United States Patent Application Publication US 2009/0199308 A1 - sequence listing, part 2

SEQ ID NO: 4884 - protein, 305 aa, Saccharomyces cerevisiae
MSSSSQFKQLEKLGNGTYATVYKGLNKTTGVYVALKEVKLDSEEGTPSTAIREISLMKELKHENIVRLYDVIHTENKLTLVFEFMDNDLKKYMDSRTVANTPRGLELNLVKYFQWQLLQGLAFCHENKILHRDLKPQNLLINKRGQLKLGDFGLARAFGIPVNTFSSEVVTLWYRAPDVLMGSRTYSTSIDIWSCGCILAEMITGKPLFPGTNDEEQLKLIFDIMGTPNESLWPSVTKLPKYNPNIQQRPPRDLRQVLQPHTKEPLDGNLMDFLHGLLQLNPDMRLSAKQALHHPWFAEYYHHAS

SEQ ID NO: 4885 - protein, 125 aa, Triticum aestivum
  misc_feature (34)..(34): Xaa can be any naturally occurring amino acid
  misc_feature (68)..(68): Xaa can be any naturally occurring amino acid
  misc_feature (74)..(74): Xaa can be any naturally occurring amino acid
  misc_feature (96)..(96): Xaa can be any naturally occurring amino acid
  misc_feature (103)..(103): Xaa can be any naturally occurring amino acid
PARRTFQGSPDLKAAREVADYLGTIHHEFHFTVXDGIDAIEEVIYHDETYDVTTIRANTPMFLMARKXIKSLGXVRWCVPGKGSEQLLGRLLYFNXAPNKEGXHKEDCRKGEGLHNTPARNKATS

SEQ ID NO: 4886 - protein, 443 aa, Methylobacter alcaliphilus
MKIFEEIESEVRSYARAFPRVFDRAQGAKIYDHEGNEYLDFLAGAGSLNYGHNHPVFKEKLLEYIQNDGITQGLDLHTRAKGEFLESFNEHILKPRNLDYIVMFTGPTGTNAVEAALKIARKKTGRENIISFTNGWHGQTLGSLSVTGNSTHRGGAGIALHGSTRIPYDGYLGDDFDTTNLLDKMLSDSSSGVDKPAAVIVETVQGEGGINAASMTWLRSLSEICKRHDVLLIIDDIQAGCGRTGTFFSFEEAGIYPDIVTLSKSLSGYGLPLAIVLMKPEIDQWSPGEHNGTFRGNNHAFVTAKAAIDHFWKDDSFAKDVQRKGRYIADRVDVIVAKYGEGNFNSHGRGMFRGINCVSGDLAGQITRRCFQKGLIIETSGADDHVVKFLCPLIITDEELEKGIDILEQAIKEVCDKADTIPEGKDFFEGDYSVSKEVSKAGH

SEQ ID NO: 4887 - protein, 179 aa, Vibrio vulnificus CMCP6
MKYSSIALLLLSSVAASTSYAGDFSLTSHDIMEGQRMAKTFEFTGFGCSGDNLSPQLSWQNAPKGTKSFAITAYDPDAPTGSGWWHWSTIDIPANVSELPRGVDLKKVGATEIRNDYGAKGFGGVCPPEGDGMHRYQFTVWALPEAKLDLDSNSSPALVGFMLNAMALDKATLTATYVR

SEQ ID NO: 4888 - protein, 509 aa, Arabidopsis thaliana
MDAQSVSEKLRSSGLLRTQGLIGGKWLDSYDNKTIKVNNPATGEIIADVACMGTKETNDAIASSYEAFTSWSRLTAGERSKVLRRWYNLLSRSEPLHFTKHRYDLLIAHKEELGQLITLEQGKPLKEAIGEVAYGASFIEYYAEEAKRVYGDIIPPNLSDRRLLVLKQPVGVVGAITPWNFPLAMITRKVGPALASGCTVVVKPSELTPLTALAAAELALQAGVPPGALNVVMGNAPEIGDALLTSPQVRKITFTGSTAVGKKLMAAAAPTVKKVSLELGGNAPSIVFDDADLDVAVKGTLAAKFRNSGQTCVCANRVLVQDGIYDKFAEAFSEAVQKLEVGDGFRDGTTQGPLINDAAVQKVETFVQDAVSKGAKIIIGGKRHSLGMTFYEPTVIRDVSDNMIMSKEEIFGPVAPLIRFKTEEDAIRIANDTIAGLAAYIFTNSVQRSWRVFEALEYGLVGVNEGLISTEVAPFGGVKQSGLGREGSKYGMDEYLEIKYVCLGDMNRH

SEQ ID NO: 4889 - protein, 214 aa, Glycine max
MTGKRNQITTSPVGSPTSGNISDSSSSKEQDRFLPIANVSRIMKRALPANAKISKEAKETVQECVSEFISFITGEASDKCQREKRKTINGDDLLWAMTTLGFENYVGPLKFYLNNYRETEGEKSSMAKQEEHSPTHQTNIDGVVVEINKLHHFCGSNQQSCRLQHFQWVVASILWGLKWLLQRASLRLEGSMAIKKVPLLKVRSVVIMMQVAIE

SEQ ID NO: 4890 - protein, 495 aa, Pisum sativum
MALQVLTLPSWVTLFTTFAILLLFSRRLRRRQYNLPPGPKPWPIIGNFNLIGTLPHQSLHGLTQKYGPIMHLWFGSKRVVVGSTVEMAKAFLKTHDATLAGRPKFSAGKYTTYNYSDITWSQYGPYWRQARRMCLLELFSAKRLESYEYIRKQELHVFLHELFDSRNKTILLKDHLSSLSLNVISRMVLGRKYLEKVENSIISPDEFKNMLDELFLLNGILNIGDFIPWIHFLDFQGYVKRMKVLSKKFDGFMEHVLEEHIERRKGVKDYVAKDMVDVLLQLAEDPDLEVKLERHGVKAFTQDLIAGGTESSAVTVEWAISELIRKPEIFKKATEELDRVIGRERWVEEKDIANLPYVYAIAKETMRLHPVAPMLVPREAREDCNINGYDIPKGSLILVNTWTIARDSNVWDNPNEFMPERFLGKDIDVKGHDYELLPFGAGRRMCPGYPLGIKVIQSSLANLLHGFNWRLSDDVKKEDLNMEEIFGLSTPKKIH

SEQ ID NO: 4891 - protein, 357 aa, Zea mays
  misc_feature (108)..(108): Xaa can be any naturally occurring amino acid
  misc_feature (225)..(225): Xaa can be any naturally occurring amino acid
MDKPVAPGIIKEELLEQQPPTQDGVGGGGDAPRPMEGLHEVGPPPFLTKTFDLVEDPATDAVLSWSRAGNSFIVWDPHVFADGLLPRLFKHSNFSSFVRQLNTYGFRXVDPDRWEFANEGFLRGQRHLLKMIKRRKPPSAVAPLRQQRAPASCLEVGEFGFEEEIDRLKRDKNILITEVVKLRQEQQSTKDHVRAMEERLRVAEQKQVQMMGFLARAMRNPEFFXQLAQQQDKRKELEDTISKKRRRPIDNTPFYSDGESEQLDSQLKMFESGVLNGLNEPELENLAVNIQELGKGSIDDGNLTQVSDQSELNDDFWAELLVEDFGDKAGQPELEGRTEDVNDLAQQLGYLSSSSPK

SEQ ID NO: 4892 - protein, 217 aa, Shigella flexneri
LDLYICLRPVRYYQGTPSPVKHPELTDMVIFRENSEDIYAGIEWKADSADAEKVIKFLREEMGVKKIRFPEHCGIGIKPCSEEGTKRLVRAAIEYAIANDRDSVTLVHKGNIMKFTEGAFKDWGYQLAREEFGGELIDGGPWLKVKNPNTGKEIVIKDVIADAFLQQILLRPAEYDVIACMNLNGDYISDALAAQVGGIGIAPGANIGDECALFEAT

SEQ ID NO: 4893 - protein, 356 aa, Anabaena variabilis ATCC 29413
METNVKAQVFRGVNQLSYEEIPLPTLEPDEVLVQVQVVGLCQSDIKKIRYPLYEPPRIFGHETAGTIAAVGSQVKGWQVGQRVAVMHHIPCMRCAYCMNDNFSMCDVYKNISTTAGFNASGGGFAEYVKVPGHIVENGGLIPIPDEISFEEASFVEPTNCCLKAVKKAQIAPGQTVLVTGAGPIGLMFVMLVKYFGAKAIATDLLPSRIEKALNVGAEAAFDARDPDLPAKIHALTNGLGVDVTLLAVPSEKAFFQALDCTRKGGKILFFAEFPDELEIPINPNILYRREIDLMGSYSSSYRLQNLSADIVFNRRIDVQALISDRYPLKDLSAAVDQAIAPTPETYKILIYPKIGD

SEQ ID NO: 4894 - protein, 76 aa, Glycine max
MVGIGVPICVQCGNTSNPCRCKVVGPTLGFLAFAAAAVVEWPVGALVYCFRHSKGRKIMGHPATVIYPSVTNAIPI

SEQ ID NO: 4895 - protein, 357 aa, Zea mays
MDKPVAPGIIKEELLEQQPPTQDGVGGGGDAPRPMEGLHEVGPPPFLTKTFDLVEDPATDAVLSWSRAGNSFIVWDPHVFADGLLPRLFKHSNFSSFVRQLNTYGFRKVDPDRWEFANEGFLRGQRHLLKMIKRRKPPSAVAPLRQQRAPASCLEVGEFGFEEEIDRLKRDKNILITEVVKLRQEQQSTKDHVRAMEERLRVAEQKQVQMMGFLARAMRNPEFFQQLAQQQDKRKELEDTISKKRRRPIDNTPFYSDGESEQLDSQLKMFESGVLNGLNEPELENLAVNIQELGKGSIDDGNLTQVSDQSELNDDFWAELLVEDFGDKAGQPELEGRTEDVNDLAQQLGYLSSSSPK

SEQ ID NO: 4896 - protein, 336 aa, Glycine max
MATRRLSLLLSRSLSSTSFQAASLLHSLGRNSGKWGNFNRFSTAAAVEDLITPQVPITYTKHLINGQFVDAASGKTFPTYDPRTGEVIAQVAEGDAEDINRAVSAARKAFDEGPWPKLTAYERCKIILRFADLVEKHGDELAALETWNNGKPYEQSATAELPTFVRLFRYYAGWADKIHGLTVPADGNYHVETLHEPIGVAGQIIPWNFPLLMFAWKVGPALACGNTVILKTAEQTPLTALYVAKLFHEAGLPPGVLNVVSGYGPTAGAALASHMDVDKLAFTGSTETGKVVLGLAAQSNLKPVTLELGGKSPFIVGEDADGGEICGRGRLELLFG

SEQ ID NO: 4897 - protein, 501 aa, Aspergillus nidulans FGSC A4
MATAVSLTAPNGHKYEQPIGLFINNEFVASKSGEKFATVNPSDEEEITQVYAAGEEDIDIAVKAARKALKDPSWKLLTATDRGNLMLKLADLIDQNKETLAVIETWDNGKPYQVSLNDDLSEVVNTIRYCAGWADKIHGQTISTTPAKFAYTLRQPIGVVGQIIPWNFPLAMAAWKLGPALACGNTVVLKPAEQTPLSILYLAKFIKEAGFPPGVVNIVNGLGRVAGSALVTHPGVDKVAFTGSTMTGKEIMKMAAGTMKNVTLETGGKSPLLVFDDADLEQAAKWAHIGIMYNQGQVCTATSRILVHEKVHDEFIRLFREAVATTSKVGDPFSDDTFQGPQVTKAQYERVLSYIESGKQEGATLVDGGVPYKNVKDGKGFFIAPTIFTNVKDNMRIYREEVFGPFVAIARFSTEEEAIDRANDTTYGLGAAVFTKDIERAHRVASEIEAGMVWINSSNDSDFRVPFGGVKQSGIGRELGEAGLEAYTQIKAVHVNMGTKL

SEQ ID NO: 4898 - protein, 401 aa, Ralstonia solanacearum
MLSEQSKPLIDASVPVLREHGLTITQTFYRNMFASHPELTNLFNMGNQANGSQQQSLASAVFAYAANHGNNAALAPVVGRIVHKHAAVGIRPSHYPIVGRHLLGAIAEVLGDAATPELLAAWDEAYWLLAAELIAAEARLYAHTQSGPDHRQPVRIIERHAQAEDVVSFTLEAVGGAKLADFLPGQYISVQVELAPGVLQQRQYSLSDAPNGRTWRISVKRDAGGSGRPAGTVSNWLHDNARPGEVLLVSQPYGDFVPQLATDSPIVLMSAGVGITPMIATLNALARRNTARKVVFSHAGQAASHVAHADDLERAAQVLPDFAAHVFLESGEAADFAARPARPGRMTVETFLDDGVADADFYLCGPLPFMQAQRAALLAGGVPAGRIHREVFGPDLLDDIL

SEQ ID NO: 4899 - protein, 214 aa, Shigella boydii
YICLRPVRYYQGTPSPVKHPELTDMVIFRENSEDIYAGIEWKADSADAEKVIKFLREEMGVKKIRFPEHCGIGIKPCSEEGTKRLVRAAIEYAIANDRDSVTLVHKGNIMKFTEGAFKDWGYQLAREEFGGELIDGGPWLKVKNPNTGKEIVIKDVIADAFLQQILLRPAEYDVIACMNLNGDYISDALAAQVGGIGIAPGANIGDECALFEAT

SEQ ID NO: 4900 - protein, 374 aa, Dechloromonas aromatica RCB
MGPSENGTMQAARVHGAGGQFEMDSIERPRIKRPTDVIINVKASGVVPNLRNVMSNYGERAYLTVPELPAIYGLDTAGVIAEIGSGVTGLTVGDRVYLNPGRSCGTCHACRCGEPINCSAYTFQGYFGFGPASRQIYREYPYGGFCEFATGPANGLIKLPDTISFEQAARFGYLGTAYSGLRKADVRAGRTVLISGASGTLGLGAVQIARAMGATRILCVARNADLLERVRLLDPQRIRTFSYGTGDLATWARDETDGIGVDAVLDAIGPGASHQVTLDCIAALRRGGKLVEVGAMSDPMPVNLHQMMCAQVSLIGSLWFSVAEGQELAAMADAGTLDLSIFEHHRFPLERVNQALELAEKRIGGFMNVVITQE

SEQ ID NO: 4901 - protein, 389 aa, Bacillus sp. KSM-K16
MLQARKQREAAIALHKHGKMEMKSTVPLINEYDMSLAYTPGVAEPCKRIAENKDEVYDHTIKGNLVAIVTDGSAVLGLGNIGPEAAMPVMEGKAVLFKQFAGVDAIPLCLETQDVDAIVATIKAVAPTFGGINLEDIAAPRCFEIEQRLQEELNIPVFHDDQHGTAIVVLAALINALKVVDKGLNSARIVINGAGAAGLSIATLLLEAGCSDITLVSLEGIVQENEPWLNQRQKELAAQTNRRHLTGKLDQAIEGADVFIGVSGPRALTGEQVKRMNSDAVVFALANPTPEIYPEEASAAGAAVVGTGRSDFPNQINNVLAFPGIFRGALDARASTITTTMKLAAAKAIANIVGQDLHAGHILPSPFDERIAPAVAKAVADEAKEKVCS

SEQ ID NO: 4902 - protein, 475 aa, Saccharomyces kluyveri
MTSILSSTYRSPVARNLLKSSKTRGGLFLAARNYSNGEKTLKERFAEIFPSKAEEIKKLKKEHGKTVIGEVLLEQAYGGMRGIKGLVWEGSVLDPEEGIRFRGRTIPEIQKELPKAADGSEPLPEAIFWLLLTGEIPTETQVKALSADLASRSELPEHVVDLLDRLPKDLHPMAQFSIAVTALESESKLPKAYAQGVAKKDYWNYTFEDSLDLLGKLPVIASKIYRNVFKDGKLASVDPNADYGKNLANLLGFQNKDFVDLMRLYLTIHSDHEGGNVSAHTTHLVGSALSSPYLSLAAGLNGLAGPFDGRANQEVLEWLFKLREEVKGDYSKETIEKYLWDTLNSGRVVPGYGHAVLRKTDPRYTAQREFALKHFPDYELFKLVSTIYEVAPGVLTKQGKTKNPWPNVDSHSGVLLQYYGLTEASFYTVLFGVARAFGVLPQLIIDRAVGQPIERPKSFSTEKYIELVNSIKAKN

SEQ ID NO: 4903 - protein, 225 aa, Listeria monocytogenes str. 4b F2365
MNEINHTSERANTEKRTEKQIIMQKILNWFVFSLLLASIGAAIGSKLSPELYLPLVVLEVALLITAMVVRRSKTINKVVGYPVVLAFAFVTGLTLGPTLTYYFGAGQGAAVLMAFVTATVTFTTLAFIGAKMKKDLSFLSSALFAAIIILVIFSFVGVFLPLGSMLSTIISAGGTIIFSLYILYDFNQIMKRDVELADVPMLALNLYLDFLNLFMFLLRLFTGRD

SEQ ID NO: 4904 - protein, 147 aa, Bdellovibrio bacteriovorus HD100
MPMRSLSPWGGRRLPSSDLFSQFQDFINEFDRGESSALTRAGFDFSPSVDVEEKDNAYLVSADLPGMKKDEIKVELNDNILTISGERTRESKSEGGYSERSYGRFQRSFTLPVQVNSEKIEAHFEDGVLQITVPKAEGARSHSIKIM

SEQ ID NO: 4905 - protein, 330 aa, Glycine max
MGSTGETQITPTHVSDEEANLFAMQLASASVLPMILKSALELDLLEIIAKAGPGVHLSPTDISSQLPTQNPDAPVMLDRILRLLACYNILSSRFCITMTRLCSCRYYLKDAVLEGGIPFNKAYGMTAFEYHGTDPRFNKVFNKGMADHSTITMKKILETYTGFEGLKSLVDVGGGTGAVVNMIVSKYPTIKGINFDLPHVIEDAPSYPGVEHVGGDMFVSVPKADAIFMKWICHDWSDEHCLKFLKNCYEALPDNGKVIVAECILPVAPDSSLATKGVVHIDVIMLAHNPGGKERTEKEFEALAKGSGFQGFRVLCCAFNTYVMEFLKKI

SEQ ID NO: 4906 - protein, 227 aa, Brassica napus
  misc_feature (198)..(198): Xaa can be any naturally occurring amino acid
MWIGIAVSHCLRELEMLYESDPAKPIVLPSNLYACKSLVVLKLDGDILLDVPQMVSLPSLKTLKLQSVRYSSDKTLPLLLSKCPLLEDLVLDLCEDDTPRHLIVAVPSLQSLSLSILYNNHIIDGFVLTTPALKYFKLMDYNEHYCLIENMPNLIEAYLDVDCPDIKDLIESITSVKRLSICSKAMLDEGFVFNQLEXLEVCLCMEHSSNQLFRLLKASSNLKRLDI

SEQ ID NO: 4907 - protein, 244 aa, Triticum aestivum
MPSRPAPLVHRLRLLRSAVVSPSSALLPCSRPRLAIPFAQPPLRAPAFAAASSPLLRPVGARFSLFSSMAAAASSASSIHDFTVKDASGKDVDLSTYKGKDDLIVKLTKIIVAYNYCSGLTNSNYTELAQLYEKYKDQGFEILAFPCNQFGGQEPPRVREIVQFACTRFKAEYPIFDKVDVNGDNVAPVYKFLKSRKGSLFGDNIKWNFSKFLVDKEGHVVDRYAPTTSPLSIEKDIKKLLASS

SEQ ID NO: 4908 - protein, 167 aa, Limonium latifolium
GYDGFEGVKTLVDVGGSSGDCLRMIINKYKDIPKAINFDLPEVVAKAPKIPGITHVGGNTFESVPSGDAIFVKWVLTCFTDEEVITLMRNCNKALPVGGKLICSEPTLPENSDESHRTRALLVADIFIMTTYRAKGKHRTEEEYRQLGLLAGFPKFRVIHVDYFFPV

SEQ ID NO: 4909 - protein, 233 aa, Zea mays
  misc_feature (157)..(157): Xaa can be any naturally occurring amino acid
MSSLYDVSCFAAGLAGNVFALALFLSPVPTFKRVLKAKSTEQFDGLPYLLSLLNCCICLWYGLPWVSDGGRALVATVNCTGALFQLAYISLFIFYADSRTTRLKVAGLLVLVVFAFALIAHASIAFFDQPLRQLFVGSVSMASLVSMFASPLAVMGXVVVRTECVEFMPFYLSLSTFLMSASFAVYGLLLRDFFIYFPNGARSHPGSQCSWLYAYYQPEMGKQRLVSTVACLI

SEQ ID NO: 4910 - protein, 409 aa, Vibrio parahaemolyticus RIMD 2210633
MELATTVTELRYALDTFFFLISGALVMWMAAGFAMLEAGLVRSKNTTEILTKNFCLYAIACTTYLVIGYNIMYVDNGEGGWLPSFGGLIGTQGEGADHSLESDFFFQVVFVATAMSVVSGAVAERMKLWSFLLFSAVLTAFIYPMEGYWTWGGGFLSEAGFSDFAGSGIVHMAGASAALAGVLLLGARKGKYGKNGEIYPIPGSNMPLATLGTFILWFGWFGFNGGSQLMVSDFENATAVGQIFLNTNAAAAAGSIAALFVCKTTWGKADLTMILNGALAGLVAITADPLSPSPLYAVAIGAVSGALVVFSIIGLDKLKIDDPVGAISVHGVCGFFGLMVVPLSNGEATFGAQLLGAAVIFAWVFGASLVVWAILKATVGIRVTEEEEMEGMDMHDCGVGAYPEFVTVK

SEQ ID NO: 4911 - protein, 430 aa, Triticum aestivum
  misc_feature (3)..(3): Xaa can be any naturally occurring amino acid
DSXAISESDGEDDFHSVQDDAFSPNGFENEAALGMRDANGGSFNGAEHPHRKPRSSELPKGHLENGARPSASHEDGASVSGGASPSSGGILDNCGLLPNNCLPCMASAVGVNEKKRALSTSPTHSMKMPSLKLSFKKKSGEANPSSTLLSTKDFLERPIAGSQVPACLLEKKVLNSWSHIDPGTFRVRGSNYLRDKNKELAQNCAAYYPFGVDVYLSPQKLHHISRFVKLPDIQTSSKLPPLLVVNVQVPLYPASLFQNETDGEGMSFVLYFRLSEGYSKELSPLFIENIRRLVDDDVEKIKGFPMETSISFRERLKILGRVANLEDLPLSAAERKLMHAYNEKPVLSRPQHQFFLGDNYFEVDIDMHRFGYISRKGFETFLDRLKICMLDVGLTIQGNKPEELPEQVLCCVRLNGIDYAKYQPLMTNGA

SEQ ID NO: 4912 - protein, 116 aa, Zea mays
SWRRTNSPGRSSSGSRIGGRPWSSAERAPQRWPKGSSVRTLRRRRPSLRPRAGSARRRSWFLRASPCRLVVLPLVLPPLPPPPPLLLLVPVCLLLLLAALATFVPSDVRSMPSSNL

SEQ ID NO: 4913 - protein, 61 aa, Zea mays
  misc_feature (50)..(51): Xaa can be any naturally occurring amino acid
GKLATMFKIIKEMLPPDVRVARDAQDLLVECCVEFINLLSSESNEVCSRXXKKTIAPEHVI

SEQ ID NO: 4914 - protein, 87 aa, Triticum aestivum
  misc_feature (35)..(35): Xaa can be any naturally occurring amino acid
  misc_feature (49)..(50): Xaa can be any naturally occurring amino acid
PPPLKPQPGPPPGSGPQTTGLPTRTQHGFATLPLXNGSPKDDLKLPTNXXIRTQLKDGFPEGKDLALPVMSAMGEEQICAVKDVGPR

SEQ ID NO: 4915 - protein, 193 aa, Streptococcus gordonii
INDYSYEEVERIVRKAFDIARGRRKRVTSIDKQNVLATSKLWRRVADEVAKDYPDVTLEHQLVDSAAMLMITNPAKFDVVVTENLFGDILSDESSVLSGTLGVMPSASHSADGPSLYEPIHGSAPDIAGQCIANPISMILSVAMMLRDSFAELEAAEAIEAAVEKTLAQGILTRDLGGQVGTAQMTESIINNL

SEQ ID NO: 4916 - protein, 573 aa, Glycine max
MGRSSGFIAMQASLSSGQVPFNLHGPQGVLSHLKYLLETKGSAVVCAAEGAGHNLLQKTNATDASGNVVFGDIGVYIQQETKKYFKEIGVHADVKYIDPTYMIRAIRANASDGILYTGLGQNHLTDIFPNAPPIPSTFCLKMRTPIDRDFPGHYSLDEEWHGYINNNDRVLLKTIYYSSPTSAGAECIDPDCTWVEQWVHRAGPREKIYYKPEEVKAAIVTCGGLCPGLNDVIRQQIVITLEIYGVKNIVGIPFGYRGFSDKELTEVPLSRKVVQNIHLSGGSLLGVSRGGPGVSDIVDSLEKRGINMLFVLGGNGTHAGANAIHHECRKRRLKVSVIGVPKTIDNDILLMDKTFGFDTAVEEAQRAINSAYIEAHSAYHGIGVVKLMGRSSGFIAMQASLFSGQVDICLIPEVPFNLHGPHGVLSHLKYLLETKGSAVVCVAEGAGQNLLQKTNATDASGNVVFGDIGVYIQQETKKYFKEIGVHADVKYIDPTYMIRAIRANASDGILCTVLGQNAVHGAFAGYSGITVGLCNTHYVYFPIPEVISHPRLVDPNSRMWHRCLTSTGQPDFI

SEQ ID NO: 4917 - protein, 97 aa, Zea mays
MEDEEHEVYGQEIPVDGEDVDMAAGDDATKLQELDDMKRRLKEMEEEAAALREMQAKVAKEMQGVDPNATTSENKEEMDSRSVFIGNVSFISSLYVN

SEQ ID NO: 4918 - protein, 216 aa, Shigella boydii
YICLRPVRYYQGTPSPVKHPELTDMVIFRENSEDIYAGIEWKADSADAEKVIKFLREEMGVKKIRFPEHCGIGIKPCSEEGTKRLVRAAIEYAIANDRDSVTLVHKGNIMKFTEGAFKDWGYQLAREEFGGELIDGGPWLKVKNPNTGKEIVIKDVIADAFLQQILLRPAEYDVIACMNLNGDYISDALAAQVGGIGIAPGANIGDECALFEATHG

SEQ ID NO: 4919 - protein, 490 aa, Comamonas testosteroni
MKQYRNYINGEWVESARRFDDVNPVDGTVVAQVHEADREAVDSAIRAGHAAVRGAWGRTTVAERAAILCRIADEIDRRYDDFLAAEIADTGKPVAMASTIDIPRGAANFRVFADILKTAPLDTFQTDLPDGARALNYAVRKPLGVVGVISPWNLPLLLLTWKIAPALACGNAVVAKPSEETPGTATLLAEVMHTVGVPPGVFNLVHGFGPDSAGEFITTNDDIDAITFTGESRTGSAIMRAAATHVKPVSFELGGKNAAIIFADCDFEKMIDGMMRAVFLHSGQVCLCAERVYVERPIYNRFLDAFVERVKALKLGWPQDGTTGMGPLISAEHRDKVLSYFKLAREEGAQVLVGGGVPKFGDARDAGFWVEPTIITGLPQTARCIKEEVFGPICHVSPFDTEAEAIALANDTKYGLSATTWTGNLNRGHRVSEAMRVGLSWVNSWFLRDLRTPFGGVGLSGIGREGGMHSLNFYSELTNVCVRIDQEAVS

SEQ ID NO: 4920 - protein, 221 aa, Shigella boydii
QELDLYICLRPVRYYQGTPSPVKHPELTDMVIFRENSEDIYAGIEWKADSADAEKVIKFLREEMGVKKIRFPEHCGIGIKPCSEEGTKRLVRAAIEYAIANDRDSVTLVHKGNIMKFTEGAFKDWGYQLAREEFGGELIDGGPWLKVKNPNTGKEIVIKDVIADAFLQQILLRPAEYDVIACMNLNGDYISDALAAQVGGIGIAPGANIGDECALFEATHG

SEQ ID NO: 4921 - protein, 298 aa, Arabidopsis thaliana
MGKEVMVSDYGDDDGEDAGGGDEYRIPEWEIGLPNGDDLTPLSQYLVPSILALAFSMIPERSRTIHDVNRASQITLSSLRSSTNASSVMEEVVDRVESSVPGSDPKKQKKSDGGEAAAVEDSTAEEGDSGPEDASGKTSKRPRLVWTPQLHKRFVDVVAHLGIKNAVPKTIMQLMNVEGLTRENVASHLQKYRLYLKRIQGLTTEEDPYSSSDQLFSSTPVPPQSFQDGGGSNGKLGVPVPVPSMVPIPGYGNQMGMQGYYQQYSNHGNESNQYMMQQNKFGTMVTYPSVGGGDVNDK

SEQ ID NO: 4922 - protein, 490 aa, Bordetella parapertussis 12822
MTISPLQLLNDPSLLRTDALVDGRWIAASQRFAVHDPATGRKLADVANLDAAHAREAIAAAQAAWPAWRARTVKERSAILRKWFDLLLANQDDLARLLTAEQGKPFGEARGEIAYAASFVEWFAEEAKRINGETLPAFDNNRRLLVLREPIGVCAAITPWNFPLAMITRKVAPALAAGCPVIVKPAEHTPLTALAAAQLAVRAGVPAGVLGVLPADGANSIAIGKELCANDAVRHLSFTGSTEVGRILMAQSAATVKKLSLELGGNAPFIVFDDADLDSAVEGAMQSKYRNAGQTCVCANRIYVQDGVYDAFVEKLADAVRALKVGPGFDEGVTQGPLIEPEAVDKIERHIEDAVSKGGRVVAGGRRLGGLFFEPTVLVDATSQMLCAREETFGPLAPVFRFHADEDAIAAANATEFGLASYLYSRDVGRIFRAAEALESGMVGVNVGILATEHVPFGGVKQSGLGREGGRHGIDDYVEIKYMCVGDILK

SEQ ID NO: 4923 - protein, 208 aa, Shigella boydii
DLYICLRPVRYYQGTPSPVKHPELTDMVIFRENSEDIYAGIEWKADSADAEKVIKFLREEMGVKKIRFPEHCGIGIKPCSEEGTKRLVRAAIEYAIANDRDSVTLVHKGNIMKFTEGAFKDWGYQLAREEFGGELIDGGPWLKVKNPNTGKEIVIKDVIADAFLQQILLRPAEYDVIACMNLNGDYISDALAAQVGGIGIAPGANIGD

SEQ ID NO: 4924 - protein, 310 aa, Alicyclobacillus acidocaldarius
MPLDPVIQQVLDQLNRMPAPDYKHLSAQQFRSQQSLFPPVKKEPVAEVREFDMDLPGRTLKVRMYRPEGVEPPYPALVYYHGGGWVVGDLETHDPVCRVLAKDGRAVVFSVDYRLAPEHKFPAAVEDAYDALQWIAERAADFHLDPARIAVGGDSAGGNLAAVTSILAKERGGPALAFQLLIYPSTGYDPAHPPASIEENAEGYLLTGGMSLWFLDQYLNSLEELTHPWFSPVLYPDLSGLPPAYIATAQYDPLRDVGKLYAEALNKAGVKVEIENFEDLIHGFAQFYSLSPGATKALVRIAEKLRDALA

SEQ ID NO: 4925 - protein, 402 aa, Oryza sativa (japonica cultivar-group)
MNLNRVHVDSVSGTAWVKSGATLGELYYAIGQLNRSLAFSAGSCSTVGMGGFVSGGGFGLISRKFALAADNVLDAILMDPNGNALNRGSMGDDVFWAIRGGGGGSWGVVYAWKLQLVHVPHSITVFSLNRTGPLEQTAKLMHKWQFVGPHLPDEFYLSIHILTGTSNGNVSMSFTGQVIGPKQYAMLVLHHTFPELGIVESDLSEMSWIESTAKFARLNSTADLTNRRLGIKYYSKSKSDYVHSPISMQDTIKIIEYLSNGPQGFIQLNPYGGAMARIGSSELPFPYRAGYLYSIEYNVSWKASDNDRADEFIRWLRSFYAYMAPHVSKNPLAAYVNYLDLDLGTNTWRNATDGTSNNSVIHAKSWGIRYFSKNFDRLVRAKTMIDPENVFNNAQSIPPLQY

SEQ ID NO: 4926 - protein, 236 aa, Anabaena variabilis ATCC 29413
MTVTADPVTLMKQEVGKAAAALVKSGSIVGLGTGSTTAYTIQYLGDRLKSGELTDIVGIPTSFQSEVLSKQYGVPLTTLDAVDHIDIAIDGADEVDPQKNLIKGGGAAHTREKVVDYLANQFIVVVDSGKLVDRLGSVFAVPVEVIPMAITPVTNAIKQLGGKPELRMGVKKAGPVITDQGNFVLDVRFDSIDDPVNLEKILNNIPGVLENGIFVNCADIVLVGEVKDGQPLVRQL

SEQ ID NO: 4927 - protein, 165 aa, Solanum tuberosum
KEVVEAMACMNKRPLIMALSNPTSQAECTAEEAYTWSEGRVVFASGSPFPSFEYDGKLNIPGQANNCYIFPGFGFGLVMSGTIRVHDDMLLAASEALAAQVTEEHYAKGMIYPPFADIRKISAHIAASVAAKAYELGVATRLPRPADLVKYAESCMYTPNYRSYR

SEQ ID NO: 4928 - protein, 234 aa, Limonium latifolium
ETLLKAWPFLHTAILDASTEPFARVNGEPAYQYYGKNDELNKNMQYAMSGVSVPYMKALLGSGYDGFEGVKTLVDVGGSSGDCLRMIINKYKDIPKAINFDLPEVVAKAPKIPGITHVGGNMFESVPSGDAIFVKWVLTCFTDEEVITLMRNCNKALPVGGKLICSEPTLPENSDESHRTRALLVADIFIMTTYRAKGKHRTEEEYRQLGLLAGFPKFRVIHVDYFFPVVEFQK

SEQ ID NO: 4929 - protein, 402 aa, Archaeoglobus fulgidus DSM 4304
MRALVVELRLWKAALSLLLGKVTKSVYYSPLSLLKYYKNYPEPALPDEDWVKVKTRLCGICGSDLRIITLQESFYLAPLTSFPFIPGHEVVGEVVEVGKEADAQEGERVVINTALSCRVRGFDDCDACRKGHFAACHNVDRGRISPGIFTGTCRDTGGGWAEYFVAHESQLVRVPEGIRDENAVFAEPLTIGIHSALRSFPDDGEVVAIVGCGVIGICTIIALRHLGFRGEIIGIDISERQAELARKFGADGVVTENPVERIAEMTGGRVYRPPRDKPMFIGGGVDVAFECTGIPQTVDTALRITKPLGRVVIAGTVAKMGVDWAPVFAKELSVLGTFGCGIEEVNGEKRDAFDIAFEILKKVDLSSLLTHRFTIEDYKKALRAAIEKGKSGAVKVAFDFTL

SEQ ID NO: 4930 - protein, 353 aa, Neurospora crassa
MADNQIPSSVADAVLVKSIEMPEGSQKVEELDFNKFKGRPITVDDLLQGMKHMGFQASSMCEAVRIINEMRAYRDPTTSEKTTIFLGYTSNLISSGLRGTLRYLVQHKHVSAIVTTAGGIEEDFIKCLGDTYMSSFSAVGADLRSKGLNRIGNLVVPNSNYCAFEDWVVPILDKMLEEQEASRGTENEINWTPSKVIHRLGKEINDERSVYYWAWKNDIPVFCPALTDGSLGDMLYFHTFKASPKQLRIDIVEDIRKINTIAVRAKRAGMIILGGGIVKHHIANACLMRNGAESAVYINTAQEFDGSDAGARPDEAVSWGKIKVGADAVKVYMEATAAFPFIVANTFAKEDGL

SEQ ID NO: 4931 - protein, 206 aa, Limonium latifolium
RAYQYYGKNDELNKNMQYAMSGVSVPYMKALLGSGYDGFEGVKTLVDVGGSSGDCLRMIINKYKDIPKAINFDLPEVVAKAPKIPGITHVGGNMFESVPSGDAIFVKWVLTCFTDEEVITLMRNCNKALPVGGKLICSEPTLPENSDESHRTRALLVADIFIMTTYRAKGKHRTEEEYRQLGLLAGFPKFRVIHVDYFFPVVEFQK

SEQ ID NO: 4932 - protein, 164 aa, Glycine max
  misc_feature (67)..(67): Xaa can be any naturally occurring amino acid
  misc_feature (85)..(85): Xaa can be any naturally occurring amino acid
ASSMISSPAVTTVNRAGAGMVAPFTGLKSMAGFPTRKTNDGITSIASNGGTVHCVQVWPPFGKKKFXTLSYLPDLNDAQLANDVXYLLRKGWIPCLESDLDHGFMYREHNRSPSYYDGRYWTMWNLPMFGCADASHVSNELQDVYTAYPLGSIPFTLVDDARQI

SEQ ID NO: 4933 - protein, 188 aa, Limonium latifolium
HGTTRSRHGSSSSSSPTANGFEGVKTLVDVGGSSGDCLRMIINKYKDIPKAINFDLPEVVAKAPKIPGITHVGGNMFESVPSGDAIFVKWVLTCFTDEEVITLMRNCNKALPVGGKLICSEPTLPENSDESHRTRALLVADIFIMTTYRAKGKHRTEEEYRQLGLLAGFPKFRVIHVDYFFPVVEFQK

SEQ ID NO: 4934 - protein, 397 aa, Xylella fastidiosa Temecula1
MSASFSPHTITLIKSTVPLLAEHGTTIIEAMYHRLFEDPQIEALFNQANQKNGTQIHALAGAILAYARNIDNPGVLASAIERISQKHVGYAIHPEHYPHVATALLGAIKQVLGDVATSEVLEAWGEAYWFIANLLKDREAVIREGIMTKNGGWIHWRRFVISKRIPESETITSFMLHPEDGGPVVPHQAGQYLTFRFDAAGMPGMKRNYSISCGPNSDHYRITVKREHGTGASAFLHDQAKVGTIIECTPPVGDFFLPSVIERPIVLLSGGVGLTPMVSMMEQIAEAYPDAQVWYVHGTQNRETHAMDAHIRALVSRHKHMKATTFYTQRSEADDAEAGFITIDWLRANTPFQKADFYLCGPRPFLRTFVRDLIGAGVPAAQVHYEFFGPMDEEMAA

SEQ ID NO: 4935 - protein, 375 aa, Limonium latifolium
MANHSSAAAMVVDETSEARNNARLKIIELANLISVPMSLTAIVRLKVPEAIWSNGSNTPVSAAEILSRLPDAPATADAENLQRLLRVLTSFGVFSEHLDTTSSSSSSTSERRYCLTEVGQTLVSFDESCPSHGAYVLQHHQETLLKAWPFLHTAILDASTEPFARVNGEPAYQYYGKNDELNKNMQYAMSGVSVPYMKALLGSGYDGFEGVKTLVDVGGSSGDCLRMIINKYKDIPKAINFDLPEVVAKAPKIPGITHVGGNMFESVPSGDAIFVKWVLTCFTDEEVITLMRNCNKALPVGGKLICSEPTLPENSDESHRTRALLVADIFIMTTYRAKGKHRTEEEYRQLGLLAGFPKFRVIHVDYFFPVVEFQK

SEQ ID NO: 4936 - protein, 188 aa, Brassica rapa
LDNPAPFVSPFQFEISYECLTSLQDDLEWKLVYVGSAEDETYDQTLESVLVGPVNVGNYRFVLQADPPDPSKIREEDIIGVTVLLLTCSYMGQEFLRVGYYVNNDYEDEQLREEPPTKVLLDKVQRNILSDKPRVTKFPINFHPEDEQTPAAADPPPPTEQSDDQQQADDNCDEAQVLPEQPPIPHES

SEQ ID NO: 4937 - protein, 506 aa, Gibberella zeae PH-1
MINSFSLFAHITPIIRSSLHSRYSVISSRKAMSSLAAAPYRHVMMPFSPAQDAQVHGNSALTKLTDAIPDLKIYTRSSPHYESLRGVYNKLITAQPLAICRPTSVAQVQAIVKTVSGLGIPLGVRGGGHDVFGRGCIADSVTIDMRELDTQELSQDKKTVKVGGGITSKNLVGFLGSHNLCTSNGFAGEAGWTSWASWGGYGPLGDYVGLGVDNIVGAKIVTASGDVVDAKGDSELLWALRGGGGNFGVIAETDVRVYPMSTIQAGFIVYPWPETADVLLRLQALLDSGVPDKLCLQAGFTKGEWGLGMAITYIWPEAETIGPESEEWLQKLKGLGTCIVDTVAETTFEAFQASISSAISNPVNVTSRHISISKFTSDTLNQLIGACESMPAEADCSITCTILHGKAAQANVLSAFGTRRPHIMLHINAVTEEAAHEHVAIAWADRLVDGVEATGDSIGSTYVSFMESDKDPKGCYGENWERLKAVKKEVDPNDVFRFVHGRIPAA

SEQ ID NO: 4938 - protein, 78 aa, Glycine max
MAFWTLIKGLLLFANAFAILNEDRFLAPRGWTLEKLHQTGRRNSPKGQIIGLIYACQYMRLPLLLINLVVIAMKIIAG

SEQ ID NO: 4939 - protein, 480 aa, Streptococcus pneumoniae R6
MPIQNKTMLITYSDSLGNNLKDLYDNLEEHFGDAIGGVHLLPFFPSTGDRGFAPVDYDEVDSAFGDWEDVKRLGERYYLMFDFMINHISRQSKYYKDYQEKHEASEFKALFLNWDKFWPENRPTQSDVDLIYKRKDRAPKQEIVFEDGSVEHLWNTFGEEQIDLDVTKEVTMEFIRKTIQHLASNGCDLIRLDAFAYAVKKLDTNDFFVEPDIWDLLDKVRDIAAEYGTELLPEIHEHYSIQFKIADHDYYVYDFALPMVTLYTLYSSRTERLAKWLKMSPMKQFTTLDTHDGIGVVDVKDILTDEEIDYASNELYKVGANVKRKYSSAEYNNLDIYQINSTYYSALGDDDVKYFLARLIQAFAPGIPQVYYVGLLAGKNDLKLLEETKEGRNINRHYYSNEEIAKEVQRPVVKALLNLFSFRNRSEAFDLEGTTEIETPTAHSIVIKRQNKDKSVTAVVEIDLQNQTYRVIENGVEVTF

SEQ ID NO: 4940 - protein, 378 aa, Medicago sativa
MAIHHHHQQHTCSLFDALYCDEEKWEDDEGEVVDEGEQSDVTTTNYDILDSTSLLPLLLLEQNLFNEDEELNTLFSKEKIQQETYYEDLKNVINFDSLSQPRREAVEWMLKVNAHYGFSALTATLAVNYLDRFLLSFHFQKEKPWMIQLVAVTCISLAAKVEETQVPLLLDLQVQDTKYVFEAKTIQRMELLILSTLKWKMHPVTTHSFLDHIIRRLGLKTNLHWEFLRRCENLLLSVLLDSRFVGCVPSVLATATMLHVIDQIEQSDDHGVDYKNQLLNVLKTSKEKVDECYNAILHLTNANNYGHKRKYEEIPGSPSGVIDAVFSSDGSNDSWTVGASSYSTSEPVFKKTKNQGQNMNLSPINRVIVGILATATSP

SEQ ID NO: 4941 - protein, 222 aa, Medicago sativa
MAIHHHHHNHQQLQQHTSSLFDALYCDEEEKWEDDEGEVVDEGEQSDVTTTNYDILDSTSLLPLLLLEQNLFNEDEELNTLFSKEITQQETYYEDLKNVINFDSLSQPRREAVEWMLKVNAHYGFSALTATLAVNYLDRFLLSFHFQKEKPWMIQLVAVTCISLAAKVEETQVPLLLDLQVQDTKYVFEAKTIQRMELLILSTLKWKMHPVTTHSFLDPGNS

SEQ ID NO: 4942 - protein, 348 aa, Pseudomonas putida
MLAIRKTKAGPGGLSVDDVAAPKEAHSTDVLVKVEAAGICGTDLLIYKWGEFAKRMKLPTILGHEVSGVIEQVGSDVKGLRPGMRVSLESHLPCGTCYTCRRGWAHVCPNTRYPGVDFDGGFASFVVVPESVCWPVPCGIPPLQAAMMEPFGLAVHASLEGSGVSGLNVLVSGCGPIGLMNIAAAKALGASKVIATDIHPLRLTAAAKMGADECINATEESVYKTVRSLLGERGVDVAIDYSGQAAALKELIQSITHGGELRLMGVPSHDILLNLEEWLFKGLIVRGLHGRRLFETWERSTSLLVTGRVDLSSLVSHRLPLSAAEDAFEMALNGESLKILFEPNGTCI

SEQ ID NO: 4943 - protein, 241 aa, Glycine max
  misc_feature (61)..(61): Xaa can be any naturally occurring amino acid
  misc_feature (130)..(130): Xaa can be any naturally occurring amino acid
  misc_feature (140)..(140): Xaa can be any naturally occurring amino acid
  misc_feature (151)..(151): Xaa can be any naturally occurring amino acid
SFYPSQEIIDMCDYCVGLSRQLNGSIIPSERPDHMMFEVWNPLGIVGVITAFNFPCAVLGXGAPTTPLITIAVTKLVAEVLERNKLPGAIFTSFCGGADIGQAIAKDTRIPLVSFTGSSKVGLMVQQTVXERFGKCLLEXLSGNNAIIVMXDDADIKLAVRSILFAAVGTAGQRCTTCRRLFLHESIYADVLDQLIGVYKQVKIGNPLEKGTLVGPLHTPTSVENFQKGISVIKSQGINFG

SEQ ID NO: 4944 - protein, 229 aa, Streptococcus mutans UA159
MNNNTIYTQSDSRLSSFFAKIYGLVGMGIGLSAVVSYLMLYVFRNNMIAIMVNAPWVYYVAIFAELALVLIASNAARKNSPTALPLFLVYSALNGFTLSFIIALYTQTTVLQAFVSSAAVFFVMALIGVTIKKDLSGMGKALLAALIGIIIASLINMFIGSGTMSYVISIISVLIFSGLIAYDNQLIKRVYDYNSGNVSDGWAVSMALNLYLDFINLFLSLLRIFGRND

SEQ ID NO: 4945 - protein, 418 aa, Pseudomonas putida KT2440
MGYQKIKVPTDGTKITVNADHSLNVPDHPIIPYIEGDGIGVDVSPVMIKVVDAAVQKAYGGKRKIAWMEVYAGEKATQVYDQDTWLPQETLDAVRDYVVSIKGPLTTPVGGGIRSLNVALRQQLDLYVCLRPVLWFQGVPSPVKKPGDVDMVIFRENSEDIYAGIEWKAGSPEANKVIKFLKEEMGVTKIRFDQDCGIGVKPVSKEGTKRLVRKALQYVVDNDRESLTLVHKGNIMKFTEGAFKDWGYEVARDEFGAELLDGGPWMKFKNPKTGREVIVKDAIADAMLQQILLRPAEYDVIATLNLNGDYLSDALAAEVGGIGIAPGANLSDTVAMFEATHGTAPKYAGQDKVNPGSVILSAEMMLRHMGWTEAADLIIKGTNGAIAAKTVTYDFERLMEGAKLVSSSGFGDEMIKHM

SEQ ID NO: 4946 - protein, 279 aa, Mesembryanthemum crystallinum
MCESFKREYQLCEEIGRGRFGVVYRCYNPSSTEDSDTPLAVKSIDKRLFLDDETDRECLDKEPKILHLLSPHPNILQIHNLFDSDTHLLIVTDLCQEETLYERIISNGPFSEPDAAAIFCQLAEALAHCHRNYVAHRDIKPDNILFDSRNRLKLCDFGSAEWFGAGDREMRGVVGTPYYVAPEVLSGKDYNEKADVWSAGVILYIMLGGVPPFYGETVEETFEAVLRGNLRFPARIFRNVSTQARDLLRKMMCKDVSRRFSAEQVLRHPWVTSGGLANM

SEQ ID NO: 4947 - protein, 202 aa, Schizosaccharomyces pombe
MATNITFHPGSVTKEERIKFVGHPGMTIWMTGLSASGKSTIACALEQYLLQRGVTTYRLDGDNVRFGLNSDLGFSEQDRNENIRRIGHVAKLFADACVVAVTSFISPYRKDRDQAREFHKKDGLPFIEVYVECPVEVAEQRDPKGLYKRARAGEIKEFTGISAPYEAPISPEIVVSSHTQSIEECVEKIVNYLLEKDLITLK

SEQ ID NO: 4948 - protein, 253 aa, Zea mays
  misc_feature (54)..(54): Xaa can be any naturally occurring amino acid
  misc_feature (198)..(198): Xaa can be any naturally occurring amino acid
  misc_feature (215)..(215): Xaa can be any naturally occurring amino acid
  misc_feature (246)..(246): Xaa can be any naturally occurring amino acid
MQLNKKSRLLQLPHFSSFTTTTTSSLISSSRPFSLSSIKMSNEEITHPTIVDGXFREISDMWPGHAMTLRVEKVLVHEKSKYQDVLIFKSTDFGNVLVLDNVIQCTERDEFSYQEMIAHLALNSHPNPKKVLVIGGGDGGVLREIVKHDCVEEATLCDIDEAVIRLSKEHLPSMACGFDHPKSKTHVGDGFKFLNDYXNEFDVIITDSSDPDGPXEALFQKSYFQLPHDALREGGVITTQAESPWXHLPLIAR

SEQ ID NO: 4949 - protein, 302 aa, Pinus taeda
MERFANDGDEHSLKETELRLGLPGVCESDTGLGQTRNGKRAFSEVMDSTKASSFNDNKWIFPSVKCQPPTSAITETAEACKGSQPGLFSATPGQKIMMQGGCGAPQSWAGDNGLSKSTAPKDELHPKTPRGGPTEKTNAASQSQAATDPAMAPAPKAQVVGWPPIRSFRKNTLAANSKPNDEGSSSNALYVKVSMDGAPYLRKVDLKMYSTYHELSSALEKMFSCFTMGQCGSPGLSESKLIDLLNGSEYVPTYEDKDGDWMLVGDVPWEMFVDSCKRLRITKASEAIGLAPRAMEKSRSKN

SEQ ID NO: 4950 - protein, 252 aa, Pinus taeda
MSCSVGNMAMVLEKSGGNAQHEKRDSLDFAETELKLGLPGVAAGARQRICGKRSFSEAMESRNYTIPDEDITNTSTHEDLDKFKGPIVKEKQMALSANDPPRMGPPPPSKAQVVGWPPVRDFRKVRTVAASNSLYVKVSMDGAPYLRKVDLKLYSTYHELTSALEKMFSCLIIMGKCGSLALNESNLMDLPNGSEYVPTYEDKDGDWMLIGDVPWQMFVDSCQRMRIMTASEAIGLAPRTMENCKNRNRVHP

SEQ ID NO: 4951 - protein, 498 aa, Leptospira interrogans serovar Lai str. 56601
MQTALYISVLIISSCGLVYELLAGTIASYLLGETVTQFSLIIGTYLFSMGVGSWLSKYLEKDLIPKFLEIELAIGLVGGFSSAILYLSFGQIRYFQIPLFLLVILIGILVGLEIPVLLRILKKELQFKELVSRVLSLDYVGALLASILFPIFFAPKLGLMRTGFIFGILNVGVALWGTWVLPLRQSKIIILRAQSVVVLTLLILGFSYSDLITYYSEESLYTDEIILSKQTQYQRIIVTRWKNEIRLFLNGHLQFSSRDEYRYHETLVHPALLAHPAPKKVLVLGGGDGLAVREILKHKNVESVTLVDLDSAITNLFSEHGILKELNEESLKNSKVTVINTDAFLWLEESDQTFDVVLIDFPDPSNFSLGKLYTTAFFHTLKRRMNETSVLEIQSTSPLFARSSYWCIERTIASLGFYTLPLHVYVPSFGEWGFVLAGQRPIQFKKKFPKDLKFLNIQELESIQTFPQDMSRVPVEINRLDNQALVRYYDREWNRILD

SEQ ID NO: 4952 - protein, 231 aa, Pinus taeda
MSCSVGGMEKSSTGAQQENKCSLDIFAETELRLGLPGVAAGERQRICGKRSFSEAMESRNFSIPQEEAHKFHEPNLGTEKQMVRPANDPPKMGPTPPKAQIVGWPPVKDFRKVRTIAASSSLYVKVSMDGAPYLRKVDLKMYSTYHDLSSALENMFGCLITMGKCGSSGIKESNLMDVVNGSEYVATYEDKDGDWMLVGDVPWQMFVDSCQRVRIMKASEAIGLAPRAMEK

SEQ ID NO: 4953 - protein, 175 aa, Triticum aestivum
MAPTVMASSATSVAPFQGLKSTAGLPVSRRSSSAGLGSVSNGGRIRCMQVWPIEGIKKFETLSYLPPLSTEALLKQVDYLIRSKWVPCLEFSKVGFVFREHNSSPGYYDGRYWTMWKLPMFGCTDATQVLNEVEEVKKEYPDAYVRVIGFDNLRQVQCVSFIAFRPPGCEESGKA

SEQ ID NO: 4954 - protein, 1082 aa, Solanum demissum
MADFQRSSLADRDIDQAIAALKKGANLLKYGRRGKPKFCPFRLSNYAVAEDRKNALKSLFSQNLDIKDESAVVWYHDKEEKQLELCHVSRIIPGQRTVSLSIPTTFFPYKGKAIFQQYPRPEKEYQSFSLICNDRSLDLICKDKDEAEVWITGLKAIITRGRSRKGKYDARSETVFSDSPHGQRVTTSTSSIDQGDNQRTESLPQSRLGKAYADIIQYTAAGKSPTLVETGSFNLSSLSAGAVDNSNARSSTADTFRVSLSSALSSSSQGSCLEDFDNLGDVFIWGEGTGNGLLGGGKHRIGKSSGTRIDANTPKSLESSVVLDVQNISCGNRHAMLVTKQGEAFSWGEEAGGRLGHGAETDVSHPKLIKNFKGMNVELIACGEYHSCAVTSSGDLYTWGDGAKSSGLLGHRSEASHWIPKKVCGLMEGLRVSHVSCGPWHTALITSAGRLFTFGDGTFGALGHGDRSGCITPREVETFNGLKTLKVACGVWHTAAVVELMSGLDSRPSDAPSGTLFTWGDGDKGKLGHGDNKPRLAPQCITALVDKSFSEVACSYAMTVALTTTGRVYTMGSNVYGQLGCPLANGMSPICVEDYLVDSTVEEISCGSHHVAVLTSRTEVYTWGKGENGQLGHGDCENKCTPTLVDILRDKQVKRIVCGSNFSAAICVHNWALSADNSICFGCRIPFNFRRKRHNCYNCGFVFCKACSSKKSLKASLAPSTSKPYRVCDDCYDKLQKAIESEPFSRVPKVKAGNALYKASEQTDKESGFPLLVGHTSRLSSSDSFNRAQGRISRVDQYENRASSFQNENPPRESFSLSKSPISAFRVSKSLFSASLPSTRVVPQSTSPLLGKASALWSAIPAPYPPVRTAEVVVDNLKPINDSLSQEVKQLKAQLEAMLLGLFKNANGLEELASKSQLLEAELGRKTKQLMDATAKAAVEAEKRRAAKHVIKSLTAQLKEVTERLPEEQISTSNLDFNVEQTSFNRTRPSNGKCVTTTTLTECSGSSNTVVSAKKSRGQKPERMLQVEPGVYLYLISLPDGGNELKRVHFSRKCFSEDEAEKWWNENGQKICEKYNITPEHV

SEQ ID NO: 4955 - protein, 461 aa, Desulfovibrio desulfuricans G20
MHAPVSSPRHPAKRFARTAALWLVVATLLHASPALAEDAPAMLSQQHGNILWTLIAAILVMLMQAGFAMVECGFTRAKNAGNILMKNFVDFAAGSLVFFLVGYAFMFGADAGGFIGTSGFALAHVDPATEGGMWDLTFWFFQSVFAATAATIVSGGIAERTRFASYIIVSVLVTGIIYPVSGHWAWGGLAGNAGWLEGLGFADFAGSTVVHSVGGWVALAGAIVVGPRAGKYGPDGSVRAIPGHNIPLAALGVFILWFGWFGFNPGSTTTADGTIGYIAVNTSLAACAGTVTAMLTAWIRFGKPDASITMNGALAGLVGITAGCYELSPSGAIIVGIICGFVVVLSIEFLDKILKIDDPVGAVSVHGVCGAIGTLMVGLLAHPSYGGSTGLVYGGDASLLMVQALGVAVVFAWAFGMGLVVFRIVAAVAGLRVSPEEELKGLDITEHGSESYNGFQIFTVE

SEQ ID NO: 4956 - protein, 429 aa, Deinococcus radiodurans
MTGNEQNPSKWLAAEKKYDSGVYNKHDVVMVRGQGATVWDENGRSYIDCVVGYGVATLGHSHPDVVKAVQEQAGKLMVMPQTVPNDKRAEFLQELVGVLPQGLDRVFLCNSGTEAMEAAKKFAITATGRSRFVSMKRGFSGRSLGALSFTWEPKYREPFGDAVDNKSVDFVTYGNLDELRAAVTEQTAAVIMEPVQGEGGVRPASAEFIQEARRITREKGALLILDEIQTGFCRTGKMFACEHFGVIPDGMTLAKAIAGGTPTAAFAMMSEVADRMPAGGHGTTFGGNPLSMAAGVASLRAMKREGLAEQAREKGAYMMDKLRAIQSPKIREVRGLGLMIGVELKEKSAPYIHAMEHDEGVLCLAATPLVVRFLPPAVISKEQIDQVVAAFERVLNNVNPREERQAELRAQQSEMGQQQVSQGESVQTE

SEQ ID NO: 4957 - protein, 321 aa, Zea mays
  misc_feature (191)..(191): Xaa can be any naturally occurring amino acid
ADHDDDERDQPALHVLPDGDPERWHAQVFRSVDAGSVKRFPRPWERAEMARRHLVGDKNLAVERSIHAAYVAAIRSAERFVYVENQYFIGGSYAWPSYRNGGACNLVPMEIALKVASKVRAGEPFAAYVVLPMWPEGNPGSGPAQEILFWQNQTMEMMYSVVAAALEGKGGHPQEHLNFYCLGNREPAEDXATAINGPIQAHARRHRRFMVYVHSKGMIVDDEYVIIGSANINQRSLAGSRDTEIAVGAYQPDHTGACPRGKVHGYRMSLWEEHLGKEAVRRPEVLRPESPRCVKLVNRIARDNWRRYAADDDKLGPLQAC

SEQ ID NO: 4958 - protein, 487 aa, Streptococcus mutans
MPITIKTMLITYADSLGKNLKELNENIENYFADAVGGVHLLPFFPSTGDRGFAPIDYHEVDSAFGDWDDVKRLGEKYYLMFDFMINHISRQSKYYKDYQEKHEASAYKDLFLNWDKFWPKNRPTQEDVDLIYKRKDRAPKQEIQFADGSVEHLWNTFGEEQIDLDVTKEVTMDFIRSTIENLAANGCDLIRLDAFAYAVKKLDTNDFFVEPEIWTLLDKVRDIAAVSGAEILPEIHEHYTIQFKIADHDYYVYDFALPMVTLYSLYSGKVDRLAKWVKMSPMKQFTTLDTHDGIGVVDVKDILTDEEITYTSNELYKVGANVNRKYSTAEYNNLDIYQINSTYYSALGDDDQKYFLARLIQAFAPGIPQVYYVGFLAGKNDLELLESTKEGRIINRHYYSSEEIAKEVKRPVVKALLNLFTYRIQSAAFDLDGRIEVETPNEENIVIERQNKDGSHIATAEINLQDMTYRVTENDQTISLSMISCQT

SEQ ID NO: 4959 - protein, 495 aa, Pirellula sp. 1
MLGMGEPGRVRASKSKIVLSDRRMWVPLIVACMTQGYTTSVTPKTSRQLVHCIYRSPMSSSSSLEIQRADTVRVQFGDTNLELPLVEGSEGEKAIDISRLRADTGVITLDDGFVNTGSTRSAITFLDGEKGILRYRGYPIEELAKSCDFVEVAYLLIFGDLPNAEEIETFRSGIRDHTMIHEDMRSFYNGFPRDAHPMAILSSVVGALSTFYQDSMDLNDPRQVEISLYRLIAKLPTIAAYSYKKSMGQPFMYPKNELDYCENFLHMMFATPTSDYLVDPDFAEALNLLFIVHADHEQNCSTSTVRMVGSSNANLFASISAGIGALWGPLHGGANEACVNMLEQIAADGGDVKKYVDMAKDKSNDFRIMGFGHRVYKNSDPRATIIRASCDKLLAKLNLDDPLFEVAQKLEEVALKDEYFIERKLYPNVDFYSGVIYRALGIPVQMFTVLFAIGRLPGWLAHWREMHANPASRINRPRQIYTGATQRDVVPVDQR

SEQ ID NO: 4960 - protein, 267 aa, Ralstonia eutropha JMP134
MSIPSFGVGTFRLTGQAAVDSVYNALDLGYRAIDTAQIYGNEADVGQAIAESGVKRDELFLTTKIWTEHYAADKLVPSLRESLDKLRTDYVDLTLIHWPAPGNGVPLREFMEALAAAKSLGLTRQIGVSNFNIALTHQAIDVVGKGEIATNQIELSPYLQSRKLTAFLTEQGIAVTSYMTLAYGKVLTDPVLAQIAAKHGATVAQVALAWALQLGYAVIPSSTKRENLASNLLARDLKLDAGDMAQITALERNGREVNPEGLAPEWD

SEQ ID NO: 4961 - protein, 363 aa, Mycoplasma mycoides subsp. mycoides SC str. PG1
MAICKIGSKYTFTIRGILFCYIIKFMLMCFLERGLYLMIKKIGILTSGGDAPGMNNAIAGVVKTAASKGIEVYGINDGYKGLVNGWFEKLNVEKTLDILSRGGTYLGSARLPEFKELEVRQKAVANLKKAGIEALVVIGGDGSYMGAQKLTEMGINCIGLPGTIDNDISSTDYTIGFHTALNTIVEAVDRIRDTMQSHNRADVVEIMGNGCGDLVTYTAVATGAEIFSPAEDLLTIEQMGQKAKQFRLLGKKSLIILVSEKSYGISAKEIAEKIQKISGYETKATVLGHIQRGGRPTAMDRYIAFTAGMFAVEKLAEGKGGLFIGLENNKLVARDIDSTLNMKKEDKKPFIKYLREINGYFSK

SEQ ID NO: 4962 - protein, 226 aa, Clostridium tetani E88
MVIIDLLKGVVYMKFFIDTANVEEIKKVAKWGVLDGVTTNPTLIAREGRDLKEVIEEICSIVDGPISAEVISLESEKMVEEAKELIKIHKNIVIKVPMCEEGLKAVSELTKLGIKTNVTLIFSAQQALLAAKAGATYVSPFLGRIDDIGSFGIQLVEDIVTIFTNFGIESEIICASIRTPIHVLECARVGGDIATVPYKVFAQMLKHPLTDRGIEQFLEDYKSMNK

SEQ ID NO: 4963 - protein, 287 aa, Prochlorococcus marinus subsp. marinus str. CCMP1375
MFENENPNGSWLDEYQNDVRYGLKGKKIIEEISNFQKITIFESNRYGKALLLDNCWMTAEYQEKQYHECIVHPALCGSKEINKVLIIGGGDGGSARECLKYQELKNLDLIEIDKRVVELSQQYLSVIGGNCWKDQRLNLKLTNGINWVKDAKDNSYDVIIIDGSDPKGPAKGLFNKDFFKDCHRILKPDGVLGAQTESPESFEDIHINTVKMIKEVFKYADPLYGYVPIYPSGIWSWTFASIKKPRHLYPIISRANTISKTCQVWSPRWQRGGFDAIPANIERKLQQ

SEQ ID NO: 4964 - protein, 502 aa, Oryza sativa (japonica cultivar-group)
MMDGRSILMGRYEVGKQLGQGTFAKVYYARNLTTGQAVAIKMINKDKVMKVGLMEQIKREISIMRLVKHPNVLQLFEVMASKSKIYFVLEYAKGGELFNKIAKEGKLSEDSARRYFHQLINAVDYCHSRGVYHRDLKPENLLLDENENLKVSDFGLSALAESKRQDGLLHTTCGTPAYVAPEVLSRKGYDGAKADVWSCGVILFVLVAGYLPFHDPNLIEMYRKICRADFRCPRYFSAELKDLIHKILDSDPSTRISIPRIKRSTWYRKPVEINAKNSEAATTNSISSGVATTSGSAECSTSEENQGSLSLPNLNAFDIISLSTGFNLSGFFEDTHGHQEERFTTRQPVTTVLGKLKELAKRLKLKVKKKDNGVLRLAAPKEGKKGFLELDAEIFEVTPSFLLVELKKTNGDTMEYRKLVKEDIRPALKDIVWVWQGDEHLNSQSILQGEQQQSPLPPELPQDQLQPSLPQQEKQDMPEPPLLPQVPQEEVQTSIPAEQTKN

SEQ ID NO: 4965 - protein, 121 aa, Arachis hypogaea
DGITHVGGDMFVSVPKADAIYMKWILHDWSDQHCIKILKNCRKAIPENGKVIIVDHVLQPEGNDLFDDTGFAFDMMLLAHNAGGKERTEENWKWLFAETGFPRYNIIKIKALPSIIEAFPN

SEQ ID NO: 4966 - protein, 120 aa, Chara vulgaris
MITVGTYLQVSDNSGAKIVQCIKILHPFKKQRAIIGDTIIVSLKQARMGRNTQNVLKAIVVETKKATKYRKDGSYLQFDRNAVVLINNGLPIGTRILGCVTHELRKKRYLKIVSMAPYVI

SEQ ID NO: 4967 - protein, 229 aa, Oryza sativa (japonica cultivar-group)
MADEQYMDLGGGGAAAAPGRGGAGERKRRFTEEQIRSLESMFHAHHAKLEPREKAELARELGLQPRQVAIWFQNKRARWRSKQLEHDYAALRSKYDALHSRVESLKQEKLALTVQLHELRERLREREERSGNGGAATTAASSSSCNGSGSEEVDDDDDKRNAAAGCLDLEPPESCVLGGATCATPADVSVESDQCDDQLDYDEGLFPESFCATPELWEPWPLVEWNAVA

SEQ ID NO: 4968 - protein, 127 aa, Rickettsia akari
WGPAHGGANEAVINMLKEIGSSENIPKYIAKAKDKSDPFRLMGFGHRVYKNYDPRASVLKETCKEVLKELGQLENNPLLQIAIELEAIALKDEYFIERKLYPNVDFYSGIIYKAMGIPSQMFTVLFA

SEQ ID NO: 4969 - protein, 170 aa, Triticum aestivum
MWTERRARRSGSMAGGGGGRARGAEGKRAAPQGQRAPAATAYNQAAADILVALRLELRRSTPADRMWTERRARRSSSMAGGGGGRARGAEGKRAAPQGQRAPAATAGYFTAELAVLFLCLTALLVFLPLVLPPLPPPPSLLLLVPVGLMAVLVALAFVPSDSRSIASSCH

SEQ ID NO: 4970 - protein, 273 aa, Zea mays
MARTPRTTILHLVLTLCILSAQNTPSLASSAIDEFLGCLSADIPSRLIQTPATPSYSALLLSTAWNLRYILPDTSKPIGIIAATEHAHVQTTVRCGRRHGVRVRVRSGGHDYEGLSYASVHLHNRNEPFAVLDLAALRAIHVDPARAEAWVESGATVGELYYAVGAASRSLGFPAGSCPTMGVGGHLSGGGFGSLARKYGLSADNVLDAVVVDADGRLMNRSTMGEDHFWALCGGGGESFRVVLSWKVRLVAVPETRHGVQHHPGQGTNLPSN

SEQ ID NO: 4971 - protein, 104 aa, Triticum aestivum
  misc_feature (81)..(81): Xaa can be any naturally occurring amino acid
MGPTVVAWGATSVDPFQGLKSTEGLHVRRRYNGARLGSVRNGGRVRCMQVWPIEGMKKFETLFYLPPFSTGALLKQVDYLXIRSKWGPCLEVSKGGFIFREHNA

SEQ ID NO: 4972 - protein, 213 aa, Malus x domestica
PIKAPILVEQGLFWDNEELISLLSKESEQNELQKPLQISPSLAGARREAVDWMLRVASHYSFSALSAVLAADYFDGFLSSLQLQVEKPWMTQLAAVACISLAAKVEETQVPLLLDFQVEDSKYVFEARTIKRMEILVLSTLQWKMNPVTPISFIDYITRRLGLKNHLCWEVLKRCELVLLSLISDSRFMSFLPSVVATAIMLHVVNNIEPCLL

SEQ ID NO: 4973 - protein, 174 aa, Glycine max
MSSHSHLSFAFGVLGNIASFVCFLAPLPTFYRVCKKKSTEGFQSIPYVAALFSAMLWIFYAYVKTGEMLLITINAFGCVIETIYLAVFITYCPKKARMSTLRMIVLLNFGGFCTIVLLTHLLAEGEGRVKLLGWICVVFATSVFAAPLSIIVSILLDHNLQLSYLFLIFHVPCY

SEQ ID NO: 4974 - protein, 220 aa, Shigella dysenteriae
LRQELDLYICLRPVRYYQGAPSPVKHPELTDMVIFRENSEDIYAGIEWKADSADAEKVIKFLREEMGVKKIRFPEHCGIGIKPCSEEGTKRLVRAAIEYAIANDRDSVTLVHKGNIMKFTEGAFKDWGYQLAREEFGGELIDGGPWLKVKNPNTGKEIVIKDVIADAFLQQILLRPAEYDVIACMNLNGDYISDALAAQVGGIGIAPGANIGDECALFEA

SEQ ID NO: 4975 - protein, 238 aa, Lactobacillus delbrueckii subsp. lactis
  misc_feature (24)..(24): Xaa can be any naturally occurring amino acid
  misc_feature (220)..(220): Xaa can be any naturally occurring amino acid
AGIFLTHGHADSIGALPYILRDGXPVFGSKLTIELAKIDVQRENKRRNNQLFNVIDADTEIDFKNASVSFFQTTHSVPDSLGIVIHAPQGQIVYTGDFKFDPSARPAYRTDMTRLAEIAENGVLALLPDSSNAEAVLPNASENEVGTYITNVFRNAKGRIIVAGKASNINRVQQVFNAAAATGRRVLLTGRDVAKIVHTAMKLGYLEVPDGLLMKAKELXDVPDEKTVILETGRMGNR

SEQ ID NO: 4976 - protein, 404 aa, Helicobacter hepaticus ATCC 51449
MDLQTLKKAYPKALPYHIGGKVGIQPRKRLRSIDELGLAYTPGVAVPCKQIEANPLSAYDYTSKSNLVAVISNGTAVLGLGDIGAMASKPVMEGKAILFKTFAGVDAFDIEINEKDVDKFVAVVKAISPTFGGINLEDIKAPECFEIERRLIEELDIPVMHDDQHGTAIISTAGIINALHLVNKKAKDIKVVVFGAGAAAVACAKMYKAFGVKNLVMFDSKGAISANRTDLNDLKKEFICQENYASYKDALNGADVMLGLSKGNLLSGDDIKGMNESPLIFALSNPTPEIMPDEVKKARPDAIVATGRSDFPNQINNVLGFPYIFKGALKVRASKINEEMKFAAAYAIANLAREPITEKLEKLLKKKMSFGKEYIIPSAFDERLDDVVSNAVADAAIKSGVARV

SEQ ID NO: 4977 - protein, 381 aa, Zea mays
LPCKPPSLVHCFKLLVLLALARLTMHVPDEDMLSPLGALRLDGHFSFHDVSAMARDFGNQCSFLPAAVLHPGSVSDIAATVRHVFSLGEGSPLTVAARGHGHSLMGQSQAAQGIVVRMESLRGARLQVHDGFVDAPGGELWINVLRETLKHGLAPKSWTDYLHLTVGGTLSNAGVSGQAFRHGPQVSNVNQLEIVTGRGDVVTCSPEDNSDLFYAALGGLGQFGIITRARIALEPAPEMGRWIRGLYSDFESFTEDQEMLMGAENSFGCVEGFVIINRTGVLNNWRASFKPQDPVEASHFQSDGRVLYCLELTKNFNSGDTDTMEQEVAVLLSRLRFIQSTLFHTDVTYLEFLDRVHTSELKLRAQGLWEVPHPWLNLLIP

SEQ ID NO: 4978 - protein, 220 aa, Shigella flexneri
ELDLYICLRPVRYYQGTPSPVKHPELTDMVIFRENSEDIYAGIEWKADSADAEKVIKFLREEMGVKKIRFPEHCGIGIKPCSEEGTKRLVRAAIEYAIANDRDSVTLVHKGNIMKFTEGAFKDWGYQLAREEFGGELIDGGPWLKVKNPNTGKEIVIKDVIADAFLQQILLRPAEYDVIACMNLNGDYISDALAAQVGGIGIAPGANIGDECALFEATHG

SEQ ID NO: 4979 - protein, 507 aa, Agrobacterium tumefaciens str. C58
METGMQTTAEAIKGKRLGLFIDGRFVEPRSGKFVDSYDPTTGEAWYQFAEGGADDVDLAISSAQRAFRDPSWRRMTQTARGKLVRRLADLVLEHAEDLALLETRDNGKLIKEMRAQMRAIPDSYLYFAGMADKLQGDTIPVNKLDQLNFNMREPLGVIGMVTPWNSPLMLLTGTLAPCLAIGNTVVIKPSEHATASTLALAELIVEAGFPAGVVNVVTGGGAVTGEALTRHNGIAKFVFTGSTATGRRIAANAAANLVPCQMELGGKSPHVVFSDVDIEKTVNGVVSGVFAAAGQTCVAGSRCFVEANIYDRFIEALVERTRNIKLGDPMDDATDIGPLALESQLSKLEGYVASGVREGSRIAIGGKRPQSEELSRGWYFEPTVMADATNDMSFMRHELFGPMVGVMPFSSEEEMISLANDTNYGLASGIWTQNIDRAMRFANQIDAGTVWINTYRSAAYMSANGGFKESGYGRRGGFDVMREFSRAKNVVIDYSGAMQDPFVIRLR

SEQ ID NO: 4980 - protein, 181 aa, Triticum aestivum
  misc_feature (88)..(88): Xaa can be any naturally occurring amino acid
  misc_feature (118)..(118): Xaa can be any naturally occurring amino acid
  misc_feature (129)..(129): Xaa can be any naturally occurring amino acid
  misc_feature (137)..(137): Xaa can be any naturally occurring amino acid
  misc_feature (166)..(166): Xaa can be any naturally occurring amino acid
MAPAVMASSATTVAPFQGLKSTAGLPVSRRSSGSLGRVSNGGRIRCMQVWPIEGIKKFETLSYLPPLSTEALLKQVDYLIRSKWVPCXLRFSKVGFRLPVSTTSSPRVITNGRYWTMXKLPYVRCTDAXTQVLNEVXEEVKKEYPDAYVRRNRASTTCAQVQCVSXFIAFRPPGCEESGKA

SEQ ID NO: 4981 - protein, 347 aa, Sulfolobus solfataricus
  misc_feature (1)..(1): Xaa can be any naturally occurring amino acid
  misc_feature (44)..(44): Xaa can be any naturally occurring amino acid
  misc_feature (138)..(138): Xaa can be any naturally occurring amino acid
  misc_feature (186)..(186): Xaa can be any naturally occurring amino acid
  misc_feature (269)..(269): Xaa can be any naturally occurring amino acid
  misc_feature (306)..(306): Xaa can be any naturally occurring amino acid
  misc_feature (317)..(317): Xaa can be any naturally occurring amino acid
  misc_feature (322)..(322): Xaa can be any naturally occurring amino acid
XRAVRLVEIGKPLSLQEIGVPKPKGPQVLIKVEAAGVCHSDVHXRQGRFGNLRIVEDLGVKLPVTLGHEIAGKIEEVGDEVVGYSKGDLVAVNPWQGEGNCYYCRIGEEHLCDSPRWLGINFDGAYAEYVIVPHYKYXYKLRRLNAVEAAPLTCSGITTYRAVRKASLDPTKTLLVVGAGGGLGTXAVQIAKAVSGATIIGVDVREEAVEAAKRAGADYVINASMQDPLAEIRRITESKGVDAVIDLNNSEKTLSVYPKALAKQGKYVXVGLFGADLHYHAPLITLSEIQFVGSLVGNQSDFLGIXRLAEAGKVKPXITKTXKLEEANEAIDNLENFKAIGRQVLIP

SEQ ID NO: 4982 - protein, 497 aa, Cladosporium fulvum
MSLSVQLETPSAGKYEQPTGLFINNEWVKPVSGKFFDVINPTDESVICQVAEADEKDVDIAVAAARKAFEGPWRQETPENRGKLLVKLAELFEKNLDLFASVKALDNGKAFNMAKVDIGMCAGCLRYYGGWADKIEGKVVDTTPDTFNYIKKEPIGVCGQIIPWNFPLLMWAWKIGPAVATGNTVVIKTAEQTPLGAYVAANLIKEAGFPPGVVNVISGFGKVAGAAIASHMDIDKVAFTGSTVTGRTILKAAAGSNLKKVTLELGGKSPNIVFDDADIDNAISWVNFGIFFNHGQRCCAGSRIYVQEGIYDKFLQRFKERAQKNVVGDPFAADTFQGPQVSQVQFDRIMGYIQAGRDAGATVEIGGNRKGDKGYFIEPTIFANVTEDMKIMQEEIFGPVCSISKFKTKEDAIKVGNATPYGLAAAVHTRNLNTAIEVSNALRAGTVWVNTYNTLHHQLPFGGFKESGIGRELGEDALANYTQTKTVSIRLGDALFG

SEQ ID NO: 4983 - protein, 486 aa, Vibrio vulnificus CMCP6
MEVTAHYIGGKPFVGDTGESFATLNPATGEVLAHIEQADERVLGHAIESAKLGFSVWSSMSAAERSRCLLKAAQLIRDHNDELAELEVRDTGKPIQEASVVDIATGADVIEYFAGLVNGLGGEQQSLGSNQFFYTRREPLGICAGIGAWNYPIQIAMWKAAPALAAGNAMIFKPSEETPLSALKLAELFTQAGVPDGVFNVVQGDYRVGQMLTAHPEIDKVSFTGESGTGKKVMADSAATLKPVTMELGGKSPLIIFDDADLDDAVSAAMVANFYTQGEVCTHGTRVYVQRAMYDAFVEQLKERTEKLIVGDPMNMETQIGSLISKSHLEKVLGAISSAKESGATLLTGGFQVTERGLEKGCFVAPTVFVDCRDEMPHVQNEIFGPVMSVLVFDDEDEVIARANNTQYGLAAGVFTQNLSKAHRVIHQLQAGICWINTWGNSPAEMPVGGYKLSGIGRENGQETLLHYTQTKSVFVELGAFDSPYA

SEQ ID NO: 4984 - protein, 382 aa, Bacillus anthracis str. A2012
MGEFSGKGENVMTVIRGLEGVVATTSSVSSIIDDTLTYAGYNIDDLAENATFEEVVYLLWHRKLPNEQELAKFNEIVSEYYKVPGEILAYLKQVDLKIAHPMSVLRTAISMLSLYDESAEIMDEKSNYLKAVKLQAQVGTLVAAYARIRKGLDVVEPRNDLSLAANFLYMLNDREPNEVEIEAFDKALVLHADHELNASTFTARVCVATLSDVYSGITAAIGALKGPLHGGANENVMKMLTEIGEEENVESYIHNALQNKVKIMGFGHRVYEQGDPRAKHLREMSKRLCVLLGEEKWYNMSIKIEDIVTKEKGLPPNVDFYSASVYHCLGIDHDLFTPIFAISRMSGWLAHILEQYENNRLIRPRADYNGPTHQVYVPIAQR

SEQ ID NO: 4985 - protein, 114 aa, Capsicum annuum
MKMFGKIACLLILCVVLIAPHAEAVTCGQIQVGVVNCLPYLQNRGPLGRCCGVIKDLLKLCKTPHERRKSCRCVKTAANTIKGIDFGKTAGLSGVCGVKIPSEISPSVDCSKVK

SEQ ID NO: 4986 - protein, 243 aa, Citrus sinensis
MGRGRVQLKRIENKINRQVTFSKRRAGFLKKAHEISVLCDAEVAVIIFSHKGKLFEYSTGSCMEKILERYERYAYAERQLIAPDPESQRNWPLECNNLKAKIDLLQKDQRHYLGEDLESLSLKDIQQLEQQLDTALKHIRSRKNQLMQESISELQKKEKSIEEQNNLLVKQIKEREKAAAQQAQWGNQIQNQVPNTLSFLLPQPPPCLRLGGAYQEQASEMRRNELNLTLEPVCSCSLGCFAG

SEQ ID NO: 4987 - protein, 379 aa, Candida albicans SC5314
MSGLGKLPGLASDAVLKQSIPVPEDFQEVKGIDYSQDNAYNMRAKDLIKSMATMGFQASSLSQACDIIDNMRSWRGKHKDTLEEHEQTGEFDDEGYQKTTIFMGYTSNLISSGLRDTLRYLVQHKMVSAIVASAGGVEEDLIKVLAPTYMGDFTLPGKGLRDQGMNRIGNLLVPNDNYCKFEEWIVPILDKCLEEQEEAMKKLGPKGLIAGSEAIWTPSKLIDRLGKEINDESSVLYWAHKNKIPIFCPALTDGSIGDMLFFHTFKASPQQLRLDIVADIRKINSMSMAASKAGMIILGGGLIKHHICNACLMRNGADYAVYINTGQEFDGSDAGARPDEAISWGKIKAEAKSVKVYADVSLVFPLIVAATFASEKPQN

SEQ ID NO: 4988 - protein, 386 aa, Listeria monocytogenes str. 4b F2365
MKHVFPTYKRFPIDLVNGTGTVVTDKNGKTYLDFTSGIAVCNLGHCPANVAEAVQQQLTNIWHTSNLYECALQDSVAELIADGKDRLVFFCNSGTEANEAALKLARKYTGKEKIITFEKSFHGRTFGSMSATAQAKIHQGFGGLVPGFTYVPYNDIEAFRAEIDEHTAAVMLEVIQGEGGVIPANAAFLLEVQLLCKKMGVLLIIDEVQTGLGRTGTLYGFEQIGLEPDIFTLAKGLGNGLPIGAMVGKANLSSAFGPGSHGSTFGGNKLALAAAKEILRTMKQAGFLEEVNAKADYFRYLLEVHLEALDNVSVIRGGGFLIGIELENTAEPVVTELRDKGLLILTAGANVLRILPPLTVSYAEIDQAIYLLKSVLENQLIGSEEG

SEQ ID NO: 4989 - protein, 261 aa, Solanum tuberosum
VENARSYSTYLKTRPASMEEAAINQLITLSKDTRAGGSAEGAHLHIVHLSDARTSLNLIKEAKQRGDSITVETCPHYLAFAAEDIPDGDTRFKCAPPIRDAANKEKLWDALLDGDIDMLSSDHSPSVPEMKLLDEGDFLKAWGGISSLQFVLPATWTHGRKYGITFEQLASWWSENPAKLAGLTTKGAIAVGNQADIVVWEPDMEFDLDNDYPVHIKHPSISAYMGSRLSGKVLATFVRGNLVYKEGNHASQACALPILHR

SEQ ID NO: 4990 - protein, 386 aa, Thermoplasma volcanium GSS1
MPETTEEISKGLEDVNIKWTRLTTIDGNKGILRYGGYSVEDIINNGAQAEEIQYLFLYGELPNAQELKIFKENVQKGYNIPDFVINSIRQLPRESDAVAMQMAAVASMAASEIKFKWNKDTDRDVAAQMIGSMSAITANVYRHILGMPAERPKPSDSYAESFLKAAFGRNVTKEEVDAINTALILYTDHEVPASTTAGLVAVSTLSDIYSGITAALAALKGPLHGGAAEAAIAQFDEIKEPSNVEKWFNDNIINGKKRLMGFGHRVYKTYDPRAKIFKGIAENLSKNNAEVKKIYDIATKLEDLGVKQFGSKGIYPNTDYFSGIVYMSVGFPLRNNIYTALFALSRVTGWEAHFIEYVEEQQRLIRPRAVYVGPAERKFVKLPDRK

SEQ ID NO: 4991 - protein, 101 aa, Rickettsia sp. 'midichlorii'
GSSENIPKYIAKAKDKNDPFRLMGFGHRVYKNYDPRAAVLKETCKEVLKELGQLENNPLLQIAIELEAIALKDEYFIERKLYPNVDFYSGIIYKAMGIPSQ

SEQ ID NO: 4992 - protein, 329 aa, Streptomyces avermitilis MA-4680
MKAAVIESVGKAVVAEVPDPTPGPREVVVEVAACGLCGTDLHILQGEFAPKLPIVPGHEFAGEVVGLGTQVTEVSVGDRVAVDPSLYCYECRYCRTGHNNLCERWAAIGVTTAGGAARYAVAPVANCVKLPEHVRTQDAALIEPLSCAVRGYDVLRSRLGAHVLVYGSGTMGLMMLELAKRTGAASVDVVDVNPARLTTARQLGVSGSAANADELDRPQGWDVVVDATGNAAAIQDGLGRVAKAGTFLQFGVADYATRVTIDPYRIYNQEITITGSMAVLHSFERAAELFAGGVLDPDVFISDRIPLARYPQALEQFASGVGRKIVVVP

SEQ ID NO: 4993 - protein, 497 aa, Bordetella pertussis Tohama I
MSTLPPLSHWESLAAGLTLRNQAFIDGRWHDGQAGPLAAINPATGQLLAEVTACSQADIDQAVAAARRAFESGVWSRMPRRERKQCMLRLAALIREHAEELALIETLNMGKPIGDTMAFDIPETAHTYAWYAETIDKQYDEIAPTDADALATITREPLGVVAAVVPWNYPLLMASWKVAPALAAGNSVILKPAEQSSLSALRLAELALQAGIPAGVLNVVPGAGPVAGRALGLHMDVDCLAFTGSTATGKRFMEYSGQSNLKQVWLECGGKSPHIIFDDCPDLDRAALAAAIGIFNNQGEVCIAGSRLYVQAGIYDTFVSKVEACARAMQPGNPLDPASPMGAMVDERQMARVLEYVESGRREGARLRMGGERVRADSGGYYIEPTIFECARPDLTIVREEIFGPVLAVTRFDGEDEVVAQANASAYGLGSGLWTADLSRAHRVSRRLRAGLVWVNCYFDGDVTVPFGGVKQSGFGRDKSLHALDKYTSLKTTWIRL

SEQ ID NO: 4994 - protein, 151 aa, Methanothermobacter thermautotrophicus str. Delta H
MNLKTHAFNDRGRIPSRYTCDGENISPPLSWDGVPGEAKSLALICDDPDAPSKVWTHWVIFNIPPDSTGLEENVPDAGRLPDGSVQGYNDSGTLGYRGPCPPSGVHRYFFRLYALDTVLDLEPGASKEDVLEAMEGHVLGEAKLIGLYRRG

SEQ ID NO: 4995 - protein, 434 aa, Triticum aestivum
  misc_feature (90)..(90): Xaa can be any naturally occurring amino acid
  misc_feature (421)..(421): Xaa can be any naturally occurring amino acid
GVDCLGKGEAFGKVHYAKNLESNRGVAIKILDKEKVLKVGLAEQIRREITTMRLVEHKSIVQLHEIMATRSKIYVVMEYMGGDLFYKDAXRVACSPRVLPSSSCRLISAVGFSHSRGVYHRDLKPENLLLDENENLKVSDFGLSALSESKRQDGLLHTTCGSPAYVAPEVISKGGYDGAKSDIWSCGVILFVLVAGYLPFQGQNLIEMYRKIEKGDFKCPGWVSQKLQKLLYKIMDPDPNKRISIQKIKESTWFRKGPGENLTAKERLPSENATTDAVPTLGVRRRKNSHEDGKPLAVTNLNAFEIISFSTGFDLSGLFVEKESKKEARFTSEQPASAIVSKLEAVAKTLNLRVRKKDNGVGWWQGCKGGRKGVLQFDSEIFEISPSYPRTVSLRSSGDSLEYQKLLEESIRPALKDICLXAWHGADGQQEPQG

SEQ ID NO: 4996 - protein, 110 aa, Rickettsia sp. 'midichlorii'
AVINMLKEIGSSENIPKYIAKAKDKNDPFRLMGFGHRVYKNYDPRAAVLKETCKEVLKELGQLENNPLLQIAIELEAIALKDEYFIERKLYPNVDFYSGIIYKAMGIPSQ

SEQ ID NO: 4997 - protein, 429 aa, Bordetella pertussis Tohama I
MGPRIITHGEGVYVFDDQGNRYLEGMAGLWSVAVGFGEQRLVEAAARQFQELPYYHTFTHKSHPSVIALAERLIGYTDGRMAQAFFTNSGSEANDTVVKLVWYYNNALGRRDKKKIIARQRGYHGVTVASASLTGLPGNHKDFDLPLPQIRHTACPHYYRYGLPGETEEDFATRMAGELEAMILREGPDTVAAFIGEPVMGAGGVIVPPRTYWQKIQAVCRKYDILVIADEVITGFGRLGQRFGSQVFDIEPDIMVLSKQITSSYQPLGAVLLNTRVADVVAEHSGRLGTFGHGYTASGHPVATAVALENLRLIDERGLIEHAAEMGALLHQELQALSSHPLVGEVRGVGLIAGVELVADKATRQPFDPLGKAGGYAYERAHDHGLIVRGIQDTVAFCPPLIITAEQVRDMVARFARTLDDVAAHVAQG

SEQ ID NO: 4998 - protein, 416 aa, Chlamydomonas reinhardtii
MASNGAAPDRWSNVKRVYTRQDVEKLRGSIKIEYTLARLGAERFWNLLHTEDYVPALGAMTGGQAVEMVAAGLKDIYLSGWQVAADANSASQTYPDQSLYPVDSVPRVVSRINNAFQRMDQMQHSEGRGDTYWFAPIVADAEAGFGGNLNAYELMKALIEAGASCVHFEDQLASAKKCGHLGGKVLVPTKEFVQKLTAARLAADVMDVPTLIIVRTDALGAYLLTSDADEYDKPFMTGERTAEGFYCVRGGIDAAIARGLAYAPYADLVWFETSEPSMEEAKKFAAAIHAQYPGKLLAYNCSPSFNWKKLSADEISKFQKTLGSLGYKFQFITLAGFHSLNYGMFSLARDYASRGMSAYAQLQEAEFASEKQGYRATTHQKFVGTGYFDLVSTVITQGTSSTNALKGSTEEEQFHH

SEQ ID NO: 4999 - protein, 368 aa, Exiguobacterium sp. 255-15
MGQDYQQWVDRLAQKKTGERQDGVEVVIKPVPDRTESGVLDPRVLEVMMQQQQDSSPVGPFSLEAARAGMGWINTDLTTTDITTEDIMIPSAEQPIPARIYRPRSTEPLPAVVYFHGGGFFGGTLEPVEHPCRLLAERANVVVISIDYRLAPEHPFPAGLNDCFTAVKWVYEQGEELGINREQLAVAGDSAGGNLATVCALLDREQQTEMIQYQVLLYPVVNLAALPTDDFNWRLDAYEMNENRELLEGIVTALEDSDGLLNRLYLQGTTDVQDPHVSPLFSDKLTGLPDALIITAEYDYLRLEGEAYGRKLARSGVKTKRIQYNGMDHAFIEKLGQYPQAEDCITEIANGLQNRFAVMKSDTNTIGG

SEQ ID NO: 5000 - protein, 335 aa, Schizosaccharomyces pombe
MQQTYKPNTSALKDGAPKATVDQKQLLPCKYRVGRVLGGGTYATVREAVHIETNKMYAAKIMNKKMMEKKQDFVKNEIAILKRVSYEHPNILHLVDFFETVNNLYLITELATGGALFDRICAKGSFYEADAAALMRTTTSAVKYLHDNGIVHRDLKPENLLYRSKDPNSDLLIADFGLSHFYEDSQYYMLMTACGTPEYMAPEVFRRTGYGKPVDMWAIGVITYFLLSGYTPFARPSQVEVIEAILANEYTFNDPCWSGISETAKDFIKKCLENDPSKRLTAADALKHPFLSENGPATSNLLPNVRENFNARKTFRTAYNAVRAFNTWKKLENKH

SEQ ID NO: 5001 - protein, 495 aa, Staphylococcus aureus subsp. aureus MSSA476
MAVNVRDYIAENYGLFINGEFVKGSSDETIEVTNPATGETLSHITRAKDKDVDHAVKVAQDAFESWSLTSKSERAQMLRDIGDKLMAQKDKIAMIETLNNGKPIRETTAIDIPFAARHFHYFASVIETEEGTVNDIDKDTMSIVRHEPIGVVGAVVAWNFPMLLAAWKIAPAIAAGNTIVIQPSSSTPLSLLEVAKIFQEVLPKGVVNILTGKGSESGNAIFNHDGVDKLSFTGSTDVGYQVAEAAAKHLVPATLELGGKSANIILDDANLDLAVEGIQLGILFNQGEVCSAGSRLLVHEKIYDQLVPRLQEAFSNIKVGDPQDEATQMGSQTGKDQLDKIQSYIDAAKESDAQILAGGHRLTENGLDKGFFFEPTLIAVPDNHHKLAQEEIFGPVLTVIKVKDDQEAIDIANDSEYGLAGGVFSQNITRALNIAKAVRTGRIWINTYNQVPEGAPFGGYKKSGIGRETYKGALSNYQQVKNIYIDTSNALKGLY

SEQ ID NO: 5002 - protein, 122 aa, Fusobacterium nucleatum subsp. vincentii ATCC 49256
MAFNKEQFIADLEAMTVLELKELVSALEEHFGVTAAAPVAVAAAGGATEAAEEKTEFDVVLKSAGGNKIAVIKEVRAITGLGLKEAKDLVDNGGVIKEAAPKDEANAIKEKLTAAGAEVEVK

SEQ ID NO: 5003 - protein, 224 aa, Oryza sativa (japonica cultivar-group)
MDVSAALSSDYSSGTPSPVAADADDGSSAYMTVSSAPPKRRAGRTKFKETRHPVFKGVRRRNPGRWVCEVREPHGKQRIWLGTFETAEMAARAHDVAALALRGRAACLNFADSPRRLRVPPIGASHDDIRRAAAEAAEAFRPPPDESNAATEVAAAASGATNSNAEQFASHPYYEVMDDGLDLGMQGYLDMAQGMLIDPPPMAGDPAVGSGEDDNDGEVQLWSY

SEQ ID NO: 5004 - protein, 285 aa, Lactobacillus johnsonii NCC 533
MKFNSVEDTYTLNNGVKIPIIGFGTWQTPDGDVAKHVVEAALNSGYRHIDTAAAYGNEESVGEGIKNSGINRHDLFITTKLWNADHGYKEAKAAIDKSLQNLGTDYLDLYLIHWPNPLALRDHWAEANAESWRAMEEAVKAGKIRAIGVSNFRKHHLEELLKTAEIKPAVNQIMLNPSDLQSDVVKVNEELGLLSEAYSPLGTGGLLGNEVVNEIANEVGKSPAQVLIRWSLEHGFLPLPKSVHDKYIAANIDVFDFELNDEQMSKLDSLHGVSDLATDPDTANF

SEQ ID NO: 5005 - protein, 411 aa, Streptococcus pyogenes
MNNKMFLNKEAGFLVHTKRKRRFAVTLVGVFFLLLACAGAIGFGQVAYAADEKTVPNFKSPDPDYPWYGYDSYRGIFARYHNLKVNLKGSKEYQAYCFNLTKYFPRPTYSTTNNFYKKIDGSGSAFKSYAANPRVLDENLDKLEKNILNVIYNGYKSNANGFMNGIEDLNAILVTQNAIWYYSDSAPLNDVNKMWEREVRNGEISESQVTLMREALKKLIDPNLEATAANKIPSGYRLNIFKSENEDYQNLLSAEYVPDDPPKPGDTSEHNPKTPELDGTPIPEDPKRPDESSEPALPPLMPELDGEEVPEVPSESLEPALPPLMPELDGEEVPEVPSESLEPALPPLMPELDGEEVPEVPSESLEPALPPLMPELDGEEVPEVPSESLEPALPPLMPELDGEEVPEKPSV

SEQ ID NO: 5006 - protein, 294 aa, Triticum aestivum
MSAPPPPASSDDDGKPADEEGVEIREVWANNLEAEFAVIRDVVDDYPYIAMDTEFPGIVCRPLGSFRSNDEYNYATLKANVDMLSLIQLGLTLSDENGALPARGTGGRPCAWQFNFRGFDPRSDPANADSIDLLRNSGIDFDRFTTEGADTGHFAELLMSSGVLLNAELQWVTFHSGYDFGYLLKLLTGRNLPDTMPGFFDLIRIYFPVLYDIKHLMKYCGSLHGGLSKLGELLGVQRVGICHQAGSDSLLTLQCFQKLKEAYFRGSTENYAGVLYGLISDGGENRPPAALLIE

SEQ ID NO: 5007 - protein, 207 aa, Shigella dysenteriae
QELDLYICLRPVRYYQGAPSPVKHPELTDMVIFRENSEDIYAGIEWKADSADAEKVIKFLREEMGVKKIRFPEHCGIGIKPCSEEGTKRLVRAAIEYAIANDRDSVTLVHKGNIMKFTEGAFKDWGYQLAREEFGGELIDGGPWLKVKNPNTGKEIVIKDVIADAFLQQILLRPAEYDVIACMNLNGDYISDALAAQVGGIGIAPGA

SEQ ID NO: 5008 - protein, 209 aa, Escherichia coli
YICLRPVRYYQGTPSPVKHPELTDMVIFRENSEDIYAGIEWKADSADAEKVIKFLREEMGVKKIRFPEHCGIGIKPCSEEGTKRLVRAAIEYAIANDRDSVTLVHKGNIMKFTEGAFKDWGYQLAREEFGGELIDGGPWLKVKNPNTGKEIVIKDVIADAFLQQILLRPAEYDVIACMNLNGDYISDALAAQVGGIGIAPGANIGDECA

SEQ ID NO: 5009 - protein, 219 aa, Escherichia coli
LDLYICLRPVRYYQGTPSPVKHPELTDMVIFRENSEDIYAGIEWKADSADAEKVIKFLREEMGVKKIRFPEHCGIGIKPCSEEGTKRLVRAAIEYAIANDRDSVTLVHKGNIMKFTEGAFKDWGYQLAREEFGGELIDGGPWLKVKNPNTGKEIVIKDVIADAFLQQILLRPAEYDVIACMNLNGDYISDALAAQVGGIGIAPGANIGDECALFEATHG

SEQ ID NO: 5010 - protein, 434 aa, Bacillus anthracis str. A2012
MFVVRPLGEIDISKNNLRRVDSLSTLREEALHMHKVHQGKLETVSKVKVENAKDLSLAYSPGVAEPCKEIYDDKSKVYEYTMKGNMVAVVTDGTAVLGLGNIGPEASLPVMEGKAVLFKSFAGVDAFPIALNTNDVDKIVETVKLMEPTFGGVNLEDIAAPNCFIIEERLKKETNIPIFHDDQHGTAIVTVAGLVNALKLVGKKMSDIKVVANGAGAAGIAIIKLLYRYGVRDIIMCDRKGAIYEGRPTGMNPVKDEVAKYTNKNRIEGSLADVVQGADVFIGVSAEGALTEEMVRTMNDDAIIFAMANPVPEIMPELAKAAGAAVVGTGRSDFANQVNNVLAFPGIFRGALDVHATQINEEMKMAAVQAIAELVAEDELNADYIIPAPFDARVAPQVAAYVAKAAMETGVARRQVDPNEVAEKTKQLALIGKE

SEQ ID NO: 5011 - protein, 294 aa, Listeria monocytogenes str. 4b F2365
MTKTLQDRMILPGNETIPYIGLGVFQVTEQEFIAGAVEKAIEVGYRLFDTAAVYNNEAIVGQAIASSAVSREELFISSKVWNGDLGFDETLFAFERTLRNLKLDYLDLYLIHWPVAGKYRDSWRAMERLHDEKLIKSIGVANFKQHHLSDLLVAANEKPVLNQVETHPLLPQNDLRKYLAEQNIAHAAWSPLAKGILMQNPVITEIAKKHQASVDQVILQWHLNRNTIIFPKSITSSRIEENSRLSYFQLDAIDMEKIDRLETGKRVGPDPDDLEYFLSSIERERAYLSGENAE

SEQ ID NO: 5012 - protein, 220 aa, Azoarcus sp. EbN1
MQNRMTMTRTDASVLSTNKVIRNTYMLLSLTLAFSALTAGLSMAMGAPRLGIIVTLAGYFGLLFATTKFRNSSLGIVFVFALTGFMGFTLGPIISSYLALPNGASIVMQAMAGTAAIFLGLSAYAVTSKKDFSFMGGFLMVGILVAFLAGLGAIFFEIPALSLTVSAAFVLLMSGLILYETSNIIHGGETNYIMATVSLFVSIFNLFTSLLHLLGFANSD

SEQ ID NO: 5013 - protein, 319 aa, Fragaria x ananassa
MAKVPSVTLSSCGDDIQTMPVIGMGTSSYPRADPETAKAAILEAIRAGYRHFDTAAAYGSEKDLGEAIAEALRLQLIKSRDELFITTKLWASFAEKDLVLPSIKASLSNLQVEYIDMYIIHWPFKLGKEVRTMPVERDLVQPLDIKSVWEAMEECKKLGLARGIGVSNFTSSMLEELLSFAEIPPAVNQLEMNPAWQLKKLRDFCKAKGIHVTAYSPLGAARTKWGDDRVLGSDIIEEIAQAKGKSTAQISLRWVYEQGVSIVTKSYNKERMRQNLDIFDFCLTEEELEKMSHLPQRKGVTFASILGPHDIVLEVDEEL

SEQ ID NO: 5014 - protein, 382 aa, Desulfovibrio desulfuricans G20
MRKTVYFIEGDGIGPEVWNAARPVIDKAVELAYGNGRSLEWKELLAGEKAYAETGTYLPQETLDTLAGAELAIKGPLGTPVGKGFRSLNVTMRQTLDLYACIRPIRYFEGIESPVKHPERVNMVVFRENTEDVYAGIEYKADTDEARKLIAFLRDELGANVDERCAVGIKPMSEKGSKRLVRRAMDFALAQGLPSVTLVHKGNIMKFTEGGFRQWGYELAHDEYAGRAVTEAQAAAGETGLVVKDRIADAMFQEVLIRPEQYSVVATSNLNGDYISDALAAQVGGLGLAPGVNMSDTLAFFEATHGTAPTIAGKDMANPGSLILCGGMLLEHLGWHEAATRIHTAMNTVIGNRTVTVDLASQMQGASTVGCRQFGELLGAAL

SEQ ID NO: 5015 - protein, 576 aa, Brassica napus
MAASFSVPSMIMEEEGRFEAEVAEVQTWWSSERFKLTRRPYTARDVVALRGHLKQGYASNEMAKKLWRTLKSHQANGTASRTFGALDPVQVTMMAKHLDTIYVSGWQCSSTHTSTNEPGPDLADYPYDTVPNKVEHLFFAQQYHDRKQREARMSMSREERAKTPFVDYLKPIIADGDTGFGGTTATVKLCKLFVERGAAGVHIEDQSSVTKKCGHMAGKVLVAVSEHINRLVAARLQFDVMGTETVLVARTDAVAATLIQSNIDSRDHQFILGVTNPSLRGKSLSSLLAEGMAVGNNGPALQAIEDQWLSSARLMTFSDAVVEALKRMNLSENEKSRRVNEWLNHARYENCLSNEQGRELAAKLGVTDLFWDWDLPRTREGFYRFQGSVTAAVVRGWAFAQIADLIWMETASPDLNECTQFAEGVKSKTPEVMLAYNLSPSFNWDASGMTDQQMMEFIPRIARLGYCWQFITLAGFHADALVVDTFAKDYARRGMLAYVERIQREERSNGVDTLAHQKWSGANYYDRYLKTVQGGISSTAAMGKGVTEEQFKETWTRPGAAGMGEGTSLVVAKSRM

SEQ ID NO: 5016 - protein, 113 aa, Brassica napus
  misc_feature (88)..(88): Xaa can be any naturally occurring amino acid
  misc_feature (101)..(101): Xaa can be any naturally occurring amino acid
MTANRSKSEKKDAEKQLRRYPYEVLGVLKNSTDQEIKSTYRKLSLKYHPDKTANDPVAADMFKEVTFSYNILSDPEKRCQYDTAGFEXAVEVEGQELEQWXLDLSSLGAVLPT

SEQ ID NO: 5017 - protein, 270 aa, Schizosaccharomyces pombe
MSTTSREDAVYLAKLAEQAERYEGMVENMKSVASTDQELTVEERNLLSVAYKNVIGARRASWRIVSSIEQKEESKGNTAQVELIKEYRQKIEQELDTICQDILTVLEKHLIPNAASAESKVFYYKMKGDYYRYLAEFAVGEKRQHSADQSLEGYKAASEIATAELAPTHPIRLGLALNFSVFYYEILNSPDRACYLAKQAFDEAISELDSLSEESYKDSTLIMQLLRDNLTLWTSDAEYSAAAAGGNTEGAQENAPSNAPEGEAEPKADA

SEQ ID NO: 5018 - protein, 483 aa, Pseudomonas aeruginosa PAO1
MQLKDAKLFRQQAYVDGAWVDADNGQTIKVNNPATGEIIGSVPKMGAAETRRAIEAADKALPAWRALTAKERANKLRRWFDLMIENQDDLARLMTIEQGKPLAEAKGEIAYAASFLEWFGEEAKRIYGDTIPGHQPDKRIIVIKQPIGVTAAITPWNFPSAMITRKAGPALAAGCTMVLKPASQTPYSALALAELAERAGIPKGVFSVVTGSAGEVGGELTSNPIVRKLTFTGSTEIGRQLMAECAQDIKKVSLELGGNAPFIVFDDADLDAAVEGALISKYRNNGQTCVCANRLYVQDGVYDAFVDKLKAAVAKLNIGNGLEAGVTTGPLIDAKAVAKVEEHIADAVSKGAKVVSGGKPHALGGTFFEPTILVDVPKNALVSKDETFGPLAPVFRFKDEAEVIAMSNDTEFGLASYFYARDLARVFRVAEQLEYGMVGINTGLISNEVAPFGGIKASGLGREGSKYGIEDYLEIKYLCLGGI

SEQ ID NO: 5019 - protein, 2229 aa, Gibberella zeae PH-1
MTTLLDALRQATQVDCDTLDANVQAIAFSEISRPLAGEPLLHHDALVKDAIEKARGALKEFQGSATFEEFVVQILTNPKLSYSTDGTMSDAHRIVNIFKALAPEFDTKRVCIKIPATWEGLQACRALEVEGIATLATTMFCMEQATLAADAQCTYIAPYVNELKVHFEAGYVDEHKAFDFCREAQTYYINHSCRTQVLAASLTSVDEVMQLAGIQHITISPNLLNGLASTKLSDWDGKLGDYFAQGPANKSWETRDYNALTKNESAWRMAFTRSGFGTSEGEFLFPVRARLMEKVTDISTSLAADVSDGWLQQTDPPEERVDLMIDPNSKRWTKVHRYFTKVLESDMAIEDVIRRSFTHHQYRMMAPTERTDVKEMQAANTKRYNALLAGRFKGIEDSLATRLTAMYFGLPAAPVDNPLEEIAMMLGLDEKEVPRYNFRPPLHFLTAHDRRNWGKETLKSEEATIDALPLPRAMEPTLSLRGGGDDDDLIGWTDDYTQEYETTALFTDGWTYLHGIYGRLPFVPRKWRSFSKVLRQLLQVKDYEYQDFSLLWYDRKLGKPKVIHDQLPLTKESPAMTFLDEHFADSTRSHKDCCALFIDNIHTDINKGPQHWEPIDGQLQSDTIKIGRSLGNAPNGPEDEVISYAYLAFPKTKVDTFKIGKYGSNQYNAHFCKTLNVLFGAPESSAHHHALFRLVDKKKNKTNWAVPIVYGAMGLPQWAWELLHPVNNPGADWMVECCWLNPGLEAVLLSNYYPKPNPYLITRNSRNGAERFNQAYRQICEMTTEAFDASVCRKIDSVFLIEGHKPKTAGELVIDGFQVRPRRDLKSWKLGIPGTPNDDTPRDLGKKLGESPNFYRTVHVNWRPGHCRLFPGWYSGGDFSVEMPRLSSTVVEFLEAMGELFKLVGPPNLNGTGPEDSCFLLTEAPSFDGLQVQDMDSPSYYIGVGATDDDWHDIRKSITSPFVSVSIVKKPKNTSWSTSISKHNLWGLRLDKEALRQNEMNGGGSRRDALQLYDLDGESVDILHGYPADPVPLEPIDPNNNVSVTTNGKPWTPTSRRRPDAFVPPRLLKIRSKSVGGAEGLHLPSTLVIGGASTPDGEPESDIGILATSRPKFRGFPPPPSEDEDDGDLAGGLAEDDHRRYSMYGDLLSDSGEEDGGGSRNKDADGDEAMEDTSLPSVPQADVIGGGEANDDDEDETPKLFGLQKIPEEKEPEDNPEDRPEQTVPPPSVTTSKPLFQASNTVGADDRAHTWATQPSIFTNEDQRAWPADAEIGLPITAAPVEKIHRLSGNVPMYSKAILTPTEQAELQHGFGDLRNILLKRTNMCPFQGCRFTWRLDQNEELNIHVFTAHAKRKCPFCDDALFGWWDKNQQIKHLGDKHPDEVKKMKVHGVQKGNISVPVTVNAPANLIGEAFAEEIRSWGPQYKLKAPPRLLTYPLLAWYDNFGTTAVKDPPKKCPIPSCSVPHLEHLSSHGVWTHFKNYHTDLEMDACPFCNLSFYVYGEKDKDGVRTVIPRSIDECIMHLDCHVYQLWDLLEPVVDQPTKVNMPSQGNKDFQTISAEKLESMRAEVVSKTVAAALARTGAATQSVADQSPPPQVSYGHVTDASQILRKCVYFEKCGAYVGSMTEKQYRRHVRVNHPKEISTLSSSSEDETDGEDQASTDDGSEDRGDDKPNDGDDGRDGAGKTAALKFGRLKPTSKPAQASTPSKPKEKAVLGKPPSPPDPDEMDISTDDNVVETESSRSEESAVMISEKTPTTKITTPQTPPPDGDSDTNEESGSSVSRGRRSVKALKSKRKAPTKRAEPDVDEDNTEDNGEKEIDDFDEDGEADGSGSKSSHTEGRGRSAKKAGKRRPRGDDDGDYEDEGDQDDDDFVMAGNNGRRYRRRAPSPDWIKVLGPEDPNFDPEDKMYCSKCLRKAPLRRAKSPNRSPIGRAGEIEAHTDKTKCCRIRNGLGSATGLPNRSGWIPANKLPGTLTSLKEDFLNRYPSYMRTMYPTSSRDHHASVWRSDPNNPENDAWFDVPWPPYEGLPPFPGDWIAPGLPWDDTPEGRQRRAMYIGNRVVDENYQYQSETDSDDDLKPDVNDIPDFQADLNPLKRPAEDEEETSDEPAPKKAKKSKTAATKTPKATGTKKTPAPKKAAAPSKTPAKTRSKAPSKAASKAPSKTPSKAASKTPSKAPSKTPSKAPSKAPSKASSKGPSKTPSRASSRKTTPSKTPSTPSTRPPSEAGDE

SEQ ID NO: 5020 - protein, 500 aa, Saccharomyces cerevisiae
MTKLHFDTAEPVKITLPNGLTYEQPTGLFINNKFMKAQDGKTYPVEDPSTENTVCEVSSATTEDVEYAIECADRAFHDTEWATQDPRERGRLLSKLADELESQIDLVSSIEALDNGKTLALARGDVTIAINCLRDAAAYADKVNGRTINTGDGYMNFTTLEPIGVCGQIIPWNFPIMMLAWKIAPALAMGNVCILKPAAVTPLNALYFASLCKKVGIPAGVVNIVPGPGRTVGAALTNDPRIRKLAFTGSTEVGKSVAVDSSESNLKKITLELGGKSAHLVFDDANIKKTLPNLVNGIFKNAGQICSSGSRIYVQEGIYDELLAAFKAYLETEIKVGNPFDKANFQGAITNRQQFDTIMNYIDIGKKEGAKILTGGEKVGDKGYFIRPTVFYDVNEDMRIVKEEIFGPVVTVAKFKTLEEGVEMANSSEFGLGSGIETESLSTGLKVAKMLKAGTVWINTYNDFDSRVPFGGVKQSGYGREMGEEVYHAYTEVKAVRIKL

SEQ ID NO: 5021 - protein, 323 aa, Triticum aestivum
MSSALDQLKATGTTVVSDSGDFASIGKYKPQDATTNPSLILAASKKEEYAKLIDVAIDYAKQKGGSVDQQVDDALDRLLVEFGKEILKIIPGKVSTEVDARYSFDTEASVNKALHLIELYGEQGISKDRILIKIAATWEGIKAAEILQRDHGINTNLTLMFSLVQAIGAAEAGAYLISPFVGRILDWFKASTKKEYTKEEDPGVLSVKQIFNYYKKFGYNTIVMGASFRNTGEITELAGCDYLTISPNLLEDLLNSSDSVPKKLDASQASSLDIEKKSYIKDEALFRFDFNEDQMAVEKLREGISKFAPVAVTLKGILKEKLS

SEQ ID NO: 5022 - protein, 481 aa, Nostoc punctiforme PCC 73102
MSDLILFWHRRDLRISDNTGLAAAKRRSPKVVGVFCLDPHILERDDVAPVRVTYMIGCLQKLQERYAQVGSQLLILHADPVQAIPALAEAINAKAVFWNWDVEPYSQERDRTIINALKEKGIEFLNQNWDQILNSPDEIRTGGNSPYTVYTPFWKNWITKPKANPVETLQNVEGLTEAEQEIAKLSGSLTLPSAKDLGFIWDEQLIISPGEAAAQERLEEFTNKAITEYQEQRNFPAVDGTSQLSAALKFGVIGIRTVWQATIEALENSRSEETAVNIRTWQQELAWREFYQHAMYNFPELADGAFRDTFKNFPWETNEEHFQAWCEGRTGYPIVDAAMRQMNESGWMHNRCRMIVASFLTKDLLINPQLGEKYFMKHLIDGDLSANNGGWQWSASSGMDPKPVRIFNPASQTQKFDPEGEYIRQWVSELRSVDTEYLVTGKIPPLERHAVGYPDPIVDHKIQQNQFKLRYQQQKNTSGGE

SEQ ID NO: 5023 - protein, 404 aa, Magnaporthe grisea 70-15
MVLNKVDLLPTSVVASWIRVLSKEYPTAAFRSSITNPFGKGSLLGLLRQFSGLLSNRKQVSVGIIGYPNTGKSSLINALRGKKVATVAPIPGETKVWQYITLTKRMYLIDCPGIVPPSNDASPQDLLLRGAVRTEKVENPEQYIPAVLAKTKLRHMERTYDLSGWKDHIHFLELLARKGGRLLKAGEPDVDGVARMVLNDFLRGKIPWFTPPPALEGDAEGVDGREGRLGEMPLKRKRDDAESVADTSMGAPSPTSDDSEDDEVSGDDEFEGFGSDSAPDATPSESEKASVAEQYIQLEASSEDDSDDDAAEDGGVAITGVGGGDDDAEPPKSLSSRNSKPSRQQRKGLHKLVKARVVSTVTFAVPLSDEGMFWPSNPMENPSSGSAIIIHSCGSLLNNAEKGT

SEQ ID NO: 5024 - protein, 359 aa, Fragaria x ananassa
MAIEQEHRKKASGWAARDSSGVLSPFNFYRRETGEKDVTFKVLYCGICHSDLHMVKNEWGFSTYPLVPGHEIVGEVTEVGSKVQKFKVGDRVGVGCIVGSCRSCENCTDHLENYCPKQILTYGAKYYDGSTTYGGYSDIMVADEHFIVRIPDNLPLDGAAPLLCAGITTYSPLRYFGLDKPGMHVGVVGLGGLGHVAVKFAKAMGVKVTVISTSPKKEEEALKHLGADSFLVSRDQDQMQAAIGTMDGIIDTVSAQHPLLPLIGLLNSHGKLVMVGAPEKPLELPVFPLLMGRKMVAGSGIGGMKETQEMIDFAARHNITADIEVIPIDYLNTAMERLVKADVRYRFVIDIGNTLKVRS

SEQ ID NO: 5025 - protein, 327 aa, Chlamydomonas reinhardtii
MQSARVSRTARHTRPSCRPQRAVAVRVSAKVNVEQLKALKAELYNYINSRGCNPISVRLGWHDSGTYDKNIAEFPARGGANGSIRFKPEIDHGANKGLAIALAILNPIKKKYPDVSYADLFQMASATAIEASGGPKIPMRYGRKDAKGPEECSPDGRLPGAAHPFADGSGSPAEHLRRVFYRMGLNDQDIVVLSGGHTLGRARPERSGFGAEKTKYTDVGPGTSTASPSGATDRPVTPKPVGQQGTSWTVNWLEFDNSYFKEIKAKRDSDLLVLPTDACIFEDDQFRPYAEKYAADQAAFFADYCVSHQKLSELGVEWEEGAPVTLD

SEQ ID NO: 5026 - protein, 109 aa, Zea mays
YVTTGVEGSIPVLIKSVSSPMVASARHFQGNWIDTAEEIDDLFLGDAEVWRRPSFGTAGPLGGDHPLVTKEGHHVLDVIFTTPIQDLGQVAEKLDKVDGVVDHGIICSN

SEQ ID NO: 5027 - protein, 581 aa, Glycine max
MCGILAVLGCSDDSRAKRVRVLELSRRLKHRGPDWSGLHQHGDCFLAHQRLAIVDPASGDQPLFNEDKSVIVTVNGEIYNHEELRKQLPNHNFRTGSDCDVIAHLYEEHGEDFVDMLDGIFSFVLLDTRDNSFIVARDAIGVTSLYIGWGLDGSVWISSEMKGLNDDCEHFECFPPGHLYSSKERGFRRWYNPPWFSEAIPSAPYDPLVLRHAFEQAVIKRLMTDVPFGVLLSGGLDSSLVASITSRYLANTKAAEQWGSKLHSFCVGLEGSPDLKAAKEVADYLGTVHHEFTFTVQDGIDAIEDVIYHIETYDVTTIRASTPMFLMSRKIKSLGVKWVISGEGSDEIFGGYLYFHKAPNKEEFHRETCRKIKALHQYDCLRANKSTFAWGLEARVPFLDKAFINAAMSIDPEWKMIKRDEGRIEKWILRRAFDDEEHPYLPKHILYRQKEQFSDGVGYSWIDGLKAHAAKHVTEKMMLNAGNIYPHNTPKTKEAYYYRMIFERFFPQNSARLTVPGGASVACSTAKAVEWDAAWSNNLDPSGRAALGVHISAYENQNNKGVEIEKIIPMDAAPLGVAIQG

SEQ ID NO: 5028 - protein, 323 aa, Pirellula sp. 1
MTLHPQAQTFVALLRELQPPRWEDLGVAKARRGFSALVDNFGAGPAMASVEDQVVEEQNCDGQVSRIPVRIYRPDDVSELAPVVMFFHGGGWVLGDVESHDTTCRRLAAASRAAVVSVEYRRSPESPFPGPVHDCFVATKAVAKNGISWGLDASRLAVMGDSAGGNLAAAVALLAKDDPDVAVKYAVLVYPVVSPAFDSESYREFESGFGLTKRTMQWFWGNYFGRAGEDFFGVDRVSDADPLADLMKADFSDFPPAHVLVAGYDVLRDEGLALADKIEASGGDVTRENASDMLHGFIHFAGQFETGVTAMQSLGNRIANQLS

SEQ ID NO: 5029 - protein, 110 aa, Zea mays
AVDKAQPNPRLCFLLRAALHLHWLLLVTSKNNKALQMSVQDANMSSDTDMSKVFEDRTFVSSILNSFPGVDPNDPSVKDLLASLHSQKEEEKKEDKSDKTEDEKNCFKLE

SEQ ID NO: 5030 - protein, 145 aa, Glycine max
VAEKYPEITYEEVIIDNCCMTLVKNPGTFDVLVMPNLYGDIISDLCAGLIGGLGLTPSCNIGEGGICLAEAVHGSAPDISGKNLANPTALMLSAVMMLRHLQFNDQADRIHNAILQTIAEGKYRTADLGGKSSTSDYTKAVCDHI

SEQ ID NO: 5031 - protein, 176 aa, Triticum aestivum
  misc_feature (164)..(164): Xaa can be any naturally occurring amino acid
MAPTVMASSATSVVPYQGLKSTAGLPVSRRSNGASLGSVSNGGRIRCMQVWPIEGIKKLETLSYLPPLSTEALLKQVEYLIRSKWVPCLEFSKVGFIFREHNTSPGYYDGRYWTMWKLPMYGCTDSTQVINEVEEVMKEYPDAYVRIIGFDNMRQVQCVSFIAXFKPPGCEESGKA

SEQ ID NO: 5032 - protein, 213 aa, Escherichia coli
YICLRPVRYYQGTPSPVKHPELTDMVIFRENSEDIYAGIEWKADSADAEKVIKFLREEMGVKKIRFPEHCGIGIKPCSEEGTKRLVRAAIEYAIANDRDSVTLVHKGNIMKFTEGAFKYWGYQLAREEFGGELIDGGPWLKVKKPNTGKEIVIKDVIADAFLQQILLRPAEYDVIACMNLNGDYISDALAAQVGGIGIAPGANIGDECALFEA

SEQ ID NO: 5033 - protein, 493 aa, Streptococcus pyogenes
MNNKMFLNKEAGFLAHTKRKRRFAVTLVGVFFMLLVCAGAIGFGQVAYAADEKTVPNRINSNPEFPWYGYDSYSGRLLRYHNLKVNLNGSKEYQAYCFNLKRFEPKKEESSSPNWYKKLDGSTETFKKYAENPRFSGEELRRHILKVLYNGYPNSNEIMKGIDPLNAILVTQNAIWYYSDSAPINDINNFFTSEANDLNIPPQQLTLMREALRKLISSDENLVKQVPSNFKLSIFESSDKSYQNLLSAEYVPDDPPKPGDTSEHNPKTPELDGTPIPEDPKRPDESSEPALPPLMPELDGEEVPEVPSESLEPALPPLMPELDGEEVPEVPSESLEPALPPLMPELDGEEVPEVPNESLEPALPPLMPELDGQEVPEVPSESLEPALPPLMPELDGEEIPEVPSESLEPALPPLMPELDGQEVPEKPSVDLPIEVPRYEFNNKDQSPLAGESGETEYITEVYGNQQNPVDIDKKLPNETGFSGNMVETEDTKE

SEQ ID NO: 5034 - protein, 207 aa, Escherichia coli
DLYICLRPVRYYQGTPSPVKHPELTDMVIFRENSEDIYAGIEWKADSADAEKVIKFLREEMGVKKIRFPEHCGIGIKPCSEEGTKRLVRAAIEYAIANDRDSVTLVHKGNIMKFTEGAFKDWGYQLAREEFGGELIDGGPWLKVKNPNTGKEIVIKDVIADAFLQQILLRPAEYDVIACMNLNGDYISDALAAQVGGIGIAPGANIG

SEQ ID NO: 5035 - protein, 390 aa, Streptococcus pyogenes
YAADEKTVPNRINSNPEFPWYGYDSYSGRLLRYHNLKVNLNGSKEYQAYCFNLKRFEPKKEESSSPNWYKKLDGSTETFKKYAENPRFSGEELRRHILKVLYNGYPNSNEIMKGIDPLNAILVTQNAIWYYSDSAPINDINNFFTSEANDLNIPPQQLTLMREALRKLISSDENLVKQVPSNFKLSIFESSDKSYQNLLSAEYVPDDPPKPGDTSEHNPKTPELDGTPIPEDPKRPDESSEPALPPLMPELDGEEVPEVPSESLEPALPPLMPELDGEEVPEVPSESLEPALPPLMPELDGEEVPEVPNESLEPALPPLMPELDGQEVPEVPSESLEPALPPLMPELDGEEIPEVPSESLEPALPPLMPELDGQEVPEKPSVDLPIEVPR

SEQ ID NO: 5036 - protein, 319 aa, Candida albicans SC5314
MSNLTSSIQLTRQSTYKLNNGSHIPVIGFGTYLLDASQAADLTYQALKDGYRHIDTALAYHNEKEVSQGIKRFLKDHPEVQRSDIWFTTKIDTQSLGYEETKKAVERIKNDVKDNIEYVDLILIHSPLASKARRLGTYQYLQELVLNPNDAPLIVKSIGVSNYGVDHLEELFNWEGYLIKPVLNQLELHPWLPRLELREYLYKHEILAEAYSPLTQGYKLDDPELLAISKESGLTPAEILLKWSFLQGFIVLVKSDKPTRIQQNLDILPQGKKDDDELQEGVNLGVVSLNPDIIEKLNKPESHVVLTWGGKDPTLFKDA

SEQ ID NO: 5037 - protein, 144 aa, Triticum aestivum
  misc_feature (90)..(90): Xaa can be any naturally occurring amino acid
  misc_feature (114)..(114): Xaa can be any naturally occurring amino acid
  misc_feature (127)..(127): Xaa can be any naturally occurring amino acid
MAPTVMASSATSVAPFQGLKSTAGLPVSRRSNGASLGSVSNGGRIRCMQVWPIEGIKKFETLSYLPPLSTEALLKQVDYLIRSKWVPCLXVQQVGFIFREHNASPGYYEGRYWXMWKLPKFGVTDAXQVINKVEEARRIPDRFR

SEQ ID NO: 5038 - protein, 201 aa, Glycine max
  misc_feature (49)..(49): Xaa can be any naturally occurring amino acid
ILEANKKCDVTVYTKIFLKFPYQFWPSDPGNEFFIYAHDQRGYYTFWQXMENAYPGSDILVVTLTNGESKRVEAQSDEDTLREAMEVLKDMFGPNIPDATDILVPRWWNNRFQRGSYSNYPVISNLQVVRDVKAPVGRIFFTGEHTSERFSGYVHGAYLAGINSSKELLEEMRKDNKRKNKSQSRVLEPLSALTECNIPRQ

SEQ ID NO: 5039 - protein, 458 aa, Pseudomonas fluorescens
MTTTSSSLADKDMRHQLHPYTNARAHEELGPLVIDRGDGVFVIDENGKPYIEAMAGLWSAALGFSNKRLVAAAEKQMSTLPFYHLFGHKAHAPSIELAEKLINMAPVPMSKVFFTNSGSEANDTVIKLVWYLNNAQGKPARKKIISRIGGYHGITLASASLTGLLANQRGFDVPLPGFLHVGCPHHYRHALPHETEEQFADRLAAELDALIVKEGPETIAAFVGEPLMGPGGVIVPPRTYWEKIQRVCRKHDILVVADEVICGFGRTGKDVRQPDFGIEPDIMILSKQLSSSYQPISAILINDRVYQGIADQTKSFGALGHGFTGGGHPVAAAVRLENLKIIDEENLVVHAAHMGELLRRGLQGFSDHPLVGEVRGAGLIAAVELVADRATKAPLDAPGTLGRFLAGRAQEHGMITRNLGDAIAFCPPLIINEDEDEVQSIVDRFGMALDDTSKWVNG

SEQ ID NO: 5040 - protein, 218 aa, Escherichia coli
ELDLYICLRPVRYYQGTPSPVKHPELTDMVIFRENSEDIYAGIEWKADSADAEKVIKFLREEMGVKKIRFPEHCGIGIKPCSEEGTKRLVRAAIEYAIANDRDSVTLVHKGNIMKFTEGAFKDWGYQLAREEFGGELIDGGPWLKVKNPNTGKEIVIKDVIADAFLQQILLRPAEYDVIACMNLNGDYISDALAAQVGGIGIAPGANIGDECALFEAT

SEQ ID NO: 5041 - protein, 135 aa, Brassica napus
  misc_feature (127)..(127): Xaa can be any naturally occurring amino acid
NIIAGSLTYYTRKHLPGLKRRRGGPEASGRFSSSGNVLSEEEQKHLLEEIQDLLSMQKGLVPTKVFVDMLRVAKILKASPTCIANLEKRIGMQLDQAGVEDLVMPSFTHTMETLYDVDSVQRIFDHXLGTDQIMT

SEQ ID NO: 5042 - protein, 332 aa, Gibberella zeae PH-1
MSNQPPYPLHESVVGRIDPEYAAFYNKHIIDKQQVHLQPIEASRASGVLIPGSGPLQPVASTVDYKVERRESQGPDVSVRCFTPNGEKPEAGWPVCIYYHGGGWVLGTIETENVIASHLCARGKCVVVSVDYRLAPENPFPAAVHDSWEAVLWVIGEGKDILGLDTSKLATGGSSAGANLAAVMCQRAADLGSPQFSLQLLSVPVMDNTADISNNESWKENQNSPALPAPKMLWYRNHYLPNKEDWSHPEASPLFWKGDFSKLPPACFVVGELDVLRTEGEQFAKKLVDAGVKAEVNMMKGQPHPFIAMDAVLEAGSRAITLFCDALYKTIK

SEQ ID NO: 5043 - protein, 297 aa, Candida albicans SC5314
MAQELTHPAIKDGWFAEISDTMWPGQAMSLKVEKVLHVEKSKYQDVLVFKSTTYGNVLVLDNCIQVTERDEFSYQEMITHLALNSHPNPKKALVIGGGDGGVLREILKHESIEEAWLCDIDETVIEVSKKYLPNMAKSYDDPRTRVHIGDGFKFLEEYKNQFDVIITDSSDPEGPAESLFQKPYFQLLKDALTEKGVITTQAENMWIHMDIISKLKKDCNEIFPVAEYAYTMIPTYPSGSIGFMVCSKDPNANVSKPIRFDWSDEFVAKNLKYYNKKIHEAAFVLPTWADQVLNKKD

SEQ ID NO: 5044 - protein, 324 aa, Glycine max
TRLIDCVSFCHNKGVFHRDLKLENVLVDAKGNIKITDFNLSALPQHFREDGLLHTTCGSPNYVAPEILANKGYDGATSDIWSCGVILYVILTGYLPFDDRNLAVLYQKIFKGEVQIPRWLSPGSQNIIKRMLDANPKTRITMAMIKEFGSSKEGYTPANPEDEEESVYIDDEDFSIHDVSHEADQGCPRSPTLINAFQLISMSSSLDLSGLFEQEDVSERKIRFTSIHSPKDLVERIEDIVTEMGFRVQKKNGMLKVIQEIKVQKCPGSFSVEAEVFEISPSLYVVELSKSCGDASLYRQLCKKLSNDLGVHTRQQLGSSEVMA

SEQ ID NO: 5045 - protein, 413 aa, Dechloromonas aromatica RCB
MTSHIKVPQGGSKIVPGQAIPDNPIIPFIEGDGIGIDITPVMIKVIDAAVEKAYGGKKKIHWMEVYAGEKSTRLYGSDEWLPKETFDALKEYSVSIKGPMTTPVGGGIRSLNVALRQELDLYQCVRPVRYFKGVPSPLKHPELTNMVIFRENTEDIYAGIEWACGSEGVKKVVKFLQEEMGVKKIRFPETSGIGIKPISIEGTSRLVRAAIKYAIDNDRKSVTIVHKGNIMKFTEGLFRDACYKLAQDEFGAELIDGGPWCRIKNPKNGREIIIKDSIADAFLQQILLRPAEYDVIATTNLNGDYISDALAAQVGGIGIAPGANISDRYACFEATHGTAPKYAGLDKVNPGSLILSAEMMLRHLGWGDAANLVLKAMEAAIGDKQVTYDFARQMEGANELSCSEFGDAMIARM

SEQ ID NO: 5046 - protein, 387 aa, Ustilago maydis 521
MPGKVAPNNSLATEPAERNVSFVLQEIEKVSFEERPIVAPKPGQVQVNIRQTGLCASDCHYLHHGRIGDFVVRKPMVLGHESSGIVTAVGEGVTTHKVGDRVALEPGVPCRSCQVCLNGMYNQCAHLEFAATPPYDGTLCTYYNIQSSFAHHVPDHMSLEEASLMEPLSVAVYSAGMRGQVKAMENVLVFGAGPIGLLNAAVCKAYSAKRVVVVDVVESKLEFAKEWCATSTFKPSLPQEGETKAETAARNAQHLISSLGDDVAAREGFDLVLECTGAEPCINMGIQALRPQGRFVQVGMGRSEVEFPITRVCVKEINVTGSFRYGAGTYKTSINLVSTGAIDVTKMVTHRFLFKDAVKAFETTTKGVGEDGKTAIKVQISQGEGKQ

SEQ ID NO: 5047 - protein, 165 aa, Pseudomonas putida KT2440
MAPGQAPCRFRQIGRLSANRQFSIRPRACFSLESWRRVTALCLHGSQQFVTWASSRDLLQPVRRLLLPATQPSNLSLTKKCESNCHQNLSFIGNKTMAERQKGTVKWFNDEKGYGFITPESGPDLFVHFRAIEGNGFKSLKEGQQVTFEAVQGQKGMQADKVQPV

SEQ ID NO: 5048 - protein, 343 aa, Triticum aestivum
  misc_feature (142)..(142): Xaa can be any naturally occurring amino acid
  misc_feature (156)..(156): Xaa can be any naturally occurring amino acid
  misc_feature (174)..(174): Xaa can be any naturally occurring amino acid
  misc_feature (271)..(271): Xaa can be any naturally occurring amino acid
MASGIASMSSSLAVLLLGVLLLSRGGVGNAARHLAEAEYPPVPPNVPAPLPKPDVPPPLPAPEVLPKPGLPVLPPPLAKPNVTTYPAAAEVLPKPGLPPLPTPEEQPKPELAPLPAPDVLPAPPLPAPDVLPKPELPTPDEXPRPELPPLPKPERXPPTVPEVPKPDVEPKSGXPPVPKGELPPKTVPPPLPTGEIPPKPVPPPFPTGELPPKPEPELLPKTDEPPKPELPPLPTDDLPSRPDVELPPKPELPPLPTDDLPSKPAQPPRRXPPKPNHPPPPPPTPPRKGDYPLEPYVQLSEPPCMPNIRASFPAPPLAGVPGPSMARVPASPRIRDLFVLRTC

SEQ ID NO: 5049 - protein, 128 aa, Triticum aestivum
MGARGHWTWTEGVEKRICALQTHRPKVGRIEAMASRLLAAASSSSSSSSPLARLISSRRMAGAADHHGSTKVNMWQEPLNPGNWKEEHFVLTSLAMWGAIIYGGLKVFGGKKEVKTEAGSAPAAAPAH

SEQ ID NO: 5050 - protein, 473 aa, Zea mays
  misc_feature (427)..(427): Xaa can be any naturally occurring amino acid
MDERRTILMDRYEIGRQLGQGNFAKVYFARNLTDGQSVAIKMIDKDKITRVGLIVQIKREISIMRLVKHPNVLQLFEVMASKSKIYFVLEYAKGGELFNKVSKAKLSEDAARRYFHQLVNAVDYCHSRGVYHRDLKPENLLLDENENLRVSDFGLSALSESRRHDGLLHTTCGTPAYVAPEVLGRRGYDGTKADIWSCGVILFVLVAGYLPFHDPNLIEMYRKISRAEYRCPRSFSGELKDLLFRMLDPDPSTRISISRIKRSTWYRKPIEANAAKIKHGTARDTTVRDGEAATASSSIECSNRAEEDQGSSSLPNLNAFDIISLSTGFDLSNLFEERHGRREERFTTRQPVGAVFGRLKELAEAVEAEKFQKEREAGSLNLACAEGKGLKGVPWKLDAEVFELAPSFLLVELKKASRDTIEYQRLXVREEVRPALKDMVWAWQSDRHQQQQQREQSVQGEQQQPLSSLPPQQ

SEQ ID NO: 5051 - protein, 313 aa, Brassica napus
  misc_feature (82)..(82): Xaa can be any naturally occurring amino acid
GVLPYTTKNVEDDYFLGQILGQGQFGTTFLCTHKKTAQKLACKSIPKRKLLCQEDYDDVLREIQIMHHLSEFPNVVRIRTRXEDTSSVHIVMELCEGGELFDRIVKRGHYSEREAAKLIKTIVGVVEACHSLGVMHRDLKPENFLFASCDEDASLKSTDFGLSVFCKPGATFSELVGSAYYVAPEVLHKHYSRECDVWSAGVILYILLCGFPPFWDESEFGIFRKILQGKIDFETRPWPSISESAKDLIVKMLEKDPKKRLTAHQVLCHPWIGDDKGAPDKPLDCAVLSRLKNFSAMDKLKKMAFRVIAERLS

SEQ ID NO: 5052 - protein, 2100 aa, Zea mays
  misc_feature (1712)..(1712): Xaa can be any naturally occurring amino acid
  misc_feature (1721)..(1721): Xaa can be any naturally occurring amino acid
  misc_feature (2059)..(2059): Xaa can be any naturally occurring amino acid
  misc_feature (2068)..(2068): Xaa can be any naturally occurring amino acid
MTRVIHDSGDDMQKEALDLVSSDVNFPKGHFPDYRIGPNNQIIDPEETHEAVPLKEIVAKETAQLLEQHKRLSVRDLKEKFEKGLSGASKLSEEAKRREAASLDRQVLLKKLRDVLDTLKGRVAGRNRDDAEEAISLVEALAVQLTQREGELIYEKAEVKKLANFLKQATEDARKVAEEERALALAEIEKARAAIEKVEKAWRVHDFASSSREKAEIEELRKEVREARRIKMLHQPSKVMDMEFELQALRTLISEKTQLCNQLKKELAMIKRLEDDSSGLFELEGSNTLGSQLCIIPRVDGASNITNCPIQWYRVISGGTRELISGATKFMYAPEPFDVGRLLQAEIVLNADKIIVQTDGPVDNVLSEPTLAVSRAVMWGRTYMRARDARRAEARAFKVGANSNSPKEGSSKESGNSSTKEAMGDSNDFKAFAEALKSLQACVVANAQAIASLTADRTSASGHKIGYDEHHGDRPPRFQKLDFPRYDGKTDPLIFINRCESYFHQQRIMEEEKVWMASYNLEHGAHMWYIQVQTDEGTPSWRRFKELLNLRYDPPLRAAPLFELADCRRTGSVADYRDLFQALLPRAGPLDEAQWVQLFTGGLRPPLSLDVQRYTRGHNRVCTRIFYINDVELDTADESATGDDHDTETPMFSLDAVAGVFVGNTVQLQVVVGAATFVALIDTGSTHIFIGEAAARRSGLTIEPRPRLTTTVANGERVACPGVLRQAPVDMGSMVFGVDLFVMPLAGSRTGRGASASTPRALNALTVKDAFPIPIVDELLDELHGARLFTKLDLRSGYHQVQMRQEDVHKTAFCTHDGLYEFLVMPFGLCNAPATFQALMNDVLRTYLRRFVLVFFDDILIYNTSWADHLRHLRVVLNTLRQHRLFVKRSKCSFGVDFVAYLGHVISAAGVAMDPAKVQAIHDWPQPRSARAVRGFLGLAGYYRKFVHNYGAIAAPLTTLLKKEGFVWPDEATAAFSALKGAVTTTPVLTLPDFTKSFVVECDASTYGFRVVLIQEAHPIAFFNRPVAPRHRSLAAYERELIGLVLAVRHWWSYLWGRRFIVKTDHYNLKYLLDQRLATISQHHWVGKLLGFDFSVEYKSGATNTDFVRACPTCQRYKSEHLHPAGLLTPLPIPTVVWADIGLNFIEALPRVNVKSVILSVVDRFSKYCHFIALGHPYTAESSDGQTEAANRVIIMYLRCFTGDRTRQWLRWLPWAEYVYNTAYQSSLRETPFRVVYGRDPPSIRSYEPGETRVDAVARDMEEREAFLADVRHRPEQAHAVQKRHYDKQHRPVTYAVGDWALLRLRQRAPSSLPQQTMGKLKPRFLGPYRVIELINNVVVRLELPPHARIHDVFHVGTLKFVLVQWRGEPTTSATWEDLDKFRATYPDFQLEDELDLEGGRDVMWGRTYMRARNARRAEARAFKVGANSSSPKEGSSKESGSSSTKEVSSKEESGSSSTKEAAGLERYVDSLMKRTDIEFNVVVTQMNGKDYSSNSVHVFHIGKLRIKLRKGWSTKARESYSTTMKLCGSRGGGNAAARAVFWHPRKGSSYTLAFETDRDRNAAIMIARKFASNCNHFDSLCHFDTPNGWDLHKDMVVKYKRGCFGSGSAVAAHAGGEEESRAARLQSFFASVLSGLFGQAEAEDEDEDEEMPTRNHNAAAAAAPQHHHHNRGGAPALGKSKAVPGRADAMNRRAPLGDIGNLVSVRPAEGXLSCRSRSIXPITRSFGAQLVKNVQANAAIKNAAILPARHAPRQERKAPAKQPPPEDVIVLSSDSEQSRTQLESSASSVRSRKKVINTLSSVLSARSKAACGITDKRRQVAVIEDIDKLDVNNELAVVEYIEDIYTFYKIAQHDRRPCDYIDTQVEINPKMRAILAGWIIEVHHKFELMPETLYLTMYIIDQYLSLQPVLRRELQLVGVSAMLIACKYEEIWAPEVNDFILISDSAYSREQILSMEKGILNSLEWNLTVPTVYMFLVRFLKAAALGNKVEKEMENMVFFFAELALMQYGLVTRLPSLVAASVVYAARLTLKRAPLWTDTLKHHTGFRESETELIECTXCWSAHTRPXADSKLRSVYKKYSSEQFGGVALRPPAAAVEIK

SEQ ID NO: 5053 - protein, 388 aa, Burkholderia sacchari
MSETDNTTQAAGAIKPKKSVALSGVCAGNTALCTVGRTGNDLHYRGYDILDLATACEFEEVAYLLVHGKLPNIAELAAYKTKLKALRGLPANVKAALEWVPASAHPMDVMRTGVSVLGTVLPEKDDHNLPGARDIADRLMASLGSMLLYWYHNSHNGKRIEVETDDDSIGGHFLHLLHGREPSKSWVDAMHVSLNLYAEHEFNASTFTGRVIAGTGSDMYSAITGAIGALRGPKHGGANEVAFEIQSRYDTPDQAESDIRRRVEAKAVVIGFGHPVYTISDPRNKVIKEVAKKLSKEQSNLKLFDIAERLESTMWEIKKMFPNLDWFSAVSYHMMGVPTAMFTPLFVISRTAGWSAHIIEQRIDNKIIRPSANYTGPENLKFTLIGKR

SEQ ID NO: 5054 - protein, 483 aa, Rickettsia prowazekii str. Madrid E
MAAFTPITIAYGDGIGPEIMEAVLYILRKAEARISLETIEVGEKLYKKHYTSGISEESWDVIQRTGIILKAPITTPQSGGYKSLNVTIRKTLQLFANIRPVVSFYPFTRTLHPNLNLTIIRENEEDLYSGVEYRQTHNMYESMKLISHTGCKKIIRYAFEYAIKNNRKKVTCLTKDNIMKFSDGIFHRVFNEIAKEYPQINNEHYIIDIGTAKLATKPEIFDIIVTSNLYGDIISDVAAEISGSVGLAGSANIGQHYAMFEAVHGSAPDIAGKGIANPSGLLNAAIMMLVHIGQGDIASLIENAWKKTIEDGVHTFDIYNEHSSSKKVCTKEFAVEVIKRLGQLPITLPKAAYPLIVKKQESNIDYKIDTREVKKLVGTDIFINMHVFSAHDIADKINKLDIGNFELKTISSKGLKLWPHDSRFEIISDHWCCRFMNKDGTEIKHLDITMLLQSLSKANIDFIKVENLFEFDGVAWYSLAQGE

SEQ ID NO: 5055 - protein, 176 aa, Zea mays
MAAASSATSVHDFTVKDSSGKDVDLSVYRGKVLLIVNVASQCGLTNSNYTQQAQLYEKYKNQGLFLIHCSCFEILAFPCNQFGGQEPGTNEEIAQFACTRFKADYPIFDKVDVNGNNAAPIYKFLKSSKGGLFGDSIKWNFSKFLVDKEGRVVDRYAPTTSPLSIEKDIKKLLGSS

SEQ ID NO: 5056 - protein, 225 aa, Brassica napus var. napus
QHQLIALLSNHHPVQKPPTPTYSPPIKPPPVQKPPTPTYSPPVKPPPVKPPTPIYSPPVMPPPVQQPPTPSYSPPVKPPPVQKPPTPTYSPPVKPPPVQKPPTPTYSPPIKPPPVQKPPTPTYSPPIKPPPVQKPPTPTYSPPVKPPPVQKPPTPTYSPPIKPPPVKPPTPIYSPPVKPPPVQKPPTPTYSPPIKPPPVKPPTPTYSPPVKPPPVQKPPTPTYSP

SEQ ID NO: 5057 - protein, 305 aa, Corynebacterium glutamicum ATCC 13032
MSVVGTGLFFGSPEEERDKLMQSLMDQKNKLSKSEGIPLVTLNDGKTIPQLGFGVFKVDPDEAERVVTEALEVGYRHIDTAAIYGNEEGVGRAIAKSGIPREELFITTKLWNDRHLDVEAAFEESLQKLGLDYVDLYLVHWPAPKNDNYVAAWKGLEKLGDRARSIGVCNFLPEHLEKLLAEATTVPAINQIELHPALQQRDAVEASLAAGITVESWGPLGQGRFDLGAEEPIAAAAKNHGKTPAQVVIRWHLQNGFVVFPKTVTKSRMVENIDVFDFELSDEEMAAITALERNDRGGSHPNDLN

SEQ ID NO: 5058 - protein, 400 aa, Streptococcus pyogenes
VFFMLLVCAGAIGFGQVAYAADEKTVPNRINSNPEFPWYGYDSYSGRLLRYHNLKVNLNGSKEYQAYCFNLKRFEPKKEESSSPNWYKKLDGSTETFKKYAENPRFSGEELRRHILKVLYNGYPNSNEIMKGIDPLNAILVTQNAIWYYSDSAPINDINNFFTSEANDLNIPPQQLTLMREALRKLISSDENLVKQVPSNFKLSIFESSDKSYQNLLSAEYVPDDPPKPGDTSEHNPKTPELDGTPIPEDPKRPDESSEPALPPLMPELDGEEVPEVPSESLEPALPPLMPELDGEEVPEVPSESLEPALPPLMPELDGEEVPEVPNESLEPALPPLMPELDGQEVPEVPSESLEPALPPLMPELDGEEIPEVPSESLEPALPPLMPELDGQEVPEKPSV

SEQ ID NO: 5059 - protein, 192 aa, Glycine max
AISDIGVGIENKIILHFKNVFWPNVEFLGVVAETSYGCSYFLNLHKATGRPVLVYMPAGQLAKDIEKMSDEAAASFAFMQLKKILPDTSSPIQYLVSRWGTDINTLGSYSYDAVGKPHDLYERLRVPVDNLFFAGEATSMLYTGSVHGAYSTGMMAAEDCRMRVLERYGELDLVPPVMGEDASVIPLQISRL

SEQ ID NO: 5060 - protein, 218 aa, Escherichia coli
QELDLYICLRPVRYYQGTPSPVKHPELTDMVIFRENSEDIYAGIEWKADSADAEKVIKFLREEMGVKKIRFPEHCGIGIKPCSEEGTKRLVRAAIEYAIANDRDSVTLVHKGNIMKFTEGAFKDWGYQLAREEFGGEPIDGGPWLKVKNPNTGKEIVIKDVIADAFLQQILLRPAEYDVIACMNLNGDYISDALAAQVGGIGIAPGANIGDECALFEA

SEQ ID NO: 5061 - protein, 404 aa, Blastocladiella emersonii
APAPASPSSPSTAAGAGSASSTASSTTTAAASGNLSIPSPLVAGSTTSSSISHAQKMATAAHTNSDYSPSPAATPSAPLDAVAERRRRKTTLADLELRQTLGTGSFGRVHLVRLRSTGKYYAMKVLKKAEVVKHKQVEHTLNEKGILEQIDHPFLVALHSSFQDSANLYMVMEYVTGGELFTYLRRSQRFSNNVAKFYAAEVVLAFEYLHSKDIIYRDLKPENLLLDAQGHVKITDFGFAKHVPDITWTLCGTPDYLAPEIIQSRGYGRAVDWYALGVLIFEMLAGYPPFYDEDHVRMYEKILQGKVKWPSHFDPAAKDLLKRLLTTDLTKRYGNLKGGSKDIKMHKWFAGLDWTKLFNKQIPPPYTPPNRGDGDTSNFDAYPEETEPYGKVQPDPYAQLFKDF

SEQ ID NO: 5062 - protein, 217 aa, Escherichia coli
DLYICLRPVRYYQGTPSPVKHPELTDMVIFRENSEDIYAGIEWKADSADAEKVIKFLREEMGVKKIRFPEHCGIGIKPCSEEGTKRLVRAAIEYAIANDRDSVTLVHKGNIMKFTEGAFKDWGYQLAREEFGGELIDGGPWLKVKNPNTGKEIVIKDVIADAFLQQILLRPAEYDVIACMNLNGDYISDALAAQVGGIGIAPGANIGDECALFEATH

SEQ ID NO: 5063 - protein, 335 aa, Schizosaccharomyces pombe
MQQTYKPNTSALKDGAPKATVDQKQLLPCKYRVGRVLGGGTYATVREAVHIETNKMYAAKIMNKKMMEKKQDFVKNEIAILKRVSYEHPNILHLVDFFETVNNLYLITELATGGELFDRICAKGSFYEADAAALMRTTTSAVKYLHDNGIVHRDLKPENLLYRSKDPNSDLLIADFGLSHFYEDSQYYMLMTACGTPEYMAPEVFRRTGYGKPVDMWAIGVITYFLLSGYTPFARPSQVEVIEAILANEYTFNDPCWSGISETAKDFIKKCLENDPSKRLTAADALKHPFLSEKRPATSNLLPNVRENFNARKTFRTAYNAVRAFNTWKKLENKH

SEQ ID NO: 5064 - protein, 364 aa, Mycobacterium avium subsp. paratuberculosis str. k10
MTEADSAQALDEPLGDHVLELQIAEVIAETDDARSLVFAVPDDDGDPDIPPERLRYAPGQFLTLRVPSERTGSVARCYSLCSSPFTDDALTVTVKRTADGYASNWLCDNARPGMRIHVLAPSGNFVPKTLGDDFLLMAAGSGITPIMSIAKSALSEGSGQVTLLYANRDERSVIFADALRELSAKYPDRLTVLHWLESLQGLPSVTALAQLAAPYTDRPVYICGPGAFMDSAREALETLKVPAAQIHIEVFKSLDSDPFAAVKIEDTAEGDEPPATAVVELDGETHTVSWPRNAKLLDVLLAKGLDAPFSCREGHCGACACTLRKGQVSMEVNDVLEQQDLDEGLILACQSHPESDSVEVTYDE

SEQ ID NO: 5065 - protein, 447 aa, Aspergillus nidulans FGSC A4
MPHSVLYTKIDTRPPEVIHSRGNYLHTSDGRTIFDASGGAAVACLGHNEPQVKQAIMAQLDKVAYIYSPFFTVPAAEEIATFLTESTGGAMSKVFIVSSGTEAIEAALKMTRQYFTELSKPQLQRTKFIARRQSYHGNTLGSLAAGGHKARRAIFEPILAASTSHVSPCYPYREMKKGESNEEYVSRLAEELENEFQRVGPDTVCAFIAETMSGTTLGCIPAVPGYLKAMKQVCDRHGALFVLDEVMSGMGRTGTLHAWQQEGVVPDLQTVAKGLGAGYAPVGALLVGNRVADVLSKGTGSFTHSQTYQGHPIACAAACAVQKIIQKENLLDNVRRQGEYLGRLLNERLGGHRNVGDVRGRGLFWALEFVRDKETKEPFPAEAGIAQKVHLTGLQKEHSISVIPGAGVADGRNGDIIQIAPAYNVSKEDIELIVERVEGVVHAAFGA

SEQ ID NO: 5066 - protein, 214 aa, Escherichia coli
LYICLRPVRYYQGTPSPVKHPELTDMVIFRENSEDIYAGIEWKADSADAEKVIKFLREEMGVKKIRFPEHCGIGIKPCSEEGTKRLVRAAIEYAIANDRDSVTLVHKGNIMKFTEGAFKDWGYQLAREEFGGEPIDGGPWLKVKNPNTGKEIVIKDVIADAFLQQILLRPAEYDVIACMNLNGDYISDALAAQVGGIGIAPGANIGDECALFEA

SEQ ID NO: 5067 - protein, 313 aa, Shewanella oneidensis MR-1
MAIQWYPGHMHKARKEIEEAMPQVDLVIEVLDARIPYSSENPMVSKLRGDKPCIKLLNKSDLADPEVTAQWIEYLEREQGVKATAITTLQPGMLKMLPDLCRKLVPSRDKTEKDIRTMIMGIPNVGKSTIINTLAGRVIAKTGNEPAVTKTQQRINLRNGIVLSDTPGILWPKVDNEASSYRLAVTGAIKDTAMEYEDVALFAAGYFLKAYPKEICERYNISELPKDDMALLEEIGRKRGALRPGGRIDLHKASELLLHEYRSGKIGLLSLETPAMAEIEKAEVERILAEKAAEKAAKLEAEKLKRSGKRHND

SEQ ID NO: 5068 - protein, 158 aa, Brassica napus
  misc_feature (12)..(12): Xaa can be any naturally occurring amino acid
  misc_feature (14)..(16): Xaa can be any naturally occurring amino acid
  misc_feature (19)..(19): Xaa can be any naturally occurring amino acid
  misc_feature (21)..(22): Xaa can be any naturally occurring amino acid
  misc_feature (26)..(26): Xaa can be any naturally occurring amino acid
  misc_feature (32)..(32): Xaa can be any naturally occurring amino acid
  misc_feature (35)..(35): Xaa can be any naturally occurring amino acid
  misc_feature (50)..(50): Xaa can be any naturally occurring amino acid
  misc_feature (54)..(55): Xaa can be any naturally occurring amino acid
  misc_feature (57)..(57): Xaa can be any naturally occurring amino acid
  misc_feature (60)..(62): Xaa can be any naturally occurring amino acid
  misc_feature (65)..(65): Xaa can be any naturally occurring amino acid
  misc_feature (92)..(92): Xaa can be any naturally occurring amino acid
  misc_feature (94)..(94): Xaa can be any naturally occurring amino acid
  misc_feature (100)..(100): Xaa can be any naturally occurring amino acid
  misc_feature (105)..(105): Xaa can be any naturally occurring amino acid
  misc_feature (114)..(115): Xaa can be any naturally occurring amino acid
  misc_feature (118)..(118): Xaa can be any naturally occurring amino acid
  misc_feature (121)..(121): Xaa can be any naturally occurring amino acid
  misc_feature (126)..(126): Xaa can be any naturally occurring amino acid
  misc_feature (137)..(140): Xaa can be any naturally occurring amino acid
  misc_feature (144)..(144): Xaa can be any naturally occurring amino acid
  misc_feature (149)..(149): Xaa can be any naturally occurring amino acid
MVSSMLSSAAVXTXXXQDXMXXPFTXLKSSAXFPXTRKANNDITSIASPXGRVXXMXVGXXXGKXKFETLSYLPDLTEVELYKEVDYLLRNXWXPCDEFXLQNGXVYREHGSTXXYYXGRXYWTMXKLPLVACADSXXXXNESXECKTXYPNAFIKII

SEQ ID NO: 5069 - protein, 207 aa, Escherichia coli
RYYQGTPSPVKHPELTDMVIFRENSEDIYAGIEWKADSADAEKVIKFLREEMGVKKIRFPEHCGIGIKPCSEEGTKRLVRAAIEYAIANDRDSVTLVHKGNIMKFTEGAFKDWGYQLAREEFGGELIDGGPWLKVKNPNTGKEIVIKDVIADAFLQQILLRPAEYDVIACMNLNGDYISDALAAQVGGIGIAPGANIGDECALFEAT

SEQ ID NO: 5070 - protein, 244 aa, Eucalyptus globulus
MGRGRLQLKRIENKINRQITFSKRRAGLLKKAHEISVLCDAEVALIVFSAKGKLFEYSTDSCMERILERYERYSYAEHQVLASETESIGSWTLEHAKLKARLEVLHRNYRHFMGEDLDSLSLKDLQNLEQQLESALKHIRSRKNQLMHESISVLQKKDRALQEQNNLLTKKIKEKERALAQQAQWEQQDHALDSPVVLPHYLPSLDINGSYQARHNGHDDGENLTQPRAGTLLPPWISASQLRL

SEQ ID NO: 5071 - protein, 499 aa, Leuconostoc mesenteroides subsp. mesenteroides ATCC 8293
  misc_feature (342)..(475): Xaa can be any naturally occurring amino acid
MKAAVWHGVKDVRVEDVELKPTKSNEVVVRVAYAGICGSDLHEYLEGPVFIPVDQPDELTGGQAPLTMGHEFSGVIEKVGPDVANFKVGDHVSINPTVTKGISSDDLDVYDGYSFIGLSTDGGFTSYVNVPEDNLYHLPEEFSLKLAATIEPTAVAVQAIKEADLRFGEKVVIFGAGPIGVLVAAAAKAAGATKIVAVDLSEIRLRKALEMGATDVINPSQVPDTVAAIKNIIPGGADASFEVAGVQPTFEQAIDATRPRGSVVIVSIFAKPISFNPMQLMNAGVKLTTTIAYSKETFQQTVALVSSGQINVEPVITDTISLDSIVSDGFESLTSDKSQAKXXXXXXXXXXXXXXXXXXXXXXXXXXXXXXXXXXXXXXXXXXXXXXXXXXXXXXXXXXXXXXXXXXXXXXXXXXXXXXXXXXXXXXXXXXXXXXXXXXXXXXXXXXXXXXXXXXXXXXXXXXXXXXXXXXXXXXLEHKAIISWHNGFYRCFITDCFCW

SEQ ID NO: 5072 - protein, 502 aa, Ustilago maydis 521
MRNLFVALPFLSGLAVAVAFLFNWSAALDRRAPVYLQRRFVNSTELDACKAIAAAKVKVVYPLDLTYYSLIEHYMTTSTQTSTCVAVPASPAEISSTIKVIGSRRIRYAVRGAGHASNQGFSSTSGVHISMNNFKQVILSDDKNTVDVGPANVWDDVYKGLEGTGVAVVGGRVSGVGVGGFITGGGGYSYKTNQYGLTGDTLVSADLVLPDGTITSASESQNADLFWAIRGGGNKFGIIHNFKLKTVPQGQVWGGLRTYTADQVDAVVNATLDFSENSKDPKASLLPTFNFLLGQPGVIALALYDAPTPPADAFRQFTAEDAPRTFTNDWKTRSILDLVKSAPSDLNSGQRGAFHTVSLQKYSKSLLDLIVSESKFYGTQGILHSATLISYDVEPFLPYSQYAKDGAWPHSTNALPLNLYFAWTNPAEDNFWRNAIKASAAKISAQARSEGQNLDDLYLYPNYAIAETPSSELYGPNLGRLSTLKKKYDPQGVTDLTTYFSF

SEQ ID NO: 5073 - protein, 122 aa, Oenothera elata subsp. hookeri
MIQPQTRLNVADNSGARELMCIRIIGASNRRYAHIGDIIVAVIKEALPSTSLERSEVVRAVIVRTCKELKCDDGIIIRYDDNAAVVIDQEGNPKGTRVFGAIAHELRELSFTKIVSLAPEVL

SEQ ID NO: 5074 - protein, 364 aa, Zea mays
MGSTAGDVAAVVDEEACMYAMQLASSSILPMTLKNAIELGLLEVLQKEAGGGKAALAPEEVVARMPAAPGDPAAAAAMVDRMLRLLASYDVVRCQMEDRDGRYERRYSAAPVCKWLTPNEDGVSMAALALMNQDKVLMESWYYLKDAVLDGGIPFNKAYGMTAFEYHGTDARFNRVFNEGMKNHSVIITKKLLDFYTGFEGVSTLVDVGGGVGATLHAITSRHPHISGVNFDLPHVISEAPPFPGVRHVGGDMFASVPAGDAILMKWILHDWSDAHCATLLKNCYDALPENGKVIVVECVLPVNTEATPKAQGVFHVDMIMLAHNPGGKERYEREFRELAKGAGFSGFKATYIYANAWAIEFIK

SEQ ID NO: 5075 - protein, 332 aa, Neurospora crassa
MSGIGASSYAPRSPDLSSLYSSAGPTHQHLQTHAEVLQYLPPRSQPDNSFSTNHYSQPQQSERPHRIPFTNNHATGVWNAQQQASQRDLHHLQNQHQYKYNQQQPQQPLQQQAYPQLFSHTQPQEHQQQQRLTRSQAQRPLQPLPSHTSNPNPPPAPEQSNIQAASSVAAQTTNTMPPKRAVAQAAQQPQPSPIQPSLVKTKFPTARIKRIMQADEEVGKVAQQTPIAVGKALELFMVQLVTKSADIARERNSKRVSAQMLKQVVESDDQWDFLREITSKIENDDKEKPAASASGRGRTKAESESEEEAQPEKKGRGGAGRGGGRGRKKSTA

SEQ ID NO: 5076 - protein, 295 aa, Zea mays
MAGLSLEHPWAFTFGLLGNVISFMTFLAPIPTFYRIYKSKSTEGFQSVPYVVALFSAMLWIFYALIKSNETFLITINAAGCVIETVYVVMYFVYATKKGRMFTAKIMLLLNVGAFGSILLLTLLLFKGDKRVVMLGWICVGFSVSVFVAPLSIMRRVIQTKSVEYMPFSLSLSLTLSAVVWFLYGLLIKDKYVALPNILGFTFGVVQMVLYVVYMNKTPLPVADGKAAGKLPSAADEHVVVNVTKLSPGRLPPVTQMAAVPTKSCATEAAAPATLPSRDVVDVLVNRHSPAVHVA

SEQ ID NO: 5077 - protein, 390 aa, Methanosarcina acetivorans C2A
MHRRLGGVLEVESKVRLRTIHDLSVAYTPGVAEPCRKIKENPSLVYLYTIKKNTVAVVTDGSAVLGLGNIGPCAALPVMEGKAIIFKEFAGIDAFPICLNTQDTEEVIKAVKYLAPAFGGINLEDISAPRCFEIESRLREELDIPVIHDDQHGAAIVVFAGLLNALKIVKKELGELKILITGLGAAGVAIFRFLVRAGADPAKILTCDSQGIVYEGREKDMNPIKAEIATLTNPGKLKGGLKEAFPGTDLFIGVSVGGIVTEEMISSMANDAIVMAMANPTPEIMPDAAKRAGARIVATGRSDFPNQLNNCLSFPGVFKGALGTCARKITPEMEMAAAHALANVVSVGELSEDYIIPEPLDKHVVPAVAKAVANASLESCAARRSLEDEL

SEQ ID NO: 5078 - protein, 503 aa, Tropaeolum majus
MSGTKATSVSVPLPDFKQSVNLKYVKLGYHYSITHAMYLFLTPLLLIMSAQISTFSIQDFHHLYNHLILHNLSSLILCIALLLFVLTLYFLTRPTPVYLLNFSCYKPDAIHKCDRRRFMDTIRGMGTYTEENIEFQRKVLERSGIGESSYLPPTVFKIPPRVYDAEERAEAEMLMFGAVDGLFEKISVKPNQIGVLVVNCGLFNPIPSLSSMIVNRYKMRGNVFSYNLGGMGCSAGVISIDLAKDLLQVRPNSYALVVSLECISKNLYLGEQRSMLVSNCLFRMGGAAILLSNKMSDRWRSKYRLVHTVRTHKGTEDNCFSCVTRKEDSDGKIGISLSKNLMAVAGDALKTNITTLGPLVLPMSEQLLFFATLVGKKVFKMKLQPYIPDFKLAFEHFCIHAGGRAVLDELEKNLKLSSWHMEPSRMSLYRFGNTSSSSLWYELAYSEAKGRIKKGDRVWQIAFGSGFKCNSAVWKALRNVNPAEEKNPWMDEIHLFPVEVPLN

SEQ ID NO: 5079 - protein, 396 aa, Oceanobacillus iheyensis HTE831
MVYKNLKDEAIELHYKHKGKLEITGKMEINTEDDLSLVYTPGVADVCKQIADDPNKINTLTSRGNMVGIVTDGTAVLGLGNIGPKAAMPVMEGKALLFKKFANIDGFPICLDTTDVDEIVNIVKAMGPTFAGINLEDIAAPRCFEIEKRLKEELDIPVFHDDQHGTAIVVLAALTNALKVVNKQNRPIKIVINGAGAAGIAIAKLLYHAGLTNITLVSLEGVVAKGEDWLNPMQVEMAEVTNKDNVRGTLKDAITEADVFIGVSGPGALKKEHIQTMAKDPIIFALANPIPEIYPEEALEAGAAVVATGRSDYPNQVNNLLAFPGIFRGAIDAGARDITTEMKVAAAYGIADVLSDEEISKDKVIPNALDERAGERVAQAVMSSAIQQKKETSSVS

SEQ ID NO: 5080 - protein, 145 aa, Magnetococcus sp. MC-1
MSTLMSYDPFHRVRTLQNELNRLFDPGWDDGNSQMAKLSMGVDIREDENQIVIKADLPGMSQEAIQVNVEHNTLTISGERTFGDEVNRDRYHRVERAYGRFSRSFQLPNTTDTANIKASYVNGVLEVALPKREESKPRAIQIEVQ

SEQ ID NO: 5081 - protein, 467 aa, Listeria monocytogenes EGD-e
MLYSEDDKRKQESYRIPLFGSEEESTSIPKYVLKKEPMEPRIAYQLVKDQLMDEGNARQNLATFCQTYMEKEAEILMAETLEKNAIDKSEYPQTAELENRCVNILADLWNAPKDMSYLGTSTVGSSEACMLGGLAMKFRWRNNAEKRGLDIQAKRPNLIISSGYQVCWEKFCVYWDVDMRVVPMDKNHLSLDVDKVFDLVDEYTIGVVGILGITYTGKFDDIQLLDEKVEAYNETNEHQLVIHIDGASGAMFTPFVNPELPWDFRLKNVVSINTSGHKYGLVYPGVGWILWKDKEYLPKELIFEVSYLGGSMPTMAINFSRSASQIIGQYYNFLRYGFEGYREIHEKTKKTAIYLAKTVEKSGYFEIINDGANLPIVCYKMKEGLDVEWTLYDLADQLLMKGWQVPAYPLPADLSDTIIQRFVCRADLGYNVAEEFAADFADAIHNLEHARVLYHDKERNDSYGFTH

SEQ ID NO: 5082 - protein, 395 aa, Zea mays
LGPSRPASSSLPAKRGGLLLGRYELGRLLGHGTFAKVYHARHADDTGETVAIKVLDKEKALRNGLVPHIKREIAILRRVRHPNIVRLFEVMATRPKIYFVMEFVRGGELFARVAKGRLKEDTARRYFQQLISAVGFCHARGVFHRDLKPENLLVDERGDLKVSDFGLSAVADQFHPDGLLHTFCGTPSYVAPEVLARRGYDGAKADIWSCGVILFVLMAGYLPFHDQNLMAMYRKIYRGEFRCPRWFSRDLSCLMNQLLDTNPETRITVAQIIESRWFKKGFRPVRFYVEDDQVHSLADSEAEALEELGPSDSEPSPPPPPPPPPPPPQKEDDGDDSGWESDSSVASCPATLSSEERRRPVGSLPRPVSLNAFDIISFSRGFNLSGLFEERGNEV

SEQ ID NO: 5083 - protein, 358 aa, Mycobacterium tuberculosis H37Rv
MTEAIGDEPLGDHVLELQIAEVVDETDEARSLVFAVPDGSDDPEIPPRRLRYAPGQFLTLRVPSERTGSVARCYSLCSSPYTDDALAVTVKRTADGYASNWLCDHAQVGMRIHVLAPSGNFVPTTLDADFLLLAAGSGITPIMSICKSALAEGGGQVTLLYANRDDRSVIFGDALRELAAKYPDRLTVLHWLESLQGLPSASALAKLVAPYTDRPVFICGPGPFMQAARDALAALKVPAQQVHIEVFKSLESDPFAAVKVDDSGDEAPATAVVELDGQTHTVSWPRTAKLLDVLLAAGLDAPFSCREGHCGACACTLRAGKVNMGVNDVLEQQDLDEGLILACQSRPESDSVEVTYDE

SEQ ID NO: 5084 - protein, 506 aa, Pseudomonas aeruginosa UCBPP-PA14
MRYAHPGSEGAIVSFKARYGNYIGGEFVPPVKGQYFTNTSPVNGQPIAEFPRSTAEDIDKALDAAHAAADAWGRTSVQERSNILLKIADRIEQNLELLAVTETWDNGKAVRETLNADIPLAADHFRYFAGCIRAQEGSAAEINDSTVAYHIHEPLGVVGQIIPWNFPLLMAAWKLAPALAAGNCVVLKPAEQTPLGICVLLELIGDLLPPGVLNVVQGFGREAGEALATSKRIAKIAFTGSTPVGSHILKCAAENIIPSTVELGGKSPNIYFEDIMQAEPAFIEKAAEGLVLAFFNQGEVCTCPSRALVQESIYPAFMEEVLKKVRAIKRGDPLDTETMVGAQASQQQYEKILSYLDIAQQEGAEVLTGGSVEKLEGNLASGYYIQPTLLKGHNKMRVFQEEIFGPVVGVTTFKDEAEALAIANDTEYGLGAGLWTRDINRAYRMGRGIKAGRVWTNCYHLYPAHAAFGGYKKSGVGRETHKMMLDHYQQTKNLLVSYDINPLGFF

SEQ ID NO: 5085 - protein, 1124 aa, Gibberella zeae PH-1
MVAPSAMLSGAEAMQMQMQAAPPRQRAQRQTSSCLECRRRKQKCSQGQPCTNCYRRFPTPECVYEVKSSRRASPLFPRPQLPTIADIQDGPYSHLNPAIIQSALYSIEGQSTSSASSPSGSYSPTASSSTSLSTQSTRSLWRPYQTLASPDGDTDKTIARSLQIIKKESIKSFKRSYLDEGMNKIESDDPMELGYSIAGSMTQLNYLPMRPTKLNKDLVRIHGQPDPTNEFMSVWVPCTMQDPLLLHIVLFTSACFLTETGDMPKKLRQIYQSHVYWMLNKQIGDANGWKNDTLMLAVVQMIADSWYWGETDHLMAHLKGLKRMVRMRGGLNQLGLRGYLAKMILIHDIAMALAHEIKPSMYGHPEFPFFDSRRTPIKTVYNTPLLCHWQSFRESSNSLQLHPSTAEILDTVRSLFSAVISLPRDASPDQTQIVRITATGFYDKIDGFPEQIPSFRGFRNSSRSSSVESPDQSPRSSRTDKSSSPLNLPDIMYIVVRKIALVYCKAISTRSPISTACSEQDIMLIWRAIWESGLPTWKSVLGIFAWVMIPLCTNCHKIKFGRLIKTLTVSTMMSLGMDDWHLFLDISKTAFRIQRWLTEGDDASGTKQLMGGQAVVDQYDGFAMDNACPRYELPEYDEPFHKDEFNYLFGTMCNFDRLREDIAHGAVLLPEDEGYEETLQRWSSACMKRANTETLQAAVVMPSNSKEVSLAVKFAVSNQIPMTVCGGGHSSSGASSSEGMVIDLRKMRKVKVDTEAMTVEFEGGCLWEDVDNALERHGLATVGGVVNHTGVGGLTLGGGHGYLTPRHGLTIDNLLEADVVLADGTIVEASEDKDANLFWAIRGAGAQFGVVTRFLSRAHQQVKVWSGTLAYLPDKLPDLLRFANELHERPNTEGHCLALGIGFGPNGTTRIVSAIPLFHGPESDAKRYFAGLLQLESVADNTEMITTAKTNTLLNLAMDHGIRRLTGSGNVVMPLNIEAMLQTAQIFWEFCDVHGGMGKSVMAIEFFPTDKIREIAQDATAYANRGDYYDVLTLFGWEDPDHDGEVREFNRSICRKVRETNGYQADSGGHWSKGPVGVYINVEAGGISPNDAWGANLPRLRELKKKYDPQNVFNKWHSIAEDAS

SEQ ID NO: 5086 - protein, 147 aa, Brassica napus
DVQERAFARAEIESARAAVHRVGEALREHEQMSRASGKQDMEDLLKEVQEATRIKVLHQPSKVMAMEYELRARRKQLAETSRHFRQLRQKLAMCRESEECISLLDDIDGNEALSSCLRVRPCSDEAPESLKCTIQWYRSSSDDSKNE

SEQ ID NO: 5087 - protein, 92 aa, Glycine max
MERRRVMEHLKTYPAFPGWYADVSWPGEAHIYKMEKILFHGKSEFQELLVFESDTSRHGKIAIPDGYIQLTENDEFAYQEMLIHLALCSIPN

SEQ ID NO: 5088 - protein, 195 aa, Amylomyces rouxii
MAEIRRKLVIVGDGACGKTCLLIVFSKGTFPEFYVPTVFENYVADVEVDGKHVELALWDTAGQEDYDRLRPLSYPDSHVILICFAVDSPDSLENVQEKWISEVLHFCQGLPIVLVGCKKDLRNDPGTIEELRRNSQKPVSSEEGASIAQRISAYKYLECSAKTGEGVREVFEHATRAALMVSKKKKSKSGVCNLL

SEQ ID NO: 5089 - protein, 506 aa, Haloarcula marismortui ATCC 43049
MTSHSEIDTLRIKARHAELAESLLPSGPLKHFVDGEWITGRGDDTFQSIDPTTGESLVGVYEGTKEEVNRAVDAAWEAYEQRWSETTPAERQQLLLTMADRLEARAEDFALIEVLDNGKPITEAREDIELAVDHFRYFAGAARNIEGKTVPHKELHIQTRREPYGVVGQVVPWNFPLLLATWKLAPALAAGNTVVLKPAEQTPISLLTYMREIADVLPDGVVNVVTGFGPETGAPLVSHERVPKVAFTGSTEVGQGVMKAAANTISDITLELGGKSPLIVAPDADPAEAADIAVDAMFFNGGECCSAGTRLFIHESIADEFVDAFLDAVGKLQMGDPLEESTDIGPQVSRAEVEKTLHYIGLARDSDASILRGGGTVEEGILAEGCFVEPTVIADVGADSTVATQEIFGPVEIMLEWDGYDEMVARANNVDYGLAAGVVTDDLSFAHRIAEDIMAGNIWVNTFNRLPAGQPFGGYKQSGIGREGAMETLREYTQTKSITMNLGDGQ

SEQ ID NO: 5090 - protein, 310 aa, Brassica rapa subsp. pekinensis
MMKRLSSSDSVGGLISLCPTTSTDQPSPRRYGREFQSMLEGYEEEEEEAVTEERGQTGLAEKKRRLSINQVKALEKNFELENKLEPERKVKLALELGLQPRQVAVWFQNRRARWKTKQLEKDYGVLKTQYDSLRHNFDSLRRDNESLLQEIGKLKAKLNGEEEVEKMMKMENNAVTMECDVSVKEEEVSLPEELTDPPSSPPQALEHSDSFNYRSFTDLRDLLSLKAAASSVAAAGSSDSSDSRAVLNEESSSNVTAGPVTVPQGGFLQFVKMEQTEDHDDFLSGEEACGFFSEEQPPSLHWYSTVDQWN

SEQ ID NO: 5091 - protein, 473 aa, Anabaena variabilis ATCC 29413
MYNKITPPTTGEKITFKNGEPVVPDNPIIPFIRGDGTGIDIWPATEKVLDAAVAKAYQGKRKISWFKIYAGDEACDLYGTYQYLPEDTLTAIREYGVAIKGPLTTPVGGGIRSLNVALRQIFDLYACVRPCRYYAGTPSPHKNPEKLDVIVYRENTEDIYLGIEWKQGSEIGDRLISILNKELIPATPEHGKKQIPLDAGIGIKPISKTGSQRLVRRAIKHALTLPKHKQQVTLVHKGNIMKYTEGAFRDWGYELATSEFRQETVTERESWILSNKEKNPNISLEDNARQIDPGFDALTPEKKAQIVKEVETVLNSIWETHGNGKWKEKVLVNDRIADSIFQQIQTRPDEYSILATMNLNGDYLSDAAAAIVGGLGMGPGANIGDSCAVFEATHGTAPKHAGLDRINPGSVILSGVMMLEYLGWQEAADLIKKGLSDAIANSQVTYDLARLLEPPVEPLKCSEFADAIIKHFG

SEQ ID NO: 5092 - protein, 204 aa, Escherichia coli
CLRPVRYYQGTPSPVKHPELTDMVIFRENSEDIYAGIEWKADSADAEKVIKFLREEMGVKKIRFPEHCGIGIKPCSEEGTKRLVRAAIEYAIANDRDSVTLVHKGNIMKFTEGAFKDWGYQLAREEFGGELIDGGPWLKVKNPNTGKEIVIKDVIADAFLQQILLRPAEYDVIACMNLNGDYISDALAAQVGGIGIAPGANIGD

SEQ ID NO: 5093 - protein, 221 aa, Shigella flexneri
RQELDLYICLRPVRYYQGTPSPVKHPELTDMVIFRENSEDIYAGIEWKADSADAEKVIKFLREEMGVKKIRFPEHCGIGIKPCSEEGTKRLVRAAIEYAIANDRDSVTLVHKGNIMKFTEGAFKDWGYQLAREEFGGELIDGGPWLKVKNPNTGKEIVIKDVIADAFLQQILLRPAEYDVIACMNLNGDYISDALAAQVGGIGIAPGANIGDECALFEATH

SEQ ID NO: 5094 - protein, 160 aa, Brassica napus
MEEDRVLSSVHSTVFKESESLEGKCDKIEGYDFNQGVNYPKLLRSMLTTGFQASNLGEAIDVVNQMLEWRLSDETIAPEDCSEEEKDPAYRESVKCKIFLGFTSNLVSSGVRDTIRYLVQHHMVDVIVTTTGGVEEDLIKCLAPTFTGDFSLPGAYLRSR

SEQ ID NO: 5095 - protein, 316 aa, Helicobacter hepaticus ATCC 51449
MAGGAAIDECGECLPMKSLQICKQSDSVLLGAVGGPKWDNEPSHNRPEKALLTLRKELGLFANIRPATLLPQLSKASPLKDEILNRGIDFIIVRELIGGVYFGEHKLEEINGEKVASDAMTYSASQIESIAKVAFNIARNRKKEIVCVDKANVLSSSRLWREVVDKVAQNYKDVHLSYMYVDNAAMQICRAPSQFDVILTENMFGDILSDEASIITGTIGVIPSASLSNGTLGMYEPIHGSAPDIAGQDKANPIGTILSAAMMLELSFGLTKESEVIQKAVQNALDKGYRTGDMMSEGMQLVGCEQMGDVILESVI

SEQ ID NO: 5096 - protein, 220 aa, Shigella flexneri
RQELDLYICLRPVRYYQGTPSPVKHPELTDMVIFRENSEDIYAGIEWKADSADAEKVIKFLREEMGVKKIRFPEHCGIGIKPCSEEGTKRLVRAAIEYAIANDRDSVTLVHKGNIMKFTEGAFKDWGYQLAREEFGGELIDGGPWLKVKNPNTGKEIVIKDVIADAFLQQILLRPAEYDVIACMNLNGDYISDALAAQVGGIGIAPGANIGDECALFEAT

SEQ ID NO: 5097 - protein, 482 aa, Pseudomonas fluorescens
MLDVPLLIGGQSRPARDGRTLERRNPVTGAVVSRVAAATLDDADAAVAAAQAAFPAWAALAPNERRSRLLKAAEQLQARSGEFIAAAGETGAMANWYGFNVRLAANMLREAASMTTQINGEVIPSDVPGSFAMALRQPCGVVLGIAPWNAPVILATRAIAMPLACGNTVVLKASELSPAVHRLIGQVLQDAGLGDGVVNVISNAPVDAAAIVERLIANPAVRRVNFTGSTHVGRIVGELAARHLKPALLELGGKAPLLVLDDADLDAAVAAAAFGAYFNQGQICMSTERLIVDAKVADAFVAKLAAKVATLRAGDPSAADSVLGSLVDVSAGTRIKALIDDALSKGARLVVGGQLDGSILQPTLLDGVTESMRLYREESFGPVAVLLRGSGDEELLRLANDSEFGLSAAIFSRDTGRALALAQRVESGICHINGPTVHDEAQMPFGGVKSSGYGSFGGKASIEHFTQLRWVTLQHGPRHYPI

SEQ ID NO: 5098 - protein, 220 aa, Shigella flexneri
QELDLYICLRPVRYYQGTPSPVKHPELTDMVIFRENSEDIYAGIEWKADSADAEKVIKFLREEMGVKKIRFPEHCGIGIKPCSEEGTKRLVRAAIEYAIANDRDSVTLVHKGNIMKFTEGAFKDWGYQLAREEFGGELIDGGPWLKVKNPNTGKEIVIKDVIADAFLQQILLRPAEYDVIACMNLNGDYISDALAAQVGGIGIAPGANIGDECALFEATH

SEQ ID NO: 5099 - protein, 189 aa, Leptospira interrogans serovar Lai str. 56601
MKEGASFMYSKYFIWFMTLGIFLPLAGIFAKGSFYDFKVKDIKGNEVSLSKYKGKVVMVVNVASKCGYTYQYEHLEKVYKKYKDQGFAVVGFPANNFGGQEPGTDQEIETFCRIQKGASFDMMSKISVKGKDIHPLYSYLIQNSPNPGEVEWNFEKILISKNGTIEARYRSSVEPDSSAVTQKIETLLK

SEQ ID NO: 5100 - protein, 564 aa, Triticum aestivum
  misc_feature (102)..(102): Xaa can be any naturally occurring amino acid
  misc_feature (257)..(257): Xaa can be any naturally occurring amino acid
  misc_feature (369)..(369): Xaa can be any naturally occurring amino acid
MASFARQEHQFLAELGLAPRNPGSFACGAWGGSGPVVTTTNPSNNEVIAEVVEASMDDYEKGMSACFDAAKTWMAVPAPKRGEIVRQIGDALRAKLHHLGRXLSLEMGKILPEGIGEVQEIIDMCDYAVGLSRQLNGSIIPSERPNHMMMEVWNPLGVVGVITAFNFPCAVLGWNACIALVCGNCVVWKGAPTTPLITIAMTKIVASVFEKNNLPSAIFTAFCGGAEIGQAIALDTRIPLVSFTGSTKVGQMVPPSXPHSPPSTIPSLRTAKQPEPEPAFQNQPARHGELREAGAPVPRRARPRAAQPGLLRLRRLGRLRPRRHHHKAIILLGHADGRRGVRSLLFAAVGTAGQRCTTWGSRPLHESMXQTFLDQLVEVYKQACIGHPMEKGTLLGPLHTTASKESFLKGIQNIRSQGGKILLGGSAIESEGNFVQPTIVEISPAAPVVREELFGPVLYAMKFQTLKEAIEINNSVPQGLSSSIFTRKPDAIFKWIGPHGSDCGIVNVNIPTNGAEIGGAFGGEKATGGGREAGSDSWKQYMRRATCTINYGSELPLAQGINFG

SEQ ID NO: 5101 - protein, 1661 aa, Bacillus halodurans C-125
MKTLKHISYKLRIFALIALLISQTLLTSLSLPFQAVANSEKSGLTNVEITDANGQTIDADQFPDRFVSIDSILQIILSWSVDESVAQGAEYSLNIPSALVVSSHGGVLTTTDSQEVGTYEVKDNGEVTLQVNEKGNGTLIVEAAFNKDEVHGKSEVPLTFHLDDETRTITVPFTVEEKTEEAVEPASESETEATIEQHKEDEEEEMVALTTQSTEASGSEITENILTSVQLKDEEGNLIHANENPDLRPALGSAVEVIYNWKLRNNHGYTAGSTFTFQLPDAFRFYNNIENEPLVFTQANTTVGSFNVTTDGTVTMTFNESIEQLSNIRGNLHLWTEFREDLQGDRLQVIHFEAKDEVIASIPVEFENATGHSIDKRGVVDQTFNATEIKWTVDFNKQLQPIEQAILKDPIQTGQALRAGSIKVYELNVQLDGSVVQGAEVDPSSYTIEQVDGNDFQIVFGSIDSAYRVEFITDITNRNATYYMNRATLTGENIDDLSADAGVWTHRGTPLSKASTGYDPATQTITWEIKYNYDGKLIRQADAVLTDLFTNSHILLDDSMKVYRVTINEHGNEVSTEEVSNYSVNGTSDEDHNGFVLQFTEDVQDSYKIIYQTTAAERGFEDATIENTVTTGDHEAKTSRTVHQQTFNKWRGQIDYAKKTVAWEYFFNEERQELTNVIISDVFANGGLTLIEDSFTITSFPSTDEEVTLENGNDYRVVTNETGFTIEFMAPITEPHHVRYETTFDFDARDDKNKAFLENGATLQWQTSSGNTMKKEGKSEFHPDTFTRNNGFKNGLYNATSKEITWNIGVNYNLHTLEHAIVEDFVREGQRLLMDSIEVYEMGLLGWWDGVSQGSKLEEGTDYVIEAVEDGEGHPGFQVRFLNTIDSAYWITFKTSLEDTLIKSNYPNRATLKSDNAEDFNVDASVSVRHGGEFVTKSGAQNGRLIDWSLNINFSQSSISNAKIVDEPSVNQILLEDTFRLYATNVQPNGTMTKGDELERDKDYTLDIRTDGEGNQHFELQFTEDIDTGYILEYQSFINARNGDVVTNNVKLEGDQLTTEEVTESSGAVSVRLSGGAGTGSGETGSLEVTKVDADTGEVLQGATFTLYDSEGEFAIRTLETGEDGKATFVNLLYGDYLLKEDSAPEGYLVGINDTQRVTIDTVLHEVTVENEKSDINRVSAVGAVQLQKVDEETGESLQGALFALQQKVDDEFVTIAEMETDEEGIVFAGSLEPGDYQFVELNAPVGYKLDETPVVFTVEEDRTETIELQKENHLIPGSVQLVKVDADDAANTLEGAEFTLLDGEGNVVQEGLTTDENGQVVVTDLKPGEYQFVETKAPAGYELEATPIGFTIERNQQEVATVAVENHLIPGSVQLVKVDADDAAITLEGAEFSLLDGEGNVVQEGLTTDATGQVVVTDLKPGEYQFVETKAPAGYELDATPIGFTIERNQQEVATVAVENHLIPGSVQLIKVDREDSAVTLEGAEFSLLDEEGNVLREGIRTGENGQLMVIDLKPGDYQFIETKAPTGYELDDTPIAFTIEKGTDEVLTLVFENKLTPEVPESPENPENPENPENPEIPEDLETPESPENPETPESPKHSEDSEVPNSDKNPEKSSDSNNRIDRLPQTGEEFLTFLLILGLLLMTAGGVLLLKRRNVAEC

SEQ ID NO: 5102 - protein, 366 aa, Glycine max
  misc_feature (40)..(40): Xaa can be any naturally occurring amino acid
HAFGIPGSASVSRSNRKPLPSSSSSSSVATEAEQKEILEXLVSNLPLEKSSKAATATRFLFGLLRTTNILNASEACRDALEKKIGLQLEEATLDDLLVPSYSYLNETLYDVDCVERILSQFLEGLEARTAAETTEDAAATRSPALMLVGKLIDGYLSEIASDANLKPEKFYNFAISLPDEARLFDDGLYRAVDVYLKAHPWVSEEEREKICGLLDCQKLTLEACSHAAQNERLPLRAVVRVLFFEQLQLRRAIAEKLGAAEEPSRHSAAMAEEEEVEDDNNTWQVTVRENQVLRLDMDSMRTRVHELERECSSMKRAIEKMDKMGPRGGGPWRASLALGRKFGCKFKTQVCDSHEPATREGRPPRR

SEQ ID NO: 5103 - protein, 507 aa, Bordetella bronchiseptica RB50
MPGRGCVPRFFSSDSIDMTISPLQLLNDPSLLRTDALVDGRWIAASRRFAVHDPATGRKLADVANLDAAHAREAIAAAQAAWPAWRARTVKERSAILRKWFDLLLANQDDLARLLTAEQGKPFGEARGEIAYAASFVEWFAEEAKRINGETLPAFDNNRRLLVLRESIGVCAAITPWNFPLAMITRKVAPALAAGCPVIVKPAEHTPLTALAAAQLAVRAGVPAGVLGVLPADGANSIAIGKELCANDAVRHLSFTGSTEVGRILMAQSAATVKKLSLELGGNAPFIVFDDADLDSAVEGAMQSKYRNAGQTCVCANRIYVQDGVYDAFVEKLADAVRALKVGPGFDEGVTQGPLIEPEAVDKIERHIEDAVSKGGRVVAGGRRLGGLFFEPTVLVDATSQMLCAREETFGPLAPVFRFHADEDAIAAANATEFGLASYLYSRDVGRIFRAAEALESGMVGVNVGILATEHVPFGGVKQSGLGREGGRHGIDDYVEIKYMCVGDILK

SEQ ID NO: 5104 - protein, 294 aa, Helianthus tuberosus
MEQYEKVEKIGEGTYGVVYKARDKVTNETIALKKIRLEQEDEGVPSTAIREISLLKEMQHGNIVRLQDVVHSDKRLYLVFEYLDLDLKKHMDSCPEFSKDPRLVKTFLYQILRGIAYCHSHRVLHRDLKPQNLLIDRRTNALKLADFGLARAFGIPVRTFTHEVVTLWYRAPEILLGSRHYSTPVDVWSVGCIFAEMVNQRPLFPGDSEIDELFKIFRIMGTPNEETWPGVTSLPDFKSAFPKWSSKDLATVVPNLEKAGLDLLCKMLWLDPSKRITARTALEHEYFKDIGFVP

SEQ ID NO: 5105 - protein, 315 aa, Glycine max
MAATTLVSEVTLPSSSGQRKMPLMGLGTAPEATSAVTTKDAVLEAIKQGYRHFDAASAYGVEQSVGEAIAEALKQGLIASRDQLFITTKLWVTDNHAHTILPALQKSLRTLQLEYIDLFLIHWPIATKPGKVVYPIEVSEIVEFDMKGVWGSMEECQRLGLTKAIGVSNFSIKKLEKLLSFATIPPAVNQVEVNLGWQQQKLRDFCKEKGITVTAFSPLRKGASRGANFVLDNDVIKELADAHGKTAAQICLRWLYEQGLTFVVKSYDKERMKQNLGIFDWSLTEDDYKKISEIHQERLIKGPTKPLLDDLWDEE

SEQ ID NO: 5106 - protein, 284 aa, Glycine max
MKGEYLEQQQQHPKSETTPPSMFSKLQPQHHPFPHHPFQLSAEEENRVGAATTPSTVQKANSSGGDGATIEVVRRPRGRPPGSKNKPKPPVIITRDPEPAMSPYILEVSGGNDVVEAIAQFSRRKNMGICVLTGSGTVANVTLRQPSTTPGSTVTFHGRFDILSVSATFLPQQSGASPAVPNGFAISLAGPQGQIVGGLVAGGLMAAGTVFVIAASFNNPAYHRLPPEEEGASAGDGHSPQVSGGGDSGHGQAESCGMSMYSCHLPSDVIWAPTARPQPPPPPY

SEQ ID NO: 5107 - protein, 317 aa, Magnetospirillum magnetotacticum MS-1
  misc_feature (291)..(291): Xaa can be any naturally occurring amino acid
  misc_feature (296)..(296): Xaa can be any naturally occurring amino acid
MLETGFFSLGTPGRLDADLEFILAKVAELKLPKLYELGPVGARTEFALRLSRSNPPAPHGVEAEDITIAGIPARRYQPQGGPKAKAMLLYFHGGGFVVGDLETHDPHCRALAAESGSVVVALHYRLGPEHPYPAAIQDGIAALKWAAAEYAGWTLGVAGDSAGGTLSAVVALHARDLNIPLALQMLIYPAVDQKGDFPSRTRLADGYLLTQGDIEWFTQQYFVGHEGPVLEPDASPLRAASHGGLAPALVLTCGFDPLVDEGDAYAQALIGAGVPVRHVRLEGSIHGCLGXWPGLXVALGQASLGGGLRGLAVRSSP

SEQ ID NO: 5108 - protein, 268 aa, Chromobacterium violaceum ATCC 12472
MVSPGPAIAWVNDDLVHGGGYPVPVRIYHPEPGAALPVLVFLHGGGHMAGGVSVYDGIHRRLAAASRHIVVAAEYRLSPENPYPAGLDDALCVARHVWDTLDGRGLAYRRRLSLAGDSAGGALCASVSGLAGRDPSLDIARQALIYPCVDYTLDQPSVAENGEGFFLTRARTDWYFDNYFQHGEDRRQASPLHWEAHGQMPATLLITAGHDILRDQGQQYARKLQAAGAEVALLHLEDQVHAFLNMEALVPEVCELAYRRIGAFLNAG

SEQ ID NO: 5109 - protein, 456 aa, Pseudomonas aeruginosa PAO1
MNSQITNAKTREWQALSRDHHLPPFTDYKQLNEKGARIITKAEGVYIWDSEGNKILDAMAGLWCVNVGYGREELVQAATRQMRELPFYNLFFQTAHPPVVELAKAIADVAPEGMNHVFFTGSGSEANDTVLRMVRHYWATKGQPQKKVVIGRWNGYHGSTVAGVSLGGMKALHEQGDFPIPGIVHIAQPYWYGEGGDMSPDEFGVWAAEQLEKKILEVGEENVAAFIAEPIQGAGGVIVPPDTYWPKIREILAKYDILFIADEVICGFGRTGEWFGSQYYGNAPDLMPIAKGLTSGYIPMGGVVVRDEIVEVLNQGGEFYHGFTYSGHPVAAAVALENIRILREEKIIEKVKAETAPYLQKRWQELADHPLVGEARGVGMVAALELVKNKKTRERFTDKGVGMLCREHCFRNGLIMRAVGDTMIISPPLVIDPSQIDELITLARKCLDQTAAAVLA

SEQ ID NO: 5110 - protein, 333 aa, Saccharomyces cerevisiae
MSEPSEKKQKVATSSLEQLKKAGTHVVADSGDFEAISKYEPQDSTTNPSLILAASKLEKYARFIDAAVEYGRKHGKTDHEKIENAMDKILVEFGTQILKVVPGRVSTEVDARLSFDKKATVKKALHIIKLYKDAGVPKERVLIKIASTWEGIQAARELEVKHGIHCNMTLLFSFTQAVACAEANVTLISPFVGRIMDFYKALSGKDYTAETDPGVLSVKKIYSYYKRHGYATEVMAASFRNLDELKALAGIDNMTLPLNLLEQLYESTDPIENKLNSESAKEEGVEKVSSINDEPHFRYVLNEDQMATEKLSDGIRKFSADIEALYKLVEEKM

SEQ ID NO: 5111 - protein, 381 aa, Gibberella zeae PH-1
MLAIRALRTPASRQALRTAAPRAAIFYNRCYSTSGDRVAKYNGTKDAKGNFLVSLIEGDGIGPEIAQSVKDIFAAAKTPIAWEPVDVTPIIKDGKTAIPDAAIDNIKKNKIALKGPLATPIGKGHVSLNLTLRRTFNLFANLRPCRSVAGYETPYDNVNTVLIRENTEGEYSGIEHVVVDGVVQSIKLITREASERVLRFAFQHAESIGRKKVRVVHKATIMKLSDGLFLKVAQEVAKDFPGIEFDAELLDNSCLKMVTDPTPYNDKVLVMPNLYGDILSDMCAGLIGGLGLTPSGNIGDECSIFEAVHGSAPDIAGKNLANPTALLLSSIMMLRHMGLNEHATRIEKAIFDTLAEGKALTGDLGGKAKTNEYAAAIISRL

SEQ ID NO: 5112 - protein, 91 aa, Brassica napus
MYYQLTKSSYMDSLKILEADIEHANGLAAEIPMGKSGVRLQMKLVCSNLAPFFIFLLQWMDFSCLLPRYFDFFHILIYKVRSDGRRNLSRY

SEQ ID NO: 5113 - protein, 502 aa, Rhizobium sp. NGR234
MDESVRNYLDQYGVSDATRRFLAKPQKMFIDGAWSDSSNGATFDIFEPSTGGLITRAPSGTPEDLDRAVRAARRQFDGGAWRRLKPLERERLLHSLADLIEAHSDELAEIEAIDMGKSVTFAREIDIRGTVDTFRYFAGWASKLHGRTVEPSLPGNYLAYTRKEPLGVVAAIVPWNFPLQTLAWKLAAALAVGCTAIVKPAELTSLSTLRFAELVQEAGIPDGVVNIVTGKGSIIGAAMSTHPGINKVTFTGSTPVGQEVGRTAVGNLKHVTLELGGKSPVLVLDDADLQSAAVAVANGVFFNSGQVCDAGTRVYVQGSVHDAFLDELVSVTSALKIAPGLDRDCYIGPLVSAQQKKVVSGYIEAGRREGAELIHGGASLHRQGHFIEPAIFSHCKPQMSIVREEIFGPVLVTSPFDDLDDAVSLANDTPFGLAAAIYSNDLSRVHTLIPRLHAGSIYVNAHSTIDPAMPFGGFKASGFGKDLGPEQLDYLMETKAVWITLP

SEQ ID NO: 5114 - protein, 175 aa, Triticum aestivum
MGPTLMASSATSVAPFQGLKSTAGLPVSRRSNGASLGSVSNGGRIRCMQVWPIEGMGGWGSLSYLPPLTHKTLLKQVDYLIRSKWVPCLEFSKVGFIFREHNAFPGYYDGRYWTMWKLPMFGCPDPTQVINEVEEVKKEYPDAYVRIIGFDNMRQVQCVSFIAFKPPGCEESGKA

SEQ ID NO: 5115 - protein, 274 aa, Lactobacillus johnsonii NCC 533
MEYFNLNDGNRIPKIGFGTYKLNGSRGVFAIQAALKNGYRLLDSAVNYENEGAVGRAIKNSGINRDDIFITSKLPGRHHKYQEAIEQIQESLYAANLDYYDLYLIHWPNPKENHYLEAWQAMLDAQRFGLIRSVGVSNFEPSHIEHLYRETGVMPAINQVELHPYWSSKTIREYDNKHNIITEAWSPLQRAGEAFQEKEIIDLAQKYHKSPAQIILRWETQLNVVPIPKASSYEHQISNLDIFDFKLTPEEVQKLINLDKISARRFDPNEHEEF

SEQ ID NO: 5116 - protein, 346 aa, Magnaporthe grisea
MSSTTEERQVWQPLHPQVRPRLDPQYVEVHDKLLQYAPPTHTQPWSAAMRQPSQASVKTGLDVVPVLTEEVQLERFTILVLTPVTNADDEPRPESGWPVFVWFHGGGFVLGDHSSELDLLTRICATARCVVCSVGYRLAPEHPYPAAIEDGTDGVRWILSDAQDGGATRFSIDRNRWAIGGVSAGALLSTVTLISLGEAGDLDSGEMARPLRQVLVVPVVDNTAMPGSGFWSINPHAISPSAERMLWYRRLWLGDADPRVWSVSVNHASDKQLAYMPPTFTAIGGEDLLAPEGLAFVDQLRGAGVDVETMMLPGCPHAILAFAGCVDKAKDLFDMCVDRISKSFGN

SEQ ID NO: 5117 - protein, 494 aa, Arabidopsis thaliana
MVLTKTATNDESVCTMFGSRYVRTTLPKYEIGENSIPKDAAYQIIKDELMLDGNPRLNLASFVTTWMEPECDKLIMDSINKNYVDMDEYPVTTELQNRCVNIIARLFNAPLEESETAVGVGTVGSSEAIMLAGLAFKRKWQNKRKAEGKPYDKPNIVTGANVQVCWEKFARYFEVELKEVNLSEGYYVMDPDKAAEMVDENTICVAAILGSTLNGEFEDVKRLNDLLVKKNEETGWNTPIHVDAASGGFIAPFIYPELEWDFRLPLVKSINVSGHKYGLVYAGIGWVVWRAAEDLPEELIFHINYLGADQPTFTLNFSKGSSQIIAQYYQLIRLGFEGYKNVMENCIENMVVLKEGIEKTERFNIVSKDQGVPVVAFSLKDHSFHNEFEISEMLRRFGWIVPAYTMPADVQHITVLRVVIREDFSRTLAERLVADISKVLHELDTLPSKISKKMGIEGIAENVKEKKMEKEILMEVIVGWRKFVKERKKMNGVC

SEQ ID NO: 5118 - protein, 664 aa, Zea mays
MSPSNPLPPPGETRVGCSLPSPVTPQAMGGGPARHVAMRALRARFLSRQREGGPAAASTWWWCASGSAKGDMESTLKGIRGSDAPCVLDLDDAATVAGGVEDTYGEDRATEEQLVTPWTVSVASGYNLLRDPRYNKGLAFTERERETHYLRGLLPPAIVSQELQERKIMNNIRQYQLPLQRYMALMDLQEGNERLFYKLLIDNVEELLPIVYTPTVGEACQKYGSIFSRPQGLYISLKEKGKILEVLKNWPERSIQVIVVTDGERILGLGDLGCQGMGIPVGKLSLYTALGGVRPSACLPITLDVGTNNEELLNDEFYIGLRQRRATGQEYTDFLQEFMSAVKQNYGEKVLIQFEDFANHNAFDLLARYGTTHLVFNDDIQGTASVVLAGLIAAQTLLGGSLADHTYLFLGAGEAGTGIAELIALEISRQTKAPIEECRKKIWLVDSKGLIVSTRKESLQHFKKPWAHEHKPLSNLLDAVNAIKPTVLIGTSGKGQTFTKDVVEAISSFNERPIILALSNPTSQSECTAEQAYTWSKGQAVFATGSPFDPVEYNGKIHVPGQANNAYIFPGFGLGVVMSGAIRVHDDMLLAASEALAQQVTEENFEKGLIYPPFSNIRKISAHIAASVAAKAYELGLASRRPRPKDLVKYAESCMYSPIYRNYR

SEQ ID NO: 5119 - protein, 568 aa, Zea mays
GRDLTKFACDDLTIGFFFPPPPPPPPSSGYTLLRDPRHNKGLAFSEAERDAHYLRGLLPPALASQELQEKKLMHNLRQYERPLHRYIAMMDLQERNERLFYKLLIDNVEELLPVVYTPTVGEACQKYGSIYRRPQGLYISLKDKGKILEVLKNWPERSIQVIVVTDGERILGLGDLGCQGMGIPVGKLSLYTALGGVRPSACLPITIDVGTNNEALLNDDFYIGLRQRRATGEEYHELVEEFMAAVKQNYGEKVLTQFEDFANHNAFDLLEKYRESHLVFNDDIQGTASVVLAGLLAALKVVGGTLADHTYLFLGAGEAGTGIAELIALEMSKHTGSPIEECRPKIWLMDSRGLIVASRKESLQAFKKPWAHEHGAVETLLEAVRSLKPTVLIGTSGKGGTFTKDVVEAMASQNERPVVFALSNPTSHSECTAEQAYTWTEGRAVFASGSPFPAVELDGRALVPGQSNNAYIFPGFGLGVVISGAIRVRDDMLLAASEALAEQVTEAHYAKGLIFPPFTNIRAISARIAAKVAAKAYELGLASRLPRPDDLVKYAESCMYTPTYRSYR

SEQ ID NO: 5120 - protein, 174 aa, Candida albicans SC5314
MSAIIRQAIRPALRSVSSKRIAVTALRYNSTAAEPAKAPVDAKITTIVDQISTLTLLETSQLINELKERLNISDISLPVGGAQAAPVAQAAPAEEEVKEEVEEKTIFSIKLESFDAKSKPKIIKEVKGMLGLSLVESKKFVESAPKVLKENVAKEDAEKIKATLEGLGAKVSLE

SEQ ID NO: 5121 - protein, 119 aa, Brassica rapa
MTFASKIITCLLVLTIYIAAPTESHITCGTVTSTMTQCISYLTNGGPLPSSCCVAVKSLNQMAQTTPDRRQVCECLKSAGKEIKGLNIDLVAALPTTCGVSLSYPIGFNTNCDSISIAV

SEQ ID NO: 5122 - protein, 444 aa, Candida albicans SC5314
MVNLLKKLHITKSHQSNQSNSDSNSLNSNTSMDNHQQQQQLQHQQYQQQFQQPQQQLYPGEQIVHPAAAQTGQNTTNVTAVSSSNITQSATSSLHSQQLQHVDVSKSAAEEAIRRSLLPERSTVSKGKYSLTDFSIMRTLGTGSFGRVHLVRSVHNGRYYAIKVLKKHQVVKMKQVEHTNDERRMLKLVEHPFLIRMWGTFQDSKNLFMVMDYIEGGELFSLLRKSQRFPNPVAKFYAAEVTLALEYLHSHDIIYRDLKPENILLDRNGHIKITDFGFAKEVSTVTWTLCGTPDYIAPEVITTKPYNKSVDWWSLGVLIFEMLAGYTPFYDSTPMKTYEKILAGKIHYPSFFQPDVIDLLTKLITADLTRRLGNLINGPADIRNHPWFSEVVWEKLLAKDIETPYEPPITAGVGDSSLFDHYPEEQLDYGSQGEDPYASYFLDF

SEQ ID NO: 5123 - protein, 497 aa, Emericella nidulans
MSDLFTTIETPVIKYEQPLGLFINNEFVKGVEGKTFQVINPSNEKVITSVHEATEKDVDVAVAAARAAFEGPWRQVTPSERGILINKLADLMERDIDTLAAIESLDNGKAFTMAKVDLANSIGCLRYYAGWADKIHGQTIDTNPETLTYTRHEPVGVCGQIIPWNFPLLMWSWKIGPAVAAGNTVVLKTAQQTPLSALYAAKLIKEAPFPAGVINVISGFGRTAGAAISSHMDIDKVAFTGSTLVGPTILQAAAKSNLKKVTLELGGKSPNIVFDDADIDNAISWANFGIFFNHGQCCCAGSRILVQEGIYDKFVARFKERAQKNKVGNPFEQDTFQGPQVSQLQFDRIMEYINHGKKAGATVATGGDRHGNEGYFIQPTVFTDVTSDMKIAQEEIFGPVVTIQKFKDVAEAIKIGNSTDYGLAAAVHTKNVNTAIRVSNALKAGTVWINNYNMISYQAPFGGFKQSGLGRELGSYALENYTQIKTVHYRLGDALFA

SEQ ID NO: 5124 - protein, 297 aa, Zea mays
  misc_feature (50)..(50): Xaa can be any naturally occurring amino acid
  misc_feature (77)..(77): Xaa can be any naturally occurring amino acid
  misc_feature (124)..(124): Xaa can be any naturally occurring amino acid
MPVPPEPLPKPELPVPPQPMPPPVRPVPPQPLPRPPPCPLLPWPSRCCSXSGDIGGAARQLQELPKPDLPPLPKPVXPPRPDLPPLPKPEEQPPLPKPELPVPPQPLPIPPQPLPKPELPVPPXPSPVPPQPELPVPPQPMPKPELPVPPQPLPKPDMPVPPESLPKPELPVPPQPLPKPELPVPPEPLPKPELPVPPQPLLKPELPVPPEPLAKPELPMPPQPLPKPELPVPPEPLPKPELPVPPEPLPKPELPVPPEPLPKPELPPPVLPGELPPKPELVPLPPKAEIMPPLPKP

SEQ ID NO: 5125 - protein, 429 aa, Aeropyrum pernix K1
MHCSLAGWTVCVDFLYTGDKMLEDACAVISGERVERVHTGGFRGQPDLDLRGRSSLALPGVIDMHVHLRGLKLSYKEDEVSGTAAAASGCVTLVADMPNTQPPLRTPEALREKLASLEAGAKVDYTVYAGVPRSYGEAVEMASMGIAGFKIYPEDLVNLDSIKNVLEAAEEAGILVVLHPESHDMFAGPDYGWLRRVARPCHAEAASVELLHDAARECGCKPRVHITHASCPATVVESKKRGFTVDVTPHHLFLSEEEVAGPTHSWGKVNPPLRGVGERSLLTQLTIEGLVDAIASDHAPHSTWEKWMHPAIAPPGFPWLEWWPGFTAARLMRAVGLERFYSMVSQTPSTILGVGDRCLWDGCPATISVLQLERTRVYHKGYTKALYTPVLGMESFDCAATVIRGKIAYTAWEGVRGGATGVLATRVVH

SEQ ID NO: 5126 - protein, 116 aa, Ricinus communis
MKNIFFSVFFLLSFLLCLANVSEAAVPCSTVDMKAAACVGFATGKDSKPSSACCTGLQQLAQTVKSVDDKKAICRCLKASSKSLGIKDQFLSKIPAACNIKVGFPVSTATNCETIH

SEQ ID NO: 5127 - protein, 116 aa, Ricinus communis
MKNAVFSVLLLLSFLFCLANTNEAAVPCSTVDMKAAACVGFATGKDSKPSQACCTGLQQLAQTVKTVDDKKAICRCLKASSKSLGIKDQFLSKIPAACNIKVGFPVSTNTNCETIH

SEQ ID NO: 5128 - protein, 424 aa, Zea mays
MERYKLIRKIGDGTCGNVFMASNVETNEIVAVKKMKRKFCHWEECISLREVKALQKLFHPNIVKLKEVTMENHELFFIFEHMECNLYDVIRERQVAFPERDIRNFMVQILQGLAYMHNNGYFHRDLKPENLLVTNGIIKIADFGLAREISSNPPYTDYVSTRWYRAPEVLLQSSVYTPAIDMWAVGAILAELFTLSPLFPGESETDQLYKICTVLGTPDCTIWPEGMNLPRSCSFKFFQNPPRNLWELIPNASSEAIDLIQQLCSWDPRRRPTAEQALQHPFFNVCNWVPRPVHDAYHTKTNGPKAEPRLELNLWDFSTEPDDCVLDLTLSLKPSFSGTDLGKHVPRRTEEEILLYPGFENTPVKSGFWPLVPSDRPVGDVPAIPSWQQAYMVDSQGAFSGSPFLQSNLLENRSLAPIRQVNFF

SEQ ID NO: 5129 - protein, 316 aa, Streptomyces coelicolor A3(2)
MSDIVLEPAAQDFADATAKPPLLYELGVEGARKLLDDVQSGPVEKPDVDEKWITVPVEVGDVRVRIVKPAGTTGVLPVVLYVHGGGWILGNAGTHDRLVRELAVGAEAAVVFVEYDRSPEAKYPVAIEQAYATAQWVTTKGAEEGLDGSRMVVAGDSVGGNMSAALTHMAKRRGDVTFLHQSLYYPVTDAGQDTESYRLFAHGPHLTAKAMEWFWNAYAPDPAERDQITASPLRATPEDLQGLPPAFVVVDENDVLRDEGEAYARKLIQAGVPTTSVRYNASLHDFMMLNPVRGTQASTAAIEQAIHVLRSALGTD

SEQ ID NO: 5130 - protein, 326 aa, Oceanobacillus iheyensis HTE831
MNGLYLSSPGVIEFRELASRSKLSDDEVRIRLIYGGICGSDISVFKGKLPHANYPVVPGHELIGTVIETGKSAADFAGKRVAIMPNSFCGKCEYCKVGKTNICTEKQSLGINRDGGFAEEFVISAKYVLSLPDQLTNEKAVLIEPLAVIVHAMKKVVITEETKVAIIGCGNEGMLAIAVAEYLGAQVTAIDVKQNKLNKVSHSYHNVSTCQSADAEELFDVVIEAAGTSESFEQGIQLLKPGGAFVAIGMPPHANLPVVEIVRKEVTIYGSIIYNFPEDFNTSIEFLLQEDFQVEPVISKILSVNEYEKAYTYAVSGDYGKIILKF

SEQ ID NO: 5131 - protein, 322 aa, Xanthomonas campestris pv. phaseoli
MTASPSKLAQLRELSVVVADTGDYDAIKRLQPVDCTTNPTLVKKALDLPVYADLIERELAWGREHGGDDRTATVNEVADRLTIGVGVKLAGLVPGRVSTEVDADLAHDTQATIAKARKFIAMYAERGVSKDKILIKIAATWEGIEAARQLQKEGIDCNLTLIFNRSQALACAEAGVFLISPFVGRILDYYVGKGQTPASIDEDPGVVFVRTVYNEFKQRGYSTVVMGASFRSTAQIEALASCDRLTISPDLLEKLDAEHGELPRKLSPAKADNAQFTPIDSDSFASGLAADPMATEKLAGGIDTFAKDLHALRKTIADKLAG

SEQ ID NO: 5132 - protein, 297 aa, Triticum aestivum
  misc_feature (153)..(153): Xaa can be any naturally occurring amino acid
MKTLLILTILAMATTIATANMQVDPSSRVQWPQEQPSPQSQQPFSQQPQQIFPQPQQTFPHQPQQAFPQPQQTFPHRPQQQFPQPQQPQQPFPQPQQPQLPFPQQPQQPFPQPQQPQQPFPQSQQPQQAFPQPQQQFPQPQQPQQSFPQQQQXMIQSFLQQQMNPCKNFLLQQCNPVSLVSSLVSIILPRSDCQLMQQQCCQQLAQIPQQLQCAAIHNVAHSIIMQQEQQRGVQILRPLFQLAQGLGIIQPQQPAQLEGIRSLVLKTLPTMCNVYVPPDCSTINVPYASIDAVIGGQ

SEQ ID NO: 5133 - protein, 270 aa, Pyrus caucasica
AHYKSEADVGEAFAEAFKTGLIKREELFITTKIWNSDHGHVVEACKNSLEKLQLDYLDLYLVHYPMPTRHNAIGKTASLLGEDKVLDIDVTISLQQTWEGMEKTVTLGLVRSIGLSNYDLFLTRDCLAYSKIKPAVSQFETHPYFQRDSLVKFCIKHGVLPTAHTPLGGAAANKDMFGSVSPLDDPILNDVAKKYGKSVAQICLRWGIQRKTAVIPKSSKIQRLKENLVVLEFQLSDEDMQLIYSIDRKYRTSLPSKTWGLRRVCKGEFV

SEQ ID NO: 5134 - protein, 324 aa, Magnaporthe grisea
MSNSLDQLKSSGTTVVCDSGDFATIGKYKPQDATTNPSLILAASKKAEYAKLIDDAIAYAKKQGGSVDDQVDASLDRLLVEFGKEILKIIPGKVSTEVDARFSFDTKASVDKALHIIKLYEAEGISKDRVLIKIASTWEGIKAAEILQRDHGINCNLTLMFSLVQAIAAAEADAFLISPFVGRILDWYKAAHKKEYKKEEDPGVESVKNIFNYYKKFGYKTIVMGASFRNTGEITELAGCDYLTISPNLLEELLNSSEAVPKKLDAQGAAALDIQKKTYISDEPLFRFDFNEDQMAVEKLREGISKFAADADTLKGILKEKIQA

SEQ ID NO: 5135 - protein, 213 aa, Triticum aestivum
  misc_feature (203)..(203): Xaa can be any naturally occurring amino acid
YPVKCNQDRYVVEDIVEFGAPFGFGLEAGSKPELLLTMSCLVARGSPDALLVCNGYKDLEYVSLALIARTMGLNTVIVLEQEEELDIVVEASRRLNIRPVVGMRAKLRTKHAGHFGATSGEKGKFGLNAAQILSVVSKLKALAMLDCLQLLHFHIGSQIPTTALLADGVGEAAQIYCELARLGAAMRVIDVGGGLGIDYDGTXSAQTDMSVAY

SEQ ID NO: 5136 - protein, 462 aa, Zea mays
  misc_feature (136)..(136): Xaa can be any naturally occurring amino acid
  misc_feature (185)..(185): Xaa can be any naturally occurring amino acid
MARSRQEGEAGGEERKLVLGKYELGRLLGQGTFAKVYYARDLSAAAGTGSTSVAIKVIDKARLRRMEGMVEQLRREISIMRMVRHPNVVGIREVLASRSRVFVVMEYARGGELFAKVARGRLTEDHARRYFQQLVXAVGFCHRRGVAHRDLKPENLLLDEDGRLKVTDFGLAALPEQLRHDGLLXHTQCGTPAYVAPEVLRKRGYDGARADLWSCGVVLYVLLCGFLPFQHDNCAKMYQRIFKAEYQVPPWVSGDARRLIARLLVVDPAKRASIPEVMCTPWFRKGFVPPVLSVSPPMTPKKRLDGDDGGGGALFDSSSNSGATSPRSCNAFQLISSMSSGLDLSGLFENEHKAATVFTARAPAATVVEKLESAARALGFETTRGKGWKVRMEAKAGGTNGRLAVTAEVLEVAVDVAVVEFAHDAGDALDFNKFCAVDVRPGLAEIVWAWQGDSPAAVVGTA

SEQ ID NO: 5137 - protein, 203 aa, Pichia angusta
MNNEYDYLFKLLLIGDSGVGKSCLLLRFAEDTYTQDYISTIGVDFKIRTIELDGKTIKLQIWDTAGQERFRTITSSYYRGAHGIIIVYDVTDQESFNNVNQWLQEIDRYATSGVMKLLVGNKCDLTDKKVVDYAVAKEFADSRGIKFLETSASQSTNVEQAFIVMSKQIKSQMANSQPASNTAGKPSVNLSGTSVINQQGGCC

SEQ ID NO: 5138 - protein, 1563 aa, Lactobacillus johnsonii NCC 533
MTVPTNQTNNLNEETNQNESTVSITGAKTNDSLIAGVTQGAINVHINNHATTPLTINHGEQVNVSINDKNNLLSFNVNPTKTSEFDMNRTDTAANKEFTFTYTGSDDGILSGFDATFPFNADTTATTQYYEKYGTYPDLTLPVTVTLPNKQSFTQNLPIKINPYEDKVINEEILHGFIIGPKVIWTPGEDGNPGANGVYTEYGANYTGPEPSAKADIPVAQQKDARLMQYAIDWNYGSSTNPSLKPLLNVLAHIKFSSGQRILPSTIKVFKIPSNIKVVASDGQRISINDYYSKISTLSEDTNFENFLRNSISNDGREIVIDQKGNFTVNGEDYSKNGPYFIQLDTQLDINKIPDWINTPSSGPSISTPTTNENDWNPSGSGSTANTFTQTYTNFKLDPTVDRIIKIRFIDENTNQEIPNSAKNIITATNSSVPNPTMDIIKDLEERHYVLDQEATEGKNGSHSENLTNYNIATQNFKLDSLNNSYNSEEINVKNTSPKYYVYLYHETKPQSQTSSVTETINYVCANGTKKGELAALPYTHTVTYTRNGIEDLVTNYIDWNSWMPDSTFNAVNSPIASDSAYSLIDPLVVPAIETNISENGEITTQNSIPLSYTVNYYAPEKATLHFYDDTDKQDLTAYLLQNNQTAVINDIYDKADNNSTKQAISFAGVDKVIDFLNSKHYVFSGVSGIGSTSSSDYSKISYGNFDDDETQDQNFVLHFKHETEPISDTKEVTETIHYLYEDNSQAANDVKHSVTFTKTGTKDLVTGKENSKWSAVQTFPEVVSPVISGYTPTQSKIAPISVDHTSNDIDKTVIYTANKQQATLRFYDDSSKKFIDFAKDLIVTGSSSSPILFTIPKSYDFSNYNFVAVNKGDNPTQTTDSLSGTTLNDVTYGKFDTDNTTNQYFIAHFTHKISPVNENKSISEKAILYAENGPRKDNIFKTLNLGNINFIRTGQKDLVNQQITWDAWNVENKAQNISISEIIFNVYKLNSQNISQPSSTLKKFELNGHEISPIEFDKKQDQALIITLPNNFEFLIKVPYVLTENITVIYKDDTTNEILERQVLSGQPDTSSQYSTKNTITKYLAKNYLLVSDPTNQQTLSFDNTEDPDDQTYVVHFKHQFEEINNSKSIKETINYIYDNGTEAAPSYTNSIQFVQSGEVDLVTNIRKIKDWTPSISSFSAVKSPIINGYTTDHKQIDQQFITPNSKDLVFNVVYTAEPVKPTKPVQPIKPMQPTKPVQPTKPVQPTKPVEPTKPVQPTKPVQPTKPVEPTKPVQPTKPVEPTKPVQPTKPVQPTKPIEPTKPVKPTKPVEPTKPVKPTKPVKPTKPVEPIKPVKPTKPVQPTKPVEPIKPVKPTKPVQPTKPVEPIKPVKPTKPVQPTKPVKPTKPVEPTKPVQPIKPVQPTKPVQPTKPVEPTKPVEPTKPVRPTKPVEPTKPVKPTKPVEPTKPVQPTKPIEPTKPVEPTKPVQTTKPVEPTKPVQPTKLTISTSLHKSSDKLTQLTHQSYQNSKVSRQNTNNISVQKKKILPQTGTKTTDIGILGLALATAASLLGLISDKVNRKKHN

SEQ ID NO: 5139 - protein, 475 aa, Prochloron didemni
MSKLILFWHRRDLRISDNMGLAAARKQSSKIVGLFCLDPNILNSNEVAPARVTYMLGCLQELKESYSKIGSQLLIVRGEPIEAIPQLAVALQVTGVFWHKDGEPYARERDGKVEQELLKQGIAVTNYWDQLLHPPEDILTQSGKPYTVYTPFWKNWSQKPKLEVAEKLDRIQGLTAEEIKIAQETGVVSLPTGKDLGYYWDGELILTPGETAAREQLEEFSERAIAQYQEQRNFPAVEGTSLLSPALRFGVIGIRTVWQATLEATKNSYSEEVRANIETWQKELAWREFYQHALYHFPQLTVEPYRQQFKDFPWDNNPEHFQAWCEGKTGYPMVDAAMRQLNETGWMHNRCRMIVASFLTKDLIINWQWGEQYFMQKLCDGDLASNNGGWQWSASCGMDPKPLRIFNPASQAKKFDPEGEYIRQWLPELSSIDTEYLVRGKIPDDERERCDYPQPIVDHNLRQREFKRRYKELSP

SEQ ID NO: 5140 - protein, 495 aa, Neurospora crassa
MEVELTAPNGKKWMQPLGLFINNEFVKSANEQKLISINPTTEEEICSVYAATAEDVDAAVSAARKAFRHESWKSLSGTERGALMRKLADLVAENAEILATIECLDNGKPYQTALNENVPEVINVLRYYAGYADKNFGQVIDVGPAKFAYTVKEPLGVCGQIIPWNYPLDMAAWKLGPALCCGNTVVLKLAEQTPLSVLYLAKLIKEAGFPPGVINIINGHGREAGAALVQHPQVDKIAFTGSTTTGKEIMKMASYTMKNITLETGGKSPLIVFEDADLELAATWSHIGIMSNQGQICTATSRILVHEKIYDEFVEKFKAKVQEVSVLGDPFEESTFHGPQVTKAQYERVLGYINVGKEEGATVMMGGEPAPQNGKGFFVAPTVFTNVKPTMKIFREEIFGPCVAITTFKTEEEALTLANDSMYGLGAALFTKDLTRAHRVAREIEAGMVWVNSSNDSDFRIPFGGVKQSGIGRELGEAGLAPYCNVKSIHVNLAA

SEQ ID NO: 5141 - protein, 267 aa, Bordetella pertussis Tohama I
MTIPSFGVGTFRLTGQTVIDSVRNAIDLGYRAVDTAQIYGNETEVGQTIAESGVARSELFVTTKIWTDNYARAKLLPSLRASLEKLRTDYVDLTLIHWPAPGNGVALPEHMEALAEAKALGLTRRIGISNFNIALTRQAIAAVGQGEIATNQIELSPYLQSARLTAFLREQGIAVTSYMTLAYGKVLKDPVLARIADKHRSTVAQVALAWALQQGYAVIPSSTKRENLASNLLARGLALDADDMARIAALERNGREVDPEGLAPAWD

SEQ ID NO: 5142 - protein, 324 aa, Magnaporthe grisea 70-15
MASPTMKLNNGLDMPQVGFGLWKVENSVCADVVYNAIKAGYRLFDGACDYGNEVECGQGVKRAIDEGLVKREELFIVSKLWNTFHDGERVEPIVKKQLADWGIEYFDLYLIHFPVALEYVDPSVRYPPGWHYDDAGTEIRPSKASIQETWTAMEKLVDAGLSKAIGVSNFQAQLLYDMLRYARIRPATLQIEHHPYLVQQRLIEACKTEGIVVTAYSSFGPASFKEFNMEHAEALTPLLEEPTIVKLAEKYGKDPGQVLLRWATQRGLAVIPKSSREKTMKSNFEAVGWDMEDSDIKTISALDKGIRFNQPANYFSTDKLWIFG

SEQ ID NO: 5143 - protein, 322 aa, Schizosaccharomyces pombe
MSSLEQLKATGTVVVSDTGDFESIAKYKPQDATTNPSLILAASKKPQYAALVDAAVDYAKAKGGSINSQIEIAFDRLLIEFGTKILAIVPGRVSTEVDARYSFDTQTTIEKARHLIKLYEAEGIGRERVLIKIASTYEGIQAAKQLEEEGIHCNLTLLFSFVQAVACAEANVTLISPFVGRILDFYKAKNNRDYTAQEDPGVVSVSNIFNYYKKFGYKTIVMGASFRNVGEIKELAGVDFLTISPALLEQLNNSTDAVPKKLDASKASSLNLEKVSYLTDEPKFRFDFNNDEMAVVKLSTGIAAFAKDADTLRTILKAKLEA

SEQ ID NO: 5144 - protein, 430 aa, Bifidobacterium longum NCC2705
MATAQLDVDSNKFNLPVVKASAGPDGIVVSKLRNDGWVTLDPGFLTTAQCESKITYIDGKHSILRYCGYPIEQLCENSDFLEVAWLLRHGELPSRAEYEQFCADINHKTMVGEDFRTFMGSFPRSAHPMSVLASAINALATFYPDTTDISDNDQLDEAAKIIMAKARTIVSYIFRRRRDEPMLYPDYARGYVDDFLRMCFAVPYEPFESDPLYVHALGRLLIIHADHEQNCSTSVVRIAGSAHANLYSAVAAGVNALSGPLHGGANEAVLRQLKAIRDSGKSVAEFVRDAKENGQKISGLGHRVYKSYDPRAAIARKYLEKIMEREDTQKLPSDERALFAVATELEDIALNDEYFVSRNLYPNVDFYTGLIYRAIGFDPAMFTTLFALGRIPGWIAQYREMLADPNTKIGRPRQVYTGPVERDFVPMDER

SEQ ID NO: 5145 - protein, 246 aa, Zea mays
  misc_feature (238)..(238): Xaa can be any naturally occurring amino acid
MGLGQPWPLLNSSHEKVLRHKHAGMHVGSKTNVYIVLEYVTGGELFDTIANHGRMREGEARSYFQQLINAVDYCHSRGVYHRDLKPENLLLDSYGNLKVSDFGLSALSQQIKDDGLLHTTCGTPNYVAPEVLEDQGYDGAMADLWSCGVILFVLLAGYLPFEDSNLMTLYKKISNAEYTFPPWKLSLPRGVLTRILDPNPMTENSCDFRITIPEILEDEWVKKGYKRPEFVEEYDTPXDDVDAVFN

SEQ ID NO: 5146 - protein, 136 aa, Vibrio parahaemolyticus RIMD 2210633
MALFKYIFITVFALALYSPASNGSEIKQNVDLFEFQSVEVQQRATSLAKTLRCPQCQNQNLIESNAPAAKDLRLKVYTMVNEGSSDQQVKDYLVERYGNIVLYQPPFNYSTALLWIFPIIFLIFFALFSIRLIKRN

SEQ ID NO: 5147 - protein, 698 aa, Glycine max
  misc_feature (251)..(251): Xaa can be any naturally occurring amino acid
  misc_feature (626)..(626): Xaa can be any naturally occurring amino acid
  misc_feature (636)..(636): Xaa can be any naturally occurring amino acid
  misc_feature (648)..(648): Xaa can be any naturally occurring amino acid
MPVLACCVDAAAPPGYAFAGDISFPAPIAFTGVPPATADDTNNSNNHWSPSLSAALYNVDGWGGPYFAVNTAGNISVRPHGSDTLSHQEIDLLKIVKKASDPKSLGGLGLQLPLIVRFPDVLKNRLDSLQSAFDYAIQSGGYESHYQGVYPVKCNQDRFVVEDIVKFGSSFRFGLEAGSKPELLLAMSCLCKGNPDALLICNGFKDAEYISLALVANKLALNTVIVLEQEEEVDLIVELSKKLCIKPVIGXRAKLRTKHSGHFGGTSGEKGKFGLTTAQILRVVKKLAHAGMLDCLQLLHFHIGSQIPSTALLADGVGEAAQIYCELVRLGANMRVIDIGGGLGIDYDGSKSCDSDISVEYGLEEYAAAVVHAVQCVCDRRSVKHPVICSESGRAIVSHHSVLIFEAVGTSSTNGGGAPPALSAHYLAEELSEDYGYLSELAFRGDYETCLVYTEEMKERCVEQFKQGTVCMEQLAAVEGLCELVRKAVGAAESVRRYHVNLSIFTSVPDAWGIDQVFPIIPIHRLEEKPSVRGILSDLTCDSDGKIDKFINGESSLALHEMEGGSYYLGMFLGGAYEEALGGVHNLFGGPSVIRVSQSDGPHSFAVTRAVPGPSCGDVLRVMQHXPELMFETLKXHRAQEYVSHDNXAAVLAAGLARTFDRMPYLLPLSSFVADDVAAAAAVPAGEDDEEQWSYICA

SEQ ID NO: 5148 - protein, 416 aa, Escherichia coli
MESKVVVPAQGKKITLQNGKLNVPENPIIPYIEGDGIGVDVTPAMLKVVDAAVEKAYKGERKISWMEIYTGEKSTQVYGQDVWLPAETLDLIREYRVAIKGPLTTPVGGGIRSLNVALRQELDLYICLRPVRYYQGTPSPVKHPELTDMVIFRENSEDIYAGIEWKADSADAEKVIKFLREEMGVKKIRFPEHCGIGIKPCSEEGTKRLVRAAIEYAIANDRDSVTLVHKGNIMKFTEGAFKDWGYQLAREEFGGELIDGGPWLKVKNPNTGKEIVIKDVIADAFLQQILLRPAEYDVIACMNLNGDYISDALAAQVGGIGIAPGANIGDECALFEATHGTAPAYAGQDKVNPGSIILSAEMMLRHMGWTEAADLIVKGMEGAINAKTVTYDFERLMDGAKLLKCSEFGDAIIENM

SEQ ID NO: 5149 - protein, 165 aa, Zea mays
  misc_feature (101)..(101): Xaa can be any naturally occurring amino acid
MDGRMFGLETPLMVALQHLLDVPDGDAGAGGDKASGAAAGGGPTRTYVRDARAMAATPADVKELPGAYAFVVDMPGLGTGDIKVQVEDERVLVISGERRRXEREDAKYLRMERRMGKFMRKFVLPDNADMDKISAVCRDGVLTVTVEKLPPPEPKKPKTIEVKVA

SEQ ID NO: 5150 - protein, 498 aa, Acinetobacter sp. SE19
MGGIPHIPFCLTSVICQGCLIMNYPNIPLYINGEFLDHTNRDVKEVFNPVNHECIGLMACASQADLDYALESSQQAFLRWKKTSPITRSEILRTFAKLAREKAAEIGRNITLDQGKPLKEAIAEVTVCAEHAEWHAEECRRIYGRVIPPRNPNVQQLVVREPLGVCLAFSPWNFPFNQAIRKISAAIAAGCTIIVKGSGDTPSAVYAIAQLFHEAGLPNGVLNVIWGDSNFISDYMIKSPIIQKISFTGSTPVGKKLASQASLYMKPCTMELGGHAPVIVCDDADIDAAVEHLVGYKFRNAGQVCVSPTRFYVQEGIYKEFSEKVVLRAKQIKVGCGLDASSDMGPLAQARRMHAMQQIVEDAVHKGSKLLLGGNKISDKGNFFEPTVLGDLCNDTQFMNDEPFGPIIGLIPFDTIDHVLEEANRLPFGLASYAFTTSSKNAHQISYGLEAGMVSINHMGLALAETPFGGIKDSGFGSEGGIETFDGYLRTKFITQLN

SEQ ID NO: 5151 - protein, 506 aa, Oryza sativa (japonica cultivar-group)
MVALASLSSLSPCGLARRRSASSAASISCCAAPPPPSAKGSQESRTPRRRVRKTEGATKSLEDSVKRKMEQFYEGLDGPPLRVLPIGGLGEIGMNCMLVGNYDRYILIDAGVMFPDFDEFGVQKIIPDTTFIKKWSHKIEAVIITHGHEDHIGALPWVIPALDSSTPIFASSFTMELIKRRLKEFGIFLSSRLKVFRVRKRFQAGPFEVEPLRVTHSIPDCCGLVLRCADGIIFHTGDWKIDESPVDGKIFDRQALEELSKEGVTLMMSDSTNVLSPGRSISESVVAGSLLRHISEAKGRVITTQFASNIHRIGSIKAAADLTGRKLVFVGMSLRTYLDAAFRDGKSPIDPSTLVHLIESRFLLKVKVEDMDAYAPNDLLVVTTGSQAEPRAALNLASFGGSHALKLSKEDVLLYSAKVIPGNESRVMKMLNRLTELGPKIVMGKDAGLHTSGHAYHDELEEVLQIVKPQHFLPVHGELLFLKEHELLGRSTGIRHTTVSTLLAMV

SEQ ID NO: 5152 - protein, 232 aa, Zea mays
  misc_feature (157)..(157): Xaa can be any naturally occurring amino acid
  misc_feature (196)..(196): Xaa can be any naturally occurring amino acid
  misc_feature (207)..(207): Xaa can be any naturally occurring amino acid
MNSLYDVSCFAAGLAGNVFALALFLSPVPTFKRVLKAKSTEQFDGLPYLLSLLNCCICLWYGLPWVSDGGRALVATVNCTGALFQLAYISLFIFYADSRTTRLKVAGLLVLVVFAFALIAHASIAFFDQPLRQLFVGSVSMASLVSMFASPLAVMGXVVVRTECVEFMPFYLSLSTFLMSASFAVYGLLLRDFFIXSRMGSESSWEXCSWCCTRTTAGDGKQRLVSTVACLI

SEQ ID NO: 5153 - protein, 501 aa, Azoarcus sp. EbN1
MDVTPLLARLGVAMDELECGELPVRSPIDAAVIARLAPHSCAHAGVALDRAQQAFFAWRDVPPPRRGDMVRQYGNLLRRHKADLGELVSIEAGKIRQEGLGEVQEMIDICDFAVGLSRQLHGLTIASERPGHRMMEQWHPAGVVGVVSAFNFPVAVWAWNAALAWVCGDSVVWKPSPRTPLTALACAALFDSLRSEFDELPPGLLEVLVGGNELASLLADDRRVAVLSATGSTAMGKALAPRVAARLGRSILELGGNNAAIICPTADLALAERAILFAAAGTAGQRCTSLRRLIVHESIADALLERLRAAWGRITVGNPLDPATLVGPLIEAAAGAKMDRALAEARAAGGTVWGGEAIRVPGCEGACYRRPALVEMPGQTALVKEETFAPILYVLRYRTLDEAIALHNDVPQGLASSIFTRDLTESERFLSATGSDCGIANVNIGPSGAEIGGAFGGEKDTGGGRESGSDAWKAYMRRATCTINYSGALPLAQGIHFGLDA

SEQ ID NO: 5154 - protein, 382 aa, Phanerochaete chrysosporium
MAFASSLLALVALAAVTSAAPATTQATCPDGTKVNNAACCAFIPLAQDLQETIFQNDCGEDAHEVIRLTFHDAIAISQSKGPSAGGGADGSMLLFPTIEPNFSANNGIDDSVNNLIPFMQKHDTISAGDIVQFAGAVALTNCPGAPQLEFLAGRPNKTIPAIDGLIPEPQDSVTSILERFKDAGNFSPFEVVSLLASHSVARADKVDETIDAAPFDTTPFVFDTQIFLEVLLKGVGFPGTANNTGEVASPLPLTSGSDTGELRLQSDFALARDERTACIWQGFVNEQALMAASFKAAMAKLAVLGHDRNTLVDCSDVVPAPKPAVNKPASFPATTGPQDLELSCNTKPFPSLSVDAGAQQTLIPHCSDGDMTCQSVQFNGPA

SEQ ID NO: 5155 - protein, 360 aa, Pseudomonas aeruginosa
MSKQILVLPGDGIGPEIMAEAVKVLELANDRFQLGFELAEDVIGGAAIDKHGVPLADQTLQRARQADAVLLGAVGGPKWDRIERDIRPERGLLKFRSQLGLFANLRPAILYPQLAAASSLKPEVVAGLDILIVRELTGGIYFGQPREQRVLENGERQAYDTLPYSESEIRRIARVGFDMARVRNNRLCSVDKANVLASSQLWREVVEEVAKDYPDVELSHMYVDNAAMQLVRAPKQFDVMVTDNMFGDILSDEASMLTGSIGMLPSASLDANNKGMYEPCHGSAPDIAGQGIANPLATILSVSMMLRYSFSQATAADAIEQAVSKVLDQGLRTGDIWSEGCRKVGTREMGDAVVAALKNL

SEQ ID NO: 5156 - protein, 112 aa, Bartonella sp. Rf1570yn
ANEACLKMLQEIGSIKRIPEFIARAKDKNDPFRLMGFGHRVYKNYDPRAKIMQKTCHEVLKELNIQDDPLLDIAIELEKIALNDEYFIEKKLYPNVDFYSGITLKALGFPTE

SEQ ID NO: 5157 - protein, 329 aa, Zea mays
  misc_feature (222)..(222): Xaa can be any naturally occurring amino acid
QDGRGGRQLRGDGLLHTACGTPAYVAPEVLLKTGYDGAKADIWSCGVILFVLLAGYLPFNDTNLILVYRKITQSNYKCPPWFSVEARKLLARLLDPNPRTRITISKVTANPWFQKGLCPLTTDKPLDLWETSEVLGKEKACRCRHHQRDDADADADADDEENTRKRKRSKVTVSSPPTVAVRPSSMNAFDIISRSSGLDLSKMFDEEHRSEARFSSRESTPXVRPRVRPRVRTRNLDIKLNKRGRVEMEGGQYCRRGTLVIEAEIFEVAPSVRVVEMRKIGGDSPEFREFYRQELKPSLGDIVWSWQGSDSPPTPLLPPAPRQATNQRP

SEQ ID NO: 5158 - protein, 509 aa, Glycine max
MASNDSDSQMKIVHGDAGYILEDVPHFADYIPNLPTYPNPLRSNPAYSVVKQYFVHMDDTVPQKVVVHKDSPRGVHFRRAGPRQKVYFKSDEVHACIVTCGGLCPGLNTVIREIVCGLSYMYGVNKVLGIDGGYRGFYSKNTITLTPKVVNDIHKRGGTILGTSRGGHDTGKIVDSIQDRGINQVYIIGGDGTQRGATVIYEEVRRRGLKVAIAGIPKTIDNDIPVIDKSFGFDTAVEEAQRAINAAHVEAESIENGIGVVKLMGRYSGFIAMYATLASRDVDCCLIPESPFYLEGKGGLFEFIQKRLKENGHMVIVIAEGAGQDLLTESMQAMDQKDASGNKLLQDVGLWISHKIKDHFARKDKIPINLKYIDPTYMIRAIQSNASDNVYCTLLAQSAVHGAMAGYTGFTVGLVNGRHTYIPFNRINERQNKVVITDRMWARLLSSTNQPSFLSPKDLEEAKKAEQPPTELLEGNNCNDVGDAGKEEQPPKDEQESGNHADNGIKTEN

SEQ ID NO: 5159 - protein, 58 aa, Glycine max
MAGDGAATCIDILLAIILPPLGVFLKYGCQSVEFWICLVLTLFGYIPGIIYAVYAITK

SEQ ID NO: 5160 - protein, 506 aa, Pseudomonas syringae pv. tomato str. DC3000
MRYAHPGTEGAIVNFKERYGNYIGGEFVAPVKGQYFTNTSPVNGKPIAEFPRSTAEDIDKALDAAHAAAAAWGSTSVQARSLVLLKIADRIEANLEVLAITETWDNGKAIRETLNADIPLAADHFRYFAGVLRAQEGSAAEIDGNTVAYHIHEPLGVVGQIIPWNFPILMAAWKLAPALAAGNCIVLKPAEQTPLGISVLIELIGDLLPAGVLNIVQGYGREAGEALASSKRIAKIAFTGSTPVGSHIMKLAADNIIPSTVELGGKSPNIFFEDIMSAEPEFIDKAAEGLVLAFFNQGEVCTCPSRALVQESIYPQFMEAVLRKVEKIKRGDPLDTDTMVGAQASEQQFDKILSYLEIAKGEGAELLTGGKVEKLEGDLSTGYYIQPTLLKGNNKMRVFQEEIFGPVVSVTTFKDEAQAVAIANDTEFGLGAGLWTRDINRAYRVGRAIKAGRVWTNCYHLYPAHAAFGGYKKSGVGRETHKIALEHYQQTKNLLVSYDTNPLGFF

SEQ ID NO: 5161 - protein, 304 aa, Azoarcus sp. EbN1
MSIQWFPGHMTSARKKAAETMALTDVVIEVLDARIPEASSNPMIHELRRHRQRVCLKVLNKADLADPVATRAWLDFFNSQEGVKAVALSCKKPGDVARVPGLCQGLAPHRNDGTKLLRIMIMGIPNVGKSTLMNALLKRRVAKVGDEPAVTKSQQTFDLGSHMTITDTPGLMWPKIAHDSDGFMLAASHAIGRNAVIDEEVATFLGDLLLERYPALLAARYGIAPERLEALDGVGVIETIAARRGCRLKGGAPDLEKASQIFLNDYRSGVLGRISLETPESRRKMLSAATSAASRAAEAIGPDA

SEQ ID NO: 5162 - protein, 279 aa, Candida albicans SC5314
MVLEATMIAIDNSEYMRNGDFLTSRYEAQLTATEFIFQNKINSNPENTVGLLAYGGSGPQVLSTLTTDFGKILAGVHETKIQGENNFSSGIQVAALALKHRQNKVQQQRIIIFVGSPIKESEKELEKLAKKMKKNNVAVDIINFGEEGVNTAKLERFQSTINNHDNSHLVTISPGPRLLYEVVASSPILVEDGGFGAGVSGGDMDFFGGAGGAGDIIDPNMDPDLAMALRLSLEEEKARQEREAADRAKAEASTDLEKIDESKEDNNDKDKDVNMEDAK

SEQ ID NO: 5163 - protein, 322 aa, Glycine max
MAGKKIPDVLLNSGHKMPVIGMGTSVENRPSNETLASIYVEAIEVGYRHFDTAAVYGTEEAIGLAVAKAIDKGLIKSRDEVFITSKPWNTDAHRDLIVPALKTTLKKLGTEYVDLYLIHWPVRLRHDLENPTVFTKEDVLPFDIEGTWKAMEECYKLGIAKSIGICNYGIKKLTKLLEIATIPPAVNQVEMNPSWQQGKLREFCKQKGIHVSAWSALGAYKIFWGSGAVMENPILQDIAKAKGKTIAQVALRWVYQQGSSAMAKSTNSERMKQNLDIFDFVLSEEDLERISQVPQRRQYTGDIWLSENGSCKTLEELWDGDV

SEQ ID NO: 5164 - protein, 338 aa, Leavenworthia uniflora
  misc_feature (170)..(170): Xaa can be any naturally occurring amino acid
TGQIIRSKAAVAWEAGKPLVMEEVEVAPPQKHEVRIKILFTSLSHTDVYFWEAKGQTPLFPRIFGHEAGGIVESVGEEVTDLQPGDHVLPIFTGECGDCPHCHSEESNMCDLLRINTERVGMIHDGESRFSINGKPIHHFLGTSTFSEYTVVHSGQVAKINPEAPLDKVXIVSCGLSTGLGATLNVAKPKKGQSVAVFGLGPVGLGAAEGARIAGASRIIGVDLNSNRFEQAKKFGVTEFVNPKEHDKPVQQVIAEMTNGGVDRSVECTGSVQAMIQAFECVHDGWGVAVLVGVPSKDDAFKTHPMNFLNERTLKGTFFGNYKPKTDIPGVVEKYMNK

SEQ ID NO: 5165 - protein, 171 aa, Oryza sativa (indica cultivar-group)
MEHKETGCQQPKGPILCINNCGFFGSAATMNMCSKCHKEMIMKQEQAKLAASSIDSIVNGGDSGKEPIIAGHAEVAVAQVEVKTLVAQPAEIAGPSEGVTVNPKGREGPNRCSTCRKRVGLTGFNCRCGNLYCAMHRYSDKHDCQFDYRTAARDAIAKANPVVKAEKLDKI

SEQ ID NO: 5166 - protein, 389 aa, Escherichia coli
TLQNGKLNVPENPIIPYIEGDGIGVDVTPAMLKVVDAAVEKAYKGERKISWMEIYTGEKSTQVYGQDVWLPAETLDLIREYRVAIKGPLTTPVGGGIRSLNVALRQELDLYICLRPVRYYQGTPSPVKHPELTDMVIFRGNSEDIYAGIEWKADSADAEKVIKFCREEMGVKKIRFPEHCGIGIKPCSEEGTKRLVRATIEYAIANDRDSVTLVHKGNIMKFTEGAFKDWGYQLAREEFGGELIDGGPWLKVKNPNTGKEIVIKDVIADAFLQQILLRPAEYDVIACMNLNGDYISDALAAQVGGIGIAPGANIGDECALFEATHGTAPKYAGQDKVNPGSIILSAEMMLRHMGWTEAADLIVKGMEGAINAKTVTYDFERLMEGAKLL

SEQ ID NO: 5167 - protein, 316 aa, Brassica napus
  misc_feature (16)..(16): Xaa can be any naturally occurring amino acid
  misc_feature (20)..(21): Xaa can be any naturally occurring amino acid
  misc_feature (23)..(23): Xaa can be any naturally occurring amino acid
  misc_feature (31)..(31): Xaa can be any naturally occurring amino acid
  misc_feature (53)..(53): Xaa can be any naturally occurring amino acid
  misc_feature (57)..(57): Xaa can be any naturally occurring amino acid
IGEGGFGQVFKGWLDXKTLXXSXPVVGIPVXVKKSNPDSAQGLHEWQCEVKFXGKFXHPNLVKLLGYCWEENQFLLVYEYLPKGSLENHLFSKGEALTWDTRLKIAIEAAQGLNFLHNSEKSVIYRDFKASNILLDSNFNAKLSDFGLAKLGPINGFSHVTTRVMGTQGYAAPEYMATGHLYVRSDVYGFGVVLLEILTGLRALDPNRPPLQLNLVEWAKPGLTQKKKIQKMMDPRLEHKYPISAVIRTAALILRCVEEDPKNRPPMDEVLRELEIVRTMRDEPKEEKRKRSGGGPDNNRINRYGSPHVRGTGRTR

SEQ ID NO: 5168 - protein, 218 aa, Brassica napus
NDGSHIVHVPSGANALSDVLLSTPVFTGDEGASGYVSAAAAAAAAGGDFDFGVDPNIDPELALALRVSMEEERARQEAAAKKAADEAGQKDKDGDTASASQETVARTTEKNAEPMDEDNALLDQAIAMSVGDVNMSEAADEDQDLALALQMSMSGEESGEATGAGNLLGDQAFISSVLSSLPGVDPNDPAVQALLGSLPDESKRNEEESNSKGEDEKK

SEQ ID NO: 5169 - protein, 388 aa, Escherichia coli
TLQNGKLNVPENPIIPYIEGDGIGVDVTPAMLKVVDAAVEKAYKGERKISWMEIYTGEKSTQVYGQDVWLPAETLDLIREYRVAIKGPLTTPVGGGIRSLNVALRQELDLYICLRPVRYYQGTPSPVKHPELTDMVIFRGNSEDIYAGIEWKADSADAKKVIKFLREEMGVKKIRFPEHCGIGIKPCSEEGTKRLVRAAIEYAIANDRDSVTLVHKGNIMKFTEGAFKDWGYQLAREEFGGELIDGGRWLKVKNPNTGKEIVIKDVIADAFLQQILLRPAEYDVIACMNLNGDYISDALAAQVGGIGIAPGANIGDECALFEATHGTAPKYAGQDKVNPGSIILSAEMMLRHMGWTEAADLIVKGMEGAINAKTVTYDFERLMEGAKL

SEQ ID NO: 5170 - protein, 509 aa, Bordetella bronchiseptica RB50
MDLSDLKKLGLDVAYPFKEQYENYIGGQWVPPVGAEYFDNLSPITGQPFCRVPRSGAADIELALDAAHRARAAWARTSPAERANILLRIADRIEGQLPMLAVAESIDNGKPLRETTAADLPLAIDHFRYFAGCIRAQEGAISEIDANTVAYHFHEPIGVVGQIIPWNFPLLMAAWKLAPALAAGCVVVLKPAEQTPASILVLAELIGDLLPPGVLNVVNGYGKEAGQALATSKRIAKIAFTGSTPVGKHILHAAADNLIPATVELGGKSPNIFFDDVMDHDDEFLDKALEGLAMFALNQGEVCTCPSRILIQESIYERFIEKAIARVQSIKTGHPLDAGTMVGAQVSQVQMDKILSYIDIGRQEGAQCLTGGARNDMLPGGLDQGFYVQPTMLLGKNSMRIFQEEIFGPVAAVATFKDEEEAIAMANDTFYGLGAGVWSRDGARAYRVGRGIEAGRVWTNCYHLYPAHAAFGGYKQSGIGRETHKAALSNYQQTKCLLVSYSAKALGFF

SEQ ID NO: 5171 - protein, 162 aa, Crocosphaera watsonii WH 8501
MSHNNSIGNYLIQRLLELGVNHVFGVPGDFVLGFNKLLENSDLEFINTCDEQGAGFAADAYARLRGLGVVCVTYCVGGLKIANTTAQCFAEKSPVVVISGSPGINERIKNPLLHHKVKEFDTQYKGFQEITVAATVLDNPDTAQVNRTIIHDYTSSFPQFGD

SEQ ID NO: 5172 - protein, 304 aa, Escherichia coli
TLQNGKLNVPENPIIPYIEGDGIGVDVTPAMLKVVDAAVEKAYKGERKISWMEIYTGEKSTQVYGQDVWLPAETLDLIREYRVAIKGPLTTPVGGGIRSLNVALRQELDLYICLRPVRYYQGTPSPVKHPELTDMVIFRENSEDIYAGIEWKADSADAEKVIKFLREEMGVKKIRFPEHCGIGIKPCSEEGTKRLVRAAIGYPIANDRDSVHLVHKGNIMKFTEGAFKDWGYQLAPEEFGGELIDGGPWLKVKNPNTGKKIVIKNVIADAFLQQILVRPAELNVIACLNLNGDFISDPLATQVG

SEQ ID NO: 5173 - protein, 389 aa, Escherichia coli
TLQNGKLNVPENPIIPYIEGDGIGVDVTPAMLKVVDAAVEKAYKGERKISWMEIYTGEKSTQVYGQDVWLPAETLDLIREYRVAIKGPLTTPVGGGIRSLNVALRQELDLYICLRPVRYYQGTPSPVKHPGLTDMVIFRGNSEDIYAGIEWKADSADAEKVIKFLREKMGVKKIRFPEHCGIGIKPCSKEGTKRLVRAAIEYAIANDRDSVTLVHKGNIMKFTEGAFKDWGYQLAREEFGGEPIDGGPWLKVKNPNTGKEIVIKDVIADAFLQQILLRPAEYDVIACMNLNGDYISDALAAQVGGIGIAPGANIGDECALFEATHGTAPKYAGQDKVNPGSIILSAEMMLRHMGWTEAADLIVKGMEGAINAKTVTYDFERLMEGAKLL

SEQ ID NO: 5174 - protein, 247 aa, Gloeobacter violaceus PCC 7421
MTLITPDTSLTVEEAVEQLRGEDLSQRYYAAWYLGYLEDPRAVEALVAALADESDRTEMGGYPLRRKAAESLGRIGEARAVPSLVEILGCEDYYVREAAAWSLARIGDALAVEPLVALLGQGGSQPYEAIIEALGDLRVHRAVPLIQPFLQERSERIRYAAARSLFQLTGEVALIDILLGGLASADSHIRRAALFDLADTGYLPAAVKIVHADVTATLKLLALKQLADVQTTDAAAADVLPFIDSIL

SEQ ID NO: 5175 - protein, 175 aa, Bradyrhizobium japonicum USDA 110
MANETKLPVTKKTNEPAFGGETWRPFEALRKEVDRLFEDFGTDDFWRRPFRSLAGFERNLAQKLVSTPAVDVTESDKAYEITAELPGMDEKDIEVNVANDGLTIKGEKKFEREEKQKDYYVSERRYGSFERHFGLPKDVEADKIEASFRNGVLKVTLPKTAEAQKPAKKIEVKAA

SEQ ID NO: 5176 - protein, 361 aa, Bacillus megaterium
MTIQWFPGHMAKARRQVTEKLKLIDIVYELVDARIPQSSRNPMIDEIIVNKPRIVLLNKVDKADPRVTQQWLDYYKEQGIYALAIDAQAGKGMKQIVSSSKELLQEKFDRMRAKGVKKPRAIRAMIVGIPNVGKSTLINRLASKKIAKTGDRPGVTQAQQWIKVGNELELLDTPGILWPKFEDETVGYKLATTGAIKDTILNMQDVAVYALRFLTSHYPEQLKQRYNLNEIPEDIVELFDAIGSRRGCLMGGGMVDYDKTAELVLREIRTDKIGTFTFDDQLFRFIYELANRENMYIEPSAAAGLQGPLHLMETGSSYIQAQALENDMSKATHLVWSTGGSMVPAEVMNSYYKQGKNLMNG

SEQ ID NO: 5177 - protein, 462 aa, Zea mays
  misc_feature (293)..(293): Xaa can be any naturally occurring amino acid
  misc_feature (396)..(396): Xaa can be any naturally occurring amino acid
MDGRRTILMGRYEIGKQLGQGTFAKVFYARNLTTGLAVAIKMINKDKVMKVGLMEQIKREISIMRLVKHPNILQLYEVMASKSKIYFVLEYAKGGELFNKIAKGGKLSEDAARKYFQQLVSAVDFCHSRGVYHRDLKPENLLLDENENLKVSDFGLSALAESKRQDGLLHTTCGTPAYVAPEVLSRKGYDGAKSDVWSCGVILFVLVAGYLPFHDTNLIEMYRKISRAEFRCPRFFSTELKDLLHKILVPDPSTRISISRIKRSAWYRKPVEAHAKKNEAETSENTCTGEGTXSVSTECSTSEGNQGPLSLPNLNAFDIICLSTGFNLSGFFEDKYGRREERFTTRQPVTTVFTKLKELAKRLKLRVKKKENGTLKLAAPKEGKKGMLELDAEIFXELLVLCSLVELKKTNGDTLEYQKLVKEEIRPALKDIVWVWQDDQHQEQAEQLPQPEQLQTPIAPEE

SEQ ID NO: 5178 - protein, 487 aa, Brucella melitensis 16M
MLALKDPSLLKSQCLVNGRWIDAADGTTIKVTNPADGSVIGTVPSLSVATIKEAIDASAKALSGWAAKTAKERAGILRKWFDLIIANADDIALIMTSEQGKPLAEARGEVLYAASFIEWFAEEAKRVYGDTIPAPQNGQRLTVIRQPVGVTAAITPWNFPAAMITRKAAPALAAGCTMIVRPADLTPLTALALGILAEKAGIPAGVLQIVTGKAREIGAELTSNDTVRKLSFTGSTEVGRLLMAQCAPTIKRISLELGGNAPFIVFDDADLDAAVDGAMVSKYRNAGQTCVCANRIYVQRGVYDKFAEKLAAKVKELKVGNGTEPGVVIGPMIEEKAITKVKAHIEDAVSKGAKLITGGKELGGLFFEPGILTGVTSDMLVAKEETFGPLAPLFAFDTEEEVIAQANDTIFGLAAYFYTENFSRAIRVSEALEYGMVGHNTGLISNEVAPFGGVKQSGLGREGSKYGIEEYLETKYICSAYKRGAKK

SEQ ID NO: 5179 - protein, 535 aa, Zea mays
MAVVYYLLLAGLIACSHALAAGTLALGEDRGRPWPAFLAALALDGKLRTDSNATAAASTDFGNITSALPAAVLYPSSTGDLVALLSAANSTPGWPYTIAFRGRGHSLMGQAFAPGGVVVNMASLGDAAAAAPPRVNVSADGRYVDAGGEQVWIDVLRASLARGVAPRSWTDYLYLTVGGTLSNAGISGQAFRHGPQISNVLEMDVITGHGEMVTCSKQLNADLFDAVLGGLGQFGVITRARIAVEPAPARARWVRLVYTDFAAFSADQERLTAPRPGGGGASFGPMSYVEGSVFVNQSLATDLANTGFFTDADVARIVALAGERNATTVYSIEATLNYDNATAAAAVDQELASVLGTLSYVEGFAFQRDVSYTAFLDRVHGEEVALNKLGLWRVPHPWLNMFVPRSRIADFDRGVFKGILQGTDIVGPLIVYPLNKSMWDDGMSAATPSEDVFYAVSLLFSSVAPNDLARLQEQNRRILRFCDLAGIQYKTYLARHTDRSDWVRHFGAAEWNRFVEMKNKYDPKRLLSPGQDIFN

SEQ ID NO: 5180 - protein, 322 aa, Malus x domestica
ILPFKLPAIGPNDVRIRIKAVGICGSDIHYLKTMKCGDFQVKDPMVIGHECAGIVDKVGSEVKHLVPGDRVAVEPGISCAHCQQCKGGRYNLCPDMKFFATPPVHGSLANQIVHPADLCFKLPENVSLEEGAMCEPLSVGVHACRRANVGPETTVLIVGAGPIGLVSVLAARAFGAPRIVIVDMDDRRLAMAKSLGADGTVKVSTKMEDLDDEVAKIKEAMGSEVDVTFDCVGFNKTMSTGLNATRPGGKVCLVGMGHGVMTVPLTPAAAREVDVVGVFRYKNTWPLCLEFLRSGKIDVKPLITHRFGFTEKEVEEALEPVL

SEQ ID NO: 5181 - protein, 364 aa, Mycoplasma penetrans HF-2
MKSINLPTSMKALVFVEKNKIQIVNKPIPTVGPNDALIKVTTTTICGTDIHIVKGEYPVKPGLTIGHEAVGILAAVGDEVTGFELGERVLAGAITPSGYTAACQSGQSSQDGIGTKYGYKPTAGWKFGNIMDGCQAEYVLVKNAMANLARVPNALTDEQVLMCPDIMSTGFSGPENANIKLGDYVGVIAQGPIGLCATTGAKLMGASIIIAIDGNDRRLEIAKELGATHTINFRNVDVVQEVNRITDGRMLDSAIECLGSQSTFEQGFRLLRAGGTLSSLGVYSSDIKLPLDALAAGLGDHKISFALCPGGSERMRRLMSLIENKRVDLRSLVTHTLPFDRIAEGYNIFANQKDGVLKVAIKVS

SEQ ID NO: 5182 - protein, 100 aa, Triticum aestivum
  misc_feature (91)..(91): Xaa can be any naturally occurring amino acid
MAPTVMASSATSVAPFQGLKSTAGLPISRRSSSAGLSSVSNGGRIRCMQVWPIEGIKKFETLSYLPPLSTEALLKQVDYLIRSKWVPCLEXFTRLGFVFR

SEQ ID NO: 5183 - protein, 362 aa, Geobacter sulfurreducens PCA
MAQVFKVAVLPGDGIGPEVMAEALRVLDAVEAKYDVKFERTHANVGGAGIDIEGKALPETTVNICKAADAILFGSVGGPKWESLPPDEQPERGALLPLRKIFGLYANLRPAIIFPSLTGASSLKEEVIAGGFNVLVIRELTGGIYFAQPKGIEGEGRDRVGFDTMRYSVPEIERITHVAFQAARKRGKKVCSIDKANVLSSSVLWREVVTGIAKEYPDVELSHMYVDNAAMQLVRWPKQFDVILCENMFGDILSDEAAMLTGSLGMLPSASLAEGTFGMYEPSGGSAPDIAGQGIANPIAQILSMGMMLKFSFGMVDAADAIDNAVATVLDQGFRTRDIYQQKDGEKLVNTKEMGDAIIAAL

SEQ ID NO: 5184 - protein, 286 aa, Salmonella enterica subsp. enterica serovar Typhi Ty2
MAENTMWHETLHDQFGQYFAVDNVLYHEKTDHQDLIIFENAAFGRVMALDGVVQTTERDEFIYHEMMTHVPLLAHGHAKHVLIIGGGDGAMLREVTRHKNVETITMVEIDAGVVSFCRQYLPNHNAGSYDDPRFTLVIDDGVNFVNQTHQTFDVIISDCTDPIGPGESLFTSAFYEGCKRCLNPGGIFVAQNGVCFLQQDEALDSHRKLSHYFSDVGFYQAAIPTYYGGIMTFAWATDNDALRHLSSEIIQARFHAAGLKCRYYNSAIHAAAFALPQYLHDALSAQ

SEQ ID NO: 5185 - protein, 490 aa, Escherichia coli
MDDQLKQSALDFHEFPVPGKIQVSPTKPLATQRDLALAYSPGVAAPCLEIEKDPLKAYKYTARGNLVAVISNGTAVLGLGNIGALAGKPVMEGKGVLFKKFAGIDVFDIEVDELDPDKFIEVVAALEPTFGGINLEDIKAPECFYIEQKLRERMNIPVFHDDQHGTAIISTAAILNGLRVVEKNISDVRMVVSGAGAAAIACMNLLVALGLQKHNIVVCDSKGVIYQGREPNMAETKAAYAVVDDGKRTLDDVIEGADIFLGCSGPKVLTQEMVKKMARAPMILALANPEPEILPPLAKEVRPDAIICTGRSDYPNQVNNVLCFPFIFRGALDVGATAINEEMKLAAVRAIAELAHAEQSEVVASAYGDQDLSFGPEYIIPKPFDPRLIVKIAPAVAKAAMESGVATRPIADFDVYIDKLTEFVYKTNLFMKPIFSQARKAPKRVVLPEGEEARVLHATQELVTLGLAKPILIGRPNVIEMRIQKLGLQI

SEQ ID NO: 5186 - protein, 170 aa, Zea mays
MAPTVMMASSATAVAPFQGLKSAASLPVARRSTRSLGNVSNGGRIRCMQVWPAYGNKKFETLSYLPPLSTDDLLKQVDYLLRNGWIPCLEFSKLGFVYRENSTSPCYYDGRYWTMWKLPMFGCNDATQVYKELQEAIKSYPDAFHRVIGFDNIKQTQCVSFIAYKPPGSD

SEQ ID NO: 5187 - protein, 487 aa, Agrobacterium tumefaciens str. C58
MTLSFDPDSLTLPIGHFIGGRLIPAQNGIDMHRPSDGVEYAGCPRANAALVDEAVQTAKAALKSSNWGGVRPRERTKILQRWADLIEQEAETLAKIEALSSTRPVGQLIAGDIAVTAEQIRFFAEFADKEGGDLVPTDDASLGMIMTEPYGVVGAITPWNFPVSMAGWKLGPALAAGNAVVLKPSEMTPFSSIFMAELAIKAGLPAGLINVVLGDGPVTGNAITGHPEISKVSFTGSTAAGAAIMANVARTGIKPMTLELGGKSPQLVFADADIEKAAAAIAGNILSNAGQACVAGSRIIVEESAADALSAAIIARMKTVKPGPTWDEATQYSPIISEVQRQRIDGIVQAAVAHGGECLTGGAIMDGPGYFYQPTLIANVDQTSPAVTEEIFGPVLTLQTFRTEEEALALADHPTYGLAAGLFSRDVSRVLRLSRAIQAGTIWVNRYGRSRDHILPTGGYKRSGIGKDLGRDAYLANRKSKSVLIGL

SEQ ID NO: 5188 - protein, 171 aa, Zea mays
  misc_feature (159)..(159): Xaa can be any naturally occurring amino acid
MAGIGRNMVAPLLVLNLIMYIIVIGFASWNLNHFINGQTNYPGVAGNGATFYFLVFAILAGVVGAASKLAGVHHVRAWRHDSLATNAASSLIAWAITALAFGLACKEIHIGGHRGWRLRVLEAFVIILAFTQLLYVLMLHTGLFGGSGGYRDHDYGVGXGAAGEPKGVTRV

SEQ ID NO: 5189 - protein, 431 aa, Bifidobacterium longum NCC2705
MATEHEEKLGTEDSKWLGEYSQVHMNVFGTPLRVMDHGQGAHIWDVDGNEYLDFLAGIAVNSLGYAHPKWVKAVADQAAKVAHISNYFASEPQIELASKLVKLAGAPEGSKVYFGNSGAEGNEAALKLAKLYGRTLPGALPSIGGKPARILAMTHGFHGRTMGALSATWKPGIRKPYDPLVPNIEFVRAGDKVALHDAFAQTGLGRYGKGPVAAVILELIQGEAGVQPLGADYVKFVRELCDINHALLIIDEVQTGIGRTGKWFAFQRDDLSGGVTPDMVTFAKGVAGGFPMGGMIAFGEKLAALFTPGSHGSTFAGNPLGAAAGLATLDVIEDENLVANAEARGEQLRDGIMATGNPLFVSVRGRGLLDAVELKHPCSHAVMNYCLEHGLIVNAVAPNALRFAPPLIVTAQDVDQALAILKDVPTDLPDD

SEQ ID NO: 5190 - protein, 208 aa, Brassica napus
  misc_feature (159)..(159): Xaa can be any naturally occurring amino acid
  misc_feature (175)..(175): Xaa can be any naturally occurring amino acid
MIDSMEKMIRSSCVSLLFCLVFLLFSSLYGSLHLVEAGKIEITDDLDDVEDNEEDDSWKQWGSKAATPEFDPPPDFSDMGFDQIQEEMAKRTFAPVVGFVKLRLGVHRTKDMVVEIAMRWMKVLRTGGLGVRFMAVDRSTVMFNMQNGMEVTELREFVXSQEEAYEVKIGKQEFXRPGDPPLDDVFEKLQANDDDGDTSKNDVTKDEL

SEQ ID NO: 5191 - protein, 479 aa, Mesorhizobium sp. BNC1
MTTLHQNLIDGAWVGGEGKENINPSNIKDVVGIYAQASAEETKQAIAAAKAAFPAWSRSGILERHAILRKTADEILARKDELGELLSREEGKTLPEGIGEVTRAGQIFDFFAGAVLRLAGEVLPSVRPGIGVEITREPIGVIGIITPWNFPIAIPSWKIAPALAYGNTVVVKPADLVPGSTWAIVDILVRAGLPKGVLNLVMGKGSVVGQTMLESRDVTAITFTGSVGTGKRVAAASVELGRKFQLEMGGKNPTVVLDDADLKVAVESVTQSAFFSTGQRCTASSRVIVTEGIHDRFVEALAERIRGLKVGNALEPGIDIGPVVDANQLKQDTDYIEIGKQEGAKLVAGGERVQKETEGYFLQPALFTEATNSMRISREEIFGPVASVIRVKDYEEALATSNDTEFGLSAGIVTTSLKYATHFKRNAEAGMVMVNVPTAGVDFHVPFGGRKGSSYGPREQGTYAAEFFTVVKTAYTAAG

SEQ ID NO: 5192 - protein, 394 aa, Vibrio vulnificus YJ016
MLSENTINIVKSTAPLLAETGPKLTAHFYQRMFEHNPELKDIFNMSNQRNGDQREALFNAICAYASNIDNLPALLGAVEKIAHKHSSFLITADQYQIVGSHLLATIDELFSPGQAVLDAWAEAYGVLANVFIQREEQIYQANQSQTGGWRGLREFELVEKQYESAHICSFVFKPVDGGSVVSFKPGQYLGIYINDEQFENQEIRQYSLSSSVRPDCYRISVKREEGGRVSNYLHDHLDVGSKVKLAAPAGDFFLDAAPTAPVVLISAGVGLTPTLSMLESLTEHQAPVTWIHATENGQQHAFKQHVKQLVETHPHFNSLVWYNQPNSDDKIGDDFQFSGWVNLHEIETVLKQADVQVYFCGPVGFMQFIAKQLLEMGVPEQQFHYECFGPHKVV

SEQ ID NO: 5193 - protein, 389 aa, Escherichia coli
TLQNGKLNVPENPIIPYIEGDGIGVDVTPAMLKVVDAAVEKAYKGERKISWMEIYTGEKSTQVYGQDVWLPAETLDLIREYRVAIKGPLTTPVGGGIRSLNVALRQELDLYICLRPVRYYQGTPSPVKHPGLTDMVIFRENSEDIYAGIEWEADSADAEKVIKFLREKMGVKKIRFPEHCGIGIKPCSKEGTKRLVRAAIEYAIANDRDSVTLVHKGNIMKFTEGAFKDWGYQLAREEFGGELIDGGPWLKVKNPNTGKEIVIKDVIADAFLQQILLRPAEYDVIACMNLNGDYISDALAAQVGGIGIAPGANIGDECALFEATHGTAPKYAGQDKVNPGSIILSAEMMLRHMGWTEAADLIVKGMEGAINAKTVTYDFERLMEGAKLV

SEQ ID NO: 5194 - protein, 290 aa, Triticum aestivum
  misc_feature (236)..(236): Xaa can be any naturally occurring amino acid
  misc_feature (267)..(267): Xaa can be any naturally occurring amino acid
MKTLLIVTILAMATTIATANMQVDPGYQVQWPQQQPFPQPQQPFCQQPQQTIPQPHQTFHHQPQQTYPHQPQQQFPQTQQPQQPFPQPQQTFPQQPQLPFPQQPQQPFPQPQQPQQQFPQSQQPQQPFPQPQQQFLQPQQPQQSFPQQQQPLIQLSLQQQMNPCKNFLLQQCNPVSLVSSLISMILPRSDCQVMQQQCCQQLAQIPQQLQCAAIHSVVHSIIMQQEQRQGVQIRRXLVQLVQGQGIIQPQQPAQLGGDQGHWYLRTXSTMCNVYVLPMVTINAPFASWCQ

SEQ ID NO: 5195 - protein, 322 aa, Exiguobacterium sp. 255-15
MSLKRIAILTSGGDAPGMNAAVRAVTRKAIFHGLEVFGVYNGYQGLINGDLVQLNLGSVGDIIQRGGTFLRSARCPEFRTEEGRAKAVVNLKKFEIDALVVVGGDGSYRGAQKLTGLGFPTIGLPGTIDNDIPGTDYTIGFDTALNTALEAIDKIRDTASSHERTYVIEVMGRDAGDIALYAGLAGGAESILVPERPEDLKEVLNRIQSGVNRGKKHSIVIVAEGAGRAQDVGDEIAKETGLDTRVTVLGHVQRGGAPTAADRVLASRMGAYAIDILLEGKQGRVVGVRGGKMVDLDIDEALDENKHELDLEILELSKQLSI

SEQ ID NO: 5196 - protein, 179 aa, Zea mays
  misc_feature (5)..(5): Xaa can be any naturally occurring amino acid
TPSVXYDPLALRKAFEKAVVKRLMTDVPFGVLLSGGLDSSLVATVAVRHLARTEAARRWGTKLHSFCVGLEGSPDLKAAREVAEYLGTLHHEFHFTVQDGIDAIEDVIYHTETYDVTTIRASTPMFLMSRKIKSLGVKMVISGEGSDELFGGYLYFHKAPNKEELHRETCRKVCVSFFH

SEQ ID NO: 5197 - protein, 498 aa, Nostoc sp. PCC 7120
MKTPLNCQNYINGQWLNAATETTLNSHNPADKSEIVATFPRSQADDVDRAVAAARQAYGSWRKVPAPARAEYIFRVGELLLQHKEELAQLISREMGKPLTEARGDVQEGVDCAFYSAGEGRRLFGQTTPSEMPNKFAMTMRMPIGVCALITPWNFPVAIPCWKAMPALVCGNTVILKPAEDTPACATKLIEIFAAAGLPPGVINLVHGVGEEVGKALVEHPNIDLVSFTGSSATGAYVGETCGRTHKRVCLEMGGKNAQVVMEDADLELALDGALWGAFGTTGQRCTATSRLILHRDIKEKFTTMLRERTSQLRLGAGTEPETDIGPIINNRQLQRVHEYMNIAREEGAKILIGGEIATEGQLQQGYFFQPTILDNVTPQMRVAREEIFGPVVALIEVSTFEEAIAILNDTKYGLSSSVYTRDINRAFVAMRDIEAGITYINGPTIGAEVHLPFGGVKQTGNGHREAGTTALDVFTEWKSVYVDFSGSLQRAQIDNRS

SEQ ID NO: 5198 - protein, 387 aa, Propionibacterium freudenreichii subsp. shermanii
MPPTTTSSSSWPSRRSSPAPSPWCCSGTSRSTRPTNPLTRQSPTPASWRHEAGMAEKLNVPGLWSAEMGQVIAKQNELAGDAFATDVTPAQMRENYDTERAFWNEGGPQMARTTDREVATAYGAVSVRQYRPAGPAPQDTLPVIVFIHGGGWVVGNPTTHDRITRILADSTKACVVSVDYTLSPEAKYPQALNECVAVVRALVDAPDEWGIDADDISLAGDSGGASLAFGVALHLRDEEKLADRLRCMLLYYGIYGLTDSASRRLGGPWDGLGDDDLQYYYNAYFGSPEDVSSPWFNVVGADLGHGVPPCYMAAAALDPLRDDSRTLAAQLGLAGVTNQYEEFAGVIHGFAHHTRMLSAARRLLAHSAQFFTDQGPDQRPDADPARP

SEQ ID NO: 5199 - protein, 457 aa, uncultured marine proteobacterium ANT8C10
MEFNSHEELVAASTKAAQKWRLVPAPQRGEFIRQFGNELRNQKTELAKVITKEARKIVSEAEGEVQEAIDMCDFATGLSRQLYGLTMPSERPDHRLQELWQPIGVVGCITAFNFPMAVFAWNFCLASVCGNSIIWKPSPHSNGCSDALKKAWDEVAGEHKDLVLLLKGGNEEASALCKDTNIPLISATGSTQMGKELAPIVSARLGRTLLELGGNNAAIICPTADLDLTVKGITFSACGTTGQRCTSLRRAFVHEDIYEEFMQKLHAYYATLKIGNPSDSSNQIGPLISERSYNDMQRVLESISNKDVTVHGGQRLEVGDPEEFYVMPAIVEVSQIEDEMLNETFAPILYVKKFTDLTNAIEMQNNVKQGLSSSIFTNDMRESELFLSSEGSDCGIANVNIGTSGAEIGGAFGGEKDTGGGRESGSDAWKAYMRRVTATINYGEDLPLAQGVEFDES

SEQ ID NO: 5200 - protein, 203 aa, Thalictrum thalictroides
KRRNGLLKKAYELSVLCEAEVALIVFSSRGRLYEYSNNSVKKTIERYKKASTDSPNSGSVSEANVQFYQQEASKLRNQIASLQNHNRNLLGESLSNLNIRELKQIEKKIEGGISKIRAKKNELLFAEIEYMQKREIDLQTDNKYLRAMIAANERAPEHMNLMPANEYHVMSSAPFDSRNFMPANLLDHNNNYCRSDQTTLQLG

SEQ ID NO: 5201 - protein, 347 aa, Streptococcus agalactiae NEM316
MFVKKGLFVFLLLCILSMWLMIFGVAFYYFGSLHQSLTSRIIYQFVLTVLLTTTAWFMGAYFLAFEGHFKTVFQFQEADGKQIVNCLFQLCFALYAVVMLIGSIIDRVQTKRLLLAVVSWLFLVYTPLAYLIWNSEGVFAKMGVLDFSGGMVVHLSAGLSSYILAHVIGKSEHQHNKVKNDSLFLGMILITFGWFGFNMGPVGEWNSQAIMILLNTIFAIIGGGLAWTLAAKWNGEEEKTGSLLNGIIVGLVTSTAGVGYLLTWQLLAVTFFASLFTYFVTDYVAKAFAIDDVVSSFGMNGIGGLLGSLGVGLFKLSHMPVQLLALATTILLSIIMTYIISKAIFRK

SEQ ID NO: 5202 - protein, 104 aa, Shigella dysenteriae
TLQNGKLNVPENPIIPYIEGDGIGVDVTPAMLKVVDAAVEKAYKGERKISWMEIYTGEKSTQVYGQDVWLPAETLDLIREYRVAIKGPLTTPVGGGIRSLNVAL

SEQ ID NO: 5203 - protein, 248 aa, Zea mays
  misc_feature (200)..(200): Xaa can be any naturally occurring amino acid
MGSMAAEMTAVEEEACIYAMQLSSTAVLPLTLKNAIELGMLEVLMGAGGKMLSPSEVAARLPPTTTNPDAPAMVDRMLHLLASYKVVSCEVEEGTHARRYGPTPVCKWFTPNQDGISMAPLLLLTNDKVPMESLYHLKDAVLDGGLPFHKAHGMTMYEYTKTDARLNHVFNEAMKSYTTIVTGKLVELYTGFHDVATLVXDVGGGVGATIRAVTSKYPHIKGINFDLPHVIAEAPQSPGVEHVAGDMF

SEQ ID NO: 5204 - protein, 188 aa, Triticum aestivum
  misc_feature (115)..(115): Xaa can be any naturally occurring amino acid
  misc_feature (123)..(123): Xaa can be any naturally occurring amino acid
  misc_feature (139)..(139): Xaa can be any naturally occurring amino acid
  misc_feature (165)..(165): Xaa can be any naturally occurring amino acid
  misc_feature (184)..(184): Xaa can be any naturally occurring amino acid
RIRGRVDLGTVHHELHFTVQEGIDALEEVIYHIETYDVTTIRASTPMFLMSRKIKSLGVKMVLSGEGSDEIFGGYLYFHKAPNKKEFHEETCRKIKALHLYDCLRANKATSAWGXEARVPFLXDKNFIKCSNGTWVPEXKMIRRDLGRFEKWALPNAFDDDEKPXLPKHSFTGKKTFNHGVGYXWVDG

SEQ ID NO: 5205 - protein, 319 aa, Glycine max
MSRALEHDYIGLAENPSMDGSSDKLSSEDGKTSSLNLKETELRLGLPGCESPERKSGSALCLFGKELQNNNNVCSVVSPLKAGAKRGFSDVTEGSQGAALFSPRGANVGKPIIGLDTQTNTQQQANTTIKEVGAVLPQSTKPVQEKNDQVAATNGHASAPAAKAQVVGWPPIRSFRKNTMASNLTKNNDDDEGKSGFGCLYVKVSMDGAPYLRKVDLKTYNNYMELSSALEKMFSCFTIGQCNSPGLPGKDGLSESSLRDLLHGSEYVLTYEDKDGDWMLVGDVPWEMFTDSCRRLRIMKGSEAIGLAPRAMEKSRSQN

SEQ ID NO: 5206 - protein, 74 aa, Triticum aestivum
MAFVPICVQCGTRSNPCRCKVVGPTLGFVALVVAGVVEWPLGAAVYLFRHRKGRRIMGHPARVVYPRVTGAIPI

SEQ ID NO: 5207 - protein, 149 aa, Triticum aestivum
  misc_feature (32)..(32): Xaa can be any naturally occurring amino acid
  misc_feature (50)..(50): Xaa can be any naturally occurring amino acid
SRRGYYGVCQELEAQYPDAQVLLVTVTNEESXRIEQQSDNQTKAEIMEVXRSMFPDEDAPDATDILVPRWWSDRFYMGTFSNWPIGVNRYEYDQLRAPVGRVYFTGEHTNEHYNGHVHGAYLSGIDSADILINCAQKSMCKYHVQGKYD

SEQ ID NO: 5208 - protein, 347 aa, Agrobacterium tumefaciens str. C58
MKTHRIALIPGDGIGQSVTDAAWQVLNAVAKTSGFVLEGTEFPWSCAFYKETGAMMPKDGIETLRGFDAIMLGAVGWPAEVPDSVSLHGLLLPIRKAFVQYANIRPHRLLSGVQGPLKADGFDILCIRENTEGEYSGAGGRVHQGTEDEVAVETSIFTRKGVERILRFGFEQAQKRRGKLASITKSNAQKYSMVFWDEVTHKLAAEYPDVEVSSYHIDAMAARMVMAPESLDVVVASNLFGDILTDLGAAIQGGLGFAASANINPDRSAPSMFEPVHGSAPDIAHLGIANPIAAIWSGAMMFEHLGEKDAAAKIMAALETATGRGIGTVPGKDKTDTITAAVLAALA

SEQ ID NO: 5209 - protein, 299 aa, Mycoplasma penetrans HF-2
MITTVWNFRRINMNKNNNTNISKFNLSSGTNHNPPLLTLNDGYQIPIIGLGTTSLHNQTCKNAIKAALEIGIRLFDTASLYGNEKEVGETIRESNINRNEIFVITKLYPGAQFANPEKAIEEALNKLNTDYIDMMLLHHPGENDVKAYKAIEKYIEKGKIKSVGLSNWYIKEINSFLPQINIKPSLIQNEIHIYYQEKEVVPYMHNLNIAMQAWYPFGGRGHTFSVLNNPTIVSIAKDHNKTSAQIISRWLLQRGIITIVGSSNPIHIKENISVFDFELSNQEMELIASLDKNEKHDWY

SEQ ID NO: 5210 - protein, 486 aa, Agrobacterium tumefaciens str. C58
MMQGLKDKELFRQTGLIGGAWKAAASGKVVDVIDPATQAVIGTVPDMGGAETRAAIEAANAAFGPWKKKTHAERAALLEKWFALMIENIDDLRLILTIEQGKPLDEAKGEIRYGASFVKWFAEEARRIGGGTIPSPTPDRRIVVLKEPVGVCGIITPWNFPNAMITRKVAPALATGCTVVIKPSEFTPYSALALGVLAERAGIPAGVINIVTGMPTEIGNEIMANETVRKISFTGSTRVGSLLMRGAADSVKRLSLELGGNAPFIVFDDADLDLAIEGAIVSKFRNGGQTCVCANRILVQSSVYDAFAKKLADRVDAMRVGPGTEAGVSIGPMINKPAIAKIRAHIDDAVAKGATIITRPRDLPEGPQYTAPVVLTGATTAMQLASEETFGPVAPLFRFETEEEALAIANGTPFGLAAYFYTESLKRAWRVGEALEFGMVGLNTGAISTEVAPFGGVKQSGLGREGAQVGIEEYLETKTFHIGGLA

SEQ ID NO: 5211 - protein, 321 aa, Malus x domestica
ILPFKLPAIGLNDVQIRIKAVGICGSDVHYLKNMKLADFEVKEPMVIGHECAGIVEKVGSDVKHLVSGDRVAVEPGISCSRCQQCKGGRYNLCPDMKFFATPPVHGSLANQIVHPADLCFKLPENVSLEEGAMCEPLSVGVHACRRANVGPETTVLIVGAGPIGLVSVLAARAFGAPRIVIVDMDDKRLAVAKSLGADGTVKVSAKMEDLDDEVAKIKETMGAEVDVTFDCVGFNKTMSTGLNATRPGGKVCLVGMGHSMMTVPLTPAAAREVDVVGVFRYKNTWPLCLEFLRSGKIDVKPLITHRFGFTEKEVEEASLEF

SEQ ID NO: 5212 - protein, 317 aa, Ralstonia solanacearum GMI1000
MQVILRDKADAAQDIATFELAAPDGGALPPFTAGAHIDVRVAGFVRQYSLCNSPAETHRYRIGVLRDAQSRGGSVAMHALAVGATLEISAPKNHFALVPGARHSILLAGGIGVTPLLAMAEQLAADGASFALHYAARAPERMAFRDRLAAAHLAPHARCYFDNAPAAERLDLAAVLSRPDEGTHLYACGPAGFIEAALAQAHALGWPEANLHREYFGAAPQTPAAGETGDAGAFRIRLAQRGETVEVGAGETAILALRRCGVDWPTSCEQGVCGTCLTRVLEGEPVHQDQYLTDEERASGCFLPCVSRAKGLLVLDM

SEQ ID NO: 5213 - protein, 310 aa, Thermoplasma acidophilum
MDRKELLSRPVRDLSITADTRLGDLMDQFSSIGGFTAAKIHEAYEIIKDMFSEDNTTFLSFPADIISTGLRGLINEVVKRKLVDVIITTSGTLDHDIARTYRNYYCGSFSYSDIELRDLGINRLGNVLVPDESYGEIIEEKVMESLEKLYAKKKEWATVDLIHEVGLDINSESSIIYNAAKNNIPVFVPGITDGSFGSQLWSFYEQHHDFKINLLEDEHRLSDIIFDAKKTGAIMIGGGISKHHTIWWNQFRDGLDYAVYVTTAQEYDGSLSGAKLEEAISWKKVRPDARYVNVYGDATVIMPVLLAPFL

SEQ ID NO: 5214 - protein, 457 aa, Agrobacterium tumefaciens str. C58
MLSNSLIELDRAHLVHPVSSFRGHEKLGVRVLKSASGATVTDMTGHQLIDGFAGLWCVNAGYGHDSIVEAAAKQMRELPYATAYFDIGSEPAIRLASELADRAPGDLNHVYFTLGGSDAVDSTIRFIRYYWHAKGQPQRDQFISIEQGYHGSTTAGSGLTALPAFHAGFGVPYDWQHKIPSHYAYRNPAGSDPAAIIASSLQILKDKIEAIGPDRVAAFYAEPIQGSGGVLVPPPGWIKAMRELCSSYGILFVADEVITGFGRTGPLFACADEDIVPDFITAAKGLTSGYVPMGAVFMADHVYDTIADFAGEAAIGHGYTYSAHPVSAAVGLEVLKLYEGGLLENGRRAGQRLMAGLEGLRNHPLVGDVRGRGMLAAIELVTDKDKKTPLPAAAAPARKVFDRAWENGLIVRAFANGILGYAPPLCCTDGEIDAIVERTLKTLDQTLEDPAVRAAMA

SEQ ID NO: 5215 - protein, 474 aa, Escherichia coli O157:H7 EDL933
MQHKLLINGELVSGEGEKQPVYNPATGDVLLEIAEASAEQVDAAVRAADAAFAEWGQTTPKVRAECLLKLADVIEENGQVFAELESRNCGKPLHSAFNDEIPAIVDVFRFFAGAARCLNGLAAGEYLEGHTSMIRRDPLGVVASIAPWNYPLMMAAWKLAPALAAGNCVVLKPSEITPLTALKLAELAKDIFPAGVINVLFGRGKTVGDPLTGHPKVRMVSLTGSIATGEHIISHTAPSIKRTHMELGGKAPVIVFDDADIEAVVEGVRTFGYYNAGQDCTVACRIYAQKGIYDTLVEKLGAAVATLKSGAPDDESTELGPLSSLAHLERVSKAVEEAKATGHIKVITGGEKRKGNGYYYAPTLLAGALQDDAIVQKEVFGPVVSVTLFDNEEQVVNWANDSQYGLASSVWTKDVGRAHRVSARLQYGCTWVNTHFMLVSEMPHGGQKLSGYGKDMSLYGLEDYTVVRHVMVKH

SEQ ID NO: 5216 - protein, 484 aa, Ralstonia solanacearum GMI1000
MFESQLLIGGKQRAAAGGATCERPNPATGDVASRAAAASLADADAAVQAAHAAFPAWAAMLPGERRRLLLKAADVMERRADDFIARGVAEAGGVPGWYGFNAALAAGMLREAAAMTTQVGGEVIPSDVPGSLAMGLRQPCGVVLGIAPWNAPLILGTRAIAMPLACGNTVVLKASEICPALHSLIGAVFEEAGFPAGVVNVITNAPADAPAIVERLIAHPAVRRVNFTGSTRVGRLIAEQAARHLKPVLLELGGKNPLVILDDADLDAAVQAAAFGAFFNQGQICMSTERIIVDRAIADRFVERLTDKAGALRAGRPGQDGAVLGGMVDASAAQRIRHLVDDAVGKGARLRTGALRIDGNIVQPAVVDGVTPAMALYGEESFGPVVAVLRAADDEDAIRLANDSEYGLSAAVFSRDIARAMQVARRIESGICHINGPTVHDEAQMPFGGVKASGYGRFGGKAAIDAFTELRWITVQAGARHYPI

SEQ ID NO: 5217 - protein, 398 aa, Puccinia triticina
MCGTSSAMDPVFQSINPSLYDPQRVLDSEEFEILTDMNKVKAYSDDNKNIACCYNDKQQLNMVKKPMPEVHPGQVLVRVRATGICGSDIHFWKHSRVGEKMVVKHECGAGHESAGEVIALGEGVTDLEVGDRVAIETGIPCSKPTCEMCRTGQYNACPEIMFWFTSPYHGLMTRYHAHPSCWLHKLPPNVSYEEGSLLEPLAVALAGIERAGVRLGDPVLICGAGPIGLVTLLACHAAGACPIAITDLSEGRLDCAKRLVPSVSTFKISLGESETDVAGQIQAAMGCKPRVAMECTGFESSIATAIFSVKFGGKVFVIGVGKDKQTLPFMHMAENEIDLQFQFRYANQYPKAIRLVSTGLIDVKPLITHRFVLEKAIEAFNTAADPKSGSMKVQVVDY

SEQ ID NO: 5218 - protein, 416 aa, Candidatus Rickettsia principis
DSEFAELKIRGKIFKLPILKASIGEDVIDISRVSVEADCFTYDPGFMSTASCQSTITYIGGDKGILRHRGYDIKDLAEKSDFLEVAYLLIYGELPSSEQYNNFTKQVAHHSLVHERLHYLFQTFCNSSHPMAMMLAAVGSLSAFYPDLLNFKDADYELTAIRMIAKIPTIATMSYKYSIGQPFIYPDNSLDFTENFLHMMFAMPCTKFKVNPIIKNALNKIFILHADHEQNASTSTVRIAGSSGANPFACISTGIASLWGPAHGGANEAVINMLKEIGSSEYIPKYIAKAKDKNDPFRLMGFGHRVYKNYDPRAAVLKETCKEVLKELGQLDNNPLLQIAIELEAIALKDEYFIERKLYPNVDFYSGIIYNAMGIPTQMFTVLFAIARTVGWMAQWKEMHEDPEQKISRPRQLYTG

SEQ ID NO: 5219 - protein, 1533 aa, Aspergillus nidulans FGSC A4
MDGQRQQPYVPAPPPSASQPSQAHIMPLPPPPPRYPPAQPQNVMPPPPPGPPPGSAYGTSKLTNPQLQSQSTLGWSNWGGRGIPQYLPPPPPPPMTHANQSSFARPSAVQNNNATSATYVPQPGTFGPGVGIPPFDVPSHSYDAPNTMVASERPRPPPNAPYGHGTSNASAYQLDGTIPSTPLTHTAPFSHETSHDVPSSAVPTGSPFKSVPQSASQANDLTKSSSHRHNNSNTTVGGMSASEAAVQWPLDRVLLWLAKNGFSHEWQETFKTLEIEGADFLELGHGQNGRPNLGKMHTVVYPQLAKECEANGTAFDLTRERDEGKRMRKLIRLIHDDAGPDNGGTFNKQHDFDDGHGSVPDEGPEFSPNINNVAQAPGSPSLNATNVSNSPNLKAPKYSHKPRSFTTPGSISHDSTTAELAMTEGSSTMLPRSDFSRNVLGTIGIDHQRKSPSMSSDNGVFAIPPHRPHEGSPKSGSPAAQHATLYAAPVSSATDLNAKYDARFGHNRVNSGERRYYETLKHDGSRPSPQTTQTAGDNASSYPKDHRMGFLNFFKKKSARNSDPNNPSPDDNTPDSPIYSKYHFNSSDVSVNERPLSASLSDYERMMMVRTKPAHRGKRFIFATMDGWNYRLIDTTDIDSVEKLRASICQNLGIYDWPDAQIFLTEPGQLEHDEPLNDTFLTLCQRSKSDSIGSLKLFVKTPHNVAGLGVSMPDRSAVSPTSAIPRKPLDGEAASRLSPLKPSSPQQLKPPASRLPLRDIQNSAAGTSPVDGEPDGSLQDQERKPQKSYRPTPAPLPRPDAYSETGYRRKEVINFDKPRISPYEDKKSEVLVPFRKPPSAPQESNTLSKVNSLRKKDGDRPRPHRSNQPPGIKEMMADMGMMSSLIGKPSSPNSGNTTATEDAHSSIDSAVDKSSQSTPPLTNTSYSPTTTATTTTTTTTASSSLSRSASQKRKSVGPEFDFEETQVSFQRSPALEEDSDDDSDDGLFAIPLANTKNSVKPGSPDTQARPRKPSLTVDTEAKPRTGLSVSFKSPSATRETFASSGGDASNSTAPYFIASNSPEEEKTPIRRNSLRNSFATGDVWASRPPVEGVIDQLDDFFPDIDLDAPYLDEQGTSPPSSPASKVAIDNELNRKDKQENSHHGMQPPPAPEDNTLGSSEPTMTSHGQGIVARRNVSRSGGGLTRMKSIREVAKGANQATRQRSVAASSGNKRSGDVHRRKSTKMFGAKIMQISPRRGSQLSQLDPIPQNSISSSSKPQRQPTFRIIRGQLIGKGTYGRVYLGMNADNGEVLAVKQVEINPRLAGQDTDKIKEMVAALDQEIDTMQHLEHPNIVQYLGCERGELSISIYLEYISGGSIGSCLRKHGKFEESVVKSLTRQTLEGLSYLHNQGILHRDLKADNILLDLDGTCKISDFGISKKSNDIYGNDSSNSMQGSVFWMAPEVIQSQGQGYSAKVDIWSLGCVVLEMFAGRRPWSKEEAIGAIFKLGSLSQAPPIPDDVSMNVTPAALAFMWDCFTVSNPSYSSFLRARSEV

SEQ ID NO: 5220 - protein, 416 aa, Candidatus Rickettsia principis
DSEFAELKIRGKIFKLPILKASIGEDVIDISRVSVEADCFTYDPGFMSTASCQSTITYIGGDKGILRHRGYDIKDLAEKSDFLEVAYLLIYGELPSSEQYNNFTKQVAHHSLVHERLHYLFQTFCNSSHPMAMMLAAVGSLSAFYPDLLNFKDADYELTAIRMIAKIPTIATMSYKYSIGQPFIYPDNSLDFTENFLHMMFAMPCTKYKVNPIIKNALNKIFILHADHEQNASTSTVRIAGSSGANPFACISTGIASLWGPAHGGANEAVINMLKEIGSSEYIPKYIAKAKDKNDPFRLMGFGHRVYKNYDPRAAVLKETCKEVLKELGQLDNNPLLQIAIELEAIALKDEYFIERKLYPNVDFYSGIIYNAMGIPTQMFTVLFAIARTVGWMAQWKEMHEDPEQKISRPRQLYTG

SEQ ID NO: 5221 - protein, 817 aa, Zea mays
  misc_feature (214)..(214): Xaa can be any naturally occurring amino acid
  misc_feature (218)..(218): Xaa can be any naturally occurring amino acid
  misc_feature (566)..(566): Xaa can be any naturally occurring amino acid
  misc_feature (655)..(655): Xaa can be any naturally occurring amino acid
  misc_feature (667)..(667): Xaa can be any naturally occurring amino acid
  misc_feature (676)..(676): Xaa can be any naturally occurring amino acid
MAQILLHGTLHATIFEAESLSNPHRATGGAPKFIRKLVEGIEDTVGVGKGATKIYATVDLEKARVGRTRMISNEPVNPRWYESFHIYCAHMAADVIFTVKIDNPIGASLIGRAYLPVQDLLGGEEIDKWLEICDEKREPVGDSKIHVKLQYFDVGKDRNWARGVRSTKYPGVPYTFFSQRQGCKVTLYQDAHVPDNFVPRIQLADGINYEPHRXCWEXIFDAISKAQHLIYFTGWSVYTEFSLVRDTNRPKPGGDVTLGELLKRKASEGVRVLMLVWDDRTSVGLLKKDGLMATHDEETANYFHGTDVNCVLCPRNPDDSGSFVQDLQISTMFTHHQKIVVVDHEMPNQGSQQRRIVSFIGGIDLCDGRYDTQYHSLFRTLDTVHHDDFHQPNFEGGSIKKGGPREPWHDIHSRLEGPIAWDVLYNFEQRWRKQGGKDLLVRLRDLSDIIIPPSPVMFPEDRETWNVQLFRSIDGGAAFGFPETPEEAARAGLVSGKDQIIDRSIQDAYVNAIRRAKNFIYIENQYFLGSSYGWKPEGIKPEEIGALHLIPKELSLKIVSKIEAGXRFTVYVVVPMWPEGVPESASVQAILDWRRRKIEMMYNDLAQALRASGMEAQAVPYLTFFCLRGREPKHPEESVPQAPAKADRDFTRAQXEARWFMIDVHTXKMMIVDDEXYIITGSGNIEPRPPWTVPGTPEIAMGAYQPYHLATRQPARGQIHGFRMPLWYEPLGMLEDVFQGPESVECVQKVNEVAEKYWDLYSSDDLEQDLPGHLLSYPIGVTADGSVTELPGMENFPDTRARVLGNKSDYLPPILTT

SEQ ID NO: 5222 - protein, 489 aa, Saccharomyces cerevisiae
MELLKLLCLILFLTLSYVAFAIIVPPLNFPKNIPTIPFYVVFLPVIFPIDQTELYDLYIRESMEKYGAVKFFFGSRWNILVSRSEYLAQIFKDEDTFAKSGNQKKIPYSALAAYTGDNVISAYGAVWRNYRNAVTNGLQHFDDAPIFKNAKILCTLIKNRLLEGQTSIPMGPLSQRMALDNISQVALGFDFGALTHEKNAFHEHLIRIKKQIFHPFFLTFPFLDVLPIPSRKKAFKDVVSFRELLVKRVQDELVNNYKFEQTTFAASDLIRAHNNEIIDYKQLTDNIVIILVAGHENPQLLFNSSLYLLAKYSNEWQEKLRKEVNGITDPKGLADLPLLNAFLFEVVRMYPPLSTIINRCTTKTCKLGAEIVIPKGVYVGYNNFGTSHDPKTWGTTADDFKPERWGSDIETIRKNWRMAKNRCAVTGFHGGRRACLGEKLALTEMRISLAEMLKQFRWSLDPEWEEKLTPAGPLCPLNLKLKFNENIME

SEQ ID NO: 5223 - protein, 232 aa, Aspergillus nidulans FGSC A4
MSSSEYDQELDSLLVGPIPVGVNKFIFEADPPDLRRIPTSEILGVTVILLTCSYDGREFVRVGYYVNNEYDSEELTADPPAKPIIERIRRNILAEKPRVTRFAIKWDTEESAPAEYPPDQPEADGLDDDGAAYGQEEAELEAALLKELQEAEKNESTKGEDHDMEGADNGEEDISDAESEDIEDESDDDEDEVDEEEGNDADEDVEMGDDSEPKDDNANPAAHHSQQEVMVH

SEQ ID NO: 5224 - protein, 163 aa, Candida albicans SC5314
MSDFYEFAPNDIKGTPYSFKKLQGKVVLIVNVASKCGFTPQYKGLQDLKQKFADQPVEILGFPCNQFGHQEPGTNEEIEKYCREYFGVTFPVLSKVETNGKNAEPVYKFLKSQKPGLLGLHRIMWNFEKFLIDQDGNVVARFSSFTKPETIGLRIEEMLKHQA

SEQ ID NO: 5225 - protein, 259 aa, Zea mays
  misc_feature (76)..(76): Xaa can be any naturally occurring amino acid
GTPVTLRTSTGYQYNCNTGLEIGGEANLTAAIQVAQFALKNRQNKQLRQRIIVFVGSPVIDEKNWLEVIGKNLKKXNVALDVVNFGESDNEKPEKLEALVAAVNSGGNSHIIHIPAGRDLSDALFSSPIILSEDRGSDSAAAARGASGFEFDVDPNVDPELALVLLISMEEERLRQEAAAKKAREESSKTENEGQSSTSNGDIVMADAEPEPNSYTEDKGLHCKVCFIAIQLMQSVSFVLDVQQLLEITHKKGLLRPPQ

SEQ ID NO: 5226 - protein, 203 aa, Thalictrum thalictroides
KRRNGLLKKAYELSVLCEAEVALVVFSNRGRLYEYANNSVRKTIDRYKKTCGEGSSTLTVSEANLLFYQQESSKMKQQIEILQNSNRHLMGEALSRLSIKELKQLESRLEKGLSRIRSKKNETLLAEIEYMQKREIELHNDNIYLREQITANERAQQHMNSLPGNVYEAITSAPHSSRDFFQVNLRDSKPNQYCSDATVLQLC

SEQ ID NO: 5227 - protein, 389 aa, Shigella sonnei
  misc_feature (180)..(244): Xaa can be any naturally occurring amino acid
TLQNGKLNVPENPIIPYIEGDGIGVDVTPAMLKVVDAAVEKAYKGERKISWMEIYTGEKSTQVYGQDVWLPAETLDLIREYRVAIKGPLTTPVGGGIRSLNVALRQELDLYICLRPVRYYQGTPSPVKHPELTDMVIFRENSEDIYAGIEWKADSADAEKAIKFLREEMGVKKIRFPEHXXXXXXXXXXXXXXXXXXXXXXXXXXXXXXXXXXXXXXXXXXXXXXXXXXXXXXXXXXXXXXXXXDGGPWMKVKNPITGKEMVIKDVIADAFLQQILLRPAEYDVIACMNLNGDYISDALAAQVGGIGIAPGANIGDECALFEATHGTAPKYAGQDKVNPGSIILSAEMMLRHMGWTEAADLIVKGMEGAINAKTVTYDFERLMEGAKLR

SEQ ID NO: 5228 - protein, 415 aa, Fusarium oxysporum
MALTAAQVAIVKSTAPILKEHGKTITTTFYRNMLGAHPELKNYFSLRNQQTGAQQAALANSVLAYATYIDDLGKLSHAVERIAHKHVSLFIKPEHYPIVGTHLIGAIGEVLGSALTTEIKDAWVAAYGQLADIFIQREGQMYEAAGEWNSWRKFKIVKKEAENDSVTSFYLEPTDGKPLPKFLPGQYVSVQIPIPELDGLLQSRQFSLSEAPGTNHYRISVKLQGPTEEPAVEDLAAGKIAGLLSTRLHNRYNVGDEVELSPPAGEFSLDPADTSAAKKPLVLLSAGVGATPLVSILDSVLQSPTASRPITWIHGARYSGSTCFVPHVLDSAKKHENITAKIFLEDVKEGDQYDFKGEIDLAKLQKEQLLQLDNADAEYYICGPEDWMVNVRAFLEENGVPRERQHLELFKTGDI

SEQ ID NO: 5229 - protein, 349 aa, Glycine max
VSYGVEFEGAGASKESKVNGDGGRDVNLGDSNYSFGEAEALSDEMEEESRYVAEILRIRDVLLNPEDESEAVLFDSLRRLQMMELTEDCLKATEIGKAVNPLRKHGSKDIRQLPIILFCGWKEMVDEWVKATTTKSITGSEEGTPDSVNPSVVDDDEEEGLPSPPLDEGAFFVTQAGSMELSQFFDGMDDDGNPRPTGPFSKNHENGRKPAFDSHSQQQAKENKAAVMPVRPNKPVTADSGPGRPPKSNVQRKSNMEPKMQQKMENNSITRRPPTAQLDKSKRSDDDAVQVKLEATKRKLQESYQQAEKAKRQRTIQVMEINDLPKQGLHRNTHFKPGYHSRHWANGRR

SEQ ID NO: 5230 - protein, 426 aa, Listeria monocytogenes EGD-e
MYVLKNGQVLNASGKLESKDVLIQNGKVNLIADSIEVTSGEEFDATGKLITPGFIDVHVHLREPGGEHKETILTGTKAAARGGYTTICSMPNTKPVPDSKEVMESIQAKIKETAKVRVLPYASITTSLGTDELVDFEALKEAGAFAFTDDGVGVQLAGTMYEAMKRAAALDMAIVAHCEDNSLIYGGVVHDGIFAEKEGLKGIPNIAESVQIARDVLLAEAAGCHYHVCHISTKESVRVVRDAKRAGIRVTAEVSPHHLILDEEAIPGNDGNWKMNPPLRSKEDRAALLEGLLDGTIDFIATDHAPHAAEEKNVPMEQAAFGIVGLETAFPLLYTHFVKTNEWTLKQLIDWMTVKPAECFKLPYGKLEEGSVADIVVLDLEKEANIDPDTFYSKGKNTPFVGETCIGWPVATFAEGTLVYNEGEIK

SEQ ID NO: 5231 - protein, 312 aa, Medicago sativa
MGSVEIPTKVLTNTSSQLKMPVVGMGSAPDFTCKKDTKDAIIEAIKQGYRHFDTAAAYGSEQALGEALKEAIELGLVTRDDLFVTSKLWVTENHPHLVIPALQKSLKTLQLDYLDLYLIHWPLSSQPGKFSFPIDVADLLPFDVKGVWESMEESLKLGLTKAIGVSNFSVKKLENLLSVATVLPAVNQVEMNLAWQQKKLREFCNAHGIVLTAFSPVRKGASRGPNEVMENDMLKEIADAHGKSVAQISLRWLYEQGVTFVPKSYDKERMNQNLRIFDWSLTKEDHEKIAQIKQNRLIPGPTKPGLNDLYDD

SEQ ID NO: 5232 - protein, 312 aa, Medicago sativa
MGSVEIPTKVLTNTSSQLKMPVVGMGSAPDFTCKKDTKDAIIEAIKQGYRHFDTAAAYGSEQALGEALKEAIELGLVTREELFVTSKLWVTENHPHLVIPALQKSLKTLQLDYLDLYLIHWPLSSQPGKFSFPIDVADLLPFDVKGVWESMEESLKLGLTKAIGVSNFSVKKLENLLSVATVLPAVNQVEMNLAWQQKKLREFCNANGIVLTAFSPLRKGASRGPNEVMENDMLKEIADAHGKSVAQISLRWLYEQGVTFVPKSYDKERMNQNLCIFDWSLTKEDHEKIDQIKQNRLIPGPTKPGLNDLYDD

SEQ ID NO: 5233 - protein, 492 aa, Ralstonia solanacearum GMI1000
MNAPQAMRFLDDAQWDGLLFQGRWVPPLRRRTADVMEPATGRKLTRVGLADAQDVDAAVEAAAAAQPAWVAMPPRERANVFRRAAMLFEQHFDELALAIARETGAALFKGEHEVREAITLCHVAAGMPLEAQGQVLASPAGRLSYARRAPFGVVGVISPFNFPLFLTLRSVAPALAAGNAVVIKPDLRTPVSGGYVIARVFAEAGLPAGLLHVLPGGAEAGEALVVHPRVPMIAFTGSPGVGRRIGELAGRHLKKVSLELGGANALIILDDADLDLAVSNAAWGAWLHQGQICMAANRILVHASLADALTARLVEKAEHLPVGDGASGQVALGPLIDQKQLQRVHAIVQDSVAAGARLLAGGSYEQLFYRPTVLAGVRPGMRVFDEEVFGPVANIIVFRDDDEAVALANDSQGGLAAGVISASVGRAMALGQRLRVGMVHINDQTVNDDCVNPFGGPGIAGNGTSMGGPADWEEYTQWRWVTVKESAPRYPF

SEQ ID NO: 5234 - protein, 289 aa, Mycoplasma penetrans HF-2
MKTSNVKLITLNNGNKIPSIGFGVFQIPKEETADCVKKAISIGYRLIDTAQAYHNEKETGLGIKLSGVKREEIFLTTKVWVSNYERCYESVIESLKRLDTSYLDLILLHQPFGNYYKAYQDLERLYKENKVRNIGVSNFWDNRIIDLCFFNQIKPMVNQIEINPFHQRIEDRFYNDKYKVVSQAWAPFAEGKNGLFTNPTLVEIGKKYNKTPAQVILRWLVQSNVVALCKTVNESRMKENFDIFDFELSKQDLDKIVALNKQHSEFRYHHSAEGAEFYGEISNQIKIGD

SEQ ID NO: 5235 - protein, 386 aa, Tetragenococcus halophilus
MATKRDYYEVLGVDKGASDDEIKKAYRKLSKKYHPDVNQEADAEEKFKKFQKPMNTLSDPQKRAAYDQYGHAGADANFGGGGAGGFGGFGGGFSDAGGFGGFEDIFESFFGGGRSADPNAPRQGDDLQYSINLTFEEAVFGKDTEVSYKRNEVCHTCGGNGAKPGTQPETCHKCKGSGTINAERQTPLGRVMTRQTCDVCHGTGKEIKEVCETCHGTGHEKKTHSVNVSVPAGVEDGQQMRLANQGEAGTNGGPYGDLYVVLYCSHETCNIFDRDGSEIYYELPINFVQAALGDEVDVPTVHGNVKLKIPAGTQTSTKFRLRGKGAPRLRGNSTGDQQVTVKIITPKNLNEEQREALRNFAELTGQSTEEQQSEGFFDKMKDAFKK

SEQ ID NO: 5236 - protein, 492 aa, Corynebacterium efficiens YS-314
MGAAGVPARFILDSVSMSLSTASPTIVWFRDDLRIRDNAALAWAADRGPVIGLFIDEDQPRALGGAARWWRDRSLTLLVDALATHGVPLLRRSGDPVVLLTEVVRETGAAAVTWNRRYHGPLRERDAEIKTQLREQGLEVHSHAGFLLTEPWEVTSGAGTGYKVYTPFSKAAFPLADESAARLGDPMPAQLTGPDTPVADTGGIDAPDPFWAAEMATHCRPGEQAALDRLGDFLDRMRERGGYADGRDEMARAVTSGLSPHLRFGEISVHRVWEEITAAADAGDIDATDAQVFRKELLWRDFAWHRLYALPDMATTNVREQFNRFGWAWDEHEAARLVDGRHPLSPTSSDEFHVALAAWRAGRTGIPLVDAGMRELWATGSMHNRSRMVVASFLTKNLQIHWRHGEEWFWETLVDADPASNAFNWQWAAGSGDDASPYFRIFNPETQARKFDPDETYIRRWIPEYGTPEYPAPIVDLKESRREALDAYEAVK

SEQ ID NO: 5237 - protein, 126 aa, Desulfitobacterium hafniense DCB-2
MPLHSAVHRAEKLERDYQARGFEVLGFPCDQFGHQEPGDEAEIKEFCSLTYDVTFPMYAKVDVNGDKAHPLWKWLKDEKGGFLGIDAIKWNFTKFLIGRDGRVLKRYAPTDKPESIAADIEKALAA

SEQ ID NO: 5238 - protein, 487 aa, Pisum sativum
MLAQKQAEEAIVSSSFNETDQQESVLGKEEEQEQDHSFSVKNFLWHGGSVWDAWFSCASNQVAQVLLTLPYSFSQLGMLSGILLQIFYGILGSWTAYLISVLYVEYRTRKEKENVNFKNHVIQWFEVLDGLLGPFWKALGLAFNCTFLLFGSVIQLIACASNIYYINDNLDKRTWTYIFGACCATTVFIPSFHNYRIWSFLGLGMTTYTAWYLTIAAIVHGQAENVTHSGPKKLVLYFTGATNILYTFGGHAVTVEIMHAMWKPQKFKYIYLLATLYVFTLTIPSASAVYWAFGDELLNHSNAFSLLPKNGFRDGAVVLMLIHQFITFGFACTPLYFVWEKVIGMHDTRSICLRALARLPVVIPIWFLAIIFPFFGPINSAVGALLVSFTVYIIPSAAHMLTYRKASARQNAAEKPPFFMPSWTAMYILNAFIVVWVFVVGFGFGGWASMTNFIRQIDTFGLFAKCYQCKPPPPLMVAAPPPHALHH

SEQ ID NO: 5239 - protein, 293 aa, Triticum aestivum
DDIAALETWDNGKPYEQAAHIEVPMLARLMRYYAGWTDKIHGLIVPADGPHHVQVLHEPIGVVGQIIPWNFPLLMYGWKVGPALACGNTIVLKTAEQTPLSALYVSKLLHEAGLPEGVLNIVSGFGPTAGAALASHMDVDKIAFTGSTDTAKVILELSARSNLKPVTLELGGKSPFIVMDDADIDQAVELAHFALFFNQGQCCCAGSRTFVHERVYDEFVEKSKARALKRVVGDPFRKGVEQGPQIDDEQFKKILRYIKSGVDSGATLVTGGDKLGDKGYYIQPTIFSDVQVS

SEQ ID NO: 5240 - protein, 310 aa, Ralstonia solanacearum GMI1000
MLDIQMQSLLQGMQQAGVPDMADLPPPAARQVYSRIMAAAAEPVRAVSIAERTIAGPGGDLALRIYAPQRPDPRRGVALYLHGGGFVVGTPRDYDSVASALCERSGCVVVQVDYRLAPEHPFPAAVEDAWAAACWVAAHARELGAQPRIAVVGDSAGGNLAAVLARLARDCEGPAIVQQTLIYPMVAARPETTASYLRYGTGYTLTTRLTHYFHDLYLNGRPAEGDPRLVPLSAPDASGLPPALVMVAGYDVLRDEGIQYAHRLAQAGTPVTLVEYSGMVHGFIGMAGALEAARQALAQVADAVGRALAG

SEQ ID NO: 5241 - protein, 448 aa, Chromobacterium violaceum ATCC 12472
MSNQAWLERSFAAVWHPCTQMKRHERLPIVPIASADGVWLTDFDGKRYLDGVSSWWVNLFGHGHPRIKQAVRKQLDSLEHVMLAGFTHRPVVELSERLAALSGLGHAFYGSDGASATEIALKMSFHYWKNVGRPQKTRFVSLENSYHGETVGALAVTDVPLFSSTYAELLKPGLRAPSPDARQAVPGERAADVALRAARSLENLLAKHGGEIAAVIVEPLVQGAAGMAMHDPIYLTELRRLCDQYQVHLIADEIAVGFGRTGSFFAYQQAGITPDFLCLSKGITGGFLPLSCVLTRDEIYQAFYHDDVARGFLHSHSYTGNALACAAALAVLDIFDDEDVLEANRVKAEGFTRQMRPLAERPEIRHFRQRGMIWAFDVDTARSDFALAYFSAMLNRGCLLRPIGKSVYFMPPYTLKSEEMDWLASASVDALDEVLAGESVGGDPTALP

SEQ ID NO: 5242 - protein, 180 aa, Triticum aestivum
  misc_feature (142)..(142): Xaa can be any naturally occurring amino acid
MAPTVMASSATSVAPFQGLKSTAGLPVSRRSNGASLGSVSNGGRIRCMQVWPIEGIKKFETLSYLPPLSTEALLKQVDYLIRSKWVPCLEFSKVGFIFREHNASPGYYDGRYWTMWKLPMFGCTDATQVINKWRSQEGVPDXYVRIIGFTTSPSECVSSCLKQRAARSARLNTHTAHIMH

SEQ ID NO: 5243 - protein, 161 aa, Candida albicans SC5314
MSQFYELAPKDAKGEPYPFEQLKGKVVLIVNVASKCGFTPQYKGLEELNKKFADQPVQILGFPCNQFGHQEPGSNEEIGSFCSLNYGVTFPVLDKIEVNGDNTDPVYKYLKSQKSGVLGLTRIKWNFEKFLIDQNGKVIERFSSLTSPESIGTKIEELLKK

SEQ ID NO: 5244 - protein, 229 aa, Candida albicans SC5314
MVKSNVESAWETMEDTFSEIQNKFHQIYKPIDTGKPDEDDETTKKESLDITDDSTLSVSPITQLLYLARSKFYDLTPLDNSKSPFPFKNLRGKVVLIVNVASRCGFSFQYNGLEQLNKRFANDDFVLLGVPCNQFLWQEPGTNDQIVTKCKKKYDVSFQILDKINVNGEQADPVYKFLKAQKEGLWGTNRVKWNFEKFLIDKNGRVVERYSTFTRPVAITPRIEQLLES

SEQ ID NO: 5245 - protein, 228 aa, Zea mays
  misc_feature (50)..(50): Xaa can be any naturally occurring amino acid
  misc_feature (121)..(121): Xaa can be any naturally occurring amino acid
MVEVVPIYTAGSKYPSSTCSPEDNSDLFYAALGGLGQFGIITRARIALEXDFESFTEDQEMLIMAENSFDYIEGFVIINRTGILNNWRASFKPQDPVQASHFQSDGRVLYCLELTKNFNSXTLEFLDRVHTSELKLRAQSLWEVPHPWLNLLIPRSSIRRFATEVFGRILVGFLSSAPSLSGHGSIAHAMSFGARWETFERRKHRYDPLAILAPGQRIFPKASLPLSL

SEQ ID NO: 5246 - protein, 133 aa, Zea mays
  misc_feature (42)..(42): Xaa can be any naturally occurring amino acid
  misc_feature (45)..(45): Xaa can be any naturally occurring amino acid
  misc_feature (69)..(69): Xaa can be any naturally occurring amino acid
  misc_feature (118)..(118): Xaa can be any naturally occurring amino acid
APSRARRHGRRPMKIMGQVKEDVSLAESSMTNIVKEMLPTDXEDXKDSTDLLGECCVEVINLLWSESNXDVCSRDDKKTIAPEHVIRALQDLGFKEYGEEVYAAYKQHKLETLGSPKXTKFTGIEMTEEKAVA

SEQ ID NO: 5247 - protein, 1306 aa, Schizosaccharomyces pombe
MSYTNHSPANLTRNSSFNHQHYSTTLRSPPSMRGRGIDVNSSHYPHISRPRTSSDSQKMYTRAPVDYYYIQENPYFNNIDQDSISDKSLPSTNQSLHHSEEDTESDNDFSESIHPEFDIDVFYKVSNILYDESDLQDPEKRERLEWHSMLSSVLKGDVMQTEKRRLRLTEPDGHSGTYISEVWLGLQAWLHGRLNADQAEVIRKSREGVEPVLREVIDFQIQDEETTKPPLEQVTEILEKVEQCKQFYISSREMEENVPLSASKEFNYKLNALISWSNVMESIQVETLVLQKWVGNDEFDLTMRTPQFNYDGVENTSSFVERIFRQSGLQRTFEQRTLTTLNRIIHQAKQTISENAQAFEEMKLPTYEDKLLPLVRFPIKLLEEALRLSPAYAKKIKGPNFLIVDSMLDDFKIALSVAVRIKREYIKIASPSPGWSLPTNVDEDYDNVLLDSLKFYFKLLTLKLSSGNKNLYFKEIDFLENEWAFLNEHIYWINGGDIHMAGQFSYLSNSLLLNVHRYVESHLNGPTERTAASLTNWYSTLLKNTQIRFRKILRFSETLNSRFENASDFVISEGHLPDLVNRLSTTGHFLAYTANLERDGVFVIADHTLSENPEALKALLFSKDISNLETIQQNCSYVLILCPVHPIVWKGRIEKVDVPDFSVDLKTNRVRIIASNKREHLQAAKSVFQSISGDLVTLAVECRSSITRVYKEFIRLSKLCMRISSTVVDCVSAVREACSGVNCHDLIYHVFSFAAEFGQRILRFLSFDSYWQTKLKRKITSLAVEWISFICDECDLMDRKTFRWGVGALEFLMLMIRGNNILLIDDAMFLKIREKVGKSMAFLLTHFDVLGAKSKVAAKLQRESTEVSSSPRLTSFGDVEEEALSIQLLQKETMLRIDELEIERNNTLLERLAIGHVLDDSVFRNRDFIKLASSFSNITIRWQQGHFVRSGMFGDVYTGVNMETGDLLAVKEIKLQDSRTFRSTVDQIHNEMTVLERLNHPNVVTYYGVEVHREKVYIFMEFCQGGSLADLLAHGRIEDENVLKVYVVQLLEGLAYIHSQHILHRDIKPANILLDHRGMIKYSDFGSALYVSPPTDPEVRYEDIQPELQHLAGTPMYMAPEIILGTKKGDFGAMDIWSLGCVILEMMTGSTPWSEMDNEWAIMYHVAAMHTPSIPQNEKISSLARDFIEQCFERDPEQRPRAVDLLTHPWITDFRKKTIITMPPATITKKTSLSHTITEEKTAQLLAGRHDDSKAETDSLAASYKEESALPVASNVGLRQPNELRIDSINLPPAIVTPDTINYSVD

SEQ ID NO: 5248 - protein, 388 aa, Synechococcus sp. WH 8103
TTAFHSPTSRRRKTLQEANLLEGPLMLIKSIRGFSSNRAMTWLACAPLALMGLGIFTLSAKAEELPDLNAAFLANNLWLLVATILVIFMNAGFAMVEAGMCRQKNAVNILAKNLFVFALAVTAYWFVGYSFMYGDAAIDGWLYFGGLFFDPTVTAETISDAGLVPTVDFLFQAAFAGTAATIVSGLVAERIKFGEFVVFALILTAFIYPVAGSWEWNGGWLNSVGNAEFIDFAGSSIVHSVGAWAGLVGAALLGPRIGKYVGGKVQAIPGHNMSIATLGALILWIGWYGFNPGSQLAMDQWVPYVAVTTTLGAAGGAIGATVISTITSKKPDLTMIINGILAGLVSVTAGCGNLTLTGSWVAGLVGGIIVVFSVSALDSAGIDDPVGA

SEQ ID NO: 5249 - protein, 241 aa, Glycine max
MATYSWSTEIFSFLVLTLLSTSSHTMVAGARNLLESTLSKPEVPTLPKPHELPPLPEIPELPKFESPKIPALPKPELPKVPVGPRLEKPKVPELPKVSEIPKVPKLPKAPEMFKVSELPKLELPKVAEISKILELSKPELPKIPKLPKIHELSKVPELSNPELSKVSDSSRIGSRPKVPELSKPELPKVPELPKVRELPKPEFSKVPELPKVHELPKPEIPKILEFPKVPQFPKAFSTSNP

SEQ ID NO: 5250 - protein, 164 aa, Thermococcus kodakaraensis
MRKMVWRRDRYWDPFDIMREIQEEIDAIFRDFMRGPRLWSYREPGERIEVSETWREPFADIFDRGDRFVITVELPGVRKEDIKLRVTEDTVYIEAQMRREKELEQEGAIRIERYYSGYRRVIRLPEEVIPEKAKARYNNGVLEIEIPKKKPTKPEKEGVEVKIE

SEQ ID NO: 5251 - protein, 416 aa, Arabidopsis thaliana
MGLFGTKKIGKYEIGRTIGEGNFAKVKLGYDTTNGTYVAVKIIDKALVIQKGLESQVKREIRTMKLLNHPNIVQIHEVIGTKTKICIVMEYVSGGQLSDRLGRQKMKESDARKLFQQLIDAVDYCHNRGVYHRDLKPQNLLLDSKGNLKVSDFGLSAVPKSGDMLSTACGSPCYIAPELIMNKGYSGAAVDVWSCGVILFELLAGYPPFDDHTLPVLYKKILRADYTFPPGFTGEQKRLIFNILDPNPLSRITLAEIIIKDSWFKIGYTPVYHQLSDSIKDNVAEINAATASSNFINAFQIIAMSSDLDLSGLFEENDDKRYKTRIGSKNTAQETIKKIEAAATYVSLSVERIKHFKVKIQPKEIRSRSSYDLLSAEVIEVTPTNCVIEISKSAGELRLYMEFCQSLSSLLTAEVS

SEQ ID NO: 5252 - protein, 148 aa, Brassica napus
  misc_feature (97)..(97): Xaa can be any naturally occurring amino acid
  misc_feature (130)..(130): Xaa can be any naturally occurring amino acid
MSAGVSHGEEAIVSSGNDNEGEQITGNHTGKTDEYDPSSGSALSNFLWHGGSVWDAWFSCASNQVAQVLLTLPYSFSQLGMLSGIVLQIFYGLLGSXDCYLISVLYVEYRARKEKEGKSFKNHVIQWFEXVLDGLLGSYWKAIGLAFN

SEQ ID NO: 5253 - protein, 467 aa, Methylococcus capsulatus str. Bath
MAVSEEFLRELEKLFPPGSRHTDPAECWAYGYDNSKRQALPDAVVFPRSHEDVVALVRLCNRHRIPLTARGRGTGTTGATVPVAGGVVASLERMSRIIEISPDNRFAVVEPGVTNQALQDAVRPDGFFWPPDPTSAEFCSIGGNLAYNSAGPRAVKYGTPRENTLGLRAVTGAGEELRCGVYTTKGVVGYDLTRLIIGSEGTLAIITEATLKLTPLPSAKRTLRAIYVDVASAARAIARIMAQPVIPCALEFIDGNAIALVRRYAAVDLPEDAAALLMIEVDGSPESLDAAVESLRAAATLEGLVEFRAARTAGEVEALWSIRKALSPSLRKVAPKKLNEDVVVPVTELPALIAGLDELSRRHAIPIVNFGHAGNGNIHVNLLFDPDRADENERAHACLHEMFTLVLKLRGTLSGEHGVGIEKRDYVGEELDRTSLALMHAIKRQFDPNGILNPGKSIPAEDPSPPA

SEQ ID NO: 5254 - protein, 346 aa, Klebsiella oxytoca
MQSVVIHAEGTVRVEERPIPTLQTENDVLVKVVSSGLCGSDIPRTFAKGAHYYPITLGHEFSGYVESYGSAVTDLQPGDGVACVPLLPCLICPDWLKGFYSQWAKYEFVGSRGDGAFTEYIVVNRKNVFVCADRMPIDDGALIEPMTVGLHAFHLAQAAKENVIIIGAGTMGLLALQCARELGAKSITAIDINPQRLALAKTLGATYVFNSKEMSSKEIQTALEEIQFDQLVLETAGTPQTVALGIEVAGPRAQLALVGTLHHDLTLLSATFGQILRKELTIVGSWMNYSGPWPGEEWQTAVRLLTEKRIQLVPLIAHIGNAESFAREVQALNGAPMQGKILLKLS

SEQ ID NO: 5255 - protein, 352 aa, Neurospora crassa
MSSAQRGGARKISFNVSEQYDIQDVVGEGAYGVVCSAVHKPSGQKVAIKKITPFDHSMFCLRTLREMKLLRYFNHENIISILDIQKPRSYETFNEVYLIQELMETDMHRVIRTQELSDDHCQYFIYQTLRALKAMHSANVLHRDLKPSNLLLNANCDLKVCDFGLARSAASQEDNSGFMTEYVATRWYRAPEIMLTFKEYTKAIDVWSVGCILAEMLSGKPLFPGKDYHHQLTLILDVLGTPTMEDYYGIKSRRAREYIRSLPFKKKVPFRTLFPNTSELALDLLEKLLAFNPVKRITVEEALKHPYLEPYHDPDDEPTAPPIPEEFFDFDKHKDNLSKEQLKQLIYQEIMR

SEQ ID NO: 5256 - protein, 428 aa, Oceanobacillus iheyensis HTE831
MKNERVENLTKEWQDDIRWVGIERPYKAEDVIRLRGSIDITHTLATRGASKLWKLINEEDYVNALGALTGNQAVQQVKAGLKAIYLSGWQVAADANMAGEMYPDQSLYPANSVPQVVRRINQALQRSDQIHFSEGENDIDWFAPIVADAEAGFGGQLNVFELMKSMIEAGAAAVHFEDQLSSEKKCGHLGGKVLLPTQNAVRNLIAARFAADVMGTPTIIIARTDANAADMITSDVDEYDHLFITGERTVEGFYKTKAGIDQAIARGLAYAPYADLIWCETSEPNLEEARIFAEAIHEKFPNKLLAYNCSPSFNWKKKLSDQEIAEFQKELGKLGYKFQFVTLAGFHALNHSMFDLAKKYKSHGMAAYSELQQAEFSSEKDGYTATRHQREVGTGYFDEVAQVISGGKASTAALIGSTETEQFTSFYK

SEQ ID NO: 5257 - protein, 261 aa, Emericella nidulans
MGHEDAVYLAKLAEQAERYEEMVENMKVVAASDVELTVEERNLLSVAYKNVIGARRASWRIVTSIEQKEESKGNKSQVALIKEYRQKIEGELAKICQDILDVLDQHLIKSAQSGESKVFYHKMKGDYHRYLAEFAVGDNRKAAADASLEAYKSATEVAQTDLAPTHPIRLGLALNFSVFYYEILNSPDQACHLAKLAFDDAIAELDTLSEESYKDSTLIMQLLRDNLTLWTSSEAEPAAENAPAEKKEEAPAAEGEEKPAE

SEQ ID NO: 5258 - protein, 149 aa, Triticum aestivum
  misc_feature (84)..(84): Xaa can be any naturally occurring amino acid
MAPTVMASSATSVAPFQGLKSTAGLPVSRRSNGASLGSVSNGGRIRCMQVWPIEGIKKFETLSYLPPLSTEALLKQVDYLIRSXKWVPLPRSSSKVGVHLPVEHNAIPPGVLRIGPGTGTMWESCLCFGMQPDAQRQVINKWREGQRKE

SEQ ID NO: 5259 - protein, 193 aa, Zea mays
MSAVNITNVAVLDNPTAFINPFQFEISYECLVPLDDDLEWKLIYVGSAEDENYDQQLESVLVGPVNVGTYRFVLQADPPDPSKIREEDIIGVTVLLLTCSYMGQEFMRVGYYVNNDYGDEQLREEPPAKVLIDRVQRNILADKPRVTKFPINFHPEPSTGTGRQQQQQEPQTASPEKHAGSGEGNGSKPEADQ

SEQ ID NO: 5260 - protein, 348 aa, Pseudomonas putida
MLAIRKTKAGPGGLSVDDVAAPKEAHSTDVLVKVEAAGICGTDLLIYKWGEFAKRMKLPTILGHEVSGVIEQVGSDVKGLRPGMRVSLESHLPCGTCYTCRRGWAHVCPKTRYPGVDFDGGFASFVVVPESVCWPVPCGIPPLQAAMMEPFGLAVHASLEGSGVSGLNVLVSGCGPIGLMNIAAAKALGASKVIAPDIHPLRLTAAAKMGADECINATEESVYKTVRSLLGERGVDVAIDYSGQAAALKELIQSITHGGELRLMGVPSHDILLNLEEWLFKGLIVRGLHGRRLYERWERSTSLLVTGRVDLSSLVSHRLPLSAAEDAFEMALNGQSLKILFEPNGSCI

SEQ ID NO: 5261 - protein, 355 aa, Sulfolobus acidocaldarius
MTFTNEELILPASVDLHVHVRGAQLSYKETVATATSEAVYGGVGVIVDMPNTVPYINTPERIKERLREFQLYSRTDYGIYSGVSKEVEEIDKLPIAGYKIYPEDLEKEETRYVLEKSKKLKILHPEMPFVSKIERSLRRSYWMETAAINLVKGNMHITHITNFETLQLAKSMGFTTDITAHHLVVDGERDCISKVNPPIRDYVTRLKLFLKGLFEVDCIASDHAPHSKEEKRMNFDLCPPGIAGVSFSTPYIYSLMFKGLISIDRAVSLLSGNPSRILNIPTGKIKEGYRANFTVIKRENWRYTTKFSKVTETPMDGFSLDAKVTNVIVEGKLAFDGENVYPIRGVNIFDSSSRS

SEQ ID NO: 5262 - protein, 161 aa, Triticum aestivum
  misc_feature (105)..(105): Xaa can be any naturally occurring amino acid
  misc_feature (123)..(123): Xaa can be any naturally occurring amino acid
  misc_feature (145)..(145): Xaa can be any naturally occurring amino acid
  misc_feature (152)..(152): Xaa can be any naturally occurring amino acid
MAPTVMASSATSVAPFQGLKSTAGLPVSRRSNGASLGSVSNGGRIRCMQVWPIEGIKKFETLSYLPPLSTEALLKQVDYLIRSKWVPCLEFSKVGFIFREHNASXPGYYDGRYWTMWKLPMFXGCTDATQVINEVEEVKKGVPLXRTFRLLXSKTCARVQC

SEQ ID NO: 5263 - protein, 197 aa, Triticum aestivum
  misc_feature (92)..(92): Xaa can be any naturally occurring amino acid
  misc_feature (108)..(108): Xaa can be any naturally occurring amino acid
  misc_feature (114)..(114): Xaa can be any naturally occurring amino acid
MAPTVMASSATSVAPFQGLKSTAGLPVSRRSNGASLGSVSNGGRIRCMQVWPIEGIKKFETLSYLPPLSTEALLKQVDYLIRSKWVPCLEFXSKVGFIFREHNASPGXYYDGRXYWDNVELPMFGCTDATQVINEVEESRRIPDAYVRISDRQHAQVQCVTHRQRARIRKAKHSHGQYKCNAVCTRALVLSLLLLSR

SEQ ID NO: 5264 - protein, 346 aa, Corynebacterium glutamicum ATCC 13032
MEDMRIATLTSGGDCPGLNAVIRGIVRTASNEFGSTVVGYQDGWEGLLGDRRVQLYDDEDIDRILLRGGTILGTGRLHPDKFKAGIDQIKANLEDAGIDALIPIGGEGTLKGAKWLSDNGIPVVGVPKTIDNDVNGTDFTFGFDTAVAVATDAVDRLHTTAESHNRVMIVEVMGRHVGWIALHAGMAGGAHYTVIPEVPFDIAEICKAMERRFQMGEKYGIIVVAEGALPREGTMELREGHIDQFGHKTFTGIGQQIADEIHVRLGHDVRTTVLGHIQRGGTPTAFDRVLATRYGVRAARACHEGSFDKVVALKGESIEMITFEEAVGTLKEVPFERWVTAQAMFG

SEQ ID NO: 5265 - protein, 211 aa, Dimocarpus longan
AWHSAGTFDLHSKTGGPFGTIRHPDELAHEANNGLDIAVRLLEPIKEQFPILSYADFYQLAGVVAVEITGGPEIPFHPGRPDKSDPPPEGRLPAATEGSDHLRDVFGHMGLSDKDIVALSGGHTLGRCHEERSGFEGPWTSNPLIFDNSYFKELLSGEKEGLIQLPSDKALLEDSVFRPLVERYAADEDAFFADYAESHLKLSELGFADAD

SEQ ID NO: 5266 - protein, 131 aa, Brassica napus
MASVSPLAKYKLVFLGDQSVGKTSIITRFMYDKFDTTYQATIGIDFLSKTMYLEDRTVRLQLWDTAGQERFRSLIPSYIRDSSVAVVVYDVSNRLSFLNTSKWIEEVRTERAGDVIIVLVGNKTDLVDKRQ

SEQ ID NO: 5267 - protein, 312 aa, Chlamydomonas reinhardtii
MADLAVLRTAKQALDEGLLNPEDYDFIKKAFLRAQQIKAGLDAGFIKEEDFVQARDSFLHSLDFALVGGSSQPAYVQTPSIPDAPAMPPPAPVALRAAAAAPQRNSTPSRDTAPAAPVPVAAAAAAAPAAAAVPRISPAPPGAGTVPIPTDLPTSARGARSSSVVSNKTSMSGISVSDQCVAIFNHIKTKSAYKWVTFKVNDAGNEVVVDQLGAADSSYEQFINILPENNCRHGVYDYAYLNADTNQTVNKLVFVHWASDTATTKNKMMYASTKDFLKSYLDGLGAELQATDTKELAESEMRERVHQAITRK

SEQ ID NO: 5268 - protein, 401 aa, Arabidopsis thaliana
MASNKRCFSDESLSKRWRFLWTLVPRLNYDLRLHDNTCPRFSQFVDRSLLLHKAPTLESLNIKIGSICFTAEKDVGVWVRIGVDRFVRELSVSYCSGEEPIRLPKCLFTCSTLAVLKLENITLEDASCYVCFQSLKTLHLLDVKYLDDQSLPRIISSCSSLEDLVVQRCPGDNVKVVTVTAPSLKTLSLHKSSQAFEGDDDGFLIDTPKLKRVDIEDYWGGFCYIENMPEVVEANVDVIYKNTEKLLGSITSVKRLALCLITSDAAYPAGTIFSQLVHLELCTCAPRWWDLLTRLIEDSPKLRVLKLRQKHIRRAPSPRASWKQPALPKCLLFHLETFKWELYEGSQKQKEVATFILKHAIRLKTAIISPKPTSTLLEKHEMLKDLSSSPRGSSTCELLFD

SEQ ID NO: 5269 - protein, 188 aa, Triticum aestivum
  misc_feature (8)..(8): Xaa can be any naturally occurring amino acid
MEMYRRIXRGDVKYPQWFSSDLRRFMSKLLDPNPNTRITIEKLVEHPWFKKGYKPAVMLAQPHGSNSLKDVQVAFSTADNEGGSKVEQPAGSSVKPSSLNAFDIISHSKGFDLSGLFAVDQEQKASNSRFMTQKPASAIVSKLEQIAETESFMVKKQDGLVKLQGSKEGRKGQLAIDAEIFEVTPAFY

SEQ ID NO: 5270 - protein, 77 aa, Glycine max
MGFWTLLEGFLLFANALAILNEDRFLARRGWTLAEMTGPQRNSLKGQVIGLIYACQFLRLPLILFNVITIIVKLFSG

SEQ ID NO: 5271 - protein, 142 aa, Bradyrhizobium japonicum USDA 110
MTPEQITLIQQSFAKVAPISETAAVLFYDRLFEVAPSVRAMFPEDMTEQRKKLMGMLAAVVGGLSNLDSILPAASALAKRHVAYGAKAEHYPVVGATLLWTLEKGLGEAWTPELATAWTDAYGVLSGYMISEAYGAQAQAAE

SEQ ID NO: 5272 - protein, 215 aa, Triticum aestivum
  misc_feature (120)..(120): Xaa can be any naturally occurring amino acid
  misc_feature (178)..(178): Xaa can be any naturally occurring amino acid
  misc_feature (184)..(184): Xaa can be any naturally occurring amino acid
  misc_feature (195)..(195): Xaa can be any naturally occurring amino acid
  misc_feature (204)..(204): Xaa can be any naturally occurring amino acid
MKTLLILTILAMAITIGTANIQVDPSGQVQWLQQQLVPQLQQPLSQQPQQTFPQPQQTFPQPQQTFPHQPQQQVPQPQQPQQPFLQPQQPFPQQPQQPFPQTQQPQQPFPQQPQQPFPQXTQQPQQPFSQQPQQPFPQTQQPQQPFSQLQQPQQPFSQPNNNWRQPNNATIIPQQQRXIIQPSXHKQLNHARNSXAQCKPCVIXVSLGNIWHKAM

SEQ ID NO: 5273 - protein, 475 aa, Mesorhizobium sp. BNC1
MSYALTINGKAVQTSTTFDVINPATGEVAAACPEGTVAELNAAVAAAKSAFPAWSSRPDSNRREALGKIADLIEAHREELAALITAEQGKPQVGPGAPFEVSGCVAWTRVTQALDFEPQILIDNDHERVELIREPVGVVASITPWNWPLMIAIWHIMPALRVGCTVVIKPSPYTPLSTLRLVELINEAGILPAGVLNAVTGDKEVGDRISEHPDIDKIAFTGSTATGRRIMERAGPTLKRLTLELGGNDAGIILPGTDMSPRMEDLFWGSFINAGQTCSCLKRLYVHESDYESVCAALSGFVGGIKVGNGAEPDTLIGPLSNKMQFDKIVAMVEDARAKGARILAGGEKPSGRGYNYPLTIIADATMDMRVVAEEQFGPVLPVIRYRDVEEAVAEANSLELGLGASVWGDDPEEAAKVARKLIAGTRWVNRHGVLNPTVPMGGVKQSGIGVEFGIEGLQEFTTVQVLSIAKRVAG

SEQ ID NO: 5274 - protein, 507 aa, Synechocystis sp. PCC 6803
MSNSILSKLNVGERSPVNRTHSSRTEAEKSSLFRFVRRKINSPWLACVPLTALIVAIWNAAAIAQDTEIVNITVETVNENVATLQGTLNAIWILIAAILVIFMNAGFGMLETGLCRQKNAVNILTKNLIVFALATIAYWAIGFSLMFGSSGNPFVGFGGFFLSGDHTNYGLSPFPEGLPVAVFFLFQVAFSATAATIVSGAVAERIKFNEFLIFSVLLVGIAYPITGHWVWDAGGWLYTMGFMDFAGSTVVHSVGGWAALAGAFLLGPRLGKFVDGRPGAIPGHNMGFAMLGCLILWIGWFGFNPGSQLAADQACAYIAVTTNLAASAGGLTATFTSWLKDGKPDLTMVINGVLAGLVGITAGCAGVSYWGSVIIGGIAGILVVYSVAFFDKIKIDDPVGAISVHLVNGVWGTLAVGFFNMEKGLFYGGGINQLIIQIVGILAIGAFTAIFSFVVWAILKQTMGIRVSGEEEMIGLDIGEHGMEAYTGFVKETDSFGSAVSGATVPE

SEQ ID NO: 5275 - protein, 126 aa, Brassica napus
FVMEYCKGGELFKKVAKGNLRNKVAWKYFHQLINAVDFCHSRQVYHRDIKPENLLLDDNENLKVSDFGLSALADCKRQDGLLHTTCGTPAYVAPEVINRKGYDGTKADIWSCGVVLFVPLAGYLPF

SEQ ID NO: 5276 - protein, 177 aa, Oryza sativa (japonica cultivar-group)
MEFGGTQMLGVSILRLFSMCQHFVITVTRTKYKEPTKALIYWPNLSNPGGNPAWMMLLLLMENILFDMIVLAGMGLWTLLEGFLLLANALAILNEDRFLGPRGWSMSEVSGNGQTKSLKGQIVGLIYATQFLRMPLIALNVLIIVVKLGLSDIQIFSLQVPFLMEILPTMVMPYVRP

SEQ ID NO: 5277 - protein, 162 aa, Saccharomyces cerevisiae
MTTSFYDLECKDKKGESFKFDQLKGKVVLIVNVASKCGFTPQYKELEELYKKYQDKGFVILGFPCNQFGKQEPGSDEQITEFCQLNYGVTFPIMKKIDVNGSNADSVYNYLKSQKAGLLGFKGIKWNFEKFLVDSNGKVVQRFSSLTKPSSLDQEIQSLLSK

SEQ ID NO: 5278 - protein, 402 aa, Bacillus cereus G9241
MLSAKTIEIVKSTVPLLQEKGVEITTRFYEILFSEHPELLNIFNHTNQKKGRQQQALANAVYAAATYIDNLEAIIPVVKQIGHKHRSLGIKAEHYPIVGTCLLRAIKEVAGAPDEVLNAWGEAYGVIADAFISIEAEMYEEAAHKEGGWKDFRNFVVVKKVKESDVITSFYLKPEDGGKVSSFIPGQYVTVQINIEGETYTHNRQYSLSDAPGKEYYRISVKKEKGVDTPDGKVSNYLHDHVKEGDTLPVSAPAGDFVLNMDSTLPVVLISGGVGITPMMSMLNTLIEQNSKRNVCFVHAAINSNTHAMKEHVEAVDNEYEQVKSYTCYSAPTEKDLEMKNFDKEGFVEREWLQTIIPTTEAEFYFCGPVAFMKQINAAITDLGVKQEHIHYEFFGPAASLQ

SEQ ID NO: 5279 - protein, 379 aa, Haloferax volcanii
MSGELKRGLEGVLVAESKLSFIDGDAGQLVYCGYDIEDLARDASYEEVLYLLWHGALPTGEELDAFSDELAAHRDLDDGVLDVARELAEQDESPMAALRTLVSAMSAYDESADFEDVTDREVNLEKAKRITAKMPSVLAAYARFRRGDDYVEPDESLNHAANFLYMLNGEEPNEVLAETFDMALVLHADHGLNASTFSAMVTSSTLSDLYSAVTSAIGTLSGSLHGGANANVMRMLKDVDDSDMDPTEWVKDALDRGERVAGFVHRVYNVKDPRAKILGAKSEALGEAAGDMKWYEMSVAIEEYIGEEKGLAPNVDFYSASTYYQMGIPIDLYTPIFAVSRAGGWIAHVLEQYEDNRLIRPRARYTGEKDLDFTPVDER

SEQ ID NO: 5280 - protein, 457 aa, uncultured marine proteobacterium ANT32C12
MEFNSHEELVAASTKAAQKWRLVPAPQRGEFIRQFGNELRNQKTELAKVITKEARKIVSEAEGEVQEAIDMCDFATGLSRQLYGLTMPSERPDHRLQELWQPIGVVGCITAFNFPMAVFAWNFCLASVCGNSIIWKPSPHSNGCADALKKAWDEVAGEHKDLVLLLKGGNEEASALCKDTNIPLISATGSTQMGKELAPIVSARLGRTLLELGGNNAAIICPTADLDLTVKGITFSACGTTGQRCTSLRRAFVHEDIYEEFMQKLHAYYATLKIGNPSDSSNQIGPLISERSYNDMQRVLESISNKDVTVHGGQRLEVGDPEEFYVMPAIVEVSQIEDEMLNETFAPILYVKKFTDLTNAIEMQNNVKQGLSSSIFTNDMRESELFLSSEGSDCGIANVNIGTSGAEIGGAFGGEKDTGGGRESGSDAWKAYMRRVTATINYGEDLPLAQGVEFDES

SEQ ID NO: 5281 - protein, 92 aa, Zea mays
MHPRSAATVRLCLVCLALLLLTRDVRSRNLVGAVVQKERHKQSHGGHGGATPEPPVEEGSDAGAKRGQLQRDLTRWEEIHTDYIYTQDVKHP

SEQ ID NO: 5282 - protein, 352 aa, Hordeum vulgare
MANEEALMFALQLASSVVLPMTLRTCIELGLLETLVGAGGKTLTPEEVAAKLPSKAESNPDAASMVDRLLRVLATYKVVSRLVDECADGSLSRRYGAEPVCKWLTPNEDGVSMAPFCLLAQNKLFMEAWCHMKDAVLEGGSAFTKAFRASWFDYAGTDDHFNHLFNEAMKDHSVIITKKPLELYTGFDGIDTLVDLAGGVGAVIHAITKKYPSIKGINFDLPHVISDAQPYPGVEHVGGDMFEMVPSGDAIPMKWILPCFSDDECAVLLKNCYDALPAHGKVINVECILPVNPDATNNAQGLICVDASLLAYSPGGKERNLRDFEKLAKAAGFTGVKASYIFANFWAMEYTK

SEQ ID NO: 5283 - protein, 383 aa, Corynebacterium efficiens YS-314
MTTPTISKQKAKFNALTVSEVRRLTDDAVEISFEVPEELQADYDYIPGQYVALRTQLDGAEVRRSYSICDIPRPGTIRVAVKKNLGGLFSTWANEELKAGDTLEVMNPQGGFTSKTHVTSLNDAETIAQEAGNNHLVAVAAGSGITPIMAIAQTVLAENPKATFEIVYANKGGADVMFAEEIGDLKDKYPQRFAVHHVLSREQRVNPLFSGRIDDEKLNLLLDQVLRTDEVKEWFLCGPFELVQLCRDELEGRGVDSANVRFELFTTGKPGDGPGQGNTGRPVIADPEGDNITISFTLDGLSGTIESPSSARESVLNAALRARPDVPFACAGGVCGTCRAKVIEGEYEMEENYALEPDEVEAGYVLTCQTRPKGDTLVVDYDA

SEQ ID NO: 5284 - protein, 501 aa, Arabidopsis thaliana
MENGKCNGATTVKLPEIKFTKLFINGQFIDAASGKTFETIDPRNGEVIATIAEGDKEDVDLAVNAARYAFDHGPWPRMTGFERAKLINKFADLIEENIEELAKLDAVDGGKLFQLGKYADIPATAGHFRYNAGAADKIHGETLKMTRQSLFGYTLKEPIGVVGNIIPWNFPSIMFATKVAPAMAAGCTMVVKPAEQTSLSALFYAHLSKEAGIPDGVLNIVTGFGSTAGAAIASHMDVDKVSFTGSTDVGRKIMQAAAASNLKKVSLELGGKSPLLIFNDADIDKAADLALLGCFYNKGEICVASSRVFVQEGIYDKVVEKLVEKAKDWTVGDPFDSTARQGPQVDKRQFEKILSYIEHGKNEGATLLTGGKAIGDKGYFIQPTIFADVTEDMKIYQDEIFGPVMSLMKFKTVEEGIKCANNTKYGLAAGILSQDIDLINTVSRSIKAGIIWVNCYFGFDLDCPYGGYKMSGNCRESGMDALDNYLQTKSVVMPLHNSPWM

SEQ ID NO: 5285 - protein, 180 aa, Nicotiana tabacum
MASSVLSSAAVATRTNVAQANMVAPFTGLKSAASFPVSRKQNLDITSIASNGGRVQCMQVWPPYGKKKYETLSYLPDLSEEQLLSEIEYLLKNGWVPCLEFETERGFVYRENNKSPGYYDGRYWTMWKLPMFGCTDATQVLAEVGEAKKAYPEAWIRIIGFDNVRQVQCISFIAYKPEGY

SEQ ID NO: 5286 - protein, 160 aa, Xylella fastidiosa 9a5c
MNVVRYTPWPGQAALQNEIKQVFDRFFEHNGDTDESAVVTAQWVPRVDIKEEPNQFVLYADLPGIDPADIEVQMDKGILSIKGERKTESSSQTEHFSRIERRYGSFHRRFALPDSADADGITASGSHGVLSIFIPKRAATTPRRIQVGNAVSNDVALQSM

SEQ ID NO: 5287 - protein, 123 aa, Brassica napus
VCVWCFVISGDVLSGNDNGGSVHLGVLQEWFGSHWWNTRIFSLLFIYAFVLLPLVLCRRVERLAFSSAISFLLAVLFVVISSVLAISALMEGQTKNPRLFPDLTNGGSFWNLFTASPVIVTAF

SEQ ID NO: 5288 - protein, 168 aa, Brassica napus
MATVNFISHLASPASVYLLFLLSTTAAAINVTTVLSSFPNLSSFSNLLVSSGIASELSGRNSLTLLAVPNSHFSSASVDFTRRLSPPKLADLLRFNVLLQFLSDSDLRRISPSGSAVTTLYEASGHVFAGSGSVNVTRDPASGSVTIGSPSSSKSVTVLKLLETKPPT

SEQ ID NO: 5289 - protein, 307 aa, Schizosaccharomyces pombe
MIDLDNIIERLYEKQLIAESVIAYLCSLAKEVLMQESNVVRLSTPITVVGDIHGQFDDLLEIFRIGGPCPYTNYLFLGDYVDRGYYSIETITLLICLKLRYPKRITLLRGNHESRGITQTYGFYSECLRKYGNANVWKYFTDIFDFLTLSATIDDTIFCVHGGLSPSIQHIDQILVLDRFREFPHEGPMADLVWSDPDPSVQEFSLSPRGAGFSFGEVIVTKFLEYNNMKHILRAHQLCSEGYQILFEKKLSTVWSAPNYCYRCANLASILQIDTDQSRFFNVFDAAPNQETPFVEPAAKVTAEYFL

SEQ ID NO: 5290 - protein, 410 aa, Blumeria graminis
MSDMQGRKVFKVFNQDFVVDERYNVTKELGQGAYGIVCAATNISTQEGVAIKKVTNVFSKKILAKRALREIKLLQHFRGHRNITCLYDMDIPRPENFNETYLYEELMECDLAAIIRSGQPLTDAHFQSFIYQILCGLKYVHSANVLHRDLKPGNLLVNADCELKICDFGLARGFSVDPEENAGYMTEYVATRWYRAPEIMLSFQSYTKAIDVWSVGCILAELLGGRPFFKGRDYVDQLNQILHVLGTPNEETLARIGSPRAQEYVRNLPFMAKRPFAQIFPNANPDALDLLNRMLAFDPASRISVEEALEHPFLQIWHDVSDEPCCPTTFNFDFEVTDDVGEMRKMILDEVARFRHHVRVQPGMQSPSNDPSVPTLQTSVAWGSEDPRPQENNDQEITGLERDLTVGLDR

SEQ ID NO: 5291 - protein, 161 aa, Triticum aestivum
  misc_feature (123)..(123): Xaa can be any naturally occurring amino acid
  misc_feature (129)..(129): Xaa can be any naturally occurring amino acid
MSDTDEHHFESKADSGASKTYPQQAGAIRKGGHIVIKARPCKVVEVSTSKTGKHGHAKCHFVAIDIFNGKKLEDIVPSSHNCDVPHVDRQDYQLIDITDDGYVSLLTESGHTKDDLKLPTDDXLLGQIXTGFADGKDLILSVMSRMGEEQICAVKEIGGGK

SEQ ID NO: 5292 - protein, 310 aa, Zygosaccharomyces rouxii
MVTLQNSTSTLKLNTGQTIPQVGLGTWRSKENEGYKAVIEALKAGYRHIDGAAVYGNEGEVGKAIQDSGVPRNEIFLTTKLWCTQQRNPQEALDQSLQRLGLDYVDLYLIHWPVPLRTENIKDGNLFQFAEKPDGSKDVDLEWNFIKTWELMQKLLESGKTKAIGVSNFSVNNLKDLLAAPTTKVTPAVNQVELHPLLPQEDLIKFGKENGIVIEAYSPLGGENAPILSDPTVQEIAKANGVEAGHVVISWAVQKGLVTLPKSVTPSRIVGNLKVLTLSDSDVAKVDGLLKAKGERRTCYQDFSPFPIFQ

SEQ ID NO: 5293 - protein, 149 aa, Glycine max
REQAQEFTDIKFREAYLDTVCLNMVQDPGHYDVLVMPNLYGDILSDLCAGLIGGLGVTPSGNIGEGAAVFESVHGTAPDIAGQDKANPTALLLSGVMMLRYMGLESYANKIEKACFDAISHGDHKTRDLGGTGTCSSFTADICARIKSM

SEQ ID NO: 5294 - protein, 311 aa, Zea mays
IRLELKISDFGLSALPEQLRYDGLLHTQCGTPAYVAPEVLRKKGYDGSKADIWSCGVVLYVLLAGFLPFQHENLMTMYNKVLRAEFEFPPWFSPDSKRLISKILVADPSKRTAISAIARVSWFRKGFSSLSAPDLCQLEKQEDAVTVTVTEEENNSKVPKFFNAFEFISSMSSGFDLSGLFESKRKTATVFTSKCSAAAIVAKIAAAARGLSFRVAEVKDFKIRLQGAAEGRKGRLAVTAEVFEVAPEVAVVEFSKSAGDTLEYAKFCEEDVRPALKDIVWTWQGDATCAANVPACHGEECHKQVVVVSTI

SEQ ID NO: 5295 - protein, 503 aa, Bradyrhizobium japonicum USDA 110
MAGSIAGAFVQGCLPKRPHHAPKKRLTMVNRMQFYIDGAWVDPAVKKSTAVVNPATEEAMYEVALGSKADVDKAVAAAKRAFATFSQTSREERVALLTKIIEIYKGRLKEIGAAVSDEMGAPLPMAEKLQAGAGLGHLMTTLDVLKNYHFEEPVGTAMVLREPIGVVGMITPWNWPLNQIACKVAPALAAGCTMILKPSEFTPTSALIFAEILHEAGVPKGVFNLVNGLGPEVGAAMSEHPDIDMISFTGSTRAGIDVAKRAAPTVKRVSQELGGKSPNVILEGADLTKAVTGGVMHMFNNSGQSCNAPSRMIVPLSKMKEVAAIAKAVADKTKAGDPRAEGTTIGPVVNRGQWDKIQGLIKKGIDEGATLVAGGPGLPEGVNKGFYVRPTIFADVTPDMTIAREEIFGPVLTIIGAKNEADAVQIANDTPYGLAGYVSADTVESAKRVARQIRAGNVNLQGVPNDRTAPFGGYKQSGNGREWGKYGLEDFLEVKAVAGFNAA

SEQ ID NO: 5296 - protein, 92 aa, Triticum aestivum
MGLCSCCCRCLEIMCAILLPPLGVCLRHGCCSMEFWISVLLTILGYLPGVLYAAYVICSVDPDRVRRRGAYVICSVDPDRVRRHDDDYIYVA

SEQ ID NO: 5297 - protein, 433 aa, Leptospira interrogans serovar Copenhageni str. Fiocruz L1-130
MIWYPFTLQFEPDSPLKIERAKGEFLYDELGNSYIDGISSWWVSIHGHNHPKIVQAVKNQLEKLDHVLLAGFTHDPAEKLAAELLKITDGLFQKVLYSDNGSTAVEIMIKLAYQYFQNIGEVDRKIFIKWNSSYHGDTIGTMSVGGNSVFNRVFQGLMFPTKEFQTPNCNFCPMGKKPESCKVECIDPIEEFFQKSPKAVAGIVIEPLILGSGGMIFYKEEVLQRLETISKKYGSLLLLDEVFTGFGRTGSVFAYQRAKIRPDFIALAKGLSAGVSAVAVTLTTDRIHSAFVTADPEKGFYHGHTMTGNPIACSAALASLKIFFEENRLEQILRLESKLNVGLKKIAKEFPKAVKNCRVLGAVGVLELEVGKASGYHYPGNKILKKKFLEKGVLLRPLGNVIYLTPPYNIENSSLEKIFSAIRETLSEISFGN

SEQ ID NO: 5298 - protein, 112 aa, Brassica napus
MKPPQSASLDRRRDDFRRGGSDIFEIIDHAIMVAATDCPIKFKSRRDKIAELLFSCRVTLCTGCHRELSLPGEDEAVDGGEDDVGGVGSKESKANSSRGDNNQIVGSYSYDD

SEQ ID NO: 5299 - protein, 352 aa, Glycine max
MARRSLPLLKHLLSRRIPARSGDHVTLIPGDGIGPMVTGAVEQVMEAMHAPVYFEKFEVHGNMKAVPPEVLDSIRKNKVCLKGGLVTPMGGGVSSLNVQLRKELDLYASLVNCFNLPGLPTRHDNVDIVVIRENTEGEYSGLEHEVVPGVVESLKVITKFCSERIAKYAFEYAYLNNRKKVTAVHKANIMKLADGLFLESCREVATKYPGIKYNEIIVDNCCMQLVSKPEQFDVMVTPNLYGNLVANTAAGIAGGTGVMPGGNVGAEHAVFEQGASAGNVGSDKIREQKKANPVALLLSSAMMLRHLQFPAFADRLETAVEKVILEGKCRTKDLGGTSTTQEVVDAVIDALD

SEQ ID NO: 5300 - protein, 124 aa, Cucumis sativus
GRGQFGTTFLCTDKPTGFNYACKTIPKRKLLCKEEYEDVWREIQIMHHLSEHPNIVRIKGTYEDPGLCYLVMELCEGGELFDRIVQKGQYSEREAAKLIGVIVSVLESCHSLGVMHRDLKPENF

SEQ ID NO: 5301 - protein, 280 aa, Streptococcus agalactiae NEM316
METYTLSNTLNIPKIGFGTWQLTEGEEAYKAVTHALKVGYTHIDTAQIYGNEHSVGRAIRDSGLARESIFLTTKIWNDKHDYHLAKASIDESLQKLGVDYIDLLLIHWPNPKALRENDAWKAGNAGTWKAMEEAYKEGKVKAIGVSNFMKHHLEALFETAEIKPMVNQIILAPGCAQEDLVRFCKGNDILLEAYSPFGTGAIFENESIKAIAEKYGKSVAQVALRWSLDNGFLPLPKSATPKNIEANLDIFDFQLNEDDITTLIQLDSGIKPKDPDNVSF

SEQ ID NO: 5302 - protein, 606 aa, Zea mays
MCGILAVLGCADEAKGSSKRSRVLELSRRLKHRGPDWSGLRQVGDCYLSHQRLAIIDPASGDQPLYNEDQSVVVAVNGEIYNHLDLRSRLAGAGHSFRTGSDCEVIAHLYEEHGEEFVDMLDGVFSFVLLDTRHGDRAGSSFFMAARDAIGVTPLYIGWGVDGSVWISSEMKALHDECEHFEIFPPGHLYSSNTGGFSRWYNPPWYDDDDDEEAVVTPSVPYDPLALRKAFEKAVVKRLMTDVPFGVLLSGGLDSSLVATVAVRHLARTEAARRWGTKLHSFCVGLEGSPDLKAAREVAEYLGTLHHEFHFTVQDGIDAIEDVIYHTETYDVTTIRASTPMFLMSRKIKSLGVKMVISGEGSDELFGGYLYFHKAPNKEELHRETCRKVKALHQYDCLRANKATSAWGLEARVPFLDKEFINAAMSIDPEWKMVQPDLGRIEKWVLRKAFDDEEQPFLPKHILYRQKEQFSDGVGYSWIDGLKAHATSNVTDKMLSNAKFIFPHNTPTTKEAYYYRMVFERFFPQKSAILTVPGGPSVACSTAKAIEWDAQWSGNLDPSGRAALGVHLAAYEHQHDPEHVPAAIAAGSGKKPRTIRVAPPGVAIEG

SEQ ID NO: 5303 - protein, 425 aa, Serratia marcescens
MSVTASDLAFDQRHIWHPYTSMSRPLPCYPIESASGVELQLADGRSLVDGMSSWWAAIHGYNHPRLNQAASQQLEKMSHVMFGGITHPAAISLCRRLVEMTPEALQCVFLADSGSVAVEVSLKMALQYWQARGERRQRILTLRHGYHGDTFGAMSVCDPDNSMHSLYQGYLAPHLFATAPQCRFDEEWREEDIAPFAALLEQHAGEVAAVILEPVVQGAGGMRIYHPTYLKRVRDVVRVAIKLLLIADEIATGFGRTGKLFACEHAQVVPDILCLGKALTGGYMTLSATLTTRHVAETISNGAAGCFMHGPTFMGNPLACAVADASLALLAENRWQAQVSAIETQLKRELLPLGRCRRWPHVRVLGAIGVVEMREPVDVAELQRGFVERGVWIRPFGKLIYLMPPYIIEAEQLSRLTAAVADAAR

SEQ ID NO: 5304 - protein, 405 aa, Geobacter metallireducens GS-15
MLDILVENGAVKELGKGVKAPSGTETIDASGLIVTPGLIDMHVHLRDPGHEYKEDIVSGTKAAAAGGFTSVACMPNTKPVNDNKAVTSYIIAKAKAEGSVNVFPVGSITQGSKGELLSEMGELKESGCVAVSDDGHPVTNSELMRRALEYAKGMGIMVISHAEDLSLVGAGVMNEGFVSTELGLKGIPWAAEDAATARDVYLAEFTDSPLHIAHVSTKGSLRIIRNAKARGVKVTCETAPHYFSLTDDAVRGYDTNAKMNPPLRTADDVTAVKEALKDGTIDAIATDHAPHHIDEKDLEFNEALNGIVGLETSLTLSLRLVEEGVLTLPVLVDKMACNPAKILGIDRGTLKPGSVADITVIDPKATWTVDADKLASKSKNSPFLGWEVKGAAAFTIVGGKVVYKR

SEQ ID NO: 5305 - protein, 422 aa, Pseudomonas aeruginosa PAO1
MSDLKTAALEYHAQPRPGKLSVELTKPTATARDLSLAYSPGVAEPVREIARDAELAYQYTGKGNLVAVISDGTAILGLGNLGPLASKPVMEGKGVLFKRFAGIDVFDIEVDAESPQAFIDTVKRISITFGGINLEDIKAPECFEIERALIEQCDIPVFHDDQHGTAIVTAAGMLNALELAGKKLEEAKIVCLGAGAAAISCMKLLVSMGAKVENIYMIDRKGVIHAGRDDLNQYKSVFATETDKRTLADALEGADVFVGLSGANLLEPEDLKRMAPNPIVFACSNPDPEIKPELAHATRNDVIMATGRSDYPNQVNNVLGFPFIFRGALDVRATRINEEMKIAAALALRDLAKQPVPEDVCAAYGVDKLEFGREYIIPKPMDKRLITVVSDAVAKAAIETGVATLPYPKNYPLKSVDDVFNG

SEQ ID NO: 5306 - protein, 453 aa, Glycine max
MEHFNNDDLEYVVDEYYDVPDFAVEDTSSDIVPELTSDVDSDFEDEFPTSNAKTDTTASEARNGKDIQGIPWERLNYSRDKYRETRLKQYKNYQNFSRSRHDLRKECLEVQKGETFYDFFFNTRLVKSTIVHFQLRPNIMLRNLLWATSKHDVYFMQNYSVMHWSALLRRGKEVLNVAKPIIPTLKRPGFLAQPVSRVQISTMTVKENLMVAGGFQGELICKNLKHPGVLFCGKITTDDNAITNAVDVYSNPAGSLRVITANNDFQVRVFDAENFASLGCFKYDWSVNNTSVSPDGKLLAVLGDSTECLIADANTGKITGSLKGHLDYSFSSAWHPDGQILATGNQDKTCRLWDIRNLSQSMAVLKGRMGAIRALRFTSDGRFLAMAEPADFVHIFDSHSGYEQGQEIDLFGEIAGISFSPDTEALFVGIADRTYGSLLEFNRKRHYNYLDSF

SEQ ID NO: 5307 - protein, 444 aa, Zea mays
  misc_feature (134)..(134): Xaa can be any naturally occurring amino acid
  misc_feature (185)..(185): Xaa can be any naturally occurring amino acid
  misc_feature (215)..(215): Xaa can be any naturally occurring amino acid
  misc_feature (279)..(279): Xaa can be any naturally occurring amino acid
  misc_feature (348)..(348): Xaa can be any naturally occurring amino acid
  misc_feature (413)..(413): Xaa can be any naturally occurring amino acid
MSTTKVKRRVGKYELGRTIGEGTFAKVRFARDTVTGEAVAIKILDKEKVLKHKMVEQIKREISTMKLIKHPNVVRIYEVMGSKTKIYIVLEFATGGELFDTIVNHGRMREDEARRYFQQLINAVDYCHSRGCVXTRDLKPENLLLDSYGNLKVSDFGLSALSQQIKDDGLLHTTCGTPNYVAPAXSLEDQGYDGAMADLWSCGVILFVLLAGYLXPFEESNLMTLYKKISNAEFTFPPWTSFPAKRLLTRILDPNPMTRITIPEILEDEWFKKGYKRPXFDEQYDTTLDDVDAVFNDSEEHHVTEKKEEEPVALNAFELISMSAGLNLGNLFDSEQEFKRETRFTSKXPPKKFVRKIEEAAKPLGFDVQKKNYKLRLEKVKAGRKGNLNVATEILQVAPSLHMVEVRKAKGDXTLEFHKFYKNLSKTLKDVVWKSDDLQTQHAS

SEQ ID NO: 5308 - protein, 164 aa, Mycoplasma penetrans HF-2
MFKMSDFYKFKVNKINGKEIELSEYKNKVVLVVNVASKCGFVKQYENLENMYQKYKDQGLVILGFPCNQFFFQEPKTNQEILSFCTTKYNVTFDMFEKINVNGKEANPLYTWLKEQMPWTARAKNVKWNFEKFLLDKNGNVKYRFESKKIPEEFEQEVVNLINE

SEQ ID NO: 5309 - protein, 479 aa, Escherichia coli O157:H7 EDL933
MSVPVQHPMYIDGQFVTWRGDAWIDVVNPATEAVISRIPDGQAEDARKAIDAAERAQPEWEALPAIERASWLRKISAGIRERASEISALIVEEGGKIQQLAEVEVAFTADYIDYMAEWARRYEGEIIQSDRPGENILLFKRALGVTTGILPWNFPFFLIARKMAPALLTGNTIVIKPSEFTPNNAIAFAKIVDEIGLPRGVFNLVLGRGETVGQELAGNPKVAMVSMTGSVSAGEKIMATAAKNITKVCLELGGKAPAIVMDDADLELAVKAIVDSRVINSGQVCNCAERVYVQKGIYDQFVNRLGEAMQAVQFGNPAERNDIAMGPLINAAALERVEQKVARAVEEGARVALGGKAVEGKGYYYPPTLLLDVRQEMSIMHEETFGPVLPVVAFDTLEDAISMANDSDYGLTSSIYTQNLNVAMKAIKGLKFGETYINRENFEAMQGFHAGWRKSGIGGADGKHGLHEYLQTQVVYLQS

SEQ ID NO: 5310 - protein, 508 aa, Zea mays
  misc_feature (376)..(376): Xaa can be any naturally occurring amino acid
MASNGCNGNGNGKAAPAGVVVPEIKFTKLFINGEFVDAASGKTFDTRDPRTGDVLAHVAEADKADVDLAVKSARDAFEHGKWPRMSGYERGRIMSKLADLVEQHTEELAALDGADAGKLLLLGKIIDIPAATQMLRYYAGAADKIHGDVLRVSGRYQGYTLKEPIGVVGVIIPWNFPTMMFFLKVSPALAAGCTVVVKPAEQTPLSALYYAHLAKMAGVPDGVINVVPGFGPTAGAALASHMDVDSVAFTGSTEVGRLIMESAARSNLKTVSLELGGKSPLIIFDDADVDMAVNLSRLAVFFNKGEVCVAGSRVYVQEGIYDEFVKKAVQAARSWKVGDPFDVTSNMGPQVDKDQFERVLKYIEHGKSEGATLLTXGGKPAADKGYYIEPTIFVDVTEDMKIAQEEIFGPVMSLMKFKTVDEVIEKANCTRYGLAAGIVTKSLDVANRVSRSVRAGTVWVNCYFAFDPDAPFGGYKMSGFGRDQGLAAMDKYLQVKSVITALPDSPWY

SEQ ID NO: 5311 - protein, 455 aa, Oryza sativa (japonica cultivar-group)
MLAVSPAMCPDIEDRAAVAGDAGMEVVGMSSDDMDQFDFSVDDIDFGDFFLRLEDGDVLPDLEVDPAEIFTDFEAIATSGGEGVQDQEVPTVELLAPADDVGVLDPCGDVVVGEENAAFAGAGEEKGGCNQDDDAGEANVDDGAAAVEAKSSSPSSTTSSSQEAESRHKSSSKSSHGKKKAKVDWTPELHRRFVQAVEQLGIDKAVPSRILEIMGIDSLTRHNIASHLQKYRSHRKHMIAREAEAASWTQRRQIYAAGGGAVAKRPESNAWTVPTIGFPPPPPPPPSPAPIQHFARPLHVWGHPTMDPSRVPVWPPRHLVPRGPAPPWVPPPPPSDPAFWHHPYMRGPAHVPTQGTPCMAMPMPAARFPAPPVPGVVPCPMYRPLTPPALASKNQQDAQLQLQVQPSSESIDAAIGDVLSKPWLPLPLGLKPPSVDSVMGELQRQGVANVPPACG

SEQ ID NO: 5312 - protein, 413 aa, Nicotiana tabacum
MPEKPLFGKYELGKLLGCGASAKVYHAREINNGQSVAIKMINKNNKDNIPNENIEREISILRQLRHPYIVKLYEVLATKSKIYFVMEYVKGGELFTKIADHGRFSEDLSRKYFQQLISALNYCHSRGIYHRDLKPENILIDENGDLKISDFGLSATTDQIQKFDGLLHTVCGSPAYVAPEILTIKGYDGAKTDIWSCGIILYVMIAGYLPFYDQNLMLMYKKIYKGEFKCPKWMSPDVIRILSRLLDTNPATRITIDEIIKDPWFRKGLKFIKFAGEEEDKYSLSSNCLNAFDLISFSQGLDISGLFKSNNPANDLERTVVEQSPESVIERVEEMAKKENFRLRKKKEWGIEMKVQNGKLTMSVDIYRLTERFVIVEVKREAGNGDLYTDLWRNKLKAVILGQQIAEIQDSGS

SEQ ID NO: 5313 - protein, 326 aa, Bacteroides thetaiotaomicron VPI-5482
MGTVKCIGILTSGGDAPGMNAAIRAVTRAAIYNGLQVKGIYRGYKGLVTGEIKEFKSQNVSNIIQLGGTILKTARCKEFTTPEGRQLAYDNMKREGIDALVIIGGDGSLTGARIFAQEFDVPCIGLPGTIDNDLYGTDTTIGYDTALNTILDAVDKIRDTATSHERLFFVEVMGRDAGFLALNGAIASGAEAAIIPEFSTEVDQLEEFIKNGFRKSKNSSIVLVAESELTGGAMHYAERVKNEYPQYDVRVTILGHLQRGGSPTAHDRILASRLGAAAIDAIMEDQRNVMIGIEHDEIVYVPFSKAIKNDKPVKRDLVNVLKELSI

SEQ ID NO: 5314 - protein, 422 aa, Oryza sativa (japonica cultivar-group)
MLAVSPAMCPDIEDRAAVAGDAGMEVVGMSSDDMDQFDFSVDDIDFGDFFLRLEDGDVLPDLEVDPAEIFTDFEAIATSGGEGVQDQEVPTVELLAPADDVGVLDPCGDGAAAVEAKSSSPSSTTSSSQEAESRHKSSSKSSHGKKKAKVDWTPELHRRFVQAVEQLGIDKAVPSRILEIMGIDSLTRHNIASHLQKYRSHRKHMIAREAEAASWTQRRQIYAAGGGAVAKRPESNAWTVPTIGFPPPPPPPPSPAPIQHFARPLHVWGHPTMDPSRVPVWPPRHLVPRGPAPPWVPPPPPSDPAFWHHPYMRGPAHVPTQGTPCMAMPMPAARFPAPPVPGVVPCPMYRPLTPPALASKNQQDAQLQLQVQPSSESIDAAIGDVLSKPWLPLPLGLKPPSVDSVMGELQRQGVANVPPACG

SEQ ID NO: 5315 - protein, 324 aa, Candida tropicalis
MSTTPTIPTIKLNSGYEMPLVGFGCWKVTNATAADQIYNAIKTGYRLFDGAEDYGNEKEVGEGINRAIKEGLVKREELFITSKLWNNFHDPKNVETALNKTLSDLNLDYVDLFLIHFPIAFKFVPIEEKYPPGFYCGDGDNFHYEDVPLLDTWKALEKLVEAGKIKSIGISNFTGALIYDLIRGATIKPAVLQIEHHPYLQQPKLIEYVQKAGIAITGYSSFGPQSFLELESKRALNTPTLFEHETIKLIADKHGKSPAQVLLRWATQRNIAVIPKSNNPERLAQNLSVVDFDLTKDDLDNIAKLDIGLRFNDPWDWDNIPIFV

SEQ ID NO: 5316 - protein, 214 aa, Zea mays
MAAVEVCVKAAAGKPDTLGDCPFSQRVLLTLEEKKVPYEVKLVDLGNKPEWFLEINPEGKVPVLKGDDGKCIADSDVITQVIEEKFPTPSLVTPPEYASVGSKIFPAFVKFLKSKDASDGSEKALLDELQALDEHLKAHGPYINGDNVSAADLSLAPKLFHLQVALEHFKGWKIPENLTNVHAYTKALFTRESFVKTKPSEEHVIAGWAPKVNA

SEQ ID NO: 5317 - protein, 147 aa, Lactococcus lactis subsp. lactis Il1403
MNGETVSMSDFKGKVVIVVNTASKCGFTPQFEGLEKLYENYKDQGLEILGFPCNQFVNQDAGENSEINEFCQLNYGVTFPMFQKIKVNGKEAHPLYQFLKKEAKGALSGTIKWNFTKFLIDREGNVIERFAPKTEPKEMEEEIQKLL

SEQ ID NO: 5318 - protein, 296 aa, Zea mays
MAVATESRGSEDRASAHANQEKRWVLSDFEVGKPLGRGKFGHVYLAREKRSSEIVALKVLFKSQLKQSQVEHQLRREVEIQSHLRHPNILRLYGYFYDQTRVYLILEYAAKGELYKELTRCKHFSERRTATYVASLARALIYLHGKHVIHRDIKPENLLVGVQGEIKIADFGWSVHTFNRRRTMCGTLDYLPPEMVEKAEHDYHVDIWSLGVLCYEFLYGVPPFEAKEHSETYRRIVKVDLKFPLKPFVSPAAKDLISQMLVKSSAQRLPLHKVLEHPWIVQNADPSGVYREGRSV

SEQ ID NO: 5319 - protein, 219 aa, Zea mays
  misc_feature (69)..(69): Xaa can be any naturally occurring amino acid
  misc_feature (202)..(202): Xaa can be any naturally occurring amino acid
APAFCELSLPLTKEKAAFSPSDPAMQRHVASGRPSGTDGSDFSYRMVVESRNQSTAHTAKATLPTPLSXPRNFAGYQRVAEGRSRLARLILVQALHLVAGGLLLLLSLSKGAAVNKFAVLSMAAGFLAIVVGELGRMRTMSVLLRLYTSLSSIAVAFSVTCIIRSELFLKVMKQNTEAITSYEMLDAVRVALGILLQMVVIXATTTRLLQNMSPPKRAS

SEQ ID NO: 5320 - protein, 171 aa, Brassica napus
STHASGWNRSRYGRKATIREFYGVILPSLERLHINFSDSPGDNTLWYPNPKAITYDIEGNRFITNSVDSEREEECGICLEPCTKMVLPNCCHAMCIKCYRNWNMKSESCPFCRGNIKRVNSEDLWVLTCDEDVVDPETVTKEDLFRFYLHINSLPKDYPEAVFLGYNEYLI

SEQ ID NO: 5321 - protein, 322 aa, Vibrio vulnificus YJ016
MSMIKKIGVLTSGGDAPGMNAAIRGVVRTALGAGLEVYGIYDGYLGLYEGRIKQLDRSSVSDVINRGGTFLGSARFPEFKEVAVREKAIENLKAHGIDALVVIGGDGSYMGAKKLTEMGYPCIGLPGTIDNDIAGTDYTIGYLTALNTVIESIDRLRDTSSSHQRISIVEIMGRHCGDLTLMSAIAGGCEYIITPETGLDKEKLIGNIQDGISKGKKHAIIALTELMMDANELAKEIEAGTGRETRATVLGHIQRGGRPTAFDRVLASRMGNYAVHLLMEGHGGRCVGIVKEQLVHHDIIDAIENMKRPVRNDLFKVAEELF

SEQ ID NO: 5322 - protein, 1533 aa, Magnaporthe grisea 70-15
MYPGSSQSRPYQVPPPPPMSPPLSQMHQQMSFVPPPPPPLNRYQTTPNLGASAPPPPPPGPPPASALNPQAPWNGAWGGVPAPRQAYDNRSGMYAQAPIQQYNPQAHAATAPGLNIPPPPLQTDAPMSDTYNPGQDPMFDGFMPDLSFDLEQETMGSSQTWQTTSSSSTNTASVNDNVQSNAPTEERTRRNNSASITGTQSSSNVPGIPSDITASWSLDKVIAWLQMNSFSRDWQETFKSLNIHGAQFLELGSGHFGRGNFGMMHQQVYPKLAKVCTASGTGWDQPREREEGKRMRRLIRGLVHARAVPDSARVPSSHGRQGSINSRGNDKGTHDGSDSPNTPIMKTPSSQSRSTTIPTFPDGSSFSNHRGVLKNIDIDRHSSPKLNGDSPAASPNPVMASSTPKSSTLSVSPHSSRFGNNVRNSTDSVKAIYGSGIPADAQKMMSNSNLDELINGRGARQSPSDLGDNSAGTDSPVSARDTKLPFRQRMQAKDIDGNLSSPNGEGSLSPQMYRNGLGLDDYLRFKKPGGSIYLMATADGWNYRVVDVTDVETVLDLRSEISRGLGIPDEDGVEFYLTELGKSDHSQPLDDNQLMNHNKSRADAEGTLKLFVKPPPMSQQSTWSAGDTGQRHRFGTSSSMSRQQNTLKDDQSEEARLRAQREYKAEIDRKGREYLAIRKAKLESNNNGLSSSTEGIGIVGKPVDFDTPRHSPYEDKNTDRMFPTRNAPAPPVAPSATLNRVNSLMTGQRRVQGSMDGYPSQRVPPGVGTTTSPKEMSEDRRRQPMSGSQPMGGITSALVDMGRNLGGVALPNRGVSANNVPSKPSPPYRVATAPVSGRDFVSPDNRAAFPRSQTAGDLSPISQMPANFAAYQEPNPSPRGFGAAPVSSAAHKRAPSGPDIDFTEPEVSFDRPAPSTAQNEAQSDDDSGDDSDDGLFVIPIAARKASMKKAKSRASVTFDASDSGDGKRPALTVNTARDRKSVSFNSPQSARTGDDDDDSGRQRRTPKSDMWDSEDGKLGRRKSFKMDVWANRPPAEALINNLEDFFPGMDVDQPVLEEGDQEQNIDGSPVAPSPIAEVDETQSPGHLQINATPLNSLPPSRVQSMYNESDTLGSDESTLKALERPPSFQSLAQRSVRRSGGLGRMKSIREKARGAHEAHKRYTQTSMAAPQGLSRSGGTPATETQPTQNNSSALLRRKSTKMFNANIVQIRPNRDSMLVPDIPQDSISSSSRGAPKHPTTFRWFKGQLIGKGTYGRVYLGMNATTGEFLAVKEVEVNPRAAAGDKKRMKELVAALDQEIETMQHLDHVNIVQYLGCERKETSISIFLEYISGGSIGSCLRKNGKFEESVVQSLTRQTLSGLAYLHREGILHRDLKADNILLDVDGTAKISDFGISKKTDNIYGNDKSNSMQGSVFWMAPEVIRSQGEGYSAKVDIWSLGCVVLEMFAGRRPWAKEEAVGAIYKIANGEIPPIPEDVQDTISPIAVAFMMDCFTVDSHDRPTANKLLSQHPFCELDPNYNFLDSELYAKIRGTY

SEQ ID NO: 5323 - protein, 133 aa, Kandelia candel
DPLDGFFSSAVANVPFNSANEAAAFANARFDWKETPEAHVFKADLPGLKKEEVKVEVEEGRILQISGERRKEQEEKNDKWHRLERSSGKFLRRFRLPENAKMYQVKASMENGVLTITVPKEEEKKPEVEAIEI

SEQ ID NO: 5324 - protein, 334 aa, Saccharomyces kluyveri
MAPHVNKKQKLSNSLEQLKATGTVVVSDTGDFESIAKYTPQDATTNPSLILAAAKKENYAKLIDTAVEYGKKQGKTLEDKVDQAVDMLLVEFGKAILNIVPGRVSTEVDARLSFDKDATVAKALHIIKLYEDAGISRERVLIKIASTWEGIQAAKELEEKHGIHVNLTLLFSFSQAVAAAEAKVTLISPFVGRILDWYKASTGKDYTAETDPGVKSVRKIFNYYKKYGYDTIVMGASFRNVGEIKALAGVDFLTISPGLLDELMSSEDPVPQVLDAEAAKSEDLAKVSFISDEAKFRFELNEDAMATEKLSEGIRKFSADIVTLFELIEKKIKA

SEQ ID NO: 5325 - protein, 336 aa, Candida parapsilosis
MSIPSSQYGFVFNKQSGLNLRNDLPVHKPKAGQLLLKVDAVGLCHSDLHVIYEGLDCGDNYVMGHEIAGTVAAVGDDVINYKVGDRVACVGPNGCGGCKYCRGAIDNVCKNAFGDWFGLGYDGGYQQYLLVTRPRNLSRIPDNVSADVAAASTDAVLTPYHAIKMAQVSPTSNILLIGAGGLGGNAIQVAKAFGAKVTVLDKKKEARDQAKKLGADAVYETLPESISPGSFSACFDFVSVQATFDVCQKYVEPKGVIMPVGLGAPNLSFNLGDLALREIRILGSFWGTTNDLDDVLKLVSEGKVKPVVRSAKLKELPEYIEKLRNNAYEGRVVFNP

SEQ ID NO: 5326 - protein, 163 aa, Chlamydomonas sp. W80
MASPFYALAATDIAGKEFPFAQLQGKVVLVVNVASQCGFTPQYKGLQELYDKYKDEGLVIIGFPCDQFGHQEPGQESEIASFCQKNFGVTFPMMAKIEVNGDNTHPVYQFLKSEKKQLFMERIKWNFEKFLINKQGEVVERFSSAGDPMRNIAPAVAKLLAEA

SEQ ID NO: 5327 - protein, 248 aa, Rosa hybrid cultivar
MAYENKPNTVLDADAQRRLGRGKIEIKRIENTTNRQVTFCKRRNGLLKKAYELSVLCDAEVALIVFSNRGRLYEYSNNSVRETIERYKKACADSSNNGSVSEATTQYYQQEAAKLRAQITTLQNSNRGYMAEGLSNMSIKELKGVETKLEKAISRIRSKKNELLFAEIEYMQKRELDLHNNNQLLRAKIADNERHQQSINAIAGGHGSYEIMQPTQPFHEARNYFQVNALEPNIHQYSRHDQISLQLV

SEQ ID NO: 5328 - protein, 445 aa, Glycine max
EKATGQEYACKYIAKRKLVTDDDVEDVRREIQIMHHLAGHPNVISIKGAYEDAMAVHVVMELCAGGELFDRIIQRGHYTERQAAELTRTIVGVVEACHSLGVMHRDLKPENFLFINQHEDSLLKTIDFGLSVFFKPGDIFNDVVGSPYYVAPEVLRKRYGPEADVWSAGVILYILLSGVPPFWAENEQGIFEQVLRGDLDFSSDPWPSISESAKDLVRKMLVRDPRRRLTAHQVLCHPWIQVDGVAPDKPLDSAVLSRLKQFSAMNKLKKMALIIIAESLSEEEIAGLKEMFKMIDADNSGQITFEELKAGLKRVGANLKESEIYDLMQAADVDNSGTIDYGEFLAATLHRNKIEREDNLFAAFSYFDKDGSGYITQEELQQACDEFGIKDVRLEEIIKEIDEDNDGRIDYNEFVAMMQKGNLPAVGKKGLENSFSIKFREALKL

SEQ ID NO: 5329 - protein, 283 aa, Clostridium acetobutylicum ATCC 824
MMIESINWFPGHMAKTTREIRENLKLVDAVIEIRDARIVYSSSNPDINSICKDKPRIILLNKFDLAEKSITDNWVKALSSESIRAIPVNALEGRGLNSIKPALNELLKPKLDNMAAKGIQNYIIRVMVVGIPNVGKSSFINKMAKNKVAKVGNKPGVTKSKQWIKTNIGIELMDTPGVLWPKFQDQKVGLNLAFTGAIKDEIMDIEELALKLVQFLQKNYPEKLMERYKLEDINEDPLINMNNIAAKRGALLKGGEIDYNRVSIIIVDEFRSGKIGKISLERP

SEQ ID NO: 5330 - protein, 120 aa, Glycine max
  misc_feature (37)..(37): Xaa can be any naturally occurring amino acid
  misc_feature (63)..(63): Xaa can be any naturally occurring amino acid
  misc_feature (97)..(97): Xaa can be any naturally occurring amino acid
AISMIFTPAATTVNRAGAGMVAPFTGLKSMDGFPTKXTNNDITSIASNGGRVQCVHVWPSVGXKKSETLYYLPYLDDAQLAKEVEYLLTKGWIPCLXLQWEHGYLYRDHNRSPRYYRWTL

SEQ ID NO: 5331 - protein, 176 aa, Glycine max
MAIKSETYKSLELGAPSKSHASGTPLVLLNLSSNWERSILKNEKLLLTTRKKNDPVTIFHGSKAPNLSVTHYMERILKYSHCSPSCFVIAQIYMDRFFQKKGGYLTSFNAHRLLITSVMVAVKFLDDKYYSNAYYAKVGGVSTEEMNRMELEFLFNLEFRLFVTTELFLKYCEKLG

SEQ ID NO: 5332 - protein, 150 aa, Brassica napus
  misc_feature (65)..(65): Xaa can be any naturally occurring amino acid
DLSLIPGAASKSAKKQNRDNTNTELWFEDLAQLSLPIFRTVILSMRSEDLSSDVIESCLISYAKXHIPGILRSNRKPSSSSSTAASENEQREILETITSNLPLDKSSISATTRFLFGLLRTAIILNASETCRDLLERKIGSQLERASLDD

SEQ ID NO: 5333 - protein, 259 aa, Echinochloa crus-galli var. formosensis
AGPIFNDYSSVGYSFLLKKDKAIIVQPERVIVGNGPAFGCVMMKEFLSELAKRLKKNTTAYENYKRIFVPEGSPLESEPNEPLRVNVLFKHIQKMLTGDSAVIAETGDSWFNCQKLKLPEGCGYEFQMQYGSIGWSVGALLGYAQGANDKRVIACIGDGSFQVTAQDVSTMLRCAQNSIIFLINNGGYTIEVEIHDGPYNVIKNWNYTGLVDAIHNGEGKCWTSKVKCEEELTAAIETALGEKKDCLCFIEVIVHKDDT

SEQ ID NO: 5334 - protein, 208 aa, Oryza sativa (japonica cultivar-group)
MSSSVLLFLVALLLSCSTMGNAARRLEVEYPAAHPAVPELPKPELPPHPVVPELPKHEEPPPHPHPAVPELPKPELPPPHPAVPELPKHEEPPHPVVPELPKPEVPHPAVPELPKHEEPPHPVVPELPKHEEPPHPVVPELPKPEVPHPAVPELPKHEEPPHPVVPELPKPEVPHPVVPELPKPEVPHPTVPEHEQPPKPESHYPEKP

SEQ ID NO: 5335 - protein, 294 aa, Fremyella diplosiphon
MYRHLSEGIEDHREQEQKVENAANIQDDNQLTVEQAIANLQGEDLGLRVYAAWWLGRFRVDAPEAIDVLIQALEDEDDRTNVGGYPLRRNAARALGKLGEKRAVPALIKALECSDFYVREAAAQSLEMLGDSSSIPRLIELLNDQVPGTLPAPEPPQLTQPFDAIIEALGTLGASDAIPIIQEFLEHTVPRIQYAAARAMYQLTSESTAGYNQYGDRLVQALAQDDLQLRRAVLSDLGAIGYLPAAEAIADTLAENSLKLISLKGLLEKQFQPTKPEDLSPGAIKVMQLMDALL

SEQ ID NO: 5336 - protein, 316 aa, Vibrio vulnificus YJ016
MSNKLEQLRKLTTVVADTGEIDAIKKYQPEDATTNPSLILKAAQIAEYAPLIDASIEYAKTQSDDKAQQIQDTCDMLAVNIGKEILKTIPGRISTEVDARLSYDMEGSVAKARQLVKMYNDAGITNDRILIKLASTWEGIRAAEILEKEGINCNLTLLFSFAQARACAEAGVFLISPFVGRIMDWYKAKEGRDFEAQEDPGVLSVTKIYNYYKEYGYKTVVMGASFRNIGEILELAGCDRLTIAPALLAELEAAEGEVVEKLVDSKGAAERPAPMTHAEFLWEHNQDPMAVEKLAEGIRNFAVDQGKLEAMIAAKL

SEQ ID NO: 5337 - protein, 600 aa, Glycine max
MWKVVRFAAARSRRFSTAIPGPCKVHKRGTDILHDPWFNKDTGFPLTERDRLGLRGLLPPRVISFEHQYDRFMNSHSALEKNTQGQSDRFVSLSKWRILNRLHDRNETLYYRVLIDNIKEFAPIIYTPTVGLVCQNYSGLFRRPRGMYFSAKDKGEMMSMIYNWPAHEVDMIVLTDGSRILGLGDLGVQGIGIPIGKLDVYVAAAGINPQRILPVMLDVGTNNQKLLEDRLYLGLRQPRLEGEEYLSIVDEFMEAVHARWPKAIVQFEDFQMKWAFETLKRYQKKFCMFNDDIQGTAGVALAGLLGTVRAQGRPLTDFVKQKIVVVGAGSAGLGVLSMAVQAVARMSGCSELAAKSQFYLIDKDGLVTTERNSLDPAAAPFAKNPRDLEGLSEGASIIEVVKKVKPHVLLGLSGVGGVFNAEVLKAMRESVSTKPAIFAMSNPTMNAECTAIEAFSHAGENIVFASGSPFENVDLGNGEVGHVNQANNMYLFPGIGLGTLLSGARHITDGMLRAAAECLASYMTEDDVRKGILYPSIDCIRDVTAEVGAAVVCAAVAEKQAEGHGDVGFKELENMSKEETVEYVRGNMWYPEYCPLVHEK

SEQ ID NO: 5338 - protein, 155 aa, Glycine max
  misc_feature (29)..(29): Xaa can be any naturally occurring amino acid
  misc_feature (57)..(57): Xaa can be any naturally occurring amino acid
FTSPFHISYVECATLLDRIFSYSVSVPSXSVAATTHVPHLIHHAEITLTSLNVHRLXIPSIMLAAKFIDDAFYNNAYYAKVGGVSTSELNRFEMSFLFGIDFRLQVGVDTFGGYCRQLEKEAAEVVQIERPMQACRIKESWSNKDDPTCASTIAR

SEQ ID NO: 5339 - protein, 505 aa, Zea mays
MASPAMVPLRQLFVDGEWRPPAQGRRLPVVNPTTEAHIGEIPAGTAEDVDAAVAAARAALKRNRGRDWARAPGAVRAKYLRAIAAKVIERKPELAKLEALDCGKPYDEAAWDMDDVAGCFEYFADQAEALDKRQNSPVSLPMETFKCHLRREPIGVVGLITPWNYPLLMATWKIAPALAAGCTAVLKPSELASVTCLELADICKEVGLPSGVLNIVTGLGPDAGAPLSAHPDVDKVAFTGSFETGKKIMASAAPMVKPVTLELGGKSPIVVFDDVDIDKAVEWTLFGCFWTNGQICSATSRLLIHTKIAKKFNERMVAWAKNIKVSDPLEEGCRLGPVVSEGQYEKIKKFISNAKSQGATILTGGVRPAHLEKGFFIEPTIITDITTSMEIWREEVFGPVLCVKEFSTEDEAIELANDTQYGLAGAVISGDRERCQRLSEEIDAGCIWVNCSQPCFCQAPWGGNKRSGFGRELGEGGIDNYLSVKQVTEYISDEPWGWYQSPSKL

SEQ ID NO: 5340 - protein, 447 aa, Bacteroides thetaiotaomicron VPI-5482
MKKEYLIYKLSEEMKEATRIDNELFPKFDVKRGLRNEDGTGVLVGLTKIGNVVGYERIPGGGLKPIPGKLFYRGYDVEDISHAIIKEKRFGFEEVAYLLLSGRLPDKEELASFRELINDNMALEQKTKMNIIELEGNNIMNILSRSVLEMYRFDPDADDTSRDNLMRQSIDLISKFPTIIAYAYNMLRHATFGRSLHIRHPQEKLSIAENFLYMLKKDYTELDARTLDLLLILQAEHGGGNNSTFTVRVTSSTGTDTYSAIAAGIGSLKGPLHGGANIQVADMFHHLQENIKDWKSVDEIDTYFTRMLNKEVYNKTGLIYGIGHAVYTISDPRALLLKELARDLAREKGKEEEFAFLELLEERAIATFGRVKNNGKTVSSNIDFYSGFVYEMIGLPQEIFTPLFAMARIVGWCAHRNEELNFEGKRIIRPAYKNVLDDLAYIPIKKR

SEQ ID NO: 5341 - protein, 396 aa, Bacteroides thetaiotaomicron VPI-5482
MNKITMQKDGTLSVPDVPVVPYITGDGVGAEVTPSMQSVVNAAVQKAYGGKRRIEWKEVLAGERAFNETGSWLPDETMKAFQEYLIGIKGPLTTPVGGGIRSLNVALRQTLDLYVCLRPVRWYQGVHSPVKAPEKVNMCVFRENTEDIYAGIEWEAGTPEAEKFYQFLKNEMGVTKVRFPETSSFGVKPVSREGTERLVRAACQYALDHHLPSVTLVHKGNIMKFTEGGFKKWGYELAQREFGDALADGRLVIKDCIADAFLQNTLLIPEEYSVIATLNLNGDYVSDQLAAMVGGIGIAPGANINYKTGHAIFEATHGTAPNIAGKDVVNPCSIILSAVMMLEYLGWKEAAALIEKALEQSFLDARATHDLARFMPGGTSLSTTAFTREIVERIEK

SEQ ID NO: 5342 - protein, 488 aa, Zea mays
  misc_feature (47)..(47): Xaa can be any naturally occurring amino acid
MAPPQTIPRRGLFIGGAWREPCLGRRLPVVNPATEATIGDIPAGTAXRHWSRAPGAVRANFLRAIAAKIKDRKSELALLETLDSGKPLDEASGDMDDVAACFEYYADLAEALDGKQQSPISLPMENFKSYVLKEPIGVVGLITPWNYPLLMATWKVAPALAAGCTTILKPSELASVSCLELGAICMEIGLPPGVLNIITGLGPEAGAPLSSHSHVDKVAFTGSTETGKRIMISAAQMVKPVSLELGGKSPLIVFDDIGDIDKAVEWTMFGIFANAGQVCSATSRLLLHEKIAKKFLDRLVAWAKNIKVSDPLEEGCRLGSVISEGQYEKIKKFISTARSEGATILYGGGRPQHLRRGFFLEPTIITDVSTSMQIWQEEVFGPVICVKEFRTESEAVELANDTHYGLAGAVISNDQERCERISKALHSGIIWINCSQPCFVQAPWGGNKRSGFGRELGEWGLDNYLTVKQVTKYCSDEPWGWYQPPSKL

SEQ ID NO: 5343 - protein, 368 aa, Triticum aestivum
MALASPVDYAGIITSSQRQLSSVMPRCNGLQCTIGYGNKSRATGHLVVRAMSMDRPKLDFSNPNWKNQFQEDFDRRFSLPHLTDIIDVESRPAPFSLKSRTPLENVDGSLEESWNGYVNDDDRALLKVIKFASPTSAGAECIDPDCSWVEQWVHRAGPRKQIYFEPQCVKAGIVTCGGLCPGLNDVIRQIVLTLEKYGVKNIVGIQHGFRGFFEDHLAEVPLNRHVVQNINLAGGGASISDIVDSIQARRLDMLFVLGGNGTHAGADAIHGECRKRKLKVSIIGVPKTIDNDILLMDKTFGFDTAVEAAQRAINSAYIEAHSAFHGIGLVKLMGRSSGFITMHASLSSGQVDICLIPEVPFTLDGPNG

SEQ ID NO: 5344 - protein, 159 aa, Zea mays
LANAAAFPMVLKAALELGVFDTLYAEASRSDSFLSPSEIASKLPTTPRNPEAPVLLDRMLRLLASYSVVKCGKVSEGKGERVYRAEPICRFFLKDNIQDIGSLASQVIVNFDSVFLNTWAQLKDVVLEGGDAFGRAHGGMKLFDYMGTDERFSKLFNQT

SEQ ID NO: 5345 - protein, 156 aa, Neurospora crassa
MGKITKFGDEGEEVTMKETPTSHQPEAQDDVSMADAGEEGEEGDEEYEEGEGTKVRLLPGSTPTAASFEFLDENHTLGNALRYVIMKNPDVEFCAYAIPHPSEAKMNVRIQTYEGTTAVEALRKGLRDIQDLCDVVSDKFLEARKDFTDKKAAASA

SEQ ID NO: 5346 - protein, 54 aa, Brassica napus
FGAQATMICIDNSEWMRNGDYSPSRLQAQTEAVNLLCVAKTQSNPENTVGILTM

SEQ ID NO: 5347 - protein, 340 aa, Bacillus cereus ATCC 10987
MKAAVWYGERDIRIEERETKELQPNDVKVKVAWAGICGSDLHAYLHPGSVPINMNTVMGHEFSGEIAEVGSHVTKFKKGDRVCIYPMMLKDPSNAEIERFITLDAVGAQIDGGFAEYVILPQKTIFKIPDHLPLELAAMVEPAAVSFQSIKDSNVREGDTVVVYGAGPIGLFAVLGAKAAGASNIIVIDLFDSRLDKATEMGATHVFNAKEVNPVEEIRKLFPGGADVAIEAAGVESTFNQAIQSTKVRGTMMVISFHTQDIQFNVPASLIFSGAKLMGSVGYSNETYNEVIELFANGRLPAQSIITSKIDIDNIAEQGFEALIHDKSQAKILVKLSGAH

SEQ ID NO: 5348 - protein, 179 aa, Fritillaria agrestis
MASSATMLSSVATAACVAPAQASMVAPFVGLKSASAFPVTQKTVTGLSTLPSNGGRVQCMKVWPIVGLKKFETLSYLPTLSVESLLKQIEYLIRNGWVPCLEFSLEGFVSRDNNKSPGYYDGRYWTMWKLPMFGCTDAAQVVKEAAECKKEYPAAFIRVIGFDNVRQVQCVSFIVEKPE

SEQ ID NO: 5349 - protein, 444 aa, Triticum aestivum
  misc_feature (308)..(308): Xaa can be any naturally occurring amino acid
VLESRDRIGGRVHTDYSFGCPIDMGASWLHGVSNENSLAPLISHLGLRLYHTSGDNSVLYDHDLESCSLFDKNGLAVPMETAAKVGVIFEKILKETVKLRDEQEHDMPLEQAISMVLERHPDLKLEGLDDRILQWCVCRLEAWFAADADEISLKNWDQEHVLTGGHGLMVDGYFPVIQALAQGLDIRLNQRVKKIARQQKGVTVTIEDGTQYSADACIITVPLGVLKANIIKFEPELPSWKSSAIADLGVGIENKVAMHFDKAFWPNVQVLGMVGPTPKTCGYFLNLHKATGHPVLVFMAASPARRFXAQDVEKLSDKEAVELVMCHLRKMIPDATEPSQYLVSRWGSDPNSLGSYSCDLVGKPSDVCERFSAPVESVLYFAGEAASAEHSGAVHGAYSSGMDAAEECRRRLLMRKGVPDLVQVGAAACEEMADVVAPLQICRT

SEQ ID NO: 5350 - protein, 297 aa, Thermoanaerobacter tengcongensis MB4
MILKLEVGVGLKNLNGKWGLDSSKEFYWEPDVEGGYRVYKVKSVIIEHQSLYQKIDIVELETWGKSLFLDGSLQSTESDEFIYHELLVHPAMRVHPSPKRVLICGVGEGKSVREVLKYPTVKEVIGVDIDKEVVALCQKHLGKTPIDDKRVRLVYQDVAEFIKNYRGEPFDVAIVDVTDDLDGPARSVHQLDFYKRLYEILGEKATVVVQGTSAFSKVKNVGFCHIYEILKEVFPFVIPYADYIPSFSDLWTFFVALKGIKDLTPRHEIPRDLKYYDEYTNERIFTLAKPLREKLGV

SEQ ID NO: 5351 - protein, 292 aa, Saccharomyces cerevisiae
TLVHVASVEKGRSYEDFQKVYNAIALKLREDDEYDNYIGYGPVLVRLAWHISGTWDKHDNTGGSYGGTYRFKKQFNDPSNAGLQNGFKFLEPIHKEFPWISSGDLFSLGGVTAVQEMQGPKIPWRCGRVDTPEDTTPDNGRLPDADKDAGYVRTFFQRLNMNDREVVALMGAGALGKTHLKNSGYEGPWGAANNVFTNEFYLNLLNEDWKLEKNDANNEQWDSKSGYMMLPTDYSLIQDPKYLSIVKEYANDQDKFFKDFSKAFEKLLENGITFPKDAPSPFIFKTLEEQGL

SEQ ID NO: 5352 - protein, 316 aa, Bacillus cereus ATCC 10987
MKNRVNPVLLPGLEMYPDQDLRPECLPTMREEASKVFPPTIIDETLSVTNEVIEGPDANPLRLKIYRPKSNNESLPALLWIHGGGYILGSINDNDDLAVKIAKEANCMVVSVDYRLAPEHPYPAPIEDCYAALKWIADNAETLNIDSNRIGVAGVSAGGGLTAALTLLARDRQYPSICFQMPLYPMIDDRNNTPSANEIKKGFVWNQKSNEAGWKMYLGKLHGTDHIPAYAAAARAEDYRNLPRTYTCVGQLDPFRSETLTYVTKLAEAGVDVEFHLYPGAYHGFEMMHPDADISVHAWNDYVRAVKTGFAKKELR

SEQ ID NO: 5353 - protein, 211 aa, Zea mays
RRGKGRLQAALSEMWQLEAASRATMNNGTEEGLGDSSEVLFPQELQMEVDRQPAPANVPPARRRGDQMVPTMTTSSLNRAGTEVSADLVVANSEEEDTRAQVPFHAHLHLHPRAEAPPAARRTNNGARQHDAFQQPRNHRRDALLAPSASEASSSWTGREGAVVPVWSPPAASGHSDAFAADEADVSSRSYLGRHPQSHRLMNWSQLSQSS

SEQ ID NO: 5354 - protein, 128 aa, Methylobacillus flagellatus KT
MALSKAEILDAIASLTVLELSELIKDLEEKFGVSAAAAAVAVAAPAAGGGDAGAAAAEKTEFDVILASAGDNKVNVIKAVRELTSLGLKEAKDLVDAAPKAIKEGVSKADAEAAAKKLEEAGAKAEIK

SEQ ID NO: 5355 - protein, 292 aa, Saccharomyces cerevisiae
TLVHVASVEKGRSYEDFQKVYNAIALKLREDDEYDNYIGYGPVLVRLAWHISGTWDKHDNTGGSYGGTYRFKKEFNDPSNAGLQNGFKFLEPIHKEFPWISSGDLFSLGGVTAVQEMQGPKIPWRCGRVDTPEDTTPDNGRLPDADKDAGYVRTFFQRLNMNDREVVALMGAGALGKTHLKNSGYEGPWGAANNVFTNEFYLNLLNEDWKLEKNDANNEQWDSKSGYMMLPTDYSLIQDPKYLSIVKEYANDQDKFFKDFSKAFEKLLENGITFPKDAPSPFIFKTLEEQGL

SEQ ID NO: 5356 - protein, 256 aa, Arabidopsis thaliana
MEGITHPIPRTVEEVFSDFRGRRAGLIKALTNDMVKFYQTCDPEKENLCLYGLPNETWEVNLPVEEVPPELPEPALGINFARDGMQEKDWVSLVAVHSDSWLLSVAFYFGARFGFGKNERKRLFQMINELPTIFEVVSGNAKQSKDLSVNNNNSKSKPSGVKSRQSESLSKVAKMSSPPPKEEEEEEDESEDESEDDEQGAVCGACGDNYGTDEFWICCDACEKWFHGKCVKITPAKAEHIKHYKCPTCSNKRARP

SEQ ID NO: 5357 - protein, 331 aa, Arabidopsis thaliana
MSNVIGDRTEDGLSTAAASGSTAVQSSPPTDRPVRVYADGIYDLFHFGHARSLEQAKLAFPNNTYLLVGCCNDETTHKYKGRTVMTAEERYESLRHCKWVDEVIPDAPWVVNQEFLDKHQIDYVAHDSLPYAHSSGRGKDVYEFVKKVGRFKETQRTEGISTSDIIMRIVKDYNQYVMRNLDRGYSREDLGVSFVKEKRLRVNMRLKKLQERVKEQQERVGEKIQTVKMLRNEWVENADRWVPGFLEIFEEGSHKMGTAIVDQYPRKVNEAKSAERLENGQDDDTDDQFYEEYFDHDMGSDDDEGEKFYDEEEVKEEETEKTVMTDAKDNK

SEQ ID NO: 5358 - protein, 296 aa, Saccharomyces cerevisiae
MITTPLVHVASVEKGRSYEDFQKVYNAIALKLREDDEYDNYIGYGPVLVRLAWHISGTWDKHDNTGGSYGGTYRFKKEFNDPSNAGLQNGFKFLEPIHKEFPWISSGDLFSLGGVTAVQEMQGPKIPWRCGRVDTPEDTTPDNGRLPDADKDAGYVRTFFQRLNMNDREVVALMGAHALGKTHLKNSGYEGPWGAANNVFTNEFYLNLLNEDWKLEKNDANNEQWDSKSGYIMLPTDYSLIQDPKYLSIVKEYANDQDKFFKDFSKAFEKLLENGITFPKDAPSPFIFKTLEEQGL

SEQ ID NO: 5359 - protein, 449 aa, Xanthomonas campestris pv. campestris str. ATCC 33913
MSRTVIVNARLVNEGKEFDADLLIEGGRIARIDSHIAPAAGDTVVDAAGRWLLPGMIDDQVHFREPGLTHKGDIATESGAAVAGGLTSFMDMPNTNPPTLNADALQAKYDAAAGRAWANYGFYMGASNDNLAHIQSLDPKTAPGIKVFMGASTGNMLVDNPETLDAIFRDAPTPIITHCEDTPTIDATMAAYKEKYGDALTAEMHPDIRSREACLKSSQLAVSLARKHNTRLHVLHISTADELMLFEAGPLVDADGKVRKRITAETCIHFLRFDRSDYARLGNLIKCNPAIKDPEDRLALIEALAEDVIDVLATDHAPHTWDEKQKPYAQAPSGLPLVQYALVAALELVHEGKLPITRVVQKFAHAPAQLFDVEQRGFLREGYFADLVLIDNRPFTVKREQVLSKCGWSPFEGTTFRSRIAATWVNGQQVWDGEQLVGSAAGQRLTFDR

SEQ ID NO: 5360 - protein, 251 aa, Neurospora crassa
MTEGPAYSKKVVVVGDGGCGKTCLLISYSQGYFPEKYVPTVFENYITYPTHPPTGKTVELALWDTAGQEEYDRLRPLSYPETDLIFVCFAIDCPNSLENVMDKWYPEVLHFCPYTPLILVGLKSDLRNKKTCIDMLKTQGLTPVTTEQGLAVAKKMGAQYMECSSKEMKGVEEIFEQAILTVVANDRKTLEQEAANGMLGVGAGSGSGKGSGISFSSGDKAGSGIGPVKAAGVGGTIVPKTRKKKRKCGMM

SEQ ID NO: 5361 - protein, 124 aa, Cucumis sativus
GRGQFGTTFLCLEKSTGKEYACKSIAKRKLATMEDVEDVRREIQIMHHLVGIPSIVSIKGAYEDAVAVHVVMELCEGGELFDRIVKLGHYTERQAAELARTVIGVIEACNSLGVMHSDLKPENF

SEQ ID NO: 5362 - protein, 208 aa, Triticum aestivum
HELGLTFSNEAGTLPPCGTGGQCCIWQFNFRGFNPHTDPYSPDSIDLLRRSGIDFDLFAVEGVDSTRFAELMMSSGIVLNDDVQWVTFHGSHDFGYLLRLLTGREMPNTLDEFLKLTKIFFPVMYDVKHLMKFCGPGLYGGLSRLGKLLKVERVGTGHQAGSDCLLTLQCFMKLKQLYLKESVKLYDGLLFGLIPGEVEIKTAPPPIG

SEQ ID NO: 5363 - protein, 199 aa, Methylobacillus flagellatus KT
MMTLYSGTTCPYSHRCRIVLFEKGMDFQVIDVDMANKPEDLAVINPHNTVPVLVERDLVLEQANIINEYIDERFPHPQLMPADPVMRARARLFLHNFEEQLFNHVADIETGSAKAADKARATIRDNLTQIVPLFSRQEYILGDEFSMLDVAIAPLLWRLGHYGIELPKQAAPLLKYAERIFSRPAYIEAMTPSEKAMRK

SEQ ID NO: 5364 - protein, 212 aa, Saccharum officinarum
HEGQPLESEPNEPLRVNVLFKHVQKMLTGDSAVIAETGDSWFNCQKLKLPEGCGYEFQMQYGSIGWSVGALLGYAQGANNKRVIACIGDGSFQVTAQDVSTMLRCEQNSIIFLINNGGYTIEVEIHDGPYNVIKNWNYTGLVDAIHNGEGKCWTSKVKCEEELTAAIETALGEKKDCLCFIEVIAHKDDTSKELLEWGSRVSAANSRPPNPQ

SEQ ID NO: 5365 - protein, 440 aa, Glycine max
MGVCGSRPKVNEEDLSSKKKNNNNNNHRRRRRRILRRRVSSRKIEANNVSHSNSALQASNRASDAAWFDSTSALDSECDDEFYSVYDGEVSTGHADEIGEDRKLSLDHCGILPNNCLPCLTSNAIAVEKRRPMSPDTPSSRRKSLSKLSFKWREGSSDMTLLSPKAFKQKHLAGSSVPFCPLEKQTPGSWSQIEPSSFRVRGKNYLRDKKKEFASSSAAFYPLGADLFLSSRKIDHIARFIQIPSINIPGDAPSILIVNIQIPLYPAAIFQSENDGEGMNVVLYFKLSEKYSKDLPDQFRESISKLINDEVERVKGFPLDTIAPFRERLKILGRVANLENLSLSTTEKKLMNAYNEKPVLSRPQHEFFLGENYLEIDLDVHRFSYIARKGFEGFIERLKLCNLDFGLTIQGNKAEDLPEHLLCAIRLNKLDYSNFNQFGF

SEQ ID NO: 5366 - protein, 415 aa, Gibberella zeae PH-1
MALTAAQVAIVKSTAPILKEHGKTITTTFYRNMLGAHPELKNYFSLRNQQTGAQQAALANSVLAYATYIDDLGKLSHAVERIAQKHVSLFIKAEHYPIVGTHLIGAIGEVLGSALTTEIKDAWVAAYGQLADIFIQREGQLYDAAGEWNSWRKFKIAKKEAENDSVTSFYLEPLDDKPLPKFLPGQYVSLQIPIPELDGLLQSRQFSLSEAPGSNHYRISVKLQGPEEEPSLEDLSAGKIPGLVCTRLHKRYNVGDEVELSPPAGEFFLNPADTSAAKKPLVLLSAGVGATPLVSILDSVLESETASRPITWIHGARYSGSTCFVPHVLDSAKKHDNITAKIFLEDVKEGDQYDFKGEIDLDQLQKDKLLQLDSSDAEYFICGPEDWMVKVRAFLEENGVPRERQHLELFKTGDV

SEQ ID NO: 5367 - protein, 462 aa, Listeria monocytogenes
MFKTNVEQNNVPVFGSFESGQDLPEKRMNKESVDPRIAYQLVKDQLIDEGSARQNLATFCQTYMEPEAEQIMAETMEKNAIDKSEYPQTAKLESSCVNMLADLWNVDESEHYMGTSTVGSSEACMLGGMAMKFRWRSAALKNGLDIHAKKPNLVISSGYQVCWEKFCVYWDIELREVPMSEEHLSINTDIIMDYVDEYTIGIVGILGITYTGKFDDIMTLNDLVEDYNNTHDNEVVIHVDGASGAMFTPFVEPGLEWDFRLPNVVSINTSGHKYGLVYPGVGWILWRDKEYLPEELVFDVSYLGGHMPTMAINFSRSASQIIGQYYNFLRFGYEGYRQIHMRTRDGALQLSQAVAETGLFEIYNDGANLPIVCYKLKDDANVAWTLYDLADRLQMKGWQVPAYPLPKEMGNTIIQRYVCRGDLGQNMVTAFKNDLSESIEELNNAHILYHDVNTSKTHGFTH

SEQ ID NO: 5368 - protein, 657 aa, Zea mays
  misc_feature (290)..(290): Xaa can be any naturally occurring amino acid
MASVSVVLLQRSSSRVRGYIRLQRIASSSVTLVLEGEGHWWWSNSRGRDERFGARTVHHMAGSVEGENGGVPAGGQVAMAPGVVTGGVEDAYGEDRATEDQTVTPWAVCIASGHSLLRDPRHNKGLSFTEKERDTHYLRGLLPPVVLSQDLQEKRMLQNVRQFQVPLQRYTALMDLQERNERLFYKLLIDNVEELLPVVYTPTVGEACQKYGSIFRRPQGLYISLKEKGRILEVLRNWTEKSIQVIVVTDGERILGLGDLGCQGMGIPVGKLALYTALGGVRPSAVSFNXCLPITIDVGTNNEDLLKDEFYIGLKQRRATGQEYSEFLDEFMAAVRQNYGQKVLVQFEDFANHNAFTLLEKYRTNHLVFNDDIQGTAAVVLAGIIAALKSVGGTLADHTFLFFGAGEAGTGIAELVALEISRQANVSVEEARKKIWLVDSKGLIVASREETLQPFKKRYAHEHEPVKDLLGAVKAIRPTALIGSAGVGQSFTKEVIEVMSSINERPIVLALSNPTSQSECTAEQAYTWSQGRAIFGSGSPFDPVKYNDKLFVPAQANNAYIFPGFGLGVVISGAVRVSDDMVLAAAEALAEQVTPEHIEKGLIYPPFSIIRKISANIAAHVAAKAYDLGMATQLPRPKDLVKYAESCMYSPVYRSYR

SEQ ID NO: 5369 - protein, 581 aa, Triticum aestivum
MCGILAVLGCGDESQGKRVHVLELSRRLKHRGPDWSGLHQVADNYLCHQRLAIIDPASGDQPLYNEDKSIAVAVNGEVYNHEELRARLSGHRFRTGSDCEVIAHLYEEYGESFIDMLDGVFSFVLLDARDNSFIAARDAIGVTPLYIGWGIDGSVWISSEMKGLNDDCEHFEIFPPGNLYSSKEKSFKRWYNPPWFSEVIPSVPYDPLRLRSAFEKAVIKRLMTDVPFGVLLSGGLDSSLVAAVAARHFAGTKAAKRWGTRLHSFCVGLEGSPDLKAAKEVADHLGTVHHEFNFTVQDGIDAIEDVIYHIETYDVTTIRASTLMFQMSRKIKALGVKMVISGEGADEIFGGYLYFHKAPNKEEFHQETCRKIKALHQYDCLRANKATSAWGLEVRVPFLDKEFINEAMSIDPEWKMIRPDLGRIEKWILRKAFDDEERPFLPKHILYRQKEQFSDGVGYSWIDGLKDHAASNVSDKMMSNAKFIYPHNTPTTKEAYYYRMIFERYFPQSSAILTVPGGPSVACSTAKAIEWDAQWSGNLDPSGRAALGVHLSAYEQDTVAVGGSNKPGVMNTVVPGVAIET

SEQ ID NO: 5370 - protein, 268 aa, Kineococcus radiotolerans SRS30216
MTLHDGVGIPQLGFGVWQVPPEQTAEVVLRALQAGYRHIDTAAGYGNEAGVGDALRASQIPREDVFITTKLANSEHGRDKTLAAFDASMAKLGLDYLDLYLIHWPLQADDYVETWKAFEEIKASGRVRTIGVSNFQKTHLRKLLDETGTVPTVNQVEVHPYLVQEDLRSFHAEHGIATEAWSPLAQRAGLVEDPVVTGIAEQLGRTPAQVVIRWHLQQGNVVIPKSVTPERIVSNIDVFGFELPPEQVDALTGLDRAERTGPDPDVLG

SEQ ID NO: 5371 - protein, 464 aa, Listeria monocytogenes
MLYSKENKESYLEPVFGSSAEDRDIPKYTLGKEPLEPRIAYRLVKDELLDEGSARQNLATFCQTYMEDEATKLMSETLEKNAIDKSEYPRTPELENRCVNIIADLWHAPKDQKFMGTSTIGSSDACMLGGMAMKFAWRKRAEKLGLDIYAKKPNLVISSGYQVCWEKFCVYWDIDMRVVPMDKEHMQLNTDQVLDYVDEYTIGVVGILGITYTGRYDDIYALNEKLEEYNSKTDYKVYIHVDAASGGFFTPFVEPDIIWDFRLKNVISINTSGHKYGLVYPGIGWVLWKDESYLPEELIFKVSYLGGEMPTMQINFSRSASHIIGQYYNFLRYGFEGYRTIHQKTSDVAQYLAHAVEQTGYFDIFNDGSHLPIVCYKLKTTANVNWTLYDLADRLQMRGWQVPAYPLPKSLENIIIQRYVCRADLGFNMAEEFIQDFQASIQELNNAHILFHDTQQSGVHGFTH

SEQ ID NO: 5372 - protein, 179 aa, Fritillaria agrestis
MASSATMLSSVATAARAAPAQASMVAPFVGLKSASAFPVTQKPATGLSTLPSNGGRVQCMKVWPIVGLKKFETLSYLPTLSVESLLKQIEYLIRNGWVPCLEFSLEGFVSRDNNKSPGYYDGRYWTMWKLPMFGCTDAAQVVKEAAECKKEYPAAFIRVIGFDNVRQVQCVSFIVEKPE

SEQ ID NO: 5373 - protein, 228 aa, Arabidopsis thaliana
MGRGKIVIQRIDDSTSRQVTFSKRRKGLIKKAKELAILCDAEVGLIIFSSTGKLYDFASSSMKSVIDRYNKSKIEQQQLLNPASEVKFWQREAAVLRQELHALQENHRQMMGEQLNGLSVNELNSLENQIEISLRGIRMRKEQLLTQEIQELSQKRNLIHQENLDLSRKVQRIHQENVELYKKAYMANTNGFTHREVAVADDESHTQIRLQLSQPEHSDYDTPPRANE

SEQ ID NO: 5374 - protein, 247 aa, Galdieria partita
MVASKTDLEQKVRSRLVKLFEQTPCMPIMVRLAWHDAGTYDAQTGTGGVNGSIRFDPELRHGANNGLKIALDLLEPIKKEYPDIGYADLFQLASVTAIEFAKGPKIPFRMGRKDATGPDACPEEGRLPNAEDHMSQLRRTFHRMGLSDKDITVLSGAHTLGRCHKERSGYEGPWTHQPLEFDNSYFVEILKPNPDPGLIRLASDLSLLDDSYTRSLVETYAENKDIFFKDYTESHHKLSELGAVWEY

SEQ ID NO: 5375 - protein, 137 aa, Triticum aestivum
  misc_feature (57)..(57): Xaa can be any naturally occurring amino acid
  misc_feature (119)..(119): Xaa can be any naturally occurring amino acid
MAHPDRHHFQTKGESGGTNIYPEDGCGILQGELIFIQSRHCQADDDSTSYTGKLGHXRVTFAGLDIFTGKKLEDIVPSSHYCDVPHVDRPDYQLTDILDDGYASLLTDSGNTNDDLKLXNDDALLDQIKSGLADGKD

SEQ ID NO: 5376 - protein, 65 aa, Triticum aestivum
ARLISRRGLAGAADGHGSAKVPLWKDPLSPSKWKEEHFVLASLSMWGVIFYGGYKLFKWKEGSQD

SEQ ID NO: 5377 - protein, 505 aa, Triticum aestivum
  misc_feature (204)..(204): Xaa can be any naturally occurring amino acid
  misc_feature (219)..(219): Xaa can be any naturally occurring amino acid
  misc_feature (379)..(379): Xaa can be any naturally occurring amino acid
MSTCAASLAPLLGTAAANATDYLCNQFADTTTAIDSTYLLFSAYLVFAMQLGFAMLCAGSVRAKNTMNIMLTNVLDAAAGALFYYLFGFAFAFGTPSNGFIGKHFFGLRDVPQVGFDYSFFLFQWAFAIAAAGITSGSIAERTQFVAYLIYSAFLTGFVYPVVSHWIWSADGWASASRTSGPLLFNSGVIDFAGSGVVHMVGGXGRALGRAHRGPPHWXRFDHAGRAVALRGHSASLVVLGTFLLWFGWYGFNPGSFLTILKSYGPPGSIHGQWSAVGRAAVTTTLAGSTAALTTLFGKRLQTGHWNVLDVCNGLLGGFAAVTAGCSVVDPWAAIICGFVSAWVLIGLNKLAARFKFDDPLEAAQLHGGCGAWGVIFTXALFARREYVEQIYGAPGRPYGLFMGGGGRLLGAHVVLILVIAAWVSCTMGPLFLALNKLGLLRISAEDQMAGMDQTRHGGFAYAYTDEDSSSRPGRGAGGSVGGFMLKSAQTSQVAADATSPSSSV

SEQ ID NO: 5378 - protein, 99 aa, Zea mays
  misc_feature (90)..(90): Xaa can be any naturally occurring amino acid
FIRHECAAAGDYCSAGVTHQSVGDRVKLEPVISCWRCRHCKGGRYNLCEDMKFFVTPPVHRSLANQEVHPADLCFKLPYRVSLQEGAMCXPLSVGFHAC

SEQ ID NO: 5379 - protein, 221 aa, Saccharomyces cerevisiae
MRANVDFLNPIQLGLSLSDANGNKPDNGPSTWQFNFEFDPKKEIMSTESLELLRKSGINFEKHENLGIDVFEFSQLLMDSGLMMDDSVTWITYHAAYDLGFLINILMNDSMPNNKEDFEWWVHQYMPNFYDLNLVYKIIQEFKNPQLQQSSQQQQQQQYSLTTLADELGLPRFSIFTTTGGQSLLMLLSFCQLSKLSMHKFPNGTDFAKYQGVIYGIDGDQ

SEQ ID NO: 5380 - protein, 364 aa, Populus tremuloides
MGSTGETQMSPAQILDEEANFALQLISSSVLPMVLKTAIELDLLEIMAKAGPGALLPPSDIASHLPTKNPNAPVMLDRILRLLASYSILICSLRDLPDGKVERLYGLASVCKFLTRNEDGVSVSPLCLMNQDKVLMESWYHLKDAILEGGIPFNKAYGMTAFEYHGTDPRFNKVFNKGMSVHSKMAMKKILETYKGFEGLASLVDVGGGTGAVVSTIVSKYPSIKGINFDLPHVIADAPAFPGVENVGGDMFVSVPKADAVFMKWICHDWSDEHCLTFLKNCYDALPENGKVILVECILPVAPDTSLATKGVMHVDVIMLAHNPGGKERTDREFESLARGAGFKGFEVMCCAFNTHVIEFRKKA

SEQ ID NO: 5381 - protein, 182 aa, Thermococcus kodakaraensis
MKRPLPLLLALLVATAGCMSEGGVKMEKTLEVGSVFHDGEFIPKEYTCEGDDTNPPIYIGNIPAEAKSLVIIVDDPDAPAGTFTHWIAWNIPPVGEIPSWVPRKPETDEPFHIVQGKNDFGRIGYNGPCPPRGHGVHHYHFKVYALDTELKLEPGSSRKELEKAMEGHVIAWGEVVGLYERK

SEQ ID NO: 5382 - protein, 501 aa, Oryza sativa (japonica cultivar-group)
MGNCCPGSGDAEPASSDASTGNGSSSFKAGASPSSAPAQNKPPAPIGPVLGRPMEDVRSIYTIGKELGRGQFGVTSLCTHKATGQKFACKTIAKRKLSTKEDVEDVRREVQIMYHLAGQPNVVELKGAYEDKQSVHLVMELCAGGELFDRIIAKGHYTERAAASLLRTIVEIIHTCHSLGVIHRDLKPENFLLLSKDEDAPLKATDFGLSVFKDIVGSAYYIAPEVLKRSYGPEADIWSVGVILYILLCESEHGIFNSILRGQVDFTSDPWPRISASAKDLVRKMLNSDPKKRISAYEVLNHPWIKEDGEAPDTPLDNAVMNRLKQFRAMNQFKKAALRVIAGCLSEEEIRGLKEMFKSMDSDNSGTITVDELRKGLSKQGTKLTEAEVQQLMEAADADGNGTIDYDEFITATMHMNRMDREEHLYTAFQYFDKDNSGCISKEELEQALREKGLLDGRDIKDIISEVDADNDGRIDYSEFAAMMRKGNPEANPKKRRDVVI

SEQ ID NO: 5383 - protein, 133 aa, Zea mays
  misc_feature (26)..(26): Xaa can be any naturally occurring amino acid
  misc_feature (68)..(68): Xaa can be any naturally occurring amino acid
MAGIDKNMLWPLLALNLIMYIIDIAXTSWNLNHFINGQTNYPGVAANGATFYFLKFSILHGRLSATSXLAIVHHVRAWRHHSLFTNNASSLICCAITALAFCLTCKEIHIGEHRGCLLYVLQDFVIILGFLRS

SEQ ID NO: 5384 - protein, 124 aa, Cucumis sativus
GRGQFGTTYLCTYRPTGDLYACKSIPKRKLLCKEDYEDVWREIQIMHHLSEHPNVVQIKGTYEDSVFVHLVMELCAGGELFDRILLKGHYSEREAAQLIKTIVGVVETCHSLGVMHRDLKPENF

SEQ ID NO: 5385 - protein, 185 aa, Glycine max
SRKIKALGVKMVLSGEGSDEIFGGYLYFHKAPNKKEFHEETCRKIKALHLYDCLRANKSTAAWGVEARVPFLDKEFINVAMSIDPEWKMIRPDLGRIEKWVLRNAFDDDKNPYLPKHILYRQKEQFSDGVGYSWIDGLKDHANKQVTDATMMAANFIYPENTPTTKEGYLYRTIFEKFFPKVDFI

SEQ ID NO: 5386 - protein, 296 aa, Glycine max
  misc_feature (52)..(52): Xaa can be any naturally occurring amino acid
  misc_feature (65)..(65): Xaa can be any naturally occurring amino acid
  misc_feature (71)..(71): Xaa can be any naturally occurring amino acid
  misc_feature (103)..(103): Xaa can be any naturally occurring amino acid
  misc_feature (171)..(171): Xaa can be any naturally occurring amino acid
MVLIRLWFVLLGFFGGFGSAAEQRRWTLNDFDIEKPLGRGKFGHVYLAREKXDNHIVALKVLFKXQLQQSXVVHQLRREVEIQSHLRHPHILRLDGYFYDQSXGPKGDLYKELQKCKYFSERRVTTYVASLARAFIYCHGKHVIHRDIKPENLLIGKIQLFCSENNESKFXVLCFGWSVHTFNRRRTMCGTLDYLPPEMVESVEHDASVDIWSLGVLCYEFLYGVPPFEAKEHSDTYRRIIQVDLKFPPKPIVSSAAKDLISQMLVKDSSQRLPLHKLLEHPWIVQNAEPSGVYRS

SEQ ID NO: 5387 - protein, 124 aa, Cucumis sativus
GRGQFGTTYLCTEITTGIEYACKSISKRKLIAKEDVEDVRREIQIMHHLAGHKNIVTIKGAYEDSLYVHIVMELCSGGELFDRIIQRGHYSERKAAELTRIIVGVVETCHSLGVMHRDLKPENF

SEQ ID NO: 5388 - protein, 356 aa, Hypocrea virens
MSRSNPPNNASASRKISFNVSEQYDIQDVVGEGAYGVVCSAIHKPSGQKVAIKKITPFDHSMFCLRTLREMKLLRYFNHENIISILDIQKPRSYDSFNEVYLIQELMETDMHRVIRTQDLSDDHCQYFIYQTLRALKAMHSANVLHRDLKPSNLLLNANCDLKVCDFGLARSAASQEDNSGFMTEYVATRWYRAPEIMLTFKEYTKAIDVWSVGCILAEMLSGKPLFPGKDYHHQLTLILDVLGTPTMEDYYGIKSRRAREYIRSLPFKKKVPFRTLFPKTSDLALDLLEKLLAFNPVKRITVEDALKHPYLEPYHDPDDEPTAPPIPEEFFDFDKHKDTLSKEQLKQLIYQEIMR

SEQ ID NO: 5389 - protein, 494 aa, Neurospora crassa
MSSNVFVELKTPVTGTYKQPTGLFINNEFVEGVDKKTFEVINPATEEVICSVHEATEKDVDIAVAAARKAFEGVWRDVTPQQRGIYLLKLADLLEKNLDLLAAVESLDNGKSITMARGDVGAVVGTIRYYGGWADKIEGKTIDISPDSFHYTRQEPLGVCGQIIPWNFPLLMLAWKVGPALATGNTIVMKTAEQTPLSALVFAQFVKEAGFPPGVLNIISGFGRIAGAAMASHMDIDKVAFTGSTMVGRQIMKAAAESNLKKVTLELGGKSPNIIFNDADIDQAIDWVNFGIYFNHGQTCCAGSRVYVQEGIYDKFVAAFKQRAQQNKVGDPFHDETFQGPQVSQLQYDRIMGYIKAGKEEGATVETGGERHGDKGYFIQPTIFTNVRHDMKIMKEEIFGPVCAVAKFSTEEEVIKLGNDSNYGLAAAVHTKDLNTAIRVSNHLRAGTVWVNTYNALHHQLPFGGYKESGIGRELGEAALANYTQCKSVAIKLN

SEQ ID NO: 5390 - protein, 1146 aa, Neurospora crassa
MADLNFSAAIEANLLAALSKHTEEAKSPASTPTPAPAPGPAPVPTPTPPSIPTQGASAPPPQPVQQQPQQAQQPPLNHSLQSSQGPPSQTAQPPQQQLSQASSLSHALQQALQSSNPPSYQTPSTPQPQPSSTTTAAPISQPLVQVPLPQPSPHAVSNVPPQASPALTEPPKRSHSPDPQDSNGKRPKLEHVDEMDQDIPFDIKAALATALGDFEKQHSQIGNDSSLENPSGPSSAPPPALAVSLSATATPMPEKCGDKLMKASSNSTYMIRSMSLPVLGNLAVQILLRLSQQPRNETLSLLSETDAEFRKHYDLLTESFKLARKGFSDSPVLLPDELEINDSEDRETVRVANLATTAISVFGANDVACKDLDDSFFSIFVPEDGEFKDTLADLLLSLKTQAFLDSLDEQATPQQVTEQLDKFFPDNFEDWLKQRNLDVVTDTDADQLAVKIKDRRELLSTLANSEQPKKSKYPPDTFPETLCAFLQSHIGVVVEYAEEYGVKIPISEEPIAPESIVSDPIQNGNNVQDEHADLAALLQSKIVENGELKDFHAGNLHNEASVSADDNFDLSKLIEQSLPDHINGLKDGLLEQNGQGESSGLFDTKDLASLIAEKLNDNLGTPVDGLSNVPQNYEDTMRENHGQVHPQYHNINQLQTPTYQQYPPASSSNIGMGTTGETLPPNQSCPTSVLYEKARQAAVAKSSSTTRREGLHSTRRPWTPDEEKALMMGLDMVKGPHWSQILSLFGAHGSVSDILKDRTQVQLKDKARNLKLFFLKTNSEMPYYLQSVTGELKTRAPGQAARKEAEEKARLNAEDEQARLAGIMTLGGLHNNHHPVAGSPIAPSPARAHTATPGPGTGHLNGTPTPTPTQGPTNQPAALAPVPISPMVKTEPVDHSAHQVGNLPQIQPAPAPQSLQPALKPQSQPQPLHQQQSQPHLQQHPQANAQQHSQQHLQQHSQPLQPLRPQQQPQQLAQSQMRSQTPQALAPAPPQQYHHQQQHHQPQGQQQHQQLHQQQQLHPGSQQHEQTQPQPQPQVQAQPPPPQQQQQHHVAPAPASTSTTTTATPAIAAAQPHVHVAAAEPAAASSTLSNQATPSFGLPPIPPNHHSTPDQAQDVKLFETLQAAIGATSPAHESHQAATVPETSAG

SEQ ID NO: 5391 - protein, 485 aa, Nocardioides sp. KP7
MTTPRKFDEYRWNVLVDGVPLNVESRYPISDPSTGRYLTQVPDCAEADVDRAVQASRQAQAEWGALPPRARAAKLRELITLLREHREEFAMLDAIDGGFPISMMRNDVDAALELMDIFADMALDLGGKTIPVSTNLHFTTHEPFGVVARIGAFNHPFFFAASKVAAPLMAGNSVILKAPDQTPLSSLRLAEVAAEVLPQNLLITISGRGRVAGRAIVRHPQIKRIGFIGSTDTGRSIQRDAAEVAVKHISLELGGKNAQIVFADADLEQAALGAVNGMNFTWTAGQSCGSTSRLLVHESVADQVIARVVELVSAIAVGPPLDENAQMGPLVSQAQYDKSVHAIGEGIREGAKVVAGGGRPEGVGEGGWYLAPTVLADVRPGSFIEQNEIFGPVLSVIIFATDDEAVAIANGVEYGLTASVWTSDITRAHLIARRVEAGYVLVNGGSRHYWGLPFGGVKSSGVGSEESMEELISYTETKTTTVVLG

SEQ ID NO: 5392 - protein, 456 aa, Magnetospirillum magnetotacticum MS-1
GHCAGEAGYGRPRGNGASSSRKGTMNTTQQAKVRLLVDDQAQDLPVVAATEGNDGIVVSSLLKSTGLVTVDPGFMNTASCESSITYIDGEAGILRYRGYPIEQLAERSSFLEVAYLLIHGELPDAATLDAFVERVNRHTLVHEDFRTFMGTFPRNAHPMAVLSSAINALSTFYPESLDPFDDETVELATVLLLAKSRTITSYLHRRRVGEPLLYPDYSRGYVDDFLRMTFATPYQQYEADPVVVDALDKLLILHADHEQNCSTSTVRVVGSSHANLYASVAAGVNALSGPLHGGANESVLTMLDKIAGAEYDVDTFMKKVKNKEDGVRLMGFGHRVYKNYDPRAAIVKKSADAVLSTLGKKDQLLDIAMGLEEIALNDDYFIERKLYPNVDFYTGLIYKAMGFSPAMFTPLFALGRMPGWIAQWREMMKDPQTKIGRPRQVYVGETERDYVAVSDR

SEQ ID NO: 5393 - protein, 420 aa, Solanum demissum
MGNCVGSSARVEATLSSTTPSAYEASRFPDRKSNSSVPSSLSIPSYGRKSSSESLPTPRSESEILFSPNVKSFSFNELKNATRNFRPDSLLGEGGFGCVFKGWIDAQTLTASKPGSGIVIAVKKLKPEGFQGHKEWLTEVNYLGQLRHPNLVKLIGYCIDGDNHLLVYEFMPKGSLENHLFRRGPQPLNWATRIKVAIGAARGLAFLHDAKEQVIYRDFKASNILLDAEFNSKLSDFGLAKAGPTGDRTHVSTQVMGTQGYAAPEYVATGRLTAKSDVYSFGVVLLELLSGRRAVDNAKVGIEQNLVDWAKPYLGDKRKLFRIMDTKLEGQYPQKGAYTAANLAWQCLSNEPKLRPKMSEVLTALEELQSPKGVSKLSHTEHRAIPSPVAVSPMRHHRSPLHMTPSASPLQAYQKSPRGR

SEQ ID NO: 5394 - protein, 489 aa, Arabidopsis thaliana
MSTVESSKPKIINGSCGYVLEDVPHLSDYLPGLPTYPNPLQDNPAYSVVKQYFVDADDSVPQKIVVHKDGPRGIHFRRAGPRQKVYFESDEVHACIVTCGGLCPGLNTVIREIVSSLSYMYGVKRILGIDGGYRGFYAKNTVSLDSKVVNDIHKRGGTILGTSRGGHDTTKIVDSIQDRGINQVYIIGGDGTQRGASVIFEEIRRRGLKVAVIGIPKTIDNDIPVIDKSFGFDTAVEEAQRAINAAHVEAESIENGIGVVKLMGRYSGFIAMYATLASRDVDCCLIPESPFYLEGEGGLFEYIEKRLKESGHMVLVIAEGAGQDLMSKSMESMTLKDASGNKLLKDVGLWLSQSIKDHFNQKKMVMNLKYIDPTYMIRAVPSNASDNVYCTLLAQSAVHGAMAGYTGYISGLVNGRQTYIPFYRITEKQNHVVITDRMWARLLSSTNQPSFLGPKDVFDNKEKPMSALLDDGNCNGVVDVPPVTKEITK

SEQ ID NO: 5395 - protein, 256 aa, Hordeum vulgare subsp. vulgare
MAAKCYPTVSDEYLAAVAKARRKLRGLIAEKNCAPLMLRLAWHSAGTFDVATKTGGPFGTMKCPAELAHGANAGLDIAVRLLEPIKEQFPILSYADFYQLAGVVAVEVTGGPEVPFHPGRQDKPEPPPEGRLPDATQGSDHLRQVFSTQMGLSDQDIVALSGGHTLGRCHKERSGFEGAWTANPLIFDNSYFTELLSGEKEGLLQLPTDKVLLTDPAFRPLVDKYAADEDAFFADYAEAHLKLSELGFGEASEGCC

SEQ ID NO: 5396 - protein, 322 aa, Neurospora crassa
MADNKFDPEYFQAVQPLLAAKASLPPPAPLTDVDSLRTNYNDFALVLANIPDSPDITETTYQIPSKDGTLITLYRFTPAAAAATPGPRAAVLHHHGGGFVNNNVDQFRKDIKRYAHASGLTFYAADYRLAPEHPFPTPFDDCYAALEWLHANAASEQIDPTRIALFGVSAGAGLATGVALKARDDKITPPVKKLVLAYPMLDDRTYWPEDHPLSPYLMWNGAANRIAWGAYAGADGVKEISPYAAPARAKDLSGLPPTFIDCGELDLFRDEDVEFSARLLKAGVSVELHVYPGVPHGFEMVAVNVRVSKIAVENRVRALENL

SEQ ID NO: 5397 - protein, 212 aa, Triticum aestivum
MPESDNDSGGPSNTGGEGELSSPREQDRFLPIANVSRIMKKALPANAKISKDAKETVQECVSEFISFITGEASDKCQREKRKTINGDDLLWAMTTLGFEDYVDPLKHYLHKFREIEGERAAATSTSTAPQHLPDNNATGYADYGGAAVPAPAPGGMMMMGQPMYGSPPPQQHQQQQHQHQVAMGGRAGFPYHGGSSGGGGSSSSSGFGRKEG

SEQ ID NO: 5398 - protein, 1116 aa, Schizosaccharomyces pombe
MAADIGSQSSGSLEERFEQSLHLQNVDKQDWSLNSVLQFLKLYKFNKEWEDVFIKSRIEMDLFINLADQSKAEEFAFKNKLSKESAIQLSSCIRKTLLAPSSTRVPSKNSSYETLTYSAKDSSDDVFTETNSGFRSSNQNSSLKSFQSVPDSNVNVFGGFGGSVVDNNELLSTGKNSHQTTSLNLEGSPINLHAYKGTVTSIINDDSRNINKKTLSKQPVSEHKEKQTSFLRRFRVPGFSRDKDKTKDCPSSNSNPFHLASSNVKTLDASLDQGEWVPRIHRLESQIGLISKKKSFVLATMDDMKFTVVDITNVQNATQLRKLIAKSMYLDISIDQFDLFLTEVGGAQYIEILDDRKLDIARLYSDEFGTIKFFVKPSQNEESGMDSDTYLSFGTKSSSTYKADDDSIYHRKEDFKKQPSYPVLTSDFEITDAGPNLSLSGHQPDNKYYKGFSSAPNLAVVPELPSRRFRGFEKIRGAKGEMATKILDATEAQSEKNKFTVCRPHKKVTLKMPLNSGSSAPQSPSSNTSASVLTRNFVAHRDPPPPPTETSSLRRKNTLTRRPSIRHARSSPYIDTGHNEASKFSHTSFDPKASSKSSNSLKESVEALSEIPFEDAPALDESDLSGDPFWAIQPKQSSSQVPKENHHNIQSKLSINTEAATDLKANELSSPKTPEYCRGDDRSISLSPLSYRLRKSKHIRESPPSSKVINSGNWEVRPSADDLYEDVDRFFPRYDLDKVLVVDQSRMVSSPSKVSIRPKMKSVRLLAREASEARKEIRHNARRNKSGNLLRRSSTKLWGSRIVELKPDTTITSGSVVSQNATFKWMKGELIGNGTYGKVFLAMNINTGELIAVKQVEIPQTINGRHDQLRKDIVDSINAEISMIADLDHLNIVQYLGFEKTETDISIFLEYVSGGSIGRCLRNYGPFEEQLVRFVSRQVLYGLSYLHSKGIIHRDLKADNLLIDFDGVCKISDFGISKHSDNVYDNDANLSMQGSIFWMAPEVIHNDHQGYSAKVDVWSLGCVVLEMLAGRRPWSTDEAIQAMFKLGTEKKAPPIPSELVSQVSPEAIQFLNACFTVNADVRPTAEELLNHPFMKCDEEFNFKDTNLYDMLCKRKS

SEQ ID NO: 5399 - protein, 420 aa, Burkholderia fungorum LB400
MRRLADLISRDWERLAEIEIRDNGKVISEVGPQIRYLAQYFHYYAGLADKIEGAVIPVDRPGMLNYTRHEPVGVVVAITPWNSPLMLASWKIAPALAAGCTVILKPSEHTSVSSLVFSDLFDEAGFPPGVVNVVTGFGAEIGNALVSHPDVAKVAFTGGDVAGQAVYERAAAGLKRVTLELGGKSPHIVFDDADLDGALAAAMDGVFSSSGQMCVAGSRLMLHDRIHDEFVARLLDRVRTLKLGAPMNPATSIGPVTTQAQFERILSYIDVAKQEGARCLVGGVASPEAEGGSGWFVAPTVFGDVKNDMRIAREEVFGPVLSIIRFSTDDEAVHLANDSRYGLASGIWTRDVGRAISVADRIQAGTVWVNTYRAVSAASPFGGMKRSGIGRENGQEAIMGFLQTKSIWISTTSRPVAAWS

SEQ ID NO: 5400 - protein, 329 aa, Oryza sativa (japonica cultivar-group)
MIQLKDMVMKLSGTSRHHGQQRRGGSPPPRGRTTSVYRSGYYRPGMVQDDMAVPPATYLGGGGTSMSSASSTPAWDFARPAEGEAREWVAQVEPGVQITFVSLAGGGGNDLKRIRFSREMYDKWQAQKWWGENNERIMELYNVRRFSRQVLPTPPRSDDGERESFYSQVGSTRGSPAATPSPAPLTPDRVTSWSAFVRPPSASRQQQQHSFRPLSPPPPSSSNPSERAWQQQQQPQRAGKSPAAASDAMDAARTTSCSSRDEVSISNASELEVTEWVIQDEPGVYITVRELADGTRELRRVRFSRERFAELNAKLWWEENKERIQAQYL

SEQ ID NO: 5401 - protein, 325 aa, Shewanella oneidensis MR-1
MKFDYKPGQFITFVLEINGEQACRSYTLSSTPSRPYSLMVTIKRVDGGLVSNYLIDHLQPGQTVRVLPPTGQFNLFDIPANKYLFLSAGCGITPMYSMSRYLTDTQINADIAVVHSARTQADIIFKNTLETMAARHASFKLCYLVEGVTTDTVWHTEEAFHYVGRLSAQNLLSLVPDFAERIVFLCGPELYMQAVKTILTELNFDMNKLYHESFATAVKEAQSHVKQAEIQSETPTTSSTGFMLSIGDKKHLLTAEQTLLDGIEAEGLPIIAACRSGVCGACKCKVLQGETESTSYMTLTPTDIEAGYVLACSTRLKSDVTLSLI

SEQ ID NO: 5402 - protein, 320 aa, Triticum aestivum
MEKGMDPALLDNIIARLLEVKSLKPGKNAQLSESEIKQLCAASKEIFLAQPNLLELEAPIKICGDVHGQYSDLLRLFEYGGYPPQSNYLFLGDYVDRGKQSLETICLLLAYKVKYPENFFLLRGNHECASVNRIYGFYDECKRRFSVKLWKTFTDCFNCLPVSALIDEKILCMHGGLSPELNKLDQILNLNRPTDVPDTGLLCDLLWSDPSNEAQGWAMNDRGVSYTFGPDKVAEFLEKHDLDLICRAHQVVEDGYEFFADRQLVTIFSAPNYCGEFDNAGAMMSVDETLMCSFQILKPARKMLPGSTNNKSGFKSMRGW

SEQ ID NO: 5403 - protein, 114 aa, Zea mays
MVITANDLSKWENFPKGLKVLLLLNGCDSDGDGSSAAETRSELESMDYIVTTFTDETEALSAVVKNPESFHIAIVEVNMSAESESFKFLEAAKDVLPTIMISTDHCRFLYFFLF

SEQ ID NO: 5404 - protein, 312 aa, Glycine max
MISPQTKQSFGSLFLLFLVLLQKRFEMGVIVENPNSSKPIVIREVWASNLESEFEVIREVIDDYPFISMDTEFPGVVFRPHVVDPTKPYLFRLRPSDHYRFLKFNVDALNLIQVGITLSDADGNLPHLETGNRFIWEFNFRDFDIDRDDYASDSIDLLRRQGIDFRRNTAEGIDSNLFAELVMSSGLVCNDSVSWVTFHSAYDFGYLVKILTRRNLPNGLEEFLKMLRAFFGNNVYDIKHMMQFCDTLYGGLDRLARTLNVDRAVGKCHQAGSDSLLTWHVFQKMRDIYFVKDGPHKHVGVLFGLELTCSAP

SEQ ID NO: 5405 - protein, 1164 aa, Streptococcus agalactiae
MFKSNYERKMRYSIRKFSVGVASVAVASLFMGSVAHASELVKDDSVKTTEVAAKPYPSMAQTDQGNNSSSSELETTKMEIPTTDIKKAVEPVEKTAGETSATDTGKREKQLQQWKNNLKNDVDNTILSHEQKNEFKTKIDETNDSDALLELENQFNETNRLLHIKQHEEVEKDKKAKQQKTLKQSDTKVDLSNIDKELNHQKSQVEKMAEQKGITNEDKDSMLKKIEDIRKQAQQADKKEDAEVKVREELGKLFSSTKAGLDQEIQEHVKKETSSEENTQKVDEHYANSLQNLAQKSLEELDKATTNEQATQVKNQFLENAQKLKEIQPLIKETNVKLYKAMSESLEQVEKELKHNSEANLEDLVAKSKEIVREYEGKLNQSKNLPELKQLEEEAHSKLKQVVEDFRKKFKTSEQVTPKKRVKRDLAANENNQQKIELTVSPENITVYEGEDVKFTVTAKSDSKTTLDFSDLLTKYNPSVSDRISTNYKTNTDNHKIAEITIKNLKLNESQTVTLKAKDDSGNVVEKTFTITVQKKEEKQVPKTPEQKDSKTEEKVPQEPKSNDKNQLQELIKSAQQELEKLEKAIKELMEQPEIPSNPEYGIQKSIWESQKEPIQEAITSFKKIIGDSSSKYYTEHYFNKYKSDFMNYQLHAQMEMLTRKVVQYMNKYPDNAEIKKIFESDMKRTKEDNYGSLENDALKGYFEKYFLTPFNKIKQIVDDLDKKVEQDQPAPIPENSEMDQAKEKAKIAVSKYMSKVLDGVHQHLQKKNNSKIVDLFKELEAIKQQTIFDIDNAKTEVEIDNLVHDAFSKMNATVAKFQKGLETNTPETPDTPKIPELPQAPDTPQAPDTPHVPESPKAPEAPRVPESPKTPEAPHVPESPKAPEAPRVPESPKTPEAPHVPESPKTPEAPKIPKPPKTPDVPKLPDVPKLPDVPKLPDAPKLPDGLNKVGQAVFTSTDGNTKVTVVFDKPTDADKLHLKEVTTKELADKIAHKTGGGTVRVFDLSLSKGGKETHVNGERTVRLALGQTGSDVHVYHVKENGDLERIPSKVENGQVVFKTNHFSLFAIKTLSKDQNVTPPKQTKPSTQGSQVEIAESQTGKFQSKAANHKALATGNETVAKGNPTSTTEKKLPYTGVASNLVLEIMGLLGLIGTSFIAMKRRKS

SEQ ID NO: 5406 - protein, 426 aa, Mesorhizobium sp. BNC1
MPFTANRQFKQAPRMLVSAKDMHYTTDDGRKLLDGTAGLWCVNAGHCRPKITEAIRHQAGELDYAPAFQMGHPIVFEFASRLVDIAPEGMDHVFFTNSGSESVETALKIALAYHRAKGDGSRTRLIGRERGYHGVNFGGISVGGIVNNRKMFGTLLAGVDHLPHTYLPGKNAFSRGVPEHGVELADELERIVALHDASTIAAVIVEPVAGSAGVILPPKGYLKRLREICDKHGILLIFDEVITGFGRLGTPFAADYFGVVPDIMTTAKGITNGVIPMGAVFVKKEIHDAFMNGPEHMIEFFHGYTYSGNPIACAAGLATLETYREEGLLTRGEELGQHWEDALHSLKGEPHVIDIRNIGLVGAIEMEPIQGQPTKRAFSAFLKGFEKGLLIRTTGDIIALSPPLIITKGQIDEIVDHVREILRSID

SEQ ID NO: 5407 - protein, 250 aa, Zea mays
  misc_feature (96)..(96): Xaa can be any naturally occurring amino acid
SESEAASRRQGEMGKGAQGSDAAAAGGEVEENMAAWLAAKNTLKIMPFKRPPVGPYDVRVRMKAVGICGSDVHYLRVRDPIRCLCNSTARELLHGXRKKKKRPLFRLFTHHRFSQEMRIAHFVVKEPMVIGHECAGVVEEVGAGVTHLSVGDRVALEPGVSCWRCRHCKGGRYNLCEDMKFFATPPVHGSLANQVVHPADLCFKLPDGVSLEEGAMCEPLSVGVHACRRVGVGPETGVLVVGAGPIGLVS

SEQ ID NO: 5408 - protein, 112 aa, Zea mays
  misc_feature (40)..(40): Xaa can be any naturally occurring amino acid
TLLEVWADLLYTEICVIPHVDDDYPYVAMDTEFAVYVRPXSGLTSARDEVNYASLRANVRMLILIPLRFTLSLKCGALPQLGPHLPPCDLKDICRGSAAHTDAGVADSIYLL

SEQ ID NO: 5409 - protein, 133 aa, Ustilago maydis 521
MVKRSAQCKFPVARIKKIMQADEDVGKVAQATPVLISIWNLGLTAKALELFMASIVEETVKETRSRGAKKMTPYHVKRTVHTNETFDFLKDIVAKVPDPVETDSSAAATATAAAGDNRGGKRRKTAKNADESD

SEQ ID NO: 5410 - protein, 323 aa, Triticum aestivum
  misc_feature (71)..(71): Xaa can be any naturally occurring amino acid
  misc_feature (83)..(83): Xaa can be any naturally occurring amino acid
  misc_feature (103)..(103): Xaa can be any naturally occurring amino acid
MEAETAAKRARENEGAAAADGAGEQAGISAVIPGWFSEISPMWPGEAHSLKVEKVLFQGNSCYQDVPVYLXTTVPEGVLLDGXIQGPGGRVPYQEMITHLPLXQAKNPKKVLVIGGGDGGVLREVSRHSSVEQIDICEIDKMVVDVSKQFFPHLALGFEDPRVSLHIGDGVAFLKNAPEGTYDAVIVDSSDPVGPAQELFEKPFFESVSRALRPGGVVCTQAESIWLHMHIIEDIVTNCRQVFKGSVNYAWTTVPTYPSGVIGFMLCSTEGPSVDFQHPVFSIEEDEYSTKSKGPLKFYNSEFHTASFCLPSFARRVIEAKAN

SEQ ID NO: 5411 - protein, 489 aa, Bordetella bronchiseptica RB50
MTQLTQPLSRAELLRDACYIDGKWVGAGNGPSIPVDNPSTGKTIISVPKLGRKEAEQAIDAAEAALPAWSARTGKERAAILLKWAQLMMENQQDLAVIMTSEQGKPVAEAAGEIAYAASFLEWFAEEAKRIDGDILQSPKGGQRLMVLKQPIGVTAAITPWNFPAAMITRKVGPALAAGCTMVVKPAQQTPLTALALAVLAEQAGVPAGVFQVVTGSSREIGAALCESEVVRKLSFTGSTEVGRTLMEQCAPTIKKLSLELGGNAPFIVFDDADLDRAIDGILASKYRNAGQTCVCANRIYVQAGVYEEVAKRLVEKVNAMKVGDGFEQGVTQGPLIDTAAVAKVQEHIADATAHGAKVIAGGQPHALGGSFFQPTVVRDVTQSMRFAVEETFGPVAPLFKFESEDEVIGMANNTIFGLAAYFYTRDYARIWRVSEALEYGIVGINTGIISNEVGPFGGVKQSGLGREGSKYGIEDYLELKYLCVDLGA

SEQ ID NO: 5412 - protein, 162 aa, Triticum aestivum
  misc_feature (58)..(58): Xaa can be any naturally occurring amino acid
  misc_feature (78)..(78): Xaa can be any naturally occurring amino acid
  misc_feature (81)..(81): Xaa can be any naturally occurring amino acid
  misc_feature (94)..(94): Xaa can be any naturally occurring amino acid
  misc_feature (100)..(101): Xaa can be any naturally occurring amino acid
  misc_feature (124)..(124): Xaa can be any naturally occurring amino acid
  misc_feature (136)..(137): Xaa can be any naturally occurring amino acid
  misc_feature (141)..(141): Xaa can be any naturally occurring amino acid
MAPTVMASSATSVAPFQGLKSTAGLPISRRSSSAGLSSVSNGGRIRCMQVWPIEGIKXFETLSYLPPLSTGGLLKQVXDYXIRSKWVPCLRFSXVGFVLXXEHNTPPGYYDVHTGKCWELPMFXGCTDAHKCQQVXXVKKXYLTLFPLIFTAPSACLRLHRF

SEQ ID NO: 5413 - protein, 570 aa, Triticum aestivum
MAGGGVEDVYGEDRATEEQLITPWSFSVASGHQLLRDPRHNKGLAFTEAERDAHYIRGLLPPAIVSQEHQEKKIMHNLRSYTVPLHRYVAMMDLQERNERLFYKLLIDNVEELLPVVYTPVVGEACQKYGSIYRRPQGLYISLKDKGKVLEVLKNWPERSIQVIVVTDGERILGLGDLGCQGMGIPVGKLSLYTALGGVRPSACLPITIDVGTNNETLLNDEYYIGLRQRRATGEEYHELLQEFMNAVKQNYGEKVLVQFEDFANHNAFDLLAKYSKSHLVFNDDIQGTASVVLAGLLAALKMIGGGLVDQTYLFLGAGEAGTGIAELIALEMSKHTELPVDDCRKKIWLVDSKGLLVESRKESLQHFKKPFAHEHEELKTLLEAVQSIKPTVLIGTSGVGKTFTQEVIEAMASFNEKPVIFSLSNPTSHSECTAEEAYTWSKGTAVFASGSPFDPVEYEGKTYVPGQSNNAYVFPGFGLGVVISGAIRVHDDMLLAASEALAEEATQENFDKGLIFPPFTNIRKISASIAAKVAAKAYDLGLASRLPRPDDLFKYAESCMYTPLYRSYR

SEQ ID NO: 5414 - protein, 487 aa, Yersinia pestis KIM
MSTHLVWFRNDLRVTDNLALHAACQDPQASVIAVFIATPVQWAAHGMAPRQAAFLRQNLQHLQAALAARGIPLHYHQCDDFQASNTWLVDFCQQQQVDSLFYSQQYELNERLRDDALAVQLSERAITCQSFHDSVLLAPGTVLTGNNEMYKVFTPFRRAFIQRLLMSDNHCVPAPKARHAPPVLLSPLPFDYPQQSVDSQLFPAGEDAALQRLRRFCREQVQDYRQYRDLPAVPGTSCLSPYLVLGVLSPRQCFNRLWAESPEMLENADSGAFTWLNELIWREFYRHLLVAYPRLCQHHPFIGWTDGLVWNRSESQLKAWQQGQTGYPIVDAAMRQMNETGWMHNRLRMISASFLVKDLLIDWRQGERYFMSQLVDGDLAANNGGWQWAASTGTDAAPYFRIFNPTTQGERFDKDGVFIRRWLPELAAVPDSDIHQPWRWAERQQQHLDYPVPLVDHKQARLATLAAFEAAKRDSTRIPNRKEPSCY

SEQ ID NO: 5415 - protein, 358 aa, Gibberella zeae PH-1
MASNSDAPPAAATEAVLVKSEEMPKDAQKVEELDFNKLKSPITAEDLFEGMRHMGFQASSMCEAVRIINDMRAWKDPETGDKTTIFLGYTSNLISSGLRGVLRWLVEHNHVSCIVTTAGGVEEDFIKCLADTYVGSFSTPGADLRRKGLNRIGNLVVPNANYCAFEDWVVPILDKMLEEQEASKGTEEEINWTPSKVIHRLGKEINDERSVYYWAYKNNIPVFCPAITDGSLGDMLYFHTFKSSPQQLKIDLVEDIRRINTIAVRAKRAGMIILGGGIVKHHIANACLMRNGAESAVYINTAQEFDGSDAGARPDEAVSWGKIKIGADNVKVYMEATACFPFIVANTFAKDIGKEDQK

SEQ ID NO: 5416 - protein, 402 aa, Bradyrhizobium japonicum USDA 110
MPIREVDMARKRIGILTGGGDVAGLNAVIKSVTYRGSEDDIEVVGLRRGWEALTHLNLDDPNSRSHYVIPLNRENTRTIDRRGGTVLHSSRVNPSKIQKLPGHLVGNEVPVSLSTNGGIATKTWDLTSRVLANLSGLGIEHLIAIGGDDTLSYAAKLNELGVKIIAIPKTMDNDVRNTEYCIGFSTAITRASDAIQRQRTTVGSHERIGIFRVFGRDAGFTALYTAYATSIRCLIPEHKVDLDKLIQLLIEDKRANPSNYALIVLSEGAQWEGYKLREYGEPDAYGHRKKANVAESLADEIKQRTGEETITSDLTYDLRSGDPDFIDKLVALTFGNMAYDAMLESKTGLMSALVEGRYDLVPIPDAKLGPRKLDVASSYNTERYRPIYANKQGLPIFLNRAS

SEQ ID NO: 5417 - protein, 372 aa, Medicago sativa
  misc_feature (1)..(1): Xaa can be any naturally occurring amino acid
  misc_feature (29)..(29): Xaa can be any naturally occurring amino acid
  misc_feature (63)..(63): Xaa can be any naturally occurring amino acid
  misc_feature (88)..(88): Xaa can be any naturally occurring amino acid
  misc_feature (118)..(118): Xaa can be any naturally occurring amino acid
  misc_feature (149)..(149): Xaa can be any naturally occurring amino acid
  misc_feature (175)..(175): Xaa can be any naturally occurring amino acid
  misc_feature (181)..(181): Xaa can be any naturally occurring amino acid
  misc_feature (189)..(189): Xaa can be any naturally occurring amino acid
  misc_feature (197)..(197): Xaa can be any naturally occurring amino acid
  misc_feature (200)..(200): Xaa can be any naturally occurring amino acid
  misc_feature (261)..(261): Xaa can be any naturally occurring amino acid
  misc_feature (271)..(271): Xaa can be any naturally occurring amino acid
  misc_feature (329)..(329): Xaa can be any naturally occurring amino acid
  misc_feature (368)..(368): Xaa can be any naturally occurring amino acid
XGNSYITKEDNQISATSEQTEDSACLSAXVLTTNLVYPAVLNAAIDLNLFEIIAKATPPGAFXSPSEIASKLPASTQHSDLPNRLDRXLRLLASYSVLTSTTRTIEDGGAERVYGLSXVGKYLVPDESRGYLASFTTFLCYPALLQVWXNFKEAVVDEDIDLFKNVHGVTKYEFXGKDKKXNQIFNKSXVDVCATEXKRXLEIYTGFEGISTLVDVGGGSGRNLELIISKYPLIKGINFDLPQVIENAPPLSGIEHVGGDXFASVPQGDAXILKAVCHNWSDEKCIEFLSNCHKALSPNGKVIIVEFILPEEPNTSEESKLVSTLDNLXFITVGGRERTEKQYEKLSKLSGFSKFQVACRAFNSLGVXEFYK

SEQ ID NO: 5418 - protein, 269 aa, Burkholderia cepacia R18194
MMSKIPAFGLGTFRLKGQVVIDSVRNGLEVGYRAIDTAQIYGNEAEVGEAIAASGVAREDLFLTTKIWVDNYAPDKLVPSLEESLRKLRTDHVDLTLIHWPAPDNGVALDTFMTALADAKAQGLTRRIGISNFNIALTKQAIAAVGKDAIATNQIELSPYLQNRKLVEFLNAEGIHVTSYMTLAYGKVLGDPVIGAIAQRHDATPAQVALAWALQLGYSVIPSSTKRENLASNLLAQSLRLTDEDMAQIAALERNGREVDPAGLAPKWD

SEQ ID NO: 5419 - protein, 179 aa, Glycine max
MASSKIIFIFLLFLAHLHQHTFVKGDSSLIKRTCKNTKYYNLCFSSLKSDPSSPNADPKGLAVIMIGIGMTNATSTSSYLSSKLLSPSNNTTLKRVLKECADKYSYAGDALQDSVQDLANEAYDYAYMHITAAKDYPNACHNAFKRYPGLAYPRDLASREDGLKHICDVAMGIIDNLDW

SEQ ID NO: 5420 - protein, 482 aa, Triticum aestivum
  misc_feature (123)..(123): Xaa can be any naturally occurring amino acid
  misc_feature (177)..(177): Xaa can be any naturally occurring amino acid
  misc_feature (334)..(334): Xaa can be any naturally occurring amino acid
  misc_feature (390)..(390): Xaa can be any naturally occurring amino acid
PPHCAALAAAPGPRVIIVGAGMSGISPGKRLSQAGVTDLVILEATDRLGGGIPRAEAARATVHRGDRAAGGGHGERVEPGSSSGPTTGARRMRLALLKKMFPKEDVPDATEILVPRWWSNRFXRAPSPTGPSASTATDMTSSGVPMACFSLPATTPAQPTTVWSAGPTLQVVLLLPXDQLFPEQDVQICCQGTESLLSRLIAESPAKTAGSNGLKPSQCTALFRCSSVSGHCSMAFWAIHILSLCDMREVCLCPGGVSFHYLVIKLHRADYVVVSASLGVLQTDLIRFKPQLPSWKIVSIYQFDMAVYTKIFLRFPKRFWPEGSGKEFFLYASXRRGYFPVWQQFEQQYPGSNVLLVTVTDDESRRIEQQSDNQTMAEAVAVLRKMFPGXNVPDATEILVPRWWSNRFFKGSFSNWPIGVNRYEYDLIRAPVGRVYFTGEHTSEKYNGYVHGAYLAGIDSADILINCAKKKMCKYNVKGKHD

SEQ ID NO: 5421 - protein, 382 aa, Metarhizium anisopliae
MSFAGMLNRLHGQPESYDKKSKYKFGRTLGAGTYGVVREADGPSGKVAIKIILKKNVKGNEKMVYAELDMLQRLTHPHIVKFVDWFESRDKFYIVTQLATGGELFDRICDQGKFTEVDASQTIRQIMTAVDYLHDNDVVHRDLKPENLLYVTRDPDSDLVLADFGITKTLDIKEETLTTMAGSFGYAAPEVMEQKGHGKPVDMWSMGVITYTLLCGYSPFRSENLRDLLRECTAAPVPFHERYWKDVSQDAKDFILVLLVPEPEKRWTSKEALGHIWLSGKNATDHNLLPELEAYRRRARLRRVIEIVKLQNRIAKLKEHEEDPSESDMGDAQGASDNHKGDGSRLHALGLFAVREAKQKQESLQVEEELEKESRRRSFSNA

SEQ ID NO: 5422 - protein, 158 aa, Bradyrhizobium japonicum USDA 110
MSAIYDFKANSLLGEEVPMRRFEGQVLLIVNTASKCGFTPQYRGLEDLYRDLSPRGFAVLGFPCNQFGAQEPGQASEIQEFCSTNYDVTFPLFEKIDVNGANAHPLYEYLKRQQSGLLGASIKWNFTKFLVDRAGRVIARYAPTARPEGLRQQIETLL

SEQ ID NO: 5423 - protein, 313 aa, Streptomyces rochei
MPVPAVDPEIRTLLETADTGIFPVYGLDAVLADPQPYALLRAYPDTPADDQVTVLDLHIPGPAGGDLRVRVYRPDTTEVLPVILYITRRRLHYGSPEAEEGRSLRYARDARAVVVSVDYRLAPEHPYPAAADDAYAALIWIAANPAELGGDRARIAVAGGSAGGNIAASTVLRARDQAGPHILFQLLTYPGVDGSLTSASVREFTDTPVLNRGAMELAWQYYAKDTHPHPYASPIRATDLGALPPTYIAVAEIDPLRDEGRDYAARLSAAGVTTELVQVPGAVHGFDILFPSARISERSLADQVRALHDALHP

SEQ ID NO: 5424 - protein, 509 aa, Bacillus sp. KSM-K16
MRIHIVQKGDTLWKLAEKYEVDYEHLKEANPNLTNPEMLMPGMKVKVPAGSVAVRKEQKKTTPKAKEVDKKPQKAKEQSVKPPKKPELKASEKTQAANVAPAPPYYGQTQQGVAKPPEYPPLPPKPPCTPCQGNAFQEFAPQANMYQQSYAPNQQLYSQQMNQPPSYQPQANQPQSYQPQSYQPQANQPQSYQPQSYQPQANQPQSYQPQSYQPQANQPQSYQPQSYQPQANQPQSYQPQIFQPQAYGENAQLQAQSHGPKQQESAGKHQPLPQDKKDNEAGEWNGVQPQAHKGSSKSGIHGQQSPWGSNAPFVQQSGGPNQQSYPIQENQNKGFQGQQNTNFTPWPQQENKGWNQEQAYAHQVEMNWGQSNGAQPFSQQMDINWGQYRYSPYQGEIGDAAPFQSYPGWQPAALPQMPVANSYPPPQTPFFAPGTLNQQAGPYRQPPVGQLDDQSYQQPHYMNQAPSFLTGPYAAQPQQWAHPQSPYLQEQEYEPEEQINAYEEEDQQD

SEQ ID NO: 5425 - protein, 342 aa, Burkholderia cepacia R1808
MGVVGVICPWNLPLLLMTWKVGPALACGNTVVVKPSEETPQTAALLGEVMNTAGVPPGVYNVVHGFGPNSTGEFLTTHRGINAITFTGETRTGAAIMKAAADGARPVSLEMGGKNAAIVFADCDLDAAIEGTLRSCFANCGQVCLGTERVYVERPIFDRFVSALKKGAEGMQLGRPEDLATGMGPLISQEHRDKVLSYYKKAVEAGATVVTGGGVPDMPEALKGGAWVQPTIWTGLGDDSVIAREEIFGPCALVMPFDSEEEVIRRANDNDYGLATAIWTTNLSRAHRVAGAIEVGIAWVNSWFLRDLRTPFGGAKQSGIGREGGAHSLEFYTELKNVCIKL

SEQ ID NO: 5426 - protein, 503 aa, Triticum aestivum
MVATAKIPQRQLFIDGDWRAPALGRRLPVINPTTEASIGEIPAGTSEDVDAAVAAARAALRRNRGRDWARAPGAVRAKYLRAIAAKMIERKSDLARLEALDCGKPLDEAAWDMDDVAGCFEFFAGHAEALDKRQNAAVALPENFKCHLKKEPIGVVALITPWNYPLLMAVWKVAPALAAGCTAVLKPSELASVTCLELGDVCKEIGLPSGVLNIVTGLGHEAGAPLSSHPDVDKVAFTGSYATGQKIMVAAAPTVKPVTLELGGKSPIVVFDDVDIDKAVEWTLFGCFWTNGQICSATSRLLIHKNIAKEFVDRMVAWSKNIKVSDPLEEGCRLGPVVSEGQYEKIKKFVANAKSEGATILTGGVRPKHLEKGFFIEPTIITDINTSMEIWREEVFGPVLCVKEFSTEEEAIELANDTHYGLAGAVISGDRDRCQRLAEEIDAGCIWVNCSQPCFCQAPWGGNKRSGFGRELGEGGIDNYLSIKQVTEYTSDAPWGWYKAPAN

SEQ ID NO: 5427 - protein, 477 aa, Thermoproteus tenax
MILWPMPDVVVVNPATEEVLAVLPSASREEVRRAIDEAEDAFYRWSELPLRERAKLLRRAADLIEADDTLINTLVAESGKPIRDARAELRRAIEIFRASAEEAKYILEGKIPRVDAYDYPLANENRIAMEVREPMGVVAGALSYNNPASTFAHKIAPVIAAGNTVIAKPSSHTPLTALKMAQILQKAGVPQGVVQVVVGSGEEIFNEFVDNPKVVGISFTGSTAVGLQVAAKAAGRGKKFMIAPGGSDPAIVFADADLEAAASIIARARFENAGQNCNATKRVFVERKVYDKFLDILRRKIAAIKVGDPMDESTEMGPVISDKMVKAMEGIVADAVEKGGKLLYGGRRMQRKGYFFEPTLVAFDGRPPEAKAFREEVFGPVLPVAPFEDEREAVELANWTQYGLQSAVFTSDYKRAFRVARAIKAGAVMINDSTRVRFDALPYGGVKMSGLSAGWREGVRSTMLLFTEIKYYVLNIA

SEQ ID NO: 5428 - protein, 451 aa, Oryza sativa (japonica cultivar-group)
MMAAAAEEGEGKKGGGTVLQGRYEMGRVLGHGNFGRVHVARDLRTGRSVAVKVVAKEKVVRAGMMEQIKREIAVMKRVSHPNIVELHEVMATRSKIYLALELVRGGELFGRIVRLGRVREDAARHYFRQLVSAVDFCHSRGVYHRDLKPENLLLDEAGNLKVVDFGLSALADHARADGLLHTLCGTPGYAAPEVLRDKGYDGAKADLWSCGVILYVLLAGSLPFPDDNIVTLYRKAQRGDYRCPAWLSTDARRLIPRLLDPNPTTRISVAQLVETPWFKKTSISRPVSIELPPAFADPAPAKEEAEKDEPETLNAFHLISLSEGFDLSPLFEGDSAKGRRDGGMLFATREPASGVISRLEGVAARGGGRMRVTKSGARGVRLEGAERGGAKGRLAVAADIFSVAPSVLVVDVKKDGGDTLEYRSFCSEELRPALQDIVWGAAADPTPTAAV

SEQ ID NO: 5429 - protein, 481 aa, Papaver somniferum
SLVAVVITTFLYLIFRDSSPKGLPPGPKPWPIVGNLLQLGEKPHSQFAQLAETYGDLFSLKLGSETVVVASTPLAASEILKTHDRVLSGRYVFQSFRVKEHVENSIVWSECNETWKKLRKVCRTDLFTQKMIESQAEVRESKAMEMVEYLKKNVGNEVKIAEVVFGTLVNIFGNLIFSQNIFKLGDESSGSVEMKEHLWRMLELGNSTNPADYFPFLGKFDLFGQSKDVADCLQGIYSVWGAMLKESKIAKQHNNSKKNDFVEILLDSGLDDQQINALLMEIFGAGTETSASTIEWALSELTKNPQVTANMRLELLSVVGKRPVKESDIPNMPYLQAFVKETLRLHPATPLLLPRRALETCKVLNYTIPKECQIMVNAWGIGRDPKRWTDPLKFSPERFLNSSIDFKGNDFELIPFGAGRRICPGVPLATQFISLIVSSLVQNFDWGLPKGMDPSQLIMEEKFGLTLQKEPPLYIVPKTRD

SEQ ID NO: 5430 - protein, 239 aa, Oryza sativa (japonica cultivar-group)
MRKSSGGGGGWSTSDVRGQTAWVGSGTMLGEVYYAIANKTSRLGFPGSVGPTVGIGGYLSGGGFDLMLRKHGLASDHVLDATMVDAKGRLLDRAAMKADLFWAIRGGGSGNFGIVLSCKLRLVPIPATVTVFTVHRSRNQSTTNLLIKWQRVAPSLPSDAFLHVVVPLYLDTRAGLIAIMADTFPELNVTASDCTEMMWIQSVLDFAFYSTGKPSEMLLDRGNGIGDPSGSWMRLARSS

SEQ ID NO: 5431 - protein, 117 aa, Glycine max
  misc_feature (76)..(76): Xaa can be any naturally occurring amino acid
HWREGERELVGKGGMSIDEHGEGKEENMAAWLVGMNSLKIQPFKLPTLGPHDVRARMKAVGICGSDVHYLKTLRCXKEPMVIGHECAGIIEEVGSQVKSLVPGDRVAIEPGISCWHC

SEQ ID NO: 5432 - protein, 179 aa, Glycine max
MVSSKIFFLFLLFLAHLHQHASVEGDSSLIKRTCKNTKYYNLCFSSLKSDPSSPNADPKGLAVIMIGIGMTNATSTSSYLSSKLPTPSNNTTWKRVLKECADKYSYAGDALQDSVQDLANEAYDYAYMHITAAKDYPNACHNAFKRYPGLVYPRDLARREDGLKHICDVAMGIIDNLDW

SEQ ID NO: 5433 - protein, 363 aa, Thermoproteus tenax
MEAAILEKYNSELVIEEVDVEPPKSGEVALRVKAAGVCHSDLYVLEGATPVPPPLVPGHEAVAEVIEVGPDVQGLSRGDLVVTSFIWPCGRCRNCARGHENLCERFSEVRLKGVLLDGTTRLRRRKSGEPLRIFLGGLWAQEAVVPASAVAKLPPRLANRPELAMLGCAFLTAYGAVVNSGSVQPGDTVAVIGTGGVGLAIVQVARAVGARVIAVGRNPEKLKLAAEMGAEVVNARDGDAVAEVRKLTDGRGADVVVEAVGSEQTVEQAIDMASTGGRVVLVGLMGLGKKAPLHVARVVRGGISVIGSYGARPRVDLPKVIGMVERGLLRPELMARDFYKLEQINEAVEALRSGRSIRPIVLP

SEQ ID NO: 5434 - protein, 197 aa, Medicago truncatula
MSGSRFIKCVTVGDGAVGKTCLLISYTSNTFPTDYVPTVFDNFSANVVVDGSTINLGLWDTAGQEDYNRLRPLSYRGADVFLLAFSLISKASYENIAKKWIPELRHYAPGVPIILVGTKLDLRDDSQFFQDHPGAAPITTAQGEELRKLIGAPVYIECSSKTQKNVKAVFDSAIKVVLQPPKQKKTKRKGQKACSIL

SEQ ID NO: 5435 - protein, 375 aa, Arabidopsis thaliana
MPLSLQSPPCATLSASIRKGRWKTLAAGFSVTPLPAVNFSLRRSIPRILASASSSSSPASSSLEAGENNELNAVSAFSEIVPDTVVFDDFERFPPTAATVSSALLLGICGLPDTIFRNAVDMALADSSCAGLETTESRLSCFFNKAIVNVGGDLVKLVPGRVSTEVDARLAYDTNGIIRKVHDLLRLYNEIDVPHDRLLFKIPATWQGIEAARLLESEGIQTHMTFVYSFAQAAAASQAGASVIQIFVGRLRDWARNHSGDTEIESAIKSGEDPGLALVKRSYNYIHKYGYKSKLMAAAVRNKQDLFSLLGVDYVIAPLKVLQSLKDSPAIPDDEKYSFVRKLTPETATHYHFTNKELVKWDQLSLASSMGPASV

SEQ ID NO: 5436 - protein, 197 aa, Medicago truncatula
MSASRFIKCVTVGDGAVGKTCLLISYTSNTFPTDYVPTVFDNFSANVVVNGSTVNLGLWDTAGQEDYNRLRPLSYRGADVFILAFSLISKASYENVSKKWIPELKHYAPGVPIILVGTKLDLRDDKQFFVDHPGAVPITTAQGEELRKLINAPAYIECSSKSQQNVKAVFDAAIRVVLQPPKQKKKKSKAPKACSIL

SEQ ID NO: 5437 - protein, 375 aa, Arabidopsis thaliana
MPLSLQSPPCATLSASIRKGRWKTLAAGFSVTPLPAVNFSLRRSIPRILASASSSSSPASSSLEAGENNELNAVSAFSEIVPDTVVFDDFERFPPTAATVSSALLLGICGLPDTIFRNAVDMALADSSCAGLETTESRLSCFFNKAIVNVGGDLVKLVPGRVSTEVDARLAYDTNGIIRKVHDLLRLYNEIDVPHDRLLFKIPATWQGIEAARLLESEGIQTHMTFVYSFAQAAAASQAGASVIQIFVGRLRDWARNHSGDTEIESAIKSGEDPGLALVKRSYNYIHKYGYKSKLMAAAVRNKQDLFSLLGVDYVIAPLKVLQSLKDSPAIPDDEKYSFVRKLTPETATYYHFTNKELVKWDQLSLASSMGPASV

SEQ ID NO: 5438 - protein, 197 aa, Medicago truncatula
MSASRFIKCVTVGDGAVGKTCLLISYTSNTFPTDYVPTVFDNFSANVVVNGSIVNLGLWDTAGQEDYNRLRPLSYRGADVFILAFSLISKASYENVSKKWIPELKHYAPGVPIILVGTKLDLRDDKQFCIDHPGAVPITTAQGEELRKLINAPAYIECSSKSQENVKAVFDAAIRVVLQPPKQKKKKNKAQKACSIL

SEQ ID NO: 5439 - protein, 382 aa, Corynebacterium efficiens YS-314
MNDKNVEVRRGLYGVVSDYTAISKVMPETNSLTYRGYPVQDLVEHCSFEEVIYLLWNGELPTAEQLREFNTRGRSYRVLDAGLIALIHSLPMGCHPMDVLRTAVSYMGTKDPEPFTTGADHVLRIGHNLLAQLPMVVAMDIRRRSGADIIAPDPDKGIAENFLSMVFGTASASVATNPEDVRDFEKSLILYAEHSFNASTFTSRVITSTRSDAYSAIAGAIGALKGPLHGGANEFVMHTMLDIDDPDNAAAWVHRALDNKDLIMGFGHRVYKSGDSRVPSMEKSMRALAQRHDAEKWVRMYEQMQQVMEDRTGIKPNLDFPAGPAYHILGFPVDFFTPLFVLARLAGWTAHIVEQYENNSLIRPLAAYNGVEQREVVPIDQR

SEQ ID NO: 5440 - protein, 327 aa, Spiroplasma citri
MLKKIGILTSGGDSQGMNAAIAGVIKTAHAKGLETYIIRDGYLGLINNWIEVVDNNFADSIMLLGGTVIGSARLPEFKDPEVQKKAVDILKKQEIAALVVIGGDGSYQGAQRLTELGINCIALPGTIDNDITSSDYTIGFDTAINIVVEAIDRLRDTMQSHNRCSIVEVMGHACGDIALYAGIAGGADIISINEAALSETEIADRVAMLHQAQKRSVIVVVSEMIYPDVHKLAKLVESKSGYITRATVLGHTQRGGNPTAMDRYRAFQMAQFAVEQIIAGVGGLAIGNQGDQIIARPIMEALSIPRSSRKEIWAKFDQLNQNIYQKS

SEQ ID NO: 5441 - protein, 345 aa, Candida albicans
MSTDHHSHPVEGHQFKKIFNRLSGQPESYSRKQNYTFGKTLGAGSFGIVRYARDNSTDEEVAVKIILKKALKGNESMIIDEMQLLEQLNNPHIVGFRDWFESKDKFYLVTQLATGGELFDRIVQKGRFTEHDASLVVLQMLEALEYLHNKDIVHRDIKPENILYLTSKDDSPIVLADFGIAKRLQNPNEKLTSSAGSFGYAAPEVILGTGHGKPCDIWSLGVVTYTLLCGYSPFRSENVQDFINEVKHNNAVIFHADYWKDVSKDARRFIIKALQFNPDNRPTATELLNDPWLVSIAKEYKETDLLPNFKQGFDAKKKFRQAIELVKLNNRIKKLKEWQTDEDDD

SEQ ID NO: 5442 - protein, 314 aa, Streptococcus dysgalactiae subsp. equisimilis
YAADEKTVPNFKSPDPDYPWYGYDAYRGWESRYHDLKVNLEGSKEYQVYCFNLHRHFPSKSTSIVKNWYQKIEGTEDSFKKNARTPRIGNGDLKRNISNVIYNGYKSNANGFMNGIEDLNAILVTQNAIWYYSDSASLDVSKMWEKEAKSNEISQEQVKLMREALKKLIDPKLGETVEKKLPTNYKLNIFVSKDNSIQNLLSAEYVPDSPPMPGEVPKEENPKEEDPKVPGLDGEEVPEVPSESLEPALPPLMPELDGQEVPEVPSESLEPALPPLMPELDGQEVPEVPSESLEPALPPLMPELDGQEVPEKPS

SEQ ID NO: 5443 - protein, 168 aa, Zea mays
MAASSTATSVHDFIVKDASGKDVDLSTYKGKVLLIVNVASQCGLTNSNYTELAQLYEKYKDQGFEILAFPCNQFGGQEPGTNEEIVQFACTRFKAEYPIFDKVDVNGSNAAPIYKFLKSSKGGLFGDSIKWNFSKFLVDKEGRVVDRYAPTTSPLSIEKDIKKLLGSS

SEQ ID NO: 5444 - protein, 297 aa, Neurospora crassa
MSKLGINDKIKLNSGYEIPQLGFGVYQTPADQVDKIVQEAFKVGYRHVDSASAYRNEAGCGAAILRSTIPRSEIFFTSKVGPKHISYNAAKRIISESLAKTGLGYIDLMLLHAPYGGSVHRKGAWLALVEAVEEGKIRSIGVSNYGVHHLDELEQHIKELEQERGGSGKGGVLSVGQWEVHPWCPRQDIVEWCRKRNVVVEAYAPIVRGERFGEPRLKSLAEKYGKTEAQVLVRWSLQKGYVPLPKSVKAERIKENADVYDFDLSEEEVKALETDEYSPVCWDPTTSELDNYSGQEV

SEQ ID NO: 5445 - protein, 210 aa, Candida albicans
MSGKGTSSRAYDMIMKLLLVGDSGVGKSCLLLRFVEDKFNPSFITTIGIDFKIRTIESKGKRIKLQVWDTAGQERFRTITTAYYRGAMGIVLIYDVTDSRSFENVENWFQTVTQHANEDAQIFLVGNKCDDEVNRQVSKEQGQELAAKLNVPFLEASAKSNENVDSIFYELASIIQEKHVEENIGGVGGASGAGGIDVSQNNSGAKNNCC

SEQ ID NO: 5446 - protein, 254 aa, Zea mays
MRKKLGTRFPAARIKKIMQADEDVGKIALAVPVLVSRALELFLQDLIDRTYEITLQSGAKTLNSFHLKQCVKRYSSFDFLTEVVSKVPDLGGADSCGDERGLPRRRKSNGSDPENDESRSSKMAIRNANISPRGRGRGRGRGRGRPPTKRKEVGYVQFEDESSMFAEQGEPLPGEETVQEINGNETMPQSTQPPVEAPPTALAQATTSSKAEEANSDHQSDWPMPDAIGSIGVVPSGFGHLTVQVEDEDYDNED

SEQ ID NO: 5447 - protein, 255 aa, Medicago truncatula
MAMTRESWAFVFGIIGNIISFAVFLSPLPTFYVIFKKKSAEGFQALPYVVALFSAMLWIYYAFVKRESALLLITINTFGIVVESAYIIMFLIYAPKKQRLSTIKLLLLLNVFGFGAMLLSTLYLSKGAKRLAIIGWICLVFNISVFAAPLFVISKVIRSRSVEYMPFFLSFFLTINAVMWFFYGLLLRDYYVALPNTLGFVFGIIQMVVYLIYRNATPVVEAPMKGQELSGGHIIDVVKIGTDSNRAGGGAGSKV

SEQ ID NO: 5448 - protein, 355 aa, Schizosaccharomyces pombe
MSDSKLADSLNCLSVSTPSTTANPGRQQLLRLAVSNQRQVNNVSLANGKENKRTSNSKFNSSLRKIEEPIAGVPSSAGPQWREFHIGMFEIGKPLGKGKFGRVYLAKEKKTGFIVALKTLHKSELVQSKIEKQVRREIEIQSNLRHKNILRLYGHFHDEKRIYLILEFAGRGELYQHLRRAKRFSEEVASKYIFQMANALSYLHKKHVIHRDIKPENILLGIDGEIKLSDFGWSVHAPSNRRTTLCGTLDYLPPEMVEGKEHTEKVDLWSLGVLTYEFLVGAPPFEDMSGHSATYKRIAKVDLKIPSFVPPDARDLISRLLQHNPEKRMSLEQVMRHPWIVKYKDSWTRKSSESS

SEQ ID NO: 5449 - protein, 276 aa, Schizosaccharomyces pombe
  misc_feature (93)..(93): Xaa can be any naturally occurring amino acid
MKPFSPSQTNFEKEQLCFGVYQLKDCYQQVIEALSLGIRVIDSAITYRNEKECEQAIQDFCHQNVNIKREDITLITKIPDSLQGFERTWKAVXQSLRRTGRPKLDVVLIHSPKWPVRRIESWRALLQHQKEGRINKIGVSNYNIHHLEEIISLGLPLPAINQVEFSAFNNRPTFLSYCFNHGILVQAFSPLTRGYRLSDIRLLDLSLKYNKTPANILLRYCLQKGVSPISKASSFVHIHENVKAEQFMLDPSDMDVMDTWDEEFVSKPTWNPIILP

SEQ ID NO: 5450 - protein, 137 aa, Glycine max
  misc_feature (28)..(28): Xaa can be any naturally occurring amino acid
  misc_feature (101)..(101): Xaa can be any naturally occurring amino acid
  misc_feature (110)..(110): Xaa can be any naturally occurring amino acid
  misc_feature (121)..(121): Xaa can be any naturally occurring amino acid
GSRIKPSISMFLTSCNIKSTGHKMGISXKGSDQILERYLYLHNVPNNEDFDPDTRLKNHALHKYDSVPAIQLTFASGTHTRVLYLDKTTVTTSMNIDPDCXKRSRSDTGXILKCTPRRASXDEQHSYLPQPILYSQK

SEQ ID NO: 5451 - protein, 162 aa, Zea mays
MVAFSLKIFYWPEGNPTTASMQEILYWQGHTMSMMYKIVADALRKEGLHERHPQEYLNFYCLGKREVSNEVPTTGNSNENSAVRLSQKFKRFMIYVHSKGMIVDDEYVLIGSANINQRSMDGSRDTEIAMGAYQPHYSWAGSGRPPRGQARLSSVWGSSHHI

SEQ ID NO: 5452 - protein, 405 aa, Bradyrhizobium japonicum USDA 110
MKNSDELYLSAREAAAELAISPATLYAYVSRGLIRSEPTPDSRKNRYRAEDVRALKERRVPSPEPRGLRSFDADLPVMDTEISTITEEGAIYRGVNCVDLAENDTLEHTATLLWDVSGVDPFAPDNQPEISEEMRTIAGAARRAAPIDRAIAVLALAASADPRAFTRAPDGRAMVGARIVRLLVATMLNAEASAEPLHQQVARVWAADNKHAPDLIRRALVLLADHELNASTFTARCAASTGLNLYDAVIAGLAALKGPKHGGAGVLASQLVKTLVDRDVAPVVRERVALGERFAGFGHGVYKRGDPRAQSLLNALSRAGAPRKFTREVPERIAEATGEFVNIDYALAVLVHALRLPAGSELALFAMARSVGWIAHASEQLQFGKLIRPRARYVGPAPGRRTGGS

SEQ ID NO: 5453 - protein, 364 aa, Bradyrhizobium japonicum USDA 110
MNIHLTKSQIGLDGVPAAETVLSHVDGERGELIIAGEHVGRLAAKSSFEGVTARLWNGASKTSLSEANVRASLGAARERAFARLAELLPATHGMGIVDGFRAAVAGLRAEHGLEHEATIVGAFPVISGALVRRAKGLDPVAPDPSASHAADTLRMLHGRAPATREVTALDAYLVTVCDHGMNASTFTTRVVASTQADLFAAVTAGYCALTGPLHGGAPEPVLEMLDAIGSRERIQPWVDAALARGERMMGFGHRVYRVRDPRADVLKTAIEALASNGADLPFAGEVEAYIRAALRKKNPDRPLETNVEFFTAILLDALAIPRQAFTPIFAVARAAGWTAHAREQQRTGRLIRPSSSYVGAVPEA

SEQ ID NO: 5454 - protein, 317 aa, Photorhabdus luminescens subsp. laumondii TTO1
MLAELITSYRKSAAIYAFVDTGLSIHFRNGAYVDIDELSRQCGIDYSRLDRLCDFLIEIGILVNHGHKVTLSEECSALADPESMESLIVKWELSPDCWNAWSMYPRSLLENDGKPAFEITHGKSFFEHLASNKLLKSNFDSSMSKGSDKIIEKLLDIYDFGQYNRILDIGGGEGSLLVKMSEKVKGKHYAVLDRYDEIPVLENIDFINGDFLKVIPSGYDLYILKDVIHDWSDNNAILILENCRKAMDNGSAVLLISYMKKPQSKMVIYLDILMDVLFSGKERYLTEFERLANQAGLVIQDVKDIDESSSIIQLGIK

SEQ ID NO: 5455 - protein, 317 aa, Photorhabdus luminescens subsp. laumondii TTO1
MLIDLITSYRKTAAIYTFVDAGLSIHFKNGDYVDINKLASQYGIDYSRLNRLCDFLIEIGVLVSSDHGVALSEECSALADPNSVEFLTVKYEINSEHWDSWLMYPKSLLENNGKSAFEMVHGKSFFEHLDSNKGLKSDFDALMSKYTNKIIKELLVIYDFDKHNRILDLGGGDGELLIRISEQVKGKDYTVLDRYNEVPISEGINFIKGDFFKPIPTGYDLYILKNVLHNWPDNDAISILKNCREAMDNNATLLIITLMKKPQSLVVKSVDILMDMLFSAKQRYLSEFEDIANQAGLVIRHYKDLDEIFSLIELKVK

SEQ ID NO: 5456 - protein, 118 aa, Triticum aestivum
  misc_feature (82)..(82): Xaa can be any naturally occurring amino acid
  misc_feature (86)..(86): Xaa can be any naturally occurring amino acid
ATSVAPFQGLKSTAGLPVSRRSNGASLGSVSNGGRIRCMQVWPIEGIKKFETLSYLPPLSTEALLKQVDYLIRSKWVPCLRXSKLXHLPVEHNALLGTTMARVLACGTAYFGCTDPHR

SEQ ID NO: 5457 - protein, 375 aa, Arabidopsis thaliana
MPLSLQPPPCATLSASIRKGRWKTLAAGFSVTPLPAVNFSLRRSIPRILASASSSSSPASSSLEAGENNELNAVSAFSEIVPDTVVFDDFERFPPTAATVSSALLLGICGLPDTIFRNAVDMALADSSCAGLETTESRLSCFFNKAIVNVGGDLVKLVPGRVSTEVDARLAYDTNGIIRKVHDLLRLYNEIDVPHDRLLFKIPATWQGIEAARLLESEGIQTHMTFVYSFAQAAAASQAGASVIQIFVGRLRDWARNHSGDTEIESAIKSGEDPGLALVKRSYNYIHKYGYKSKLMAAAVRNKQDLFSLLGVDYVIAPLKVLQSLKDSPAIPDDEKYSFVRKLTPETATHYHFTNKELVKWDQLSLASSMGPASV

SEQ ID NO: 5458 - protein, 435 aa, Anabaena variabilis ATCC 29413
MTTELLQQVRVIDPVSGIDNITDVLIADGVIQAIAPNIPNTSPDTQIRDCRGLVLGPGLVDLYSHSGEPGFEERETLASFLQAAAAGGFTKVSILPDTSPAIDNPGLVAQLQKRGLGIGDWGLGSNSSPLHPCTPAPLLHLWGAITLDVAGKQMTELADLAAAGVVGFTDGLPLDNLSLVRRLLEYVQPLGKPVAFWPCDRQLSANGVMREGADALRFGLPPIPPSAETTAIAALLELVAATGNTQVHIMRVSTARSVELIAAAKAKGLPITASTTWLHLLLDTKAVKSYDTSLHLDPPLGNASDVKALRAGVRTGVIDAIAIDHAPYTYEEKVQAFAEAPPGAIGFELALPLLWQNLVETGEFTALELWQALSTRPAQCIQQKVSAFAPHHKAELTLFDPQKIWKVEKKNLCTLSSNTSWLGQELQGRVIQIWL

SEQ ID NO: 5459 - protein, 84 aa, Brassica napus
AMGFPPEFFPVLFAVPRMAGYLSHWRESLDDPDTKIMRPQQAYVDPRVRHYEPVRQRTLSSDSDKMGQVSISNASRRRLSGSAL

SEQ ID NO: 5460 - protein, 110 aa, Triticum aestivum
MGGHAAGPTSYGSSGRRSFPAPAATAKQRRAPAPAGNGGKSDGGGYFGAEAAVVLALMTAALLVLPLLLPPRPPPPPLSLFVPVAILAGLLLLVLLPSDARGLRVAPSYL

SEQ ID NO: 5461 - protein, 435 aa, Thermus thermophilus HB27
MEGLTPEMQREAEALRREWETNPRWKGVRRDYRPEDVVRLRPSVMVEYTLAKRGAEKLWKLLHERPYVHTFGAYTGAMAVEMVRAGLEAIYLSGWQVAADANLAWQTYPDQSLYPYNSVPQIVKRINNALMRADQVERIEGRVTRDWYVPIVADAEAGFGGALNVFELTKAMIEAGAAGIHYEDQLASEKKCGHLGGKVLVPTGQHIRTLQAARLAADVMGVPTVIIARTDAEAATLITSDIDERDKPFILPDERTPEGFYRFKNGIEAGIARALAYAPYADVIWMETSKPDLEEARKFAEAVKKEFPDKLLAYNLSPSFNWKKFLDDETIAKFNRELGEMGYKFQFITLAGWHALNYYIWELAKGYKERGMPAFVELQQKEFAAQKEGFTAVKHQREVGAGYFDEVVLALTQGQASTLALKGSTEEAQFNEPVH

SEQ ID NO: 5462 - protein, 254 aa, Brassica rapa subsp. pekinensis
MGRGRVEMKRIENKINRQVTFSKRRAGLLKKAHEISILCDAEVSLIVFSHKGKLFEYSSESCMEKVLERYERYSYAEKQLKAPDSHVNAQTNWSMEYSRLKAKIELLERNQRHYLGEDLESISIKELQNLEQQLDTSLKHIRSRKNQLMHESLNHLQRKEKEILEENSMLTKQIKERESILRTHQNQSEQQNRSHHVAPQPQPQLNPYMISHQASPFLSMGGMYQGEDPTAVRRNRLDLTLEPIYNCNLGYFAA

SEQ ID NO: 5463 - protein, 509 aa, Arabidopsis thaliana
MGLDSGAFSVSFVFVFLCLLFKSLDRQIRDSILAKRKRKVFNSLMRLWLNESLRIRVVMGKDRISELPDALLIKILSFLPTKIVVATSVFSKQWRPLWKLVPNLEFDSEDYDDKEQYTFSEIVCKSFLSHKAPVLESFRLEFESEKVDPVDIGLWVGIAFSRHLRELVLVAADTGTGTAFKFPSSLCTCNTLETLRLVLLILVDISSPVVMKSLRTLHLELVSYKDESSIRNLLSGCPILEELLVIRGEDSDIEVFTIDEVPSLKRLTINDDHDGQEFWGYVINAPSLKYLLIEDLRCPGFCLNAPELMEANIFDGTSITNDNFLGYLTSVKRLLLNLSPWKITYPTGSIFYQLVSLEMYTREIDWWDLLTLMLEHSPKLQVLKLTDVRHFIISQLCIFNCVKFHKNGLPGGKWNEPKYVPECLLSHLETFVWRRFDWGREEEKEIATYILKNARRLNKATFSTNPVNSEELDKLKERRKVHNELDGVVRASNSCQVLGSGASRWELKT

SEQ ID NO: 5464 - protein, 375 aa, Arabidopsis thaliana
MPLSLQSPPCATLSASIQKGRWKTLAAGFSVTPLPAVNFSLRRSIPRILASASSSSSPASSSLEAGENNELNAVSAFSEIVPDTVVFDDFERFPPTAATVSSALLLGICGLPDTIFRNAVDMALADSSCAGLETTESRLSCFFNKAIVNVGGDLVKLVPGRVSTEVDARLAYDTNGIIRKVHDLLRLYNEIDVPHERLLFKIPATWQGIEAARLLESEGIQTHITFVYSFAQAAAAAQAGASVIQIFVGRLRDWARNHSGDNEIESAIKSGEDPGLALVKRSYNYIHKYGYKSKLMAAAVRNKQDLFSLLGVDYVIAPLKVLQSLKDSPAIPEDEKYSFVRKLTPETATHYHFTNKELVKWDQLSLASSMGPASV

SEQ ID NO: 5465 - protein, 250 aa, Zea mays
  misc_feature (104)..(104): Xaa can be any naturally occurring amino acid
MAAAARQRGTVKWFNDTKGFGFISPEDGSEDLFVHQSSIKSEGFRSLAEGEEVEFSVSEGDDGRTKAVDVTGPDGSFVRGGGGGGGGGGGYGSRGGGGSGGGGXAYGGSWGGGRRSGGGGGPGACYKCGEPGHMARDCPSADGGGGYGGGGYGGGGYGGGGGGGGGCFKCGEPGHMARDCSSGGGGYRGGGGGGGGGGGCYNCGQAGHMARDCPSGGGGGGGRFGGGGGGGDRSCYNCGEAGHIARDCPT

SEQ ID NO: 5466 - protein, 108 aa, Glycine max
MEHGSVADSSASTFSIMEEDHTLANSVRFVLNQDPRVAFCGYSIPHPADNKVNIRVQTTGDPAKDVMKDALQDLMVMGQHVRGTFDKAVADFKSKMPAEQMDVDLNQQ

SEQ ID NO: 5467 - protein, 420 aa, Solanum demissum
MGNCVGSSARVEATLSSTTPSAYEASRFPDRKSNSSVPSSLSIPSYGRKSSSESLPTPRSESEILFSPNVKSFSFNELKNATRNFRPDSLLGEGGFGCVFKGWIDAQTLTASKPGSGIVIAVKKLKPEGFQGHKEWLTEVNYLGQLRHPNLVKLIGYCIDGDNHLLVYEFMPKGSLENHLFRRGPQPLNWATRIKVAIGAARGLAFLHDAKEQVIYRDFKASNILLDAEFNSKLSDFGLAKAGPTGDRTHVSTQVMGTQGYAAPEYVATGRLTAKSDVYSFGVVLLELLSGRRAVDNTKVGIEQNLVDWAKPYLGDKRKLFRIMDTKLEGQYPQKGAYTAANLAWQCLSNEPKLRPKMSEVLTALEELQSPKGVSKLSHTEHRAIPSPVAVSPMRHHRSPLHMTPSASPFQAYQKSPRGR

SEQ ID NO: 5468 - protein, 212 aa, Secale cereale
MDAADAGSPRFGHRTVCSEPPKRPAGRTKFKETRHPLYRGVRRRGRLGQWVCEVRVRGAQGYRLWLGTFTTAEMAARAHDSAVLALLDRAACLNFADSAWRMLPVLAAGSSRFSSAREIKDAVAVAVVEFQRQRPFVSTSETADGEKDVQGSPRPSELSTSSDLLDEHWFSGMDAGSYYASLAQGMLMEPPAARAWSEDGGEYSGVHTPLWN

SEQ ID NO: 5469 - protein, 227 aa, Glycine max
  misc_feature (192)..(192): Xaa can be any naturally occurring amino acid
MDQFLWRVLPLLTILVSFGVFFYLQDSYTAQLFPLIKLPRDKCSLLPHRHFWISSKRIVTPQGIISGSVEINDGKIISVVEGHAIQGKPKQEEVIDYGDAVIMPGLIDVHVHLNEPGRTEWEGFDTGTRAAAAGGVTTVVDMPLNCYPTTVSKEKLKLKLDAAEDKIYVDVGMTNNLCLSIQLTELLRYFLXSYTGFWGGLIPENALNTSILDGLLSAGVLGVKVYI

SEQ ID NO: 5470 - protein, 268 aa, Secale cereale
MDVADIASRSGQQQQGHRTVSSEPPKRPAGRTKFHETRHPLYRGVRRRGRVGQWVCEVRVPGIKGSRLWLGTFNTAEMAARAHDAAVLALSGRAACLNFADSAWRMLPVLAAGSFGFDSAREVKAAVAVAVVAFQRKQIIPVAVAVVALQKQQVPVAVAVVALQQRQVPVTVAVVALQKLQVPVAVAVVALQKKQIILPAACLAPEFYMSSGDLLELDEEQWFGGMDAGSYYASLAQGMLVAPPDDRARPENGEQSGVQTPLWSCLFD

SEQ ID NO: 5471 - protein, 143 aa, Zea mays
  misc_feature (130)..(131): Xaa can be any naturally occurring amino acid
MAMAFKMATTGMWVTDECKNSFMEMKWKKVHRYIVFKIDERSRLVTVDKVGGPGESYDDLAASLPNDDCRYAVFDFDFVTVDNCRKSKIFFIAWAPTASRIRAKMLYATSKDGLRRALDGISYEVQATDXXEMGFDIIKDRAK

SEQ ID NO: 5472 - protein, 174 aa, Glycine max
  misc_feature (140)..(140): Xaa can be any naturally occurring amino acid
  misc_feature (154)..(154): Xaa can be any naturally occurring amino acid
MICSLAVTTANRAGAGMVAPFTGLNSMAGLPTTKTNTDITFIACIGGIEQCMQVWPPLGKKKLETLSYLPYLDDAQLAKEVKYLLRKGWIPCLEFNLDHSSVYREHNTSPRYYDRRYCTMSNLTMLGCTDASHVLNELHXAKTAYPNGSVRIIXFDNATQVQCITFIVYNTPAY

SEQ ID NO: 5473 - protein, 158 aa, Petroselinum crispum
MDFRLMGFNHPLLNTLSPHCDEDNQDSSNKNKSEQARSYVRDAKAMATTPADVKEYPNSYVFVVDMPGLKSGDIKVQVEEDNVLVVSGERKREEEKEGVKYVRMERKVGKFMRKFVLPENADLENINAVCQDGVLSVTVQKLPPPEPKKPKTIEVKIA

SEQ ID NO: 5474 - protein, 497 aa, Mesorhizobium loti
MKGDDGLTVTQSLTRRLKNPELFDDLAGVPGRKAEQSTRRFSVFNPSTGELLAELPDMDVRDVSKAIDKAEAAQEHWAALTARERSDILWEWHQLILDHSEDLAAILTAEMGKPLAEAKSEIAHAAAYLQWYAEEANRIYGETISPPSNDRRMLVIKQPIGVVGAITPWNFPASMVARKISPALAAGCAIVLKPAEQTPLVAGAMFTLARMAGFPDGVLNLIYASEGDAVGRELCSNPKVRKISFTGSTEVGRLLMRECSDQIKRTSFELGGNAPFIVFDDADVDAAVDGALQAKFRNAGQTCVSANRLYVQSSVYNEFCDKFTKRVSALRVGDGFEPEVAIGPLIDKCALAKIEDHIRDAVRQGGKIRCGGNRIGESGTFFEPTVITDVERTMRVAQEETFGPLAPIIRFNDPDQVVREANDTIYGLAAYFYASNLKRVWRVAETLEYGMVGINTGRMSSEAAPFGGMKQSGIGREGSRHGLEDYLEMKYLCMGGL

SEQ ID NO: 5475 - protein, 336 aa, Klebsiella pneumoniae
MAADPSVHIQGVIMSFDLIIKNGTVILENESRVVDIAVNDGKIAAIGEHLGEAKQVMDATGLIVSPGMVDAHTHISEPGRTHWEGYETGTRAAAKGGITTMIEMPLNQLPATVDRQTIELKFDAAKGKLTIDAAQLGGLVSYNLDRLHELDEVGVVGFKCFVATCGDRGIDNDFRDVNDWQFFKGIQKLAEMKQTVLVHCENALICDELGEEAKREGRVTAHDYVASRPVFTEVEAIRRVLYLAKVAGCRLHVCHVSSPEGVAEVTRARQEGQDVTCESCPHYFVLDTDQFAEIGTFGEVLSADPRCGKTRKACGKSCSTEKSTAWSPTIRRAHRK

SEQ ID NO: 5476 - protein, 430 aa, Rubrobacter xylanophilus DSM 9941
MDAAVDRAKRAFPGWRDVPPAERARLLGRLAEALDAEREDLARTESLNVGKPLSAARAEMKMVVDTFAYYAGAPERLLGETIPVAGGVDMTFREPLGVVGLIVPWNFPLQITSWKVAPALAAGNTVVLKPAELTPLTALKLERIAGEAGIPEGVLNVVVGPGEIVGKRLVEHPEVAKIAFTGSTEVGRKIMAGAAGTVKRVTLELGGKSASIVFADADLEKAAAAAPLAVFDNAGQDCCARSRILVERGAFERFMSLLEPAVKELRVGDPQDETTQMGPLISASHREKVASYVTEEAPVAIRGEAPDGKGFWYPPTVLAPVSNKDRVAREEIFGPVAAVIPFEDEEEAVRLANDTIYGLSGSVWTRDVARALRVARRVETGTLSINSNTSVRVSTPFGGFKQSGVGRELGPHALEHYTEVKNVFVATEEG

SEQ ID NO: 5477 - protein, 536 aa, Glycine max
MASSLRISRLISRSFSSTSFFSRGGNGFLGSRHCKYSTSSAIEEEPVKPSVQVEHTQLLIDGKFVDAASGKTFPTLDPRTGEVIAHVAEGHSEDVDRAVAAARKAFDHGPWPKMTAYERQRILLRAADLLEKHNDELAALETWDNGKPYEQAAKIEVPMLVRLIRYYAGWADKIHGLTVPADGPYHVQTLHEPIGVAGQIIPWNFPLLMFAWKVGPALACGNTIVLKTAEQTPLSALYAAKLFHEAGLPAGVLNVVSGFGPTAGAALASHMEVDKLAFTGSTDTGKVVLELAAKSNLKPVTLELGGKSPFIVCEDADVDQAVELAHFALFFNQGQCCCAGSRTFVHESVYDEFVEKAKARALKRVVGDPFKGGIEQGPQIDSDQFEKILRYIRSGVESGATLETGGDKLGNKGFYIQPTVFSNVKDGMLIARDEIFGPVQSILKFKDLGEVVQRANNTRYGLAAGVFTTNMDTAYTLTRALRVGTVWINCFDTFDAAIPFGGYKMSGQGREKGEYSLKNYLQVKAVVNPLKNPAWL

SEQ ID NO: 5478 - protein, 298 aa, Glycine max
MVFSANDLQEWKDFPKGLKVLLLERDNISAAEIRAKLEAMDYNVSTFCEENEALSAISSGLESFHIAIVEVSSSSGQGGFKFLENAKDLPTIMTSNNHCLNTMMKCIALGAVEFLRKPLSEDKLRNIWQHVVHKAFNARASILSESLKPVKESVVSMLQLQTDDEQHESRVSRDIEKVSRFVDNDHELSSGNDKYPAPSTPQLRQGTRLLDDGDCQEQTNCSTGKESGEHEGESKSVETTCGNLNAESTPQQRKSEITLVREEVESTPQQRKSEITLVKEEVDIVDASKGESVASPHT

SEQ ID NO: 5479 - protein, 275 aa, Bacillus cereus ATCC 14579
MHIPTTTLHNGVKMPMIGLGVYKAKEGDEVKQAVKTALEVGYRSIDTATVYENESGVGEAIRESGIPREDIFITTKVWNDDQGYEETLEAFEKSLKKLQMDYVDLYLIHWPVRGKYVDTYRALEKLYEEGKVRAIGVSNFHKHHLELLLPNCKVKPMVNQVELHPMLTQFELRNYCQDEQIQMEAWSPLMRGGEVFQHPIIQAIANKYEKTPAQVILRWDIQSGIVTIPKSVTPSRIKENFTIFDFALTEEEIRQINTLNRDLHVGTNPDKYDTL

SEQ ID NO: 5480 - protein, 340 aa, Streptococcus agalactiae NEM316
MKRIAVLTSGGDAPGMNAAIRAVVRKAISEGMEVYGINQGYYGMVTGDIFPLDANSVGDTINRGGTFLRSARYPEFAELEGQLKGIEQLKKHGIEGVVVIGGDGSYHGAMRLTEHGFPAVGLPGTIDNDIVGTDYTIGFDTAVATAVENLDRLRDTSASHNRTFVVEVMGRNAGDIALWSGIAAGADQIIVPEEEFNIDEVVSNVRAGYAAGKHHQIIVLAEGVMSGDEFAKTMKAAGDDSDLRVTNLGHLLRGGSPTARDRVLASRMGAYAVQLLKEGRGGLAVGVHNEEMVESPILGLAEEGALFSLTDEGKIVVNNPHKADLRLAALNRDLANQSSK

SEQ ID NO: 5481 - protein, 511 aa, Liquidambar styraciflua
MDSSLHEALQPLPMTLFFIIPLLLLLGLVSRLRQRLPYPPGPKGLPVIGNMLMMDQLTHRGLAKLAKQYGGLFHLKMGFLHMVAVSTPDMARQVLQVQDNIFSNRPATIAISYLTYDRADMAFAHYGPFWRQMRKLCVMKLFSRKRAESWESVRDEVDSAVRVVASNIGSTVNIGELVFALTKNITYRAAFGTISHEDQDEFVAILQEFSQLFGAFNIADFIPWLKWVPQGINVRLNKARGALDGFIDKIIDDHIQKGSKNSEEVDTDMVDDLLAFYGEEAKVSESDDLQNSIKLTKDNIKAIMDVMFGGTETVASAIEWAMTELMKSPEDLKKVQQELAVVVGLDRRVEEKDFEKLTYLKCVLKEVLRLHPPIPLLLHETAEDAEVGGYYIPAKSRVMINACAIGRDKNSWADPDTFRPSRFLKDGVPDFKGNNFEFIPFGSGRRSCPGMQLGLYALETTVAHLLHCFTWELPDGMKPSELEMNDVFGLTAPRAIRLTAVPSPRLLCPLY

SEQ ID NO: 5482 - protein, 195 aa, Zea mays
  misc_feature (69)..(69): Xaa can be any naturally occurring amino acid
MSSTYMKRMLQGIGSDQVIGKAAMDDEEHEVYGQEIPEDGDMDGADVDMAAAGDDAANVQELDEMKRKXEEMQGCDPSISTAEAKEQVDARSVYVGNVDYACTPEEVQQHFQACGTVNRVTILTDKFGQPKGFAYVEFLEQEAVQEALNLNESELHGRQIKVAPKRTNVPGMKQRPPRGYNPYHGYPYRSYGAPY

SEQ ID NO: 5483 - protein, 327 aa, Triticum aestivum
  misc_feature (297)..(297): Xaa can be any naturally occurring amino acid
MASRTAAVPEVALRSGDARPMPAIGMGTAQSPVVPDTTVKAVLEAVEVGYRHFDTASMYATERPLGEALAEAVRRGLLASREEVFVTSKLWCTQCHPHLVLPSLQESLQNLQMEYVDLYLIHWPISLKPGPVVFPVKREDAVPFDLEGVWRAMEECHRLGLAKAIGVSNFTTRHLDKLLPAATVPPAVNQVEMNPVWQQRKLREYCAEKGIHVAAYSPLGGQNWSGDGNAVLDSEVLAEIAKARGKSVAQVALRWIYEQGVTPIVKSFSKERLKENLGIFDWGLTDDDLRKIGQIPXKKIVKAETVLFSAEGEFTSADLADMEIVED

SEQ ID NO: 5484 - protein, 427 aa, Glycine max
  misc_feature (176)..(176): Xaa can be any naturally occurring amino acid
MNSERQSTTTTLLHGKYELGRVLGHGSFAKVYHARNLKTGQHVAMKVVGKEKVIKVGMMEQVKREISVMKMVKHPNIVELHEVMASKSKIYISIELVRGGELFNKVSKGRLKEDLARLYLQQLISTIDFYHKPHIYHHNPPPENLLLDERRNLKVSDFGLTAFSEHLKEDGLLHTXTCGTPAYVSPEVIAKKGYDGAKADIWSCGVILYVLLAGFLPFQDDNLVAMYKKIYRGDFKCPPWFSLDARKLVTKLLDPNPNTRTGVGSRMESSWFKKPVPRKLAAEKVDLEEEKIESQLETINAFHIISLSEGFNLSPLFEDKRREEMRFATAGTPSTVISRLEEVAKAGKFDVRSSETKVRLQGQERGRKGKLAIAADIYAVTPSFMVVEVKKDNGDTLEYNQFCSKQLRPALKDIFWNSSQNSAPASA

SEQ ID NO: 5485 - protein, 340 aa, Xanthomonas axonopodis pv. citri str. 306
MKALVKREANKGIWLEQVPVPTPGPNEVLIKLEKTAICGTDLHIYLWDEWSQRTIEPGLTIGHEFVGRVAELGSAVTGYQIGQRVSAEGHIVCGHCRNCRGGRPHLCPNTVGIGVNVNGAFAEYMVMPASNLWPIPDQIPSELAAFFDPYGNAAHCALEFDVIGEDVLITGAGPIGIIAAGICKHIGARNVVVTDVNDFRLKLAADMGATRVVNVSKTSLKDVMADLHMEGFDVGLEMSGNSRAFNDMLDCMYHGGKIAMLGIMPRGAGCDWDKIIFKGLTVQGIYGRKMYETWYKMTQLVLSGFPLHKVLTHQLPIDDFQKGFDLMEEGKAGKVVLSWN

SEQ ID NO: 5486 - protein, 511 aa, Thermobifida fusca
MDDALVQRLTRHVVSSTGRTVVTTAPFTGEPLATLPQSSASDVTEAFRRARAAQREWAQRSPRQRIAPFLRFSDLLLDRQTEILDILQWETGKARKNAFEEVCDAALGTLHYARHAPRLLRRRRAPGAIPLATRTRVNYQPKGVVSVITPWNYPLTLPVADAVPALLAGNAVVAKPDTQTALSALWAIDLLVEAGLPRDLWLVVLGEPAEIGDPLVDEADYVAFTGSSATGARIAQRAASRLIGCSAELGGKNPMIVCADADLDRTVHGAVAACFSNSGQLCISMERLYVHDSIYDAFVEKFVAETKNLRLGADLDYSADLGSLTSQRQFDRVVAHVEDARSKGATVLAGGRPRPDVGPLFYEPTVLTGVDESMTLCAEETFGPVVSLYRFTTEDEAIERANHTPYGLNASVWTRDVARGRRIAERLKAGTVNINEGYGAAFASYGAPMGGMKRSGLGRRHGVEGILRYTEAQTVSSQHVVGLSGPPGMSAETLSRVMTTGIRLMRALRIR

SEQ ID NO: 5487 - protein, 189 aa, Glycine max
MISGHWNVTDVCNALLGGFAAITAGCSVVEPWTAIVCGFVASVVLIACNKLAEKVKFDDPLEAAQLHGGCGAWGVIFTALFAKKEYVSQVYGEGRAHGLFMRGGGKLLAAHVIQILVIVGWVSATMGPLFWGLNKLKLLRISSEDELAGMDLTRHGGFAYAYEDDESHKHGIQLRKVGPNASSTPTTDE

SEQ ID NO: 5488 - protein, 227 aa, Thermus thermophilus
  misc_feature (24)..(24): Xaa can be any naturally occurring amino acid
  misc_feature (101)..(101): Xaa can be any naturally occurring amino acid
  misc_feature (163)..(163): Xaa can be any naturally occurring amino acid
  misc_feature (210)..(210): Xaa can be any naturally occurring amino acid
MERPLESYKKEAAHAAIAYVQDGXVVGLGTGSTARYAVLELARRLREGELKGVVGVPTSRATEELAKREGIPLVDLPPEGVDLAIDGADEIAPGLALIKGXGGALLREKIVERVAKEFIVIADHTKKVPVLGRGPVPVEIVPFGYRATLKAIADLGGEPELRXDGDEFYFTDGGHLIADCRFGPIGDPLGLHRALLEIPGVVETGLFVGXATRALVAGPFGVEELLP

SEQ ID NO: 5489 - protein, 309 aa, Mesorhizobium loti MAFF303099
MRDPYEVLGVAKNASAKDIKSAYRKLAKKHHPDQNPNDPKAKDRFAAANQAYEIVGDEKNRAAFDRGEIDADGKPRFQGFEGAAGGGDPFAGFRRQQGAGGSRFEFRSGRPGGDPFDGNSDIFSQIFGDAFSGARGAGMGDRRQPATAADLNVTLDVTIEEAATAEKVTAMFPDGRKVAVKLPAFVEDGQTIRLKGQGEQGPGQPGDALVKIHIRRHPRYRIEGRDLHADVPVSLADAVLGAKVPVETPTGRLAVNVPAWSSSDKVLRLKGRGLPEKAGGHGDLYAHVRIMLPEGGDSALEALLRGQKG

SEQ ID NO: 5490 - protein, 270 aa, Secale cereale
MDVADIASPSGQQEQGHRTVSSEPPKRPAGRTKFHETRHPLYRGVRRRGRVGQWVCEVRVPGIKGSRLWLGTFNTAEMAARAHDAAVLALSCRAACLNFADSAWRMLPVLAAGSFGFGSPREIKAAVAVAVIAFQRKQIIPVAVAVVALQQQQVPVAVAVVALKQKQVPVAVAVVALQQLHVPVAVAVVALQQQQIILPVACLAPEFYMSSGDLLELDEEHWFGGMDAGSYYASLAQGMLVAPPDERARPENGEQERRPDAAMELFVRLI

SEQ ID NO: 5491 - protein, 375 aa, Arabidopsis thaliana
MPLSLQSPPCATLSASIQKGRWKTLAAGFSVTPLPAVNFSLRRSIPRILASASSSSSPSSSSLEAGENNELNAVSAFSEIVPDTVVFDDFERFPPTAATVSSALLLGICGLPDTIFRNAVDMALADSSCAGLETTESRLSCFFNKAIVNVGGDLVKLVPGRVSTEVDARLAYDTNGIIRKVHDLLRLYNEIDVPHERLLFKIPATWQGIEAARLLESEGIQTHITFVYSFAQAAAAAQAGASVIQIFVGRLRDWARNHSGDNEIESAIKSGEDPGLALVKRSYNYIHKYGYKSKLMAAAVRNKQDLFSLLGVDYVIAPLKVLQSLKDSPAIPEDEKYSFVRKLTPETATHYHFTNKELVKWDQLSLASSMGPASV

SEQ ID NO: 5492 - protein, 499 aa, Corynebacterium efficiens YS-314
MRLWGAGGLAEAMSTENFVSNQIFINGWVDGTSERSTTTLNPFNGEEVATIRNASQEDVDKAYATAAEVQKEWAAVPPVKKARILNKAAQVIEDNRDAIVELIRRESGSTALKANIEAGLAMASLREAATFPARITGQILPSNTPGKSNYVFREPLGVVGVISPWNFPFALSMRSVAPALACGNGVVLKPASDTPIVGGTLLAHIFEAAGLPTGLFNVVVGAGSEIGDYFVEHRIPRLISFTGSTPVGKQVGATATGGKYIKKVALELGGNAPMVVLSDADINKAVAAASMGSFLHQGQICMAVNRIIVEAPVYDQFLEGFAARVSKVAYGDQLDDATMVGPIVNDSQVESVSGKIDLAREQGARAVVSGPIEGRVIAPHVFADVTPDMELFREEIFGPVVGVVKADNEEHALELANDTEFGLSSAVFTEDLQRGINFARRVEAGMTHINDITVNDEAHVMFGGEKNSGLGRFNGEWAIDEFTTDHWVSVTTGTDAYPI

SEQ ID NO: 5493 - protein, 238 aa, Glycine max
MGRGKIPIRRIENSTNRQVTFCKRRNGLLKKTRELSILCDAEVGVIVFSSTGKLYEYSNTSMETIIERFNKQNNNHHRLMDATSAIKGEAASLRQQLQHLQENHRQLMGEELSGLGINQLKHLENQLQMSLNNVRNKKDHIFSDEIKELQQKGSLIRRQNEELHKKIDLIHNENAELKKVIEARHKEEERAALKPPCAIKNRYDTLDPNSLQQRQSQPQPSEPSAEVMIMGYSLKLKM

SEQ ID NO: 5494 - protein, 243 aa, Rhodobacter sphaeroides 2.4.1
MDLVQDGMKLGLGTGSTAAWMVRCLAERVREEGLRVQGVPTSTRTAELARALGIQVVTLDEAKWLDLTIDGADEFDADFNLIKGGGAALLQEKIVATASDRMVVIADAAKEVAHLGAFPLPVEVIPFGWQSTKMLIEETLEGMDVLGREVTLRLSGDAPLLTDEKNYILDLHLKRIGEPRPLALALNQIAGVVENGLFIDICDTVVVGHGDGRVSLRDLQSGQAEEGSIDMDRARNIFADLGD

SEQ ID NO: 5495 - protein, 375 aa, Arabidopsis thaliana
MPLSLQSPPCATLSASIQKGRWKTLAAGFSVTPLPAVNFSLRRSIPRILASASSSSSPASSSLEAGENNELNAVSAFSEIVPDTVVFDDFERFPPTAATVSSALLLGICGLPDTIFRNAVDMALADSSCAGLETTESRLSCFFNKAIVNVGGDLVKLVPGRVSTEVDARLAYDTNGIIRKVHDLLRLYNEIDVPHDRLLFKIPATWQGIEAARLLESEGIQTHMTFVYSFAQAAAASQAGASVIQIFVGRLRDWARNHSGDTEIESAIKSGEDPGLALVKRSYNYIHKYGYKSKLMAAAVRNKQDLFSLLGVDYVIAPLKVLQSLKDSPAIPDDEKYSFVRKLTPETATHYHFTNKELVKWDQLSLASSMGPASV

SEQ ID NO: 5496 - protein, 82 aa, Brassica napus
  misc_feature (14)..(14): Xaa can be any naturally occurring amino acid
  misc_feature (27)..(27): Xaa can be any naturally occurring amino acid
  misc_feature (42)..(42): Xaa can be any naturally occurring amino acid
  misc_feature (76)..(76): Xaa can be any naturally occurring amino acid
MRKKLDTRFPAARXKKIMQADEDVGKXALAVPVLVSKALELXLQDLCDRTYEITLQRGAKTVSSLHLKNCVETYNXFDFLRE

SEQ ID NO: 5497 - protein, 161 aa, Triticum aestivum
MSDSEEHHFESKADAGASKTYPQQAGTIRKNGHIVIKNRPCKVVEVSTSKTGKHGHAKCHFVAIDIFNGKKLEDIVPSSHNCDVPHVNRTDYQLIDISEDGFVSLLTESGGTNDDLRLPSDEALLTQIKDGFAEGKDLIVTVMSAMGEEQICALKDIGPKN

SEQ ID NO: 5498 - protein, 237 aa, Hordeum vulgare subsp. vulgare
MPSRPAPFIHRLRLLRSAVVSPSSAPLPCSRPRLAVPFAQPPIRAPAFAAAGSPLLRPVGARFSLSSNMAAAASSASSVHDFTVEDASGKDVDLSTYKGKVLLIVNVASQCGLTNSNYTELAQLYEKYKDQGFEILAFPCNQFGGQEPGTNEEIVQFACTRFKAEYPIFDKVDVNGDNVAPVYKFLKSSKGSLFGDNIKWNFSKFLVDKDGNVVDRYAPTTSPLSIEKDIKKLLASS

SEQ ID NO: 5499 - protein, 131 aa, Candida albicans SC5314
MSAEDIQMEDASNNSEQEQIQEQEYDINKIKILPGSSEDGTSASFQIIDEDHTLGNALRYIIMKNPEVEFCGYSIPHPSENKLNIRIQTYGNISAVEALHQGLDNLSELCGAIEDKFDDAIKAGGYSTKEP

SEQ ID NO: 5500 - protein, 171 aa, Hordeum vulgare subsp. vulgare
MGAAESSSKLGGSVHDFVVKDVRGNDVELSRYKGKVLLIVNVASRCGLANSNYTEMGQLYEKYREKGLEILAFPCNQFAGQEPDSDEKIVEFACDRFQAQFPIFRKVDVNGNNAAPLYKFLKSERGGLFGERIKWNFTKFLVDKEGHVMNRYAPTWSPLGIENDIKKLLEV

SEQ ID NO: 5501 - protein, 165 aa, Hordeum vulgare subsp. vulgare
MAAASSATSVHDFTVKDASGKDVDLSVYKGKVLLIVNVASQCGLTNSNYTELSQLYPKYKDQGFEILAFPCNQFGGQEPGTNDEIVQFACTRFKAEYPIFDKVDVNGNNVSPLYKFLKSSKGGFFGDSIKWNFSKFLVDKEGHVVDRYAPTTSPMSIEKDIKKLL

SEQ ID NO: 5502 - protein, 115 aa, Zea mays
SAAGRPGNQARDNRCVNESIAMASRLVAAAASSSSSLSSASPLARLISRRGLAGAADGHGSAKVPLWKDPLSPSKWKEEHFVLASLSMWGVIFYGGYKLFSGKKEAKTEAASPQA

SEQ ID NO: 5503 - protein, 505 aa, Mesorhizobium loti MAFF303099
MNKVEFSRPVKAPFDKRYGNFIGGKWTEPRSGRYFENHSPVNGQLLCEVARSDADDIEAALDAAHAAKDAWGRTSVAERSLILNRIADRMEENLDLLACAETWDNGKPIRETTVADLPLAIDHFRYFASAVRGQEGSLSQIDDDTVAYHFHEPLGVVGQIIPWNFPLLMACWKLAPALAAGNCVVLKPAEQTPAAILLWADLIGDLLPPGVLNIVNGFGLEAGKPLASSPRIAKIAFTGETTTGRLIMQYASQNLIPVTLELGGKSPNIFFKDVVAEDDDFFDKAIEGFVMFALNQGEVCTCPSRALIHESIYDRFMERALKRVEAIVQGDPLDPATMIGAQASSEQLEKILSYIDIGRQEGAEVLTGGARNVLPGDLAGGYYVKPTVFRGHNKMRIFQEEIFGPVVSVTTFKDDDEALSIANDTLYGLGAGVWTRDGNRAYRFGRAIQAGRVWTNCYHAYPAHAAFGGYKQSGIGRETHKMMLDHYQQTKNMLVSYSPKKLGFF

SEQ ID NO: 5504 - protein, 292 aa, Aspergillus nidulans FGSC A4
MSEITHPTIKDGWFSEQSEMWPGQAMNLRVNQILHHEKSKYQDVLVFESSDYGTVLVLDNVIQCTERDEFSYQEMITHLAMNSHPNPKKVLVIGGGDGGVLREVVKHETVEEAILCDIDEAVIRVSKKYLPGMSIGFQHPNVKVHVGDGFEFLKQRQNEFDVIITDSSDPEGPAESLFQKPYFELLRDALRDGGVITTQAENQWLHLPLIADLKKACNEVFPVAEYAYTTIPTYPSGQIGFMVCCKDANRNVKEPVRTWSREEEERLCRYYNQDIHRASFVLPNFARKALGN

SEQ ID NO: 5505 - protein, 479 aa, Pyrococcus abyssi GE5
MCLIAGGFNVSREDAIKIINLGKHRGPDSFGFWSERQMLKSDNFSDVSEIEGGEIALIQCRLAMTGSKSYTQPFYNEIILVHNGEIYNHESLRKYLIERGVAFETDVDSEVILRLLEYLVFDRKLKVEEAIKLSMKMLRGDYAVAFFFNGKFYLFRDPLGVRPLYYSSRGHFASEKKVLWGLGEDAEPVLPGEIVSISKHGITRVRGFNVFSIRTQGKDYFNGLQNLLIDSVKVRASKKVGVLFSGGVDSSLIALIASRYSDVILYTSGTEDSKDVEWARRVAEELGLKLRESLFSREDIENEIERIMFAIEEPNPMNLAIAIPLYFSTKRAREDGVKVLLSGQGADELFGGYAKYLQNPGLMLKDVEELGERNLARDDKVAMLNGVETRYPYLDLPFAILALNVPLELKIRDGKRKFILREIAKSLGLPEWVAEREKKAAQYGSNAQKILEKIAKSRGVKLKGLADILFSKVFHGIQN

SEQ ID NO: 5506 - protein, 306 aa, Glycine max
HGKKPTTKLSFKWKEGHGNATLFSSKMLLQRPIAGSQVPFCPIEKKMLDCWSQIDASTFKVRGVNYFKDKKKDFAPNYPAYYPFGVDVFLSPRKVDHIARFVELPVMSSSAKFPPILVVNVQVPLYPATLFQGETDGEGMSIVLYFKLSESYSKELPQTFQESIRRLMDDEVEKVKGFPVDTIAPFRERLKILGRVINLEDLHLSAAERKLMQAYNEKPVLSRPQHEFYMGENYFEIDLDMHRFSYISRKGFEAFLDRLKVCTLDVGLTIQGNKQEELPEHVLCCIRLNGIDYMNYQQLGLTQDPL

SEQ ID NO: 5507 - protein, 113 aa, Rickettsia sp. 'midichlorii'
ANEAVINMLKEIGSSENIPKYIAKAKDKNDPFRLMGFGHRVYKNYDPRAAVLKETCKEVLKELGQLENNPLLQIAIELEAIALKDEYFIERKLYPNVDFYSGIIYKAMGIPSQ

SEQ ID NO: 5508 - protein, 480 aa, Glycine max
  misc_feature (230)..(230): Xaa can be any naturally occurring amino acid
  misc_feature (425)..(425): Xaa can be any naturally occurring amino acid
MSIPIPHRQLFIDGDWKVPVLKNRIPIINPSTQHIIGDIPAATKEDVDLAVAAAKAALSRNKGADWASASGSVRARYLRAIAAKITEKKPELAKLEAIDCGKPLDEAAWDIDDVAGCFEFYADLAEKLDAQQKAHVSLPMDTFKSYVLKEPIGVVALITPWNYPLPMATWKVAPALAAGCAAILKPSELASVTCLELAEICKEVGLPPGVLNILTGLGPEAGAPLAAHPXDVDKIAFTGSSATGSKIMTAAAQLIKPVSLELGGKSPIIVFEDVDLDKAAEWTIFGCFWTNGQICSATSRLIVHASFESIATEFLNRIVKWVKNIKISDPLEEGCRLGPIVSEGQYEKILKFISNAKSEGATILTGGSRPEHLKKGFFVEPTVITDVTTSMQIWREEVFGPVLCVKTFSTEEEAIDLANDTVYGXCSAVISNDLERCERITKAFNAGIGGIRYSEPCVTQSPWGGIITSGDVRRLEECGG

SEQ ID NO: 5509 - protein, 491 aa, Musa acuminata
GTRRDRERERERERERERERERERERERERERERERVHLLGSSSLHRSLWELSKKHGPLMHLKFGRVPVVVVSSPEMAKEVLKTHDLECCSRPSLLSFSKFSYGLSDVAFIPYGERWRQLRKLCTVELLSTRKINSFRDIRKEEMERVTKLICSHVRASSMVNLSELLLSLSCNMTCRSAFGSGFDDGGDIQLHDMLREAQEELSGLFLSDYLPLLGWVDRLSGMRSRLERAFLKLDSIYQRRIDYHQDRLRQQGKEDGDVLDALLRMQKDEEGLTEDHIKGVLMDIFIAGTDTSSATVEWAMAELIRQPELMKRAQDEVRRCVGSKGEVEESDLHQLHFFKCVIKETMRLHPPAPLLLPRETMQHFKLNGYDILPKTWMYVNAWAIGRDPNSWGRPHVFDPERFMHDSTEASGQDFKLIPFGEGRRICPGKNLGMLMVELVLANLLYSFDWHLPPGMVKEDISMEEAPGVPVHREYALCLMATKYDATTA

SEQ ID NO: 5510 - protein, 507 aa, Musa acuminata
MALPPLLLSPLPSLLVVLALLSSLLLAGRKARGGSATWKLPPGPPKLPVIGHLHLLGSSLLHRSLWELSKKHGPLMHLKFGRVPVVVVSSPEMAKEVLKTHDLECCSRPSLLSFSKFSYGLSDVAFIPYGERWRQLRKLCTVELLSTRKINSFRDIRKEEMERVTKLICSHVRASSMVNLSELLLSLSCNMTCRSAFGSGFDDGGDIQLHDMLREAQEELSGLFLSDYLPLLGWVDRLSGMRSRLERAFLKLDSIYQRRIDYHQDRLRQQGKEDGDVLDALLRMQKDEEGLTEDHIKGVLMDIFIAGTDTSSATVEWAMAELIRQPELMKRAQDEVRRCVGSKGEVEESDLHQLHFFKCVIKETMRLHPPAPLLLPRETMQHFKLNGYDILPKTWMYVNAWAIGRDPNSWGRPHVFDPERFMHDSTEASGQDFKLIPFGEGRRICPGKNLGMLMVELVLANLLYSFDWHLPPGMVKEDISMEEAPGVTVHREYALCLMATKYDATTA

SEQ ID NO: 5511 - protein, 242 aa, Capsicum chinense
MWNQPYRKYDVEAGTAPLYPEMLESPELRWSFTRKVYSIITIQLLLTIAVASVVVTVHPISHFFATTSAGIGVYIVLVITPFITLCPLYYYHQKHPVNYLLLGLFTVSLAFTVGLTCAFTSGKVILEAVILTTAVVISLTAYTFWAAKRGQDFNFLGPFLFGALVVLLLFSLIQIFFPLGKISVMIYGGLASIIFCGYIVYDTDNLIKRYTYDEYIWAAISLYLDVINLFLSLLTIFRAADN

SEQ ID NO: 5512 - protein, 93 aa, Zea mays
MPGSHGRPLAIDGLGRPPPVDPFQGLKCTASLPDSARSFISLGNVSNGGRILCMQVWPDYGTKKFQTLSYLPQLTTEDLLKQMDSLLCNRWIP

SEQ ID NO: 5513 - protein, 275 aa, Musa acuminata
HEVDWLRGMRSRLERAYVKLDSIYQRLIDYHQDRFRLQGKEDEDILDALLRMQKDEEGVTEDHIKGVLMNIIIAGTDTSTATVLWTMAELIRQPELMKRAQDEVRGCVRSKGEVEESDLDQLHFLKCVIKETMRLHPPVPLLLPRETMQHFKLNGYDILPKTWMYVNAWAIGRDPNSWARPHVFDPERFMHDSTEASGQDFKLIPFGEGRRICPGKNLGMLMVELVLANLIYSFDWHLPPGMVKEDISMEEAAGFTMNREYALCLMATKYDSPTA

SEQ ID NO: 5514 - protein, 375 aa, Arabidopsis thaliana
MPLSLQSPPCATLSASIQKGRWKTLAAGFSVTPLPAVNFSLRRSIPRILASASSSSSPSSSSLEAGENNELNAVSAFSEIVPDTVVFDDFERFPPTAATVSSALLLGICGLPDTIFRNAVDMALADSSCAGLETTESRLSCFFNKAIVNVGGDLVKLVPGRVSTEVDARLAYDTNGIIRKVHDLLRLYNEIDVPHERLLFKIPATWQGIEAARLLESEGIQTHITFVYSFAQAAAAAQAGASVIQIFVGRLRDWARNHSGDNEIESAIKSGEDPGLALVKRSYNYIHKYGYKSKLMAAAVRNKQDLFSLLGVDYVIAPLKVLQSLKDSPAIPEDEKYSFVRKLTPETATHYHFTNKELVKWNQLSLASSMGPASV

SEQ ID NO: 5515 - protein, 197 aa, Azotobacter vinelandii
MSTNLMSQALAVDAARRARAKGQKPVALWLTGLSGAGKSTIANALELALVERGRHTYLLDGDNVRMGLCRDLGFSDADREENIRRVAEVAHLFVDAGLIVISAFISPFRRDRAIAREVIGNGAFIEIFVDTPLAECERRDPKGLYGKARQGLIKNFTGIDSAYEPPVDPHIRIDTLKDDLPTAVARILDYLDKWERA

SEQ ID NO: 5516 - protein, 445 aa, Streptomyces turgidiscabies
MSGIRRMRDRWRTDEAGLTSAAEDFGHCVHAKPAAVLAPRSPAEVQEAVSYAAGQGRPLAARGAGHSTYGQGQAADGIVLDMTELDTVHEVGPDHIVVDAGARWSDVVAATLPGLRTPPVLTDFLGTTVGGTLSVGGFGGASHRHGAQTDNVVDLDVVTGTGALVRCSPLGNRDLFDCVRGGLGQFGVIVRATLRLVPAFDKTHWYKFLYNDLTVFLAEQTRLAHEGMFDHVEGRVLPLGSGPWRYRLDLAKHCLTGDPPDERSVLRSLHPECRAEPVEVLPHAEFLDRMAAGEQELRRTGEWFHPHPWLNMLLPAPTAEGFVRQALDGLTQESTGRSGLVIVYPLPTAKLATPFVRKPTDATAFMVALLRTALPGEQGPMIASNRQIYEQALAAGGVAYPVNALPMSPEDWRRHFGPLWNDFARAKRRFDPNIILTPGHGIRLI

SEQ ID NO: 5517 - protein, 309 aa, Triticum aestivum
HASATTAVPEVALRSGDARPMPAIGMGTAKLPVVPETTVKAVLEAVVVGYRHFDTASMYATERPLGEALAEAVRRGLLASREEVFVTSKLWNLQMEYVDLYLIHWPISLKPGPAVFPVKREDAVPFDFAGVWRAMEECHRLGLAKAIGVSNFTTSHLHKLLAAATVPPAVNQVEMNPVWQQRKLREYCAEKGIHVAAYSPLGGQNWSGDGNAVLDSEVLAEIAKARGKTVAQVALRWIYEQGATPIVKSFSKERLKENLGIFDWGLTDDDLRKIGQIPQKKIVRAETVLFSAEGEFTSADLAEMEIVEE

SEQ ID NO: 5518 - protein, 363 aa, Crucihimalaya himalaica
  misc_feature (17)..(17): Xaa can be any naturally occurring amino acid
  misc_feature (253)..(253): Xaa can be any naturally occurring amino acid
  misc_feature (350)..(350): Xaa can be any naturally occurring amino acid
IRCKAAVAWEAGKPLVXEEVEVAPPQKHEVRIKILFTSLCHTDVYFWEAKGQTPLFPRIFGHEAGGIVESVGEGVTDLQPGDHVLPIFTGECGDCRHCHSEESNMCDLLRINTERGGMIHDGESRFSIKGKPIHHFLGTSTFSEYTVVHSGQVAKINPDAPLDKVCIVSCGLSTGLGAVLNVAKPKKGQSVAVFGLGAVGLAAAEGARIAGASRIIGVDLNSKRFDEAKKFGVTEFVNPRDHDKPVQQVIAEXTDGGVDRSVECTGSVQAMIQAFECVHDGWGVAVLVGVPSKDDAFKSHPMNFLNERTLKGTFFGNYKPKTDIPGVVEKYMNKELELEKFITHTVPFSXINKAFDYMLKGES

SEQ ID NO: 5519 - protein, 337 aa, Sulfolobus tokodaii
MGFTVALIQGDGIGPEIVSKSKRILAKINELYSLPIEYIEVEAGDRALARYGEALPKDSLKIIDKADIILKGPVGESAADVVVKLRQIYDMYANIRPAKSIPGIDTKYGNVDILIVRENTEDLYKGFEHIVSDGVAVGMKIITRFASERIAKVGLNFALRRRKKVTCVHKANVMRITDGLFAEACRSVLKGKVEYSEMYVDAAAANLVRNPQMFDVIVTENVYGDILSDEASQIAGSLGIAPSANIGDKKALFEPVHGAAFDIAGKNIGNPTAFLLSVSMMYERMYELSNDDRYIKASRALENAIYLVYKERKALTPDVGGNATTDDLINEIYNKLG

SEQ ID NO: 5520 - protein, 116 aa, Zea mays
  misc_feature (46)..(46): Xaa can be any naturally occurring amino acid
PQPQRTVRRAQRYGEGQRNRRVLVARFDDVSLPPEGHPQGGGGGGXEEPSSSRGGGSLCSGYLSLPALLLVGVTASLVILPLVLPPLPPPPSMLMLVPVAMLLLLLVLAFMPTSST

SEQ ID NO: 5521 - protein, 430 aa, Mycobacterium bovis AF2122/97
MSVLIRGVRPYGEGERVDVLVDDGQIAQIGPDLAIPDTADVIDATGHVLLPGFVDLHTHLREPGREYAEDIETGSAAAALGGYTAVFAMANTNPVADSPVVTDHVWHRGQQVGLVDVHPVGAVTVGLAGAELTEMGMMNAGAAQVRMFSDDGVCVHDPLIMRRALEYATGLGVLIAQHAEEPRLTVGAFAHEGPMAARLGLAGWPRAAEESIVARDALLARDAGARVHICHASAAGTVEILKWAKDQGISITAEVTPHHLLLDDARLASYDGVNRVNPPLREASDAVALRQALADGIIDCVATDHAPHAEHEKCVEFAAARPGMLGLQTALSVVVQTMVAPGLLSWRDIARVMSENPACIARLPDQGRPLEVGEPANLTVVDPDATWTVTGADLASRSANTPFESMSLPATVTATLLRGKVTARDGKIRA

SEQ ID NO: 5522 - protein, 151 aa, Glycine max
  misc_feature (95)..(95): Xaa can be any naturally occurring amino acid
LKSMAGFPTTKTNNDITCIVSNRGKLQCMHVWPPLGKKKAETLCYLTDLDDAQLANEVQYLLRKGWIPCWELESEHGCMYREHNMSPGYYYGLYXTMWKLTMLGCTDAYHVLNELQEANTAYPSGYIRIIGFDSVRQLLCISYIIYKRSRF

SEQ ID NO: 5523 - protein, 345 aa, Ralstonia solanacearum
MKALVYEGPGKISLENKPKPELQAPGDAVVRVTLTTICGTDLHIIKGDVPTCEPGRTLGHEGVGVIESVGAAVTSLKPGDHVLISCISSCGKCANCRRGMYSHCETGGWILGHRIDGVQAEYVRVPHAETSLYKVPPGVDEEALVMLSDIFPTGFECGVLNGRVQPGSTVAIVGAGPIGLASLLTAQFYSPARIIMIDTNVARLEVASGLGASDCINVTRENAAAAVKRLTDGMGVDCAIEAVGVPATFELCQELVAPGGVIANIGVHGVKADLHLETLWSQNIAITTRLVDTVSTPMLLKTVRAGKLLPGQLITHRFKLDDILAAYDTFRNAGETHALKVIIAT

SEQ ID NO: 5524 - protein, 107 aa, Lilium longiflorum
RAAPAQASMVAPFVGLKSSSAFPVTQKPATGLPTLPSNGGRVQCMKVWPIVGKKKFETLSYLPTLPVEALLKQIEYLIRSGWVPCLEFSLVGFVSRDYHQSPGYYDG

SEQ ID NO: 5525 - protein, 263 aa, Glycine max
MATFSKERENFVYVAKLAEQAERYDEMVEAMKKVAKLDVELSVEERNLFSVGYKNVVGSRRASWRILSSIEQKEDSKGNELHVKHIRDYRNKVELELSNICSDIMIILDEHLIPSTNIAESTVFYYKMKGDYYRYLAEFKAGNEKKEVADQSLKAYQTASTTAESELQPTHPIRLGLALNFSVFYYEILNSPERACHLAKQAFDDAVSELDTLNEDSYKDSTLIMQLLRDNLTLWTSDIPEEGEDLKMESAARVDQGEDELGR

SEQ ID NO: 5526 - protein, 489 aa, Burkholderia cepacia R18194
MSTVQETLALKDPSLFRQQAYVNGEWQGATNGETFEVRNPATGGLLGTVPAMGTAETRHAIEAANAAWPAWRKKTAKERAVVLRKWHDLMMEHADDLALILTTEQGKSLAEAKGEIGYAASFLEWFAEEGKRVYGDTIPTPASDKRIVVTKEAIGVCAAITPWNFPAAMITRKVGPALAAGCPIVVKPAEATPFSALAMAVLAERAGVPAGVFSVVTGDPKAIGGEMTSNPIVRKLSFTGSTPVGRLLMSQCAATVKKVSLELGGNAPFIVFDDADLDAAVQGAIASKYRNSGQTCVCTNRFYVHEAVYDQFAQKLAAAVGQLKVGRGTEPGVTQGPLINEAAVLKVEAHIEDALAKGATVVTGGKRHALGHGFFEPTVLTGVTPAMKVAKEETFGPLAPLFKFGSDDEVIRLANDTEFGLAAYFYSRDIGRVWKVAEALEYGMVGVNTGLISNEVAPFGGVKQSGLGREGSHYGIDDYVVIKYLCLAV

SEQ ID NO: 5527 - protein, 140 aa, Ralstonia solanacearum
MSQLRRYDPFAIEPAGDIFQGLLRSFRGGMDSALPFKVDVTESDTAYSVVAEIPGAKKEDIDVTVDRGTVMISAKVERQSEKKEGERVIRSERYSGSMQRMFTLEAGVDENKVEATYESGLLRVTLPKKEVSPQQRITIR

SEQ ID NO: 5528 - protein, 283 aa, Listeria monocytogenes str. 1/2a F6854
MKTVKLNNGVEVPILGFGTYQITDAAEAEQAVKDAIKTGYRHIDTAQSYMNEEAVGRGIAASGVDRKELFITTKIWVENVSYKGVMSSFDRSLKRLGLDYVDLLLIHQPFNDVYGAWIAMEELQASGKIRAIGVSNFSPDRVIDLAAFNEVTPQVNQIEVNPFQQQTANLAILRKEGVAIEAWAPFAEGKNDVFNNPVLTKIGAKYGKSAAQVILRWLVEQDIIVLAKSVKPERMAQNLAIFDFELTEADKEEIAGLNQGESQFFSHADPEMVKWMASRKLNV

SEQ ID NO: 5529 - protein, 315 aa, Haemophilus ducreyi 35000HP
MNQLDALREMTVVVADTGDIEAIRQYQPQDATTNPSLILSASALSQYAPLIDDAIRYAKSKSGNKAQQLVDAEDKLAVNIGLEILKIVPGRISTEVDARFSYDTEKTIAKARKLIGLYNEAGVANNRILIKIAATWQGIRAAEILEKEGINCNLTLLFSQAQARACAEAGVYLISPFVGRILDWYKANEKKEYAAAEDPGVISVTAIYNYYKQYNYKTIVMGASFRNVGEITEIAGCDRLTIAPPLLKALAESNETLVRKLDYQGEILDRPAPLSEAEFYWQHNQDPMAVDKLAEGIRKFAIDQEKLEEMLSAKL

SEQ ID NO: 5530 - protein, 140 aa, Bordetella parapertussis 12822
MRRAALLLGLWLLLGAPAAADIAQRELRLAHSLRCLVCQNQTLAESNAPLAHDMRALIRQQLADGRSDEEVMQFFEDRYGDFVRYEPPFKPATWLLWLGPFALLLAGFVVLWRALARRPGAAPLTDAQRARAERFLDEES

SEQ ID NO: 5531 - protein, 462 aa, Bacillus cereus ATCC 14579
MTINSKTIEKSSYTYEELAEKNKAYVWHPFTQMKDYLEEDPVIIERGEGRKLYDVNGNEYWDGVSSIWLNVHGHQVPELDEAIREQLNKIAHSTMLGLANVPSILLAEKISEVVPDGLKKVFYSDSGSTAVEIAIKMAFQYWQHKGKPKKQRFVTLKEAYHGDTIGAVSVGAIDLFHQVYSSLLFDAIKMPYPYTYRSPYGNNKEEIVKSHLEEMEELLKEKHEEVAAIIVEPLMQGAGGMITMPKGYLKGLRDLCTKYNVLFITDEVATGFGRTGKMFACEHENVTPDILTAGKGLTGGYLPIAVTVTTDEIYNAFLGEYEEQKTFFHGHSYTGNPLGCAVAIANLELYEKTNLIEEVARKTDYVAAQLEKLFAYKHVGDIRQCGLMVGIELVKNKETKEAFDWTERVGVQVCKRSRELGMILRPLGNTIVFMPPLASTFEEIDDMLRILYKAISDVTEGE

SEQ ID NO: 5532 - protein, 437 aa, Methylobacillus flagellatus KT
MTTSNASLLQRSLAAVWHPCTQMKQHEALPLVPVKRGEGVWLEDFDGKRYLDGVSSWWVNLFGHNHPHIKQAIKAQLDQLEHVILAGFTHEPVVRLSEQLSLLTGLGHSFYASDGASATEIALKMSFHYWRNHGETAKTRFLSLQNGYHGETLGSLSVTDIALFKDTYAPLLREESIALPSPDWRRAEPGESAEQYALRCAGQAEAYIAQHHAGIAAVIVEPLVQCATGMAMYHPVYLQRLRALCDRYQVHLIADEIAVGFGRTGTMFAIEQAGIKPDFICLSKGITGGYLPLSVVQTTQDIYAAFYDDSVTRGFLHSHSYTGNALACSAALATLDIFAQHDVLNSNRRKAGYLNRRLAAWRDLPIRHLRNTGMIWAFDVTPSRPGFQQRFYQAALQRGLLLRPVGNTVYFMPPYIISEEEMDWMLEQARGALEESL

SEQ ID NO: 5533 - protein, 496 aa, Burkholderia cepacia R1808
MRAQNKFKTGLDIAKYTAKIMRADMAAYDADPSKYTQSLGCWHGFIGQQKMISIKKHFNSTERRYLYLSGWMVAALRSEFGPLPDQSMHEKTSVSALIRELYTFLRQADARELGGLFRELDAAKDAAAKAAIQQKIDNHVTHVVPIIADIDAGFGNAEATYLLAKQFIEAGACCIQIENQVSDEKQCGHQDGKVTVPHEDFLAKIRAIRYAFLELGVDDGIIVARTDSLGAGLTKQIAVTNAPGDLGDQYNSFLDCEELSGDQLGNGDVVIKRDGKLLRPKRLPSNLFQFRAGTGEARCVLDCITSLQNGADLLWIETEKPHIAQIAGMVNEIRKVIPNAKLVYNNSPSFNWTLNFRQQVYDALKAEGKDVSAYDRAQLMSVEYDDTELAKLADDKIRTFQADASREAGIFHHLITLPTYHTAALSTDNLAKEYFGEQGMLGYVAGVQRKEIRQGIACVKHQNMSGSDIGDDHKEYFSGEAALKAAGKDNTMNQFS

SEQ ID NO: 5534 - protein, 444 aa, Oryza sativa (japonica cultivar-group)
MRMGKYEMGRALGEGHFGKVKLARHADTGAAFAIKILDRQRILAMKIDEQIKREIATLKLLKHPNVVRLHEVSASKTKIYMVLEYVNGGELFDKIALKGKLSEKEGRKLFQQLMDAVSYCHEKGVYHRDLKPENVLVDAKGNIKVSDFGLSALPQNQRKDGLLHTTCGSPNYIAPEVLLNRGYDGSLSDIWSCGVILYVMLTGNLPFDDQNTVVLYQKILKGDARIPKWLSPGAQDILRKILDPNPITRLDITGIRAHEWFRQDYTPAMPFDDDDDNNISDGNLHMTENQDIETSPAISQINAFQLIGMSSCLDLSGFFEKEDVSERKIRFVSNYSPTSLFEKIESTVTEKGFQVQKNSGKLKVIQVCKEPANPRGHGNLLISAEVFEINESLYVVELKRSSGDCSLYRQLCASLSEDLGICKRQQLLKKDSMRQDLCRYNSSF

SEQ ID NO: 5535 - protein, 282 aa, Zea mays
MATANGSSKGPFEVPKVEVRFTKLFIDGKFVDAVSGKTFETRDPRTGEVIASIAEGGKADVDLAVKAAREAFDNGPWPRMTGYERGRILHRFADLIDEHVEELAALDTVDAGKLFAVGKARDIPGAAHLLRYYAGAADKVHGATLKMAQRMHGYTLKEPVGVVGHIVPWNYPTTMFFFKVGPALAAGCAVVVKPAEQTPLSALFYAHLAREAGVPAGVLNVVPGFGPTAGAAVAAHMDVDKVSFTGSTEVGRLVMRAAAESNLKPVLLELGSYGGGGGGWRD

SEQ ID NO: 5536 - protein, 335 aa, Xanthomonas axonopodis pv. citri str. 306
MTQTITVIRGDGIGPEIMDATLFVLDALQAGLTYEYADAGLVALEKHGDLLPESTLASITKNKVALKSPLTTPVGEGFSSINVAMRRKFDLYANVRPAKSFPNTKSRFADGVDLITVRENTEGAYLSEGQTVSEDGETAFSGTRITRKGSERIVRYAFELAKSTGRKKVTAVHKANIIKSTSGLFLKVARDVAAQYPEIEFQEMIVDNTCMQLVMRPEQFDIIVTTNLFGDIISDLCAGLVGGLGLAPGANIGLDAAIFEAVHGSAPDIAGQGKANPCALLLGAAQMLDHIGQPQNAERLREAIVATLEAKDSLTPDLGGTGNTMGFAKAIASRL

SEQ ID NO: 5537 - protein, 474 aa, Aspergillus niger
MASTLRLGTSALRSTSIAAKPVVQSAAFNGLRCYSTGKAKSLKETFAEKLPAEIEKVKKLRKEHGSKVIGEVTLDQAYGGARGVKCLVWEGSVLDSEEGIRFRGRTIPECQELLPKAPGGQEPLPEGLFWLLLTGEIPTEQQVRDLSAEWAARSDLPKFIEELIDRCPSTLHPMSQFSLAVTALEHESAFAKAYAKGINKKDYWNYTFEDSMDLIAKLPTIAAKIYRNVFKDGKVAPIQKDKDYSYNLANQLGYGDNNDFVELMRLYLTIHSDHEGGNVSAHTTHLVGSALSSPMLSLAAGLNGLAGPLHGLANQEVLNWLTKMKAAIGNDLSDEAIKNYLWSTLNAGQVVPGYGHAVLRKTDPRYVSQREFALRKLPDDPMFKLVSQVYKIAPGVLTEHGKTKNPYPNVDAHSGVLLQYYGLTEANYYTVLFGVSRALGVLPQLIIDRALGAPIERPKSYSTEAFAKLVGAKL

SEQ ID NO: 5538 - protein, 397 aa, Candidatus Rickettsia tarasevichiae
PILKASIGEDVIDISRVSSEADCFTYDPGFMSTASCRSTITYIDGDKGILRHRGYDIKDLAEKSDFLEVAYLLIYGELPSSEQYNNFTKKVAVHSLMNERLHYLFQTFCNSSHPMAIMLAAVGSLSAFYPDLLKFKEADYELTAIRMIAKIPTIAAMSYKYSIGQPFIYPDNSLDFTENFLRMMFATPCTKYEVNPVIKNALNKIFILHADHEQNASTSTVRIAGSSGANPFACISTGIASLWGPAHGGANEAVINMLKEIGSSENIPKYIAKAKDKDDPFRLMGFGHRVYKNYDPRAAVLKETCKEVLKELGQLENNPLLQIAIELEASALKDEYFIERKLYPNVDFYSGIIYKAMGIPSQMFTVLFAIARTVGWMAQWKEMHEDPEQKISRPRQL

SEQ ID NO: 5539 - protein, 197 aa, Brassica napus
MSASRFIKCVTVGDGAVGKTCLLISYTSNTFPTDYVPTVFDNFSANVVVNGATVNLGLWDTAGQEDYNRLRPLSYRGADVFILAFSLISKASYENVSKKWIPELKHYAPGVPVILVGSKLDLRDDKQFFVDHPGAVPITTAQGEELRKLIDAPTYIECSSKSQENVKAVFDAAIRVVLQPPKQKKKKSKAQKACSIQ

SEQ ID NO: 5540 - protein, 265 aa, Sulfolobus tokodaii str. 7
MIREVLRFINKSDLVIEVIDAREPDLTRSKKLEEYALNRERKILIVLNKADLIPREILEGWKKIFENEGKNAIYISATMHLGTKILRDKIKELLRGKEGTVIFVGYPKTGKSSIINALKGKHSASTSKIPMAYGYTKTIQKFKIDSKIYAWDSPGIIPPDGNELEKVIRGISVEKLEDPVKAGEMLLLRIIKYNPNAIKETYNITFNSPYEFFEKLALKRGWLYKSTKEPNIEEAAKAFIRDYHKGKIIYYVPPLSMNDDKDSSV

SEQ ID NO: 5541 - protein, 297 aa, Zea mays
MAAAAVTSNGGAVAANGPAPGRLASVYSEVQTSRLLHTLPLPSVLRSNFSVVDGPASSAAGNPDEIAKLLPNLVGQPSASLVPTAEPAATRPLKIGVVLSGGQAPGGHNVICGIFDYLQERAKGSTLYGFKGGPAGIMKCKYVELTSDFVYPYRNQGGFDMICSGRDKIETPEQFKQAEDTANKLDLDGLVVIGGDDSNTNACLLGEYFRSRNMKTRVIGCPKTIDGDLKCKGVPTSFGFDTACKIYSEMIGNVMTDARSTGKYYHFVRLMGRAASHITLECALQTHPNAALIGEEV

SEQ ID NO: 5542 - protein, 445 aa, Rubrobacter xylanophilus DSM 9941
MTQEPQGRSDGAASTVQKDGSLSVTDNRTGRSYEIEIKDGTVRSMDFRQIKVDEDDFGLMTYDPGYTNTASCRSAITYIDGERGILQHRGIPIEELCEHSTYLEVAYLLIHGHLPTEEELSQWVYDITHHTYVHENIKSFMDGFRHDAHPMGILLASVGALSTFYPEASDIDDEEQRNMAAIRLIAKMPTIAAFAYRHSLGLPYVYPDNDLSYTGNFLSMLFKMAEPKYEPDPRLEKALDVLFILHADHEQNASTSAVRTVGSTRADPYTAVAAGVAALYGPLHGGANVAVLKMLQRIGSVKNIPDFLETVKQGKERLMGFGHRVYKNYDPRARIIKSHVDEVLEATGKESPWLDIAVELEKRALDDEYFTSRKLYPNVDFYSGLIYEALGIPTEAFTVMFAIPRTSGWIAQWMEMLRDPELKIARPRQIYTGPRDQHYVPMSER

SEQ ID NO: 5543 - protein, 461 aa, Mycobacterium bovis AF2122/97
MATATTQRPLKGPAKRMSTWTMTREAITIGFDAGDGFLGRLRGSDITRFRCAGRRFVSISHPDYVDHVLHEARLKYVKSDEYGPIRATAGLNLLTDEGDSWARHRGALNSTFARRHLRGLVGLMIDPIADVTAALVPGAQFDMHQSMVETTLRVVANALFSQDFGPLVQSMHDLATRGLRRAEKLERLGLWGLMPRTVYDTLIWCIYSGVHLPPPLREMQEITLTLDRAINSVIDRRLAEPTNSADLLNVLLSADGGIWPRQRVRDEALTFMLAGHETTANAMSWFWYLMALNPQARDHMLTELDDVLGMRRPTADDLGKLAWTTACLQESQRYFSSVWIIAREAVDDDIIDGHRIRRGTTVVIPIHHIHHDPRWWPDPDRFDPGRFLRCPTDRPRCAYLPFGGGRRICIGQSFALMEMVLMAAIMSQHFTFDLAPGYHVELEATLTLRPKHGVHVIGRRR

SEQ ID NO: 5544 - protein, 141 aa, Triticum aestivum
  misc_feature (57)..(57): Xaa can be any naturally occurring amino acid
  misc_feature (85)..(86): Xaa can be any naturally occurring amino acid
  misc_feature (88)..(88): Xaa can be any naturally occurring amino acid
  misc_feature (90)..(90): Xaa can be any naturally occurring amino acid
  misc_feature (102)..(103): Xaa can be any naturally occurring amino acid
  misc_feature (107)..(107): Xaa can be any naturally occurring amino acid
  misc_feature (118)..(119): Xaa can be any naturally occurring amino acid
  misc_feature (124)..(125): Xaa can be any naturally occurring amino acid
  misc_feature (132)..(132): Xaa can be any naturally occurring amino acid
  misc_feature (135)..(135): Xaa can be any naturally occurring amino acid
MAPAVMASSATTVAPFQGLKSTAGLPVGRRSSGSLSSVSNGGRIRCMQVWPIEGIKXFETLSYLPPLSTGGLLKQVDYLDSLKVXXCXRXNKVGSSPVEHNXXPGYXDGRYWDKLELXXFRVEXXTQGAEQXEEXKKDTLP

SEQ ID NO: 5545 - protein, 494 aa, Brassica napus
MGSASKEYEFLSEIGLSSSHNLGNYVGGKWLGNGPLVSTLNPANNQVLPIAQVVEASLEDYEIGLKACEEAAKTWMQVPAPKRGDIVRQIGDALRSKLDYLGRLLSLEMGKILAEGIGEVQEVIDMCDFAVGLSRQLNGSVIPSERPNHMMLEMWNPLGIVGVITAFNFPCAVLGWNACIALVCGNCVVWKGAPTTPLITIAMTKLVAEVLEKNHLPGAIFTAMCGGAEIGEAIAKDTRIPLVSFTGSSKVGLTVQQTVSARSGKTLLELSGNNAIIVMDDADIQLAARSVLFAAVGTAGQRCTTCRRLLLHESVYDKVLEQLLTSYKQVKIGDPLEKGTLLGPLHTPESKKNFEKGIEVIKSQGGKVLTGGKAVEGEGNFVEPTIIEISSDAAVVKEELFAPVLYALKFKTFEEAVAINNSVPQGLSSSIFTRSPDNIFKWIGPMGSDCGIVNVNIPTNGAEIGGAFGGEKATGGGREAGSDSWKQYMRRSTW

SEQ ID NO: 5546 - protein, 443 aa, Arabidopsis thaliana
MEQQLKTDGLNLSIRDAVKEDRISELPEDLLLQILSDIPTENVIATSVLSKRWRSLWKMVPNLTFDFTFDPKYHQTFSENLYRSLTSHEASVLESLQLNFTRGIDGLNIGMWIATAYVRHVRKLVLVSFGDVRDKRARFRSALFNFNDTLDILEIQDYILLDLPSPVCLKSLRELRLYEVHFKDEASVCNLLCGCPSLEVLSVHRERNVDVETFTIVVPSLQRLTIYDFCIGGGKGGYVINAPSLKYLNIVGFEGLDFCLIENAPELVEAEISDVSHIANENILESLTSVKRLSLESPIKIKFPTGKVFDQLVYLDVLTKEREWWNLLSRMLESSPKLQILKLTGLSCIEKGLDGQNWNPPKCVPECLLFHLEKFLWTGYEWQRGDEKEVATYILENARLLKKATFSTKRIDLENLEKRREMLNELASVARASDSCHLVFHSI

SEQ ID NO: 5547 - protein, 186 aa, Pyrococcus abyssi GE5
MFLGEFSIMRYLVPLLVFMVLGMGCLGGGGEEMVKVSSVFGNDEFIPAKYTCEGIDVNPPLRIEGISENAKSLVIIVDDPDAPLGTFTHWIAWNIPPVEEIPEGIPKQGEVEKPIHMIQGRNDFGRIGYNGPCPPRGHGVHHYHFKVYVLDTTLNLRPGATREELEKAMEGHIIQFGELVGLYERK

SEQ ID NO: 5548 - protein, 235 aa, Streptochaeta angustifolia
EMRRIENKISRQVTFAERRNGLPKKAYELSLLCDAEVALIIFSSGRLFEFSSASCMYRTLERYRTCNYRSHEAAAPIETESNYQEYLKLKTRVEFLQTTQRNLPGEDLGPLNMKELEQLENQIESSLKNIRSTKNQTLLDQLFDLRHKQQQLQDLNKDLRRKLQEVGGHDNALQVWEDGGPSGSAGHEHLQGLLQPSEIDPSLQIGYHQAYLDQLNNGQIAQYPNGHLPSSAPWI

SEQ ID NO: 5549 - protein, 447 aa, Arabidopsis thaliana
MEQKCKIGGEGLRNRGLVNEEDRISELPEALLLLILSSLPTETVIATSVLSKQWKSLWKLVPNLKFDSKYHYHYTFSDNVFRSLISHKAPVLDSLHLKVEDKDDALDVGILIGIAFSRHMRKFVLKITLLEESFVRFPSAWCSCNDTLEILELKYCILLDFPSLVCLKSLRKLYLYHVRFNDEESVCNLLCGCPSLEDLVVHRHSTTDVESYTIAVPSLQRLTIYDDYYGEGVGGYVINAPSLKYLNIDGFNGLEFCLIEKAPELVEAKISAVFEIANENIMDSLTSAKCLSLHLAPFKIKYPTGKIFYQLLSLELRAYSYEWWNLLWFMLDSSPKLQILKLVDPYQFPKEDCSVGWEWSRPKCVPECLLFHLETFVWTRYEWQREDEKAVATYILKNARCLKKATLSTKPIGSEELEKLGKRREMLNELATQASPSNSCNLVFESE

SEQ ID NO: 5550 - protein, 286 aa, Burkholderia cepacia R18194
MDASEFSKFLKAALPPQATAGAALTVTEVEIPGYAQDIVLRLYRRPDKTGLPVVLYFHGGGFVRGSLEDADFAARFLAERLPALVVSVDYSLAPAFPFPAAPEDAYRAAVWAATRARAFGGNPKKIGVAGHDAGGQLANCLAFIARDRGEVQIVAQALFGPMLDPSMTRIGDADRLASDITPRECAACYRAYLPQAAQRMHPYAAPLESVRLAGLPPTLVVTAQNDVLHVEAEKYASCLISSGVLTQVIRYPDITHAALATHEAAFEEAVRFFQCRFQARQPNRSE

SEQ ID NO: 5551 - protein, 271 aa, Neurospora crassa
MSVVSLLGVNVMNNPAKFTDKYLFEITFECLEHLEKDLEWKLTYVGSATSDNYDQELDSLLVGPIPVGVNKFIFEAEPPDTKRIPIDELLGVTVILLTCAYDGREFVRVGYYVNNEYESEELINDPPPKPVIEKIRRNVLAEKPRVTRFAIKWDSEASAPPEFPPEQPEADEVADEEEYGADELAEQSSIADPAVNGGMEVEGQPNGAIVIEEDEMSEDGSVDLENESEDELDGEGDAEGELEQGQDEDIEMGDEMEIDDHPKQQGMAMAQ

SEQ ID NO: 5552 - protein, 222 aa, Chasmanthium latifolium
ELRRIENKISRQETFAKRRNGLLKKAYELSVLCDAEVAHIIFSSRGRLYEFSTSSCIYKTLERYRSCSYASEASAPMEAELSNYQGYLKLKTRVEFLLTTQRNLLGEDLGPLSAKELEQFENQVEISLKHIRSTKSRQLLDQLFELKRKEQQLQDANKDLRRKIQDTSGENMLRMTCKDIGSSGSSSGHARDAKHQELPHSGVCDPSLRIGYQAYMDQLNNE

SEQ ID NO: 5553 - protein, 221 aa, Pennisetum glaucum
  misc_feature (12)..(12): Xaa can be any naturally occurring amino acid
  misc_feature (202)..(202): Xaa can be any naturally occurring amino acid
EMRRLENKISRXVTSAKRRNGLLKKAYEVAVLCDAEVALIIFSSRGRLFEFSTSSCMYETLEQYRSCNFTSEASSAPIEAELSNYEEYLKLKTRIEFLQTTQRNLLGEDLGPLSTKELEQLENQIEISLKHIRSSKNQQMLDQLFELKRKEQQLQDSNKDLRKKIQETSEENVLRPTFQDLGACGSSGHPRDANQEYLRQLXCDPTLRIGYQSYIDHLSNE

SEQ ID NO: 5554 - protein, 203 aa, Solanum demissum
MDILGNLYIDPLPLVIPTTTSSTTFDNNSNEKVMLLLASKIPKRRGDRKKFHETRHPVYRGVRWKNFEKWVSEVRVPAKKSRIWLGTFPNAEMAAKAHDVAVMALKGRSACLNFADSTWRLPVPASAAVKDIQKAAAEAAEAFRVSESLERENSEEVVINNDDHYVVDSGWRLVIPASAVARDIQKAVAEAFCPSESSKGEYF

SEQ ID NO: 5555 - protein, 354 aa, Bacillus cereus ATCC 14579
MEKRIVCLAGDGVGPEVMESAKEVLHMVERLYGHHFHLQDEYFGGVAIDLTGQPLPQRTLAACLASDAVLLGAVGGPRWDSAKERPEKGLLALRKGLGVFANVRPVTVESATAHLSPLKNADEIDFVVVRELTGGIYFSYPKERTEEVATDTLTYHRHEIERIVSYAFQLANKRKKKVTSIDKANVLESSKLWRTVTEEVALRYPNVEVEHILVDAAAMELIRNPGRFDVIVTENLFGDILSDEASVLAGSLGMLPSASHAEKGPSLYEPIHGSAPDIAGKNKANPIAMMRSVAMMLGQSFGLTREGYAIEEAVSAVLKSGKCTADIGGTETTTSFTKAVIQEMEEQALVGRGR

SEQ ID NO: 5556 - protein, 182 aa, Zea mays
  misc_feature (33)..(33): Xaa can be any naturally occurring amino acid
PDDGAARAGPSRRTGYVDFLSRVNRVEGPATQXDAPHPWLNPSSPRATSPLERRHQGHARDGIDGPMLVYPMLKSKWDPNTSVALPEGEVFYLVALLRFCRSGGPAVDELVAQNGAILRACRANGYDYKAYFPSYRGEADWARHFGAARWRRFVDRKARYDPLAILAPGQKIFPRVPASVAV

SEQ ID NO: 5557 - protein, 399 aa, Halobacterium sp. NRC-1
MHSLDLIDMGAIPDDRVMSDLEGDVKAIVPTHGHLDHIGAISKLAHRYDAPIVGSPFTIELVKGEIESEQKFGVENDLVKMEAGGTMEIGDRCELEFVHVTHSIIDAINPVLHTPEGAVVYGLDKRMDHDPVLEDPIDMERFREIGREGEGVLCYIEDCTNAGKKGRTPSESTARRHLKDVLTSVADYDGGIVATTFSSHISRVSSLVEFAKEIGREPILLGRSMERYSGTAERMGRVNFPDDLGMFGHRKSVDRAFKRVMNEGKENFLPIVTGHQGEPQAMLTRMGRGETPYDIEDGDKIIFSASVIPEPTNKGQRYQSEQLLRMQGARIYDDIHVSGHLREEGHYQMLDALQPQHLIPAHQDMKGMAPYAKLAKSQGYKIGRDLHMTENGNTIQLVE

SEQ ID NO: 5558 - protein, 317 aa, Glycine max
MAGLVVSSQCFLKLLLVVSVFHVSFAARRLNELVQDQSQLLHYHNGPLLYGKIAVNLIWYGNFKPSQKAIITDFVTSLSSPASQSSQPSVATWWKTTEKYYHLSPRKASLSLSLGDQILDETYSLGKSLTGKNLVQLASKGGQRNSINVVLTSADVAVEGFCMSRCGTHGSSASHLKKNSKSYKFAYIWVGNSETQCPGQCAWPFHQPIYGPQSPPLVAPNNDVGLDGMVINLASLLAGTATNPFGNGYFQGPAEAPLEAASACPGVYGKGAYPGYAGDLLVDSTTGASYNVKGANGRKYLVPALYDPSTSSCSTPV

SEQ ID NO: 5559 - protein, 394 aa, Corynebacterium glutamicum ATCC 13032
MTSTFSPTEKEKTMSDSQVRKGLNGVISDYTSISKVMPESNSLTYRGYAVEDLVENCSFEEVIYLLWFGELPTTEQLRTFNTTGRSYRSLDAGLISLIHSLPNTCHPMDVLRTAVSYMGTFDPDPFTRDADHIRSIGHNLLAQLPMVVAMDIRRRSGEEIIAPDHNKGIASNFLSMVFGNDDGSVANSADDIRDFERSLILYAEHSFNASTFSARVISSTRSDTYSAITGAIGALKGPLHGGANEFVMHTMLDIDDPNNAADWMGKALDRKERIMGFGHRVYKNGDSRVPSMEKSMRSLAARHRGQKWVHMYESMQEVMEARTGIKPNLDFPAGPAYYMLGFPVDFFTPLFVLARVSGWTAHIVEQFENNALIRPLSAYNGVEEREVVPISERT

SEQ ID NO: 5560 - protein, 416 aa, Salmonella typhimurium LT2
MESKVVVPVEGKKITLQNGKLNVPENPIIPFIEGDGIGVDVTPAMLKVVDAAVEKAYKGERKISWMEIYTGEKSTQVYGQDVWLPAETLDLIRDYRVAIKGPLTTPVGGGIRSLNVALRQELDLYVCLRPVRYYQGTPSPVKHPELTDMVIFRENSEDIYAGIEWKADSADAEKVIKFLREEMGVKKIRFPEHCGIGIKPCSEEGTKRLVRAAIEYAITNDRDSVTLVHKGNIMKFTEGAFKDWGYQLARDEFGGELIDGGPWLKIKNPNTGKEIVVKDVIADAFLQQILLRPAEYDVIACMNLNGDYISDALAAQVGGIGIAPGANIGDECALFEATHGTAPKYAGQDKVNPGSIILSAEMMLRHMQWFEAADLIVKGMEGAIAAKTVTYDFERLMEGAKLLKCSEFGDAIIANM

SEQ ID NO: 5561 - protein, 146 aa, Triticum aestivum
  misc_feature (139)..(139): Xaa can be any naturally occurring amino acid
  misc_feature (141)..(141): Xaa can be any naturally occurring amino acid
  misc_feature (143)..(143): Xaa can be any naturally occurring amino acid
MAPTVMASSATSVAPFQGLKSTAGLPVSRRSNGASLGSVSNGGRIRCMQVWPIEGIKKFETLSYLPPLSTEALLKQVDYLIRSKWVPCLEFSKVGFIFREHNASPGYYDGRYWTMWKLPMFGCTDATQVINEVEEVKKXNXDXMSE

SEQ ID NO: 5562 - protein, 295 aa, Triticum aestivum subsp. spelta
MKTLLILTILAMAITIGTANMQVDPSSQVQWPQQQPVPQPHQPFSQQPQQTFPQPQQTFPHQPQQQFPQPQQPQQQFLQPQQPFPQQPQQPYPQQPQQPFPQTQQPQQLFPQSQQPQQQFSQPQQQFPQPQQPQQSFPQQQPPFIQPSLQQQVNPCKNFLLQQCKPVSLVSSLWSMIWPQSDCQVMRQQCCQQLAQIPQQLQCAAIHTVIHSIIMQQEQQQGMHILLPLYQQQQVGQGTLVQGQGIIQPQQPAQLEAIRSLVLQTLPTMCNVYVPPECSIIKAPFSSVVAGIGGQ

SEQ ID NO: 5563 - protein, 387 aa, Oryza sativa (japonica cultivar-group)
MEGGGAKDGSAAAAQTRGSGDDGSHKPLPPCCLKAKAAAAESEAKCHATVVSGWFTEPRSHSGKTSKVQYFNNPMWPGEAHSLKVENILYQGKSPYQEILVFESSTYGNVLVLDGIVQLTEKDECAYQEMVTHLPLCSIPSPKSVLVVGGGDGGVLREIARHASVENIDICEIDQLVIDVCKDFFPQLSVGFKDPRVQLHVGDAVDFLRNAPEGKYDAIIVDSSDPIGPAQELVEKPFFQTIARALKPGGVLCNQAESMWLHTHLIQDMLSICRETFKGAVHYAWTSVPTYPSGVIGFLLCAKEGPAVNFLSPVNPIEKLEGAMEAGREIRFYNSEVHRAAFVLPTFVRRELESHNTCAEKDKSETKPVAKPKKMKIMPNSAIPTAS

SEQ ID NO: 5564 - protein, 107 aa, Glycine max
  misc_feature (65)..(65): Xaa can be any naturally occurring amino acid
MDSPSRPSVIIVGAGISGIAAAKVLAENGIEDLVILEASDRVGGRIRKESFGGVSVELGAGWIAXVGGPQPNPVWELGVQFGLRTCFFDYSNARYNIYDRSGNIIPS

SEQ ID NO: 5565 - protein, 507 aa, Lolium rigidum
MNLEVAFLHEYASPRALVVAVVLVLVAVHLARSTSRAERLRRKLPCPRFTLPVIGHLHLIGSLPHVGLRDLARKHGPDVMLLRLGAVPTLIVSSPSAARAVLRTHDHVFASRPDTVVGDILFVGSTNVGHSPYGEYWRQVRKIITTHVLTAKKIRANLPYREQEARLALASVREAAAAGTAVDLTHLFSHFAHDMVSQAVAGRIHREDRWGKLFHDLFVGNGQLLGGFNLDDCFPSLARLGIGSANIAKQRKRWDDLLDEVIDRHTSTPMEKGDEPDFIDVMLSVQDEYKLTRNNIKSILMDMFQAGTDTTFIWLDYAMAELARAPQVMAKLQAEVRRCSTTNQLLTQEDLSSMSYLKAVMKETMRLHPPGPLLLPHASIADCEVEGYVVPAGTRVIINVWAIGRHASSWERAEEFVPERFLEGSVDANSDFYGNDFRLLPFGSGRRMCPGINFATLTFEIILANLIYHFDWELPEGSPGVDMTEAFGMDVHRKENLLLVPRVAKIV

SEQ ID NO: 5566 - protein, 500 aa, Mesorhizobium sp. BNC1
MELQDYAQHIGGEAVAAADGETYITHNPANGRPWGRFPAGKSADVARAVAAAMEALRGSWGSMAPTRRGRLLIEWARAISVNAEKIARLETAQNGKIFRDCLNQARDLENWLYYYGGQADKIEGTVVPLLRQSILNYTLREPLGVIGIITPWNSPASLTMSSAAPALAAGNAIVIKPSEVTPASILEIARLAEEAGIPKGVINVVTGGRNAGEALVDHPDIAKIAFTGSVEAGRAIAERAGKRLIGCTLELGGKSPNIVFPDADLARAEAGVLGGIFASTGQTCVAGSRAYVHESLFDSFVERLATRARQIVLGDPMDPRTQMGPVSTELQLQKDERLVAEALSEGAVKIAGGERVSPPGCEDGYFYAPTVLTKLNPAASILKTEVFGPVLSVLPFKSEDDVVAMANDSPFGLAAGFWTRDFARAHRLARRLEAGTVWINMYRAFAFNSPMNGHKQSGIGWQNGSEAIFQYLKTKSVWCETDEDYGDMFARAQPASTGRE

SEQ ID NO: 5567 - protein, 564 aa, Zea mays
  misc_feature (515)..(515): Xaa can be any naturally occurring amino acid
MASSHIILPKEEEEEAAAAVAEAGLGAAVEADHDHRRYQEQAPGKAALPFSATCVRISRDSYPNLRALRNASTMSLHDDDAAFVKLEEGDYGYVLDDVPHLTDYLPDLPTFPNPLQDHPAYSTVKQYFVNADDTVPEKVVVQKNSPRGVHFRRAGPRQRVYFESEEAKACIVTCGGLCPGLNTVIRELVCGLSHMYNVSNVFGIQNGYKGFYSSNYLPMTPKSVNDIHKRGGTVLGTSRGGHDTKKIVDNIQDRGINQVFIIGGDGTQKGAYEIYKEIRRRGLQVAVAGIPKTIDNDIAVIDKSFGFDSAVEEAQRAINAAHVEASSAENGIGLVKLMGRYSGFIAMYATLASRDVDCCLIPESPFYLEGEGGLFEYIDRRLKENNHMVIVVAEGAGQDLIAQSIPAADQQDASGNKLLLDVGLWLTHKIKDYCKSKKMEMTIKYIDPTYMIRAIPSNASDNVYCTLLAHSAIHGAMAGYSFTVGMVNGRHAYIPFHRVTSTRNKVRITDRMWAXLLSSTNQPSFLSQKDIDAAREADKAANRMKSREDVSKKQSTPVLANGEK

SEQ ID NO: 5568 - protein, 246 aa, Brassica napus
MNIAHTIFGVFGNATALFLFLAPSITFKRIIKNKSTEQFSGIPYPMTLLNCLLSAWYGLPFVSKDNTLVSTINGTGALIERVYVLIFLFYAPKKEKAKIFGVFTAVLAVFATVALVSLFALHGNARKLFCGIAATVFSIIMYASPLSIMRLVIKTKSVEYMPFFLSLFVFLCGTSWFIYGLIGRDPFVAIPNGFGCALGTLQLILSIIYCGNKGEKSAEKDAKSLEMKGEEKKQNVVNGKQQEQQV

SEQ ID NO: 5569 - protein, 453 aa, Escherichia coli CFT073
MSFDLIIKNGTVILENEARVVDIAVKDGKIAAIGQDLGDAKDVMDASGLVVSPGMVDAHTHISEPGRSHWEGYETGTRAAAKGGITTMIEMPLNQLPATVDRASIELKFDAAKGKLTIDAAQLGGLVSYNIDRLHELDEVGVVGFKCFVATCGDRGIDNDFRDVNDWQFFKGAQKLGELGQPVLVHCENALICDALGEEAKREGRVTAHDYVASRPVFTEVEAIRRVLYLAKVAGCRLHVCHVSSPEGVEEVTRARQEGQDVTCESCPHYFVLDTDQFEEIGTLAKCSPPIRDLENQKGMWEKLFNGEIDCLVSDHSPCPPEMKAGNIMKAWGGIAGLQSCMDVMFDEAVQKRGMSLPMFGKLMATNAADIFGLQQKGRIAPGKDADFVFIQPNSSYVLTNDDLEYRHKVSPYVGRTIGARITKTILRGDVIYDIEQGFPVAPKGQFILKHQQ

SEQ ID NO: 5570 - protein, 430 aa, Mycobacterium avium subsp. paratuberculosis str. k10
MSVLLRGVRLYGEGDRVDVLVDDGQIADIGAGLDIPDTADVIDATGQVLLPGFVDLHTHLREPGREYAEDIETGSAAAALGGYTAVFAMANTNPVADSPVVTDHVWHRGQQVGLVDVHPVGAVTMGLAGKELTEMGMMAAGAAQVRMFSDDGVCVHDPLVMRRALEYATGLGVLIAQHAEEPRLTVGAVAHEGPTAARLGLAGWPRAAEESIVARDALLARDAGARVHICHASTAGTVEIVKWAKQQGISITAEVTPHHLMLDDSRLASYDGRNRVNPPLREAADAAALRRALADGVIDCVATDHAPHAEHEKCVEFSAARPGMLGLQTALSIVVHTMVRPGLLTWRDIAKVMSENPARIANLPDHGRPLEVGEPANLTVVDPDASWTVAGSDLASRSANTPYEAMTLPATVTATLLRGKVTARDGKCPA

SEQ ID NO: 5571 - protein, 162 aa, Zea mays
  misc_feature (7)..(7): Xaa can be any naturally occurring amino acid
QVIVVTXGERILGLGDLGCQGMGIPVGKLALYTALGGVRPSACLPITIDVGTNNEDLLKDEFYIGLKQRRATGQEYSEFLDEFMAAVRQNYGQKVLVQFEDFANHNAFTLLEKYRTNHLVFNDDIQGTAAVVLAGIIAALKSVGGTLADHTFLFFSASYTIK

SEQ ID NO: 5572 - protein, 510 aa, Glycine max
  misc_feature (368)..(368): Xaa can be any naturally occurring amino acid
MPSFMAFLSHPYFFAALSASLTLLVVQLLFRKLNKRHSRKKYHPVAGTIFNQMLNFNRLHHYMTDLAAKHRTYRLLNPFRYEVYTTEPTNVEYILKTNFENYGKGLYNYHNLKDLLGDGIFTVDGEKWREQRKISSHEFSTKMLRDFSISIFRKNVVKLVNIVSEAATSNSTLEIQDLLMKSTLDSIFQVAFGTELDSMCGSSQEGKIFADAFDTSSALTLYRYVDVFWKIKKFLNIGSEAKLRKTTEILNEFVFKLINTRILQMQISKGDSGSKRGDILSRFLQVKEYDPTYLRDIILNFVIAGKDTTAATLSWFMYMPCKCPALPEMAAGVVGQAPYTTCLSSYNEFVYSVTDEALERMNYLHAAXTETLRLYPAVPVDAKICFSDDTLPDGYSVNKGDMVSYQPYAMGRMKFIWGDDAEDFRPERWLDENGIFKPESPFKFTAFQAGPRICLGKEFAYRQMKIFAAVLLGCFRFKLKDEKKNVTYKTMINLHIDEGLEIKAFNRYRD

SEQ ID NO: 5573 - protein, 248 aa, Triticum vavilovii
QQQPVPQPHQPFSQQPQQTFPQPQQTFPHQPQQQFPQPQQPQQQFLQPQQPFPQQPQQPYPQQPQQPFPQTQQPQQLFPQSQQPQQQFSQPQQQFPQPQQPQQSFPQQQPPFIQPSLQQQVNPCKNFLLQQCKPVSLVSSLWSMIWPQSDCQVMRQQCCQQLAQIPQQLQCAAIHTVIHSIIMQQEQQQGMHILLPLYQQQQVGQGTLVQGQGIIQPQQPAQLEAIRSLVLQTLPTMCNVYVPPECSI

SEQ ID NO: 5574 - protein, 274 aa, Triticum aestivum
SINRKGYDGAKADIWSCGVILFVLLAGYLPFQDKNLMNMYKKIGKAEFKCPSWFSSDIRRLLLRILDPNPSTRISIERIMEHPWFRKGLDAKLLRYNLQAKDAVPAADMTATSDSLSCSNSATEGKDQEAKKLANLNAFDIISLSTGLDLSGMFEDNDKKRESKFTSTNSASTIVSKIEDIAKCMRLKLVKKDGGMMRMESFKPGRKGVMSIDAEIFEVTPDFHLVELKKTNGDTIEYQKVLNQEMRPALKDIVWAWQGEQQPQPQPQPQQQPC

SEQ ID NO: 5575 - protein, 254 aa, Triticum vavilovii
QWPQQQPVPQPHQPFSQQPQQTFPQPQQTFPHQPQQQFPQPQQPQQQFLQPQQPFPQQPQQPYPQQPQQPFPQTQQPQQLFPQSQQPQQQFSQPQQQFPQPQQPQQSFPQQQPPFIQPSLQQQVNPCKNFLLQQCKPVSLVSSLWSMIWPQSDCQVMRQQCCQQLAQIPQQLQCAAIHTIIHSIIMQQEQQEQQQGMHILLPLYQQQQVGQGTLVQGQGIIQPQQPAQLEAIRSLVLQTLPTMCNVYVPPECSI

SEQ ID NO: 5576 - protein, 238 aa, Zea mays
PAVSRYQKKEFHDETCRKIKALHLYDCLRANKATSAWGVEARVPFLDKSFISVAMDIDPEWKMIKRDLGRIEKWVIRNAFDDEERPYLPKHILYRQKEQFSDGVGYSWIDGLKDHASQHVSDSMMMNAGFVYPENTPTTKEGYYYRMIFEKFFPKPAARSTVPGGPSVACSTAKAVEWDASWSKNLDPSGRAALGVHDAAYEDTAGETPASADPVSDKGLRPAIGESLGTPVASATAV

SEQ ID NO: 5577 - protein, 876 aa, Zea mays
MDLLSTLLRRLCLCPPLAGITPARRRSLSDDDDDSAHAHAHTHPHHHHLRGRLHRRPRRRHEPQPHGHLLLPTSDPYAAVVVAGPHETTVARTYVFRNSEAPRWEASFLLPLAHAATGLEFHVKDADPFGSDLIGVAWLPAAAVLASAAAPIESQWLDLARPDARGPPAPGGGSAIRVSAAFVPAAASRGRSGVGVPAYFPLRRGCDVRLYQDAHVAAGELEGVGVVPGFLPGRCWEDLCMAVLGAQRLVYVAGWSVHTTVRLTREAMSPEMAAKVAELEELGGEPVEHMSLGELLKYKSQEGVRVLLLVWDDRTSHNNFFVKMLFGRSIVLQLCMAWVEKLSATSAAAAVQVVGTLYTHHQKCVLVDTPASESTRRITAFLGGLDLCAGRYDTPSHRLFRDLQTVFHGDVYNPTFGGDVNGPRQPWHDLHCRLDGPAAYDILKNFEQRWRKATKLREMFGGKAAHRKDDALLKLERIPWILSPTKPKQQPPSAAADTGAADHDDDERDQPALHVLPDGDPERWHAQVFRSVDAGSVKRFPRPWERAEMARRHLVGDKNLAVERSIHAAYVAAIRSAERFVYVENQYFIGGSYAWPSYRNGGACNLVPMEIALKVASKVRAGEPFAAYVVLPMWPEGNPGSGPAQEILFWQNQTMEMMYSVVAAALEGKGGHPQEHLNFYCLGNREPAEDAGDGNKWAPADPLDDATTSSAAAHARRHRRFMVYVHSKGMIVDDEYVIIGSANINQRSLAGSRDTEIAVGAYQPDHTGACPRGKVHGYRMSLWEEHLGKEAVRRPEVLRPESPRCVKLVNRIARDNWRRYAADDDKLGPLQGHLLRYPVHVRADGRVEPLPGNELFPDVGGRVVGAPNNLPDYLTM

SEQ ID NO: 5578 - protein, 470 aa, Zea mays
  misc_feature (145)..(145): Xaa can be any naturally occurring amino acid
  misc_feature (161)..(161): Xaa can be any naturally occurring amino acid
  misc_feature (268)..(268): Xaa can be any naturally occurring amino acid
  misc_feature (386)..(386): Xaa can be any naturally occurring amino acid
MARSGREAEPGEEERKLVLGKYELGRLLGQGTFAKVYYARDLSAGAGTGHSCSVAIKVIDKARLRRTEGMVEQLRREISIMRMVRHPNVVGIREVLASRSRVFVVMEYARGGELFAKVARGRLDEDHARRYFQQLGSPAVGFCHXRGVAHRDLKPENLLLXDRRGRLKVTDLPGLGRACPSSCATTAWLHTQCGNPRVRRRPRCSGSAGYDGARADLWSCGVVLYVLLCGFLPFQHDNYVKLYQKIFKADYQVPPWVSGDARRLIARXLLVVDPAKRASIAEIMCTPWFRKGFVPPVLSPPVTPKKQQLDEGAALFDNDDDDNSNSNHSGATSPRSCNAFQLISSMSSGFDLSGLFESEQKTATVFTARAPAATVVEKLESVARRXGFEVTRGKGWKVRMEAKAEGTNGRLAATAEVLEVAVDVTVVEFVHDAGDALDFNKFCAVDVRPGLTEIVWAWQGDSPAAAVGTA

SEQ ID NO: 5579 - protein, 229 aa, Brassica napus
MLRSSFRLLYITRTNLLVRASPSSLSRLPSKFTSAKPLVCSHHQIPLSTTGAIHSSFEHSMAASSEPKSIYDFTVKDAKGNDVDLSIYKGKVLLIVNVASQCGLTNSNYTELAQLYQKYKDHGFEILAFPCNQFGNQEPGSNEEIVQFACTRFKAEYPIFDKVDVNGDKAAPIYKFLKSSKGGLFGDGIKWNFAKFLVDKDGNVVDRYAPTTSPLSIEKDLKKLLGVTA

SEQ ID NO: 5580 - protein, 57 aa, Zea mays
MAFTASDICKIIFAVLLPPLGVFLERGCGGDLCINILLTILGYIPGIIHALYIILKY

SEQ ID NO: 5581 - protein, 429 aa, Xylella fastidiosa Temecula1
MSDLDKVTLNAGETSLVLPVLKPTLGNGCVDIAKLTKETGLFTYDSGFTATASCKSAITYIDGEKGVLLYRGYPIEQLAEHSSFLEVAYLLMNGELPRKDEFAKFDDEITHHTMMHESLKNFLGGFHYDAHPMAMLAASVASLSAFYHDTLDLNDLEQRRLAAIRLIAKVPTLAAAAHRYSIGWPIRYPRNNLGYVERFLHMMFEVPSEPLQLNPVVIKALDLLFILHADHEQNASTSTVRLVGSTGANPYASVAAGITALWGPAHGGANEAVLKMLEEIGDAKNVDLVIAKAKTKDKNSPFRLMGFGHRVYKHFDPRAKIIREMAHTVLGELGVNDPLLEVALKLEEAALKDDYFVQRKLYPNVDFYSGIIYKAINIPLEMFTVMFAIARTAGWVSHWLEQQVDPEMKISRPRQIYTGHRERDYKDAR

SEQ ID NO: 5582 - protein, 495 aa, Staphylococcus aureus subsp. aureus Mu50
MAVNVRDYIAENYGLFINGEFVKGSSDETIEVTNPATGETLSHITRAKDKDVDHAVKVAQEAFESWSLTSKSERAQMLRDIGDKLMAQKDKIAMIETLNNGKPIRETTAIDIPFAARHFHYFASVIETEEGTVNDIDKDTMSIVRHEPIGVVGAVVAWNFPMLLAAWKIAPAIAAGNTIVIQPSSSTPLSLLEVAKIFQEVLPKGVVNILTGKGSESGNAIFNHDGVDKLSFTGSTDVGYQVAEAAAKHLVPATLELGGKSANIILDDANLDLAVEGIQLGILFNQGEVCSAGSRLLVHEKIYDQLVPRLQEAFSNIKVGDPQDEATQMGSQTGKDQLDKIQSYIDAAKESDAQILAGGHRLTENGLDKGFFFEPTLIAVPDNHHKLAQEEIFGPVLTVIKVKDDQEAIDIANDSEYGLAGGVFSQNITRALNIAKAVRTGRIWINTYNQVPEGAPFGGYKKSGIGRETYKGALSNYQQVKNIYIDTSNALKGLY

SEQ ID NO: 5583 - protein, 157 aa, Triticum aestivum
  misc_feature (8)..(8): Xaa can be any naturally occurring amino acid
AKKAAEEXSNTENNNASSSNSDSVMAEAEPASNAAAGDKKEQPKDDDDLLQQALAMSMEGGASGSAAVTDSAMAEAGAVDPDLALALQMSVQDANMSSDTDMSKVFEDRTFVSSILNSLPGVDPNDPSVKDLLASLHSQGEQEKKEDKSDKTEDEKN

SEQ ID NO: 5584 - protein, 447 aa, Arabidopsis thaliana
MSGSRRKATPASRTRVGNYEMGRTLGEGSFAKVKYAKNTVTGDQAAIKILDREKVFRHKMVEQLKREISTMKLIKHPNVVEIIEVMASKTKIYIVLELVNGGELFDKIAQQGRLKEDEARRYFQQLINAVDYCHSRGVYHRDLKPENLILDANGVLKVSDFGLSAFSRQVREDGLLHTACGTPNYVAPEVLSDKGYDGAAADVWSCGVILFVLMAGYLPFDEPNLMTLYKRICKAEFSCPPWFSQGAKRVIKRILEPNPITRISIAELLEDEWFKKGYKPPSFDQDDEDITIDDVDAAFSNSKECLVTEKKEKPVSMNAFELISSSSEFSLENLFEKQAQLVKKETRFTSQRSASEIMSKMEETAKPLGFNVRKDNYKIKMKGDKSGRKGQLSVATEVFEVAPSLHVVELRKTGGDTLEFHKFYKNFSSGLKDVVWNTDAAAEEQKQ

SEQ ID NO: 5585 - protein, 312 aa, Triticum aestivum
  misc_feature (42)..(43): Xaa can be any naturally occurring amino acid
MERDKVIREIGDASCGLAFWAHMIVSLVIGAGEKMKRKFYHXXECISLREVKALQKLNHPNIVQLKEVTMENHELFFIFEHMDCNLYDVIRERSAPFSEEEIRTFMLQILQGLVYMHNNGYFHRDLKPENLLVTNGIVKIADFGLAREVCSSPPYTDYVSTRWYRAPEVLLQASAYTPSIDMWAIGAILAELFTLSPLFPGETETDQLYKICAVLGTPDHSLWPEGMNLPRSSSFQFFQIPPRNLWELIPNASLEALDLIKQLCSWDPRRRPTAEQALQHPFFNVRKWVPRPLQDASYPKMNEPRATPRLEL

SEQ ID NO: 5586 - protein, 338 aa, Arabidopsis thaliana
MVLKAAFELGVIDTIAAAGNDTWLSPCEIACSLPTKPTNPEAPVLLDRMLSLLVSHSILKCRMIETGENGRTGKIERVYAAEPVCKYFLRDSDGTGSLVPLFMLLHTQVFFKTWTNLKDVILEGRDAFNSAHGMKIFEYINSDQPFAELFNRAMSEPSTMIMKKVLDVYRGFEDVNTLVDVGGGNGTVLGLVTSKYPHIKGVNFDLAQVLTQAPFYPGVEHVSGDMFVEVPKGDAVFMKWILHDWGDEDCIKILKNCWKSLPEKGKIIIVEFVTPKEPKGGDLSSNTVFAMDLLMLTQCSGGKERSLSQFENLAFASGFLRCEIICLAYSYSVIEFHK

SEQ ID NO: 5587 - protein, 72 aa, Glycine max
  misc_feature (34)..(34): Xaa can be any naturally occurring amino acid
MASSMISSPAGTTVNPAGAGMDAAWAGLNFMAAXHSKKTNSDIPSIASSGSRVHRMQVWPTTGMRKFETLYY

SEQ ID NO: 5588 - protein, 506 aa, Ruta graveolens
MDLLLLEKALLGLFAAAVVAIAVSKLRGKRFKLPPGPFGFPVFGNWLQVGDDLNQRKLANLSKKFGDVYLLRMGQRNLVVVSSPEMAKEVLHTQGVEFGSRTRNVVFDIFTGKGQDMVFTVYSEHWRKMRRIMTVPFFTNKVVQQQRFNWEDEAARVVEDVKKDPQAATTGIVLRRRLQLLMYNNMYRIMFDRRFESVDDPLFNKLKALNGERSRLAQSFEYNYGDFIPILRPFLRGYLKLVKEVKERRLKLFKDYFVEERKKLTSTKSMTEENFKCAIDHVLDAQQKGEINEDNVLYIVENINVAAIETTLWSIEWGIAELVNHPDIQKKLRAEIDRVLGPDHQITEPDTHKLPYLQAVIKETLRLRMAIPLLVPHMNLNDAKLAGYDIPAESKILVNAWWLANNPAHWKDPQVFRPERFLEEESGVEANGNDFRYIPFGVGRRSCPGIILALPILGITIGRMVQNFELLPPPGQSKIDTSEKGGQFSLFILNHSTIVLKPRSSV

SEQ ID NO: 5589 - protein, 754 aa, Zea mays
  misc_feature (117)..(117): Xaa can be any naturally occurring amino acid
FGHQLQTSEKRRVGGKLLLYDSCAHSSTVLGNLGGEEEESSGSQRTTHYSWLHGFLTSLCGGDPAMRIVVWFRRDLRVEDNPALAAAARAGGEVVPAYVWSPEEEGPYYPGRVSRWXWISQSLNHLDASLRRLGAGKLVTRRSADAAVALLQLVRDTGATHVYFNHLYDPISLVRDRRLKEMLAAEGIVVQSFNSDLLYEPWEVVDDEGQPFTMFDPFWNRCLSMPYDPPAPLLPPKRINSGDLSMCPSEDLIFEDESERGSNALLARAWTPGWQNADKALTAFLNGPLADYSVNRKKADSASTSLLSPHLHFGELSVRKVFHLVRMKQLVWSNEGNHAAEESCTLFLRSIGLREYSRYLSFNHPSSHERPLLAHLRFFPWVVDESYFKIWRQGRTGYPLVDAGMRELWATGWLHDRIRVVVASFFVKVLQLPWRWGMKYFWDTLLDADLESDALGWQYITGSLPDGRELDRIDNPQFEGYKFDPHGEYVRRWIPELARLPTEWIHHPWDAPVSVLQAAGIELGSNYPLPIVELDAAKGRLQAALSEMWQLEAASRATMNNGTEEGLGDSSEVLFPQELQMEVDRQPAPAEAAANVHVHVPMPARRRGDQMVPTMTTSSLNRAGTEVSADLVVANSEEEDTRAQVPFHAHLHLHPRAEAPPAARRTNNGARQHDVFQQRRNHRRDALLAPSASEASSSWTGREGAVVPVWSPPAASGHSDAFAADEADVSSRSYLGRHPQSHRLMNWSQLSQSS

SEQ ID NO: 5590 - protein, 308 aa, Arabidopsis thaliana
MAPGGSALKEVMESNSTGMDYEVKTAKVEVNNNKPTKPGSAGIGKYGIHSNNGVYELLECPVCTNLMYPPIHQCPNGHTLCSNCKLRVQNTCPTCRYELGNIRCLALEKVAESLEVPCRYQNLGCHDIFPYYSKLKHEQHCRFRPYTCPYAGSECSVTGDIPTLVVHLKDDHKVDMHDGCTFNHRYVKSNPHEVENATWMLTVFNCFGRQFCLHFEAFQLGMAPVYMAFLRFMGDENEAKKFSYSLEVGAHGRKLTWQGIPRSIRDSHRKVRDSQDGLIIPRNLALYFSGGDRQELKLRVTGRIWKEE

SEQ ID NO: 5591 - protein, 513 aa, Lolium rigidum
MVMEMEPSSATLFFLSVVTLVILVSLVSRKPSSKLRRPPGPRDLPFVGSLHHLLTSQPHVALRNLAKTHGPVMRLRLGQVEAVVVSSSAAAQEVLRDNDLSFASRPNLLATEIMCYGNLDVAFAPYGAYWRALKKLCVLELLSSRKVRQFKPVRDSETMSLIKEICAAGKGGKPVKLRSLLVKCTSSVTGKATFGERCDIDLREQFMAAMEVAQIHSSGFCVGDLFPSLGFLDVATGMRYQLWRARQQLDNVVDKIISDCEARREEKKSTPTGDEDLLSLMLRIRDEGGSDFPIETINIKAIIVDLFTAGTETTSSTAEFVMSELMRNPKVMKKAQEEVWRMMENKSPQDHENHMDELPYLRMVIKETMRLHPVVPLLLPRLCRESCHVGGFEITKGTRVIINAWALATSPENWNEPEEFRPERFEDSVVVNDKGTQFKLMPFGGGRRMCPGDGFALATLELMVARLLYYFEWSLPDGMRPDELDMDVKVGTTSRRRNELRVVASPCRIPIEI

SEQ ID NO: 5592 - protein, 556 aa, Zea mays
  misc_feature (94)..(94): Xaa can be any naturally occurring amino acid
  misc_feature (119)..(119): Xaa can be any naturally occurring amino acid
  misc_feature (127)..(127): Xaa can be any naturally occurring amino acid
  misc_feature (141)..(141): Xaa can be any naturally occurring amino acid
  misc_feature (177)..(177): Xaa can be any naturally occurring amino acid
  misc_feature (187)..(187): Xaa can be any naturally occurring amino acid
  misc_feature (221)..(221): Xaa can be any naturally occurring amino acid
MARRAASSLVSRCLLARAPAGAPPAAPSALRRTVPADGMHRLLPGVLQRFSTAAAVEEPITPSVQVNYTKLLINGNFVDSASGKTFPTLDPRTXGEVIAHVAEGDAEDINRAVAAARKXAFDEGPWXPKMTAYERSRILLXRFADLIEKHNDELAALETWDNGKPYEQAAQIEVPMXVARLMRYYAXGWADKIHGLIVPADGPHHVQILHEPIGVAGQIIXPWELPLLMFAWKVGPALACGNTLVLKTAEQTPLSALYISKLLHEAGLPEGVVNVVSGFGPTAGAALASHMDVDKIAFTGSTDTGKIILELAAKSNLKTVTLELGGKSPFIIMDDADVDHAVELAHFALFFNQGQCCCAGSRTFVHERVYDEFVEKAKARALKRVVGDPFRKGVEQGPQIDDEQFKKILRYIRYGVDGGATLVTGGDRLGDKGFYIQPTIFSDVQDGMKIAQEEIFGPVQSILKFKDLNEVIKRANASQYGLAAGVFTNSLDTANTLTRALRAGTVWVNCFDVFDAAIPFGGYKMSGIGREKGVDSLKNYLQVKAVVTPIKNAAWL

SEQ ID NO: 5593 - protein, 252 aa, Pinus taeda
MSCSVVGSMGMALEKSGGNAQHEKRDSLDFAETELKLGLPGVAADESRAHQKSCGKRSFSEAMESRSYTITDVDITRTGTPEDADKFHGPIVKEKQMALPANDPATTGSRPPPKAQIVGWPPVKDFRKVRTISTCDSLYVKVSMDGAPYLRKVNLKIYSTYHDLSSALENMFSCLLTMGKSRSHGLNESSLMDMPNGSGYVPTYEDKDGDWMLVGDVPWQMFVDSCQRMRIMKASEAIGLAPRTMEKCKKRN

SEQ ID NO: 5594 - protein, 376 aa, uncultured archaeon
MEERGISKHELKLFLKEQKQRDLTYRKVLSSMCTYPHEIAVYAHNLFLDSNLGDSGLFPGTKEIEDELIRMIGALLGNENAHGYISAGGTESNIQAIRAIRNRKRKEGLQQMNIIVPKTAHFSFDKIEDLLSLEVKKAGLDDELRVDVNLVEDLIDDNTISIVGIAGTTEFGQIDPIKELADLAHNSDIFLHVDAAFGGFVIPFLDAEYLFDFSLDAVSSISIDPHKMGLSTIPAGCILFRDVSYLADLAVNTPYLTTNEQCSLIGTRSGAPVAATYAVLKYLGRNGLRAIVDECMQLTRMLVHGAKEMGIYPVIEPVMNVVTLRFPDVERVAKALEARGWQVSTTRAPKALRLVIMPHVTEDTIEMFLNDLENAK

SEQ ID NO: 5595 - protein, 320 aa, Mycobacterium avium subsp. paratuberculosis str. k10
MPRLDNPADEKPGIDPILQKVLDAVPFRLSTEDGIDAARQRFRDLPRRPLHPELRVEDRTIPGPQGAIAVRIYWPPSHSESCPAPVVLYFHGGGFVIGDLDTHDGTARQHAVGAGAIVVSVDYRLAPEHPYPAAVEDAWAATLWAAENAAGLHGDPGRIAVAGDSAGGTLAAVTAQRARDRGGPPVRFQLLWYPSTMWDASLPSFAENATAPILDVKAVAEFSRWYAGDVDLSDPPADMAPGRATDLSNLPPAYIGVAGYDPLRDDGIRYGEPLAAAGVAAQVHNAETLVHGYLGYAGVVPAATAAMERGLAALRTALQG

SEQ ID NO: 5596 - protein, 192 aa, Triticum urartu
PQPQPFSQQPRQAFPQPQQTFPLQPQQVFPQPQQPQQQFPQPQQPQQPFPQPQQPQLPFPQQPFPQPQQPQQPFPQSQQPQQPFPQPQQQFPQPQQPQQSFPQQQQPLIQPYLQQQMNPCKNYLLQQCNPVSLVSSLVSMILPRSDCQVMQQQCCQQLAQIPRQLQCTAIHSVVHAIIMQQEQQGIQILRPL

SEQ ID NO: 5597 - protein, 174 aa, Pyrococcus abyssi GE5
MEGFTIWLTGPSGAGKTTLAVKLAKKLREMGYKVEILDGDTIRKTLYPNLGFSKEAREMHNRIVIYMAKLLTRNGVIAIVSLISPYKRIREYARKEIGRFMEVYVYAPLEVRIKRDPKGLYAKAIRGEIRGLTGYDGVYEEPENPEVKVDSSRMTPDEEAELVIRKAKELGYLP

SEQ ID NO: 5598 - protein, 480 aa, Listeria monocytogenes str. 1/2a F6854
MQIKNKAMLITYSDSLGENMEELSKVMETYFEDAIGGIHLLPFFPSTGDRGFAPSDYTTVDSDLGSWEMIEKLGEKYYLMFDFMINHISRESLFFQDFKKEHLNSKYKDMFIRINDFFPPGRPNEKDLDLIYKRKDKAPFQEVEFADGETELVWNTFGEEQIDLDVTAEVTKEFIRQTIKNMAAHGCSILRLDAFAYAIKKLDTNDFFVEPEIWDLLDEVKAEAAKYDMELLPEIHEHYSIQMKIANHDYYIYDFALPMVMLYSLYSGRVEHLAKWLEMSPMKQFTTLDTHDGIGVVDARDLLTDEELDYTSAELYKIGANVKKIYSSEKYNNLDIYQINSTYYSALGDDDKSYLLARVIQCFAPGIPQIYYVGLLAGKNDIDLLEETKEGRNINRHYYTIDEIKNEVKRPVVKALCNLLRFRNTSEAFDLEGSIEIETPSSNEIVIIRKNKTNKITATLKADLSTKTFQISENERNILI

SEQ ID NO: 5599 - protein, 296 aa, Zea mays
  misc_feature (290)..(290): Xaa can be any naturally occurring amino acid
MDRADPARGRLAVLSSHLRGAGAEEAAGLERSPVSAPAPGPRAGALAVVDGRTGKRHEVKVSEDGTVRATDFKKITTGKDDKGLKIYDPGYLNTAPVRSSICYIDGDEGILRYRGYPIEELAESSSFVEVAYLLMYGNLPTQSQLAGWEFAISQHSAVPQGLLDIIQSMPHDAHPMGVLASAMSTLSVFHPDANPALQGQDLYKSKQVRDKQIVRVLGKAPTIAAAAYLRLAGRPPVLPLNTLSYSENFLYMLDSLGDRTYKPNPRLARALDILFILHAEHEMNCSTAAXRHLASR

SEQ ID NO: 5600 - protein, 192 aa, Triticum urartu
PQPQPFSQQPQQVFPQPQQTFPLQPQQVFPQPQQPQQQFPQPQQPQQPFPQPQQPQLPFPQQPFPQPQQPQQPFPQSQQPQQPFPQPQQQFPQPQQPQQSFPQQQQPLIQPYLQQQMNPCKNYLLQQCNPVSLVSSLVSMILPRSDCQVMQQQCCQQLAQIPRQLQCTAIHSVVHAIIMQQEQQGIQILRPL

SEQ ID NO: 5601 - protein, 429 aa, Sinorhizobium meliloti
MSEKSATVTFGGKSADLPVRSGSIGPDVVDIGSLYKQTTMFTYDPGFTSTASCESKITYIDGDEGVLLHRGFPIEQLAEHGDFLEVCYLLLYGELPTKAQKADFDYRVTHHTMVHEQMSRFFTGFRRDAHPMAVMCGCVGALSAFYHDSTDITDPHQRMVASLRMIAKMPTIAAMAYKYHIGQPFVYPKNDLDYASNFLRMCFAVPCEEYVVNPVLARAMDRIFILHADHEQNASTSTVRLAGSSGANPFACIAAGIACLWGPAHGGANEAALNMLAEIGTVDRIPEYITKAKDKNDPFRLMGFGHRVYKNYDPRAKIMQKTTHEVLAELGHKDDPLLEVAMELERIALTDEYFIEKKLYPNIDFYSGITLKALGFPTTMFTVLFALARTVGWIAQWNEMIEDPEQRIGRPRQLYVGAPLRDYVPISKR

SEQ ID NO: 5602 - protein, 181 aa, Brassica napus
  misc_feature (166)..(166): Xaa can be any naturally occurring amino acid
MAKATSPIFLLLLLVILSSTLLSVKPNTTTIETTCKTTNYYRLCVSALKSDPRSPTADTKGLATIMVGFGMKSATATATYIAGNHTAAAANDTVLRKVLKDCSDKYALAADSLRLTVQDLDDEAYDYAYMHVLAAQDYPNVCRNIFRRAKGLVYPTEIRRREVSLXRICGVVSGILDRLAE

SEQ ID NO: 5603 - protein, 364 aa, Ganoderma applanatum
MFSKVFLSLVVLASSVAAAVPTVGRRATCANGKTTANDACCVWFDVLDDIQENLFHGGQCGEDAHESLRLTFHDAIAFSPALTAAGQFGGGGADGSIIAHSDVELTYPVNDGLDEIVEASRPFAIKHNVSFGDFIQFAGAVGVANCNGGPQLSFFAGRSNDSQPSPPNLVPLPSDTADTILSRFSDAGFDAVEVVWLLVSHTVGSQNTVDSSIPGAPFDSTPSDFDAQFFVETMLNGTLVPGNGLQDGEVLSPYPGEFRLQSDFALSRDSRTTCEWQKMIADRANMLEKFEITMLKMSLLGFDQSALTDCSDVIPTATGTVQDPFIPAGLTVDDLQPACSSSAFPTVTTVAGAVTSIPAVPLNS

SEQ ID NO: 5604 - protein, 254 aa, Hyacinthus orientalis
MGEEADRSGYDRLASDGDGDGSGGDGDDGRVLEWEIGLPSADDLTPLSQPLVPPELASAFSITPDPARTILDVHRASHSTMSSLRRHNLASSSSAMKSFSPFPSGDPTVLESDDQKDESRVRRSEAENSEDDQSARSLKRPRLVWTPQLHTRLLTWVAHLGIKTAVPKTIMQLRMSRGLTRENVASHLQKYRLYFEEDAGRCRTNGHRPAIRCSHRRRCLIVCTKICCQLLLRRWPMPYAVPTMIPRARVWECR

SEQ ID NO: 5605 - protein, 122 aa, Amborella trichopoda
MIQAQTYLNVADNSGARELMCIRIVGASNPRYAHIGDVIVAVIKEAVPNMPLERSEVIRAVIVRTCKELKRDNGIIIRYDDNAAVVIDPEGNPKGTRVFGSIAGELRHLNFTKIVSLAPEVF

SEQ ID NO: 5606 - protein, 332 aa, Glycine max
IRLEARGRLREETARLYFQQLISAVDFCHSRGVFHRDLKPENLLLDDDGNLKVTDFGLSTFSEHLRHDGLLHTTCGTPAYVAPEVIGKRGYDGAKADIWSCGVILYVLLAGFLPFQDENLVALYKKIYRGDFKCPPWFSSEARRLITKLLDPNPNTRITISKIMDSSWFKKPVPKNLVGKKREELNLEEKIKHQEQEVSTTMNAFHIISLSEGFDLSPLFEEKKREEKELRFATTRPASSVISRLEDLAKAVKFDVKKSETKVRLQGQENGRKGKLAIAADLYAVTPSFLVVEVKKDNGDTLEYNQFCSKELRPALKDIVWRTSPAENPTLA

SEQ ID NO: 5607 - protein, 212 aa, Schizosaccharomyces pombe
KARHLIKLYEAEGIGRERVLIKIASTYEGIQAAKQLEEEGIHCNLTLLFSFVQAVACAEANVTLISPFVGRILDFYKAKNNRDYTAQEDPGVVSVSNIFNYYKKFGYKTIVMGASFRNVGEIKELAGVDFLTISPALLEQLNNSTDAVPKKLDASKASSLNLEKVSYLTDEPKFRFDFNNDEMAVVKLSTGIAAFAKDADTLRTILKAKLEA

SEQ ID NO: 5608 - protein, 140 aa, Triticum aestivum
  misc_feature (69)..(69): Xaa can be any naturally occurring amino acid
  misc_feature (82)..(82): Xaa can be any naturally occurring amino acid
  misc_feature (92)..(92): Xaa can be any naturally occurring amino acid
  misc_feature (97)..(97): Xaa can be any naturally occurring amino acid
  misc_feature (118)..(118): Xaa can be any naturally occurring amino acid
  misc_feature (127)..(127): Xaa can be any naturally occurring amino acid
  misc_feature (130)..(130): Xaa can be any naturally occurring amino acid
MAPTVMASSATSVAPFQGLKSTAGLPVSRRSNGASLGSVSNGGRIRCMQVWPIEGIKNSETLSYLPPLXSTEASSKQVDYLXIRSKWVPCLXFSKLXHLPVSTTTPGYYDGRSGTMWXLPISGCTDXTMXNEVEESRRIP

SEQ ID NO: 5609 - protein, 107 aa, Bartonella capreoli
GGANEACLKMLQEIGSIEKIPEFIARAKDKNDPFRLMGFGHRVYKNYDPRAKLMQKTCHEVLKELNIKDDPLLDIAMELEKIALSDEYFIEKKLYPNVDFYSGITLK

SEQ ID NO: 5610 - protein, 167 aa, Streptococcus pyogenes MGAS8232
MPNLYDFTVKAQNGNDLSLAAYKEKVVLIVNTATKCGLTPQYQALQALYDTYHDKGFEVLDFPCNQFLNQAPGDAEEINHFCSLTYHTTFPRFAKIKVNGKDADPLFTWLKEEKSGPLGKRIEWNFTKFLIDQNGQVIKRYSSKTDPKLIEEDLKALLDKIQCYHHL

SEQ ID NO: 5611 - protein, 211 aa, Brassica napus
KDVTQATRAQGLEEDPRNYLTFFCLGNREVKKEGEYEPAERPDPDTDYMRAQEARRFMIYVHSKMMIVDDEYIIVGSANINQRSMDGARDSEIAMGGYQPHHLSHRQPARGQVHGFRMSLWYEHLGMLDETFLDPSSLECIEKVNRIADKYWNFYSSESLEHDLPGHLLRYPISVDNEGNISELPGFEFFPDTKARILGNKVDYLPPILTT

SEQ ID NO: 5612 - protein, 109 aa, Bartonella bovis
ANEACLKMLQEIGSTEKIPEFIERAKDKNDPFRLMGFGHRVYKNYDPRAKLMQKTCHEVLKELNIQDDPLLDIAMELEKIALNDEYFIEKKLYPNVDFYSGITLKALGF

SEQ ID NO: 5613 - protein, 133 aa, Glycine max
MEPMDIVGKAKEDASLPKATMTKIIKEMLPPDVRVARDAQDLLIECCVEFINLVSSESNEVCNKEERRTIAPEHVLKALGQDSLKGAKWSNRAEMTEEEALAEQQRMFAEARARMNGGAIQSKEPEADQSLES

SEQ ID NO: 5614 - protein, 499 aa, Mesorhizobium sp. BNC1
MNRFELPSSKLYIGGRWEEGSGAEIVSIFSGDGSVNRVIKGASRADGERAIERALKAQSDPAWRNLKPHERARFLHRIADGIETNAARIAFIQTRDTGKTLRETTALVASAAGTFRYFAGALESLDDTLTAPRGDYLSMSVHEPLGLVSAITPWNSPIASDAQKVAPALAAGNAVLLKPASWSPLVSLELARIVEAAGLPQGLFSVLPGAGREIGNLLVEHPAISRVSFTGGTATGRMLARQAAEKLMPISLELGGKSPTIVFADADIDLAIAGILFGVFSSSGQSCIAGSRLFVERSIYESFVDRLVAATKKLVVGDPFDERTQVAPLVHFDHRDAVAAQVAAAVEAGAEVLCGAAIPTGADYDRGAYYLPTILAGLENDDPICREEVFGPVLCVLPFDDEADVIAQSNANDYGLACGIWTRDFPKAWRTARAITTGTVWINTYKQFSISTPFGGEKDSGMDREKGREGIRAYMAQKSVYVDLTGKPHPWARWPEAGA

SEQ ID NO: 5615 - protein, 161 aa, Rubrobacter xylanophilus DSM 9941
MGARRWCEMLSPFRGFWDVRSELDRMFDDVVRDAFRLWRGEGRAARTAEWAPAIDVYSKDGDLVIKAELPGMKPEDVDITLQEGVLTISGERKAEEEREGAGYFVRERRYGSFRRSMRLPEGVDESKIHARFEDGVLEVVVEGAGAVTEPRRIQIEAPKGS

SEQ ID NO: 5616 - protein, 489 aa, Bacillus cereus ATCC 10987
MPQDRKAEVQKHAYERKEIMPDNSQSLPRHMQKELPHEFSVNPLFAREGESVVPRFHISDEGMLPETAYQIVHDEITLDGNARLNLATFVSTWMEPAAEQLYAKSFDKNMIDKDEYPQTAEIEERCVRILANLWHSPSPLTTMGVSTTGSSEACMLGGLALKRRWQNARKSEGKPLDRPNIVFSSAVQVVWEKFANYWEVEPRYVKVSPEHPQLDPQGVLAAVDENTIGVVPILGETYTGLYEPVAEIAKALDDLQARTGLDIPMHVDAASGGFIAPFLQPDLVWDFQLPRVKSINVSGHKYGLVYPGLGWIIWREAEDLPEDLIFRVSYLGGNMPTFALNFSRPGAQVLLQYYNYLRLGKSGYYDIQRASQKVALFLSKAIQKMEPFELLSDGSDIPVFAWRLKEGYTSNWNLYDLSRQLRVFGWQVPAYPLPPDMESVTIMRVVVRNGFSMDLAHLFLRNLKQTVAFLDSLDGPMPHDTKCNNGFHH

SEQ ID NO: 5617 - protein, 390 aa, Aspergillus nidulans FGSC A4
MATKTLEARFEHLSVKDDSGNGNKGTSYPKHKSSLSTAVSLSGLGVAGQLTSGANRSNLLKLALQNTNDNKVNAMNANASQSPGKGTQNPASLRNLDENGEYEQPAPRKLHLGMFEIGKPLGKGKFGRVYLAKERSSGFVCALKVLHKSELQQGGVQKQVRREIEIQSNLRHPNVLRLFGHFQDSKRIFLILEFAGRGELYKHLRKEHRFPEWKAAHYIAQMASALKYLHKKHVMHRDIKPENILVGIHGEIKISDFGWSVHAPNNRRQTMCGTLDYLPPEMLTSNPQGNFYNEKVDLWSLGVLTYEFLVGEAPFEDTPVMTQRRIQRGDMQVPSFVSPEAKDLIKRLLVLDPEKRISLDEIQRHPWILKHCVKDDRTIKRGSAPHAANE

SEQ ID NO: 5618 - protein, 167 aa, Synechococcus elongatus PCC 6301
MKIRNVSMAPQVTDIAVTTIDGAAKSLSDYAGQVLLIVNVASYCGYTSQYSGLEALYRQYRDRGLQVLAFPCNDFGAQEPGSNEEIKTFCSTRFDVSFELFDKVHAKGADQHPLYAALTQTDPAGDVAWNFEKFLVGKDGTVLARFKSGVAPNDASLIQAIEAALAA

SEQ ID NO: 5619 - protein, 458 aa, Burkholderia cepacia R18194
MDEPIRSEGGASDAPKRRHADLLVHGGMVMTPNGAERIDVACVNGRVVALGALHGNWSADVVLDAGGLHVLPGVVDSQVHFREPGLTHKETLEAGTRGAVLGGVTTIFEMPNTHPLTLTAQDLQAKLDLAHGRAWCDYAFYIGGSAANAERLPELENLPGCAGVKVFMGSSFGDLLADDEAVLRRIVRNGRRRMAVHAEDEARLRERRALVEASGDVRDHHRWRDEESALAATRRIVGLATETGRRLHVLHVSTAEEMAFLARHRQRVTVEVTPHHLSLYAPDCYERLGTFAQMNPPVRERHHQDALWQAVRDGVVDVIGSDHAPHTRDEKRRPYPQSPSGMTGVQTLLPLMLDHVHAGRLSLARLVDLTSAGPARIFGIAGKGRIAAGYDADFSIVDLRARRIIRDEWIASVSGWTPYDGCAVTGWPVHTVVRGRVVVRDGALNGEPEGQAVTFLDA

SEQ ID NO: 5620 - protein, 426 aa, Helicobacter hepaticus ATCC 51449
MLFQNATLCDYQGIKKADLRAQNGLITDIGSLQPLKDEDIYDAKDRILFPAMIDLNVAPKSLSLSRKNLLSLAQKALKGGAGSILLYPHTTPSCSENGSIELIKSLNKESPIHLIPAISPLDSQGKLSDISTLHTNGAKAIFAPSDIDAHSLMSIAQYAQMLDIPLMCFCQDSSVADGVMNEGILSASLGLPSIPAYSQTKEVAKIAEMFKNMPIKLIFDTLVYPRSFEILQSFRAIHNKTSQKNKDSMQFGETPQFFTQTSIHHLILDESLCDNYNTAAKLNPPLVEKNAQSKLIEMLQNGYIDTLTSLQCADFNSKKDQVFELASFGVDALEIYFPLLYTYLHKAYNIPLPLISQFTSYTPAQILNLNKGALQEGKIAQLFVFNPHTRFKVNDMFSPYHQHNLYGNIEAFLSNEILYTPHTKEL

SEQ ID NO: 5621 - protein, 481 aa, Burkholderia cepacia R1808
MANVTYTDTQLLIDGEWVDAASGKTIDVVNPATGKAIGKVAHAGIADLDRALAAAQRGFEAWRKVPAHERAATMRKAAALVRERADAIAQLMTQEQGKPLTEARIEVLSAADIIEWFADEGRRVYGRIVPPRNLGAQQMVVKEPVGPVAAFTPWNFPVNQVVRKLCAALATGCSFLVKAPEETPASPAALLRAFVDAGVPAGVVGLVYGDPAEISSYLIPHPVIRKVTFTGSTPVGKQLAALAGQHMKRATMELGGHAPVIVAEDADVALAVKAAGGAKFRNAGQVCISPTRFLVHNSIRDEFTRALVAHAQGLKIGNGLDEGTTLGALANPRRLTAMASVVENARKVGASIETGGERIGSEGNFFAPTVIANVPLEADVFNNEPFGPVAAIRGFDKLEDAISEANRLPFGLAGYAFTRSFANVHLLTQRLEVGMLWINQPATPWPEMPFGGVKDSGYGSEGGPEALEPYLVTKSVTVMAV

SEQ ID NO: 5622 - protein, 484 aa, Rhodococcus erythropolis
MQALTSSVPLVIGDQLTPSSTGATFDSINPADGSHLASVAEATAADVARAVEAAKAAARTWQRMRPAQRTRLMFRYAALIEEHKTELAQLQSRDMGKPIRESLGIDLPIMIETLEYFAGLVTKIEGRTTPAPGRFLNYTLREPIGVVGAITPWNFPAVQAVWKIAPALAMGNAIVLKPAQLAPLVPVALGELALEAGLPPGLVNVLPGRGSVAGNALVQHPSVGKVTFTGSTEVGQQIGRMAADRLITASLELGGKSALVAFGDSSPKAVAAVVFQAMYSNQGETCTAPSRLLVERPIYDEVVELVQARVEAARVGDPLDPDTEIGPLISAEQRESVHSYVVSGTEEGATLISGGDQSPTGAPEQGFYYRPTLFSGVTADMRIAREEIFGPVLSVLPFEGEEEAITLANDTVFGLAAGVFTRDVGRALRFAQTLDAGNVWINSWGVLNPASPYRGFGQSGYGSDLGQAAIESFTKEKSIWARLD

SEQ ID NO: 5623 - protein, 377 aa, Sulfolobus solfataricus
MSVVSKGLENVIIKVTNLTFIDGEKGILRYRGYNIEDLVNYGSYEETIYLMLYGKLRTKKELNDLKAKLNEEYEVPQEVLDTIYLMPKEADAIGLLEVGTAALASIDKNFKWKENDKEKAISIIAKMATLVANVYRRKEGNKPRIPEPSDSFAKSFLLASFAREPTTDEINAMDKALILYTDHEVPASTTAALVAASTLSDMYSSLTAALAALKGPLHGGAAEEAFKQFIEIGDPNRVQNWFNDKVVNQKNRLMGFGHRVYKTYDPRAKIFKKLALTLIERNADARRYFEIAQKLEELGIKQFSSKGIYPNTDFYSGIVFYALGFPVYMFTALFALSRTLGWLAHIIEYVEEQHRLIRPRALYVGPEYQEYVSIDKR

SEQ ID NO: 5624 - protein, 1184 aa, Cryptococcus neoformans var. neoformans
MFVTRPPFSPLDHRGSPLEDDHTNTSGSSRDDVPSSHSTNTAFHEFKSSTPFPPHYLNVPSGLAFKTYLEKWGPEQIMGFLAIHGCEHHSGIFIKNSIDGKLLLDLDMSVLTSLGITKVGERVRLMAGIKCLRQRIAHEAEKDNVRSAHLCNGSLGMDRVKVMIHPKMSASLYVCRQGPFDSDPSTARRSRLTPSSSADRERNPSPMQRSQEVMKHSFITRSSGGQVIPPLWSGQIHNHGIDNSPTPGLYQPPMQRSVPLRSSVSYSDIAAKGMPLLVTQSINSAADHTFAVTDSHDTTSSLGGHLPRPDYFHSTNDAFQTCTKGEDNTISELPQRNQESSPSKWKKSGVICEDEAMLDSSPFAPTSPKHPFAINVTGNNVMEYPPNLPIKNCLSLRSFQSPDKSAGEDRLNMNPRAPSLDDLRRKLVKFVNAEDGTTRTVNVMKATSGAEVLERALRKFGKTGTGSAPFLDEENHNGGKYEGSLCIDGWGVFAEDLLGEEIGPMTEGDLFDICASLQNGAAIQRDALILRQTSESQKRKDMRFYLGNMPVLPTPVNLPISFYSPHSGQFERNSALQHTAQHQPLLSKNRSRASMMSIMSGLGVSHPDIKQPTHDSVQSPTSVTRSSSKKKSMYNFFGHRPPSELISSHLADYFPSAKKRDVAKVRGSMLRLNIAHTAEHDPRSVKSLGMIETDDMPFSSTEQSLTEQGGHYFDPSTCQPADTSSRGHVDHIITDHAGNSKGYYRLPCDEKASPTVKTQELHSANSANSILRACPPNLPPTYQSARLTDLHSDSTFSQLQLLRHSSSLSFKQPSSSHRRTVDEITAEMQHRQTSLSSNRPTSTIDSDISGPPCDSETSPDHTSDVSDVSESSSEYWDDQSSVSSKDSDHNTVEHTRAFTSNGSKRNIKWIKGALIGAGSFGSVFLGMDAQSGLLMAVKQVELPRGIAKMEARRRDMLSALEREIELLKDLQHENIVQYLDSSADANHLNIFLEYVPGGSVAALLNSYGAFEEALVGNFVRQILTGLNYLHERDIVHRDIKGANILVDNKGGIKISDFGISKKVENSLLNGLHPNRPSLQGSVFWMAPEVVKQTSYTSKADIWSVGCLVVEMLTGTHPWARLTQMQAIFQIGSMGQPDIPSDISAHAADFLSRAFALDYRMRPSATSLLQHAFIIHDGSGGNDEV

SEQ ID NO: 5625 - protein, 691 aa, Zea mays
MPALACCVDAAAPPGYAFAGDISFPAPVALTGVPPATTDDSNNNRWSPSLSAALYNVDGWGGPYFAVNTAGNISVRPHGSDTLSHQEIDLLKIVKKASDPKSLGGLSLQLPLIARFPDVLKNRLESLQSAFDYAIQSGGYESHYQGVYPVKCNQDRFVVEDIVKFGSPFRFGLEAGSKPELLLAMSCLCKGNPDALLICNGFKDAEYISLALVANKLALNTVIVVEQEEEVDLIVELSKKLCIKPVIGLRAKLRTKHSGHFGGTSGEKGKFGLTTAQILRVVKNLDLAGMLDCLQLLHFHIGSQIPSTALLADGVGEAAQIYCELVRLGANMRVIDIGGGLGIDYDGSKSCDSDISVEYSLEDYAVAVVHAVQCVCDRRSVKHPVICSESGRAIVSHHSVLIFEAVGTSSTTGGGASPALSAQYLAEELSEDYRNLSELAFRGEYETCLVYTEEMKERCVEQFKQGTVCMEQLAAVEGLCELARKAVGAGESVRRYHVNLSVFTSVPDAWGIEQVFPIIPIHRLDEKPSVRGILSDLTCDSDGKIDKFINGESSLPLHEMEGGRTYYLGMFLGGAYEEALGGVHNLFGGPSVVRVSQSDGPHSFAVTRAVPGPSCGDVLRVMQHQPELMFETLKHRAQEYVSHDNAAALLAAGLARTFDRMPYLLSLSSFVADDVAAAVPAAQDLGEQWSY

SEQ ID NO: 5626 - protein, 272 aa, Glycine max
MESFPEIIKAVDPRASANLDGNHLDDDDRMEINSDIEPAETEALPHEFNMAPIADLFDNLQDKAHQETVIDSEDSPESVDSESSSDKEVSDQHMKITFPGKKMQTIAERFEEALGTSSVITEGTHVGAPNSLRPGIFGKLQHMMLKVKETDMEFWKKLQPEARPDGELGCIDVKIISRYRDGKLTVCHCSFGKYTENFLLQDNSKGMRFGGSECSQSTIIFSPRVCNNVDLEVGSLIRIHPPWFWFLDRKEVQAGNDNVILCTYFSEILFPV

SEQ ID NO: 5627 - protein, 304 aa, Zea mays
MCSSRALWPVHCCRFKAEGSLSSLEAGRGLGAFLYRPDPSFIRVVTVRPRSPRRSPKSQPRFLWSARASMASPSPAVSSLETEAPQATVTRERRLNPDLQEHLPKPYLARAMVAVDPDHPTGTEGRDPRGMSVLQQHVAFFDRNGDGVVYPWETFKGMRAIGCGFFTSLVLSFLINLVMSYPTQPGWLPSLLLSVHVKNIHKAKHGSDSETYDTEGRFDPSKFDAIFSKYGRTHPDALTKDEMNSMLKANRNIYDFLGWIAAIGEWHLLYSVAKDKDGLLQRETVRGLFDASLFERLQDSKKSS

SEQ ID NO: 5628 - protein, 372 aa, Arabidopsis thaliana
MFAQLAPSPSPSPANVSHFVHHRTFRQCTYAVSASLPTANSSRPPPIQIVGGKDLNLDVTRKDDSIGFKLEANEDEIDWMNLESDIRLWTRALRPVQWYPGHIMKTEKELREQLKLMDVVIEVRDARIPLSTTHPKMDAWLGNRKRILVLNREDMISNDDRNDWARYFAKQGIKVIFTNGKLGMGAMKLGRLAKSLAGDVNGKRREKGLLPRSVRAGIIGYPNVGKSSLINRLLKRKICAAAPRPGVTREMKWVKLGKDLDLLDSPGMLPMRIDDQAAAIKLAICDDIGEKAYDFTDVAGILVQMLARIPEVGAKALYNRYKIQLEGNCGKKFVKTLGLNLFGGDSHQAAFRILTDFRKGKFGYVSLERPPL

SEQ ID NO: 5629 - protein, 67 aa, Brassica napus
  misc_feature (29)..(29): Xaa can be any naturally occurring amino acid
MVFTSNDISKWENFLKGLRVLLLDCGDGXSAAETRSKLESMDYIVTTFTDGTEALSAVFKSLESFHI

SEQ ID NO: 5630 - protein, 291 aa, Glycine max
IRLERLEQRLTKCQPAEAPEPNQLIWPNLKIKYFQRELRQYLVYFIVALTIFFYMIPITFISAFTTLDNLVKYLPFIKPIVNIKALKTVLEAYLPQLALIIFLALLPKLLLFLSKFEGIPTESHAVRAASGKYFYFTVLNVFIGVTIGGTLFKAFKRIREHPTLDEISSLLAESLPGNATFFLTYVALKFFIGYGLELSRIVPLIIYHLKRKYLCKTEAELKEAWRPGDLGYGTRVPGDMLIVTIVFCYSVIAPVIIPFGALYFGLGWLVLRNQVKFLEFCLMNPVLCFMW

SEQ ID NO: 5631 - protein, 245 aa, Schizosaccharomyces pombe
KSFIKVSSLEQLKATGTVVVSDTGDFESIAKYKPQDATTNPSLILAASKKPQYAALVDAAVDYAKAKGGSINSQIEIAFDRLLIEFGTKILAIVPGRVSTEVDARYSFDTQTTIEKARHLIKLYEAEGIGRERVLIKIASTYEGIQAAKQLEEEGIHCNLTLLFSFVQAVACAEANVTLISPFVGRILDFYKAKNNRDYTAQEDPGVVSVSNIFNYYKNSVTRPLSWVLLSVTSVRSRNSLVLTF

SEQ ID NO: 5632 - protein, 182 aa, Triticum aestivum
YTYIVQSLVPTVMASLATSVAPFQGLKSTAGLPVSRRSNGASLGSVRNGGRIRCMQVWPIEGIKRFETLSYLPPFSTEALLKQVDYLIRSKWVPCLEFSKVGFIFREHNASPGYYNGRYWTLWKLPMFGCTDASQVINEVEEVKKEYPDAYVRIIGFDNMRQVQCVSFIAFKPPGCEESGKA

SEQ ID NO: 5633 - protein, 435 aa, Yersinia pestis KIM
MTISRTQQIQQLEQEWTSPRWKNITRPYSAEDVIKLRGSVNPECTFAQNGAKKLWELLHGGSRKGYINCLGALTGGQALQQAKAGVEAIYMSGWQVAADANTASSMYPDQSLYPVDSVPAVVKRINNSFRRADQIQWSNNIEPGSKGYTDYFLPIVADAEAGFGGVLNAFELMKAMIEAGAAGVHFEDQLAAVKKCGHMGGKVLVPTQEAIQKLVAARLAADVLGVPTLLIARTDADAADLLTSDCDPYDREFITGDRTAEGFFRTRAGIEQAISRGLAYAPYADLVWCETSTPDLALAKRFADAVHAQFPGKLLAYNCSPSFNWKKNLTDQQIASFQDELSAMGYKYQFITLAGIHSMWFNMFDLAHAYAQGEGMKHYVEKVQQPEFASVDRGYTFASHQQEVGTGYFDKVTNIIQGGASSVTALTGSTEEQQF

SEQ ID NO: 5634 - protein, 425 aa, Vibrio cholerae O1 biovar eltor str. N16961
MSDDNRLNPTPEEQFRQRALDYHAYPTAGKIGIALTKPADSAADLALAYSPGVAEPVREIAQNVDNVYKYTAKGNTVAVISNGTAILGLGNLGPMASKPVMEGKALLFKRFAGLDSIDIEVKHRTIDEFIDTVANIADTFGGINLEDIKAPDCFEIERRLIERCDVPVFHDDQHGTAIVTAAGMLNALELQGKQLKDCIIVCLGAGAAAVACMELLIKCGAMREKIYMLDRKGVIHTRRDDLNEYKALFANNTDKRTLEDVIAGADLFLGVSGPNLLPADALKLMADKPVVFACSNPDPEIKPEIAHQVRNDMIMGTGRSDYPNQVNNVLCFPFIFRGALDVRASEINDQMKLAAVEAIRQLAKEPVPAEVLAAAGVDKLSFGIDYIIPKPMDPRLLPRVARAVAEAAVESGVARIPMPENYMQA

SEQ ID NO: 5635 - protein, 469 aa, Triticum aestivum
  misc_feature (256)..(257): Xaa can be any naturally occurring amino acid
MDPTVPNSGDHAASTPTNTTVTLPPLTLRDAPRLPALPSGATTIPNPISSHPYFHPPPTFYISPGDVSLRHAFFDLSSGSPNPLVAYRRAGPRESLAVDPARARAALVTCGGLCPGLNTVLRELVVGLHELYGVLDVFGVAAGYRGFYGADDDHVRLDPASVDDWHKKGGTALKTTRGGFDLNKIVDGIVARGYTQVYAIGGDGTMRGAVAIFEEFKRRGLRISITGIPKTVDNDIGIIDRSFGFQTAWEIAQQAXXAAHVEAVSAVNGIGLVKLMGRSTGHIALHATLSSRDVDCCLIPEIDFHVEGKGGLFEFLYERIKKKGHAVVVVAEGAGQEVIPRTDDQKREQDESGNMLFLDVGPWLKSELGRWWKREHPTELFTVKYIDPTYMIRAVPANATDNLYCTLLAHSAIHGIMAGFTGFVPGPINGNYSYIPLEDIAVAKNPVDVNDHKWAWVRSVTDQPDFLKP

SEQ ID NO: 5636 - protein, 497 aa, Staphylococcus xylosus
MELVKNLSRRQFIDGEWVESSNKETRKIINPFNQEVIFEVAEGTADDSERAILAARRAFEDGEWANETSENRGKKVRAISDLIVKHREELAKLETLDTGKTLEESYADMDDIANVFNFFAGLADKDGGEIIDSPIPNTESKVIKEPIGVVTQITPWNYPLLQASWKIAPALASGCSLVMKPSEITPLTTIRVFELMEEVGFPQGVINLVLGKGSEVGEPLSAHKEVDLVSFTGGIQTGKHIMKNAADHVTNIALELGGKNPNIIFDDADFDLAVDQALNGGFFHAGQVCSAGARIIVHNDIKEKFEAALIERIKNIKLGNGFDEDTEMGPVISAEHREKIENYMEVAKSENATIAIGGKRPEREDLQDGFFFEPTVITDCDTSMRIVQEEVFGPVVTIESFTTEAEAIKLANDSIYGLAGGVFTNDVGKAQRIANKLKMGTVWINDFHPYFAQAPWGGYKQSGIGRELGKAGLAEYQEEKHILRNTNPEPVNWFGKA

SEQ ID NO: 5637 - protein, 244 aa, Zea mays
HASELLEDLQGRSGSYVETASLSHQHTRAKHWKPKFLSSEKKTIAILGDRSIDSEDPLEHVIDGTSSEEEDATQNHLSLVNKDENQQTMADLFQEVFNPTNMDGAMKSMRSTGAGNYGRMQQIMQMEKDWHVEFLRQYSREHSYSGDLKGTTVQILSRSLEGKLTVCSCMFQEKGNDATISNASADGTMDESRTRRTIIFSPKICNNVDLLVGNIIHIFPPWKEVKIQEEHVIICTYFSHHHRT

SEQ ID NO: 5638 - protein, 332 aa, Anabaena variabilis ATCC 29413
MTKNLLEQLREMTVVVADTGDIQAIEKFTPRDATTNPSLITAAAKMPEYQEIVDQTLLQAKKDAGAGASKGQIVSLAFDRLAVSFGLKILQIIPGRVSTEVDARLSYDTEATITKARELIAQYKAAGIGPERVLIKIASTWEGIKAAEILEKEGIHCNLTLLFGLHQAIACAEAGITLISPFVGRILDWYKKETGRDSYPSAEDPGVISVTTIYNYYKKFGYTTEVMGASFRNIGEITELAGSDLLTISPGLLGELQATIGELPRKLDPAKAATLDIEKISIDKATFDKMHAADRMAYDKLDEGIKGFTKALEELETLLAERLARLEVVASH

SEQ ID NO: 5639 - protein, 294 aa, Triticum aestivum
HSITSLYKKAGWYRSGIPLDTRIPLVSFTGSTKVGQMVQQQVSARFGKCLLELSGNNAIIVMDDADIPLAVRSVLFAAVGTAGQRCTTCRRLLLHESIYQTFLDQLVEVYKQVRIGDPMEKGTLLGPLHTTTSKESFLKGIQTIKSQGGKILLGGSAIESEGNFVQPTIVEISPDAPVVREELFGPVLYAMKFLTLKEAIEINNSVPQGLSSSIFTRKPDAIFKWIGPHGSDCGIVNVNIPTNGAEIGGAFGGEKATGGGREAGSDSWKQYMRRATCTINYGSELPLAQGINFG

SEQ ID NO: 5640 - protein, 587 aa, Glycine max
  misc_feature (124)..(124): Xaa can be any naturally occurring amino acid
VITTQFASNLHRLGSVKAAADLTGRKLVFVGMSLRTYLDAAWKDGKAPIDPSTLVKAEDIDAYAPKDLLIVTTGSQAEPRAALNLASYGSSHAFKLAKEDVVLYSAKVIPGNESRVMKMLNRIXEIGSTIVMGKNEGLHTSGHAYRGELEEILRIVKPQHFLPIHGELLFLKEHELLGKSTGIRHTAVIKNGEMLGVSHLRNRRVLSNGFISLGKENLQLKYSDGDRAFGTSSDLFIDERLRIALDGIIVISMEIFRPKILDGSAENTLKGKIRITTRCLWLDKGKLMDALYKAARAALSSCPVKSPLAHIERIVSEVLRKMVRKYSGKRPEVIAIAIEKPAAILADEINTKLSGKSHVGLGMSTLSKAVDGHGKGNQSTALQVKDDSIDNASGAEGDLSEEDNTASGPEGYLSEEDNTASGAEGDLSESEDSDEFWKPFITSLPVEKSINADNGYVSPKEQKSNLKKDESEDIDEAKSEETSNSEAKSSKSVKRNKWKTEEVKKLIGMREELSERFQVVKGRMALWEEISQKLLADGICRSPGQCKSLWTSLVVKYEGIKNEDRKKSWPYIEDMERIMSDKEAPAK

SEQ ID NO: 5641 - protein, 257 aa, Bradyrhizobium japonicum
VYLSGWTIAALRSEFGPLPDQSMHEKTSVPVLIEELYTFLRQADSRELNDIFRSLDKARKEGDKTREKELIEKIDGFQTHVVPVIADIDAGFGNAEATYLLAKKMIEAGACALQIENQVSDEKQCGHQDGKVTVPHDVFLAKIRACRHAFLELGVEDGVVVTRTDSLGAGLTQQIAVSHKPGDIGDQYNSFLDCEEITAENARNRDVIINRNGKMMRPKRLPSNLYQFRPGTGEDRCVLDCITSLQNGATDLDRDQS

SEQ ID NO: 5642 - protein, 231 aa, Triticum aestivum
MPESDNDSGGPSNTGGEGELSSPREQDRFLPIANVSRIMKKALPANAKISKDAKETVQECVSEFISFITGEASDKCQREKRKTINGDDLLWAMTTLGFEDYVDPLKHYLHKFREIEGERAAATSTSTSTTPDMPRNNNNNARRLPRRPGRHDDDGAAHVPARPHHKEPNKIAMGRGEAGFYFGGGGSSVLTEKGLFLFLFFSFWLTRGGFQTVSFWVKTLLKFFPGGFFPV

SEQ ID NO: 5643 - protein, 478 aa, Ralstonia eutropha JMP134
MHAQHFVANRLIAPDNGLRIKVFDPSNGEPFAEIARGNATDINVAVHAARQAADGAWGAMAPAERVRLLNRVALTLVAHEEELTALETRDTGKPVRQARADARAVARYFEFYAGAVDKLHGQTIPYNPGYTVFTLREPHGVTGHIIPWNYPLQIFGRSVGAALAAGNACVVKPAEDACLSLLRVAELAAEAGLPEGALNIVTGYGHEAGAALARHPGINHISFTGSPQTGKLVSQLAAENHVPVTLELGGKSPQIVFADADVDALVPVIVNGIVQNAGQTCSAGSRVLVERPLYNALLDRIASVFESLRVGPSELDLECGPLISRKQQQRVWDFVSDAQHAGISVMAQGQIVAEAPESGYYQVPMLFRDVPPAHRLAQEEVFGPLLAAMPFDSEAEAVALANGTPYGLVAGLWTRDGGRQLRLARKLRAGQVFINNYGAGGGVELPFGGTGQSGYGREKGFEALYGFTTLKTIAIQHG

SEQ ID NO: 5644 - protein, 178 aa, Triticum aestivum
  misc_feature (101)..(101): Xaa can be any naturally occurring amino acid
  misc_feature (138)..(138): Xaa can be any naturally occurring amino acid
  misc_feature (157)..(157): Xaa can be any naturally occurring amino acid
  misc_feature (161)..(161): Xaa can be any naturally occurring amino acid
  misc_feature (168)..(168): Xaa can be any naturally occurring amino acid
MAPTVMASSATSVAPFQGLKSTAGLPVSRRSNGASLGSVSNGGRIRCMQVWPIEGIKKFETLSYLPPLSTEALLKQVDYLIRSKWVPCLEFSKVGFIFREXHNASPGYYDGRYWDNVGSCLCSGGTDATKGVQRRWRXAKKGLPDAFVRIIGFQKHXQVQXVRFIASXQPGWKESRKG

SEQ ID NO: 5645 - protein, 354 aa, Burkholderia cepacia R18194
MKAAVWHGRHDIRVEQVPVPERPPAGWVTIRVHWCGICGSDLHEYVAGPVFIPVDAPHPLTGLKGQCILGHEFSGEIAELGAGVTGFAVGDRVTADACQHCGTCWYCKHGLYNICENLAFTGLMNNGAFAEYVNVPAELLYKLPDDFPTEAGALIEPLAVGLHAVKKAGNIVGQTVVVVGAGTIGLCTIMCAKAAGAGRVIALEMSAARKQKALEVGASVVIDPKTSDAIAEVKALTGGYGADVSFECIGHTTTAKLAIDVIRKAGKSVMVGIFEEPAPFNFFDIVSTEKEVIGSLAYNGEFADVIRFIADGRIDVQPLITGRIALGDIVSHGFEELVNHKERNVKIIVQPALA

SEQ ID NO: 5646 - protein, 360 aa, Triticum aestivum
MGSTATDMAASAHEEACMFALQLGSSSILPMTLKNSIELGLLDTLVAADGKLLSPAELAAKLPSTANPAAPDMVDRMLRLLASYKVVSCTLEEDKDGRLSRRYGAEPVCKFLTPNEEGVSMAPLALMNQDKVLMESWYYLKDAVLDGGIPFNKAHGMSAFEYHGTDPRFNRVFNEGMKNHSIIITKKLLELYKGFNGLDTLVDVGGGIGATVGAITAHYPTVKGINFDLPHVISEAPPFSGVTHVGGDMFQKIPSGDTILMKWILHDWSDEHCATLLKNCYDALPAHGKVVLVECILPVNPEATPEAQGGFHLDMIMLAHNPGGRERYEREFEALAKGAGFGAIKTTYIYANIWVIEFTK

SEQ ID NO: 5647 - protein, 468 aa, Bacillus halodurans C-125
MDLYINGEWMRSGKTLDVTNPATGEVIDTVPFAGKKEAELAVSAAYEAFPQWSSQTASERSRYLMRWFQLIDEQQDEIGEIMTKEQGKPLREAIGEVQYANSFIQWYAEEAKRIYGDTIPASAINKRILVQKQPVGVIAAITPWNFPAAMITRKVAPALAAGCTAIVKPAEQTPLTALKLAQLAEEAGIPAGVLNVITGNAQDIGEAWLEDSRVRKITFTGSTEVGKLLMRGAAQTVKKISLELGGHAPFIIMDDANLEEAVDQVIASKFRNAGQTCVCANRIYVAREIAEAFTEKFAAKVNELKVGNGLEEGVTIGPLIDKAAVEKVEAHIHDALKKGGQVTVGGRWTNHFFEPTIITGATDEMLCMNEETFGPLAPVATFDTEEEVIERANHTPYGLAAYVFTENIGRAIRLSEKLEYGIVGVNDGMPSVAQAPFGGWKESGLGREGGKYGIEEYLEVKYVSVAFK

SEQ ID NO: 5648 - protein, 486 aa, Saccharomyces cerevisiae
MGTGKKEKSRRIREGDTKDGNLRVKGENFYRDSKRVKFLNMYTSGKEIRNKKGNLIRAASFQDSTIPDARVQPDRRWFGNTRVISQDALQHFRSALGETQKDTYQVLLRRNKLPMSLLEEKDADESPKARILDTESYADAFGPKAQRKRPRLAASNLEDLVKATNEDITKYEEKQVLDATLGLMGNQEDKENGWTSAAKEAIFSKGQSKRIWNELYKVIDSSDVVIHVLDARDPLGTRCKSVEEYMKKETPHKHLIYVLNKCDLVPTWVAAAWVKHLSKERPTLAFHASITNSFGKGSLIQLLRQFSQLHTDRKQISVGFIGYPNTGKSSIINTLRKKKVCQVAPIPGETKVWQYITLMKRIFLIDCPGIVPPSSKDSEEDILFRGVVRVEHVTHPEQYIPGVLKRCQVKHLERTYEISGWKDATEFIEILARKQGRLLKGGEPDESGVSKQILNDFNRGKIPWFVLPPEKEGEEKPKKKEVEKTA

SEQ ID NO: 5649 - protein, 496 aa, Pseudomonas putida KT2440
MVAGLLERLGVAAEAYTQGDYPVHTPIDGSQIASVKLLGKAETIARIDQAQSAFEAWRSVPAPRRGELVRLFGEVLREHKADLGELVSIEAGKITQEGLGEVQEMIDICDFAVGLSRQLYGLTIASERPGHHMRETWHPLGVVGVISAFNFPVAVWAWNTALALVAGNSVVWKPSEKTPLTALACQALFEKALKAFGDAPAGLAQLVIGGREAGEAMVDDPRVPLVSATGSTRMGREVGPRVAARFGRSILELGGNNAMILAPSADLDLAVRGILFSAVGTAGQRCTTLRRLIVHRSIKDEVVARVKAAYGKVRIGDPRKDNLVGPLIDKQSFDAMQGALAKARDEGGQVFGGERQLADQYPNAYYVSPAIAEMPAQSDVVRHETFAPILYVLAYDDFEEALRLNNEVPQGLSSCIFTTDIREAERFQSASGSDCGIANVNIGTSGAEIGGAFGGEKETGGGRESGSDAWKGYMRRQTNTVNYSRELPLAQGIVFD

SEQ ID NO: 5650 - protein, 187 aa, Aspergillus nidulans FGSC A4
MTTEEAEIKDERLETPHEEGGDDEEEIEAMKRRVAEMESEAAKLREMQATLDQQSESLKEDKEDIDARSIFVGNVDYGASPEEIQAHFQSCGSINRVTILLDKFTGQPKGYAYVEFAEPSLVAQALVLNESVFRGRNLKVVPKRTNLPGMSSRGRGRGRGRGYGRGGFPRGGYRGGYRGRGRGYAPY

SEQ ID NO: 5651 - protein, 313 aa, Glycine max
KLLNQQVSFFFSFFLLNYSSFYKLLLYHSSGVYLQEVLLPGGHGLMVRGYLPVVNSLAKGLDIRLGHRVTKVVRRYNGVKVTVENGKTFFADAAVIAVPLGVLKAKKILFEPKLPDWKEAAIADLGIGLENKIILHFENVFWPNVEFLGVVADTPYECSYFLNLHKATGRAVLVYMPSGQLAKDVEKMPDEAAVNFAFMQLKKIFPDASSPIQYLVSRWGSDINSLGSYSYDAVGKPHELYERLRVPVDNLFFAGEATSMSYPGSVHGAYSTGTMAAEDCRMRVLERYGEVDLFQPVMGEEGSMSIPLQISRL

SEQ ID NO: 5652 - protein, 144 aa, Glycine max
  misc_feature (62)..(62): Xaa can be any naturally occurring amino acid
  misc_feature (94)..(94): Xaa can be any naturally occurring amino acid
  misc_feature (107)..(107): Xaa can be any naturally occurring amino acid
FAFLISYDNPGILAGLGCSASSQAKRGRGLELSRIQAHRGPDWSQLHQYGDHYLAHHRLAIXDPAHGEHPLFNADYTESVPVNGEIYNHEELMXQLPNDTFQTGCDXDVIAHLHEEHGDYYMDMLDGIFSAALLDSRDSMHIVA

SEQ ID NO: 5653 - protein, 442 aa, Mesorhizobium loti MAFF303099
MSNRLKVTPNDLSAFWMPFTANRQFKQAPRMFVSAKDMHYTTSDGRKVLDGTAGLWCVNAGHCRPKITEAIQHQAAELDYAPAFQMGHPIVFELANRLVDIAPKGMDHVFFTNSGSESVETALKMAIAYHRMKGEGARTRLIGRERGYHGVNFGGISVGGIVSNRKMFGTLLGGVDHMPHTHLPEKNAFSKGVPEYGAELANELERIVALHDASTIAAVIVEPVAGSTGVILPPKGYLQKLREICTKHGILLIFDEVITGFGRLGAPFAADYFGVVPDIMTTAKGVSNGVIPMGAVFVKKEIHDAFMTGPEHMIEFFHGYTYSGNPIACAAALGTLDTYKEEGLLTRGEELAPYWEDALHSLKGEPHVIDIRNIGLIGAIELAPIAGSPTKRAFSAFVKAFERGALIRTTGDIIALSPPLIITKGQINELIDHVREVLRSID

SEQ ID NO: 5654 - protein, 327 aa, Triticum aestivum
MKTLLILTILAMAITIGTANIQVDPSGQVQWLQQQLVPQLQQPLSQQPQQTFPQPQQTFPHQPQQQVPQPQQPQQPFLQPQQPFPQQPQQPFPQTQQPQQPFPQQPQQPFPQTQQPQQPFPQQPQQPFPQTQQPQQPFPQLQQPQQPFPQPQQQLPQPQQPQQSFPQQQRPFIQPSLQQQLNPCKNILLQQCKPASLVSSLWSIIWPQSDCQVMRQQCCQQLAQIPQQLQCAAIHSVVHSIIMQQQQQQQQQQGMHIFLPLSQQQQVGQGSLVQGQGIIQPQQPAQLEAIRSLVLQTLPSMCNVYVPPECSIMRAPFASIVAGIGGQ

SEQ ID NO: 5655 - protein, 505 aa, Glycine max
MSSLSNNSSSSHGNSFLQMPPIKFTKLFINGDFVDSLSGRTFETIDPRTEEVIARVSEGDKEDIDIAVKAARQAFDSGPWPRLPASERAKIMMKWADLIDENIEELAALDTVDAGKLNYINKVVEIPSATNALRYYAGAADKIHGEVLKMNGDFHAYTLLEPIGVVGHIIPWNAPSLSFFIKVSPSLAAGCTMVLKPAEQTPLSALFYAHLAKLAGIPDGVLNIVPGFGPTAGAAISSHMDIDVVSFTGSIEVGREVMQAAARSNLKPVSLELGGKSPLIIFNDADIDKAAQLALFGIMSNKGEICVASSRVFVQEEIYDEFEKKLVEKAKSWVVGDPFDPKSLQGPQADRNQLEKILSYIEHGKREGATLLTGGNTVGNKGYYIEPTIFCNVKEDMLIARDEIFGPVLALMKFKTMEEAIKSANNTKYGLAAGIVTKNLDTANTMSRSIRAGIVWINCYLTVGSDVPFGGYKMSGFGRDLGLQALHKYLQVKSVVTPIHNSPWL

SEQ ID NO: 5656 - protein, 408 aa, Glycine max
FGSRLGRVLGHGSFAKVYHARNLKTGQHVAMKVVGKEKVIKVGMMEQVKREISVMKMVKHPNIVELHEVMASKSKIYISIELVRGGELFNKVSKGRLKEDLARLYFQQLISAVDFCHSRGVYHRDLKPENLLLDEHGNLKVSDFGLTAFSDHLKEDGLLHTTCGTPAYVSPEVIAKKGYDGAKADIWSCGVILYVLLAGFLPFQDDNLVAMYKKIHRGDFKCPPWFSLDARKLVTKLLDPNPNTRICISKVMESSWFKKQVPRKVEEVVEKVDLEEKIENQETMNAFHIISLSEGFNLSPLFEEKRKEEMRFATAGTPSSVISRLEEVAKAGKFDVKSSETKVRLQGQERGRKGKLAIAADIYAVTPSFMVVEVKKDNGDTLEYNQFCSKQLRPALKDIFWNSAPASA

SEQ ID NO: 5657 - protein, 90 aa, Triticum aestivum
  misc_feature (27)..(27): Xaa can be any naturally occurring amino acid
  misc_feature (37)..(37): Xaa can be any naturally occurring amino acid
  misc_feature (45)..(45): Xaa can be any naturally occurring amino acid
MALRGVHTVAPFQGLKCTAGMPVARRXGNSSFGNVSXGGRIRCMXVWPIEGIKKFETLYYLTPITVEDLLKQIENLLRSRGCLLEGPVPP

SEQ ID NO: 5658 - protein, 432 aa, Sulfolobus tokodaii str. 7
MDCIFIFRRDLRLEDNTGLNYALSECDRVIPVFIADPRQLINNPYKSEFAVSFMINSLLELDDELRKKGSRLNVFFGEAEKVVSRFFNKVDAIYVNEDYTPFSISRDEKIRKVCEENGIEFKAYEDYLLTPKSLFHHRNFTSFYNEVSKVKVREPETMEGSFDVTDSSMNVDFLLTFKKIESPLFRGGRREGLYLLHRNVDFRRRDYPAENNNYRLSPHLKFGTISMREAYYTQKGKEEFVRELYWRDFFTLLAYYNPHVFGHCYRREYDNISWENNESYFEAWKEGRTGYPIIDAGMRMLNSTGYINGRVRMLVAFFLVKVLFVDWRWGERYFATKLVDYDPAINNGNWQWIASTGVDYMFRVFNPWKQQEKFDPEAKFIKEWVEELKDVPPSIIHSIYKTKVPGYPSPIVNWLERVNYVKSEYKNVKAVL

SEQ ID NO: 5659 - protein, 193 aa, Zea mays
  misc_feature (72)..(72): Xaa can be any naturally occurring amino acid
  misc_feature (124)..(124): Xaa can be any naturally occurring amino acid
  misc_feature (137)..(137): Xaa can be any naturally occurring amino acid
GSNKIKIFHQRNTEAVLKMLSEIGSVDNIPEFIEGVKNRKRKMSGFGHRVYKNYDPRAKVIKKLADEVFSIXVGRDPLIEVAVALEKAALSDDYFVKRKLYPNVDFYSGLIYRAMGFPPEFFTXVLFAIPRMGWILXSHWKESGGMILDTKDHAHNRGTPPGRCGLRHLHTSLKGRGMEAKGGQNRVGVQVST

SEQ ID NO: 5660 - protein, 339 aa, Zea mays
  misc_feature (77)..(77): Xaa can be any naturally occurring amino acid
MTMVDDPTTNAVVSWSAANNSFVVWDPHIFGTVLLPRYFKHNNFSSFVRQLNTYVAVLPCLFLRLWNHARRDDAAVXKGFRKVDPDRWEFANEEFLRGQRHLLKNIRRRKPPHSSPNQQSLGSYLEVGHFGYEEEIDQLKRDKQLLMAEVVKLRQEHQNTRSDLQAMEEKLQDTEQKQQQMMAFMARVMQNPDFMRQLISQREMRKELEDAISKKRRRRIDQGHEAGSMGTGSSLEQGPQGVFEPQEPVESLANGVPSDLESSSVEAKGLEVRQGVSSGGSEHLNGRPSGELNDDFWEDLLHEGGLGADAGNAVGQDDMNMDMDPDVSLPQLKQHGPRH

SEQ ID NO: 5661 - protein, 1172 aa, Oryza sativa (japonica cultivar-group)
MVCGNVSTVVPMLQHTSMAREQKLVLDADADDDGLHHTGAGGKQQKLVLDAAADGLHLTGVGGKQHNLVLDAGAGGKQQKLVLDAADDGLHLAGVGGKQHNLVLDAGTGRKQQKLVLDADDDGLHLAGVGGKQHNLVLDAADDGLHLPGVGGKQHNLVVDAGAGGKQQKLVLDDADDGLHLAGVGGKQHNLVVDAGASGKQQKLVLDAADDGLHLAGVGEKQHNLVLDAVTDGLHLAGVGGKQHNLVLDAGTGRKQQKLVLDADDDGLHHTGAGGKQQKLVLNAADDGTTWCSMPPTTGFTSPAWDAADDGLHLAGVGGKKHNLVLDAAPDGLHLAGVGGKQHNLVLDAGTGRKQQKLVLEDDGLHHTGAGRKQQKLVLDAANDGLHLAGVGGKQHNLVLDAADDGLHLAGVGGKQHNLVVDAGAGAKQQKLVLDAADDGLHLAGVGGKQHNLVLDAGAGGKQQKLVLDAADDGLHLAGVGWKQHNLVLDAGAGGKQQKLVLDTAVDVSQHTVGGAEQNLLLDSTDDGLHHTGAGGEQNLVIDDDIDGSNHTVGGAEQDDGLHTTGAGWEQNLVLCTDVDGLLHTGAGGEQNMVCDNVGTIVSGLHDTIARWERNLVFDDVGTAVPWLRHTGVDGKQNLVYHLATATVQSVWRENCMEQFKLVLEALHQPHRHLYIAVDMEFAADAATNVSHRPVTSISCYQHMRRYVNGGGIFQMGLTFAFVGEGEQAPSPLIALEINFDFNVNSPKYHGKSIDFLSSQGHDLTQHSKRGVAPEFVYEGLLRHLPFGDGSVTWVAFHGDYDLAFLLRLLQGGDHGGNCLLPPKLATFLQKVREKFPVVYDVRVLGKLVKDGFNGSLTALAEYLGIPRNGDEHHAGSDALLTLSCFFKIVSLSGHQMHRMDARRGLLAGLEEWNMAIKCARHIDNHTGSIYVVKMLPHKLDEEARRIEELVASNFNIVGVEVIHAQLGKRSYAVEAQQNYELIKTFLKDSDLYEIIVTFMNAEGMLAYSRAWKFCISSRADNACVHPQQFAKFMASCGALGDPNISWVTFHGAHGIARMIRSFLSPQDLPSQWCSYIGHRRAFFPAIYDVALLVRRSFDIITIPWIECKGGLLDVAQALNLKEIEADMEAARVLLTLRCYMRLAERPDFPGTKMAVQGLLKESCCWKCPANC

SEQ ID NO: 5662 - protein, 75 aa, Zea mays
GPVGVNPGEYPPLKAPGGKVFFPGEPTIQHNKGFVPGDYFSVFGGEEIFNDCAQKKMCKYKVQGKYVLEGHGDGN

SEQ ID NO: 5663 - protein, 360 aa, Glycine max
MGESNVMTKTEDGACLSAMLLSTNLVYPAVLNAAIELNLFEIIAKATPAGSFMSSHEIASKLPTQHPDLPNRLDRMLRLLASYSVLTTSTRTTHHGATETVYGLSQVGQYFVPDGTRGYLASFTAFVCYPPLLQVWLNFKEAVVDADIDLFKKILGVTMYQYMENDPKMNQIFNKSMANLCATEMSRILEIYTGFEGISTLVDVGGGNGQNLKMIISKYPLIKGINFDLPQVIENAPPLPGIEHVGGDMFAKVPQGDTIILKAVCHNWSDEKCIEFLRNCHKALSPNGKVIVVEFILPEEPEPTEESQLVSTLDNLMFITVGGRERTQKQYETLCKLSGFSNFQVACRAFSSLGVMEFYK

SEQ ID NO: 5664 - protein, 331 aa, Vibrio cholerae O1 biovar eltor str. N16961
MIFDSQSSRVSMIKKIGVLTSGGDAPGMNAAIRGVVRTALGAGLEVFGIYDGYQGLYEDRIKQLDRSSVSDVINRGGTFLGSARFPQFREVEVREKAIENLKKHGIEALVVIGGDGSYMGAKKLTEMGFPCIGLPGTIDNDIAGTDYTIGYLTALNTVIEAIDRLRDTSSSHQRISIVEIMGRHCGDLTLTSAIAGGCEYIITPETGLNMEQLISNIKDGIAKGKKHAIIALTELMMDANKLAKEIESATGRETRATVLGHIQRGGKPTAFDRVLASRMGNYAVHLLMEGHGGRCVGIQKEQLVHHDIIDAIENMKRPVRTDLYKVAEELF

SEQ ID NO: 5665 - protein, 69 aa, Glycine max
  misc_feature (44)..(44): Xaa can be any naturally occurring amino acid
CRNATSAVPAGASMVAPFTGLKYIAVLPTRNTILDFAYIASNGXRAQCMHVWPPIGKKKVETLSYLPDL

SEQ ID NO: 5666 - protein, 462 aa, Oryza sativa (japonica cultivar-group)
MENNMQAARTATTRERAPPRATAISRYIFLALARIPVNKCVAWRSAGALLLLVTDMAAMASAAAEVPSYFVCPISLQLMRDPVTLPTGISYDRAAIARWLAAPGARRTCPVTRQPLEHGLELTPNHTLRRLIQSWAASVSPGSAVDEEVAALRPVSSDEVASLLSDAAAAQVGALRRLRELAAECEDSRAMLESQGGVFDVLSRVVTSGSACSTAREEAVGVLASLRIPEQELIGVSTRHGNLAESLTAVLRSSNLQSRAHAVQLVRTLADAVVPAWVIGLNAELLAEVVGVVRDRVSARATKASLHALAALCPYGRHRVKIVGAGAVAALVELLLDEPERRVCELALAVLDRLCTCAEGRAELVAHAAGVAVVGKKVLRVSEAASERAVRVLRSVARHAATPAVLQEMAQCGVVGKLCLALRSEQCGVKTKEKAHEVLKLHSRVWRASPCLSPSFLALYPS

SEQ ID NO: 5667 - protein, 491 aa, Bacillus sp. KSM-K16
MIRGKMFINGEWTDAKNGRVREIINPFNQEVIATVPEGSAEDSHAAIAAARAAFDEGVWSAASASERGERVRLIGQKIANQNEEFARLESLDTGKTLEESRTDMEDIANVFFYFAGLADKNGGEVIRSPLPNSTSIVVREPVGVCGLITPWNYPLLQAAWKLAPALVAGNTLILKPSELTPLTTMKLFELFEEVGLPTGVANLVLGTGKEVGAPLAESTDVDLISFTGGIETGKTIMQAASSNVKKMALELGGKNPNIVFADADFETAIDQALNAVFFHAGQVCSAGSRLLVEEAIHDDFVEELVKRTKRIKLGNGFDEKTESGPLISAAHRAKVESYIQIGLDEGATLACGGKRPDAAELQNGFFLEPTIFTNCRSSMRIVQEEVFGPVLTVETFRTTEEAIAKANDTIYGLAGAIFSNDIGKAERIASKLRLGTVWINDFHPYFVQAPWGGYKQSGFGRELGKIGLEEYTETKHIFRNKQPQPIGWFRG

SEQ ID NO: 5668 - protein, 478 aa, Burkholderia cepacia R1808
MDITYDALHLFIDGEWIGASERETAPVINPATQIQIGRVPLATAADLDRALQAAVPAFDVWRNTVPAERARILKRAAELMRERAEHIATVMTLEEGKPLAESRDEVLRAADYFEWFAEEARRIDGRVVPSNRPGVQQLVKKQAIGPVAAFTPWNFPAITPARKLSAALAAGCSVIIKPGEESPATALALARALDDAGLPKGVLQVVFGVPDQVSTQLIASPVIRKVTFTGSVPIGRLLSARAAEGVKPITLELGGHGPVLVFNDADVEKAAVEGAANRFRGTGQVCISSTRFLIQREVYDEFVGHFVRATSALKVGNGMDAGTQVGPLANPRQLAKMEELIADAVERGATILAGGKRIEGEGYFFEPTVLADVPKDARVMHEEPFGPIAVLMRFDALADGLAEANRLPYGLSAYAFTSSARTAIDVADGLEAGMIGINQYRIVSTELPFGGMKESGHGSEGGTEGIEYYLTHKFISQA

SEQ ID NO: 5669 - protein, 373 aa, Zea mays
PLWVDVLRATLRHGLAPRVWTDYLRLTVGGTLSNAGIGGQAFRHGPQIANVHELDVVTGTGEMVTCSMDVNSDLFMAALGGVRWVPLAYTDVATFTKDQEFLISNRASQVGFDYVEGQVQLSRSLVEGPKSTPFFSGADVARLAGLASRTGPAAIYYIEGAMYYTKDTAISVDKKMKALLDQLSFEPGFAFTKDVTFVQFLDRVREEERVLRSAGAWEVPHPWLNLFVPRSRILDFDDGVFKALLKDSNPAGIILMYPMNKDRWDDRMTAMTPATNDDDVFYAVSFLWSALSADDVPQLERWNKAVLDFCDRSGIECKQYLPHYTSQDGWRRHFGAKWSRIAELKARYDPRALLSPGQRIFPVPVEASGIASA

SEQ ID NO: 5670 - protein, 467 aa, Caulobacter crescentus CB15
MNAPIRNHDVAELKRLDLAHHLPAQADHKVIAELGGSRIVTRADGCYITDGDGHRILDGMAGLWCVNVGYGRKELADAAYEQMLELPYYNTFFKTATPPTVKLAAKIAEKMGGHLTHVFFNSSGSEANDTVFRLVRHYWKLKGQPNRTVFISRWNAYHGSTVAGVSLGGMKHMHVQGDLPIPGVEHVMQPYPFGEGFGEDPAAFRDRAVKEIEDKILEVGPENVAAFIGEPVQGAGGVIIPPDGYWPAVEAVCRKYGILLVCDEVICGFGRLGQWFGHQHYGIKPDLIAMAKGLSSGYLPISAVGVADHIVAELREKGGDFIHGFTYSGHPTCAAVALKNIEIIEREDLITRTREDTGPYLAKALARLNDHPLVGETRSLGLIGAVEIVREKGTNHRFLDKEGEAGPIVRDICIRNGLMVRAIRDSIVCCPPLIVSHAEIDELVGIIEKSLTEAEPILRALKPEAVS

SEQ ID NO: 5671 - protein, 354 aa, Vitis aestivalis
MRRGPLNPSNLKLTLPPDEDSLTKFLTQSGTFMDGDLLVNRDGVRIVSKSEAEVPPLIKPSDNQLSLADIDTIKVIGKGAGGTVQLVQHKWTGQFFALKVIQMNIQEAALKHIAQELKINQSSQCPYVVVCYKSFYDNGAFSIILEYMDGGSLLDFLKKVKSIPEPYLAAICNQVLKGLSYLHHERHIIHRDLKPSNLLINHRGEVKITDFGVSAILTSTSGQANTFVGTYNYMSPERISGGKYGSKSDIWSLGLVLLECATGQFPYSPPEQGEGWTSFYELMEAIVDQPPPCASTNQFSAEFCSFISACIQKDPNDRKSAHELMAHPFISMYRDLNVDLATYFTNAGSPLATF

SEQ ID NO: 5672 - protein, 244 aa, Haematococcus pluvialis
MATERELALYSAKLSEQAERYPDMVSEMKKIAAGAQDQELSVEERNLLSVAYKNLVGARRASWRILQSVEQSELAKGNEKRVKLIQKYRTVVEKELDEVCGEILSLLDTYLVPSASSVEASVFYLKMKADYHRYLAEFKVDEDRRSAAEKTLEAYKAAQNKATSELPSTNPIRLGLALNFSVFYYEVLNQPDQACSLAKQAFDEAISDLDTLGEDSYKDSALIMQLLRDNLTLWTSEMQDSKPE

SEQ ID NO: 5673 - protein, 119 aa, Vitis aestivalis
MGSSGAVKLACVMVICMVMAAPAAVEAAITCGQVASALSPCISYLQKGGAVPPACCSGIKSLNSSAKTTADRQAACKCLKNFSSTVSGINLSLASGLPGKCGVSVPYKISPSTDCTKVT

SEQ ID NO: 5674 - protein, 147 aa, Glycine max
  misc_feature (72)..(72): Xaa can be any naturally occurring amino acid
DSGALLKLFTSQHLPHTQVGLFNFINMYFPTVSPIKHLIKFCSSLHGGLSKLSEMLEVSRVGIYHQAGSYSXLPSCAFRKLKAHFSSGSLDKYPGVLYGLGVHNAQGSPLQEKKGPINNAIRTKTNQASVDLSLFELLHIWRNTHFY

SEQ ID NO: 5675 - protein, 224 aa, Zea mays
VFRTTLASSTWQRHMRRDLCTSVSPADLARAMVAVDPDHPTGTEGRDPRGMSVLQQHVAFFDRDGDGVVYPWETFKGMRAIGCGFFTSLVLSFLINLVMSYPTQPGWLPSLLLSVHVKNIHKAKHGSDSETYDTEGRFDPSKFDAIFSKYGRTHPDALTKDEMNSMLKANRNIYDFLGWIAAIGEWHLLYSVAKDKDGLLQRETVRGLFDASLFERLQDSKKSS

SEQ ID NO: 5676 - protein, 316 aa, Glycyrrhiza glabra
MAAAAIEIPTKVLPNSTCELRVPVIGMGSAPDFTCKKDTKEAIIEAIKQGYRHFDTAAAYGSETALGEALKEARDLGLVTREDLFVTSKLWVTENHPHLVVPALRKSLETLQLEYLDLYLIHWPLSSQPGKFSFPIQAEDLLPFDVKGVWESMEESLKLGLTKAIGVSNFSVKKLQNLLSVATIRPAVNQVEMNLAWQQKKLREFCNANGIVLTAFSPLRKGASRGPNEVMENDMLKGIAEAHGKSIAQVSLRWLYEQGVTFVAKSYDKERMNQNLQIFDWELTTEDHQKIDQIKQNRLIPGPTKPQLNDLWDDEI

SEQ ID NO: 5677 - protein, 170 aa, Triticum aestivum
VASSATSVAPFQGLKSTAGLPVSRRSNGASLGSVINGGRIRCMQVWPIEGIKKFETLSYLPPLSTEALLKQVDYLIRSKWVPCLEFSKVGFIFREHNASPGYYDGRYWTMWKLPMFGCTDATQVINEVEEVKKEYPDAYVRIIGFDNMRQVQCVSFIAFKPPGCEESGKA

SEQ ID NO: 5678 - protein, 161 aa, Zea mays
  misc_feature (94)..(94): Xaa can be any naturally occurring amino acid
MDARMFGLENPLVAALHHLLDVPDGDAGAGGDKAGGGATRTYVRDARAMAATPADVKELAGAYAFVVDMPGLSTGDIRVQVEDERVLMISGERXRREEREDAKYLRMERRMGKFMRKFVLPDNADVDKVAAVCRDGVLTATVEKLPPPEPKKPKTIEIKVA

SEQ ID NO: 5679 - protein, 317 aa, Zea mays
GRAITCLAARRGGFPPLTQLSSPPSAASSSSQSIADYTADAEWLVTRPPDAAFDYVEGFAFVNSDDPVNGWPSVPIPGGARFDPSLLPAGAGPVLYCLEVALYQYAHRPDDVDDDDEEDQAAVTVSRMMAPLKHVRGLEFAADVGYVDFLSRVNRVEEEARRNGSWDAPHPWLNLFVSARDIADFDRAVIKGMLADGIDGPMLVYPMLKSKWDPNTSVALPEGEVFYLVALLRFCRSGGPAVDELVAQNGAILRACRANGYDYKAYFPSYRGEADWARHFGAARWRRFVDRKARYDPLAILAPGQKIFPRVPASVAV

SEQ ID NO: 5680 - protein, 447 aa, Zea mays
IRLEWGLDGSVWFSSEMKALSDDCERFITFPPGHLYSSKTGGLRRWYNPPWFSETVPSTPYNALFLREMFEKAVIKRLMTDVPFGVLLSGGLDSSLVASVASRHLNETKVDRQWGNKLHTFCIGLKGSPDLKAAREVADYLSTVHHEFHFTVQEGIDALEEVIYHIETYDVTTIRASTPMFLMSRKIKSLGVKMVISGEGSDEIFGGYLYFHKAPNKKEFHEETCRKIKALHLYDCLRANKATSAWGVEARVPFLDKSFISVAMDIDPEWKMIKRDLGRIEKWVIRNAFDDDERPYLPKHILYRQKEQFSDGVGYSWIDGLKDHASQHVSDSMMMNAGFVYPENTPTTKEGYYYRMIFEKFFPKPAARSTVPGGPSVACSTAKAVEWDASWSKNLDPSGRAALGVHDAAYEDTAGKTPASADPVSDKGLRPAIGESLGTPVASATAV

SEQ ID NO: 5681 - protein, 324 aa, Candida tropicalis
MSTTPTIPTIKLNSGYEMPLVGFGCWKVNNETAADQIYNAIKTGYRLFDGAEDYGNEKEVGEGINRAIKEGLVKREELFITSKLWNNFHDPKNVETALNKTLSDLNLDYVDLFLIHFPIAFKFVPIEEKYPPGFYCGDGDNFHYEDVPLLDTWKALEKLVEAGKIKSIGISNFTGALIYDLIRGATIKPAVLQIEHHPYLQQPKLIEYVQKAGIAITGYSSFGPQSFLELESKRALNTPTLFEHETIKSIADKHGKSPAQVLLRWATQRNIAVIPKSNNPERLAQNLSVVDFDLTKDDLDNIAKLDIGLRFNDPWDWDNIPIFV

SEQ ID NO: 5682 - protein, 211 aa, Glycine max
MHVNVTILPRVRPRVRPRVRGRVGGPRVRPRVRKKLGFVTLSFACESESNNNQSIIMSSAKKITLKSSDGEAFEVDEAVALESQTIKHMIEDDCADSGIPLPNVTSKILAKVIEYCKKHVEAANPEDKPSEDDLKAWDADFVKVDQATLFDLILAANYLNIKSLLDLTCQTVADMIKGKTPEEIRKTFNIKNDFTPEEEEEVRRENQWAFE

SEQ ID NO: 5683 - protein, 336 aa, Glycine max
  misc_feature (304)..(304): Xaa can be any naturally occurring amino acid
AEFTLYTTCKLLRKGTPSCGKSRSGNPNNNNLFDGRQGESDHWSELDTDLYNWTKALRPVQWFPGHIAKAEKELKEQLKLMDVVIEVRDGRIPMSTSHPQMDLWLGNRKRILVLNREDMISTADRNAWADYFTRNGTKVVFSNGQLGMGTMKLGRLAKELAADVNVKRRSKGLLPRAVRAGIVGYPNVGKSSLINRLLKRRMCPAAPRPGVTRELRWVRFGKDLELLDSPGILPMRISDQSAAIKLAICDDIGERSYDVADVAAILVQMLSKLPTVGRDALCKRYKIDVDCRDGRIFIEKLAVXVFNGDVHQAAFRVLADFRKGKFGWTALERPPK

SEQ ID NO: 5684 - protein, 502 aa, Streptomyces avermitilis MA-4680
MRPGRQSAMTELVEHGQLFIGGVLADPLGKDVIEVISPHTEEVIGRVPHASTADVDRAVAVARKAFDEGPWPRATLDERIEVVTRIKDAIAVRHEEIARVISSENGSPYSWSVLAQALGAMMVWDAAITVARNFTYEETRDGVLGKIVVRREPVGVVAAVVPWNVPQFVAAAKLAPALLTGCTVVLKPSPESPLDAYLLGEIAREAGLPEGVLSILPADREVSEYLVGHPGIDKVSFTGSVAAGRRVMEVASRNLTRVTLELGGKSAAVVLPDADITTSVPGIVSAAWMNNGQACVAQTRILVPRSRYDEFADAFAAAASALVVGDPLDPATQVGPLVARRQQRRNLDYIRIGQEEGAKILTGGGRPPGLDRGWYVEPTLFGDVDNSMRIAREEIFGPVICLLPYGDETEAVKIANDSDYGLSGSVWTADVEHGIDVARRVRTGTYSVNTFSLDMLGPFGGYKNSGLGREFGPEGYGEFLEHKMIHLPAGYEAPTGVEGAGA

SEQ ID NO: 5685 - protein, 120 aa, Triticum aestivum
MRDAVLLRCDASMAAGSTSYGSSSGRRSFLAQAATAKQRRAPAPAGNGGKSDGGGYFGPEAAVVLALMTAALLVLPLLLPPLPPPPPLFLFVPVAILAVLLLLVLLPSDARGLRVAPSYL

SEQ ID NO: 5686 - protein, 374 aa, Petroselinum crispum
MESSSAATADHTHIKGVPTHGGRYVQYNVYGNLFEVSRKYVPPIRPVGRGAYGIVCAAMNSDTREEVAIKKIGNAFDNRIDAKRTLREIKLLRHMNHENVIAIKDIIRPPQIESFNDVYIVYELMDTDLHQIIRSNQQLTDDHCRYFLYQLLRGLKYVHSANVLHRDLKPSNLLLNANCDLKIGDFGLARTTSETDFMTEYVVTRWYRAPELLLNCSEYTAAIDIWSVGCILGEVMTRQPLFPGKDYVHQLRLITELIGSPDDASLGFLRSDNARRYVRQLPQYPKQQFSARFLNKSPGALDLLEKMLIFDPNRRITVDEALCHPYLAALHDINEEPVCPRPFSFDFEQPTCTEENIKELIWKESVKFNPDPIL

SEQ ID NO: 5687 - protein, 216 aa, Glycine max
FSRPGEYSGLEHQVVRGVVESLKIITRQASLRVAEYAFHYAKAHGRERVSAIHKANIMQKTDGLFLKCCREVAEKYPEITYEEVVIDNCCMMLVKNPALFDVLVMPNLYGDIISDLCAGLVGGLGLTPSCNIGEGGIALAEAVHGSAPDIAGKNLANPTALLLSGVTMLRHLNLHDKAEQIQKAILNTIAEGKYRTADLGGSSKTTEFTKAIIDHL

SEQ ID NO: 5688 - protein, 375 aa, Rhodococcus equi
GVTRNYTAEQVVKLQGTVVEEATLARRGSEILWDLVNNEDYINSLGALTGNQAVQQVRAGLKAIYLSGWQVAGDANLSGHTYPDQSLYPANSVPQVVRRINNALLRADEIAKVEGDTSVDNWLAPIVADGEAGFGGALNVYELQKAMIAAGVAGSHWEDQLASEKKCGHLGGKVLIPTQQHIRTLTSARLAADVADVPTVVIARTDAEAATLLTSDVDERDREFLDGTRTAEGFYGVKNGIEPCIARAKAYAPYSDLIWMETGVPDLEVAKKFAEAVRSEFPDQLLAYNCSPSFNWKAHLDDATIAKFQKELGAMGFKFQFITLAGFHSLNYGMFDLAHGYAREGMTAFVDLQEREFKAAEERGFTAIKHQREVG

SEQ ID NO: 5689 - protein, 472 aa, Aspergillus nidulans FGSC A4
MSSPLSNSKRKRADSQHLSTADIAKSSTTDLLQPSSRDASGEEGDESTGPIISPVKASNNPPPKRARKASVSEGQSGDAGKDTSISKEDPGEPSETTPASSDIETHTKTRPGLHLNTKPDEELMKPPVLGKLQDPAGGYKTNPPPVGRPVRVYADGVFDLFHVGHMRQLEQAKKAFPDVYLIVGVTGDKETHERKGLTVLSGAERAESVRHCKWVDEVFPNCPWIVTPEFMEEHKIDYVAHDDLPYGAAEGDDIYAPIKAQGKFLVTQRTEGVSTTGVITRIVRDYDRYISRQFKRGASRQELNVSWLKKNELEIKRHVSELRDSIMTNWTNTGQELSRELRQLWNSRPNSPAPSTRTSMDWGSSRGVVSPTAGGKSHVSRVEALGRTESITGREPDFATGYSLGLIGGVRAWKAEASHQPVKKNTSLNWNAATVRDPPNLSGKLAVHRMCRTGEVTFMIFIFEAILGHIGT

SEQ ID NO: 5690 - protein, 376 aa, Vitis aestivalis
MGCFPCAGKSNKKGKKNQEKNSKDQIPSTSERLKVNSSVDGRKDASKDGGSDHIAAHTFTFRELAAATKNFRAECLLGEGGFGRVYKGRLESTNKIVAIKQLDRNGLQGNREFLVEVLMLSLLHHPNLVNLIGYCADGDQRLLVYEYMALGSLEDHLHDLPPDKKRLDWNTRMKIAAGAAKGLEYLHDKASPPVIYRDLKCSNILLGEGYHPKLSDFGLAKLGPVGDKTHVSTRVMGTYGYCAPEYAMTGQLTLKSDVYSFGVVLLEIITGRKAIDNSKAAGEHNLVAWARPLFKDRRKFSQMADPMLHGQYPLRGLYQALAVAAMCVQEQPNMRPLIADVVTALTYLASQKYDPETQPVQSSRMGSSTPRSRREL

SEQ ID NO: 5691 - protein, 482 aa, Caulobacter crescentus CB15
MTALNLVETAALIDGQWVRGEASFDVLNPADGTLIAAVADLGAAETTLAIDAAHRALPAWAARTAKERGAILRRWSDLILAHADDLARLMTDEQGKPLAEAKGEVVYGASFIDWFAEEAKRAYGHTIPTPMPGKRLASIKQPVGVCAAIAPWNFPIAMITRKVGPALAAGCTVVVKPAAETPLSALAIARLATEAGVPAGVLNIVTTTRSSEVGKVLCDDSRVRKLSFTGSTPIGKVLYQQCAGTMKKLSLELGGNAPFIVFDDADLEAAVDGAIASKYRNAGQTCVCANRLIVQSGIHDAFAARLAEKVAALKVGPGTGEGVQIGPLINEKALTKVVGLVSGAVQAGAEVLTGGDVHGLGGHFYQPTVLVGATPEMRIFQEEIFGPVAPIVKFETEAEAVELANATPFGLAAYFYSRDVGRCWRVAEQIEAGMVGINEGLISTEVAPFGGVKESGLGREGASEGLDEYLETKYLCFGGVAG

SEQ ID NO: 5692 - protein, 121 aa, Triticum aestivum
MAGCCVFLRRPSTSSAHRLGYHSLDGDHEAGPPPAATVTVVVGKERRVFAVDQLVLDTYPFRVLLETAARKEERRGKALFVDVDAILFEHILWLAGCHDRSAVSLLQPDLQDIIDFYSQDA

SEQ ID NO: 5693 - protein, 411 aa, Candida albicans
  misc_feature (207)..(207): Xaa can be any naturally occurring amino acid
MDNHQQQQQLQQYQQQFQQPQQQLYPGEQIVHPAAAQTGQNTTNVTAVSSSNITQSATSSLHSQQLQHVDVSKSAAEEAIRRSLLPERSTVSKGKYSLTDFSIMRTLGTGSFGRVHLVRSVHNGRYYAIKVLKKHQVVKMKQVEHTNDERRMLKLVEHPFLIRMWGTFQDSKNLFMVMDYIEGGELFSLLRKSQRFPNPVAKFYAAXVTLALEYLHSHDIIYRDLKPENILLDRNGHIKITDFGFAKEVSTVTWTLCGTPDYIAPEVITTKPYNKSVDWWSLGVLIFEMLAGYTPFYDSTPMKTYEKILAGKIHYPSFFQPDVIDLLTKLITADLTRRLGNLINGPADIRNHPWFSEVVWEKLLAKDIETPYEPPITAGVGDSSLFDHYPEEQLDYGSQGEDPYASYFLDF

SEQ ID NO: 5694 - protein, 496 aa, Caulobacter crescentus CB15
MTLPADMTERLAKLAPPSQAVIDGDLVEAASGATFHNVSPRDGQVLNLVTACQADDVERAVAGARAAFEDGRWRDQGPRQKKAVLFRLAELMERDADELALLESLDVGKPISDARNVDIPLAINTCRWYAEALDKVYGEVGTSPADRLSYAVHEPLGVIGAIVPWNFPLHMAMWKVAPALAMGNSVVLKPAEQSPLTALKLGALALEAGLPPGVLNVIPGLGGVAGEALALSMDVDMIAFTGSGPVGRRLMEYSARSNLKRVSLELGGKSPQIVFADCPDLEAAAQAAAWGVFYNQGEVCTAASRLLVEAPIKDAFLARVIEVAKGMKVGDPLDPSTQFGAMVSERQMNTALDYIATADSQGARRVLGGQRVRQEAGGFYVEPTIFDQVRPDQTLAREEVFGPVLGVMTFSSEDEAMRLANDTVYGLAAGLWTADVSKALRGARRLKAGLVWVNGWDACDITMPFGGFKQSGFGRDRSLHALHKYADLKSVSVTLR

SEQ ID NO: 5695 - protein, 173 aa, Flaveria pringlei
MASIPATVATVAQANMVAPFTGLKANAAFPVTKKVNDFSTLPSNGGRVQCMKVWPPLGKKKYETLSYLPDLTEVQLAKEVDYLLRNKWVPCLEFELEHGFVYRENARSPGYYDGRYWTMWKLPMFGCTDSAQVMKELQECKKEYPQAWIRIIGFDNVRQVQCISFIASKPGGF

SEQ ID NO: 5696 - protein, 110 aa, Arabidopsis thaliana
MSGVWVFKNGVIRLVENPNQSGSDTQNRRKVMVYLPTGEVVSSYSTLEQILQSLGWERYFGGGDTDLLQFHKRSSIDLISLPRDFTKFNSVYMYDIVVKNPNYFHVRDSH

SEQ ID NO: 5697 - protein, 439 aa, Caulobacter crescentus CB15
MPDFGANDLDAFWMPFTPNRRFKRHPRMLSSASGMWYRTPESREVLDATSGLWCVNAGHDRPKIREAIQKQAAEMDYAPCFNMGHPLAFQFASRLAQITPKGLDRIFFTNSGSESVDTALKIALAYHRARGKGTKTRLIGRERGYHGVGFGGISVGGIPKNRMYFGSLLTGVDHLPHTHGLPGNTCAKGQPENGAHLADDLERIVALHDASNIAAVIVEPVAGSTGVLIPPKGYLERLRAICDKHDILLIFDEVITGFGRVGAPFAAERFGVTPDLICMAKGLTNAAVPCGAVAASGKIYDAMMDGADAPIELFHGYTYSAHPLACAAGLATLETYREDDLFARAAGLEGYWQDAMHSLADARHVVDVRNLGLVAGIELEPRPGAPTARAMEVFETCFDEGLLIRVTGDIIALSPPLILEKDHIDRMVETIRRVLGQVD

SEQ ID NO: 5698 - protein, 315 aa, Glycyrrhiza glabra
MAAAIEIPTKVLPNSTCELRVPVIGMGSAPDFTCKKDTKEAIIEAIKQGYRHFDTAAAYGSETALGEALKEARDLGLVTREDLFVTSKLWVTENHPHLVVPALRKSLETLQLEYLDLYLIHWPLSSQPGKFSFPIQAEDLLPFDVKGVWESMEESLKLGLTKAIGVSNFSVKKLQNLLSVATIRPAVNQVEMNLAWQQKKLREFCNANGIVLTAFSPLRKGASRGPNEVMENDMLKGIAEAHGKSIAQVSLRWLYEQGVTFVAKSYDKERMNQNLQIFDWELTTEDHQKIDQIKQNRLIPGPTKPQLNDLWDDEI

SEQ ID NO: 5699 - protein, 497 aa, Pseudomonas putida KT2440
MTTLTRADWEQRAQQLKIEGRAFINGEYTDAVSGETFECLSPVDGRFLAKVASCDLADANRAVENARATFNSGVWSQLAPAKRKAKLIRFADLLRKNVEELALLETLDMGKPIGDSSSIDIPGAAQAIHWTAEAIDKVYDEVAPTPHDQLGLVTREPVGVVGAIVPWNFPLLMACWKLGPALATGNSVVLKPSEKSPLTAIRIAQLAIEAGIPAGVLNVLPGYGHTVGKALALHMDVDTLVFTGSTKIAKQLMVYAGESNMKRIWLEAGGKSPNIVFADAPDLQAAAEAAASAIAFNQGEVCTAGSRLLVERSIKDKFLPMVVEALKGWKPGNPLDPQTTVGALVDTQQMNTVLSYIEAGHKDGAKLLAGGKRTLEETGGTYVEPTIFDGVTNAMRIAQEEIFGPVLSVIAFDTAEEAVAIANDTPYGLAAGIWTSDISKAHKTARAVRAGSVWVNQYDGGDMTAPFGGFKQSGNGRDKSLHALEKYTELKATWIKL

SEQ ID NO: 5700 - protein, 309 aa, Bartonella vinsonii subsp. berkhoffii
ITYIDGNKGVLLYRGYPIEQLAEKGDFLESCYLLLYGELPTQQEKSDFDRCIMQHTMVHEQFARFFHGFRRDSHPMAVMVACLGAMSAFYHDSIDIIDPQQRMIASVRLISKVPTLAAMAYKYSIGQAFVYPRNDLSYAANFLRMCFSVPCEEYKTNPVLTRAMDRIFILHADHEQNASTSTVRLAGSSGANPFACIAAGVACLWGPAHGGANEACLKMLLEIGSVKRIPEFIARAKDKNDPFRLMGFGHRVYKNYDPRAKIMQKTCHEVLKELNIQNDPLLDIAIELEKIALNDEYFVEKKLYPSVDF

SEQ ID NO: 5701 - protein, 305 aa, Saccharomyces cerevisiae
MSSSSQFKQLEKLGNGTYATVYKGLNKTTGVYVALKEVKLDSEEGTPSTAIREISLMKELKHENIVRLYDVIHTENKLTLVFEFMDNDLKKYMDSRTVGNTPRGLELNLVKYFQWQLLQGLAFCHENKILHRDLKPQNLLINKRGQLKLGDFGLARAFGIPVNTFSSEVVTLWYRAPDVLMGSRTYSTSIDIWSCGCILAEMITGKPLFPGTNDEEQLKLIFDIMGTPNESLWPSVTKLPKYNPNIQQRPPRDLRQVLQPHTKEPLDGNLMDFLHGLLQLNPDMRLSAKQALHHPWFAEYYHHAS

SEQ ID NO: 5702 - protein, 104 aa, Triticum aestivum
  misc_feature (58)..(58): Xaa can be any naturally occurring amino acid
  misc_feature (80)..(80): Xaa can be any naturally occurring amino acid
  misc_feature (89)..(89): Xaa can be any naturally occurring amino acid
MAPTVMAWSDTSVAPFQGLKSTAGLPVSRRSNGASLGSVSNGGRIRCMQVWPIEGIKXIRDLSYLPTLNKEASSSKSTNXFAPNWVPCXSSTKVGSTSVNGMPV

SEQ ID NO: 5703 - protein, 425 aa, Triticum aestivum
  misc_feature (42)..(42): Xaa can be any naturally occurring amino acid
  misc_feature (240)..(240): Xaa can be any naturally occurring amino acid
  misc_feature (273)..(273): Xaa can be any naturally occurring amino acid
  misc_feature (293)..(293): Xaa can be any naturally occurring amino acid
  misc_feature (334)..(334): Xaa can be any naturally occurring amino acid
  misc_feature (342)..(342): Xaa can be any naturally occurring amino acid
SKSRTQPETSKQPLPSLLLLCSSSLQSTLLASHRPIRWTAPXPARGRLAVLSSHLLAAGADPAAALERSPASAAAPGTRAGVLAVVDSRTGKRYEVKVSEDGTVRATDFKKITAGKDDKGLKTYDPGYLNTAPVRSSICYIDGDEGILRYRGYPIEEVAESSSFVEVAYLLMYGNLPSQSQLAAWEFAISQHSAVPQGLLDIIQSMPHDAHPMGVLASAMSTLSVFHPDANPALRGQDLXPSQTTRRALRALHNRGKMAAGDYQGLLVSSFVXLPSITIAFLVNFVYMLDDMXDINYQLNRLLESLLDLLVEHEANRETTCARALVRHLVSGGXVDVFTALXLAVGALFGALQRGSIECLMRLELVGVRVYTNYVHGVKVRRQKMSDVGHRVCRDSLTGATVIRKLAEEVVSIVRRDPLNEDAVS

SEQ ID NO: 5704 - protein, 431 aa, Vibrio cholerae O1 biovar eltor str. N16961
MVMADKKATLHIEGKAPIELPIMDGSLGPQVIDVRTLGSNGYFTFDPGFLATASCESQITYIDGAKGILLHRGYPIDQLANNADYLEVCYILLYGEAPNRKQYEEFKKIVTRHTMVHEQIASFFHGFRRDAHPMAVMCGVVGALAAFYHDSLDINNDTHREIAAYRLLSKMPTLAAMCYKYSVGQPFIYPRNDLSYAENFLHMMFATPCEEYEVNPIVARAMDKIFTLHADHEQNASTSTVRLAGSSGANPFACIAAGIASLWGPAHGGANEACLRMLEEIGSVDKIPEYVRRAKDKDDPFRLMGFGHRVYKNYDPRATVMREACHEVLKELSIQDPLLDVAMELERIALSDEYFIEKKLYPNVDFYSGIILKAIGIPVSMFTVIFAMSRTIGWIAHWNEMHSDPDNRIGRPRQLYTGQKLRDFTPLHERS

SEQ ID NO: 5705 - protein, 511 aa, Glycine max
  misc_feature (407)..(407): Xaa can be any naturally occurring amino acid
MEPNQLFSTHFRDGTIASCIEGQHRGAIPSVIVIGAGISGLAAARSLHDASFKVTVLESRDRLGGRIHTDFSFGCPVDMGASWLHGVCNENPLAPLIRGLGLSLYRTSGDNSVLYDHDLESYMLFNIDGKQVPQQMVIEVGDIFKKILEETGKVRDEHTEDISVSQAISIVLDRHPELRQQGLAHEVLQWFICRMEAWFAADADMISLKTWDQEHVLSGGHGLMVQGYDPIIKVLAKDIDICLNQRVKMISSGYNKVMVTVEDGRNFVADAAIITVPIGILKANLIQFEPKLPDWKVSAISDLGVGNENKIALRFDKVFWPNVELLGTVAPTSYTCGYFLNLHKATGHPVLVYMVAGRFAYDIEKLSDEAAANFVMQQLKKMFPNSSKPVMSASYLRTLTSLFVGLXVQYLVSRWGTDPNSLGCYSYDLVGKPLDVYDKLRAPLGNLFFGGEAVSLDNQGSVHGAYSAGVMAAENCESYLLEKLGHVEKLSLASVRHEMLETLIPLQISRM

SEQ ID NO: 5706 - protein, 140 aa, Ralstonia eutropha JMP134
MTNLRHFDPFSVEPISDMLQGMLRSFRGTADNGLAFKVDVSESESAYTLAAELPGVKKEDIDVSVDRGTVMISAKVEKSSEQKEGERVIRRERYSGSMQRAFTLDASIDEGKVEASYDNGVLRVVLPKKETSPQQRITVK

SEQ ID NO: 5707 - protein, 345 aa, Glycine max
MLLLERQRILLRAADLLEKHNDELAALETWDNGKPYEQAAKIEVPMLVRLIRYYAGWADKIHGLTVPADGPYHVQTLHEPIGVAGQIIPWNFPGKVVLELAAKSNLKPVTLELGGKSPFIVCEDADVDQAVELAHFALFFNQGQCCCAGSRTFVHESVYDEFVEKAKARALKRVVGDPFKGGIEQGPQIDSDQFEKILRYIRSGVESGATLETGGDKLGNKGFYIQPTVFSNVKDGMLIARDEIFGPVQSILKFKDLGEVVQRANNTRYGLAAGVFTTNMDTAYTLTRALRVGTVWINCFDTFDAAIPFGGYKMSGQGREKGEYSLKNYLQVKAVVNPLKNPAWL

SEQ ID NO: 5708 - protein, 339 aa, Arabidopsis thaliana
MGEAVEVMFGNGFPEIHKATSPTQTLHSNQQDCHWYEETIDDDLKWSFALNSVLHQGTSEYQDIALLDTKRFGKVLVIDGKMQSAERDEFIYHECLIHPALLFHPNPKTVFIMGGGEGSAAREILKHTTIEKVVMCDIDQEVVDFCRRFLTVNSDAFCNKKLELVIKDAKAELEKREEKFDIIVGDLADPVEGGPCYQLYTKSFYQNILKPKLSPNGIFVTQAGPAGIFTHKEVFTSIYNTMKQVFKYVKAYTAHVPSFADTWGWVMASDHEFDVEVDEMDRRIEERVNGELMYLNAPSFVSAATLNKTISLALEKETEVYSEENARFIHGHGVAYRHI

SEQ ID NO: 5709 - protein, 213 aa, Brassica napus
RPTRPGTLQSPGGSILWNGINTGARMRSSGSDWWYEDVSYLSVDLFRRLIKTMETKGIRAESLVGAMVYYARKYLPGLGRWQSRTSGSNNNKSRTSVVSFSLAAASSSSSSMSPVDQIALLETILSLLPEKRGRSFCKFLLCLLRVAFILGVDGSCVKQLERRIGMQLELATLENLLILNYSDSDTLYNVDCVERMIRHFVSSSSSSELSDFS

SEQ ID NO: 5710 - protein, 124 aa, Desulfitobacterium hafniense DCB-2
MSKTAEILEAVKGLTVLELAELVKAFEEEFGVSAAAPVAVAAAPGAAAAPVAEEQTEFDVVLMNAGAGKINVIKVVREITGLGLKEAKELVDGAPKPVKEKVSKDDAEAIKAKLVEAGATVEVK

SEQ ID NO: 5711 - protein, 272 aa, Zea mays
MTSASELFTARRAARGARISDLDLDPHADALRDQHGLGARHRRRGCRPRRQLDAAGDVRQHLHTGAPPPRRRGSYTDQILSYIDNNNLGVGDSAARRNRLDRLMFRTNERLPGAVLQAQARVLERLRGISLGSSASRPSISLDEFSASDVFRIIDFRNREARHEANRHHSSWFHPSSESDEERPTVSSTHSNRSTGLTKAAFLRLQVEIFEASKDDSREASPECSICLDGFYDGDELIRLRCGHRFHSTCLEPWARKCADCPYCRTNIRSRS

SEQ ID NO: 5712 - protein, 183 aa, Glycine max
  misc_feature (153)..(153): Xaa can be any naturally occurring amino acid
MEECHTVFGKYEMGRLLGKGTFAKVYYGKQISTGENVAIKVINKEQVRKEGMMEQIKREISVMRLVRHPNVVEIKEVMATKTKIFFVMEYVRGGELFAKISKGKLKEDLARKYFQQLISAVDYCHSRGVSHRDLKPENLLLDEDENLKISDFXGLSALPEQLRYDGLLHTQCGTPAYVAPGVL

SEQ ID NO: 5713 - protein, 122 aa, Vigna angularis
MIQPQTHLNVADNSGARELMCIRILGASNRRYAYIGDIVVAVIKQAVPNTNLERSEVIRAVIVRTCKQLKRSNGIIIQYDDNAAVIIDQEGNPKGTRIFCAIARELRQLNFTKIVSLAPEVL

SEQ ID NO: 5714 - protein, 451 aa, Staphylococcus epidermidis ATCC 12228
MANTRELNHKDAQYVWHPFTQMGVYAKNDNIIIEKGRGSYLYDTEGNKYLDGYASLWVNVHGHQHKKLNKAIHKQLDKIAHSTLLGSSNIPSIELAEQLVKLTPDRLQKVFYSDTGSASVEIAIKMAYQYWKNIDAKQYAKKNKFLTLHHGYHGDTIGSVSVGGIDSFHKIFKDLIFENIQIETPCLYKSKYRNEAEMLNSILNQIENILSERNDEIVGFILEPLIQGATGLFVHPHGFLKAVEQLCRKYDVLLICDEVAVGFGRTGEMFACNHEDVQPDIMCLGKAITGGYLPLAATLTSQKIYDAFLSQSHGKNTFFHGHTYTGNQLVCSVALENINLFKKKHLIGHIQKTSQTLKQRLEALQPHKNIGDIRGRGLMYGVELVENKSTQTPLDIPTVELIIRRCKENGLMIRNLENVITFVPILSMSNKEIKKMVKIFNKALHQTLGKK

SEQ ID NO: 5715 - protein, 169 aa, Triticum aestivum
  misc_feature (92)..(92): Xaa can be any naturally occurring amino acid
  misc_feature (100)..(100): Xaa can be any naturally occurring amino acid
  misc_feature (107)..(107): Xaa can be any naturally occurring amino acid
  misc_feature (126)..(126): Xaa can be any naturally occurring amino acid
  misc_feature (154)..(154): Xaa can be any naturally occurring amino acid
MAPTVMASSATSVAPFQGLKSTAGLPVSRRSNGASLGSVSNGGRIRCMQVWPIEGIKKFETLSYLPPLSTEALLKQVDYLIRSKWVPCLEFXSKVGFIFXREHNASXPGYYDGRLLGQCWKLPMFXGATDATQVINEVEEVKEGVPDAYVRIIXGFDNMRQVQCVSSSP

SEQ ID NO: 5716 - protein, 254 aa, Methanococcoides burtonii DSM 6242
MASYKLMVKDVIKQADILLEVVDARFPDETRNLEVERDVKRSGKPLIIVLSKCDLVSKETLQKAKSRLSKVAPTVFVSSKERYGTTMLRHKILEIADIQGRNILIGSLGYPNTGKSSVINGVAGKNKAGTSSISGHTKGVQIVKAGSRIVFIDTPGVIPFGDNDEYRQGLLGVKDATHLNDPIGVAMKIIAHICDNNKSVLEEFYNIEIKENNPEKVLELIGLKGNCLKKGGEVDEMRIAIKIINDWQRGKMLI

SEQ ID NO: 5717 - protein, 202 aa, Escherichia coli
LRPVRYYQGTPSPVKHPELTDMVIFRENSEDIYAGIEWKADSADAEKVIKFLREEMGVKKIRFPEHCGIGIKPCSEEGTKRLVRAAIEYAIANDRDSVTLVHKGNIMKFTEGAFKDWGYQLAREEFGGELIDGGPWLKVKNPNTGKEIVIKDVIADAFLQQILLRPAEYDVIACMNLNGDYISDALAAQVGGIGIAPGANIG

SEQ ID NO: 5718 - protein, 113 aa, Rickettsia sp. ATT
VNEAVINMLKEIGSSEYIPKYIAKAKDKNDPFRLMGFGHRVYKNYDPRAAVPKETCKEVLKELGQLDNNPLLQIAIELEAIALKDEYFIERKLYPNVDFYSGIIYKAMGIPSQ

SEQ ID NO: 5719 - protein, 178 aa, Flaveria pringlei
MASISSTVATVSRAAPAQANMVAPFTGLKSNVAFPATKKANDFSTLPSNGGRVQCMKVWPPLGKKRYETLSYLPNLTEAQLAKEVDYLLRNKWVPCLEFELEHGFVYRENARSPGYYDGRYWTMWKLPMFGCTDSAQVMKELQECKKEYPQAWIRIIGFDNVRQVQCISFIASKPEGF

SEQ ID NO: 5720 - protein, 173 aa, Flaveria pringlei
MASIPATVATVAQANMVAPFTGLKSNAAFPVTKKVNDFSTLPSNGGRVQCMKVWPPLGKKRYETLSYLPNLTESQLAKEVDYLLRNKWVPCLEFELEHGFVYRENARSPGYYDGRYWTMWKLPMFGCTDSAQVMKELQECKKEYPQAWIRIIGFDNVRQVQCISFIASKPDGF

SEQ ID NO: 5721 - protein, 286 aa, Pseudomonas syringae pv. tomato str. DC3000
MSDYQETLYEGYGQRFRMEKMLHEVRTEHQHLVIFQNPRMGRVMALDGVIQTTEADEFIYHEMLTHVPILAHGAAKRVLIIGGGDGGMLREVAKHLTVEHITMVEIDATVVEMCKEFLPNHSSGAFDDSRLNLVIDDGMRFVATTEEKFDVIISDSTDPIGPGEVLFSENFYQACHRCLNEGGILVTQNGTPFMQLSGVQTTAGRMNGLFADWHFYQAAIPTYIGGAMTFAWGATDKSYRKLPLETLRQRFSGSGIVTRYYNPEVHIGAFALPQYVLHAVNKASND

SEQ ID NO: 5722 - protein, 178 aa, Flaveria pringlei
MASISSTVATVSRAAPAQANMVAPFTGLKSNAAFPATKKANDFSTLPSNGGRVQCMKVWPPLGKKKYETLSYLPNLTEAQLAKEVDYLLRNKWVPCLEFELEHGFVYRENARSPGYYDGRYWTMWKLPMFGCTDSAQVMKELQECKKEYPQAWIRIIGFDNVRQVQCISFIASKPDGF

SEQ ID NO: 5723 - protein, 432 aa, Amycolatopsis mediterranei
MTMTVQKAPSQLLAAKLQIPPIPYSHAAGSWVYASDGTRYLDGASGIVNVNIGHAHPTVVAALRDQVGICTYASPGTFAPDLMEQLAAAAARAVHRPDDRVMFTPTGTHATESAIALARLVQRARGEEGRHKILTSTLGYHGNSAFVLALSGHRSRRPHEDDSFGLAPAFNPPYPGQHLGCPFDACRVECVRAVRDAIVAAGPESVAAVLMEPVNGTTGGGYVPPAGYLRALREVCDEFGVLVIHDEVLTGLGRCGLPLASHHTPGSAADIVTLSKGLGAGYVPLAATMLSPDLAEDIMTSGKWLPLMGTMSATPLQGRAGLAVLSVLEELGALDRDEVRGAALGRLVADAVRGRQVVTDVRGLGYFYGIELAPGTLGDVMRITRSRGLLLYPYVGFRPDRTGEGLLVAPRSTRPTAISASSARRWARHWTS

SEQ ID NO: 5724 - protein, 201 aa, Triticum aestivum
LMNQDKVLMESWYYLKDAVLDGGIPFNKAYGMSAFEYHGTDPRFNRVFNEGMKNHSIIITKKLLELYKGFNGVGTLVDVGGGIGATVGAITAHYPTIKGINFDLSHVISEAPPFPGVTHVGGDMFQKIPSGDTILMKWILHDWSDEHCATLLKNCYDALPTHGKVMLVECILPVNPEATPKAQGGFHLDMIMLAHNPGGKE

SEQ ID NO: 5725 - protein, 113 aa, Rickettsia sp. HOT1
ANEAVINMLKEIGSSEYIPKYIAKAKDKNDPVRLMGFGHRVYKNYDPRAAILKETCKEVLKELRQLDNNPLLQIAIELEAIALKDEYFIERKLYPNVDFYSGIIYKAMGIPSQ

SEQ ID NO: 5726 - protein, 338 aa, Escherichia coli CFT073
MISSGQTGYIPLTSCLKRNTIMTDKLTSLRQYTTVVADTGDIAAMKLYQPQDATTNPSLILNAAQIPEYRKLIDDAVAWAKQQSNDRAQQIVDATDKLAVNIGLEILKLVPGRISTEVDARLSYDTEASIAKAKRLIKLYNDAGISNDRILIKLASTWQGIRAAEQLEKEGINCNLTLLFSFAQARACAEAGVFLISPFVGRILDWYKANTDKKEYAPAEDPGVVSVSEIYQYYKEHGYETVVMGASFRNIGEILELAGCDRLTIAPALLKELAESEGAIERKLSYTGEVKARPARITESEFLWQHNQDPMAVDKLAEGIRKFAVDQEKLEKMIGDLL

SEQ ID NO: 5727 - protein, 173 aa, Flaveria pringlei
MASIPATVATVAQANMVAPFTGLKSNAAFPVTKKVNDFSTLPSNGGRVQCMKVWPPLGKKRYETLSYLPNLTEVQLAKEVDYLLRNKWVPCLEFELEHGFVYRENARSPGYYDGRYWTMWKLPMFGCTDSAQVMKELQECKKEYPQAWIRIIGFDNVRQVQCISFIASKPDGF

SEQ ID NO: 5728 - protein, 270 aa, Schizosaccharomyces pombe
MSTTSREDAVYLAKLAEQAERYEGMVENMKSVASTDQELTVEERNLLSVAYKNVIGARRASWRIVSSIEQKEESKGNTAQVELIKEYRQKIEQELDTICQDILTVLEKHLIPNAASAESKVFYYKMKGDYYRYLAEFAVGEKRQHSADQSLEGYKAASEIATAELAPTHPIRLGLALNFSVFYYEILNSPDRACYLAKQAFDEAISELDSLSEESYKDFTLIMQLLRDNLTLWTSDAEYSAAAAGGNTEGAQENAPSNAPEGEAEPKADA

SEQ ID NO: 5729 - protein, 74 aa, Triticum aestivum
LFFRLALILIQRRHIEQVKVVLPAILRVMHANLSECDGEHGMSAVDLFSAALRIGNAIQEMCKTMVNHRKEELC

SEQ ID NO: 5730 - protein, 187 aa, Pisum sativum
MEFKATELRLGLPGITEEEEKKIIHGSSVVKNNNKRQLPQTSEESVSISKVTNDEHIVESSSAAPPAKAKIVGWPPIRSYRKNSLHEADVGGIFVKVSMDGAPYLRKIDLRVYGGYSELLKALETMFKLTIGEYSEREGYKGSEYAPTYEDKDGDWMLVGDVPWDVTSCKRLRIMKGTEAKGLGCGV

SEQ ID NO: 5731 - protein, 173 aa, Flaveria pringlei
  misc_feature (63)..(63): Xaa can be any naturally occurring amino acid
  misc_feature (172)..(172): Xaa can be any naturally occurring amino acid
MASIPATVAAVAQANMVAPFTGLKANAAFPVTKKVNDFSTLPSNGGRVQCMKVWPPLGKKKYXTLSYLPNLTEAQLAKEVDYLLRNKWVPCLEFELEHGFVYRENARSPGYYDGRYWTMWKLPMFGCTDSVQVMKELQECKKEYPQAWIRIIGFDNVRQVQCISFIASKPDXF

SEQ ID NO: 5732 - protein, 143 aa, Chloroflexus aurantiacus
MTNLTRWDPFREMTQLLDDTFFTGFTGVLPRNGSLVPALDLSETADAYHIEMAVPGMTADQLNITFENNVLTISGEITQSSDRKERQYHVTERRFGRFSRSIRLPNQIHPDRIEARLENGVLTVTVPKAEEIKPRKIAVNVAQ

SEQ ID NO: 5733 - protein, 501 aa, Cytophaga sp. KUC-1
MSNTIQRPEFKAKYDNYINGKFTAPVKGEYFDVLSPIDGKVFTKAAHSGKEDLELAVDAAYEAFKTWGKTSVTERSILLNKIAQKIEDNLEYIATVETIDNGKPIRETLAADIPLAIDHFRYFAGVIRAEESSIAELDSQTVSIALSEPLGVVAQIIPWNFPILMAVWKIAPALAAGNTIVLKPAESTPISILVLMELIGDILPPGVLNIVNGFGAELGRPLVTNKKVAKAAFTGSTTTGRLVMQYATENIIPVTLELGGKSPNIFFPSVADHDDDFFDKAIEGAVLFALNQGEICTCPSRLLIHEDIYEKFIARVIERTEAIIAGNPLDKSTMIGAQTSLVQKEKIMSYIKLGKEEGAELLTGGDENHLGGDLEGGYYIKPTLFKGHNKMRIFQEEIFGPVLAVTTFKTTEEAIEIANDTMYGLGAGVWTRDAHEIYQVPRAIQSGRVWINQYHSYPAGAPFGGYKQSGIGRENHKMMLGQYRQTKNMLISYDKKKLGFF

SEQ ID NO: 5734 - protein, 205 aa, Eucalyptus globulus
MGRGRVQLKRIENKINRQVTFSKRRCGLLKKAHEISVLCDADVALIVFSTKGKLFEYATDCCMERILERYERYSYAESQVLTNNAETNGNWTLEHAKLKARMEILQKNQKNLMGEELDSLSLKELQNLEHQLDTALKNIRSRKIQLMCESISELQRKDKALQEQNNMLAKKVKEKEKALAQQTQWDNPQDDGLTSSSGSLPSEWN

SEQ ID NO: 5735 - protein, 250 aa, Glycine max
MTKNYPTVSADYQKAVEKAKKKLRGFIAEKRCAPLMLRLAWHSAGTYDVSSKTGGPFGTIKHPSELAHGANNILDIAVRLLEPLKAEFPILSYADFYQLAGVVAVEVTGGPEVPFHPGREDKPEPPPEGRLPDATKGSDHLRDVFGKAMGLSDRDIVALSGGHTIGAAHKERSGFEGPWTSNPLIFDNSYFKELLSGEKEGLLQLPSDKALLSDPVFRPLVEKYASDEDAFFADYAEAHQKLSELGFADA

SEQ ID NO: 5736 - protein, 300 aa, Aegilops bicornis
GTANMQVDPSGQVQWTQQQPVPLPQQPFSQQPQQTFPQPQQTFPHQPQQQIPQPQQPQQQFLQPQQPFPQQPQQPYPQQPQQPFPQTQQPQQLFPQSQQPQQPYPQQPQQPFPQTQQPQQQFPQSQQPQQPFPQPQQPQQSFPQQQPPFIQPSLQQQLNPCKNLLLQQCRPVSLVSSLWSMIWPQSDCQVMRQQCCQQLAQIPQQLQCAAIHSVVHSIIMQQEQQQQQQQQQQQQQGLRIPLPLYQQQQVGQGTLVQGQGIIQPQQPAQLEAIRSLVLQTLPTMCNVYVPPECSIIKAPL

SEQ ID NO: 5737 - protein, 101 aa, Brassica napus
  misc_feature (6)..(6): Xaa can be any naturally occurring amino acid
  misc_feature (11)..(11): Xaa can be any naturally occurring amino acid
  misc_feature (21)..(21): Xaa can be any naturally occurring amino acid
  misc_feature (51)..(51): Xaa can be any naturally occurring amino acid
  misc_feature (58)..(58): Xaa can be any naturally occurring amino acid
  misc_feature (62)..(62): Xaa can be any naturally occurring amino acid
  misc_feature (75)..(75): Xaa can be any naturally occurring amino acid
  misc_feature (88)..(89): Xaa can be any naturally occurring amino acid
  misc_feature (92)..(92): Xaa can be any naturally occurring amino acid
  misc_feature (94)..(94): Xaa can be any naturally occurring amino acid
  misc_feature (96)..(96): Xaa can be any naturally occurring amino acid
  misc_feature (98)..(99): Xaa can be any naturally occurring amino acid
EKEEVXAYSMXSSATVVTSPXQATMVVPFTGLKSSSAFPVTRKANNDITSXVSNGGRXNCMXAWPPIGKKKFETXSYLPDLTEAELPXXVDXLXRXKXXPC

SEQ ID NO: 5738 - protein, 321 aa, Oryza sativa
MGRKPCCSKEGLNRGAWTAMEDDILVSYIAKHGEGKWGALPKRAGLKRCGKSCRLRWLNYLRPGIKRGNISGDEEELILRLHTLLGNRWSLIAGRLPGRTDNEIKNYWNSTLSKRVAMQRTAAATSMPAAATTSSNADAAGAAARRRRSPEPRTVVVSPIRTKALRCNNNSSSGIVVVQQAGACSHGGRPPESGAPGDAAADKVATPQAVQQQQQQELAGAEDDDDLPVPAVCIDLDLDDIELGGLDGFLISPWRGGGHDDGNAAAGAVPNLPMPIGYKLGGAGGGGEAGAVDLEALLGQLEAEEDDDGDHHHHHHHHHHQ

SEQ ID NO: 5739 - protein, 105 aa, Brassica napus
  misc_feature (10)..(10): Xaa can be any naturally occurring amino acid
  misc_feature (14)..(14): Xaa can be any naturally occurring amino acid
  misc_feature (30)..(30): Xaa can be any naturally occurring amino acid
  misc_feature (52)..(53): Xaa can be any naturally occurring amino acid
  misc_feature (61)..(61): Xaa can be any naturally occurring amino acid
  misc_feature (69)..(70): Xaa can be any naturally occurring amino acid
  misc_feature (76)..(77): Xaa can be any naturally occurring amino acid
  misc_feature (85)..(85): Xaa can be any naturally occurring amino acid
  misc_feature (87)..(87): Xaa can be any naturally occurring amino acid
GIICIASLIXPYRXDRDICRTLLPEGDFVXVYMDVSLEVCEARDPKGLYKLXXAGKIKGFXGIDDPYEXXLNCEIXXGQEGTGTXPXEMAETVVAYLEHKGYLNA

SEQ ID NO: 5740 - protein, 175 aa, Triticum aestivum
MAPTVMGWSGTCAGPLQGLKSTVGLPVSRRYNGASLGSVSNGGRIRCMQVWPIEGIKKCETLSYLPPVSAEALLKQVDYLIRSKWVPWLEFSKVGFIFREHNASPGYYDGRYWTMGKLPMFGCTDATQVINEVEEVKKEYPDAYVRIIGFDNMRQVQCVSFIAFKPPGCEESGKA

SEQ ID NO: 5741 - protein, 268 aa, Photorhabdus luminescens subsp. laumondii TTO1
MSVPAFGLGTFRLKDDVVITSVKNALELGYRAIDTAQIYENEAAVGQAIEESGVAREDIYITTKIWTENLSKEKLIPSLKESIAKLRTDYVDLTLIHWPSPHNVVSVDETMNALLDAKNMGLTREIGVSNFTIDLMQQAIDAVGAEHITTNQIELSPYLQNCHVTAWAKDHGIHITSYMTLAYSKALQDEVIRRIATKHQATPAQVILSWAMALGYSVIPSSTKRENLQSNLRASVLKLDADDMAAIATLDHNERLVNPEGLAPQWDN

SEQ ID NO: 5742 - protein, 491 aa, Gibberella zeae PH-1
MASSTPKPTNSLLYKNFQKHPAALIESTEGIFLNTSDGRRILDATSGAAVACLGYNNKDVQQAVVEQLVNVPYCHPGFYKTKAAEDLADFLVESTNGLMSKAVLCGSGSEAVEVALKLAKTHFSHLAIPQPERSHFIARVGAWHGATLGALTLGDFKVRKDPFVQLISQNSSQVSACSEYRGRKEGEDDEAYVQRLAQELDDEFQRIGPEKVCAFVAETVGGSASGCAMPIKGYFPAMKAVCEKYNALLILDEVMCGMGRTGTLHAWEQEDVVPDILVVGKGLGAGYAPVSAVMLNAKLVESFQKSGKGFAHGQTYMAHPQAAAAGLKVQQIIRDENLLAHVQTMGEYLGSRLKERFLPMPFVGDIRGRGLFWAIEFVTDKKTKMPFPYSLGLNSTLHSRGMSAGYEIALFNANGGYDGYSGDHFLICPPFIVTKADVDDIVERTARVVEDTFAELVNSAVWEKVTLQMGIDNKCEVNAVNAPPAVGVAAQ

SEQ ID NO: 5743 - protein, 479 aa, Agrobacterium tumefaciens str. C58
MRRKEQPWFSTGAAGGGINTATPMRIETIIFDCFRQAAEKPQEISIFRHKFTLHLHAAVASICQTCLWVYAKRRAMMAKQKVAMLTAGGLAPCLSSAVGGLIERYSDIAPEIDIIAYRSGYQGVLLGERIEITKDMREKAHLLHRYGGSPIGNSRVKLTNAADCAKRGLVKEGDNPLRVAAERLAADGITILHTIGGDDTNTTAADLAAYLGANGYDLTVVGLPKTVDNDVVPIKQSLGAWTAAEVGAAFFDNVSNEQSAAPKTFVIHEVMGRHCGWLTAATARAYIQKTRGNDYVEGLMMNTQMKNIDGIYLPEMAFDIEAEAERLKEVMDKHGYVTLFVSEGAGLDAIVAEREAAGEAVKRDAFGHVKIDTINVGGWFQKQFAGLIGAERSMVQKSGYFARSAPANGDDLRLIQGMVDLAVESALNKVSGVTGHDEDQNGKLRTIEFPRIKGGKHFDLSAKWFTEVMEHVGQPFTAA

SEQ ID NO: 5744 - protein, 511 aa, Manihot esculenta
MSVAILTSLPPQWLSILAVFLLPILTLLLFRGKDDNQKKGLKLPPGPRQLPLIGNLHQLGGQPYVDFWKMAKKYGPVMYLQLGRCPTVVLSSTETSKELMKDRDVECCSRPLSVGPGQLSYNFLDVAFSPYSDYWREMRKLFIFELLSMRRVQTFWYAREEQMDKMIEILDGAYPNPVNLTEKVFNMMDGIIGTIAFGRTTYAQQEFRDGFVKVLAATMDMLDNFHAENFFPVVGRFIDSLTGALAKRQRTFTDVDRYFEKVIEQHLDPNRPKPETEDIVDVLIGLMKDESTSFKITKDHVKAILMNVFVGGIDTSAVTITWAFSELLKNPKLMKKAQEEVRRAVGPNKRRVEGKEVEKIKYIDCIVKETFRKHPPVPLLVPHFSMKHCKIGGYDILPGTTIYVNAWAMGKDPTIWENPEEYNPDRFMNSEVDFRGSDFELVPFGAGRRICPGLAMGTTAVKYILSNLLYGWDYEMPRGKKFEDFPLIEEGGLTVHNKQDIMVIPKKHKWD

SEQ ID NO: 5745 - protein, 293 aa, Burkholderia fungorum LB400
MSAPLLFRPSLDAVYGFPHAKRVTQVVSPYQRIEVWDTPQLGRLFTLDGRPMTSTGDEFIYHECMVHPAALAHPSPQAALVLGGGDGGAARQLLRHAGIERIVVAELDAEVVRLTREHLPEVHGGAFDDPRVELVIGDAAHYVAHAAPARFDLVVFDLTPPDSPAAGLYTPTFYQQLKRVMRPIAAVSVHLGSPYFHAARIARLLDDLRAAFAVVRTMNTFIPLYGSLWIMATASDTLDPAALAADTLIERLAARRIGPLMHYDAGTHAALFSASRSVRDKLRRCCEIKFWVC

SEQ ID NO: 5746 - protein, 113 aa, Rickettsia sp. HOT2
ANEAVINMLKEIGSSEYIPKYIAKAKDKNDPFRLMGFGHRVYKNYDPRAAVLKETCKEVLKELRQLDNNPLLQIAIELEAIALKDEYFIERKLYPNVDFYSGIIYKAMGIPSQ

SEQ ID NO: 5747 - protein, 486 aa, Pseudomonas fluorescens PfO-1
MNPALYQNGKVPVHSPIDGSRIGAVNWEGPAEVEQHISRADHAFEQWRKVPAPRRGELVRQFGEVLREYKTELGELVSWEAGKITQEGLGEVQEMIDICDFAVGLSRQLYGLTIASERPGHHMRETWHPLGVVGVISAFNFPVAVWAWNTTLALVCGNPVVWKPSEKTPLTALACQALFERVLKNFSDAPAHLSQVIIGGRDAGEALVDDPRVALISATGSTRMGREVAPKVAARFARSILELGGNNAMILGPSADLDMAVRAILFSAVGTAGQRCTTLRRLIAHESVKEEIVTRLKAAYSKVRIGHPLEGNLIGPLIDKHSFENMQDALEQALSEGGRVFGGKRQLEDQFPNAYYVSPAIVEMPEQSDVVCSETFAPILYVVGYSDFEEALRLNNAVPQGLSSCIFTTDVREAEKFMSAVGSDCGIANVNIGPSGAEIGGAFGGEKETGGGRESGSDAWRAYMRRQTNTVNYSLELPLAQGITFD

SEQ ID NO: 5748 - protein, 389 aa, Escherichia coli
TLQNGKLNVPENPIIPYIEGDGIGVDVTPAMLKVVDAAVEKAYKGERKISWMEIYTGEKSTQVYGQDVWLPAETLDLIREYRVAIKGPLTTPVGGGIRSLNVALRQELDLYICLRPVRYYQGTPSPVKHPELTDMVIFRENSEDIYAGIEWKADSADAEKVIKFLREEMGVKKIRFPEHCGIGIKPCSEEGTKRLVRAAIEYAIANDRDSVTLVHKGNIMKFTEGAFKDWGYQLAREEFGGELIDGAPWLKVKNPNTGKEIVIKDVIADAFLQQILLRPAEYDVIACMNLNGDYISYALAAQVGGIGIAPGANIGYECALFEATHGTAPKYAGQDKVNPGSIILAAEMMVRHMGWTEAADLIVKGMEGAINAKPVTYDFERLMEGAKLL

SEQ ID NO: 5749 - protein, 291 aa, Triticum aestivum
MGGGSMGIRAAARAAFIGGYRSASNARRSALPSSSAAAADTRPVSTATTFDDWYIPDREVFGPVPSHEEAMAATLDLRDAFEIAKIDSHGGRLDISKTHISHDGLDDPTKVAQETFQDHLHSEASKHEEKHDSLSVASGSSARVIEAFTMLHESPEAQDVVASLASDKNVWEAVMKNKKLVEFYKTNLSESSSVTDEAEQSDAESSQSSNGVVSPADAFSDYIQMMKAFVSEMVTNLSSIMQDLVATSDEGQSKGRLKTLIINSKKDFTNGPSSFVLLAIASILVVLLKRA

SEQ ID NO: 5750 - protein, 1166 aa, Ustilago maydis
MQAVTASRPNADSASASHRIPSQPNASNPPSASLRPPDQQLPTTAASLMREGPRDFTVIKDVGDGSFGTVCLADWKSPLPSGTMLSPMQHPTTRPEYIGKRLVAIKKMKKPFPSWQECMKLKELKSLLTIPPHPNIIPLYDAFLMPTTKELHFVFECMEGNLYQLTKSRKGRPLAAGLVASIYEQIVLGLDHIHQHGYFHRDMKPENLLITTTGLADYPNLQPALAAERDVLVIVKLADFGLARETLSKPPYTEYVSTRWYRAPEVLLRSRDYSNPVDMWALGTILAELVNLKPLFPGHSEVDQVLQICDILGDPSHSYGHDSRNRRNGGGPWDRGIRMARAVGFTFPIRKPAKFSRFFSDRVPQNLIDCIEDLLRYDPQARLTSKDCLQHDYMRLDAPRLRPPQAKPLVSATAPLRPQQNASRPLPSSHSTLLSSNHARPPFGAADSNLKPLAVLRQPDGSPIVRVNAAATSDPSLANGTTPASPMQEDATEVHWAPPVVSSSRDVSLSGYPAFPDSASLYAASSSTHPDGPPSGAPSSDATMVMSDAQLTDSTLKHTDPRHAQALQAHQYEQYQRQYRHDAGQSQSPGYDAHAAAAYDRDAALRGAAFVPFVASYPGSAATGQLAAATSSGELSQKNDSNASNETISSRDKERRRSKVWGLNISSKFGGSGSSGTLAGSSSGGAANATGTHLYAVGNAAAGRLPPNGPMQESRVSLEPTPAQRIAAEHSNATLATLPNGAPAKTADSKKARKEAEKAAREAEKAKREAQQKAARDRARAVMQKRNQLLASSNSKDPVEWLAGAIQSDEPYRSSPSEKARGKQPAIPGSQLSPSMPSFASGEFPRSPLQQPIHGLSPDYGMNANPAVMGSMAWRGVGAARYSRSNKARRREHDDDHSMSSFEDAVDPRRASMQSYQTGDSDPGPGTGQQVAQGHYVQRASSSSSLASAPSLVDQRRFAPSLESHRSSADTRSISSLDHQLITNMERMTAVEARARTPGNVSPGPAHVVGARQSLSRQSRTNSRASSTSAHRQGSASPLHHASGIPRFHPYSHGGPVTPSTGYHANYQLPPLHQSLAHPSGAQRSDTAGDRSVSPAFYSNASQPQQHVHQHHINPIFHVPAGNSGHGTTLPPFSSIAASIDVPAIDEKATQMLYAQARSPGPLPQS

SEQ ID NO: 5751 - protein, 212 aa, Shigella flexneri
ICLRPVRYYQGTPSPVKHPELTDMVIFRENSEDIYAGIEWKADSADAEKVIKFLREEMGVKKIRFPEHCGIGIKPCSEEGTKRLVRAAIEYAIANDRDSVTLVHKGNIMKFTEGAFKDWGYQLAREEFGGELIDGGPWLKVKNPNTGKEIVIKDVIADAFLQQILLRPAEYDVIACMNLNGDYISDALAAQVGGIGIAPGANIGDECALFEA

SEQ ID NO: 5752 - protein, 389 aa, Escherichia coli
TLQNGKLNVPENPITPYIEGDGIGVDVTPAMLKVVDAAGEKAYKGERKISWMEIYTGEKSTQVYGQDVWLPAETLDLIREYRVAIKGRMTTPDGGGIRSLNVALRQELDLYICLRPVRYYQGTPSPVKHPELTDMVIFRENSEDIYAGIEWKADSADAEKVIKFLREEMGVKKIRFPEHCGIGIKPCSEEGTKRLVRAAIEYAIANDRDSVTLVHKGNIMKFTEGAFKDWGYQLAREEFGGELIDGGPWLKVKNPNTGKEIVIKDVIADAFLQQILLRPAEYDVIACMNLNGDYISDALAAQVGGIGIAPGANIGDECALFEATHGTAPKYAGQDKVNPGSIILSAEMMLRHMGWTEAADLIVKGMEGAINAKTVTYDFERLMEGAKLL

SEQ ID NO: 5753 - protein, 173 aa, Flaveria pringlei
MASIPATVATVAQANMVAPFTGLKSNAAFPVTKKVNDFSTLASNGGRVQCMKVWPPLGKKRYETLSYLPNLTEVQLAKEVDYLLRNKWVPCLEFELEHGFVYRENARSPGYYDGRYWTMWKLPMFGCTDSAQVMKELQECKKEYPQAWIRIIGFDNVRQVQCISFIASKPDGF

SEQ ID NO: 5754 - protein, 208 aa, Kluyveromyces lactis
MSQAVGNVASIRRKLVIVGDGACGKTCLLIVFAKGKFPQVYVPTVFDNYVADVEVDGRRVELALWDTAGQEDYDRLRPLSYPDSNVVLICYSIDLPDSLENVMEKWISEVLHFCQGVPIILVGCKADLRNDPQVVEELRAQGLQPVSQAQAQEVADQIGAVDYIECSAKTGYGVREVFEAATRASLVGKQGKSKPKTKSSKKKKCVVL

SEQ ID NO: 5755 - protein, 332 aa, Bdellovibrio bacteriovorus HD100
MFAARYVPGKKELSLVEVPKPTPGPLDVILKIRAAGICHSDLHVLHGEVPYKESFTMGHEACGEVVEKGSEVFGTFNPGDLYAVHGPNPCGHCNYCRTGHDNLCNDPSRTFIGLGQDGAYAEYLKVPARNIVKVPKGISPEVAAVATDAVLTPYHAIKTKGGVGLGSKVLAIGLGGLGMNGVQIALALGAEVTAVDLKDANLETAKSFGVQKVLNSKQISSLTPLSFDVVVDFVGLESTFKDAQNFVKPGGTILLIGLGSAQVPLTTATAITFETKVQASFWGTHVEMQELYELIAEGKIKPQVETAPMKEVNHWLHELEAGRVKSRMALIP

SEQ ID NO: 5756 - protein, 389 aa, Escherichia coli
TLQNGKLNVPENPIIPYIEGDGIGVDVTPAMLKVVDAAVEKAYKGERKISWMEIYTGEKSTQVYGQDVWLPAETLDLIREYRVAIKGPLTTPVGGGIRSLNVALRQELDLYICLRPVRYYQGTPSPVKHPELTDMVIFRENSEDIYAGIEWKADSADAEKVIKFLREEMGVKKIRFPEHCGIGIKPCSEEGTKRLVRAAIEYAIANDRDSVTLVHKGNIMKFTEGAFKDWGYQLAREEFGGELIDGGPWLKVKNPNTGKEIVIKDVIADAFLQQILLRPAEYDVIACMNLNGDYISDALAAQVGGIGIAPGANIGDECALFEATHGTAPKYAGQDKVNPGSIILSAEMMLRHMGWTEAADLIVKGMEGAINAKTVTYDFERLMEGDKLV

SEQ ID NO: 5757 - protein, 219 aa, Brassica napus
LNRLHDRNETMYYKVLIANIEEYAPIVYTPTVGLVCQNYSGLFRRPRGMYFSSEDRGEMMSMVYNWPAEQVDMIVVTDGSRILGLGDLGIHGIGISVGKLDLYVAAAGINPQRVLPVMIDVGTNNEKLLKDPLYLGLQQHRLENDEYIEVIDEFMEAVFTRWPHVIVQFEDFQSKWAFKLLQRYRSRYRMFNDDVQGTAGVAIAGLLGAVRAQGRPMLD

SEQ ID NO: 5758 - protein, 453 aa, Arabidopsis thaliana
MEQGESLRIRVVMGKDRISELPDALLIKILSFLPTKIVVATSVFSKQWRPLWKLVPNLEFDSEDYDDKEQYTFSEIVCKSFLSHKAPVLESFRLEFESEKVDPVDIGLWVGIAFSRHLRELVLVAADTGTGTAFKFPSSLCTCNTLETLRLVLLILVDISSPVVMKSLRTLHLELVSYKDESSIRNLLSGCPILEELLVIRGEDSDIEVFTIDEVPSLKRLTINDDHDGQEFWGYVINAPSLKYLLIEDLRCPGFCLNAPELMEANIFDGTSITNDNFLGYLTSVKRLLLNLSPWKITYPTGSIFYQLVSLEMYTREIDWWDLLTLMLEHSPKLQVLKLTDNCVKFHKNGLPGGKWNEPKYVPECLLSHLETFVWRRFDWGREEEKEIATYILKNARRLNKATFSTNPVNSEELDKLKERRKVHNELDGVVRASNSCQFVFKFDTSYHVSDSS

SEQ ID NO: 5759 - protein, 488 aa, Listeria monocytogenes str. 1/2a F6854
MADVRKLKNYINGEWVESKTDKYEDVINPATGEVLCQVPISTRAELDQAAVIAEQAFEKWSQVAVPRRARVLFGFQQLLIQHKEELARLITLENGKNLSEARGEVQRGIENVEFAAGAPTLMMGDSLASIATDVEAANYRYPVGVVGGIAPFNFPMMVPCWMFPMAIALGNSFILKPSERTPLLMEKLVELFSEAGLPKGVFNVVYGAHDVVNGILENEIIKAVSFVGSKPVGEYVYKTGSANLKRVQALTGAKNHTIVLNDADLEDTVTNVISAAFGSAGERCMACAVVTVEEGIADEFLEALRTAAQNVKIGNGLDDGVFLGPVIREENQKRTIAYIEKGIEEGAKLTVDGRETGLSEGHFVGPTILEDVTTDMTIWKDEIFAPVLSVIRVKNLQEAVRVANQSEFANGACIFTNNAKAIRYFREKIDAGMLGVNLGVPAPMAFFPFSGWKSSFYGTLHANGKDSVDFYTHKKVVTARYSLKGYEE

SEQ ID NO: 5760 - protein, 369 aa, Oryza sativa (japonica cultivar-group)
MCMTLIMPGAPDVGSYYGEQWAPLAMSSLSSLFSYSPPGTAKYAAALASPSQQVSTTMPELETEGELKTLPAPMTIETTAAAAAAARSPEIVKVRSVWAHNLDEEANLIESLFPSFRLAAVDTEFPGTVHRPSAPAYTLTRKQKYALLKKNVDELHLVQLGLTLFDAGGRLPDLGTGGAARYVWEFNFREFDLRRHAHAPESIALLRSKGVDFDRTRRGGVDAAAFGPRLRRWLRAGLGRAGLVTFSGAYDLAYMLKMLYGGGGGGYRLPGDAATFEFVVRAVIGRTLYDVGKMARHCPGDMRGGLERVAGKLGVRRAVGEAHQAGSDSLLTSQMFMRMRERYFDDQDALTAVAGINFGYLNFTSCEYT

SEQ ID NO: 5761 - protein, 389 aa, Escherichia coli
TLQNGKLNVPENPIIPYIEGDGIGVDVTPAMLKVVDAAVEKAYKGERKISWMEIYTGEKSTQVYGQDVWLPAETLDLIREYRVAIKGPLTTPVGGGIRSLNVALRQELDLYICLRPVRYYQGTPSPVKHPELTDMVIFRENSEDIYAGIEWKADSADAEKVIKFLREEMGVKKIRFPEHCGIGIKPCSEEGTKRLVRAAIEYAIANDRDSVTLVHKGNIMKFTEGAFKDWGYQLAREEFGGELIDGGPWLKVKNPNTGKEIVIKDVIADAFLQQILLRPAEYDVIACMNLNGDYISDALASTVGGIGIAPGQTLGDECALFEATHGTAPKYAGQDKVNPGSIILSAKMMLRHMGWTETADLIVKGMEGAINAKTVTYDFERLMEGAKLL

SEQ ID NO: 5762 - protein, 436 aa, Bordetella pertussis Tohama I
MNLSDKKATLSFSDGSAPIEFPVYKGTVGPDVIDIRKLYGQTGMFTFDPGFMSTAACASGITYIDGDKGELLYRGYPIEQLAVNCDFLDICYLILNGELPNGGQKQDFDSQVTHHTMVNEQLHFFLRGFRRDAHPMAVLTGLVGALSAFYHDSTDITNPHHRHVSAIRLIAKMPTLVAMAYKYSQGQPFIYPQNDLSYTGNFLRMMCATPCEEYKVNDVVERALDRIFILHADHEQNASTSTVRLCGSSGTNPFAAIAAGVACLWGPAHGGANEACLQMLEELQANGGVAKVGEFMEKVKDKNSGVRLMGFGHRVYKNYDPRAKLMQETCKEVLVALGLENDPLFKLAMELERIALEDDYFVQRKLYPNVDFYSGIVQRAIGIPTSLFTAIFALARTVGWIAQWNEMLSDPDYKIGRPRQLFTGSVTRDVPGMDKR

SEQ ID NO: 5763 - protein, 500 aa, Burkholderia cepacia R18194
MTDLLSAPEYAALAAALRFPSGPFIDGAFRTASSGDTFATVNPATDAVLAQIGACNAADVDIAVANARQAFEDGRWRKLAPSHRKAVLLKFADLLEQHAHELATMESLDSGKPIRECQTIDVPETIHTIRWHAELIDKIYDNTAPVGGNALALVVREPIGVVGLVLPWNFPLLMLAWKIGPSLAAGCSIVVKPAKETTLTALRVAELAHEAGVPAGVFNVLPGGGREVGEPLGRHADVDMVSFTGSTDTGRKFLKYAAESNLKRIVLECGGKNPAVVLPDAPDLDAVAQHIVNGAFWNMGENCSASSRLIVHADIKDDLLQRIGTQMREWKMGNPLDPAHRIGAMVSKAHFEKVRSYLEQAGAEHLHVAFGGQTDGGIFVEPTVVDGVSPHSRLFREEIFGPVLSVTTFTDIAEAIALANDSVYGLAASVYTGSLNLAIRLSREIRAGVVTVNCFGEGDVTTPFGGYKESGFGGRDKSVWAHDQYTEIKTIWIDVPVDPA

SEQ ID NO: 5764 - protein, 434 aa, Bacillus halodurans C-125
MKKNDETSRNLIGLDQQHFIHPTSSMQQQQQHGPAHIFVRGKGVYLYDHDGKAYLDGMSSLWNVNVGHGRRELGEVAKKQMDTLAFSSCFATFSNKPAIELAAKLARVSPPSLRATFFTSGGSEANDTAFKLARHYWKVKDQPKKRKIIARMKSYHGVAMGATSATGLKPFRDFAPSLAPDFLHVDHMSIEALRALIDREGPETIAAFVCEPIQGAGGVHVAPDSYLCDIRSICDEYELLFIADEVITGFGRTGAYFGCDHANISPDMMCIAKGITSGYAPLGGVMLSKSLHEQLTAHSHGTLLHGYTYSGHPTSCAVALKNIQIIEEENLIDHAATMGEKLLLGFRTIQEQYSEIHDARGRGLMAALAFSHNGKNEPLAPKVVQAADQRGLILRAVTFDQQDVLVCAPPLIINEEELNQLLSILESSVQAVVS

SEQ ID NO: 5765 - protein, 464 aa, Listeria monocytogenes str. 4b F2365
MLYSKENKESYLEPVFGSSAEDRDIPKYTLGKEPLEPRIAYRLVKDELLDEGSARQNLATFCQTYMEDEATKLMSETLEKNAIDKSEYPRTAELENRCVNIIADLWHAPKNQKFMGTSTIGSSEACMLGGMAMKFAWRKRAEKLGLDIYAQKPNLVISSGYQVCWEKFCVYWDIDMRVVPMDKDHMQLNTDQVLDYVDEYTIGVVGILGITYTGRYDDIYALNEKLEEYNSKTDYKVYIHVDAASGGFFTPFVEPDIIWDFRLKNVISINTSGHKYGLVYPGIGWVLWKDESYLPEELIFKVSYLGGEMPTMQINFSRSASHIIGQYYNFLRYGFEGYRTIHQKTSDVAQYLAHAVEQTGYFDIYNDGSHLPIVCYKLKDDANVKWTLYDLADRLQMRGWQVPAYPLPKNLENIIIQRYVCRADLGFNMAEEFIQDFQASIQELNNAHILFHDTQQSGVHGFTH

SEQ ID NO: 5766 - protein, 519 aa, Zea mays
  misc_feature (144)..(144): Xaa can be any naturally occurring amino acid
LFLSSQSPITPAAQRAETGDALPSPHPPLVSWRRLGGCRCRCRPTSGGQVVLGHFAGDEYHKAVDTFSGIRGSMSNYYDDYDDIDEMEDDYDMDDPIDDMVDEQQGIRDSDAEDNDYGQPNDKIPDTSSADARKGRDIQGIPWXQINITRKKYRQSRLEQYKNYENVPNSGEEAMKDCKPTEKGGIYYEFRRNTRSVKSTILHFQLRNLVWATSKHDIYLVSHYSIRHWSALSGVDTELINVQGHVAPREKHAGSLLEGFYQTQVSTLTVKDNLLVAGGFQGELICKHLDQEGISFCCRTTYDDNAITNAVEIFNTSSGAVHFMASNNDSGVRYYDMERFQLFKHFQFEWPVNHASLSPDRKVVVIVGDDPDGLLIDANSGKTVHSIKGHRDYSFASAWSPDGRTFATGNQDKTCRIWDVRNLSKSVHVLRGNLGAIRSIRFTSDGQFMSMAEPADFVHIYDVKSDYNKRQELDFFGEISGTSFSPDTDTLFVGVWDRMYGSLLQFGRLYNYSYLDSLF

SEQ ID NO: 5767 - protein, 162 aa, Triticum aestivum
  misc_feature (81)..(81): Xaa can be any naturally occurring amino acid
  misc_feature (90)..(90): Xaa can be any naturally occurring amino acid
  misc_feature (100)..(100): Xaa can be any naturally occurring amino acid
  misc_feature (102)..(102): Xaa can be any naturally occurring amino acid
  misc_feature (110)..(110): Xaa can be any naturally occurring amino acid
  misc_feature (122)..(123): Xaa can be any naturally occurring amino acid
  misc_feature (147)..(147): Xaa can be any naturally occurring amino acid
MAPAVMASSATTVAPFQGLKSTAGLPVSRRSSGSLGRVSNGGRIRCMQVWPIEGIKNSETLSYLPPLSTEASLKQVDYLIXRSKWVPCLXFNKVGFSFRXAXSPPGYNDXPYWTMLELAIFXXTDPASLNKVEESKRIPDPIPLIGXTQFILNSIKHGSREG

SEQ ID NO: 5768 - protein, 186 aa, Aeropyrum pernix K1
MQALTTYKCIEKGIVVWLTGLPGSGKTTIATRLADLLQKEGYRVEVLDGDWARTTVSEGAGFTREERLRHLKRIAWIARLLARNGVIVICSFVSPYKQARNMVRRIVEEEGIPFLEIYVKASLEEVIRRDPKGLYKKALKGELENFTGITDPYEPPENPQLVLDTESNTIEHNVSYLYSLVKAVIE

SEQ ID NO: 5769 - protein, 400 aa, Bordetella pertussis Tohama I
MSTSQKKPTVQQKKPAAQPAEKAAFKPKKSVALSGVVAGNTALCTVGRTGNDLHYRGYDILDFAGSAEFEEIAHLLVHGKLPNKAELKAYKEKLRALRGLPAQLQNVLECLPASSHPMDVMRTAVSVLGCVLPEKDDHNTPGARDIADRLMANLGSALLYWYHYSHNGRIIDVQTDDDSIGGHFLHLLHGAKPSDEWVRAMHTSLILYAEHEFNASTFTGRVIAGTGSDMYSSITGAIGALRGPKHGGANEVAFEVQKRYETPDEAEADIRQRVENKEVIIGFGHPVYTVSDPRNKVIKDVAKKLSRKAGSTKMFDIAERLETVMWDIKKMFPNLDWFSAVSYHMMGVPTAMFTPLFVIARTAGWSAHIIEQRIDNKIIRPTANYVGPEDQTYVPISKRA

SEQ ID NO: 5770 - protein, 228 aa, Leuconostoc mesenteroides subsp. mesenteroides ATCC 8293
MSSSQDLQKIIAGRRAADFVQDGMVVGIGSGSTIAQVITALGERVANENLKIVGVPTSEKTRRNAAKLGIPMYNVDDVDKIDLTIDGADQISDDFSAIKGGGAALLWEKIVAFNSRENIWVVDSSKRVSKLNQYLPVEIIPYGSDQLFKRFTADGFHPTWRLDQNGNPVRTDSANYLIDLHVPVIEDPRDLGQELINMVGVVEHGLFTDVVNRVVIGSDDGVEIIEAP

SEQ ID NO: 5771 - protein, 429 aa, Brucella melitensis 16M
MQPRAGPSLPGAKRLPKERIAYIRRIAEIYESRLDEMAKTISMEMGAPIKLARESQAAAGLSHTKAFIAACENFEVEEVLSPKYPNQTVVHEPIGVCGLITPWNWPMNQITLKVIPAIAVGCTVVLKPSEIAPMSAMLFAEFVDQAGLPKGVFNLVNGEGPVVGEALSQHPEVDMMSFTGSTRAGTAVSRAAAATVKRVSLELGGKSPNIVFADSDLEKAISRSLAHCFENTGQSCNAPTRMLVERSVYDKAVELAKKAAESTKVGDPAQEGDHIGPLSSSIQFEKVQALIQKGIDEGARLVAGGTGRPEGFTEGDYVKPTVFADVNNNMTIAREEIFGPVLAMIPFDTEEEAIAIANDTPYGLAAYIQTGSPERAKRVARKLRAGMIQINGTSRAPGSPFGGYKQSGNGREGGKWGLEDFMEVKLISG

SEQ ID NO: 5772 - protein, 450 aa, Zea mays
  misc_feature (135)..(135): Xaa can be any naturally occurring amino acid
MAYAAGRKKRVGRYEVGRTIGQGTFAKVKFAVDADTGAPVAMKVLDKETIFAHRMLHQIKREISIMKIVRHPNIVRLNEVLAGKTKIYIILELVNGGELFDKIARYGKLRENEARKYFQQLIDAIDYCHSKGVYXHRDLKPQNMLLDSRGNLKVSDFGLSTLSQNGAGLLHTTCGTPNYVAPEVLSSNGYDGSAADIWSCGVILYVLMAGYLPFEENDLPHLYEKITAAKYSCPYWFSPGAKSLIQRILDPNPRTRITIEEIREDPWFEKNYVAIRCGEDENVSLDDVQAIFDNIEDKYVSDEVTHKDGGPLMMNAFEMIALSQGLDLSALFDRQQEFVKRQTRFVSRKPAKTVVATIEVVAESMGLKVHSRNYKVRLEGPASNRASQFAVVLEVFEVAPSLFMVDVRKVAGDTPEYHRFYENLCSKLCSIIWRPTEVSAKSTPLRTTTC

SEQ ID NO: 5773 - protein, 159 aa, Glycine max
SFYETLPCRVTKISDGYNMVMVTVEDGRNFVADAVIVTVPIGILKANLIEFSPKLPHWKAEAIKDIGMGNENKIALRFDAVFWPNVEVLGIVAPTSYACGYFLNLHKATGHPILVYMAAGKFAYDLEKLSDESAANFAMQQLKKMFPDASKPVSSPLML

SEQ ID NO: 5774 - protein, 327 aa, Yersinia pestis KIM
MVKKIGVLTSGGDAPGMNAAIRGVVRAALSAGLDVFGIEDGYLGLYENRMKKLDRYSVSDMINRGGTFLGSARFPEFRDPEVRKVALKNMHERGIDGLVVIGGDGSYAGADLLTKEGGIHCVGLPGTIDNDVAGTDYTIGFFTALETVVEAIDRLRDTSSSHQRISIVEVMGRYCGDLTLAAAIAGGCEFIAIPEVEFKRDDLVAEIKAGIAKGKKHAIVAITEKLDDIDSLAKYIEKETGRETRGTVLGHIQRGGAPVAYDRILASRMGAYAVDLLLQDHDYKKGGFCVGVQNEKMVHELISVCIAPENKKSKFKEDWYDTAKKLF

SEQ ID NO: 5775 - protein, 187 aa, Lycopersicon esculentum
VYDDDGKVFTTFDAYWEKSLSIQNEPVSQLPPWRLTQAAGSVKMCSVEGVGDLENESEKSSNALLGKGWAPGWRPIADKALTEFVESNLLAYSKDRLRVGGNSTSLLSPYLHFGEVSVRKVFNSVRLKQILWTKEGNSVGKDSATIYLRAIGLREYSRYISLNFPFTHERSLLNNLRFFPRNADQAH

SEQ ID NO: 5776 - protein, 272 aa, Rhodobacter sphaeroides 2.4.1
MTATLEFHDGSRIPQLGFGLWQVPEDRTAEVVREALELGYRLADGAAIYGNEEGLGHGLRTSGLPRDKVFVTTKVWNDAQGFESALRAVEESLKRLGLDRLDLCLIHWPAPKRNLYVETWRALIRLRDEGRITSIGVSNFDLDQIDRLTAETGVTPVLNQIELHPMLQQAELRAGHAERGIVTQSWSPLGRGMAFETPAIREIAERTGRSPAQVVLRWHIELGCAVIPRSTRRAGLAENLALFDFELTEADHAAISALDAGTRTGPDPQSFG

SEQ ID NO: 5777 - protein, 496 aa, Mentha spicata
MELQISSAIIILVATFVASLLIKQWRKSESRQNLPPGPPKLPLVGHLHLLWGKLPQHAMADMAKKYGPVTHVQLGEVFSVVLSSREATKEAMKLLDPACADRFESIGTRIMWYDNDDIIFSPYSDHWRQMRKICVSELLSARNVRSFGFIRQDEMSRLLRHLQSSAGETVDMTERIATLTCSIICRAAFGAIINDHEELVELVKDSLSMASGFELADLFPSSKLLNLLCWNKSKLWRMRRRVDTILEAIVDEHKLKKSGEFGGEDIIDVLFRMQKDSQIKVPITTNAIKAFIFDTFSAGTETSSTTTLWVMAELMRNPAVMAKAQAEVRAALKGKTSVDVDDVQELKYMKSVVKETMRMHPPIPLIPRSCREECEVNGYKIPNKARIMINVWSMGRNPLYWEKPETFWPERFDQVSRDFMGSDFEFIPFGAGRRICPGLNFGLANVEVPLAQLLYHFDWKLAEGMKPSDMDMSEAEGLTGIRKNNLLLVPTLYKSP

SEQ ID NO: 5778 - protein, 75 aa, Triticum aestivum
MCDRPAPVSSDDDGKLGDEEGVEIREVWANNLEAECAVIRDVGDDYGYMVMDTELPDIVCRPLGSFRSNDEYNYA

SEQ ID NO: 5779 - protein, 178 aa, Glycine max
  misc_feature (83)..(83): Xaa can be any naturally occurring amino acid
  misc_feature (86)..(86): Xaa can be any naturally occurring amino acid
  misc_feature (98)..(98): Xaa can be any naturally occurring amino acid
  misc_feature (113)..(113): Xaa can be any naturally occurring amino acid
  misc_feature (137)..(137): Xaa can be any naturally occurring amino acid
MASSMISAPAGTTVNRAGAGMVATFTGLKFMAGFRTRKTNSVITCIASNGGRVQCMQAWPPVGTKKTETLSYLPDLDDAQLAXKYXYLLRKGWIPCLXFELEHGLVFRDHNRXPRYYDGLYWTMSNLSIYSFADAFXVLNELHDAKTAYPNSFIHIIGFYNIHQLHYISFISYIPAVF

SEQ ID NO: 5780 - protein, 254 aa, Treponema pallidum subsp. pallidum str. Nichols
MHERNTTTNTPLDVTAQKLLVAQRSVDTLVQEGVLHAHMSIGLGTGSTAMPAVKRIADHLARGTLSDIAAVPTSFQTALICERYNIPLFSLSSKRIGGKLDVTIDGADEIDTQNFVIKGGGAALLQEKIAAYNSAHFVIIVDETKVVETLGTRAALPIEVVPEARMSVMRTLQDWGLSVHIREAVRKKGPVVTDHGNFILDARWQSLPTRTPQDMERALNALPGVIENGLFTERTVRVFVAHADGSVEERSASF

SEQ ID NO: 5781 - protein, 74 aa, Glycine max
MGFWTLLEGFLLFANALAILNEDRFLARRGWTLAEMTGPQRNSLKGQVIGLIYACQFLRLPLILFNVITIIVKL

SEQ ID NO: 5782 - protein, 155 aa, Glycine max
  misc_feature (126)..(126): Xaa can be any naturally occurring amino acid
  misc_feature (138)..(138): Xaa can be any naturally occurring amino acid
MEPMDIVGKSKEDASLPKATMTKIIKEMLPPDVRVARDAQDLLIECCVEFINLVSSESNEVCNREDKRTIAPEHVLKALQVLGFGEYVEEVYAAYEQHKLETMQDSLRGGGKWSNGAEMTEEEALXEQQRMFAEARAXMNGGAIAFKPAQMLTKS

SEQ ID NO: 5783 - protein, 425 aa, Ustilago maydis 521
MPFHNPLAKQPDSYVKKKEYDFKKTLGEGTFGIVRQATWKAADPPINVAVKVISKRILRGHDEIVKDEMNVLKGLDQPHVVKFLDWFESKDKYYLVFEEATGGELFERILSRGRFTELDACRTIRAVLSAIQYLHHHNIVHRDIKPENILYRTKAEDANVVLVDFGIAAHMKDDNEVLTSVCGSFGYAAPEILAKKGHGKAVDMWSLGVITYTMLCGYTPFRSDDAAALAAETQRGKVEFHDRYWKNVSNEAKDFVKACLTVDPKKRLTADQGMSHPWLTEHSEETQGVHDISAGLRENYRKRWKSAIAAVRASTKFRTFAQLASESRSGSQASLQTSDSSTAFADDPGKISPPTKRELYSESEDEQDGEDNQWFDTEDGSAARGNDATLADAASSQSENEPGWVEKLENKLDDLHLHSSSKSSE

SEQ ID NO: 5784 - protein, 389 aa, Escherichia coli
TLQNGKLNVPENPIIPYIEGDGIGVDVTPAMLKVVDAAVEKAYKGERKISWMEIYTGEKSTQVYGQDVWLPAETLDLIREYRVAIKGPLTTPVGGGIRSLNVALRQELDLYICLRPVRYYQGTPSPVKHPELTDMVIFRENSEDIYAGIEWKADSADAEKVIKFLREEMGVKKIRFPEHCGIGIKPCSEEGTKRLVRAAIEYAIANDRDSVTLVHKGNIMKFTEGAFKDWGYQLAREEFGGELIDGRPWLKVKNPNTGKEIVIKDVIADAFLQQILLRPAEYDVIACMNLNGDYISDALAAQVGGIGIAPGANIGDECALFEATHGTAPKYAGQDKVNPGSIILSAEMMLRHMGWTEAADLIVKGMEGAINAKTVTYDFERLMEGAKLL

SEQ ID NO: 5785 - protein, 210 aa, Shigella flexneri
LRPVRYYQGTPSPVKHPELTDMVIFRENSEDIYAGIEWKADSADAEKVIKFLREEMGVKKIRFPEHCGIGIKPCSEEGTKRLVRAAIEYAIANDRDSVTLVHKGNIMKFTEGAFKDWGYQLAREEFGGELIDGGPWLKVKNPNTGKEIVIKDVIADAFLQQILLRPAEYDVIACMNLNGDYISDALAAQVGGIGIAPGANIGDECALFEA

SEQ ID NO: 5786 - protein, 114 aa, Zea mays
  misc_feature (35)..(35): Xaa can be any naturally occurring amino acid
  misc_feature (86)..(86): Xaa can be any naturally occurring amino acid
WSASLKKTARFLVLLRRAGIRCDILAVLGCSDWSXAKRARMLAWSRWLKHMGPDWSGLYQHEGNFLAQQRLAVISTLTGDQTLFSXDRTVLAVANGEMDNHLNVLKQFTFTHNF

SEQ ID NO: 5787 - protein, 389 aa, Escherichia coli
TLQNGKLNVPENPIIPYIEGDGIGVDVTPAMLKVVDAAVEKAYKGERKISWMEIYTGEKSTQVYGQDVWLPAETLDLIREYRVAIKGPLTTPVGGGIRSLNVALRQELDLYICLRPVRYYQGTPSPVKHPELTDMVIFRENSEDIYAGIEWKADSADAEKVIKFLREEMGVKKIRFPEHCGIGIKPCSEEGTKRLVRAAIEYAIANDRDSVTLVHKGNIMKFTEGAFKDWGYQLAREEFGGELIDGGPWLKVKNPNTGKEIVIKDVIADAFLHQILLRPAEYDVIACMNLNGDYISDALAAQVGGIGIAPGANIGDECALFEATHGTAPKYAGQDKVNPGSIILSAEMMLRHMGWTEAADLIVKGMEGAINAKTVTYDFERLMEGAKLL

SEQ ID NO: 5788 - protein, 213 aa, Shigella flexneri
YICLRPVRYYQGTPSPVKHPELTDMVIFRENSEDIYAGIEWKADSADAEKVIKFLREEMGVKKIRFPEHCGIGIKPCSEEGTKRLVRAAIEYAIANDRDSVTLVHKGNIMKFTEGAFKDWGYQLAREEFGGELIDGGPWLKVKNPNTGKEIVIKDVIADAFLQQILLRPAEYDVIACMNLNGDYISDALAAQVGGIGIAPGANIGDECALFEA

SEQ ID NO: 5789 - protein, 289 aa, Salmonella enterica subsp. enterica serovar Typhi Ty2
MEYSILSNNLKMPMVGFGVFKVTDKEECQQSVLSAIRSGYRLIDTAAVYGNEDAVGDAVREAIATGLCTREELFITSKLWVQDMANYDLAKAGIEASLKKSGLDYFDLYLLHQAMGDYFSAWRALEDAYEAGKLKAIGVSNFYAHVLANFCETVRITPMVNQVELHPYFAQPAALETMKHYNVQPEAWAPLGGGRHKPYENVMLQRIADAHQKTIAQVVLRWNVQRGVTVIPKSTRQERIEENFAIWDFSLTDNEMAQINALDLGYVGEAVKHFNPEFVRGCLGVKIHD

SEQ ID NO: 5790 - protein, 492 aa, Candida albicans SC5314
MNVNPHLQYLQQQQQQQQQQQQQQQQSQPSQSNQSQSNQSPQFSQLQLQQLQRQQLLNQHLQQQQSQSQSSQVPPQLTQQSMGTPTSTNPLLAVLNGGANSNATSTGNGSLSSNPVLQQLQLQQLQQQVQLQQLQAQQQQQQQQQQQQQAIPIIKEVWSSNLEHEFQALRTFINDKTSKVFIAIHQEIPGIVARPVGTFKSSSDYHFQTLRANSDLLNLIQLSLCVIKISKNETISTPVIWQFNFLYDLTKEMYNEEHLAMLAQTSQINFQLLSTHGIPHFEFAELMIESGLILDDNINWVSFHAGYDLGFFVSLLSNDDLPVDEPDFYWWCAKYFPNFYDLKYIGNQILNKSTTNGAGGTNSNTLDEKTNKPSIEYLAEELHLLPISPAIRQHFTNSTFHSQQLTSTLHAYLSMECFKELLRRSNMTLLSSFKGTIWGLGTFSGGTSINNTNNNGVTEDEIVASRINGISTPSTPVGIISKSGMVHFGGRV

SEQ ID NO: 5791 - protein, 389 aa, Escherichia coli
TLQNGKLNVPENPIIPYIEGDGIGVDVTPAMLKVVDAAVEKAYKGERKISWMEIYTGEKSTQVYGQDVWLPAETLDLIREYRVAIKGPLTTPVGGGIRSLNVALRQELDLYICLRPVRYYQGTPSPVKHPELTDMVIFRENSEDIYAGIEWKADSADAEKVIKFLREEMGVKKIRFPEHCGIGIKPCSEEGTKRLVRAAIEYAIANDRDSVTLVHKGNIMKFTEGAFKDWGYQLAREEFGGELIDGGPWLKVKNPNTGKEIVIKDVIADAFLQQILLRPAEYDVIACMNLNGDYISDALAAQVGGIGIAPGANIGDECALFEATPGTAPKYAGQDKVNPGSIILSAEMMLRHMGWTEAADLIVKGMEGAINAKTVTYDFERLMEGAKLL

SEQ ID NO: 5792 - protein, 182 aa, Mesembryanthemum crystallinum
MASSLMSNAATTMAAATTTAQANMVAPFNGLKSISAFPVTRKNNDITSVASNGGRVQCMVWPPLGMKKFETLSYLPPLSEESLLKEVQYLLNNGWVPCLEFEPTHGFVYREHGNTPGYYDGRYWTMWKLPMFGCTDPSQVVAELEEAKKAYPEAFIRIIGFDNVRQVQCVSFIAYKPASYGA

SEQ ID NO: 5793 - protein, 592 aa, Zea mays
  misc_feature (93)..(93): Xaa can be any naturally occurring amino acid
  misc_feature (459)..(459): Xaa can be any naturally occurring amino acid
SKTSIKQLGRSLARATTSTVAALCFLLSCVSATPSTLAASSAIIHDIIRGLADTTAARVRTDAEATARAFTDFGTNATEDDAARPAAVFYPVXAADIAALLRASSASASPFPVSARGRGHSTRGQATAPGGVVVDMASLAVAAGRDETATTNASSTSASARLAVSVDGRYIDAGGEQLWVDVLHAALAHGLTPRSWTDYLRLTVGGTLSNAGISGQAFRHGPQISNVLELDVVTGTGDMVTCSKEKDADLFDAVLGGLGQFGIITRARIPLAPAPARARWLRLLYTGAADLTADQERLIADDERRGGALAGLMDYVEGSVVTDLQQGLIGSWRSQPPPSSSSLYSESATDAARIAALAEEAGGVLYFLEGAVYYGGASDTTAADVDKRVDVMLRELRYARGFAYVQDVSYEQFLDRVSAGERRLRGEGLWDVPHPWLNLFLPRSRILDFAAGVFHGVLXSPRPAAAAAGPGVVYPMNRGKWDGATSAVLPYDDGDGDEVFYTVGILRSAVADGDLRRMEEQNAEVARFCEAAGIPCTQYLPAYATQADWAARHFGPAGSGRWDTFLRRKRKYDPMAILSRGQRIFSSPLLAS

SEQ ID NO: 5794 - protein, 206 aa, Shigella boydii
YICLRPVRYYQGTPSPVKHPELTDMVIFRENSEDIYAGIEWKADSADAEKVIKFLREEMGVKKIRFPEHCGIGIKPCSEEGTKRLVRAAIEYAIANDRDSVTLVHKGNIMKFTEGAFKDWGYQLAREEFGGELIDGGPWLKVKNPNTGKEIVIKDVIADAFLQQILLRPAEYDVIACMNLNGDYISDALAAQVGGIGIAPGANIGD

SEQ ID NO: 5795 - protein, 132 aa, Glycine max
  misc_feature (32)..(32): Xaa can be any naturally occurring amino acid
  misc_feature (41)..(41): Xaa can be any naturally occurring amino acid
  misc_feature (77)..(77): Xaa can be any naturally occurring amino acid
  misc_feature (86)..(86): Xaa can be any naturally occurring amino acid
  misc_feature (107)..(107): Xaa can be any naturally occurring amino acid
YGCEKTTEGEGRIDMCLLRRASDDEEHSYMTXRILFMLKEXLSVGADYMRIDGIKAYAATYVTANMMLYARDMYLHXTPYATDAFXYTLIFERFFAQNSPMLTDTGXARVACSTYKAGEWDAACSTPLIPVA

SEQ ID NO: 5796 - protein, 286 aa, Aspergillus nidulans FGSC A4
MQGWKTIVGKLMSRYDFPLPDLSVQAEDKILGGVPTRIYTPPDVADPPLALYFHAGGWVMGSIDEEDGFVRTLCKLARTRIFSVGYRLAPEFRFPMALDDCLTVARSVLETYPVQSICFIGASAGGNMAFSTALTLVSDGLGDRVQGVVALAPVTVHPDSVSADNRDRGEYTSYEENDRLTINTGSAMRSFFDCYGAPPDDPRLSCLLHPGLGKLNKVYMAVGDADTLRDDVRLMRDALVALEVPVKCDEYPGYPHFSWLFPSPALREHQALFFGNLLSGICWVCE

SEQ ID NO: 5797 - protein, 389 aa, Escherichia coli
TLQNGKLNVPENPIIPYIEGDGIGVDVTPAMLKVVDAAVEKAYKGERKISWMEIYTGEKSTQVYGQDVWLPAETLDLIREYRVAIKGPLTTPVGGGIRSLNVALRQELDLYICLRPVRYYQGTPSPVKHPELTDMVIFRENSEDIYAGIEWKADSADAEKVIKFLREEMGVKKIRFPEHCGIGIKPSSEEGTKRLVRAAIEYAIANDPDSVALVHKGNIMKLTEGAFKDWGYQLAREEFGGELIDGGPWLKVKNPNTGKEIVIKDVIADAFLQQILLRPAEYDVIACMNLNGDYISDALAAQVGGIGIAPGANIGDECALFEATHGTAPKYAGQDKVNPGSIILSAEMMLRHMGWTEAADLIVKGMEGAINAKTVTYDFERLMEGAKLL

SEQ ID NO: 5798 - protein, 102 aa, Nicotiana tabacum
PNSYVFVVDMPGLKSGDINVQVEDDNVLLISGERKREEEKEGAKYIRMERRVGKFMRKFTLLENANTDAISAVCQDGVLTVTVQKLPPPEPKKPKTIEVKIA

SEQ ID NO: 5799 - protein, 337 aa, Petroselinum crispum
ILSPFKFSRRATGDNDVRFKVLYCGVCHSDLHMVKNEWGMTTYPIVPGHEIVGRVTEVGSKVEKFKVGDAVGVGCLVGSCLSCENCDDDSENNCAKQVQTYAFTNVDGSITYGGYADSMVADQHFVLRWPENLPLDSGAPLLCAGITTYSPLRYHGLDKPGTKVGVVGLGGLGHVAVKMAKAFGAHVTVISTSESKKQEALEKLGADEFLVSSDSDQMQAATGTLHGIIDTVSALHPVVPLLGLLKVNGKLVMVGAPEKPLELPVFPLLMGRKVLAGSNIGGLKETQEMLDFAAQHNITADVEVIPVDYVNTAMERLVKSDVRYRFVIDVANTIKTE

SEQ ID NO: 5800 - protein, 130 aa, Triticum aestivum
  misc_feature (40)..(40): Xaa can be any naturally occurring amino acid
MAPTVMASSATSVAPFQGLKSTAGLPVSRRSNGASSAASXNGGRIRCMQVWPIEGIKKFETLSYLPPLSTEALLKQVDYLIRSKWVPCLEFSKVGFIFREHNASPGYYDGRYWTMWNCYVRVTTHTVSTR

SEQ ID NO: 5801 - protein, 483 aa, Arabidopsis thaliana
MADLLRKVKSIKKKQDQSNHQALILGKYEMGRLLGHGTFAKVYLARNAQSGESVAIKVIDKEKVLKSGLIAHIKREISILRRVRHPNIVQLFEVMATKSKIYFVMEYVKGGELFNKVAKGRLKEEMARKYFQQLISAVSFCHFRGVYHRDLKPENLLLDENGNLKVSDFGLSAVSDQIRQDGLFHTFCGTPAYVAPEVLARKGYDGAKVDIWSCGVILFVLMAGFLPFHDRNVMAMYKKIYRGDFRCPRWFPVEINRLLIRMLETKPERRFTMPDIMETSWFKKGFKHIKFYVEDDHQLCNVADDDEIESIESVSGRSSTVSEPEDFESFDGRRRGGSMPRPASLNAFDLISFSPGFDLSGLFEDDGEGSRFVSGAPVGQIISKLEEIARIVSFTVRKKDCKVSLEGSREGSMKGPLSIAAEIFELTPALVVVEVKKKGGDKMEYDEFCNKELKPKLQNLSSENGQRVSGSRSLPSFLLSDTD

SEQ ID NO: 5802 - protein, 396 aa, Erwinia carotovora subsp. atroseptica SCRI1043
MLDNHTIAIVKSTIPLLAETGPKLTAHFYDRMFTHNPELKDIFNMSNQRNGDQREALFNAICAYATNIENLAALLPAVERIAQKHTSFNIQADQYQIVGNHLLATLDEMFSPGQEVLDAWGKAYGVLANVFIQREDDIYRSTETKTGGWSGVRPFRIVNKQLQSSVITSFTLEPTDGQPIADFQPGQYLAIYIKHDSFANQEIRQYSLTHAPNGKSYRIAVKREAQGTVSGYLHDTAREGDIVHLAAPHGDFFLDIPTDTPVALISGGVGQTPMLGMLHTLKQQDHQAKVLWLHAAENGTAHAFTDEIEQTGQALPHFDHHIWYREPQQTDRPGEDYHHSGLMQLASLKGELTTPDMHYYLCGPVVFMQFVAQQLLAMGIPAEQLHYECFGPHKVV

SEQ ID NO: 5803 - protein, 196 aa, Triticum aestivum
EGGKKSGGGGGGHGEKGSSKSAEQERRQGIAWTEDEHRLFLLGLEKYGKGDWRSISRNFVISRTPTQVASHAQKYFIRLNSMNRERRRSSIHDITSVNGEASAAQGPITGTNGQAAVPGKSPKQSPHQPGNLPPGVDAFGTTIGQPVGGPLVSAVGTLVTLPVAAPPHMGYAMHAPVPGTVVPRAPMYPMPPPPSR

SEQ ID NO: 5804 - protein, 127 aa, Streptomyces coelicolor A3(2)
MPTGKVKWFNSEKGFGFLSRDDGGDVFVHSSVLPAGVESLKPGQRVEFGVVAGQRGDQALSLALLDPAPSVAAAQRKKPDELASIVQDLTTLLENITPMLERGRYPEKTAGKKIAGLLRAVADQLDV

SEQ ID NO: 5805 - protein, 303 aa, Zea mays
  misc_feature (59)..(59): Xaa can be any naturally occurring amino acid
PPLDAPSSIPSRSSWRPTLLASIDVQSFNVDLLYEPWEVLDEDRRPFTMFAPLLPPLHXFWNRCLCMPDPAAPLLPPKRINSGDLSRCPWDELVFEDESERGSNALLARAWSPGWQNADKALTAFLNGPLMDHSVNRKKADSASTSLLSPYLHFGELSVRKVFHQVRMKRLMWSNDDNHAGEESCTLFLCSIGLREYLRYLTFNHPYSHEKPLLSHLRFFPWVVNEVYIIKVLENSDWIYIMPWGLYKAVTYVKEKYRDDRNAAEIFRANGDIIGLKSHCNSQLKVIGDGGDPNGHYDKDDHQ

SEQ ID NO: 5806 - protein, 500 aa, Mentha x piperita
MELQISSAIIILVVTYTISLLIIKQWRKPKPQENLPPGPPKLPLIGHLHLLWGKLPQHALASVAKQYGPVAHVQLGEVFSVVLSSREATKEAMKLVDPACADRFESIGTKIMWYDNDDIIFSPYSVHWRQMRKICVSELLSARNVRSFGFIRQDEVSRLLGHLRSSAAAGEAVDLTERIATLTCSIICRAAFGSVIRDHEELVELVKDALSMASGFELADMFPSSKLLNLLCWNKSKLWRMRRRVDAILEAIVEEHKLKKSGEFGGEDIIDVLFRMQKDSQIKVPITTNAIKAFIFDTFSAGTETSSTTTLWVMAELMRNPEVMAKAQAEVRAALKGKTDWDVDDVQELKYMKSVVKETMRMHPPIPLIPRSCREECEVNGYTIPNKARIMINVWSMGRNPLYWEKPETFWPERFDQVSRDFMGNDFEFIPFGAGRRICPGLNFGLANVEVPLAQLLYHFDWKLAEGMNPSDMDMSEAEGLTGIRKNNLLLVPTPYDPSS

SEQ ID NO: 5807 - protein, 301 aa, Archaeoglobus fulgidus DSM 4304
MRVTSPEIQRGIKVSELLDMFGSTAFNARRLGEAAKICEEMVKSDSFVFLTLAGAMIPAGMRKIVAGMMQNGFISSLVTTGANIVHEIVESLGIGHEIGSCYVDDTALAEESINRIYDVFVGQEAFERVEEFLSGIIEGLDGIYTTYEFLWEVGKRIPDERSFLRIAAEREIPVFCPTLHDSIAGLHMTIYRKNLQIDFFRDVSRIIDFCFQKRKMGVIVVGGGVPKNFTLQAMLLAEGFDYAVQITTDSPQWGGLSGATLEEAKSWCKLKPDAKAVTVYCDATIALPMLYAYLLDRCGES

SEQ ID NO: 5808 - protein, 106 aa, Nicotiana tabacum
PNCYIFIVDMPGTKANEIKVQVEDDNVLVVSGERKRDKEKKDEKESVKYLRMERRVGKFMRKFVLPENANIDSITAVCQDGVLKVTVEKLPPPERKKPKTIDVKLA

SEQ ID NO: 5809 - protein, 112 aa, Bartonella sp. Rf1554yn
ANEACLKMLQEIGSIKRIPEFIARAKDKNDPFRLIGFGHRVYKNYDPRAKIMQKTCHKVLKELNIQNDPLLDIAIELEKIALSDEYFIEKKLYPNVDFYSGIILKALGFPTE

SEQ ID NO: 5810 - protein, 498 aa, Mentha x piperita
MELLQLWSALIILVVTYTISLLINQWRKPKPQGKFPPGPPKLPLIGHLHLLWGKLPQHALASVAKEYGPVAHVQLGEVFSVVLSSREATKEAMKLVDPACANRFESIGTRIMWYDNEDIIFSPYSEHWRQMRKICVSELLSSRNVRSFGFIRQDEVSRLLRHLRSSAGAAVDMTERIETLTCSIICRAAFGSVIRDNAELVGLVKDALSMASGFELADMFPSSKLLNLLCWNKSKLWRMRRRVDTILEAIVDEHKFKKSGEFGGEDIIDVLFRMQKDTQIKVPITTNSIKAFIFDTFSAGTETSSTTTLWVLAELMRNPAVMAKAQAEVRAALKEKTNWDVDDVQELKYMKSVVKETMRMHPPIPLIPRSCREECVVNGYTIPNKARIMINVWSMGRNPLYWEKPDTFWPERFDQVSKDFMGNDFEFVPFGAGRRICPGLNFGLANVEVPLAQLLYHFDWKLAEGMKPSDMDMSEAEGLTGILKNNLLLVPTPYDPSS

SEQ ID NO: 5811 - protein, 342 aa, Oceanobacillus iheyensis HTE831
MKAVFVEDAEKIIVKDIEVPELKPNEVQIKVNVAGICGSDIHTYKGLHPFRKPPVVIGHEVAGEVVEVGSSVTKFKVGDRVTVEPQIGTGESEGVMTGNVNYSDTRLAPGMGDWLGTMAEYFASPEEQVIKLPDSVSYDQGVLVEPLAVGVHAAFKGDVQPTDRVAILGAGPIGLLTLIAVKAKGVKDIVVTDVLDYSLQVAKEMGASEVINIKDNSNWIHDAKQSLDKGSFDKVFITAGVPGIVNDSLNLLRKGGRVVTVAMFHGQQSVDIEQLQQNEKEIIGCMTYNRPDTEEALEIIASGKLDVEKVISHKLHYEEAAKGFTIVDKKKDKSVKVLVSFE

SEQ ID NO: 5812 - protein, 101 aa, Rickettsia sp. Bar29-like
GSSEYIPKYIAKAKDKNDPFRLMGFGHRIYKNYDPRAAVLKETCKEVLKELGQLDNNPLLQIAIELEAIALKDEYFIERKLYPNVDFYSGIIYKAMGIPSQ

SEQ ID NO: 5813 - protein, 112 aa, Bartonella sp. Rf1561yn
ANEACLKMLQEIGSIKRIPEFIARAKDKNDPFRLIGFGHRVYKNYDPRAKIMQKTCHKVLKELNIQDDPLLDIAIELEKIALSDEYFIEKKLYPNVDFYSGIILKALGFPTE

SEQ ID NO: 5814 - protein, 337 aa, Streptococcus pyogenes SSI-1
MKRIAVLTSGGDAPGMNAAIRAVVRKAISEGMEVYGINRGYAGMVDGDIFPLGSKEVGDKISRGGTFLYSARYPEFAQLEGQLAGIEQLKKHGIEGVVVIGGDGSYHGAMRLTEHGFPAVGIPGTIDNDIAGTDYTIGFDTAVNTAVEAIDKLRDTSSSHGRTFVVEVMGRNAGDIALWAGIASGADQIIVPEEEFDIEKVASTIQYDFEHKGKNHHIIVLAEGVMSGEAFAQKLKEAGDKSDLRVTNLGHILRGGSPTARDRVIASWMGSHAVELLKEGKGGLAVGIHNEELVESPILGTAEEGALFSLTEEGQIIVNNPHKARLDFAALNRSLSQ

SEQ ID NO: 5815 - protein, 108 aa, Brassica napus
  misc_feature (91)..(91): Xaa can be any naturally occurring amino acid
FEAFQLGMAPVYMAFLRFMGDENDARNYSYSLEVGANGRKMIWEGTPRSIRDSHRKVRDSHDGLIIQRNMALFFSGGERKELKLRVTGRIXKEQQNPDSGACIPNLFS

SEQ ID NO: 5816 - protein, 280 aa, Triticum turgidum subsp. durum
MKTLLILTILAMATTIATANMQVDPSGQVQWPQQQPFPQPQQPFCEQPQRTIPQPHQTFHHQPQQTFPQPEQTYPHQPQQQFPQTQQPQQPFPQPQQTFPQQPQLPFPQQPQQPFPQPQQPQQPFPQSQQPQQPFPQPQQQFPQPQQPQQSFPQQQQPAIQSFLQQQMNPCKNFLLQQCNHVSLVSSLVSIILPRSDCQVMQQQCCQQLAQIPQQLQCAAIHSVAHSIIMQQEQQQGVPILRPLFQLAQGLGIIQPQQPAQLEGIRSLVLKTLPTMCNVY

SEQ ID NO: 5817 - protein, 122 aa, Zea mays
KLAGCSRVSDHRRGTKARDNRCVNESIAMASRLVAAAASSSSSLSSASPLARLISRRGLAGAADGHGSAKVPLWKDPLSPSKWKEEHFVLASLSMWGVIFYGGYKLFSGKKEAKTEAASPQA

SEQ ID NO: 5818 - protein, 73 aa, Glycine max
PTRPPTRPCGCEKTTEGGLGWERYYDGDPDLYQFHKHSSIDLISLPKDFSKFNSINMYDIVIKNPNVFHVRDK

SEQ ID NO: 5819 - protein, 179 aa, Triticum aestivum
  misc_feature (91)..(91): Xaa can be any naturally occurring amino acid
  misc_feature (104)..(104): Xaa can be any naturally occurring amino acid
  misc_feature (133)..(133): Xaa can be any naturally occurring amino acid
  misc_feature (136)..(137): Xaa can be any naturally occurring amino acid
  misc_feature (144)..(144): Xaa can be any naturally occurring amino acid
  misc_feature (146)..(146): Xaa can be any naturally occurring amino acid
  misc_feature (151)..(151): Xaa can be any naturally occurring amino acid
MAPTVMASTATSVAPFQGLKSTAGLPVSRRSSSAGLSSVSNGGRIRCMQVWPIEGIKKFETLSYLPPLSTEALLKQVDYLIRSKWVPCLEXFSKVGFVFREHNXSSPGYYDGRYWTMWKAAYVRGGTDATQVXNEXXREVKKEXPXDAYVXVIGFRTGAKLRLIRFKGQPGLPKEWERA

SEQ ID NO: 5820 - protein, 723 aa, Glycine max
MDFTSFLTSLGTSFVIFLVLMIVFAFLSSRPGNNVVYYPNRILKGLDPLEGGYKSRNPFSWIKEALTSSERDVIAMSGVDTAVYFVFLTTVLSILVLSGVILLPVLLPLSVTDHGMKTQTTSNGTFSELDKLSMANITAKSSRLWGFFIACYWVSIVTFALLWRAYKHVSWLRAEALKSPDVKPEQFAIVVRDIPHVPQGQTRKEQVDSYFRDIYPETFYRSMIVTDNKVVNKIWESLEKYTKKLARAEAVYAGSKTTAKPEGTRPTNKTGFLGLVGKKVDTIEYCNEKINELEARLESEQKVTLREKQQDAAVVFFSSRVVAASASQSLHAQMVDTWSVFDAPEPNQLIWPNLKIKYFQRELRQYLVYFIVALTIFFYMIPITFISALTTLDNLVKYLPFIKPIVNIKALKTVLEAYLPQLALIIFLALLPKLLLFLSKFEGIPTESHAVRAASGKYFYFTVLNVFIGVTIGGTLFKAFKRIREHPTLDEISSLLAESLPGNATFFLTYVALKFFIGYGLELSRIVPLIIYHLKRKYLCKTEAELKEAWRPGDLGYGTRVPGDMLIVTIVFCYSVIAPVIIPFGALYFGLGWLVLRNQALKVYVPTFESYGRMWPHIHNRILASLILYQITMFGYFGTQKFYYTPLVLPLPILSLVFGFVCAKKFYPAFQHPALEVAANTLKEVPNMELIFGAYIPPSLRSEKIDGDRVEDALSQASRTTPV

SEQ ID NO: 5821 - protein, 445 aa, Pseudomonas aeruginosa UCBPP-PA14
MQSLLIRNARMVNEGQVREGDLLVRHGRIERIAGCLENCGASREIDAAGRYLLPGMIDDQVHFREPGYPQKGSIASESRAAVAGGITSFMDMPNTRPATLSLEALAEKKRLAAAHSVANYGFHFGVSRDNLDTVAALDPRDVAAVKVFMGASTGDMLVDDLPTLERLFASVPTLLLSHCEDTPRIEANLARWRQRFGERIPAAAHPRIRDAEACYRSTALAVELAQRHGTLLHVLHLSTARELALFEDKPLCQKRITAEVCVHHLLFDDSDYARLGHLLKCNPAIKSREDRDALRRALAGNRLDVIGTDHAPHAWAEKQQAYPQAPAGLPLVQHALPALLELVREGWLSLATLVAKTSHRVAELFAIADRGFLREGYWADLVLVSELEHPALASAMPLLSRCNWTPFRHRAFHHRIDTTIVSGQLAWHAGRLSDDCQGLPLRFSR

SEQ ID NO: 5822 - protein, 197 aa, Shigella flexneri
PVRYYQGTPSPVKHPELTDMVIFRENSEDIYAGIEWKADSADAEKVIKFLREEMGVKKIRFPEHCGIGIKPCSEEGTKRLVRAAIEYAIANDRDSVTLVHKGNIMKFTEGAFKDWGYQLAREEFGGELIDGGPWLKVKNPNTGKEIVIKDVIADAFLQQILLRPAEYDVIACMNLNGDYISDALAAQVGGIGIAPGA

SEQ ID NO: 5823 - protein, 423 aa, Triticum aestivum
  misc_feature (413)..(413): Xaa can be any naturally occurring amino acid
MPLSGMAIAFKASTSACTAQQLWGHPTRDQCQHGFTHLNERKSRKGSAALHARAIPGNLDLDFGDPSWKQKYQEDWDRRFSLPHITDVFDLEPCRSAFPRSTHASPRGASDASSPDKWNGYVNKDDRALLKVSDYASNTSAGAECIDPDCSWVEHWVHRAGPRKEIYYEPEEVKAAIVTCGGLCPGLNDVIRQIVFTLEIYGVKNIVGIQFGYRGFFEKGLKEMPLSREVVENINLAGGSFLGVSRGGAKTSEIVDSIQARRIDMLFVIGGNGSHAGANAIHEECRKRKLKVSVVAVPKTIDNDILFMDKTFGFDTAVEEAQRAINSAYIEARSAYHGVGLVKLMGRSTGFIAMHASLSSGQIDVCLIPEVSFTLDGEHGVLAHLEHLLETKGFCVVCVAEGAGQDLLQKSNXTDASGNVILS

SEQ ID NO: 5824 - protein, 389 aa, Escherichia coli
TLQNGKLNVPENPIIPYIEGDGIGVDVTPAMLKVVDAAVEKAYKGERKISWMEIYTGEKSTQVYGQDVWLPAETLDLIREYRVAIKGPLTTPVGGGIRSLNVALRQELDLYICLRPVRYYQGTPSPVKHPELTDMVIFRENSEDIYAGIEWKADSADAEKVIKFLREEMGVKKIRFPEHCGIGIKPCSEEGTKRLVRAAIEYAIANDRDSVTLVHKGNIMKFTEGAFKDWGYQLAREEFGGELIDGGPWLKVKNPNTGKEIVIKDVIADAFLQQILLRPAEYDVIACMNLNGDYISDALAAQVAGMGIAPGANIGDECALFEATHGTAPKYAGQDKVNPGSIILSAEMMLRHMGWTEAADLIVKGMEGAINAKTVTYDFERLMEGAKLL

SEQ ID NO: 5825 - protein, 226 aa, Clostridium beijerinckii
MKLIIDDVNIEKIKDVFSIFQIDGVTSNPSILHKYGKQPYEILIKIREFIGENSELHVQVISESSEGMLKEAHKIIKELGKNTYVKIPVTRDGLKAIKILRKEEINVTATAIYTQMQAYLAGKAGAQYAAPYVNRIDNLGANGVQVAKDIHDIFEKNNFKTEVLAASFKNSQQVLELCKYGIGAATISPDVIEGLIKNDCVDVAVENFKKDFEILCGQGNTMLNCR

SEQ ID NO: 5826 - protein, 218 aa, Shigella boydii
QELDLYICLRPVRYYQGTPSPVKHPELTDMVIFRENSEDIYAGIEWKADSADAEKVIKFLREEMGVKKIRFPEHCGIGIKPCSEEGTKRLVRAAIEYAIANDRDSVTLVHKGNIMKFTEGAFKDWGYQLAREEFGGELIDGGPWLKVKNPNTGKEIVIKDVIADAFLQQILLRPAEYDVIACMNLNGDYISDALAAQVGGIGIAPGANIGDECALFEA

SEQ ID NO: 5827 - protein, 399 aa, Bacillus anthracis str. Sterne
MYWNDGNEGSEYRMISHLFQTYGRRTVEFVKGNGTKVIDNNGKQYLDFTSGIGVCNLGHCHPTVMKAVQEQLNDIWHISNLFTNSLQEEVASLLTENIALDYVFFCNSGAEANEAALKLARKHTGKSLVVTCEQSFHGRTFGTMSATGQNKVKEGFGPLLPSFLHTPFNDIKALKEVMNEEVAAVMVEVVQGEGGVIPADLSFLKEIETLCKKFGSLFIIDEVQTGIGRTGTLFAYEQMGIDPHIVTTAKALGNGIPVGAMIGRKELGTSFTAGSHGSTFGGNYVAMAAAKEVLQVSKRLSFLKEVQEKGEYVLQKLQEELQHVECIQNIRGKGLMVGIECTHEVASFIEQLEKEGLLVLQAGPNVIRLLPPLIVTNEELEQAVYMIKKVVCTKNVSII

SEQ ID NO: 5828 - protein, 535 aa, Glycine max
MGSISHVITTTLPHLPSTRSLGFPISHSNSRLLSLPPTRVAKQVGVFAELVSRSSTASFASVDFSVHDWKIQFHEDCQLRRPPPHLTDIFPNAPPIPSTFCLKMRTPIDRDFPGHYSLDEEWHGYINNNDRVLLKTIYYSSPTSAGAECIDPDCTWVEQWVHRAGPREKIYYKPEEVKAAIVTCGGLCPGLNDVIRQQIVITLEIYGVKNIVGIPFGYRGFSDKELTEVPLSRKVVQNIHLSGGSLLGVSRGGPGVSDIVDSLEKRGINMLFVLGGNGTHAGANAIHHECRKRRLKVSVIGVPKTIDNDILLMDKTFGFDTAVEEAQRAINSAYIEAHSAYHGIGVVKLMGRSSGFIAMQASLFSGQVDICLIPEVPFNLHGPHGVLSHLKYLLETKGSAVVCVAEGAGQNLLQKTNATDASGNVVFGDIGVYIQQETKKYFKEIGVHADVKYIDPTYMIRAIRANASDGILCTVLGQNAVHGAFAGYSGITVGLCNTHYVYFPIPEVISHPRLVDPNSRMWHRCLTSTGQPDFI

SEQ ID NO: 5829 - protein, 314 aa, Aspergillus nidulans FGSC A4
MSLADTTYKLNTGAEIPALGLGTWQSAPGEVSAAVYHALKVGYRHIDAAQCYGNETEVGEGIKRALSEGIVKRSEIFVTTKLWCTYHTRIQQALDLSLSKLGLDYVDLYLVHWPLAMNPNGNHDLFPKLPDGSRDLVREHSHVTTWKGMEELITNNPDKVKAIGVSNYSKRYLEQLLPQAKIVPAVNQIENHPALPQQEIVDLCKEKGILITAYSPLGSTGSPLFKAEAIVAVAERRGVTPASVLLSWHLARGSSVLAKSVTPSRIEENRKLVKLEPEDVELIGKYSAELAATNGFQRYVYPPFGVDFGFPDKS

SEQ ID NO: 5830 - protein, 213 aa, Shigella dysenteriae
DLYICLRPVRYYQGAPSPVKHPELTDMVIFRENSEDIYAGIEWKADSADAEKVIKFLREEMGVKKIRFPEHCGIGIKPCSEEGTKRLVRAAIEYAIANDRDSVTLVHKGNIMKFTEGAFKDWGYQLAREEFGGELIDGGPWLKVKNPNTGKEIVIKDVIADAFLQQILLRPAEYDVIACMNLNGDYISDALAAQVGGIGIAPGANIGDECALF

SEQ ID NO: 5831 - protein, 303 aa, Arabidopsis thaliana
MALKFSGAYKQCKPCTGSSSSPLKKGHRSFPDYDNASEGVPYPFMGGSAGSTPAWDFTNSSHHPAGRLESKFTSIYGNDRESISAQSCDVVLDDDGPKEWMAQVEPGVHITFASLPTGGNDLKRIRFSREMFDKWQAQRWWGENYDKIVELYNVQRFNRQALQTPARSDDQSQRDSTYSKMDSARESKDWTPRHNFRPPGSVPHHFYGGSSNYGPGSYHGGPPMDAARTTTSSRDDPPSMSNASEMQAEWIEEDEPGVYITIRQLSDGTRELRRVRFSRERFGEVHAKTWWEQNRERIQTQYL

SEQ ID NO: 5832 - protein, 278 aa, Mycoplasma gallisepticum R
MITRMNHSKINWFPGHMKKTLDDINKIKKHIDLVIQVLDARAINLTSNPDLLEIFKQKKIINVALKSDLADLSYQYDPETIVTNIRDHQFSNFLLNKLHQILSDKIKRLQAKGLVTPHFNIMVIGLPNIGKSSLINKLIKKNHNKVENKAGVTKRQTFVKLNKNFTLYDTPGVLYKRIDDFILGAKLSLLNVINLEVIPMQEVLSFAYSYLNQYYHNQLLEWAKQEIIPEQFHEFIEQYAHKKGFLNKNNAIDLNATYMNFYQDISLAKIAKVNYEKN

SEQ ID NO: 5833 - protein, 204 aa, Shigella dysenteriae
RPVRYYQGAPSPVKHPELTDMVIFRENSEDIYAGIEWKADSADAEKVIKFLREEMGVKKIRFPEHCGIGIKPCSEEGTKRLVRAAIEYAIANDRDSVTLVHKGNIMKFTEGAFKDWGYQLAREEFGGELIDGGPWLKVKNPNTGKEIVIKDVIADAFLQQILLRPAEYDVIACMNLNGDYISDALAAQVGGIGIAPGANIGDEC

SEQ ID NO: 5834 - protein, 313 aa, Agrobacterium tumefaciens str. C58
MLELLWSGQTATKITAEDIRSQLGKARLRAFELMQLLFPGLAALTSVEALRLLLSWLPDDETTPHHLVAVAAVPVFATAIIRNRQGFAPIAPDASLTHSADFLRMLSGTLPSTEKVRALDTYLTTVADHGLNASTFTARVIASTGAGLFSSVVGALCALKGPLHGGAPGPVLDMLDAIGAEAEIEPWLLDALGRGERLMGFGHRIYRVRDPRADVLKHAVSTLKEGSDRIAFAGKVEEAALALLKEKKPLRPLQTNVEFYTALVLEAVGFPRDSFTNVFAAGRMAGWTAHVLEQERTGRLIRPQSHYIGPHPR

SEQ ID NO: 5835 - protein, 235 aa, Nostoc punctiforme PCC 73102
MTGTDPVKLMKQEVGKAAAALVKSGSIVGLGTGSTTAYTIQFLGDRLKSGELKDIIGIPTSFQSEVLAKQYGVPLATLDSIDHIDIAIDGADEVDPQKNLIKGGGAAHTREKVVDYLAEQFIVVVDSGKLVDRLGSSFAVPVEVIPMAITPVTNAIKKLGGKPELRMGVKKAGPVITDQGNFVLDVRFDSIEDPVSLEKTLNNIPGVLENGIFVNCVDLVLIGEVKDGQPLVRQL

SEQ ID NO: 5836 - protein, 466 aa, Triticum aestivum
NSARAAGKRLWDAGVRDLLILEATGRVGGRMHKHNFGGLNVEIGANWVEGLNGDKVNPIWPMVNASLQLRNFYSDFDGVVGNVYKESGGLYDEEFVQKRMDRGDEVEELGGKLAAEMDPSGRDDISILAMQRLFNHQPNGPATPVDMVLDYFRYDYEFAEPPRVTSLQGTEPTATFADFGDDANFVADQRGFETLIYHIAGQYLRSDKSGNIVDPRVKLNKVVREISYDQRGVVVTTEDNSAYSADYVIVSASIGVLQSDLIQFKPQLPAWKILAIYRFDMGVYTKIFLKFPRKFWPTGPGKQFFVYASSRRGYYGMWQSFEQEYPGANVLMVTVTDVESRRIEQQPDNVTMAEAVGVLRNMFPDRDVPDATDIYVPRWWSNRFFKGSYSNWPVGVNRYEYDQLRAPVGGRVYFTGEHTSEHYNGYVHGAYLAGIDSADILMNKVLNNVEFKVRPKYDEEQKAEAK

SEQ ID NO: 5837 - protein, 116 aa, Glycine max
  misc_feature (56)..(56): Xaa can be any naturally occurring amino acid
FVSDQRGCNYFLHKMAEVFLFPSQERMLDIRLKPNKVARELQYSQSGVTLQTENGXVCDTNYVILSDSIGVFQSDVMSLQSPLTRVCSILCPTLTSRKYTSAVVFFHTKNTRLFFQ

SEQ ID NO: 5838 - protein, 335 aa, Aspergillus nidulans FGSC A4
MGSNGNNGPAYAPEWQHFITELGDPLLMRGETVAELYENSNENIQKLLAKYDFPPTDKSVTTEDITLKNGVWVRIYTPPAADFNATMADSDSGKEEKITVFMHGGGWIMGSVDHEDSAVRQLCRAVGHKIVSVGYRLAPKHKYPVALDDCLQATLWTLENFASSAPSVSLMGGSAGANLAFGVALRLLDSGLGDKFKGVHALVPCVVHPEAVPEPKREQFTAYEENAEATVNTLACMRCFLDSYGPPPDDIYFSVLLHPRIGDLKRVYIVECGTDTLRDDARLMRDALIEKGVDVRYDAYPGLPHYFWSYPAKALEGVSGVFHANMYRALQWIHE

SEQ ID NO: 5839 - protein, 389 aa, Escherichia coli
TLQNGKLNVPENPIIPYIEGDGIGVDVTPAMLKVVDAAVEKAYKGERKISWMEIYTGEKSTQVYGQDVWLPAETLDLIREYRVAIKGPLTTPVGGGIRSLNVALRQELDLYICLRPVRYYQGTPSPVKHPELTDMVIFRENSEDIYAGIEWKADSADAEKVIKFLREEMGVKKIRFPEHCGIGIKPCSEEGTKRLVRAAIEYAIANDRDSVTLVHKGNIMKFTEGAFKDWGYQLAREEFGGELIDGGPWLKVKNPNTAKKIVIKDVIADAFLQQILLRRPEYDVIACMNLNGDYISDALAAQVGGIGIAPGANIGDECALFEATHGTAPKYAGQDKVNPGSIILSAEMMLRHMGWTEAADLIVKGMEGAINAKTVTYDFERLMEGAKLL

SEQ ID NO: 5840 - protein, 483 aa, Pseudomonas sp. ND6
MTVQLVIDNQKQSASDGKTFERIDPLSSHAVSVGAACSVEDALRAAQSSERAFQTWSGTGPTERRRILLAAADALEAKMADFCSAMAEEIGASQLWAQFNVGASANLLREAAAMTTQIKGETIPTDKPGALSMTLRQPVGTVLSIVPWNGPVILGARAIAYPLACGNTVIFKGSESSPRTHALLAEAFYEAGLPAGVLNFLISAPEDAAAVTEALVAHDTVRRVNFTGSTKVGRMIAQTCASHLKRCLLELGGKAPFIVLDDADIEGAVNAAVFGAFLYQGQICMSTERFVVDEAVADAFVARFAERVNALETGLPAKSPGCVIGPMIGQGSVQRINHLLDDAVNKGAKIVTGGLAETALMGPTLVDCVTREMAIYDEETFGPVTTIVRVKGAEQALAVANDTAYGLSSSIFSRDVTKALGLASRLDAGCVHINGATVQNEPQAPYGGMKKSGYGRFDGNAVIEEFTEVKWVTVEPSGQPYPF

SEQ ID NO: 5841 - protein, 280 aa, Methanothermobacter thermautotrophicus str. Delta H
MAIGKESLEQVFRAGSPRWRTSITRVEPNRIVTRGYSQEDLIGGVSFSEMVYLLIRGELPPQNVARMLEAVLVSFCDHGVTPPSTQAARMIASAGSPVHACIAGGLLAFGKNHAGAIERSMKLFQETVSSCESEDEIPDAALRLVDDHLQANRRIPGFGHRYHNADPRAVRLLELAEDYGCVGPHTSLALEVQEILLERKGVRMNVDGANAGILSDMGFDWRTGAGVFMIGRLPGLISHVYEEKVREPAFRKFFEIEEIQYDGEEERDLSAGADLEPMPE

SEQ ID NO: 5842 - protein, 616 aa, Zea mays
MDSDYGVPRELSEVQKKRALYQPEVPPCLQGTTVRVEYGDAAIAADQAGAHVISHAFPHTYGQPLAHFLRKTAVVLDAKVISEHPVVRVGIVFCGRQSPGGHNVVWGLYEAIKAHNQNSKLIGFLGGSDGLLAQRTLEITNEVLASYKNQGGYDMLGRTKDQIRTTEQVNGAMASCQALKLDALVIIGGVTSNTDAAQLAETFAEAKCATKVVGVPVTLNGDLKNQFVETTVGFDTICKVNAQLISNVCTDALSAEKYYYFIRLMGRKASHVALECALQSHPNMVILGEEVAASKLTIFDITKQICDAVQARAEKDKNHGVVLIPEGLVESIPELYALLQEIHGLHGKGVSVENISSQLSPWASALFEFLPPFIRKQLLLHPESDDSAQLSQIETEKLLAQLVETEMNRRLKEGTYKGKKFNAICHFFGYQARGALPSKFDCDYAYVLGHVCYHIIAAGLNGYMATVTNVKSPVNKWRCGAAPISSMMTVQRWSRGPSATQIGKPAVHMASVDLKGKAYDVLRQNSSRFLLEDVYRNPGPLQFEGPGADSKPISLCVEDQDYMGRIKKLQEYLEKVKSIVKPGCSQDVLKAALSAMSSVTETLNIMTSSSTGQTAL

SEQ ID NO: 5843 - protein, 289 aa, Photorhabdus luminescens subsp. laumondii TTO1
MSQKEIWSETLHANFGQYFSVDKVLYHDKTEHQDLIIFENATLGRIMALDGTVQTTERDEFIYHEMMAHVPLFAHGNAKRVLIIGGGDGGMLREVCRHQYLESITMVEIDAGVVEFCRQYLPNHNAGAYDDPRFNLIIDDGVNFVNTTDQKFDVIISDCTDPIGPGEGLFTSEFYQGCQRCLNEGGIFVAQNGVCFLQQDEAVTSHKKLSNYFADSGFYQAAIPTYYGGIMTFAWASQNPALRHVDLATLQQRFDNASFTCRYYNPAVHVGSFALPQYLLDALFTGCTI

SEQ ID NO: 5844 - protein, 302 aa, Triticum aestivum
MKTLLILTILAMATTIATANMQVDPSGQVQWPQQQPFPQPQQPFCQQPQRTIPQPHQTFHHQPQQTFPQPQQTYPHQPQQQFPQTQQPQQPFPQPQQTFPQQPQLPFPQQPQQPFPQPQQPQQPFPQSQQPQQPFPQPQQQFPQPQQPQQSFPQQQQPAIQSFLQQQMNPCKNFLLQQCNHVSLVSSLVSIILPRSDCQVMQQQCCQQLAQIPQQLQCAAIHSVAHSIIMQQEQQQGVPILRPLFQLAQGLGIIQPQQPAQLEGIRSLVLKTLPTMCNVYVPPDCSTINVPYANIDAGIGGQ

SEQ ID NO: 5845 - protein, 104 aa, Oryza sativa (japonica cultivar-group)
MVDAKGRLLDRATMEEDLFWAIRGGGGRNFGIVLSWKLRLVPIPATVTVFTVHRSRNQSATNLLIKWQHVASSLPNDAFLRVVVPLYRVPASSPPWPTPSWSST

SEQ ID NO: 5846 - protein, 381 aa, Staphylococcus aureus subsp. aureus MSSA476
MLTEQEKDIIKQTVPLLKEKGTEITSIFYPKMFKAHPELLNMFNQTNQKRGMQSSALAQAVMAAAVNIDNLSVIKPVIMPVAYKHCALQVYAEHYPIVGENLLKAIQDVTGLEENDPVIQAWAKAYGVIADVFIQIEKEIYDQMMWIGFKPFKITNIKQESEDIKSFTVETEEYDFSEFTPGQYITVDVSSEKLPYRAKRHYSIVSGEKNHLTFGVKRDVTTEHEGEVSTILHDEIKEGDMINLAAPVGGFVLENTTEPQLFLGSGIGVTPLVAMYEAASAKGLDTQMVQVAENEQHLPFKDNFNSIASHHDNAKLYTHLKDKQGYIGAEELQAFLANKPEIYICGGTKFLQSMIEALKSLNYDMDRVHYETFIPRLSVAV

SEQ ID NO: 5847 - protein, 262 aa, Hypocrea lixii
MGHEDAVYLAKLAEQAERYEEMVENMKIVASEDRDLTVEERNLLSVAYKNVIGARRASWRIVTSIEQKEESKGNSSQVTLIKEYRQKIENELAKICDDILEVLDQHLIPSAKSGESKVFYHKIKGDYHRYLAEFAIGDRRKDSADKSLEAYKAATEVAQTELPPTHPIRLGLALNFSVFYYEILNAPDQACHLAKQAFDDAIAELDTLSEESYKDSTLIMQLLRDNLTLWTSSEAETPARLMPLLRRRPLLRLPSRRRRAQG

SEQ ID NO: 5848 - protein, 213 aa, Zea mays
MGCFHSTAKRQHPGYEDPVHLASQTSFSVSEVEALFELFKSISGSVIDDGLINKEEFQLALFKNQRKENLFANRIFDLFDVKKRGAIDFGDFVRALNVFHPNIPMDEKIDFSFKLYDMDSTGFIERKEVKQMLIALLGESEMRLSDDIIETILDKTFSDADANQDGKIDRTEWENFVTRNPSLMKIMTLPYLKDITTTFPSFVFNSEVDDLVT

SEQ ID NO: 5849 - protein, 351 aa, Staphylococcus aureus subsp. aureus MSSA476
MKALVKTREGHGNLELLDKEVATPLDDKVKIKVHYAGICGTDIHTYEGHYKVNFPVTLGHEFSGEIVEVGADVKDFKVGDRVTSETTFYVCNECEYCKSKDYNLCNHRKGIGTQVDGAFTNYVIAREESLHHIPDEVSYQSAAMTEPLACAHHGVSKIQVNSGDVAVVMGPGPIGLLVAQVLKSKGATVVVTGLDNDKVRLDKAEALHMDYVVNLQQTDLKTYINGITDGYGADVVVECSGAVPAARQGLDILRKKGFYSQIGIFKDAEIPFDMEKVIQKEITVVGSRSQKPADWEPSLQLMADGLVNAEALVTKIYDISKWDEAYQHLKSGEGIKALLKPLDLDENEGEN

SEQ ID NO: 5850 - protein, 462 aa, Bacillus subtilis subsp. subtilis str. 168
MPDQLTVYNPATGEEIKTIPQQSATEVEEAIERSHQAFKTWSKTSANERTSLLKKWYELIVEHKEELADLITKENGKPYQEAVGEVLYGAGYIEWFAEEAKRVYGRTVPAPTTGKRIVVTRQPVGPVAAITPWNFPNAMITRKAAPALAAGCTFIIKPAPDTPLSAYELARLAYEAGIPKDVLQVVIGDGEEIGNVFTSSPKIRKITFTGSTPVGKILMKNSADTVKHVSMELGGHAPLIVDEDADIDLAVEQAMASKYRNAGQTCVCANRLIVHESIKDEFAAKLSEQVSKLKVGNGLEEGVNVGPIINKRGFEKIVSQIDDAVEKGAKVIAGGTYDRNDDKGCYFVNPTVLTDVDTSMNIMHEETFGPVAPIVTFSDIDEAIQLANDTPYGLAAYFFTENYRRGIYISENLEYGIIGWNDGGPSAVQAPFGGMKESGIGREGGSEGIEPYLETKYLSIGL

SEQ ID NO: 5851 - protein, 168 aa, Malus x domestica
MAGHSESKSIHDFTVKDAKGNDVDLSTYKGKVLLIVNVASQCGLTNSNYTELAQLYEKYKTQGLEILAFPCNQFGAQEPGTNDEIVEFACTRFKAEYPIFDKVDVNGDNAAPIYKFLKSSKGGLFGDSIKWNFSKFLVDKEGKVVDRYAPTTSPLSIEKDVKKLLGVA

SEQ ID NO: 5852 - protein, 205 aa, Shigella dysenteriae
PVRYYQGAPSPVKHPELTDMVIFRENSEDIYAGIEWKADSADAEKVIKFLREEMGVKKIRFPEHCGIGIKPCSEEGTKRLVRAAIEYAIANDRDSVTLVHKGNIMKFTEGAFKDWGYQLAREEFGGELIDGGPWLKVKNPNTGKEIVIKDVIADAFLQQILLRPAEYDVIACMNLNGDYISDALAAQVGGIGIAPGANIGDECAL

SEQ ID NO: 5853 - protein, 439 aa, Nostoc punctiforme PCC 73102
MLESLGRIKNPLVRSIAAAATVSSVITLSAAVVIGVSNAKAKSAYQFGVYSSLFGTASGAVFGLVYTNKASGNKSTPDLKTLDSHVWQDWRNFVVVRKVKESEEITSFYLQPEDKGEITNFQPGQFLTIKLDIPGQDKPVIRTYSLSDYPENCEYYRLSIKREPAPNGLDVMPGIASNFMHDRIQEGSVILAKPPNGKFVLDVQKSIPAVLISNGVGITPMISMAKACSLLNPTRPIWFVHGARDGKFHAFRDEVREISRQNHNLNVHFRYSRPTPEDRGKYHSVGYVDAALIQELVRQEAEYFLCGSPSFMQSIMQGLKESGVPDSRVFFESFGKPMKSVSEKQTQTVTGDDKFAEIVFAKSGKTLTWQPSDGTILEFAEANDINPPFSCRVGVCGTCMCKIREGVVAYQEEPTATTDQGSVLICISQPGTSKLVLDI

SEQ ID NO: 5854 - protein, 289 aa, Populus alba
EENWAEEVREDWFQDELEGESYCSNNSNKLNTFPILLEQDLSWEDEELSSLFAKEEQNQLCKDLETNPSLARARCEAVEWILKVNEHYSFTALTAVLAVNYLDRFLFSVHLQKEKPWMAQLAAVSCLSLAAKVEETQVPLLLDFQVEDSKYVFEAKTIQRMEILVLSTLKWKMNPVTPISFLDYITRRLGLEHYLCLEFLKRCERMVLSILADSRSMPYVPSVMAAATMLYVIDNIKPSLAAEYQSQLLSILGIDKDKVEDCSKFLMEFALREHFKLLSNKRKFCSLPG

SEQ ID NO: 5855 - protein, 389 aa, Escherichia coli
TLQNGKLNVPENPIIPYIEGDGIGVDVTPAMLKVVDAAVEKAYKGERKISWMEIYTGEKSTQVYGQDVWLPAETLDLIREYRVAIKGPLTTPVGGGIRSLNVALRQELDLYICLRPVRYYQGTPSPVKHPELTDMVIFRENSEDIYAGIEWKADSADAEKVIKFLREEMGVKKIRFPEHCGIGIKPCSEEGTKRLVRAAIEYAIANDRDSVTLVHKGNIMKFTEGAFKDWGYQLAREEFGGELIDGGPWLKVKNPNTGKEIVIKDVIADAFLQQILLRPAEYDVIACMNLNGDYISDALAAQVGGIGIAPGANIGDECALFEATHGTAPKYAGQDKVNPGSIILSAEMMLRHMGWTEAADLIVKGMEGAINAKTVTYDFERLMDGAKLL

SEQ ID NO: 5856 - protein, 193 aa, Triticum aestivum
MPSTFCRRRSRRPTVAPANSSRENFWVLIRGEEMSDSEEHQFESKADAGASKTYPQQAGTIRKNGYIVIKNRPCKVVEVSTSKTGKHGHAKCHFVAIDIFTGKKLEDIVPSSHNCDVPHVNRTEYQLIDISEDGFVSLLTDNGNTKDDLKLPTDETLLGQIKDGFAEGKDLVVSVMSAMGEEQINALKDIGPK

SEQ ID NO: 5857 - protein, 218 aa, Shigella dysenteriae
LDLYICLRPVRYYQGAPSPVKHPELTDMVIFRENSEDIYAGIEWKADSADAEKVIKFLREEMGVKKIRFPEHCGIGIKPCSEEGTKRLVRAAIEYAIANDRDSVTLVHKGNIMKFTEGAFKDWGYQLAREEFGGELIDGGPWLKVKNPNTGKEIVIKDVIADAFLQQILLRPAEYDVIACMNLNGDYISDALAAQVGGIGIAPGANIGDECALFEATH

SEQ ID NO: 5858 - protein, 3471 aa, Bacillus thuringiensis serovar konkukian str. 97-27
MKKSLKCFNVVTIIALLLSITLPSPSAFAEINKKNWDELHGNDVRIKAEQVNAEIYRGEVAEREHVFQYTIENTGDTPIQELVLKQNNENEITFLSQSMKVNGEKLPENKVADFYVEEKDKGGKLLSSNLKIRDLKSHEKMTVLIKASRTQHFNKEYKQKISVQKDQVQIGSMSFDVEGIPSEDKVEATADDEADSSKKSVVPSVNNTTKKVDEKLKVSVEDTNKPTSNTELVKQPVTEAEKQPEKEVAKQSDAEVQAASENASKVQIQVGDKQGFGDPLYSTIAAGNLVQTGNVTLGLTTDHYGRQSLGYKTNKMTVDVDNDDSTFNSSTGAFPTIPAGSKVKKAYLFWTAAMGVPGNITDRKVTEDQVRQPVKMKMGNKQYAEVSADSIRKADYLPYISNYSGSGAGYVAYADVTNVIAQQGISQTLTVANVPQIKDVTGGGYYWGNWNLILVYENYKETVKDMKIWEGLVSQKSTAWTDVSVNKINTPKEGAFKAKFSYFSSQGDPAEKDGYAYDYGEYDFDAGYIKIKNINGKDNDANDSSMTEVQVDGTNEFVTKKYPGYNPDWTNSFSTDIHTYHFEGPNQVKNDLKEAKMRFRANGATGDIYVLNNATFVTEHNAPNLQVDKKALDSAGKEIKEVKAGEEITYKIEVKNDTKNNQAPVSNVKGFDKLDDRLEYVPGSIQYVTGSNTGQKTDDASDDEAEFVNNQIDFRIGEGADAKDGGVLKPGESAVLTFKVKVKESIKSDTTVKNVVAVKGQDSAEIKYESEDDANVTVTIPKEVPGEIEARKIASNKSPKLGDEVEYRITFKNKVKDGRLDVLTIEDELPSSLEFVKDSLKAEGVQPEPVELKFENGKIIAKYPAITDMEERSIVFKTKVKETAKIGEEIVNKAIVSDKTNPPKNIEEKITPQHKAGKIDAKKKATNKKPKLGEEFEYQISFNNTVENGKLEAVTIEDEIPANLEFIQGSERAEGAGPSPVELKVENGKVIAKYPAITDTKERSIIFKVKVKEEAKAGETIVNKAVVSDPNGQSEHPEEKVTPDYKDGKVDVDKSVTNQTPKLGEEVEYRITFHNTVENGKLEKVMIEDTLPAGVEYVKDSLKAEGIKPEPVELKMENGKIIAKYPEITDTEKRSIVFKVKVKDSAKVGEAIVNKAIAKDPKHDPVDAKVVITPQSKKGEIAATKVVNNEKPKLGEEIEYRISFHNTVENGKIAEVRVEDTIPKGLEYVENSIKAEGEAPSPVELTVEAGVVKAKYIDITDTKERSIVFKVKVKEEVEVGKEIVNKAIVDDTKHQPIEPEERITPQHKDGIINAAKIVDNPSPKLGEEVEYRISFKNTVENGKLEKVKIEDTIPNGLEYVKGSEKAEGDKPAPVKLHVKDGKVIAEYENITDTKERSIVFTVKVKEEAEIGKEIVNQAIVDDTKDSKKPEAKITPLHKDGKIKAKKSVNNETPKLGEEVEYRISFKNTVENGKLAEVKIEDTLPEGLEYVENSLKAEGAGPNPVELKMENGKVLAKYPEITDIEERSITFKVKVKEEVKVGEKIVNKAIVDDTKHDPINPKAEITPQYKDGKIEAEKVVNNPSPKLEEEVEYRISFKNTVEHGKLAEVIIEDDLPNGLEYVKGSLQAEGSKPNPVELKFENGKVLAKYPEITDTKERSITFKVKVKGNVSDTIINQAIVSDTKHPPETPKAEIIPQHKDGKLEAKKVVNNLLPKLGEEVEYRISFKNTLENGKLAEVKIEDTLPEGLEYVENSLKAEGAGTDSVELKFENGKILAKYPEITDTKERSITFKVKVKDEVKIGGKIVNKAIIDDTKKEPETPTAEITPQHKDGKVEAEKTVNNPSPKLGEEIEYRISFKNTVENGKLAEVKIEDTLPNGLEYVKDSLQAEGSKPNPVELKVKDGKVIAKYPAITDIEERSIVFKAKVKEDFKVGEGIVNKVVVDDTKDPKTREVTVTPEYKDGKLKAEKFVNNKKPKLGEEVEYRINFKNTVENGKLVEVKVEDEIPAGLEYVENSLQAEGSKPSPVELKFENGKVMAKYPVITDTKERSIVFKAKVKEEAEIGKEIVNKAIVVDTTHEPEKPYVEITPQYKDGKIVAEKVANNHKPKLGEEVEYRIRFKNTVESGKLAEVNIKDTLPKGLEYVEGSITAEGSKPKPVELKVENGKVTAKYPAITDTEERSIVFKAKVKESVKAGEEIVNEAIVDDTKNVPEEPYVPITPQYKDGKIEARKEVSNYEPKLGEEIEYRIIFNNTVKDGKLAEVKIEDEIPAGLEFVQGSEKAEGAEPKPMELKVENGKVIATYAEIMDTEERSIVFKVKVKESVTIGKAITNKAIIHVDDPNHPIIEPTAKITPQYKDGKIIAHKKVNNDKPKLGEEIEYRISFSNTVKDGKLAEVKIEDEIPSGLEYVKDSLKAEGDEPAPVELKEEAGKVTAKYENITDTKERSIIFKVKVKDSVEVEKAIVNKAIVDDTKNPPERPEVDITPQHKDGKVKADKKVSKKDPKLGEEVEYRISFKNTVENGKLAELKIEDQLPAGLEYVKDSLKAEGNEPNPVELKEEAGKITAKYENITDTAERSISFKVKVTEAVKVGKTIVNKAIVDDHNPKNPPQKPEAIITPEYKDGKLKAEKTVNNPAPKLGEEVEYRITFRNVVEHGKVAKVKIKDELPTGLEFVEGSERAEGENPKPLHVKVKNGIVLAEYPEIVDTKERSIIFKVKVKEKAKVGEEIVNTAVVEDTINPPEQPNIAIQPQYKDGALQAEKTVSNQEPKLGEEVEYRISFENTVENGRLTEVKVEDEIPAGLEYVQDSIKSDGPEPDPVELKVENGKVTAKYPEITDMKKRSIIFKVKVQETVQVGKEIINKAIVDDNNPTTPPVESLIPITPQYKDGKLEARKEVSNHEPKLGEEIEYRITFNGTVDGGKLVDVKIEDEIPAGLEYVKDSLEAVGDKPVPTELKVENGKVTAKYPEITDTKERSIIFKAKVKETVKVGGEITNKAIIHVDDPNHPVIEPTATIKPEYKDGKLKAAKAVSNKEPKLGEEVEYRISFKNTVENGKVAEVKVEDEIPAGLEYVQDSLRFEGAEPNPVELKVEFGKVIAKYLDIADRKERSIIFKAKVKETVETGEKIVNKAIVGDTINQPEEPVVSITPQYKDGMLKAEKEVSNKEPKLGEEVEYRISFKNTVENGKLAEVKIEDQLPDGLEYVKDSVKAKGAIEVKVENGKLTAKYENIIDTKERNITFKVKVKEKAGEEIVNRAIVDDGINQPLEPTVSIKPKEPEVKPEDPKEPEVKPEDPKEPEVKPEDPKEPEVKPEDPKEPEVKPEDPKEPEVKPEDPKEPEVKPEDPKEPEVKPEDPKEPEVKPEDPKEPEVKPEDPKEPEVKPEDPKEPEVKPEDPKEPEVKPEDPKEPEVKPEDPKEPEVKLEKPEVRLEKLIKEPQVKVERELPKTGAASPWMVSVGAGISFLVGGVLFVLGRRRKQ

SEQ ID NO: 5859 - protein, 389 aa, Escherichia coli
TLQNGKLNVPENPIIPYIEGDGIGVDVTPAMLKVVDAAVEKAYKGERKISWMEIYTGEKSTQVYGQDVWFPAETLDLIREYRVAIKGPLTTPVGGGIRSLNVALRQELDLYICLRPVRYYQGTPSPVKHPELTDMVIFRENSEDIYAGIEWKADSADAEKVIKFLREEMGVKKIRFPEHCGIGIKPCSEEGTKRLVRAAIEYAIANDRDSVTLVHKGNIMKFTEGAFKDWGYQLAREEFGGELIDGGPWLKVKNPNTGKEIVIKDVIADAFLQQILLRPAEYDVIACMNLNGDYISDALAAQVGGIGIAPGANIGDECALFEATHGTAPKYAGQDKVNPGSIILSAEMMLRHMGWTEAADLIVKGMEGAINAKTVTYDFERLMEGAKLL

SEQ ID NO: 5860 - protein, 507 aa, Zea mays
MDSPPLQPTVFSLILALILVLYLALRRRGGGKNRSYPPVAGTVLHQLFNFGRLMEYQTALSRRYRTFRMLTPTCSYIYTVEPANVEYILKANFGNYGKGSTLHELSEDLLGDGIFNVDGAKWRHQRKVASHEFSTRVLRDYSTGVFRDTAAELAGIVAAAAAAAGEKLDMQELLMRSTLDSIFKVGFGVSLGVLSGSSEEGAAFAKAFDDASEQVLRRFLDPFWKAKRFLNFSSEAAMKRSLRTINGFVYAVVDRKIEQMERDQQEFVSPEDITSPFLVERESDPGCSDNKYLRDIILNFVIAGRDTTAGTLSWFLYVLCRNQSIQDRIAQEVRAATSGDGGLGAPELVACLTEDAISKMHYLHAALTETLRLYPSVPIDVKCCFSDDTLPDGYAVKKGDMVNYQPYQMGRMRFLWGAGAEEFRPERWLDDAGVFVPESPFKFTAFQAGPRVCLGKEFAYRQMKIFAAALLYLFRFEMWDANATVGYRAMLTLKIDRPLYLRTSLRR

SEQ ID NO: 5861 - protein, 271 aa, Zea mays
  misc_feature (66)..(66): Xaa can be any naturally occurring amino acid
  misc_feature (141)..(141): Xaa can be any naturally occurring amino acid
  misc_feature (206)..(206): Xaa can be any naturally occurring amino acid
  misc_feature (213)..(213): Xaa can be any naturally occurring amino acid
MLMKALSLLCRTSLSLHRKAAFLMPPKVLITSGSGRVGGRVGGRVGGRVGCAPLMLRLAWHSAGTXFDVATKTGGPFGTMKNPAEQAHGANAGLEIAIRLLEPIKEQFPILSYADFYQLAGVVAVEVTGGPDVPFHPGRQXKPEPPPEGRLPDATQGSDHLRQVFSTQMGLSDQDIVALSGGHTLGRCHKDRSGFEGAWTSNPLIXFDNSYFXELLSGEKEGLLQLPSDKALLSDPSFHPLVDKYAADEDAFFADYAEAHLKLSELGFVEA

SEQ ID NO: 5862 - protein, 199 aa, Shigella dysenteriae
PVRYYQGAPSPVKHPELTDMVIFRENSEDIYAGIEWKADSADAEKVIKFLREEMGVKKIRFPEHCGIGIKPCSEEGTKRLVRAAIEYAIANDRDSVTLVHKGNIMKFTEGAFKDWGYQLAREEFGGELIDGGPWLKVKNPNTGKEIVIKDVIADAFLQQILLRPAEYDVIACMNLNGDYISDALAAQVGGIGIAPGANI

SEQ ID NO: 5863 - protein, 496 aa, Pastinaca sativa
MIGVWCMLLAYTLVSIGRIRAKATRKLPPGPFPLPIIGNIHKLGKHPHKSLANLAQVYGPIMRLKLGHMTTVVISSSTTARQVLRKQDIAFSNRALPNAVRALDHNKYSAVWLPVGSQWRGLRKIMSMNLFTANKLDANQHLRSQKVHDLIRYCEKCSQSGEAVDIGGAAFLTSLNLMSNTIFSKDMIDSYENSEAKVFRDLVWNIMVEIGKPNLVDYFPLLQWMDPQGIKRRLAYNFDTLIKLFDVMVDERLELNGPQNSRDVLDELLKLVNTDEIDKSHIQHMFLDLFGAGTDTSSSTVEWAMSEILRKPATVLVKAKAELDQVIGNGKIVEEADISKLDYLRCIVKETLRLHPPAPLLVPRQVQEEVELCGYTVPKNSQVLVNAWAIGRDPMLWENPLSFQPERFVDSEIDINGHGYELIPFGAGRRICPGMPLAMRMVPIMLGSLLNCFDWKLQGGIAPEDLNMEDKFGLTLAKLHPLRVVPTSRPTHLFAF

SEQ ID NO: 5864 - protein, 388 aa, Escherichia coli
TLQNGKLNVPENPIIPYIEGDGIGVDVTPAMLKVVDAAVEKAYKGERKISWMEIYTGEKSTQVYGQDVWLPAETLDLIREYRVAIKGPLTTPVGGGIRSLNVALRQELDLYICLRPVRYYQGTPSPVKHPELTDMVIFRENSEDIYAGIEWKADSADAEKVIKFLREEMGVKKIRFPEHCGIGIKPCSEEGTKRLVRAAIEYAIANDRDSVTLVHKGNIMKFTEGAFKDWGYQLAREEFGGELIDGGPWLKVKNPNTGKEIVIKDVIADAFLQQILLRPAEYDVIACMNLNGDYISYALAAQVGGIGIAPGANIGDECALFEATHGTAPKYAGQDKVNPGSIILSAEMMLRHMGWTEAADLIVKGMEGAINAKTVTYDFERLMEGAKL

SEQ ID NO: 5865 - protein, 212 aa, Shigella dysenteriae
LDLYICLRPVRYYQGAPSPVKHPELTDMVIFRENSEDIYAGIEWKADSADAEKVIKFLREEMGVKKIRFPEHCGIGIKPCSEEGTKRLVRAAIEYAIANDRDSVTLVHKGNIMKFTEGAFKDWGYQLAREEFGGELIDGGPWLKVKNPNTGKEIVIKDVIADAFLQQILLRPAEYDVIACMNLNGDYISDALAAQVGGIGIAPGANIGDECA

SEQ ID NO: 5866 - protein, 285 aa, Xylella fastidiosa Dixon
MTTKDTWFTEHFQATGSAIGFRVTGKLDEVQSPFQKIEIYNSTDWGKLMVIDGALMLTSRDNFIYHEMISHPALFTHTAPKCVVIIGGGDCGTLREVLKHPDIEQVTQCDIDEQVTRMAEKHFPELCTSNNDPRATLLFSDGVAYMADCPTNSVDVIIVDSTDPIGPAKGLFNRTFYESCFRALKNDGLLIQQSESPLALLELIKEMRHEMSKAGFKAFKTLPFPQPCYPTGWWSVTLSSKQPNANFAFRQTDAQTKPFDTLYYNAHLHHGVLAPPPFIAHALGE

SEQ ID NO: 5867 - protein, 389 aa, Escherichia coli
TLQNGKLNVPENPIIPYIEGDGIGVDVTPAMLKVVDAAVEKAYKGERKISWMEIYTGEKSTQVYGQDVWLPAETLDLIREYRVAIKGPLTTPVGGGIRSLNVALRQELDLYICLRPVRYYQGTPSPVKHPELTDMVIFRENSEDIYAGIEWKADSADAEKVIKFLREEMGVKKIRFPEHCGIGIKPCSEEGTKRLVRAAIEYAIANDRDSVTLVHKGNIMKFTEGAFKDWGYQLAREEFGGELIDGGPWLKVKNPNTGKEIVIKDVIADAFLQQILLRPAEYDVIACMNLNGDYISDALAAQVGGIGIAPGANIGDECALFEATHGTAPKYAGQDKVNPGSIILSAEMMLRHMGWTEAADLIVKGMEGAINAKTVTYDFERLMEGDKLL

SEQ ID NO: 5868 - protein, 389 aa, Escherichia coli
TLQNGKLNVPENPIIPYIEGDGIGVDVTPAMLKVVDAAVEKAYKGERKISWMEIYTGEKSTQVYGQDVWLPAETLDLIREYRVAIKGPLTTPVGGGIRSLNVALRQELDLYICLRPVRYYQGTPSPVKHPELTDMVIFRENSEDIYAGIEWKADSADAEKVIKFLREEMGVKKIRFPEHCGIGIKPCSEEGTKRLVRAAIEYAIANDRDSVTLVHKGNIMKFTEGAFKDWGYQLAREEFGGELIDGGPWLKVKNPNTGKEIVIKDVIADAFLQQILLRPAEYDVIACMNLNGDYISDALAAQVGGIGIAPGANIGDECALFEATHGTAPKYAGQDKVNPGSIILSAEMMLRHMGWTEAADLIVKGMEGAINAKTVTYDFERLMEGAKLL

SEQ ID NO: 5869 - protein, 300 aa, Oryza sativa (japonica cultivar-group)
MGGGVMRTAAAKVGIAGGAAAAAAAAGGGRFRHVAPAFATAASAEAAAPTLVSAAGGGGGGEVPAVAASGAQWASSWEVDDWEFADWRDVAAAEPEVTAAGKPRLVFAPPSREEAEEATTELRDAIDRVYFSEAPIEVVKEQDKDLSKLGADAIIPAMPGHVMQAFTLLKSSPEAQGVVASLASDKNVWDAVLKNEKVMEFYKTHQQSLVYTFPEGTASVVSPEKLADASSENSSSGEKPESSPFADFMDNARKTVIDIVNNITNFFQDMFRKPNEAEILGGSFMALAIAVILLIMFKKA

SEQ ID NO: 5870 - protein, 190 aa, Glycine max
MPLILAKSDSIQIREVWNDNLEEEFALIREIVDNYPYIAMDTEFPGIVLRPVGNFKNSYDYHYQTLKDNVDMLKLIQLGLTFSDEHGNLPMCGGDDEESDTCCCIWQFNFREFNVNEDVFANDSIELLRQSGIDFKRNNENGIDAHRFGELLMSSGIVLNDNIHWVTFHSGYDFGYLYELLTCQALPDTQ

SEQ ID NO: 5871 - protein, 441 aa, Pseudomonas putida KT2440
MALTREQQIAALEKDWAENPRWKGVTRTYTAADVVRLRGSVQPEHTFARQGAEKLWKLVTEGAHPSFRPDKDFVNCMGALTGGQAVQQVKAGIQAIYLSGWQVAADNNSAESMYPDQSLYPVDSVPTVVKRINNAFRRADQIQWKAGKNPGDDGYIDYFAPIVADAEAGFGGVLNAYELMKNMIEAGAAGVHFEDQLASVKKCGHMGGKVLVPTQEAVQKLVAARLAADVSGVPTIILARTDANAADLLTSDCDPYDQPFVVGERTREGFYKVRAGLDQAIARGLAYAPYADLIWCETAKPDLDEARRFAEAIKKEYPDQILSYNCSPSFNWKKNLDDATIAKFQRELSAMGYKHQFITLAGIHNMWHGMFNLAHDYARNDMTAYVKLQEQEFADASKGYTFVAHQQEVGTGYFDDMTTVIQGGASSVTALTGSTEEEQFH

SEQ ID NO: 5872 - protein, 468 aa, Pseudomonas aeruginosa UCBPP-PA14
MNARLHATSPLGDADLVRADQAHYMHGYHVFDDHRVNGSLNIAAGDGAYIYDTAGNRYLDAVGGMWCTNIGLGREEMARTVAEQTRLLAYSNPFCDMANPRAIELCRKLAELAPGDLDHVFLTTGGSTAVDTAIRLMHYYQNCRGKRAKKHVITRINAYHGSTFLGMSLGGKSADRPAEFDFLDERIHHLACPYYYRAPEGVGEAEFLDGLVEEFERKILELGADRVGAFISEPVFGSGGVIVPPAGYHRRMWKLCQRYDVLYISDEVVTSFGRLGHFFASQAVFGVQPDIILTAKGLTSGYQPLGACIFSRRIWEVIAEPDKGRCFSHGFTYSGHPVACAAALKNIEIIEREGLLAHADEVGRYFEERLQSLRDLPIVGDVRGMRFMACVEFVADKASKALFPESLNIGEWVHLRAQKRGLLVRPIVHLNVMSPPLILTREQVDTVVRVLRESIEETVEDLVRAGHR

SEQ ID NO: 5873 - protein, 175 aa, Triticum aestivum
  misc_feature (132)..(132): Xaa can be any naturally occurring amino acid
  misc_feature (134)..(134): Xaa can be any naturally occurring amino acid
MAPTVMASSGTSVAPFQGLNSTDGLPVSRRSNGASLGTVSNGGRIRCMQVWPIEGIKKFETLSYLRPIRTEALLKQVEYLIRSKWVPCLEFSKVGFIFREHNASPGYYDGRYWTMWKLPMFGCTDATQVINXCXEVKNEYPDAYVRIIGFDNMRQVQCVSFIAFKPPGCKESGKA

SEQ ID NO: 5874 - protein, 295 aa, Zea mays
MQYLFDVWKDMEELKKEVREARRIKMLHQPSKAMDLENEIRILRNTFAEKSKDCVSLLKELETHKRLKENGTIPSFDLEGLQCLGSMLRIVGLSGTHMDLSNISIQWFRIHPKESNKEIISGATRPVYALEPHDVGRYLQAEIDVGGEIAVAKTAGPVDPDAGLVDYVETLVRKPETEFNVVVLQSNGVDQPKESVHVLNVGRLRMRLTKGKSVVAKEFYSSSMQLCGVRGGGEAASQAMFWRPRNDLSLVLAFESTRERNAAIMLARRFAVDCNVCAFTKRYIILAGPGDKTPW

SEQ ID NO: 5875 - protein, 161 aa, Brassica napus
MSTKKIVLKSSDAESFEVDEAVARESQTLAHMVEDDCADNGIPLPNVTGKILARVSEYCKKHVDAAAAKTEAAADGGAPSDEDLKAWDAEFMKIDQATLFELILAANYLNIKNLLDLTCQTVADMIKGKTPEEIRTTFNIKNDFTAEEEEEVRRENQWAFE

SEQ ID NO: 5876 - protein, 424 aa, Staphylococcus aureus subsp. aureus MRSA252
MKLIKNGKVLQNGELQQADILIDGKVIKQIAPAIEPSNGIDIIDAKGHFVSPGFVDVHVHLREPGGEYKETIETGTKAAARGGFTTVCPMPNTRPVPDSVEHFEALQKLIDDNAQVRVLPYASITTRQLGKELVDFPALVKEGAFAFTDDGVGVQTASMMYEGMIEAAKVNKAIVAHCEDNSLIYGGAMHEGKRSKELGIPGIPNICESVQIARDVLLAEAAGCHYHVCHVSTKESVRVIRDAKRAGIHVTAEVTPHHLLLTEDDIPGNNAIYKMNPPLRSTEDREALLEGLLDGTIDCIATDHAPHARDEKAQPMEKAPFGIVGSETAFPLLYTHFVKNGDWTLQQLVDYLTIKPCETFNLEYGTLKENGYADLTIIDLDSEQEIKGEDFLSKADNTPFIGYKVYGNPILTMVEGEVKFEGDK

SEQ ID NO: 5877 - protein, 463 aa, Synechocystis sp. PCC 6803
MVSLTPNPSYSVSLLLELPNHAGTLASVTQAIADAGGSFGQISLIESNLKLTRREIAVDASSSEHAEKIIGAVKALDNVKLLKVSDRTFDLHRQGKISVVSRIPLTSQSDLAMAYTPGVGRICRAIAEDPEKVYSLTIKSNTVAVVTDGSAVLGLGNLGPEAALPVMEGKAMLFKEFAQLDAFPICLDTQDTEEIIRTVKAIAPVFGGVNLEDIAAPRCFEIEARLKKELNIPVFHDDQHGTAIVTLAALLNALKFVGKAMAAVRIVINGAGAAGLAIAELLKESGATDIWICDSKGIVGKHRTDLNSKKQSFAVDAEGTLADAMAGADVFLGVSAPGVVTKEMVQSMAKDPIVFAMANPIPEIQPELIQEDAAVIATGRSDYPNQINNVLAFPGVFRGAIDCRASIITTTMCIEAAKAIASLVHSNTLDSEHIIPSVFDNRVATTVASAVQLAARNEGVAGQ

SEQ ID NO: 5878 - protein, 117 aa, Vigna radiata
MASIKCACVVALLCLVVATAPTAHAITCGQVASSLTSCIPFITKGGIVPPSCCAGVKSLNAAAKTTPDRQAVCNCLKSEAGRIGGFNANNAAILPGKCGVSIPYKISTSTNCASIKF

SEQ ID NO: 5879 - protein, 487 aa, Sinorhizobium meliloti
MRAQPKASHFIDGEYVEDAAGTVIESIYPATGEIIARLHAATPGIVEKAIAAAKRAQPEWAAMSPTARGRILKRAAELMRQRNRELSELETLDTGKPIQETIVADPTSGADSFEFFGGVAPAALNGDYIPLGGDFAYTKRVPLGVCVGIGAWNYPQQIACWKGAPALVAGNAMVFKPSENTPLGALKIAEILIEAGLPKGLFNVIQGDRATGPLLVNHPDVAKVSLTGSVPTGKKVAGAAAAELKHVTMELGGKSPLIVFDDADLESAIGGAMLGNFYSTGQVCSNGTRVFVQRKIKEPFLARLKERTEAIVIGDPLDEATQLGPMVSAAQRDKVFSYIGKGKAEGARLVTGGGIPNNVSGEGTYIQPTVFADVTDGMTIAREEIFGPVMCVLDFDDEVEVIARANATEFGLSAGVFTADLTRAHRVADRLEAGTLWINTYNLCPVEIPFGGSKQSGFGRENSVAALNHYTELKTVYVGMGPVEAPY

SEQ ID NO: 5880 - protein, 494 aa, Sinorhizobium meliloti 1021
MQNLPKLSMYIDGQWVAPASGEYIETVDPFTARPWALVPRGNAEDADRAVRAAHRAFSQGPWGKMHPTERGRIIQRFAALIEEHADALADIEVRDNGRLLAEMTHQIRYIPRWYHYYAGFADKIEGTLHPCDKPALSFSRHEPLGVCVGIVPWNAPLLLFSLKAAPALAAGNTLVMKPAEFTSATALKLMELVEKAGFPTGVINVVTGYGPEVGEPLVTHPLTRHVGFTGSTKTGAHLYSLAAKDVKRVSLELGGKSPNIVFGDADLDNAVRGVVGGIFGAVGQTCIAGSRLLVHRSIHDEFLEKLAVFTKTARIGDPRKVETQIGPIANSMQFEKVLGYIDIARREGAELILGGGRPDLEECGTGYFIEPTIFAGVSNDMRIAREEVFGPVLSAIVFDEPEEALAIANDSEFGLGAGVWTSDMRLALKMSERLEAGSVWVNTYRDISYTTPFGGYKKSGIGRENGVAGIYEYLQTKAVWLSTAEEIANPFVIG

SEQ ID NO: 5881 - protein, 208 aa, Gibberella zeae PH-1
MSDSGIQDGKPMVENQHEIDHDREHDEEQEQGTEMSATEEEEITAMKRRVAEMEEEAKKLREMQATLEQQSAELADDKESIDARSIFVGNVDYSASPEDIQGHFQSCGSINRVTILLDKFTGQPKGYAYVEFTEPSLVAQALVLNESMFKGRSIKVTPKRTNVPGMSRGRGRGGFRGGRGSFQGRGGFPRGGGYRGGYRGRGRGFAPY

SEQ ID NO: 5882 - protein, 347 aa, Staphylococcus aureus subsp. aureus MSSA476
MKALKLYGVEDLRYEDNEKPVIESANDVIVKVRATGICGSDTSRYKKMGPYIKGMPFGHEFSGVVDAIGSDVTHVNVGDKVTGCPAIPCYQCEYCLKGEYARCEKLFVIGSYEPGSFAEYVKLPAQNVLKVPDNVDYIEAAMVEPSAVVAHGFYKSNIQPGMTVAVMGCGSIGLLAIQWARIFGAAHIIAIDIDAHKLDIATSLGAHQTINSKEENLEKFIENHYANQIDLAIESSGAKVTIGQILTLPKKGGEVVLLGIPYDDIEIDRVHFEKILRNELTVCGSWNCLSSNFPGKEWTATLHYMKTKDINVKPIISHFLPLEKGPETFDKLVNKKERFDKVMFTIY

SEQ ID NO: 5883 - protein, 281 aa, Lactococcus lactis subsp. lactis Il1403
MTLTDTYTLNNGIKIPKVGFGTWQSASGEEAYNAVKAALEAGYRHIDTAAVYKNEESVGQAIADSGIPREELFVTTKLWGVGTTEDAAKALDESLKKLGLDYVDLYLIHWPNPKAFRPDFETRNLAVWKAMEAGVKAGKIRAIGVSNFHPRHLKPLLKFAEIKPAVNQIMVNPSDQQEEIVSFNVDNNILTEAYSPLGTGKIFEVPELADLASKYNKSIAQVVLRWSLHKGYLPLPKSVTPARIKENAEIFDFDLSIEDIAFIDSLHGKAGLAKNPDEVDF

SEQ ID NO: 5884 - protein, 248 aa, Arabidopsis thaliana
MYQWNLPYRKDDVETGVSSRRPLLYPAMHENPELRWGFIRKVYSIIAFQLLATVAVAATVVTVRPIALFFATTGLGLALYIVIIITPLIVLCPLYYYHQKHPVNYLLLGIFTLALAFVVGLTCAFTNGKVILESVILTSVVVLSLTLYTFWAARKGYDFNFLGPFLFGALTVLIFFALIQILFPLGRVSVMIYGCLVSIIFCGYIVYDTDNLIKRHTYDEYIWAAVSLYLDIINLFLYLLTVLRALQR

SEQ ID NO: 5885 - protein, 455 aa, Methanothermobacter thermautotrophicus str. Delta H
MEMIIDGEGVSGEKIFTVRNPFNGDEVDRVPLAGRSDVERAIRAAHRARDAMADLSARKISEKLYDVADELKTELDEFARLITLESGKPIRFSRDEVKRSVETARLSAEEAGRLYGESIPMDAGIGGKGLTGFTVRIPLGVVAAITPFNYPLNLAIHKVGPALAAGNTTILKPSLEAPLSALKLAWILSEHFPAGAVNAVTGRGSEVGDVIIDSPLVDKITFTGSVEVGRYISARASMKKITLELGGNDPLIVMDDADIDSAVEAAVRGSYLYSGQVCIAVKRMIVHEDVADEFADKLVNITGSLRAGDPMDVRTDVGPLINEDAAIEVERVIGAAVEDGAELLCGGSRRGNFVEPTVLDHVVPGMEVIERETFGPVSPIIRFNGADEAIRIANGTCYALQAGVFTENIRTALRMAREIEAGTVLVNKQSTFRVDHMPFGDSGAVEWVRRVSSTP

SEQ ID NO: 5886 - protein, 115 aa, Zea mays
RPGARAEREETVDGATGNTVRVNGNQQQQNLQNNMHRVLGIAPSISEASSSWTGREGGLVPVWSPPAASVHSDPYAADEADISSRSYLDRHQQSNTMMNWSQLSQSLTTGWEVDN

SEQ ID NO: 5887 - protein, 403 aa, Psychrobacter sp. TAD1
MIDNNNTTAQIVDLLPTAFSQSLPSSVSEQLTNNASDHQMWLLPPLVDLCARLREPGLQQHGTLASEGSAALANGFLHVVIPPDTNPILENGSLLKGLRERALEDGGIHLHILGALTAGLKGERPSNIAGLKKGGCIAVSNARRPFENDLVQLRTLEYAATFGMKVFFYPDEPSLSGDGVAHEGYIASYHGLQGIPWIAETVALSTQLLMVEETGIAAHFSQLSCKSSVELMRWAKDKGLPVTCDVAMHQLHLTDDNLEGFNAMSYVLPPLRSNTDQQALRRGLKDGTIDAICSHHEPLNVTAKKAPFAESIPGISNFDTFMALACQLVRDEVLTVEQLVAKICLNPAKIAGIEDQYLETGGAILVDPDMKWQVTAETMLSNGKNTPFFGQQLQGRVVETFFG

SEQ ID NO: 5888 - protein, 450 aa, Zea mays
MDIKDMKTRGKTLTERYELGKLLGKGAFGKVHYGRDLESNQDVAIKIMDKDRVLKAGLSEQVKCEITTMRLVTHKNIVRLHEVMATRNKIYIIMEYAKGGELFEKIKRSDRLTEADTHKYFQQLIDALDHCHSRGVYHRDLKPENLLLDENGDLKVSDFGLSAFSESRRTDGLLHTVCGTPVYIAPEVIKKTGYDGAKSDIWSCGVVLFVLAAGYLPFQGPNLMEIYRKIHDRDFRCPSWFSHKLKRLLYKILNPNPSMRPSIQEIKESTWFRKGPREISAVNEKVLSENATTTNAAPVLPSRRKEIAHEDMKSLVATNLNAFEIIALSAGLDLSGLFIKECRKETRFTSDKPALSIIAKLEDVAKALNLRIRKKDNNTISIQGRKEGGNGVLKFDTQIFEITPSCHLVQIKQTSGNLLEYEKLLEEGIRPGLKDVVSAWHGDDLQQKQK

SEQ ID NO: 5889 - protein, 492 aa, Arabidopsis thaliana
MFLCVIIPCLCSYLCSLFSWLLGQIPSFLFDKINESWLTSTKRNVEIVKNLMDKISQLPDELLVKVLSFLSTKDAVSTSILSMRWKSLWMWLPKLEYNFRHYSVSEGQGLARFITSSLRVHKAPAIESLSLKFRYGAIGSIKPKDIYLWVSLAVHVSNVRELSLKLFNFAELPTKLPKSLCKCKSIVILKLKDEILVDVPRKVCLPSLKTLFLGRVTYSDANSLHRLLSNCPVLEDLVMERDKIDNLGKLSVIVKSLQRLTLKMSRPCHLDGLKMNSPSLKYLKVIDERLESDSDDESDSDSPRYFYDFEDMPKLEEADFVLTFQNIKKFFGSITSVKRLSLCLGVYTEESLYHEGLVFNQLEQLKICSCDSDWSILLARLLKSSPNLRELEAYVIEDHPNGRTDLPNQWDNQLNCVPTCLLSSLETFRWSEMHGLLQNQMDVAKYILKNARCLKSATIFFPTTYAQETRDEMIEELSLSFQGPETCQVFFH

SEQ ID NO: 5890 - protein, 479 aa, Exiguobacterium sp. 255-15
MNGKFLINGQWLDQGRERTDVKNPATGEVVGSVPNGTKSDVNDAVEAAHNAFPDWSKRTVYERAALLEKLYAKMLEKKDELARLMTLEMGKPLAESEGEVEYAANFVKWFAEEGKRAYGRIIPSHDATKRLHVIKQPVGVVAAITPWNFPAAMITRKLAPALVAGCTFVLKPPTATPLTALRLLELCQEVGIPDGVVNAVTGSGKDLGESLATHPHVAKITFTGSTEVGRTLMAQGAETIKAMSLELGGHAPILVFDDCDLDLAVRETIKSKFRNGGQTCVCGNRIYVSDSIYDEFVEKLGQETAKLKTGNGLDQETKIGPMINKAGYDKVKKHVDDATSAGARIVTGGSGQTDDDNDVYYYEATVLADVTPQMLIMNEETFGPVAPVQRVSSDEEAVHYANQTPFGLASYVFTNNYARAFKAIEHLDYGIVGWNDGVPSAAQAPFGGMKQSGVGREGGSEGLEAYLETKYVSIGGLDQ

SEQ ID NO: 5891 - protein, 634 aa, Glycine max
MGSNRTIVWFRRDLRIEDNPALAAAAKEGSVLPVYIWCPKEEGQFYPGRVSRWWLKQSLAHLDQSLKSLGSRLVLIKTHSTVTALVECVKAIQATKVVFNHLYDPVSLVRDHNIKEKLVEQGISVQSYNGDLLYEPWEVNSESGRAFTTFNAFWKKCLHMQMDIVSVVPPWQLIPAEGKIEECSLEELGLENESEKPSNALLGRAWSPGWRNADKALREFVELHLLHYSKKRLKVGGESTSLLSPYLHFGELSARKVFQVTRMKQILWTNEGNSAGEESVNLFLRAIGLREYSRYLCFNFPFTHEKALLGHLKFFPWNPDADIFKNWRQGRTGFPLVDAGMRELWATGWIHNRIRVIVSSFAVKMLLLPWKWGMKYFWDTLLDADLESDILGWQYISGGLPDGHELERLDNPEIQGAKFDPEGEYVRQWLPELARMPTEWIHHPWDAPLTVLRAAGVELGQNYPKPIIDIDLARERLTEAIFKMWESEAAAKAAGSEPRDEVVVDNSNSLENLDTRKVVVLGKAPCATISANDQKVPALQDSKNEPPTRKRPKHMIEEGQNQDHSQNHNKDTGMSSIDQDICSTADSSSCKKQCASTSSYSFSVPQQCSSSSNLKWPWQDQIDMEQSSSKDGAM

SEQ ID NO: 5892 - protein, 298 aa, Glycine max
  misc_feature (51)..(51): Xaa can be any naturally occurring amino acid
SSRSSGSSARGLIFSGTASVVLARLVASLKLVGGNLADHRFLFLGAGEAGXGIAELIALETSKQTNAPLEEVRKNIWLVDSKGLIVSSRKDSLQHFKKPWAHEHEPVRNLVDAVNKIKPTVLIGTSGQGRTFTKEVIEAMASINERPIILSLSNPTSQSECTAEEAYKWSQGRAIFASGSPFPPVEYEGKVFVPGQANNAYIFPGFGLGLIMSGTIRVHDDLLLAASEALAAQVSQENFDKGLIYPPFTNIRKISAHIAANVAAKAYELGLATRLPQPKDLVKFAESCMYTPSYRSYR

SEQ ID NO: 5893 - protein, 87 aa, Triticum aestivum
MAFVPICVQCGTRSNPCRCKVVGPTLGFVALVVAGVVEWPLGAAVYLFRHPASARIMGHPARVVYSCSPAATPLSSSNASPHLPVRW

SEQ ID NO: 5894 - protein, 125 aa, Brassica napus
  misc_feature (6)..(6): Xaa can be any naturally occurring amino acid
  misc_feature (9)..(12): Xaa can be any naturally occurring amino acid
  misc_feature (14)..(16): Xaa can be any naturally occurring amino acid
  misc_feature (18)..(19): Xaa can be any naturally occurring amino acid
  misc_feature (22)..(23): Xaa can be any naturally occurring amino acid
  misc_feature (25)..(25): Xaa can be any naturally occurring amino acid
  misc_feature (28)..(30): Xaa can be any naturally occurring amino acid
  misc_feature (33)..(34): Xaa can be any naturally occurring amino acid
  misc_feature (36)..(38): Xaa can be any naturally occurring amino acid
  misc_feature (40)..(40): Xaa can be any naturally occurring amino acid
  misc_feature (44)..(44): Xaa can be any naturally occurring amino acid
  misc_feature (48)..(48): Xaa can be any naturally occurring amino acid
  misc_feature (52)..(52): Xaa can be any naturally occurring amino acid
  misc_feature (56)..(56): Xaa can be any naturally occurring amino acid
  misc_feature (63)..(63): Xaa can be any naturally occurring amino acid
  misc_feature (84)..(84): Xaa can be any naturally occurring amino acid
  misc_feature (87)..(87): Xaa can be any naturally occurring amino acid
  misc_feature (100)..(100): Xaa can be any naturally occurring amino acid
  misc_feature (110)..(110): Xaa can be any naturally occurring amino acid
  misc_feature (112)..(114): Xaa can be any naturally occurring amino acid
  misc_feature (117)..(124): Xaa can be any naturally occurring amino acid
DQSSMXSSXXXXTXXXQXXMVXXFXVLXXXAAXXVXXXAXNDIXSIAXNGGXVSCXKVWPPVXKKKFETLSYLPDLTEVELGLXKSXTLLRNKCIPCVEXELEHGFCAPXSXXXPPXXXXXXXXM

SEQ ID NO: 5895 - protein, 488 aa, Ralstonia solanacearum GMI1000
MIQNFINGAYREGRAGKRFRDLDPCTGRLVAEVSEAGKEDVDDAVQAARAALNGPWGKLTLAQRCDLLYAVADEIDRRKEDFLAAEVADTGKPRALASHLDIPRGAANFRVFADAVRNVATECFTGTAPDGKPSLNYALRRPKGVIAVVCPWNLPLLLMTWKVGPALACGNTVVVKPSEETPATAALLGEVMNAVGVPAGVYNVVHGFGPDSAGEFLTRHPDVDAITFTGETRTGAAIIKASADGIKPVSMELGGKNPALVFADADLDAVIAGLKRSVFENTGQVCLGTERVYVERPMFDKVVRALAEIAGTLRPGLPGDPHANFGPLISGEHQRKVLGYYALARDEGATVHYGGGVPDMPPDLREGAWIEPTVWTGLPRDSRVLTEEIFGPCCHVEPFDSEEEAVRLANGTPYGLATSLYTGDVNRAHRVSAKLKVGVVWVNTWFLRDLRTAFGGSGKSGIGREGGVHSLEFYTELSNVCLKLEPQA

SEQ ID NO: 5896 - protein, 341 aa, Shigella flexneri 2a str. 301
MKALSKLKAEEGIWMTDVPVPELGHNDLLIKIRKTAICGTDVHIYNWDEWSQKTIPVPMVVGHEYVGEVVGIGQEVKGFKIGDRVSGEGHITCGHCRNCRGGRTHLCRNTIGVGVNRPGCFAEYLVIPAFNAFKIPDNISDDLASIFDPFGNAVHTALSFDLVGEDVLVSGAGPIGIMAAAVAKHVGARNVVITDVNEYRLELARKMGITRAVNVAKENLNDVMAELGMTEGFDVGLEMSGAPPAFRTMLDTMNHGGRIAMLGIPPSDMSIDWTKVIFKGLFIKGIYGREMFETWYKMAALIQSGLDLSPIITHRFSIDDFQKGFDAMRSGQSGKVILSWD

SEQ ID NO: 5897 - protein, 389 aa, Escherichia coli
TLQNGKLNVPENPIIPYIEGDGIGVDVTPAMLKVVDAAVEKAYKGERKISWMEIYTGEKSTQVYGQDVWLPAETLDLIREYRVAIKGPLTTPVGGGIRSLNVALRQELDLYICLRPVRYYQGTPSPVKHPELTDMVIFRENSEDIYAGIEWKADSADAEKVIKFLREEMGVKKIRFPEHCGIGIKPCSEEGTKRLVRAAIEYAIANDRDSVTLVHKGNIMKFTEGAFKDWGYQLRREEFGGELIDGGPWLEVKNPNTGKEIVIKEVIADAFLQQILLGPAEYDVIACMNLNGDYISDALAAQVGGIGIAPGANIGDECALFEATHGTAPKYAGQDKVNPGSIILSAEMMLRHMGWTEAADLIVKGMEGAINAKTVTYDFERLMEGAKLL

SEQ ID NO: 5898 - protein, 168 aa, Zea mays
  misc_feature (78)..(78): Xaa can be any naturally occurring amino acid
SQKTEHTIRPEGELGEVPHPWLNLLIPRSSIHRFAKEVFGKILKDSNNGTILLYLVNKSKWDNITSVVIPDEEIFYLXVGFLSSAPFLSGYGSIAHSMNLNKEIVEFCEEAGIGMIQYLAPYTTQQQWKAHFGARWETFERRKHRYDPLAILAPGQRIFPKASLPLPL

SEQ ID NO: 5899 - protein, 389 aa, Escherichia coli
TLQNGKLNVPENPIIPYIEGDGIGVDVTPAMLKVVDAAVEKAYKGERKISWMEIYTGEKSTQVYGQDVWLPAETLDLIREYRVAIKGPLTTPVGGGIRSLNVALRQELDLYICLRPVRYYQGTPSPVKHPELTDMVIFRENSEDIYAGIEWKADSADAEKVIKFLREEMGVKKIRFPEHCGIGIKPCSEEGTKRLVRAAIEYAIANDRDSVTLVHKGNIMKFTEGAFKDWGYQLAREEFGGELIDGGPWMKVKNPNTGKEIVIKDVIADAFLQQILLRPAEYDVIRCMNLNGDYISDALAAQVGGIGIAPGTNIGDECALFEPTPGTAPKYAGQDKVNPGSIILSAEMMLRHMGWTEAADLIVKGMEGAINAKTVTYDFERLMDGAKLL

SEQ ID NO: 5900 - protein, 454 aa, Streptomyces parvulus
MEKTDVDRLRTLDREHMWYPWTPMTEWMARDQLVVERAEGCWLIDADGKRYLDGRSSMGMNLHGHGRSEIVEALVAQARKAGETTLYRVSHPAAVELAARLASMAPAGLQRVFFAESGSTAVETALKAAYAYWVAKGEPQRSTFVSMEGGYHGETLGTVSLRGTNGEQVDMIRKTYEPLLFPSLSFHQPHCYRCPVGQSSDSDCGLECTDSLENLLTREKGRIAAVIVEPRVQALAGVITAPEGHLAKVAEITRRHGVLLIVDEVLTGWARTGPTFSCEAEGVTPDLMTVGKALTGGYLPLSATLATEEIFGAFRESVFLSGSTYSGYALGAAVALASLDLFEKEDVPARAKALADVLTTALEPFRALTHVGDVRQLGLIAGVELVADRETRAPYPPQERVVDRICTLARDNGVLVNAVPGDVITMLPSPSMSPDDLRFLTGTLYTAVREVTEE

SEQ ID NO: 5901 - protein, 121 aa, Hordeum vulgare
MAAPRGAALVLAMVLAAMVVAPPVTVRAAISCSAVYSTLMPCLQYVQQGGTPARGCCAGIQNLLAEANNSPDRRTICGCLKNVANAAPGGSEITRAAALPSKCNVNLPYKISPSVDCNSIH

SEQ ID NO: 5902 - protein, 389 aa, Escherichia coli
TLQNGKLNVPENPIIPYIEGDGIGVDVTPAMLKVVDAAVEKAYKGERKISWMEIYTGEKSTQVYGQDVWLPAETLDLIREYRVAIKGPLTTPVGGGIRSLNVALRQELDLYICLRPARYYQGTPSPVKHPELTDMVIFRENSEDIYAGIEWKADSADAEKVIKFLREEMGVKKIRFPEHCGIGIKPCSEEGTKRLVRAAIEYAIANDRDSVTLVHKGNIMKFTEGAFKDWGYQLAREEFGGELIDGGPWMKVKNPNTGKEIVIKDVIADAFLQQILLRPAEYDVIACMNLNGDYISDALAAQVGGIGIAPGANIGDECALFEATPGTAPKYAGQDKVNPGSIILSAEMMLRHMGWTEAADLIVKGMERAINAKTVTYDFERLMEGAKLL

SEQ ID NO: 5903 - protein, 210 aa, Shigella dysenteriae
LYICLRPVRYYQGTPSPVKHPELTDMVIFRENSEDIYAGIEWKADSADAEKVIKFLREEMGVKKIRFPEHCGIGIKPCSEEGTKRLVRAAIEYAIANDRDSVTLVHKGNIMKFTEGAFKDWGYQLAREEFGGELIDGGPWLKVKNPNTGKEIVIKDVIADAFLQQILLRPAEYDVIACMNLNGDYISDALAAQVGGIGIAPGANIGDECA

SEQ ID NO: 5904 - protein, 389 aa, Escherichia fergusonii
TLQNGKLNVPENPIIPYIEGDGIGVDVTPAMLKVVDAAVEKAYKGERKISWMEIYTGEKSTQVYGQDVWLPAETLDLIREYRVAIKGPLTTPVGGGIRSLNVALRQELDLYICLRPVRYYQGTPSPVKHPELTDMVIFRENSEDIYAGIEWKADSADAEKVIKFLREEMGVKKIRFPEHCGIGIKPCSEEGTKRLVRAAIEYAIANDRDSVTLVHKGNIMKFTEGAFKDWGYQLAREEFGGELIDGGPWLKVKNPNTDKKIVIKNVIADAFLQQILLRPAEYDVIACMNLNGDYISDALAAQVGGIGIAPGANIGDECALFEATHGTAPKYAGQDKVNPGSIILSAEMMLRHMGWTEAADLIVKGMEGAINAKTVTYDFERLMEGAKLL

SEQ ID NO: 5905 - protein, 356 aa, Zea mays
TRPDGTHSAQTDMSVAYSLEEYAGAVVAAVGRVCDRKGVQHPIICSESGRALVSHHSVLVFEAFSATAPGRLDAATAYLLDELTDDCRADYRNVMAAAVRGDYDTCGLYADQLKRRSAEQFKEGVLGLEHLAAVDAFCELVARGMGAPEPPRTYHINLSVFTSLPDMWAIGQQFPIIPIQRLQERPAVDGVLSDLTCDSDGKVSEFIGGRHSLPLHELPTHATRGYYLGMFLGGAYQEALGGLHNLFGGPSVVRVSQCDGPHCFAVTRAAAGPSCADVLRAMQHEPEVMYEVLKQRTDGATAAALARAFGAMPYLVFDPEAAVMSGGESSDSERSAAGAAEEEDDEEWEFMRGLTV

SEQ ID NO: 5906 - protein, 438 aa, Zea mays
MAEKENILMQRYEMGKLLGKGSFAKVYHARNVKTSESVAIKVIDKDKIKKCGLMDQIIQEISVMKLVKHPNIVQLYEVMATKTKIYFVIEYVKGGELFKKVQRGRLKEDVARAYFQQLISAVDFCHTRQVYHRDLKPENLLLDGSRNLKISDFGLSALPNCKRKDGLLHTICGTPAYVAPEVISQKGYDGAKADIWACGVILYVLLAGYLPFQDKNMMDMYKKIFKAELKWPSWFSSDVRKLLRRILHPNPNRRISIEEIRTHPWFRIGLDARLFDSTTRDYVPSDMDLALNSLNSNMVECNSAAEKLTILNAFDIISLSNGFDLSGIFENSNKVSKFTSTNTAMTIITKLMEVAKSLDLKVITKTGGLLNMEAAESGIKGVMSINAEIFQITPNYHLVEIKKINGDILEYHNFMNQSMRPALEDIVWAWHGEQPDEK

SEQ ID NO: 5907 - protein, 493 aa, Triticum aestivum
MALSRAQTNSGESLISSTFASRYVRTALPRFRIPEQSIPKDAAYQIINDELMLDGNPRLNLASFVTTWMEPECDKLIQNSVNKNYVDMDEYPVTTEFQNRCVNMIAHLFNAPIGEDETAVGVGTVGSSEAIMLAGLAFKRKWQNKMKAEGKPHDKPNIVTGANVQVCWEKFARYFEVELKEVKLREGYYVMDPAKAVELVDENTICVAAILGSTLNGEFEDVKMLNDLLVAKNAETGWDTPIHVDAASGGFIAPFIYPELEWDFRLPLVKSINVSGHKYGLVYAGVGWIIWRNKEDLPDELIFHINYLGADQPTFTLNFSKGSSQVIAQYYQLIRLGFEGYKNIMENCQENAMVLKQGLEKTGRFNIVSKDNGVPLVAFSLKDSARHNEFEISDFLRRFGWIVPAYTMPPDAQHVTVLRVVIREDFSRTLAERLVLDVEKVLHELDALPARVVANGGDAAAASASEREMEKQREVISLWKRAVLAKKKTNGVC

SEQ ID NO: 5908 - protein, 70 aa, Glycine max
  misc_feature (43)..(43): Xaa can be any naturally occurring amino acid
SITTGNRSGTSMVAPFTGTKSMADFCIRNTNDDITIIASNGAXVQCMHMWTPVSMKQIDTDSYLPDIDHA

SEQ ID NO: 5909 - protein, 353 aa, Magnaporthe grisea 70-15
MASATEGKSPHDVCFEERPMPKLASEHDVLVAVNYTGICGSDVHYWHHGSIGDFVVKDPMVLGHESAGTVVEVGSAVKTLQVGDRVALEPGYPCRRCRDCLAGRYNLCPEMRFAATPPYDGTLAGFWTAPADFCYKLPESVSLQEGAMIEPLAVGVHIVRQAKVSPGQSVVVMGAGPVGLLCAAVARAFGATTVVSVDIVESKLEVAKQIAATHTYLSQRISPQDNAKALIAAAGLEDNGGADVVIDATGAEPSIQTSIHAVRVGGSYVQGGMGKPDITFPILAFCCKEVTASGSFRYSAGDYRLAIDLVANGKVNLKALITETVPFDKAQEAFTKVSEGQVIKVLIAGPNEK

SEQ ID NO: 5910 - protein, 339 aa, Glycine max
  misc_feature (68)..(68): Xaa can be any naturally occurring amino acid
MVVPQPIEGLHETGPPPFLTKTYDIVDDPSTNHIVSWSTGNNSFVVWDPQAFSVTLLPKFFKHNNFSXFVRQLNTYGFKKVDPDKWEFANEMFLRGQRILLKNIRRRKANHHQSHQHAMQQGVEEPFVEVGQFELDGEIDRLRRDRQVLMVELVKLRQQQQSTKSHLQEMEGRIKMTEQKQKQMMNFLARAMQNPNFVQQLAQQKECSRELEEVFSNKKRRPIDQGPNVVEVADDDDELLGCAEECSDFVKLEPQEYYSDDKVLEFEVPDLDLALNLDEENIESQKRIMEEEHVQLENSRERYIDEVFWQDLLNEGIEDQGVLGVEDVDVLAKQLGYLA

SEQ ID NO: 5911 - protein, 116 aa, Vigna radiata
MASLKVACMVAVVFMVVVSAHMAHAITCGQVASSLAPCISYLQKGGVPSASCCSGVKALNSAASTTADRKTACNCLKNLAGPKSGINEGNAASLPGKCKVNVPYKISTFTNCANIK

SEQ ID NO: 5912 - protein, 252 aa, Zea mays
  misc_feature (219)..(219): Xaa can be any naturally occurring amino acid
PSTSRLPALPQKKTARLLLLLRRAGITCGILAVLGCSDWSQAKRARILACSRRLKHRGPDWSGLYQHEGNFLAQQRLAVTKRHLVETEAAEKFGTELHSFVVGLEGSPDLKAAREVADYLGTIHHEFHFTVQDGIDAIEEVIYHDETYDVTTIRASTPMFLMARKIKSLGVKMVLSGEGSDELLGGYLYFHFAPNKEEFHRETCRKVKALHQYDCLRAXKATSAWGLEVRVPFLDKEFINVAMGMDPEWKMY

SEQ ID NO: 5913 - protein, 272 aa, Oryza sativa (indica cultivar-group)
MGRRACCAKEGMKRGAWTSKEDDVLASYIKSHGEGKWREVPQRAGLRRCGKSCRLRWLNYLRPNIKRGNIDDDEEELIVRLHTLLGNRWSLIAGRLPGRTDNEIKNYWNSTLSRKIGTAATAAAGSRGGSTPDTARATDAASSSSVVPPGQQQQPASRADTDTATAAAAAAATTTTVWAPKAVRCTRGFFFHDRETAPLAAAAPAPAGELGDGDDVDCDYYCSGSSSAATTTSSSSLPVVVEPCFSAGDDWMDDVRALASFLDTDDAWNLCA

SEQ ID NO: 5914 - protein, 366 aa, Triticum aestivum
  misc_feature (117)..(117): Xaa can be any naturally occurring amino acid
MGKGGKGEAAAAVAGEGENMAAWLVAKNTLKIMPFKLPPLGPYDVRVRMKAVGICGSDVHYLKEMRIAHFVVKEPMVIGHECAGIIEEVGDGVKHLAVGDRVALEPGISCWRCRHCXKGGRYNLCDDMKFFATPPYHGSLADQIVHPGDLCFKLPDNVSLEEGAMCEPLSVGVHACRRADVGAEKSVLIMGAGPIGLVTMLSARAFGAPRIVIADVDDHRLSLAKSLGADAVVKVSGNAEDLAGEIERIQAAMGGDIDVSLDCAGFSKTMSTALEATRPGGRVCLVGMGHNEMTVPLTSAAIREVDVVGIFRYKDTWPLCLEFLRSGKIDVKPLITHRFGFSQGEVEEAFEVSARGRDAIKVMFNL

SEQ ID NO: 5915 - protein, 272 aa, Oryza sativa (indica cultivar-group)
MGRRACCAKEGMKRGAWTSKEDDVLASYIKSHGEGKWREVRQRAGLRRCGKSCRLRWLNYLRPNIKRGNIDDDEEELIVRLHTLLGNRWSLIAGRLPGRTDNEIKNYWNSTLSRKIGTAATAAAGSRGGSTPDTARATDAASSSSVVPPGQQQQPASRADTDTATAAAAAAATTTTVWAPKAVRCTRGFFFHDRETAPLAAAAPAPAGELGDGDDVDCDYYCSGSSSAATTTSSSSLPAVVEPCFSAGDDWMDDVRALASFLDTDDAWNLCA

SEQ ID NO: 5916 - protein, 160 aa, Thermoplasma volcanium GSS1
MAFKRKVLGKTDYGRRLRLLKSKDRRFIVRITNKGIIAQIAEYSVNGDRILATITDKALSKYGIELRGNNLQICYLVGYAAGVEAQKAGVETAVLDIGRKKFRKGGRIAACLKGITDSGVDIPHGEDVFPDKKRLNGSHLKNPVKLNEAVKNFKKLEEKA

SEQ ID NO: 5917 - protein, 472 aa, Xanthomonas campestris pv. campestris str. ATCC 33913
MHRHVHEPEILADPAAFEAAEHWRQRDLAVVWHPCTQMREHPHTLPLVPIARGDGAWLIGHDGRHYLDAVSSWWTNLFGHAEPRIGAAIAQQAGRLEQVMLAGFTHAPAVQLAERLLAIAPRQPDRAPLAKVFYADNGSAGVEVALKMAFHYFHNRDEHRRTRFIALENGYHGETIGALSVGDIPLYRRVYAPLLLESIFAPSPDAYLAEPGQSAEDYALQAADALQHLLEQSPGEICALILEPRVQCAGGMRMYHPAYLRRARELCDAHGVFLIADEIATGFGRTGTLFACEQAGVMPDLLCLSKGLTGGFLPLSAVLATQQLYDAFLDDSRERAFLHSHSYTGNPLACAAALATLQIFADDDIIARNQRTAAHMTQLAAQIGEHSAVADVRQAGMIVAFELTQGGDKRTPFPAAARVGLQAYRAALARGVVLRPLGDVLYWMPPYCVDDAQLALLADTTRHAIAKAVACA

SEQ ID NO: 5918 - protein, 194 aa, Magnetospirillum magnetotacticum MS-1
MSRLLPTNPLGSFVASVVAAIGLAGGVAWGATGDHLDWSSLPLPAIAGGQVPADAFKGKVVLVVNTASQCGFTPQYQGLEALWREYRGRGLVVLGVPSNDFGAQEPGSNPEVASFCEINYGVDFPLLEKQVVTGTGAHPFYRWAAERTGALGVPRWNFHKILVGRDGQLVDWFASTTAPDSARLRAAIDKALTP

SEQ ID NO: 5919 - protein, 272 aa, Oryza rufipogon
MGRRACCAKEGMKRGAWTSKEDDVLASYIKSHGEGKWREVPQRAGLRRCGKSCRLRWLNYLRPNIKRGNIDDDEEELIVRLHTLLGNRWSLIAGRLPGRTDNEIKNYWNSTLSRKIGTAATAAAGSRGGSTPDTARATDAASSSSVVPPGQQQQPASRADTDTATAAAAAAATTTTVWAPKAVRCTRGFFFHDRETAPLAAAAPAPAGELGDGDDVDCDYYCSGSSSAATTTSLSSLPAVVEPCFSAGDDWMDDVRALASFLDTDDAWNLCA

SEQ ID NO: 5920 - protein, 272 aa, Oryza rufipogon
MGRRACCAKEGMKRGAWTSKEDDVLASYIKSHGEGKWREVPQRAGLRRCGKSCRLRWLNYLRPNIKRGNIDDDEEELIVRLHTLLGNRWSLIAGRLPGRTDNEIKNYWNSTLSRKIGTAATAAAGSRGGSTPDTARATDAASSSSVVPPGQQQQPASRADTDTATAAAAAAATTTTVWAPKAVRCTRGFFFHDRETAPLAAAAPAPAGELGDGDDVDCDYYCSGSSSAATTTSSSSLPAVVEPCFSAGDDWMDDVRALATFLDTDDAWNLCA

SEQ ID NO: 5921 - protein, 429 aa, Brucella melitensis 16M
MTDFYSLIPSAPKGRFDGIERAHTAEDVKRLRGSVEIKYSLAEMGANRLWKLIHEEDFVNALGALSGNQAMQMVRAGLKAIYLSGWQVAADANTASAMYPDQSLYPANAGPELAKRINRTLQRADQIETAEGKGLSVDTWFAPIVADAEAGFGDPLDAFEIMKAYIEAGAAGVHFEDQLASEKKCGHLGGKVLIPTAAHIRNLNAARLAADVMGTPTLIVARTDAEAAKLLTSDIDERDQPFVDYEAGRTAEGFYQVKNGIEPCIARAIAYAPYCDLIWMETSKPDLAQARRFAEAVHKAHPGKLLAYNCSPSFNWKKNLDDATIAKFQRELGAMGYKFQFITLAGFHQLNYGMFELARGYKDRQMAAYSELQQAEFAAEADGYTATKHQREVGTGYFDAVSLAITGGQSSTTAMKESTETAQFKPAAE

SEQ ID NO: 5922 - protein, 490 aa, Gibberella zeae PH-1
MSNLRRSDHASKPHIAVVGAGLAGLRCADVLLQNGFQVTIIEARNRVGGRLHQETLPNGHLADVGPNWIHGTDDNPMLDLAKQTNTAVSDWDSTSCVFAEDGELFPLKDGEKYSTMVWDIVQEAFKHANNSSHDIDPKESLHDFFVQKVTEKVPSTEADHEKKRNIVMQISEMWGAFIGSPVYRQSLKFFWLEECIEGENLFCAGTYKKVLDEVAKPALEGAEIKFETQVDEISYRTSPEEKAKLRTQSGQTLEFDEIVMTAPLGWLKRNLDAFEPALPARMTKAIGAIGYGCLEKVYINFPKAFWLGSESDDRKAEGFVQWLSPNYVPDLNPKRWNQEVVELASLGPEVSHPTLLFYTYGEQSQFITGELLKISDPKKKDEFLLNFFKPYYSLLPHYSESDPDCKPSGFMATDWLHDELSGYGSYSNFQVGLEEGDVDIRTMREGLPDHGLWLAGEHTAPFVGLGTATGAYWSGEAVGKRIAEAYGRNK

SEQ ID NO: 5923 - protein, 502 aa, Capsicum annuum
MEIQFTNLVAFLLFLSSIILLLKKWKTQKLNLPPGPWKLPFIGSLHHLAVAGPLPHHGLKNLAKLYGPLMHLRLGEIPTVIISSPRMAKEVLKTHDLAFATRPKLVVADIVHYDSTDIAFSPYGEYWRQIRKICILELLSAKMVKFFSSIRQDELSMMVSSIRTMPNFPVNLTDKIFWFTSSVTCRSALGKICRDQDKLIIFMREIISLTGGFSIADFFPTWKMLHDVGGSKTRLLKAHRKIDEILEHVVNEHKQNRADGQKGNGEFGGEDLIDVLLRVRESGEVQISITDDNIKSILVDMFSAGSETSSTTIIWALAEMMKKPSVLAKAQAEVRQVLKEKKGFQQIDLDELKYLKLVIKETLRMHPPIPLLVPRECMKDTKIDGYNIPFKTRVIVNAWAIGRDPESWDDPESFSPERFENSSVDFLGSHHQFIPFGAGRRICPGMLFGLANVGQPLAQLLYHFDRKLPNGQSHENLDMTESPGISATRKDDLVLIATPYDP

SEQ ID NO: 5924 - protein, 111 aa, Triticum aestivum
MERRAARGTSDHRRRMQMPPAQVEQKPQRRGGPKSCQRTPPPPGCFTIQLLMVFLWVAASLAFLPLVLPPLPPPPLSLLLVPVCLLAVLAALAFVPLDAHNNVVGGGSSCL

SEQ ID NO: 5925 - protein, 187 aa, Oryza sativa (japonica cultivar-group)
MADGPGSPGGGGGSHESGSPRGGGGGGGGGGGGGGVREQDRFLPIANISRIMKKAIPANGKIAKDAKETVQECVSEFISFITSEASDKCQREKRKTINGDDLLWAMATLGFEDYIEPLKVYLQKYREVRTDGDSKLTAKAGDGSVKKDVLGSHGGSSSSAQGMGQQAAYNQGMGYMQPQYHNGDVSN

SEQ ID NO: 5926 - protein, 304 aa, Gibberella zeae PH-1
MSSHNIPSYKLNDGNEIPNSQHTAALSHKANICKLAFGLGTAQFKKDSQSGLDQHVVDITTKAIKAGYLYGNEEELGEAIKAGGVPREQLYVTTKIPAEKKGSAIDAFDVSLKKLGLEYVDLYLIHGPWFAETDEDLQQRWSELEQIKESGRAKSIGVSNFLQVHLEPILKTAKVKPAINQIEYHPYLQHGDLLDFHKKHNIAVSAYGPLTPIVTAKGGPVDPLYTKLAEKYGVTESEVGLRWVIDQDTIALTTSNKVERLDGYLAKLPKFKLTQDEIAEISKLGAEKHFRGFWRNKFDENDRS

SEQ ID NO: 5927 - protein, 265 aa, Brassica napus
VDPRVRASKWLPDLSGNVSAITTPPPTESVTASVMKKRFFVETLIGILPPEKDSVPCNFLLRLLRTAKMVGANANYLTELENRVAWQLDQASLKELMIPSFSHTSGTLLDVELVTRLVKKFVGLDSEGVKTGAALVKVAKLVDSYLAEAALDGGLTLPEFISLIEALPSYARTTEDGLYRAIDTYLKAHPQVLKQERKELCRLIDSRKLSPEAALHAAQNDRLPVRSIIRVLFTEQTKLSRHVDWSGSLTRSPTNPSGSHYFEQE

SEQ ID NO: 5928 - protein, 235 aa, Zea mays
HACSVTLYQNAHLSDAFDPGVRLDGGLAYRPARLWEDLYAAIRDARRFVYVAGWSVNTEITLVRDAGRRAVPGAEGDTLGELLKRKADEGVAVLVMPWQDNTSVSFLGNAGLMKTHDEETRRFFEGTNVRCFLCPRNADASLTMVQHVETSAEFTHHQKTVTLDAATPGTDERHVVSFIGGIDLCDGRYDDENHTLFRDLDTTYSHDFMQNNYKHASLRRGGPREPWHDVHCRHA

SEQ ID NO: 5929 - protein, 432 aa, Tropheryma whipplei str. Twist
MSKIKLVTAIPGPESERLHRMRQATVARGVSSTFPIYIKESHGSILIDEDGNHLIDMGCGIGVTTLGHSHPAVVDAARAQINSVWHTLFSITPYESYVEVCKLLAKNTPGDFPKKSLLLNSGAEAVENAVKISRAYTGRPTVAVLDRSFHGRTNLTSSMTYRGSLYSSDFGPTASNIVSAPNSYPLHDRLSGKEAAARTISYLETRVAARNIACLFYEPIQGEGGVIVPADGFLPALQDWCRENDIVFVADEIQSGFGRTGCFFASETDGLEPDIVCSAKGIANGLPLSAVTGRSDIVDAARPGTLGGTFTGNHVSCAAALEVFEQYKDNAPLDSASRLGDILKELLLNLQSKHPQIAEVRGRGAMFGAEFSGNHAGEMVSRVITRAAELGVIFLSSGVEGNVVRFLPNVFMDKETIEEAIGVLDSAISSVV

SEQ ID NO: 5930 - protein, 507 aa, Streptomyces avermitilis MA-4680
MHNPGHRFQAQDRFADGAQYIAGRFAKGTSGRRHAVVDPATGEEVYRYELAGTADVDAAVAAARAAFPGWAATTPGDRSDALHRFAAVLADRAEEFARAESLQCGKPLKLTREFDVPGTIDNTSFFAGAARHLQGQSAGEYSGDHTSYIRREPIGVVGSIAPWNYPLQMAAWKVLPAIAAGNTIVLKPAEITPLTSLLFAEAATRAGIPDGVVNIVTGAGRDAGEHLVAHPDVAMTSFTGSTAVGRRVAEIATSTVKRLHLELGGKAPFVVFDDADLDAAVHGAVAGSLINTGQDCTAATRAYVQRPLYEEFVARTAALMETVRLGDPFAHGTDLGPLVSHAQRDRVAGFVDRARAYARVVTGGEIPEELKDGAYYRPTLIADAAQDSEIVQSEIFGPVLVVLPFDSDDEGIRLANDTPYGLAASAWSRDVYRANRATREIKAGCVWVNDHIPIISEMPHGGYKASGFGKDMSAYSFEEYTQIKHVMFDNTAIVRKDWHRTIFGDRP

SEQ ID NO: 5931 - protein, 219 aa, Shigella dysenteriae
QELDLYICLRPVRYYQGTPSPVKHPELTDMVIFRENSEDIYAGIEWKADSADAEKVIKFLREEMGVKKIRFPEHCGIGIKPCSEEGTKRLVRAAIEYAIANDRDSVTLVHKGNIMKFTEGAFKDWGYQLAREEFGGELIDGGPWLKVKNPNTGKEIVIKDVIADAFLQQILLRPAEYDVIACMNLNGDYISDALAAQVGGIGIAPGANIGDECALFEAT

SEQ ID NO: 5932 - protein, 489 aa, Dechloromonas aromatica RCB
MSQPQRIHHFINGEFTASPDPRYFDKRSPVDGRVIAHIAEAGQADVDAAVTAARAALKGEWGKLSTDQRVDLLYGVANEITRRFDDFVAAEMADTGQPSHVQTHVFIPRGAANFKVFADVIKNVAAESFRMATPDGKGALNYAIRNPKGVIGVISPWNAPFLLMTWKVGPALACGNTVVVKPSEETPLTATLLGEVMNSVGIPKGVYNVINGFGPDSAGAYLTQHPGVDAITFTGETRTGTAIMKAAAEGMRDVSFELGGKNAGIVFADCNFEAAVDGIFRSAFLNTGQVCLGTERVYVERPIFENFVQALKAKVEGVRYGRPEDHTSTYGPLISQEHRDKVLSYYKKAVDEGATVVTGGGVPDMPAELAGGSWVQPTIWTGLPETAAVVREEIFGPCCHIRPFDSEEEVIELANANDYGLATTIWTENLSRAHRVAERVEVGVTWVNSWFLRDLRTPFGGSKQSGIGREGGVHSLEFYTETRNVCIKL

SEQ ID NO: 5933 - protein, 213 aa, Candida maltosa
DQSLNILLAGRDTTAGLLSFAVFELGRNPEVWSKLRQEIGDKFGLDSDSRIEDISFELLKLCEYLKAVINETLRLYPSVPRNGRFAAADTTLPHGGGKDGMSPILVRKGQTVMYSVYALQRDEKYYGKDANEFRPERWFEPEVRKLGWAFLPFNGGPRICLGQQFALTEASYVLVRLIQSFETLELSPEAAYPPAKLTHLTMCLFDGAPVRIE

SEQ ID NO: 5934 - protein, 215 aa, Shigella flexneri
LYICLRPVRYYQGTPSPVKHPELTDMVIFRENSEDIYAGIEWKADSADAEKVIKFLREEMGVKKIRFPEHCGIGIKPCSEEGTKRLVRAAIEYAIANDRDSVTLVHKGNIMKFTEGAFKDWGYQLAREEFGGELIDGGPWLKVKNPNTGKEIVIKDVIADAFLQQILLRPAEYDVIACMNLNGDYISDALAAQVGGIGIAPGANIGDECALFEAT

SEQ ID NO: 5935 - protein, 264 aa, Triticum aestivum
FPWQPQQPFPQTQQSFPLQPQQPFPREPQQPFSQPQLQFPQQPEQIIPQQPQQPFLLESQQPFPQQPQQPFSQPQQLIPMQPQQPFPQQSQQSQQPFPGPQQLFPELQQPIPQQPQQPFPLQPQQPFPQQSQQPFPQQPQQPFPLQPQQPFPQQPQQPFPQQPQQPFPLQPQQPFPLRPQQPFSQQPQQSQQSFPQPQPQQPQQPSILQPQQPFLQPQQQLSQQLEQTISQQPQQPFPQQPHQPQQPYPQQQPYGSSLTSIGGQ

SEQ ID NO: 5936 - protein, 198 aa, Zea mays
PEPTRPDMPSVQAEVGGGWRPKQQQYPLEIREVWADNVEREFKLIRAAIERFPYVSMDTEFPGVIHHPPPSVHHSALTPPQRYALLKSNVDALHLIQVGLAFAPSASSPPALAFQVNLREFDPRLHRHAPDSVRLLAASGLDLPAHRARGVSARAFAALLMSSGLVCNPDVAWVTFASAYDMAYLVKVLMGRKLPRAL

SEQ ID NO: 5937 - protein, 280 aa, Zea mays
MEAMPRPSVAPSLQLQLRPCPRWPRRKHCPPSSVPSRRVACSASAADADVVDLFDAAKLTVDKFVTSGMVVGLGSGPASALAIQYLGTRLRRGSLTGITAVTSQSVLSASEADKAGIRANSYQEGTQIDFAFTDAEAIEEGTLAAVIGRRKTESGEPSFMAEKAMAKSAHKLAFITGNDKYVTTGVEGSIPVLIKKVWRRPSFGTAGPLGGDHPLVTKEGHHVLDVIFTTPIQDLGQVAEKLDKVDGVVDHGIICSNQPYAVIASKGEVQVLDEKSSVIQ

SEQ ID NO: 5938 - protein, 637 aa, Zea mays
HTGDWKIDESPVDGKKFDRQALEELSKEGVTLMMSDSTNVLSPGRSISESVVAGSLLRHISEAKGRVITTQFASNIHRIGSIKAAADLTGRKMVFVGMSLRTYLEAAFKDGKAPLDPSTLQIKVEDMDAYAPKDLLVVTTGSQGEPRAALNLASYGGSHALKLSKEDVLLYSAKVIPGNETRVMKMMNRLTDLGPKIIMGKDSGLHTSGHAYREELEEVLRIVKPQHFLPVHGELLFLKEHELLGRSTGIRHTTVIKNGEMLGVSHLRNRRVLSNGFVSLGKEDLQLMYSDGDKAFGTSTDLCVDERLRIASDGIIFVSMEIFRPQKEHGLAQSGLKGKFKITTRCLWLDNGRLLDALYKAAHAALSSCPVNCPHSHMERMVAEILRKMVRKYSGKRPDVIAVATENTTAGFSEHLDTKASGNFGPSSATSHLSRSPATSLEGSYKTHPDNPEVDAEEILPETVRTTPDDATTSSNGEALFSSDLHQPKTLEHFWESFKSPTAVKIARIVNGGNKQNFGKIGIMGQDSLIQSAPAPVKSSKKNKWKPEEIKSLIQMRGEMNERFQSVKGRMVLWEEISDNMLKQGISRTPAQCKSLWTSLVQKYEESKKDAESMKTWPYFSAMDRILSQQGEMATKG

SEQ ID NO: 5939 - protein, 81 aa, Glycine max
  misc_feature (20)..(20): Xaa can be any naturally occurring amino acid
  misc_feature (23)..(23): Xaa can be any naturally occurring amino acid
  misc_feature (51)..(51): Xaa can be any naturally occurring amino acid
TAKNTAPAETTDNRAGAGRXAPXTGRKAKAGHPTRKTNNDSTTRASNGGRXQGMHFLPPVGKKKGETLSYPPDLDDAQLSK

SEQ ID NO: 5940 - protein, 234 aa, Antirrhinum majus
MGRGKIVIQRIDKSTSRQVTFSKRRSGLLKKAKELAILCDAEVGVVIFSSTGKLYEFSSTSMKSIIERHTKTKEDHHQLLNHGSEVKFWQREAATLRQQLQDLQENHRKLMGEELQGLNVEDLHRLENQLEMSLRGVRMKKVQMLTDEVHELRRKGHLIHQENNELYEKVKLLQQENKELCKKAYGTRDVSAANGTALVPFGFAIGREQFEPIQLHLSQPEPENIETSRASGSK

SEQ ID NO: 5941 - protein, 309 aa, Glycine max
  misc_feature (228)..(228): Xaa can be any naturally occurring amino acid
PRRYLFFFFLLNYFSFYNLLLYHSSGVYLQEVLLPGGHGLMVRGYLPVINTLAKGLDILLGHRVTKVVRRYNGVKVTVESGKTFFADAAVIAVPLGVLKAKKILFKPKLPDWKEAAIADLGIGLENKIILHFENVFCPNVEFLGVVADTSYGCSYFLNLHKAAGHAVLVYMPSGQLAKDVEKMSDEAAVNFAFMQLKKILPDASSPIQYLVSRWGSDINSLGSYSYDXQLGKPHELYERLRVPVDNLFFAGEATSMSYPGSVHGAFSTGMMAAEDCRMRVLERYGEVDLFQPVMGEEASLSIPLQISRL

SEQ ID NO: 5942 - protein, 416 aa, Escherichia coli
MESKVVVPAQGKKITLQNGKLNVPENPIIPYIEGDGIGVDVTPAMLKVVDAAVEKAYKGERKISWMEIYTGEKSTQVYGQDVWLPAETLDLIREYRVAIKGPLTTPVGGGIRELLVALRQELDLYICLRPVRYYQGTPSPVKHPELTDMVIFRENSEDIYAGIEWKADSADAEKVIKFLREEMGVKKIRFPDHCGIGIKPCSEEGTKRLVRAAIEYAIANDRDSVTLVHKGNIMKFTEGAFKDWGYQLAREEFGGELIDGGPWLKVKNPNTGKEIVIKDVIADAFLQQILLRPAEYDVIACMNLNGDYISDALAAQVGGIGIAPGANIGDECALFEATHGTAPKYAGQDKVNPGSIILSAEMMLRHMGWTEAADLIVKGMEGAINAKTVTYDFERLMDGAKLLKCSEFGDAIIENM

SEQ ID NO: 5943 - protein, 242 aa, Zea mays
  misc_feature (204)..(204): Xaa can be any naturally occurring amino acid
  misc_feature (211)..(211): Xaa can be any naturally occurring amino acid
LAGSCLRRLMFAWKVGPALACGNTLVPKTAEQTPLSALYISKLLHEAGLPEGVVNVVSGFGPTAGAALASHMDVDKIAFTGSTDTGKIILELAAKSNLKTVTLELGGKSPFIIMDDADVDHAVELAHFALFFNQGQCCCAGSRTFVHERVYDEFVEKAKARALKRVVGDPFRKGVEQGPQIDDEQFNKILRYIRYGVDGGATLXDGGDRLXDKGFYIQPTDFSDVQDGMKIAQEEILGPVQS

SEQ ID NO: 5944 - protein, 272 aa, Oryza rufipogon
MGRRACCAKEGMKRGAWTSKEDDVLASYIKSHGEGKWREVPQRAGLRRCGKSCRLRWLNYLRPNIKRGNIDDDEEELIVRLHTLLGNRWSLIAGRPPGRTDNEIKNYWNSTLSRKIGTAATAAAGSRGGSTPDTARATDAASSSSVVPPGQQQQPASRADTDTATAAAAAAATTTTVWAPKAVRCTRGFFFHDRETAPLAAAAPAPAGELGDGDDVDCDYYCSGSSSAATTTSSSSLPAVVEPCFSAGDDWMDDVRALASFLDTDDAWNLCA

SEQ ID NO: 5945 - protein, 416 aa, Escherichia coli
MESKVVVPAQGKKITLQNGKLNVPENPIIPYIEGDGIGVDVTPAMLKVVDAAVEKAYKGERKISWMEIYTGEKSTQVYGQDVWLPAETLDLIREYRVAIKGPLTTPVGGGIRSLLVALRQELDLYICLRPVRYYQGTPSPVKHPELTDMVIFRENSEDIYAGIEWKADSADAEKVIKFLREEMGVKKIRFPDHCGIGIKPCSEEGTKRLVRAAIEYAIANDRDSVTLVHKGNIMKFTEGAFKDWGYQLAREEFGGELIDGGPWLKVKNPNTGKEIVIKDVIADAFLQQILLRPAEYDVIACMNLNGDYISDALAAQVGGIGIAPGANIGDECALFEATHGTAPKYAGQDKVNPGSIILSAEMMLRHMGWTEAADLIVKGMEGAINAKTVTYDFERLMDGAKLLKCSEFGDAIIENM

SEQ ID NO: 5946 - protein, 275 aa, Sinorhizobium meliloti
MHAVSSNGANIPALGFGTFRMSGAEVLRILPQALKLGFRHVDTAQIYGNEAEVGEAIQKSGIPRADVFLTTKVWVDNYRHDAFIASVDESLRKLRTDHVDLLLLHWPGSDVPMAERIGALNEVRNAGKVRHIGISNFNTTQMEEAARLSDAPIATNQVEYHPYLDQTKVLQTARRLGMSLTSYYAMANGKVPADPLLTEIGGRHGKTAAQVALRWLVQQQDVIVLSKTATEARLKENFAIFDFALTREEMAAVRELARPNGRIVNPQGLAPEWDA

SEQ ID NO: 5947 - protein, 78 aa, Zea mays
MDSSSGSQDKKFRDNDRPEAKEANSTAQHLVDFTEAEEDLVSRMHRLVGNRWEIIAGRIPGRTAEEVEMFWSKKYQER

SEQ ID NO: 5948 - protein, 106 aa, Brassica napus
  misc_feature (21)..(21): Xaa can be any naturally occurring amino acid
  misc_feature (36)..(38): Xaa can be any naturally occurring amino acid
  misc_feature (40)..(40): Xaa can be any naturally occurring amino acid
  misc_feature (83)..(83): Xaa can be any naturally occurring amino acid
  misc_feature (91)..(91): Xaa can be any naturally occurring amino acid
MASVRLSSATMTSSLAHATMXAPFIGLKSSAAFPVXXXAXTEITSITSNGGRINCMKVWPPVGKKKFETLSYLPGLTDVEIAXEIDYLIRXKWTPCIEFEVEHGFV

SEQ ID NO: 5949 - protein, 183 aa, Triticum aestivum
MAGVGRNMVAPLLVLNLIMYLIVIGFASWNLNHFINGLTNRPGVGGNGATFYFLVFAILAGVVGAASKLAGVHHVRTWRGDSLATSASSALVAWAITALAFGLACKEIHIGGYRGWRLRVLEAFVIILMFTQLLYVLALHSGLFGNQFGGNHAGGYPAEHAYGAGGDPHNKGMGMGTGGVARV

SEQ ID NO: 5950 - protein, 341 aa, Nostoc sp. PCC 7120
MLAALLYGQEDLRLEQVADPSPDVGEVVIKVGAATTCGTDLKVWRRGGHAKMLKLPTLFGHEAAGEIVAVGADVTGWQIGDRVVANNSAPCMKCFFCQRQEYSLCPNLTWNNGTFAEYLKIPAPIVQHNLLQVPDELPLSLAAMTEPLACVLHGVARSHIKPQDRVVVLGDGAIGLMFVAVLADKVEVLLWGGNDQRLEIGQKLGATKTFNYHQNPDIPHVVKELTQGWGADVVIEATGVPSVWETAIACARPGAIVNLFGGCPRDTTITVNTEQLHYSELTLKGVFHNTPEYVRAALALIASRKIPFELLISEQRPLKDLEQVFYDMKARKVIKVAMVCS

SEQ ID NO: 5951 - protein, 117 aa, Nicotiana attenuata
MAKVALLVVVCMAAVAVMLTPHADAAISCGQVVASLSPCISYVRQGGAIPAPCCSGIKSLNNQATSTPDRQTACNCIKSAAAAINGINYSLAGSLPSKCGVNLPYKISPSIDCSTVH

SEQ ID NO: 5952 - protein, 166 aa, Glycine max
MAAAFASRCSRVGRSLSGGLSNSSPGLFTSSHGMTCNNLFSQQQRTFIQMRTVLKVVDNSGAKKVMCIQALKGKKGARLGDTIIASVKEAHPNGKVKKGKVVYGVVVRAAMQKGRCDGSEVKFDDNAVVLVDKQGQPIGTRVFGPVPHELRQKKHVKILTLAGHIA

SEQ ID NO: 5953 - protein, 75 aa, Zea mays
  misc_feature (32)..(32): Xaa can be any naturally occurring amino acid
KPFSDIRFYILLQATIICIDELLCMRNNHYSXNNFQAQADAVNLICSANTHSNPKNTIGVMTMAAKGDHFLNTPT

SEQ ID NO: 5954 - protein, 437 aa, Helicobacter hepaticus ATCC 51449
MLDLKALDLAHIWHPCTQMKDHETLPLIPIKSAKGVYLYDFEGKAFIDGISSWWVNLFGHCNPFINAAITKQLQQLEHIILAGFSHEGIIRYSEKLCALLPQSLQKCFYADNGSSAIEVALKMSFHSHYNAGNKDKNAFLSLSNAYHGETLGALSVGDVALYKSTYQPLLLECLSAPVPRGIWNPDDGTISGDYHMELEALEEILKHHAHRICAFILEPLLQCAGGMNMYPAAYIKEACALARKHNIHIIFDEIAVGFGRTGSMFALEQCDVTPDFLCLSKGITGGYLPLSVVVTSNNIYEGFYAPYEEQKAFLHSHSYTGNALAIAAANAVLDIFEQDDIIFSNHSLSVAIVKRWSMLAKHKKVGNLRVCGMVFAFDLQGCKLKRAGLYVYENALAKGVLLRPLGNTIYFMPPYVINLEIAEYVCNVLDAILEDDF

SEQ ID NO: 5955 - protein, 288 aa, Shigella flexneri 2a str. 301
MAEKKQWHETLHDQFGQYFAVDNVLYHEKTDHQDLIIFENAAFGRVMALDGVVQTTERDEFIYHEMMTHVPLLAHGHAKHVLIIGGGDGAMLREVTRHKNVESITMVEIDAGVVSFCRQYLPNHNAGSYDDPRFQLVIDDGVNFVNQTSQTFDVIISDCTDPIGPGESLFTSAFYEGCKRCLNPGGIFVAQNGVCFLQQEEAIDSHRKLSHYFSDVGFYQAAIPTYYGGIMTFAWATDNDALRHLSTEIIQARFLASGLKCRYYNPAIHTAAFALPQYLQDALASQPS

SEQ ID NO: 5956 - protein, 157 aa, Zea mays
  misc_feature (10)..(10): Xaa can be any naturally occurring amino acid
  misc_feature (61)..(61): Xaa can be any naturally occurring amino acid
  misc_feature (121)..(121): Xaa can be any naturally occurring amino acid
  misc_feature (130)..(130): Xaa can be any naturally occurring amino acid
RATMRHCPSXTMCIEIEIQVVRDPRSEKYSDSFRLWREWELHRSCGESGIALYEFKGIDSXLGCTYRIVVLRLCLRHLWNSSIQWFGIQREGSMKEIISASTRSVYGPDPHDVGRFIQGEXNHGGQISVXKTAGSIDPIAGSVEYVETLVMNPESDY

SEQ ID NO: 5957 - protein, 381 aa, Glycine max
MSPAAGVSVPLLGDSKGTPPPASVPGAVFNVATSIVGAGIMSIPAIMKVLGVVPAFAMILVVAVLAELSVDFLMRFTHSGETTTYAGVMREAFGSGGALAAQVCVIITNVGGLILYLIIIGDVLSGKQNGGEVHLGILQQWFGIHWWNSREFALLFTLVFVMLPLVLYKRVVAFVGICCGLAITALVQGKTQTPRLFPRLDYQTSFFDLFTAVPVVVTAFTFHFNVHPIGFELAKASQMTTAVRLALLLCAVIYLAIGLFGYMLFGDSTQSDILINFDQNAGSAVGSLLNSLVRVSYALHIMLVFPLLNFSLRTNIDEVLFPKKPMLATDNKRFMILTLVLLVFSYLAAIAIPDIWYFFQFLGSSSAVCLAFIFPGSIVLR

SEQ ID NO: 5958 - protein, 197 aa, Shigella flexneri
YQGTPSPVKHPELTDMVIFRENSEDIYAGIEWKADSADAEKVIKFLREEMGVKKIRFPEHCGIGIKPCSEEGTKRLVRAAIEYAIANDRDSVTLVHKGNIMKFTEGAFKDWGYQLAREEFGGELIDGGPWLKVKNPNTGKEIVIKDVIADAFLQQILLRPAEYDVIACMNLNGDYISDALAAQVGGIGIAPGANIGD

SEQ ID NO: 5959 - protein, 368 aa, Nostoc sp. ATCC 53789
MPLAAVMTAPNQPVEVQQLPDPVLEKGGIILETLYSEVCGTDVHLLHGRLEGVPYPIIPGHFSVGRVVETGGAVSDVNGKLIQPGAIATFLDVHETCYNCWYCLVAKASTRCPKRKVYGVTYSAKDGLLGGWSELIYLKPGVKVLTLPEEVSPKQFIAGGCALPTALHAIDRAQIQIGDVVVVQGCGPVGLSVAILALLSGAGKVIVIDKFESRLVVAKSFGVDETLAIKADDPRQHIERVLELTNGHGADVTIEATGIPIAVKEGLNMTRNGGRYVIVGHYTNTGEILINPHLEINLKHIDIRGTWGIDFSHFYRMIELLKRHSDSSKNIAWSSIISRSYTLQQINQALADVEQGSVLKAVIQPNLS

SEQ ID NO: 5960 - protein, 155 aa, Glycine max
MSSAKKITLKSSDGEAFEVEEAVALESQTIKHMIEDDCADSGIPLPNVTSKILAKVIEYCKKHVEAANPEDKPSEDDLKAWDAEFVKVDQATLFDLILAANYLNIKSLLDLTCQTVADMIKGKTPEEIRKTFNIKNDFTPEEEEEVRRENQWAFE

SEQ ID NO: 5961 - protein, 99 aa, Brassica napus
MDQEIEIPTFFLCPISLDIMKDPVIVSTGITYDRDSIEKWLFTGKKNTCPVTKQVITETDLTPNHTLRRLIQSWCTLNASHGIERIPTPKPPISKSEIE

SEQ ID NO: 5962 - protein, 479 aa, Streptomyces avermitilis MA-4680
MSTELRRLRNHIDGEFRDAADGRTTEVVNPATGEAYATAPLSGQADVDAAMAAAAAAFPAWRDQTPAERQKALLKIADAFEERAEELIAAEVENTGKPIGLTRSEEIPPMVDQIRFFAGAARMLEGRSAGEYMEGMTSIIRREPIGVCAQVAPWNYPMMMAVWKFAPALAAGNTVVLKPSDTTPASTVLIADIIGSILPKGVFNVICGDRDTGRAMVEHPTPAMASITGSVRAGMSVAESAAKDVKRVHLELGGKAPVVVFEDTDIPKAVEDISVAGFFNAGQDCTAATRVLVQESIHDEFVAALAKAAADTKTGQPDDEDVLYGPLNNPNQLKQVAGFVERLPAHAKVEAGGHQVGEKGYFYAPTVVSGLKQDDEIIQNEVFGPVITVQSFTDEAQAIEWANGVDYALASSVWTKDHGRAMRLSKSLDFGCVWINTHIPLVAEMPHGGFKKSGYGKDLSAYGFDDYTRIKHVMTSLDS

SEQ ID NO: 5963 - protein, 502 aa, Lotus corniculatus var. japonicus
MAALPECSAANLAQLIGPNATDAAAVAGFICDQFTAVGQRFSDTAFAVDSTYLLFSAYLVFSMQLGFAMLCAGSVRAKNTMNIMLTNVLDAAAGGLFYYLFGFAFAFGAPSNGFIGRHFFGLKDVPTVAFDYSYFLYQWAFAIAAAGITSGSIAERTQFVAYLIYSSFLTGFVYPVVSHWFWSGDGWASATNTGNLLFGTGVIDFAGSGVVHMVGGVAGLWGALIEGPRIGRFDHAGRAVSLRGHSASLVVLGTFMLWFGWYGFNPGSFTKILSAYDSGNYYGQWSAIGRTAVTTTLAGCTAALTTLFGKRIISGHWNVTDVCNGLLGGFAAITAGCSVVEPWAAIVCGFVAAVVLIACNMLAEKVRYDDPLEAAQLHGGCGAWGIIFTALFAKEEYVNQVYPGKPGRPYGLFMGGGGKLLGAHVIQILVIIGWVSATMGPLFFILNKMKLLRISTEDELAGMDLTRHGGFAYAYEDDESHKPGIQLRKIEPNSSSTPSAES

SEQ ID NO: 5964 - protein, 296 aa, Glycine max
  misc_feature (24)..(24): Xaa can be any naturally occurring amino acid
MAIATETQPQQHKDSSEVSGSAAXERRWTLNDFDIGKPLGRGKFGHVYLAREKTSNHIVALKVLFKSQLQQSQVVHQLRREVEIQSHLRHPHILRLYGYFYDQKRVYLILEYAPKGELYKELQKCKFFSERRAATYVASLARALIYCHGKHVIHRDIKPENLLIGAQGELKIADFGWSVHTFNRRRTMCGTLDYLPPEMVESVEHDASVDIWSLGVLCYEFLYGVPPFEAKEHSDTYRRIIQVDLKFPPKPIVSSAAKDLISQMLVKDSSQRLPLHKLLEHPWIVQNAEPSGVYRS

SEQ ID NO: 5965 - protein, 323 aa, Zea mays
LVLSVFNTQEGIAHEVLQWYLCRMEGWFATDADSISLQGWDQEVLLPGGHGLMVRGYRPVINTLAKGLDIRLNHKVVEIVRHRNRVEVTVSSGQTFVADAAVVTVPLGVLKAKTIKFEPRLPEWKEEAIRELTVGVENKIVLHFGQVFWPNVEFLGVVSSSTYGCSYFLNLHKATGHPVLVYMPAGRLARDIEKTSDEAAAQFAFSQLKKILPNAAEPINYLVSRWGSDENTLGSYTFDGVNKPRDLYEKLRIPVDNLFFAGEATSVKYTGTVHGAFSTGVMAAEECKMRVLERFRELDMLEMCHPAMGEDSPVSVPLLISRL

SEQ ID NO: 5966 - protein, 272 aa, Oryza rufipogon
MGRRACCAKEGMKRGAWTSKEDDVLASYIKSHGEGKWREVPQRAGLRRCGKSCRLRWLNYLRPNIKRGNIDDDEEELIVRLHTLHGNRWSLIAGRLPGRTDNEIKNYWNSTLSRKIGTAATAAAGSRGGSTPDTARATDAASSSSVVPPGQQLQPASRADTDTATAAAAAAATTTTVWAPKAVRCTRGFFFHDRETAPLAAAAPAPAGELGDGDDVDCDYYCSGSSSAATTTSSSSLPAVVEPCFSAGDDWMDDVRALASFLDTDDAWNLCA

SEQ ID NO: 5967 - protein, 303 aa, Zea mays
MAGLSLEHPWAFAFGLLGNVISFMTFLAPIPTFYRIYKSKSTEGFQSVPYVVALFSAMLWIFYALIKSNETFLITINAAGCVIETIYIVMYFVYAPKKAKLFTAKIMALLNGGVFGVILLLTLLLFKGSKRVVLLGWICVGFSVSVFVAPLSIMRRVIQTKSVEYMPFSLSLSLTLSAVVWFLYGLLIKDKYVALPNVLGFIFGVVQMVLYVFYMNKTPVAAAVGKDAGKLPSAADDHVLVNIAKLNPALPERTSGTMMHPVTQMAAVPARSCAAEATAPAMLPNRDVVDVFVSRHSPAVHVV

SEQ ID NO: 5968 - protein, 270 aa, Oryza glaberrima
MGRRACCAKEGMKRGAWTSKEDDMLASYIKSHGEGKWREVPQRAGLRRCGKSCRLRWLNYLRPNIKRGNIDDDEEELIVRLHTLLGNRWSLIAGRLPGRTDNEIKNYWNSTLSRKIGTAATAAAGSRGGSTPDTARATDAASSSSVVPPGQQQQPASRADTDTATAAAAATTTTVWAPKAVRCTRGFFFHDRETAPLAAAAPAPAGELGDGDDADCDYYCSGSSSAATTTSSSSFPAVVEPCFSAGDDWMDDVRALASFLDTDDAWNLCA

SEQ ID NO: 5969 - protein, 170 aa, Zea mays
  misc_feature (25)..(25): Xaa can be any naturally occurring amino acid
MAPTVMMASSATAVAPFQGLKSAAXLPVARRSTRSLGNVSNGGRIRCMQVWPAYGNKKFETLSYLPPLSTDDLLKQVDYLLRNGWIPCLEFSKVGFVYRENSTSPCYYDGRYWTMWKLPMFGCNDATQVYKELQEAIKSYPDAFHRVIGFDNIKQTQCVSFIAYKPPGSD

SEQ ID NO: 5970 - protein, 269 aa, Oryza glumipatula
MGRRACCAKEGMKRGAWTSKEDDVLASYIKSHGEGKWREVPQRAGLRRCGKSCRLRWLNYLRPNIKRGNIDDDEEELIVRLHTLLGNRWSLIAGRLPGRTDNEIKNYWNSTLSRKIGTAAAGSRGGSTPDTARATDAASSSSVVPPGQQQQPASRADTDTATAAAAAAATTTTVWAPKAVRCTRGFFFHDRETAPLAAAAPAPAGELGDGDDVDCDYYCSGSSSAATTTSSSSLPAVVEPCFSAGEDWMDDVRALASFLDTDDAWNLCA

SEQ ID NO: 5971 - protein, 460 aa, Bradyrhizobium japonicum USDA 110
MSMLPNSQEARDVAYQLHPYTNARAHQQAGPLVIERGEGPYVFDASGKRYFEAMAGLWSVGLGFNEKRLVEAAHKQMLALPFYHTFSAKSHGPSIDLAEKLVALAPVPMSKVFFTNSGSEANDTVLKLIAYRSNALGQPQRKKVISRMRAYHGVTIASASLTGLPNNHRSFDLPLPNILHTGSPHFYKDGAPGESEEAFATRRAEELDALIQKEGPDTIAAFFGEPVMGAGGVIVPPATYWDKIQAVLKKYDILLVADEVICGFGRTGKMFGCETYGIKPDAIVVSKQITSSYFPLSAILMNDRMFEPIADESNKIGVLGHGFTAGGHPVGSAIALENLKIIEERGLVAHAAELGGYMQGKLRELAGHPLVGEVRGVGMIAALELVLDKQRKTAAATPGAVGGIASRMLQERGVISRNMLDAIAICPPLIVNKTQIDELVAAISGVLEDMKAEVAKLTPA

SEQ ID NO: 5972 - protein, 433 aa, Ralstonia eutropha JMP134
MTPSEVKATLSFSDGSPSVDLPIYQGTVGPDVIDIRKLYGQTGKFTYDPGFMSTASCNSKITYIDGDKGELLYRGYPIEHLAQKCDHLETCYLLLKGELPDATQKEEFVGRVMKHTMVHEQLQFFLRGFRRDAHPMAVLTGLVGAMSAFYHDAMDIDDPHQREISAIRLIAKMPTLVAMAYKYNIGQPYIYPQNDLSYSGNFLRMMFATPCAPYTVNPVLERALDRIFILHADHEQNASTSTVRLAGSSGTNPFAAIAAGVACLWGPAHGGANEAALKMLEEIGSVDNIGEFIKQVKDKNSGVRLMGFGHRVYKNYDPRAKLMRETCHEVLNELGLHNDPLFKLAMELEKIALEDEYFVSRKLYPNVDFYSGIVQRALGIPTSLFTCIFALARTPGWISQWEEMITDPEYKIGRPRQLFNGAASRDQSEAAAS

SEQ ID NO: 5973 - protein, 352 aa, Pseudomonas aeruginosa UCBPP-PA14
MKALRWHAARDLRLSELERQAPRPGEVELEVAYCGICGSDLHEYQSGPHSIPQAEAHPLSGCRAPLTLGHEFCGVVAALGPGVEGLRIGDRVAVEPEYRCGECRYCREGRYNLCESMGFIGLMGDGGFAERARVPAYMLHRLPDAVGFRQAAVLEPAAVALHALRRSSLAPGQRCAVFGLGPIGLLLVMLARLRGIEDIAAVDVSPERLALAGEFGASRALDARDGDTAARLREGGALDCAFEAAGSQASLDAALASLRKGGELVLVSLMGEVRLDAFDLVNRELRLLGSVGYRDAYPELIALLADGRLDLARAVTRSVPLEQAVEHGFEALLRDKSQVKVLVNPNPALADA

SEQ ID NO: 5974 - protein, 329 aa, Fusobacterium nucleatum subsp. nucleatum ATCC 25586
MRVKIKKMEKKLAILTSGGDAPGMNAAIRATAKIAEYYGFEVYGIRRGYLGMLNDEIFPMTGRFVSGIIDKGGTVLLTARSEEFKEARFREIAANNLKKKGINYLVVIGGDGSYRGANLLYKEHGIKVVGIPGTIDNDICGTDFTLGFDTCLNTILDAMSKIRDTATSHERTILIQVMGRRAGDLALHACIAGGGDGIMIPEMDNPIEMLALQLKERRKNGKLHDIVLVAEGVGNVLDIEEKLKGHINSEIRSVVLGHIQRGGTPSGFDRVLASRMAAKAVEVLNKGEAGVMVGIEKNEMVTHPLEEACSVDKRKSIEKDYELALLLSK

SEQ ID NO: 5975 - protein, 165 aa, Magnaporthe grisea 70-15
MSDSPQSNPKEIEGAHTPDEEAQMNDPQDPQSAGLGYEFEVKEQDRWLPIANASEKCHQEKRKTVNGEDILFAMTSLGFENYSEALKIYLAKYREQNQSTRGEGQQNRPSSQGYGAPPGAAPGTNATAGFPGGELGQQGTEAPGDASGYLYSTQPGHNGATAGEY

SEQ ID NO: 5976 - protein, 466 aa, Oryza sativa (japonica cultivar-group)
MPEKGTVVMSRYELGRSLGHGTFSKVYQARSLVSGETVAVKVIDKEKALRAGAGMVDQIEREVAVMRLVGRHPNVVRLHEVMASRSKIYFVMELVRGGELLARLVAGGGRLGEDAARRYFHQLVAAVDFCHSRGVYHRDLKPENLLVDDDGSGGGGNLKVTDFGLSALSASRRHDGLLHTTCGTPSYVAPEIIGDKGYDGATADVWSCGVILFLLLAGYLPFFDSNLMEMYKKITNGEFKVPDWFTPDARSLISRLLDPNPTTRITIDELVKHPWFKKGHTKRPASSNTMKLNEEEKPANAAMNMKPASLNAFDIISLSQGFDLSGMFCCHGHSSRTQDQLFVTGKPATAIVSRLEEIAETEHFTVKKKQKKRQEEDGMAVKLQGWKEGRKGQLAIDAEIFEVSPSCYVVEVKKTAGDTLEYQAFCNRDLRPSLNDICWTSPATAASEKNQLPAVSEVSPLSSPRN

SEQ ID NO: 5977 - protein, 193 aa, Zea mays
  misc_feature (24)..(24): Xaa can be any naturally occurring amino acid
  misc_feature (67)..(67): Xaa can be any naturally occurring amino acid
MARMACRVALFATVLLCAAAGAAXGTKRAPIPDDLRDVIDEEEDDEWRQYRVPSSRGPGRGDGPPPXLSRMDPAALQAELLRGQTGPSFGFVKLRPGTTRSREHVVGIARRWSNVLRTGSVDARFTAVNFVTLMFTMERGRDILELKEFVLSQAEAYELRIGDQVFRRPGDPPLDQVLRKPRKKKRRKSRDEL

SEQ ID NO: 5978 - protein, 1571 aa, Lactobacillus johnsonii NCC 533
MVKENITIQSNAKEVQSKAAVTILGTDADNYPKKAGDLIGDNRYIYQILNLNGTSFVSSDNKKLILSVNRNNLSDDNLYAYVTDNSFTEILSTHTIQAGHFKNIEVVNGWHTVKFLVVNSGKSNISINGSETPVGNASTVVGSTRIEYCLGNSTSIDASSIGEIIPVYTEQSVIKYYYNQNGNLIEIPGTDKYPNVNISGWTGQGFIVDNVDQYKQLINGFYLDASKLPTGSFTGTLSQFGDGSYYKKVYYSAGDKNEGTIDQLTVDFTVVYRQIDATGKMEVLMYDGKDMTKVIESHTVEAGKSVNFSHNNYTARNPFVTDSAHEVQFVYKELGSLILVDENGKEIHPSVKFNNDKDDPTKAGLTYTPVIEGYIADIEFVTPEDPGKDIKVVYRLREDAKATITIVDLDNLENNGGKVAELNATGKVYSVINFVDLSTTLQDLIDRGYVVISNDFKPGTKFDVKDLEFKIELKHGLEEINESQSVDKIINYVDGVGNKLHDSVTQTAIFKTNGYRDKVTGKIVEVTEVEHDDGYVIAIEITNKDASLQWTSKTDVFESIKSPDIVGYTTTQKWSTADKVDQDVKHRVENIVYDKKAQVGTITFWDETSNKQLGSTINIAGNYREVINYQIIENVLNSIKDYENNNYILVSNPLTYATTFGDAEYNPGCNDFRVILKHKIAENTQNKEVNRVITYVYADGPNKDQEAANSVAQKVTFIGTGQYDSVDKAWIGDIVWTTEAGDMNYTFAPVESPKVTGYGADRGIVEAKIVSGSSDNITEEVLYYANQTGASIQYIDDVTGLVIGRDEVQGKVDHQINWKQNHENVLNLFIESGYKLVSSDYEFGKDYYYSADEAKNNFTIHLTRDLIIIDPTNPDSPAYGSEDYIKEVIQEIQYVFENGSTAAESNKQNIKFTAYGVVDKTTGKYVVLDENGKIVVDENKQPIEGTLTWKADITDPKFAEVISPTLAGYTADKTWVSGSSVTENTPNKVIVVTYTANAANAEIIYVDETTGKQLETAVVDGKYNETINYSTADKIKYYESLGYELVKDGYVGGEFGEDTKTFYVTFKHGMVVVNPETPGKPDEPINPDNPDGPKYPADSANLNKDVTNTIHYVYADGTTAKPSHTQTLTFVGSGVIDKVTGQYVEVDENGNVKLDENGNPIPGKLTWTASDGTTFVEVVSPTIVGYTPDKGVVNAVEGINQDSKNLETTVIYTANAAKAEIIYVDETTGKQLETAVVDGKYNETINYSTADKIKYYESLGYELVKDGYVGGEFGEDTKTFYVTFKHGTVTVTPDDKFTEEDPINPDNPDGPKYPFDSIALDKTITRTIKYVYADGTKAKDEVVQKLRFRGTAIIDKVTGEVIILDKNGRKISDGIKWTALDGTTFIQVISPDIAGYTPDRKEIGSLENVDNNTDDIIETVVYNKDIVDPEEPKDPVDPEEPKDPVDPEEPKDPEEPKDPVDPEEPKDPVDPEEPKDPEDPEDSKVPVQAETPTESTNDAPILPDQLSTDTTLKEVATVETKESGKVEAATTEDVSLPQTGHKHSNAGLIGLGLATIASLLGLAGTRKRKKD

SEQ ID NO: 5979 - protein, 279 aa, Bacillus anthracis str. Ames 0581
MKNLQSKAVLNNGVEMPWFGLGVFKVEEGPELVEAVKSAIKAGYRSIDTAAIYGNEKAVGEGIRAGIEATGISREDLFITSKVWNADQGYEETIAAYEESLKKLELDYLDLYLVHWPVEGKYKDTWRALETLYKEKRVRAIGVSNFQVHHLQDVMKDAEIKPMINQVEYHPRLTQKEVQAFCKEQGIQMEAWSPLMQGQLLDNETLQEIAEKHGKTTAQVILRWDLQNGVITIPKSTKEHRIIANADVFNFELTKEDMEKIDALNQNHRVGPDPDNFDF

SEQ ID NO: 5980 - protein, 337 aa, Streptococcus mutans UA159
MKRIAVLTSGGDAPGMNAAVRAVVRKAISEGMEVCGINRGYAGMVEGDIFPLDAKGVSNILSRGGTFLQSARYPEFAKLEGQLKGIEQLKKHGIEGVVVIGGDGSYHGAMRLTEHGFPAVGLPGTIDNDIVGTDYTIGFDTAVNTATDALDKIRDTSFSHGRTFVVEVMGRNAGDIALWSGIAAGADQIIIPEEPYDIKEVVANVKNGYLSKSKNHHLIVLAEGVMHGEEFAAQMKEAGDNSDLRVTNLGHILRGGAPTPRDRVIASWMGAHAVELLREGKGGLAIGIQNEELVEHPILGSAEDGALFSLTEQGEIVVNNPHKARLDFAALNRDLSN

SEQ ID NO: 5981 - protein, 204 aa, Shigella flexneri
DLYICLRPVRYYQGTPSPVKHPELTDMVIFRENSEDIYAGIEWKADSADAEKVIKFLREEMGVKKIRFPEHCGIGIKPCSEEGTKRLVRAAIEYAIANDRDSVTLVHKGNIMKFTEGAFKDWGYQLAREEFGGELIDGGPWLKVKNPNTGKEIVIKDVIADAFLQQILLRPAEYDVIACMNLNGDYISDALAAQVGGIGIAPGA

SEQ ID NO: 5982 - protein, 106 aa, Triticum aestivum
  misc_feature (82)..(82): Xaa can be any naturally occurring amino acid
  misc_feature (93)..(93): Xaa can be any naturally occurring amino acid
MAPTVMASSATSVAPFQGLKSTAGLPVSRRSNGASLGSVSNGGRIRCMQVWPIEGIKKFETLSYLPTLSKEALLKAGRLPYXLKWVPCLQFNXVGVHLPRQKRNLG

SEQ ID NO: 5983 - protein, 176 aa, Triticum aestivum
  misc_feature (100)..(100): Xaa can be any naturally occurring amino acid
MAPAVMASSATTVAPFQGLKSTAGLPISRRSGSAGLSSVSNGGRIRCMQVWPIEGIKKFETLSYLPPLSTEALLKQVDYLIRSKWVPCLEFSKVGFVFRXEHNSSPGYYDGRYWTMWKLPMFGCTDATQVLNEVEEVKKEYPDAYVRVIGFDNMRQVQCVSFIAFRPPGCEESGKA

SEQ ID NO: 5984 - protein, 363 aa, Zea mays
  misc_feature (98)..(98): Xaa can be any naturally occurring amino acid
  misc_feature (123)..(123): Xaa can be any naturally occurring amino acid
  misc_feature (291)..(291): Xaa can be any naturally occurring amino acid
LSQTAQSPRLFKPTGGHILAARAAAGNAPTSPVREGVTELDAVAGFSEIVPDTVVFDDFERFAPTAATVSSSLLLGITGLPDTKFKSAIDTALADGGXTHLEKAEDRDVLVTSPGLLQMVGAXLGQQGPWGKVPPEKKARLAYDTQGIIHRVHELLNLYNQHDVSTDRLLFKIPATWQGIEASRLLESEGIQTHLTFVYSFAQAAAAAQAGASVVQMFVGRLRDWARHHSGDPEIDEALKNGEDAGLSLAKKVYAYIHRNGYKTKLMAAAIRNKQDVFSLLGIDYIIAPIXDVKYGYVPKLTPAIGKTYNFTEEELVKWDQLSLSAAMGPAAEELLASGLEGYVNQARRVEELFGKIWPPPNV

SEQ ID NO: 5985 - protein, 199 aa, Shigella flexneri
PVRYYQGTPSPVKHPELTDMVIFRENSEDIYAGIEWKADSADAEKVIKFLREEMGVKKIRFPEHCGIGIKPCSEEGTKRLVRAAIEYAIANDRDSVTLVHKGNIMKFTEGAFKDWGYQLAREEFGGELIDGGPWLKVKNPNTGKEIVIKDVIADAFLQQILLRPAEYDVIACMNLNGDYISDALAAQVGGIGIAPGANI

SEQ ID NO: 5986 - protein, 464 aa, Haloarcula marismortui ATCC 43049
MLVSLTKCMHVFWHQRDLRIPDNRGLTAAAADDEVLPVYVLDTDLLANIGKRQKAFLLAGVRALKQAYRDHGGELLVKKGTAVDVLSNVVDEYDADRVYYNEHYRPARRNRQRRVDEALPTKSLTDLVLVDPAGLDSQYENHSRFYDDWQAHHKLPPVGSPDSGSLVDVSDPTTAPTIETEMDLPTPGYEGARQRYDDFLTGGIETYNDTRDDMQAAVERPTSAVSRMSPYLAAGMIGIREMWRDASDRHTEATGDAQRNIQKYRYELSWREQSYHLLYYNPTLLSENYKTFPNRIEWENDEDNFEAWKHGETGYPFIDAGMRQLEQEGYIHNRPRQNVASFLTKHLLVDWREGARHFRKRLVDHDPANNAASWQWTASTGTDSVDVRIFDPVAQMSKYDSGADYVTEYVPELRGVPSTKIVDWPTLSDGEREELAPDYYHPIVDRNAAYERAQRVFETALGKR

SEQ ID NO: 5987 - protein, 398 aa, Zea mays
RFAVAVQIQSQATMICVDNSEWMRNGDYPPSRFAAQAHAFAVLSGAKTEANLESTVGLVAMAGKGVSVLVPPTNDFGKVLSGMNGLEIGGEANLTAAIQVAQFALKNRQNKQLRQRIIVFVGSPVIDEKNWLEVIGKNLKKNNVALDVVNFGESDNEKPEKLEALVAAVNSGGNSHIIHIPAGRDLSDALFSSPIILSEDRGSDSAAAARGASGFEFDVDPNVDPELALVLLISMEEERLRQEAAAKKAREESSKTENEGQSSTSNGDIVMADAEPEPNSYTEDKGLHCKDEGQLLEQARKIRIEDYISFEELFDGVTSDTMSAFQEEETCTQSDAGKDFGHQPFEPSLSDVELLNDLSNKVALEWEELFIDPSKCMAEGPQGFYFASLDEKGYLFSC

SEQ ID NO: 5988 - protein, 214 aa, Aeropyrum pernix K1
MGRGPRYRVPLRRRREGKTNYYRRFRLVKSGKPRMAVRISNEYLWVQFLEARIEGDRVIAAAHSRELIKKFGWKGDGNNTCAAYLTGYLAGLRALEKGVREAVLDVGLHKPVKGSRVFAALKGALDAGVEIPHSEEILPGDERVRCEHIAQWAEALKEENAELYQRQFSRYLDRGLNPEELPGHVEEVKKAIEEAYKHVAEETAAEGEEVEVKA

SEQ ID NO: 5989 - protein, 236 aa, Shigella flexneri 2a str. 301
MGYRSIDTAAAYKNEEGVGKALKNASVNREELFITTKLWNDDHKRPREALLDSLKKLQLDYIDLYLMHWPVPAIDHYVEAWKGMIELQKEGLIKSIGVCNFQIHHLQRLIDETGVTPVINQIELHPLMQQRQLHAWNATHKIQTESWSPLAQGGKGVFDQKVIRDLADKYGKTPAQIVIRWHLDSGLVVIPKSVTPSRIAENFDVWDFRLDKDELGKIAKLDQGKRLGPDPDQFGG

SEQ ID NO: 5990 - protein, 407 aa, Pseudomonas putida KT2440
MHRPTAWHVTHWSSDPFSLGAYSALLPGGSPLHRSALGQVLHGRLVIAGEACNASAPAMTHGAWNDGLRAAEAAVSAGASKVIVIGAGCAGLAAAQRLRERGVDCTVLEARGRTGGRTHTVELGGVKADEGAAWLQHFAENPLAAVALQHGLACVETDFSCPLAAARGGALPDIDAAWDALTRRLDRQQPLSDAIDGYMATLDPALARATQFAIDANLVLEACLPVEQLSACALDEEGVGHGDRMLPGGYSELVDLLSKHLDIRLNSPVTHIDWSSARVMVNEDVCDFCICTVPVGVLKTLRFTPALPEIQQGALAHLGMGKLEKVILQFDERWWPCSPSGYLRWYDVPASWGEWLDLTDAVGKPTIAGLIAADAIERQFTGRTDEQVAMAACEALQAWAAAVGPTP

SEQ ID NO: 5991 - protein, 111 aa, Brassica napus
MARVSFKDSLKALEADIQHANTVALDYPREKDGARVQMRLSYNPAAQFLLFLVQWTDCHLAGALGLLRVLIYMPCAVPRSSISVDVSQTSMTAFCAGFAPSRSETKRRSKE

SEQ ID NO: 5992 - protein, 207 aa, Neurospora crassa
MVTGTIKYAKTNHPLSRECVVVGDGAVGKTCLLISYTTNKFPSEYVPTVFDNYAVTVMIGDEPYTLGLFDTAGQEDYDRLRPLSYPQTDVFLICFSVASPASFENVSQKWAPEVNHHCPGVPFLIVGTQKDLRSDKELRDKLAQRKQSMIEFKQGEKLAQDLDAVKYVECSALTQEGLKNVFDEAIVAALEPPQKKTSKRDKKCLIL

SEQ ID NO: 5993 - protein, 458 aa, Geobacillus stearothermophilus
MSGPNDIDEAVQAAKEAQRQWALVPAPKRAEILYKVGMLLKERKEQLARLLTMEMGKVIEEARGEVQEGIDMAFYMAGEGRRLFGDTTPSELKDKFAMSVRTPVGVVGIITPWNFPIAIATWKSFPAIVAGNAVVWKPAPETPIMAQELARIFEEAGLPPGVFHVVHGDGPTVGNALVEHPDVKVISFTGSNEVGRMIAEKCGRLLKKVSLEMGGKNAVIVMDDADLTLAVDGIIWSAFGTSGQRCTACSRVIVHERVKQEFERRLLEAVKTLKIGNGLDETVKVGPVIHEEALQKIDRYVRIGVEEGAKLLVGGYILREGDYARGFYYAPTIFTDVTPNMRIAREEIFGPVVSIISVRSLDEAIAVNNSVDYGLSSAIFTRDVNNVFRAMRDLDTGIVYVNAGTTGAEIHLPFGGTKGTGNGHRDSGVAALDVFTEWRSIYVDFSGKLQRAQIDTDD

SEQ ID NO: 5994 - protein, 202 aa, Pseudomonas putida KT2440
MCVRRYPASSRIVMREKRVMRAHWLTVPVLALLASTSSWAADCPALLQGSLPELRGKGQVDLCERFAGKPLVVVNTASYCGFAPQFEGLEATYKEYHEQGLEMLGVPSNDFKQEDADSEKTAKVCYANYGVTFTMTKTQAVRGKDAIPLFAELASQSSAPKWNFYKYVVDRKGKVIGNFSSLTKPDDPAFRAAIEKAIASQP

SEQ ID NO: 5995 - protein, 432 aa, Gibberella zeae PH-1
MSSPSGSSQGGKRKRNSLRVESTHDFAENGIQTSSRDASGEEGDTTAAESGRLHARGSAPIPKRQRSSSNRDNTIDPGEPSDTTEASIDIAERVGRKGRQALKELDEEEQRRIEAMPPPPIGNLQDPAGGYKTNPPPVGRPVRVYADGVFDLFHLGHMRQLEQAKKAFPDTTLVVGVTGDHETHKRKGLTVMSAAERAETLRHCKWVDEVIEDCPWVVTPEFLDENKLDYVAHDDLPYGADEGDDIYQPIKAAGKFLVTQRTEGVSTTGLITRIVRDYEKYIARQFKRGTSRQELNVSWLKKNELDLKRHVQDLRENITNNWSTTGQELGRELKQFWPVSRPQSPARFNSAGTAEGLRSPTTPGTSGTPKEFITGYALGLVGGVRGWMTKSRTNVADGSRPPSDDESEESDAHAKSPKESSNTPTAVAPSKL

SEQ ID NO: 5996 - protein, 464 aa, Edwardsiella tarda
  misc_feature (186)..(186): Xaa can be any naturally occurring amino acid
MKKGTDTRGGYLDSRFGSEAIRTAAEAHHFPQGEMREDIAFQVINDELFLDGNARQNLATFCQTWDDDYVHRLMDISINKNWIDKEEYPQSAAIDLRCVNMVADLWHAPRPADGQAVGTNTIGSSEACMLGGMAMKWRWRAKRLAQGKSVDKPNMVCGPVQVCWHKFARYWDVELREIPMAPGKLXMDPERMIAACDENTIGVVPTFGVTYTGNYEMPDVLHKALDDLQARTGLDIDMHVDAASGGFLAPFCAPDIVWDFRLPRVKSISASGHKFGLAPLGCGWVVWRDAASLPDDLIFKVDYLGGQVGTFAINFSRPAGRVIAQYYEFLRLGREGYTKVHTASYQVAQFLAAEIAKLGPYEFICSGDPQQGIPAVCFRIPAGKALGYSLYDLSERLRLRGWQVPAFALNGEMSDVVVMRIMCRRGFEMDFAQLLMEDFRAALAYLKAHPAVANVAHQNSFKHS

SEQ ID NO: 5997 - protein, 157 aa, Brassica napus
  misc_feature (148)..(149): Xaa can be any naturally occurring amino acid
MAQLIRPIRQLSPQCHHRLRNLRHLFSKKLPLNPPSSTPTLLLLSPSFSTARSPPRRRLRRPPEALSPPTLIAEEDGGSDESESESSRSRNQRKRDARRAVRWGMELASFSSDQIKRVMRAASLGEEVYDALMLAKRLGADVREGKRXXFNYIGKLL

SEQ ID NO: 5998 - protein, 422 aa, uncultured marine gamma proteobacterium EBAC31A08
MVLKILEIFGHLIFELKPRYNIFMKEIIKEYTNYMVPFYAPADFVVKKASGSHVWDLNNKKYIDFTAGIAVTNLGHSNKDLIKILKKQSEELWHLSNLYINEPSVTLARKLCKNSFADKVFFCNSGAESIEAAVKIARKFCSSTVNKNKNEVISFSTSFHGRTMLGIALAKAKHLTDGFAPLPRGIKNHPYNDITNLEKVFSDKTAAVILELVQWQSGITKADKKFIAKIKKLAKKHKALVIIDEVQSGIGRTGTLFAYEQFNITPDILCFAKGISNGFPLGGILTSDKVSKHMSAGSHGTTFGGGPIACAIGNEVIDTISKKSFLNKVLKKEVRFINLLNKINEKHKCFEKITSAGLWVGVEVSKDSKIQIDDLIKKSHHNGLMILKANASTVRFSPSLIIENELVDEGLKIFEKSIISLL

SEQ ID NO: 5999 - protein, 499 aa, Burkholderia fungorum LB400
MTRVRRLNDTFDTGLVWLRRDLRNTDNAALYYALKHCERVWCVFVFDTTILQPLVDAWHARHPDTQPQDRRIEFILAALGELDEALRADGGGLIVLYGNPAELVPKLADELGVDAVFANHDYEPVAIERDGTVRERLAEAGRQWLTFKDQVIFERDEVLTGQSKPFTVFTPYRNAWLRQLSAFDLKPYPVETYAKRLAALPSKFDRQLPTLEQLGFAPSNLGELNLPAGMSGAQRLLDDFMTRIDSYADRRDFPAAKGPSYLSIHLRFGTVSIRTLARLAHEMSLQPDGQGSATWLSELIWRDFYFMILAHHPRLARGASFREEYDRLRWEQGLQADEAFAAWCNGRTGYPLVDAAMLQLNRTGYMHNRLRMVTASFLVKDLGVDWRLGERYFAEQLNDFDFSANNGGWQWAASTGCDAQPYFRIFNPVTQSEKFDAEGRFIKRYLPQLAKLPSKWIHAPWLAGAERLADCGVVLGKDYPAPIVDHAEARARTLARFGK

SEQ ID NO: 6000 - protein, 294 aa, Triticum aestivum
MSAPPPPASSDDDGKPADEEGVEIREVWANNLEAEFAVIRDVVDDYPYIAMDTEFPGIVCRPLGSFRSNDEYNYATLKANVDMLSLIQLGLTLSDENGALPARGTGGRPCAWQFNFRGFDPRSDPANADSIDLLRNSGIDFDRFTTEGADTGHFAELLMSSGVLLNAELQWVTFHSGYDFGYLLKLLTGRNLPDTMPGFFDLIRIYFPVLYDIKHLMKYCGSLHGGLSKLGELLGVQRVGICPQAGSDSLLTLRCFQKLKEAYFRGSTENYAGVLYGLISDGGENRPPAALLIE

SEQ ID NO: 6001 - protein, 363 aa, Desulfitobacterium hafniense DCB-2
ADEQEIKKAYRKLARQYHPDVNPGDKDAEEKFKEATEAYDVLSDTEKRARYDQMGHSAFDPNQQGFGGFGGDFGGFGDIFDMFFGGGGGGGQRRQGPTRGNDLRYDLTITFEEAAFGTEKEIQVPRQETCTECHGSGSAPGTHPTTCSQCHGTGQVKATQRTPFGAIQTARTCPACNGSGQFISSPCKECSGKGTTRKVKTIKVTVPPGSEDGLNLRFSGNGEAGLRGGPSGDLYVVLNVKAHKFFEREGNDVYCEIPITFVQAALGSELDVPTLDGKVKMKIPEGTQTATVFRLRGHGIPYRRGNGRGDQHVRVVVATPTKLTDRQKELLREFGEVTSDQQQMGKKSFFEKVKENIRDAIDL

SEQ ID NO: 6002 - protein, 215 aa, Shigella flexneri
LDLYICLRPVRYYQGTPSPVKHPELTDMVIFRENSEDIYAGIEWKADSADAEKVIKFLREEMGVKKIRFPEHCGIGIKPCSEEGTKRLVRAAIEYAIANDRDSVTLVHKGNIMKFTEGAFKDWGYQLAREEFGGELIDGGPWLKVKNPNTGKEIVIKDVIADAFLQQILLRPAEYDVIACMNLNGDYISDALAAQVGGIGIAPGANIGDECALFE

SEQ ID NO: 6003 - protein, 293 aa, Nostoc punctiforme PCC 73102
MLSQLGATSHLSPHLTFGTISTRTVYQSTKALAEQLKTQPKAEFSLKAFRDRLRWHDSFTQRLYFHPEIAYTNRYREFDKLYTPETLSGAKQELYQAWQQGMTGFPLVDASMRQLQTMGWMNFRMRAMCATFLTINCGVSWHHGAKHYMNYLVDGDLAIDNWQWQMQAGVTNPLSDTFRIYNPSKNIAEKDPLGEFIYHWIPELRGYSLLEIEQEKYIETSNYPKVILDWSKTRKVNGKIVSDLRKQTKQRLLSQGGDEYDSAIAAKETVDKYWQHKDKEYKEYQQKLTELQE

SEQ ID NO: 6004 - protein, 250 aa, Solanum tuberosum
MGKSYPTVSEEYLKAVDKCKRKLRALIAEKNCAPIMLRLAWHSAGTYDVCSKTGGPFGTMRFKAEQAHGANNGLDIALRLLEPIREQFPTLSHADFHQLAGVVAVEVTGGPDVPFHPGREDKPEPPVEGRLPDATKGCDHLRDVFVKQMGLSDKDIVALSGAHTLGRCHKERSGFEGPWTANPLIFDNSYFTELLSGEKEGLLQLPSDKALLCDPAFRLLVEKYAADEDAFFADYAKAHLTLSELGFAEA

SEQ ID NO: 6005 - protein, 214 aa, Shigella boydii
ELDLYICLRPVRYYQGTPSPVKHPELTDMVIFRENSEDIYAGIEWKADSADAEKVIKFLREEMGVKKIRFPEHCGIGIKPCSEEGTKRLVRAAIEYAIANDRDSVTLVHKGNIMKFTEGAFKDWGYQLAREEFGGELIDGGPWLKVKNPNTGKEIVIKDVIADAFLQQILLRPAEYDVIACMNLNGDYISDALAAQVGGIGIAPGANIGDECAL

SEQ ID NO: 6006 - protein, 279 aa, Glycine max
  misc_feature (254)..(254): Xaa can be any naturally occurring amino acid
  misc_feature (256)..(256): Xaa can be any naturally occurring amino acid
SSTQLILLFLTKLLSKNSSGDSISTMSNSEHNIITGHAGYVLEDVPHLSDYIPHLTTYPNPLQDNPSYSVVKEHSVDVDDTIAQKAIVHKNSPRETHFRRAGPRQKVYFESEDVYACIVTCGGLCPGVNTVIREIVCGLYHMYGVHKVLGIEGGYRGFYSCNTIPLTPKVVNDIHKRGGTILGTSQGEGGNDTLKIVDSIQDRGINQVYILGGDGTQRGASVIFEEIRRRGLKGSVVGIPESVDNDIPVIDKSXFXFDTAGEEAQRAINAAHVEAESTE

SEQ ID NO: 6007 - protein, 212 aa, Shigella boydii
DLYICLRPVRYYQGTPSPVKHPELTDMVIFRENSEDIYAGIEWKADSADAEKVIKFLREEMGVKKIRFPEHCGIGIKPCSEEGTKRLVRAAIEYAIANDRDSVTLVHKGNIMKFTEGAFKDWGYQLAREEFGGELIDGGPWLKVKNPNTGKEIVIKDVIADAFLQQILLRPAEYDVIACMNLNGDYISDALAAQVGGIGIAPGANIGDECAL

SEQ ID NO: 6008 - protein, 199 aa, Oryza sativa
MGCSSSVPARSTGGLNNISNDNSATDSKDLRAKLVLLGDSGVGKSCIVLRFVRGQFDPTSKVTVGASFLSQTLALEDSTIVKFEIWDTAGQERYAALAPLYYRGAAAAVVVYDITSPESFSKAQYWVKELQKHGSPDIIMVLVGNKADLHKNRHVSSQEAQEYAEKNNMVFIETSAKTADNINQVFEEIAKRLPRPTAS

SEQ ID NO: 6009 - protein, 216 aa, Shigella boydii
LDLYICLRPVRYYQGTPSPVKHPELTDMVIFRENSEDIYAGIEWKADSADAEKVIKFLREEMGVKKIRFPEHCGIGIKPCSEEGTKRLVRAAIEYAIANDRDSVTLVHKGNIMKFTEGAFKDWGYQLAREEFGGELIDGGPWLKVKNPNTGKEIVIKDVIADAFLQQILLRPAEYDVIACMNLNGDYISDALAAQVGGIGIAPGANIGDECALFEA

SEQ ID NO: 6010 - protein, 412 aa, Oryza sativa
MRPQGKTLEMGKRALPRSSDGDEDRTGDLPDGILHHILGSLPARDAARTCVLARRWRHLWKFATGLRITDREMREPAPMEKLQDFVDHLLLLRGRAPLETCWLNLTRLSSDGDARRVNLWFRHAVLCEVQVLRLDLILNGFQLKLDDLPLASRCLAKLNLSGVHLMHSFPDFSCCPVLEHLDIFFCDLSDAKKITSQSMKCLNIRHCTFSQISRTRISAPNLISLRLENYWHRTPVFEVMPLIVDAFVRVHDRSGDWYSCTSGNADFEECLCEDCDFCHSNTNCVIMQALSQAKNLVLSAHEQEFIFKKELMRCPTFSNLKTLLLINCFCVAFDLHGITSILRHTPVIEKLILEFFFEVTEHDDEVEMKGSCSQMERSSAISKHLKLVIVKCNAIDGRITKILKFLSTFNIC

SEQ ID NO: 6011 - protein, 436 aa, Streptomyces kasugaensis
MSDSVLLSARQPLPPIDYSHAAGAWIHTAEGDSLLDAASGLVCVNIGHAHPHVVEQITRQARTATFASPGVLLPAVQEELAGRLTEAVNRPGDGVSLACSGTSAVELAISYARLIQRSRGQDGRHHILTARLGYHGNSALTLGLSGHRRRRPHPDDALGLAPAFDPPYPGHHRDCPHDRCRASCADAVAEAIDRRGPESVAAVLIEPVNGTTGGAYTPPPGYLAALRRACHERGVLVIHDEVLTGLGRTGLPLGADHCTDAAADIVVLSKGLSAGYLPLAAVLVNPEGVARLRSGPRPLPLMGTMSATPLQAAAGLAVLDVLGEIGALDPARVRGGDVAAAVRAVAALPVVQETRGVGYFHAVELAPGTQAAALAAARDERLLLYPFNGFHADGTGEGLIVAPPLNSTPSEVEFLAQGLRRALERTAARSEDRSHR

SEQ ID NO: 6012 - protein, 160 aa, Brassica napus
  misc_feature (15)..(15): Xaa can be any naturally occurring amino acid
  misc_feature (17)..(17): Xaa can be any naturally occurring amino acid
  misc_feature (21)..(21): Xaa can be any naturally occurring amino acid
  misc_feature (30)..(32): Xaa can be any naturally occurring amino acid
  misc_feature (34)..(34): Xaa can be any naturally occurring amino acid
MVSGLGSHRAAFPVXRXSITXITSIAATSXXXSXLKVWPPVGKKKFETLSYLPDLTDVELAKEVDYLLRNKWIPCVEFELEHGFVYREHGNTPGYYDGRYWTMWKLPLFGCTDSAQVLKEVQECKTEYPNAFIRIIGFDNNRQVQCISFIAYKPPSFTGA

SEQ ID NO: 6013 - protein, 189 aa, Bradyrhizobium japonicum USDA 110
MMNRRTMLIAALAGAVAPVTRAVAGGGMSRISAYAFSFPALSGDDIRLAAFTGKPLLVVNTASLCGYTPQYAGLQELWSEFGERGLTVIGVPSNDFGGQEPGGTSEITETAHHQYGVTFPIAAKATVIGARAHPFYKWAADARPKDVPRWNFHKYLIGRDGYIAEVFASNIEPTDTRIKTAIAKTLADT

SEQ ID NO: 6014 - protein, 362 aa, Burkholderia cepacia R18194
MATPQFHPLRIRDVRPETADAVTVSFDVPPELRDAYRFTQGQFVTLKTHIDGEETRRSYSICVGTTDYDRDGELRIGIKRVRGGRFSNFAFDSLQPGHTIDVMTPDGRFFTHLNADHGKQYVAFSGGSGITPVLAIVKTTLELEPRSTFTLIYGNRSVDAIMFAEELEDLKNRYMNRFVLYHVLSDDQQDVELFNGVLDQTKCAEFLGTLTPADAIDEAFICGPAPMMDAAEAALKAAGVPQAKVHVERFGTPLPQAGAPVVEITDQTPAADLEIVLDGKKRKLRLPYEGVSLLDVGLRAGLALPYACKGGVCCTCRAKVLEGEVRMEKNYTLEEHEVKDGFVLTCQCHPISDKVVVSYDER

SEQ ID NO: 6015 - protein, 503 aa, Glycine max
MSIPIPHRQLFIDGDWKVPVLKNRIPIINPSTQHIIGDIPAATKEDVDLAVAAAKAALSRNKGADWASASGSVRARYLRAIAAKITEKKPELAKLEAIDCGKPLDEAAWDIDDVAGCFEFYADLAEKLDAQQKAHVSLPMDTFKSYVLKEPIGVVALITPWNYPLLMATCCFVRCLVSSLLCCHVLLCAIFRTCLELAEICKEVGLPPGVLNILTGLGPEAGAPLAAHPDVDKIAFTGSSATGSKIMTAAAQLIKPVSLELGGKSPIIVFEDVDLDKAAEWTIFGCFWTNGQICSATSRLIVHESIATEFLNRIVKWVKNIKISDPLEEGCRLGPIVSEGQYEKILKFISNAKSEGATILTGGSRPEHLKKGFFVEPTVITDVTTSMQIWREEVFGPVLCVKTFSTEEEAIDLANDTVYGLGSAVISNDLERCERITKAFKAGIVWINCSQPCFTQAPWGGIKRSGFGRELGEWGLDNYLSVKQVTQYISDEPWGWYQSPSRL

SEQ ID NO: 6016 - protein, 175 aa, Triticum aestivum
MAPTVMASSATSVAPFQGLKSTAGLPVSRRSTSAGLGSVSNGGRISCMQVWPIEGIKKFETLSYLPPLTVEDLLKQIEYLLRSKWVPCLEFSKVGFVYRENHRSPGYYDGRYWTMWKLPMFGCTDATQVLKELEEAKKAYPDAFVRIIGFDNVRQVQLISFIAYKPPGCEESGGN

SEQ ID NO: 6017 - protein, 265 aa, Triticum aestivum
LRVSRAGGAGRETPPPGNGQDPCGHPLRVGKRRVSRTGGRSWAQELSLPVVGGPRLVFAPPSREEAEEATAELREAIDRVYFKETPVEVVKEHDQELSKLGADALIPAMPGHVVQAFTLLKSSPEAQSVVASLASDKNVWDAVLKNERVMEFYKSHQQTLVNTFPEGTDSTDSVESPEKFEEASPEYALPTASPLSDFVDNAKKTMMEMVDNITNFFQDLFHNPAEAEAGPGSSSKKPSFAEMAAGGSFMALAMAVILVVLFKRA

SEQ ID NO: 6018 - protein, 426 aa, Schizosaccharomyces pombe
MSNGEFIDQYLLPESGAILQDYLDDYFYTSWYTGNRNLIQLDHYGFPTASNFELNPKSTDNCGTVDFQGIPWGNKAIGKRKNFRLYRLHTYSLSCNHSDWSPEELSLDTVQVAAEDSFYEFQRFLKNPNCLRNHHHLCKSVKVVGEHSVIYVSNNSIRMENTLHDNSVQIIDLKNNILQKKAISCLDTTNAVGCLGTLYGQYCIFNFKNGSFSTRKLSDDSINHIQLFSEKKFILGCNDGAVYVEDVQRTSPILVYRCSNAVNCVQLFDETPLALVCTDSKDAMLIDIRSNSVSAKLPHSDSVLTGSWHPNGNILATGGQDTTAKVWDIRALGKSFRNLGSQMSAVTNLCFSPLGESLAVTEQADFVQLFDTKLFNTSQVIDFFGEIAGTAYSSSGDSLFIGVDDPMLGGILEFRRPLQHPLSFIF

SEQ ID NO: 6019 - protein, 571 aa, Zea mays
PAGPGLHADLLYEPWEVLDDDGFPFTMFAPFWNRCLCMPDPAAPLLPPKRINSGDLSRCPWDELIFEDESEKGSNALLARAWSPGWQNADKALTAFLDGPLVDYSANHKKADSASTSLLSPYLHFGELSVRKVFHLVRMKQLMWSNDGDRAGEESCTLFLRAIGLREYSRYLTFNHPCSLEKPLLSHLRFFPWVVDEVHFKVWRQGRTGYPLVDAGMRELWATGWVHDRIRVVVSSFFVKVLQLPWRWGMKYFWDTLLDADLESDALGWQYISGSLPDGRELDRIDNPQFEGYKFDPHGEYVRRWLPELARLPTEWIHHPWDAPESVLQAAGVELGSNYPRPIVELDAANSRLQGALSEMWELEAASRAAIENGMEEGLGDSTDEPPIDFPQELRMEVDRQPAQPAIIHTPVVAGWRREDQRVPSMTSSLIRAETELTADFGNTSEDSRPEVPSNIHLQARAEREETVDGATGNTVRVNGNHHQQNLQNNMHRVLGIAPSISEASSSWTGRDGGVVPVWSPPAASGHSDPYAADEADISSRGYLDRHPQSHTMMNWSQLSQSLTTGWEVDN

SEQ ID NO: 6020 - protein, 492 aa, Rhodobacter sphaeroides 2.4.1
MLDSVTDLRSLLKDPSLLETRAFVAGEWVDADDGATFEVTNPARGDVICTVPDLGRAETARAIAAAEEAMKEWAARTGKERAQVMRKWFDLMMANQDDLGAILTAEMGKPLAEAKGEIAYGASFIEWFGEEAKRIYGETIPGHMRDKRITVLKQPIGVVGSITPWNFPNAMITRKCGPALAAGCGFVARPAAETPLSALALAVLGERAGLPKGILSVITSSRSSDIGKEMCENPIVRKLTFTGSTEVGRILLRQAADQVMKCSMELGGNAPFIVFDDADLDAAVQGAMASKFRNNGQTCVCANRIYVQSGVYDAFAEKLAAAVKKLKVGDGLVEGTEAGPLINEKAVAKVEEHIRDVLDGGGQVLTGGKRHALGGTFFEPTVVTGVKQEMKVSTEETFGPLAPLFRFETEDEAVGYANDTIFGLASYFYARDVGRITRVQEALEYGIVGVNTGIISTEVAPFGGVKQSGLGREGSRHGIEDYLEMKYICLSI

SEQ ID NO: 6021 - protein, 175 aa, Triticum aestivum
MAPTVMASSATSVAPFQGLKSTAGLPVSRRSNGASLGSVSNGGRIRCMQVWPIEGIKKFETLSYLPPLSTEALLKQVDYLIRSKWVPCLEFSKVGFIFREHNASPGYYDGRYWTMWNLPMFGCTDATQVINEVEEVKKEYPDAYVRIIGFDNMRQVQCVSFIAFKPPGCEESGKA

SEQ ID NO: 6022 - protein, 387 aa, Oryza sativa
MPPRIRRAPARRAAPEEVPDRVSALPDEALHAVLSLLPAHDAVRTCVLARRWRHLWEHAPALRVTDVEGWNPRLRGDGLGRFIRFVDGLFVSRRRRDAPLELCDLDFDFPEDKGKDWHVNRWIMLALLRHHARVLRISLPAYITLPDVPLISQRLTRLELDGVLGNDNILDFSCCPALIALKMKCCRINAEKMSSPSVKILSLASCEFYPATRTQMSFPSVVSLELDGCSGSVPFLESMPSLVAAIVIFDDDYADRCDNSVLGDCGDDSCVDCCNYSDRSKCVCLNGLLEATHLELSAEPAMQSPILEKLTIKIPEEPKCSMDAGQQKIPEEPFVSNHLKIVEIKCKGKEVMWVCKFLKTLGTFGIPLEKINIKLTSEHCRSECELI

SEQ ID NO: 6023 - protein, 373 aa, Oryza sativa
MASGADRISDLPDDVIHHVLSLLPSRDAVRTCALARRWRDLWRSVPAVRVAGDRGWASFDALARFVDSLLRLRRGGAALDACDFDLRFDGAFPGEELQGDTWIRRALRRQVRALRFAVSTHPRVPIPLSDSPLVSHSLTTLELRGVQGNDQVLDFSSCPSLVDLKMKDCYVGGLEMWSPSLKHLSITYCVFYCDYRTRMDFPSLVTFKFNTNTGRTPLLETMPSLATAAVRLDHFCHDRCANGWYDDCGDAGCKGCHDYYRPDEYDCVFLEGLTEATDLTLLAYSKVVPKNLVGMDGSFNQLEQPFAASHLQIVEIYCREVDGIILKILKVLNANGVPLEKISIRCSGCELSMNTHASYYAVVNMCCRAKHCP

SEQ ID NO: 6024 - protein, 449 aa, Triticum aestivum
MQLEVMANRGKILMERYELGRLLGKGTFGKVHYARSLESNRSVAIKMLDKEKVLKVGLSEQIRREVTTMRLVAHKNIVQLHEVMATRNKIYFVMEYVKGGELFDKVAKSGKLTEGAAHKYFQQLISAVDYCHSQGVYHRDLKLENLLLDENENLKVSDFGLSALSESKRQDGLLHTTCGTPAYVAPEVISKTGYDGAKSDIWSCGVILFVLVAGYLPFHGSNLMDMYRKIEQGDFRCPSWFSHKLQKLLCKILDPNPSTRASIQKIKESTWFRKGPRGTLAVKERTPSENVTTNAPPTAGVRPRKNTHEDVQPLTVTNLNAFEIISFSTGFDLSGLFIQEDCRKETRFTSDKPASAIISKLEYVAKALNLRVRKKDNGVVKMQARKEGRNGAVQLDMEIFEITPSHPLIEMKQTSGDPLEYRELLEDIRPALKDIVWAWHGDDPHQQLE

SEQ ID NO: 6025 - protein, 383 aa, Zea mays
  misc_feature (258)..(258): Xaa can be any naturally occurring amino acid
  misc_feature (320)..(320): Xaa can be any naturally occurring amino acid
  misc_feature (325)..(325): Xaa can be any naturally occurring amino acid
  misc_feature (327)..(327): Xaa can be any naturally occurring amino acid
  misc_feature (339)..(340): Xaa can be any naturally occurring amino acid
  misc_feature (346)..(346): Xaa can be any naturally occurring amino acid
  misc_feature (348)..(348): Xaa can be any naturally occurring amino acid
PGYSVVEQYFVNPDDTVCQKIVVHKDGPRGNHFRRAGPRQKGGYRGFYARNTITLTPKSVNDIHKRGGTILGSSRGGHDTVKIVDSIQDRDINQVYVIGGDGTQRGAVLIFQQVRRRGLKVSVAGIPKTIDNDIPVIDKSFGFDTAVEEAQRAINAAHVEAVSAENGIGLVKLMGRHSGFIAHYATLARRDVDCCLIPESPIYLEGEGGLFRYIEKRLKDNGHMDIVVAEGAGQKLIAETMQSIGKDASGNELLLDVXLWLSQKINEHFKKNKMTINLKYIDPTYMIRAIPSNASDNVYCTLLAHSVVHGAMAGYTGLPXQVNGXTXTSIYRITEKQTXXITDRCXKXLSSTTPTPTNLRKEGHKTPTRLHKYSKGHWSTHAR

SEQ ID NO: 6026 - protein, 507 aa, Mycobacterium tuberculosis H37Rv
MTVFSRPGSAGALMSYESRYQNFIGGQWVAPVHGRYFENPTPVTGQPFCEVPRSDAADIDKALDAAHAAAPGWGKTAPAERAAILNMIADRIDKNAAALAVAEVWDNGKPVREALAADIPLAVDHFRYFAAAIRAQEGALSQIDEDTVAYHFHEPLGVVGQIIPWNFPILMAAWKLAPALAAGNTAVLKPAEQTPASVLYLMSLIGDLLPPGVVNVVNGFGAEAGKPLASSDRIAKVAFTGETTTGRLIMQYASHNLIPVTLELGGKSPNIFFADVLAAHDDFCDKALEGFTMFALNQGEVCTCPSRSLIQADIYDEFLELAAIRTKAVRQGDPLDTETMLGSQASNDQLEKVLSYIEIGKQEGAVIIAGGERAELGGDLSGGYYMQPTIFTGTNNMRIFKEEIFGPVVAVTSFTDYDDAIGIANDTLYGLGAGVWSRDGNTAYRAGRDIQAGRVWVNCYHLYPAHAAFGGYKQSGIGREGHQMMLQHYQHTKNLLVSYSDKALGFF

SEQ ID NO: 6027 - protein, 333 aa, Oryza sativa (japonica cultivar-group)
MASPGSSGRCSRTPGFPAGPLGGGGRAVPAVGLGTASLRSVGEESFRGALLAALEVGYRHIDTASVYGSERVVGEAVAGAARRGVIACREEVFVTTKVWCTQCHPDLVLPSLRESLQNLQMEYVDMYLVHWPMSVKPTKPHYPMKREDIMPMDLRGVWQAMEECHQLGLAKMIGVSNFTTKKLQELLAFAKIPPAVNQVELNPVWQQKKLMEFCKAKGIHVTAYFPLGGRHSTSTVNPVLDSDVLKEIAAAKGKSVAQISLRWIYEQGASMVTTSTKRERLKENIDIFDWQLSDEDRLKISQIPQHKTVSVLSILCPDGVSSVELSEVDVVEV

SEQ ID NO: 6028 - protein, 323 aa, Oryza sativa (japonica cultivar-group)
MAVVVPEAVLRHGDARPMPAVGMGVAEYPSTPERTRDAVLAALEAGFRHFDTASLYRTEAPLGEAIAEATRRGLLASREEAFVTTKLWCTQCHPDLVLPSLRESLRNLQMEYVDLYLIHLPISVKPGPMVFPVKKEDVVPFDFGGVWRAMEECHRLGLAKAIGVSNFTTKHIDKLLAVATILPAVNQVEMNPTWQQRTVREYCDAKGIRVTAYSPLGGQNWGGSANYVMESSVLTEIARARGKSIAQVSLRWIYEQGVTPIAKSYRKERLKENLEIFDWELTDEDRLKISQIPQRKRVTAASLFSPDGEFTSVDLPDIEIVEE

SEQ ID NO: 6029 - protein, 360 aa, Lolium perenne
MGSTAADMAASADEDVALFALQLASSSVLPMTLKNAIELGLLEILVAAGGKSLTPTEVAAKLPSAVNPEAPDMVDRILRLLASYNVVTCLVEEGKDGRLSRSYGAAPVCKFLTPNEDGVSMAALALMNQDKVLMESWYYLKDAVLDGGIPFNKAYGMSAFEYHGTDPRFNRVFNEGMKNHSIIITKKLLELYHGFQGLGTLVDVGGGVGATVAAIAAHYPAIKGVNFDLPHVISEAPQFPGVTHVGGDMFKEVPSGDAILMKWILHDWSDQHCATLLKNCYDALPANGKVVLVECILPVNPEANPSSQGVFHVDMIMLAHNPGGRERYEREFQALARGAGFTGVKSTYIYANAWAIEFTK

SEQ ID NO: 6030 - protein, 422 aa, Streptococcus mutans UA159
MLLIKNGRVLDPKSGLDRVLDVLLDGKKVVKIAENIESVDAQVIDAEGLVVAPGLVDVHVHFREPGQTHKEDIHTGALAAAAGGVTTVVMMANTTPTISDVATLTEVLESAAKENIHIKTVATITKHFDGQHLTDFETLLKAGAVGFSDDGIPLTSSKVVKEALDLAKKNDTFISLHEEDPELNGILGFNEKIAKEHFKICGATGVAEYSMIARDVMIAYDRQAHIHIQHLSKAESVKVVAFAQKLGAQVTAEAAPQHFSKTENLLLEKGANAKMNPPLRLEADRLAVIEGLKSGVISVIATDHAPHHADEKNVADVTKAPSGMTGLETSLSLGLTYLVEAGHLSLMDFLAKMTINPAQLYDFDVGYLAENGPADLVIFADKEDRLVSNHFASKAANSPFIGETLKGQVKYTICSGEVIYQA

SEQ ID NO: 6031 - protein, 464 aa, Zea mays
MARSGREADPGEEERKLVLGKYELGRLLGQGTFAKVYYARDLSAGAGTGHSCSVAIKVIDKARLRRTEGMVEQLRREISIMRMVRHPNVVGIREVLASRSRVFVVMEYARGGELFAKVARGRLDEDHARRYFQQLVAAVGFCHRRGVAHRDLKPENLLLDEAGRLKVTDFGLAALPEQLRHDGLLHTQCGTPAYVAPEVLRKRGYDGARADLWSCGVVLYVLLCGFLPFQHDNYVKLYQKIFKADYQVPPWVSGDARRLIARLLVVDPAKRASIAEIMCTPWFRKGFVPPVLSPPVTPKKQQLDEGAALFDNDDDDNSNSNHSGATSPRSCNAFQLISSMSSGFDLSGLFESEQKTATVFTARAPAATVVEKLESVARALGFEVTRGKGWKVRMEAKAEGTNGRLAATAEVLEVAVDVTVVEFVHDAGDALDFNKFCAVDVRPGLTEIVWAWQGDSPAAAVGTA

SEQ ID NO: 6032 - protein, 186 aa, Pennisetum glaucum
MAKCYPTVSAEYQEAVEKARRKLRALIAEKSCAPLMLRLAWHSAGTFDVSTKTGGPFGTMKNPAEQAHGANAGLDIAVRMLEPVKEEFPILSYADLYQLAGVVAVEVTGGPEIPFHPGREDKPQPPPEGRLPDATKGSDHLRQVFGKQMGLSDQDIVALSGGHTLGRCHKERSGFEGPWTRNPLVF

SEQ ID NO: 6033 - protein, 248 aa, Clostridium perfringens str. 13
MENVWNGFRQLEIFKIEEEAKDIKSFYLRATDGKPLKEYKCGQFLPLKIETDDEVIKKEMRRYSLSGDPKKNYYRLTIKRVPNGKVSGYFHESINVGDTILAMPPFGNFTLTEDSNKPLVLLSGGIGITPILSMLYGAKEQSRDIYFVEAVLNSDNLALNSDVQGIKKVKNFKEIKIFSEPLESDIKGKDFDEEGFITKEWIKNNLPLNGEFFFCGPTLFMKSIRNSLKDLGVKEDNINFEFFGKEEF

SEQ ID NO: 6034 - protein, 175 aa, Glycine max
MAPTVMASSATSVAPFQGLKSTAGLPVSRRSNGASLGSVSNGGRIRCMQVWPIEGIKKFETLSYLPPLSTEALLKQVDYLIRSKWVPCLEFSKVGFIFREHNASPGYYDGRYWTMWKLPMFGCTDATQVINEVEEVKKEYPDAYVRIIGFDNMRQVQCVSFIDFQPPGCEESAKA

SEQ ID NO: 6035 - protein, 344 aa, Ralstonia solanacearum GMI1000
MDALVIHAANDLRIEDIDTPEVQPDQLRVQVRFGGICGSDLHYYNHGGFGTVRVKEPMVLGHEVAGRVEEIGPGVHRHAKGDRVAISPSRPCGQCHYCQQGLQNHCLDMRYYGSAMRTPHVQGAFRREIVIDESQAHRLADTLSDQEGAMAEPLSVALHAVRRAGPLLGKRVLVTGCGPIGALIVVAARRAGAAEIIVTDMGAYPLKAAVAVGADVTINVAEQPDGLKPYTTDKGQIDVLFEASGNERALRGAIDALRPRGIIVQVGLGGEMTLPLNAIVAKELELRGAFRFHEEFAMAVELLNKGLVDVKPLISATVPYRNAAHAFALAGDRTQAMKVLLDFQ

SEQ ID NO: 6036 - protein, 111 aa, Arabidopsis thaliana
MDVRGDHNRKNTSFRGSAPAPIMGKQELFRTLSSQNSPRRLISASYFSLESMVVLVGLTASLLILPLILPPLPPPPFMLLLIPIGIMVLLMVLAFMPSSNSKHVSSSSTFM

SEQ ID NO: 6037 - protein, 280 aa, Gibberella zeae PH-1
MERSHTDTLPLANSVEIPQLGFGVYLSPPEVCVKSCLTALEAGYRHIDTAQYYGNEAEVGQAVQQSNVERKDVFLTTKILEAAGSVELSYSKCVESIGKLDPESGYVDLFLIHSPNPGAAKRKEMWQALERLYEEGKARSIGVSNFGIKHIDELKQYAKVWPPHVNQIELHPWLQQRDCVSYCEKNSIAVEAYAPLVRNQKANDKTLGSIASKHSVTPSKVLIRYCLQKNWIPLPKSDTPERIRDNADVFGFDLDDKDMKSLDNLDQGDTGAIVQAVDNY

SEQ ID NO: 6038 - protein, 143 aa, Zygosaccharomyces rouxii
MSRSGVSVADESLQAFNDLKLGKKYKFVLYGISEDKTTIVVKETSTSQSYDEFLGKLPENDCLYAIYDFEYEIGGNEGKRSKIVFFTWSPDTAPVRSKMVYASSKDALRRALTGVSSDIQGTDFSEVSFETVLERVSKSAGSH

SEQ ID NO: 6039 - protein, 162 aa, Triticum aestivum
  misc_feature (54)..(54): Xaa can be any naturally occurring amino acid
  misc_feature (88)..(88): Xaa can be any naturally occurring amino acid
  misc_feature (96)..(96): Xaa can be any naturally occurring amino acid
  misc_feature (119)..(119): Xaa can be any naturally occurring amino acid
  misc_feature (134)..(134): Xaa can be any naturally occurring amino acid
MSDTDEHHFESKADSGASKTYPQQAGAIRKGGHIVIKARPCKVVEVSTSKTGKXHGHAKCHFVAIDIFNGKRKLEDIVPSSHNCDVPXLTAKDYQXLIDITDDGYVSLLTESGNTKDDXKLPTDDVLAWQIKTXLMARTDLSVMSAMGEKQICAVKEIGGGK

SEQ ID NO: 6040 - protein, 446 aa, Aeropyrum pernix K1
MAGDSSSDDIGGARIIEIYRRYGGKIEVMPKVPVSGVEDFAIWYTPGVAEASIRINKDPDESFELTSRWNMVAIVTDATRVLGLGKLLPEAAYPVMEGKALIFKLFGGVDAVPIVHRRREPGAFASLVKDLEPSFGGVNLEDIESPKCFYLLDFLRMELEIPVWHDDQQGTAAASLAGLINAFKIVGKNLRESRIVLLGAGAANIALYRFLKAYGVNPRNIVVVDSKGVLHPEREDMDRLLFSNRYKYEIALETEGGGLAPGSSLEEALRGADALVAASRPGPGVVKKEWIRGMSRDPIVFALANPTPEIWPWEARDAGARVVATGRSDLPNQVNNALVFPGVFRGALDVRSRAITDGMAIAAAEEIARYTEEEIGIEEDRILPPITDWQVHYRVAAAVAWAASREKVARKPRTYAEELENARAIIETTRRKYGALLSAGLIERLV

SEQ ID NO: 6041 - protein, 335 aa, uncultured marine gamma proteobacterium EBAC31A08
MFQTFALKIFFYMPIWLLKIIFYRKRTVIRGHQFDAQSAALLSLLPKKDLSELLDGEIAKARITLEEARIQNKVSLTPSIQVRKVDHILPKHDLILREYKPHQEDLKKVILYFHGGGYVLNSVNTHDDMVSYMSDKIGVKFYSLDYRLSPESKYPDSLDDALDAFSWLIGQGYGPGDISVCGDSAGAHLAASLCHYLAEQNKDLPSSQLLIYPMCDPSCSSESYNLLSSGYLLTKKTMIWFWDKLRTSEVNNNDSAFNLLKFNFEKTLPPTIIVTGGFDPLCDDGEKYAYLLHKGKHNVKQLHYPTMFHGFASMTKLKAAQIAVEDFLKEYKKIL

SEQ ID NO: 6042 - protein, 1212 aa, Candida albicans SC5314
MNNQDPDSQYHNKKVYPPNLPSIPPPPQQPLSGRPATPRMLRSISGTLKSKTELAHSDKGQESNNETKNSNSPHYVPDTHTRQPPPESLKSNIQAPTAVHGNQQKGSLLPPPSIPNPNTMKPAPTPTGVDQPPAKQKPSPAPKQPQPQQQQQQQQQQQFHRKSIGDWNFVKTIGAGSMGKVKLAQHNATHEICAVKIIPRAAKLYQRAHANDPPPQTTQEAAQRHKEFEKEVARDRRTIREGALGRLLYHPFICRLYEMVPMTNHYYMLFEYIEGGQMLDYIVAHGSLKERHARKFARGIASALDYCHRNNVVHRDLKIENIMINEKGDIKIIDFGLSNLYAPKNLLKTYCGSLYFAAPELLSAKPYIGPEVDVWSFGVVLYVLVCGKVPFDDQSVSVLHEKIKKGNVEYPAFLSRECVSLLSRMLVVDPTKRASLYEVCSHPWMNKGYDYKVNNYLPRREPLRLPLDPEIIKTIANFELGTVQGVADELTSILTSVEYQMSCENWYKITETGREYASSQNAQILPDPTGGFHPLVSIYYLVDEMRKRKKAKEEALKAQRRAQVPTIAVPTPKQQQQQQPQPAQPQPQPQPEVSQPLPEPKPVPPEEIINPAVATQAQANMTAPKIVETFSETPQRTLDPSKQSVDEKPSAPGPSIAVPEQAHTTSVPSSFVKTQTSIDEDQLSIPEQQSPRTSTPQTLDPAKVVGGSSGSAISAPNAGSGAGFNSLLRRLSSKKYKGASSPKRSTSPSPNVEGLSPQPTKADPMVRRGVSMKVTAKEKQTNTRPPKSELIKKKPQHGRSSSTSNKMQGFIPVEYLPPLPTIDTNTNTIVSDGAKQQNLTVPSTARHMHPTARAKSVGGGHMRKDSYGRVSHGSQNPLPPLPTSMASQNSQEVVGKDTSEGFFDDVQLDDVGYQEVPQLTESEIIEQYNISKPNSMPSIEHCKTLFLKGFFSVQTTSAKPLPVIRYNIINVLSKLGVKFQEVKGGFVCMHTPSVQPSHSNELDEENKLYGDAFKSKSSDSFEAAEPEGSKTPSRQPSLQLPSHTPTTPSGPKSHKSSNSIGSIGGNVPRRKFSIGNAFNTYRKKNGSQVMMPPNTPATAKVIHGLYDDDDKERNGEDDDDEDDYGYDDSADSLNGYGGGSDMLISSRIEQRAKHQRTVSSSSQKASKSPLKFEIHIVKVPLVGLYGVQFKKILGNTWNYKTLASQILNEMNL

SEQ ID NO: 6043 - protein, 323 aa, Oryza sativa (japonica cultivar-group)
MAAVPEVALRHGAGRPMPAVGVGTADSAATSPETKRGAALAALEVGFRHFDTAALYGTEAPLGEAIAEATRRGLVASREEVFVTTKLWCTQCHPGLVLPSLRESLRNLQMEYVDLYLVHWPISVKPGPPMLPVKREDAVPFDFEGVWRAMEECHRLGLAKAIGVSNFTTKHLDKLLAVATIPPAVNQVEMNPVWQQRTVREYCAAKGIRVAAYSPLGGQNWIGEGNDVMESPVLADIARARGKSIAQVSLRWIHEQGVTPIPKSYNKERLKQNLEIFDWELTKEDRLKISQIPQKKIVTAARMFSPDGEFASVDLSDMEIVEE

SEQ ID NO: 6044 - protein, 128 aa, Aquifex aeolicus VF5
MATLTIDEIVEAIKNMSVLEVAELVKRLEEEFGVSAAAMVAAAPAAGAAAGAPAQAEEKTEFDVILKSPGKNKIQVIKVVREITGLGLKEAKELVDNAPKPIKEGVPKEEAEQIKKKLEEAGAEVELK

SEQ ID NO: 6045 - protein, 469 aa, Methanothermobacter thermautotrophicus str. Delta H
MTAMCAIAGFRGDDAPVKVQEMLDVLRHRGPDATGIYHDSRIVIRTATGEDVKEAPQSAEIAVGHNLLSIVGGPQPVSGDGVLVFNGEIYNQEELNWTGSDSELILDLIEGHGGDLEDALRFTVNKIDGDYAFAYTDGENLASRQDPVGVKPLYHSGEAFASEKKALWRIGLRNVETLPPGHAMINGVKVKLRGLPRAEPSDAEPEELRENLKSALRESVERRVRGLDEAALVFSGGVDSTLLAVLLDEHIDVRLYTVGLPGSSDPQFASRAAADLGMELEVLEVTEDTIREALPHVLGAIEEYNLMKIGVAMPLYLASEAASADGYRVMFSGQGADELFAGYHRYRRLLAEGRLEDALRHDLENIHHVNLERDDAVTMANSVELRVPFLDLQLIGVALTIPADLKIRGPEDELRKRILREAALEMGVPEYIAMRPKKAAQYGSGIDKVLRRKVLPGFDHETFLRRLMF

SEQ ID NO: 6046 - protein, 438 aa, Crocosphaera watsonii WH 8501
MTALLIRHPRILLPDGEFLLGDILIQQGKIVQIAPEITAPDGSNIIDATGLTLLPGVIDPQVHFREPGLEHKENLFTASCACAKGGVTSFLEMPNTKPLTTTQAPLDQKLQLASEKCLVNYGFFIGATPENLPDLLTTNPVCGIKIFMGSSHGALLVSREAEIEPIFARGDRLIAVHAEDQARILQRRQEFKGITDPAIHSQIQDETAALNATKLALKLSQKYQRRLHILHLSTGIEAEFLRENKPSWVTAEVTPQHLLLNTEAYEKIGTLAQMNPPLRSPENNQILWQALLDGVIDFIATDHAPHTLEEKAKGYPNSPSGMPGVETSLPLMLTQAMAGKCSVSQVSSWMATKPAEAYKIPNKGLIKTGYDADLVLVDLDNYRPVLREDLQTKCGWSPFEGWNLTGWPIITIVGGNIVYERGKLNTEVRGKALQFGKN

SEQ ID NO: 6047 - protein, 447 aa, Eremothecium gossypii
MASQEEFYRTQIFGTVFEITNRYADLNPVGMGAFGLVCSAVDTYTQQPVAIKKIMKPFSTAVLAKRTYRELKLLKHLRHENLICLEDIFLSPLEDIYFVTELQGTDLHRLLQTRPLEKQFLQYFLYQILRGLKYVHSAGVIHRDLKPSNILINENCDLKICDFGLARIQDPQMTGYVSTRYYRAPEIMLTWQKYNVEVDIWSAGCIFAEMIEGKPLFPGKDHVHQFSIITDLLGSPPKDVIDTICSENTLKFVTSLPHRDPVPFTERFKNLKPDAVDLLEKMLVFDPKKRITAGDALTHPYLAPYHDPTDEPVADAKFDWNFNDADLPVDTWRVMMYSEILDFHQVPDSQINPNDTFDDQVAAATAAAEAARQQQQQKQQQQKQQQQRHQGVEHGAQHVQLQHGAKQLSADPLVGDSNGGIPLNVSAANETLNNFANQAAQYATDFE

SEQ ID NO: 6048 - protein, 316 aa, Mycoplasma mycoides subsp. mycoides SC str. PG1
MSAEFNWFPGHMNKTLKDIEARIEIVDVVVEVIDSRAPYSSKNATFKKLLKDKPIVYIFSKADIADSKVTQQWVDYYIKNENSKVIVLYNRHTDIVNELINVINELTIKKREKDKAKGIKNTLINALVIGIPNVGKSTFINRVIKGKNVKVGNKPGVTRGIQLIHLNPFINLLDTPGVLPSKLESETVAVNICAINSIKDNVFPKERVAAKLMSYIYNNYDDIIEKYYKINLRLQKPISVIDSYKIFETIGIEKKWYVTEDILDMERILSSFLKDLDKGKLGKISFEKVLEVVPEEIQKAINPEDNKQDNDISSLW

SEQ ID NO: 6049 - protein, 400 aa, Streptomyces clavuligerus
MSNQEFAQRWQGVMIDSYGTPGLSFVRGEGSTLWDADGTAYTDFVSGLAVNALGHAHPAVVGAVSRQIASLGHISNFYSAEPTITLAERLIELFGRPGRVFFCNSGAEANETAFKIGRLTGRSRIVAAQSGFHGRTMGSLALTGQPAKREPFLPLPGDVTHVPYGDAEALRAAVTEDTAMVILEPIQGESGVVVPPKGYLRAAREITEATGTLLVLDEVQTGIGRTGHWFAAQAEGVEADVVTLAKGLGGGLPLGAAVAFGRAAELMTPGHHASTFGGNPVSCARTRVLDTIAADGLLDRVKQLGSAPDEWSVRDAAAIRWSPMSGAGLMLGIVLNEPLAPQVQLAAQKAGFLVNVPAPDVVRLIPPLVIEETEVDAFLQALPGLLDAVHERDREGQTGE

SEQ ID NO: 6050 - protein, 56 aa, Zea mays
  misc_feature (33)..(33): Xaa can be any naturally occurring amino acid
MSDGTATCIDIILAIILPPLGVFFKFGCGVEWXQRRVRGFFGYLPGIIYAVWAITK

SEQ ID NO: 6051 - protein, 323 aa, Oryza sativa (japonica cultivar-group)
MADEHEWWNSPCSARTGDDEAACSTADADESAVGSTPMSFGHGGQPASLSDAAASSSSSSFLLAGQHMDYWTQDFMGGRAAAAATASFDTLLQLQLQGGDAASRRLLLGDHAAAPPRHLVVPGAPYGGGGGDDTAAPPRGLSPTPYEAADNLQQQQSFPGGHHVVSNTDRLHDHHQDAGSPSPATRSSPGSPAAAKKPRIEAPSPMPTFKVRKEKLGDRITALQQLVSPFGKTDTASVLHEAIEYIKFLHDQVASLSSPYLRCGRPVQLQHQQGSHKVNGNCEGKQLDLRSRGLCLVPVASTYTVASETATEFWHPTFGGTFR

SEQ ID NO: 6052 - protein, 347 aa, Listeria innocua Clip11262
MKNAIKWIAIGFAGIILLPLVIVFFIYKKAVGKKEYDPEVLENLDEASQEFVKNTSPLSDVDSRYKYMRLATKALPSAKDIEIGDVENKKIDGPAGKIPIRIYTPKEDGPFEIIVYYHGGGFVLGGLQTHDAIARKLVQTTGARVVTVDYRLAPENPFPAAVEDAYAALLWVQNHRTSLRAKSSDIIVAGDSVGGNLATVVTQIAKAKGKPNVTAQILLYPATDIFSRDASVLYPSMDEFAEGYVLTKESLDKFFKLYIANSSDRKYDPLIAPIRSKDLAGLPKTFIATAEFDPLRDQGEAYAKKLKDAGVEVFAKRFEKVPHGFMTTTSEATDETYELISEFLEEK

SEQ ID NO: 6053 - protein, 494 aa, Burkholderia fungorum LB400
MNANPKHVADPTRLRNQNLIGGQWKAALSGQSIAVENPANEEIIAQVPRGQQEDIDEAVKVARATFESAAWRKIRPIDRGRILENIARKVEEHAEELSWLESLDTGKAISFARVIDLPSTVDVFRYMGGWCSKLGGTTPPISFDGKEYHAYTRREPVGVVGAITPWNYPLALGSWKIASALAAGCTMVLKPTELTPLSTLRLAELCLEAGLPEGALNVVNGYGHEAGEALARHPDIDKITFTGSTVVGKKIVEYALGNMKRVTLELGGKSPSIVFDDADLDQVGLGAALAVFFNSGQICFAASRLFVQASVYDRVVEAVAAVASQFKVGNGQDTDTMLGPLVSRKQQERVLGYVQSGIEQGASLIYGGQKIGDKGYFLQPTVFADADQSMKIAQEEIFGPVVSIIRFKDEVEAIRLANDTTYGLAANIWTRDIKKAHRVAHRLQAGSVWINCHGVIDPAAPFGGFKQSGWGREVSEEGLAAYTEIKTVCALLDD

SEQ ID NO: 6054 - protein, 484 aa, Agrobacterium tumefaciens str. C58
MKNLHRRDLIEDRAFVNGAWVERDQMFAIVDPAGGDHLADVASCTLNDVDFAIDAASKAFAGWRDMLPVDRGDILRNWSARMRENAHDLATIISAEQGKPLAESRGEIAYAANFLDWFASEGERSYGETIPTHLKGSNLSVRMQPIGVTVAITPWNFPSAMIARKAGAALAAGCTMIVKPAPETPLSALALARLAEESGVPPGVLQVLPGEAAPLARRLLENTEVRAFSFTGSTEVGRILLTQSAATVKKASLELGGHAPFIVFADADLTEAVKGCLGAKFATSGQDCLAANRIYVQRSLYPRFVERFAEATSRLTVGHGLETGVDIGPMTRPSVAEKCRQQVAQALSAGARLVCGGQDSPLGGNFVTPTVLADVTDDMLIAREETFGPVAAILPFDDEAEVIRRANATEMGLAAYLYTNDLGRAMRLTDQLEYGMVAVNTPKFTGAPIPFGGWKQSGLGREGSRHGLMEYLEPKYVCFGNLAA

SEQ ID NO: 6055 - protein, 273 aa, Brassica napus
MVLSQTTTESNEPVSSTFGSRYALTALPKYEIGESSIPKDAAYQIIKDELMLDGNPRLNLASFVTTWMEPECDKLIMDSINKNYVDMDEYPVTTELQNRCVNMIARLFNAPLGDTETAMGVGTVGSSEAIMLAGLAFKRNWQNKRKAEGKTYDKPNIVTGANVQVCWEKFARYFEVELKEIKLSEGYYVMDPEKAVEMVDENTICVAAILGSTLTGEFEDVKRLNHLLVKKNDATGWNTPIHVDAASGGFIAPFIYPELEWDFRLSLVKSINV

SEQ ID NO: 6056 - protein, 327 aa, Triticum aestivum
  misc_feature (239)..(239): Xaa can be any naturally occurring amino acid
QFLGQQQPFPPQQPYPQPQPFPSQQPYLQLQPFPQPQLPYSQPQPFRPQQPYPQPQPQYSQPQQPISQQQQQQQQQQQQQQQFPQQQQPLLPQQPPFSQQQPPFSQQQQQPPFSQQQQQPILLQQPPFSQHQQPVLPQQQIPSVQPSILQQLNPCKVFLQQQCSPVAMPQSLARSQTLWQSSCHVMQQQCCRQLPQIPEQSRYDAIRAIIYSIVLQEQQHGQGLNQPQQQQPQQSVQGXVSQPQQQQKQLGQCSFQQPQQQQQQQQQQQQQQQEQQILQQILQQQLIPCMGCCIAATQHSAWEITSFATKYLPAVARIVLSAPMADP

SEQ ID NO: 6057 - protein, 506 aa, Glycine max
MLSQKQGEDAIITNLNHTEHEGGSTSTREEEEQDHSMFNFKSLLWHGGSVWDAWFSCASNQVAQVLLTLPYSFAQLGMVSGILLQIFYGLIGSWTAYLVSVLYIEYRTRKEKENVSFKNHVIQWFEVLDGLLGRYWKAVGLAFNCTFLLFGSVIQLIACASNIYYINDKLYKRTWTYIFGACCAFTVFIPSFHNYRIWSFLGLGMTTYTAWYLAIAALIHGQVENVTHTGPTKLVLYFTGATNILYTFGGHAVTVEIMHAMWKPQKFKYIYLLATLYVFTLTIPSAAAVYWAFGDELLNHSNAFSLLPKNRFRDAAVILMLIHQFITFGFACTPLYFVWEKVIGMHDTKSICIRALARLPVVIPIWFLAIIFPFFGPINSAVGALLVSFTVYIIPAIAHMLTYRKASARQNAAEKPPFFMPSWTAMYVFNAFIVGWVLVVGFGLGGWASMINLINQIDTFGLFAKCYQCPDPPPPAGAPPPLTHPVVEGGVDLVEPWAPPNLLKII

SEQ ID NO: 6058 - protein, 435 aa, Bdellovibrio bacteriovorus HD100
MSKVTLFWFRRDLRLDDNAGLYHALKERSAVLPLFIFDSEILENLDDPADARVTFIYEQIQDMKQQLNAKKSDLIVRHGKPLEVLKTLSDEMAVEAIYANHDYEPAARKRDEKVAAWAAKAGIEFLTFKDQCLFEKDEILTDARKPYTVYTPYRNKVLANLSEFYLKSYPNDLYESSYAKVKKAEPLLTLKSLGFERSNIEFPPMDLSTKMLKTYHATRDFPADEKGTSHLGLHLRFGTLSVRELAREAKKYSPVWLSELIWRDFFMQILWHFPQVENQSFRPEYDKIAWRKSKADFQKWCEGRTGYPLVDAGMRELNATGYMHNRVRMVVASFLCKHLLIHWYEGERYFAKKLLDYDLSANNGNWQWAAGSGCDAAPYFRIFNPQTQFEKFDPDGKYVQKWVPEYGTDEYPQPMVDHNEARGRCLQAFTKVLKK

SEQ ID NO: 6059 - protein, 160 aa, Glycine max
MSDEEHHFDSQADAGASKTYPQQAGTIRKNGYIVIKSRPCKVVEVSTSKTGKHGHAKCHFVAIDIFNGKKLEDIVPSSHNCDVPHVNRTDYQLIDISEDGFVSLLTDNGNTKDDLKLPTDEALLAQIKDGFSEGKDLVVSVMSAMGEEQICSLKDIGPKN

SEQ ID NO: 6060 - protein, 172 aa, Zea mays
MAAGHHGQPPDGDDGRPSVVGGEQDRLLPIANVGRIMKQILPPNAKISKEAKETMQECVSEFIGFVTGEASDKCHKEKRKTVNGDDLCWAFGALGFDDYVDPMRGYLHKYREVEGDRAAAAASSSRGGGDHHPASASTSTSPPAAAPPAGHFMFGAAAIDRPDNNTSSARPF

SEQ ID NO: 6061 - protein, 275 aa, Triticum aestivum
  misc_feature (44)..(44): Xaa can be any naturally occurring amino acid
MEAETAAKRARENEGAAAADGAGEQAGISAVIPGWFSEISPMWXYQEMITHLPLCSIKDPKKVLVIGGGDGGVLREVSRHSSVEQIDICEIDKMVVDVSKQFFPHLALGFEDPRVSLHIGDGVAFLKNAPEGTYDAVIVDSSDPVGPAQELFEKPFFESVSRALRPGGVVCTQAESIWLHMHIIEDIVTNCRQVFKGSVNYAWTTVPTYPSGVIGFMLCSPEGPSVDFQHPVFSIEEDEYSPKSQGQLKFYNSEFHPASFCLPSFARRVIEAQAN

SEQ ID NO: 6062 - protein, 175 aa, Triticum aestivum
MAPAVMASSATTVAPFQGLKSTTGLPISRPSGSAGLSNVSNGGRIRCMQVWPIEGIKKFETLSYLPPLSTEALLKQVDYLIRSKWVPCLEFSKVGFVFREHNSSPGYYDGRYWTMWKLPMFGCTDATQVLNEVEEVKKEYPDAYVRVIGFDNMRQVQCVSFIAFRPPGCEESGKA

SEQ ID NO: 6063 - protein, 122 aa, Staphylococcus aureus subsp. aureus MRSA252
MANHEQIIETIKEMSVLELNDLVKAIEEEFGVTAAAPVAVAGAAGGADAAAEKTEFDVELTSAGSSKIKVVKAVKEATGLGLKDAKELVDGAPKVIKEALPKEEAEKLKEQLEEVGATVELK

SEQ ID NO: 6064 - protein, 207 aa, Vibrio vulnificus CMCP6
MSSVIAQKDENVVWHQHAVTKTQRADLKQQKPAVLWFTGLSGAGKSTVAGALENRLAEQGFHTYLLDGDNVRHGLCSDLGFSTQDRRENIRRIGELAKLMADAGLIVLTAFISPHRAERQLVRDLLPEGEFIEVFVNTSLEVCEQRDPKGLYKKARAGEIANFTGIDSEYEVPLNPEIDLPAGEKGIEALVDLLVEQLTLRGVISPR

SEQ ID NO: 6065 - protein, 361 aa, Zea mays
MAWRANPKPSQAEGKRGCERGAPSHYPAAASPHTPPSRAQGFGMEADAAAKRTRESGEDATAAGISAVIPGWFSEISPMWPGEAHSLKVEKVLFQGKSDYQNVMVFQSSTYGKVLVLDGVIQVTERDECAYQEMITHLPLCSIKDPKKVLVIGGGDGGVLREVSRHSSVEQIDICEIDKMVVDVSKQFFPHLAVGFEDPRVSLHIGDGVAFLKNAPEGTYDAVIVDSSDPIGPAQELFEKPFFQLVARALRPGGVVCTQAESIWLHIHIIEDIVVNCRQVFKGSVNYAWTTVPTYPSGVIGFMLCSTEGPAVDFQHPVFNIEEDEHPMKSKGPLKFYNSEIHTASFCLPSFAKRVIESKAN

SEQ ID NO: 6066 - protein, 439 aa, Glycine max
MDRRTGSTRNILFNKYEIGKLLGQGNFAKVYHGRNLSTNESVAIKVIKKERLQQKERLVKQIKREVSVMSLVRHPHIVELKEVMANKAKIFLVVEYVKGGELFAKVAKGKMKEDVARKYFQQLISAVDFCHSRGVTHRDLKPENLLLDENEDLKVSDFGLSALPDQRRSDGMLLTPCGTPAYVAPEVLKKKGYDGSKADIWSCGVILFALLSGYLPFQGENVMRIYSKSFKADYAFPEWISPAAKNLISNLLVVDPQKRYSIPDIMKDPWFQIGFLRPIAFSMKDDDGNSSSSNNEDGELTGAKPARPSYNAFEIISSLSNGFDLRNLFETRKRSPSMFISKFSASAVMAKLEGVAKKLNFRVTGKKEFVVRMQGATEGRKGKLAMTVEVFEVAPEVAVVEFAKSAGDTLEYIKFCEDQVRPSLKDIVWSWQGDANCHQ

SEQ ID NO: 6067 - protein, 356 aa, Triticum aestivum
MGSIAAGADEDACMYALQLVSSSILPMTLKNAIELGLLETLMAAGGKLLTPAEVAAKLPSAANPEAPDMVDRMLRLLASYNVVSCTTEEGKDGRLSRRYGAAPVCKYLTPNEDGVSMAALALMNQDKVLMESWYYLKDAVLDGGIPFNKAYGMSAFEYHGTDPRFNRVFNEGMKNHSIIITKKLLEVYKGFEGLGTIVDVGGGVGATVAAITAHYPTIKGINFDLPHVISEAPPFPGVTHVGGDMFQKVPSGDAILMKWILHDWSDEHCATLLKNCYDALPPHGKVVLVECILPVNPEATPKAQGVFHVDMIMLAHNPGGRERYEREFEALAKGAGFKAIKTTYIYANAFAIEFTK

SEQ ID NO: 6068 - protein, 509 aa, Candida albicans SC5314
MDQQEAPIYYGRSVNKVYNQEFIIDSRFKIVKELGHGAYGIVCSAKYDNGSKKVPDSNNGNASSSANASFVAIKKITNIFSKNILCKRALRELKLLQFFRGHKNITCLYDLDIIPNPMTGEFNEIYLYEELMECDMHQIIRSGQPLSDQHYQSFIYQVLCGLNFIHSADVLHRDLKPGNLLVNADCELKICDFGLARGFSENPDENAGFMTEYVATRWYRAPEIMLSFTNYTKAIDIWSVGCILAELLGGKPLFRGKDYVDQLNQILMILGTPPESTLQRIGSHRAQNYVRSLPITRKASYEELFPDANPLALDLLERMLTLDPRERITVRDALNHKYLELWHDPKEEIECQVKFDFKSFETVDGLDEMKQLIMDEVQKFREFVRKPIEEQQRIQMQLHMQKREEQRQEEEEKELLEQQRQFPAQESMDISQTPYNNLETNIGTPQVEDDYPRPQELDEFTFSNLESSSSMNLFQDMAKPSGEEYIKLEEELGFGLDGAMFNNYCNDHQ

SEQ ID NO: 6069 - protein, 275 aa, Escherichia coli O157:H7
MANPTVIKLQDGNVMPQLGLGVWQASNEEVITAIQKALEVGYRSFDTAAAYKNEEGVGKALKNASVNREELFITTKLWNDDHNRPREALLDSLKKLQLDYIDLYLMHWPVPAIDHYVEAWKGMIELQKEGLIKSIGVCNFQIHHLQRLIDETGVTPVINQIELHPLMQQRQLHAWNATHKIQTESWSPLAQGGKGVFDQKVIRDLADKYGKTPAQIVIRWHLDSGLVVIPKSVTPSRIAENFDVWDFRLDKDELGEIAKLDQGKRLGPDPDQFGG

SEQ ID NO: 6070 - protein, 365 aa, Aspergillus fumigatus
MAEFVRAQIFGTTFEITSRYNLQPVGMGAFGLVCSARDQLTGQPVAVKKIMKPFSTPVLSKRTYRELKLLKHLRHENIISLSDIFISPLEDIYFVTELLGTDLHRLLTSRPLEKQFIQYFLYQILRGLKYVHSAGVVHRDLKPSNILINENCDLKICDFGLARIQDPQMTGYVSTRYYRAPEIMLTWQKYDVEVDIWSAGCIFAEMLEGKPLFPGKDHVNQFSIITELLGTPPDDVIQTICSENTLRFVKSLPKRERQPLANKFKNADPEAVDLLERMLVFDPKKRIRAGEALAHEYLSPYHDPTDEPEAEEKFDWSFNDADLPVDTWKIMMYSEILDFHNIDQGNDAGQVLMEGGVAQAQQNYA

SEQ ID NO: 6071 - protein, 425 aa, Azoarcus sp. EbN1
MKIRIANGRVIDPANGLDDTRDMYLADGKIVAHGRVPEGFAAERTIDATGLVVAPGLIDLAARLREPGFEYRATLESEMDAAMAGGVTSLAIPPDTDPVLDEPGLVEMLCYRAKKLNRAHVYPVGALTIGLNGERLSEMAELVEAGCVAFGQANVPVVDSAVLLRAMQYAATFGFRVWLQPLAPFLSRGFAHDGEVATRLGLPGIPTAAETIALYAHIQLARATGARLHVTRLSSAEGLALIRQARADGLDVTCDVSINHLHLSEMDIGYFNSNCHLVPPLRSQRDRDALRQGLADGSIDALCSDHTPVDDNGKLTPFSESEAGATGLELLLPLTLKWAQETGLPLGQALARVTSDAARIVGITKAGHLGAGARADLCLFDPAAHTTVRRDTLRSQGKNTPFLGLELPGRVHYTLVEGQVMHEPS

SEQ ID NO: 6072 - protein, 419 aa, Zea mays
  misc_feature (263)..(263): Xaa can be any naturally occurring amino acid
MILSMLAVQPYSPVTRQQGESTTRSETTTFSTLSPSTSLITLHRPSNLKAMADLIIPPSPVMFPEDQDSWNVQLFRSIDGGACFGFPSTPEAAAQSGLVSGKNNVLDRSIHDAYIHAIRRAKHFIYIENQYFLGSSFAWKADGIKPEEIEALHLVPRELSLKIVSKIEAGEHFAVYVVLPMWPEGPPASGSIQGILDWQRRTMEMMYNDISVALDAKRIDRDPRDYLTFFCLGNREVKMDGEYEPSGRPLDGTDYARAQNARXRFMIYVHSKMMIVDDEYIIVGSANINQRSMDGGRDSEIAMGAYQPCHLNTKGQVARGQVHGFRMSLWYEHLGMLHDDFLNPGSLECVRRVNQMADRYWDLYAGDSLDADLPGHLLRYPVTVTKEGTVTELPGAKFFPDTQALVLGALSKLPPILTT

SEQ ID NO: 6073 - protein, 483 aa, Azotobacter vinelandii
MQLNDARLFRQQAYIEGRWVDADGGQTLAVNNPASNEILGGVPKMGAAETRRAIEAAERALLAWRALTAKERAGKLRCWFELLLEHQDDLARLMTLEQGKPLAEARGEIAYAASFLEWFAEEAKRIYGDTIPGHQADKRILVIKQPVGVCAAITPWNFPAAMITRKAGPSLAAGCTLVLKPASQTPFSALALAELAERAGIPAGVFNVVTGSAAEIGGELTANPIVRKLSFTGSTEIGRQLMAQCARDIKKVSLELGGNAPFIVFDDADLDAAVEGALASKYRNAGQTCVCANRLYVQDGVYDAFAEKLRAAVARLKVGNGLEEGVSIGPLIDDKAVGKVEEHIADAVSRGARVIAGGRPHALGGTFFEPTILAEVPADARVAREETFGPLAPLFRFGDDDEAIALANATEFGLAAYFYARDLSRVFRVAESLEYGIVGVNTGLISTEVAPFGGVKASGLGREGSKYGIEDYLEIKYLCLGGI

SEQ ID NO: 6074 - protein, 220 aa, Capsicum annuum
MESEHEKSETPNFKRPLKKKCENAKRFTDEQVKLLESMFKLGTKIEPREKLQLARDLGLQPRQVAIWFQNKRARWKSKQLEHEYRILQSKFDHLNTQFESLKIEKERLLIELETLNDQLGNKLARGSKSQDSRDSELHTSPENGFTDLLELKHCAGCSNSRFGHKSVNEEDDETTEETDKYFTPKEEAEFWNLDELGDNNSLEHWCVGLGSISNSKLWDF

SEQ ID NO: 6075 - protein, 445 aa, Streptomyces avermitilis MA-4680
MSDVELVLRSTRVITPEGTRPAAVAVAAGKITAVLPHDAEVPAGARLEDLGDDVLLPGLVDTHVHVNDPGRTHWEGFWTATRAAAAGGITTLVDMPLNSLPPTTTVGNLRTKRDVAADKAHIDVGFWGGALPDNVKDLRPLHDAGVFGFKAFLSPSGVDEFPELDQERLARSMAEIAGFGGLLIVHAEDPHHLAAAPQRGGPRYTDFLASRPRDAEDTAIANLLAQAKRLNARVHVLHLSSSDALPLIAGAKAEGVRVTVETCPHYLTLTAEEVPDGASEFKCCPPIREAANQDLLWQALADGTIDCVVTDHSPSTADLKTDDFATAWGGISGLQLSLPAIWTEARRRGHSLEDVVRWMSARTARLVGLAQKGAIEAGRDADFAVLAPDETFTVDPAALQHRNRVTAYAGKTLSGVVKSTWLRGERIMADGEFTEPKGRLLSREP

SEQ ID NO: 6076 - protein, 119 aa, Pennisetum glaucum
KTKKKLEDKWIADSDVIAQALEEKYPEPPLATPPDKAQLGQKYFPPFIGFLKSKDSSDGTEQALLDELTSFDNYLKDNGPFINGVTISAADLALGPKLYHMEIALGHYKNCLFQIHFHM

SEQ ID NO: 6077 - protein, 177 aa, Zea mays
MAGGGVEDVYGEDRATEEQLITPWAFSVASGYTLLRDPRHNKGLAFSEAERDAHYLRGLLPPALASQELQEKKLMQNLRRYEQPLHRYIAMMDLQERNERLFYKLLIDNVEELLPVVYTPTVGEACQKYGSIYRRPQGLYISLRDKGKILEVLKNWPERSIQVIVVTDGERILGLGD

SEQ ID NO: 6078 - protein, 398 aa, Ustilago maydis 521
MASLRTGLRVAQPLRASARNFATRPSIRSSVRHYSSPAPGSPPPPQPSSSSSTSKVLLTSVAIAAAAGGAFLAFGRDDKVSILGVGANGANKFQGSKGSVGPATTSAHSKADYQAVYNAIAEQLEANPDYDDGSYGPVLVRLAWHASGTYDKNSNTGGSNGATMRFAPESEHGANAGLGAARDFMEKIHQKFPWITYSDLWTLGGVAAIQELGGPKIPWRPGRKDATADKCTPDGRLPDGDKGPDHLRYIFYKMGFNDQEIVALSGAHALGRCHTDRSGFDGPWTFAPTSFTNEYFNLLMNEKWNIRKWNGPPQFEDKSTKSLMMLMTDMALVQDPSFKKHVQRYAKSEDEFFNDFRSAYAKLLELGVPAENFKAFETKLDGGKPFEFATSAEQENAN

SEQ ID NO: 6079 - protein, 75 aa, Brassica napus
  misc_feature (7)..(7): Xaa can be any naturally occurring amino acid
  misc_feature (45)..(45): Xaa can be any naturally occurring amino acid
  misc_feature (53)..(53): Xaa can be any naturally occurring amino acid
  misc_feature (59)..(59): Xaa can be any naturally occurring amino acid
EKEEVVXAYSMLSSAAVVTSPAQATMGAPFTGLKSSSAFPVTRKXNNDITSIXSNGGRXVPSIFASINLPSLPLP

SEQ ID NO: 6080 - protein, 126 aa, uncultured marine gamma proteobacterium EB000-45B06
MATSKEDILKAIEEMSVMDLVDLISDIEEKFGVTAAAAVAAAPAAAAGGDAEAAEEKDAFDVVLNAAGDQKVQVIKAVRAITGLGLKEAKDMVDGAPSTVKEGASKDDAEAMLKQLTEAGATAELK

SEQ ID NO: 6081 - protein, 133 aa, Brassica napus
MEGVGSRLSRTSSRYSGPAATAVFSGRVRKWKKKWVRVSTSPVGVFRASKSNGRSNNNNNSSSNSPHHLLLHKWTPLPSDANGSGETEEPPKRRFRYAPIAMFEHRERVGAKDSEVEAEETDEFDNDSPLPKA

SEQ ID NO: 6082 - protein, 230 aa, Zea mays
  misc_feature (151)..(151): Xaa can be any naturally occurring amino acid
  misc_feature (202)..(202): Xaa can be any naturally occurring amino acid
MTKNYPAVSEEYQKAIEKCKRKLRGLIAEKNCAPIMVRLAWHSAGTFDCASRTGGPFGTMRFDDELAHGANNGLHIALRLLEPIREQFPTISHADFHQLAGVVAVEVTGGPEIPFHPGREDKPQPPPEGRLPDATKGCDHLRQVFLKQMGXLTDQDIVALSGAHTLGRCHKDRSGFEGAWTSNPLIFDNSYFKELLSGEKEXLLRLSLTKPLLDDPVFRPLVEKYAADDV

SEQ ID NO: 6083 - protein, 400 aa, Magnaporthe grisea 70-15
MATTQTTQGQIQPCRYKVGKTLGAGSYSVVKECVHIDTGRYYAAKVINKRLMAGREHMVRNEIAVLKKVSMGHQNILTLVDYFETMNNLYLVTDLALGGELFDRICRKGSYYESDAVDLIRATLSAVAYLHDHGIVHRDLKPENLLFRTPEDNADLLIADFGLSRIMDEEQFHVLTTTCGTPGYMAPEIFKKTGHGKPVDIWALGVITYFLLCGYTPFDRDSDLEEMQAILNADYSFTPIEFWRGVSDSAKDFIRRCLTIDPTKRMSAHEALQHPFVAGYLADKGANLLPTVKKNFNARRTLHAAIDTVRAINKLREGQGLNGQRLMAGVKSREPNKAAAAAAAAASIPTSTGEVGTVGAATHKDSGYGSTRPDALRPGVETNKVVETSKGLWTGVGSRG

SEQ ID NO: 6084 - protein, 82 aa, Triticum aestivum
  misc_feature (54)..(54): Xaa can be any naturally occurring amino acid
  misc_feature (61)..(61): Xaa can be any naturally occurring amino acid
  misc_feature (73)..(73): Xaa can be any naturally occurring amino acid
MSNDAEHDTTFESADAGASLTYPMQCSALRKNGFVVIKGRPCKIAEMSTSKTGXKHGHAKXHLVAIDIFTGKXLEELCPSTQ

SEQ ID NO: 6085 - protein, 435 aa, Burkholderia cepacia R1808
MSRQQQALELQKQWDTDPRWTGIKRGYTADDVVRLRGSIAVEHTLAKRGAEKLWRLINEEPFVNALGALTGNQAMQQVKAGLKAIYLSGWQVAGDANVAGEMYPDQSLYPANSVPLVVKRINNTLTRADQIQWSEGKNPGDDGYVDFFAPIVADAEAGFGGVLNAFELMKAMIEAGASGVHFEDQLASVKKCGHMGGKVLVPTREAVAKLSAARLAADVMGTPTVLVARTDAEAADLITSDIDDNDKPFLTGERTVEGFFRTKPGLEQAISRGLAYAPYADLVWCETGKPDLEYAKKFAEAIHKQFPGKMLSYNCSPSFNWKKNLDDATIAKFQKELGAMGYKFQFITLAGFHALNYSMFNLAHGYARTQMSAFVELQQAEFEAADKGFTAVKHQREVGTGYFDAVTQTVEREASTTALHGSTEDEQFFDGKKVA

SEQ ID NO: 6086 - protein, 194 aa, Glycine max
  misc_feature (27)..(27): Xaa can be any naturally occurring amino acid
  misc_feature (55)..(55): Xaa can be any naturally occurring amino acid
  misc_feature (117)..(117): Xaa can be any naturally occurring amino acid
  misc_feature (129)..(129): Xaa can be any naturally occurring amino acid
  misc_feature (166)..(166): Xaa can be any naturally occurring amino acid
DTSFILARDAIGDTYLFIAWRLNGSHXTPSYLNGDYDDCEHYESFPPGHLYSIKXRALLTIAQSLHGFCDAILLSHLMITLALRHAFEMAVVKRMMTDVPSAGSLSQGSYSTLSAVXLYLYLSGSRCSXQRASKLHSLCVCLEGAPDLMASLEVTYYIGTVHHEYXYSVQEGIYTIDDEIYHIYSSWVDTIRAS

SEQ ID NO: 6087 - protein, 154 aa, Prunus persica
MALSLFGGRRSNVFDPFSLDIWDPLEGLGTLANIPPSARETTAIANTRIDWKETPEAHIFIADLPGLKKEEVKVEVDDGKVLHISGERSREQEEKNDKWHRIERSTGKFSRRFRLPDNAKIDQVKASMENGVLTVTVPKEEEKRPQVKAIDISG

SEQ ID NO: 6088 - protein, 390 aa, Oryza sativa (japonica cultivar-group)
MEGGGAGSGMERWREMFRGADIYDVIRNAILIAGADSPRELLRRRQGIIEWLFAVAPVTVPVPAPLACGRVVDGAGNRLPPAAIPDGGGHHHDDNDGNFAAAEAQTSLIDQQILEALYDEIEEDTQVINEVLRIKDILINYKEQSVDTLFDGLRRLQLMRLSISVLKSTQIAEAVAPLNKHRSPVICKIARDLAKGWKGVAADWVGPSSANADTSPDISNPSTVEDDFGLPTPPMDVGAFFLPQSAAEQYVSEFLHKADDDDDESLIPNAKNDCGFGGYKMEIAKPVANMDENILRKGKDLSRQHGPPMRQANLQMKLAQHHAIAITEQRPIAVVRKPLPDHVSKLERQATILEGCKVGIGKRNNTDIADLRLEATKRKLNDAYQEAENS

SEQ ID NO: 6089 - protein, 499 aa, Burkholderia fungorum LB400
MDASTILADLGIAHAAQAGDIAVHSPITGELIGRVASNTVAEVDTALAQAKQAYTAWRNVPAPRRGELVRLLGNRLREKKQALGSIITLETGKILQEGMGEVQEMIDICDFAVGLSRQLYGLTIASERPGHRMAETWHPVGTCVVISAFNFPAAVWSWNAALALVCGNAVIWKPSEKTPLTALAVNQILSEALQEFGDAPAGLTALINGGRDVGAKLVADPRASIVSATGSTEMGRTVGVEVAKRFGRSLLELGGNNAGIVTQTADHELAMRGILFSAVGTAGQRCTSLRRLFVHESVYDKTIERLKQLYSKVPIGNPLEKGTLMGPLIDKQSYGRMQEALQQATAEGGKVFGGERVEVKGYEGGYYVRPAIVEMPSQTSVVLKETFAPILYVLRYTDFADAVEANNAAVHGLSSCVFTTDLREAERFLSDSGSDCGIANVNIGPSGAEIGGAFGGEKETGGGRESGSDAWKAYMRRATNTVNYSSALPLAQGIDFNIG

SEQ ID NO: 6090 - protein, 429 aa, Streptomyces avermitilis MA-4680
MSDNSVVLRYGDGEYTYPVIDSTVGDKGFDIGKLRAQTGLVTLDSGYGNTAAYKSAITYLDGEQGILRYRGYPIEQLAERSTFLEVAYLLINGELPTVDELSTFKGEITQHTLLHEDVKNFYRGFPRDAHPMAMLSSVVSALSTFYQDSHNPFDEKQRNLSTIRLLAKLPTIAAYAYKKSIGHPFVYPRNDLGYVENFLRMTFSVPAQDYDLDPVVVSALDKLLILHADHEQNCSTSTVRLVGSSQANMFASISAGISALWGPLHGGANQSVLEMLEGIQTSGGDVDTFIRKVKNKEDGVKLMGFGHRVYKNFDPRAKIIKAAAHDVLSALGKSDELLDIALKLEEHALADDYFVERKLYPNVDFYTGLIYRAMGFPTEMFTVLFALGRLPGWIAQWHEMIKEPGSRIGRPRQIYTGEVLRDFVPVEGR

SEQ ID NO: 6091 - protein, 457 aa, Azotobacter vinelandii
MKDATGNPQTRHWQALGHAHHLPPFSDYRQLKEHGPRIITRASGVYLWDSEGNCILDGMAGLWCVNVGYGREELVEAASRQMRELPYYNLFFQTAHPPAVELARAIAELAPPGMHHVFFTGSGSEANDTVLRLVRHYWAIKGQPRKNVVIGRWNGYHGSTVAGASLGGMKAMHGQGDLPIPGIEHIDQPYWFGEGGGLDPEAFGIRVADQLERKILEIGEERVAAFIAEPIQGAGGVIIPPDSYWPRIREILRKYDILFAADEVVCGFGRTGEWFGSQYYGLEPDLMAIAKGLTSGYLPMGGVVVRDRIVEVLEEGGEFYHGFTYSGHPVAAALALENIRLLREEGIVERVRTRTGPYLQRRWRELAEHPLVGEVRGLGMLAALELVKDKKTRERFPADLAAGMRCREHCFANGLVMRAVGDTMIVAPPLVISEAEIDELIAKARHCLDLTASEMPG

SEQ ID NO: 6092 - protein, 131 aa, Sulfolobus acidocaldarius
MSIQYTTVGDLKVGSYVMIDGEPCRVVEITKAKTGKHGSAKANVVAIGLFTGQKRSLMAPVDQQVEVPIIEKHVGQILADKGDNLTIMDLESYETFDLEKPTENEIVSKIRPGAEIEYWSVMGRRKIVRVK

SEQ ID NO: 6093 - protein, 478 aa, Agrobacterium tumefaciens str. C58
MHTYPDIKLLIDGEWRDAVSGKTIAVSDPATDEIIGAIAHAEKEDLDLALAAAERGFKLWRDTSPYERSKIMRKAADILRERKDKIAYIMTREQGKPLAQSATEIMGAADTIDWFAEEARRTYGQVIPARATGVSQLAIKVPVGPVAAFTPWNFPLNQIVRKLSAALATGCSIIVKAPEETPASPAELIRAFVDAGVPAGVIGLVYGVPSEISEYLIPHPVIRKISFTGSTPIGKHLAALAGKHMKRATMELGGHAPVMIFDDADIEKAIEVTSLAKFRNAGQVCVAPTRFLVQDGVADRFLEGFVEATKAIKVGNGLEEGVIMGPLANERRIPALEGLINDAVSHGAELKTGGRRIGNKGNFFEPTVLANVPVTAKIMNDEPFGPVAIINRFSSFDDAITEANRLPFGLASYAFTGSVKTAHALGQQVEAGMLTINHNGLALPEVPFGGIKDSGYGTEGGSEAVQAYLETKFVSQMS

SEQ ID NO: 6094 - protein, 225 aa, Populus tomentosa
MAREKIKIKKIDNVTARQVTFSKRRRGLFKKAEELSVLCDAEVAVIIFSATGKLFEYSSSSMKGVLARYNLHSNNLDKINQPSLELQLENSNHMRLSKEVSEKSHQLRRMRGEDLQGLNIEELQQLEKALEVGLSRVLETKGERIMNEISTLERKGVQLLEENKQLKQKIATITRGKRPALVDLDTAVQEEGMSSESTTNVCSCSSGPPVEDDSSDTSLKLGLAI

SEQ ID NO: 6095 - protein, 502 aa, Arabidopsis thaliana
MVLSHAVSESDVSVHSTFASRYVRTSLPRFKMPENSIPKEAAYQIINDELMLDGNPRLNLASFVTTWMEPECDKLIMSSINKNYVDMDEYPVTTELQNRCVNMIAHLFNAPLEEAETAVGVGTVGSSEAIMLAGLAFKRKWQNKRKAEGKPVDKPNIVTGANVQVCWEKFARYFEVELKEVKLSEGYYVMDPQQAVDMVDENTICVADILGSTLNGEFEDVKLLNDLLVEKNKETGWDTPIHVDAASGGFIAPFLYPELEWDFRLPLVKSINVSGHKYGLVYAGIGWVIWRNKEDLPEELIFHINYLGADQPTFTLNFSKGSSQVIAQYYQLIRLGHEGYRNVMENCRENMIVLREGLEKTERFNIVSKDEGVPLVAFSLKDSSCHTEFEISDMLRRYGWIVPAYTMPPNAQHITVLRVVIREDFSRTLAERLVIDIEKVMRELDELPSRVIHKISLGQEKSESNSDNLMVTVKKSDIDKQRDIITGWKKFVADRKKTSGIC

SEQ ID NO: 6096 - protein, 93 aa, Triticum aestivum
  misc_feature (39)..(39): Xaa can be any naturally occurring amino acid
  misc_feature (46)..(46): Xaa can be any naturally occurring amino acid
  misc_feature (55)..(55): Xaa can be any naturally occurring amino acid
MSDTDEHHFESKADSGASKTYPQQAGAIRKGGTHRHQGXPCKVVEXPLPKTGKHXHAKCHFCCNLILWELGTFLSMPKAKFQLIYKPIISPSN

SEQ ID NO: 6097 - protein, 486 aa, Candida albicans SC5314
MTKKYSSTDLKSSKLLHRDLNSPPIVIDHANGNNLFTQDHHQLFDSVGGAAVISVGHNNKEVIDAITTQLQKVSYLHTGEFTVPIAEELAHELINNLDSSSGYSGGDVDPSKKIAKVYFANSGSEANEAAIKLVMQYFYEQGKHTKTQFISRHQSYHGNCLGGMSLSGHIARRKPYESIIDQSRFHKVDPCYEFRYKQSNDESNESSDQYVKRLLEQLENKILQIGPENVAAFFAETIVGATTGCVPATPGYFKGVREICDKYDILLVLDEIMCGSGRTGTFFAWQQEQEGEEQGGKSIIPDITTCGKAITSGYCPLSCVFFNKKILDVLSNGSSCFNCGHTYQSFPIACAAAHAVQKIIKRDNLLDNVVKMGVILQELLMMKIDPLEIVANIRGRGLFWGIEFCKNKSTLEPFNPSCNVSIKIGEYTKRNGVVVYPGKGTIDGIKGDHILIAPSFTITKEEIEFIVDIVAKSIKEFIANEVDLFK

SEQ ID NO: 6098 - protein, 191 aa, Candida albicans SC5314
MQTIKCVVVGDGAVGKTCLLISYTTSKFPADYVPTVFDNYAVTVMIGDEPFTLGLFDTAGQEDYDRLRPLSYPSTDVFLVCFSVISPASFENVKEKWFPEVHHHCPGVPIIIVGTQTDLRNDDVILQRLHRQKLSPITQEQGEKLAKELRAVKYVECSALTQRGLKTVFDEAIVAALEPPVIKKSKKCTIL

SEQ ID NO: 6099 - protein, 329 aa, Brassica napus
MSNVTADPTTDGPSTAVAVSGSAAIQASPPTDRPVRVYADGIYDLFHFGHARSLEQAKKSFPNTYLLVGCCNDETTHKYKGRTVMTAEERYESLRHCKWVDEVIPDAPWVINQEFLDNHRIDYVAHDSLPYADTSGAGKDVYEFVKKVGRFKETMRTEGISTSDIIMRIVKDYNQYVMRNLDRGYSREDLGVSFVKEKRLRVNMRLKKLQERVKEQQEKVGEKIQTVKMLRNEWVENADRWVAGFLEIFEEGCHKMGTAIRDSIQERLIRQIPRKKLENGEDDDTDDQFYEEYFDHDMGSDEDEDERYYDEEEDVEEEKSVKKDAQDNK

SEQ ID NO: 6100 - protein, 178 aa, Glycine max
  misc_feature (115)..(115): Xaa can be any naturally occurring amino acid
MASSMISSPAVTTVNRAGAGMVAPFTGLKSMAGFPTRKTNNDITSIASNGGRVQCMQVWPPIGKKKFETLSYLPDLDDAQLAKEVEYLLRKGWIPCLEFELEHGFVYREHNRSPXYYDGRYWTMWKLPMFGCTDASQVLKELQEAKTAYPNGFIRIIGFDNVRQVQCISFIAYKPPGF

SEQ ID NO: 6101 - protein, 123 aa, Zea mays
MAGCCVFLRWPSASPSRIGYRSLVDAAADDAAPPSTVTVVVGKERRAFAVDRLVLDSYPLRLLLETAARREERRAGGGAGAIFVDVDAILFEHILWLACDARSVSQILHLDLKEIIDFYAQDA

SEQ ID NO: 6102 - protein, 188 aa, Triticum aestivum
  misc_feature (30)..(30): Xaa can be any naturally occurring amino acid
IVAHAPPRGGLVGTPGGSFQGVKSTAGLPXSRRYKGGSLGSVSNGGRIRCMQVWPIEGIKKFETLFYLPPLSTEALLKQVDYLIRSKWVPCLEFSKVGFIFREHNAFPGYYDGRYWTMWKLPMFGCTDATQVINEVEEVKKEYPDAYVRIIGFDNMPQVQWVSFIAFKPPGCAPPPPGLNRSLTTGHI

SEQ ID NO: 6103 - protein, 156 aa, Methylococcus capsulatus str. Bath
MALIITSEAFPPNGEIPRKYTCDGGDVSPPLTWSGLPPGTRSLALIVDDPDAPDPRAPRMTWVHWVLYNLPPEAPGLPEAVQALPAGTLQGLNDWKRTGYGGPCPPIGRHRYFHKLYALDTVLPDLHRPDKAKLEQAMTGHVLGQAELIGIYQRAR

SEQ ID NO: 6104 - protein, 470 aa, Mycobacterium tuberculosis H37Rv
MQGQLSRTRVYTVPVPGSAQSAYACGVERLLASYRSIPATASIRLAKPTSNLFRARVKHDARGLDASGLTGVIGIDPEARTADVAGMCTYEDLIAATLHYGLSPLVVPQLRTITLGGAVTGLGIESASFRNGLPHESVLEMDILTGAGELLTVSPGQHSDLYRAFPNSYGTLGYSTRLRIQLEPVRPFVALRHIRFSSLTAMVAAMERIIDTGGLDGESVDYLDGVVFSADESYLCIGMQTSVPGPVSDYTGQDIYYRSIQHEAGIKEDRLTIHDYFWRWDTDWFWCSRSFGAQNPRLRRWWPRRYRRSSVYWRLMALDQRFGIADRFENSRGRPARERVVQDIEVPIERTCEFLEWFGENVPISPIWLCPLRLRDHAGWPLYPIRPDRSYVNIGFWSSVPVGATEGATNRKIENKVSALDGHKSLYSDSFYTREEFDELYGGETYNTVKKAYDPDSRLLDLYAKAVQRR

SEQ ID NO: 6105 - protein, 291 aa, Zea mays
MPMYSKSELIHVPPPPCSRPRYVMAPPLVFTSIGASMNAAVRDVWASNFDEELSNLSAVLPRYPCVCVDTEFPGAVHDSNLPRYMRGPRESYELVKRNVDDLKLLQVGIALSGPAGRFPIAWQFNIRGFDPALHPHAPASIAMLREQGMDFAMLNEFGIDPEDFAAGFRRSGLACGWLTWTAFSGSYDFGYLAKALTGGQPLPDTLDGFLALVRRLFGHSVFDVKHLARCCALRGGLEQVATALGVKRAAGRAHCAGSDSLLTTDVLLLMMDRFFRNVDVLAHAGTIVDLT

SEQ ID NO: 6106 - protein, 367 aa, Nicotiana tabacum
MVFPLDTQLLNPIFDGLFCEEDRFLDDDDLGEWSCTLEQVENNVKKTLPLLECDMFWEDDQLVTLLAKEKESHLGFDCLISDGDGLLVEVRKEALDWMLRVIAHYGFTAMTAVLAVNYFDRFVSGLCFQKDKPWMSQLAAVACLSIAAKVEETQVPLLLDLQVADSRFVFEAKTIQRMELLVLSTLKWKMNPVTPLSFIDHIMRRFGFMSNLHLDFLRRCERLILGIITDSRLLYYSPSVIATAVMFFVINEIEPCNAMEYQNQLMSVLKVKQDSFEECHDLILELMGTPGYNICQSLKRKHQSVPGSPSGVIDAYFSCDSSNDSWSVASSISSSPEPQYKRMKTQDQTMTLAPLSSVSVVVGSSPR

SEQ ID NO: 6107 - protein, 397 aa, Agrobacterium tumefaciens str. C58
MAGRKTGLPQNPAISGLRWRKPFWHGHCTFSGIKCHRGENMRALRFHAAKDLRIEDIAEPKRPGPGQVLVRNRFVGICGTDLHEYSYGPIFIPTEPHPFTGAHGPQILGHEFGGVVEAIGDGVTSVNVGDRVSIQPLIMPRSGDYFADRGLFHLSTQLALVGLSWDGGGMAEAALVNEYNVQKIPDEMTDEEAALVEPSAVAVYACDRGGVTAGNSVLVTGAGPIGMLTLLAARAAGATQLFVSDLNDARLELARNVIRDVITINPKRDNVGDVVRSATEGKVGCDVAIECVGNEHALKACVDAVRKQGVVVQTGLHPHENPIDWFQVTFRDLEIKGSWAYPTHYWPRVIRLIASGLLPATKIVTKRITLDTAVTEGFDALLDPAGTHLKILIDLSK

SEQ ID NO: 6108 - protein, 362 aa, Triticum aestivum
  misc_feature (161)..(161): Xaa can be any naturally occurring amino acid
MGAGDKTAAGMPRIGMGTAVQGPKADPIRRAVLRAIQIGYRHFDTAAHYETEAPIGEAAAEAVRSGAVASRDELFITSKLWCSDAHRDRVVPALRQTLRNLQMEYVDLYLVHWRPGVPETTSLSPPSSGAAMRTATGSSPPSGRRSGISRWSTWNLYLVHXPVSMKPGRFKAPFTAEDFVPFDMRAVWEAMEECHRLGLAKAIGVANFSCKKLETLLSFATIPPTVNQVEVNPVWQQRKLREFCRGKGIQLCTYSPLGAKGTHWGSDAVMDAGVLQEIAASRGKSVAQVCLRWVYEQGDCLIVKSFDEARMRENLDVDGWELTEEEHRRIAEIPQRKINLGKRYVSEHGPYKSLEELWDGEI

SEQ ID NO: 6109 - protein, 296 aa, Saccharomyces cerevisiae
MITTPLVHVASVEKGRSYEDFQKVYNAIALKLREDDEYDNYIGYGPVLVRLAWHISGTWDKHDNTGGSYGGTYRFKKEFNDPSNAGLQNGFKFLEPIHKEFPWISSGDLFSLGGVTAVQEMQGPKIPWRAGRVDTPEDTTPDNGRLPDADKDAGYVRTFFQRLNMNDREVVALMGAHALGKTHLKNSGYEGPWGCANNVFTNEFYLNLLNEDWKLEKNDANNEQWDSKSGYMMLPTDYSLIQDPKYLSIVKEYANDQDKFFKDFSKAFEKLLENGITFPKDAPSPFIFKTLEEQGL

SEQ ID NO: 6110 - protein, 195 aa, Triticum aestivum
  misc_feature (69)..(69): Xaa can be any naturally occurring amino acid
  misc_feature (82)..(82): Xaa can be any naturally occurring amino acid
  misc_feature (88)..(88): Xaa can be any naturally occurring amino acid
  misc_feature (107)..(107): Xaa can be any naturally occurring amino acid
  misc_feature (118)..(118): Xaa can be any naturally occurring amino acid
MAPTVMASSATSVAPFQGLKSTAGLPVSRRSNGASLGSVSNGGRIRCMQVWPIEGIKKFETLSYLPPLXSTEALLKQVDYLXIRSKWXVPCLEFSKVGFIFREHNAXPLGYYDGRYWXTMWKAAYVRVATDATQVINEVGKGQERSTLTRYVRIIGFDNMRQGAVPSSFNRLQGNRAAKESRQRTKTSSLTTGHI

SEQ ID NO: 6111 - protein, 496 aa, Arabidopsis thaliana
MSGAITCSAADLSALLGPNATAAADYICGQLGSVNNKFTDAAYAIDNTYLLFSAYLVFAMQLGFAMLCAGSVRAKNTMNIMLTNVLDAAAGGLFYYLFGYAFAFGESSDGFIGRHNFGLQNFPTLTSDYSFFLYQWAFAIAAAGITSGSIAERTKFVAYLIYSSFLTGFVYPVVSHWFWSPDGWASPFRSEDRLFGTGAIDFAGSGVVHMVGGIAGLWGALIEGPRIGRFPDGGHAIALRGHSASLVVLGTFLLWFGWYGFNPGSFTKILIPYNSGSNYGQWSGIGRTAVTTTLSGCTAALTTLFGKRLLSGHWNVTDVCNGLLGGFAAITAGCSVVDPWAAIVCGFVASLVLIGCNKLAELLKYDDPLEAAQLHGGCGAWGLIFVGLFAKEKYINEVYGASPGRHYGLFMGGGGKLLGAQLVQIIVIVGWVSATMGTLFFILKKLNLLRISEQHEMRGMDLAGHGGFAYIYHDNDDDSIGVPGSPVPRAPNPPAV

SEQ ID NO: 6112 - protein, 498 aa, Arabidopsis thaliana
MSGAITCSAADLATLLGPNATAAADYICGQLGTVNNKFTDAAFAIDNTYLLFSAYLVFAMQLGFAMLCAGSVRAKNTMNIMLTNVLDAAAGGLFYYLFGYAFAFGGSSEGFIGRHNFALRDFPTPTADYSFFLYQWAFAIAAAGITSGSIAERTQFVAYLIYSSFLTGFVYPVVSHWFWSPDGWASPFRSADDRLFSTGAIDFAGSGVVHMVGGIAGLWGALIEGPRRGRFEKGGRAIALRGHSASLVVLGTFLLWFGWYGFNPGSFTKILVPYNSGSNYGQWSGIGRTAVNTTLSGCTAALTTLFGKRLLSGHWNVTDVCNGLLGGFAAITAGCSVVEPWAAIVCGFMASVVLIGCNKLAELVQYDDPLEAAQLHGGCGAWGLIFVGLFAKEKYLNEVYGATPGRPYGLFMGGGGKLLGAQLVQILVIVGWVSATMGTLFFILKRLNLLRISEQHEMQGMDMTRHGGFAYIYHDNDDESHRVDPGSPFPRSATPPRV

SEQ ID NO: 6113 - protein, 270 aa, Zea mays
  misc_feature (235)..(235): Xaa can be any naturally occurring amino acid
FATASITKGGPREPWHDIHSRLEGPIAWDVLYNFEQRWRKQGGKDLLVQLRDLSDIIIPPSPVMFPEDRDTWNVQLFRSIDGGAAFGFPDTPEEAARAGLVSGKDQIIDRSIQDAYINAIRRAKDFIYIENQYFLGSSYCWKPEGIKPEEIGALHVIPKELSLKIVSKIEAGERFTVYVVVPMWPEGMPESASVQAILDWQRRTMEMMYTDITQALEAKGIEANPKEYLTFFCLXNREVKQDGEYEPQEQPELNTDYVRAQERLGRFMIY

SEQ ID NO: 6114 - protein, 280 aa, Zea mays
  misc_feature (272)..(272): Xaa can be any naturally occurring amino acid
MATANGSSKGSFEVPKVEVRFTKLFIDGKFVDAVSGKTFETRDPRTGEVIASIAEGGKADVDLAVKAAREAFDNGPWPRMTGYERGRILHRFADLIDEHVEELAALDTVDAGKLFAVGKARDIPGAAHLLRYYAGAADKVHGATLKMAQRMHGYTLKEPVGVVGHIVPWNYPTTMFFFKVGPALAAGCAVVVKPAEQTPLSALFYAHLAREAGVPAGVLNVVPGFGPTAGAAVAAHMDVDKVSFTGSTEVGRLDMRAAAESNLQPVSLELGXGKTPEIVF

SEQ ID NO: 6115 - protein, 230 aa, Dechloromonas aromatica RCB
MNTNFEIANQGSSGLALQQNRVLRNTYMLLGLSMVPTVIGALVGIQMGFSFLAGSPLMSFLLFMGIAMGFMWGIEKNKDSGLGVALLLGFTFFMGLMLSRILQVALGFSNGGSMIAMAAGGTGAVFFTMSTVAAVSKRDFTGMGKFLFVGMIVILLAAVANIFFQIPALSLTIAVAVVGIFSAYILYDISRIVQGGETNYVSATLAVYLDVYNVFVSLLQLIMAFTGERD

SEQ ID NO: 6116 - protein, 440 aa, Wolbachia endosymbiont of Drosophila melanogaster
MNDDLDSTTKQEALKYHSRGGNPGKISIMPTKPLSTQYDLSLAYSPGVAAPCLEIAKNPEVVYDYTAKSNCVAVISNGTAVLGLGNIGPLAAKPVMEGKAVLFKRFADIDAVDIEVGTENIEDFINAVRYLGPSWGGINLEDIRSPDCFIIEKRLNELMDIPVFHDDQHGTAVVVAAGIENALDIVEKKLEDVKIIMNGAGAAGIACLEILKSMGAKNIVLCDKQGVIYKGRNEDMNEWKEKYAIDTSERSLLDTIKGADVFIGLSAKDVLNEEMLKSMGKDPIIFALANPDPEVRPEFAKSVRPDAIIATGRSDYNNQVNNVMGFPYIFRGALDVHATTINDEMKIAAADAIAKLAREPVPGEISAVYGSRKMGYGREYIIPTPFDPRLISIVAPAVAKAAVDSGVARKAIQDWSKYENQLKSRLSNVLSTLNLLSSHM

SEQ ID NO: 6117 - protein, 178 aa, Glycine max
  misc_feature (115)..(115): Xaa can be any naturally occurring amino acid
  misc_feature (122)..(122): Xaa can be any naturally occurring amino acid
  misc_feature (144)..(144): Xaa can be any naturally occurring amino acid
MASSMISSPAVTTVNRAGAGMVAPFTGLKSMAGFPTRKTNNDITSIASNGGRVQCMQVWPPVGKKKFETLSYLPDLDDAQLAKEVEYLLKKGWIPCLEFELEHGFIYHKHNKSPXYYNRHYXTMWKLPMFGCTDASQVLKELQXANTAYPNSFIHIIRFDNIHQIHCISFITYKLPSF

SEQ ID NO: 6118 - protein, 118 aa, Hordeum vulgare subsp. vulgare
MARAAATQLVLVAMVAAMLLVATDAAISCGQVSSALSPCISYARGNGAKPPVACCSGVKRLAGAAQSTADKQAACRCLKSLATSIKGINMGKVSGVPGKCGVSVPFPISMSTDCNKVH

SEQ ID NO: 6119 - protein, 114 aa, Triticum aestivum
  misc_feature (14)..(14): Xaa can be any naturally occurring amino acid
  misc_feature (16)..(16): Xaa can be any naturally occurring amino acid
MGTSNAKFIYPHNXPXYKGAYCYRMIFESSFPQEFTFRSAILTVPGGPSVACSTAKAVEWDAQWSGNLDPSGRAALGVHLSAYEQEHLPATILTGTSKKPRMIEVAAPGVAIES

SEQ ID NO: 6120 - protein, 447 aa, Methanosarcina mazei Go1
MTEIGIVAVGGYNEMGRNMTAIIIGEDIVILDMGLRLDRVQIHEDVEIDKMHSLELIEMGAIPDDTIMKEINGTVRAIVCTHGHLDHIGAIPKLAHRYNAPILATPYTAAIIRQQIESERKFEVCNRVIPLQAGGTYQVTEDISIEFIRVQHSIIDCVLAAVHTPAGAVLYACDFKLDRTPTMGEAPDFDRFKSLGKEGVIAMITESTNAGRSGKTPSEQIAKDMVRDVLLGTEESGVGMIVTTFASHIARLKAIIEAAEEMGRIPVLMGRSMERYVGAARDIGYLDLPSNVEIYGTRKDVDRAFKRIMQEGKNKYLPIVTGHQGEPGSILVRVANGETPYTIDPGDRIIFSANVIPSPMTQANRYALETKLRMKGGRIYDDVHVSGHAYREDHWELLRMVNPEHVIPAHGDMEMHGHYIEMAEDAGYVLGDTVHLLRNGEVLYIEE

SEQ ID NO: 6121 - protein, 159 aa, Burkholderia cepacia R1808
MSTLYSFSAETLAGEPVSLDAYRGKVLLIVNTASECGFTPQYAGLQKLYDRYAARGFSVLGFPCNQFGKQEPGDATQIGAFCERNYGVTFPMFAKIDVKGDHAHPLYRYLTDEAPGILGLKAIKWNFTKFLIGRDGRIVKRYAPSTKPEEIAADIDKLL

SEQ ID NO: 6122 - protein, 205 aa, Schizosaccharomyces pombe
MSSCFGSKKKPIYRKIVILGDGAAGKTSLLNVFTKGYFPQVYEPTIFENYIHDIFVDGNSIELSLWDTAGQEEYDQLRSLSYSDTHVIMICFAVDSRDSLENVITKWLPEVSSNCPGVKLVLVALKCDLRGADEEQVDHSKIIDYEEGLAAAKKINAVRYLECSAKLNRGVNEAFTEAARVALAAQPRGTKDGADESHGTGCIIA

SEQ ID NO: 6123 - protein, 273 aa, Arabidopsis thaliana
MEGIQHPIPRTVEEVFSDFRGRRAGLIKALSTGQLDLSFSIYSVSFDRILDDFYVQKFYHQCDPEKENLCLYGLPNETWEVNLPVEEVPPELPEPALGINFARDGMQEKDWISLVAVHSDSWLISVAFYFGARFGFGKNERKRLFQMINDLPTIFEVVTGNAKQSKDQSANHNSSRSKSSGGKPRHSESHTKASKMSPPPRKEDESGDEDEDDEQGAVCGACGDNYGGDEFWICCDACEKWFHGKCVKITPAKAEHIKHYKCPSCTTSKKMKA

SEQ ID NO: 6124 - protein, 231 aa, Glycine max
  misc_feature (218)..(218): Xaa can be any naturally occurring amino acid
MASNDSDSQMKIVHGDAGYILEDVPHFADYIPNLPTYPNPLRSNPAYSVVKQYFVHMDDTVPQKVVVHKDSPRGVHFRRAGPRQKVYFKSDEVHACIVTCGGLCPGLNTVIREIVCGLSYMYGVNKVLGIDGGYRGFYSKNTITLTPKVVNDIHKRGGTILGTSRGGHDTGKIVDSIQDRGINQVYIIGGDGTQRGATVIYEEVRRRGLKVAIAGIPXNHDDTVIDKSFWF

SEQ ID NO: 6125 - protein, 375 aa, Zea mays
MPAASWSAPTTSFAPAPAPPWGPWRTKAAPLPIRTLPRRVLLNAVGESAMVAAGDTLLGLYEKERLGLLQYADDESKEERYWETLDADLRYWTRSLRPVQWYPGHIAKTEKELKEQLRLMDVVIEIRDARIPLSTSHPKMDSWLGNRKRIIVLNRKDMISTEDMNAWATYFGNQGIKVVFSNGQLGMGTMKLGRMAKSVASVANTKRKEKGLLPRPVRAGIVGYPNVGKSSLINRLLKRRMCPAAPRPGVTRELKWVRFGTDLELLDSPGILPMRISDQTSAIKLAICDDIGERSYDFADVAAILVQMLIRHPAVGSEAFRRRYKIDVDSECGKTFVTKLSVHLFNGDTSQAAFRILSDYRKGKFGWVALERPPT

SEQ ID NO: 6126 - protein, 81 aa, Glycine max
  misc_feature (47)..(47): Xaa can be any naturally occurring amino acid
MSALFNFHSFLTVILLGICACTYFKMQFPAILDQKTGLDGMTYMLSXRFRGFFWKAARIGERLSPWVAAGCFMMGVSIIFF

SEQ ID NO: 6127 - protein, 498 aa, Nostoc sp. PCC 7120
MAINTGKNKLMNRHIRPWQRLLVLAIGSMVFAVFAPTIVQAVDTPTLESLSETTIKLQISIDTTWVLLSGFLVFFMQTGFAMLEAGLVRQRSVVNTLLENFIDAAVTVLAWWAVGFGIAFGTSAGGLFGIDTFFLSQLPGADGSYPLGAPGSTAAINTYTLFFFQFAFAATASTITTGSMAGRTDFIGDLIYSAIMGAISYPIIVHWAWNSNGWLGKLSYHDFAGGSIVHTVGGWTALVGAYLLGPRPDRPPWGKLPPAHNLALATLGTMILWFGWYGFNPGSTLGTANPGLIGLVTINTTLAAGAGALAALIFLYVRTGKWDLVYCLNGSLAGLVAITAPCAYVAPWASVLIGLTGGIAVVLGVSLIESLHIDDPVGAFSVHGISGMMGTLSIGFLGQEELTLNQKAGLLLGGGFDLLGIQMLGIVAITVFTVAFAFLMYGGLKAMGHLRVNAEADRIGIDTYEHGASVWPDVYSVEELSKPQEHTKISENKTLEGE

SEQ ID NO: 6128 - protein, 294 aa, Glycine max
MAHANPMIFVVGILGNLVSFCCFLAPVPTFYRVCKKKTTEGFQSLPYVAALFTSMLWIFYAYIKTGEILLITINAFGCFIETVYLVIYITYCPKKARFFTFKMIFLFNVGVIFLVVLLTHVLAKERTARIELLGWICVVLSTSVFAAPLSIIKVVIRTKSVEFMPITLSLLLTVSAMMWMAYGILLRDIYVTLPNFVGITFGTIQIVLYLIYRKNKPVKDQKLPEHKDDVANDENVNTAVSGENRGANATGFVDIEIGEKKQVQEQADKKQDQQAVNARDQTEHNNNSNKTREG

SEQ ID NO: 6129 - protein, 114 aa, Glycine max
MEGVGARLGRSSTRYGPATVFTGPVRKWKKKWIHVSPSSASSNSNANNHHNHASHASHLLLYKWTPLTHSQNTATTNNANAKDSPPEPPEEPPRRKFKYVPVFKLRFSSSPIII

SEQ ID NO: 6130 - protein, 396 aa, Salmonella enterica subsp. enterica serovar Typhi Ty2
MLDAQTIATVKATIPLLVETGPKLTAHFYDRMFTHNPELKEIFNMSNQRNGDQREALFNAIAAYASNIENLPALLPAVEKIAQKHTSFQIKPEQYNIVGTHLLATLDEMFNPGQEVLDAWGKAYGVLANVFIHREAEIYHENASKDGGWEGTRPFRIVAKTPRSALITSFEFEPVDGGTVAEYRPGQYLGVWLKPEGFAHQEIRQYSLTRKPDGKGYRIAVKREDGGQVSNWLHHHANVGDVVHLAAPAGDFFMNVAADTPVSLISAGVGQTPMLAMLDTLAKEQHTAQVNWFHAAENGDVHAFADEVSELGRTLPRFTAHTWYREPTEADRAQRVFDSEGLMDLSKLEAAISDPAMQFYLCGPVGFMQFAAKQLVSLGVNNENIHYECFGPHKVL

SEQ ID NO: 6131 - protein, 317 aa, Escherichia coli
  misc_feature (132)..(132): Xaa can be any naturally occurring amino acid
MTDKLTSLRQYTTVVADTGDIAAMKLYQPQDATTNPSLILNAAQIPEYRKLIDDAVAWAKQQSNDRAQQIVDATDKLAVNIGLEILKLVPGRISTEVDARLSYDTEASIAKAKRLIKLYNDAGISNDRILIXLASTWQGIRAAEQLEKEGINCNLTLLFSFAQARACAEAGVFLISPFVGRILDWYKANTDKKEYAPAEDPGVVSVSEIYQYYKEHGYETVVMGASFRNIGEILELAGCDRLTIAPALLKELAESEGAIERKLSYTGEVKARPARITESEFLWQHNQDPMAVDKLAEGIRKFAIDQEKLEKMIGDLL

SEQ ID NO: 6132 - protein, 368 aa, Zea mays
  misc_feature (182)..(182): Xaa can be any naturally occurring amino acid
  misc_feature (220)..(220): Xaa can be any naturally occurring amino acid
  misc_feature (240)..(240): Xaa can be any naturally occurring amino acid
  misc_feature (307)..(307): Xaa can be any naturally occurring amino acid
  misc_feature (351)..(351): Xaa can be any naturally occurring amino acid
MGKGAQGSDAAAAGGEVEENMAAWLVAKNTLKIMPFKRPPVRPYDVRVRMKAVGICGSDVHYLREMRIAHFVVKEPMVIGHECAGVVEEVGAGVTHLSVGDRVALEPGVSCWRCRHCKGGRYNLCEDMKFFATPPVHGSLANQVVHPADLCFKLPDGVSLEEGAMCEPLSVGVHACRRVGVXGPETGVLVVGAGPIGLVSLLAARAFGAPRVVVVDVDDXRLAVARSLGADAAVRVSPRXEDLADEVERIRAAMGSDIDVSLDCAGFSKTMSTALEATRPGGKVCLVGMGHNEMTLPLTAAAAREVXVVGVFRYKDTWPLCIDFLRSGKVDVKPLITHRFGFSQRDVEEAXFEVSARGRDAIKVMFNL

SEQ ID NO: 6133 - protein, 149 aa, Brassica napus
MEEISERVKARLAVISAHLTSADPLESGSPAIERWTTSADINPPPHGSLKGALTVVDERTGKKYQVPVSDDGTVKAVDLKKISMGKEDKGIKLYDPGYLNTAPVRSSISYIDGDEGILRYRGYPIEEMAENSTFLEVAYLLMYGNLPLK

SEQ ID NO: 6134 - protein, 369 aa, Magnaporthe grisea 70-15
MGDQQVYPQPPYPLHDSIKDKLDPEYVEFYNKYLLNAPQVHYQPVAASRVGGKIIPVKAPLAAFPSQNPRTDKLSTQNQGGTDPVPVGKTIDKAIPRQETTGPDVRVRAFVPAGQPPSPSGWPVFLWYHGGGWVLGNIDSENSLCSSICARARCVVVTTDYRLAPEHPFPAAVHDAWEAALWVATGAAAPALGEPLDLAKVAVGGSSAGGNLAAVVTQRALRHEAFARAGLFRFQLLVVPVTDNTASVETSTTYAEYEHTAALPVDKMLWYRRHYLPDRADWASVEASPLFADADTFAKLPPALVVVAGLDVLRWEGEEYARKLRDAGVEAEVKVIEGVPHPFIVMDAVLQKGKEGVDFVCERLAAVLA

SEQ ID NO: 6135 - protein, 355 aa, Halobacterium sp. NRC-1
MTRGEARRPPQEFDRVLSSMCTTPHPAAREAAQAFLATNPGDPETYPAVAERERDAVALLGEIVGLSSPHGYIAAGGTEANLQAVRAARNRADADAVNVVAPASAHFSFQKAADVLGVELRLAPTDGDHRADVAAVADLVDGDTAVVVGVAGTTEYGRVDPIPALADIAAGVDANLHVDAAWGGFVLPFTDHDWSFADAPVNTMAIDPHKMGQAPVPAGGFLARDPETLDALAIETPYLESDTQPTLGGTRSGAGVAGALASLRALWPDGYREQYERTQGNAEYLAAELAARGYDVVDPELPLVAADMPDAEFQALREEGWRISRTASDALRVVCMPHVTREMLAAFLDDVDALA

SEQ ID NO: 6136 - protein, 372 aa, Methanopyrus kandleri AV19
MILQRDSDYSDGTVLGSMCTEPHPVAAEAFVAGLHVNLGDPYLFPNAYRAERECIGWLAETLLDHPAPEEAEGSIVSGGTEANILAAYAAREVTGGREIIVPATRHFSFEKAARMLRMKLVEAPLRSDYTVDVDAVQDLISRDTALIVGIVGTTETGSVDDIEALSDVAEDHGVPLHVDAAFGGFTAPFLREEYPLPRFGFDLEAVVSVTVDPHKMGLVPPPAGGIVFRDDEFPKAIEVYAPYLSGGGASQYTITGTRPGAPVLALYANILELGEEGYRRIAFRCYEETLKVAEKARELGLELAVDPPHLNLVNIRLPDRGTAERLLRESEREGWKISVSTKPLGVRIVMMPHLDAETVSRFLELVARVLGG

SEQ ID NO: 6137 - protein, 506 aa, Pseudomonas putida KT2440
MRYAHPGTEGAKVSFKSRYGNYIGGEFVTPVKGQYFENTSPVNGKLIAEFPRSTAEDIDKALDAAHAAADAWGRTSVQDRSNVLLKIADRIEQNLELLAITETWDNGKPIRETLNADIPLAVDHFRYFAGCIRAQEGGAAEINEGTVAYHIHEPLGVVGQIIPWNFPILMAAWKLAPALAAGNCVVLKPAEQTPLGITVLLEVIGDLLPPGVLNVVQGYGREAGEALATSKRIAKIAFTGSTPVGSHIMKCAAENIIPSTVELGGKSPNVYFEDIMQAEPSFIEKAAEGMVLAFFNQGEVCTCPSRALVQESIYPQFMEVVMKKVLQIKRGDPLDTDTMVGAQASQQQFEKILSYLQIAQEEGAELLTGGKVEKLEGSLATGYYIQPTLLKGNNKMRVFQEEIFGPVVSVTTFKDEAEALAIANDTEFGLGAGVWTRDINRAYRMGRGIKAGRVWTNCYHLYPAHAAFGGYKKSGVGRETHKMMLDHYQQTKNLLVSYDINPLGFF

SEQ ID NO: 6138 - protein, 108 aa, Glycine max
  misc_feature (85)..(85): Xaa can be any naturally occurring amino acid
AASMISSPAVTTVNRAGAGMVAPFAGLKSMGGFPTIKTNSDVAFIASYGGRVQFKLVWPPVGNKMFYTLFFLPYLYDAQLAKEVXFLHRKGWITWLEFEWEHGFLCRE

SEQ ID NO: 6139 - protein, 244 aa, Glycine max
  misc_feature (70)..(70): Xaa can be any naturally occurring amino acid
MTSASELFHSRRHRLGRSALDLGLDTELNAADSLRRHYHLRRLRHHPERASDRIDGRYRRSFASESVDSXEENVRSSLRGSDSERLPVGVSCRLLQRLRGEPLSTNFLRQYDRDSFGEDPESESSNEDPSGASLVTELTSQMARSQFLQELSTKPPGLTQEALDCLHQEVFSSNASEIGLDSRVLQDCSICLESFTDGDELIRLPCGHKFHSVCLDPWIRCCGDCPYCRRCIVVNTHSSLNEDE

SEQ ID NO: 6140 - protein, 170 aa, Campylobacter jejuni
MINSPYIIWLTGLAGSGKTTIGQALYEKLKLKYKNLIYLDGDELREILGHYAYDRQGRIDMALKRAKFAKFLNNQGMIVIVTTISMFNEIYDYNRKQLKNYYEIYIECDMHELMQRDQKGLYTKALNKEIDNVVGVDIEFDKPEADLVINNSCRNNLEEKVEFIIKKLAL

SEQ ID NO: 6141 - protein, 263 aa, Oryza sativa (japonica cultivar-group)
MVFKKNAMSSSVLFLAALLLLSSSSMSSAARWLEEEYPPHPTVPELPKPEVPPHPAVPELPKHEEPPHPVVPELPKHEEPPHPVVPELPKPELPPHPVVPELPKHEEPPHPAVVPELPKHEEPPHPAVVPEFPKHEEPPHPAVPELPHPAVPEIPHPAVPELPKHEEPPHPVVPELPKPEVPHAAVPELPKPELPPHPAVPELPKHEEPPHPVVPELPKHEEPPHPVVPELPKPEEPHHPEVPEHEQPPKPESHYPEVPMAKP

SEQ ID NO: 6142 - protein, 227 aa, Zea mays
  misc_feature (210)..(210): Xaa can be any naturally occurring amino acid
  misc_feature (221)..(221): Xaa can be any naturally occurring amino acid
VDPRVREHQPNGPVTPVDMVVDFYKFDYEFGEPPRVTSLHNTVPVATFNDFCDDVYFVADQRGYEAVVYYLAGQYLKTDDKSGKIVDPRLQLNKVVREIKYSPGGVTVKTESDLIQFKPKLPTWKVRAIYQFDMAVYTKILLKFPRKFWPEGKGREFFLYASSRRSYYGVWQEFEKQYPDANVLLVTVTDEESRRIEQQSDEQTKAEIMXVLRKMFPGIDXPDATDI

SEQ ID NO: 6143 - protein, 539 aa, Zea mays
  misc_feature (44)..(44): Xaa can be any naturally occurring amino acid
MGNCCVTPKAADDAGGGKKPKEPKQKKGKKPNPFSIEYNRSGPXSAPKLVVLRDPTGRDIAARYELGAELGRGEFGVTYLCTDRASGEALACKSISKKKLRTAVDLEDVRREVEIMRHLPKHPNVVTLRDTYEDDNAVHLVMELCEGGELFDRIVARGHYTERAAALVLRTIVEVVQMCHKHGVMHRDLKPENFLFANKKESAALKAIDFGLSVFFTPGERFSEIVGSPYYMAPEVLKRNYGPEVDVWSAGVILYILLCGVPPFWAETEQGVAQAIIRSVIDFKRDPWPRVSDNAKDLVRGMLNPDPKRRLTAHQVLGHPWLQNIKKAPNVNLGETVKARLQQFSVMNKFKKHALRVIAEHLSVEEAADIKDMFEKMDLNKDQMLSFEELKLGLHKFGHQMPDADVQTLMEAADADGNGSLNYGEFVTLFVHLRKIGNDEHLHKAFAYFDRNQSGYIEIDELRESLADDLGQNREEIINAIIRDVDTDKDGKISYDEFATMMKAGTDWRKASRQYSRERFTSLSLKLQKDGSLQMTSTR

SEQ ID NO: 6144 - protein, 193 aa, Betula pendula
LGSGYSLEVVCLSCGQAVKFVCDRRSVKHPVICSESGRAIVSHHSVLIFEAVSASAYGSQALSTSSFQHFVEGLSDEALADIGNLNAAAIKGEHETCLLYADQLKQRCVDQFKDGSLGMEQLAAVDGLCDMVSKAIGTTDPVRTYHVNLSVFTSIPDFWGIGQLFPIVPIHRHDQRPSVKGILSDLTQSTPAR

SEQ ID NO: 6145 - protein, 369 aa, Thermosynechococcus elongatus BP-1
MSSSRKRLGVFTSGGDCPGLNTAIRAIVAHATLSYGWEVLGILHATQGLIERKAIPLNAEGLGGMDVLLNMGGTILGAINKGDTLGHADEVIAGYYELGLDALIAICGDGSLRILHQLAQKGNWNFLAIPKTIDNDVALTDRAIGFDTAVNTVVEALNRITSTAASHDRVFVVEVMGRTAGHLALYSGIAGGADIILIPEIPYSIEGICQHLQKLRDRWGRQFALIVVAEGSKQLEEDANHPRHCSIGQYIADKIAQHSPIPIELRVSVLGHIQRGGAPMAMDRLLAAGMGNTAVDLAAQGTFGRMVAWQAGQVVTVPIADVVAKCPRHVDPNSFLIRTAQGLGIYVGDKPMLPYVDPTLCRDQVICAI

SEQ ID NO: 6146 - protein, 450 aa, Zea mays
MRGSMSNYYDDYDDIDEIEDDYDMDDPADDMVDEQRGVRDSDAEDNDYGQPNDKIPDTSSADARNGRDIQGIPWEQLNITRKKYRQSRLEQYKNYENVPNSGEEAMKDCKPTEKGGMYYEFRRNTRSIKSTILHFQLRNLVWATSKHDIYLVSHYSIRHWSALSGVDTELINVQGHVAPREKHAGSLSEGFYQTQVSTLAVKDNLLVAGGFQGELICKHLDQEGISFCCRTTYDDNAITNAVEIFNTSSGAVHFMASNNDSGVRYYDMERFQLFKHFQFEWPVNHASLSPDRKVVVIVGDDPDGLLIDANSGKTVHSIKGHRDYSFASAWSPDGRTFATGNQDKTCRIWDVRNLSKSVHVLRGNLGAIRSIRFTSDGQFMSMAEPADFVHIYDVKSDYNKRQELDFFGEISGTSFSPDTDTLFVGVWDRMYGSLLQFGRLYNYSYLDSLF

SEQ ID NO: 6147 - protein, 112 aa, Bartonella sp. Bi3726tl
ANEACLQMLQEIGSIKRIPKFIARAKDKNDPFRLIGFGHRVYKNYDPRAKIMQKTCHEVLKELNIQDDPLLDIAIELEKIALSDEYFIEKKLYPNVDFYSGIILKALGFPTE

SEQ ID NO: 6148 - protein, 112 aa, Bartonella sp. Rr4252tl
ANEACLKMLQEIGSIKRIPKFIARAKDKNDPFRLIGFGHRVYKNYDPRAKIMQKTCHEVLKELNIQDDPLLDIAIELEKIALSDEYFIEKKLYPNVDFYSGIILKALGFPTE

SEQ ID NO: 6149 - protein, 247 aa, Zea mays
MAMAYKMATEGMNVKEECQRWFMEMKWKKVHRFVVYKIDERSRAVLVDKVGGPGEGYEELVAALPGDDCRYAVFDFDFVSVDTCQKSKIFFIAWSPAASRIRAKILYATSKQGLRRLLDGVHYEVQATDPSEMGYRRHQRPRAMRPALRSAPIYVLTCAWACSPTTHCSVVICVRVCVCVCDRPDANWRWCAPVAIDAANLTRLRVCLLCYFRFSGEMVQAWCVDVDGWSRSSGEWQRTNETSTSAT

SEQ ID NO: 6150 - protein, 198 aa, Zea mays
TPIGRLGPSRPAVMLAQPHGSSSLKDVQVAFSNADHKDSSSKVEQPADSSLKPASLNAFDIISHSRGFDLSSLFEVDQEQKASNSRFMTQKPASAIVSKLEQIAETERFMVKKQDGLVKLQGSKQGRKGQLAIDAEIFEVTPAFHVVEVKKSAGDTLEYEMFCSKGLRPSLSDICWSSRSEENMAPSVVQPSQLEPST

SEQ ID NO: 6151 - protein, 105 aa, Bartonella sp. Bi4271tl
ANEACLKMLQEIGSIKRIPKFIARAKDKNDPFRLIGFGHRVYKNYDPRAKIMQKTCHEVLKELNIQDDPLLDIAIELEKIALSDEYFIEKKLYPNVDFYSGIILK

SEQ ID NO: 6152 - protein, 280 aa, Glycine max
MGSHNALAATFGILGNIISVMVYLAPVPTFYRIYKKKCTDGFHSLPYLLSLMSSMLWLYYAFLKIHDGVVPLITINSIGCVIELIYILTYIKYAHKDARNLTYTLFAAMNIGFLALVLSSRFALNGSHRVKVIGWICDAVSLSVFASPLSIMAKVIRTKSVQFMPFYLSFFLTLNAITWFVYGLSMQDKCIYIPNVGGFALGLVQMVLYGIYRKGSESEKEQGLGEGVINIVVVNPLGPAEVFPIAVDDNKVKDLVVVDDVTVSQQEKEKNVEAKDDCPV

SEQ ID NO: 6153 - protein, 371 aa, Malus x domestica
MGKGGMSDGDHADRCYGEAINGDVQQENMAAWLLGVKNLKIQPYKLPNLGPHDVRVRLKAVGICGSDVHHFKNMRCVDFIVKEPMVIGHECAGIIEEVGSEVEDLVPGDRVALEPGISCKRCNLCKQGRYNLCRKMKFFGSPPNNGCLANQVVHPGDLCFKLPDNVSLEEGAMCEPLSVGIHACRRANVCQETNALVVGAGPIGLVTLLAARAFGAPRIVIADVNDERLLIAKSLGADEVVKVSTNIEDVAEEVAKIQKVLENGVDVTFDCAGFNKTITTALSATRPGGKVCLVGMGQREMTLPLATREIDVIGIFRYQNTWPLCLEFLRSGKIDVKPLITHRFGFSQKEVEEAFETSARGGNAIKVMFNL

SEQ ID NO: 6154 - protein, 477 aa, Candida albicans SC5314
MSTDHHSHPVEGHQFKKIFNRLSGQPESYSRKQNYTFGKTLGAGSFGIVRYARDNSTDEEVAVKIILKKALKGNESMIIDEMQLLEQLNNPHIVGFRDWFESKDKFYLVTQLATGGELFDRIVQKGRFTEHDASLVVLQMLEALEYLHNKDIVHRDIKPENILYLTSKDDSPIVLADFGIAKRLQNPNEKLTSSAGSFGYAAPEVILGTGHGKPCDIWSLGVVTYTLLCGYSPFRSENVQDFINEVKHNNAVIFHADYWKDVSKDARRFIIKALQFNPDNRPTATELLNDPWLVSIAKEYKETDLLPNFKQGFDAKKKFRQAIELVKLNNRIKKLKEWQTDEDDDPTEINLFNEHGSVEQRANPSTNDGLTIPGTTSPRRGESPLNTWKKFNDVINSLDTNRSKASLSSFKSPYDLAHSNRGTDVSNSGATNVGKSDTASSAFVQLVHAATANKEKVANYTEDEEGKEKKQKDGDKN

SEQ ID NO: 6155 - protein, 321 aa, Thermoanaerobacter tengcongensis MB4
MKTIGILTSGGDAPGMNAAIRAVVRTGIYYGLKVKGIMRGFAGLVEDEVIDLGLSSVGDIIQKGGTILRTARCEEFKQKEVRKKAYETLQKHGIEGLVVIGGDGSFRGAQLLSEEWNVNTICIPGTIDNDIPCTDYTIGFDTACNTVIDAINKIRDTATSHERANIIEVMGRNSGYIALYAGVAGGAEMIILPEVEWSIDELCDKITYGIKRGKLHHIIVLAEGVMSAPELAKMIKERLPKLDLRYTILGHIQRGGAPTVMDRVLASQMGARAVELLLENKTKRVISIRNNQIVDDDIDEALSMKKEFNRKLYELSKILSI

SEQ ID NO: 6156 - protein, 219 aa, Lilium longiflorum
VEQFSPVPYLATLLNCMLWVVYGLPLVHPHSTLVLTINGLGLIIELTYVLLFLLYSNGRARIRVLAMLLTEIVFVGLITVIVLSTAHTLVTRSLIIGVLCVFFGTMMYAAPLSVMKLVIQTKSVEYMPLFLSVASFLNGICWTTYALIRFDLFITIPNALGTMFAVAQLILHAMYYKSTKIQMEAQKRKLEMGFEEVMAPVENTEKIRGASQTGKYPPV

SEQ ID NO: 6157 - protein, 427 aa, Streptomyces avermitilis MA-4680
MAEARTTAAEELTRRWAFDPRWQGIERTYGAADVVRLSASVREEHTLARRGAERLWRQLHELDYVHALGALTGGQAVQQVKAGLQAIYLSGWQVAADANQAGHTYPDQSLYPANSVPQVVRRINNALLRADQIATAEGGEDTTDWLAPIVADAEAGFGGPLNAFELTKAMIAAGAAGIHYEDQLASEKKCGHLGGKVLVPTSQHIRTLNAARLAADIADVPTVIIARTDALAANLLTSDVDERDAEFVTGERTAEGFYRVRGGMAPVIARGLAYAPYADLIWVETGTPDLAQAREFAEAIHAEYPDRMLAYNCSPSFNWKAALDDDQIAKFQRELGAMGYRFQFITLAGFHSLNHGMFDLARGYAEHGMTAYVDLQEREFAAQEHGFTAVRHQREVGTGYFDLVSTAVNPASSTTALAGSTEEEQFH

SEQ ID NO: 6158 - protein, 362 aa, Pseudomonas putida KT2440
MNDLSHTHMRAAVWHGRHDIRVEQVPLPADPAPGWVQIKVDWCGICGSDLHEYVAGPVFIPVEAPHPLTGIQGQCILGHEFCGHIAKLGEGVEGYAVGDPVAADACQHCGTCYYCTHGLYNICERLAFTGLMNNGAFAELVNVPANLLYRLPQGFPAEAGALIEPLAVGMHAVKKAGSLLGQTVVVVGAGTIGLCTIMCAKAAGAAQVIALEMSSARKAKAKEAGANVVLDPSQCDALAEIRALTAGLGADVSFECIGNKHTAKLAIDTIRKAGKCVLVGIFEEPSEFNFFELVSTEKQVLGALAYNGEFADVIAFIADGRLDIRPLVTGRIGLEQIVELGFEELVNNKEENVKIIVSPGVR

SEQ ID NO: 6159 - protein, 467 aa, Arabidopsis thaliana
MAEAKIEEIGCEDRISVLPEDLLVVILDLLPTKDVVATMILSKRWLSIWTMVRTLEYTDDMDDESKKSVWWFLNKSLQLHKAPVIDSLCMELGPQCPTTDDVDIGKWVAKAVDCLVMTLTIKLLWSAGPTSLPKSLYSCTSLSELTLSDQILVNVPSSAYLPSLTELELICVVYKDEDSLVSFLSSCPVLEFLFVLRKIDDNVKTFTVKVPSLLELTYKNLCSDVVDNTDRCLVVNAPAVNTCQITDYSLESFSIEDMPCLQDATIDVDEAYHPDDKFLTSFSSVLSLRMHLSDAMVSSSLISSHCNSIAASNYLLKLCLFSFQVMRCTTINFSRLIKLSIYPYGPDMLETLLRLLGNAPKLKEFLVDYPSLIASQKFVYNPEDLPWSWKQPSHVPECLSSQLEIFEWRDYGDRIIEEEFLTYVLANSKRLKTATISLRLNLEDPELIIEEIKDLPRVSTTSHLLFK

SEQ ID NO: 6160 - protein, 133 aa, Oryza sativa (japonica cultivar-group)
MASSHTKPSILLLAAALLLLSCSSIGGAARYLEEAAPAAAAAEEEEHPAHPAVPEIPKPELPELPKVPELPHPVVPELPKPELPKIPEVPHLAVPELPKPEVPEIPKAELPPLPKFELPPKPEFHFPEPEAKP

SEQ ID NO: 6161 - protein, 123 aa, Oryza sativa (japonica cultivar-group)
METDINAPPPPAPAPAGAGEGSSSAAGPSSRKPNKRFEIKKWNAVALWAWDIVVDNCAICRNHIMDLCIECQANQASATSEECTVAWGVCNHAFHFHCISRWLKTRQVCPLDNSEWEFQKYGH

SEQ ID NO: 6162 - protein, 342 aa, Oryza sativa (japonica cultivar-group)
MAARKIAMSTSSLLLLLLAAALLLTGDAARILQEAAWPPYDYPKPDQPPPLLPTPDVVPNPNQPPLQPTPGVPPLPNPDVPPMNKPDVPPMPKPDGPPIPPVQPCPDQPPQPKPDGPPLPNPNQPPQPNPNGPPKPDMPPMPKPDGLPNTYEPSRPDQPPQPISDGPPLPNPNVPPKPDQPPQPIPNGPPKPDMLPMPKPDGSPNSYAPSVPDQSTQPNPNGPSIPNQPPQPIPNGPIKPDQPPQPNPDMPPKPDQPPQPCPDGPPKPDQPPQPNPNGPPKPDQPPQPNPNGPSKPDQPPRPNPDMPPKPDQPPQPEYYEQPPKPDAPQMPPLPNGEIPFSP

SEQ ID NO: 6163 - protein, 512 aa, Escherichia coli O157:H7
MTNNPPSAQIKPGEYGFPLKLKNRYDNFIGGEWVAPADGEYYQNLTPVTGQLLCEVASSGKRDIDLALDAAHKVKDKWAHTSVQDRAAILFKIADRMEQNLELLATAEAWDNGKPIRETSAADVPLAIDHFRYFASCIRAQEGGISEVDSETVAYHFHEPLGVVGQIIPWNFPLLMASWKMAPALAAGNCVVLKPARLTPLSVLLLMEIVGDLLPPGVVNVVNGAGGEIGEYLATSKRIAKVAFTGSTEVGQQIMQYATQNIIPVTLELGGKSPNIFFADVMDEEDAFFDKALEGFALFAFNQGEVCTCPSRALVQESIYERFMERAIRRVESIRSGNPLDSVTQMGAQVSHGQLETILNYIDIGKKEGADVLTGGRRKLLEGELKDGYYLEPTILFGQNNMRVFQEEIFGPVLAVTTFKTMEEALELANDTQYGLGAGVWSRNGNLAYKMGRGIQAGRVWTNCYHAYPAHAAFGGYKQSGIGRETHKMMLEHYQQTKCLLVSYSDKPLGLF

SEQ ID NO: 6164 - protein, 150 aa, Glycine max
  misc_feature (40)..(40): Xaa can be any naturally occurring amino acid
  misc_feature (57)..(57): Xaa can be any naturally occurring amino acid
ISFGLKDIPSSSYDYSYFLYQWAFAFAAAGITSGSMVERXQGVAYLIYCSFLTGFVXEKDSHWFWAPERWAFAFNITDRLFSTGVIDFAGSGEIHMGGGIPGLWGALIESPRMGRFYHPRQAGALGGHTPPLVVLGTFLLWLGWYGSNPG

SEQ ID NO: 6165 - protein, 200 aa, Glycine max
MTFQPVPTLLLLLLLASANSHFALAGKRKVHIPDELDDVFDDEEDDAWREWGKKPEPPFPSSDISKLDPSQIQQEMMKRHAGPVIGFVKLRPGSRRTPDMVAEFAMKWTHVLRTGAVGVRFMGVDLNTIMFNLESIKDLEELKEFVLDQSEAYEIKMGDQFFRRSGDPPLDEVIEKYNSEKAKADNADSEEIDPNVKTEL

SEQ ID NO: 6166 - protein, 539 aa, Glycine max
MASSLRISRLLSRSFLSASTTTPLFSRGGSGALGAGLSKFSTAAAIEEPIKPPLKVEHTQLLIDGKFVDAATGKTFPTLDPRTGDVISHVAEGDHEDVDRAVAAARKAFDRGPWPKMTAYERQRILLRAADLFEKHNDDLAALETWDNGKPYEQSAQIEIPMLVRLFRYYAGWADKIHGLTVPADGPYHVQTLHEPIGVAGQIIPWNFPLVMFAWKVGPALACGNTIVLKTAEQTPLSALYASKLLHEAGLPPGVLNVISGFGPTAGAAIASHMDIDKLAFTGSTETGKVVLELAARSNLKPVTLELGGKSPFIVCEDADVDEAVELAHFALFFNQGQCCCAGSRTFVHERVYDEFIEKAKARALKRAVGDPFKGGIEQGPQIDSEQFQKILKYIRSGVESGATLETGGDRFGNSGFYIQPTVFSNVKDDMLIAKEEIFGPVQSILKFKDLDDVIQRANNTHYGLAAGVFTKNINTANTLTRALRAGTVWVNCFDTFDAAIPFGGYKMSGQGREKGEYSLKNYLQVKAVVTSLKNPAWL

SEQ ID NO: 6167 - protein, 374 aa, Ferroplasma acidarmanus
MAVSLGLEDVFIKYTGLTFIDGNAGVLRYRGYDINDLVQNTGFEEVCYLMTNGELPNSQQLAEFKKSVKEHYKLPDHVMELISDLPREADTLTMMETAFASLSSGDYQWNKENDRKQVPKILGENLGIISNIYRHKMGMGLQNPDPKYDYAEAFLRNCFGNADEKKISAMNAALVIYVDHEVPASTTAALVASSTLSDMYSCITAATAALKGPLHGGAAEAAYKQLLDIGNVDNVENWFKTNILDGKRRLMGFGHRVYRTYDPRMKIFKKLATTLEQTDEQKKLFEIAVKLEELGVKEFGGKGIYPNTDYYSGIVFNEIGFPIYMFTTLFGFSRVLGWLSHITEYVEEEERLIRPRAVYTGPDKRDFVKIQDRK

SEQ ID NO: 6168 - protein, 130 aa, Brassica napus
MAPVSALAKYKLVFLGDQSVGKTSIITRFMYDKFDNTYQATIGIDFLSKTMYLEDRTVRLQLWDTAGQERFRSLIPSYIRDSSVAVIVYDVASRQSFLNTTKWIDEVRTERGSDVIVVLVGNKTDLVDKR

SEQ ID NO: 6169 - protein, 365 aa, Lotus corniculatus var. japonicus
MDFSSSNGSEDTELSQAQIHLYKHVYNFVSSMALKSAMELGIADVIHSHGKPITLPELATALNLRPSKIGVLHRFLRLLTHNGFFAKTTVSRGEGAEEETAYGLTPPSKLLVKSNSTCLAPIVKGALHPSSLDMWRSSKKWFLEDNEELTLFESATGESFWEFLNKETESDTLSMFQEAMAADSHMFKLALKECKHVFEGLGSLVDVAGGRGGVTKLIREAFPHVKCTVFDQPQVVANLTGDENLNFVGGDMFKSVPPADAVLLKWVLHDWNDELSLKILKNCKEAISGRGKEGKVIIIDISIDETSDDRELTELKLDYDLVMLTMFNGKEREKKEWEKLIYDAGFSSYKITPICGFKSLIEVFP

SEQ ID NO: 6170 - protein, 138 aa, Pyrobaculum aerophilum
MVLKWVMSTKYVEAGELKEGSYVVIDGEPCRVVEIEKSKTGKHGSAKARIVAVGVFDGGKRTLSLPVDAQVEVPIIEKFTAQILSVSGDVIQLMDMRDYKTIEVPMKYVEEEAKGRLAPGAEVEVWQILDRYKIIRVK

SEQ ID NO: 6171 - protein, 79 aa, Brassica napus
  misc_feature (17)..(17): Xaa can be any naturally occurring amino acid
  misc_feature (35)..(35): Xaa can be any naturally occurring amino acid
CPKASTPPQEKLIGLDXPAKFEFVKRKLQETSHHXHDKPKKQSPIQVLEPIPKQGSSAAQKPQLKSPGMTNRSWSTGRQ

SEQ ID NO: 6172 - protein, 197 aa, Zea mays
MATSFQGTTTKRTACDKTVYLVDKLTADNRIYHKACFRCHHCKGTLKLANYNSFEGVLYCRPHFDQLFKRTGSLDKSFEGTPKVVKPERNVGNENATKVSSAFAGTREKCVGCSKTVYPTERVTVNNTMYHKSCFKCCHGGCTISPSNYIAHEGKLYCKHHHIQLIKERGTSASLRMTTRRHHRLGHWRRMNMSIDH

SEQ ID NO: 6173 - protein, 456 aa, Bordetella bronchiseptica RB50
MTTLSSAQQQDIQYQLHSYTNAVKHRDVGPRIITHGEGVYVFDDQGNRYLEGMAGLWSVAVGFGEQRLVEAAARQFQELPYYHTFTHKSHPSVIALAERLIGYTDGRMAQAFFTNSGSEANDTVVKLVWYYNNALGRRDKKKIIARQRGYHGVTVASASLTGLPGNHKDFDLPLPQIRHTACPHYYRYGLPGETEEDFATRMAGELEAMILREGPDTVAAFIGEPVMGAGGVIVPPRTYWQKIQAVCRKYDILVIADEVITGFGRLGQRFGSQVFDIEPDIMVLSKQITSSYQPLGAVLLNARVADVVAEHSGRLGTFGHGYTASGHPVATAVALENLRLIDERGLIEHAAEMGALLHLELQALSSHPLVGEVRGVGLIAGVELVADKATRQPFDPLGKAGGYAYERAHDHGLIVRGIQDTVAFCPPLIITAEQVRDMVARFARTLDDVAAHVAQG

SEQ ID NO: 6174 - protein, 454 aa, Xanthomonas campestris pv. campestris str. ATCC 33913
MSYDTVNPANGQVEHTQHTLDAAAIEARLAASAKAFPEWAALPLAERGALLRRVGEELTKRREDLQRIMTAEMGKLRREALAEIDKCAQGCAYYAEHAAEYLAPRAIPTEAQSSYVRYEPLGCVFAVMPWNFPLWQAFRFLAPGLMAGNVALLKHASNVPRCADAMKEVLDAAGIPPGVFDVLHIDNDQAAEVLRDDRIAAVTLTGSERAGRSLAANAGDQLKKCVMELGGSDAFVVLDDADLERTVQSAVQSRFDNSGQTCIAAKRFIVVDAIADQFVERFVAAAAQRVLGDPQQDATTLAPMARADLRDELHKQVQESVSKGAKVLLGGEPVAGSHAGYPATILDQVGPGMPAYEQELFGPVAAVIRVADEAEAVRVANDTTFGLGGSVWTADAKRGERVAQQLQCGAAFVNSVVKSDVRLPFGGIKRSGFGRELAEHGIHEFMNIKTIYVA

SEQ ID NO: 6175 - protein, 311 aa, Bradyrhizobium japonicum USDA 110
MPLDPLAKRLLTMMAAAGPQVRNRPSVEARRQSLAKLMQFARTDAPDVTVSDGTLPGPGGELPYRLYSPATAAERAPGFVFFHGGGLVAGSVATHDRIAAALAHATGCRLVSVDYRLAPEHKFPAAVDDAIAATEWVAREASSLGIDAGRLVVGGDSAGATLAAIVCQEALQNAGLSIVAQCLICPVLDFEETSPSREAFAEGHLIDRITIEADLADYLPGGIDAADPRISPLRATRFAGLPTAIIHTAEFDPMRDEGNAYARKLLAAGVTVEHVCHDGMVHNFHAMGAILPQAQLVLSQIGEQVRRAVEK

SEQ ID NO: 6176 - protein, 458 aa, Streptomyces coelicolor A3(2)
MATSVVLFTRDLRLHDHPPLRAALDRSDAVVPLFVRDRAVDAAGFAAPNRLALLADCLRDLDSGLRDRGGRLVVRSGDLVEEVCAVAGEAEADEVHLAADVSAHAHRREELLRSALSARGCRLHVHDAVTTVLAPGSVTPASSDHFAVFTPYFRRWSERAVREPLAAPRRVRVPDGVGSEPLPARGDLTGLSPGLPTGGERDARKRLTAWLRGGIADYADHHDDLAGDATSRLSPDLHLGALSPVELVHRARRAGGPGAEAFVRQLAWRDFHHQVLAARPHASAADYRTRHDRWRTGAAAEADAAAWRDGRTGYPVVDAAMRQLRHEGWMHNRGRLLVASFLTKTLYVDWRVGAWHFLELLVDGDVANNQLNWQWAAGTGTDTRPHRVLNPTTQARRFDPGGTYVRRWVPELAGLAGRSVHEPWRLARAARAAYDAYPDPIVDLSEGLDRFRRARGRD

SEQ ID NO: 6177 - protein, 500 aa, Gibberella zeae PH-1
MSLDIQLTAPNGRTYKQPTGLFINNEWVKSSNGEKITSINPTNEQEITSVYAGSSEDVDKAVRAARRALHNPSWRDLPGTERGKLLSRLATLVEENKEILATIETWDNGKPYTVALNDDVNEVAETLRYYGGFADKVYGQVIETTGDKFGYTIREPIGVCGQIIPWNFPLAMAAWKLGPALACGNAVILKPAEQTPLSILYLANLIVEAGFPPGVVNIINGLGTVAGAALASHMDVDKIAFTGSTPTARSIMKMASSNLKNITLETGGKSPLIVFDDADVDLAAYWAHAGIMYNQGQVCTATSRILVQESIYDKFMAAFGAQVKNISKVGDPFEESTFQGPQVTKAQYERILSFVDVGKKEGAKLALGGQPFKVGDGKGYFVEPTVFTDVTPKMRVFQEEVFGPFVVVTKFSSEDEAIHLANDTQYGLGSALFTTNLTRAHQVAKRIEAGMVWVNSSNDSDWRIPFGGVKQSGIGRELGEAGLAAYSNIKAVHVNIAAKL

SEQ ID NO: 6178 - protein, 126 aa, uncultured marine alpha proteobacterium HOT2C01
MADLQQIVDQLSDLTVIEAAELSKMLEDKWGVSAAAPVAVAAAGAAPSGDAAAAEEKDEFTIVLAAAGDKKINVIKEVRTITGLGLKEAKDLVEGAPKELKTGVSKDEANGFKEKLEAAGATVELK

SEQ ID NO: 6179 - protein, 296 aa, Saccharomyces cerevisiae
MITTPLVHVASVEKGRSYEDFQKVYNAIALKLREDDEYDNYIGYGPVLVRLAWHISGTWDKHDNTGGSYGGTYRFKKEFNDPSNAGLQNGFKFLEPIHKEFPWISSGDLFSLGGVTAVQEMQGPKIPWRCGRVDTPEDTTPDNGRLPDADKDAGYVRTFFQRLNMNDREVVALMGAHALGKTHLKNSGYEGPWGAANNVFTNEFYLNLLNEDWKLEKNDANNEQWDSKSGYMMLPTNYSLIQDPKYLSIVKEYANDQDKFFKDFSKAFEKLLENGITFPKDAPSPFIFKTLEEQGL

SEQ ID NO: 6180 - protein, 439 aa, Thermoproteus tenax
MSDYLEKIKAQIPNIQPFAGKYAEPVEGSYITYTGPGQLKVPDKVVIGYIEGDGTGPEVAYAAIKVANAAVERAYGKSRRVLWYEVLVGSKAEKILGSRLPDQSVEVLKKIRVFLKAPLETPVGGGFRSLNVTLRQIFDLYANIRPVKYFPGLPSPLKRPESVDLVIFRENTEDVYMGIEWPWNSPEAAKVREFLRRELKVDIRDDAGIGIKPISKFGTQRIARLALKFAVENKRRVVTIMHKGNIQKYTEGAFRDWAYEVAKNEFRDHVVLEEELAQYGGKVPPGKILVNDRIADNMLQQLLTRTGEYDVILAPNLNGDYVSDEAAGLVGGLGVAPGIDVGDWGMMAEPVHGTAPKYTGKNYVNPTATILALELLFRFIGWREAADLITRGVSKAYSEGYFTGDLARQMTDEERKVVKEVLGTQEFAEKVAEIIKTEL

SEQ ID NO: 6181 - protein, 170 aa, Campylobacter jejuni
MINSPYIIWLTGLAGSGKTTIGQALYEKLKLKYKNLIYLDGDELREILGHYAYDRQGRIDMALKRAKFAKFLNDQGMIVIVTTISMFNEIYDYNRKQLKNYYEIYIECDMHELMQRDQKGLYTKALNKEIDNVVGVDIEFDKPEADLVINNSCRNNLEEKVELIIKKLAL

SEQ ID NO: 6182 - protein, 410 aa, Thermoproteus tenax
MSEQTVSIRTTGKIIQSPCGPIIHGLEDVLVKITTISDIDGHTGRLWYRGYRIEDLAENTTYEEVVYLLLYGKLPSARELADIKSRLSANRELNPATIEILRALAKAHPMFALEAAVASEGAFDEDNLKLADALRAGRYKQEEKDLALRIAEKLIAKLPTIVAYHYRLSRGLELVRPRGDLAHSANFLYMFFGKEPDPLATKAIDLYLILHADHEIPASTFTALVIGATLSDLYSVIAGAIGALKGPLHGGANEAAVKSYLEIADPSKAKEIVEAATKPGGPRLMGVGHRVYKAYDPRAKIFKKLVEDYTAKFGDPQRLYAIASNIEQAVMAHPYFQQRKLYPNVDFWSGIVFYYMGIPYDYFTPLFAMSRVAGWTAHVLEYWENNRLFRPRACYVGPHDQQFIPLENRS

SEQ ID NO: 6183 - protein, 267 aa, Arabidopsis thaliana
MPVHDEQEHEVYGGEIPEEEEGEMDTEEYEEHGGEEGAAAGDEELEPGSSSRDLEDMKKRIKEIEEEAGALREMQAKAEKDMGASQDPSGGVSAAEKEEVDSRSIYVGNVDYACTPEEVQQHFQSCGTVNRVTILTDKFGQPKGFAYVEFVEVEAVQNSLILNESELHGRQIKVSAKRTNVPGMRQFRGRGRPFRPMRGFMPGVPFYPPYAYGCESSQVQTAYALQTVLIRQIGVKKVAAASPFSGKLIIINTVHRTLQLFRLTEMS

SEQ ID NO: 6184 - protein, 462 aa, Mesembryanthemum crystallinum
MGEQELLLQQQIKEDRNVSRETEMKHPALQGKYELGRVLGQGTFARVYHARNLVTGNSLAIKVVAKDKVIKVGMMEQMKREISVMKRVKHPNIVQLHEVMASKSKIYLAMDLVRGGELFSKVSKGGKLDEDVARSYFKQLISAVDFCHSRGVYHRDLKPENLLLDEHGNLKITDFGLSASFENEDHHQTLLRTSCGTPHYVAPEVISRKGQQGYHGAKSDIWSCGIILFVLLAGFLPFHDDNIIRMYRKVFKGDFTCPSWLSSQARDLITRLLDINPATRITVSEIMQSDWYCMDTSSMTAVTTDEFDLDHNNNNNNNSNYNNIHHHKKEPEMLNAFHIISLSQGFDLSPLFEEKHREERQDMRFATTKSASTVVSRLEEVAAKAGKFIVKKFCGDSVVRLQGQERGRKGKLAIAAEIMSVSPSLLVVEVKKDNGDTLEYNQFCTKQLRPALKDIVWTCPSS

SEQ ID NO: 6185 - protein, 122 aa, Zea mays
  misc_feature (48)..(48): Xaa can be any naturally occurring amino acid
  misc_feature (68)..(68): Xaa can be any naturally occurring amino acid
  misc_feature (74)..(74): Xaa can be any naturally occurring amino acid
  misc_feature (79)..(79): Xaa can be any naturally occurring amino acid
  misc_feature (113)..(113): Xaa can be any naturally occurring amino acid
TDKAIERLLSQLRKESLKIIPVNASSEVDALYSFKTEFSVNEDLHLIXLYSEKGISKDRILIKIAATXEDIKAXEILQXDHGINTNLTLMVSLIQAIGAAEAAAYLISPFVGXILDWFKPLP

SEQ ID NO: 6186 - protein, 452 aa, Arabidopsis thaliana
MNRPKVQRRVGKYEVGKTLGQGTFAKVRCAVNTETGERVALKILDKEKVLKHKMAEQIRREICTMKLINHPNVVRLYEVLASKTKIYIVLEFGTGGELFDKIVHDGRLKEENARKYFQQLINAVDYCHSRGVYHRDLKPENLLLDAQGNLKVSDFGLSALSRQVRGDGLLHTACGTPNYAAPEVLNDQGYDGATADLWSCGVILFVLLAGYLPFEDSNLMTLYKKIIAGEYHCPPWLSPGAKNLIVRILDPNPMTRITIPEVLGDAWFKKNYKPAVFEEKEEANLDDVDAVFKDSEEHHVTEKKEEQPTSMNAFELISMSRALDLGNLFEEEESIPFNLQGFKRETRFAAKGAANDLVQKIEEASKPLGFDIQKKNYKRYLCTQMRLENVTAGRKGNLRVATEIFQVSPSLHMIEVRKTKGDTLEFHKFYKKLSTSLNDVVWKSGESSGLSK

SEQ ID NO: 6187 - protein, 420 aa, Listeria innocua Clip11262
MSQKIQVENGVLKTPNNPVIPFIEGDGTGPDIWAAAKRVLDAAVKKAYNGEKEIAWKEVLAGEKAFKQTGEWLPQETLDTIDEYLIAIKGPLTTPIGGGIRSLNVALRQELDLYVCLRPVRYFKGVPSPVKRPEDTDMVIFRENTEDIYAGIEFKEGSAESKKLIDFLKSEFGVDKIRFPETSGIGIKPISKEGTERLVRSAIEYAIKEGRKSLTLVHKGNIMKFTEGAFKNWGYDLCEREYGDKVFTWNEYDRIKEAEGTEAADAKQKEELAAGKILVKDSIADIFLQQILTRPAEFDVVATMNLNGDYISDALAAQVGGIGIAPGANINYLTGHAIFEATHGTAPKYAGLDKVNPSSVILSGTLLLEHIGWGEAAALINHSMEKTIAAKTVTYDFARLMDGATEVKCSEFADELIKNF

SEQ ID NO: 6188 - protein, 444 aa, Zea mays
MDEFELEDNLEFILQSIQELMEDPGDNNAFGDANQNELFASIVNYDQENMLPDVSAADVAAGKDIQGIPWEKMLFGRDKYREMKMKNYRNYQNLSYAREDALQECKQVKKDSPYYDFHYNTRRARPSIVHFQLRNLVWATTKHDVYTMHDQSVTHWSSLEQTSTELINADDCIVPKQRGHGSQSVAMVQVTTMAVDSNLLVVGGFQGEIICKRLDDEGVVYSTRVTDDENAITNSLEMYQDPSGSRRLVAANNDCSIRIFDTEYFDLLKHYVFPWSVNSVSVSPNGKLFAVLGDHEDGCVVDPKCGKAIGSLRGHLDYSFASAWHPDGNIVATGSQDTTCRLWDIRNLSQSVAVLGGRMGSIRCVKFSPDGRFLATAEPVDFVHMYDAYADYSRSHEIDLFGEIGGLAFSPDTEAFYVGLADQTYGGMIEFSKRHQHHYFNSLW

SEQ ID NO: 6189 - protein, 317 aa, Pichia guilliermondii
MSIKLNSGYDMPSVGFGCWKVDNATCADTIYNAIKVGYRLFDGAEDYGNEKEVGDGINRALDEGLVARDELFVVSKLWNSFHDPKNVEKALDKTLSDLKVDYLDLFLIHFPIAFKFVPFEEKYPPGFYCGDGDKFHYEDVPLIDTWRALEKLVEKGKIRSIGISNFSGALIQDLLRSAKIKPAVLQIEHHPYLQQPRLVEYVQSQGIAITAYSSFGPQSFVELDHPRVKDVKPLFEHDVIKSVAGKVKKTPAQVLLRWATQRGLAVIPKSNNPDRLLSNLKVNDFDLSQEDFQEISKLDIELRFNNPWDWDKIPTFI

SEQ ID NO: 6190 - protein, 155 aa, Lilium longiflorum
MGSKLTREEYDTLLAAFHKLTVRLEVASVPKDATPADIKNLPDAYLYFIDMPGVRTGEIKVEVEDDSALVIIGERKREEEEKYQMMERWTGKRMRKFELPENADTKAVSAVWKNGVLAVTVRKLPAWEVAGISFNIERLPVPLPTKTKSIEVKIA

SEQ ID NO: 6191 - protein, 203 aa, Lilium longiflorum
QSSQSMESAMITLDLPVIAAYRQLMEIPGETSNSLGDPSQSYALDAPTLTYALDAPTRSYVLDAPTLSYAHDAPTLTYALGAPASTYALDAGAMASTAADVKDLPAAYVFVVDMPGVGSGDLKVKVEGDNVLLISGERKREEEGVYLCIERRVGKLTKMFVLPENANTEAVSAVCKDGVLTVTVEKRPPQEPKKPKVIEVKVA

SEQ ID NO: 6192 - protein, 199 aa, Candida albicans SC5314
MSVPKTKSSSNGYTSVPQGENQADNLSNSETLTNNNQERSTDEYELQTLNSLDYEVENGPEEQQEEEQTGSSTMKMAFMNMANSILGAGIIGQPYAFRNSGLIGGILIMILLTVLIDWTLRLIIKNSILSQTKSYQDTVNYCFGVWGKIVLLVSICSFAYGGCMAFCVIIGDTIPHVLKAFIPESITRSDGSIWVGLVA

SEQ ID NO: 6193 - protein, 512 aa, Streptomyces clavuligerus
MVTAAISGTDEIRARAEQALTRCGVDLTAVKGDALTARTPLTGADLFGLRAQTPEDVDRAVEAAHTAFLTWRTTPAPVRGALVKRFGELLTEHKQDLADLVTIEAGKIRSEALGEVQEMIDICDFAVGLSRQLYGRTMPSERPGHRLMETWHPLGVVGVISAFNFPVAVWAWNAAVALVCGDTVVWKPSELTPLTALACAALLDLAIADAGAPKGLNQVVVGAADVGERLVDSPRVPLVSATGSTRMGRAVGPRVAARFGRTILELGGNNAAVVTPSADLDLTVNAAVFAAAGTAGQRCTTLRRLIVHEDIADTVVERLTAAFERLPIGDPFQDTTLVGPLVNEAAFGRMREAVERATAEGGTLCAGGERQFPDAAPGAYYVRPALVRMPAQTAVVREETFAPILYVLTYRDLDEAIRLNNEVPQGLSAGIFTADQSEAERFLAPDGADCGIANVNIGTSGAEIGGAFGGEKETGGGRESGSDAWRAYMRRATNTVNYSGRVALAQGVDFSQ

SEQ ID NO: 6194 - protein, 460 aa, Xanthomonas campestris pv. campestris str. ATCC 33913
MSERVVDPSVLRSLQQLDAAHHLHPFNDNAALASKGTRILTRGEGVYVWDADGNKLLDAFAGLWCVNLGYGRAELAQAAARQMEQLAYYNSFFQCTTEPTVHLAAKLAELAPGDLNHAFFANSGSEANDTILRLVRHFWAVQGQPQKHIFIGRHDGYHGTTMGGASLGGMRGMHRQGGLPIPGIEHIAPPNHFGEGGEMDPDDYGLLAARRLEEKILQLGPDTVAAFIGEPIMGAIGVYIPPRSYWPEIERICRRYDVLLVADEVICGFGRTGAWFGAEYFGFQPDVMTLAKGITSGYIPLAAAMFNDRVAGVLKRQGGELAHGGTYAGHPVCAAVALENLRLLQDEGIVDTARTQIAPYLAQRWAELGAHRLVGEARIAGLVGALELVPDKRRRGVYFPERGRVGALCRDFALRRGLILRATYDAMLLSPPLIITCEQVDELFDKTWAALDDTAQALGK

SEQ ID NO: 6195 - protein, 382 aa, Saccharomyces cerevisiae
MRALAYFKKGDIHFTNDIPRPEIQTDDEVIIDVSWCGICGSDLHEYLDGPIFMPKDGECHKLSNAALPLAMGHEMSGIVSKVGPKVTKVKVGDHVVVDAASSCADLHCWPHSKFYNSKPCDACQRGSENLCTHAGFVGLGVISGGFAEQVVVSQHHIIPVPKEIPLDVAALVEPLSVTWHAVKISGFKKGSSALVLGAGPIGLCTILVLKGMGASKIVVSEIAERRIEMAKKLGVEVFNPSKHGHKSIEILRGLTKSHDGFDYSYDCSGIQVTFETSLKALTFKGTATNIAVWGPKPVPFQPMDVTLQEKVMTGSIGYVVEDFEEVVRAIHNGDIAMEDCKQLITGKQRIEDGWEKGFQELMDHKESNVKILLTPNNHGEMK

SEQ ID NO: 6196 - protein, 429 aa, Rhizobium tropici
MTEQSAKLTWGEKTVDLPVKTGTIGPSVIDIGALYKNTSTFTYDPGFTSTASCESSITFIDGDEGVLLHRGYPIEQLAEHGDFLEVCYLLLYGELPTAAQKKDFDYRVVHHTMVHEQMSRFFTGFRRDAHPMAVMCGCVGALSAFYHDSTDITDPHQRMVASLRMIAKMPTLAAMAYKYHIGQPFVYPKNDLDYASNFLRMCFAVPCEEYVVNPVLARAMDRIFILHADHEQNASTSTVRLAGSSGANPFACIAAGIACLWGPAHGGANEAALNMLTEIGTVDRIPEYIARAKDKNDPFRLMGFGHRVYKNYDPRAKIMQKTAHEVLGELGIKDDPLLDIAIELERIALTDDYFIEKKLYPNVDFYSGITLKALGFPTTMFTVLFALARTVGWIAQWNEMIEDPDQRIGRPRHVYTGAPLREYVPVSKR

SEQ ID NO: 6197 - protein, 319 aa, Bartonella grahamii
DGDKGILLYRGYPIDQLAEKGDFLESCYLLLYGELPTQQEKNEFDRCIMQHTMVHEQFARFFHGFRRDSHPMAVMVACLGAMSAFYHDSIDITDPHQRMIASVRLISKVPTLAAMAYKYSIGQAFVYPRNDLSYAANFLRMCFAVPCEEYKTNPVLARAMDQIFILHADHEQNASTSTVRLAGSSGANPFACIAAGVACLWGPAHGGANEACLKMLQEIGSIERIPEFIARAKDKNDPFRLMGFGHRVYKNYDPRAKIMQKTCHEVLKELNIQDDPLLDIAIELEKIALSDEYFIEKKLYPNVDFYSGITLKALGFPTE

SEQ ID NO: 6198 - protein, 215 aa, Aspergillus oryzae
MSSTSPSKEPEVEPEVQSGEEQEQMDKEQQDQAQNQGEFEVKEQDRWLPIANVARIMKLALPDNAKIAKEAKECMQECVSEFISFITSEASEKCQQEKRKTVNGEDILFAMTSLGFENYAEALKIYLSKYRETQSARGEHQNRPTSSGYASGGPVGGVSSAPGGRPATAGGFPDAADNTNSIMNPSLDPTEQDPSAYGYPPMVGQPHNGTAGDSY

SEQ ID NO: 6199 - protein, 373 aa, Listeria innocua Clip11262
MTLSKGLENVYVAETSISSIIDDMLTYVGYGIDDLMENNASFEEVIYLLWHLRLPNKEEFKKFKLEIQENMAVSETIITSLRMQNHQKLHPMSVLRTTVSMLGVFDTEAELDDGEAVYRKGLRLQAKMPTIVAAFSRIRRGLDPIPPREDLNMAANFLYMITGEEADELSVEAMNKALVLHADHEFNASTFTARVCVATLSDVYSGVTSAIGALKGPLHGGANERVFDMLEEIDAAGDVRNYIQEKIDTKQKIMGFGHRVYRGGDPRAKHLREMSRKLTAEKGEEKWFDISLQVEEAVWELKHLKPNVDFYSASVYHALGIDRDLFTLVFSVSRVSGWLAHIFEQYRDNRLIRPRAIYVGPENRSYLPVEERI

SEQ ID NO: 6200 - protein, 229 aa, Streptococcus agalactiae NEM316
MNDNVIYTQSDSGLNQFFAKIYGLVGIGVGLSAAVSAIMLYMFPQNMIAIMQKMPGLYFGAIILELVLVFVASGAARRNTPAALPLFLIYSALNGFTLSFIIARYTQTTVLQAFITSAAVFFAMALIGAKTKKDLSGMRKALMAALIGILIASLVNLFIGSGGMSYIISIVCVIIFSGLIAYDNQMIKYVYNSQGGQVADGWAVSMALSLYLDFINLFLNILRLFARND

SEQ ID NO: 6201 - protein, 211 aa, Thermosynechococcus elongatus BP-1
MSANFLIQTVSNTPENILWHQSTVTRARREQLNGHKSYVLWFTGLSGAGKSRLAHTVEERLHRLGCRTFVLDGDNVRHGLCSDLDFSEVGRKENIRRIGEVAKLMMEVGLIVMTAFISPFRADREAVRNRMPYGDFLEIYCQVSLEACEARDVKGLYKKARAGQIKNYTGIDSAYEAPLKPELVVNTECLTLEESVSAVLRMLHERGMVVQ

SEQ ID NO: 6202 - protein, 119 aa, Arabis alpina subsp. caucasica
PGSFNKILISYESGTVNGQWSAVGRTAVTTTLAGCTAALTTLFGKRLLSGHWNVTDVCNGLLGGFAAITGGCSVVEPWAAIICGFVAACVLLGCNKLAEKLRYDDPLEAAQLHGGCGAW

SEQ ID NO: 6203 - protein, 121 aa, Clostridium perfringens
MTKEQIIGALKEMSVLELNEVVKACEEEFGVSAAAPVAVVGGAAAGAAAEEKSEFDVVLTNAGANKIKVIKAVRELTGLGLKEAKEIVDGAPKTLKEAVAKEEAEDMKAKLAEVGAEVELK

SEQ ID NO: 6204 - protein, 319 aa, Listeria innocua Clip11262
MKRIAILTSGGDAPGMNAATRAVVRKAIYEGLEVYGINYGFLGLVNGDIRKLELGSVGDLLHRGGTFLYSARYPEFATEEGQLKGIEQLKKHQIDGLVVIGGDGSYHGAEALTKRGFPTIGIPGTIDNDISGTDFTIGFDTALNTVLDALDKIRDTATSHERTFIIEVMGRDAGDIALWSGLAGGAEAIIVPEESFNMDDVVDRLNKGRERGKKHSIIVVAEGVMSGNEFAKQLAEYGDYHARVTVLGHVQRGGSPTAFDRVLASRLGARSVELLLENRGGLAVGIRENRIVENNIGEILKEKHTLDQKLFDLASILSI

SEQ ID NO: 6205 - protein, 130 aa, Nostoc sp. PCC 7120
MSAATDQILDQLKSLSLLEAAELVKQIEEAFGVSAAAPAGGMMMMAAPGAAAAAEPVEEQTEFDVVLESVPADKKIAVLKIVREITGLGLKEAKDLVEAAPKAVKEAIAKDAAEDAKKRIEEAGGKVTVK

SEQ ID NO: 6206 - protein, 506 aa, Oceanobacillus iheyensis HTE831
MRYANPNKQDAIVNFEKRYDNFIGGKYQPPINGNYFENVSPVTGEVFCEIARSTKEDVDAAIDAAHAAKDAWGKTSVAERAVILNKIADRIEENLEKLAVAETWDNGKAVRETLAADIPLAVDHFRYFAGVIRAQEGTLSQIDEDTVAYHFHEPLGVVGQIIPWNFPILMATWKLAPALAAGNCVVLKPAEQTPASIHVLLDLIKDLLPDGVLNVVNGFGVEAGKPLASNSRIAKIAFTGETTTGRLIMQYASENIIPVTLELGGKSPNIFFEDVMDKDDAFVDKAIEGMVMFALNQGEVCTCPSRALVHESIYDRFMEKVIQRVNQIKIGHPLDTDTMMGAQASQEQMEKIKSYLDIGKQEGAEVLTGGNVNALEGELAAGYYVEPTIFKGNNKMRIFQEEIFGPVLSVTTFKDKDEAMEVANDTLYGLGAGIWTRDINTAYRFGRGIEAGRVWTNCYHQYPAHAAFGGYKKSGIGRENHLMMLGHYQQTKNLLISYGEGTAGLF

SEQ ID NO: 6207 - protein, 197 aa, Bacillus cereus ATCC 14579
MDTNITWHTASVSKDERRVKNGHHSFVIWFTGLSASGKSTVANAVARKLFEKNIGNYVLDGDNIRHGLNKDLGFSESDRMENIRRIGEVAKLFVDQGAVVLTAFISPFRVVRKQVRDLLAADEFIEIFVKCPIEECEKRDPKGLYKKARKGDIKDFTGIDSPYEEPEQAELIVETHKYSIEECAEQIVKYLQERSFI

SEQ ID NO: 6208 - protein, 164 aa, Cleisostoma racemiferum
IENKINRQVTFAKRRNGLLKKAYELSVLCDAEVALIIFSNRGKLYEFCSSTSMLKTLEKYQKCNFGSPESTIISRETQSSQQEYLKLKSRVEALQRSQRNLLGEDLGPLGSKELEQLERQLDSSLKQIRSTRTQFMLDQLADLQRREHMLCEANKALKRRFEES

SEQ ID NO: 6209 - protein, 495 aa, Escherichia coli
SYYHHHHHHLESTSLYKKAGLMQHKLLINGELVSGEGEKQPVYNPATGDVLLEIAEASAEQVDAAVRAADAAFAEWGQTTPKVRAECLLKLADVIEENGQVFAELESRNCGKPLHSAFNDEIPAIVDVFRFFAGAARCLNGLAAGEYLEGHTSMIRRDPLGVVASIAPWNYPLMMAAWKLAPALAAGNCVVLKPSEITPLTALKLAELAKDIFPAGVVNILFGRGKTVGDPLTGHPKVRMVSLTGSIATGEHIISHTASSIKRTHMELGGKAPVIVFDDADIEAVVEGVRTFGYYNAGQDCTAACRIYAQKGIYDTLVEKLGAAVATLKSGAPDDESTELGPLSSLAHLERVGKAVEEAKATGHIKVITGGEKRKGNGYYYAPTLLAGALQDDAIVQKEVFGPVVSVTPFDNEEQVVNWANDSQYGLASSVWTKDVGRAHRVSARLQYGCTWVNTHFMLVSEMPHGGQKLSGYGKDMSLYGLEDYTVVRHVMVKH

SEQ ID NO: 6210 - protein, 177 aa, Triticum aestivum
  misc_feature (27)..(27): Xaa can be any naturally occurring amino acid
  misc_feature (67)..(67): Xaa can be any naturally occurring amino acid
MAPTVMASSATSVAPFQGLKSTAGPPXSARRSNGASLGSVSNGGRIRCMQVWPIEGIKKFETLSYLXPPLSTEALLKQVDYLIRSKWVPCLEFSKVGFIFREHNASPGYYDGRYWTMWKLPMFGCTDATQVINEVEEVKKEYPDAYVRIIGFDNMRQVQCVSFIAFKPPGCEESGKA

SEQ ID NO: 6211 - protein, 330 aa, Methanococcus maripaludis S2
MHKICVIEGDGIGKEVVPAAVEVLKATGVEFEFNHALAGDEVFEKTGVALPEETIAAAKAADAILFGAAGETAADVIVKLRKILDTYANIRPVKSYNGINCLKTGIDYIIVRENTEGLYKGIEAEIADGVTVATRVITKDASERIFKHAFEMAKDRKKQGTAGKVTCAHKANVLKITDGLFKKTFYEVSNDYKDIQTEDFYVDAMNMFIISRPETFDIVVTSNLFGDILSDGAVGMVGGLGMAPSGNVGDKYGLFEPIHGSAPDIAGKGLANPTATILTAVMMLRYLKENEAAEKVEKALEEVLSLGLTTPDLGGTLSTSEMGQEVAKRV

SEQ ID NO: 6212 - protein, 303 aa, Triticum aestivum
MGGGVMRTAAKVGLAGGAAAAAGRFRNVAPSFATAPAAEAAAAAPLLSAAGEIPAVAPAGSQWASWEVDDWEFADWRSESASEADVAVVGGPRLVFAPPSREEAEEATAELREAIDRVYFKETPVEVVKEHDQELSKLGADALIPAMPGHVVQAFTLLKSSPEAQSVVASLASDKNVWDAVLKNERVMEFYKSHQQTLVNTFPEGTDSTDSVESPEKFEEASPEYALPTASPLSDFVDNAKKTMMEMVDNITNFFQDLFHNPAEAEAGPGSSSKKPSFAEMAAGGSFMALAMAVILVVLFKRA

SEQ ID NO: 6213 - protein, 108 aa, Triticum aestivum
MEHGSVADSSASTFSVMEEDHTLANSVRFVLNQDPRVAFCGYSIPHPADNKVNIRVQTTGDQAKDVMKDALQDLMVMGQHVRGTFDKAVADFKSKMPAEQMDVDLNQQ

SEQ ID NO: 6214 - protein, 151 aa, Picea abies
MAMDPLLSTVQQLLGVPDDLERILHAPTRSYMRDTEATASTPVDVKEYPNSYVFIVDMPGLKSNDIKVQVEDENVLNISGERKRNEKEEGAVKYIRMERRVAKFMRKFTLPADCNLEAISAACQDGVLTVTVPKLPPPEPKKPKTIAVKIG

SEQ ID NO: 6215 - protein, 502 aa, Atriplex hortensis
MAFPIPARQLFIDGEWREPLLKNRIPIINPSTEEIIGDIPAATAEDVEVAVVAARKAFKRNKGRDWAALWSHRAKYLRAIAAKITEKKDHFVKLETLDSGKPRDEAVLDIDDVATCFEYFEYFAGQAEALDAKQKAPVTLPMERFKSHVLRQPIGVVGLISPWNYPLLMDTWKIAPALAAGCTTVLKPSELASVTCLEFGEVCNEVGLPPGVLNILTGLGPDAGAPIVSHPDIDKVAFTGSSATGSKIMASAAQLVKPVTLELGGKSPVIMFEDIDIETAVEWTLFGVFWTNGQICSATSRLLVHESIAAEFVDRMVKWTKNIKISDPFEEGCRLGPVISKGQYDKIMKFISTAKSEGATILCGGSRPEHLKKGYYIEPTIITDITTSMQIWKEEVFGPVICVKTFKTEDEAIELANDTEYGLAGAVFSKDLERCERVTKALEVGAVWVNCSQPCFVHAPWGGVKRSGFGRELGEWGIENYLNIKQVTSDISDEPWGWYKSP

SEQ ID NO: 6216 - protein, 267 aa, Humulus lupulus
MADANMGAGGGQFPDFPSVLTHGGQYVQFDIFGNFFEITTKYRPPIMPIGRGAYGIVCSVLNTELNEMVAVKKIANAFDIYMDAKRTLREIKLLRHLDHENVIGLRDVIPPPLRREFSDVYIATELMDTDLHQIIRSNQGLSEDHCQYFMYQLLRGLKYIHSANVLHRDLKPSNLLLNANCDLKICDFGLARPNIENENMTEYVVTRWYRAPELLLNSSDYTAAIDVWSVGCIFMELMNRKPLFAGKDHVHQIRLLTELLGTPTESN

SEQ ID NO: 6217 - protein, 119 aa, Barbarea verna
PGSFNKIAVTYATGTYNGQWSAVGRTAVTTTLAGCTAALTTLFGKRLLSGHWNVTDVCNGLLGGFAAITGGCSVVEPWAAIICGFVAALVLLGCNKLAEKLKYDDPLEAAQLHGGCGAW

SEQ ID NO: 6218 - protein, 321 aa, Bartonella sp.
YIDGDKGILLYRGYPIDQLAEKGDFLESCYLLLYGELPTQQEKNDFDRCIMQHTMVHEQFSRFFHGFRRDSHPMAVMVACLGAMSAFYHDSIDITDPHQRMIASVRLISKVPTLAAMAYKYSIGQAFVYPRNDLSYAANFLRMCFAVPCEEYKINPVLARAMDQIFILHADHEQNASTSTVRLAGSSGANPFACIAAGVACLWGPAHGGANEACLKMLQEIGSIKRIPEFIARAKDKNDPFRLMGFGHRVYKNYDPRAKIMQKTCHEVLKELNIQDDPLLDIAIELEKIALSDEYFIEKKLYPNVDFYSGITLKALGFPTE

SEQ ID NO: 6219 - protein, 119 aa, Crambe cordifolia
PGSFNKILVTYESGSMNGQWSAVGRTAVTTTLSGCTAALTTLFGKRLLSGHWNVTDVCNGLLGGFAAITGGCSVVEPWAAIICGFIAALVLLGCNKLAERLRYDDPLEAAQLHGGCGAW

SEQ ID NO: 6220 - protein, 482 aa, Ralstonia eutropha JMP134
MLKLQDPSLLRQQCYIDGRWTDGERRIDVTNPATGELVAQVPQFGVAETRHAIEAANRALPAWRARLAKERSALLRKWFELILANQDDLARIMTAEQGKPFAEAKGEIAYAASFIEWFAEEGKRVYGETIPAPVSSQRIVVTKEPIGVCAAITPWNFPAAMITRKAGPALAAGCTMVVKPASQTPLTALALAVLAERAGIPAGVLSVVTGSAGAIGGELSSNPLVRKLTFTGSTEVGRVLMAQTASTIKKVSMELGGNAPFIVFDDADLDAAVEGAIISKYRNAGQTCVCANRIYVQDKVYDAFAQKLVAAVAQLKVGNGMEDGVRIGPLIDEKAVAKVEEHIADALGKGARVLEGGHRHGLGHTFFQPTVLADVAPNMLVAREETFGPLAPLFRFKTEDDVVAMANDTEFGLASYFYARDLGRVWRVSERLEYGMVGVNTGLISNEVAPFGGVKQSGVGREGSHYGIEDYLVIKYTCMAGI

SEQ ID NO: 6221 - protein, 288 aa, Bacillus sp. KSM-K16
MKTIQWYPGHMAKARREIKEKLKLIDVVIELVDARLPQSSRNPLIDELAQQKPRLMLLNKADLADPAETERWRAFFKRTGAEVLAINAQTGAGVKNIAPACKTLASALYQKWEQKGMKPRPLRAIILGIPNVGKSTLINRLVNKRQAKVGDRPGVTKQQQWIKVKQELELLDTPGILWPKFDDQEVGLRLAATGAIKDELLDYGDVAAYALRYLAAEYPDLLEARYGIERNSEEDDVVPLFEAIGKKRGCIVRGGLVDFDKTAELILRELRSGTIGKVTLEKAEHEAL

SEQ ID NO: 6222 - protein, 362 aa, Pseudomonas putida
MNDLSHTHMRAAVWHGRNDIRVEQVPLPADPAPGWVQIKVDWCGICGSDLHEYVAGPVFIPVEAPHPLTGIQGQCILGHEFCGQIAKLGEGVEGFAVGDPVAADACQHCGTCYYCTHGLYNICERLAFTGLMNNGAFAELVNVPANLLYRLPQGFPPEAGALIEPLAVGMHAVKKAGSLLGQTVVVVGAGTIGLCTIMCAKAAGAAQVIALEMSSARKAKAKEVGATVVLDPSQCDALAQIRALTFGLGADVSFECIGNKHTAKLAIDTIRKAGKCVLVGIFEEPSEFNFFELVSTEKQVLGALAYNGEFADVIAFIADGRLDIRPLVTGRIGLEQIVELGFEELVNNKEENVKIIVSPGVR

SEQ ID NO: 6223 - protein, 450 aa, Xanthomonas campestris pv. campestris str. ATCC 33913
MHDHPSSDAAHAMQTPAAMEAFWMPFTANRQFKARPRLLASAAGMYYRDVEGRQILDGTAGLWCCNAGHARERIVAAIRAQAGTLDFAPTFQMGSPLPFALAERLAALAPPGLGHVFFTNSGSEAVDSAMKIVLAYHRLRGEGQRTRFIGREKAYHGVGFGGMSIGGLPNNRKWFGPLLAGTDHLRHTLDLQRNAYSRGLPAFGVELADDLERLITLHDASTIAAVFVEPVSGSAGVILPPEGYLQRLRAICDRHGIVLVFDEVITGFGRVGEAFAAQRFGVTPDLITAAKGLTSGTVPMGAVLVADAIHDAFMHGPQAAIELFHGYTYSGHPLACAAALATLDTYAEEQLFTRAITLGPQWEEALHSLRGLPHVIDIRNIGLIGAIELAPREGAPGARGYEVFERCFHEGGLLVRVTGDVIALSPPLIVTPDQIGQMVETLAAILRKVD

SEQ ID NO: 6224 - protein, 296 aa, Saccharomyces cerevisiae
MITTPLVHVASVEKGRSYEDFQKVYNAIALKLREDDEYDNYIGYGPVLVRLAWHISGTWDKHDNTGGSYGGTYRFKKEFNDPSNAGLQNGFKFLEPIHKEFPWISSGDLFSLGGVTAVQEMQGPKIPWRCGRVDTPEDTTPDNGRLPDADKDAGYVRTFFQRLNMNDREVVALMGAHALGKTHLKNSGYEGPFGAANNVFTNEFYLNLLNEDWKLEKNDANNEQWDSKSGYMMLPTDYSLIQDPKYLSIVKEYANDQDKFFKDFSKAFEKLLENGITFPKDAPSPFIFKTLEEQGL

SEQ ID NO: 6225 - protein, 476 aa, Saccharopolyspora spinosa
MPAQAAVIDGKLVEGPETLDVLDPSTGTLLDRTLRGTGEHVDAAVAAARAASREWAHTPYSERSAILRRIGELIRRDRGEFALLESQDTGKPLAQACADTDVAARYFEYYANTMEAFFGHSLPPNGDFVAYTRHVPFGVTGHIIPWNYPLQIGCRTIAPAIAVGNCAVVKPAEEAPLSVLKVARTALEAGLPAGVLNVVPGLGAQAGAALAGHAGIDHLSFTGSVPVGAAVAHAAAENVIPVVLELGGKSPNIVFPDADLDAAIPVIVKSMLQNAGQTCSAGSRLLVHEEVRDEVLARIDEALRGVRIGPGPQDLDLGPLISAKQRDRVTQMVQRAADSGARQLGGPGQVELPEGGFYFPPTVFTDVDPAQEIAQEEVFGPVLAAMSFGTVDEAIQLANGTQYGLIAAAWTRNLDVAHVMAEEIRAGQVYLNTYGGGGGVEYTFGGFGKSGYGREKGFEALKGFCQTKTIVTKVTR

SEQ ID NO: 6226 - protein, 306 aa, Sporothrix schenckii
MDGKRQLNSFQQLEKLGEGTYATVFKGRNRHTGEFVALKEIHLDSEEGTPSTAIREISLMKELKHENIVALHDVIHTESKLMLVFEYMDGDLKKYMDTNGERGALKPMLIKSFMYQLLKGIDFCHQNRVLHRDLKPQNLLINGKGQLKLGDFGLARAFGIPVNTFSNEVVTLWYRAPDVLLGSRTYNTSIDIWSVGCIMAEMYTGRPLFPGTTNEDQMLRIFRIMGTPTEHNWPGISQFPEYKATAPRYATQDLRQILPQIDATGIDLLQRLLQLRPELRISAHDALQHPWFHDILQYQHCQQAAG

SEQ ID NO: 6227 - protein, 460 aa, Zea mays
MVNGERRADAECTRASLLGRYEIGRTLGEGNFGKVKYARHIASGGHFAIKILDRSKILSLRIDDQIRREIGTLKLLKHPNVVRLHEVAASKTKIYMVLEFVNGGELFDKIAIKGKLSEHEGRRLFQQLIDGVSYCHDRGVYHRDLKPENVLVDRKGTIKISDFGLSALPQHLGSDGLLHTTCGSPNYIAPEVLQNRGYDGSLSDLWSCGVILYVMLVGCLPFDDRNLVVLYQKIFKGDCQIPKWLSPAAQDLLKRILQPNPMKRINVAGIREHEWFKKDYVPAVPHDDDEDVLPSPAPSIKPIDEPAQEKCSPINAFQLIGMASSLDLSGFFEEEDAAQRKIRFTSTHPPKDLFDKIESVVMEMGFKVHRGAGKLKVLRNSKCSRNPSSLLVCTEVFELGPSLYVVELRKSHGDSTLYRQLCERLSDELGACKTDQIARTESSSDDLSSVDGEAFPLSGF

SEQ ID NO: 6228 - protein, 432 aa, Rhodospirillum rubrum
MSLRSPGRVAYVNARLLDPASGLDQTGALLADGEHIVEVHPGAFTAPEDAEIIDCQGACLAPGLVDMRVQLREPGEEHKESMRSAGQAAVAGGITSMVCLPNTNPPMDDEATLEFVARRARLAGLAKVYCYGACTKGLRGEDLAELGIMAEAGALAFTDGVKAIANAQMMRRVLAYAATFDLLVMQHPEEPTLAGGVMNAGDLATRMGLSGIPREAEIILLERDLRLVAMTGGRYHAAHISTGESVALIRRAKDQGLRVSCDTAPFYFALNELAVGDYRTFAKLSPPLRGESDRRAIIEGLKDGVIDAIASDHSPQDQDTKRLPFAQAAFGAVGLETLLSISLELHHNGHLSLLEVLKRLTVAPAGLLGLDAGRLRPGGKADLLVFDPYRAGKVDATRFLSKSKNSPFDDRPVQGRVLRTVVDGRTVFPANG

SEQ ID NO: 6229 - protein, 109 aa, Zea mays
  misc_feature (73)..(73): Xaa can be any naturally occurring amino acid
  misc_feature (85)..(85): Xaa can be any naturally occurring amino acid
  misc_feature (94)..(94): Xaa can be any naturally occurring amino acid
MICSCADIYMPTDSNHTENIQDLDQLNRKLNQIDDEVAIFHHMQAKVHKYIHERDPYFISSDATRSCIHQALXVGNIDYAFTPQXVHHHFQACXTINKVTILTDKFFIQ

SEQ ID NO: 6230 - protein, 186 aa, Zea mays
  misc_feature (112)..(112): Xaa can be any naturally occurring amino acid
MTASQSSMSGGGEPGVRTVVWFRRDLRVEDNPALAAAARTAGEVVPAYVWSPEEDGPYYPGRVSRWWLSQSLKHLDASLRRLGAWRLVTRRSSDAVVALIDLVRSTGATHLXFFNRLYDPLSLVRDHRVKEQLSAEGITVQSFNADLLYEPWEVLDDDGFPFTMFAPFWNRCLCMPDPAAPLLPPK

SEQ ID NO: 6231 - protein, 580 aa, Glycine max
  misc_feature (249)..(249): Xaa can be any naturally occurring amino acid
FGSSDLTLGELLKYKSEEGVRVLLLVWDDKTSHDKVFLKTAGVMGTHDEETRKFFKHSSVMCVLSPRYASNKMSFLKQQVVGTVFTHHQKCVIVDTQAAGNNRKITAFIGGLDLCDGRYDTPEHRLFRNLDDVFDGDFHNPTFSAGTRVPRQPWHDLHCRIDGPAAYDVLINFEQRWRKATKWKEFAILFKKSSQWHDDALIRIERISWILSPSGAATLKDKSDDYTVPEDDPLVWVSSEDDPENWHVXGSLKGFPKRVDVALSQNLICAKNLVIDKSIQTAYIQAIRSAQHFIYIENQYFIGSSYAWPAYKDAGADNLIPMELALKIASKIRAKERFAVYIVLPMWPEGDPKTGAMQEILFWQGQTMQMMYDAVARELKSMQLTDVHPQDYLNFYCLGNREHFNEDSSSTNGAQVSTAYKYRRFMIYVHAKGMIVDDEYVIIGSANINQRSMAGTKDTEIAMGAYQPHYTWSAKKRHPHGQIYGYRMSLWGEHLGMLDETFEEPERLECVHKVNKIADNNWKLFASEDFSLLQGHLLKYPVQVDSDGKIRSLPDCENFPDAGGKILGAHSTTIPDILTT

SEQ ID NO: 6232 - protein, 115 aa, Malus x domestica
MASSAVTKLALVVALCMAVSVAHAITCGQVTSSLAPCIGYVRSGGAVPPACCNGIRTINGLARTTADRQTACNCLKNLAGSISGVNPNNAAGLPGKCGVNVPYKISTSTNCATVK

SEQ ID NO: 6233 - protein, 436 aa, Glycine max
MSPAAGVSVPLLGDSKGTPPPASVPGAVFNVATSIVGAGIMSIPAIMKVLGVVPAFAMILVVAVLAELSVDFLMRFTHSGETTTYAGVMREAFGSGGALAAQVCVIITNVGGLILYLIIIGDVLSGKQNGGEVHLGILQQWFGIHWWNSREFALLFTLVFVMLPLVLYKRVESLKYSSAVSTLLAVAFVGICCGLAITALVQGKTQTPRLFPRLDYQTSFFDLFTAVPVVVTAFTFHFNVHPIGFELAKASQMTTAVRLALLLCAVIYLAIGLFGYMLFGDSTQSDILINFDQNAGSAVGSLLNSLVRVSYALHIMLVFPLLNFSLRTNIDEVLFPKKPMLATDNKRFMILTLVLLVFSYLAAIAIPDIWYFFQFLGSSSAVCLAFIFPGSIVLRDVKGISTRRDKIIALIMIILAVVTSVLAISTNIYNAFSSKS

SEQ ID NO: 6234 - protein, 460 aa, Kurthia sp. 538-KA26
MNSHDLEKWDKEYVWHPFTQMKTYRESKPLIIERGEGSYLFDIEGNRYLDGYASLWVNVHGHNEPELNNALIEQVEKVAHSTLLGSANVPSILLAKKLAEITPGHLSKVFYSDTGSAAVEISLKVAYQYWKNIDPVKYQHKNKFVSLNEAYHGDTVGAVSVGGMDLFHRIFKPLLFERIPTPSPYTYRMAKHGDQEAVKNYCIDELEKLLQDQAEEIAGLIIEPLVQGAAGIITHPPGFLKAVEQLCKKYNILLICDEVAVGFGRTGTLFACEQEDVVPDIMCIGKGITGGYMPLAATIMNEQIFNSFLGEPDEHKTFYHGHTYTGNQLACALALKNIELIERRDLVKDIQKKSKQLSEKLQSLYELPIVGDIRQRGLMIGIEIVKDRQTKEPFTIQENIVSSIIQNARENGLIIRELGPVITMMPILSMSEKELNTMVETVYRSIQDVSVHNGLIPAAN

SEQ ID NO: 6235 - protein, 117 aa, Glycine max
  misc_feature (88)..(88): Xaa can be any naturally occurring amino acid
  misc_feature (110)..(110): Xaa can be any naturally occurring amino acid
VFCHLLFAQQYHDMYQREERMRMSREERARTPYVDYLRPIIADGDTGFGGPTTTVKLCTLYEERGAGGIHIEDQSSATKKCGHIYPKXLDAISEHINRLDAGRLQFDGMXAETVLAA

SEQ ID NO: 6236 - protein, 166 aa, Zea mays
MADDGGSHEGSGGGGGVREQDRFLPIANISRIMKKAVPANGKIAKDAKETLQECVSEFISFVTSEASDKCQKEKRKTINGDDLLWAMATLGFEEYVEPLKIYLQKYKEMEGDSKLSTKAGEGSVKKDAISPHGGTSSSSNQLVQHGVYNQGMGYMQPQVIYRTVIC

SEQ ID NO: 6237 - protein, 535 aa, Glycine max
  misc_feature (204)..(204): Xaa can be any naturally occurring amino acid
  misc_feature (206)..(206): Xaa can be any naturally occurring amino acid
MGNCCATPSTDETANKKGKKGKKENPFAIDYGFNAAAAANGSKLTVLKSPTGREIEARYELGRELGRGEFGITYLCTDKETGEELACKSISKKKLRTAIDIDDVRREVEIMRHLPQHPNIVTLKDTYEDDNAVHLVMELCEGGELFDRIVARGHYTERAAAAVTKTIVEVVQMCHKQGVMHRDLKPENFLFANKKETAALKAIXFXLSVFFKPRERFNEIVGSPYYMAPEVLKRNYGPEVDIWSAGVILYILLCGVPPFWAETEQGVAQAIIRSVVDFKRDPWPKVSDNAKDLVKKMLDPDPRRRLTAQEVLDHPWLQNAKKAPNVSLGETVRARLKQFSVMNKLKKRALRVIAEHLTVEEAAGLKEGFQLMDTNNRGKINIDELRVGLHKLGHQVPESDVQALMEAGDVDGDGHLDYGEFVAISVHLRKMGNDEHLRKAFQFFDQNKSEYIEIEELRSALSDDLDTNSEEVISAIMHDVDTDKDGRISYDEFATMMKAGTDWRKASRQYSRERFASLSLTLMRDGSLHLNNEKQ

SEQ ID NO: 6238 - protein, 316 aa, Triticum aestivum
  misc_feature (43)..(43): Xaa can be any naturally occurring amino acid
  misc_feature (63)..(63): Xaa can be any naturally occurring amino acid
  misc_feature (68)..(68): Xaa can be any naturally occurring amino acid
  misc_feature (89)..(89): Xaa can be any naturally occurring amino acid
  misc_feature (99)..(99): Xaa can be any naturally occurring amino acid
  misc_feature (109)..(109): Xaa can be any naturally occurring amino acid
  misc_feature (116)..(116): Xaa can be any naturally occurring amino acid
  misc_feature (124)..(124): Xaa can be any naturally occurring amino acid
  misc_feature (152)..(152): Xaa can be any naturally occurring amino acid
HAHCPQQYIRFAPQSTARALSVFNDDIQGTASVVLAGPLGGLXRMIGGGLVDQTYLFLGAGEXAGTGXIAELIALGDVENTLNLPVDDXHKKIWLVDSXKGLLVESRKXSLQHFKXPFAHEHEXLKTLLEAVQSIKPTVLIGASGVGKTFTXEVIEAMASFNEKPVIFSLSNPTSHSECTAEEAYTWSKGTAVFASGSPFDPVEYEGKTFVPGQSNNAYVFPGFGLGVVISGAIRVHDDMLLAASEALAEEATQENFDKGLIFPPFTNIRKISASIAAKVAAKAYDLGLASRLPRPDDLVKYAESCMYTPLYRSYR

SEQ ID NO: 6239 - protein, 115 aa, Malus x domestica
MASSAVTKLALVVALCMAVSVAHAITCGQVTSSLAPCIGYVRNGGAVPPACCNGIRTINSLARTTADRQTACNCLKNLAGSISGVNPNNAAGLPGKCGVNVPYKISTSTNCATVK

SEQ ID NO: 6240 - protein, 151 aa, Picea glauca
MAMDPLLSTVQQLLGVPDDLERILHAPTRSYTRDTEATASTPVDVKEYPNSYVFIVDMPGLKSNDIKVQVEDENVLNISGERKRNEKEEGEVKYIRMERRVAKFMRKFSLPADCNLEAISAACQDGVLTVTVPKLPPPEPKKPKTIAVKIG

SEQ ID NO: 6241 - protein, 312 aa, Medicago sativa
MGSVEIPTKVLTNTSSQLKMPVVGMGSAPDFTCKKDTKDAIIEAIKQGYRHFDTAAAYGSEQALGEALKEAIELGLVTRDELFVTSKLWVTENHPHLVIPALQKSLKTLQLDYLDLYLIHWPLSSQPGKFSFPIDVADLLPFDVKGVWESMEESLKLGLTKAIGVSNFSVKKLENLLSVATVLPAVNQVEMNLAWQQKKLREFCNAHGIVLTAFSPLRKGASRGPNEVMENDMLKEIADAHGKSVAQISLRWLYEQGVTFVPKSYDKERMNQNLRIFDWSLTKEDHEKIAQIKQNRLIPGPTKPGLNDLYDD

SEQ ID NO: 6242 - protein, 179 aa, Chrysanthemum x morifolium
MASISSSAVATVNRTTSAQASMVAPFTGLKSNVAFPVTKKSNDFSSLPSNGGRVQCMKVWPPLGLKKYETLSYLPPLTETQLAKEVEYLLRNKWVPCLEFELEHGFPYRENNRSPGYYDGRYWTMWKLPMFGCNDASQVLKELNECKKEYPQSWVRIIGFDNVRQVQCISFIAHKPDGY

SEQ ID NO: 6243 - protein, 312 aa, Medicago sativa
MDSVEIPTKVLTNTSSQLKMPVVGMGSAPDFTCKKDTKDAIIEAIKQGYRHFDTAAAYGSEQALGEALKEAIELGLVTREELFVTSKLWVTENHPHLVIPALQKSLKTLQLDYLDLYLIHWPLSSQPGKFSFPIDVADLLPFDVKGVWESMEESLKLGLTKAIGVSNFSVKKLENLLSVATVLPAVNQVEMNLAWQQKKLREFCNANGIVLTAFSPLRKGASRGPNEVMENDMLKEIADAHGKSVAQISLRWLYEQGVTFVPKSYDKERMNQNLCIFDWSLTKEDHEKIDQIKQNRLIPGPTKPGLNDLYDD

SEQ ID NO: 6244 - protein, 318 aa, Bartonella sp.
ITYIDGDKGVLLYRGYPIDQLAEKGDFLESCYLLLYGELPTKQEKNDFDRCIMQHTMVHEQFARFFHGFRRDSHPMAVMVACLGAMSAFYHDSIDITDPQQRMIASVRLISKVPTLAAMAYKYSIGQAFVYPRNDLSYAANFLRMCFSVPCEEYKTNPVLTRAMDRIFILHADHEQNASTSTVRLAGSSGANPFACIAAGVACLWGPAHGGANEACLKMLQEIGSVKRIPEFIARAKDRNDPFRLMGFGHRVYKNYDPRAKIMQKTCHEVLKELNIQDDPLLDIAIELEKIALNDEYFVEKKLYPNVDFYSGITLKAL

SEQ ID NO: 6245 - protein, 480 aa, Saccharomyces cerevisiae
MSELGEYSKLENKELRTEFELTNFPFPGTTDNDSDDGSQGQNSLNIITPDMDDTLVNDVLRENDKKSSMRMAFMNLANSILGAGIITQPFAIKNAGILGGLLSYVALGFIVDWTLRLIVINLTLAGKRTYQGTVEHVMGKKGKLLILFTNGLFAFGGCIGYCIIIGDTIPHVLRAIFSQNDGNVHFWLRRNVIIVMVTTFISFPLSMKRNIEALSKASFLAVISMIIIVLTVVIRGPMLPYDWKGHSLKLSDFFMKATIFRSLSVISFALVCHHNTSFIFFSMRNRSVAKFTRLTHISIIISVICCALMGYSGFAVFKEKTKGNVLNSFPGTDTAINIARLCFGFNMLTTFPMEIFVLRDVVGNLLHECNLIKNYDEHTQLSGKQHVVITSSLVFITMGISLTTCNLGALFELIGATTASTMAYILPPYTNLLLTSKKKSWKERLPFYLCICFGFMIMIISSTQTIIDAVNGSDGQHCQI

SEQ ID NO: 6246 - protein, 128 aa, Triticum aestivum
MAPTVMASSATSVAPFQGLKSTAGLPVSRRSNGASLGSVSNGGRIRCMQVWPIEGIKKFETLSYLPPLSTEALLKQVDYLIRSKWVPCLEFSKVGFIFREHNASPGYYDGRYWTMWKLPMFGCTDATQ

SEQ ID NO: 6247 - protein, 494 aa, Rubrobacter xylanophilus DSM 9941
MNVEREGRVETRMIERLFVGGEWVGEASTGRTFEVENPASGRVIAVLPDGGGGEMRRAVEAAVAAQPGWEEATAYERASVLWRAAGLMRERAEHLARVMTLEQGKPLAESRGEISYAASFVEWFAEEGKRVYGESVPSSFRDKRILVLKRPVGVAAAITPWNFPAAMITRKLAPALAAGCAMVVKPSELTPLSALELAKIFEEAGLPRGLLSVVVGTDPGDITAPLMEDGRVRKLSFTGSTEVGKHLMRQAAKTMKRLSLELGGHAPFIVFEDADLEAAVEGALVSKMRNMGQTCVCANRIFVQKSVLEPFAERLVERMGRMKVGDGLQEGVSVGPLIEERALRKVERHVEDARQKGARVLLGGSRLSSGGGYFFAPTVLCGADESMLVFREETFGPVAALASFESEQEVVERANATPYGLAGYYYTRDVGRVMRLAEKLRYGILGANDGLPSTAQAPFGGLKESGFGREGGHWGIEEYLDVKYLSLGGLGSSS

SEQ ID NO: 6248 - protein, 140 aa, Brassica napus
KPGDKFKDLVGSAYYVAPEVLKRNYGPEADIWSAGVILFILISGVPPFWGENETGIFDAILKGELDFSADPWPTVSAGAKDLVKKMLKYDPKDRLTASEVLNHPWIKEDGEASDKPLDNAVLSRMKQFRAMNKLKKMALN

SEQ ID NO: 6249 - protein, 505 aa, Glycine max
MASLSCSANDLAPLFNDTAAANYLCAQFDSISRKLNVTTYAVDNTYLLFSAYLVFAMQLGFAMLCAGSVRAKNTMNIMLTNVLDAAAGGLSYYLFGFAFAFGGPSNGFIGRHFFGLRKFPKDSPPSGDYSFFLYHWAFAIAAAGITSGSIAERTQFVAYLIYSSFLTGFVYPIVSHWFWSSDGWASATRSHGNVLFGSGVIDFAGSGVVHMVGGIAGLWGALIEGPRIGRFDRSGRSVALRGHSASLVVLGTFLLWFGWYGFNPGSFLTIAKGYESGGYYGQWSAIGRTAVTTTLAGSTAALTTLFSKRLLAGHWNVIDVCNGLLGGFAAITSGCAVVEPWAAIVCGFVAAWVLIGLNKLAAKVEYDDPLEAAQLHGGCGAWGVFFTGLFAKKVYVEEIYGVGRPFGALMGGGGRLLAAQVIQILVVCGWVTATMAPLFYGLHKMKLLRISRDDETAGMDLTRHGGFAYAYHDDEDGSSRGVGFMLRRIEPAASTTPSPPAAPQV

SEQ ID NO: 6250 - protein, 161 aa, Antirrhinum majus
LKTKKITLRSSDGEVFEVEESLALESQTIKHMIEDDCADNVIPLPNVTGKILSKVIEYCKRHVDAAAAKADDKLASTGTSDDELKAFDADFVKVDQATLFDLILAANYLNIKTLLDLTCQTVADMIKGKTPEEIRKTFNIKNDFTPEEEEEVRRENQWAFE

SEQ ID NO: 6251 - protein, 384 aa, Synechocystis sp. PCC 6803
MGTKRIGILTSGGDCPGLNAVIRAVVKASALKGWEVYGIPYGTDGFVEVAHGKYQAEDLLLTKHGYALPGMLKGLDVLQFLSGSVLGSLSKGHPEQPAIAEAILKGYAILDLEALIVIGGDGSLDIIYDLAQKGNWHIIAIPKTIDNDVPFTDLAVGFSTAVDIVTQALYDLTFTAASHERIIIVQVMGRDAGHLTLHAGIAGGADIILIPEITPCLTSEIIRNCCYQLMNLRKSGRHFALIVISEGVHDQNNKKNKHIADYLAEEISETSQHLCDIKDPAFCDLISLDIRATTLGHLQRSGTPLSFDRLLATVFGIRAVELIEQEIYDQVVIWRSGKVEHADLKPIISIIKECHQENRCPFPVDRDGFMVKTAKSLGIYLGED

SEQ ID NO: 6252 - protein, 177 aa, Glycine max
  misc_feature (110)..(110): Xaa can be any naturally occurring amino acid
MSGWVSGKVKWFNDQKGFGFITPDDGSEELFVHQSQIKSDGFRSLAEGESVEFAIESESDGRAKAVDVTGPDGASVQGTRRGGDGGRSYGGGQGGGGGGYGGGGACYNCXESGHLAWDCSQGGGGDRYGGGGGGGGRYGGGGGGRYGGGGGGGGGGGSCYSCGESGHFARDCPSSAR

SEQ ID NO: 6253 - protein, 169 aa, Bacillus anthracis str. A2012
MIVKRGAKTMTVYDFSAKTITGEEKSLKDYEGKVLLIVNVASKCGFTPQYKGLQEVYDKYKEQGLEILGFPCNQFGGQEPGTEADITSFCELNYGVNFPMFAKIDVKGDKAHPLYTYMTEQAPGLLGMKAVKWNFTKFLIGKDGKVVGRFAPQTKPVDLEVEIEKVLGE

SEQ ID NO: 6254 - protein, 293 aa, Saccharomyces cerevisiae
TPLVHVASVEKGRSYEDFQKVYNAIALKLREDDEYDNYIGYGPVLVRLAFHISGTWDKHDNTGGSYGGTYRFKKEFNDPSNAGLQNGFKFLEPIHKEFPWISSGDLFSLGGVTAVQEMQGPKIPWRCGRVDTPEDTTPDNGRLPDADKDAGYVRTFFQRLNMNDREVVALMGAHALGKTHLKNSGYEGPWGAANNVFTNEFYLNLLNEDWKLEKNDANNEQWDSKSGYMMLPTDYSLIQDPKYLSIVKEYANDQDKFFKDFSKAFEKLLENGITFPKDAPSPFIFKTLEEQGL

SEQ ID NO: 6255 - protein, 94 aa, Glycine max
MASFARGAASLTRIGLSSSKTPLQLIHRRGLADHHGPPKVACWKDPMSPSKWKEEHFVIVSLTGWGLLIYGGFKLATGGKGKKEEVLAKASTEA

SEQ ID NO: 6256 - protein, 384 aa, Listeria innocua Clip11262
MKHVFPTYNRFPVDIVKGNGTVVKDATGKTYLDFTSGIAVCNLGHCPENVTEAIQSQLANIWHTSNLYECALQDSVAELITDGTDKLVFFCNSGTEANEAALKLARKYTGKEKIITFEKSFHGRTFGSMSATGQAKIHQGFGRLVPGFTYVPYNDIESFKTELDENTAAVMLEVIQGEGGVIPGNAAWLMEVQMLCKKAGALLIIDEVQTGLGRTGTLFGFQQTFLDPDIFTLAKGLGNGLPIGAMVGKEHLSSAFGPGSHGSTFGGNKLALAAAKEILLTMKQTGFLEEVNAKAAYFRNLLEEHFEQLENVVAIRGEGFLIGIELGSSAAPVVTELRDKGLLILTAGPNILRILPPLTVSYAEIDQAISILKSVLEKQLIGSE

SEQ ID NO: 6257 - protein, 68 aa, Brassica napus
  misc_feature (9)..(9): Xaa can be any naturally occurring amino acid
  misc_feature (37)..(37): Xaa can be any naturally occurring amino acid
  misc_feature (49)..(49): Xaa can be any naturally occurring amino acid
  misc_feature (52)..(52): Xaa can be any naturally occurring amino acid
  misc_feature (56)..(56): Xaa can be any naturally occurring amino acid
  misc_feature (61)..(63): Xaa can be any naturally occurring amino acid
  misc_feature (65)..(67): Xaa can be any naturally occurring amino acid
MAYSMLSSXAVVTSPAQATMVAPFTGLKSSSAFPVTXARPNNDITSIVXNGXKRLXACRWXXXNXXXN

SEQ ID NO: 6258 - protein, 147 aa, Funaria hygrometrica
MDFPLFQILSFPDELEKSLNPQSQKYVRDTKAMVSTAVDVKELPDAYIFVADMPGLKSADMKVQLENDNVLVIGGTRKREEPDPKVKYIRMERNSGSFMRKFTLPQNSNLDKIAASCVDGILTVTVPKIPPPEPAKPRTIEVTMGNQ

SEQ ID NO: 6259 - protein, 496 aa, Triticum aestivum
  misc_feature (169)..(169): Xaa can be any naturally occurring amino acid
MVLSHAASAGSSDDSVHSTFASRYVRASLPRFRMPENSIPKEAAYQIINDELMLDGNPRLNLASFVTTWMEPECNKLMMDSINKNYVDMDEYPVTTELQNRCVNMIAHLFNAPLGETETAVGVGTVGSSEAIMLAGLAFKRRWQNKMKAAGKPCDKPNIVTGANVQVCXWEKFARYFEVELKEVKLSEGYYVMDPEKAVEMVDENTICVAAILGSTLNGEFEDVKMLNDLLVKKNEETGWDTPIHVDAASGGFIAPFLYPELEWDFRLPLVKSINVSGHKYGLVYAGIGWCIWRSKEDLPDELIFHINYLGADQPTFTLNFSKGSSQVIAQYYQLIRLGFEGYRNIMDNCQENAMVLKEGLERTGRFNIVSKDQGVPLVAFSLKDSSRHDEFEISEFLRRFGWIVPAYTMPPDAQHVTVLRVVIREDFSRTFAERLVIDIEKVLHELDALPSRSSGPALQHPNGDTVSEKDLARQREVVSVWKRAVAARKKTQGVC

SEQ ID NO: 6260 - protein, 262 aa, Glycine max
  misc_feature (238)..(238): Xaa can be any naturally occurring amino acid
  misc_feature (259)..(259): Xaa can be any naturally occurring amino acid
KALNTGTAFSMTERDRLDLRGLLPPNVMSPDLQIERFMVDLKRLEVQARDGPSDPNALAKWRILNRLHDRNETMYYKVLIAKIEEYAPIVYTPTVGLVCQNYSGLFRRPRGMYFSAEDRGEMMSMVYNWPAEQVDMIVVTDGSRILGLGDLGVHGIGIAIGKLDLYVAAAGINPQRVLPVMIDVGTNNEKLLEDPLYLGLQQHRLDGDDYLAVVDEFMEAVFTRWPNVIVQFEDFQSXWAFKLLPAYRNTYRMFNDDVXGTS

SEQ ID NO: 6261 - protein, 349 aa, Flaveria brownii
EFYIGLRQRRATGQEYAELMNEFMSAVKQNYGEKVLIQFEDFANHNAFDLLEKYRTTHLVFNDDIQGTASVVLAGLISALKLVGGSLADHKFLFLGAGEAGTGIAELIALEISKQTNIPLEESRKKVWLVDSKGLIVRSRLDSLQHFKKPWAHDHEPVDKFLDAIKTIRPTVLIGSSGTGQTFTKEVVETMSSLNEKPIILALSNPTSQSECTAEQAYTWSEGRAIFASGSPFGPVEYNGKLYMSGQANNAYIFPGFGLGLIISGAIRVHDDMLLAASEALAEQVTEEHFDNGLIYPPFTNIRKISAHIAAKVAAKAYELGLASRLPQPENLVAYAESCMYSPKYRSYR

SEQ ID NO: 6262 - protein, 177 aa, Zea mays
  misc_feature (23)..(23): Xaa can be any naturally occurring amino acid
  misc_feature (30)..(30): Xaa can be any naturally occurring amino acid
  misc_feature (58)..(58): Xaa can be any naturally occurring amino acid
  misc_feature (76)..(76): Xaa can be any naturally occurring amino acid
  misc_feature (146)..(146): Xaa can be any naturally occurring amino acid
AVLDCSDCLLAKMARILACSRKXKHRGPDXCVTVHSTRCNFLMPQRLAAVSPLSVDRXLFNVDRTDVVPAIGEIYXHKNGRKHITGTHNFSTSSDCEVIMPLYDKYGENFGYMLDGELAFVLYYTRDRTYVASRDAIGVNPLYIGXSSDGSDWIASEMKALNEDCVRFEIFPSSHLY

SEQ ID NO: 6263 - protein, 165 aa, Antirrhinum majus
SSSDNASKKITLRSSDGEVFEVDEAIALLSQTIKHMIEDDCADNVIPLPNVTGKILSKVIEYCKRHVDADAAKSEEKVAAAAAGDDDLKAFDADFVKVDQATLFDLILAANYLNIKTLLDLTCQTVADMIKGKTPEEIRKTFNIKNDFTPEEEEEVRRENQWAFE

SEQ ID NO: 6264 - protein, 486 aa, Pseudomonas putida
MKEIKHFINGAFVDSASGRTFEDINPVNGQVIGRVHEAGRAEVDAAVRAARAALKGPWGKMTVAERAEILHRVADGVTARFDEFLEAECLDTGKPKSLASHIDIPRGAANFKVFADLIKNVPTEAFEMATPDGAGALNYGVRRPKGVIGVISPWNLPLLLMTWKVGPALACGNCVVVKPSEETPLTATLLGEVMQAAGVPAGVYNVVHGFGGDSAGAFLTEHPDVDAYTFTGETGTGETIMRAAAKGVRQGSLELGGKNAGIVFADCDLDKAIEGTLRSAFANCGQVCLGTERVYVERPIFDAFVARLKAGAEALKIGEPNDPEANFGPLISHKHREKVLSYYQQAVDDGATVVTGGGVPEMPAHLAGGAWVQPTIWTGLTDDSAVVTEEIFGPCCHIRPFDSEEEAIELANSLPYGLASAIWTENASRAHRVAGQIEAGIVWVNSWFLRDLRTAFGGSKQSGIGREGGVHSLEFYTELKNICVKL

SEQ ID NO: 6265 - protein, 119 aa, Antirrhinum majus
TIIPVPNVTSKILAKVIEYCKRHVEAAAKTDADDGQGDRDALKVFDAEFVKVDQGTLFDLILAANYLNIKSLLDLTCQTVADMIKGKTPEEIRKTFNIKNDFTPDEEEEVRRENAWAFE

SEQ ID NO: 6266 - protein, 387 aa, Ustilago maydis 521
MNALRQLNRAAAPALKQATKSGLVLPNVPQLLRPATTLAAGTPKISKGPTKYGGVYTVTLIPGDGVGVEITDSVKEIFEVMNVPVEWEQFNVSGETHGSESLFKEAMESLKRNKVGLKGILFTPIETGSHNSWNVAMRQQLDIYASLVICKSLPGYPTRHKDVDFAIIRENTEGEYSGLEHSSYPGVVESLKVSTRAKAERISRFAFDFALKNGRKRVTCVHKANIMKLGDGLFLNTFRRVAEEYKSSGIESNDMIVDNTSMQLVSRPQQFDVMVMPNLYGNIVSNIGAALVGGPGTVPGCNIGREFALYEPGCRHVAKDIMGTNAANPAAMILSATMMLRHLGLDTQANQIAESVYKVIADGKVRTADMGGKSKTHEFTQAVLSNL

SEQ ID NO: 6267 - protein, 140 aa, Magnetospirillum magnetotacticum MS-1
MLYPTYLRRSDPFALMRSMMRDLDRGFWPPARAAFPAVNVWQGPEAVGVTAELPGIEPGDIEISVKDNVLTLSGERKAPEVLDGARWHRNERSFGRFSRTIRLPFAASDDKVEARMTNGVLRIVISRPEEEKPKKIEGIL

SEQ ID NO: 6268 - protein, 319 aa, Bartonella vinsonii subsp. vinsonii
DGNKGILLYRGYPIEQLAEKGDFLESCYLLLYGELPTQQEKSDFDRCIMQHTMVHEQFARFFHGFRRDSHPMAVMVACLGAMSAFYHDSIDITDPQQRMIASVRLISKVPTLAAMAYKYSIGQAFVYPRNDLSYAANFLRMCFSVPCEEYKTNPVLTRAMDRIFILHADHEQNASTSTVRLAGSSGANPFACIAAGVACLWGPAHGGANEACLKMLQEIGSVKRIPEFIARAKDKNDPFRLMGFGHRVYKNYDPRAKIMQKTCHEVLKELNIQDDPLLDIAIELEKIALNDEYFVEKKLYPNVDFYSGITLKALGFPTE

SEQ ID NO: 6269 - protein, 191 aa, Chlorobium tepidum TLS
MMSRSIQNPLAALVALLMLMPVMLRAGQKGEAMTFELTSTAFRNMGAIPALYTCEGKNISPPLTWKNIPKGTKSLVLIVDDPDAPDPAAPKFTWVHWVLYNIPPGKTGFAEGAGNHPAETEMQEGFNSWNRGGYGGPCPPIGTHRYFFKLYALDTVIDDLLSPLKADVEAAMQGHILGETVLIGTYKKRGK

SEQ ID NO: 6270 - protein, 365 aa, Vanilla planifolia
MATWVEHQQQQNGSKDVDEEACMYAMQLSSMVVLPMTLRVAVELGILEQIQAGGPDSYLTAEDLAARLGNSNPLAPVMIERILRLLTSYSILNFTDTVDGEGRTVRSYGAAHVCKYLTPNQDGVSMAPLVLMNTDKVLMESWYHMKDAVTNGGIPFNLAYGMTAFEYHGKDLRFNKVFNEGMKNNSIIITKKILERYKRFEDVNVLIDVGGGIGGTISMITAKYPHIHGINFDLPHVVSEAPPFQGVEHVGGNMFESVPIGDAIFIKWILHDWSDEHCLKLLRNCAKSLPDKGKVIVVECILPDAPLVTPEAEGVFHLDMIMLAHNPGGKERTKKEFKELAMLSGFSNFKALFSYANVWVMEFNK

SEQ ID NO: 6271 - protein, 348 aa, Glycine max
VSYGVEFEGAGASKESKVNGDGGRDVNLGDSNYSFGEAEALSDEMEEESRYVAEILRIRDVLLNPEDESEAVLFDSLRRLQMMELTEDCLKATEIGKAVNSATSAPPHTYASTLHLLNGWKEMVDEWVKATTTTAITGSEEGTPDSVNPSVVDDDEEEGLPSPPLDEGAFFVTQAGSMELSQFFDGMDDDGNPRPTGPFSKNHENGRKPAFDSHSQQQAKENKAAVMPVRPNKPVTADSGPGRPPKSNVQRKSNMEPKMQQKMENNSITRRPPTAQLDKSKRSDDDAVQVKLEATKRKLQESYQQAEKAKRQRTIQVMEINDLPKQGLHRNTHFKPGYHSRHWANGRR

SEQ ID NO: 6272 - protein, 349 aa, Bradyrhizobium japonicum USDA 110
MTSTALAATLFGPEDLRMIEHPLDKLASGMVRIRFGAGGICGSDMHYFRHARTGDFVVKSPLVLGHEISGEVVEISGSAANLKVGDRVAVNPSRWCGHCVACREGRPNLCENIYFMGSASKTPHMQGGFANYFDAIPAQCVKIPDHVSYQAAALAEPLAVCLHAVARAGNIEGKRGIIFGAGPIGLLTMLAAHRAGMADITVADIAPAPLAFASRLGASHVENVSGGEEGLKAQAAARPYDVAFEVSGTAAGLASAIGIVRRGGVVVQIGNLPGGQIPTPSNAVMAKEIDLRGSFRFGFEFMTAVELISAGSVDVLSLVTAERPLSTAPDALRLALDRSQSVKVVLTAN

SEQ ID NO: 6273 - protein, 457 aa, Zea mays
MSHYHSADFEEMEDEYDMNEPVDDMEGEDEYQELVIRDSDAEDEDDADQLHKLSDTSAADARSGKDIQGIPWETIEVTRETYRQARLEQYKNYENIPNSGVAAMMVQFVNQPKKACKSTEKGRTYYEFRRNTRSVKSTISHFQLRNLVWATSKHDVYLLLHYSVLHWSALNGVDTEIMDVHGHVAPSEKHPGSLLEGFLHTQISTMAVKDNLLVAGGFQGELICKHLDREGISFCCRTTYDDNAITNALEIFNTSSGALHFIASNNDCGVREYDMERYQLFKHFRFDWPVNHTSLSPDGKLVIIVGDDTDALLIDANSGKTIHSMKGHLDFSFASAWSPDGLTFATGNQDKTCRIWDARNLTESVHVLRGNVGAIRSIRFTSDGHFLSMAEAADFVHIFDIKSDYNKRQELDFFGEVSGMSFSPDTDTLYVGISDRTYGSLLQFGRLYNYSYLDSLL

SEQ ID NO: 6274 - protein, 405 aa, Halobacterium sp. NRC-1
MGPMETYVVTEPALVERLLVSDAAEFRKPEFQADAIDDLLGDGLLLSEGESWREQRGRANPAFSMARVAGFDADIAAHAADRVDDWPVGDTVDVEAAMTHITLDVILDVMLGVSLPEARVDAIGDALEPVGARFEPDPVRFAVPEWLPMPDDREYAAAVATLDDLVDDIVAAREGTASGGDGDDPMDLLSVLLRARDRGEQSLDRLRDEVMTTLLAGHDTTALTLTYTWFLLSEHPDVEARLHAELDGALDDGAQPTVAQLQDLDYLEWVLQESMRLYPPVYNVFRTPIEPVELAGSEVPAGAPIMLPQWAIHRSPDHWDDPEAFDPERWRPERRADRPRFAYFPFGGGPRHCIGKQLALLEAKLIVATVASDYRLRYEGDTPLSFVPSLTIHPEQEMRMRVEPR

SEQ ID NO: 6275 - protein, 492 aa, Oryza sativa (japonica cultivar-group)
MVTKNVYSSLPDPPVSLHAPLAFAAAAWPPRDGVDRISALPVDILRDILSRLPARDAARTSALSTRWRRLWRSAPLVLADAHLKHTGRAPGPAAHPGPFRSVHITCTPMDAHRSELALWLQLLAARGVQELVFVNRASKFDTDVPFPATLFRCSSLTRLYIGFLRFPAVATVPRAASFPHLRELGLCSLIMGQRELAFLLDRCPVLENFEIVCHRELLRLRVASHSLRCVEVCMSIVEEITVEHAARLERLMFWETCGTGGVIDNVGGIIDMRTRVKIGHAPNLRVLGFLVPVMHELSIGNTDIRAGTKPTRRTMVPSVQMLGIQLKLFDNNQVRMLPSFLRCFPNVETLYIQSETTLSGNTTGKLNPKLLQETSPIECLQKHIKKVIMREFRMQRSELDFLKFIAGRGQVLEKVVVVLTHTCSSSADRLRASLSTFMASTRLANEDCKLIVYESPFPIDATAWCFQGAFNMSKDPFDVSKCFKDGASCRAD

SEQ ID NO: 6276 - protein, 189 aa, Zea mays
MSLCTIARRLCLSKPSSGGRLSAIWAHLYSTEVAKDMGAKKYKYPDVYDPYGPMPPPSEKVVELADRIAALPPEEIKQIAPALLLRLNQEPPQAVSGQGFGAQDGSGAGSGKAEKKAEKTVFDVRLEKFDAAAKIKIIKEIRTFTDLGLKEAKELVEKAPVVLKQSLTKEEAEAIIAKIKAAGGVAVME

SEQ ID NO: 6277 - protein, 357 aa, Thermococcus kodakaraensis
MKARKAWRVVREVVDEADIVVEVVDARDPIGTRNRKLERLILEEGKPLLIVMNKADLVPKEWAEEYKRKSEVPVVFISARERKGTGILRKEIKKLAKPLLDEKEKVKVALIGYPNVGKSTIINTLKGKRAVGTAPIPGYTKGKQLIRLSKKIWLLDSPGVIPIDDFDELVIRGGFPADKIEEPVKPAVKLIGRILETRKEAITEKFGITEFESEEDILRKIGERRGLIKAGGEVDIEETARWFLREWQTGRFTLFGSEEEGKRDFIWDFEDVLNGVEKDLLLDPRRILWKYGDELREKLDGQKRAGVREIEGITVGIATGFKKCDSAVKFLEELTGKHALASECFGKKWKGVVAVLD

SEQ ID NO: 6278 - protein, 402 aa, Bacillus cereus ATCC 14579
MLSAKTIEIVKSTVPLLQEKGVEITTRFYQILFSEHPELLNIFNHTNQKKGRQQQALANAVYAAATYIDNLEAIIPVVKQIGHKHRSLGIKAEHYPIVGTCLLRAIKEVAGAPDEVLNAWGEAYGVIADAFISIEAEMYEEAAHKEGGWKDFRNFVIVKKVKESDVITSFYLKPEDGGKVSSFIPGQYVTIQINIEGETYTHNRQYSLSDAPGKEYYRISVKKEKGVDTPDGKVSNYLHGHVKEGDVLPVSAPAGDFVLNMDSTLPVVLISGGVGITPMMSMLNTLIEQDSKRNVYFVHAAINSNTHAMKEHVKAVENEYEQVKAYTCYSAPTEKDLEMKNFDKEGFIESEWLKTIIPTTEAEFYFCGPVAFMKHINAALTDLSVKQEHIHYEFFGPATSLQ

SEQ ID NO: 6279 - protein, 482 aa, Arabidopsis thaliana
MASRTTPSRSTPSRSTPSGSSSGGRTRVGKYELGRTLGEGTFAKVKFARNVENGDNVAIKVIDKEKVLKNKMIAQIKREISTMKLIKHPNVIRMFEVMASKTKIYFVLEFVTGGELFDKISSNGRLKEDEARKYFQQLINAVDYCHSRGVYHRDLKPENLLLDANGALKVSDFGLSALPQQVREDGLLHTTCGTPNYVAPEVINNKGYDGAKADLWSCGVILFVLMAGYLPFEDSNLTSLYKKIFKAEFTCPPWFSASAKKLIKRILDPNPATRITFAEVIENEWFKKGYKAPKFENADVSLDDVDAIFDDSGESKNLVVERREEGLKTPVTMNAFELISTSQGLNLGSLFEKQMGLVKRKTRFTSKSSANEIVTKIEAAAAPMGFDVKTNNYKMKLTGEKSGRKGQLAVATEVFQVAPSLYMVEMRKSGGDTLEFHKFYKNLTTGLKDIVWKTIDEEKEEGTDGGGTNGAMANRTIAKQST

SEQ ID NO: 6280 - protein, 375 aa, Arabidopsis lyrata
MALSLQSPPCATLSASIQKGRWKTLAAGFSATPLPAVNFSIRRSIPRILASASSSSSPSSSSLEAGENNELNAVSAFSEIVPDTVVFDDFERFPPTAATVSSSLLLGICGLPDTIFRNAVDMALADSSCAGLETTESRLSCFFNKAIVNVGGDLVKLVPGRVSTEVDARLAYDTNGIIRKVHDLLRLYNEIDVPHDRLLFKIPATWQGIEAARLLESEGIQTHMTFVYSFAQAAAAAQAGASVIQIFVGRLRDWARNHSGDTEIESAIKSGEDPGLALVKRSYNYIHKYGYKSKLMAAAVRNKQDLFSLLGVDYVIAPLKVLQSLKDSPAIPGDEKYSFVRKLTPETATHYHFTNKELIKWDQLSLASAMGPASV

SEQ ID NO: 6281 - protein, 195 aa, Petunia x hybrida
MTFAGTTQKCSACDKTVYLVDRLAADNRVYHKACFRCYHCKSTLKLSNFNSFEGVIYCRHHFDQLFKRTGSLDKSFEGTPKFTKPEKPVDNENGSGNKVSSLFGGTRDKCVGCSKTVYPIEKVSVNGAAYHKACFKCTHGGCTISPSNYIAHEGRLYCKHHHIQLFKEKGNYSQLESENEPESALPTPLQIAAES

SEQ ID NO: 6282 - protein, 115 aa, Pisum sativum
MSKVVLISVMTACMLISSSYGKATLTCEQVTIWLTPCIPYGTLGGSVLPLCCQGVHSLNAAYKNGDDRRLACHCVQDRAALIPLIDYTRINQIGDLCGSKCPFKVYPSTDCDKVK

SEQ ID NO: 6283 - protein, 265 aa, Glycine max
MEHFNNDDLEYVVDEYYDVPDFAVEDTSSDIVPELTSDVDSDFEDEFPTSNAKTDTTASEARNGKDIQGIPWERLNYSRDKYRETRLKQYKNYQNFSRSRHDLRKECLEVQKGETFYDFFFNTRLVKSTIVHFQLRNLLWATSKHDVYFMQNYSVMHWSALLRRGKEVLNVAKPIIPTLKRPGFLAQPVSRVQISTMTVKENLMVAGGFQGELICKNLKHPGVLFCGKITTDDNAITHAVDVYSNPAGSLRVITANNDFQGRVFD

SEQ ID NO: 6284 - protein, 531 aa, Zea mays
  misc_feature (263)..(263): Xaa can be any naturally occurring amino acid
  misc_feature (452)..(452): Xaa can be any naturally occurring amino acid
MEAVGVTPAPVAAPEKKKLLDLKDPFPAAANGGAKASPAAKWAMKKKLVGGDAGYVLEDVPHLTDYMPQLPTYPNPLQDNPAYSVVKQYFVNPDDTVTQKIVVHKTSARGTHFRRAGPRQRVYFQSDEVNAAIVTCGGLCPGLNTVIRELVCGLYDMYGVSSVVGIEGGYKGFYSKNTVALTPKSVNDIHKRGGTVLGTSRGGHDTAKIVDCLQDRGINQVYIIGGDGTQKGASVIYEEVRRRGLKCSVVGVPKTIDNDIAVXDKSFGFDTAVEEAQRAINAAHVEAESAENGIGVVKLMGRNSGFIAMYATLASRDVDCCLIPESPFYLEGKGGLLEFVERRLKDNGHMVIVVAEGAGQDLIARSMNFVDTQDASGNKLLLDVGLWLSQKIKDHFKKKPSFPITLKYIDPTYMIRAVRSNASDNVYCTLLAHSALHGAMAGYTGFTVAPVXGRHAYIPFYRITEKQNKVVITDRMWARVLCSTNQPCFLSHEDVENMKHDDDEHHHMHNTQLLEGGSSPVSKCNGSAAAV

SEQ ID NO: 6285 - protein, 299 aa, Arabidopsis thaliana
MEDQSAARSIGKVSWFSDGKGYGFITPDDGGEELFVHQSSIVSDGFRSLTLGESVEYEIALGSDGKTKAIEVTAPGGGSLNKKENSSRGSGGNCFNCGEVGHMAKDCDGGSGGKSFGGGGGRRSGGEGECYMCGDVGHFARDCRQSGGGNSGGGGGGGRPCYSCGEVGHLAKDCRGGSGGNRYGGGGGRGSGGDGCYMCGGVGHFARDCRQNGGGNVGGGGSTCYTCGGVGHIAKVCTSKIPSGGGGGGRACYECGGTGHLARDCDRRGSGSSGGGGGSNKCFICGKEGHFARECTSVA

SEQ ID NO: 6286 - protein, 154 aa, Triticum aestivum
  misc_feature (91)..(91): Xaa can be any naturally occurring amino acid
  misc_feature (106)..(106): Xaa can be any naturally occurring amino acid
  misc_feature (110)..(110): Xaa can be any naturally occurring amino acid
  misc_feature (113)..(113): Xaa can be any naturally occurring amino acid
  misc_feature (119)..(119): Xaa can be any naturally occurring amino acid
  misc_feature (124)..(124): Xaa can be any naturally occurring amino acid
SATSVAPFQGLKSTAGLPVSRRSNGASLGSVSNGGRIRCMQVWPIEGIKKFETLSYLPPLSTEALLKQVDYLIRSKWVPCLEFSKLGSSSXEHNASPGYYDGRYWXTMWXLPXFGCTDXTQVIXRLEGVKEGYPDPKSDHRQMVSACVTSSPTT

SEQ ID NO: 6287 - protein, 230 aa, Helicobacter pylori 26695
MALYDRANSRNAYAEDSLLRESELVSFVKTTYKFFAGSLLLATIGALLGLMNFQAVVQYKWVFFIAEIAAFFGLMFSKSKPGLNLFMLFAFTSLSGVTLVPLLGMVIAKAGLGAIWQALGMTTIVFGLMSVYALKTKNDLANMGKMLFIALIVVVVCSLINLFLGSPMFQVVIAGASAILFSLYIAYDTQNIVKGMYDSPIDAAVSLYLDFLNVFISILQIIGIFSDRDT

SEQ ID NO: 6288 - protein, 214 aa, Synechococcus sp. WH 8102
MSASPTYGELTNQGASTNIAWHQASVDRAARAEQRGHRSAILWFTGLSGSGKSTLANAVNAALFQRGLATYVLDGDNVRHGLCKDLGFSDADREENIRRIGEVAKLFLDSGVIVLTAFVSPFRADRDKARALVDDGDFIEIHCAADLEVCESRDPKGLYAKARAGQIKEFTGISSPYEAPQAAELKIDTGSQELAESVDLVIKALQERGVIPAA

SEQ ID NO: 6289 - protein, 115 aa, Malus x domestica
MASSAVIKLALVVALCMAVSVAHAITCGQVSSNLVPCFDYVRSGGPVPPACCNGIRTINGLAKTTPDRQAACNCLKSLAGSVSGVNPGNAESLPGKCGVNVPYKISTSTNCATVK

SEQ ID NO: 6290 - protein, 182 aa, Triticum aestivum
MSDEAASPPGGGGGGGGGGSDDGGGGGGFGGVREQDRFLPIANISRIMKKAIPANGKIAKDAKETVQECVSEFISFITSEASDKCQREKRKTINGDDLLWAMATLGFEEYIEPLKVYLQKYRETEGDSKLAGKSGDVSVKKDALGPHGGASGTSAQGMGQQVAYNPGMVYMQPQYHNGDISN

SEQ ID NO: 6291 - protein, 370 aa, Lactococcus lactis subsp. lactis Il1403
MPETTTILYRGGVFMRAARFYDRGDIRIDEINEPIVKAGQVGIDVAWCGICGTDLHEFLDGPIFCPSAEHPNPITGEVPPVTLGHEMSGVVNFIGEGVSGLKVGDHVVVEPYIVPEGTDTSETGHYNLSEGSNFIGLGGNGGGLAEKISVDERWVHKIPDNLPLDEAALIEPLSVGYHAVERANLSEKSTVLVVGAGPIGLLTAAVAKAQGHTVIISEPSGLRRKKAQEAQVADYFFNPIEDDIQAKVHEINEKGVDAAFECTSVQPGFDACLDAIRMGGTVVIVAIWGKPASVDMAKLVIKEANLLGTIAYNNTHPKTIDLVSTGKIKLDQFITAKIGLDDLIDKGFDTLIHHNETAVKILVSPTGKGL

SEQ ID NO: 6292 - protein, 507 aa, Isatis indigotica
MTSVNVKLLYHYVITNFFNLCFFPLTAIVAGKASRLTTNDLHYFYYSHLQHNLLTITLLFAFTAFGSVLYILTRPKPVYLVDYSCYLPPPHLKSSVSKVMDIFYQVRKADPLPNVACDDSSWLDFLRKIQERSGLGDETYGPEGLLQVPPRKTFAAAREETEQVIIGALENLFENTKVNPKEIGILVVNSSMFNPTPSLSAMVVNTFKLRSNIRSFNLGGMGCSAGVIAIDLAKDLLHVHKNTYALVVSTENITYNIYAGDNRSMMVSNCLFRVGGAAILLSNKPGDRRRSKYELVHTVRTHTGADDKSFRCVQQEDDESGKTGVSLSKDITGVAGRTVKKNIATLGPLVLPLSEKFLFFVTFMAKNLLKDKIKHYYVPDFKLAIDHFCIHAGGRAVIDVLESNLGLAPIDVEASRSTLHRFGNTSSSSIWYELAYIEAKGRMKKGNKVWQIALGSGFKCNSAVWVALRNVKASTNSPWEHCIDRYPVKIDSDSAKTSETRVQNGRS

SEQ ID NO: 6293 - protein, 350 aa, Synechococcus elongatus PCC 6301
MTDQPCPRGIPRKFAEDESMDASLLLRQITTGYWGSQALYVAAKLGIADQLVNGPRSCEDLAIVVGAKPEVLYRLLRALASLGIFTEVSDRQFALTPAAELLRSGTAGSLRNLVMMFGEEHYVAWGELLHSIQTGENAFEHHYGAPVFAYYAQHPASADIFNGAMSDMSRPDTAAVLSSYDFQGIRCLVDVGGGHGQLLSQILAAYPDLTGILYDQPAVVAGADSVLADVSDRCEVVGGDFFASVPAGGDAYLLKHIIHDWDDADSLKILANCRQVMQPGDRLLLLEQVVRAGNEPNLAKWLDLNMLVMTQGGRERTQAEFATLLADAGFQLSQIHGTASEVCIIEGRAI

SEQ ID NO: 6294 - protein, 506 aa, Sinapis alba
MTSVNVKLLYHYVITNLFNLCFFPLTAIVAGKASRLTIDDLHHLYYSYLQHNLITIAPLFAFTVFGSVLYIVTRPKPVYLVEYSCYLPPTHCRSSISKVMDIFYQVRKADPSRNGTCDDSSWLEFLRKIQERSGLGDETHGPEGLLQVPPLKTFAAAREETEQVIIGALENLFENTKVNPKEIGILVVNSSMFNPTPSLSAMVVNTFKLRSNVRSFNLGGMGCSAGVIAIDLAKDLLHVHKNTYALVVSTENITYNIYAGDNKSMMVSNCLFRVGGAAILLSNKPRDRRRSKYELVHTVRTHTGADDKSFRCVQQGDDESGKTGVSLSKDITDVAGRTVKKNIATLGPLILPLSEKLLFFVTFIAKKLFKDKVKHYYVPDFKLAIDHFCIHAGGRAVIDVLEKNLALAPIDVEASRSTLHRFGNTSSSSIWYELAYIEAKGRMKKGNKVWQIALGSGFKCNSAVWVALSNVKASTNSPWEHCIDRYPVQIDSDSAKSETRVQNGRS

SEQ ID NO: 6295 - protein, 409 aa, Haemophilus ducreyi 35000HP
MDNNFIFGIIAFTALVLVLAVIILFAKSKLVDSGDITISINDDPEKGITLPAGGKLLGALASKGIFVSSACGGGGSCGQCKVQVNSGGGEILPTELSHISKKEAKEGWRLACQVNVKSSMDVELPEEIFGVKKWECTVISNDNKATFIKELKLQIPEGEEVPFRAGGYIQIEAEPHTVNYKDFDIPKEYHEDWDKFNLWRYVSKVDEHIIRAYSMASYPEEKGIIMLNVRIATPPPRQPDAPPGQMSSYIWSLKAGDKVTISGPFGEFFAKETDNEMVFIGGGAGMAPMRSHIFDQLKRLKSKRKMSFWYGARSKREMFYVEDFDQLQAENDNFKWHVALSDPLPEDNWDGYTGFIHNVLYENYLKNHEAPEDCEYYMCGPPVMNAAVIGMLKSLGVEDENILLDDFGG

SEQ ID NO: 6296 - protein, 506 aa, Sinapis arvensis
MTSVNVKLLYHYVITNFFNLCFFPLTAIVAGKASRLTIDDLHHLYYSYLQHNLITIVPLFAFTVFGSVLYIATRPKPVYLVEYSCYLPPTHCRSSISKVMDTFYQVRKADPFRNGTCDDSSWLDFLKKIQERSGLGDETHGPEGLLQVPPRKTFAAAREETEQVIIGAVENLFKNTKVNPKDIGILVVNSSMFNPTPSLSAMVVNTFKLRSNVRSFNLGGMGCSAGVIAIDLAKDLLHVHKNTYALVVSTENITSSIYAGDNRSMMVSNCLFRVGGAAILLSNKPRDRRRSKYELVHTVRTHTGADDKSYRCVQQGDDENGKTGVSLSKDITDVAGRTVKKNIATLGPLILPLSEKLLFFITFMAKKLFKDKVKHYYVPDFKLAVDHFCIHAGGRVVIDVLEKNLGLAQIDVEASRSTLHRFGNTSSSSIWYELAYIEAKGRMKKGNKVWQIALGSGFKCNSAVWVALSNVKASTNSPWEHCIDRYPVKIDYDSAKSEVRVQNGRS

SEQ ID NO: 6297 - protein, 463 aa, Corynebacterium diphtheriae NCTC 13129
MAYATTNPYTGEVVKEFPTATAQEVEQAITRAHDTFTQWSRKPVAERVEVLARAADILETKKREYAEIITLEMGKLIAEAEAEIDICVDMLRYYVANGEAQLAPRYLPAKGFGEHDVQLVNEPLGVLYAVEPWNFPYYQVIRIGAPQFTAGNTIVLKHASNVPQSALKMVELFREAGAPEGLLVNIFADHNATETILSDPRVRGVALTGSEGAGAAVSATASKYLKKSTLELGGADAFIVLNDAELDKAVDWAVFGRHWNAGQVCCSSKRIIVEDSLYDAFLTQYTQKVAALTAGDPMDPNTQLAPLSSQTAADDLGKLVDKARAEGATVTEVGIDLPEHGAFYQPTILTDIPLDSDTAHSEFFGPVSQIYRARDIDHAVEIANSSPFGLGGSVFSQDEAKAKDIARRLDTGMVYINQPTGVKADIPFGGTKRSGFGRELIDLGLHEFVNQKVVVVTDIDGSF

SEQ ID NO: 6298 - protein, 181 aa, Arabidopsis thaliana
MIIYLSVYTPLYQHIYIYIAHTLHGFLILIKINKLIFEYPKKNLASSNFFKYIITSTMSGVWVFNKNGVMRLVENPYNQSAGDSSESSSSGGNQQQRMRRKILVHLPSSEVVSSYGSLEKILKNLGWERYYSGDNTDHLLQFHKRTSIDLISLPRDFSKFNSIHMYDIVVKNPNVFHVRDM

SEQ ID NO: 6299 - protein, 429 aa, Brucella suis 1330
MTDFYSLIPSAPKGRFDGIERAHTAEDVKRLRGSVEIKYSLAEMGANRLWKLIHEEDFVNALGALSGNQAMQMVRAGLKAIYLSGWQVAADANTASAMYPDQSLYPANAGPELAKRINRTLQRADQIETAEGKGLSVDTWFAPIVADAEAGFGGPLNAFEIMKAYIEAGAAGVHFEDQLASEKKCGHLGGKVLIPTAAHIRNLNAARLAADVMGTPTLIVARTDAEAAKLLTSDIDERDQPFVDYEAGRTAEGFYQVKNGIEPCIARAIAYAPYCDLIWMETSKPDLAQARRFAEAVHKAHPGKLLAYNCSPSFNWKKNLDDATIAKFQCELGAMGYKFQFITLAGFHQLNYGMFELARGYKDRQMAAYSELQQAEFAAEADGYTATKHQREVGTGYFDAMSLAITGGQSSTTAMKESTETAQFKPAAE

SEQ ID NO: 6300 - protein, 384 aa, Pyrococcus abyssi GE5
MSKFPEKGLPREEVLNLLEDKTKVDLTFSSGKILGSMCTMPHELAIEVFARYIDRNLGDPGLHPGTRKIEEEVIEMLSDLLHLEKGYGHIVSGGTEANILAVRAFRNISDAERPELILPKSAHFSFIKAGEMLGVKLVWAELKQDYAVDVKDVEAKISDNTIGIVGIAGTTGLGVVDDIPALSDLAREYGIPLHVDAAFGGFVIPFAKSLGYDLPDFDFKLKGVESITIDPHKMGMAPIPAGGIIFRRKKYLKAISVLAPYLAGGKVWQATITGTRPGASVLAVWALIKHLGFEGYREIVRKAMELSRWFAEEIKKLNNAWLVREPMLNIVSFQTKNLRKVERELKRRGWGISAHRGYIRIVFMPHVTKEMVEEFLRDLREVLK

SEQ ID NO: 6301 - protein, 278 aa, Chloroflexus aurantiacus
MPALGTTVQVSRFMGPYAAQELLAHYAHEIGVTMIPFTELVYLKREGRYVTIDEVPPGAEISSISGTQVRDEYLAKGRLLPEWFTRPETAEILRQMYPPRHRQGFCVWFTGLSGAGKSTIAAILNVLLLERGRTPTVLDGDVVRTHLSKGLGFSREDRDTNILRIGFVASAVVKAGGAVICAAVSPYRAARNECRTMIGSDQFIEVFVDTPLEVCEQRDVKGLYAKARRGELRGFTGIDDPYEPPVNPELTLTTTDVTPEENARKIIRYLEEKGFLEG

SEQ ID NO: 6302 - protein, 303 aa, Brassica napus
  misc_feature (142)..(142): Xaa can be any naturally occurring amino acid
MVFVKPSKSNAYFKRYQVKFRRRRDGKTDYRARIRLINQDKNKYNTPKYRFVVRFTNKDIVAQIVSASIAGDIVKASAYAHELPQYGLTVGLTNYAAAYCTGLLLARRVLKMLEMDEEYEGNLEATGEDFSVEPTESRRPFXRALLDVGLIRTTTGNRVFGALKGALDGGLDIPHSDKRFAGFNKENKQLDAEIHRNYIYGGHVSNYMKMLNEDEPEKFQTHFSQYLKKGVDAESMEELYKKVHAAIRADPNPKKTKKPAPKTHKRYNLKKLTYEERKNKLIERVKALNGAAGGDDDDEDDEE

SEQ ID NO: 6303 - protein, 228 aa, Vicia faba
PVYISIGCNLPAIPHPTFSRDPVPFSLAPRLSNQIGLEAAVEAAAEFLNKAVKPVLVGGPKLRVAKASDAFVELADASGYALAVMPSAKGMVPEHHPHFIGTYWGAVSTAFCAEIVESADAYLFAGPIFNDYSSVGYSLLLKKEKAIIVQPDRVVIANGPAFGCVLMNDFLKALAKRLKHNNVAYENYHRIFVPDGKPLKCVPKEPLRVNVMFQHIQKMLSSETAVIA

SEQ ID NO: 6304 - protein, 548 aa, Zea mays
MEAATAATAAMMWFRKGLRVHDNPALDAARRHGVGAASARLYPVFVLDPRYLRPDPVAASPGSARAGVARIRFLLESLSDLDARLRRLGSRLLLLRARDDVADAVCAALKDWNIGKLCFESDTEPYALARDKKVTDFALASGIEVLTPVSHTLSDPEEIIKKNGGRPPLTYQSFVSIAGEPPAPAMEEYSELPPLGDTGEYELLPVPTVEGLGYGDISQEEIPPFHGGETEALRRMKESLQNKEWVAKFEKPKGDPSAFVKPSTTVLSPYLKFGCLSSRYFYHCIQDVHRSVRNHTKPPVSLTGQLLWRDFFYTVSYGTPNFDRMKGNKICKQIPWSENEDLFVAWRDGQTGYPWIDAIMIQLRKWGWMHHLARHSVACFLTRGDMFIHWEKGRDVFERLLIDSDWAINNGNWLWLSCSSFFYQYHRIYSPITFGKKYDPNGNYIRHFIPVLKDMPREYIYEPWTAPTSIQKKANCIIGKDYPKPVVDHETASKECRKRMGEAYASSRVDAKPSKGKTLNSRRKMLHGDRDTSNSTIAKRLKRNSRVE

SEQ ID NO: 6305 - protein, 316 aa, Zea mays; identical to SEQ ID NO: 330

SEQ ID NO: 6306 - protein, 426 aa, Arabidopsis thaliana
MESPYPKSPEKITGTVLLGKYELGRRLGSGSFAKVHVARSISTGELVAIKIIDKQKTIDSGMEPRIIREIEAMRRLHNHPNVLKIHEVMATKSKIYLVVEYAAGGELFTKLIRFGRLNESAARRYFQQLASALSFCHRDGIAHRDVKPQNLLLDKQGNLKVSDFGLSALPEHRSNNGLLHTACGTPAYTAPEVIAQRGYDGAKADAWSCGVFLFVLLAGYVPFDDANIVAMYRKIHKRDYRFPSWISKPARSIIYKLLDPNPETRMSIEAVMGTVWFQKSLEISEFQSSVFELDRFLEKEAKSSNAITAFDLISLSSGLDLSGLFERRKRKEKRFTARVSAERVVEKAGMIGEKLGFRVEKKEETKVVGLGKGRTAVVVEVVEFAEGLVVADVKVVVEGEEEEEEVESHWSELIVELEEIVLSWHN

SEQ ID NO: 6307 - protein, 115 aa, Malus x domestica
MASSAVINLALVVALCMAVSVAHAITCGQVSSNLVPCFDYVRSGGPVPPACCNGIRTINGLAKTTPDRQAACNCLKSLAGSVSGVNPGNAESLPGKCGVNVPYKISTSTNCATVK

SEQ ID NO: 6308 - protein, 729 aa, Zea mays
MPAWWPRSKLRSRSKAKPGAGSVSAASSPRKSADLESPSPSPSPTPTPTPRDRKAHSLDFPGAAAARGRPAGAAPGHGSVGYKLPTPVEAVEPVGTLYGLLLAAAAAAAAGDGCSSAEESSVCSAASLDEPHYQHGFRPMDPVAFARERNMPSDSDRILNEDKRFMSCSMPREHQKFFDVPAASVRELHLQSDGPSTSEANCSRGRMISGDLFAPRTRSLSPIPKGHAFAVSNGNSREFGFSPRSPVRKMDGLRSPPHPLPLPPASGACSPLHPASGACSPLHPASGACSPLLPTHSFCSPLPSSPSSCPPLPASPTNCSQSQSQWKKGKLLGSGTFGQVYLGFNSENGQFCAIKEVQVIMDDPHSKERLKQLNQEIDMLRQLSHPNIVQYHGSELSDESLSICLEYVSGGSIHKLLREYGSFKEPVIRNYTGQILAGLAYLHGRNTVHRDIKGANILVGPNGEVKLADFGMAKHISSFAEIRSFKGSPYWMAPEVIMNCKGYSLSVDIWSLGCTIIEMATARPPWHQYEGVAAIFKIANSKDIPEIPDSFSEEGKSFLQLCLKRNPASRASAVQLMDHPFVQDHPAVRAAKSSVLRNTPSSPADGRHTMSNRELPSRKIITPLKDIGLGMRDFTGFSTTVPSPHSPIPGRANMSTPVSPCSSPLRQFKQSNVRGMRSPPHPMLSPGLGNTVSYTQNQTRRNPAPAISDPWMDVGQMKLQSPNISPRRF

SEQ ID NO: 6309 - protein, 337 aa, Thermococcus kodakaraensis
MTEPKDIVLKESEEVEGIPIEGPWLDDVSSLEEVLDYYERIGFQATHLGKAIEIWKKVEKRRAEGKEVRVFLGYTSNIISSGLRELVAWLVKEGKIDVIVTTAGGIEEDFIKALKPFILGDWHVNDALMREKGINRIGNIFVPNDRYIEFEKYMIPFFERVLEIEKERGKPLTASEFIYELGRYMDEKLGKEKERSVIYWAYKRNVPIFCPAITDGSIGDMLYFFKEERGDRELIIDIANDIVKLNNLAVTAKETASIILGGSLPKHAIINANLFRGGTDYAIYITTAVPWDGSLSGAPPSEGVSWGKIRAKADYVEIWADATLVFPLLVWKVMKAP

SEQ ID NO: 6310 - protein, 115 aa, Malus x domestica
MASSAVINLALVVALCMAVSVAHAITCGQVSSNLVPCFDYVRSDGPVPPACCNGIRTINGLAKTTPDRQAACNCLKSLAGSVSGVNPGNAESLPGKCGVNVPYKISTSTNCATVK

SEQ ID NO: 6311 - protein, 217 aa, Mesorhizobium sp. BNC1
MKFFVDTADVNEIRELSETGLLDGVTTNPSLIMKSGRPILEVTREICEIVDGPVSAEVTAVDFKEMMREADILSKIADNIAIKVPLTMDGLKACKALTSSGRMVNVTLCFSANQALLAAKAGATFISPFIGRIDDMGIDGMELIAEIRTIYDNYDFDTEILAASIRSVNHVKQAAIIGADVATVPPAVLKSLVKHPLTDKGLEAFLADWAKTGQKIG

SEQ ID NO: 6312 - protein, 257 aa, Medicago sativa
MEGMAQHPVPRTVEEVFSDYKGRRAGLIKALTTDVEKFYQLVDPEKENLCLYGFPNETWEVNLPVEEVPPELPEPALGINFARDGMQEKDWLSLVAVHSDSWLLAVAFYFGARFGFGKNDRKRLFQMINDLPTVFELATGTAKQSKDQLTAHNNGSNSKYKSSGKSRQSESQTKGVKMSAPVKEEVDSGEEEEEDDDEQGATCGACGDNYGTDEFWICCDMCEKWFHGKCVKITPAKAEHIKQYKCPGCSIKKPRIG

SEQ ID NO: 6313 - protein, 506 aa, Orychophragmus violaceus
MTSVNVKLLYHYIITNFFTLCFFPLTAIVAGKASRLTTNDLHHFYYSHLQHSLITITLLFAFTVFGSVLYIITRPKPVYLVDYSCYLPPPHQKASVSKVMDIFYHLRKADPLRNVACDDSSWLEFLRKIQERSGMGDETYVPAGLLEVPPRKTFSASREESEQVINGAIENLFKNTKVNPKEIGLLVVNSSIFNPTPSLSAMVVNTFKLRSNIRSFNLGGMGCSAGAIAIDLAKDLLHVHKNTYALVVSTENITDHIYAGDNRSMMVSNCLFRVGGAAILLSNKPRDRRRSKYELVHTVRTHTGADDKCYRCVQQGDDESGKNGVSLSKDITAVAGKAIKINISTLGPLVLPLSEKILVFVSFIGKKLLKDKIKNLYVPDFKLVIDHFCIHAGGRAVIDVLEKNLGLEPVDVEPSRSTLHRFGNTSSSSIWYELAYIEAKGRMKKGNKVWQIALGSGFKCNSAVWVALRNVKASTNSPWEHCIDRYPVNIDSDSAESVTRVQNGRS

SEQ ID NO: 6314 - protein, 316 aa, Salmonella typhimurium LT2
MNQLDGIKQFTTVVADSGDIESIRHYQPQDATTNPSLLLKAAGLEQYGHLIEDAIAWGKKHGGTQEQQVAAASDKLAVNFGAEILKSIPGRVSTEVDARLSFDKEKSIEKARHLVDLYQQQGVDKSRILIKLAATWEGIRAAGQLEKEGINCNLTLLFSFAQARACAEAGVYLISPFVGRIYDWYQARSPLEPYVVEEDPGVKSVRNIYDYFKQHRYETIVMGASFRRTEQILALTGCDRLTISPNLLKELKEKEEPVIRKLVPSSQMFHRPTPMTEAEFRWEHNQDAMAVEKLSEGIRLFAVDQRKLEDLLAAKL

SEQ ID NO: 6315 - protein, 506 aa, Brassica napus
MTSVNVKLLYHYVITNLFNLCFFPLTAIVAGKAYRLTIDDLHHLYYSYLQHNLITIAPLFAFTVFGSVLYIATRPKPVYLVEYSCYLPPTHCRSSISKVMDIFYQVRKADPSRNGTCDDSSWLDFLRKIQERSGLGDETHGPEGLLQVPPRKTFAAAREETEQVIIGALENLFKNTNVNPKDIGILVVNSSMFNPTPSLSAMVVNTFKLRSNVRSFNLGGMGCSAGVIAIDLAKDLLHVHKNTYALVVSTENITYNIYAGDNRSMMVSNCLFRVGGAAILLFNKPGDRRRSKYELVHTVRTHTGADDKSFRCVQQGDDENGKIGVSLSKDITDVAGRTVKKNIATLGPLILPLSEKLLFFVTFMGKKLFKDKIKHYYVPDFKLAIDHFCIHAGGRAVIDVLEKNLALAPIDVEASRSTLHRFGNTSSSSIWYELAYIEAKGRMKKGNKVWQIALGSGFKCNSAVWVALNNVKASTNSPWEHCIDRYPVKIDSDSGKSETRVQNGRS

SEQ ID NO: 6316 - protein, 279 aa, Lactobacillus gasseri
MATIQWYPGHMNKAKNQLEDNLDLIDVLIEVLDARLPVSSRNPMIGQLTKKKPHIIILNKSDLADPIQTKKWTRYFQDEGNFVISMDAQHNTNMTSLFKIIKLAGKKKTEKLIAKGASNPMIRVAIAGIPNCGKSTIINRMVGRNAAIVGDKPGVTRGQSWLKTKTNVQILDTPGILWPKFSDQEVGYKLAACGAIKADVFHPDDVALFVIEFLKQNYKKDLTKFAQATNEELENMSNPDLLLAMTNKYGMRDDYDKFSLFMLQRLRKGKLGRITFDLR

SEQ ID NO: 6317 - protein, 442 aa, Synechococcus elongatus PCC 6301
MSDLWIRNARVLLPTGEWQLADVEVRAGKIVAIADQLPAASDDTPEVQAEGLALLPGVIDPQVHFRDPGLTHKEDLHTASRACARGGVTSFMEMPNTKPLTTTQAILTEKLAIAAEKSLVNYAFFIGATPENHPDLHTATPTCGIKIFMGASHSPLMVPTEPELEPIFAAGRRLIAVHAEDQPRILARREFMLAGPHVPDLHSAIQDNEAALLATRLALKLSKKYQRRLHILHLSTGDEALLLRQDKPAWVTTEVTPQHLLLNRDAYYEIGSLAQMNPPLRTRWDNEVLWQALLDGVIDCIATDHAPHTLEEKAQPYPNCPSGMPGVETSLPLMLTEAQKGRCTVAQVAQWMSTNVAKIFGIANKGKIEPGYDADLVLVDLDRYQLVRREDLQTKCGWSPFEGWNLTGWPQVTIVGGQIVYDRGQFNESVRGQALQFDESGW

SEQ ID NO: 6318 - protein, 256 aa, Arabidopsis thaliana
MEGITHPIPRTVEEVFSDFRGRRAGLIKALTNDMVKFYQTCDPEKENLCLYGLPNETWEVNLPVEEVPPELPEPALGINFARDGMQEKDWVSLVAVHSDSWLLSVAFYFGARFGFGKNERKRLFQMINELPTIFEVVSGNAKQSKDLSVNNNNSKSKPSGVKSRQSESLTKVAKMSSPPPKEEEEEEDESEDESEDDEQGAVCGACGDNYGTDEFWICCDACEKWFHGKCVKITPAKAEHIKHYKCPTCSNKRARP

SEQ ID NO: 6319 - protein, 287 aa, Glycine max; identical to SEQ ID NO: 254

SEQ ID NO: 6320 - protein, 317 aa, Erwinia carotovora subsp. atroseptica SCRI1043
MTDKLTSLRQVTTVVADTGDIAAMKLYQPQDATTNPSLILNAAQIPEYRKLIDEAIAWAREQSSDRKQQVVDATDKLAVNIGLEILKLIPGRISTEVDARLSYDTEASVAKAKHLIKLYNDAGISNERILIKLASTWQGICAAEQLEKEGINCNLTLLFSFAQARACAEAGVFLISPFVGRILDWYKANGDKKEFAPHEDPGVVSVSEIYDYYKEHGYETVVMGASFRNVGEILELAGCDRLTIAPALLKELSESEGEVVRKLSYVGDVKVRPARMTEAEFYWQHNQDPMAIDKLADGIRKFAIDQEKLEKMIADLL

SEQ ID NO: 6321 - protein, 222 aa, Zea mays
  misc_feature (210)..(210): Xaa can be any naturally occurring amino acid
MDRAGVLAVVDSRTGKRYEVKVSEDGTVRATDFKKITAGKDDKGLKTYDPGYLNTAPVRSSICYIDGDEGILRYRGYPIEEVAESSSFVEVAYLLMYGNLPSQSQLAAWGFAISQHSAVPQGLLDIIQSMPHDAHPMGVLASAMSTLSVFHPDANPALRGQDLYNSKQVRDKQIVRVLGKAPAIAAAAYLRLAGRPAVLPSKNLSYSQNXLDMLDSLGDQKY

SEQ ID NO: 6322 - protein, 123 aa, Oryza sativa (japonica cultivar-group)
MIQPQTLLNVADNTGARKLMCIRVIGAASSQRYARIGDVIVAVIKDVVPQMPLERSEVIRAVIVRTCKEFKCEDGIIIRYDDNAAVIIDQKGNPKGTRVFGAIAEELRELNFTKIVSLAPEVL

SEQ ID NO: 6323 - protein, 178 aa, Triticum aestivum
  misc_feature (143)..(143): Xaa can be any naturally occurring amino acid
MAPTVMASSATSVAPFQGLKSTAGLPVSRRSNGASLGSVSNGGRIRCMQVWPIEGIKKFETLSYLPPLSTEALLKQVDYLIRSKWVPCLEFSKVGFIFREHNASPGYYDGRYWTMWKLPMFGCTDATQVINEVEEVKKEYLTXVVRIIGFTTSQVQCVSHRKQRAARSGRLNSHHTAH

SEQ ID NO: 6324 - protein, 416 aa, Escherichia coli O157:H7 EDL933
MESKVVVPAQGKKITLQNGKLNVPENPIIPYIEGDGIGVDVTPAMLKVVDAAVEKAYKGERKISWMEIYTGEKSTQVYGQDVWLPAETLDLIREYRVAIKGPLTTPVGGGIRSLNVALRQELDLYICLRPVRYYQGTPSPVKHPELTDMVIFRENSEDIYAGIEWKADSADAEKVIKFLREEMGVKKIRFPEHCGIGIKPCSEEGTKRLVRAAIEYAIANDRDSVTLVHKGNIMKFTEGAFKDWGYELAREEFGGELIDGGPWLKVKNPNTGKEIVIKDVIADAFLQQILLRPAEYDVIACMNLNGDYISDALAAQVGGIGIAPGANIGDECALFEATHGTAPKYAGQDKVNPGSIILSAEMMLRHMGWTEAADLIVKGMEGAINAKTVTYDFERLMEGAKLLKCSEFGDAIIKNM

SEQ ID NO: 6325 - protein, 277 aa, Desulfitobacterium hafniense DCB-2
SCLAEGPITLRFGEVHSYIIDEGEMVPVPGRLIYRGYDITDLARGFMEDNRFGFEETAYLLLFGRLPNRQELIDFHNLLDIYQKLPDNFARDMILNVPSKDIMNGMARSVLGFYCYDTNPDDTSIRNVLKQCIRLIAAFPALAVYCYQAYTHYHGNKSLVIHSPQPELSLAENILYMLRPNHKYTELEARLLDLALVLHAEHGGGNNSSFVTHVVTSTGTDTYSAVAAALGSLRGPKHGGANHKVIQMFQDIKEKISDWQDEDELSAYLDKFFLGCL

SEQ ID NO: 6326 - protein, 85 aa, Brassica napus
MAPVSALAKYKLVFLGDQSVGKTSIITRFMYDKFDNTYQATIGIDFLSKTMYLEDRTVRLQLWDTAGQERFRSLIPSYIRDSSVA

SEQ ID NO: 6327 - protein, 352 aa, Vibrio parahaemolyticus RIMD 2210633
MQQMNSIVMQDGSVRLKQVEIPKPAAGQVLVRSLACGICGSDLHITRHADEVFDVFHQLGLMPDEAGEHAQVMLGHEFCAEIVEYGSDTQQTLAVGSRVTSVPMLLSQNGAGVGVTPGTYGAYSEYFLLDEALLLPVPDGMPSEAAALTEPLAVGLHAVNRSEIETEETALVVGCGPIGLAVIAALKQRGVSNILAVDLQEEKLQLASEFGANRLISPTKEDEIAVGEQYAMNSRLVIYECVGKHTLIDDFLRRAPARARIVISGIHTTPAIINYAYATVKELDLRFSYYYQPHEFEQCLQAIAEHKLPWQKMLTAKVGIDGVEDAFRQLMTPNDHIKVVIEPWRCGALEVI

SEQ ID NO: 6328 - protein, 115 aa, Malus x domestica
MASSAVINLALVVALCMAVSVAHAITCGQVSSNLVPCFDYVRSGGPVPPACCNGIRTINGLAKTTPDRQAACNCLKSLAGSVSGVNPGNVESLPGKCGVNVPYKISTSTNCATVK

SEQ ID NO: 6329 - protein, 401 aa, Triticum aestivum
  misc_feature (155)..(155): Xaa can be any naturally occurring amino acid
  misc_feature (203)..(203): Xaa can be any naturally occurring amino acid
  misc_feature (210)..(210): Xaa can be any naturally occurring amino acid
  misc_feature (237)..(237): Xaa can be any naturally occurring amino acid
IEQVCTKKQAGTGPEFPGYRRPTRPISYTLFDKDGRQIPQEIVTKVGEIFEQILKETVKVRDEYANDMPLVQAISMVLDRNPHLKLEGLQYEVLQWCICRLEAWFATDVDNISLKNWDQEHVLTGGHGLMVNGYDPVIKALSRDLDVHLNHGLQXIQRYNKVIVCVEEVQFVAMRYITVSRCIRLYSGRTSSTVDPELPDWKXSAISDLXVGLETRIALRFNTVFWPNVEVLGRVAXTSNACGYFLNLHKATGHPVLVCMVAGRFAYEMEKLSDEESVNFVMSQLRRMLPGATEPVQYLVSRWGTDPNSLGSYSCDLVGKPADLYERFCARVGNLFFAGEAACIDHSGSVHGAYSSGIDAAEDCRRRLSTQLGISDLFQVGKIVMREEMTEVMVPLQISRL

SEQ ID NO: 6330 - protein, 501 aa, Chromobacterium violaceum ATCC 12472
MQSLKPGFELKSRYANYIGGRWVPPVNGRYFENVTPITGKPLCEIPRSDEQDVELALDAAHAARYAWGHTPVTERAIALNRIADRMEANLALLAEVETWDNGKPIRETRAADIPLAIDHFRYFASCVRAQEGSLGEIDANTVSYHFHEPLGVVGQIIPWNFPILMAAWKLAPALAAGNCVVLKPAEQTPLSILVLMELIGDLLPPGVLNVVNGFGVEAGKPLASSKRIAKIAFTGETGTGRLIMQYASQNLIPVTLELGGKSPNIFFGDVAAKDDAFLDKAIEGFVMFALNQGEVCTCPSRALIHESIYDRFMEKALARVAAIKQGNPLDPATMIGAQASQEQMDKIQSYLAIGRDEGAKVLAGGARAQLDGDLAGGFYIQPTVFHGHNKMRIFQEEIFGPVVSVTTFQDRDEALAIANDTLYGLGAGVWTRDMNTAFFMGRHIEAGRVWTNCYHAYPAHAAFGGYKQSGIGRETHKMMLEHYQQTKNLLVSYAEDKLGFF

SEQ ID NO: 6331 - protein, 231 aa, Zea mays
MCPTKKGMTGEPSSPCSSASASTLPEHHQTVWTSPPKRPAGRTKFRETRHPVFRGVRRRGSAGRWVCEVRVPGRRGCRLWLGTFDTAEAAARAHDAAMLALAGAGACCLNFADSAWLLAVPASCASLAEVRHAVADAVDDFLRHQLVPEDDALAATPSSPSSEDGNTSDGGESSSDSSPPTGASPFEFDVFNDMSWDLHYASLAQGLLVEPPSAVTAFMDEGFADVPLWSY

SEQ ID NO: 6332 - protein, 199 aa, Zea mays
  misc_feature (136)..(136): Xaa can be any naturally occurring amino acid
  misc_feature (186)..(186): Xaa can be any naturally occurring amino acid
MKTRGKTLTERYEMGKLLGKGAFGKVHYARDLESNQGVAIKIMDKERVLKAGLSEQVKREITTMRLVEHKNIVRLHEVMATRNKIYIIMEYAKGGELLDKVKRSGRLTEADTHRYFQQLIGALDHCHSRGVYHRDXKPENLLLNENGDLKVTDFALSAFSESRRTNGVLHTVCGTPVYIAPEVIKXTGFDRAKSDIWSC

SEQ ID NO: 6333 - protein, 325 aa, Mycoplasma mobile 163K
MAKKIAILTSGGDSPGMNNAIRTIVKTSKIHGIEVFLVYNGYKGLVEKTIKNANEINVDQYIGSGGTFIGSARYLEFKKLEVRQKAVQNLKEMGIDSLVVIGGDGSYAGAQLLHELGVKTIGLPGTIDNDIASTEYTIGLDTALNTIVENVDRLRDTMNSMNMVALVEVMGHGAGDLAMLSGLATGAEIIVTNAHRKSIDEMIEIVKDQMIAKTKRSVIGIVSEFIYDDLKKVAKEIEDKTGIRTRAIILAHTQRGGNPKAYERINASFLGIAAVESLLKNESGVALGFKGNKIISTPIPEALKAQNSAKNENELVTKINKINQS

SEQ ID NO: 6334 - protein, 207 aa, Glycine max
FGSRAMCEPLSVGVHACRRANIGPETYVLIMGAGPIGLVTMLAARAFGAPRTVIVDVDDYRLSVAKSLGADDIVKVSTNIQDVAEEVVQIQKVMGADIDVTFDCAGFDKTMSTALSATQPGGKVCLVGMGHSEMTVPLTPAAAREVDVLGVFRYMNTWPLCLEFLRSGKIDVKPLITHRFGFSQKEVEEAFETSARGGNAIKVMFNL

SEQ ID NO: 6335 - protein, 267 aa, Ralstonia metallidurans CH34
MSIPSFGVGTFRLTGQVVVDSVRNALDVGYRAIDTAQIYGNEADVGQAIAESGVERGELFVTTKIWTANYAADKLVPSLRESLDKLRTDYVDLTLIHWPAPGNGVALSEYMAALAEAKALGLTRQIGVSNFNIELTRQAIEAVGKGEIATNQIELSPYLQSRKLTAFLKEQGIAVTSYMTLAYGKVLKDPVLGQIAAKHHATVAQVALAWALQLGYAVIPSSTKRENLASNLLARDLKLDADDMALIASLERNGREVSPEGLAPVWD

SEQ ID NO: 6336 - protein, 212 aa, Zea mays
MDEEEHEVYGQEIPEDGDMDGADVDMAASGDDAAKLQELDEMKRRLKEMEEEAAALRDMQAKVAKEMQGGDPSASTAEAKEQVDARSVYVGNVDYACTPEEVQQHFQACGTVNRVTILTDKFGQPKGFAYVEFLEQEGVQEALNLNESELHGRQIKVAPKRTNVPGMKQRPPRGYNPYHGYPYRSYGAPYFPPYGYGRAPRFRRPMRYRPYF

SEQ ID NO: 6337 - protein, 591 aa, Zea mays
  misc_feature (429)..(429): Xaa can be any naturally occurring amino acid
  misc_feature (534)..(534): Xaa can be any naturally occurring amino acid
MCGILAVLGVAEVSLAKRSRIIELSRRLRHRGPDWSGLHCHEDCYLAHQRLAIIDPTSGDQPLYNEDKTVVVTVNGEIYNHEELKAKLKTHEFQTGSDCEVIAHLYEEYGEEFVDMLDGMFSFVLLDTRDKSFIAARDAIGICPLYMGWGLDGSVWFSSEMKALSDDCERFITFPPGHLYSSKTGGLRRWYNPPWFSETVPSTPYNALFLREMFEKAVIKRLMTDVPFGVLLSGGLDSSLVASVASRHLNETKVDRQWGNKLHTFCIGLKGSPDLKAAREVADYLSTVHHEFHFTVQEGIDALEEVIYHIETYDVTTIRASTPMFLMSRKIKSLGVKMVISGEGSDEIFGGYLYFHKAPNKKEFHEETCRKIKALHLYDCLRANKATSAWGVEARVPFLDKSFISVAMDIDPEWKMIKRDLGRIEKWVXRNAFDDEERPYLPKHILYRQKEQFSDGVGYSWIDGLKDHASQHVSDSMMMNAGFVYPENTPTTKEGYYYRMIFEKFFPKPAARSTVPGGPSVACSTAKAVEWDAXWSKNLDPSGRAALGVHDAAYEDTAGKTPASADPVSDKGLRPAIGESLGTPVASATAV

SEQ ID NO: 6338 - protein, 276 aa, Oryza sativa (japonica cultivar-group)
MASAAVAAAAAPLRRSLLPSLNPSCLFSSLASSSHRLSLPRALRPAGPLPSDVEDSDDSNAGDGAGEALRKSRNDLKREARRAVQWGMDLAKFSPPQIKRILRAASLDREVFDALMLVKRFGSDVREGKRRQFNYIGRLLRGAQPELMDTLIQYSKDGDDNRLLALMSENTFLMEDEEIEDLPCNEEEGDKEHIEIADRWFEGLLSKDISVTNEIYAIHNVEFDRQELRKLVRTVHMVQDNIENEHEEESTMKLLGAKKQLLCFLRSIAKEAYVKS

SEQ ID NO: 6339 - protein, 120 aa, Zea mays
  misc_feature (82)..(82): Xaa can be any naturally occurring amino acid
TVSFGYDSTKLQELDEMNLLLREMEDESAALREMHAKVGKDMLDPNATTSENRDEMDSLSVFVGNVDYACTPEEVQPHFNSXGTSYRVTILTDKSVQPKGSAYVEFVEDEAAQEAIKLNE

SEQ ID NO: 6340 - protein, 428 aa, Pasteurella multocida subsp. multocida str. Pm70
MSELTAKLTLSDGREYDLPVHKGSLGYDAIDVQSLVKNKLFTFDPGFMSTACCRSEITYIDGDNGVLLHRGYPIAELAKNADYLEVAHLLLFGERPSPEEYKNFTQLVRRHTLVHEQISRFFHGFRRDSHPMAIMCGVSGALAAFYHDSLDINDITHREITAIRLLAKMPTLAAMCYKYSIGQPFMFPQNHLSYSGNFLYMMFATPCEPYIVNPVLERAMDRIFILHADHEQNASTSTVRTAASSGANPFACIAAGIASLWGPAHGGANEACINMLEEIGTVDRIPEFIARAKDKNDPFRLMGFGHRVYKNYDPRAKVMRQTCHEVLKELNIQNPLFDVAMELERIALSDPYFIDHKLYPNVDFYSGIILKAIGIPTSMFTVMFALARTVGWIAHWKEMFKPGNMKIVRPRQLYMGEKERSFEAMDKS

SEQ ID NO: 6341 - protein, 368 aa, Arabidopsis thaliana
MEDDRVFSSVHSTVFKESESLEGKCDKIEGYDFNQGVDYPKLMRSMLTTGFQASNLGEAIDVVNQMLDWRLADETTVAEDCSEEEKNPSFRESVKCKIFLGFTSNLVSSGVRDTIRYLVQHHMVDVIVTTTGGVEEDLIKCLAPTFKGDFSLPGAYLRSKGLNRIGNLLVPNDNYCKFEDWIIPIFDEMLKEQKEENVLWTPSKLLARLGKEINNESSYLYWAYKMNIPVFCPGLTDGSLGDMLYFHSFRTSGLIIDVVQDIRAMNGEAVHANPKKTGMIILGGGLPKHHICNANMMRNGADYAVFINTGQEFDGSDSGARPDEAVSWGKIRGSAKTVKVYCDATIAFPLLVAETFATKRDQTCESKT

SEQ ID NO: 6342 - protein, 54 aa, Triticum aestivum
MGSATVLEVILAIILPPVGVFLRYKLGVEFWICLLLTILGYIPGIIYAVYVLVV

SEQ ID NO: 6343 - protein, 232 aa, Brucella suis 1330
MDEARKLKIAAAAEALTYVKDGMRLGIGTGSTAEEFVRLLAEKVKGGFRVIGVPTSERTAKLCEELGVALTTLEETPHLDLTIDGADEVDGELSLIKGGGGALLREKIVAAASDSMIVIADQSKVVETLGRFPLPIEVNRFGLGATIRAIEAAAVKCGLAGPLNLRLKDGSPFLTDGGHYIVDASFGRIPDPKTLSDALFAIPGVVEHGLFIGLARAAIIAGTDGIRTMNRS

SEQ ID NO: 6344 - protein, 438 aa, Aspergillus nidulans FGSC A4
MVPPMTSAVLHRDTRFVPKKAVGGKGSYLLLEDGTKFLDSTGGAAVSCLGHGHEKIIQAITEQFTKVEYCHTAFFGTEASENLASLLVDSTGGKLSKLFVVSSGSEAVEAALKLARQYFLELPTPQPQRTRFIARKPSYHGTTLGALGVGGHALRRQPFEPILSQNVSHVSPCYAYRGKNDGESDADYVARLAGELDAEFRRVGPDTVCAFIAEPIVGAALGCVPAVPGYFAAMKTICEKHGALFILDEIMCGMGRCGTLHAWEQEDVTPDLQTIGKALGGGYAPVSGLLISDKVVQTVDKGTGAFRHGQTYQGHPISCAAALAVQTVIVEEQLLDNVKSMGEYLEKRLRGTLEGMQYVGDIRGKGLFWGVEFVKNKATKEPFSSETALAFKIQETGTVNGTRGDHIILAPAYNVTKEEIDIIVDTTAKVLAEVFAQL

SEQ ID NO: 6345 - protein, 292 aa, Oryza sativa (japonica cultivar-group)
MAIATESRCEEEKASPHSQEVKRWVLSDFDIGKPLGRGKFGHVYLAREKRSNHIVALKVLFKSQLKQSQVEHQLRREVEIQSHLRHPNILRLYGYFYDQTRVYLILEYALKGELYKELQRCKHFSERRSATYIASLAHALIYLHGKHVIHRDIKPENLLIGSQGELKIADFGWSVHTFNRRRTMCGTLDYLPPEMVEKTEHDYHVDIWSLGILCYEFLYGVPPFEAKEHSETYRRIVKVDLKFPLKPFVSPAAKDLISQMLVKNSAHRLPLHKLLEHPWIVQNADPSGVYRG

SEQ ID NO: 6346 - protein, 370 aa, Pneumocystis carinii
MDSKHSVFNVMGQEFVLQKGYEVIKGLGKGSYGVVCSAKNIEVEDNNKVAIKKITNIFSKKMLAKRALREIMLLQHFRNHKNITTLYDMDIVDPSKFNELYLYEELMQANLNSIIRSDQPLTDAHFQSFIYQILCGLKYIHSANVLHRDLKPSNLLINADCKLKICDFGLSRGISVNQGQGTEYMTEYVTTRWYRAPEVMLSFQSYSKAIDLWSVGCILAELLGRKPFFKGSNYVDQLNQIFCILGTPNENIISKIKSASAQSYIRSLPTLPKMPYSKIFPYANPDALDLLNCLLTFDPYDRISCEEALEHPYLIIWHDPNKEPVCSEQFDFGFEAIDSIEEIRQMIINEVSRFKGLTGNQKLYHSISNT

SEQ ID NO: 6347 - protein, 312 aa, Glycine max
KATNVIVVLGWLENIDDAPSPDASLLQRVMRVMVRRKIFSAEQSETGETLYGLTRASKWILRDTKMTLAPMLLLENHPIHLNPAHYISEIIREGTKNGTAFFKCHGHEQFEMTGLDPEYNRLFNEGMVCTARVVSKAVITGYKDGFNQIKSLVDVGGGIGGSLSEIVRAYPHINAINFDLPHVVATAPKYDGITHVGGDMFVSIPDADAIYMKWILHDWSDEHCVKILKNCRKAIPEKTGKVIIVDHVLRPEGNELFTDVGIAFDMMLLAHNAGGKERTEENWKWLFKETGFARYNIIKINALPSIIEAFPI

SEQ ID NO: 6348 - protein, 341 aa, Anabaena variabilis ATCC 29413
MLAALLYGQEDLRLEQLADPSPEVGEVVIKVGAATTCGTDLKVWRRGGHAKMLKLPTLFGHEAAGEIVAVGAGVTGWQIGDRVVANNSAPCMKCFFCQRQEYSLCPNLTWNNGTFAEYLKIPAPIVQHNLLQIPDELPLPLAAMTEPLACVLHGVARSQIKPQDKVVVLGDGAIGLMFVATLADNVEVLLWGGNDQRLEIGQKLGAAKTFNYHQNPDIPGTVKDLTQGWGADVVIEATGVPKVWETALACARPGAIVNLFGGCPRDTTITVNTEQMHYSELTLKGVFHNTPEYVRAALALIASRKIPFELLISEQRPLKDLEQVFDDMKARKVIKVAMVSS

SEQ ID NO: 6349 - protein, 166 aa, Pirellula sp. 1
MDETNQIILVGISFPIHFKITDSKSTLDMTPEQVTLVKESWEKVKPISEQAAELFYGRLFTLDPSLRSLFKGDMSEQGKKLMSTITLAVTSLDRLETILPTVQALGRKHAVEYEVPDSSYATVGEALIWTLGQGLGDDFTEDVKEAWLLTYTTLSGAMLSGKSTAA

SEQ ID NO: 6350 - protein, 355 aa, Sclerotinia sclerotiorum
MASRAPNPSSGSRKISFNVSEQYDIQDVVGEGAYGVVCSALHKPSGQKVAIKKITPFDHSMFCLRTLREMKLLRYFNHENIISILDIQKPRNYESFTEVYPIQELMETDMHRVIRTQDLSDDHCQYFIYQTLRALKAMHSANVLHRDLKPSNLLLNANCDLKVCDFGLARSAASQEDNSGFMTEYVATRWYRAPEIMLTFKEYTKAIDVWSVGCILAEMLSGKPLFPGKDYHHQLTLILDVLGTPTMEDYYGIKSRRAREYIRSLPFKKKVPFKTMFPKTSDLALDLLEKLLAFNPVKRITVEEALKHPYLEPYHDPEDEPTANPIPEEFFDFDKNKDNLTKEQLKQLIYHEIMR

SEQ ID NO: 6351 - protein, 174 aa, Zea mays
MEDEEHEVYGQEIPVDGEDVDMSAGDDATKELDEMKRRLKEMEEEAAALREMQAKVAKDMQDPNATTSENKEEMDSRSVFVGNHVDYACTPEEVQQHFNSCGTVNRVTILTDKFGHPKGFAYVEFVEVEPVQEAIKLNESELHGRQLKVAPKRTNVLGMKHPPGGGFNPSRPKG

SEQ ID NO: 6352 - protein, 370 aa, Methanocaldococcus jannaschii DSM 2661
MRDIKDNPIRRGIAEQSEAMHPGYTNRAKPYGCKRDPKDIVLKESEDIEGIAIEGPWLEDDISLEEIIKKYYLKIGFQASHIGKAIKIWKHIEEKRKKGDEITVFFGYTSNIVSSGLREIIAYLVKHKKIDIIVTTAGGVEEDFIKCLKPFILGDWEVDGKMLREKGINRIGNIFVPNDRYIAFEEYMMEFFEEILNLQRETGKIITASEFCYKLGEFMDKKLKSKEKEKSILYWAYKNNIPIFCPAITDGSIGDMLYFFKKYNKDEELKIDVANDIVKLNDIAINSKETACIVLGGSLPKHSIINANLFREGTDYAIYVTTALPWDGSLSGAPPEEGVSWGKIGAKADYVEIWGDATIIFPLLVYCVMK

SEQ ID NO: 6353 - protein, 336 aa, Sulfolobus tokodaii
GFTVALIQGDGIGPEIVSKSKRILAKINELYSLPIEYIEVEAGDRALARYGEALPKDSLKIIDKADIILKGPVGESAADVVVKLRQIYDMYANIRPAKSIPGIDTKYGNVDILIVRENTEDLYKGFEHIVSDGVAVGMKIITRFASERIAKVGLNFALRRRKKVTCVHKANVMRITDGLFAEACRSVLKGKVEYSEMYVDAAAANLVRNPQMFDVIVTENVYGDILSDEASQIAGSLGIAPSANIGDKKALFEPVHGAAFDIAGKNIGNPTAFLLSVSMMYERMYELSNDDRYIKASRALENAIYLVYKERKALTPDVGGNATTDDLINEIYNKLG

SEQ ID NO: 6354 - protein, 344 aa, Streptomyces coelicolor A3(2)
MTGGMSAVVWAGVNDVRVEEVPMPEVPPGWALVRVACTGICGTDLGIVHGKHPRARQGLILGHEISGWVEVTAPGGPPEGALVVAEPLISCKDCRACREGHSHVCARLGLFGIDAPGGAAQFVALPTSTLHQVPSRVEPTQAALTEPLAVAVHAVSRSGMEAGDVVAVFGAGPIGILTALVARHEGASHVVVAEPNARRRAVASDMGLIAVPDGAQLRDMVAELSQGDGADTTFDSAAHPAVAAELADVTRVLGRVVIVGVYKEPAAVDLQAVCFKEQSVVGVRVYTREDFRTAIDLVAQNALGLDRFPVSVYGFDRISDAFDAAATGSGGLKVLISTHRDEAT

SEQ ID NO: 6355 - protein, 384 aa, Xanthomonas axonopodis pv. citri str. 306
MNDTATPGFKPKKSVALSGTAAGNTALCTVGRSGNDLHYRGYDILDLATTSEFEEIAYLLVHGKLPNRGELRGYKAKLRSLRGVPAAVKTALEQLPPSAHPMDVMRTGVSVLGCLQPEKDDHNHPGARDIADKLMASLGSMLLYWYHYSHNGKRIEVETEDDSIGGHFLHLLHGFAPKDSWVRAMHTSLILYAEHEFNASTFASRVIAGTGSDMYSAIAGGIGALRGPKHGGANEVAFEVQKRYDTPDEAEADIKARVERKEVVIGFGHPVYTVSDPRNKVIKVVARELSDEQGSRKMYDIAERLESVMWDIKKMFPNLDWFSAVSYHMMGVPTAMFTPLFVLARTAGWSAHIIEQRVDGKIIRPSANYTGPEDQVFVPLDQRS

SEQ ID NO: 6356 - protein, 270 aa, Nicotiana langsdorffii x Nicotiana sanderae
MTMSLLSYLSLLIFLSSLCAASVDVQKKFLQCLSVSDQKFPIYTTNNKNYSSVLQFSIQNLRFNTTKTPKPLVIVTPVSEAEIQRVILCAKESSIHVRVRSGGHDYEGLSYVSEDPFVLIDLVGHRNITINVDDKTAWVETGSTIGELYYKISKKSKTLGFPAGLCPTVGVGGHISGGGTGVMLRKYGLAADNVIDARLMDANGRILDRKSMGEDLFWAIRGGGGNTFGLVLAWKIKLVDVPEKVIVFTIDKTLEQNATKLVHKWQYVSS

SEQ ID NO: 6357 - protein, 418 aa, Nicotiana langsdorffii x Nicotiana sanderae
YEGLSYVSEDPFVLIDLVGHRNITINLDDKTAWVETGSTIGELYYKISKKSKTLGFPAGLCPTVGVGGHISGGGTGVMLRKYGLAADNVIDARLMDANGRILDRKSMGEDLFWAIRGGGGNTFGLVLAWKIKLVDVPEKVIVFTIDKTLEQNATKLVHKWQYVSSKLHQDLYIRIFIHKDEQNIFLASFVSIFLGDIDRLLLIMQENFPELGLVRENCIEMSWIESTLYFAGFPRGESLDVLRSRGLPPTLYSEAKADYVQKPISVQQLEGIWDFFNAGEAKFEQMIFTPYGGRMDEISEYELPFPHRPGNLYEIQYLMFWDEEGVEEAERHMRWMRRLYAHMEPLVSTSPRAAYINYRDLDIGVNNKKGNTSYAQAKVWGIKYFKNNFDRLVQVKTKVDPSNVFRNEQSIPPLVEQE

SEQ ID NO: 6358 - protein, 174 aa, Triticum aestivum
MAPAVMASSATTVAPFQGLKSTAGLPVSRRSSASLGSVSNGGRIRCMQVWPIEGIKKFETLSYLPPLSTEALLKQVDYLIRSKWVPCLEFSKVGFVFREHNSSPGYYDGRYWTMWKLPMFGCTDATQVLNEVEEVKKEYPDAYVRVIGFDNLRQVQCVSFIAFRPPGCEESGKA

SEQ ID NO: 6359 - protein, 250 aa, Nicotiana tabacum
MGKCYPTVSEEYLKAVDKCKRKLRGLIAEKNCAPLMLRLAWHSAGTYDVCSKTGGPFGTMRFKAEQGHGANNGIDIAIRLLEPIKEQFPILSYGDFYQLAGVVAVEVTGGPDVPFHPGREDKTEPPVEGRLPDATKGSDHLRDVFVKQMGLSDKDIVALSGGHTLGRCHKERSGFEGPWTTNPLIFDNSYFTELLSGEKEGLLQLPSDKALLSDPAFRPLVEKYAADEDAFFADYAEAHLKLSELGFAEV

SEQ ID NO: 6360 - protein, 370 aa, Agrobacterium tumefaciens str. C58
MTVRSLFLLPGDGIGPEAMTEVRKLIEYMNSAHNAGFTVSEGLVGGSAYDAHGVAISDADMEKALAADAILFGAVGGPKWDGVPYEHRPEAGLLRLRKDLELFANLRPAICYPALAAASSLKPELVEGLDILIVRELTGGVYFGEPKQIIDLGNGQKRGIDTQIYDTFEIERIASVAFELARSRDNRVCSMEKRNVMKSGVLWNQVVTETHAAKYKDVQLEHMLADAGGMQLVRKPKQFDVIVTDNLFGDMLSDVAAMLTGSLGMLPSASLGAPDAKTGKRKAMYEPVHGSAPDIAGKSIANPIAMIASFAMCLRYSFNMVDEATKLEAAIANVLDKGIRTADIMADGCRQVGTSDMGDAVLAEFKALSA

SEQ ID NO: 6361 - protein, 427 aa, Nitrosomonas europaea ATCC 19718
MPPQNVATLSPGKGKQEIELPIVSGNEGPDVVDIRSLYAQSGMFTYDPGFVSTASCKSAITFIDGDKGVLLYRGYPIEQLATRCDFMEVSYLLLNGELPTPDQKAKFVDNIKNHTMLHEQLIKFLSGFRRDAHPMAVMVGVVGALSAFYHDAMDVSDAQHREQSAFRLIAKLPTITAIAYKYNIGQPFIYPHNDLGFTENFLHMMFATPAEQYTPNPVIVRALDRILILHADHEQNASTSTVRLAGSSGANPFACISAGITCLWGPAHGGANEACLNMLEQIGDVSRINEYIARAKDKNDPFRLMGFGHRVYKNFDPRATLMRETCHEVLDELGLHNDRLFKLALELEKIALEDDYFITKKLYPNVDFYSGIVQRALGIPTSMFTAIFATARTVGWVAQWNEMISDPEQKIGRPRQLYVGAPRRDVP

SEQ ID NO: 6362 - protein, 208 aa, Arabidopsis thaliana
MTSSVVVAGAGDKNNGIVVQQQPPCVAREQDQYMPIANVIRIMRKTLPSHAKISDDAKETIQECVSEYISFVTGEANERCQREQRKTITAEDILWAMSKLGFDNYVDPLTVFINRYREIETDRGSALRGEPPSLRQTYGGNGIGFHGPSHGLPPPGPYGYGMLDQSMVMGGGRYYQNGSSGQDESSVGGGSSSSINGMPAFDHYGQYK

SEQ ID NO: 6363 - protein, 119 aa, Triticum aestivum
MAETAAIAPPPQPMAPPQPVEENATAAPSQPMAPPQPMAENATAAPPQPMAESATVVVVVPPPPPDGTTTFLCLILAFFIPPLGVFLKYKCEIEFWICLILTFLAYAPGIIQAVRVIVK

SEQ ID NO: 6364 - protein, 292 aa, Arabidopsis thaliana
MGVIINHHFLAFIFGILGNVISFLVFLAPVPTFYRIYKRKSTESFQSLPYQVSLFSCMLWLYYALIKKDAFLLITINSFGCVVETLYIAMFFAYATREKRISAMKLFIAMNVAFFSLILMVTHFVVKTPPLQVSVLGWICVAISVSVFAAPLMIVARVIKTKSVEYMPFTLSFFLTISAVMWFAYGLFLNDICIAIPNVVGFVLGLLQMVLYLVYRNSNEKPEKINSSEEQLKSIVVMSPLGVSEVHPVVTESVDPLSEAVHHEDLSKVTKVEEPSIENGKCYVEATRPETV

SEQ ID NO: 6365 - protein, 435 aa, Chromobacterium violaceum ATCC 12472
MTGSIAVETNRKVTLSYNEGKETLDLPVLGGTLGPDVVDIRGFGKTGMFTFDPGFLATASCESKITFIDGDLGHLYYRGYPIEQLAEKSDYLEVCYLLLNGELPTAAQRKEFERGVMRHNMLHDQLMSLFKGFRRDAHPMAVMVGVVGALSAFYHDSLDISNPEHRRISAHRLIAKLPTIAAQAYRYNKGLPFSYPKNGLTYAENFLHMMFSTPCEEYKVNPVLARALDRIFTLHADHEQNASTSTVRLAGSSGANPFACIAACIACLWGPSHGGANEAVLKMLDEIGSVDNVADFMQGVKDKRYKLMGFGHRVYKNMDPRAAIMKQTCDEVLNELGLHNDPKFKLAMELEKIALSDPYFIERKLYPNVDFYSGIVLSAIGIPVSMFTPIFALARTVGWIAHWNEMIGDPGMKIGRPRQLYTGAARRDFVEVAKR

SEQ ID NO: 6366 - protein, 454 aa, Bacteroides thetaiotaomicron VPI-5482
MPEYELIKVIGQGGMGSVYEGRSGDGKRVAIKMMNSKATMNPEFKELFYIEAAALKKMRHPSVVGIVDNPFSDEHGNMYLPMEYVDGETIEHHVEMAGPYTEFTAKDLMGKILDAMAYIHRMGCIHRDIKPSNIMVRPDGSICIIDFGIAKDMKTSTGKTIGRIIGTDGYMSPEQAKGDSIDYRTDIYSLGCLLHYMLTGSHAIKKRSNDYDTICSILNDEFPRAKTFNPHLSDQTQEAILKAVDKNMLRRFQTVMEFKSGLFRETVVDPNRVKVSVGRRECDITIPSDYISGHHLEIEYREERCTGSIHRYLLFTDSSTNGTSVDGKYLRHGSIKIPFSFENPSPLPNVWLAGRSEYLLDWDEVIQKLRDKGGRTVIMEEVVGDILPPTPPTPSVKEDKLGIGYGILSVVCPIVGWVLWAQWKKETPRRARAAAICGWIGFVVGFIINILSSI

SEQ ID NO: 6367 - protein, 101 aa, Glycine max
  misc_feature (61)..(61): Xaa can be any naturally occurring amino acid
  misc_feature (92)..(93): Xaa can be any naturally occurring amino acid
  misc_feature (95)..(95): Xaa can be any naturally occurring amino acid
STENQVNGEIYNHEELRKQLPNHTFRTGSDCDVIAHLYEEHGENFMDMLDGYFHLFCWISXNSFIVARDAIGVTSLTLGGGLDGSVWISSEXXGXNDDANF

SEQ ID NO: 6368 - protein, 132 aa, Chlorobium tepidum TLS
MLMKIAKDPMRLFDDIWSGSQMAVAPSFKVDISEDENAYHLDAELPGIAKEQIALNIEDDVLTIKAERTHKEEEKKKNYHRVERTYGSFSRSFNIGEIIDQEHIGATYDNGVLHVTLPKTQPAKKTKEIPIN

SEQ ID NO: 6369 - protein, 503 aa, Pisum sativum
MDIPIPTRQLFINGDWKAPVLNKRIPVINPATQNIIGDIPAATKEDVDVAVAAAKTALTRNKGADWATASGAVRARYLRAIAAKVTEKKPELAKLESIDCGKPLDEAAWDIDDVAGCFEYYADLAEKLDARQKAPVSLPMDTFKSHVLREPIGVVGLITPWNYPMLMATWKVAPALAAGCAAILKPSELASLTCLELGEICKEVGLPRSVLNIVTGLGHEAGAPLASHPDVDKISFTGSSATGSKIMTTAAQLVKPVSLELGGKSPLVVFEDVDLDKAAEWAIFGCFWTNGQICSATSRLILHESIATEFLNRIVKWIKNIKISDPLEEGCRLGPVVSEGQYEKILKFVSNAKSEGATILTGGSRPEHLKKGFFIEPTIITDVTTNMQIWREEVFGPVLCVKTFSTEEEAIDLANDTVYGLGAAVISNDLERCERVTKAFKAGIVWVNCSQPCFTQAPWGGVKRSGFGRELGEWGLDNYLSVKQVTQYISEEPWGWYQPPAKL

SEQ ID NO: 6370 - protein, 526 aa, Glycine max
  misc_feature (146)..(147): Xaa can be any naturally occurring amino acid
  misc_feature (157)..(157): Xaa can be any naturally occurring amino acid
MVSPISHLPLIIVLLLSFSLANSASLQESFVQCLNLNSDRTFPFYSSIYTPSNPSFTSILDSSAQNLRLLVPSAPKPEFIFTPSRDSHVQAAVICSKKLGIHIRVRSGGHDYEGISYVSEIETPFIVVDLVKLRGINVDVKSNTAXXVQAGATTGEXVYYRIYEKSSVHGFPAGLCTSLGIGGHITGGAYGSMMRKYGLGADNVLDAKIVDANGRILDRKAMGEDLFWALRGGGGGSFGILLWWKVKLVPVPPTVTVFTVKKTLEQGATKLLHRWQEVAPFLDENLFIRVRIQRAQSTVTTSYEGLFLGGARKLLKIMKTSFPELGVTRKDCMETSWIKSVLYIAGFPSGTPPEVLLKGKPIAKFFFKGKSDFVRKPIPETGLEGLRQRLLVEDSPLILWSPYGGRMNQFSESDTPFPYRNGTLFISLYISLWQEGEKNVAKHIDWIGNLHNYMGAYVPSFPRGQYVNYRDLDLGINTKNNTGNIQESAWGYRYFKNNFDRLVKIKTKVDPQNVFRHEQSIPPLPK

SEQ ID NO: 6371 - protein, 170 aa, Escherichia coli
  misc_feature (1)..(1): Xaa can be any naturally occurring amino acid
  misc_feature (25)..(25): Xaa can be any naturally occurring amino acid
  misc_feature (89)..(89): Xaa can be any naturally occurring amino acid
  misc_feature (140)..(140): Xaa can be any naturally occurring amino acid
  misc_feature (158)..(158): Xaa can be any naturally occurring amino acid
XSLKLISNDLRDGDKLPHRHVFNGXGYDGDNISPHLAWDDVPAGTKSFVVTCYDPDAPTGSGWWHWVVVNLPADTRVLPQGFGSGLVAXPDGVLQTRTDFGKTGYDGAAPPKGETHRYIFTVHALDIERIDVDEGASGAXVGFNVHFHSLASASITAXFSEGGSHHHHHH

SEQ ID NO: 6372 - protein, 240 aa, Arabidopsis thaliana
MGRGKIAIKRINNSTSRQVTFSKRRNGLLKKAKELAILCDAEVGVIIFSSTGRLYDFSSSSMKSVIERYSDAKGETSSENDPASEIQFWQKEAAILKRQLHNLQENHRQMMGEELSGLSVEALQNLENQLELSLRGVRMKKDQMLIEEIQVLNREGNLVHQENLDLHKKVNLMHQQNMELHEKVSEVEGVKIANKNSLLTNGLDMRDTSNEHVHLQLSQPQHDHETHSKAIQLNYFSFIA

SEQ ID NO: 6373 - protein, 331 aa, Zea mays
  misc_feature (34)..(34): Xaa can be any naturally occurring amino acid
RTRGLRELEALTNEIDEESQIVGEVLRIKELLLXREDHSDATLFDSLRRLQLMQLSVSTLKATEIGRAVNRLRKHNSRKIRHLVCTLIEGWKVLVDEWVSTTNAALTENSPGSSNPSVVDEEEEGLPSPPLDEGAFFATQTTSIQLSEFFDEMDEDGNLRHSNDPSLAKQEGQANPQTLQSSSLQAKPHGALNKQSNNPSSYESGPGRPVKAAQQRPFGDMKPKQTREHVAIERKPMASQTDKSRPGARPSAGAKLELAKPKVYDDGLDNNRKLEAAKRRLQERYQEAENAKRQRTIQVMELGDIPKPKNQNRQPVVKSRNSLRNWANGRR

SEQ ID NO: 6374 - protein, 347 aa, Sinorhizobium meliloti
MKAVRLESVGNISVRNVGIPEPGPDDLLVKVEACGICGTDRHLLHGEFPSTPPVTLGHEFCGIVVEAGSAVRDIAPGARITGDPNISCGRCPQCQAGRVNLCRNLRAIGIHRDGGFAEYVLVPRKQAFEIPLTLDPVHGAFCEPLACCLHGVDLSGIKAGSTVAILGGGVIGLLTVQLARLAGATTVILSTRQATKRRLAEEVGATATVDPSAGDVVEAIAGPVGLVPGGVDVVIECAGVAETVKQSTRLAKAGGTVVILGVLPQGEKVEIEPFDILFRELRVLGSFINPFVHRRAADLVATGAIEIDRMISRRISLDEAPDVISNPAAAGEVKVLVIPSAERVAQQ

SEQ ID NO: 6375 - protein, 482 aa, Chloroflexus aurantiacus
MLPLYIVEPSLIHAPDFAARHWTFIRGCLVELRANLARLGQPLVVRVGEAVEVLDHLVSTWPIEAIWAHEETGNLLSYARDRAVRRWARARGIPFHELPQNGVVRRLPSRDEWQARWEERMAAAQAQPPSALPPLAIDPGTIPTADELSLPPDTLSEHQPAGETAALQTLTDFIHRRSQQYHRALASPLTAWEGCSRLSAYLAWGALSIRTVVQATRHRISELAFDPSPATRGWVRALNAFESRLHWHCHFIQKLEDEPEIEVRNLVRAYDGMREENHRPDLLVAWASGRTGYPFVDACMRALTATGWLNFRMRAMLVSFVAYDLWQHWREPALILARRWIDYEPGIHYSQMQMQAGTSGNRTIRIYNPVKQGIDHDPEGIFIRRWVPELAHVPTPYIHTPWLLDRHGQERAGCRIGRDYPAPIVDHEAAYRRARAAIAAVRARPETAQEAAAVHQRHGSRTWRPQRRPSKTVSSRQLRLDL

SEQ ID NO: 6376 - protein, 492 aa, Streptomyces coelicolor A3(2)
MTHELFDSKGLLGSAPAAFVAGEYELDSSHGTLPVINPANGQLVAEVPSSSSSTVDRAVTAAVAAQREWGRRSHVARAAVLEAVRDAIAVHADELARIVSVEQGKPLSDARGETEGACAFFDFAISQKYRAVGSMMASEPGRSLGVREEPIGVVAAILPWNFPVAIFARKVAPALMAGNAVVLKPSELTPLSALALARLCRLAGVPDGLLSVVCGEGKDTGRALVTHPGVGMVTMTGSTRGGREILAQVADQIIPVSLELGGKAPFIVFEDADLDAAVEAAADARLWNTGQVCTCNEVTYVHADLHDEFVRRVVDRFASVTPLDPFAAGSRLGPLVAERERTRVQGMVDAAVAAGARVRTGGGRPDGEQYQSGAWFAPTVLTNVRPEMDIARREVFGPVLPIIPFDAEAEVVSAANSTAYGLTAYVYTRDLSRAMRMIDALEFGEVYVNQAGPEQVQGFHTGWKSSGLGGDDGPHGYEKYLRRKTVYVRHAV

SEQ ID NO: 6377 - protein, 221 aa, Triticum aestivum
  misc_feature (190)..(190): Xaa can be any naturally occurring amino acid
  misc_feature (213)..(213): Xaa can be any naturally occurring amino acid
MVLEAVMVVVDNSESSRNSDYQPTRFDSQVDAVNITFQSITQGNPESSVGLMSMGGKGPEVLVTLTTEQGKILEGLHRTKKKIGGSSHLKTGIQVATLALKHRQNRSQRQRIIVFVCSPVEESEKELTTLAKKMKKANISVDFVLFGDLDDDSTKNKLQLFIDTVKTNEGCHLVVIPPSSKLLSDQLVSXPILLGENAGGSGGAGGAGGGNDXVEFGFDPA

SEQ ID NO: 6378 - protein, 503 aa, Burkholderia cepacia R1808
MQFNDILAALDIDLAQWKGNALTARSPVDGATLATLAVDSPADAERKIDAAHAAFLKWRTVPAPVRGELVRVFGNVLREHKAELGRLVTLEAGKITSEGLGEVQEMIDICDFAVGLSRQLYGLTIASERPGHRMMETWHPIGVCGVISAFNFPVAVWAWNAALAFVCGDPVVWKPSEKTPLTAIACHQLLAKALREFDRTHPGVAPEGLHQLVLGMRDVGEVLTSSKKVPVISATGSVRMGQEVAKVLSQRLARGILELGGNNGMIVAPSADLDLVVRAVTFAAVGTAGQRCTTLRRLIVHRSIVDQLLPRIEKAYASVKVGSPLEEGTLVGPLVDRAAFDAMQKALADAREQGGEVKGGERVDVGHADAYYVRPALVRMPKQSAVVERETFAPILYVLVYDDFEQAIDVHNAVPQGLSSAIFTNDMREAEQFMSAAGSDCGIVNVNIGTSGAEIGGAFGGEKETGGGRESGSDAWKAYMRRATNTINYSRQLPLAQGVKFDV

SEQ ID NO: 6379 - protein, 432 aa, Wolinella succinogenes
MDNKTLAQEDLRYLWHPCTQMKDHEQFPLIPIARGKGVYLYDFEGNAYIDGVSSWWVNLFGHSHDYINSQIVEQMGRLEHVILAGFTHEPIIKLSKRLVEMTPHGLEKCFYADNGSSAIEVALKMSFHRHKIEGKKRALFLSLSNSYHGETIGALSVGDVALYKETYGEILLATLQTPVPRDLTQEATQEALEALEVILENRGEEISAFVLEPLVQCAGGMHMYSADYVKGASQLCRARGIHLIFDEIAVGFGRTGTLLALEQCGVVPDFLCLSKGITGGYLPLSVVMMSQETYDCFYAPYHENRAFLHSHSYTGNALACAAANATLDLLEDGSVLKNNRLLGERIDTHLKRLALHPRIGNARRTGMIAALDLLGFDPKERVGLRVYSEALKRGILLRPLGNVIYFMPPYVITLTEIDQVFEALEEVLGRIL

SEQ ID NO: 6380 - protein, 168 aa, Zea mays
MAAASSATSVHDFTVKDASGKDVDLSVYKGKVLLIVNVASQCGLTNSNYTELSQLYPKYKDQGFEILAFPCNQFGGQEPGTNDEIVQFACTRFKAEYPIFDKVDVNGSNVSPLYKFLKSSKGGLFGDSIKWNFSKFLVDKEGRVVDRYAPTTSPLSIEKDIKKLLGSS

SEQ ID NO: 6381 - protein, 409 aa, Sulfolobus tokodaii str. 7
MLYKEPEDGEKIKFDKGKWIVPNKPVILYIEGDGIGPEITNAAIKVINKAVERAYGSSREIKWLEVYAGEKAEKLVNDRFPKETQEMLLKYRVVLKGPLETPIGKGWKSVNVAIRLMLDLYANIRPVKYIEGLESPLKHPEKVDMIIFRENTDDLYRGIEYPFNSEEAKKIRDFLRKELKVEIEDDTGIGIKVMSKYKTQRITRLAIQYAIEHKRKKVTIMHKGNVMKYTEGAFREWAYEVALKEYRDFIVTEEEINQGKPDQGKIILNDRIADNMFQQIIIRPEEYDIILAPNVNGDYISDAAGALIGNIGMLGGANIGDEGGMFEAIHGTAPKYAGKNVANPTGIIKAGELMLRWMGWNEAADLIEKAINMAIRDKKVTQDIARFMGVKALGTKEYADELIKIMDTI

SEQ ID NO: 6382 - protein, 347 aa, Sulfolobus solfataricus
MRAVRLVEIGKPLSLQEIGVPKPKGPQVLIKVEAAGVCHSDVHMRQGRFGNLRIVEDLGVKLPVTLGHEIAGKIEEVGDEVVGYSKGDLVAVNPWQGEGNCYYCRIGEEHLCDSPRWLGINFDGAYAEYVIVPHYKYMYKLRRLNAVEAAPLTCSGITTYRAVRKASLDPTKTLLVVGAGGGLGTMAVQIAKAVSGATIIGVDVREEAVEAAKRAGADYVINASMQDPLAEIRRITESKGVDAVIDLNYSEKTLSVYPKALAKQGKYVMVGLFGADLHYHAPLITLSEIQFVGSLVGNQSDFLGIMRLAEAGKVKPMITKTMKLEEANEAIDNLENFKAIGRQVLIP

SEQ ID NO: 6383 - protein, 470 aa, Arabidopsis thaliana
MNIYTYTKSYVFPQMDQEEEEIEIPNYFICPISLEIMKDPVTTVSGITYDRQNIVKWLEKVPSCPVTKQPLPLDSDLTPNHMLRRLIQHWCVENETRGVVRISTPRVPPGKLNVVEEIKNLKKFGQEALGREETLQKLEVLAMDGNNRRLMCECGVHKSLILFVVKCTSEDEDGRRRIKGLDESLRLLHLIGIPSNDAKTILMENDRVMESLTWVLHQEDFLSKAYTIVLLRNLTEYTSSHIVERLNPEIFKGIIGFLKDVVNSVNRTSPTVRETVQSSSRPSLGKTEPSKLDHSLVIKQAVTAALMILLETSSWSRNRSLLVDLGAVSELIELEISYTGEKRITELMLGVLSRLCCCANGRAEILAHRGGIAVVTKRLLRVSPAADDRAISILTTVSKFSPENMVVEEMVNVGTVEKLCSVLGMDCGLNLKEKAKEILKDHFDEWKKFPCIDITLLTKLLSISPKGPKI

SEQ ID NO: 6384 - protein, 108 aa, Zea mays
MEDEEHEVYGQEIPVDGEDVDMAAGDDATKLQELDDMKRRLKEMEEEAAALREMQAKVAKEMQGVDPNATTSENKEEMDSRSVFIGNVDYAWCLRYQVVFLGQKKKKK

SEQ ID NO: 6385 - protein, 384 aa, Rickettsia bellii
DISKVYSEADCFTYDPGFMSTASCRSTITYIDGDQGILRHRGYDIKDLAEKSDFLEVAYLLIYGELPNNKLYNDFTKKVAHHALVNERLHYLFQTFCSSSHPMAIMLAAVGSLSAFYPDLLNFFKEADYELTAIRMIAKIPTIAAMSYKYSIGQPFVYPDNSLDFTENFLHMMFATPCEKYKVNPVIKNALNKIFILHADHEQNASTSTVRIAGSSGANPFACVSTGIASLWGPAHGGANEAVINMLKEIGSVENIPKYIAKAKDKNDNFRLMGFGHRVYKNYDPRAAVLKETCKEVLKELGQLDNNPLLQIAIELEAIALKDEYFIERKLYPNVDFYSGIIYKAMGIPPQMFTVLFATARTVGWMAQWKEMHEDPEQKISRPR

SEQ ID NO: 6386 - protein, 194 aa, Mirabilis jalapa
MMKNDMNKSGGGVIAKDVNDNTKVNGANNNADLAKPPAKAQVVGWPPVRSYRKNMLAVQKSTGAPESESEKPAANGGLVKVSMDGAPYLRKVDLKLYKSYQDLSDALGKMFSSFTLGNYGSQGMIDFMNESKLMDLINGSDYVPTYEDKDGDWMLVGDVPWEMFVESCKRLRIMKGKEAAGLAPRAMEKCKNRI

SEQ ID NO: 6387 - protein, 601 aa, Zea mays
GQPPRPSVVTCAAKQTLSGCCPLSSPRRAVGMEGGGVGDAYGEDRATEEQLITPWAFSVASGYTLLRDPRHNKGLAFSEAERDAHYLRGLLPPALASQELQEKKLMHNLRQYERPLHRYIAMMDLQERNERLFYKLLIDNVEELLPVVYTPTVGEACQKYGSIYRRPQGLYISLKDKGKILEVLKNWPERSIQVIVVTDGERILGLGDLGCQGMGIPVGKLSLYTALGGVRPSACLPITIDVGTNNEALLNDDFYIGLRQRRATGEEYHELLEEFMTAVKQNYGEKVLTQFEDFANHNAFDLLEKYRESHLVFNDDIQGTASVVLAGLLAALKVVGGTLADHTYLFLGAGEAGTGIAELIALEMSKHTGSPIEECRPKIWLMDSRGLIVASRKESLQAFKKPWAHEHGAVETLLEAVRSLKPTVLIGTSGKGGTFTKDVVEAMASQNERPVVFALSNPTSHSECTAEQAYTWTEGRAVFASGSPFPAVELDGRALVPGQSNNAYIFPGFGLGVVISGAIRVRDDMLLAASEALAEQVTEAHYAKGLIFPPFTNIRAISARIAAKVAAKAYELGLASRLPRPDDLVSYAESCMYTPTYRSYR

SEQ ID NO: 6388 - protein, 408 aa, Nicotiana tabacum
MDEATCSTNALPPFLTKTYEMVDDPSSDAIVSWSSSNKSFVVWNPPDFARDLLPRYFKHNNFSSFIRQLNTYGFRKVDPEKWEFANEDNFFRGQPHLLKNIHRRKPVHSHSAQNLHGLSSPLTESERQGYKEDIQKLKHENESLHLDLQRHQQDRQGLELQMQVFTERVQHVEHRQKTMLSALARMLDKPVTDLSRMPQLQVNDRKRRLPGNSCLYNETDLEDTRAISSRALTWENMNPSSLLTINAELLNQLDSSLTFWENVLQDVDQAWIQQNCSLELDESTSCADSPAISYTQLNVDVGPKASDIDMNSEPNANTNPEVAAPEDQAAVAGTTTNVPTGVNDIFWEQFLTENPGSVDASEVQSERKDIGNKKNESKPVDSGKFWWNMKSVNSLAEQLGHLTPAEKT

SEQ ID NO: 6389 - protein, 57 aa, Glycine max
MADDSTATCIDILLAIILPPLGVFLKYGCKVEFWICLVLTLFGYIPGIIYAVYAITK

SEQ ID NO: 6390 - protein, 233 aa, Ralstonia solanacearum
MSSPSLAAPALARARDRLARRRTAGVLSRHHLLIIAIAIVIAIIALLLPRTCHAAAGAQAAPAPQPAAAGPCPTALDFRVRRLQDDAPQNLCQYAGRVVLVVNTASYCGYTYQYEGLEALYARFRDKGLTVLGFPSNDFEQEPGTGKQIADFCYNTYGVKFPMFSKTSVVGPAASPLYHWLAQQTGQPPKWNFHKYLLDRSGRVVAVYPSKVEPGDPALIKRIDALLAEPAPR

SEQ ID NO: 6391 - protein, 301 aa, Aspergillus nidulans FGSC A4
MAPYSKTVKSSAYYSRYQTKYRRRREGKTDYYARKRLITQAKNKYNAPKYRLVVRFTNRDIVTQIVYSEITGDKVFASAYSHELKRYGITNGLTNWAAAYATGLLLARRTLKKLGLDEDFTGVEEPDGEFSLTEAAETEEGTRRPFKAFLDVGLARTSTGARVFGAMKGASDGGIFIPHSESRFPGYDIEAEELDAETLRSYIFGGHVAEYMEGLADDDEERFRGQFHKYTENEIDAGDIEELYAEAHKAIRADPFKKDESEGPKKTKEEWKAESKKYRKTKLSHEEKKARVEAKIRELAA

SEQ ID NO: 6392 - protein, 321 aa, Rhodococcus sp. X309
AAAGGKIDATADANKLALDVIGLAGFGYDFASFDGDEHPFVGAMSRVLEHVNRTSNDIPFLRKLRGNGADLQYEKDIAFVRTVVDDVITERQAKPGEHQDDLLDLMLNNIDDETGEKLDPVNIRNQVLTFLVAGNETTAGAIAFALYFLSRHPEIADAARAEVADITGGETPAFEDVARMRYLRRVVDETLRLWPSAPGYFRKVRTDTTLGGRYAMPKGSWVFVLLPQLHRDPVWGENPDSFDPDRFKPENVKKRPAHAYRPFGTGPRSCIGRQFALHEAVLSLATILQRYSFQSDPEYKLDVREALTLKPVGLELSLQRL

SEQ ID NO: 6393 - protein, 393 aa, Azotobacter vinelandii
MLTEQQRAIVKATVPLLETGGEALTSHFYRIMLAEHPEVRPLFNQAHQASGEQPRALANAVLMYARHIDRLEALGPLVAQIVNKHVSLQVLPEHYPIVGACLLRAIREVLGAETATDAVLDAWGAAYGMLAELLIGAEEAAYAAGAAVPGGWRGARAFRVARRVVESEEIVSLHLRPEDGGALPAFRPGQYIGLRLVLDGEEVRRNYSLSAAPNGEEYRISVKRHATGRVSRHLHEQVREGDRLELFPPAGEFVLNDSDKPLVLIGAGVGVTPLLAMLEAALPGGRPIRFIHCARHAGVQAFRQQVEALAGRHPQLEAFFCYSAPRAGDRADANGRLDAQRLAAWLPAERDLDAYFLGPKSFMAQVKRQLRELGVPQEQCHYEFFGPAQALEA

SEQ ID NO: 6394 - protein, 266 aa, Zea mays
TTTASVEPEGRRRRKKLGTRFPAARIKKIMQADEDVGKIALAVPVLVSRSLELFLQDLIDRTYEITLQSGAKTLNSFHLKQCVKRYSSFDFLTEVVSKVPDLGGADSCGDERVLPRRRKSNGSDPENDESRSSKMAIRNANISPRGRGRGRGRGRGRPPTKRKEVGYVQFEDESSMFAEQGEPLPGEETVQEINGNETMPQSTQPPVEAPPTALAQATTSSKAEEANTDHQSDWPMPDAIGSIGVVPSGFGHLTVQVEDEDYDNED

SEQ ID NO: 6395 - protein, 158 aa, Xanthomonas axonopodis pv. citri str. 306
MNIVRYPQFPTHALQNEIKHVFDRFFEQNGDTDESAVVTAQWVPRVDIKEEVNHFVLYADLPGIDPSQIEVQMDKGILSIRGERKSESSTETERFSRIERRYGSFHRRFALPDSADADGITAAGRNGVLEIRIPKRPAATPRRIQVGNGQNTSGSTVQ

SEQ ID NO: 6396 - protein, 371 aa, Zea mays
MDPFHGIVKEEFDLDFDFTCASAAAAAAASWAVALPEMPRPMEGLGEVGPTPFLTKTYDVVDDPNTDTIVSWGFAGTSFVVWDANAFALVILPRYFKHSNFSSFVRQLNTYGFRKVDPDRWEFANEGFQRGQRELLRTIKRRRPPSSPSAQQGQAPSACLEVGQFGLDGEVHRLQRDRGILLAEVVKLRQEQQATRAQMQAMEKRITTAEQKQQQMTVFLARAMKNPSFIRMLVDREGLGGCRRELEDALSRKRRRPIEYLPRDGERSGTATESAVSDYISGLPVGVNGVAEADDDERRWERRGGGGGGEDTESFWAKLLNLGLEEKHREGRCDGEEGNGADVDNDVDDDVDVLVQSIYHLNPNPGSPGGK

SEQ ID NO: 6397 - protein, 284 aa, Thermoplasma acidophilum
MNGMQTAEFDGTGRKVSVIGVGTWSLEGSRSENVRSIRYALDHGVNFIDTAEMYGTEDIVGEAIKGYRREDLFIATKVWPTHFAYHDVLKSCEESLKKLGTDYVDLYQLHWPNPSVSIKETMSAMEKLVDEGRIRYIGISNFSVKEMKEAMSALAKYRIVSNQLEYNVATREIEDEGIYDFCRKNGMAIIAYSPLSHGKIFGNEMILETLTDIGKKYGKRPAQVALNWIIRKGAFPIPKASKPIHMAENIESTDFTLSDEDMKTLDSLYQRHPIRSIASRYKGH

SEQ ID NO: 6398 - protein, 193 aa, Zea mays
MSAVNITNVAVLDNPTAFLNPFQFEISYECLVPLDDDLEWKLIYVGSAEDENYDQQLESVLVGPVNVGTYRFVLQADPPDPSKIREEDIIGVTVLLLTCSYMGQEFMRVGYYVNNDYDDEQLREEPPAKVLIDRVQRNILADKPRVTKFPINFHPEPSTGTGRQQQQQEPQTASPEKHAGSGEGNGSKPEADQ

SEQ ID NO: 6399 - protein, 360 aa, Pisum sativum
MDFSTNGSEESELYHAQIHLYKHVYNFVSSMALKSAMELGIADAIHNHGKPMTLPELSSSLKLHPSKVNILYRFLRLLTHNGFFAKTTVKSNEGEEETAYVLTPSSKLLVSGKSTCLSSLVKGALHPSSLDMWGVSKKWFHEDKEQTLFECATGENYWDFLNKDSDSLSMFQDAMAADSRLFKLAIQENKHVFEGLESLVDVAGGTGGVAKLIHEAFPHIKCTVFDQPQVVGNLTGNENLNFVGGDMFKSVPSADAVLLKWVLHDWNDELSLKILKNSKEAISHKGKDGKVIIIDISIDENSDDRGLTELQLEYDVVMLTMFLGKERTKKEWEKLIYDAGFSRYKITPICGFKSLIEVYP

SEQ ID NO: 6400 - protein, 440 aa, Rhodobacter sphaeroides 2.4.1
MAKLGKSAQPVLTHAEGIYVHTEDGRRLIDGPAGMWCAQVGYGRREIVDAMAHQAMVLPYASPWYMATSPAARLAEKIATLTPGDLNRIFFTTGGSTAVDSALRFSEFYNNVLGRPQKKRIIVRYDGYHGSTALTAACTGRTGNWPNFDIAQDRISFLSSPNPRHAGNRSQEAFLDDLVQEFEDRIESLGPDTIAAFLAEPILASGGVIIPPAGYHARFKAICEKHDILYISDEVVTGFGRCGEWFASEKVFGVVPDIITFAKGVTSGYVPLGGLAISEAVLARISGENAKGSWFTNGYTYSNQPVACAAALANIELMEREGIVDQAREMADYFAAALASLRDLPGVAETRSVGLVGCVQCLLDPTRADGTAEDKAFTLKIDERCFELGLIVRPLGDLCVISPPLIISRAQIDEMVAIMRQAITEVSAAHGLTAKEPAAV

SEQ ID NO: 6401 - protein, 503 aa, Glycine max
MAISIPSRQLFIDGEWKVPLLNNRFPIINPATEDIIGHIPAATKEDVDLAVDAAKRAFSHNKGKDWSSAPGSVRARYLRAIASKITEKKDELGKLEAIDCGKPLDEALADLDDVIGCFNYYAELAEGLDAKQNAPVSLPMETFKSYVLKEPIGVVALITPWNYPLLMATWKVAPALAAGCTAILKPSELASVTCLELAEICREVGLPPGVLNIVTGLGNEAGAPLSSHPDVDKISFTGSSATGSRIMTAAAQLTKPVSLELGGKSPIIVFEDVDLDKTAEWTIFGCFFTNGQICSATSRLIVHESIATEFVNRLVQWAKNIKISDPFEEGCRLGPIVSEGQYKKVLNCISTAKSEGATILIGGSRPEHLKKGYFVEPTIITDVTTSMQIWREEVFGPVLCVKTFSTEEEAIELANDTHYGLGSAVMSKDLERCERISKAIQAGIVWINCAQPSFIQAPWGGVKRSGFGRELGEWGLENYLSVKQVTKYISDEPWGWYQSPSKL

SEQ ID NO: 6402 - protein, 103 aa, Triticum turgidum subsp. durum
AVVAAMLLAVTEAAVSCGQVSSALSPCISYARGNGASPSAACCSGVRSLASSARSTADKQAACKCIKSAAAGLNAGKAAGIPTKCGVSVPYAISSSVDCSKIR

SEQ ID NO: 6403 - protein, 388 aa, Zea mays
MAGKGGSSNGGGGGRESKKPALLLGRYEVGKLLGQGNFAKVYHARSVRTGEEVAIKVMEKEKILKSGLMAHIKREIAVLRRVRHPHIVQLYEVMATKLRIYFVMEYVRGGELFARVARGRLREDDARRYFQQLVSSVAFCHARGVYHRDIKPENLLLDDAGELKVTDFGLSAVAEQMRHDGLFHTFCGTPAYVAPEVLSRRGYDAAKADLWSCGVVLFVLAAGYLPFRDRNLVAMYRKIHRGEFRCPRWFSPGLTRLLRRVLDTSPPRRATAAEIMGDEWFKVGFRRFSFRVEDDRSFTRFDLDDDASTSPPEPDTPRADAAAAGREKPRRVAAGLTSCASAPSLLQTPSLHISYNLARVITRGPSHPMHVLNVLKTHSNVSTVSSPS

SEQ ID NO: 6404 - protein, 159 aa, Glycine max
MDFRVMGLESPLFHTLQHMMDMSEDGAGDNKTHNAPTWSYVRDAKAMAATPADVKEYPNSYVFEIDMPGLKSGDIKVQVEDDNLLLICGERKRDEEKEGAKYLRMERRVGKLMRKFVLPENANTDAISAVCQDGVLSVTVQKLPPPEPKKPRTIQVKVA

SEQ ID NO: 6405 - protein, 383 aa, Rickettsia amblyommii
DISRVSAEADCFTYDPGFMSTASCQSTITYIDGDQGILRHRGYDIKDLAEKSDFLDVAYLLIYGELPSGEQYNNFTKQVAHHSLVNERLHYLFQTFCSSSHPMAIMLAAVGSLSAFYPDLLNFKEADYELTAIRMIAKIPTIAAMSYKYSIGQPFIYPDNSLDFTENFLHMMFATPCTKYKVNPIIKNALNKIFILHADHEQNASTSTVRIAGSSGANPFACISTGIASLWGPAHGGANEAVINMLKEIGSSEYIPKYIAKAKDKNDPFRLMGFGHRVYKNYDPRAAVLKETCKEVLKELGQLDNNPLLQIAIELEAIALKDEYFIERKLYPNVDFYSGIIYKAMGIPSQMFTVLFAIARTVGWMAQWKEMYEDPEQKISRPR

SEQ ID NO: 6406 - protein, 558 aa, Triticum aestivum
  misc_feature (88)..(88): Xaa can be any naturally occurring amino acid
  misc_feature (330)..(330): Xaa can be any naturally occurring amino acid
  misc_feature (343)..(343): Xaa can be any naturally occurring amino acid
  misc_feature (352)..(352): Xaa can be any naturally occurring amino acid
  misc_feature (369)..(369): Xaa can be any naturally occurring amino acid
  misc_feature (428)..(428): Xaa can be any naturally occurring amino acid
  misc_feature (515)..(515): Xaa can be any naturally occurring amino acid
  misc_feature (529)..(529): Xaa can be any naturally occurring amino acid
  misc_feature (540)..(540): Xaa can be any naturally occurring amino acid
MAAAAVASNGGAAPVPGRLASVYSEVQTSRIAHALPLPSVLRSHFTLADGPASTAAGSPDEIAKLFPCLYGQPSAAVVPSAEAGRDEXLKIGVVLSGGQAPGGHNVICGIFDYLQERAKGSTMYGFKGGPAGVMKGKYVELTTDFVYPYRNQGGFDMICSGRDKIETPEQFQQAEDTVNRLDLDGLVVIGGDDSNTNACLLGEYFRGRNLKTRVIGCPKTIDGDLKCKEVPTSFGFDTACKIYSEMIGNVMTDARSTGKYYHFVRLMGRAASHITLECALQTHPNVALIGEEVAEKKETLKNVTDYITDVVCKRAKLGYNYGVVLIPEGXIDSIPEIQKLIAXLNECYAIVXDEGGAWKASKLEPASRXFDFLPKTIQEQLLLERDPHGNVQVAKIETEKMLIAMVETELEKRRAAGKYSAHFRGQSXTHFFGYEGRCGLPTNFDSSYCYALGYGAGALLQFGKTGLISSVGNLAAPVEEWTVGGTALTALMDVERRHGKNKPVIKKAMVELDAXPFKKFASLRDEWAXKNRYISPGPIXFSGPGSDASNHTLMLSWR

SEQ ID NO: 6407 - protein, 297 aa, Triticum aestivum
MGDRPKLPARYEQVKLLGEGNFAKVYLARHMDTKEEVAIKVMDKEKLIKLGAVQQIKREIAVMRRLRHPNIVQLHKVMACKSRIFVVMEYVRGGPLYRHIPANSGLKEDETRRIFQQLVSALTFCHAQGVYHRDIKPDNLLVDEHGNLKVADFGLSAHADTARREALLHTVCGTPLYVPPEVFARRGYDGAKADAWSCGIVLFVLAAGRKPFRDDDFITLYRTICRGDYRCPRTFSPELVRIVRRLLQPNPAHRITLLQIKETDWFKKGFKEISFYIDNKDCLRSLDGSEELISVTL

SEQ ID NO: 6408 - protein, 336 aa, Agrobacterium tumefaciens str. C58
MLAIFCDTPGQLTAKDLPNPVRGEGEVLVRIRRIGVCGTDLHIFTGNQPYLSYPRIMGHELSGTVEEAPAGSHLSAGDVVTIIPYMSCGKCNACLKGKSNCCRNIGVLGVHRDGGMVEYLSVPQQFVLKAEGLSLDQAAMTEFLAIGAHAVRRGAVEKGQKVLIVGAGPIGMAVAVFAVLDGTEVTMIDGRTDRLDFCKDHLGVAHTVALGDGDKDRLSDITGGNFFDAVFDATGNPKAMERGFSFVGHGGSYVLVSIVASDISFNDPEFHKRETTLLGSRNATADDFERVLRALREGKVPEALITHRMTLADVPSKFAGLTDPKAGVIKGMVEVA

SEQ ID NO: 6409 - protein, 420 aa, Lotus corniculatus var. japonicus
MVLSNTASSGSESDLSIHSTFASRYVRTSLPRFKMPQESIPKEAAYQIINDELMLDGNPRLNLASFVTTWMEPECDKLIMASINKNYVDMDEYPVTTELQNRCVNMIAHLFNAPLGDSDTVGTVGSSEAIMLAGLAFKRTWQNRRKAEGKPHDKPNIVTGANVQVCWEKFARYFEVELKEVKLSEGYYVMDPQKAVDLVDENTICVAAILGSTLNGEFEDVKRLNDLLIEKNKETGWDTPIHVDAASGGFIAPFIYPELEWDFRLPLVKSINVSGHKYGLVYAGIGWVIWRNKEDLPEELIFHINYLGADQPTFTLNFSKGSSQIIAQYYQLIRLGYEGYKHVMENCRDNMLVLKEGLQKTGRFEIVSKDNGVPLVAFTLKDHTHYNEFQISDSLALRVDSAGIQHAPKYSARDRGPCSH

SEQ ID NO: 6410 - protein, 452 aa, Arabidopsis thaliana
MIDKPNQIMEEEGRFEAEVAEVQTWWSSERFKLTRRPYTARDVVALRGHLKQGYASNEMAKKLWRTLKSHQANGTASRTFGALDPVQVTMMAKHLDTIYVSGWQCSSTHTSTNEPGPDLADYPYDTVPNKVEHLFFAQQYHDRKQREARMSMSREERTKTPFVDYLKPIIADGDTGFGGTTATVKLCKLFVERGAAGVHIEDQSSVTKKCGHMAGKVLVAVSEHINRLVAARLQFDVMGTETVLVARTDAVAATLIQSNIDARDHQFILGATNPSLRGKSLSSLLAEGMTVGKNGPALQSIEDQWLGSAGLMTFSEAVVQAIKRMNLNENEKNQRLSEWLTHARYENCLSNEQGRVLAAKLGVTDLFWDWDLPRTREGFYRFQGSVAAAVVRGWAFAQIADIIWMETASPDLNECTQFAEGIKSKTPEVMLAYNLSPSFNWDASGMTDPLTC

SEQ ID NO: 6411 - protein, 75 aa, Glycine max
  misc_feature (66)..(66): Xaa can be any naturally occurring amino acid
MAFSMISSPAVTTVNRAGAGMVAPFTGLKFMAGFATRKTNFDFTCIASNGGRVQCTHVRPPVAKKXFATLSYLSD

SEQ ID NO: 6412 - protein, 146 aa, Vitreoscilla stercoraria
MLDQQTVDTSKATVPVLKEHGVTITTTFYQNLFAKHPEVRPLFDMGRQASLEQPKALAMTVGAAAQNIENLPAILPAVQKIAVKHCQAGVAARHYPIVGQELLGAIKELLGDAATDDILDAWGKAYGVIADVFIQVEADLYAQDAE

SEQ ID NO: 6413 - protein, 487 aa, Zea mays
RPPAQGRRLPVVNPTTEAHIGEIPAGTAEDVDAAVAAARAALKRNRGRDWARAPGAVRAKYLRAIAAKVIERKQELAKLEALDCGKPYDEAAWDMDDVAGCFEYFADQAEALDKRQNSPVSLPMETFKCHLRREPIGVVGLITPWNYPLLMATWKVAPALAAGCAAVLKPSELASVTCLELADICKEVGLPPGVLNIVTGLGPDAGAPLSAHPDVDKVAFTGSFETGKKIMAAAAPMVKPVTLELGGKSPIVVFDDVDIDKAVEWTLFGCFWTNGQICSATSRLLVHTKIAKKFNERMVAWAKNIKVSDPLEEGCRLGPVVSEGQYEKIKKFILNAKSEGATILTGGVRPAHLEKGFFIEPTIITDITTSMEIWREEVFGPVLCVKEFSTEDEAIELANDTQYGLAGAVISGDRERCQRLSEEIDAGIIWVNCSQPCFCQAPWGGNKRSGFGRELGEGGIDNYLSVKQVTEYISDEPWGWYRSPSKL

SEQ ID NO: 6414 - protein, 290 aa, Triticum aestivum
  misc_feature (215)..(215): Xaa can be any naturally occurring amino acid
MAISTDSRGEEKPSQHSQEEKRWVLSDFDVGKALGRGKFGHVYLAREKRSSQIVALKVLFKSQLKQSQVEHQLRREVEIQSHLRHPNILRLYGYFYDQTRVYLILEHAAKGELYKELQRCKHFSERRSATYIAYRKTLLVGVQGELKIADFGWSVHSFGVQGELKIADFGWSVHTFNRRRTMCGTLDYLPPEMVEKTEHDYHVDIWSLGILCYEXLYGRPRFDAKEHSETYRRIVKVDLKFPLKPFVSPAAKDLISQMLVKNSAHRLPLHKVLEHPWIVQNADPSGVYRG

SEQ ID NO: 6415 - protein, 258 aa, Pyrobaculum aerophilum str. IM2
MKETWRLVRRVVEDGDIVLEVLDARDPEATRSVEVEKIAEELGKRLLVVLNKADLVEREIAEQWKSYLESRGMNVVYISAKYRLGTRKLITHIRALAPRIPATVVVVGYPNVGKSTIINYLKGRHVAPTSPKPGWTRGEQLVKAKSWLTVLDTPGIVRTKSTGDLALDVIRGLVDPGTVDDPVPYAYALLKRVVKHNPDALKEAYGIESDIDNALVEIGKVKRRLLKGGRINIEEAARIVLKDWIVGKLRYALPPPNV

SEQ ID NO: 6416 - protein, 335 aa, Xylella fastidiosa Ann-1
MTQTITVIRGDGIGPEIMDATLSVLNALQANLNYEFADAGLSALEKHGDLLPEATLNSISKNKIALKSPLTTPVGEGFSSINVALRRKFDLYANVRPAKSFPNTKSRFSDNVDLITVRENTEGAYLSEGQTISPDGEVATSRARVTRKGSERIVRYAFDLARTTGRKKVTAVHKANIIKSTSGLFLKTARDVASQYPEIDFQEMIVDNTCMQLVMRPEQFDIIVTTNLFGDILSDLCAGLVGGLGLAPGANIGNEQAIFEAVHGSAPDIAGQGKANPCALLLGAVQMLDHIGQPQNAERLRNAIVATLNAKDSLTPDLGGNGNTMGFAKAIASRL

SEQ ID NO: 6417 - protein, 346 aa, Bacillus sp. KSM-K16
MRASVLKALKTIELEERTKPKPGAGEVLIQMKAVGICGSDLHYYEHGRIGERVAKPPFVLGHECAGVVTKVGPEVADLNVGDHVVIEPGLPCGECSSCRVGHYNLCPKVLFLSSPPNDGVLMEYICHPAKFTYKMPEGLSFELASLAEPLSVGLYTAQKTSIQPGSNIVIMGMGPVGLCMILAAKWYGASNIVVTDIEPYRLEIAKKIGAMDTIQVNHEADRAGLLAEADRLGGFDMVIDTSGAEAAFDMAVNLLKRGGTIGGIGFPGGAKSTIPLLKMMQREIVYQPIYRYRHTFKHALALLEKEQEAAQLLLTDFFPMSQISAAFDYAASNKDKSIKVIIHPDK

SEQ ID NO: 6418 - protein, 318 aa, Anabaena variabilis ATCC 29413
MKGLWLENNQLQLLTDIPIPEPAPEEALVRVLRAGICNTDLELLRGYYPYTGILGHEFVGVVEQGPENLLNQRVVGEINAVCGYCRFCRRGQPTHCENRTVLGIVNRHGAFAEYLCLPVKNLHPVPENVATEVATFTEPLAAALEIQQQVILSKDDRVLVVGDGKLGQLVAQTLALTGCELLVVGRHQEKLANLKVRGIQTGLVDAVQDRAFDIVVECTGNPEGFAIARRALRPRGTLVLKSTYAGNLSLDASSLVVDEITLIGSRCGSFPPALELLATGKVDVEPLIHAHYPLSQGLLAFEEAQRRGVLKVLLEIGN

SEQ ID NO: 6419 - protein, 273 aa, Lactobacillus gasseri
MKQLTLNNDVKIPIFGFGTYEISPDQTKQAVLSAFEEGYRLIDTAQYYQNEQQVGEAVKASGLNRDEVFITTKTMTDGYEDTKIGLDESLRRIGLDYFDLVLIHWPMGHDIDTWHALEAAYKAGKTRAIGISNFNSRQTLDLIHQSSVRPMVDQIETHLFLQQWKMHEFLEKENIVHESYSPLGNGQQNLISNPVLKEISEKYGKSPIQVILRYLVQNDVVTIPRSTNPAHIKSNIDIFDFELDNDDLKRLRVLDERKPIDGWPAEMREDEDY

SEQ ID NO: 6420 - protein, 505 aa, Synechococcus elongatus PCC 6301
MLSKELFQMPRGVAPAFAGRKPKGWAWASTAVPDFQGGFKRLINRFQGSKLWLACVPLAATIAVFWGVAANAQGSADPVPSAQFLVNNLWLMVATVLVIFMNAGFAMVETGLCRQKNAVNVLAKNLIVFTLAATAYWFIGYSLMYGSPVVDGFLYFGKGGPLGFFFDPTVSAETIKNDGLISSLDFLFQAAFAGTAATIVSGSVAERIKFVDFIIFSLILTAVIYPIAGSWQWNVGSGWLNKAGFIDFAGSTVVHSVGGWAALIGAITLGPRMGKFQDGRPGALPGHNLAIATLGALILWIGWYGFNGGSVLAFNTAVPYVAVTTTLGGAAGGISATITSWSTSGKPDLSMVINGILAGLVGVTAGCDGFGMGGSFIVGLIAGVLVVFSVYTFENLKIDDPVGACSVHLVCGIWGTLAVGLFNLEKGLFYGGGFGQLGSQILGIISYGVWTVVASVIIWNILKALLGLRVSPEEELQGLDIGEHGMEAYSGFAKDASNALSSISE

SEQ ID NO: 6421 - protein, 110 aa, Populus tomentosa
MDTDVTMVPAGEASSSSSRKPKRFEIKKWNAVALWAWDIVVDNCAICRNHIMDLCIECQANQASATSEECTVAWGVCNHAFHFHCISRWLKTRQVCPLDNSEWEFQKYGH

SEQ ID NO: 6422 - protein, 270 aa, Aspergillus nidulans FGSC A4
MATNARYEPAPQRDSFEDQHYTQAPPSYQATAQEPTPRSEDDNVPDDFKFGGTVAEGTLPIRMQFIRKVYAILTVQLLLTTVMSSISFFSPSYCEWIRSNVWLMMVSVFGAFGFLLVTYWKRKSYPANLLFLSAFTILEAYSISVVTSYYQPRIVVQALILTLGLFVGLTLFACQTKYDFTNWMPYLFGALWFLILFGFVAAFVPHGSTMELIYGSLAALIFSGYILVDTQLIMRHYHVEEEIAASISLYLDILNLFLAILRILNNQNNN

SEQ ID NO: 6423 - protein, 192 aa, Zea mays
MSLCTIARRLCLSKPSSVNRLSVIWAHLYSTEAAKDTGAKKYKYPDVYDPYGPMSLPSEKVVDLADRIAALPPEEIKQIAPALLFRLNQEPPQAISGQGFSFGAQGGAGVGAGKAEEKKAEKTVFDVKLEKFDAAAKIKIIKEIRTFTDLGLKEAKELVEKAPVILKQSLTKDEAEAIIGKIKAAGGVAVME

SEQ ID NO: 6424 - protein, 160 aa, Glycine max
  misc_feature (111)..(111): Xaa can be any naturally occurring amino acid
  misc_feature (114)..(114): Xaa can be any naturally occurring amino acid
MEPMDIVGKSKEDASLPKATMTKIIKEMLPPDVRVARDAQDLLIECCVEFINLVSSESNEVCNREDKRTIAPEHVLKALQVLGFGEYIEEVYAAYEQHKLETMQDSLRGGXWWXKWNNGAEMTEEEALAEQQRMFAEARARMNGGAIASKQPDADQSLDS

SEQ ID NO: 6425 - protein, 625 aa, Zea mays
MAGPEKTVVWFRRDLRIQDNPALAAAAKGGSVLPIFIWCPSDYGQYYPGRCSRWWLKQSLVHLGKSLELLGCPLVLIRAEDSTLAALLECVRSISATRVVYNRLYDPISLVLDNKIKNELPAHGISIQSFNGDLLYEPWDVYDENGQAFTTFNKYWEKCMSLPIEISQYLAPTRLVAAPGLANVRCCSIDDLGLESSKDVESSNALLSRAWSPGWRNAENMLEEFVSYGLLEYSEHGMKVGGSTTSLLSPYLHFGELSVRMIYQLVKMRQVKWQNEGKSEAEESVRLFLRSIGFREYSRYLCFNYPFTHERSFLGNLKHYPWLLDEGRFKSWRQGMTGYPLVDAGMRELWATGWTHNRIRVIVSSFAVKFLQIPWIWGMKYFWDVLLDADLESDILGWQYISGSLPDGHELSRLDNPEVQGQKYDPDGEYVRTWIPELARMPTEWIHSPWAAPNSILQVAGVELGFNYPKPIVELHMARECLDDAISTMWQLDTAAKLAELDGEVVDDNLNNIRNFDIPKVVLNKKLSPSTSSMEHRVLSTNGKDEKSQPTEVKALYKQIIRDDMMNDSNMDDTCSTANLKVTRKRSSSDSYFQKTADRDGTSKVEDNDSEDSGTSISRPSKKAA

SEQ ID NO: 6426 - protein, 355 aa, Blumeria graminis
MSTRAPNATTGSRKISFNVSEQYDIQDVVGEGAYGVVCSALHKPTGQKVAIKKITPFDHSMFCLRTLREMKLLRYFNHENIISILDIQKPRSFDSFTEVYLIQELMETDMHRVIRTQDLSDDHCQYFIYQTLRALKAMHSANVLHRDLKPSNLLINANCDLKVCDFGLARSAASQEDCSGFMTEYVATRWYRAPEIMLTFKEYTKAIDVWSVGCILAEMLSGKPLFPGKDYHHQLTLILDVLGTPTMEDYYGIKSRRAREYIRSLPFKKKIPFKQMFPKTSDLALDLLEKLLAFNPVKRITVDEALQHPYLEPYHDPEDEPTADPIPEEFFDFDKNKDNLSKEQLKELIFQEIMR

SEQ ID NO: 6427 - protein, 433 aa, Pseudomonas syringae
MSGMAGWVDLRHGVGQQANLPHSKVTKVILDMIAAMAGRGPDGQAVWLGPDLALGHCSTVASRYDFNEQPWIGEIRGATVAIMYTGQIYNMWQLQQELASFGPAPDRWSYAEIIRARLWRGYGTARSALRACSLLPLDGQKRELLLARDRLGLQPLYYTLTDGGIIFASVPTAIQAHPQFTAKLDRSALAIVLQPRMAMPGETPLKGLHELPPANVLSFSKRGHTQVRYWQLESAPHTDNFEQTSDHVRALLEGVVARQFEDQVPSAAMLSGGIDSTSVAALVMKQLATRGAGPALDTFCLKFDTDEDAFTSSELRPDIDAPFAALAAEYMGTRHTTLSATMQDLLNVIPATRTARGLPGWGQFDASMYLLFERMRDNFSVALTGEAADEIFGGYPYYFKPDLLARAQFPWLGDGPKLADYLSPALITAQQVA

SEQ ID NO: 6428 - protein, 495 aa, Shigella flexneri 2a str. 2457T
MNFHHLAYWQDKALSLAIENRLFINGEYTAAAENETFETVEPVTQAPLAKIARGKSVDIDRAVSAARGVFERGDWSLSSPAKRKAVLNKLADLMEAHAEELALLETLDTGKPIRHSLRDDIPGAARAIRWYAEAIDKVYGEVATTSSHELAMIVREPVGVIAAIVPWNFPLLLTCWKLGPALAAGNSVILKPSEKSPLSAIRLAGLAKEAGLPDGVLNVVTGFGHEAGQALSRHNDIDAIAFTGSTRTGKQLLKDAGDSNMKRVWLEAGGKSANIVFADCPDLQKAASATAAGIFYNQGQVRIAGTRLLLEESIADEFLALLKQQAQNWQPGHPLDPATTMGTLIDSAHADSVHTFIREGEGKGQLLLDGRNAGLAAAIGPTIFVDVDPNASLSREEIFGPVLVVTRFTSEDQALQLANDSQYGLGAAVWTRDLSRAHRMSRRLKAGSVFVNNYNDGDMTVPFGGYKQSGNGRDKSLHALEKFTELKTIWISLEA

SEQ ID NO: 6429 - protein, 443 aa, Photorhabdus luminescens subsp. laumondii TTO1
MSKTHYSESLNLKSHWMPFSANRSFQRDPRLIVAAEGQWLKDDKGRQIYDSLSGLWTCGAGHTRTEIQQAVAAQLSTLDYSPGFQFGHPLSFQLAEKIANLTPGDLNHVFFTSSGSESVDTAVKMVRAYWRVKGQPEKTKLIGRALGYHGVNIAGTSLGGIGGNRKMFGQLMDVDHLPHTLQTDMAFTPGMAETGGAELANEMLKLIELHDASNIAAVIVEPVSGSAGAIIPPKGYLQRLREICDQHNILLIFDEVITGFGRMGRWTGAEYFGVTPDLLNFAKQITNGAIPLGGVVASSEIYEAFMSQSLPEHSVEFSHGYTYSAHPVACAAGLATLDLLDKNHLIQRSAELAPHFETALHALRNCPNVTDIRNCGLVGAIELAARDGDTAVRPFDASMALWKAGFYVRFGGDTLQFGPMFNAERADLDRLFDAVGEVLHHID

SEQ ID NO: 6430 - protein, 348 aa, Actinosynnema pretiosum subsp. auranticum
MTLTDDEHTAHRHDEGAAAFQALATAAAGWGALRAAVELRLPDLLPDAPTAVPDLAALAGVAPTRLAQLVAVLADVGVLALDERAHVRHTPLSRALRSTDGLALTRLLTAGWADEAWRGLAEGVRTDTSPLELVHGRPLFDLLAADPAAAAVFHDAVATGPGDPFDEAIRSALDLTGAARVVDVGGGRGRLLAALLREHPVLSGVLFDLPEAVRDAVPELRGDDRVQIRAGDLFADRVGAADVYVLRTVLHVLDDAQAVRALANVRADAPAHARVVVVEALSDDEANRTYAAHSSLRLFVLCGGRERSTAEFAELFDRAGLELRSVTPTGTPYHLLEGAPRLSPRTDG

SEQ ID NO: 6431 - protein, 1148 aa, Photorhabdus luminescens subsp. laumondii TTO1
MKSEFKEGYCTLCRSRCGTVNEVRNDTLIKIQQNPKHPTGNAMCMKGKAAPELAHSPNRILHPLRRTNPKGDADPGWEKITWDEALTYVAEKLAFYKAESGAESVAFSVTSPSGTPLSDSLEWIERFIRNFGSPNVCYSTEVCNWHKDEAHKFTFGCSIPVADYRNAELIILWGHNPTNTWLAQAEALGAGRNAGAKLIVVDPRHTALAKESDNWLNINPGTDAALALGLINIIINRRGYDQAFVARWTNASLLVRNDNGLFLREKDINISAKKNRYVVWNNITQSPLPYDIHENVPCDENDHYALLGEFSINSAEDVNKKIPCKSAFQRLLNECQPYTPEYVEKITGITKEKLLYAADLIISSKRIAYHSWTGVAQHTNATQSERAIAVLYALTGCFDTQGSNRVYNKHPVNPVNARRLMPKEQQEKALGFKERPLGPPLDGWITSHDLYQAILHKRPYPIRAMMAFGTNMLSSHADTKIGIDALKQLEFHVHCDLFETPTAHYADILLPVNTPWEREGLRVGFEISAKAEELVQLRQKMISPRGESRSDNEIVFDLACRLGMNDLFFNGSVEAGWNYILEPIGLTVEALREKPAGISMPLIQHDRKYAGIDPVKNTVKGFDTETGVVEIYSEKLWRHGYPPLPIYDEPKENLNSESHFPYRLTSVKNGFYCHSQQRSLTRLRKKSPYPKLEINSRLAEKKGINNGDWVEVITRNGEARFKASLDDNIAYDTIIAEFGWWQACPDYGKEGFPAIGKNSSNYNALISDDSCDPISGASPLRSFRCDIKLAEDINPERRPWQGRKAFRVVDTKPEAKGVKTVIFESQDGTMLPDYEPGQHITVQVSIPGQDAPVIRAYSLTGTATLEGRKSYSISVRHQKSITSDGETFEGVMSSYINKTLVAGAEVNLTPPGGNFIIPLNAKQPVVMLAGGIGITPFISYLESLPANGEKPELLLLYANQNSNTHTFSKRLKEIESKIKQLKVINYYSNPLPVDIEGINYQYHGYITADAVPETLIKQQARFYMCGPAPMMKTFEEGLLTLGVPPFDIYKEMFRSLTPVKIKDGKSFAVKFEKSGVPLEWSPDKGTLLNFGEKSGIKMASGCRVGQCESCAVKLKSGEVQHLNGVEPSEQGMCLTCQCIPISDISIDA

SEQ ID NO: 6432 - protein, 496 aa, Synechococcus sp. WH 8102
MTSSGKVRIYELSKDLGLENKDVLDAAEKLSIAAKSHSSSISDAEAGQIRSLLKSKGNGSKASAPAPAKPAPGKAILSVKKAAPAKPAPAQAKPATPAKPAASASKPAAPAKPAAPAAPARPAPARAAAPAAPAKPVPRPAAAPPPRPQPAKPEVVSKPKPATPATASAPSKPTAPPARPTVVKPTVAKPTVAKPTVAKPTVAKPAPAKPAAAKPAPARPAPARPAPARPSADQPKPRPAAAPSRPTPGAGQKPQIVSRPGSAPRPGAPTRPGAPAPARPGAPVKAGPPTRPTPRPELVGKPVPRRPGTGAPTRSGAGAPQRPGTGVPQRPGSPGRPTRPGAPARSGGNTLELVGKPIRRDGSSTGSGGRPAPPTRPGAGSPQRPGMPSGMRKPVAPGELMQLQKPVGRPAAPAPRRPDAPTKAGDGAGTATPPVARPTPPTAPRRPGGFRPGAPGGQRRLDVRTGMTAPSWKPCAAVRHRSSARRSTSSARTTMR

SEQ ID NO: 6433 - protein, 223 aa, Oryza sativa (japonica cultivar-group)
MAWIGLCVLQKSPFLLCCGPCLEAPGRSGGGGGRRRGGDDGSAGRGGGKLGRSRAEQRGGRSGRSRAAEVAGGGGRRRDGELADPELTPAAAAAAAVAALAREGASSRTRPTAPLPWICSCFLFLFLKILTANTSLFGMSEFLLIYTVEHLFFAQLYDDRKQREACMSMSRAEHAHESYVDYLKPIIADVPSLRELLERIPAPEVERLRTGCGSGKKRGARRR

SEQ ID NO: 6434 - protein, 323 aa, Candida shehatae
MSPSPIPAFKLNNGLEMPSIGFGCWKLDKSTAADQVYNAIKAGYRLFDGAEDYGNEQEVGEGVKRAIDEGIVTREEIFLTSKLWNNYHDPKNVETALNKTLKDLKVDYVDLFLIHFPIAFKFVPIEEKYPPGFYCGDGDNFVYEDVPILETWKALEKLVKAGKIRSIGVSNFPGALLLDLFRGATIKPAVLQVEHHPYLQQPKLIEYAQKVGITVTAYSSFGPQSFVEMNQGRALNTPTLFEHDVIKAIAAKHNKVPAEVLLRWSAQRGIAVIPKSNLPERLVQNRSFNDFELTKEDFEEISKLDINLRFNDPWDWDNIPIFV

SEQ ID NO: 6435 - protein, 306 aa, Photorhabdus luminescens subsp. laumondii TTO1
MPLDKNVEKWLASTPEIAIGEDSPLEQLRIVLEHALIQQQGEWNDATYNSSFTVLAEDGFPIPVRMYVPYGKEKMSDKPALVYAHGGGWCLGSLDAWDRPCRKLAESMGCVIFSVDYRLAPENPFPVPLTDFYAALCYVTDNAEKFGINRQQIAVGGDSAGGNLAVAACLMSRNQEGPAICYQLLFYPALDASMETDSYDKYGEGYVLTKQMMAFFWQAYINEHNSRTNPLISPSHLTHFEGLPDATILLCEYDPLRSEGEAYAQQLRDAGVSVQIETIEGMIHGAMHMTAVTPSVEAFYKKFCFC

SEQ ID NO: 6436 - protein, 479 aa, Streptomyces coelicolor A3(2)
MSTELRRLRNYIDGEFRDAADGRTTEVVNPATGEAYATAPLSGQADVDAAMAAAAAAFPAWRDLVPAERQKALLKIADAFEERAEELIAAEVENTGKPIGLTRSEEIPPMVDQIRFFAGAARMLEGRGAGEYMEGLTSFVRREPIGVCAQVAPWNYPMMMAVWKFAPALAAGNTVVLKPSDTTPASTALMADIIGSIVPKGVFNVVCGDRDTGRLMVEHETPAMASITGSVRAGMSVAESASKDLKRVHLELGGKAPVVVFEDTDIPKAVEGISEAGYFNAGQDCTAATRVLVHESVHDEFVSALAKAASEIKTGQPDDEDVMYGPLNNPNQLKQVSGFIERLPAHAKVEAGGHRVGDKGYFYAPTVVSGLKQDDEIIQREVFGPVITVQAFRDEDQAVEWANGVEYALASSVWTKDHGRAMRMSKKLDFGCVWINTHIPLVAEMPHGGFKKSGYGKDLSGYGFEDYTRIKHVMTSLDM

SEQ ID NO: 6437 - protein, 299 aa, Arabidopsis thaliana
MFSTLETLILKYLALVDVPSPVCMKSLRTLHLDCVNFKHNESFSNLISGCPNLEDLFMYQYYPLDVVMNFIIVAPSLKRLVIIDYREAGGYVINAPTLKYLKIKGLSHCGFCLIENAPVLVEAKIRNLFYIYKEKILGSLKSAKRLSLDLSPLECPIDSIFYQLVHLEIYTCKEEWWNLLKLMLDSSPKLQVLKLIGKNLDFKKVGMVGGKWNEPKNVPECLLSQLKMFVWTSYHWESEVEKEVATYILKNARQLKNVSFSTRPIHSKEHNKLEEKCKMLKELDGVVRASSSCHLVFIE

SEQ ID NO: 6438 - protein, 493 aa, Zea mays
MDQPPNGFAAGGFFTHIDGQNRSPPSIIVIGGGISGIAAARALSTASFNVTLLESRDRLGGRVHTDYSFGCPIDMGASWLHGVCNENSLAPLIRMLGLRLYRTSGDNSVLYDHDLESYALFDKHGQQVPQEIVSKVGETFERILKETVIVRDEHANDMPLFQAIGIVFDRNPHMKLQGLEYEVLQWCICRLEAWFATDMDNISLKTWDQEHMLTGGHGLMVNGYDPVIRAPAQGLDIHLNHRVTKIIQRYNKVIVCVEDGASFVADAAIVTVPLGVLKANIIKFEPELPKEKLSAIADLGVGIENKIALKFDTVFWPDVEVIGRVAPTSNACGYFLNLNKATGNPVLVCMVAGRFAYEIEKLSDEESVNFVMSQLRNMLPQATDPVQYLVSRWGSDPNSLGSYSCDLVGKPADLYERFCAPVGSLFFAGEAACIDHSGSVHGAYSSGIAAAEDCRRRLSAQLGISAGLFQVGKAAMREEMTAEAMVPFQISRL

SEQ ID NO: 6439 - protein, 193 aa, Zea mays
  misc_feature (156)..(156): Xaa can be any naturally occurring amino acid
MDAVMFGLETPLMAALQHLLDVPDGDAGAGGDSDNKTGGGATRTYVRDARAMAATPADVKELPGAYAFVVDMPGLGTGDIRVQVEDERVLVVSGERRREEREDDAKYLRMERRMGKFMRKFVLPDNADVDKVAAVCRDGVLTVTVEKLPPPEPKKXPKTIEVKVAFREQAVAVLLKLCVFQFASFFGITNHPI

SEQ ID NO: 6440 - protein, 294 aa, Aspergillus nidulans FGSC A4
MVPTSIPTTQLKDGTSIPVIGYGTGTAWFKKKGDTSINRDLVESIKTAIRLGYHHLDSAEVYGTERELGVAIKECGVPREQLFVTTKVNQNIANVPKALEDSLEKLQLSYVDLYLIHQPFFAESPTELQDAWAAMEKVKEAGKARAIGVSNFLESHLETILDSARIPPAINQIEYHPYLQHGSLVPYHERKGIAVASYGPLTPVTRAKGGPLDPLLSELAGKYGVGEGEILLRWSLYRGAVAITTSGKESRLSTYLNVFKFQLTHEEVLKISRIGDQKHYRGFWSDKFAADDRS

SEQ ID NO: 6441 - protein, 404 aa, Oryza sativa (japonica cultivar-group)
GPFNHGNAKDLFGDGIFAIDGEKWKQQRKIASYDFSTRALRDFSCAVFKRNAAKLAGIVSNHAASNQSMDFQGLMLRATMDSIFTIAFGTDLNTLDGSGEGSRFAAAFDDASEFTMLRYISPLWKLARLLNVGVEAMLKERIKVVDEFVYRLIRARSDELSNSHDSGSRQDILSRFLQATTSDSVVDYKYLRDIILNIVIAGKDTTAGALAWFLYMVCKHPEVQEKICHEAMVATSAGDTASVDEFLQSLTDQALNNMHYLHAALTETLRLYPSVPMENKQCFSDDVLPNGFNVSKGDIVFFIPYAMGRMESLWGKDAEYFRPERWLDENGVFQQESPFKFTAFQAGPRICLGKEFAYRQMKIFAAVLLRFFVLKLRDEKEIVSYRTTLTLAIDQGLHLTATAR

SEQ ID NO: 6442 - protein, 353 aa, Burkholderia cepacia R18194
MSDSRFHRLTVAEVIAESDDACSFVFDVPAALRDAFAYRPGQFLTLNVPCADATVARCYSLSSAPGIDAAPKITVKRVRDGRASNWLCDRVKAGDALDVLPPAGVFTPRTLDGDLLLFAGGSGITPVLSILKSALVHGRGMLTLIYANRDERSVIFRAELQQLAQRHPGRVRVIHWLDSVQGIPQQRHLEELARPFSQQETFICGPALFMENALAAMLGLGLPRARVHVERFASLPDAPAQAPAASDTTASSVAAAASASGDGAAIETVLDGDAFAFDSAPGETLLDAMLRAGVPAPNSCRMGQCGACMCRIERGEVALDSNHVLDEDEIAAGWTLACCARPASDALRVVFPD

SEQ ID NO: 6443 - protein, 327 aa, Triticum aestivum
RSGIFGSTHASGKTIVLKTAEQTPLSALYVSKLLHEAGLPEGVLNIVSGFGPTAGAALASHMDVDKIAFTGSTDTGKVILELSARSNLKPVTLELGGKSPFIVMDDADIDQAVELAHFALFFNQGQCCCAGSRTFVHERVYDEFVEKSKARALKRVVGDPFRKGVEQGPQIDDEQFKKILRYIKSGVDSGATLVTGGDKLGDKGYYIQPTIFSDVQDGMKIAQEEIFGPVQSIFKFNDLNEVIKRANASQYGLAAGVFTNNLDTANTLTRALRAGTVWVNCFDIFDAAIPFGGYKMSGIGREKGIDSLKNYLQVKAVVTALKNPAWL

SEQ ID NO: 6444 - protein, 277 aa, Staphylococcus aureus subsp. aureus MRSA252
MEVKTFYNGNTMPQIGLGTFRVENDENCMESVKYAIEQGYRSIDTAKVYGNEEQVGAGIRAGLESTGIAREDLFITSKLYFEDFGRENVAAAYEASLSRLGLKYLDLYLVHWPGTNEAVMVDTWKGMEDLYKNNKVKNIGVSNFEPEHLEALLAQVSIKPVINQVEYHPYLTQHKLKLYLAAQHIVMESWSPLMNAQFLNDETIKDIAQELGKSPAQVVLRWNVQHGVVTIPKSVTPNRISENFRIFDFELSDEQMTRIDGLNQDKRIGPDPKTFEG

SEQ ID NO: 6445 - protein, 471 aa, Chloroflexus aurantiacus
MKLAWRTKIGLGLGFGLGLWLVGTGRAFAQEGPTTAELAVAMNTFFLIVAAALVFFMQAGFAMLTAGLTRSKNTTNILFKNLMDFVMCSIAFWAVGWGIAYGTSAGGFIGTDQFFLSPVTAEGEVPVMASWFFQVVFAGTAATIVAGAMAERTKFAAYLIYSFIISLFIYPVVVHWVWSGAGWLNTYSGSTEGNWGFTDFAGSTVVHSVGGWASLVGAMILGPRLGRFGPDGKPRVIPGHNMSLAALGTFILWLGWFGFNPGSQLAIASQANADAVALVAVTTNLAAAAGALGALFTAWLRYGKPDLGQTLNGVLGGLVAITAGCAYVDPLSSIIIGFIAGPIVVFSAELLEKLKIDDPVGAVPVHLVNGIWGTLAVGLFASVPGNTGTTGLFYGGGLTLLISQFVGVVAIGLWTVATAALMFFAIKATIGLRVSKAEEEAGLDIGEHGMVAYPDLSGAPAGGEVSGALAR

SEQ ID NO: 6446 - protein, 488 aa, Methanosarcina barkeri str. fusaro
MCGIAGAAGTPDTNEEVKRMLAALGHRGPDACGTYQAKGLSIGNTLLKITGDMLQPLVGKGALVLNGEIFNFRELAAEQGIKTNSDTEVLFALIETKIKEGETPTNAIFSVLSRVNGDYALAYVLGNKLVLARDPVGVKPLFYSLEKEGKKPKLAFASEKKAFSSQKDQIKSFPPGRVMAFDIRNGRLEEKSLTIDPPQERISEEHEASSRLKAALEKAVEIRLTKTSGIAFSGGIDSTFLAALAKNIDPSISLYAVGLPDSHDLVQAQRAAEVAGMSDSLKTHTLSPEEIEAAIPNVIYSTESTDPMKIAIGLPLYFVAKTAKEDGKRVLLTGQGADELFGGYNRHKALLEHGPKVLDRAIYTDLKNISTINLERDDMVTMANSVELRVPFLDKEVIKTGLAISPELKVLKRDSLYIRKYILRKAADGLLPSELLWKEKKAIQYGTGVQKVLDRLAREAGFSKREGNHIEKYLKKVAENQGFDFIFR

SEQ ID NO: 6447 - protein, 509 aa, Camptotheca acuminata
MAVLLLFLPLIFIFLAYKLYQRLRFKLPPGPRPLPFVGNLYSVKPVKFRCFAEWAQVYGPIMSVWFGSTLNVVISNSELAKEVLKENDQHLADRERNRSSNSFSRGGKDLIWADYGPHYVKVRKLCTVELFTPKRLEALRPIREDEVTAMVDSIFKDSANPDNYGKSLLVKQYIGAVAFNNITRLVFGKRFMNSEGVMDEQGKEFRGIVANGVKIGGLRFIGEHIPWLRCMFPQEEEILVKHEARRDRLTRAIMEEHTLARKHSGGAKQHFVDALLTLQKEYELSDDTVIGLLWDMITAGMDTTSISVEWAMAELIKNPRVQQKAQEELDRVIGYERIMSETDFPNLPYLQCVAKEALRLHPPTPLMLPHKANSNVKIGGYDIPKGSIVHVNVWAIARDPATWKDPHEFRPERFLEEDVDMKGHDFRLLPFGAGRRICPGAQIAINLITSMLGHLLHHFSWAPPEGVKPEEIDMTENPGLVTFMKTPVQAVAKPRLPSHLYKRVAVGAV

SEQ ID NO: 6448 - protein, 343 aa, Escherichia coli CFT073
MQVKTQSCVVAGKKTVAVTEQTIDWNNNGTLVQITRGGICGSDLHYYQEGKVGNFMIKAPMVLGHEVIGKVIHSDSSKLHEGQTVAINPSKPCGHCKYCIEHNENQCTEMRFFGSAMYFPHVDGGFTRYKMVETSQCVPYPAKADEKVMAFAEPLAVAIHAAHQAGELQGKRVFISGVGPIGCLIVSAVKTLGAAEIVCADVSPRSLSLGKEMGADVLVNPQNDDMDHWKAEKGYFDVSFEVSGHPSSVNTCLEVTRARGVMVQVGMGGAMAEFPMMTLIGKEISLKGSFRFTSEFNTAVSWLANGVINPLPLLSAEYPFTDLEEALRFAGDKTQAAKVQLVF

SEQ ID NO: 6449 - protein, 227 aa, Glycine max
VIVFDDADVDKAAELALLGILFNKGEICVAGSRVLVQEGIYDEFEKKLVEKAKAWVVGDPFDPKVQQGPQVDKKQFEKILSYIEQGKKEGATLLTGGKRVGNKGYYIEPTIFSNVKEDMLIVQDEIFGPVMALMKFKTIEDAIKIANNTRYGLASGIVTKSLDTANTVSRSIRAGIVWINCYFAFGNDIPYGGYKMSGFGRDFGMEALHKYLQVKSVVTPIYNSPWL

SEQ ID NO: 6450 - protein, 202 aa, Glycine max
MEGVGARLGRSSTRYGPATVFTGPVRKWKKKWIHVSPSSASSNSNANNHHNHASHASHLLLYKWTPLTHSQNTATTNNANAKDSPPEPPEEPPRRKFKYVPVALLEEQKNEGAESEGTEKVDEESKPIDADSGAAEATHKNETLDEKPDINDVPMEESQSQYKNQVVRQDLNESTLDLSLGLTSHDDEHDSDSKTNQTRDGQ

SEQ ID NO: 6451 - protein, 180 aa, Gibberella zeae PH-1
MAMSCRYAAQSCARQLRSARTARAPAQLVRIPATSRRWNSTEAAPVNPKIEAIVDQISQLTLLETADLVSSLKNKLNIPDMPIGGFAAAPAAAPAAVEEAEEAAPAAAEKTLFTLKLQGFDAPSKAKVIKEVKNMLGLSLVDSKKFVESAPKMMKENVPKEDAEKIINTMKELGATVVME

SEQ ID NO: 6452 - protein, 208 aa, Azospirillum brasilense
MKLAEALLRALKDRGAQAMFGIPGDSACPSLGGGGNADPAAPHAEHEPPVGFAADAAARYSSTLGVAAVTYGSGAFNMVNAVAGAYAEKSPVVVISGAPGTTEGNPGLLLHHQDRTLDTQFQVFKEITVAQARLDDPAKAPAEIARVLGAARALSRPVYLEIPRNMVNAEVEPVGDDPAWPVDRDALAACADEVLAAMRSATSPVQMV

SEQ ID NO: 6453 - protein, 238 aa, Arabidopsis thaliana
MERGAPFSHYQLPKSISELNLDQHSNNPTPMTSSVVVAGAGDKNNGIVVQQQPPCVAREQDQYMPIANVIRIMRKTLPSHAKISDDAKETIQECVSEYISFVTGEANERCQREQRKTITAEDILWAMSKLGFDNYVDPLTVFINRYREIETDRGSALRGEPPSLRQTYGGNGIGFHGPSHGLPPPGPYGYGMLDQSMVMGGGRYYQNGSSGQDESSVGGGSSSSINGMPAFDHYGQYK

SEQ ID NO: 6454 - protein, 123 aa, Coxiella burnetii
ELTGVSIVTYQHIKVPSQGEKITVNKAVLEVPDRPIIPFIEGDGIGIDITPVMKNVVDAAVEKSYAGKRKIEWMEIYAGEKATKVYGKDNWLPDETLEAIKEYQVAIKGPLTTPVGGGIRSLN

SEQ ID NO: 6455 - protein, 301 aa, Arabidopsis thaliana
  misc_feature (249)..(249): Xaa can be any naturally occurring amino acid
  misc_feature (252)..(252): Xaa can be any naturally occurring amino acid
MVFVKSTKSNAYFKRYQVKFRRRRDGKTDYRARIRLINQDKNKYNTPKYRFVVRFTNKDIVAQIVSASIAGDIVKASAYAHELPQYGLTVGLTNYAAAYCTGLLLARRVLKMLEMDDEYEGNVEATGEDFSVEPTDSRRPFRALLDVGLIRTTTGNRVFGALKGALDGGLDIPHSDKRFAGFHKENKQLDAEIHRNYIYGGHVSNYMKLLGEDEPEKLQTHFSAYIKKGVEAESIEELYKKVHAAIRAXPNXRKTVKPAPKQHKRYNLKKLTYEERKNKLIERVKALNGAGGDDDDEDDEZ

SEQ ID NO: 6456 - protein, 371 aa, Treponema denticola ATCC 35405
MIDSHVHLRDGLLSDKETIAHALALACPAGFTAFFDMPNTNPPLTNAEAVLERFALAEKSIKQAGVSAFYGIYGGLTSDIAQIEKMVLFYKKYFPKIVGFKMFAGHSTGNMGIVEKEDQRKVYAALKKFDYRGILAVHCEKESLMNNSIFDIENPITHSLARPPIAETESIKDQIELMQSEDFKGHLHVCHISTKEGIRLVAEAKKSGLSISCGATAHHALLNIDSYKKSGIFVKMNPPLREKEEQEAVFNALISGGIDWIESDHAPHTYEDKKKGASGIPGFAGSLILLKELRKAGCSEKRLDELCGKAVNHIFKLDLSYKVPSNTEIDASLPSLRSGYPFDAFEFFGISKFSFLNFIVTLTICTIAYIL

SEQ ID NO: 6457 - protein, 287 aa, Mesembryanthemum crystallinum
MAMPPVVDSVYLKEIDKARRDLRALISNRSCAPIMLRLAWHDAGTYCAKTKTGGANGSIRNEEEYAHGANNGLKKAIDWCEEVKAKYPKITYADLYQLAGVVAVEVTGGPTIEFVPGRKDSKVSTNEGRLPDAKKGPPHLRDIFYRMGLTDKDIVALSGAHTLGRAHPERSGFDGPWTQEPLKFDNSYFVELLKGESEGLLQLPTDKALVEDPAFRPYVELYAKDEDAFFRDYAVSHKKLSELGFTPSGSKSGPKDSTILAQGAVGVAVAAAVVILSYIFEVRKRLK

SEQ ID NO: 6458 - protein, 324 aa, Yersinia pestis KIM
MTVQPQAELAMILPPIFHGCYCEGEAPNMSQKELWYETLHANFGQYFSVENVLFREKTEHQDLVIFENPELGRVMALDGVVQTTERDEFIYHEMMTHVPLLAHGQAKKVLIIGGGDGAMLREVSRHKNIEQITMVEIDAGVVEFCRQYLPNHSAGAYDDPRFKLVIDDGVNFVNQTTEKFDVIISDCTDPIGPGESLFTSVFYEGCARSLNEGGIFVAQNGVCFLQQDEAVNSHNKLSHYFSDVSFYQAAIPTYYGGIMTFAWATQNPALRQLDLATLQNRFAQAGLACRYYNPAIHVGSFALPQYLLDALTTIPKVIGVDSSE

SEQ ID NO: 6459 - protein, 222 aa, Chlorobium tepidum TLS
MKFFIDTASLDEIKAANELGVLDGVTTNPSLIAKIVKDSTNFTYADFKAHIAKICEIVDGPVSAEVTTLKAGEMIAQGEELAAIHKNIVVKCPLTVDGLKAIKHFSSNGIKTNATLVFSPTQALLAAKAGADFVSPFVGRLDDISTSGMELVRQIVTIYDNYGYLTEVIVASVRNPLHVVESAMVGADIATIPYSVIKQLANHPLTDKGLEKFMEDAAVMKP

SEQ ID NO: 6460 - protein, 350 aa, Chlorobium tepidum TLS
MEERSMQKAGFLKEPIKHIGITKHNVVPMVEEMADMAFQARNLARAAFIVDLMQKDKECAVILTLAGSLISAGLKQVIIDMLEHNMVDVIVSTGANIVDQDFFEALGFKHWKGSQFVDDSELRELAIDRIYDTYIDEDELRVCDDTIAIIANSMQPGAYSSREFIVEMGKYIEEKGLDKNSIVYKAYEKGVPIFCPAFSDCSAGFGLVHHQWHNPDQHVSIDSVKDFRELTKIKIENDKTGIFMIGGGVPKNFTQDIVVAAEVLGYENVSMHTYAVQITVADERDGALSGSTLKEASSWGKVDTVYEQMVFAEATVAMPLIAGYAYHKRNWEGRPARNFNAMLDAKPVNA

SEQ ID NO: 6461 - protein, 145 aa, Triticum aestivum
  misc_feature (2)..(2): Xaa can be any naturally occurring amino acid
  misc_feature (17)..(17): Xaa can be any naturally occurring amino acid
  misc_feature (22)..(22): Xaa can be any naturally occurring amino acid
  misc_feature (28)..(28): Xaa can be any naturally occurring amino acid
  misc_feature (33)..(33): Xaa can be any naturally occurring amino acid
  misc_feature (37)..(37): Xaa can be any naturally occurring amino acid
  misc_feature (40)..(40): Xaa can be any naturally occurring amino acid
  misc_feature (44)..(44): Xaa can be any naturally occurring amino acid
  misc_feature (55)..(55): Xaa can be any naturally occurring amino acid
  misc_feature (58)..(58): Xaa can be any naturally occurring amino acid
  misc_feature (91)..(91): Xaa can be any naturally occurring amino acid
  misc_feature (96)..(96): Xaa can be any naturally occurring amino acid
  misc_feature (104)..(104): Xaa can be any naturally occurring amino acid
  misc_feature (114)..(114): Xaa can be any naturally occurring amino acid
  misc_feature (120)..(120): Xaa can be any naturally occurring amino acid
  misc_feature (135)..(135): Xaa can be any naturally occurring amino acid
MXPNVMGSSGTSVAPFXGLKSXAGLPVXRRSNXANLXSVXSNGXRIRCMQVWAIXGIXKFETLSYLPTLNTEALLKQVDYLIRSKWVPCLXEFNKXGFIFREHXNASPGYYDGXRYWTMXETAYVPGCTDPHKVXKPSGRSKKEP

SEQ ID NO: 6462 - protein, 306 aa, Oryza sativa (japonica cultivar-group)
MPASTAWAARLAEGGEEGTESIVRCGSPLATTTTSPMPPPPHRGGGGGRDTSAFFAATLVLWAVSVGFEIGARGRRELAPVAAGFAFFQAASAAVRAAVSRDPLFVNTAVSLLHSSLTSASVIFVLVNRWHNKDLKNMFEHEELFGGSWVGAYSALCFSCGYFAYDQLDMLRYRLYSGRIPGILMHHLILLICFTLALYRNVTINYLILTLVCERKLRRMAGFRDYNRKIVKLEWVLNWTTFVSARVACHILITYKLIIDAHKFDSGIELPLALFGMAGMNLLNIFLGLDLLKAYTLERNQQTHQD

SEQ ID NO: 6463 - protein, 316 aa, Triticum aestivum
MKTLLILTILAMAITISTANMQVDPSGQVQWPQQQLVPQPQQPLSQQPQQAFAQPQQTFPHQPQQQVPQPQQPQQPFLQPQQPFSQQPQQIFPQPQQTFPHQPQQAFPQPQQTFPHQPQQQFPQPQQPQQPFPQQPQQQFPQPQQPQQPFPQQPQQQFPQPQQPQQPFPQPQQPQLPFPQQPQQPFPQPQQPQQPFPQLQQPQQPLPQPQQPQQPFPQQQQPLIQPYLQQQQQQQQQQQGMHILLPLSQQQQLGQGTLVQGQGIIQPQQLAQLEAIRSLVLQTLPTMCNVYVPPECSIIRAPFASIRASSGHHLPA

SEQ ID NO: 6464 - protein, 287 aa, Synechococcus elongatus PCC 6301
MSAPQIQWYPGHIAKAERQLQEQLKRVDVVLEVRDARIPLATDHPRLKSWLGSRERLLILNRLDMIPAPARQAWIDWFRSQGDRVLLTDAHAGTGVAQLSQAAQAAGAAMNARRKQRGMLPRAVRAVVIGFPNVGKSALINRLVKKKVVESARRAGVTRSLRWVRVSEHLDLLDAPGVLPSRLDDQTAALKLALCDDIGEAAYDNQRVAAALVDCLQALEAQPLSGVTPTLFFDRYGLSVDDTGEAYLAALADHRCQGDRERTALMLLNDFRRGSLGPIALELPPTA

SEQ ID NO: 6465 - protein, 204 aa, Zea mays
MASSMLSSAAVATSPAQATMVAPFTGLKSSAAFPVTRKSNTDITSIASNGGRVSCMKVWPPVGKKKFETLSYLPDLTDVELAKEVDYLLRNKWIPCVEFELEHGFVYREHGSTPGYYDGRYWTMWKLPLFGCTDSAQVLKEVQECKTEYPNAFIRIIGFDNNRQVQCISFIAYKPPSFTGCLISFQKQPKKNPNPFPFPMAGFT

SEQ ID NO: 6466 - protein, 177 aa, Streptomyces sp. AM-7161
MTGATIWLTGLPSAGKTTIAYELAGRLRDEGHAVEILDGDEIREFLSAGLGFTREDRHTNVQRIGFVAELLASHGVKVLVPVIAPYNDSREAVRKRHQAEGTAFVEVHVATPVDVCSVRDVKGLYAKQAAGEISGLTGVDDPYEAPENPDLRIESQNQTVQESAAQLHALLTERGLL

SEQ ID NO: 6467 - protein, 225 aa, Zea mays
  misc_feature (71)..(71): Xaa can be any naturally occurring amino acid
RYYLKDAVLDGGVPFNKAYGMTAFEYHGTDARFNRVFNEGMKNHSVIITKKLLDFYTGFEGVSTLVDVGGXGVGATLHAITSRHPHISGVNFDLPHVISEAPPFPGVRHVGGDMFASVPAGDAILMKWILHDWSDAHCATLLKNCYDALPENGKVIVVECVLPVNTEATPKAQGVFHVDMVMLAHNPGGKERYEREFRELAKGAGFSGFKATYIYANAWAIEFIK

SEQ ID NO: 6468 - protein, 186 aa, Physcomitrella patens
MSTSRFIKCVTVGDGAVGKTCMLISYTSNTFPTDYVPTVFDNFSANVVVDGNTVNLGLWDTAGQEDYNRLRPLSYRGADVFLLAFSLISKASYENISKKWIPELRHYAPSVPIILVGTKLDLRDDKQFFADHPGAAPITTSQGEELRKSIGAASYIECSSKTQQNVKAVFDAAIKVVLQPPKQKKK

SEQ ID NO: 6469 - protein, 321 aa, Zea mays
  misc_feature (14)..(14): Xaa can be any naturally occurring amino acid
  misc_feature (90)..(90): Xaa can be any naturally occurring amino acid
  misc_feature (112)..(112): Xaa can be any naturally occurring amino acid
  misc_feature (117)..(117): Xaa can be any naturally occurring amino acid
  misc_feature (132)..(132): Xaa can be any naturally occurring amino acid
  misc_feature (146)..(146): Xaa can be any naturally occurring amino acid
  misc_feature (167)..(167): Xaa can be any naturally occurring amino acid
  misc_feature (210)..(210): Xaa can be any naturally occurring amino acid
  misc_feature (215)..(215): Xaa can be any naturally occurring amino acid
  misc_feature (248)..(248): Xaa can be any naturally occurring amino acid
  misc_feature (271)..(274): Xaa can be any naturally occurring amino acid
  misc_feature (283)..(283): Xaa can be any naturally occurring amino acid
  misc_feature (304)..(304): Xaa can be any naturally occurring amino acid
SRDTLLDADLESDXLGWQYISGSLPDGRELDRIDNPQFEGYKFDPHGEYVRRWLPELARLPTEWIHHPWDAPESVLQAAGVELGSNYPRXIVELDAANSRLQDALSEMWELXAASRXAAMENGMEEGLGDSXSDEPPIDFPQELRXEVDRQPVQPAIHAPGVTGRRXEDQMVPSMTSSFIRAETELTADFGHTSEDSRPEVPSNIHHLQXRPERXETVDGGTGNAVRVHGNHHQQNLQNNMHRVLGIXPSISEASSSWTGRDGGVVPVWSXXXXASGHSDSYXADEADISSRGYLDRHPQSHTXMNWSQLSQSLTTGWVDN

SEQ ID NO: 6470 - protein, 160 aa, Triticum aestivum
MSDSEDHHFESKADAGASKTFPMQAGAIRKGGYLVIKNRPCKVVEVSTSKTGKHGHAKCHFVALDIFNGKKLEDIVPSSHNCDVPHVDRTEYQLIDISEDGFVSLLTDNGSTKDDLKLPTDDAILTQLKDGFAEGKDLALTVMSAMGEEQICAVKDVGPR

SEQ ID NO: 6471 - protein, 313 aa, Brassica napus
MEISARPKARLAVLTAHLAVSDPVGSIQVLPPAIEPWCTSSALPPHGSLKGSLTIVDERTGKKYQVPVSEDGTVKSVDLKKITTGKDDKGLKLYDPGYLNTAPVRSSISYIDGDEGILRYRGYPIEELAESSTFIEVSYLLMYGNLPSQSQLADWEFTISQHSAVPQGVLEIIQSMPHDAHPMGVLVSAMSALSIFHPDANPALSGQDIYKSKQIRDKQIVRILGKAPTIAAAAYLRMAGRPPVLPSGHLSYAENFLYMLDSMGNRSYKPNPRLARVLDILFILHAEHEMNCSTAAARHLASSGVDVYTAVAG

SEQ ID NO: 6472 - protein, 290 aa, Triticum aestivum
  misc_feature (206)..(206): Xaa can be any naturally occurring amino acid
MGGLSMEHPWAFAFGLLGNVISFSSLLAPIPTFYRIFKSKSTEGFQSVPYVVALFSAMLWIFYALVKTGEGLLISINAAGCVIETVYIVMYLVYAPRKAKIFTAKIVVLLNIAGFGLIFLLTLFAFHGETRVVSLGWICVGFSVCVFVAPLSIIGRVIKTKSVEYMPFTLSLTLTLSAIVWFLYGLLIKDKYVALPNVLGFTFGVXQMVLYVFYMNKTPVASEVKEGKEAWKVPAEDHVVVINVGKADKSSCAEVRPVTEMAGAVDVPRRCAAEAAAAPGMDFARSVDVV

SEQ ID NO: 6473 - protein, 124 aa, Zea mays
  misc_feature (11)..(11): Xaa can be any naturally occurring amino acid
  misc_feature (18)..(18): Xaa can be any naturally occurring amino acid
  misc_feature (40)..(41): Xaa can be any naturally occurring amino acid
MAYSMLSSAAXCYLPGSXHMVAPFTGLKSSSAFPVTGRAXXDLTLLVSNGEKVNWMEGGPQLGKKNFETLFLTFRDLYPKFKLGGGEGEKLFSPKKGGVPLGGEEIPRGGEHPFFFFGPRGETQ

SEQ ID NO: 6474 - protein, 196 aa, Glycine max
MAFAGTTQKCMACDKTVYLVDKLTADNRVYHKACFRCHHCKGTLKLSNYNSFEGVLYCRPHFDQLFKRTGSLDKSFEGTPKIAKPEKTGEEKPAATKVSSMFGGTRDKCAGCQKTVYPTEKVTVNGTPYHKSCFKCTHGGCVISPSNYIAHEGKLYCKHHHIQLIKEKGNLSQLEGDHEKSTEEEKINGEVVAAET

SEQ ID NO: 6475 - protein, 382 aa, Pinus radiata
MDSNMNGLAKSNGCEISRDGFFESEEEELQGQAEAWKCTFAFAESLAVKCVVLLGIPDMIAREGSRATLSLGEIVAKLPTESPDAACLFRIMRFLVAKGIFRASKSAREGGAFETRYGLTPASKWLVKGRELSMAPMLLMQNDETTLAPWHHFNECVLEGGVAFQKANGAEIWSYASDHPDFNNLFNNAMACNARIVMKGILSKYQGFHSLNSLVDVGGGTGTAVAEIVRAYPFITGINYDLPHVVATASSLSGVQHVGGDMFETVPTGDAIFMKWIMHDWNDEDCIKILKNCRKAIPDTGKVIIVDVVLDADQGDNTDKKRKKAVDPIVGTVFDLVMVAHSSGGKERSEKEWKRILLEGGFSRYNIIEIPALQSVIEAFPR

SEQ ID NO: 6476 - protein, 477 aa, Vibrio parahaemolyticus RIMD 2210633
MQQIKNETLKEVFKQWASDDGVVVINPATEQELIRLKPSSIEELDCLIEACSAEQVRWAKLSAKERSSCLKNWHQLLMEHAEDIATIITLEQGKPLSESRGEVSYGASFVEWFAEEARRAYGEVIPAPAIDRRLSTIKQPVGVCAAITPWNFPIAMITRKAAPALAAGCGMIIKPSELTPLTALAVVELAYQAGIPKPLLPVVISEQAAEFGQVLSMDPRIKKISFTGSTRVGKILMKQASETVKAVSMELGGNAPFIVFEDADLESAADGLIASKFRNAGQTCVCTNRLYVHQNAKERFMEKVLAKMTELNVGNGLESGVTVGPVITMASKHRLEAVIDQALQEGATIANRPQKLAGRFMEPVILDNVDQGMAIVQQELFGPVLPVLTFEDDEQVLAMANDTEYGLACYFYTDSLKRIIKFTEGLEYGMVGVNEGIISTEVAPFGGIKESGVGREGAKQGLDEYLETKYICLGGLN

SEQ ID NO: 6477 - protein, 392 aa, Thermobifida fusca
MTSDRSSRLDDDPAFALHRGGKLEVRSTVEVNDQKSLSLAYTPGVARVCTAIADTPELADTYTWKNNVVAVVTDGTAVLGLGDIGPEASLPVMEGKSLLFKQFAGIDSVPIALACTDVDEIVETVVRMAPSFGGINLEDISAPRCFEIEQRLRERLDIPVFHDDQHGTAIVALAAIRNAARVTGRELSDLRAVVSGAGASGIAVSRMLIRGGIGDIAVADSKGLIYEGRPGLNKYKAELAAISNKAGLQGSIESALAGADVFVGLSAGEVPEEVVATMADNAIICAMANPNPEVHPDVARKYAAVVATGRSDFPNQINNVLAFPGVFRGALDVRATQITENMKLAAATALADLVGDDLAPDYIIPKPFDERVVPAVAAAVADQARKDGVARA

SEQ ID NO: 6478 - protein, 148 aa, Triticum aestivum
  misc_feature (73)..(73): Xaa can be any naturally occurring amino acid
  misc_feature (100)..(100): Xaa can be any naturally occurring amino acid
MSDTDEHHFESKADSGASKTYPQQAGAIRKGGHIVIKARPCKVVEVSTSKTGKHGHAKCHFVAIDIFNGKKLXEDIVPSSTNCDVPHVDRQDYQLIDINXWMGYVSLLTESGNTKDDLKLPTDDVLLGQIKTGFADGKDLILSGCPPG

SEQ ID NO: 6479 - protein, 604 aa, Glycine max
  misc_feature (76)..(76): Xaa can be any naturally occurring amino acid
  misc_feature (285)..(285): Xaa can be any naturally occurring amino acid
LKYKSEEGVRVLLLVWDDKTSHDKVFLKTAGVMGTHDEETRKFFKHSSVMCVLSPRYASSKMSFLKQQEIGFFVSXFSVESNVKCPVFCGLSSKQWVVGTVFTHHQKCVIVDTQAAGNNRKITAFIGGLDLCDGRYDTPEHRLFRNLDDVFDGDFHNPTFPAGTRVPRQPWHDLHCRIDGPAAYDVLINFEQRWRKATKWKEFAILFKKTSQWHDDALIRIERISWILSPSGAATLKDKSDDYTVPEDDPLVWVSSEDDPENWHVQIFRSIDSGSLKGFPKRVDXALSQNLICAKNLVIDKSIQTAYIQAIRSAQHFIYIENQYFIGSSYAWPAYKDAGADNLIPMELALKIASKIRAKERFAVYIVLPMWPEGDPKTGAMQEILFWQGQTMQMMYDAVARELKSMQLTDVHPQDYLNFYCLGNREHFNEDSSSTNGAQVSTAYKYRRFMIYVHAKGMIVDDEYVIIGSANINQRSMAGTKDTEIAMGAYQPHYTWSAKKRHPHGQIYGYRMSLWGEHLGMLDETFEEPGRLECVEKVNEIAENNWKLFASEDFSLLQGHLLKYPVQVDSDGKIRSLPDCENFPDAGGKILGAHSTTIPDILTT

SEQ ID NO: 6480 - protein, 274 aa, Listeria innocua Clip11262
MNLKDTVKLANGVEMPRLGFGVWKVQDGDEAVNSVKWAIEAGYISIDTAAAYKNEEGVGQAIKESGVKREDLFVTTKLWNAEQGYESTLAAFDESLRKLELDYVDLYLIHWPVEGKFKDTWRAFEKLYKDKRVRAIGVCNFHEHHLKELMEDAEIAPMVNQIELHPQLTQEPLRKFCAENNIVVEAWSPLGNGKLLANPEIKAIADAHGKSVAQVILRWDLQIGVVTIPKSVHQERIIQNADIFDFELSDEEVAKISGLNKDERTGPDPDNFNF

SEQ ID NO: 6481 - protein, 448 aa, Methanocaldococcus jannaschii DSM 2661
MKLEIIAIGGYEEVGRNMTAVNVDGEIIILDMGIRLDRVLIHEDTDISKLHSLELIEKGIIPNDTVMKNIEGEVKAIVLSHGHLDHIGAVPKLAHRYNAPIIGTPYTIELVKREILSEKKFDVRNPLIVLNAGESIDLTPNITLEFIRITHSIPDSVLPVLHTPYGSIVYGNDFKFDNFPVVGERPDYRAIKKVGKNGVLCFISETTRINHEGKTPPEIIASGLLKNDLLAADNDKHGIIVTTFSSHIARIKSITDIAEKMGRTPVLLGRSMMRFCGIAQDIGLVKFPEDLRIYGDPSSIEMALKNIVKEGKEKYLIIATGHQGEEGAVLSRMATNKTPYKFEKYDCVVFSADPIPNPMNAAQRYMLESRLKLLGVRIFKGAHVSGHAAKEDHRDMLRWLNPEHIIPSHGDFNLTAEYTKLAEEEGYRLGEDVHLLRNGQCLSFERII

SEQ ID NO: 6482 - protein, 180 aa, Zea mays
  misc_feature (139)..(139): Xaa can be any naturally occurring amino acid
MEVGDARNGSAAAALTKGGADDAARKPLPPCCVKAKARVPETEANCHDTVVSGWFTEPRSRFGEAHSLKVEKILFQGKSPYQEILVFESSTYGNVLVLDGIVQLTDKDECAYQEMVTHLPLCSIPAPKNVLVVGGGDGXGVLREIARHDSVETIDICEIDQLVIDVSKEFFPNLSIGSKI

SEQ ID NO: 6483 - protein, 381 aa, Cicer arietinum
WRSLRRACATKIFSPQQLDSTQFHRKRKVQDLLNYVQKCCEKGEALDFGEVVLATVMNSISETFISMDLFHYCDPSNDDDNKKSREFKEMVFGIMEEVGRPNVVDFFPFLKLFDPQGVRTRMRNHFEKLLAFFYEVMKERMRLRASGESKEYKDVLDSFLDLLNEENSQLCRHDVLHLFTDLFVAGIDTTSTTMEWAMAELLHNPSKLARLRKELEQIHGKFGQIEESDASKLPYLRAVVKEILRLHPSVPFLVPHKSKDDGELGGFMVPKNAQILVNVWSIGRNSSIWDNQIHLNLKDFWRVKLISKGRDFELVPFGAGRRICPGLPLASRSIHYIMASLLHHFNFKLADDLKPDDMDMSHKFGVTLHKAQPLRVVPIKA

SEQ ID NO: 6484 - protein, 345 aa, Methanosarcina acetivorans C2A
MHHNVFTNNPTVPIDVKNRSVSELMDGMLKTGFQGRKLAESVQAWNNMLKEKNTTVFMGLSGAMVPAGMRRIISHMIRERMIDCLVSTGANLFHDCHEALGRKHYVGSHLANDEKLFEQGVDRIYDIFAVEEEFRTADNLIADFAQEIGEITCSSREFMYLLGKELGRRGAAEDSIVVSAYRHNVPIFVPALSDSSIGIGLTIARRRGLKLEIDQIKDVDEITQIVEKSERTGVVYVGGGVPKNFIQQTEVIASILGMDIGGHDYAIQYTSDSPHWGGLSGCTFDEAVSWGKIAPQAKKVQVFVDATIALPIVAHALHEKTHDLKRIAPVFFWDGPEGLAIDYKE

SEQ ID NO: 6485 - protein, 460 aa, Haloarcula marismortui ATCC 43049
MPAAGFPLGATTMEVEIATIGGYEAVGRQMTAVRAGDDVVIFDMGLNLSKVLIHDNVETERMHSLDLIDMGAIPDDRVMSDLEGDVKAIVPTHGHLDHIGAISKLAHRYDAPIVATPFTIELVKQQIKSEEKFGVQNDLVKMDAGETMSIGERNELEFVNVTHSIIDAINPVLHTPEGSVVYGLDKRMDHSPVIGDPIDMKRFREIGREGEGVLCYIEDCTNAGKKGRTPSESVARRHLKDVMDSVADYDGGIVATTFSSHIARVKSLVEFADDIGRQPVLLGRSMEKYSGTAERLDFVDFPEDLGMYGHRKSVDRTFKRIMNEGKENFLPIVTGHQGEPRAMLTRMGRGETPYELDDGDKVLFSARVIPEPTNEGQRYQSEKLLGMQGARIYDDIHVSGHLREEGHYEMIDALQPKNIIPAHQSLEGFAPYVDLAENMGYKAGRDLHITRNGNMIKLTE

SEQ ID NO: 6486 - protein, 315 aa, Digitalis purpurea
MAEEIRFFKLNTGAKIPSVGLGTWQSSPGDAAQAVEVAIKCGYRHIDGARLYENEKEIGVVLKKLFDDGVVKREDLFITSKLWSTDHAPEDVPVALDKTLEDLQLDYIDLYLIHWPVRLKKGSVGLDPENFIPTDIPGTWKAMEALYDSGKARAIGVSNFTLKKLSDLLDVARIPPAVNQVGCHPSCAQTKLRAFCKSKGVHLSGYSPLGSPGTPWVKHDVLENPILVDVAEKLGKTPAQVAIRWGLQMGHSVLPKSVHESRIKENIDVFSWCIPDDLFAKFSEIEQVSPGKPEFPVHPEISQYKTVEEMWDGGI

SEQ ID NO: 6487 - protein, 1005 aa, Actinosynnema pretiosum subsp. auranticum
MVATGTRIPGPKPLPLVGNLLDVLTSDLDTDVDFLDRCHREHGGIVALTFAGQRQVFASSHELVARMCSDPSWGKAVHPALEQVRDFAGDGLFTARGDEPNWGKAHRLLMPAFGPTAMRDHFPAMLDIAEQMLVRWRRFGPDHRIDVADDMTRLTLDTIALCAFGARFNSFYRDRAHPFVDAMVRSLVEAGERAERLPGVQPFLVGRNQRYRDDIATMNRIADGIVAARAALPAGERPDDLLERMLTCADPVTGERLSARNVRYQLATFLIAGHETTSGLLSFAVHRLLAHPEVLRKAKDAVDGVLGDRVPAFEDLARLDYLGQVLRETLRLHPTAPAFALAPDEPAELGGHAIGAGEPVLVMLPTLHRDPAVWRDPDVFDPERFAPERMDEIPACAWMPFGHGARACIGRPFALQEATLVLALVLQRFDLALADPDHRLTIKQTLTLKPDSLVVRARPRADRPGATATVETVVPHQVPATHRHGTPLHVFYGSNGGSGEGLARTIAGDGAARGWATSVAPLDDAVRALPASGPVVIVSSSYNGAPPDNAAHFVRWLTQDGPDLSGVDYLVLGCGNLDWSATYQRVPTLIDEAMAAAGARRLRERGATDARADFFGDWERWYEPLWPLLSAECGVEVGEIGPRFRVVESDAADGLGDLASAVVLENRELVRGPDAGSKRHLELRLPDGTSYRTGDYLSVLPQNHPDLVRRAVARLGTRAERVVTVESSAPTGLVPVGRALRVDELLTRCVDLSAPAGAGVVARLAERCPCPPERAELAATTGATLLELLERFPSCAVDLALALELLPAPRTRLYSISSAAEEQRAEVALTVSVTGVTSGYLSRVRPGDRVAVGIASPPESFRPPADNTVPVVLIAAGTGIAPFRGFLRARAALGGEPGPALLLFGCRGPELDDLYAEEFAALGDWLEVDRAYSRHPDGEVRHVQHRLWQRRDRVRELVDAGARVYLCGDATRVGPAVEEVLGRIGPGAGWLDALRAGGRYATDVF

SEQ ID NO: 6488 - protein, 334 aa, Triticum aestivum
  misc_feature (301)..(301): Xaa can be any naturally occurring amino acid
MYKRLLSGMEFRRIRPEIIAGSLAYYARKYIPGLSRRNSMGTMPLAGTLSDVEQRNLLEEIDRLLPVQKGLVPTKLLLGLLKTSMILKASSTCIANLEKRVGMQLDQASLEDLLLPNYSYTMETLYNVECVHRILEHFLAMDQANGGCSPCIDDMMASPSMIPITAVAKLLDGYLAEVAPDVNLKPPKFQALASALPEYARPLDDGLYRAIDVYLKAHSWLSEAEREQLCRLMDCQKLSLEACTHAAQNERLPLRVVVQVLFFEQLQLRTSIAGCLLVSDNLEGSSRPLRSGCVAMSGEAXGWSAAVRENQVLKVGMDNMRMRLAELEKECSDM

SEQ ID NO: 6489 - protein, 296 aa, Arabidopsis thaliana
MTEEFEIAGISTGAWWSSPTNTAAVFSGYSLPCSTEISPDVTNFGWQNFDNKINDHNDGCMNMHNSFFEGLLIDPNDQLLPDPWSKSTIPNAKSELLENFPFLDNMFLVDSEAESLLDHEIRNHKSSKEQITQDYKNLTSKAQLEENSDEYSPRLLKRPRLETLSPLPSFKVRKEKLGDRITALQQLVSPFGKTDTASVLNEAVEYIKFLQEQVTVLSNPEQNTIGSVQQQQCSNKKSINTQGEVEEDECSPRRYVDLSSRGLCLMPISASYPVAAAAASAAEMNVHLVSGIFHSL

SEQ ID NO: 6490 - protein, 315 aa, Digitalis purpurea
MAEEIRFFELNTGAKIPSVGLGTWQSSPGDAAQAVEVAIKCGYRHIDGARLYENEKEIGVVLKKLFDDGVVKREDLFITSKLWSTDHAPEDVPVALDKTLEDLQLDYIDLYLIHWPVRLKKGSVGLDPENFVPTDIPGTWKAMEALYDSGKARAIGVSNFTLKKLSDLLDVARIPPAVNQVGCHPSCAQTKLRAFCKSKGIHLSGYSPLGSPGTPWVKHDVLENPILVDVAEKLGKTPAQVALRWGLQMGHSVLPKSVHESRIKENIDVFSWCIPDVLFAKFSEIEQVSPGKPEFPVHPEISQYKTVEEMWDGGI

SEQ ID NO: 6491 - protein, 107 aa, Oryza sativa (japonica cultivar-group)
MESSGGSQLGKNSKTSDGRETKATSSLLLLITAIHFVALCPKGENEDARKEVNSTAQNFVHFTEEEEDIVFRMHRLVGNRWELIAGRIPGRTAEEVEKFWAIKHQAT

SEQ ID NO: 6492 - protein, 471 aa, Exiguobacterium sp. 255-15
MIEQNVINGVWYDTEETIPVFNPATKELLGHVPSSTADDAQRAVDAASTAFVDWSERTADDRADKIDAWYRLIQEHRDELADIMTREQGKPFIEARGEIDYGNQYVRWYAEEARRIYGETIPASVPGKRLFVEKEPVGVVAAITPWNFPAAMITRKLAPALAAGCTVVLKPSEETPYTALRLVELAIEAGIPAGAINVLTGDAATISGVWQADSRVRKITFTGSTAVGKLIMRQAADTMKKLSLELGGHAPFIVTENADLDKAVQGAIRSKFRNGGQACVATNRFYVQASVLDTFTEKFVAEVKRLKVGNGLDADSTIGPLINAKAVAKVKAHIDDAVAKGATILTGGTIDDSVGYFVEPTVLGNVTEDMICMQEETFGPLAPISVFETLDEVIERANNTPYGLAAYAFSEKIDEALRLGKKLEYGIVGLNDGAPSAAQAPFGGYKESGLGREGGVYGIEDYLEVKYLSLG

SEQ ID NO: 6493 - protein, 309 aa, Pseudomonas syringae pv. tomato str. DC3000
MTSKLDQLKKFTTVVADTGDFGAIKSLKPQDATTNPSLLLKAASSESNDQMLADAFSGAKGDIGLACDRFAVAIGQEILKVVPGRVSTEVDARLSFDTDALIERSERIIGLYDTAGISRDRVLIKLAATWEGIRAAEKLEKDGIQTNLTLLFSFAQAVACAEAGVFLISPFVGRIYDWYKKSSGTDYVGADDPGVQSVTRIYNYYKANDFKTVVMGASFRNLNQIEQLAGCDRLTISTELLKQLAEDTGTLEQKLAPGNAGEARQSLTESQFRWASNEDAMATEKLAEGIRQFARDQEKLEALLSAKKS

SEQ ID NO: 6494 - protein, 498 aa, Glycine max
  misc_feature (51)..(51): Xaa can be any naturally occurring amino acid
  misc_feature (260)..(260): Xaa can be any naturally occurring amino acid
MASLSCSANDLAPLFNDTAAANYLCAQFDSISRKLNVTTYAVDNTYLLFSXYLVFAMQLGFAMLCAGSVRAKNTMNIMLTNVLDAAAGGLSYYLFGFAFAFGGPSNGFIGRHFFGLRKFPKDSPPSGDYSFFLYHWAFAIAAAGITSGSIAERTQFVAYLIYSSFLTGFVYPIVSHWFWSSDGWASATRSHGNVLFGSGVIDFAGSGVVHMVGGIAGLWGALIEGPRIGRFDRSGRSVALRGHSASLVVLGTFLLWFGCXGFNPGSFLTIAKGYESGGYYGQWSAIGRTAATTTLAGSTAALTTLFSKRLLAGHWNVIDVCNGLLGGFAAITSGCAVVEPRAATVCGFVAAWVLIGLNKLAAKVDDDDPLEAAQLHGGCGAWGVIFTALFAKKEYVSQVYGEGRAHGLFMRGGGKLLAAHVIQILVIVGWVSATMGPLFWGLNKLKLLRISSEDELAGMDLTRHGGFAYAYEDDESHKHGIQLRKVGPNASSTPTTDE

SEQ ID NO: 6495 - protein, 506 aa, Pseudomonas aeruginosa
MIYAAPGTPGAVVTFKPRYGNYIGGEFVPPVKGQYFTNTSPVNGQPIAEFPRSTAEDIDKALDAAHAAADAWGRTSVQERSNILLKIADRIEQNLELLAVTETWDNGKAVRETLNADIPLAADHFRYFAGCIRAQEGSAAEINDSTVAYHIHEPLGVVGQIIPWNFPLLMAAWKLAPALAAGNCVVLKPAEQTPLGICVLLELIGDLLPPGVLNVVQGFGREAGEALATSKRIAKIAFTGSTPVGSHILKCAAESIIPSTVELGGKSPNIYFEDIMQAEPAFIEKAAEGLVLAFFNQGEVCTCPSRALVQESIYPAFMEEVLKKVRAIKRGDPLDTETMVGAQASQQQYEKILSYLDIAQQEGAELLAGGSVEKLEGNLASGYYIQPTLLKGHNGMRVFQEEIFGPVVGVTTFKDEAEALAIANDTEYGLGAGLWTRDINRAYRMGRGIKAGRVWTNCYHLYPAHAAFGGYKKSGVGRETHKMMLDHYQQTKNLLVSYDIDPLGFF

SEQ ID NO: 6496 - protein, 475 aa, Rickettsia conorii str. Malish 7
MNLLKNITGKNYINGEFIEFGKQISVINPATLKEIATVPNLGLSEINSAINNTVTSFSLWSQSSFEARIAILRRWYNLVIENIEELSYILTLEQGKVLAESKKEILYGASFIDWYTYAIHNIHSTIKPGNSNTHKIVTQYEPVGPSAAITPWNFPNAMITRKVVPAIAAGCSVILKPSSLTPLSALVLAKFASDAGLPAGVFNVITGSSDIIGKAFCEDFRLRKLSFTGATNVGKILYQNAANTLKRLSLELGGNAPFIITADNNLEKVVSDLVIAKTRNSGQSCTSPNRIFIEESIYEKFIEILKAKFTKLKAGDGFDKESDIGPLINSAAIEKIQKLLADAQSKGAKLICGGKTVDNFIEPTIIIDCLDNMDIFRIEIFGPVVACYKFKDLDEVIEHANNTEYGLQGYVYSNNISVAQMIASKLDFGMVSINDPLPANAKAPFAGRKASGFGVEGSFEGIFEYLNTKYINLQN

SEQ ID NO: 6497 - protein, 214 aa, Zea mays
MGLFSWWRGGRPWWVLPAPRSAAVSAALVPAAVSLFFNPPAGLSSPLLTQLTSARSPFPSLSFPLLSYPCALELESETQPAMSYYGDRRAESSIVEAFTLSPLPYPVILVLLMVTLLLGASWFFTYDDFIEEASQQLSWALLGVPIALVLLIRWISSVDSFEGYLGFYPRESRWKGRYERGPAEGSSPWGVALLVLLLLVLASFHSTIHDMWGP

SEQ ID NO: 6498 - protein, 272 aa, Triticum aestivum
  misc_feature (50)..(50): Xaa can be any naturally occurring amino acid
KPPRGEIPQVLAKTLEAQFAVIPEILDDYPYLPMDTEFPGFVFRPFGTFXSKREFHYATLKANVDMLKLIQLGLTFSDERGGLPALGPDARPCVWQFNFRGFDPRTDVAAADSIDLLRRSGIDFARHATEGADSRRFAELLMSSGVVLNAEIHWVTFHSGYDFGYLLKLLTGSNLPDTSSGFFDLIRIYFPVIYDIKHLMRFCNSLHGGLNKLAELLDVERVGICHQAGSDSLLTALSFNKLKESYFGGLTEKYAGVLYGLGTEGGETTSVH

SEQ ID NO: 6499 - protein, 127 aa, Rickettsia sp. TwKM01
PAHGGANEVVINMLKEIGSSEHIPKYIAKAKDRNDPFRLMGFGHRIYKNYDPRAAVLKETCKEVLKELGQLDNNPLLQIAIELEAIALKDEYFIERKLYPNVDFYSGIIYKAMGIPSQMFTVLFAIA

SEQ ID NO: 6500 - protein, 185 aa, Dechloromonas aromatica RCB
MFSSLKRCFGIAALITVGVVPVAAAAECPPLLNHSFASLQDGKPMPLCQYAGKVILVVNTASYCGFTSQYDGLEKLYARLKDKGLVVLGFPSNDFGEQEPGSEKEIADFCRLTYGVEFPMVSKTVVKGKGAHPFYLKLAEITGSKPKWNFHKYLINRDATQVVAYTSFTKPDDKDLLKKIDEFLK

SEQ ID NO: 6501 - protein, 510 aa, Gossypium hirsutum
MPSFDTILLRDLVAAACLFFITRYFIRRLLSNPKRTLPPGPKGWPIVGALPLLGSMPHVELAKLAKKYGPVMYLKMGTCNMVVASTPDAARAFLKTLDLNFSNRPSNAGATHIAYNSQDMVFAEYGPRWKLLRKLSNLHMLGGKALEDWSQVRAVELGHMLRAMCESSRKGEPVVVPEMLTYAMANMIGQVILSRRVFVTKGSESNEFKDMVVELMTSAGLFNIGDFIPSIAWMDLQGIEGEMKKLHNRWDVLLTKMMKEHEETAYERKGKPDFLDIIMDNRENSAGERLSLTNVKALLLNLFTAGTDTSSSIIEWALAEILKNPKILNKAHEEMDKVIGRNRRLEESDIPKLPYLQAICKETFRKHPSTPLNLPRVSTQACEINGYYIPKNTRLSVNIWAIGRDPDVWGNPLDFTPERFLSGRFAKIDPRGNDFELIPFGAGRRICAGTRMGIVLVEYILGTLLHSFDWMLPPGTGELNMDEAFGLALQKAVPLSAMVRPRLAPTAYVS

SEQ ID NO: 6502 - protein, 423 aa, Pseudomonas aeruginosa UCBPP-PA14
MTISIRGARVIDPASGLDQVGDLHIEAGKIVAIGAAPAGFSAQKTLDGAGLVAAPGLVDLSVALREPGYGRKGNVESETRAAAAGGTTSLCCPPYTRPVLDTPAVAELILDRAREAGNAKVYPIGALTRGFGGEQLSELVALRDTGCVAFTNGLHGFASNRILRRALEYAATFDLTVIFTSQDTDLAEGGLAHEGPTASFLGLAGIPETAETVALARNLLLVEQSGVRAHFSQLTSARGIELVAQAQARGLPVTCDVALYQLILTDEALVGFSSLYHVQPPLRTKADREALREAVKNGVVQAIASHHQPHEADAKNAPFAATEPGISGAELLLPLAMTLVQDGLLDLPTLLARLSHGPAQALRLPAGRLAVGQAADLVLFDPQGSTLAGESWYSKGQNSPFVGHCLPGRVRYTLVDGHLTHEG

SEQ ID NO: 6503 - protein, 119 aa, Bacillus cereus ATCC 14579
MTKEQIIEAVKSMTVLELNDLVKAIEEEFGVTAAAPVAVAGGAGEAAAEKTEFDVELTSAGAQKIKVIKVVREITGLGLKEAKELVDNTPKVIKEAAAKEEAEEIKAKLEEVGAAVEVK

SEQ ID NO: 6504 - protein, 1234 aa, Magnaporthe grisea 70-15
MTVDHWESIVQIRRSPIVAEHPAGRNPIRSFAWLLRVFMVIVVIAVSLVCLPYDGHSSPSREGYHANLQQPSSNVATQRSSRRPSSHDHQNQHQPQEHSPPIASQSNSPMSSRAAIASPVAVAPAGAPEYYQPTSSDRRRHHAPIAPPRTSSSHQTSAPVNGAQTSRRPVSASHQPQNSSSRRAPDHHGSSADQQTDQSSSSRRRDRHHAPATGDYPPQRQGSTRDPRTATTTTMPIRTNTGGSATASSSKQPSREASEILNSMLVSQPEVDIEREKERLALAQPTSSAHDASEVASPPVVPTQRSRQDHSSKREKHTKFGEYILGNTIGEGEFGKVKLGWKSEGGVQVAIKLIKKDALGSNPNRMQKIMREVSILKQLTHPNIVRLHKMEESERHFGIILEYASGGELFDYILNNRYLKDNAARRLFAQLVSGVGYLHKKGIVHRDLKLENLLLDRNRNIIITDFGFANTFDPALELTEEEEAGLSNREFVKRLGLDKIGANGSRKGDLMQTSCGSPCYAAPELVVSDSLYTGRKVDVWSCGVILYAMLAGYLPFDDDPANPEGDNINLLYKYIVSTPLTFPEYVTPHAKDLLRRILVPDPRRRADLFEVARHSWLSEYAHVVEFITSSTTTHTEIQNTTVPAEDSENPNLARSASVREASRRTPVSPTIGGLASKQGGIDQETEYAARQQKDNKRRTVQVEYVAPTTQTQRGEPAQQQATSGKTRARSGSEGPVEVDPRLSSDKPLPRDPPVSKESYSKPSVRGDPRKPPSSHRNQPSISRPPQSGRVPSDSYVTTMAPGSRPGTSGSMNTAGARPVAGASRSSYGQPLPPTVAGTNVHGRIQQPTDQQSEFGRPSAGGVPSKFAHVPGVAGHDQPDSREGSAKGHRRSNTLGEITGKMFGRSGSIFGNKNRKSSKVDQPQTPTEAKNRDSRKYPPVSMSAAPNPNGEYEPRKSVDSKRSRRSFSFGLGPRKKSGSIHNGSQTSVDKQNKRFSFIPGSISLKAIGIGKETPPGSTQGGGNDSQVDLGYQQEHLREPYRPDSQQQHQRQQSHYVDQRVNEQDLEAAGMDGMYAQLHSPSAPTFSTQQPHQQQQQQHYPAHYTSGQYGDRQMATAVPGYMQSGAHLQTSESESSVNMLSPEQQQFQAHGLRSVSVDHHQKLMEAQGGLGPAGRTGSSVGADGRQARVLQKNKRFVDAYDTDHSGGADHAGSSGAARRVMDFFRRRGKARGGDDR

SEQ ID NO: 6505 - protein, 122 aa, Brassica napus
MSPEKDGVSIPLHVDITDVASPLPMPLDILHGNPIPPFLSKTFDLVDDPSLDPVISWGLTGASFVVWDPVEFARIILPRNFKHNNFSSFVRQLNTYGFRKIDTDKWEFANEAFLRGQKHLLK

SEQ ID NO: 6506 - protein, 167 aa, Zantedeschia hybrid cultivar
MAADAAAAGASKKLTLKSSDGEVFEVEETVAMESQTIRNLIEDDCTADGVPLPNVTGRILAKVIEFCKKHVEIAALKADEGVDRAADEELKVWDADFVKVDQTTLFDLILAANYLNIKSLLDLTCQTVADMIKGKTPEEIRKTFNIKNDFTPEEEEEVRRENQWAFE

SEQ ID NO: 6507 - protein, 209 aa, Zea mays
  misc_feature (208)..(208): Xaa can be any naturally occurring amino acid
MADQELKLFQEEVEAVKQWWKNPRFAQTTRPYTAEQVVSKRGTLKQTYPSNIQAKKLYATLEAHAAKGTTSHTYGALDPVQVTQMAKHLETVYVSGWQCSSTASSTNEPGPDLADYPYNTVPLKVEHLFMAQLFHDRKQREERSNMSPEQRAKTPVIDYLRPIVADADTGHGGLTAVMKLTKLFVEKGAAGIHIEGPAPGTKKCGHMXR

SEQ ID NO: 6508 - protein, 360 aa, Rhodobacter sphaeroides 2.4.1
MDIRTHRIAAIPGDGIGIEVVAAGLEVLEALADRDGGFRFDVESFDWGTDRYRRTGAFMPEDGADRLRGFDAILFGAVGAPDVADHLTLWGLRLAICQPLDQYANVRPTRMLPGIRSPLRHVGESELDWVIVRENSEGEYAGQGGRSHPGLPLEVATDVSIFTRAGVERIMRFAFRLAQSRPRKLLTVVTKSNAQRHGMVLWDQIAGEVAREFPDVRWDKMLVDAMTVRMVQKPASLDTIVATNLHADILSDLAAALAGSIGVAPTANLNPERDTPSMFEPIHGSAFDITGRGIANPVATFWTAAMMLEHLGEAEAAGRLMTAVGRVTADEDLHTPDLGGRATTRQVTDALIAALRGRNA

SEQ ID NO: 6509 - protein, 252 aa, Glycine max
MEGVPHPIPRTVEEVFTDFKGRRAGLIKALTTDVEKFYQQCDPEKENLCLYGFPNETWEVNLPVEEVPPELPEPALGINFARDGMQEKDWLSLVAVHSDSWLLAVAFYFGARFGFGKNERKRLFQMINDLPTIFELVTGSAKQSKDQPAAHNNGSKCKSSGKSHQSESQAKGMKMSAPPKEEDESGEEEEEDDEQGATCGACGDNYGTDEFWICCDMCERWFHGKCVKITPAKAEHIKQYKCPSCSNKRVRV

SEQ ID NO: 6510 - protein, 454 aa, Rhodobacter sphaeroides 2.4.1
MNVLIWFRNDLRVADHPALARAADDRVLPLAIVDPAEWADPARSGRQWAFRAECLADLRADLAALGAPLAVRVGDAQAVLSKLCKLHRIGRILCLEDPAFAELDLALQAWAGGTGLDFIRLKPGAGAPAALTPLPAVEPGPIPPARALRLAEDRCPHRQPGGRPQGQLLLQSFLERRGALYRDGRNRLLQAERASSRLSPHLAAGTLSREEVLAAVAARLAERPDADWVRSLGAFRAALASGAPGARGAVCPPGRPGGGGSPRGYLDQTEGEADALRLRLAALHAGETGLPFVDAALRAMAASGWLPARLRGMLASVALHHLGLSEQAAGAALAAGLTDHSPPIHWAQMRRVALGRPVDPERLAGVLDPDGAFTRRWLPELAEVPDRVLQAPWRWEGARGLLGRRYPEPLVDPSAARAAGRTLARRPTARVEVIEGAAPRRPASDPTQQLCLDL

SEQ ID NO: 6511 - protein, 423 aa, Medicago sativa
MFGRGPTRKSDNTKYYDILGVSKSASEDEIKKAYRKAAMKNHPDKGGDPEKFKELGQAYEVLSDPEKKELYDQYGEDALKEGMGGGAGSSFHNPFDIFESFFGAGFGGGGPSRARRQKQGEDVVHSIKVSLEDVYNGTTKKLSLSRNALCSKCKGKGSKSGTAGRCFGCQGTGMKITRRQIGLGMIQQMQHVCPDCKGTGEVISERDRCPQCKGNKITQEKKVLEVHVEKGMQQGHKIVFEGQADELPDTITGDIVFVLQVKGHPKFRRERDDLHIEHNLSLTDALCGFQFNVTHLDGRQLLVKSNPGEVIKPGQHKAINDEGMPQHGRPFMKGRLYIKFSVDFPDSGFLSPSQSLELEKILPQKTSKNLSQKEVDDCEETTLHDVNIAEEMSRKKQQYREAYDDDDDEDDEHSQPRVQCAQQ

SEQ ID NO: 6512 - protein, 363 aa, Gibberella zeae PH-1
MTSTQSVKAVRYHGQQDIRLESVPVKPLDPTTVRIAPKFCGICGTDVHEYLGGNNLIPKPGTPHGITGETSPLTLGHEFSGIVEEVGSEVTRLQKGDRVCVQPIIYDNECRSCKRGLQNCCDQNGFIGLSGWGGGLAESTVVPQDAVKKLPDNVSLEVGALVEPLAVGWHATKISPYEDGNSAFVVGGGPIGLAVVQALVGRGCKNIMLTEVSSKRREFAKKFGAHHVFDPTKDDVVAMVKKLTGGLGADVGFDAAGSQHAIDVAFDCLKARAVLVNIAVWEKRAQLNMNQIVFRERSYVGCATYALGDFEEVIDALSNGKIKPEGMITKVIKMDKVVEEGFQTLINDKDNHVKILVDVSAGV

SEQ ID NO: 6513 - protein, 1144 aa, Photorhabdus luminescens subsp. laumondii TTO1
MSQEYTEDKNIKLKRLSSGRRLLEAVLLVIVILAAYLLVALVSFNPSDPSWSQTAWHEPVHNLGGGVGAWLADTLFSAFGILAYVIPPVMILGCWTAFKQHDDREYVDFFALALRVIGALAIVLTSCGLAALNVDDLHYFASGGIIGSLFSSAMLPWFNELGATLVLLCIWAIGLTLFTGWSWLTIAEKTGAIILGAIGLITNRSRNEQEYTPYDETAIAREDLADDKTEPEFTAAGIDHDDVLFTAPSAVELAKAELDEPESVKAEIEIEQEQPIDIPTTNMANIDAEPEIRVNTSDDGIVQSQPLVEESEKNNNDEPVRYTFEIPAEYHFEPISEFNRQGTPTFEPVENSRNSSDTFTFMPETEPKNVVAATSATVITGNSQVKQGIGPELPRPNPVRIPTRRELYGIKVPSQRLAEQQREEEVKQQVGGADDDIESDKQQEVLLSQQFLEQQRERYRITTDTEEQAPIQPQIRQNPFEPENQPSVEERAQTATETVKQTVEQPQYKRYQEQGHQEKKELSALESLSILNNFSPVEDLVEKEPAEPLFMPSVHSAPENQLERPTEIAFAPAPVHNVVQQPQQPQQPQQPQQPQQPQQPQQPQQPQQPQQPQQPQQPQQPQQPQQPQQPQQDSLFHPFLVRNDQPLPKPTTPMPSLDLLTSPLAEEEPVDMFALEQTSRLIEARLSDYRVKADVVGFSPGPVITRFELDLAPGVKASRISNLSRDLARSLSAVAVRIVEVIPGKPYVGLELPNKKRQTVYLREVLDCEKFRDNPSPLTIVLGKDIGGQPVVADLGKMPHLLVAGTTGSGKSVGVNAMILSILYKAKPEDVRFIMIDPKMLELSVYEGIPHLLTEVVTDMKDAANALRWSVGEMERRYKLMSALGVRNLAGYNEKVKQAEEMGRPIPHPFWKPGDSMDVIHPVLKKEPYIVVMVDEFADLMMTVGKKVEELIARLAQKARAAGIHLVLATQRPSVDIITGLIKANIPTRIAFTVSSKIDSRTILDQGGAESLLGMGDMLYLAPNSSIPVRVHGAFVRDQEVHEVVNDWKARGRPEYVDSILSGGDDAEGGSGFDSDEELDALFDQAVQFVTEKRRVSISGVQRQFRIGYNRAARIVEQMEAQQIVSAPGHNGNREVLAPPPHES

SEQ ID NO: 6514 - protein, 183 aa, Eucalyptus grandis
MGRGRVELKRIENKINRQVTFAKRRNGLLKKAYELSVLCDAEVGLIIFSNRGKLYEFCSSSSMLKTLERYQKCNYGALEPNVSARESLELSCQQEYLRLKARYEGLQRTQRNLLGEELGQLCSKELESLERQLDGSLKQIRSRRTQYMLDQVTDLQHREQVVHEANRTLNQRLMEGYQVMRSS

SEQ ID NO: 6515 - protein, 199 aa, Bacillus subtilis subsp. subtilis str. 168
MTHNPNIIWHPAAISKSDRQSLNGHKSCVLWFTGLSGSGKSVLANAVDEKLYRKGIQSYVLDGDNIRHGLNKDLGFQTGDRIENIRRIGEVAKLFVDSGQMILTAFISPFREDRDMVRALFPKGEFFEIYVKCPLHVCEQRDPKGLYKKARNGEIKHFTGIDSPYEAPLSPDFIIESDQTSISDGADLIINALQNRGII

SEQ ID NO: 6516 - protein, 481 aa, Burkholderia fungorum LB400
MAIPSYTDTRLLINGEWCDAASGKTLDVINPATGQAIGKVAHAGIADLDRALAAAQRGFEAWRKVPANERATTMRRAAALVRERASDIGRLMTQEQGKPFAEARIEVLAAADIIEWFADEGRRVYGRIVPSRNLAAQQLVLKEPIGPVAAFTPWNFPVNQVVRKLSAALACGCSFLVKAPEETPASPAALLQAFVEAGVPAGTVGLVFGDPAEISGYLIPHPVIRKVTFTGSTPVGKQLAALAGAHMKRATMELGGHAPVIVAEDADVALAVKAAGGAKFRNAGQVCISPTRFLVHNSIREEFAAALVKHAEGLKLGDGLAEGTTLGPLANARRLSAMSKVLDDARKTGAKVETGGERVGSEGNFFAPTVLTNVSLEADVFNNEPFGPIAAIRGFDKLEEAIAEANRLPYGLAGYAFTKSFSNVHLLSQQVEVGMLWINQPATPSPEMPFGGVKDSGYGSEGGPEAMEGYLVTKAVSVMAV

SEQ ID NO: 6517 - protein, 127 aa, Rickettsia sp. TwKM02
PAHGGANEAVINMLKEIGSSEKIPKYIAKAKDKNDPFRLMGFGHRVYKNYDPRAAVLKETCKEVLKELGQLENNPLLQIAIELEAIALKDEYFIARKLYPNVDFYSGIIYKAMGIPSQMFTVLFAIA

SEQ ID NO: 6518 - protein, 176 aa, Zea mays
  misc_feature (109)..(109): Xaa can be any naturally occurring amino acid
  misc_feature (130)..(130): Xaa can be any naturally occurring amino acid
  misc_feature (159)..(159): Xaa can be any naturally occurring amino acid
GPVLSAASTPRFLHAQPPQSVAFPSATAIRRAKSAAIPLRPQRPPAAISPPAAPAIRRLSIRGRNRFHPRPQSTAPNPPPHPCARNASTLLLSPYMHFGELSVRKVFHXGNDSNHAGEESCTLFLCSIGXFNHPCSHEKPLLSHLRFFPWVVNEVYFKXPLVDAGMRELRATGWVH

SEQ ID NO: 6519 - protein, 175 aa, Triticum aestivum
MPPPVMAWSATSVAPLQGLESTGVLPVSRRSNGDSLDSVSNGGRIMCMQVWPIEGIKKFETLFYLRPLSTEALLKQVDYLIRSKWVPCLEFSKVGFIFREHNASPGYYDGRYWTMWKLPMFGCTDATQVINEVEEVKKEYPDAYVRIIGFDNMRQVQCVSFIAFKPPGCEESGKA

SEQ ID NO: 6520 - protein, 118 aa, Brassica napus
MAESQAKSPGGGESGGDQSPRSSSHVREQDRFLPIANISRIMKRGLPANGKIAKDAKEIVQECVSEFISFITSEASDKCQREKRKTINGDDLLWAMATLGFEDYIDPLKIYLTRYREM

SEQ ID NO: 6521 - protein, 310 aa, Zea mays
  misc_feature (247)..(247): Xaa can be any naturally occurring amino acid
  misc_feature (289)..(289): Xaa can be any naturally occurring amino acid
MAARSSPSSTSPPAGGPAAAAWRRRRVASEPPYSCGAGASPNIPFCDVGLPIDRRVDDLGSRMTVAKKTSQLGDQSPAIPRLGVPAYKWWSEALHGIFNQGRGIHLDGPLRAATSFPQVILTAASFNLHLWDRIGQDVDELKEEVQEAPRVKMLHCPSKAMDIENEIQVLCDQLAKKSSDSLRLLKELELHRSYGENDMPLYELKGLETLGSTLHIVVHDCASVDFWNSSIQWFRIQPEGSKKEIIXGTTKPAYAPEPHDVGRYTQAEVKSGGQTSITKIAGSVDPVSXAAGLVHYVEALVRRRETGYNV

SEQ ID NO: 6522 - protein, 303 aa, Bartonella bacilliformis
YIDGDEGILLYHGYSIDQLAENGDFLETCYLLLYGELPNKQQKIDFDRCIMRHTMVHEQFARFFHGFRRDSHPMAVMVACLGAMSAFYHDSINITDPQQRMIASIRLISKVPTLAAMAYKYSIGQPFVYPRNDLNYATNFLHMCFSVPCEEHKISPVIARAMDRIFTLHADHEQNASTSTVRLAGSSGANPYACIAAGVACLWGPAHGGANEACLKMLQEIGSVKKIPEFIARAKDKNDPFRLMGFGHRVYKNYDPRAKIMQKTCHEVLQELNIQDDPLLDIAMELEHIALNDEYFINKKLYP

SEQ ID NO: 6523 - protein, 501 aa, Glycine max
MTSLTNGDAGSLNKVPTIKFTKLFINGDFVDSLSGKTFETIDPRTGDVIARISEGDKEDIDIAVKAARHAFDNGPWPRLPGSERARILLKWAEIIEENAEELAALDAIDAGKLYHMCRNVEVPAAANTLRYYAGAADKIHGEVLKMSREFHAYTLLEPLGVVGHITPWNFPNTMFYIKVAPSLAAGCTMVLKPAEQTPLSALFYAHLAKLAGIPDGVINVVPGFGPTAGAALSSHMDVDKVSFTGSTQTGREIMQAAAKSNLKPVSLELGGKSPLIIFDDADIDKAAELALFGIISNKGEICVASSRVFVQEGIYDEFEKKLVEKAKSWVVGDPFDPKVQQGPQVDKNQFEKILSYIEHGKREGATLLTGGKTVGNKGYYIEPTIFSNVKEDMLIAQDEIFGPVIALMKFKTIEEAIKSANNTKYGLAAGIVTKNLDTANTVSRSIRAGIVWINCYFAFGDDVPFGGYKMSGFGRDHGLEALHKYLQVKSVVTPLYNSPWL

SEQ ID NO: 6524 - protein, 320 aa, Bartonella doshiae
TYIDGDKGILLYRGYPIEQLAEKGDFLESCYLLLYGELPTQQEKNDFDRRIMQHTMVHEQFSRFFQGFRRDSHPMAVMVACLGAMSAFYHDSIDITDPQQRMIASIRLISKVPTLAAMAYKYSIGQAFVYPHNSLSYAANFLRMCFAVPCEEYQVNPVLTRAMDRIFILHADHEQNASTSTVRLAGSSGANPFACIAAGVACLWGPAHGGANEACLKMLKEIGSVKKIPEFIARAKDKNDPFRLMGFGHRVYKNYDPRAKIMQKTCHEVLKELNRQDDPLLDIAIELEHIALNDEYFIEKKLYPNVDFYSGITLKALGFP

SEQ ID NO: 6525 - protein, 467 aa, Listeria monocytogenes str. 4b F2365
MLYSEDDKRKQESYRIPLFGSEEESTSIPKYVLKKEPMEPRIAYQLVKDQLMDEGNARQNLATFCQTYMEKEAEILMAETLEKNAIDKSEYPQTAELENRCVNILADLWNAPKDMSYLGTSTVGSSEACMLGGLAMKFRWRNHAEKRGLDIQAKRPNLIISSGYQVCWEKFCVYWDVDMRVVPMDKEHLSIDVDKVFDLVDEYTIGIVGILGITYTGKFDDIQLLDEKVEAYNEANEHQLVIHVDGASGAMFTPFVNPELPWDFRLKNVVSINTSGHKYGLVYPGVGWILWKDKEYLPKELIFEVSYLGGSMPTMAINFSRSASQIIGQYYNFLRYGFEGYREIHEKTKKTALYLAKSVEKSGYFEIINDGANLPIVCYKMKEGLDVEWTLYDLADQLLMKGWQVPAYPLPADLSDTIIQRFVCRADLGYNVAEEFAVDFADALHNLEHARVLYHDKERNDSYGFTH

SEQ ID NO: 6526 - protein, 194 aa, Methanosarcina barkeri str. fusaro
MNRKTGAVVLIFLFAAIVFISGCVQNEKVGAPVNKEFPEDGKGDESMNIQSIKVSSSAFESNGSIPGKYTCDGQNINPPLEFEGIPEEAESLVIIVDDPDAPTKTFTHWIVWNIEPVAKIEEDSIPGIEGLNDFKKIGYGGPCPPSGTHRYFFRVYALDKNLDLKAGAGRKGLENEMIGHIIAEGELMGKYSRK

SEQ ID NO: 6527 - protein, 467 aa, Pseudomonas aeruginosa UCBPP-PA14
MGLNADWMQRDLNVLWHPCTQMKDHERLPVIPIRRGEGVWLEDFEGKRYIDAVSSWWVNVFGHANPRINQRIKDQVDQLEHVILAGFSHQPVIELSERLVKITPPGLDRVFYADSGSAGIEVALKMSYHFWLNSGRPRKKRFVTLTNSYHGETIAAMSVGDVALFTETYKSLLLDTIKVPSPDCFLRPDGMCWEEHSRNMFAHMERTLAEGHDEIAAVIIEPLIQGAGGMRMYHPVYLKLLREACDRYGVHLIHDEIAVGFGRTGTMFACEQAGIAPDFLCLSKALTGGYLPMSAVLTSETIYRGFYDDYQTLRAFLHSHTYTGNPLACAAALATLDIFEEDKVIEANRALSTHMARATAHLADHPHVAEVRQTGMVLAIEMVQDKASRTPYPWQERRGLKVFQHGLERGALLRPLGSVVYFLPPYVITPEQIDFLAEVASEGIDIATRDAVSVAVSDFHPDHRDPG

SEQ ID NO: 6528 - protein, 484 aa, Pseudomonas aeruginosa UCBPP-PA14
MLGVFSAVALGKDKQPTAIVVGAGLAGLSAAYELQKDGWQVTVLEARPQVGGRSGLATSEWVGNQKVQPTLNAYLDTFKLKPVPAPDFVRTPSYLIDGLYYSSSDLALKQPNVAADLKRFESTLDDLSASISDPLNPASSNTLFALDQMNAARWLDKLNLSPTARLLVNQRIRSRYDEPSRLSLLYLAQQGRAYRGVDDRDLRAARLPGGSQVLAEAFVKQIKTIKTKSKVSSIVQAKDGVAVKAGSETYKADYVVLAVPLKALGQIQMTPSLSGTQMSALKGTNYGWRDQILLKFKRPVWDDKSRLSGEIFSDQGLGMIWVEPALKGGANVLINLSGDNARVLQAFGDRQMVDQVLIRMNKFYPKMRGAFGGYEIRRYSADPGTGGSYLAYGPGQVTRFWRIWEQPLSRVAFAGEHTDALYPGTIEGALRSGKRAASQVRDLYAGKTPVIEGAPMVAKAEKVAAPTTGGEKKNPFAWFTRLFD

SEQ ID NO: 6529 - protein, 232 aa, Zea mays
  misc_feature (215)..(215): Xaa can be any naturally occurring amino acid
MAQILLHGTLHATIFEAESLSNPHRATGGAPKFIRKLVEGIEDTVGIGKGTTKIYATVDLEKARVGRTRMVSNEPVNPRWYESFHIYCAHMAADVVFTVKIDNPIGASLIGRAYLPVEDILGGDEIDKWLEIRDEKREPIGDSKIRVKLQYFDVGKDRNWARGVRSTKYPGVPYTFFSQRQGCKVTLYQDAHVPDNFVPRIPLADGKNYEPHRVXWEDIFDAISKGQHLIYI

SEQ ID NO: 6530 - protein, 378 aa, Anabaena variabilis ATCC 29413
MMVCEYKPGLEGIPAAQSSISYVDGQKGILEYRGIRIEDLAQKSTFLETAYLLIWGELPTKEELQVFEEEVRLHRRIKYRIRDMMKCFPESGHPMDALQASAAALGLFYSRRDLHNPVYIRDAVVRLIATIPTMVAAFQLMRKGNDPVKPRDDLDYSANFLYMLNEKEPDALAAKIFDICLILHVEHTMNASTFSARVTASTLTDPYAVVASAVGTLGGPLHGGANEEVIQMLEEIGSVENVRSYVEERLQRKDKLMGFGHRVYKVKDPRATILQGLAEQLFAKFGADKYYDIAQEMERVVEEKLGHKGIYPNVDFYSGLVYRKMGIPTDLFTPIFAIARVAGWLAHWKEQLEENRIFRPTQVYNGKHSVTYTPIDQR

SEQ ID NO: 6531 - protein, 350 aa, Listeria monocytogenes str. 4b H7858
MTYKITSLAGDGIGPEIMTSGLQVLEAVAKKYNHTFEIESHPFGGAGIDVAQDPIPSSTLKACRDADAILLGAIGGPKWDNAPKRPEDGLLALRKALGLFANIRPIQVPSSITHLSPLKKEIVENTDFVVVRELTGGLYFGEPKYWDNEAAVDSLTYTRAEIERIIEKAFEIAATRNKKVTSVDKANVLASSKLWRKIADEVASRHPDITLEHLYVDAAAMLMIQRPTTFDVIVTENLFGDILSDEASVITGSLGMLPSASHAENGPSLYEPIHGSAPDIANQNIANPMSMISSVSMMLRQSFSLFEEADATDAATARTMQAGFLTADLGGNTSTTDFTNEVLKQIEGGE

SEQ ID NO: 6532 - protein, 294 aa, Staphylococcus aureus subsp. aureus MRSA252
MVIQWYPGHMAKAKREVSEQLKKVDVVFELVDARIPYSSRNPMIDEVINQKPRVVILNKKDMSNLNEMSKWEQFFIDKGYYPVSVDAKHGKNLKKVEAAAIKATAEKFEREKAKGLKPRAIRAMIVGIPNVGKSTLINKLAKRSIAQTGNKPGVTKQQQWIKVGNALQLLDTPGILWPKFEDEEVGKKLSLTGAIKDSIVHLDEVAIYGLNFLIQNDLARLKAHYKIEVPEDAEIIAWFDAIGKKRGLIRRGNEIDYEAVIELIIYDIRNAKIGNYCFDIFKDMTEELANDANN

SEQ ID NO: 6533 - protein, 335 aa, Burkholderia cepacia R1808
MALEQRPKPELQSPTDAIVRVTRTTICGTDLHILKGDVPTCEPGRVLGHEGVGVVEQVGAAVDALKPGDRVLISCISSCGRCEYCRRGLYSHCTTGGWILGNRIDGTQAEYVRIPHAQTSLYPIPAGADEDALVMLSDILPTGFECGVLNGKVQPGCSVAIVGAGPIGLAALLTAQFYSPGQIIMIDPDSNRLDIARRFGATDCVDGRSGDAAADVMKLTDGIGVDCAIEAVGIPATFELCTSIVAPGGVVANVGVHGVKADLHLEKLWDRNIAITTRLVDTVSTPMLLKTVRAGRLDPAQLITHRFALDDVEGAYDTFGRAAQTHALKVIIEVS

SEQ ID NO: 6534 - protein, 263 aa, Oryza sativa (japonica cultivar-group)
MSPPLELDYIGLSPPPPPPSSSSAAAARADDVDLKGTELRLGLPGSESPDRRPAAIAAAAATATTLELLPAKGAKRVFPDEAALTPPTAAAGKGKAAREGEEVGAEEEDKKVAAPPQPAAKAQVVGWPPIRSYRKNTMATNQIKSNKEDVDAKQGQGFLYVKVSMDGAPYLRKVDLKTYKNYKDMSLGLEKMFIGFSTGKEGAENQKDGEYVLTYEDKDGDWMLVGDVPWEMFTDSCRRLRIMKGSDAIGLAPRAGEKSKNRN

SEQ ID NO: 6535 - protein, 248 aa, Glycine max
WFRFQVDWTPELHKKFVKAVEQLGIDQAIPSRILEIMKVEGLTRHNVASHLQKYRIHKRQSAPREEDRKWHNQRDAMQRNYYMQRPIMAYPPYHSNHTLSPAPIYPMWGQPGSQTAGVQIWGHPGYHIWHPTESCHWKPYQGVHVDAWGCPLLPAPQAPCFPYNQNIPGLHNPKAVDYRFGMPQSSFEHHPAEEVVDKVVKEAISKPWLPLPLGLKPPSMDSVLAELSKQGISGIPLGNKRSSTPKLR

SEQ ID NO: 6536 - protein, 335 aa, Moorella thermoacetica ATCC 39073
MKHVVTLIPGDGTGPELIAAARRVLEASGAELEWEVMAAGEGAQEKYGSVLPEETLASIRKNGVALKGPITTPVGTGFRSVNVALRKELDLYANVRPFRNLPNVPSRYQGVDLVIYRENTEDLYAGVEHMVGEDAAESIKIITRKGSERIARAAFEYARRQGRKRVTAGHKANIMKFSDGLFLRTFYDVARDYPEITADDRIVDNLSMQLVQKPEQYDVLVLPNLYGDILSDLCAGLVGGLGVAPGANIGEKAAVFEPIHGSAPKYAGQNKVNPLATILSGVMMLEHLGEKEAAARIQRAILAVLAEGKYLTYDLGGSAGTSDMADAIVRRLEVE

SEQ ID NO: 6537 - protein, 199 aa, Zea mays
  misc_feature (72)..(72): Xaa can be any naturally occurring amino acid
  misc_feature (74)..(75): Xaa can be any naturally occurring amino acid
  misc_feature (77)..(78): Xaa can be any naturally occurring amino acid
  misc_feature (86)..(87): Xaa can be any naturally occurring amino acid
  misc_feature (101)..(102): Xaa can be any naturally occurring amino acid
MASSMLSSAAVVTSPAQATMVAPFTGLKSSAAFPVTRKANNDITSIASNGGRVSCMKVWPPVGKKKFETLSXYXXDXXEVEWVKEXXYLLPHKWIPLCEFXXEHGFVYREHGNTPEYYNARTGHGGTSLGPMTDFAQGLKEAKRAKGKPNPFLGTSIPKNRKAGDNFYPKNPKFPGGKFERNPKKTPPIYSQGGFFPRG

SEQ ID NO: 6538 - protein, 370 aa, Arabidopsis thaliana
MVDQGFFTLKKEKKKNILIKLFYVKILGFCFCDSWSSSDMAHSLTSLAVFQSVIRKEMVRSLHVYESVEIEREFWFKSKSCYVEKKAKPLFRSEDFRRPEISEGSVFGTWRCIFVFRFNHSLPRFPTLLCLSRNPKLEDIPNLANELKFISELKPSKIYEEEQCSSSTEGYYNSDLPKPRKLVLKQDLNCLPDSETESEESVNEKTEHSEFENDKTEQSESDAKTEILKKKKRTPSRHVAELSLEELSKYFDLTIVEASRNLKVGLTVLKKKCREFGIPRWPHRKIKSLDCLIHDLQREAEKQQEKNEAAAMAVAKKQEKLETEKRNIVKRPFMEIGIETKKFRQENFKKRHRASRAKKNQESLVTSSST

SEQ ID NO: 6539 - protein, 422 aa, Desulfovibrio vulgaris subsp. vulgaris str. Hildenborough
MSDILFLRNARLLGTPVDLIARDGVIAAIGEHGTLDTPADATVHDAGGHILFPSFIDAHVHLREPGFEYKEDIASGLAAAAHGGFGAVMCMANTRPVNDDAAVTRHIIETSLRHWPHGPRVYPVGAATVGLKGTELAPMAELAAAGCAAFSNDGAPVPDTEMFRRAVEYAADLGRVVIDHCEDPYLAKGAHMNEGATSGRVGVKGQPDVGEALHVARDILLADYLGLPIHLAHISCRRSVELIAWAKVRGVPVTAETCPHYLILDDTALENYDTNAKVNPPLRTPDDVAALREAVKSGVIDMFVTDHAPHAAHEKETPLDEAPNGISGLDTAVALTWGLVREGLLTEGDLVRLWNREPARVFGLPRNGFEPGDPADFFLFDPDEAWVVSRETMHSKSCNTPFLGHTLTGRVKAHWMGGRRIA

SEQ ID NO: 6540 - protein, 333 aa, Zea mays
MEAEAAAKRAREGGEDATAPVAGAEAVVAGAGEQAGISAVIPGWFSEISPMWPGEAHSLKVEKVLFQGKSDYQNVMVFQSSTYGKVLVLDGVIQVTERDECAYQEMITHLPLCSIKDPKKVLVIGGGDGGVLREVSRHISVEQIDICEIDKMVVDVSKQFFPHLAVGFEDPRVSLHIGDGVAFLKNAPEGTYDAVIVDSSDPIGPAQELFEKPFFHSVARALRPGGVVCTQAESIWLHMHIIEDIFVNCRQVFKGSVNYAWTTVPTYPSGVIGFMLCSTEGPAVDFQHPVFNIEEDEHSTKSKGPLKFYNSEIHTASFCLPSFAKRVIESKAS

SEQ ID NO: 6541 - protein, 345 aa, Arabidopsis thaliana
MDGKASNGNGLEKTVPSCCLKAMACVPEDDAKCHSTVVSGWFSEPHPRSGKKGGKAVYFNNPMWPGEAHSLKVEKVLFKDKSDFQEVLVFESATYGKVLVLDGIVQLTEKDECAYQEMIAHLPLCSISSPKNVLVVGGGDGGVLREISRHSSVEVIDICEIDKMVIDVSKKFFPELAVGFDDPRVQLHISDAAEFLRKSPEGKYDAIIVDSSDPVGPALALVEKPFFETLARALKPGGVLCNMAESMWLHTHLIEDMISICRQTFKSVHYAWSSVPTYPSGVIGFVLCSTEGPAVDFKNPINPIEKLDGAMTHKRELKFYNSDMHRAAFALPTFLRREVASLLAS

SEQ ID NO: 6542 - protein, 488 aa, Shigella flexneri 2a str. 301
MKKVNHWINGKNVAGNDYFQTTNPATGEVLADVASGGEAEINQAVAAAKEAFPKWADLPMKERARLMRRLGDLIDQNVPEIAAMETADTGLPIHQTKNVLIPRASHNFEFFAEVCQQMNGKTYPVDDKMLNYTLVQPVGVCALASPWNVPFMTATWKVAPCLALGNTAVLKMSELSPLTADRLGELALEAGIPAGVLNVVQGYGATAGDALVRHHDVRAVSFTGGTATGRNIMKNAGLKKYSMELGGKSPVLIFEDADIERALDAALFTIFSINGERCTAGSRIFIQQSIYPEFVKRFAERANRLRVGDPNDPNTQVRALISQQHWEKVSGYIRLGIEEGATLLAGGPDKPSDLPAHLKGGNFLRPTVLADVDNRMRVAQEEIFGPVACLLPFKDEAEGLRLANDVEYGLASYIWTQDVSKVLRLARGIEAGMVFVNTQNVRDLRQPFGGVKASGTGREGGEYSFEVFAEMKNVCISMGDHPIPKWGV

SEQ ID NO: 6543 - protein, 489 aa, Mycobacterium avium subsp. paratuberculosis str. k10
MALLADGVSELFIDGKMSAGNAGTFPTVNPATEEVLGVAANADAADMDRAIDAARRTFDETDWSRNTELRVRCVRQLRDAMREHIEELRDITIAEVGAPRMLTSAAQLEGPVGDLSFAADTAESYEWNQDLGQASPMGIPTRRTIAREAVGVVGAITPWNFPHQINLAKLGPALAAGNTVVLKPAPDTPWCAAVLGQLIAEHTDFPPGVVNIVTSDDHGVGALLSKDPRVDMVSFTGSTATGRSVMSDAAATIKRVFLELGGKSAFVVLDDADLGGACSMSAFTAAMHAGQGCAITTRLLVPRDRYDEAVAAAAGTMGSIKPGDPNDPGTVCGPVISARQRDRVQSYLDLAIAEGGTFACGGGRPADKDVGFFIEPTVIAGLTNDARPAREEIFGPVLTVIAYDGEEDALRIANDSPYGLSGTVFSADPERAANFASRMRVGTVNVNGGVWYSADAPFGGYKQSGNGREMGLAGFEEYLEIKTIATAVQ

SEQ ID NO: 6544 - protein, 365 aa, Yersinia pestis biovar Medievalis str. 91001
MRLAMKKTYRIAAIPGDGIGHEVMPEGINVLQAAALRWDLDISFENIEWASCEYYQHHGQMMPNDWQRQLQCFDAIYFGAVGWPATVPDHISLWGSLLKFRRDFQQYVNLRPVRLFPGIPCPLVGKQPGDIDFYVVRENTEGEYSSVGGRLFEGTEQEMVLQASIFTRRGVDRILKYAFELAQMRPRKRLTSATKSNGLAFSMPYWDERFEVMAAQYPQISADKQHIDILCARFVLNPERFDVVVASNLFGDILSDLGPACAGTIGIAPSANLNPERDFPSLFEPVHGSAPDIYKRNIANPIAMIWAGAMMLDFLGQGDERYHAAHNGILNAIEQVIAQGPKTPDMCGDASTQQVGSAIVQVLSH

SEQ ID NO: 6545 - protein, 283 aa, Oenococcus oeni PSU-1
MVLSRSVPNIVLNDGHSLPAIGLGTYLVRGGQGVDQILSAIEDGYRLIDTSTNYDSEGAVGEAIRRSGIPRSEFIVTSKLPGKYHHYQDALMMIQESIFRMGIDYLDLYLIHWPLPKRDHYVKAWKALVDAQKLGLIRSIGVSNFLPEHLDRIINESGVTPAVNQIEVHPYWVQEDMLAANKSRGIVSEAWSPLGRGSAALKEDIIKNLADKYGKNTGQIILRWHTQRGIIPLPKSSSLIHQRSNIDIFDFSLTSSEIEQINALNRSDGRVDGQDPNTYEEFD

SEQ ID NO: 6546 - protein, 400 aa, Streptomyces avermitilis MA-4680
MLSEQSAATVRATLPAVGAAVGEITARFYDRLFAARPELLRDLFNRGNQAAGTQRQALAGSIAAFATYLVEHPDERPDAMLDRIAHKHASLGIAPGQYAVVHEHLFAAIAEVLGDAVTPEVAAAWDEVYWLMANALIAIERRLYAQHENTGDTGGRRPWRVVERVDETADVAAFRLRPADGRPLPDFRPGQYVSVRVELPDGARQTRQYSLVGAPGSPELRIAVKRVHGGTTPDGEVSNHLHARVREGSVLELSAPYGDLALEATDVPLLLASAGIGVTPMIAMLEHLALTGHRAPVTVVHADRSPAEHALRADHEAYAAKLADAAVHFWYEHPEPGHPADRTGLVDLTGVPVSAGTRAYLCGPLPFMRAVRTQLIEKGVAPADIHYEVFGPDLWLARES

SEQ ID NO: 6547 - protein, 123 aa, Saprolegnia ferax
MIHIQTKLKIKDNTGVKIGQCIKIYKKATGTIGDTILISVKNLRLNKKKKIKITKGDLLKALIIQTKYSVKNTIGNYIKFDNNCAVILNNQNKLMGTRILGPITSEFRKKKQFKILSLASNIL

SEQ ID NO: 6548 - protein, 325 aa, Glycine max
  misc_feature (159)..(159): Xaa can be any naturally occurring amino acid
MGGGGAMRSAAAKIAGIGISKAALRPSALPTEQAVHNASRPTSVVGVKGAKSTEVASLHAAAPWDDWDLADDGDLVVPRMVFGSVPTFAEAKEATAELKDAIDQVYLSPESSQYSSRGGQVSALSPTGGQVSALSPTLYEPVNRSCVVDAISDSSAPKXAIQAFHLLSTSRDVFAVVASLACDPNVWNAVMENPAVSSFFQSQQSVADLGAAGNTEELDKFSSCTSETVESPERLGVSAESHPGNGIFDFMDLLQNVKLTVIELVSRVSGFLQNIFPTPDAMKEKMSGDVDGNTKASFMDSKISMGGTFTGLAIKKIMVIVTKRA

SEQ ID NO: 6549 - protein, 320 aa, Bartonella quintana
IDGDKGILLYCGYPIDQLAEKGDFLESCYLLLYGELPTKQEKIDFDRCIMQHMMVHERFTRFFHGFRRDSHPMAVMVACLGAMSAFYHDSIDIKDAQQRMIAAIRLISKVPTLAAMAYKYSIGQAFVYPRNDLSYAANFLHMCFSVPCEEYKINPVLSRAMDRICTLHADHEQNASTSTVRLVGSSGANPFACIAAGVACLWGPAHGGANEACLKMLQKIGSVERIPEFIARAKDKNDPFRLMGFGHRVYKNYDPRAKIMQQTCHEVLKELNIQDDPLLDIAIALENTALNDEYFIEKKLYPNVDFYSGITLKALGFPTE

SEQ ID NO: 6550 - protein, 352 aa, Coxiella burnetii RSA 493
MKNKNLSMPSLKEKLLQETVEHIDITRFDARPIIDAMDHMSFTSRDLARATQIFNRMLQDEQCSIILSLAGSTSAGGCMKLYADLVKYNMVDAIVATGASIVDMDFFEALGFRHYQGSPAVEDRQLRDLYIDRIYDTYIDEEDLQRCDHTIYEIANSLEPRPYSSREFIHHMGAYLAQGKAKKEESLVQLAYEHDVPIFCPAFTDSSAGFGLVLHQVKNPDRHLTIDSIRDFRELTDIKIKAGTTGLLMIGGGVPKNFVQDTVVCAEVIGKTVDMHKYAIQITVADVRDGACSSSTLKEACSWGKVDTAYEQMVYAEATSGLPLLASDAYHRGYWKDRSPRQYANLFKSESK

SEQ ID NO: 6551 - protein, 243 aa, Medicago truncatula
MGKSLFQESLKALEADIQYANTLALGHPRDKEGGCFQMRLSYSPVAPLFLSLVQWTDYRLAGALGLLRILIYVTYGNGKTTISIYERKASIRQFYSIIFPALLQLQKGVTDLEERKQKEVYANRYQKKTDFKDRRESKIDIEREKECGVCLEVKAKVVLPNCCHQMCFKCYREWCLRSQSCPFCRDSLKRVNSGDLWIYTDTSDIVDVGTIFKENCKILFLYIEKLPLIIPDPRHVSYDPFFR

SEQ ID NO: 6552 - protein, 106 aa, Arabidopsis thaliana
MDVGRNNRKNMSFRSSPEKSKQELRRSFSAQKRMMIPANYFSLESLFLLVGLTASLLILPLVLPPLPPPPFMLLLVPIGIMVLLVVLAFMPSSHSNANTDVTCNFM

SEQ ID NO: 6553 - protein, 426 aa, Chlorobium tepidum TLS
MTIDLDFDRCHLWHPYTSMADPLPVWPVKRASGVMIELEDGRKLIDGMSSWWAAIHGYNHPVLNRAVTEQLGRMSHVMFGGLTHEPAIELGKILTSLLPDPLDRIFFCDSGSVAVEVAIKMALQYWLAAGKPGKKRLLTVRSGYHGDTFMAMSVCDPVTGMHSLFSGAVPEQLFVEAPACGFNEPWREEAIDKMRQALEDHANTIAAVIIEPIVQGAGGMRFYSPHYLRRLRELCTEHGVLLIFDEIATGFGRTGKLFAMEYASVTPDIVCLGKALTGGYMTLAATVTTGHVADTISGGNPGLFMHGPTFMANPLACAVAVASLKLLLSGDWQSTVWRIERQLAEELAPCTGMTGVRDVRVLGAIGVVELDRPVDMAKIQQAFVERGIWVRPFGRLVYLMPPFIIRDNELTRLTSVICEVIGAEYR

SEQ ID NO: 6554 - protein, 319 aa, Bartonella sp.
ITYIDGDKGVLLYRGYPIDQLAEKGDFLESCYLLLYGELPTKQEKNDFDRCIMQHTMVHEQFARFFHGFRRDSHPMAVMVACLGAMSAFYHDSIDITDPQQRMIASVRLISKVPTLAAMAYKYSIGQAFVYPRNDLSYAANFLRMCFSVPCEEYKTNPVLTRAMDRIFILHADHEQNASTSTVRLAGSSGANPFACIAAGVACLWGPAHGGANEACLKMLQEIGDVKRIPEFIARAKDRNDPFRLMGFGHRVYKNYDPRAKIMQKTCHEVLKELNIQDDPLLDIAIELEKIALNDEYFVEKKLYPNVDFYSGITLKALG

SEQ ID NO: 6555 - protein, 315 aa, Bartonella sp.
DGDKGVLLYRGYPIDQLAEKGDFLESCYLLLYGELPTKQEKNDFDRCIMQHTMVHEQFARFFHGFRRDSHPMAVMVACLGAMSAFYHDSIDITDPQQRMIASVRLISKVPTLAAMAYKYSIGQAFVYPRNDLSYAANFLRMCFSVPCEEYKTNPVLTRAMDRIFILHADHEQNASTSTVRLAGSSGANPFACIAAGVACLWGPAHGGANEACLKMLQEIGSVKRIPEFIARAKDRNDPFRLMGFGHRVYKNYDPRAKIMQKTCHEVLKELNIQDDPLLDIAIELEKIALNDEYFVEKKLYPNVDFYSGITLKALG

SEQ ID NO: 6556 - protein, 472 aa, Escherichia coli CFT073
MTTHLVWFRQDLRQHDNLALAAACRNSSARVLALYIATPRQWAAHNVSPRQAELINTQLNALQIALAEKGIPLLFREVDDFAASVEIVKQVCAEYRVTHLFYNYQYEVNERARDVQAERTLRNVVCEGFDDSVILPPGAVMTGNHEMYKVFTPFKNAWLKRLREGMPECVAAPKVRSSGSIEPAPSITLNYPRQSFDTAHFPVEEKAAIAQLRQFCLNGAGEYEQQRDFPAVEGTSRLSASLATGGLSPRQCLHRLLAEQPQVLEGGPGSVWLNELIWREFYRHLMTYYPSLCKHRPFIAWTDRVQWQSNPAHLKAWQEGKTGYPIVDAAMRQLNSTGWMHNRLRMITASFLVKDLLIDWREGERYFMSQLIDGDLAANNGGWQWAASTGTDAAPYFRIFNPTTQGEKFDREGEFIRQWLPELRDVPGKAVHEPWKWAEKTGVTLDYPQPIVDHKEARLRTLAAYEEARKGA

SEQ ID NO: 6557 - protein, 500 aa, Bordetella parapertussis 12822
MDTPSDLLRKLGLDPAALAQGSLRARSPIDGALLARVPEHSVAQAHAAITRARQASQQWRDVPAPRRGELVRRFGDVLREHKEALGRLVSLEAGKILAEGAGEVQEMIDICDFAVGLSRQLYGLTIASERPGHRMMETWHPLGVVGVISAFNFPVAVWSWNAALALVCGNAVVWKPSEKTPLTALACQALLARALQDYGEAPAGLAEVLIGGRQLGEALVDSHDVALVSATGSTRMGRQVGPRVAQRFGRVLLELGGNNAIIVAPSADLEMATRGIVFGAIGTAGQRCTTTRRLIAHTDIADTLVARLKQAYASATVGDPLQPGTLVGPLIDRAAYDAMQAALTAAREQGGQVSGGERLLAERYPDAWYVRPAIVEMPGQTDVVCHETFAPILYVMRYGDFPAALAMHNGVPQGLSSAIFTNDLREAEAFLSSAGSDCGIANVNIGTSGAEIGGAFGGEKETGGGRESGSDAWKHYMRRATNTVNYSRALPLAQGIRFGE

SEQ ID NO: 6558 - protein, 221 aa, Glycine max
  misc_feature (117)..(117): Xaa can be any naturally occurring amino acid
MALFAAFSICKVAKDAAGVAGNVFAFGLFVSPIPTFRRIIRNGSTEMFSGLPYIYSLLNCLICMWYGTPLISADNLLVTTVNSIGAVFQFVYIIIFLMYAEKAKKVRMIGLSLAVLXIFAIILVGSLQIDDIIMRRFFVGFLSCASLISMFASPLFIIKLVIQTKSVEFMPFYLSLSTLLMSTCFLLYGLLNDDAFIYGPDGVGTMLGLVPGVLCWVLRGG

SEQ ID NO: 6559 - protein, 425 aa, Fusobacterium nucleatum subsp. nucleatum ATCC 25586
MLLKNCKILKNTKFEKVDILIRDNKIEKISENIDITDENIIDIKNRFVTAGFIDVHVHWREPGFSKKETVYTASRAAARGGFTTVMTMPNLNPVPDSVETLNKQLEIIKKDSVIRAIPYGAITKEEYGRELSDMEAIASNVFAFTDDGRGVQSANVMYEAMLMGAKLNKAIVAHCEDNSLIRGGAMHEGKRSAELGIKGIPSICESTQIVRDVLLAEAANCHYHVCHISAKESVRAVREGKKNGIKVTCEVTPHHLLSCDEDIKEDNGMWKMNPPLRSREDRNALIVGILDGTIDIIATDHAPHTMEEKIRGIEKSSFGIVGSETAFAQLYTKFVKTDIFSLEMLVKLMSENVAKIFDLPYGKLEENSFADIVVIDLEKEITINPNNFLSKGKNTPYINEKINGIPVLTISNGKIAYIDKEEINL

SEQ ID NO: 6560 - protein, 481 aa, Pseudomonas putida KT2440
MHPIAPHWLNFIDGQWTDSEQHLSIHNPGTTDLVATIAQASVADAECALQAARRCADSNALNRVRPAQRVTWLLEVAAQIRAITDEGAWVLCQENGKSLRDARDEFIEAARYFEYYAGMADKIEGKSIPLGDGYIDFTVYDPLGVSLQIVPWNFPVSICARSLAPALAAGNAVVIKSPELSPLGLCVLMQAIERAGLPQGAVNLICGRGREVGAYLAGHRDVDQIVFTGSVGTGQSILRSAAEHAIPSVMELGGKSAALVFPDADREQLISSVKSGIFFNAGQVCSAMSRLLVHRSIYDEVVADVVAMAEGLTVGLGQDNPDHTPVISAAQLEGIEALCRRAQQQGAVVATGGEAISGLSGHYMAPTVLRDVTAQMEIAQTEVFGPVLAVIPFDSEEEALAIANGTVFGLVAGVFTQDLNRALRCARRLCTGQVFVNEWYAGGIETPFGGVGLSGFGREKGQEALYSYVRTKNLAVRIKGE

SEQ ID NO: 6561 - protein, 175 aa, Triticum aestivum
MGPTVMASSATSVAPFQGLKSTAGLPVSRRSNGASLGSVSNGGRIRCMQVWPIDVIKKWETLSYLPPLSTEALLKQVDYLIRSKWVPCLEFSKVGFIFREHNASPGYYDGRYWTMWKLPMFGCTDATQVINEVEEVKKEYPDAYVRIIGYDNMRQVQCVSFIAFKPPGCDESGKA

SEQ ID NO: 6562 - protein, 458 aa, Synechocystis sp. PCC 6803
MIRRRSFFKLSQLMFVSYLLSTSCGKNNTPVTANDAPSILIIGAGLAGLAAAQSLMKQGYTVRVLEARDRLGGRTWTSNYWDDAPLDMGASWIQGTEGNPITELAEKIATPLVMTSYDNAITYEVGGQPFTAKEDRIIEQLEKKWQGAIATAQNGDGDQSLQAVIENVFDLENQPLETKQIIDWYMNSTIEHEYAGSLKDTSIYWFDGDGGFGGDDAIFVEGYQAIVNYLAKDISIELNQIVESIDYSEEIPKIITNQGAYTADQVIITLPLGVLKSGQVKFIPELPSPKRKAIKALGMGILNKCYLRFPKVFWPKKVDWIEQVPTERGLWSEWVNIFRVNQLPILLGFNAADEGKEIETWTDEEIIKSAMKTLRHLFGDDIPDPTDYQITRWQSDSFSRGSYSFNALGSHPDMRDHLAKSLNDQIFFAGEATERDYFATAHGAYLSGLRVAEEINNL

SEQ ID NO: 6563 - protein, 254 aa, Arabidopsis thaliana
MENEREKQVYLAKLSEQTERYDEMVEAMKKVAQLDVELTVEERNLVSVGYKNVIGARRASWRILSSIEQKEESKGNDENVKRLKNYRKRVEDELAKVCNDILSVIDKHLIPSSNAVESTVFFYKMKGDYYRYLAEFSSGAERKEAADQSLEAYKAAVAAAENGLAPTHPVRLGLALNFSVFYYEILNSPESACQLAKQAFDDAIAELDSLNEESYKDSTLIMQLLRDNLTLWTSDLNEEGDERTKGADEPQDEV

SEQ ID NO: 6564 - protein, 506 aa, Brassica napus
MTSINVKLLYHYVITNLFNLCFFPLTAIVAGKAYRLTIDDLHHLYYSYLQHNLITIAPLFAFTVFGSVLYIATRPKPVYLVEYSCYLPPTHCRSSISKVMDIFYQVRKADPSRNGTCNDSSWLDFLRKIQERSGLGDETHGPEGLLQVPPRKTFAAAREETEQVIIGALENLFKNTNVNPKDIGILVVNSSMFNPTPSLSAMVVNTFKLRSNVRSFNLGGMGCSAGVIAIDLAKDLLHVHKNTYALVVSTENITYNIYAGDNRSMMVSNCLFRVGGAAILLSNKPRDRRRSKYELVHTVRTHTGADDKSFRCVQQGDDENGKTGVSLSKDITDVAGRTVKKNIATLGPLILPLSEKLLFFVTFMGKKLFKDKIKHYYVPDFKLAIDHFCIHAGGKAVIDVLEKNLGLAPIDVEASRSTLHRFGNTSSSSIWYELAYIEAKGRMKKGNKVWQIALGSGFKCNSAVWVALNNVKASTNSPWEHCIERYPVKIDSDSGKSETRAQNGRS

SEQ ID NO: 6565 - protein, 373 aa, Zea mays
MRRRRMGALHVVGEPRISFRQQPAAVVAKNGGHGAVVEEIHGLIRVYKDGHVERLPAIPAVPCTWGGTAAPDAPGGVVARDVVVDPATGVWARLYAPTSAAAGDGARRPVVVYFHGGGFCVGSAAWSCYHEFLAQLAARAGCAVMSVDYRLAPEHRLPAAFDDGLAAVRWLRHQAAASASASACSNDDLSWWRARCGFDRVFLMGDSAGASIALHVAARLGQGQLGALPPLTVRGAVLIQPFLGGEGRTASEKNVAQPPRSALTLPTSDCYWRLALPAGASREHPWCNPLSGRAAPRLETTPLPPLLVCVSETDILRDRNLELCRALREAGKRVEQAVYGGVGHAFQVLHNCHLSQPRTQEMLAHIKAFVSAR

SEQ ID NO: 6566 - protein, 391 aa, Zea mays
MCCLQLKDMVLKFSGSSKQCKGTAGTQSFRSSGDRYRRPYPGFIDDTGFTPASKVLGEDYYPRTALAGAAGAAGGARTASSDTLDMGRSNRKSPGSSGWIPGTDEAAAGGDDVLALEDAAAPREWTAQVEPGVQITFGTIPTGGNDLKRIRFSREMFNKWEAQRWWGENYDRIVELYNVVMFSGRQQGCSTPVSSVDDLALVGRDSSYSRGGSTSRGSPITAPPPPPPLPPVASKEPITRSASYKATAAGSSSAPYAAAHSTRAAAAYFPSAAVPDPSDHVWAHHFNMLNSAAAAAGTSAAMGGGAPSSYDPSRATTSSRDEASVSLSNVSDLEATEWIEEDEPGVCLTIRELGDGTRELRRIRFSREIFGEDRAKVWWEQNRERIQAEYL

SEQ ID NO: 6567 - protein, 506 aa, Brassica oleracea
MTSINVKLLYHYVITNLFNLCFFPLTAIVAGKAYRLTIDDLHHLYYSYLQHNLITIAPLFAFTVFGSVLYIATRPKPVYLVEYSCYLPPTHCRSSISKVMDIFYQVRKADPSRNGTCDDSSWLDFLRKIQERSGLGDETHGPEGLLQVPPRKTFAAAREETEQVIIGALENLFKNTNVNPKDIGILVVNSSMFNPTPSLSAMVVNTFKLRSNVRSFNLGGMGCSAGVIAIDLAKDLLHVHKNTYALVVSTENITYNIYAGDNRSMMVSNCLFRVGGAAILLSNKPRDRRRSKYELVHTVRTHTGADDKSFRCVQQGDDENGKTGVSLSKDITDVAGRTVKKNIATLGPLILPLSEKLLFFVTFMGKKLFKDKIKHYYVPDFKLAIDHFCIHAGGKAVIDVLEKNLGLAPIDVEASRSTLHRFGNTSSSSIWYELAYIEAKGRMKKGNKVWQIALGSGFKCNSAVWVALNNVKASTNSPWEHCIDRYPVKIDSDSGKSETRAQNGRS

SEQ ID NO: 6568 - protein, 285 aa, Moorella thermoacetica ATCC 39073
MALRGIWFSELQTPDLAISVRLNQTLHHEKTPYQELAVVDTEAYGRMLLLDNIIQTTVKDEFFYHEMIAHVPLNTHPNPRTALVIGGGDGGVVREIVKHPSIEKVTLVEIDARVVANAREYLPEIACGLDDARVEIRFEDGIEHVRQRENTYDVIIVDSTDPIGPAVGLFSAEFYRNVYRALKADGVFVAQTESPIFNSRLIRRIQRDLKEIFPIARLYLTTVPTYPGGLWAFSLGSKKYDPLEVDWRQAPKVATRYYTPAIHQAAFSLPPFVQEFLEAPEEEEF

SEQ ID NO: 6569 - protein, 506 aa, Brassica rapa
MTSINVKLLYHYVITNLFNLCFFPLTAIVAGKAYRLTIDDLHHLYYSYLQHNLITIAPLFAFTVFGSVLYIATRPKPVYLVEYSCYLPPTHCRSSISKVMDIFYQVRKADPSRNGTCDDSSWLDFLRKIQERSGLGDETHGPEGLLQVPPRKTFAAAREETEQVIIGALENLFKNTNVSPKDIGILVVNSSMFNPTPSLSAMVVNTFKLRSNVRSFNLGGMGCSAGVIAIDLAKDLLHVHKNTYALVVSTENITYNIYAGDNRSMMVSNCLFRVGGAAILLSNKPGDRRRSKYELVHTVRTHTGADDKSFRCVQQGDDENGKTGVSLSKDITDVAGRTVKKNIATLGPLILPLSEKLLFFVTFMGKKLFKDKIKHYYVPDFKLAIDHFCIHAGGRAVIDVLEKNLALAPIDVEASRSTLHRFGNTSSSSIWYELAYIEAKGRMKKGNKVWQIALGSGFKCNSAVWVALNNVKASTNSPWEHCIDRYPVKIDSDSGKSETRVQNGRS

SEQ ID NO: 6570 - protein, 384 aa, Glycine max
KLQIIREIATLKLLRHPNVVRLYEVLASKTKIYMVLEYVNGGELFDIIASKGKHIEGEGRKLFQQLIDGVSYCHTKGVFHRDLKLENVLVDNKGNIKITDFGLSALPQHLREDGLLHTTCGSPNYVAPEVLANKGYDGATSDTWSCGVILYVILTGHLPFDDRNLVVLYQKIFKGDVQIPKWLTPGARNMIRRILDPNPETRITMAGIKEDPWFKKGYIPVNPEDEDVYVDQEAFSIHEQPNEAEQRNSGSPSLINAFQLIGMSSCLDLSGFFEKEDVSERKIRFASNLSVKDLIERIEDTATEMEFRVEKKNGKLKVIRENKVHKTLGCLSVVVEVFGISSSLYVVELRKSYGDGSVYKQLCNKLLNDLGIPPKQPLVRSAAN

SEQ ID NO: 6571 - protein, 506 aa, Brassica napus
MTSINVKLLYHYVITNLFNLCFFPLTAIVAGKAYRLTIDDLHHLYYSYLQHNLITIAPLFAFTVFGSVLYIATRPKPVYLVEYSCYLPPTHCRSSISKVMDIFYQVRKADPSRNGTCDDSSWLDFLRKIQERSGLGDETHGPEGLLQVPPRKTFAAAREETEQVIIGALENLFKNTNVNPKDIGILVVNSSMFNPTPSLSAMVVNTFKLRSNVRSFNLGGMGCSAGVIAIDLAKDLLHVHKNTYALVVSTENITYNIYAGDNRSMMVSNCLFRVGGAAILLFNKPGDRRRSKYELVHTVRTHAGADDKSFRCVQQGDDENGKIGVSLSKDITDVAGRTVKKNIATLGPLILPLSEKLLFFVTFMGKKLFKDKIKHYYVPDFKLAIDHFCIHAGGRAVIDVLEKNLALAPIDVEASRSTLHRFGNTSSSSIWYELAYIEAKGRMKKGNKVWQIALGSGFKCNSAVWVALNNVKASTNSPWEHCIDRYPVKIDSDSGKSETRAQNGRS

SEQ ID NO: 6572 - protein, 307 aa, Sorghum bicolor
MSAELKRDYEIGAEIGRGRFGVVHRCTSRATGEAFAVKSVDRSQLADDLDRELAELEPKLAQLAGAGNPGVVQTHAVYEDETWTHTVMDLCAGPDLLEWVRLRRGAPVPEPLAAAIVAQVAQALALCHRRGVAHRDVKPDNILIDTAPAGSDDGEDEEEDSGEAEEAETAPRARLADFGSAAWVGAGGLGRAEGLVGTPHYVAPEVVGGGEYGAKADVWSAGVVMYALLSGGALPFGGETAAEVLAAVLRGSVRFPPRLFSGVSPAAKDLLRRMICRDEWRRFTAEQVLAHPWIVSGGGARAIERPT

SEQ ID NO: 6573 - protein, 395 aa, Yersinia pestis biovar Medievalis str. 91001
MNAMSLLSVEVSNFTFVGLFKNDNVNIVSIHRVLLLLEELMSQLPEKMSAVVCHGPQDYRLEHVPTPVPKAKELVIKVKGCGICAGDCKCKNGAKMFWGETPWVKPPVVPGHEFYGHIVALGEGTESKYKLGERVIAEQIVPCWDCRYCNSGSYWMCETHNIYGFQKDVAEGGMAEYMRFSENAIVHKIPESLSHEDAVLIEPMACAIHTVARGDIQLDDVVVLAGAGPLGLCMVQVARLKTPKKLIVIDTIEERLALAKAFGADVVINPLKEDADKIVKSLTGGYGCDVYIEATGAPIGVTQGLQMIRKLGRFVEFSVFGQETTVDWSIIGDRKELDIRGAHLAPYSYEIATDLFERGLVTSKGIVTHSYSLDDWEKAFELADSTNSIKVILVP

SEQ ID NO: 6574 - protein, 500 aa, Oryza sativa (japonica cultivar-group)
MENSQVWLLWGALSVAVLFYLSTLRRRHAGGKPLPPGPTPLPLIGNLHLAGGTSFHHKLRDLARVHGPVMTLKLGLATNVVISSREAAIEAYTKYDRHLAARATPDTFRACGFADRSMVFIPSSDPRWKALRGIQGSHVFTPRGLAAVRPIRERKVGDLMAYLRAHAGEEVLLGQAMHTGLLNLVSFSYFSIDIVDMGSQMARDLREVVDDIISVVGKPNISDFYPFLRPLDLQGLRRWTTKRFNRVFSIMGDIIDRRLAHIRDNKPSHNDFLDSLLELMAAGKIDRVNVLDMLFEAFVAGADTMALTLEWVMAELLKNPGVMAKARAELRDVLGDKEVVEEADAARLPYLQAVLKEAMRLHPVGALLLPHFAVEDGVEVGGYAVPKGSTVLFNAWAIMRDPAAWERPDEFVPERFVERAPLLDFRGKDAEFMPFGSGRRLCPGLPLAERVMPFILASMLHTFEWKLPGGMTAEDVDVSEKFKSANVLAVPLKAVPVLIK

SEQ ID NO: 6575 - protein, 282 aa, Oryza sativa
GEFEDVKLLNNLLTEKNKETGWDVPIHVDAASGGFIAPFLYPELEWDFRLPLVKSINVSGHKYGLVYPGVGWVIWRSKEDLPEELIFHINYLGTDQPTFTLNFSKGSSQIIAQYYQLIRLGFEGYKNIMQNCMETPAILREGIEATGRFEILSKEAGVPLVAFSLKASGRYTVFDISEHLRRFGWIVPAYTMPANAEHVAILRVVIREDFSRSLAERLVSDIVKILHELDAHSAQVLKISSAIAKQQSGDDGAVTKKSVLETEREIFAYWRDQVKKKQTGIC

SEQ ID NO: 6576 - protein, 319 aa, Bacillus sphaericus
MKKIAVLTSGGDVPGMNAAIRAVVRKAAFHGINVVGIKHGYEGLVKGYLEELDLGSVGGIIQRGGTHLNSARCPEFKEDAVQQQGIENLRAAGIEGLVVIGGDGSYRGAMDLVKKGFPAVGVPGTIDNDVPGTEYTIGFDTALNTVVESIDKIRDTATSHENSFIVEVMGRDAGDIALWAGLAAGAETVLIPEEDYDLDDIVARLDRGAARGKKHSIIIVAEGVMSGNELAKLIKEKTGKETRVSVLGHIQRGGSPTARDRVLASQFGAHAVELLMEGKYGRAVGIRNHQVIDYDMPEAFEKNHEADVSLYTLMKELSI

SEQ ID NO: 6577 - protein, 44 aa, Zea mays
AIILPPFGVFLKVGCKGEIWVCLLVPFLAYFPGVIFPIFGFPQG

SEQ ID NO: 6578 - protein, 109 aa, Ipomoea batatas
CWQFITLAGFHGNALIIDTFAKDFASRGMLAYVEKIQREERNNGVDTLAHQKWSGANYYDRVLRTVQGGITSTAAMGKRVTEEQFQESWTRPGTTNMGDGGVVIAKARM

SEQ ID NO: 6579 - protein, 200 aa, Triticum aestivum
MSAVNITNVAVLDNPTAFLNPFQFEISYECLVPLDDDLEWKLTYVGSAEDETYDQQLESVLVGPVNVGTYRFVFQADPPDPLKIREEDIIGVTVLLLTCSYVGQEFMRVGYYVNNDYDEEQLREEPPAKLLLDRVQRNILADKPRVTKFPINFHPEPGTSSEQPQQDAEQQQQPTSPEPQTAPVEPHMAPLENVPIAADQ

SEQ ID NO: 6580 - protein, 441 aa, Glycine max
  misc_feature (51)..(51): Xaa can be any naturally occurring amino acid
  misc_feature (224)..(224): Xaa can be any naturally occurring amino acid
MPETESAAAAAVEEENNTALFGKYEVGRLLGCGAFAKVYHARNTETGQSVXAVKVISKKKLNSSGLASNVKREISIMSRLHHPNIVKLHEVLATKTKIYFILEFAKGGELFARIAKSRFSEDLARRYFQQLISAVGYCHARGVFHRDLKPENLLLDEQGNLKVSDFGLSAVKDQIGVDGLLHTLCGTPAYVAPEILAKKGYDGAKVDVWSCGIILFVLVAGYLXPFNDPNLMVMYKKIYKGEFRCPRWFSMELRRILTRLLDTNPDTRITVDEIMKDTWFKKGYKEVKFGDLGLEWKSEGEGVKDLNAFDIISFSTGLNLSGLFDSSCGVEEGERFLLRESPEKVVEMLVAAAEKEGVVVRMRKECGVELEGCGGNFAALVEVYRLPGELVVVEVRRRDGDGGVFRDVWRNKLRPCLCAASSSTTSDRDGTTLAQPVAGDS

SEQ ID NO: 6581 - protein, 411 aa, Zea mays
MRHHLMCPISLQPMQDPVTAPTGITYDRRAIERWLAAGHATCPVTGQPLALADLTPNHTLRRLIQSWCAPRPSTPPEAAGANKPADGDDDAVEHSQSQTDDDVVKKLLRAATSPPIDVLREAAAAAFESDAARRRMVDAGVLQRVLRGVAAIASEVKADDPRHHENESRSSSAIARAIEARLDLARALAVSSCDDDELRPQLVSDSLVHGLLDAATDVLAALERAGGGGGDDGDAARASAVRLLDSVTGAAGAAVLERLRPGLFRAVTAVVRDRVSPAATRSALRVLLHACPLGRNRALAVEAGAAREAIELELDAPPPPPGGGGGRRATELALALLAELCACADGRAAVAAHPAGVAVVARRLLRVSAAADACAVRVLAAVGGRAASPEVLREMARVGAVGKLCCVLQAC

SEQ ID NO: 6582 - protein, 290 aa, Nicotiana tabacum
ELFDRIIAKGHYTERAAASMCRAIVNVVHVCHFMGVIHRDLKPENFLLTDKSENAALKATDFGLSMFIQEGKVYKDIVGSAYYVAPEVLRKSYGKEIDVWSAGVMLYILLSGVPPFWAETERGIFDAILKEDIDFESQPWPSITSSAKDLVRKMLTKDPKKRISAAQVLEHPWLKVGGVASDKPLDNAVLSRMKQFRAMNKLKKLALKVIAENMSAEEIQGLKSMFHNIDTDNSGTITYEELKSGLARLGSKLTEAEVKQLMEAADVDGNGSIDYIEFITATMHKHTEFL

SEQ ID NO: 6583 - protein, 427 aa, Escherichia coli CFT073
MADTKAKLTLNGDTAVELDVLKGTLGQDVIDIRTLGSKGVFTFDPGFTSTASCESKITFIDGDEGILLHRGFPIDQLATDSNYLEVCYILLNGEKPTQEQYDEFKTTVTRHTMIHEQITRLFHAFRRDSHPMAVMCGITGALAAFYHDSLDVNNPRHREIAAFRLLSKMPTMAAMCYKYSIGQPFVYPRNDLSYAGNFLNMMFSTPCEPYEVNPILERAMDRILILHADHEQNASTSTVRTAGSSGANPFACIAAGIASLWGPAHGGANEAALKMLEEISSVKHIPEFVRRAKDKNDSFRLMGFGHRVYKNYDPRATVMRETCHEVLKELGTKDDLLEVAMELENIALNDPYFIEKKLYPNVDFYSGIILKAMGIPSSMFTVIFAMARTVGWIAHWSEMHSDGMKIARPRQLYTGYEKRDFKSDIKR

SEQ ID NO: 6584 - protein, 73 aa, Glycine max
AFSMIFSPAVITVNLAGADMVAPFTVLMSMAGFPTRKTNNDITSIASNGGRVQCMQVRPPICKNKSETLSYLA

SEQ ID NO: 6585 - protein, 362 aa, Triticum aestivum
  misc_feature (200)..(200): Xaa can be any naturally occurring amino acid
  misc_feature (213)..(213): Xaa can be any naturally occurring amino acid
AYRQDQIVSVWLLQSTTFFSIWIKQHLQSIVHIFYSEGTDHSYSWYLQLRNLVWATSKHDVYMAQNNSVMHWSSLLQRGTEVLHVAGQVVPKQKAHGARTLSRVQISSMALKDNLMVAGGFRGELIFKYVDKPGVAFCTNAADNKNSVTNAVDVYESPSGATRVTAANNDCTVKFLDAERCSLLSRFTFPWSVNNNIGEXPDGKLLAVLGDSXPDCVIADAQSGEEIATLKGHLDYSFSSAWHPGGHVLATGNQDKTCRLWDTRNLSAPFAVLGGRIGAVRGLRFSSDGRFLAAAEAADFVHVYDARAGYGAAQEIGLFGEIAGVAFSPDADALFVGVADRAYGSLLEFGRRGRHAYLDSYL

SEQ ID NO: 6586 - protein, 100 aa, Burkholderia cepacia R18194
MVIVALISPYEADRQRARQIVGVDHFVEVYLKTDIATCSARDPKQLYAKAITGQTTQFTGISDPYEVPTTPDLVVETGSMDIASSVALIMNFERQRFTHA

SEQ ID NO: 6587 - protein, 431 aa, Burkholderia cepacia R18194
MGALNRAGSRVIVKADGVYLWDSDGNKIIDGMAGLWCVSVGYGCKALADAAYRQIQELPFYNTFFKTTHPPVIELSAMLAEVSPKGFNHFFYCNSGSEGNDTVLRLVHQYWRVQGQPQKKYVISRKNGYHGSTIAGGTLGGMGYMHEQMPSKVENIVHIDQPYFFGEAAAGETPEAFGLARAQQLEAKILELGAENVAAFIGEPFQGAGGVIFPPSTYWPEIQRICRKYDILLAADEVIGGFGRTGEWFAHQHFGFEPDLITMAKGLTSGYVPMGAVGIHERVARPIIDNGEFNHGLTYSGHPVAAAVAVANLKLLRDEGIVERVKNDIGPYFQRRLRDALGDHPIVGEIAGAGLVAGVQLARDRDRRERFGASVDIGTICRDFCFNGNLIMRATGDRMLLSPPLVIREAEVDEIVDKAKRAFDATAERVG

SEQ ID NO: 6588 - protein, 111 aa, Brassica napus
  misc_feature (34)..(34): Xaa can be any naturally occurring amino acid
  misc_feature (36)..(36): Xaa can be any naturally occurring amino acid
  misc_feature (38)..(42): Xaa can be any naturally occurring amino acid
  misc_feature (48)..(50): Xaa can be any naturally occurring amino acid
  misc_feature (59)..(59): Xaa can be any naturally occurring amino acid
MAYSMLSSAAVVTSPAQATMVAPFTGLKSSSAFXVXRXXXXXFTSIVXXXRRVSCMPVXSLLSPVPPRRYPPVAPLFACALPARAFGPSAGLAFLPRLPPPARCRRRAFVS

SEQ ID NO: 6589 - protein, 409 aa, Streptomyces coelicolor A3(2)
MAAEIVNPRSDSEAGAEQEAGAEPLDSFDPAFALHRGGKMAVQATVPIRDKEDLSLAYTPGVAKVCSAIAEQPDLVHDYTWKSSVVAVVTDGTAVLGLGDIGPEASLPVMEGKAILFKQFGGVDAVPIALNCTDADEIVETVVRLAPSFGGVNLEDISAPRCFEIERKLQERLDIPVFHDDQHGTAVVTLAALRNAARLSGRTLGELRAVISGAGAAGVAIAKMLVEAGIGDVAVADRKGVVSADREDLTPVKQELASFTNKAGLSGPLEAALAGADVFIGVSGGTVPEPAVASMAEGAFVFAMANPNPEVHPEVAHKYAAVVATGRSDFPNQINNVLAFPGIFAGALQVRASRITEGMKLAAAEALASVVGDDLAADYVIPSPFDERVAPAVTAAVAAAARAEGVARR

SEQ ID NO: 6590 - protein, 423 aa, Candida albicans SC5314
MMNIDQHHQLQQQHQQQMLQQQAQAQAQAQAQAQQQQQQQQQAAAAAAAANAAATTSSSSPRQVSFNVSDHYQILEIVGEGAYGIVCSAIHKPSQQKVAIKKIEPFERSMLCLRTLRELKLLKHFNHENIISILAIQRPINYESFNEIYLIQELMETDLHRVIRTQNLSDDHIQYFIYQTLRALKAMHSANVLHRDLKPSNLLLNSNCDLKICDFGLARSIASQEDNYGFMTEYVATRWYRAPEIMLTFQEYTTAIDVWSVGCILAEMLSGRPLFPGRDYHNQLWLIMEVLGTPNMEDYYNIKSKRAREYIRSLPFCKKIPFSELFANTNNNTSTSTSNTGGRTNINPLALDLLEKLLIFNPAKRITVEDALKHPYLQLYHDPNDEPISDKIPEDFFDFDKMKDQLTIEDLKKLLYEEIMKPL

SEQ ID NO: 6591 - protein, 467 aa, Listeria monocytogenes str. 4b H7858
MTSVMWFRRDLRVNDNKALYHACKEDDLLLLFQVNPAQFITGSPSHQAFFASVAHFKQEIDKTAHLQIMFGEPIECFQQLKDSLPSWDKVYFNRDETGYGAKRDEAAQAFFDEQKIEVQAFHDSYLHSAEEVKKSPTEYYKIFTPYYKKWREEIKETPFKVTLKHENIRKESLFLKYEEQFAEMTSDLPILDIGERAANTRLANFIKHDVADYDKARDFPELDKTSHLSRYLRTGEISIRTIWQTLQETEATEGRATFEKELCWRDFYNMIYVSFPNQKNEPIQENYRFIEWENNREYFKAWQEGKTGFPLVDAAMRQLKETGWMHNRLRMITASFLTKDLLIDWRFGEKYFQQMLIDYDPASNIGGWQWAASTGTDAVPYFRIFNPTTQSQKFDSTGKFIRKYVKELANLPDKYIHQPEKMSETEQKEHGLLLGKDYPFPIVDHKERRKLAIARYEFSKEHSRGNI

SEQ ID NO: 6592 - protein, 314 aa, Zea mays
ACLQAVIKRLMTDVPFGVLLSGGLDSSLVASVTKRHLVKTDAAGKFGTELHSFVVGLENRARDGTLTARTFQGSPDLKAAREVADYLGTTHHEFHFTDGIDAIEEVIYHDETYDVTTIRASTPMFLMARKIKSLGVKMVLSGEGSDELLGGYLYFHFAPNKEEFHRETCRKVKALHQYDCLRANKATSAWGLEVRVPFLDKEFINVAMGMDPEWKMYDKNLGRIEKWVMRKAFDDDEHPYLPKHILYRQKEQFSDGVGYNWIDGLKSFTEQQVTDEMMNNAAQMFPYNTPVNKEAYYYRMIFERLFPQDSARET

SEQ ID NO: 6593 - protein, 334 aa, Deinococcus radiodurans R1
MTQPDMAYPNPAGIKRVAVLTSGGDAPGMNAAIRAVVRTGAQQGIEVVGVRRGFSGLHRGEVQLLGPRDVANTIQRGGTILLTARSHTWRSPEGRAKGAAVLREWGVDGLVVIGGDGSFHGGYFLQEEHGIPVIGVPGTIDNDLYGTDHTIGYFTAVETALEAVDKLRDTGASHERIFVIEVMGRHAGHIALDVAVAGGAEEVFIPEDKKPIGDVVNIVKDSIAKGKRGSIIIVAEGYDGGAEAVAQAIHAGTGLETRVSILGHIQRGGTPVSSDRILASRLGEAAVYALMDGKKGVMVGRIGGGIAYTPLHETWEKRKDVSRDLYRCAKMLSI

SEQ ID NO: 6594 - protein, 270 aa, Moorella thermoacetica ATCC 39073
MPAPLQSLRQYLKVVDAVLEVADARLPVSSRYPDLEKLIGFRARVVVLTRADLADPAATACWLEKLRAGGTRAVAMNARTGSGDRLLYQYLKAIAKAKREARARRGLGEAPLRVMALGIPNVGKSSVLNRLAGRGAARTGNRPGITRGPQWIRIKDNLELLDTPGVLWPRWREPRTALWLGALGCAPEESVPVVGIACLVGEFLLREAPGTLAARYGIQEQGDATDILAAIGRARGFLLPGGVVDQEKTARALVNDFREGRLGRFTLERP

SEQ ID NO: 6595 - protein, 486 aa, Pseudomonas aeruginosa UCBPP-PA14
MIKHWINGREVESKDVFENYNPATGELIGEVASGGAAEIDAAVAAAREAFPKWANTPAKERARLMRRLGELIDRNVPHLAELETLDTGLPIHQTKNVLIPRASHNFEFFAEVCTRMNGHSYPVDDQMLNYTLYQPVGVCGLVSPWNVPFMTATWKTAPCLALGNTAVLKMSELSPLTANELGRLVHEAGIPPGVFNVVQGYGASAGDALVRHRDVRAVSFTGGTATGRRIMEAAGIKKYSMELGGKSPVLVFEDADLERALDAALFTIFSLNGERCTAGSRIFVQESVYPQFVAEFAARARRLIVGDPQDPKTQVGSMITQAHYDKVTGYIRIGLEEGATLVAGGLERPTGLPAHLSKGQFIQPTVFADVDNRMRIAQEEIFGPVVCLIPFKDEAEALRLANDVEYGLASYIWTQDIGKAHRLARGIEAGMVFINSQNVRDLRQPFGGVKASGTGREGGEYSFEVFAEIKNVCISMGSHHIPRWGV

SEQ ID NO: 6596 - protein, 498 aa, Thermoplasma volcanium GSS1
MINTENFGNIINGTEEMVGDESIVKSPVDGSPIASVYFADRDAVSKAIDSSYDSYYKVWSKFTLSERKKLLAKLADRIQEKSERYATLESLNTGKTLRQSMLMDIPLGIEHLRYFATETEFKMERQITHPEYPDSHGIVQYVPMGVVGAITPWNVPFLMAVWKAAPALLAGNTVVIKPSSFTPLTTIEMARDAISVGFPPGVLNVVNGRGETVGEELARNKKVRMLSFTGSTYTGKRITEITGIKKVTLELGGKSPNIVFDDADLERAALGVMFGIYLNSGQLCESGSRLLVQSSIKDKFLNLLKSKIEKMRPGNPMSMETDISAITTKNQRDKIEKMVNSGLKDGSVIFYQKSIDGSVPKGGLYFPPTILDKVSEDMEVAKEEIFGPVLSVMEFDDEADAIDKANMTDYGLAAGVWTQDSEKATRVASSIEAGTVWINEYHLLSAAAPRGGFKNSGVGRELGLDGIMEFTQTRHLFVSHGSTDQDTVAYGLVLADLS

SEQ ID NO: 6597 - protein, 514 aa, Triticum aestivum
  misc_feature (98)..(98): Xaa can be any naturally occurring amino acid
  misc_feature (127)..(127): Xaa can be any naturally occurring amino acid
  misc_feature (179)..(179): Xaa can be any naturally occurring amino acid
  misc_feature (197)..(197): Xaa can be any naturally occurring amino acid
  misc_feature (222)..(222): Xaa can be any naturally occurring amino acid
PPPPEPPSLVITDSHFLPLASHSSQQNPPHLFSTRDSETNWRRAERKRSHTPDLRFAEGGFQRQRGIRQPGSQGLSTTKVKGRVGKYELRRTIGEGTXVKVRNVINPETVDPVAIKIVGKEKLLKHXMVEQIKREIATMKLIKNPNVVCIHEVMGSKTKVYIVLDNRAGWNTVNSITSXSLFLDSCGNLMLSGFWAXARYLSSSRMTDYCTQLVALQFMLHXGILEVSDFGLSALSQQLKDDGLLHTTCGTPNYVAPEVLEDQGYDGAMADLWSCGVILFVLLAGYLPFEDSNLMALYKKISDAEFTFPPWTSFPAKRLLTRILDPNPMTRITVQEMLEDEWFKKGYKRAEFDEKYDTTLDDVDAVFNDSEEHHVTEKKEEEPVALNAFELISMSAGLNLGNLFDSEQEFKRETRFTSKSSPKEILRKIEEAAKPLGFDIHKKNYKLRLEKVKAGRKGKLNVATEILRVGPSLHMVEVRKAKGDTLEFHKFYKNLSNTLKDVVWKSDDLQIQPS

SEQ ID NO: 6598 - protein, 123 aa, Triticum aestivum
  misc_feature (5)..(5): Xaa can be any naturally occurring amino acid
THLIXDMLSICREVFKGGVHYAWASVPTYPSGVIGFLLCAKDGPPVDFLTPVNPIEKIEGATKDGREMRFYNSEIHRAAFILPTFVKRELEAYNTSTEKEKPEKPAAKPVKMKVMRDSAITAS

SEQ ID NO: 6599 - protein, 133 aa, Zea mays
MSYYGDRRAESSIVEAFTLSPLPYPVILVLLMVTLLLGASWFFTYDDFIEEASQQLSWALLGVPIALVLLIRWISSVDSFEGYLGFYPTESRWKGRYERGPAEGSSPWGVALLVLLLLVLASFHSTIHDMWGP

SEQ ID NO: 6600 - protein, 273 aa, Ralstonia eutropha JMP134
MEHCMTNMTKTADRKYWRTAIGDPTPHEGTMVRGYDVLTDLVGKIDFGAMVYLLYKGELPKGNESKIINAMFISVADHGISPSSTVTRFVQAAGVPIQCAVAAGAMMFGDVHGGAGEEFSRYIQELVSLAASSGRTYEDVATEHVANHKRLDGFGHPQHPEGDPRGKVLFALAEEYGIAGDHVRMTRELEKALIKKKNRPLLANIDAAVGAIISDMGFDWRLARAFIVVPRTAGLFAHAFEESVREPGWRQINLDQVEYDGPARRKNENPSAI

SEQ ID NO: 6601 - protein, 200 aa, Cichorium intybus x Cichorium endivia
MATIGHNNLNAKLVLLGDMGAGKSSLVLRFVKGQFLEFQESTIGAAFFSQTLVVNDATVKFEIWDTAGQERYHSLAPMYYRGAAAAIIVYDITSADSFTRAKKWVQELQKQGNPNMVMALAGNKADLEDKRKVTVEEARVYAEENGLFFMETSAKTAANVNDVFHEIAKRLPRAQPTQNPAGMVLVDRPAEGARAASCCS

SEQ ID NO: 6602 - protein, 1071 aa, Arabidopsis thaliana
MAEKVSEDVMLLHGDLDLKIVKARRLPNMDMFSEHLRRLFTACNACARPTDTDDVDPRDKGEFGDKNIRSHRKVITSDPYVTVVVPQATLARTRVLKNSQEPLWDEKFNISIAHPFAYLEFQVKDDDVFGAQIIGTAKIPVRDIASGERISGWFPVLGASGKPPKAETAIFIDMKFTPFDQIHSYRCGIAGDPERRGVRRTYFPVRKGSQVRLYQDAHVMDGTLPAIGLDNGKVYEHGKCWEDICYAISEAHHMIYIVGWSIFHKIKLVRETKVPRDKDMTLGELLKYKSQEGVRVLLLVWDDKTSHDKFGIKTPGVMGTHDEETRKFFKHSSVICVLSPRYASSKLGLFKQQASPSSSIYIMTVVGTLFTHHQKCVLVDTQAVGNNRKVTAFIGGLDLCDGRYDTPEHRILHDLDTVFKDDFHNPTFPAGTKAPRQPWHDLHCRIDGPAAYDVLINFEQRWRKATRWKEFSLRLKGKTHWQDDALIRIGRISWILSPVFKFLKDGTSIIPEDDPCVWVSKEDDPENWHVQIFRSIDSGSVKGFPKYEDEAEAQHLECAKRLVVDKSIQTAYIQTIRSAQHFIYIENQYFLGSSYAWPSYRDAGADNLIPMELALKIVSKIRAKERFAVYVVIPLWPEGDPKSGPVQEILYWQSQTMQMMYDVIAKELKAVQSDAHPLDYLNFYCLGKREQLPDDMPATNGSVVSDSYNFQRFMIYVHAKGMIVDDEYVLMGSANINQRSMAGTKDTEIAMGAYQPNHTWAHKGRHPRGQVYGYRMSLWAEHLGKTGDEFVEPSDLECLKKVNTISEENWKRFIDPKFSELQGHLIKYPLQVDVDGKVSPLPDYETFPDVGGKIIGAHSMALPDTLTTQGGKERLILRFIALTKTLILSVSIATSVSSAMADSPQRRRDSRSPSPRKERARSRSRSRSRSRSRPRLRSRSRSLPRPVSPSRSRGRSRSRSRGRSEVENPGTTLYVTGLSTRVTDKDLEAHFAKEGKIEKAVAVEGGTMIVMITETVGHQDATIHLVMKEGLEEIGLTLLMEEAQREDQREGLRGQREGMNPVARDDLFSSF

SEQ ID NO: 6603 - protein, 498 aa, Anabaena variabilis ATCC 29413
MKTPLNCQNYINGQWLNAATETTLNSHNPANKSEIVATFPRSQADDTDRAVTAARQAYGSWRKVPAPARAEYIFRVGELLLQHKEELAQLISREMGKPITEARGDVQEGVDCAFYSAGEGRRLFGQTTPSEMPNKFAMTVRMPIGVCALITPWNFPVAIPCWKAMPALVCGNTVILKPAEDTPACATKLIEIFAAAGLPPGVINLVHGVGEEAGKALVEHPNIDLVSFTGSSATGAYVGETCGRTHKRVCLEMGGKNAQVVMEDADLELALDGALWGAFGTTGQRCTATSRLILHRDIKEKFTTMLRERTSQLRLGAGTEPETDIGPIINNRQLQRVHEYMNIAREEGAKILIGGEIVTEGQLKQGYFFQPTILDNVTPQMRVAREEIFGPVVALIEVSTFEEAIAILNDTKYGLSSSVYTRDINRAFVAMRDIEVGITYINGPTIGAEVHLPFGGVKQTGNGHREAGTTALDVFTEWKSVYVDFSGSLQRAQIDNRS

SEQ ID NO: 6604 - protein, 200 aa, Cichorium intybus x Cichorium endivia
MATIGHNNLNAKLVLLGDMGAGKSSLVLLFVKGQFLEFQESTIGAAFFSQTLAVNDATVKFEIWDTAGQERYHSLAPMYYRGAAAAIIVYDITSADSFTRAKKWVQELQKQGNPNMVMALAGNKADLEDKRKVTAEEARVYAEENGLFFMETSAKTAANVNDVFHEIAKRLPRAQPTQNPAGMVLVDRPAEGARAASCCS

SEQ ID NO: 6605 - protein, 272 aa, Lactococcus lactis subsp. lactis Il1403
MKLNNQIEIPELGLGVFQIPNDETADVVKNAIVNGYRLIDTAKIYENEEGTGQGIKEGLAMTGLSRDDLFITSKLWGDNHSYEETVQNFEKSLKKLDLDYLDLYLIHWPGTHYAYKEAWNAMEDLYKAGKIKAIGVSNFQKSHLEELLSYAKITPVLNQIELHPKLSQEELRNFLELHDIKVQAWSPLMQGQLLDNEVLKKIADKHGKSVAQIILRWDIQQDILVNVKSIKSERMIANRQIFDFSLDSEDMKAINSLNEELRVGPDPEHFNF

SEQ ID NO: 6606 - protein, 115 aa, Corylus avellana
MGSLKLVCAVLLCMMVAAPVARASLTCPQIKGNLTPCVLYLKNGGVLPPSCCKGVRAVNDASRTTSDRQSACNCLKDTAKGIAGLNPNLAAGLPGKCGVNIPYKISPSTNCNNVK

SEQ ID NO: 6607 - protein, 162 aa, Zea mays
QPGKRSEDQDPSVVVVAAIVVVAAIVVVATPVAAASVRLLPLQEALGGLHNLFGGPSVVRVSQCDGPHCFAVTRAAAGPSCADVLRAMQHEPEVMYEVLKQRTDGATAAALARAFGAMPYLVFDPEAAVMSGGESSDSERSAAGAAEEEDDEEWEFMRGLTV

SEQ ID NO: 6608 - protein, 158 aa, Shigella flexneri 2a str. 301
MKLISNDLRDGDKLPHRHVFNGMGYDGDNISPHLAWDDVPAGTKSFVVTCYDPDAPTGSGWWHWVVVNLPADTRVLPQGFGSGLVAMPDGVLQTRTDFGKTGYDGAAPPKGETHRYIFTVHALDVERIDVDEGASGAMVGFNVHFHSLASASITAMFS

SEQ ID NO: 6609 - protein, 212 aa, Shigella boydii
LYICLRPVRYYQGTPSPVKHPELTDMVIFRENSEDIYAGIEWKADSADAEKVIKFLREEMGVKKIRFPEHCGIGIKPCSEEGTKRLVRAAIEYAIANDRDSVTLVHKGNIMKFTEGAFKDWGYQLAREEFGGELIDGGPWLKVKNPNTGKEIVIKDVIADAFLQQILLRPAEYDVIACMNLNGDYISDALAAQVGGIGIAPGANIGDECALF

SEQ ID NO: 6610 - protein, 202 aa, Shigella boydii
RPVRYYQGTPSPVKHPELTDMVIFRENSEDIYAGIEWKADSADAEKVIKFLREEMGVKKIRFPEHCGIGIKPCSEEGTKRLVRAAIEYAIANDRDSVTLVHKGNIMKFTEGAFKDWGYQLAREEFGGELIDGGPWLKVKNPNTGKEIVIKDVIADAFLQQILLRPAEYDVIACMNLNGDYISDALAAQVGGIGIAPGANIGD

SEQ ID NO: 6611 - protein, 1342 aa, Shigella flexneri 2a str. 301
MSQEYTEDKEVTLTKLSSGRRLLEALLILIVLFAVWLMAALLSFNPSDPSWSQTAWHEPIHNLGGMPGAWLADTLFFIFGVMAYTIPVIIVGGCWFAWRHQSSDEYIDYFAVSLRIIGVLALILTSCGLAAINADDIWYFASGGVIGSLLSTTLQPLLHSSGGTIALLCVWAAGLTLFTGWSWVTIAEKLGGWILNILTFASNRTRRDDTWVDEDEYEDDEEYEDENHGKQHESRRARILRGALARRKRLAEKFINPMGRQTDAALFSGKRMDDDEEITYTARGVAADPDDVLFSGNRATQPEYDEYDPLLNSAPITEPVAVAAAATTATQSWAAPVEPVTQTPPVASVDVPPSQPTVAWQPVPGPQTGEPVIAPAPEGYPQQSQYAQPAVQYNEPLQQPVQPQQPYYAPAAEQPAQQPYYAPAPEQPVAGNAWQAEEQQSTFAPQSTYQTEQTYQQPAAQEPLYQQPQPVEQQPVVEPEPVVEETKPARPPLYYFEEVEEKRAREREQLAAWYQPIPEPVKEPEPIKSSLKAPSVAAVPPVEAAAAVSPLASGVKKATLATGAAATVAAPVFSLANSGGPRPQVKEGIGPQLPRPKRIRVPTRRELASYGIKLPSQRAAEEKAREAQRNQYDSGDQYNDDEIDAMQQDELARQFAQTQQQRYGEQYQHDVPVNAEDADAAAEAELARQFAQTQQQRYSGEQPAGANPFSLDDFEFSPMKALLDDGPHEPLFTPIVEPVQQPQQPVAPQQQYQQPQQPVAPQQQYQQPQQQVAPQPQYQQPQQPVAPQQQYQQPQQPVAPQPQYQQPQQPVAPQPQYQQPQQPVAPQPQDTLLHPLLMRNGDSRPLHKPTTPLPSLDLLTPPPSEVEPVDTFALEQMARLVEARLADFRIKADVVNYSPGPVITRFELNLAPGVKAARISNLSRDLARSLSTVAVRVVEVIPGKPYVGLELPNKKRQTVYLREVLDNAKFRDNPSPLTVVLGKDIAGEPVVADLAKMPHLLVAGTTGSGKSVGVNAMILSMLYKAQPEDVRFIMIDPKMLELSVYEGIPHLLTEVVTDMKDAANALRWCVNEMERRYKLMSALGVRNLAGYNEKIAEADRMMRPIPDPYWKPGDSMDAQHPVLKKEPYIVVLVDEFADLMMTVGKKVEELIARLAQKARAAGIHLVLATQRPSVDVITGLIKANIPTRIAFTVSSKIDSRTILDQAGAESLLGMGDMLYSGPNSTLPVRVHGAFVRDQEVHAVVQDWKARGRPQYVDGITSDSESEGGAGGFDGAEELDPLFDQAVQFVTEKRKASISGVQRQFRIGYNRAARIIEQMEAQGIVSEQGHNGNREVLAPPPFD

SEQ ID NO: 6612 - protein, 287 aa, Erwinia carotovora subsp. atroseptica SCRI1043
MSQKEIWYETLHANFGQYFSVDRVLYHEKTDHQDLIIFENDALGRVMALDGVVQTTERDEFIYHEMLTHVPLLSHGNAKRVLIIGGGDGGMLREVSRHHGVEQITMVEIDAGVVEFCRQYLPNHSAGSYDDPRFNLVIDDGVNFVRQCSEKFDVIISDCTDPIGPGESLFTSDFYQGCARSLNEGGIFVAQNGVCFLQQDEAIGSHKKLSHYFNDVSFYQAAIPTYYGGIMTFAWASNNPALRQMDIVTLRQHFAQSGITCRYYTPDVHIGSFALPQYLLSALQNAQ

SEQ ID NO: 6613 - protein, 279 aa, Brassica napus
MTIINLDTYPRNKPGGAIAIREVWAENLESEFELISGIIDDYPFVSMDTEFPGVIFKSDLRRGNPADLYSLLKSNVDALSLIQVGLTLSDADGNLPDLGAGRRFIWEFNFKDFDVARDAHAPDSIELLRRQGIDFERNCRDGVDSERFAELMMSSGLVCNEEVSWVTFHSAYDFGYLMKILTRRELPCALGEFQRMMKALFGERVYDMKHMMRFCERKLYGGLDRVARTLEVSREVGKCHQAGSDSLLTWHAFQRTRASDFLQDGPEKHAGVLYGLEVF

SEQ ID NO: 6614 - protein, 214 aa, Shigella boydii
LYICLRPVRYYQGTPSPVKHPELTDMVIFRENSEDIYAGIEWKADSADAEKVIKFLREEMGVKKIRFPEHCGIGIKPCSEEGTKRLVRAAIEYAIANDRDSVTLVHKGNIMKFTEGAFKDWGYQLAREEFGGELIDGGPWLKVKNPNTGKEIVIKDVIADAFLQQILLRPAEYDVIACMNLNGDYISDALAAQVGGIGIAPGANIGDECALFEA

SEQ ID NO: 6615 - protein, 221 aa, Zea mays
MATTKREKVILVLLFSLTMLPLSTLGTRSGPAAVQHHGHGGTTKHPSPPSPATAALVRSTCNSTAYYDVCVSALGADPSSATADVRGLSTIAVSAAAANASGGAATAAALANGTGTASSSNAQAAPATASAAAALLRTCAAKYGQARDALAAAGDSIAQQDYDVASVHVSAAAEYPQVCRVLFRRQKPGQYPAELAAREETLRQLCSVALDIIGLASTNTN

SEQ ID NO: 6616 - protein, 190 aa, Brassica napus
MAFAGTTQKCMACDKTVYLVDKLTADNRVYHKACFRCHHCKGTLKLSNYNSFEGVLYCRPHFDQNFKRTGSLEKSFEGTPKIGKPDRPLEGERPAGTKVSNMSGGTREKCVGCDKTVYPIEKVSVNGTLYHRSCFKCTHGGCTISPSNYIAHEGKLYCKHHHIQLIKEKGNLSQLEGGGENAAKDKVVAA

SEQ ID NO: 6617 - protein, 416 aa, Salmonella enterica subsp. enterica serovar Typhi Ty2
MESKVVVPVEGKKITLQNGKLNVPENPIIPFIEGDGIGVDVTPAMLKVVDAAVEKAYKGERKISWMEIYTGEKSTQVYGQDVWLPAETLDLIRDYRVAIKGPLTTPVGGGIRSLNVALRQELDLYVCLRPVRYYQGTPSPVKHPELTDMVIFRENSEDIYAGIEWKADSADAEKVIKFLREEMGVKKIRFPEHCGIGIKPCSEEGTKRLVRAAIEYAITNDRDSVTLVHKGNIMKFTEGAFKDWGYQLARDEFGGELIDGGPWLKIKNPNTGKEIVVKDVIADAFLQQILLRPAEYDVIACMNLNGDYISDALAAQVGGIGIAPGANIGDECALFEATHGTAPKYAGQDKVNPGSIILSAEMMLRHMQWFEAADLIVKGMEGAIAAKTVTYDFERLMDGAKLLKCSEFGDAIIANM

SEQ ID NO: 6618 - protein, 489 aa, Bacillus sp. KSM-K16
MAKFTQTVEVFQNYINGEWKDSTSGQVMDSVNPANKTETIGQLQSSTTEEVDEAIQSATEAKIGWRKTGAYQRGQLLASVANELEKNVDDIAETLTKEMGKTLPEAIGETQRGIAILRYYAAEGMRKEGEVIPASDKEALMFTKRTPLGVVGIITPWNFPVAIPIWKIAPALVYGNTVVFKPASESAVTAAKVVKCFEHAGLPKGVLNFITGKGSIVGEALINSKKLNGITFTGSESTGKRVAKAASANGIKYQLEMGGKNPVIVLDDADVQSAVQGILSGAFKSTGQKCTATSRVIVQEGIYEELKAALLAETKKITIGDGMNSSIWMGPCASESQLNTVLEYIQIGQEEGATLLYGGQRLTENEYAHGFYVEPAIFEQVTSTMRIAQEEIFGPVIALLKVKTVEEAIDIANDTEFGLSASLYTSNIGSALSFIDDIEAGLVRVNSESAGVELQAPFGGMKASSTGTREQGEAAKEFYTAIKTVLIRS

SEQ ID NO: 6619 - protein, 261 aa, Zea mays
  misc_feature (255)..(255): Xaa can be any naturally occurring amino acid
MSCSIAAVVVSLFLSLNQIISCRAAGADDDGAARSLASCLISHGVTNFTLPTSRSYAGVLNSSISNLRFALPDVGKPAAVVLPGSRQDLQRSVLCARSSSLAVRVRSGGHSYEGLSYTSENRVPFVVIDVANLNRVRVDRGSATAWAEAGATLGELYHAVGRSGRSLAFSAGSCSTIGLGGTVSGGGFGLLSRRFGLAADNVLDAVLVDADGRALDRAAMGRDVFWAIRGGGGGSWGVMYAWKLRLVPVPRNVTXALGGAD

SEQ ID NO: 6620 - protein, 192 aa, Triticum aestivum
  misc_feature (132)..(132): Xaa can be any naturally occurring amino acid
ELHSFVVGLEGSPDLKAAREVADYLGTIHHEFHFTVQDGIDAIEEVIYHDETYDVTTIRASTPMFLMARKIKSLGVKMVLSGEGSDELLGGYLYFHFAPNKEECHRETCRKVKALHQYDCLRANKATSAWGXEVRVPFSTRSHNVRWHGPQWKSPQDLGRSRMGQRKGPHDSTYCQDISTGEEIMTGKWLPI

SEQ ID NO: 6621 - protein, 358 aa, Triticum aestivum
  misc_feature (235)..(235): Xaa can be any naturally occurring amino acid
  misc_feature (254)..(254): Xaa can be any naturally occurring amino acid
  misc_feature (268)..(268): Xaa can be any naturally occurring amino acid
  misc_feature (315)..(315): Xaa can be any naturally occurring amino acid
  misc_feature (321)..(321): Xaa can be any naturally occurring amino acid
MRRRLSSNGHMLRAGCGVAAVFLMWMQFRSWLVAKNTLKIMPFKLPPLGPYDVRVRMKAVGICGSDVHYLKEMRIAHFVVKEPMVIGHECAGIIEEVGDGVKHLAVGDRVALEPGISCWRCRHCRGGRYNLCDDMKFFATPPYHGSLADQIVHPGDLCFKLPDNVSLEEGAMCEPLSVGVHACRRADVGAEKSVLIMGAGPIGLVTMLSARAFGAPRIVIADVDDHRLSVAKSLXGADAAVKVSGNAEDLAGEXERIQAAMGGDIDVXWDCAGSSKTMSTALEATRPGRRVCLVGMGHNEMTVPLTSAGSRQVDXVGIFRXKDTWPLCPKFLRSGITDLKPSSKVRFPREWRASPTIR

SEQ ID NO: 6622 - protein, 428 aa, Zea mays
MGRGLGAAPVSPRLASLGAAALALLVAAALPSPAAGVNATAVLSAFPNFADFARLLASTPVASELAGRSSLTLLAVPNANLPQSPSAFVAGAAAGADIADVLRYHVLLEYLSPADLARLPPSGKLVTTLFQTTGRAPSDFGAVNLTVGPNSTVVVRSPAPSPGSSATVLGAVTAVPYNLSVLAVGGLIVPSGFDLAASESRPPPPVNITRVLTDARGFYVAASMLQASGVASEFEADERGAGITVFVPTDDAFAGLPTTDRLQSLPAERKAVVLRFHVLHSYYPLGSLESIVNPVQPTLATEHTEAGHFTLNITRVNGSIAIDTGIVQASITRTVFDQNPVAVFAVSKVLLPKEMFSRGDSGSTAMVPPSVAMAPGDAGTEQTPQTRLSSPPDLHGEDSESSAALATAKGTSWWCVGLMYLHLLLSLV

SEQ ID NO: 6623 - protein, 143 aa, Glycine max
  misc_feature (23)..(23): Xaa can be any naturally occurring amino acid
  misc_feature (25)..(25): Xaa can be any naturally occurring amino acid
ALNLALGSLPQFTICNRAGAGGXVXFTVPLFTAGLPTRKTNNDITNIVSNGGRVRCMQVWAPVGKKKHETLSYLPDLDDAQLAKEVEYLPRKGWIPCLESEREHGLVYREHIRLPGYYDGRYWTMWKLLMIGCTDASQVLKEL

SEQ ID NO: 6624 - protein, 48 aa, Mirabilis jalapa
EDRDGDWMLVGDVPWEMFVNSCKRLRIMKGSEAIGLAPRAVEKCKSRS

SEQ ID NO: 6625 - protein, 356 aa, uncultured crenarchaeote
MSDAHSFTGKKIEPPLISKNMTISQLVDFFGSTGYNARRLFEAANIMKQMIDAGSTICLTLAGAMTPIGMGNTIKTLIENGYIDWIVTTGANVYHDLHFAYDLPVRQGHFQVDDDVLFSKQIVRIYDVYIKEIGTLQAQDLIVQREIKKIEKSYSKSYSTADMSHGLGKATYENSTNPEKSFLASAYKNDVPVFIPAISDSSIGLNMLPLLFEDMTRFPNVIMDIAESTAILWKSKVSGGIELGGGVPKNFFQQTGPALYQILKLKDGGHDYVIQITDARPDTGGLSGATIQEGKSWGKIKTSHKNNVIVYGDSSICFPIIGAYVLSECKKRSSKRLYSKKNAWVEEMKKEYLKNK

SEQ ID NO: 6626 - protein, 179 aa, Daucus carota
MERADQQARGFQGYRKIHQQQQLPASGTASTGTDNNPAAGDQDCLVREQDRFMPIANVIRLMRKSIPSHAKISDDAKELVQESVSEFISFVTSEANYRCQKEQRKTITAEDVLWAMSSLGFDDYVEPLTFYLDRFREADGGERTALRGEPLVKKSGEHGHRGFLQHLHHGTIWGRIMRF

SEQ ID NO: 6627 - protein, 393 aa, Mycobacterium tuberculosis H37Rv
MTGPLAAARSVAATKSMTAPTVDERPDIKKGLAGVVVDTTAISKVVPQTNSLTYRGYPVQDLAARCSFEQVAFLLWRGELPTDAELALFSQRERASRRVDRSMLSLLAKLPDNCHPMDVVRTAISYLGAEDPDEDDAAANRAKAMRMMAVLPTIVAIDMRRRRGLPPIAPHSGLGYAQNFLHMCFGEVPETAVVSAFEQSMILYAEHGFNASTFAARVVTSTQSDIYSAVTGAIGALKGRLHGGANEAVMHDMIEIGDPANAREWLRAKLARKEKIMGFGHRVYRHGDSRVPTMKRALERVGTVRDGQRWLDIYQVLAAEMASATGILPNLDFPTGPAYYLMGFDIASFTPIFVMSRITGWTAHIMEQATANALIRPLSAYCGHEQRVLPGTF

SEQ ID NO: 6628 - protein, 467 aa, Pseudomonas aeruginosa PAO1
MGLNADWMQRDLNVLWHPCTQMKDHERLPVIPIRRGEGVWLEDFEGKRYIDAVSSWWVNVFGHANPRINQRIKDQVDQLEHVILAGFSHQPVIELSERLVKITPPGLDRVFYADSGSAGIEVALKMSYHFWLNSGRPRKKRFVTLTNSYHGETIAAMSVGDVALFTETYKSLLLDTIKVPSPDCFLRPDGMCWEEHSRNMFAHMERTLAEGHDEIAAVIVEPLIQGAGGMRMYHPVYLKLLREACDRYGVHLIHDEIAVGFGRTGTMFACEQAGIAPDFLCLSKALTGGYLPMSAVLTSETIYRGFYDDYQTLRAFLHSHTYTGNPLACAAALATLDIFEEDKVIEANRALSTHMARATAHLADHPHVAEVRQTGMVLAIEMVQDKASRTPYPWQERRGLKVFQHGLERGALLRPLGSVVYFLPPYVITPEQIDFLAEVASEGIDIATRDAVSVAVSDFHPDHRDPG

SEQ ID NO: 6629 - protein, 496 aa, Pseudomonas aeruginosa PAO1
MSLRWLRAAAFLMLGVFSAVALGKDKQPTAIVVGAGLAGLSAAYELQKDGWQVTVLEARPQVGGRSGLATSEWVGNQKVQPTLNAYLDTFKLKPVPAPDFVRTPSYLIDGLYYSSSDLALKQPNVAADLKRFESTLDDLSASISDPLNPASSNTLFALDQMNAARWLDKLNLSPTARLLVNQRIRSRYDEPSRLSLLYLAQQGRAYRGVDDRDLRAARLPGGSQVLAEAFVKQIKTIKTKSKVSSIVQAKDGVAVKAGSETYKADYVVLAVPLKALGQIQMTPSLSGTQMSALKGTNYGWRDQILLKFKRPVWDDKSRLSGEIFSDQGLGMIWVEPALKGGANVLINLSGDNARVLQAFGDRQMVDQVLIRMNKFYPKMRGAFAGYEIRRYSADPGTGGSYLAYGPGQVTRFWRIWEQPLSRVAFAGEHTDALYPGTIEGALRSGKRAASQVRDLYAGKTPVIEGAPMVAKAEKVAAPTTGGEKKNPFAWFTRLFD

SEQ ID NO: 6630 - protein, 295 aa, Bordetella bronchiseptica RB50
MTARDPLAAIRARLAEVTASWQAAESLARIRASFADYLAEVGPRGAAMARPRPQPLAPALAGAWIGQGARRALYCHGGGFQIGGIASHASLIARLAEAGQARILAVEYRLAPEHRYPAAIDDAFAAYQWLLANGGAPAAIIGDSAGGALALQTAQRARDAGLPLPRSLVLLSPWLDLSMQGRSYVELAEQDIFSKPAQLRAMARSYLGRLGPPPDAPPASPLWDDLSGLPPIVVHAGAHDITLDDSHTLAARVRAAGGQVQLQVFPGMCHHFQIYEALAEARESIDALGRHLRQD

SEQ ID NO: 6631 - protein, 452 aa, Fusobacterium nucleatum subsp. nucleatum ATCC 25586
MRGVCIMINNLSELQKKDLKYVFHPCAQMKDFEENPPLVIKKGDGLYLIDENGNKYMDCISSWWVNLFGHCNKRINRIITEQVNNLEHVIFANFTHEPAAELCEELTKVLPKGINKFLFSDNGSSCIEMALKLSFQYHLQTGNPQKTKFISLENAYHGETIGALGVGDVDIFTETYRPLIKEGRKVKVPYIDSKLSNDEFVKLEDECIKELEDLIIKNHNEIACMIVEPMVQGAAGIKIYSAKFLKAARDLTKKYNIHLIDDEIAMGFGRTGKMFACEHAGIEPDMMCIAKGLSSGYYPIAMLCITTDIFNAFYADYKEGKSFLHSHTYSGNPLGCRIALEVLRIFKEENILKTINEKGTYLRNKMKEIFEDKSYIKDIRNIGLIGAIELKDNLLPNVRIGKEIYNFALKKGAFLRPIGNSVYFMPPYVITYEEIDKMLHVCKESIEELLKI

SEQ ID NO: 6632 - protein, 447 aa, Ralstonia eutropha JMP134
MTITSPKLPQAAELDLKAHWMPFSANRNFHDDPRMVVAAKGRWLIDDQGRKVFDGLSGLWTCGAGHARAEIQAAVASQLGTLDYSPAFQFGHPQSFMLAERIAELFPGDLNHVFYTGSGSECADTAVKMARAYWRIKGQPAKTKLIGRARGYHGVNIAGTSLGGIGGNRKMFGQLMDADHLPHTLQADCAFTKGQAETGGVELANELLKLIELHDASNIAAVIVEPMSGSAGVIVPPKGYLQRLREICTQHGILLIFDEVITGFGRLGKASGAEYFGVTPDIANVAKQLTNGAIPMGAVIASSEIYNTFMAQPTSGHAVEFGHGYTYSGHPVACAAGLATLDLLARENLIQQAADLAPHFEQAIHGIRGAKHVVDIRNCGLAGAIQMAPRDGDATIRPFEAGLALWKKGFYVRFGGDTLQFGPAFNTTISELDTMFDSVGAVIETLA

SEQ ID NO: 6633 - protein, 351 aa, Oceanobacillus iheyensis HTE831
MKAAVWYGKHDIRVENKEEPIIKPGKVKIKVAWTGICGSDLHAYHGAEGVVQVGEPHPVTGEMAPLTLGHEFSGVIHEIGEGVSGLSVGDRVAIEPAIKCGKCENCVRGNYNLCEHNGFVGLQSDGAFAEYAIVDPHMVHKLPDNISFEEATAIEPTAVSFHALKLSNMKAGDTVAVFGVGPIGLTAILCAKAAGASRIYAIDVSNERLEMAQKLGATTVINAIEENAAEKIYAETGSGVTIAFDCAGAEATVNSAIDSLAKGGQLVIVSIIPEPIKVNLLQANLKEINILATIGYRDVYKDVIAMVESGQLDLKPIITKKIGLDDIIEEGFHALTNDKSQAKILVSPTGV

SEQ ID NO: 6634 - protein, 495 aa, Staphylococcus aureus subsp. aureus COL
MAVNVRDYIAENYGLFINGEFVKGSSDETIEVTNPATGETLSHITRAKDKDVDHAVKVAQEAFESWSLTSKSERAQMLRDIGDKLMAQKDKIAMIETLNNGKPIRETTAIDIPFAARHFHYFASVIETEEGTVNDIDKDTMSIVRHEPIGVVGAVVAWNFPMLLAAWKIAPAIAAGNTIVIQPSSSTPLSLLEVAKIFQEVLPKGVVNILTGKGSESGNAIFNHDGVDKLSFTGSTDVGYQVAEAAAKHLVPATLELGGKSANIILDDANLDLAVEGIQLGILFNQGEVCSAGSRLLVHEKIYDQLVPRLQEAFSNIKVGNPQDEATQMGSQTGKDQLDKIQSYIDAAKESDAQILAGGHRLTENGLDKGFFFEPTLIAVPDNHHKLAQEEIFGPVLTVIKVKDDQEAIDIANDSEYGLAGGVFSQNITRALNIAKAVRTGRIWINTYNQVPEGAPFGGYKKSGIGRETYKGALSNYQQVKNIYIDTSNALKGLY

SEQ ID NO: 6635 - protein, 282 aa, Mycobacterium leprae TN
MMPSTPRTSIPSITLNDENTMPLLGLGVAELSEDETERAVLAALEIGCRLIDTAAAYGNEAAVSRAIAASGIPRAQLFVTTKLATPDQGFTKSQDACNASLDRLGMDYVDLYLIHWPAPPVGQYVDAWGGMIQSRGEGHARSIGVCNFTEEHLSAIIDLTFVTPAVNQIELHPLLNQDEMRKSNAQHNVITQSYTPLVLGRLMDNSTLTAIAAEYGKTPAQVLLRWNLQLGNAVVFRSAKAEHIASNFDVFDFELAVNHMDAMNELHDGTRLRPDPETYAGS

SEQ ID NO: 6636 - protein, 429 aa, Vibrio vulnificus CMCP6
MADKKATLHVEGKAPIELPIMEGSLGTPVIDVRKLGANGYFTFDPGFLATASCESQITYIDGGKGILLHRGYPIDQLANNADYLEVCYILLYGEAPTREQYEKFKTTVTRHTMVHEQIASFFHGFRRDAHPMAVMCGVVGALAAFYHDSLDINNDLHREITAYRLLSKMPTLAAMCYKYSTGQPFIYPRNDLSYAENFLHMMFATPCEEYEVNPVVARAMDKIFTLHADHEQNASTSTVRLAGSSGANPFACIAAGIASLWGPAHGGANEACLKMLEEIGSVDNIPEYVDRAKDKDDPFRLMGFGHRVYKNYDPRATVMRETCHEVLKELNIQDPLLDVAMELERIALSDEYFVSKKLYPNVDFYSGIILKAIGIPVSMFTVIFAISRTIGWIAHWNEMHSDPLNRIGRPRQLYTGEVQRDFQPMHERE

SEQ ID NO: 6637 - protein, 204 aa, Shigella boydii
LYICLRPVRYYQGTPSPVKHPELTDMVIFRENSEDIYAGIEWKADSADAEKVIKFLREEMGVKKIRFPEHCGIGIKPCSEEGTKRLVRAAIEYAIANDRDSVTLVHKGNIMKFTEGAFKDWGYQLAREEFGGELIDGGPWLKVKNPNTGKEIVIKDVIADAFLQQILLRPAEYDVIACMNLNGDYISDALAAQVGGIGIAPGAN

SEQ ID NO: 6638 - protein, 215 aa, Shigella boydii
DLYICLRPVRYYQGTPSPVKHPELTDMVIFRENSEDIYAGIEWKADSADAEKVIKFLREEMGVKKIRFPEHCGIGIKPCSEEGTKRLVRAAIEYAIANDRDSVTLVHKGNIMKFTEGAFKDWGYQLAREEFGGELIDGGPWLKVKNPNTGKEIVIKDVIADAFLQQILLRPAEYDVIACMNLNGDYISDALAAQVGGIGIAPGANIGDECALFEA

SEQ ID NO: 6639 - protein, 219 aa, Ustilago maydis 521
MRKFKLVFLGEQSVGKTSLITRFMYDTFDNTYQATIGIDFLSKTMYLEDRTVRLQLWDTAGQERFRSLIPSYIRDSSVAVVVYDITNRASFQNTSKWVDDVRAERGNDVIIVLVGNKTDLSDKRQVTTEEAEKKAQEFNVMFIETSAKAGHNVKVLFKKIAQALPGMDKDADAATGGAAANKSEYRSQAWHLHYASRMTDLLVCCASAFTPIALEQIST

SEQ ID NO: 6640 - protein, 209 aa, Shigella sonnei
RPVRYYQGTPSPVKHPELTDMVIFRENSEDIYAGIEWKADSADAEKVIKFLREEMGVKKIRFPEHCGIGIKPCSEEGTKRLVRAAIEYAIANDRDSVTLVHKGNIMKFTEGAFKDWGYQLAREEFGGELIDGGPWLKVKNPNTGKEIVIKDVIADAFLQQILLRPAEYDVIACMNLNGDYISDALAAQVGGIGIAPGANIGDECALFEA

SEQ ID NO: 6641 - protein, 212 aa, Oryza sativa (japonica cultivar-group)
MAEEEDLADMPRVVGVLAALLERVTERNDAAAAELELAVAGAPAASAFRATTKPDITVRAYMARIARFAGCSPACYVVAYIYLDRLLRRRRRACAFSVDSYSVHRLLITAVLAAVKFMDDICYNNAYFAKVGGVSLPEMNYLEVDFLFGVGFDLNVSPETFGHYCAVLQSEMLCLELEPPPSPSPAPAARLHCFLSEDDTSSSGSTQHQLAA

SEQ ID NO: 6642 - protein, 298 aa, Zea mays
MEAMPRPSVAPSLQLQARPCPRWPRRKHCPPSSVASRRVACSASAADADVVDLFDAAKLTVDKFVTSGMVVGLGSGPASALAIQYLGTRLRRGSLAGITAVTSSVLSASEADKAGIRANSYQEGTQIDFAFTDAEAIEEGTLAAVIGRRKTESGEPSFMAEKAMAKSAHKLAFITGNDKYVTTGVEGSIPVLIKSGNWIDTAEEIDDLFLGDAEVWRRPSFGTAGPLGGDHPLVTKEGHHVLDVIFTTPIQDLGQVAEKLDKVDGVVDHGIICSNQPYAVIASKGEVQVLDEKSSVIQ

SEQ ID NO: 6643 - protein, 215 aa, Shigella sonnei
ELDLYICLRPVRYYQGTPSPVKHPELTDMVIFRENSEDIYAGIEWKADSADAEKVIKFLREEMGVKKIRFPEHCGIGIKPCSEEGTKRLVRAAIEYAIANDRDSVTLVHKGNIMKFTEGAFKDWGYQLAREEFGGELIDGGPWLKVKNPNTGKEIVIKDVIADAFLQQILLRPAEYDVIACMNLNGDYISDALAAQVGGIGIAPGANIGDECALF

SEQ ID NO: 6644 - protein, 467 aa, Zea mays
  misc_feature (200)..(200): Xaa can be any naturally occurring amino acid
MMSSQQQQQQMARPDRQAMYGAPVLPEIPTRFVYMPQTATDVMSGSSSLWKTGAPPHDTLAESAAMYTATLSSQQQQQMARPDRQAMYGAPVLPEIPTRFVYRPQTATDVMSSFSSLWETGAPPPAAYAAMLSSQQQQMPTARPGWQAAPRGAPVPPPMNMRFIPNTMPAADAMDVGSSAPMTPADSSSERTPSPLQRVXVRQVWAHNFDSEAKLIESLLPKFRYVAVETEFPGTVYRPAGPAYKLEPAERYRLLRCNVDALHPVQLGLTLFDAGCVLPGGATRYVWQFNFRDFDVRRHRHVAESVTALRSRGVDLDRTRQYGVAAAAAFGPRLRKWTRAGLGRAGVVTSRGGYDLAYLMKMMFGTGFRMPGSAAEFNAVVKSVLHRRRVFDIGEMARLCPHEHLHRGLDSIAGQLNAARFAADAACQAGYDSLRTCYTFMKLREIYFDDDGKLAGVDGILAEVTAF

SEQ ID NO: 6645 - protein, 209 aa, Shigella sonnei
QELDLYICLRPVRYYQGTPSPVKHPELTDMVIFRENSEDIYAGIEWKADSADAEKVIKFLREEMGVKKIRFPEHCGIGIKPCSEEGTKRLVRAAIEYAIANDRDSVTLVHKGNIMKFTEGAFKDWGYQLAREEFGGELIDGGPWLKVKNPNTGKEIVIKDVIADAFLQQILLRPAEYDVIACMNLNGDYISDALAAQVGGIGIAPGANI

SEQ ID NO: 6646 - protein, 200 aa, Simmondsia chinensis
MATIGHNNLNAKLVLLGDMGAGKSSLLLLFVKGHFLEFQESTIGAAFFSHTLAVNDATVKFEIWDTAGQERYHILAPMYYRGAAAAIIVYDITSADSFALAKKWVQELQKQGNPNMVMALAGNKADLEDRRSVPAEEARIYAEDNGLFFMETSAKTALNVNEIFYEIAKRLPRAQPPQNPAGMVLVDRPPEGSRASTCCS

SEQ ID NO: 6647 - protein, 372 aa, Magnaporthe grisea 70-15
MSATNGSAAAAPSKKNIGVFTNPKHDLWINEAEPSLESVQKGSDELKEGQVTIAIRSTGICGSDVHFWHHGCIGPMIVREDHILGHESAGEIIAVHPSVTSLKVGDRVAVEPQVICYECEPCLTGRYNGCEKVDFLSTPPVPGLLRRYVNHPAVWCHKIGDMSWEDGAMLEPLSVALAGIQRAGITLGDPVLVCGAGPIGLITLLCAKAAGACPLVITDIDDGRLKFAKELVPDVITFKVEGRPTAEDAAKSIVEAFGGVEPTLAIECTGVESSIASAIWAVKFGGKVFVIGVGRNEISLPFMRASVREVDLQFQYRYCNTWPRAIRLIQNKVIDLTKLVTHRFPLEDALKAFETAADPKTGAIKVQIQSLE

SEQ ID NO: 6648 - protein, 492 aa, Burkholderia cepacia R18194
MPAKSSVAPAIVWFRDDLRVTDQPALTRAVESGRPLVCVFVDDTGDGAGRALGGAARWWLHGSLAGLDAALARHGGRLLLLRGDAQREIERVVHDTGAEAVYWNRRYAQPQRDADAALKASLKARGVTVESSNGSLLNEPWEVLTGSGGPYQVFTAYWRAARRDRTVAVPLPEPERIAFHPWPKAVRDCALALDVLALRPPVPDWAGGLRDAWPAPDEAGAHARLDAFLTASLAGYADARDLPDRPATSRLSPFLRFGNLSPRQVWHAVQGAANAGGAAVAADADKFLSELGWREFSYTLLYHFPALASDNFRAQFDAMPWRDDPAALRAWQRGRTGYPLVDAGLRELWTTGWMHNRVRMVVASFLIKHLLIDWRAGEAWFWDTLVDADPANNAASWQWVAGCGADAAPYFRIFNPVAQGQKFDPDGAYVRRWVPELAGLDNASIHAPWEASPLELDAAGVRLGVDYPAPLVEHAAARARALDALAALPKRR

SEQ ID NO: 6649 - protein, 194 aa, Methanosarcina mazei Go1
MNRKAGAVVLICLFAGVILVPGCINKQHVEQPVNNESSNAGKGDESVDIQVIKVFSSAFESNSTIPRKYTCNGENINPPLEFADIPEETESLVLIMDDPDSPMNPFTHWIVWNIEPVAKIEEDSIPGIEGMNNFRKIGYGGPCPSSGTHRYFFKVYALDRKLELKAGSGRKELESEMIGHIIAEGELMGKYGKT

SEQ ID NO: 6650 - protein, 316 aa, Rubrivivax gelatinosus PM1
MSSQLEQLKAYTTVVADTGDFKQIAAFAPRDATTNPSLILKAVSQPAYAPLLAQTAAAHRGQPLDAIVDRVLVRFGCEILNVVPGRVSTEVDARLSFDAAATVARAQRIMALYESEGIARERVLIKIAATWEGIQAAKALEHHGIHCNLTLLFAFCQAVACGESGVRLISPFVGRIHDWHKKAAGARWDEAANAGANDPGVKSVAQIWRYFRKFGIETEVMGASFRNTGQILALAGCDLLTISPELLAQLQASEATVMRALDVDAALHCDAKALSFNEASFRYALNEDAMATEKLAEGIRAFAVDAAQLDRLIQAL

SEQ ID NO: 6651 - protein, 151 aa, Sinorhizobium meliloti
MIRLLIALFLLLASVAPGFAVNPDEVLADPALEARARAISAQLRCMVCQNQSIDDSNAELAKDLRLLVRERLKNGDSDEAVISYVVSRYGEFVLLNPRLEAKTLVLWGMPAILLVAGIITLVVAARRRGARVPGAPLSDEEKERLDRLLRP

SEQ ID NO: 6652 - protein, 421 aa, Arabidopsis thaliana
MVIKGMRVGKYELGRTLGEGNSAKVKFAIDTLTGESFAIKIIEKSCITRLNVSFQIKREIRTLKVLKHPNIVRLHEVLASKTKIYMVLECVTGGDLFDRIVSKGKLSETQGRKMFQQLIDGVSYCHNKGVFHRDLKLENVLLDAKGHIKITDFGLSALSQHYREDGLLHTTCGSPNYVAPEVLANEGYDGAASDIWSCGVILYVILTGCLPFDDANLAVICRKIFKGDPPIPRWISLGAKTMIKRMLDPNPVTRVTIAGIKAHDWFKHDYTPSNYDDDDDVYLIQEDVFMMKEYEEEKSPDSPTIINAFQLIGMSSFLDLSGFFETEKLSERQIRFTSNSLAKDLLENIETIFTEMGFCLQKKHAKLKAIKEESTQKRQCGLSVTAEVFEISPSLNVVELRKSHGDSSLYKQVMMHSCNIS

SEQ ID NO: 6653 - protein, 400 aa, Ralstonia eutropha JMP134
MIANTDDLAYLMTREQGKPLDEAKGEIAYAASFLEWFAEEAKRVDGEVLASPAADKRLVTLRQPVGVCAAITPWNFPAAMITRKAAPALAAGCAIVIKPAELTPLSAFALAELAHRAGVPAGVLQVVTGDARTIGAVLTASPIVRKLSFTGSTEVGRILMAQSAATVKRLSLELGGNAPFVVFDDADVDAAVDGAIAAKFRNGGQTCVCANRFYIQDGIYDAFATKFAQRASQLRVGNGLEQGVVIGPLIEEAAVEKVTSLVDDATSKGGRLLTGGLKHQLSGTYYAPTVIADATATMRVAREEIFGPLAPLFRFKRDEDAVAAANATEYGLAAYLYTRDIARAWRTAEALEYGMVGLNTGLISNEVAPFGGIKQSGLGREGSRHGIEEYLETKYLCLQM

SEQ ID NO: 6654 - protein, 321 aa, Ureaplasma parvum serovar 3 str. ATCC 700970
MNQVNFLNLDKNILIITSGGDAPGMNASLISLIHRLMNNNFNVFIGIEGLLGLYNNLIEPIKDKRVFDVYFNEQGTVIKTSRFIKLDINDKKTQIIKDNLLSHNIQKIIILGGQGSMQAGLVLTKMGFEVFGILHTIDNDFSETQMCIGALSAASFNQKLLKCLNYTAKAHCAFNLVELMGRECSWLVNNSVGKLKPILMLTNQDNKYTVDEVIDLIKDKINSIKEYDPLIIVQELIYDQKWYELLVKTFEQKLHKSLRITILNYLQRGAPVSDFDLQLAKDSANVLVDFIVNQNDIKNTNNMYVVINKFDNKLEVIKFNK

SEQ ID NO: 6655 - protein, 153 aa, Desulfovibrio desulfuricans G20
MKLKSPIFEQGELLPAANPQHGGESPPLAWEDVPEGTASFVLLCDDPDADGGTATLWMLYNLPADLRSLEAGIADDFAPLKGAAHGINTRGNCRYDAPQPSCHPRRVYYRLYALDSRLSLKAGIARGQLVRAMEGHIISEASLTTVVGSAHTA

SEQ ID NO: 6656 - protein, 400 aa, Rubrivivax gelatinosus PM1
MVWMMAAGALVFFMQAGFALLESGMSRAKNAINVIMKNYCDTCFGAVAYWAVGFGLMFGANASGWIGTDRFLPHAMPEADYGLLFFQMMFAATAATIVSGAIAERARFWAYIVSSVLITGLIYPVFGSWAWGSLFSGQGWLREMGFIDFAGSTVVHSVGGWSALAAILVIGPRLGRFGPNGEARPMLGHNLTSVALGGFILWLGWFGFNGGSTAAATVGIGKIVLNTHLAGAAGAIGALAVLALGRQPVLMTAAVNGSIAGLVGITAGCHVMEPAYALLTGFVAGGLSVLAGWLLEAGRIDDVVGAVSVHAVGGVWGTLAAGLFKHDAMFDLRQLGVQAIGCGVAFAWSFGTALLMYWLLARGVGLRASTLDEQRGLDFTEHYEIGYPEFQQDAVHRGKR

SEQ ID NO: 6657 - protein, 491 aa, Fusobacterium nucleatum subsp. nucleatum ATCC 25586
MENILKKSYKMFINGEWIDSSNGVMVKSYAPYNNELLSEFPDASESDIDFAIKSAKEAFKTWRKTTVKERARILNKIADIIDENKDLLATVETMDNGKPIRETKLVDIPLAATHFRYFAGCILADEGQATVLDEKFLSLILREPIGVVGQIIPWNFPFLMAAWKLAPALAAGDTVVLKPSSTTTLSLLVLMELIQDVIPKGVVNLVTGKGSTAGEFLKNHPDLDKLAFTGSTAVGRDIALAAAEKLIPATLELGGKSANIILDDADIEKALEGAQLGILFNQGQVCCAGSRIFVQEGIYDEFISKLVKKFENIKIGNPLDPTTIMGSQIDARQVKTILDYVEIAKQEGGVILTGGVKYTENGCDKGNFVRPTLITNVNNGCRVSQEEIFGPVAVVIKFKTDDEVIAQANDSEYGLGGAVFTKNINRALKLAREIQTGRVWINTYNQIPEHAPFGGYKKSGIGRETHKVILEHYTQMKNILIDLEEGTSGLY

SEQ ID NO: 6658 - protein, 314 aa, Oryza sativa
EESMEMMVHGRRDEQYGGLGLGLGLGLSLGVAGGAADDEQPPPRRGAAPPPQQQLCGWNGGGLFSSSSSDHRGRSAMMACHDVIEMPFLRGIDVNRAPAAETTTTTARGPSCSEEDEEPGASSPNSTLSSLSGKRGAPSAATAAAAAASDDEDSGGGSRKKLRLSKDQAAVLEDTFKEHNTLNPKQKAALARQLNLKPRQVEVWFQNRRARTKLKQTEVDCELLKRCCETLTDENRRLHRELQELRALKLATAAAAPHHLYGARVPPPTTLTMCPSCERVASAATTTRNNSGAAPARPVPTRPWPPAAAQRSSA

SEQ ID NO: 6659 - protein, 426 aa, Pichia pastoris
MSGDHKSFTVFNQEFIIDRDFELIKALGQGAYGVVCSAQYKGNEDGGKVAIKKVTNIFSKKILAKRALREIKLLRHFRGHKYITCLYDLDVIPDQNNNFNEIYLYEELMECDLHHIIKSKQPLTDSHYQSFIYQILGGLKYIHSADVLHRDLKPVNLLVNSDCELKICDFGLARGYSSDAEKNAGFLTEYVATRWYRAPEIILSFQTYTKAIDIWSVGCILAELLGGRPIFRGRDYVDQLNLILSTLGTVSEETLQSIRSERAQDYVRSLPFMPKIPFSQLFPGANPEAIDLLDRMLTVDPTHRITVTEALEHPYLKVWHDPNDEPVCSSKFDFSFEVVDDIETMKQMIVDEVLSLREFVRRPIQEQQLPFTEPDKHFDVSFDQPQIEPPAENYRDDHLPRPHELESQILDLEHELQYGLDRYGTQ

SEQ ID NO: 6660 - protein, 320 aa, Arabidopsis thaliana
MSALTFPIGSVHHLMPVLALGTAASPPPEPIVLKRTVLEAIKLGYRHFDTSPRYQTEEPLGEALAEAVSLGLIQSRSELFVTSKLWCADAHGGLVVPAIQRSLETLKLDYLDLYLIHWPVSSKPGKYKFPIEEDDFLPMDYETVWSEMEECQRLGVAKCIGVSNFSCKKLQHILSIAKIPPSVNQVEMSPVWQQRKLRELCKSKGIVVTAYSVLGSRGAFWGTHKIMESDVLKEIAEAKGKTVAQVSMRWAYEEGVSMVVKSFRKDRLEENLKIFDWSLTEEEKQRISTEISQSRIVDGEVYISEKGPIKSVTEMWDGEI

SEQ ID NO: 6661 - protein, 273 aa, Thermoplasma volcanium GSS1
MKLIENWFSERYSDNLQLSFRVSDQLLSIKTDYQRIDLFDTYDFGKLLAIDGTVQLTERDEYIYHELITMIPYHMTKNPPQSALVIGGGDGGAARRLLDLGLNKIVNVEIDGQVVEVSKRFFPDLSSAFTDKRVNLIIDDGIKYVRKCNEKFDLVIIDSTDPEGPAEGLFSMEFYSDITKILSDGGVIVSQSGSPFYQPKALKLAYTGMRRLFKDVKVYTGFIPTYPSGFWSFTIASEDAMNPRKPAIKGKYFNEDVLDGVFKLPQFVKDLIT

SEQ ID NO: 6662 - protein, 310 aa, Thermoplasma volcanium GSS1
MDRKELLSKPVQDLRIDGNTTLSNLMAQFSNIGGFTAAKLYEAHSIISDMFLEDNTTFLSFPADIISTGLRGLINDVVKRKLVDVIITTSGTLDHDIARTFGKYYCGSFNYSDVELREININRLGNVLVPDESYGELIEEKVMEQLEKLYSIKKEWATVDLIKEIGLSINNESSILYNAAKNDIPIFVPGITDGSFGSQLWSFYEQHHDFKINLLEDEHRLSDIIFDAKKTGAIMVGGGISKHHTIWWNQFRDGLDYAVYITTAQEYDGSLSGAKLEEAISWKKVRPNARFVNIYGDATVIMPILMAPFL

SEQ ID NO: 6663 - protein, 76 aa, Triticum aestivum
MSSESLGKNSKIMGGRERKEVNSTAKHFVDFTEAEEDLVFRMHRLVGNRWELIAGRIPGRTAEEVEMFWAKRHQDQ

SEQ ID NO: 6664 - protein, 43 aa, Zea mays
PTRPRTRVLKYGCGHEWWVCLLLTFLGYIPGIIYAFYAITKNN

SEQ ID NO: 6665 - protein, 425 aa, Mesorhizobium loti MAFF303099
MSGRSLMSPVWHPFTQHALELAIPEIARTEGAYLHKADGTRILDAISSWWVVTHCHRHPRIIKAIETTAASLDQIIFAGFTHEPAERLARALVGLAPAGLDWVFYSDSGSTSVEVALKMALGYFRNIGAPRSRIVVMEHSYHGDTIGTMSVGARGVFNAAYEPLLFEVDTIPFPAAGQEQETLDRFEAVSRDRRAAALIVEPLVLGAGGMQMYPAWVLAELKKITEASGTLLITDEVMTGWGRTGTMFACEQASISPDILCTSKGLTGGTIPLAATLATDAIFQAHYSEDRKKTFFHSSSYTANPIACGAALANVEIWRDEPVAERIAALSAMQAAGLRRFGDNPRFTDSRVTGTIAALDLRTSSAGYLADIGPKLRAFFLERGLLVRPLGNVLDLMPPYCITGDELDGLYDAIEEAAERFGSRP

SEQ ID NO: 6666 - protein, 299 aa, Arabidopsis thaliana
MASEDQSAARSTGKVNWFNASKGYGFITPDDGSVELFVHQSSIVSEGYRSLTVGDAVEFAITQGSDGKTKAVNVTAPGGGSLKKENNSRGNGARRGGGGSGCYNCGELGHISKDCGIGGGGGGGERRSRGGEGCYNCGDTGHFARDCTSAGNGDQRGATKGGNDGCYTCGDVGHVARDCTQKSVGNGDQRGAVKGGNDGCYTCGDVGHFARDCTQKVAAGNVRSGGGGSGTCYSCGGVGHIARDCATKRQPSRGCYQCGGSGHLARDCDQRGSGGGGNDNACYKCGKEGHFARECSSVA

SEQ ID NO: 6667 - protein, 320 aa, Lupinus cosentinii
FAHYGPQWRLRRKLSSVHMFSGKALEDFTHLRQEEVARLTSNLASSRSKAVNLGQVLNVCTTNALTRVMIGRRVFNDGNDGFDPKADEFKSMVVELMVLAGALNIGDFIPALEWLDIQGVQAKMTKLHKKFDAFLTNIVEEHKNSKIEKHQDMLSTMLSLKDGTEDGGKLTDIEIKALLLNMFAAGTDTSSSTTEWAISELIKNPNIQAKLQQELDSVVGRDRLVTEADLAHLPYLEAVVKETFRLHPSTPLSLPRIASESCEVFGYHIPKGSTLLVDVWAIARDPKEWNNPLEFKPERFLPGGEKANVDIKGNDFEVIP

SEQ ID NO: 6668 - protein, 90 aa, Brassica napus
MASFARRAMNLAQIPSARAPASVCQRRGFAGAADHHGSTKVDFWKQPTNPGNWKEEHFVLISLSGWGMLFYGGYKLFTGGKGEKPVEAAQ

SEQ ID NO: 6669 - protein, 413 aa, Burkholderia fungorum LB400
MPIYKGTLGPDVIDIRKLYGQTGKFTYDPGFMSTAACNSAITYIDGDKGELLYRGYPIDNLAENADFLETCYLLLKGELPNAQQNAEFVKTVTNHTMVHEQMHFFFRGFRRDAHPMAILVAAVGALSAFYHDSLDINNPRHREVSAIRMIAKLPTLVAMAYKYSIGQPFAYPKNDLSYSANFMHMMFSNPCEEYKVNDVLVRALDRILILHADHEQNASTSTVRLAGSSGANPFACIAAGIACLWGPAHGGANEAALNMLEEIGSVDNIPEFIKQVKDKNSGVKLMGFGHRVYKNYDPRAKLMRETCHEVLEELGLHDDPLFKLAMALEKIALEDEYFVSRKLYPNVDFYSGIVQRALGIPTSMFTCIFAMARTVGWIAQWNEMIADPEQKIGRPRQLFIGDTQREAKPIAQR

SEQ ID NO: 6670 - protein, 170 aa, Glycine max
  misc_feature (125)..(125): Xaa can be any naturally occurring amino acid
MASDGSEEFRLVSPAFSNEGKLPRNYTDEGQGAKKNISPPLEWYNLPEGTKTLALVVEDIDGSDSDGPIMPWTHWVVANIPATVKGLPEGFSGKAAEMGGDYVTIKEGNNDLKKTGWNGPRLPTXGHRIQFRLYALDDELKLGNKVTKEKLLEETIEGHVLGEATLMAIF

SEQ ID NO: 6671 - protein, 216 aa, Shigella sonnei
QELDLYICLRPVRYYQGTPSPVKHPELTDMVIFRENSEDIYAGIEWKADSADAEKVIKFLREEMGVKKIRFPEHCGIGIKPCSEEGTKRLVRAAIEYAIANDRDSVTLVHKGNIMKFTEGAFKDWGYQLAREEFGGELIDGGPWLKVKNPNTGKEIVIKDVIADAFLQQILLRPAEYDVIACMNLNGDYISDALAAQVGGIGIAPGANIGDECALF

SEQ ID NO: 6672 - protein, 415 aa, Magnaporthe grisea
MSDLQGRKIFKVFNQDFIVDERYTVTKELGQGAYGIVCAAVNNQTSEGVAIKKVTNVFSKKILAKRALREIKLLQHFRGHRNITCLYDMDIPRPDNFNETYLYEELMECDLAAIIRSGQPLTDAHFQSFIYQILCGLKYIHSANVLHRDLKPGNLLVNADCELKICDFGLARGFSVDPEENAGYMTEYVATRWYRAPEIMLSFQSYTKAIDVWSVGCILAELLGGRPFFKGRDYVDQLNQILHILGTPNEETLSRIGSPRAQEYVRNLPFMAKKPFPTLFPNANPDALDLLDRMLAFDPSSRISVEQALEHPYLHIWHDASDEPDCPTTFNFDFEVVEDVGEMRKMILDEVYRFRQLVRTAPGAGGHGAPHAPQVPIPAGAGQGQWKAEDPRPQEYVGQMNDLEAELAGGLDQRR

SEQ ID NO: 6673 - protein, 439 aa, Anabaena variabilis ATCC 29413
MEKASLQHRDMFTAEVIGFGDTVVFVSHPQGIQTIFANDRKKLVAVGEANRILYPLVGNNSMFLLEGVKHKQRRQLLMPSFHGERMREYGHLIRNITETLFSQLQQNVTFSALTAMREISMQVILQAVFGFYEGERCQQFKHLLPVFLSELFQSPLASSILFFPFLQKDLGNLTPWGRFVRQREKIDKLLYEEIAERRQEINSDRIDILSLLISSRDETGNSMSDQELRDELITLMISGHETTGTAMAWSLYWILQTPEVFQRLIQELDSLGDSPDPMSIFRLPYLTAVCNETLRINPVAMLTLPRVVKEPVELLGNRLESGTTVVGCIYLTHHREDLYPESKLFQPERFLKREFSQYEFMPFGGGVRGCIGQAIAMFEMKIVLATVLSRYQFALADGKPERPQRQGFTLTPANGVKMLITGKHQRQNYSTAASTTFTT

SEQ ID NO: 6674 - protein, 429 aa, Pseudomonas putida KT2440
MADKKAQLVIEGAAPVELPILTGTVGPDVIDVRGLGATGHFTFDPGFMATASCESKITYIDGDKGILLHRGYPIEQLAEQSDYLETCYLLLNGELPNAEQKAQFVSTVKNHTMVHEQLKSFFNGFRRDAHPMAVMCGVVGALSAFYHDSLDINNPQHREISAVRLVAKMPTLAAMVYKYSMGQPMMYPRNDLSYAENFLHMMFNTPCEIKPISPVLAKAMDRIFILHADHEQNASTSTVRLAGSSGANPFACIAAGIAALWGPAHGGANEAVLTMLDEIGDVSNIDKFIAKAKDKNDPFKLMGFGHRVYKNRDPRATVMKQTCDEVLRELGIKNDPQLELAMRLEEIALTDPYFIERSLYPNVDFYSGIILKAIGIPTSMFTVIFALARTVGWISHWKEMLSSPYKIGRPRQLYTGEQKRDIVALKDRK

SEQ ID NO: 6675 - protein, 333 aa, Zea mays
MASPPRNVGTRTTSNPEIPEFLVGPAGRPVPAVGLGTASFPFVEENVRTAVLAALELGYRHLDTASLYRSERAVGDAVAEAARRGIVASREEVFVTTKMWCSQCHPDLVLPSLKESLQNLQMDYVDLYLVHWPIAAKPGKPQFPFKREDIMPMDLIGVWRAMEECHRLGLARMIGVSNFTTKKLQELLAIAKIPPSVNQVEMNPIWQQKRLAEFCKDKGIHLTAYSPLAGQSTSKVNPVMQSEVLQEVAKARGKSVAQISLRWIYEQGASVVVKSFGRDRLKENVEIFDWELTNEDRRKISQIPQHKRVTVLGILSPDGVSSVDLAELDIVEM

SEQ ID NO: 6676 - protein, 476 aa, Rhodopseudomonas palustris CGA009
MVNRMQFYIDGAWVDPVVKKSTPVVNPATEEAMYEVALGSKADVDKAVAAAKRAFETFSVTSREERIALLEKVVAIYKSRMKEIGAAISDEMGAPLPMAEKMQAGAGLGHIMSTLDVLKNYQFEEPLGSAMIVREPIGVVGMITPWNWPLNQIACKVAPAIAAGCTMVLKPSEFTPTSALLFAEILHEAGVPKGVFNLVNGLGPEVGAAMSEHPDIDMISFTGSTRAGIDVAQRAAPTVKRVSQELGGKSPNVILEDADLTKAVTGGVMHMFNNSGQSCNAPSRMIVPLSKMKEVAAIAKGVAEKTKAGDPRGEGTTIGPVVNRIQWDKIQTLINKGIEEGATLVAGGPGLPEGVNKGFYVRPTVFADVTKDMTIAREEIFGPVLVIMGAKDENEAVELANDTPYGLAGYVSAGSVDRARAVGRKIRAGNVNLQGVPNERTAPFGGYKQSGNGREWGKFGLEEYLEVKAIAGFNAA

SEQ ID NO: 6677 - protein, 210 aa, Zea mays
MASDRVLGTVKWFNGTKGFGFITPDDGSEDLFVHQSSIKSDGYRSLNDGDAVEYTVGSGNDGRAKALDVTAPGGGPLAGGERPDGGNGGGRGGYGGGDRGYGGGGDRGYGGGGDRGYGGGDRGYGGGGDRGYGGGGDRGYGGGGGYGGGYGGGGGGGGRGCFKCGEEGHMARDCSQGGGYGGGGGGGRGSECYNCGQEGHISRDCPNKRR

SEQ ID NO: 6678 - protein, 418 aa, Bordetella pertussis Tohama I
MSYQHIKVPTGGQKITVNADYSLNVPDQVIIPVIEGDGTGADITPVMIKVVDAAVQKAYAGKRKIHWMEVYAGEKATKVYGPDVWLPEETLDAVKDYVVSIKGPLTTPVGGGIRSLNVALRQQLDLYVCLRPVRYFKGVPSPVREPEKTDMVIFRENSEDIYAGIEYMAESEQAKDLIQYLQTKLGVTKIRFPNTSSIGIKPVSREGTERLVRKALQYAIDNDRASVTLVHKGNIMKFTEGGFRDWGYALAQNEFGAQPIDGGPWCKFKNPKTGREIIVKDSIADAFLQQILLRPAEYDVIATLNLNGDYISDALAAQVGGIGIAPGANLSDSVAMFEATHGTAPKYAGKDYVNPGSEILSAEMMLRHMGWTEAADLIIASMEKSILSKKVTYDFARLLEGATQVSCSGFGQVMIDNM

SEQ ID NO: 6679 - protein, 294 aa, Allium cepa
MDQYEKVEKIGEGTYGVVYKARDRLTNETIALKKIRLEQEDEGVPSTAIREISLLKEMQHANIVRLQDVVHSEKRIYLVFEYLDLDLKKHMDSCPDFAKDSRLAKTFLYQLLRGIAYCHSHRVLHRDLKPQNLLIDRRTNSLKLADFGLARAFGIPVRTFTHEVVTLWYRAPEILLGARQYSTPVDIWSVGCIFAEMVNQRPLFPGDSEIDELFKIFRIMGTPNEDTWPGVTSLPDFKSAFPKWPAKDLATIVPKLDSAGIDLLYKMLHLEPSKRITARKALEHEYFRDLGTIP

SEQ ID NO: 6680 - protein, 247 aa, Pisum sativum
EHLANLEYANAGLLSHLSLAFWDQDDPYDMGGDHCFLPGGNGKLVQALAENVPILYEKTVHTIRYGSDGVQVIAGSQVFEGDMALCTVPLGVLKKGSIKFIPELPQRKLDGIKRLGFGLLNKVAMLFPHVFWEMDLDTFGHLSDDPSRRGEFFLFYSYATVAGGPLLIALVAGEAAHKFESMPPTDAVTKVLQILKGIYEPKGINVPEPIQTVCTRWGSDPFCFGSYSNVAVGASGDDYDILAEMVG

SEQ ID NO: 6681 - protein, 298 aa, Archaeoglobus fulgidus DSM 4304
MARTGFQGRKLGEAFEIWTEMLREENITILMGLSGAMVPAGMRKIIAWLIRNRYIDVLVSTGANLFHDIHEAMGFRHFMGSEHVNDCKLFEEGIDRIHDVFAYEKEFNVIDYTLAEIISEMSGVMSSREFLEEIAGRLNVKDRNSIVIAAYESKVPIFSPAIADSSIGIAAALAKREVVIDTIRDVEELTEIVVNSEKTGVIYVGGGVPKNFIQQTEVVARLKGYDVRGHEYAIQITTDVPQFGGLSGCTFEEGVSWGKISGKAKKVQVNCDATIALPVLAHGLIGIRRQKYPIFNGL

SEQ ID NO: 6682 - protein, 290 aa, Coxiella burnetii RSA 493
MSPGKLFRQAVANEHPLQIVGAINAYCALLAENVGFKAIYLSGGGVANTLGLPDLGITDLHDVLEDARRITAATHLPLLVDIDTGFGGAFTIARAIKEMERAQVAAVHMEDQVAQKRCGHRPGKELVNTNEMVDRIKAAVDVKSNDFVLIARTDAYAVEGLKATIDRACTYVEAGADMIFAEALENINDYPTFCKAVKVPVLANMTEFGKTPLYTAAQLADHGVKMVLYPRSADRAMSKAALAVYEDIKKHGVQTASLPFMQTREALYEVLNYHAYEDKLNQLFKRKEDD

SEQ ID NO: 6683 - protein, 372 aa, Coxiella burnetii RSA 493
MTKTAKGLRGQSAGETSIATVGKEGHGLTYRGYRIEDLAANATFEEVAYLLLKNKLPTKSELDAYTKKLVNLRSLPPALKDTLERIPASSHPMDVMRTGCSMLGNLEPENGFENEQNIADRLVAIFPAIQCYWYHYSHHGKRIDTELDDLTLAGYFLHLLLGKKAAQMAIDCMNASLILYAEHEFNASTFAARVCSATLSDIYSAVTAAIATLRGPLHGGANEAAMDLIMLYKTPSEAIAGIKRKLANKELIMGFGHAVYRERDPRNAIIKSWAQKLAPNAADGYLFDISDAIENTMQDEKKLFPNLDFYSATAYHFLNIPTKLFTPIFVMSRVTGWCAHIFEQRKDNRIIRPNADYIGPEEQGWVPIEKRR

SEQ ID NO: 6684 - protein, 325 aa, Bradyrhizobium japonicum USDA 110
MEGPAMAAPLDPVIAQIIPLLPLRDPTTMTPQSARDSLRALAAARAAVPPPPVDTVQDIKVKGGAGPLDARLYRIGSDPAPTVVFFHGGGWVAGDLETHDRQARNLAIETGAVVVSVDYRRPPETRFPGAFEDAFAAARDIFNRVAEFGGDAKRLGVAGDSAGGNLAAATAIACRDAGIKLAAQLLVYPVTDVAGHYADARENARFPSRAENADGYFLSRAVMEWFCGHYLADPGHGADWRVSPLRAASLAGLAPAIVATASFDPLRDEGAAYARALEAAGVRVKHHEGPGLIHGYFGLGDASDVARAEAQRARADFKALLARGI

SEQ ID NO: 6685 - protein, 203 aa, Glycine max
  misc_feature (159)..(159): Xaa can be any naturally occurring amino acid
MVAGKYPSPTYFILLLITITRLISTVGKTSQWMKALTPPPELASVSLDDTIFSKLRNDPEALQGRASRDYGNLVREVPSAVFHPTSSSDIARLIKLSYNGSVPFKIAARGQGHSTRGQAMVRDGVVVDMAGFRERGNGEGIRVVMSVVVDPYNKNGYGXYYADVGGEQLWIDVLNATLEHGLAPMSWTDYLYLTVGGTLFNAG

SEQ ID NO: 6686 - protein, 486 aa, Dechloromonas aromatica RCB
MLQDKILNFINGEFVATNKWFENRTPISNAVIGQVAEAGKAEVDAAVAAAQAALKGPWGKMTLAKRVELLEALVAEINNRFDEFLEAECADTGKPKSLASHIDIPRGAANFKVFADVIKNVPGEFFDMATPDGGTAINYTFRSPVGVVGVICPWNLPLLLMTWKVGPALACGNTVVVKPSEETPRTAALLGEVMNKVGIPKGVYNVVHGFGPNSAGEFLTTHPDVDAITFTGETRTGEIINRAASVGSRPVSLEMGGKNAAIVFADCDFDAAIEGTLRSAFANCGQVCLGTERVYVERPIFEKFVAAMKAGAEKLKIGVPEDPATGMGPLISKEHQNKVLSYFQIAKEAGATIVTGGGVPDMPGELKDGCWVQPTIWTGLPETARVIKEEIFGPCCHIAPFDTEEEVLEKANDNIYGLATAIWTKDVSRANRVAQQMEVGIAWVNSWFLRDLRTAFGGAKQSGIGREGGVHSLEFYTELKNICIKL

SEQ ID NO: 6687 - protein, 256 aa, Gibberella zeae PH-1
MPGVGFGTFANEGAKGETYKAVIAALKTGYRHLDCAWFYLNEGEVGQAVRDFLAEDNGVKREDLFICTKVWNHLHEPEEVKWSFENSLKNFGLDYIDLFLVHWPIAAEKGDDYQPKIGPDGKYVIKKDLTENPEPTWRAMEEIYASGKARAIGVSNWTIDGLKQLMAFAKVKPAVNQIEIHPFLPNEDLVKFCLENDILPAAYSPLGSQNQVPTTGETVRSNKTLNEVADRSGNTLAQVLIAWGLRRGYAPVRRGL

SEQ ID NO: 6688 - protein, 66 aa, Triticum aestivum
  misc_feature (10)..(11): Xaa can be any naturally occurring amino acid
  misc_feature (41)..(42): Xaa can be any naturally occurring amino acid
  misc_feature (47)..(47): Xaa can be any naturally occurring amino acid
ERERETLEHXXWSGANFYDRVLKTVQGGMSSTAAMGKGATXXQFWTXPGSESNNQARSQVQDVMKV

SEQ ID NO: 6689 - protein, 288 aa, Glycine max
MRVAREEAMGGGKRNTVETFFLATLILWFASLCFQILLNKRWELLSVIAGSIFYQTSNCLIRFFSPHKDKDALFVNTSVSLLHSLLTSSSVIFILFRELLSNGPSGMSDHSQLVEDAWSWAFEALSFSCGYFAYDQWDMLHYRLYNGWIPSILVHHLVLLICFTLALYRNVTINYLILTLICELHSIFLHLRKVRRMAGIRDAKSILVKLEWFLNWVTFFVARSVPHVLITAKLIKDAYKFEKGMELPLALLGMAGMNLLNIGLGIDLLKAFKRERKSQQGNLHHHRE

SEQ ID NO: 6690 - protein, 372 aa, Arabidopsis thaliana
MPEIEIAAGSGDNNDALFGKYELGKLLGCGAFAKVFHARDRRTGQSVAVKILNKKKLLTNPALANNIKREISIMRRLSHPNIVKLHEVMATKSKIFFAMEFVKGGELFNKISKHGRLSEDLSRRYFQQLISAVGYCHARGVYHRDLKPENLLIDENGNLKVSDFGLSALTDQIRPDGLLHTLCGTPAYVAPEILSKKGYEGAKVDVWSCGIVLFVLVAGYLPFNDPNVMNMYKKIYKGEYRFPRWMSPDLKRFVSRLLDINPETRITIDEILKDPWFVRGGFKQIKFHDDEIEDQKVESSLEAVKSLNAFDLISYSSGLDLSGLFAGCSNSSGESERFLSEKVAGDVGGGSGGVCERGESEDEEEEGGRVWV

SEQ ID NO: 6691 - protein, 499 aa, Triticum aestivum
  misc_feature (21)..(21): Xaa can be any naturally occurring amino acid
  misc_feature (275)..(275): Xaa can be any naturally occurring amino acid
RPTLPKSSAETGNFRLTIPTXSAPTSGFSSPVGSPRRLSNADVSSTVASSHAPQAWSAPSIHTIDFLGALSPRTLPEKLTGASEPSPYSSTFRSPILMPRNTSAPPSPLPKLFPENQISRTEVNGSASLHPLPLPPSAISPMQTSFSNQPAPKVEMPSVSCQWQKGKLLGSGTFGCVYEATNRNTGALCAMKEVNIIPDDAKSAESLNQLEQEIKFLSQFKHENIVQYYGSDTIEDRFYIYLEYVHPGSINKYVQQHYGAITESVIRNFTRHILXGLAFLHGQKIMHRDIKGANLLVDINGVVKLADFGMAKHLSSAAPNLSLKGPPYWMAPEMIRATLVKDVGYDLAVDIWSLGCTIIEMFNGKPPWSGLEGPTAMFKVLNKDPPLPDNLSHEAKDFLKCCFKRNPAARPSARELLTHPFIRNSSHYSKHVQEVIIAGCEEVIRASCDPSLTRKTTTSGGNDARSSESLVSQLTLQPVQVVTPYFPPRNSGFVSNPGS

SEQ ID NO: 6692 - protein, 395 aa, Burkholderia fungorum LB400
MSETTQTAGTPGGNEPKSGFKPKKSVALSGVTAGNTALCTVGKTGNDLHYRGYDILDIASACEFEEIAYLLVHEKLPTQAELTAYKTKLKALRGLPANVKAALEWIPAAAHPMDVMRTGVSVLGTVLPEKDDHNLPGARDIADRLMASLGSMLLYWYHYSHNGKRIEVETDDDSIGGHFLHLLHGVEPSNAWVDAMHVSLNLYAEHEFNASTFTGRVIAGTGSDIYSALTGAIGALRGPKHGGANEVAFEIQSRYQTPDEAEADIRRRVENKEVVIGFGHPVYTISDPRNKVIKEVAKKLSKEAGNTRLFSIAERLESVMWDAKKMFPNLDWFSAVSYHMMGVPTAMFTPLFVIARTAGWSAHIIEQRIDNKIIRPSANYTGPENLKYLPLNRRK

SEQ ID NO: 6693 - protein, 512 aa, Robinia pseudoacacia
MDQLVWRVLPMLALLVSFLVFFYLQDSYKAQLSPFIKLPGDECSLLPHRHYWISSKRIVTPQGIISGSVEINEGEIVSIIEGYGKQGNSMQEAVIDYGEAVVMPGLIDVHVHLDEPGRTEWEGFDTGTRAAAAGGVTTVVDMPLNNYPTTVSKETLQLKLEAAEKKLYVDVGFWGGLIPENALNTSILEGLLSAGVLGVKSFMCPSGIDDFPMTTIDHIKEGLSVLAKYRRPLLVHAEIQQDSKNHLELKGNGDPRAYLTYLNTRPPSWEQAAIKELVDVTKDTIIGGPLEGAHVHIVHLSDSSASLDLIKEAKSRGDSISVETCPHYLAFSSEEIPDRDTRFKCSPPIRDALNKEKLWEAVLEGHIDLLSSDHSPTVPELKLLEEGDFLRAWGGISSLQFDLPVTWSYGKKHGLTLEQLSLLWSKKPATFAGLESKGAIAVGNHADIVVWQPELEFDLNDDYPVFIKHPSLSAYMGRRLSGKVLDTFVRGNLVFKDGKHAPAACGVPILAK

SEQ ID NO: 6694 - protein, 162 aa, Arabidopsis thaliana
MSSEELRLVSPTIDNDGKLPRKYTMAGQGVKKDISPPLEWYNVPEGTKTLALVVEDIDAPDPSGPLVPWTVWVVVDIPPEMKGLPEGYSGNEDQTTGIREGNNDHKIPGWRGPLLPSHGHRFQFKLFALDDKPKIGHTVTKERLLIAIEGHVLGEAILTCLA

SEQ ID NO: 6695 - protein, 111 aa, Lactobacillus delbrueckii subsp. lactis
MKRIGILTSGGDAPGMNAAVRAVTRVAIANGLEVFGIRYGFAGLVAGDIFPLESEDVAHLINVSGTFLYSARYPEFAEEEGQLAGIEQLKKHGIDAVVVIGGDGSYHGALQ

SEQ ID NO: 6696 - protein, 267 aa, Shigella flexneri 2a str. 301
MAIPAFGLGTFRLKDDVVISSVKTALELGYRAIDTAQIYDNEAAVGQAIAESGVPRHELYITTKIWIENLSKDKLIPSLKESLQKLRTDYVDLTLIHWPSPNDEVSVEEFMQALLEAKKQGLTREIGISNFTIPLMEKAIAAVGAENIATNQIELSPYLQNRKVVAWAKQHGIHITSYMTLAYGKALKDEVIARIAAKHNAIPAQVILAWAMGEGYSVIPSSTKRKNLESNLKAQNLQLDAEDKKAIAALDCNDRLVSPEGLAPEWD

SEQ ID NO: 6697 - protein, 84 aa, Brassica napus
  misc_feature (43)..(43): Xaa can be any naturally occurring amino acid
MGCFHSKVAREFRGHEDPVKLASETAFSVSEVEALFELFKSIXSSSVVDDGLINKEEFQLALFKSRKRENIFANRIFDMFDVKR

SEQ ID NO: 6698 - protein, 429 aa, Pseudomonas syringae pv. tomato str. DC3000
MADKKAQLIIEGAAPVELPILTGTVGPDVIDVRGLTATGRFTFDPGFMSTASCESKITYIDGDNGILLHRGYPIEQLAEQSDYLETCYLLLNGELPTAEQKAQFVAVVKNHTMVHEQLKTFFNGFRRDAHPMAVMCGVVGALSAFYHDSLDINNPQHREISAVRLVAKMPTLAAMVYKYSMGQPMMYPRNDLSYAENFLHMMFNTPCEIKPISPVLAKAMDKIFILHADHEQNASTSTVRMAGSSGANPFACIAAGIAALWGPAHGGANEAVLTMLDEIGDVSNIDTFIAKAKDKNDPFKLMGFGHRVYKNRDPRATVMKQTCDEVLKELGIKNDPQLELAMRLEEIALTDPYFIERSLYPNVDFYSGIILKAIGIPTSMFTVIFALARTVGWISHWKEMLSSPYKIGRPRQLYTGNVQRDIIALKDRK

SEQ ID NO: 6699 - protein, 479 aa, Saccharomyces bayanus
MSAILSTTSKNFLSRNPARQCQSAQKALFALLSSRHYSSATEQTLKERFAEIIPAKAEEIKKFKKEHGKTVIGEVLLEQAYGGMRGIKGLVWEGSVLDPDEGIRFRGRTIPEIQRELPKAEGSTEPLPEALFWLLLTGEIPTDAQVKALSADLAARSEIPEHVVQLLDSLPKDLHPMAQFSIAVTALESESKFAKAYAQGVSKKEYWSYTFEDSLDLLGKLPVIASKIYRNVFKDGKITTVDPNADYGKNLAQLLGYENKDFVDLMRLYLTIHSDHEGGNVSAHTTHLVGSALSSPYLSLAAGLNGLAGPLHGRANQEVLEWLFKLREEVKGDYSKETIEKYLWETLNSGRVVPGYGHAVLRKTDPRYMAQREFALKHFPDYELFKLVSTIYDVAPGVLTKHGKTKNPWPNVDSHSGVLLQYYGLTEASFYTVLFGVARAIGVLPQLIIDRAVGAPIERPKSFSTEKYKELVKKIESKN

SEQ ID NO: 6700 - protein, 308 aa, Aspergillus nidulans FGSC A4
MTRTHPSSFQQLEKLGEGTYATVYKGRNCQTGEMVALKEIHLDSEEGTPSTAIREISLMKELHHDNILSLYDVVHTENKLMLVFEYMDQDLKKYMDTHGNHGQLEPAIVKSFAFQLLRGIAFCHDNRILHRDLKPQNLLINSKGQLKLADFGLARAFGIPVNTFSNEVVTLWYRAPDVLLGSRTYNTTIDIWSIGCIIAEMFTGRALFPGTTNEDQLQKIFRVMGTPSERTWPGVSQFPEYKSDFPVYPPQDLRQVVPRIDPYGLDLLRCMLRLQPDLRISAVDALRHPWFNDPVSDLPIDHGMEALT

SEQ ID NO: 6701 - protein, 204 aa, Paracoccidioides brasiliensis
MAQQQLQQLQTENVMRRKLVIIGDGACGKTSLLSVFTLGYFPTHYVPTVFENYVTDCRVDGRSVQLALWDTAGQEDYERLRPLAYSKAHVLLIAFAVDTPDSLENVRNKWIEEANERCPDVPIILVGLKKDLREDPLAIEEMRKKSLRFVSSKEGHDTAAQVGARKYLECSSLTGEGVDDVFEAATRAALLTFEKDRGSCCVIL

SEQ ID NO: 6702 - protein, 114 aa, Lycopersicon esculentum
MEMFGKIACFVVFCMVVVAPHAESLSCGEVTSGLAPCLPYLEGRGPLGGCCGGVKGLLGAAKTPEDRKTACTCLKSAANSIKGIDTGKAAGLPGVCGVNIPYKISPSTDCSTVQ

SEQ ID NO: 6703 - protein, 294 aa, Saccharomyces bayanus
MTVPYLNSGRNVASYLQTHSHQEKTLKERFSEIYPSHAQDVKQFVKEHGKTKISDVLLEQVYGGMRGVPGSVWEGSELDAEEGIRFRGRTIADIQKELPKAKGSSQPLPEALFWLLLTGEVPTQAQVENLSADLMSRSELPHHVVQLLDNLPKDLHPMAQLSIAVTALESESKFAKAYAQGISKQDYWSYTFEDSLDLLGKLPVIAAKIYRNVFKDGKIGEVDPNADYGKNLVNLIGSKDEDFVDLMRLYLTIHSDHEGGNVSAHTSHLVGSALSSPYLSLASGLNGLAGPLHG

SEQ ID NO: 6704 - protein, 286 aa, Listeria monocytogenes str. 4b H7858
MILPGNETIPYIGLGVFQVTEQEFIAGAVEKAIEVGYRLFDTAAVYNNEAIVGQAIASSAVSREELFISSKVWNGDLGFDETLFAFERTLRNLKLDYLDLYLIHWPVAGKYRDSWRAMERLHDEKLIKSIGVANFKQHHLSDLLVAANEKPVLNQVETHPLLPQNDLRKYLAEQNIAHAAWSPLAKGILMQNPVITEIAKKHQASVDQVILQWHLNRNTIIFPKSITSSRIEENSRLSYFQLDAIDMEKIDRLETGKRVGPDPDDLEYFLSSIERERAYLSGENAE

SEQ ID NO: 6705 - protein, 491 aa, Zea mays
  misc_feature (377)..(377): Xaa can be any naturally occurring amino acid
MAREQLEESIVADGNGKEEEVGVMGIGAADGADDQHGGGKLSMKSLLWHGGSVWDAWFSCASNQVAQVLLTLPYSFSQLGMLSGVLLQIFYGFLGSWTAYLISVLYVEYRSRKEKEGVSFKNHVIQWFEVLDGLLGPYWKAAGLAFNCTFLLFGSVIQLIACASNIYYINDRLDKRTWTYIFGACCATTVFIPSFHNYRIWSFLGLGMTTYTAWYLAIAALLNGQAEGVAHSGPTKLVLYFTGATNILYTFGGHAVTVEIMHAMWKPAKFKYIYLLATLYVFTLTLPSSAAMYWAFGDELLTHSNAFSLLPKTRWRDAAVILMLIHQFITFGFACTPLYFVWEKVIGMHDAKSIFKRALARLPIVVPIWFLAIIFPXFFGPINSAVGALLVSFTVYIIPALAHVLTYRTASARMNAAEKPPFFLPSWTGMFVLNMFIVVWVLVVGFGLGGWASMVNFVRQIDTFGLFAKCYQCPKPPVPAAAQSPAPLPHH

SEQ ID NO: 6706 - protein, 204 aa, Ustilago maydis 521
MASHQEEVSLSEPGTSELHHAQSTDAAGVEPTSTDTTADVTAMTDEDAEIEAMKQRVAEMEAEAAKLRELQQAAGEAGGAGLHPTEEEREEVDSRSIYVGNVDYGATPEEVQQHFQSCGTINRVTILCDKFTGHPKGFAYVEFAEPSLVANAMVLNESLFRGRLIKVTAKRTNMPGLSARGRGRGRGRGRPFRGRGRGRGRGYY

SEQ ID NO: 6707 - protein, 283 aa, Listeria monocytogenes EGD-e
MKTVKLNNGVEVPILGFGTYQITDAAEAEHAVKDAIKAGYRHIDTAQSYMNEEAVGRGIAASGVDRKELFITTKIWVENVSYKGVMSSFDRSLKRLGLDYVDLLLIHQPFNDVYGAWIAMEELQASGKIRAIGVSNFSPDRVIDLAAFNEVTPQVNQIEVNPFQQQTANLAILRKEGVAIEAWAPFAEGKNDIFNNPVLTKIGAKYGKSAAQVILRWLVEQDIIVLAKSVKPERMAQNLAIFDFELTEADKEEIAGLDQGESQFFSHADPEMVKWMASRKLNV

SEQ ID NO: 6708 - protein, 158 aa, Staphylococcus aureus subsp. aureus MRSA252
METIYDFVVETNKGVTYKLDAYKGDVMLIVNTASECGFTSQFEGLQSLYEKYKDQGFVILGFPCNQFGGQEPGSGEEAAQNCKLNYGVTFPMHQKIDVKGEHQLPLFRYLTAAQHGFFNEKIKWNFTKFLVDREGNVVKRFAPQKKPVQIEREIEKLL

SEQ ID NO: 6709 - protein, 422 aa, Streptococcus pyogenes SSI-1
MILIKNGRVMDPKSQRDQVADVLIDGKQIVKIASAIECQEAQVIDASGLIVAPGLVDIHVHFREPGQTHKEDIHTGALAAAAGGVTTVVMMANTNPVISDVETLQEVLASAAKEKIHIYTNASVTQAFNGKDVTDFKALLEAGAVSFSDDGIPLESSKVLKEAFDLANANQTFISLHEEDPQLNGVLGFNEGIAEEHFHFCGATGVAEYSMIARDVMIAYDRQAHVHIQHLSKAESVQVVAFAQQLGAKVTAEVSPQHFSTTEDLLLTAGTSAKMNPPLRTQRDRLAVIEGLKSGVITVIATDHAPHHKDEKAVDDMTKAPSGMTGLETSLSLGLTHLVEPGHLTLMSLLEKMTLNPALLYGFDAGYLAENGPADLVIFADKQERLITENFASKASNSPFIGNKLKGVVKYTIADGEVVYPN

SEQ ID NO: 6710 - protein, 174 aa, Lactuca sativa
MASISSSAIATVNRTTSTQASLAAPFTGLKSNVAFPVTKKANNDFSSLPSNGGRVQCMKVWPPIGLKKYETLSCLPPLSDEALSKEIDYLIRNKWIPCLEFELEHGFVYREHHHSPGYYDGRYWTMWKLPMFGCTDSAQVMKEVGECKKEYAGTEFAKGSLKVKLLKWPRSPLQ

SEQ ID NO: 6711 - protein, 159 aa, Triticum aestivum
  misc_feature (17)..(17): Xaa can be any naturally occurring amino acid
  misc_feature (92)..(92): Xaa can be any naturally occurring amino acid
  misc_feature (106)..(106): Xaa can be any naturally occurring amino acid
  misc_feature (140)..(140): Xaa can be any naturally occurring amino acid
  misc_feature (146)..(147): Xaa can be any naturally occurring amino acid
MSDSEDHHFESKADAGXASKTYPMQAGRHPGRAASSVIKNRPCKVVEVSTSKTGKHGHAKCHFVALDIFNGKKLEDIVPSSHNCDVPHVDRXTEYQLIDISEDGFXVSLLTDNGNTKDDLKSQLDDAILTNSRMVAEGKXSTDIMXXGEEKFGIKDSAK

SEQ ID NO: 6712 - protein, 445 aa, Pisum sativum
GGFSVVRKGTRKSNNDDEKSQSQSKSQSQSQVAIKTLRRLGTSNNLPRKKDGGENSTETMMKFPTMRQVSVSDALLTNEILVMRRIVENVSPHPNVIDLYDVYEDTNGVHLVLELCSGGELFDRIVAQDKYSETEASTVVHQIVAGLEAIHRANIIHRDLKPENCLFLDVGKDSSLKIMDFGLSSVEEFTDPVVGLFGSIDYVSPEALSQGKITTKSDMWSLGVILYILLSGYPPFIAQNNRQKQQMILNGNFSFYEKTWKGISQSAKNLISSLLTVDPAKRPSAQELLSDPWVKGEKAKDDQMDPEIVSRLQRFNARRKLRAAAIASVWSSTIFLRTKKLKSLVGSYDLKEDEIENLRMHFKKICADRDNATLCEFEEVLKAMKMPSLIPFAARIFDLFDNNRDGTVDMREILCGFSSLKNSKGEDALRLCFQMYDTDRSGCIT

SEQ ID NO: 6713 - protein, 273 aa, Triticum aestivum
HSITSLYKKAGWYRSGIPGISSTHASGDEYLAAVAKAKRKLRGFIAEKNCAPLMLRLAWHSAGTFDVATKTGGPFGTMKCPAELAHGANAGLDIAVRLLEPIKEQFPILSYADFYQLAGVVAVEVTGGPEVPFHPGRQDKPEPPPEGRLPDATQGSDHLRQVFSTQMGLSDQDIVALSGGHTLGRCHKERSGFEGAWTANPLIFDNSYFTELLSGEKEGLLQLPTDKTLLTDPAFRPLVDKYAADEDAFFADYAEAHLKLSELGFGEAVEGCC

SEQ ID NO: 6714 - protein, 276 aa, Thermosynechococcus elongatus BP-1
MSGEGMTAVSEPVQLTVPQMLAQLQGTDTSLRYYAAWWLGKFGLETATAAERQAIVSALIAALADEADRTELGGYPLRRNAARALGKLGDRQAVPALIECLRCEDFYVREAAAIALGQLGDPRAIAPLQSLLEGGVAMARLVPGRPHLVQPVEAVIESLGHLGATEAIALIEPFLAHEMPRVQFAAARALFQLTGDAVYGDRLLAALNSEDVQLRRTALLDLGAMGYLPAAEAILQAGVEASFKLIALHGILGQQLRQAAPAEQTLSLFQGLDQLL

SEQ ID NO: 6715 - protein, 329 aa, Ralstonia eutropha JMP134
MKTRTMSVPLDPELAAIVAAMREARAPAPFSGSPEHARERMRSAILAARARTPLPEVGAIEDGIAVHDGQRVPVRVYRPRTASAMLATVVFFHGGGFVLGSVELMDDIARKLCRDLDAVVVSVDYRLAPEHPFPAAHDDALAATSWAIRNVSALGGNPARIAVAGESAGANLAASTALLLRDQGETLAAQLLIVPGVDLARDTQKLEAARGEFPMLSPTDLRDISRLYMGERAALAGRFPPSPMHAVNVHRLPPAVVAVAGHDPLCEEGTRYAARLEAAGVPVCLLRFDDMFHPFFGFFEASASARRANNAICHTFKSWLHQHASPTST

SEQ ID NO: 6716 - protein, 500 aa, Amaranthus hypochondriacus
MAIRVPSRQLFIDGEWREPIKKNRIPIINPSTEEIIGVIPAATAEDVELAVAAARRALKRNKGEDWASASGAHRAKYLRAIAAKITEKKDYFAKLEAMDCGKPLDEAAWDIDDVAGCFEYYADQAEALDAKQKAPIALPMDTFKCHVLKQPIGVVGLISPWNYPLLMATWKVAPALAAGCSAVLKPSELASVTCLELAEVCREVGLPPGVLNILTGLGPEAGGPLACHPDVDKVAFTGSTATGSKVMSSAAQLVKPVTLELGGKSPIVIFEDVDLDKAAEWTAFGCFWTNGQICSATSRLLVHESIAAEFLDRLVKWCKNIKISDPFEEGCRLGPVVSKSQYEKVLKFISTAKSEGATILCGGSRPEHLKKGYYVEPTIISDVSTSMQIWREEVFGPVLCVKTFGSEDEAIELANDTQYGLGAAVLSKDLDRCERITKALQAGIVWVNCSQPCFCQAPWGGTKRSGFGRELGEWGIENYLNIKQVTEYISDEPWGWYKSP

SEQ ID NO: 6717 - protein, 304 aa, Zea mays
MAFLNMEQQTWAFTFGILGNIVSLMVFLSPLPTFYRVYRNKSTEGFQSTPYVVTLFSCMLWILYALLKPGAELLVTINGVGCVVETVYLAMYLVYAPKAARVLAAKMLLGLNVAVFGLVALVTMLLSDAGLRVHVLGWICVSVSLSVFAAPLSIMRQVIRTKSVEFMPISLSFFLVLSAVVWFAYGALKKDVFVAFPNVLGFVFGLAQMALYMAYRKPAAALVIIPEQSKEEVAEGKASCGGAEVHPIDIAEVHDLQTVVVDVDVEPVTYAAASGMVDGSVGRPRAPEQLVIKPDMVTVIAAEA

SEQ ID NO: 6718 - protein, 85 aa, Glycine max
TRPCEKTTEGDIKHLMKFCNSLHGGLNKLAELLEVERVGVCHQAGSDSLLTSCTFRKLRDTFFSGSTEKYAGVLYGLGVESGQTN

SEQ ID NO: 6719 - protein, 511 aa, Agrobacterium tumefaciens str. C58
MDMDAMTKLDVKQEAAALLDKMGVARDLYTGGDMASFSPVTGEQIASLRTVSVEGVAAVVDKADAAFRTWRNVPAPRRGELIRLLGEELRAFKTDLGRLVSLEAGKIPSEGLGEVQEMIDICDFAVGLSRQLYGLTIATERPGHRMMETWHPLGVVGVISAFNFPVAVWSWNAALALVCGNSVVWKPSEKTPLTALAVQGIFERAAARFGDAPEGLSQLLIGDRAVGEAMVDYPKVPLVSATGSTRMGRDVGPRLAKRFARAILELGGNNAGIVCPSADLDMALRAIAFGAMGTAGQRCTTLRRLFVHDSVYEELVPRLKKAYASVSVGNPLESSALVGPLVDKAAFDGMQKAIEAAKAAGGVVHGGDRVDTGAADAYYVKPALVEMPKQVGPVLEETFAPILYVMKYSDLDQAIDAHNAVAAGLSSSIFTRDIQESERFLSSEGSDCGIANVNIGTSGAEIGGAFGGEKETGGGRESGSDSWKAYMRRATNTINYSKALPLAQGVSFDIE

SEQ ID NO: 6720 - protein, 189 aa, Desulfovibrio desulfuricans G20
MMVSKLNPWNWFKKESEQEKTLPVKQTERGAREYASPLDHFHAEFDRMVDSMFSGFGMPSPRRLFDAASPMLGKSVIKPKVDIYGTDKEYVVEVDLPGIEEKDLSVELKDDVLILSAEKKHEEKTEEKGYYRVERSYGSFRRVLNVPDDADKEGINAKLNKGVLRITMPRNKAIETESRKIAIESSKED

SEQ ID NO: 6721 - protein, 366 aa, Cupriavidus necator
MTAMMKAAVFVEPGRIELADKPIPDIGPNDALVRITTTTICGTDVHILKGEYPVAKGLTVGHEPVGIIEKLGSAVTGYREGQRVIAGAICPNFNSYAAQDGVASQDGSYLMASGQCGCHGYKATAGWRFGNMIDGTQAEYVLVPDAQANLTPIPDGLTDEQVLMCPDIMSTGFKGAENANIRIGHTVAVFAQGPIGLCATAGARLCGATTIIAIDGNDHRLEIARKMGADVVLNFRNCDVVDEVMKLTGGRGVDASIEALGTQATFEQSLRVLKPGGTLSSLGVYSSDLTIPLSAFAAGLGDHKINTALCPGGKERMRRLINVIESGRVDLGALVTHQYRLDDIVAAYDLFANQRDGVLKIAIKPH

SEQ ID NO: 6722 - protein, 255 aa, Glycine max
EKQWQRSGIILSVSIGVLQSDLLAFNPTLPRWKLDAIEKCDVMVYTKIFLKFPYKFWPSGPDKEFFIYAHERRGYYTFWQHMENAYPGSNMLVVTLTNEESKRVEAQADEETLREAMAVLRDMFGPNIPNAIDILVPRWWNNRFQRGSYSNYPIISNHKLFHNIKAPVGRIFFTGEHTSERFNGYVHGGYLAGIDTSKALLEEMRKEKESQTLLLEPLLASLTMSKPETVSNIHKCDIPTQLYLSGKLGVPEAIL

SEQ ID NO: 6723 - protein, 318 aa, Pseudomonas putida KT2440
MSLNPDLAAYLQLVEAGRSAGKVLPMHALAADEARRQFEESSALIAGKADEPDCISDLSLTTRDGHTLPVRLYRPPQADPALAGAALLYLHGGGYVVGSLDSHDTLCWNLAQDAGVPVIAVGYRLAPQWRFPTASDDALDAWRWLVEQAEALGIDAQRLAVVGDSVGGSLATILANQLAAQRELPAPRLQVMIYPVTDASCRRPSVQRYGSGYLLEAQTLEWFYQQYATVPADRHDPRFSPLLGSVASNSAPALMLIAECDPLHDQGVAYARHLEQAGVAVQLAVIPGVTHDFMRMGSIIEEADEGLAMVVEALQQHL

SEQ ID NO: 6724 - protein, 170 aa, Arabidopsis thaliana
MNSSSNGMMNGSILSQQQHRTFIQMGTILKCVDNSCAKEVMCIQSLRGKKGARLGDIIVGSVKEANPIVQKKVKKDAVPKGKVKKGMVVYGVVVRAAMPKGRADGSQVKFDDNAIVVVGIKEKKGQNNSHGSKRKMEYNQPTGTRVFGPVPHEMRLRKQLKILSLAQHIV

SEQ ID NO: 6725 - protein, 231 aa, Triticum aestivum
MGERVKGTVKWFNVTKGFGFISPDDGGEDLFVHQSAIKSDGYRSLNENDAVEFEIITGDDGRTKASDVTAPGGGALSGGSRPGEGGGDRGGRGGYGGGGGGYGGGGGGYGGGGGGYGGGGGGYGGGGYGGGGGGGRGCYKCGEDGHISRDCPQGGGGGGGYGGGGYGGGGGGGRECYKCGEEGHISRDCPQGGGGGGYGGGGGRGGGGGGGGCFSCGESGHFSRECPNKAH

SEQ ID NO: 6726 - protein, 277 aa, Bacillus cereus ATCC 14579
MILTNLKDYTTLHNGVKMPWFGLGVFKVEDGSEVIDSVKAAIKNGYRSIDTAAIYQNEEGVGQAIRESGVSREELFITSKVWNSDQGYETTLQAFETTLEKLGLEYLDLYLVHWPVKGKYTESWKALETLYKDGRVRAIGVSNFHIHHLQDVFEIAEIKPMVNQVEYHPRLAQEELHAFCKEHNIQLEAWSPLMQGQLLDNPTLQEIATKYNKSTAQIILRWDLQNEVVTIPKSIKEHRIIENANIFDFELSADDMKAIQALNEDRRVGPDPDNFNF

SEQ ID NO: 6727 - protein, 194 aa, uncultured crenarchaeote
MDSRGYYAILGVSQSANFQEIKKSYRKLAKKYHPDKNKSPLAEETIKKINQAFEILSDRRKRKQYDLEASNIYDANDSTYEEKEENLSDQMQRNSYNFAKPESTSNLGFDNLLLDTIKSRFHILIEPSLCLAFGGCETIAPKVFVVDKSKHINPKARVQSETADTLDRIVLAAQACPTKAIKIIDRYTGNQIYP

SEQ ID NO: 6728 - protein, 518 aa, Zea mays
MAAITPPTQSEPSPQTGRPASSAAAAAKRGGGGAGAAGGPLMGKYELGRLLGHGTFAKVYHARHVDTGDNVAIKVLDKEKAVKSGLVPHIKREIAVLRRVRHPNIVHLFEVMATKTKIYFVMELVRGGELFSRVSKGRLREDTARRYFQQLVSAVGFCHARGVFHRDLKPENLLVDEQGNLKVSDFGLSAVAEQFRPDGLLHTFCGTPAYVAPEVLGRRGYDGAKADVWSCGVILFVLMAGYLPFHDKNIMAMYKKIYKGEFRCARWFSKDLTSLLMRILHTNPNTRITLPEIMESRWFKKGFKPVKFYIEDDQLHNVIDDEDGLLDMGPAGPVPPPLPPPPPPLPPPKVDGDESGSDSDSSISSCPASMLSDESQRPRGSLPRPASLNAFDIISFSRGFNLSGLFEEKGDEVRFISAEPMSDIITKLEDIAKLKSFKLRRKDWRICLEGTREGVKGPLTIGAEIFELTPPLVMVEVKKKAGDNEEYENFCDKELKPGMQHLVHHMVRAPSMLLTDAK

SEQ ID NO: 6729 - protein, 385 aa, Aspergillus fumigatus
MISARNFVAPARQCLRTTRVSSGFASHLSQLRGYASAADDRVAKFKGQKGPDGKYTVTLIEGDGIGPEIAQSVKDIFAAAKAPIKWEPVDVTPILKDGKTTIPEEAIKSVQKNYVALKGPLATPVGKGHVSLNLTLRRTFNLFANLRPCRSVAGYKTPYDNVDTVLIRENTEGEYSGIEHVVVDGVVQSIKLITREASERVLRFAFQYARSVNKKKVRVVHKATIMKMSDGLFLNTAREIAKEFPDIEFDAELLDNSCLKIVTDPTPYNDKVLVMPNLYGDILSDMCAGLIGGLGLTPSGNIGDECSIFEAVHGSAPDIAGKGLANPTALLLSSIMMLQHMGLHEHAARIQKATFDTLAEGKTLTGDLGGKAKTHEYAEAICKRL

SEQ ID NO: 6730 - protein, 363 aa, Pseudomonas aeruginosa UCBPP-PA14
MNSSPQANAAMRAAVWHGRHDIRVEDVPLPAEPPPGWVQIRVHWCGICGSDLHEYLAGPVFIPVEAPHPLTGLKDQCILGHEFSGEIVRLGNGVTGFALGQAVAADACQHCGTCYYCRHGLYNICENLAFTGLMNNGAFAEYVNVPANLLYALPAGFPSEAGALIEPLAVGMHAVKKAGSLLGQNVVVVGAGTIGLCTIMCARAAGAAQVIALEMSSARKAKALEVGASQVLDPSRCDALGEIRALTGGLGADVSFECIGNKHTAKLAIDAIRKAGKCVLVGIFEEPSEFNFFELVSTEKQLLGALAYNGEFADVIAFIADGRLDIAPLVTGRIGLEEIVERGFEELVNNKEHNVKIIVSPGG

SEQ ID NO: 6731 - protein, 180 aa, Triticum aestivum
MAGVGRNMVAPLLVLNLIMYLIVIGFASWNLNHFINGLTNRPGVGGNGATFYFLVFAILAGVVGAASKLAGVHHVRTWRGDSLATSASSSLVAWAITALAFGLACKEIHIGGYRGWRLRVLEAFVIILAFTQLLYVLALHSGLFGNQFGNHAGGYGAEHGGYGAGDPHNKGMGTGGVARV

SEQ ID NO: 6732 - protein, 284 aa, Glycine max
MTRLCSCRYYLKDAVLEGGIPFNKAYGMTAFEYHGTDPRFNKVFNKGMADHSTITMKKILETYTGFEGLKSLVDVGGGTGAVVNMIVSKYPTIKGINFDLPHVIEDAPSYPGVEHVGGDMFVSVPKADAIFMKWICHDWSDEHCLKFLKNCYEALPDNGKVIVAECILPVAPDSSLATKGVVHIDVIMLAHNPGGKERTEKEFEALAKGSGFQVKRVWSTPMRSFWHIIHQGKRVQRKSLRLFPKGKDSKVSELFAVLSTPPSWNFSKKFKFFGMNSCQAAFGF

SEQ ID NO: 6733 - protein, 293 aa, Methanocaldococcus jannaschii DSM 2661
MNQNNDFKCHIWFTEYHNNNVALSVRVKDILYREKSGFQEIEIIDTYDFGKALILDNTFQTTERDEFIYHELISHIPLFTHPNPRNVLVIGGGDGGTVREVVKHKSVETVDFVELDEKVIEACKKYMPKLSCEIDNEKVNLIITDGIKYVAETEKKYDVIIVDCPDPVGPAKGLFEKEFYKNVFKCLNDDGIMVQQSESPLYNLDLIQNICRYLKDAGFKIIMPYTYPMPTYPSGFWSFTLASKKYNPLEVDEARIKEALKDMETKYYDEEVHKGIFLAAPKFLKDAVKKALE

SEQ ID NO: 6734 - protein, 117 aa, Zea mays
  misc_feature (110)..(110): Xaa can be any naturally occurring amino acid
MATVDLEKLRMSGAGKAIGVLTSGGDAQGMNAAVRAVTRMGIYVGAKVFLIYEGYEGLVEGGENIKPANWLSGSDIMQLGGTIIGSARCKAFTTREGRLAAGYTLLRRGXTNLCVIG

SEQ ID NO: 6735 - protein, 289 aa, Neurospora crassa
MPETVTDMLSRRVKLSNGLSIPQIQLGLYMMSGPETTRAVRWALGAGYRGFDSAQWYYNEREAGQAILSFLSSPENTAGLTRKDVHFTSKLRDNSTNYDAVRASISKSVKASGLGYIDLFLLHSPLGGREARLTSWKAVEDAVLAGEVKMAGVSNYGVKHLDEVMSAPFKIKPLVNQIECHPFNTQPEIRAACEKYGIVIEAYAPLARGMRMKHPVLTAVAKKYGVTPAQVLVRWSVQHGFVTLPKSTKKERLVENADVGRFELAEEDMEKLDGLDEKLVTDWDPTDAD

SEQ ID NO: 6736 - protein, 304 aa, Kluyveromyces lactis
MVAPSQFKQLEKVGNGTYATVYKGLNKTTGVYVALKEVKLDSEEGTPSTAIREISLMKELKHDNIVRLFDVIHTENKLTLVFEFMDNDLKKFMDNRNKGNPHKGLEMDLVKYFQWQLLQGVAFCHENRILHRDLKPQNLLINNRGQLKLGDFGLARAFGIPVNTFSSEVVTLWYRAPDVLMGSRNYCTLIDIWSCGCILAEMIMGKPLFPGSNDEEQLKLIFDTMGTPVEQTWPQVTQLAKYNPLLPPHMPRDLKQLLQNNTEEVLDDNVVDLLHGLLQLNPDARLSAKDALNHPWFAEYNHAN

SEQ ID NO: 6737 - protein, 447 aa, Sinorhizobium meliloti 1021
MTHLLHRAIHAKLPVAVRGEGIRLFDAEGRAYIDASGGAAVSCLGHAHPDVLAALHAQLDRIAYAHTGFFTTEAAERLADRLVADAPDGLDHVYLVSGGSEAVEAALKMARQYFVEKGEPQRRHIIARRQSYHGNTLGALAAGGNEWRRAQFRPLLVETHHIDPCFAYRLQQAGESDTDYAARAAGQLEAKILELGADQVIAFVAETVVGATAGAVPPVADYLKRVRAICDKYGVLLILDEVMCGMGRTGTLHACEQDGVVPDLMTIAKGLGGGYQPVGAVLLSSAIFQAFSEGSGFFQHGHTYMGHPMAAAAGLAVQEVIRRDGLLENVVSMGDYLERCLVERLGNHHHVGDIRGRGLFRAVELVADRATKSPFDPGLKLNARIKKEAMARGLMVYPMGGTIDGQRGDHVLLAPPFILNREDVGQIVERLGDAVDAAIASLTKAAG

SEQ ID NO: 6738 - protein, 249 aa, Triticum aestivum
  misc_feature (78)..(78): Xaa can be any naturally occurring amino acid
RRRRGRRCHAQHPAGHQGAHGADQGGNDLKRIRFSRERFNKWQAQRWWAENYDKVMELYNVQRFNHQSVPLPTTPKSXDESSKEDSPVTPPLDKERVPRSLQRPTSGGGAMGYSSSDSLEHHSNHYCNGLHPHHGHQCYDSVGLASTPKLSSISGAKTETSSMDASMRTSSSPEEVDRSGELSVSISNASDQEREWVEEDQPGVYITIRALPGGIRELRRVRFSREKFSEMHARLWWEENRARIHEQYL

SEQ ID NO: 6739 - protein, 313 aa, Glycine max
MSTFMLKIFLLISIFQISFATRRLNELVQDQTQLLRYHNGPLLSGKISINLIWYGHFKPSQKAIVSDFITSLSPSSPHSTQPSVATWWKTTEKYYHHLSNTKKTSPLSIPLNKQILDENYSLGKSLTSKHLIQLASKGDHKNAINVVLTSADVAVEGFCTSRCGTHGSSSAGHAKNKNYKFAYIWVGNSEAQCPGQCAWPFHQPIYGPQSPPLVAPNNDVGIDGMVINLASLLAGTVTNPFGNGFYQGPAEAPLEAATACPGVYGKGAYPGYAGNLNVDSSTGASYNAHGANGRKYLLPALYDPATSSCSTLV

SEQ ID NO: 6740 - protein, 481 aa, Ralstonia eutropha JMP134
MNVFLNHIDGEWTACQSGRTFDNVNPADTGDIVGRFQASSAVDAQAAVAAAAAAFAGWKKTPVGKRAAVLNRAADHLEANADSIAAELTREEGKALTLARDEVLRSAQTLRFYAVEGQTFTGEVFPNDDPDQLVFSQREPLGVVTVIAPWNFPVSIPARKIAPALVTGNTVVFKPSSEAPLSGYRLAEALIKAGLPKGVLNFITGSAAEIGAAITEAPVVRAISFTGSSRAGEQIHRAVPLTTRTQMELGGKNPLIVMEDADLDRAVDLTIKGGFSLSGQACTGTSRVLVAESVKAAYTERLLAKVATLKVGSGMTAGMDLGPLASQKQMETVLRYIDIGKSEATLLCGGERLTGGEFDKGYYVAPTVFTDVTQQMRIAREEIFGPVIAILGFTDYADAIAKANDTEYGLAAAIVTSNPRYIHHFANDIEAGTVKINRTTTGNLVNAPFGGLKRSSTSTFRESGRTGLEFYTQIKTVYRGA

SEQ ID NO: 6741 - protein, 118 aa, Brassica napus
MVTGVKKVAKRGLIGGMSFAKEAGAINWFPGHMAAATRAIRSRLKLSDLVIEVRDARIPLSSANEDLQPQLSAKRRIIALNKKDLANPNVLNKWTHHFESKKQDCVAINAHSRSSVKK

SEQ ID NO: 6742 - protein, 376 aa, Populus tremula x Populus tremuloides
MASMYNPETSAVQDQQQNPTLLYDALYCSEENWVEEVREDWFQDELEGESYCSNNSNKLNTFPILLEQDLSWEDEELSSLFAKEEQNQLCKDLETNPSLARARCEAVEWILKVNEHYSFTALTAVLAVNYLDRFLFSVHLQKEKPWMAQLAAVSCLSLAAKVEETQVPLLLDFQVEDSKYVFEAKTIQRMEILVLSTLKWKMNPVTPISFLDYITRRLGLEHYLCLEFLKRCERMVLSILADSRSMPYVPSVMAAATMLYVIDNIEPSLAAEYQSQLLSILGIDKDKVEDCSKFLMEFALRDHFKLLSNKRKFCSLPGSPSGVVDVSFSSDSSNDSWSVASSVSSSPKPLSKKSRALQSLNNATTSDFSQHSSPVP

SEQ ID NO: 6743 - protein, 174 aa, Ustilago maydis 521
MSIVHLQSVEILNAEASFKDPYVFKITFECISPLQDDLEWRLVYVGSAGDEKYDQELDTCMVGPVPVGVNSFEFEAAAPSPSKIPPEDLLGVTVILLTASYRDQEFIRVGYYVNNAYESEELRENPPEKVDLTQVRREVLVSKPRVTRFNIKWDDSATASASTQQQGSAEGLTA

SEQ ID NO: 6744 - protein, 505 aa, Neurospora crassa
MGIIHEKAHYVVAVALVAFLIRAFVLSQWNTIKRNGERLKKPPNTLPLVGNGLQFLQSRWKLFSWFDACQRKFGYETVAISVPTLPPGVLIHDPRNLDYVFKNEGIFTKGNFVKGRTWDLFGNGIINAEGDFWKTQRKAGLSFLNTANLRVLTDVALPQYLSESISQLRSSTNGTVVDLQHMAMHADDEFTVSFDYASGGTAERFQNPLWFVTEIFLGAELRKSIAVVKNFGRHIVTKAVQDRQEKEFGEEEGKLDQISGSLIQSLLDAIQDEQMVADAALTYLSAGRDTTGQALTWTFYLLMRHPRVVAKIREEATQLLKEKNVTLTPDQFDSSLFNPVTMPYSMAVFYEVLRLYPPIPFEIRQCNEDVTLPDGTFLPKSSILVWCLWAMQRSKLTWGDDADEFRPERFLDGNKLISRSPSEFPVFYGGPRTCLGRKMAEAIAAQVIPTMACLFDFVPTSDEERTSKTSLTLPMEGGLPVTVKTLTGEEREKLVRIPEIRFSEH

SEQ ID NO: 6745 - protein, 177 aa, Zea mays
  misc_feature (33)..(33): Xaa can be any naturally occurring amino acid
  misc_feature (73)..(73): Xaa can be any naturally occurring amino acid
VHASRRAGVGPETGVLVVGAAPIGVVSLLAARXFGAPRVVVVNVKEHRLPVARSLGANAAVRVSPRAKALANXVKRIGAAMGWDIEVSLDCAGLTKPMSRALKPTGPAGKLCLVGLAPTKLPWPLRRRRARKLNVVGCSGQDPWPCDHFCQGKWTQALITPVRLSQRDVEEASRSAP

SEQ ID NO: 6746 - protein, 258 aa, Glycine max
MAINHETWAFIFGLLGNVISFMVFLAPLPTFYQIYKKKSTDGFQSLPYIVALFSSMLWIYYALVKKDASLLLITINSFGCVIETIYLAIFLIYAPSKTRLWTIKLLLMLNVFGFGAMLLSTLYLTTGSKRLSVIGWICLVLNISVFAAPLCIMKRVIKTKSVEFMPFSLSFFLTINAVMWFFYGLLLKDYYIALPNTLGFLFGIIQMVLYLIYRNAKPQGLEEPTKVQELNGHIIDVVKPNHVTKNGPVPVIETASNV

SEQ ID NO: 6747 - protein, 106 aa, Glycine max
MELGSYSDQSKSTFSLVDEDHTFANSVRFTLNQDPRVTFCGYSIPHPSDNRVNIRVQTTGDPAREVLKDGCQDLMLMCQHVRSTFDNAMTDFKRTQTNTEQEMDTK

SEQ ID NO: 6748 - protein, 142 aa, Triticum aestivum
  misc_feature (100)..(100): Xaa can be any naturally occurring amino acid
  misc_feature (107)..(107): Xaa can be any naturally occurring amino acid
  misc_feature (115)..(115): Xaa can be any naturally occurring amino acid
MAPAVMASSATTVAPFQGLKSTAGLPVSRRSGSAGLSSVSNGGRIRCMQVWPIEGIKKFETLSYLPPLSTEALLKQVDYLIRSKWVPCLEFSKGWLRLPXEHNSSPXYYDGRYWXTMWKLPMFGCNDATQVLSKWRSQRRIP

SEQ ID NO: 6749 - protein, 143 aa, Glycine max
  misc_feature (85)..(85): Xaa can be any naturally occurring amino acid
  misc_feature (93)..(93): Xaa can be any naturally occurring amino acid
  misc_feature (122)..(122): Xaa can be any naturally occurring amino acid
MASSMISSPAVTTVNRAGAGMVAPFTGLKSMAGFPTRKTNNDITSIASNSGRVQCMHVWPPVDKKKFETLSYLPYLDNTQLAKEXEYLLKKEXIPYLEFECKHDFIYHKHNRSPGYYNKHYXTIVKLAIYNYTNTSQILRDLQ

SEQ ID NO: 6750 - protein, 433 aa, Ustilago maydis 521
MVLEATMLVLDNSEWMRNGDYTPTRWEAQADAVSMIFDAKTNSNPESEVGLMTMAGKSPEVLVTLTQDIGKILAALHRSKIVGNSDLTTGINVASLALKHRQNKNQRQRVVVFVGSPVEQTEEDLVKLGKKLKKNNIAVDIISFGEDVENEEKLSKFIEAVNSGDNSHLLSIPAGPQLLSDIILSSPVLQEEGGDSGAGPSGSGGGGNNFEFGVDPSMDPELAMALRLSLEEEQARQRAAEGSSGSQVPSLPTVSEGAENITAATGSAGPAAGLAGSGSMVPKGAESITGEGHNADDESEEAMLQKAIALSQAGEAKTNDEDVDMTSAEPSGGRRAVVAGQVEGEEDEEMDEDEAIARAIQMSLQEGDGQDESNVQIGVQSAYSRLDPMRLLPTSRVNVSWHLYTRAVEQSRRHVTANMAELHERTHLAAAHN

SEQ ID NO: 6751 - protein, 118 aa, Glycine max
LQKNVLISITYVQIQSVDQLLSKLSYIPSTLFLSEVSYVEFLDRVHVSENKLRAQGLWEVPHPWLNLLIPRSEIHDFAEEVFGNILKDTSNGPILIYPVNQTRCVLYMDTTTQTNEFN

SEQ ID NO: 6752 - protein, 300 aa, Aspergillus fumigatus
MPFHKLVKNSAYYSRYQTKYRRRREGKTDYYARKRLITQAKNKYNAPKYRLVVRFTNRDIITQIVYSEITGDKVFASAYSHELKRYGITQGLTNWAAAYATGLLLARRTLKKLGLDEQFTGVEEPDGEYKLTEAVETDDGTRRPFKAFLDVGLVRTSTGARVFGAMKGASDGGIFIPHSENRFPGYDIESEELDAETLRNYIFGGHVSEYMETLADDDEERYRSQFAKYIENEIDAGDLEEIYAEAHKAIREDPFKKDEDEKPKKSKEEWKAESKKYKKAKLSREEKKARVEQKIRELAA

SEQ ID NO: 6753 - protein, 66 aa, Glycine max
TYRIDLCFVEKSSQVSDVEFSEAEEILIAMVYNLVGERWSLIAGRIPGRTAEEIEKYWTSRFSTSQ

SEQ ID NO: 6754 - protein, 126 aa, Brassica napus
MARTGTAKNGAGQFFLATLLLWLVSVVFEIAFNLRTELLWVLGGGCFFQLVNCFVRSYLSRDPLFVNTSVSLLHSIITSASVVFILVNQCLAKGVDEMFDHSELVGGSWRWAYQALCFSCGYFAYD

SEQ ID NO: 6755 - protein, 490 aa, Photorhabdus luminescens subsp. laumondii TTO1
MTNNVNTELLRQQAYINGQWVDADNQATFKVTNPANGEVIAHVSNMGAAETERAIAAAQQALPAWRTMTAKQRSQILQRWFQLMMANQPALAELLSREQGKSQTEAMGEIAYGASFIEWFAEEGKRTYGETIPSPLPGRRIVTIKQPIGVVAAITPWNFPNAMITRKVGPALAAGCTVILKPASETPLSALALAALAEQAGIPAGVFNVVTGIDAKAIGGAMTQSPIVRKLSFTGSTRVGKLLMAQSADTVKKLSLELGGNAPFIVFDDANIDAAVQGALIAKFRNSGQTCVCANRILVQETIYDTFAERLAQAVNQLQVGPASDAKSQQGPLINQAAVDKVEEHISDAISHGARILAGGKPHALGGLFFEPTVLADVNKSMLISQEETFGPIAPLFKFRDEAEAIHLANETEFGLAAYFYSRDIGRIYRVAEALESGMVGINEGLISNEAAPFGGIKQSGLGREGSRYGIEDYLEVKYLCFGGIEDTGV

SEQ ID NO: 6756 - protein, 488 aa, Photorhabdus luminescens subsp. laumondii TTO1
MTVISHWINGKNISSKTYFETTNPATGEVLAEVASGGQEEVDQAVAAAKAAFPKWADLPMKERARLMRRLGELIDENVPEIAAMETKDTGLPIHQTQNVLIPRASHNFNFFAEICQQMNGRTYPVDDKMLNYTLVQPVGVCALISPWNVPFMTATWKVAPCLALGNTAVLKMSELSPLTANRLGELALEAGIPAGVLNVVQGYGATAGDALVKHHDVRAVSFTGGTATGRQIMKNAGLKKYSMELGGKSPVLIFEDADIERALDAALFTIFSINGERCTAGSRIFIQQSIYPEFIKRFAERANRLRVGDPQDPTTQIGALISKPHWEKVSGYIRLGIEEGATLLAGGPDKPIDLPAHLKDGHFLRPTVLADVDNRMRVAQEEIFGPVACLLPFKDEAEGLRLANDVEYGLASYLWTQDVSKVLRLARNIEAGMVFVNTQNVRDLRQPFGGVKASGTGREGGEYSFEVFAEMKNVCISMGDHPIPRWGV

SEQ ID NO: 6757 - protein, 490 aa, Escherichia coli
MSRMAEQQLYIHGGYTSATSGRTFETINPANGNVLATVQAAGREDVDRAVKSAQQGQKIWASMTAMERSRILRRAVDILRERNDELAKLETLDTGKAYSETSTVDIVTGADVLEYYAGLIPALEGSQIPLRETSFVYTRREPLGVVAGIGAWNYPIQIALWKSAPALAAGNAMIFKPSEVTPLTALKLAEIYSEAGLPDGVFNVLPGVGAETGQYLTEHPGIAKVSFTGGVRSGKKVMANSAASSLKEVTMELGGKSPLIVFDDADLDLAADIAMMANFFSSGQVCTNGTRVFVPAKCKAAFEQKILARVEPIRAGDVFDPQTNFGPLVSFPHRDNVLRYIAKGKEEGARVLCGGDVLKGDGFDNGAWVAPTVFTDCSDDMTIVREEIFGPVMSILTYESEDEVIRRANDTDYGLAAGIVTADLNRAHRVIHQLEAGICWINTWGESPAEMPVGGYKHSGIGRENGVMTLQSYTQVKSIQVEMAKFQSIF

SEQ ID NO: 6758 - protein, 294 aa, Gibberella zeae PH-1
MSNEEITHPTIVDGWFREISDMWPGHAMTLRVEKVLVHEKSKYQDVLIFKSTDFGNVLVLDNVIQCTERDEFSYQEMIAHLALNSHPNPKKVLVIGGGDGGVLREIVKHDCVEEATLCDIDEAVIRLSKEHLPSMACGFDHPKSKTHVGDGFKFLNDYKNEFDVIITDSSDPDGPAEALFQKSYFQLLHDALREGGVITTQGSESPWLHLPLIARLKKDCGAIFPVAEYAYTTIPTYPSGQIGFMVCSKDPKADVKNPIRSWTKEEEDEKLRYYSSEIHKASFVLPKFAAKALE

SEQ ID NO: 6759 - protein, 276 aa, Bacillus subtilis subsp. subtilis str. 168
MSELWYTEKQTKNFGITMKVNKTLHTEQTEFQHLEMVETEEFGNMLFLDGMVMTSEKDEFVYHEMVAHVPLFTHPNPEHVLVVGGGDGGVIREILKHPSVKKATLVDIDGKVIEYSKKFLPSIAGKLDDPRVDVQVDDGFMHIAKSENQYDVIMVDSTEPVGPAVNLFTKGFYAGIAKALKEDGIFVAQTDNPWFTPELITNVQRDVKEIFPITKLYTANIPTYPSGLWTFTIGSKKYDPLAVEDSRFFDIETKYYTKDIHKAAFVLPKFVSDLIK

SEQ ID NO: 6760 - protein, 481 aa, Thermosynechococcus elongatus BP-1
MKAMSKLKLKRARRQKRPLLNLDWQPNFRWRSPALVACIPLALIIVAVWGVAAQAQDKPLTPEDVQGVLNTIWVLVAAILVIFMNAGFGMLETGFCRQKNAVNILAKNLIVFALATLAYWAIGYSFMFGTEGNAFIGWGGFFLSSEDPATYGLNPFPKGLPISVAFLFQAAFAGTAATIVSGAVAERIKFVDFLIFSLLLTGISYPITGHWVWGGGLLSSIGFLGENVAFKDFAGSTVVHAVGGWSALMGAAFLGPRIGKYAADGTPQALPGHNMGFAMLGCLILWIGWFGFNPGSQLAADEAVPYIAVTTNLAAAAGGVAATITAWLAIGKPDLSMIINGILAGLVSITAGCAGVSYWSAVIIGTIGGVIVVYSVLFFDRIKIDDPVGATSVHLVCGTWGTLAVGLFDKELGLFSGYGVTQLIAQIIGILTIGGFTVLLTSIFWLALKQTLGIRVSEEEEIKGLDIGEHGMEAYSGFLKE

SEQ ID NO: 6761 - protein, 422 aa, Staphylococcus aureus subsp. aureus COL
MTAEKITQGTEGLNVPNEPIIPFIIGDGIGPDIWKAASRVIDAAVEKAYNGEKRIEWKEVLAGQKAFDTTGEWLPQETLDTIKEYLIAVKGPLTTPIGGGIRSLNVALRQELDLFTCLRPVRWFKGVPSPVKRPQDVDMVIFRENTEDIYAGIEFKEGTTEVKKVIDFLQNEMGATNIRFPETSGIGIKPVSKEGTERLVRAAIQYAIDNNRKSVTLVHKGNIMKFTEGSFKQWGYDLALSEFGDQVFTWQQYDEIVENEGRDAANAAQEKAEKEGKIIIKDSIADIFLQQILTRPAEHDVVATMNLNGDYISDALAAQVGGIGIAPGANINYETGHAIFEATHGTAPKYAGLNKVNPSSVILSSVLMLEHLGWQEAADKITDSIEDTIASKVVTYDFARLMDGAEEVSTSAFADELIKNLK

SEQ ID NO: 6762 - protein, 373 aa, Staphylococcus aureus subsp. aureus COL
MAELQRGLEGVIAAETKISSIIESQLTYAGYDIDDLAENAQFEEVIFLLWNYRLPNEEELAHLKGKLNQYMTLNPRVYTHFEEYVTDHVHPMTALRTSLSYIAHFDPDAENESDENRYERAMRIQAKVASLVTAFARVRQDKEPLKPNPDLSYAANFLYMLRGELPTDIEVEAFNKALILHADHELNASAFTARCAVSSLSDMYSGIVAAVGSLKGPLHGGANEQVMTMLSEIGSIENVDAYLDEKFANKDKVMGFGHRVYKDGDPRAKYLREMSRQITKDAGREELFEMSVKMEKRMAEEKGLIPNVDFYSASVYHCMEIPHDLFTPIFAVSRSAGWIAHILEQYKDNRIMRPRAKYIGETNRKYIPLEERK

SEQ ID NO: 6763 - protein, 407 aa, Zea mays
  misc_feature (129)..(129): Xaa can be any naturally occurring amino acid
  misc_feature (160)..(160): Xaa can be any naturally occurring amino acid
  misc_feature (170)..(170): Xaa can be any naturally occurring amino acid
  misc_feature (180)..(180): Xaa can be any naturally occurring amino acid
  misc_feature (199)..(199): Xaa can be any naturally occurring amino acid
  misc_feature (219)..(219): Xaa can be any naturally occurring amino acid
MEVGDARNGSAAAALTKGSADDAARKPLPPCCVKAKARVPETEANCHDTVVSGWFTEPRSRFGKTSKVQYFNNPMWPGEAHSLKVEKILFQGKSPYQEILVFESSTYGNVLVLDGIVQLTDKDECAYQXNGCYFATEQIELKDVLPTLRLLMSSNFMGSXPYDISLLTDXVLVVGGGDGXGVLREIARHDSVETIDICXKEFFPNLSIGFKDPRVRLHXGDAVDFLRNSPEGKYDAIIVDSSDPIGPAQALVEKPFIQTIARALKPGGVLCNLAESMWLHTHLIQDMLAICRQTFKGAVHHAWTSVPTYPSGVIGFLLCAKEGRAVNFLTPVNPIEKIEGTAKAGRELRFYNSEIHRAAFVLPTFVRRELEAYTTPSASAENEKPKESVSEPQKIKILSNNAILTAT

SEQ ID NO: 6764 - protein, 322 aa, Staphylococcus aureus subsp. aureus COL
MKKIAVLTSGGDSPGMNAAVRAVVRTAIYNEIEVYGVYHGYQGLLNDDIHKLELGSVGDTIQRGGTFLYSARCPEFKEQEVRKVAIENLRKRGIEGLVVIGGDGSYRGAQRISEECKEIQTIGIPGTIDNDINGTDFTIGFDTALNTIIGLVDKIRDTASSHARTFIIEAMGRDCGDLALWAGLSVGAETIVVPEVKTDIKEIADKIEQGIKRGKKHSIVLVAEGCMTAQDCQKELSQYINVDNRVSVLGHVQRGGSPTGADRVLASRLGGYAVDLLMQGETAKGVGIKNNKIVATSFDEIFDGKDHKFDYSLYELANKLSI

SEQ ID NO: 6765 - protein, 512 aa, Glycine max
  misc_feature (31)..(31): Xaa can be any naturally occurring amino acid
  misc_feature (188)..(188): Xaa can be any naturally occurring amino acid
  misc_feature (210)..(210): Xaa can be any naturally occurring amino acid
  misc_feature (227)..(227): Xaa can be any naturally occurring amino acid
  misc_feature (327)..(327): Xaa can be any naturally occurring amino acid
EVRREKWQSPLPSRQLFTKMESGKFPLLNKXRFPIINPATEDIIGHIPAATKEDVDLAVDAAKRAFSHNKGKDWSSAPGSVRARYLRAIASKITEKKDELGKLEAIDCGKPLDEALADLDDVIGCFNYYAELAEGLDAKQNAPVSLPMETFKSYVLKEPIGVVALITPWNYPLLMATWKVAPALAAGXTAILKPSELASVDCLELSEICXEVGLPPRVLNIVTGLGXHEAGAPLAAHPDVDKIAFTGSSATGSKIMTAAAQLIKPVSLELGGKSPIIVFEDVDLDKAAEWTIFGCFWTNGQICSATSRLIVHESIATEFLNRIVKWXKNIKISDPLEEGCRLGPIVSEGQYEKILKFISNAKSEGATILTGGSRPEHLKKGFFVEPTVITDVTTSMQIWREEVFGPVLCVKTFSTEEEAIDLANDTVYGLGSAVISNDLERCERITKAFKAGIVWINCSQPCFTQAPWGGIKRSGFGRELGEWGLDNYLSVKQVTQYISDEPWGWYQSPSRL

SEQ ID NO: 6766 - protein, 498 aa, Hypericum androsaemum
MEFLLITQCSLLFVATYLLVNHVILRGRSKNNGSTKLPPGPRPLPIIGNLLALRDKPHKSLAKLARVHGPLVTLKLGQVTTVVVSSPATAREILQKHDATLSNRYIIDAIRAQGHHEAGLAWVPVGPTWRKFRKVCYSHIFTNQKLNSSQHVRQRTIQQLLAEARESCRVGEAMDVGKAAFRAALSSLSISVMSLDLADAASDTAREFKELARCIMNDVGEPNLADYFPVLKRFDPQGVRGRVEISFGRILDLFGSIIADRMEKRGADEDILDTLLTTHDENPELVEINDIKHLLLDLFVAGTETTSSTLEWAMAELLHKPTTMAKAKAELEQIIGKGNSIDQESEVSRLPYLQAVIQETLRLHPAVPLLLPRRAGEEVHVSGFTIPKDAQVLVNVWAMGRDPEVWEDPCSFTPERFLGSSIDVIGTCFELIPFGAGRRICPGLPLAMRMLQMMLGNLLLSFDWKLPDGVTPECMDMEDRFGITLQKAQPLLAIPLSL

SEQ ID NO: 6767 - protein, 164 aa, Zea mays
MDAVMFGLETPLMAALQHLLDVPDGDAGAGGDNKTGSGGSATRTYVRDARAMAATPADVKELPGAYAFVVDMPGLGTGDIRVQVEDERVLVVSGERRREEREDDAKYLRMERRMGKFMRKFVLPDNADVDKVAAVCRDGVLTVTVEKLPPPEPKKPKTIEVKVA

SEQ ID NO: 6768 - protein, 391 aa, Zea mays
  misc_feature (221)..(221): Xaa can be any naturally occurring amino acid
  misc_feature (295)..(295): Xaa can be any naturally occurring amino acid
MELEATMICIHNSEWMRNGDYAPSRFQAQADAVNLICGAKTQSNPENTVGVLVTPTSDLGKILACMHGLEVGAEANLAAAIQVAQLALKHRQNKRQQQRIIAFIGSPVKYDKKVLETIGKKLKKNNVALDIVDFGESDDEKPEKLEALIAAVNSSDSSHIVHIPPGENALSDVLLSTPIFTGEEGGSGFAASAAAAAATGASGFEFGVDPNVDPELALALXRLSMEEERARQEAIAKKAAEDTSNTEHNNVPSSNSDSVMAEGEPASNAAAGDKEQPKDDDDLLQQALAMSMEGXASGSAAVTDSAMAEAGAVDPDLALALQMSVQDANMSSDTDMSKVFEDRTFVSSILNSLPGVDPNDPSVKDLLASLHSQGEQEKKEDTSDKTEDDKN

SEQ ID NO: 6769 - protein, 171 aa, Zea mays
  misc_feature (146)..(146): Xaa can be any naturally occurring amino acid
MPDSDNDSGGPSNAGGELSSPREQDRFLPIANVSRIMKKALPANAKISKDAKETVQECVSEFISFITGEASDKCQREKRKTINGDDLLWAMTTLGFEDYVEPLKHYLHKFREIEGERAAASAGASGSQQQGELPRGAANAAGYAGXGAPGSGGMMMMMMGQPMYGGLPPQQ

SEQ ID NO: 6770 - protein, 338 aa, Leuconostoc mesenteroides
MEALVLTGTKKLEVKDIDRPKVLPNEVLIHTAFAGICGTDHALYAGLPGSADAVPPIVLGHENSGVVAEIGSAVTNVKVGDRVTVDPNIYCGQCKYCRTARPELCENLSAVGVTRDGGFEEFFTAPASVVYPIPDNVSLKSAAVVEPISCAVHGIQLLKVTPYQKALVIGDGFMGELFVQILQAYGIHQVDLAGIVDEKLAMNKEKFGVKNTYNTMKGDKIPEGEYDVIIEAVGLPQTQEAAIEASARGAQVLMFGVGGPDAKFQMNTYEVFQKQLTIQGSFINPNAFEDSLALLSSGKLNVEALMSHELDYKTVDDFVNGKLGVVSKAVVKVGGEEA

SEQ ID NO: 6771 - protein, 220 aa, Zea mays
MPVQRSQRQRRILSFVGGLDLCDGRYDTPCHSLFRTLDGAHHDDFHQPNFATAAIAKGGPREPWHDIHCRLEGPVAWDVLYNFEQRWRKQGGKDLLIQLRDLADEIIAPSPVTFPNDPETWNVQLFRSIDGGAAFGFPDTPDDATRAGLVSGKDQIIDRSIQDAYIHAIRRARSFIYIENQYFLGSSYCWKPDGIKPEDIGALHVIPKELSMKVVSKIEA

SEQ ID NO: 6772 - protein, 316 aa, Ustilago maydis 521
MAGRIREVWAENLEVEMALLRDTIEKYPYVAMDTEFPGIVARPIGTFKGSSDYHYQTLRCNVDLLKLIQLGITLCDENGNLPPDVCTWQFNFRFSINDDMCAPDSLDLLTKAGLDFDRHERMGIDVEHFGELLITSGLALFDDVKWVSFHSGYDFGYLLKVVTCSPLPAQESDFFALLRVWFPCIYDIKFLMRSCKTLKGGLQDVADDLQVSRIGQQHQAGSDSLLTATTFFKMRQKYFDGSIDDSKYLGCLYGFSSSSSHVNGMVHYSQGRPVSVQSFHDASAVPRSVSGGYAAGGYGSNFGSPFKSTLSASTER

SEQ ID NO: 6773 - protein, 122 aa, Bdellovibrio bacteriovorus HD100
MSLTNDQIVEALSAKTVLEIAELVKTLEEKWGVSAAAPVAAAAAGPAAAVEEKTAFDVILVDAGANKINVIKEVRGLTGLGLAEAKALVEAGNKAVKEGATKEDAEKIKKALEAAGAKVTVK

SEQ ID NO: 6774 - protein, 358 aa, Ralstonia eutropha JMP134
MSKFHELTVASVTRETRDAVAVTFAVPEDLADTYRYVQGQHLTLRAGIGGEDVRRSYSICSAVQDRRLRVAIKRVDGGMFSNWANDALQPGMTLEVMPPSGHFHVPLSDTHSKHYVAFAAGSGITPMLSIIKTTLMTEPDSRFTLFYGNRASSSVLFKEELEDLKDTYLERFNLVFILSREQLDIDLFNGRIDGEKVRALLRHWVRPQDIDVAFICGPHSMMEEVSQALQENGVDKARIKRELFATSIPAARPAAHAHKQLGQQQCEVTVIQDGRTRQFTLEKNKETILDAALAQGIELPYSCKGGVCSTCRCKRIEGEVDMDVNFALEDYEVARGFILSCQSYAVTDKLVIDFDQET

SEQ ID NO: 6775 - protein, 181 aa, Zea mays
MASSMFSSTAVVTSAAQATMVAPFTGLKSSASFPVTRKANNDITSITSNGGRVSCMKVWPPIGKKKFETLSYLPDLSDVELAKEVDYLLRNKWIPCVEFELEHGFVYREHGNTPGYYDGRYWTMWKLPLFGCTDSAQVLKEVEECKKEYPGAFIRIIGFDNTRQVQCISFIAYKPPSFTEA

SEQ ID NO: 6776 - protein, 400 aa, Zea mays
  misc_feature (367)..(367): Xaa can be any naturally occurring amino acid
RLELEPLGCQGMGIPVGKLSLYTALGGVRPSACLPITLDVGTNNEELLNDEFYIGLRQRRATGQEYTDFLQEFMSAVKQNYGEKVLIQFEDFANHNAFDLLARYGTTHLVFNDDIQGTASVVLAGLIAAQTLLGGSLADHTYLFLGAGEAGTGIAELIALEISRQTKAPIEECRKKIWLVDSKGLIVSTRKESLQHFKKPWAHEHKPLSNLLDAVNAIKPTVLIGTSGKGQTFTKDVVEAISSFNERPIILALSNPTSQSECTAEQAYTWSKGQAVFATGSPFDPVEYNGKIHVPGQANNAYIFPGFGLGVVMSGAIRVHDDMLLAASEALAQQVTEENFEKGLIYPPFSNIRKISAHIAASVAAKXAYELGLASRRPRPKDLVKYAESCMYSPIYRNYR

SEQ ID NO: 6777 - protein, 361 aa, Saccharomyces cerevisiae
MTTAVRLLPSLGRTAHKRSLYLFSAAAAAAAAATFAYSQSQKRSSSSPGGGSNHGWNNWGKAAALASTTPLVHVASVEKGRSYEDFQKVYNAIALKLREDDEYDNYIGYGPVLVRLAWHTSGTWDKHDNTGGSYGGTYRFKKEFNDPSNAGLQNGFKFLEPIHKEFPWISSGDLFSLGGVTAVQEMQGPKIPWRCGRVDTPEDTTPDNGRLPDADKDADYVRTFFQRLNMNDREVVALMGAHALGKTHLKNSGYEGPWGAANNVFTNEFYLNMLNEDWKLEKNDANNEQWDSKSGYMMLPTDYSLIQDPKYLSIVKEYANDQDKFFKDFSKAFEKLLENGITFPKDAPSPFIFKTLEEQGL

SEQ ID NO: 6778 - protein, 487 aa, Arabidopsis thaliana
MGSKLKLYPLLNHSSVFHPDSRYQSAPTMEEEQQQLRVLFAKYEMGRLLGKGTFGKVYYGKEITTGESVAIKIINKDQVKREGMMEQIKREISIMRLVRHPNIVELKEVMATKTKIFFIMEYVKGGELFSKIVKGKLKEDSARKYFQQLISAVDFCHSRGVSHRDLKPENLLVDENGDLKVSDFGLSALPEQILQDGLLHTQCGTPAYVAPEVLRKKGYDGAKGDIWSCGIILYVLLAGFLPFQDENLMKMYRKIFKSEFEYPPWFSPESKRLISKLLVVDPNKRISIPAIMRTPWFRKNINSPIEFKIDELEIQNVEDETPTTTATTATTTTPVSPKFFNAFEFISSMSSGFDLSSLFESKRKLRSMFTSRWSASEIMGKLEGIGKEMNMKVKRTKDFKVKLFGKTEGRKGQIAVTAEVFEVAPEVAVVELCKSAGDTLEYNRLYEEHVRPALEEIVWSWHGDNHNNNIVKSNGNYVSDENSGSDC

SEQ ID NO: 6779 - protein, 71 aa, Triticum aestivum
MAPRQVGIVKSFNDEKGFGLITPAGGGADLFVHFRNIQASGFKSLKEGQQVTFVAVQGQKGMQANEVITEE

SEQ ID NO: 6780 - protein, 101 aa, Brucella melitensis 16M
MLPDDLLSINSIHRDVCEACGLNSYYVTKDIPMATGTVKWFNTTKGFGFIQPDQGGTDVFVHISAVQRAGLTTLDEGQKVSYEIVQDRRSGRSSADNLVAA

SEQ ID NO: 6781 - protein, 409 aa, Staphylococcus aureus subsp. aureus COL
MSLRDEALEMHKRNQGKLEVKPNVKVTNKEELSLAYSPGVAEPCKDIYEDKRKVYDYTIKGNTVAVITDGTAVLGLGNIGPEASIPVMEGKAVLFKSFAGINGVPIALNTTDTEEIIKTVKLLEPNYGGINLEDISAPRCFEIEERLKKETNIPVFHDDQHGTAIVTLAGLVNALRVVNKDIAKIKVVLNGAGAAGIAIVKLLYAYGVRNMVMCDSRGAIFEGRSYGMNPTKDVVAKWTNKDKIEGSLEEVVKDADVFIGVSVANALSQDMVKSMADNPIIFAMANPNPEIIPDDAKAAGARVVGTGRSDYPNQINNVLAFPGIFRGALEVEATHINEEMKKAAVEAIADLIDSSELNEDYCIPGPFDKRVAPSVARNVAKAAMESGVARIEVDPQDVYDKTMKLTDLQ

SEQ ID NO: 6782 - protein, 390 aa, Crocosphaera watsonii WH 8501
MATLLEQLREFTVVVADTGDIQAIETFTPRDATTNPSLITAAAQMPQYQSIVDDTLKTARKELGKDADESAVVTLAFDRLAVAFGLKILEIIPGRVSTEVDARLSYDTEATLEKARYLISEYEKAGVSRDRILIKIASTWEGIKAAEVLEKEGIHCNLTLLFGMHQAVACAEANVTLISPFVGRILDWYKKETGKEYAPTEDPGVMSVTTIYNYYKKFGHKTEVMGASFRNIGEICELAGCDLLTISPKLLDQLNSTEETLPRKLDPEAAAKMDIAKIAMDKAIFDKMHQEDKMAYEKLDEGIKGFTKALETLEEMLKERLTRIEGETRVNNAAADIFRVYDLDGDGFITREEWAGTDVVFDAIDINHDGKITPEEMAAGLGAAICLVEA

SEQ ID NO: 6783 - protein, 449 aa, Centaurium erythraea
MDVIFPLLVAFITWAIASSLTFRRFGRLPPGPFPVPVIGNIHQLGKHPNQSLAKLSKIYGPLMSLKLGTQTAIVASSSTVVREILQKHDQVFSSRTIPSALHAHDHHKFSMALLPASSRWRHLRKITKEQMFSVQRLDESQGLRQDKLKELRDYLHSCCVTGQAVNIGEAAFTTTLNLMSCTLFSVNFASFDSKFSDELKRDICAFVQVIAAPNLADFSPVLRHVDPQGLLKRTKTYMQKVFDSFEDIITKRLQERGTSQQDSLRRHDLLEALLDEMEKNDSAFTINDMKHLILDLFIAGADSTSSTTEWGMAELLHNPEKMEKAKAELNEVIGQKNLVEESDISRLPYLQAVVKEVFRLHPPGPLLVPHKADADVEIDGYVVPKNANVLVNVWALGRDSSSWADPEAFMPERFLDNEIDVKGQHFELIPFGAGRRMCPGLPLSYRMLH

SEQ ID NO: 6784 - protein, 143 aa, Glycine max
MAMAYKMATEGMNIKEECKRWFTEMKWKKVHRFVVYKIDERTRAVLVDKVGGPGEGYDELVAALPGDDCRYAVFDFDFVSVDNCQKSKIFFIAWSPAASRIRAKILYATSKQGLRRVLEGVHYEVQATERSEMGFDVIRERAQ

SEQ ID NO: 6785 - protein, 214 aa, Triticum aestivum
  misc_feature (8)..(10): Xaa can be any naturally occurring amino acid
  misc_feature (14)..(14): Xaa can be any naturally occurring amino acid
  misc_feature (21)..(21): Xaa can be any naturally occurring amino acid
  misc_feature (24)..(24): Xaa can be any naturally occurring amino acid
  misc_feature (36)..(37): Xaa can be any naturally occurring amino acid
  misc_feature (39)..(39): Xaa can be any naturally occurring amino acid
  misc_feature (42)..(42): Xaa can be any naturally occurring amino acid
  misc_feature (52)..(53): Xaa can be any naturally occurring amino acid
  misc_feature (66)..(66): Xaa can be any naturally occurring amino acid
  misc_feature (68)..(68): Xaa can be any naturally occurring amino acid
  misc_feature (77)..(77): Xaa can be any naturally occurring amino acid
  misc_feature (82)..(83): Xaa can be any naturally occurring amino acid
  misc_feature (91)..(91): Xaa can be any naturally occurring amino acid
  misc_feature (122)..(122): Xaa can be any naturally occurring amino acid
  misc_feature (135)..(136): Xaa can be any naturally occurring amino acid
  misc_feature (140)..(140): Xaa can be any naturally occurring amino acid
  misc_feature (157)..(158): Xaa can be any naturally occurring amino acid
  misc_feature (163)..(163): Xaa can be any naturally occurring amino acid
  misc_feature (167)..(167): Xaa can be any naturally occurring amino acid
MAPTVMAXXXTSVXPFQGLKXTAXLPVSRRSNGASXXSXSNXGRIRCMQVWXXEGIKKFETLSYLXPXNTEALLKQXDYLIXXKWVPCLEXSKVGFIFREHNASPGYYYGRYWTMWKLPMFXCTDATQVINEVEXXKKEXPDAYVRIIGFDNMRQVXXVSLIXFKPXGCEERGLKQNSPGQHIKVFAGFFDFWGCFLSHLFLVPKKNIGKGPFG

SEQ ID NO: 6786 - protein, 465 aa, Haloarcula marismortui ATCC 43049
MRLHWHRRDLRATDNAGLAAATPSDPVVPVFIFDTAVLDHAGPPRVAFMLDALDSLREWYRDKGSDLVVAEGDPTSVLPELAAQHGAEKVTWGKDYSGLARERDAAVRQALDDADVAREAVQNAVLHEPGEITTNDGDPYSVFTYFGRKWHDREKAAPYDPPSADTLADVDGDALPTLADLGFEEPEADVPAAGTEEARALLDDFLDENVYEYEERRDFPADECTSRLSAHLKFGTIGIREVYDRTQAAKEGTGGDRRDSVREFQSQLAWREFYTQVLFAHPHVVSSNYKSYENPIEWENDEELLQAWKDGDTGYPIVDAGMRQLRDEAYMHNRVRMIVASFLTKDLLIDWRHGYEWFREKLVDHDTANDNGGWQWAASTGTDAQPYFRIFNPMTQGEDYDPNAEYIKEYVPELRDAAPEIIHDWNDCSLTQRRSAAPEYPDPVVDHSERREEALAMFERARGDD

SEQ ID NO: 6787 - protein, 466 aa, Arabidopsis thaliana
MNSGDVFILSRSKGHDMLAPFTAGWQSADLDPLVIAKSEGSYVYDDTGKKYLDSLAGLWCTALGGNEPRLVSAAVEQLNTLPFYHSFWNRTTKPSLDLAKVLLEMFTANKMAKAFFTSGGSDANDTQVKLVWYYNNALGRPEKKKFIARKKSYHGSTLISASLSGLPPLHQNFDLPAPFVLHTDCPHYWRFHLPGETEEEFSTRLAKNLEDLIIKEGPETIGAFIAEPVMGAGGVIPPPATYFEKVQAVVKKYDILFIADEVICAFGRLGTMFGCDKYNIKPDLVTLAKALSSAYMPIGAILMSQEVADVINSHSSKLGVFSHGFTYSGHPVSCAVAIEALKIYKERNIPEYVAKVAPRFQDGVKAFASGSPIIGETRGTGLILGTEFVDNKSPNEPFPPEWGVGAFFGAECQKHGMLVRVAGDGILMSPPLIISPEEIDELISIYGKALKATEEKVKELKAQHKK

SEQ ID NO: 6788 - protein, 148 aa, Oryza sativa
DGLVGIPKCGKAIGALKGHLDYSFASAWHPDGNILATGSQDTTCRLWDIRNLSESVAVLGGRMGSIRCIKFSSDGRFLATAEPVDFVHIYDSYADYGRSHEIDLFGEIAGLSFSPDAEALYVGIADPTYGGLIEFNRRHQHHYLNCMW

SEQ ID NO: 6789 - protein, 316 aa, Buchnera aphidicola str. Bp (Baizongia pistaciae)
MNQLECLKKYTDIVVDSGDLVSINKFKLGDVTTNPSLIRQVMSLQKYQYIIYDSIRYAKKKGGSHKFKLENAIDKVSVILGSEILKNISGKISTEIDSRLSFNTNLCIERAKKLISMYEEHDIHRDRVLIKLAATWESVSAAKELKKENIQSNLTLLFSFAQAKICAEAGVFLISPFVGRIYDWYKSKSLIKSAMIDDDPGVNAVRKIYQYYKEYGYHTIIMGASFRNVDQVLALSGCDRLTISPNLLHKLQLSDDLVIRKLIPPKHKKLQPVCMSKSEFCWFHNEDAMAVEKLSEGIRQFGKDQQELENIINNNF

SEQ ID NO: 6790 - protein, 250 aa, Zantedeschia aethiopica
MGKSYPAVSEEYQTAVGKAKRKLRALIAEKNCAPLMLRLAWHSAGTYDVSTRTGGPFGTMRFQAELAHGANNGIDIAVRLLEPIKEQFPILSYADFYQLAGVVAVEVTGGPEIPFHPGREDKPAPPVEGRLPDATKGSDHLRQVFSQQMGLNDQDIVALSGAHTLGRCHKERSGFEGAWTTNPLIFDNSYFKELLSGEKEDLLQLPSDKALLSDPVFRPLVEKYAADEDAFFADYTEAHLKLSELGFAEC

SEQ ID NO: 6791 - protein, 432 aa, Dechloromonas aromatica RCB
MTTERKATLSIDGQAPVDFSIMSPTHGNDCIDIRTLGGKTGLFTYDSGFLSTASCKSKITFIDGDVGQLLYRGYPIEQLAENCNFLEVTYLLKNGELPNAKQKADFESTIKNHTMVHEQLSKFFSGFRRDAHPMAVMTGVVGALSAFYHDAMDFSDAEHRNVSFNRLVAKMPTIVAMAYKYNTGAPFMYPDNSLDYTANFMRMMFGNPCEKYVPNPVLVRALDTIFTLHADHEQNASTSTVRLAGSSGANPFACIAAGIACLWGPAHGGANEACLQMLEEIGDVSRVPEYIARAKDKNDSFKLMGFGHRVYKNFDPRAKLMRQVCNEVLAELGLENDRLFKLAMELERIALEDPYFVEKKLYPNVDFYSGIVQKAIGIPTEMFTCIFALARTVGWMTQWEEMISDPEYKIGRPRQLYMGAAKRDVVPLAQRG

SEQ ID NO: 6792 - protein, 202 aa, Glycine max
  misc_feature (43)..(43): Xaa can be any naturally occurring amino acid
MSGRVSGKVKWFNDQKGFGFITPDDGSEELFVHQSQIKSDGFXRSLAEGESVEFAIESESDGRAKAVDVTGPDGASVQGTRRGGDGGRSYGGGRGGGGGGYGGGGGYGGGGGYGGGGGYGGGGRGGGGGACYNCGESGHLARDCSQGGGGDRYGGGGGGGGRYGGGGGGRYGGGGGGGGGGGSCYSCGESGHFARDCPSSAR

SEQ ID NO: 6793 - protein, 636 aa, Zea mays
FHTGDWKIDESPVDGKKFDRQALEELSKEGVTLMMSDSTNVLSPGRSISESVVAGSLLRHISEAKGRVITTQFASNIHRIGSIKAAADLTGRKMVFVGMSLRTYLEAAFKDGKAPLDPSTLVKVEDMDAYAPKDLLVVTTGSQGEPRAALNLASYGGSHALKLSKEDVLLYSAKVIPGNETRVMKMMNRLTDLGPKIIMGKDSGLHTSGHAYREELEEVLRIVKPQHFLPVHGELLFLKEHELLGRSTGIRHTTVIKNGEMLGVSHLRNRRVLSNGFVSLGKEDLQLMYSDGDKAFGTSTDLCVDERLRIASDGIIFVSMEIFRPQKEHGLAQSGLKGKFKITTRCLWLDNGRLLDALYKAAHAALSSCPVNCPHSHMERMVAEILRKMVRKYSGKRPDVIAVATENTTAGFSEHLDTKASGNFGPSSATSHLSRSPATSLEGSYKTHPDNPEVDAEEILPETVRTTPDDATTSSNGEALFSSDLHQPKTLEHFWESFKSPTAVKIARIVNGGDKQNFGKIGIMGQDSLIQSAPAPVKSSKRNKWKPEEIKSLIQMRGEMNEKFQSVKGRMVLWKEISDTMLNQGVSRTPAQCKSLWTSLVQKYEESKDTESMKTWPYFSAMDKILSQQGEMATKG

SEQ ID NO: 6794 - protein, 370 aa, Senecio vulgaris
MAESNKEAIDSARSNVFKESESLEGTCAKIGGYDFNNGIDHSKLLKSMVSTGFQASNLGDAMIITNQMLEWRLSHDEVPENCSEEEKKNRESVKCKIFLGFTSNLISSGVRETICYLTQHRMVDVLVTTTGGIEEDFIKCLASTYKGKFSLPGADLRSKGLNRIGNLIVPNDNYIKFEDWIIPIFDQMLIEQKTQNVLWTPSRMIARLGKEINNETSYLYWAYKNNIPVFCPSITDGSIGDMLYFHSVSNPGPGLVVDIVQDVIAMDNEAVHASPQKTGIIILGGGLPKHHICNANMMRNGADFAVFINTAQEYDGSDSGARPDEAVSWGKISSTGKAVKVHCDATIAFPLLVAETFAVKKEKASKVNGF

SEQ ID NO: 6795 - protein, 122 aa, Panax ginseng
MIQPQTLLNVADNSGARELMCIRIIGASNRRYAHIGDVIVAVIKEAVPNMPLARSEVVRAVIVRTCKELKRDNGMIIRYDDNAAVVIDQEGNPKGTRVFGAIARELRQLNFTKIVSLAPEVL

SEQ ID NO: 6796 - protein, 358 aa, Triticum aestivum
  misc_feature (260)..(260): Xaa can be any naturally occurring amino acid
MAPAAASQHQATTTVAPTSGRKVVDEVSGWLRVMDDGSIDRTWTGPPEALPLMEPVQPYAVPRDGHTLHDLPGEPNLRVYLPEVDAGSAGRLPVIVQLHGGGFCISHPSWVLYHHFYARLACAVPAVVVTAELPLAPEHRLPAQLHTGVDVLRRLRSIAMSDEGSLDDPAAELLREAADMSRVFLVGDSSGGNLVHLVAARVGEDGADAWAPLRVAGGVPIHPGGSMRATRSKSELQDTPDSVFFTLDMLDKFLAMALPXGATKDHPYTCPMGPNAPPLESVPLPPMLVVVGEKDLIRDTNLEYCDALRAAGKEVEVLINRGMSHSFYLNKFAVDMDPTTGERAQELIDAIKSFVARH

SEQ ID NO: 6797 - protein, 299 aa, Triticum aestivum
ASTHASGWLGWLCGLTRTRPPRRRPQEESDKNAADARSDFDTCGLYADQLKRRCAEQFKEGVLGLEHLAAVDGLCEIVARGMGAAEGPRRYHINLSVFTSLPDMWAIEQLFPIIPIQRLQERPAVDGVLSDLTCDSDGKVDQFIGGRSSLPLHELPTHGTRGYYLGMFLGGAYQEALGGLHNLFGGPSVVRVSQSDGPHCFAVTRAAPGPSCADVLRAMQHEPEVMFEVLKQRTTDDGATAAALARAFGSMPYLSFDAEEAVAMSGAESSGMSSDSEGSAAGAAEDDDEEWEFMRGLTV

SEQ ID NO: 6798 - protein, 434 aa, Magnetospirillum magnetotacticum MS-1
MSHILRKFPNDPAKPRVVKAEGLYIHTEDGRKLLDMTAGTTTFGVLGYSHPEVLAAMQAQMGKFCHIDYNTWVDPNLEELAALLLSRAPRGLDKVYFPGNSGSEAMEAAMKLSYHVHHDSGKPGKTHYIARLQSFHGATLHGISISELPILAFYEPLLPDGRSKIAQHNPSLNRLPGESMEDYARRSAKELEDKILEIGPDKVGAFIGETMLGSLVGDVPPAPGYWKLIREVCDRYDVHLILDEIYCGLGRSGRIYCCDWDGIVPDFVCIGKNLAAGHAPLSAVVTNHRVEDIIAKGQGRIQHGHTHQGYSLGVAAALAVQRIVHTDAMLDHIQARGRQIVDTITTRLGGHPFFKEVRGRGLLQSFEYDCADKNGFGMTLAKRMLDEHATVINAKWHRVSFTPGYIITEAQLGRVLDDFVAVFESTASGWKTAG

SEQ ID NO: 6799 - protein, 180 aa, Triticum aestivum
  misc_feature (100)..(100): Xaa can be any naturally occurring amino acid
  misc_feature (110)..(110): Xaa can be any naturally occurring amino acid
  misc_feature (114)..(114): Xaa can be any naturally occurring amino acid
  misc_feature (121)..(121): Xaa can be any naturally occurring amino acid
  misc_feature (127)..(127): Xaa can be any naturally occurring amino acid
  misc_feature (131)..(131): Xaa can be any naturally occurring amino acid
MAPTVMASSATSVAPFQGLKSTAGLPVSRRSNGASLGSVSNGGRIRCMQVWPIEGIKKFETLSYLPPLSTEALLKQVDYLIRSKWVPCLEFSKLGSSSRXHNASPGYYDXRYWXTMWKLPXFGCTDXTQVXNKWKSQEGLPDAYSASDRQHRKCMSSSPTTGCKIRKAKQSQRQIKCMRL

SEQ ID NO: 6800 - protein, 399 aa, Bacillus thuringiensis serovar konkukian str. 97-27
MLENQINERSLLLHKELVGKIEITSKVEVNSADDLSLTYTPGVAESCKAIAADEETVYDYTARGNMVAVVSDGTAVLGLGNIGPKAAMPVMEGKSILFKKFANVDAFPLCLGTTDVDEIVTLVKNLEPTFAGINLEDIAAPRCFEIEKRLKEETNIPVFHDDQHGTAIVVLAAVINALKVVSKQMDHVKIVINGAGSAGIAIGKLLLKAGAQHITLVSLEGIVCEGEAWMNEAQIEVSKKTNREHVRGTLKEAIHQADIFIGVSAPNVLTKELVQMMNEKAIVFAMANPIPEIFPEDALEAGAAVVGTGRSDYANQVNNVLAFPGIFRGALDVRATDITEEMKLAAAYGIANIITDEERNANYVIPNPLDKRVVPSVAEAVAKAAIDSGVAQIMKIPSY

SEQ ID NO: 6801 - protein, 453 aa, Arabidopsis lyrata subsp. petraea
MESSISQTLSKVSDPTTALLIVVSLFIFIGFITRRRRPPYPPGPRGWPIIGNMLMMDQLTHRGLANLAKKYGGLCHLRMGFLHMYAVSSPDVARQVLQVQDSVFSNRPATIAISYLTYDRADMAFAHYGPFWRQMRKVCVMKVFSRKRAESWASVRDEVDKMVRSVSCNVGKPINVGEHIFALTRNITYRAAFGSACEKGQDEFIRILQEFSKLFGAFNVADFIPYFGWIDPQGINKRLVKARNDLDGFIDDIIDEHMKKKENQNAVDDGDVVDTDMVDDLLAFYSEEAKLVSEAADLQNSIKLTRDNIKAIIMDVMFGGTETVASAIEWALTELLRSPEDLKRVQQELAEVVGLDRRVEEADIEKLTYLKCTLKETLRMHPPIPLLLHETAEDTSIDGFFIPKKSRVMINAFAIGRDPTSWADPDTFRPSRFLEPGVPDFKGSNFEFIPFGS

SEQ ID NO: 6802 - protein, 344 aa, Oryza sativa (japonica cultivar-group)
MVGAVQEGIVREMNGGFEVMSGYDRSSMAPKQQQREEESKWYEEEIDDDLKLCYALNSVLHRGASKYQEIALIDTKHFGKALIIDGKMQSTEVDEFIYHESLIHPPLLFHPNPKTVFIMGGGEGSAAREVLRHNTVHRVVMCDIDQEVVDFCRTYLTVNWDAFASDKLCLIINDARAELEKSREKFDVIVGDLADPVEGGPCYQLYTKSFYQHIVKPKLNDRGVFVTQAGPAGVLTHKEVFSSIYNTLRHVFKYVKAYTAHVPSFADTWGWVMASDYPFSMNAQQINERIKERIDGELVYLSGESLISSTILNKSVYQSLLNETHVYTEDDARFIYGHGRARCA

SEQ ID NO: 6803 - protein, 147 aa, Crocosphaera watsonii WH 8501
MALLRYNPWTEMNALQRQINQLFDDGVLTTSERGLKEAIFAPSAELSETDEAVMLKLELPGVKAEDVDIQATKEAIYITGERKKETKSEENGVTRSEFRYGKFSRFIGLPALIDNTKISAEYKDGILNLTLPKAEEEKHKVVKITLG

SEQ ID NO: 6804 - protein, 485 aa, Magnetospirillum magnetotacticum MS-1
MIKHLINGKHVESASTIANLNPATNEVICQIAAGGEAEVARAVAAAKEAFPKWAGLAPAQRAKLLRKVGDLINQHVDEIAKLESLDTGQSYWRTKKMLVPRAADNFYFFADTCQHVDGETYPTNDHLNYTIYQPVGVVGLISPWNVPFMTATWKTAPCLAFGNTAVLKMSELSPLSADRLGQLILEAGIPAGVFNIVHGYGSAVGEALVKHPDVRGVSFTGSTATGNRIIQSGGLKKYSMELGGKSPNIVFDDCDFERAVDAAIVAVYGNNGESCTNGTRILVQDGIYDRFVAALAERTKKVVVGDPLDEATNVGPMITRDHWKKVTGYIELGIKEGARVVAGGLGEPEGLPAHLKNGNFVKPTVLADVDNSWRVAQEEIFGPVACVIRFKDEAEALKIANATTYGLASYVWTENGAKAIRMAEGIEAGLVFVNSQNVRDLRQPFGGIKGSGTGREGGHYSYEAFLEVKNVCVSKGNHHIPRWGV

SEQ ID NO: 6805 - protein, 307 aa, Zea mays
  misc_feature (41)..(41): Xaa can be any naturally occurring amino acid
  misc_feature (56)..(56): Xaa can be any naturally occurring amino acid
  misc_feature (90)..(90): Xaa can be any naturally occurring amino acid
ADIWSCCLRVFVLLAGCLPFHNANLMEMYRKISTSDIKYPXWLSPELQRVMPKLLXPNPNNRITIEKLLEHPMVKKEYRPAVVLAHPARXSSSLKDVQVAFSNADLLDSSSKVEQPADSSLKPASLNAFDIISHSRGFDLSSLFEVDQEQKASNSRFMTQKPASAIVSKLEQIAETERFMVKKQDGLVKLQGSKQGRKGQLAIDAEIFEVTPAFHVVEVKKSAGDTLEYEMFCRKGLRPSLSDICWSTRSEENMAPSIVSALPNCEPSPLTPISGRITQPLFIRLAIPAPFPFLAATTIHSSYFFSP

SEQ ID NO: 6806 - protein, 222 aa, Pseudomonas syringae pv. tomato str. DC3000
MEKNVFSLCVHNPEWMIMENSQGGQSLVWQPSQVSSKDREQHLRQTPKTVWLTGLSGSGKSTIAFALERALMDLGKLAYTLDGDNIRQGLCRDLGFSAEHRSENIRRIAEVARLMNDAGLIVISSFISPYEADREAARSIIGNERFMEVFISTPLETCIQRDPKGLYRRAVAGELKDFTGISAPYESPLYPVLQLDTRHVPIEECVARILDILQITKNHFRA

SEQ ID NO: 6807 - protein, 477 aa, Synechococcus sp. WH 8102
MTTPRVLFWHRRDLRLTDNLGLAAAAAISPAVTGVYVLDPQVISPSEHLLPMAPARLWFLIESLIELQQRWRDAGSRLLVVEGDPVQLLPQLAERIAAEAVVWNRDVEPYARERDRQVAQRLQADGRKVVVDWDQLLIAPELLKTGGGDPYRVYGPFLRNWRGQVQAKQPVTVPAPAGLVDLDPAAVPSGEPLMARRDSHGFKGTELCPCRPGEAAAMQQLTSFCDGALFGYEPDRNFPGVVGTSYLSAALSVGTLSPRQAWSAAQEAREQARSEEQLHAIAVWEQELCWREFYQQALFHFPELSDGPYREQWRRFPWENNEDWFDFWREGQTGMPIIDAAMRQLNQTGWMHNRCRMIVASYLVKDLICDWRWGERAFMELEVDGDLAANNGGWQWSASSGMDPKPLRIFNPATQASKFDAAGDYIRQWVPELRHVNTKDLLSGEIGALERRDYPEPLVNHKTQQAKFKALYATIRS

SEQ ID NO: 6808 - protein, 109 aa, Triticum aestivum
MIEQVCTKKQAGTGPEFPGYRRPTRPRPPCSHHPSPLAFRWTLREREGGRRKMADEGTANCIDIILAIILPPLGVFFKFACGIEFWICLLLTFFGYLPGIIYAVWVITK

SEQ ID NO: 6809 - protein, 179 aa, Lycopersicon esculentum
MASFGGTTQKCKACEKTVYLVDQLTADNKVYHKACFRCHHCKGTLKLSNYNSFEGVLYCRPHFDQLFKMTGSLDKSFEGAPKTVRERSADQGSNSKVSSLFGGTQDKCVACKKTVYPLEKVAVDGTSYHRPCFKCSHGGCVISPSNYVAHEHRLYCRHHHTQLFKERGNFSQMEDHEKN

SEQ ID NO: 6810 - protein, 323 aa, Sporidiobolus salmonicolor
MVGTTTLNTGASLELVGYGTWQAAPGEVGQGVKVAIETGYRHLDLAKVYSNQPEVGAAIKEAGVKREDLFITSKLWNNSHRPEQVEPALDDTLKELGLEYLDLYLIHWPVAFPPEGDITQNLFPKANDKEVKLDLEVSLVDTWKAMVKLLDTGKVKAIGVSNFDAKMVDAIIEATGVTPSVNQIERHPLLLQPELIAHHKAKNIHITAYSPLGNNTVGAPLLVQHPEIKRIAEKNGCTPAQVLIAWAIVGGHSVIPKSVTPSRIGENFKQVSLSQEDVDAVSKLGEGSGRRRYNIPCTYSPKWDINVFGEEDEKSCKNAVKIK

SEQ ID NO: 6811 - protein, 160 aa, Gibberella avenacea
RAEYGKSGNITCMRKWLCCEKLVDKYPYIAMDTEFPGVVSRPMGGFRGKSDYHYQCLRTNVDMLKVIQIGSHSSMRTAKPAPRPVHGSSTSNLSQDDMYNESRSESLQPSRYRTSICSNVTESTLSNCLTPHPFRSRVLRQRAMDFIPRRLRFWLPHQAL

SEQ ID NO: 6812 - protein, 162 aa, Ustilago maydis 521
MSASDDEQHNATFETADAGSSLTFPMQCSALRKNGHVVIKGRPCKIVDMSTSKTGKHGHAKVHLVAVDIFTTKKYEDISPSTHNMDVPNVRREEYQLVNIDDGFLNLMTNDGDTKDDVRVPDGELGDQIQAAFDDGKDLMVTVVSAMGEEHCLSFKDAPQGK

SEQ ID NO: 6813 - protein, 1348 aa, Oryza sativa (japonica cultivar-group)
MPDIRSAPGRGKSDEDERRPIGSLFKLKRKRRAPGSAEAKGDSNPSVESEAPDGVVPGEMDDTLAIIKRKLRKPKKGKEGGDAVVVGSGAEGELLVEEEDVQGGVNVGDGVAEDKSNLEGVKVEVDEVIGGELKDSGGLGLEDSLSTLFKRSGRKSRQVSVKEEEGVEVAGSHGEEILEKGSGLVSDRVAKGTKRRRRRTKEEMKNAAAKSESAMAHEGSPNRKVGTSLPRKAKAEAKVKISNSNRRSKKSDEKPKASDDVLCHRSLGETIEQDAETRTVLDDGSRNSSDGASHRIEVSACLSNQPCLKPCSGELAEEVSLSAANAATDGVSNEHTYSETLLKERNDDAGCSHGKPPTLAIKSIPGKKPIEMPKKPVRQKDQLLSTDVDNKCVVGSGDTKDVNIENQPAFGIPESHVTGKGLHPHKMATSVKELDVVDVVAPTDFEDMENASKSKRVTRSSRKRKHGDMAYEGDIDWETLMQEQGLFSNLSAALVDYPLKSKDKIKISEVLDNGDGSGVAAVRAGLKAKAVTPIEKIKFKDILKRRGGLQEYLECRNMILSRWCKDVKHILDLAECGVSDVCLDDESPRQTLIRDVYLFLDQNGYINAGIASDKVKTDHESPPEDVEVSKLNESHERKSVSIQDCIVTEAVQDKKAVVKQTDCVLTEASNEESSSAAIHCDAQDLLPPLKSEELIFKEKNQGVLTEVEGGSLHQAEAADIEHSENKHEASDRVESGGYGKKIIVVGAGPAGLTAARHLQRQGFSVTVLEARNRIGGRVYTDRVSLSVPVDLGASIITGVEADIATERRADPSSLICSQLGLELTVLNSACPLYDVVTGDKVPDDLDTDLESEYNGLLDEMAQLFAQNGESAVGLSLEDGLEYALRKNRVTRSEQDDQLRNVSSAGAVDISESASTEKEIAHCGKEDKTDVLSPLERRVMNWHFAHLEYGCAAMLKSVSLPYWNQDDVYGGFGGAHCMIKGGYDTVLESLAKGLDVQLNHVVTEVLYGSEELGASGNSRKFVKISTSNGNEFVGDAVLITVPLGCLKAQTIKFSPSLPDWKLSSIDRLGFGLLNKIVLEFPEVFWDDNVDYFGATAEQTDLRGQCFMFWNLKKTVGVPVLIALLVGKAAIDGQSISSDDHVKNAIVVLRKLFKDASVPDPVASVVTNWGLDPFSRGAYSYVAVGASGRDYDILGRPVSDCLFFAGEATCKEHPDTVGGAILSGLREAVRIIDLVHSGKDYVAEVEALQTYQMQSDSERNEVKDMSNKLDACELSTALCKTSSDASYPLFSKETLLQEMFFSAKTTSGRLHLAKELLKLPPDVLKSFAGSKDGLSTLNSWILVSGLSSEF

SEQ ID NO: 6814 - protein, 137 aa, Brassica napus
  misc_feature (18)..(18): Xaa can be any naturally occurring amino acid
  misc_feature (53)..(53): Xaa can be any naturally occurring amino acid
  misc_feature (66)..(66): Xaa can be any naturally occurring amino acid
  misc_feature (110)..(110): Xaa can be any naturally occurring amino acid
QREVCNMRYRRKDENKSXEPSEIEMEREKKFGICMEMNSLVVLPNCTHSLCIXCYRDWRRRSQSCXFCRDSLKRVDSGDLWMFLEGTDTVNPSVIARENQKRLFVYIEKXPLVVPRQAFASSPYDLHVKVKKEKKGC

SEQ ID NO: 6815 - protein, 506 aa, Magnaporthe grisea 70-15
MALVAMQKRDKRKMLGSQTLPTVAAVLAAVVSASPVSGREVATVPDDLTGELGCEALKLVYGSGSVFLPGDAEYAEEAAAFWSNTQLMSPTCIFRPTSAEQVASAVVGNSGTGTQWAVRGGGHMGIRGANNIDKGMLIVMSGIKTLRISEDRTAVHVGPGNKWGDVYDYLAQFDVAVAGGRLGPVGVPGLLLGGGVSFYGHQAGWSADNVLEYEVVLADGRTVAASADENQDLFWALKGGSANFGIVTDFKLRTFPSKKVWAGVYTVSGEHMAAFEEAVARYSSEPQDPLSHAVPMVIPMAGGVTVASVILFYDSETVSEPECFRDFLAIPPISPPTTAFKTVAEFAKENGALVVPGVNDVFLAGTTVGKTQAELLEGVQITNKPIGAAWQAASEKMNPAGNALGIDTAAKGTYLAWALAIEWVDGPGHDEIVDKWVRETIAAMEEATKAAGLYDAFNYMGDAAGFQEVYAGYGEENQKKLLEISRKYDPERVTQKLWPGGFKVGV

SEQ ID NO: 6816 - protein, 647 aa, Zea mays
MATMKLGSKPEIFVLQDLTWRCTIELESDVVVEVGEMSFYLHKFPLLSRSGVLQRMISEYQAPADGGGMCTLQLDDIPGGAKAFELAAKFCYDVKIELNALNVVCLRCAAEYLRMTDDYAEGNLITQAECFLVDVLANWKDSIKALETCEGVLPTAEDLHLVSRCITALASKACGSDAAAPVVRNASVDKDALWNGIRSGDTTSSAAAAAAAAGMDWWYEDVSFLSLPMFKRLIQAMEAKGMRDESIAGAIMFYAGRFLPGLKRNTSFSNALASYGADGSGGAGGGMSSRNITPRAASVSAPSEGDQRYFLEEIVALLPTKKGVASTKFLLGMLRTAMLLHASPLCRENLERRIGAQLEDASLDDLLVPNLGYHVETLYDIDCVQRILDYFMSSTDGIGTGYTSPALAEEGGGSLGIPQGATPSSSLSPITMVAKLMDGFLAEVAPDTNLKLPKFQALAAVVPDYARPVDDGIYRAIDIYLKSHPWLSESEREQLCRLLNCQKLSLEACTHAAQNERLPLRVVVQVLFFEQLRLRTSIAGWFFVSDNAAGGDGARPHAGGAIVPKGTAAIAGCPQADADSDVEGDAPDGKETITDVKARVSDLEKECKSMKQEIRRLGKPRRSWSLLTRKCGFGAKVQQAQTAMSGK

SEQ ID NO: 6817 - protein, 462 aa, Streptomyces avermitilis MA-4680
MKAQDGMYIDGAWRPAAGPDMIEVVNPADEQVIGRVPAGTPEDVDAAVRAARAALTAWAATPPAERAARISALRDVLVARQDEIAETVTAELGSPLSFSQSVQVGLPILVAGSYAELAATYAFEERVGNSTVHHEPVGVVGAITPWNYPLHQIVAKVAPALAAGCTIVLKPAEDTPLTAQLFAEAVHEAGVPAGVFNLVTGLGPVAGQALAEHEDVDLVSFTGSTAVGRQIGATAGAAVKRVALELGGKSANVILPSADLAKAVNVGVANVMANSGQTCSAWTRMLVHAERYEEAVELAAAAAVKYADRIGPLVNAKQRARVRGYIDKGVAEGARLVAGGPESTEPQGYFVSPTVFADVTPEMTIAKEEIFGPVLSVIRYEDEEEALRIANGTVYGLAGAVWAGDEAEAVAFARRLDTGQVDINGGRFNPLAPFGGYKQSGVGRELGAHGLAEYLQTKSLQF

SEQ ID NO: 6818 - protein, 455 aa, Mycobacterium tuberculosis CDC1551
MSTTQLINPATEEVLASVDHADANAVDDAVQRARAAQRRWARLAPAQRAAGLRAFAAAVQAHLDELAALEVANSGHPIVSAEWEAGHVRDVLAFYAASPERLSGRQIPVAGGVDVTFNEPMGVVGVITPWNFPMVIASWAIAPALAAGNAVLVKPAELTPLTTMRLGELAVEAGLDEDLLQVLPGKGTVVGERFVTHPDIRKIVFTGSTEVGKRVMAGAAAQVKRVTLELGGKSANIVFHDCDLERAATTAPAGVFDNAGQDCCARSRILVQRSVYDRFMELLEPAVHSIVVGDPGSRATEMGPLVSRAHRDKVAGYVPDDAPVAFRGTAPAGRGFWFPPTVLTPKRGDRTVTDEIFGPVVVVLTFDDEADAISLANDTAYGLSGSIWTDDLSRALRVARAVESGNLSVNSHSSVRFNTPFGGFKQSGVGRELGPDAPLQFTETKNVFIAVGEEM

SEQ ID NO: 6819 - protein, 291 aa, Triticum aestivum
FAVLDQIPAPGAGINQWYPGHIAKTEKELKGQLKLMDVVIEVRDARIPLATTHPKMDSWLGNRRRIIVMNREDMVSADDRNAWATYFSSQGIKVIYSNGQLGMGTMKLGRMAKSAASTVNTRRREKGLLPRPVRAGIVGYPNVGKSSLINRLLKRRMCPAAPRPGVTRELKWVRFGKDLELLDSPGILPMRISDQTAALKLAICDDIGERSYDFADVAAILVQILLRHPAVGSEAFRKRYKIDVDSDCGKLFVTKLSVHLFNGDTTQAAFRILSDFRKGRFGWVALERPPT

SEQ ID NO: 6820 - protein, 504 aa, Lycopersicon esculentum
MANRNVPIPRRQLYIGGEWREPVKKNRIPIINPATEEIIGDIPAATAEDVDIAVEAARKAIARDDWGSTTGAQRAKYLRAIAAKVLEKKSVLATLESLDSGKTLYESAADMDDVAGCFEYYAGLAEALDSRRMTPVNLNSDSYKSYVLREPLGVVGLITPWNYPLLMAIWKVAPALAAGCAAILKPSELASITCLELGEICREIGLPSGALNILTGLGPEAGGPLASHPHVDKISFTGSGPTGSKIMTAAAQLVKPVSLELGGKSPIVVFDDIDNLDIAAEWTLFGIFANTGQVCSATSRLIVQENIASAFMDRLLKWTKNIKISDPLEEDCKLGPVVSAGQYEKVLKFISNAKSEGATILCGGERPQHLKKGYYVQPTIITDVNTSMEIWKEEVFGPVLCVKTFKTEEQAIELANDTKYGLGAAVMSKDVKRCERFTKAFQTGIIWINCSQPTFNELPWGGKKRSGFGRDLGKWGLENFLNIKQVTEYTSAEPLAFYKSPSKN

SEQ ID NO: 6821 - protein, 405 aa, Arabidopsis thaliana
MPLSLQSPPCATLSASIRKGRWKTLAAGFSVTPLPAVNFSLRRSIPRILASASSSSSPASSSLEAGENNELNAVSAFSEIVPDTVVFDDFERFPPTAATVSSALLLGICGLPDTIFRNAVDMALADSSCAGLETTESRLSCFFNKAIVNVGGDLVKLVPGRVSTEVDARLAYDTNGIIRKVHDLLRLYNEIDVPHDRLLFKIPATWQGIEAARLLESEGIQTHMTFVYSFAQAAAASQAGASVIQIFVGRLRDWARNHSGDTEIESAIKSGEDPGLALVKRSYNYIHKYGYKSKLMAAAVRNKQDLFSLLGVDYVIAPLKVLQSLKDSPAIPDDEKYSFVRKLTPETATHYHFTNKELVKWDQLSLASSMGPASVELLSAGVEGYANQAKRVEELFGKIWPPPNV

SEQ ID NO: 6822 - protein, 213 aa, Wolbachia endosymbiont of Drosophila melanogaster
MEIFLDSVDLNEIKGLKEFIDGITTNPSLIAKSGRKDKYEDLVREICSIIKGPVSVEVVADSHEEMITEGLNLAKIADNVVIKLPLTHEGLISCKKLWTEHKIPVNITLCFSPGQALLAAKVGACFISPFVGRLDDISYDGLSLIEDICTIYSNYGFDTKVLVASVRSPAHVIEAARLGADSITVPAKVLRQLVNHPLTDQGLAIFEKDWGVK

SEQ ID NO: 6823 - protein, 177 aa, Arabidopsis thaliana
MSSNKIVLTSSDGESFQVEEVVARKLQIVKHLLEDDCVINEIPLQNVTGNILSIVLEYCKKHVDDVVDDDASEEPKGDDASEEAKQNLDAWDAEFMKNIDMETIFKLILAANYLNVEGLLGLTCQTVADYIKDKTPEEVRELFNIENDFTHEEEEEAIRKENAWAFEADTKHEDPKP

SEQ ID NO: 6824 - protein, 369 aa, Oryza sativa
MDAQYNPRTVEEVFRDFKGRRAGLVRALTADVEDFFRQCDPEKENLCLYGFPNEHWEVNLPAEEVPPELPEPALGINFARDGMQEKDWLSMVAVHSDAWLLSVAFYFGARFGFDKNDRKRLFGMINDLPTIFEVVSGKSKAKPPSANNHSNSKSKSSNKTKSSEPRAKQPKPQPQPPVKNEGREEEGGPDDEEGGGGGGGGGREEEHGETLCGACGESYGADEFWICCDICEKWFHGKCVKITPAKAEHIKQYKCPSCSGGNGGGGGVSGNGKQLKICSTKREAIISQYLVRDERSKNTSTHARSPLISDNPYEVISDIRIMLAEQYTTNAREDDFDAKPNDKDNQGEGNVAWGGINKELYSLQVTIQN

SEQ ID NO: 6825 - protein, 515 aa, Glycine max
  misc_feature (252)..(252): Xaa can be any naturally occurring amino acid
EWEMDQLLWRVLPLLTILVSFGVFFYLQDSYTAQFYALIKLPRDKCSLLPHRHFWISSKRIVTPQGIISGSVEINDGKIISVVEGHAKQGKPKQEEIIDYGDAVVMPGLIDVHVHLDEPGRTEWEGFDTGTRAAAAGGVTTVVDMPLNNYPTTVSKEKLKLKLDAAEDKIYVDVGFWGGLIPENALNTSILDGLLSAGVLGLKSFMCPSGINDFPMTTIDHIKAGLSVLAKYRRPIVVHAEIQQDFEKHLEXMSNLDPRAYLTYLNTRPPSWEEAAIKELVGVTKDTRKGGPLEGAHVHVVHLSDSSASLDLIKEAKRRGDSISVETCPHYLAFSSEEIPNGDTRFKCSPPIRDAYNREKLWEAVLEGHIDLLSSDHSPTVPQLKLLEEGDFLKAWGGVTSLQFDLPVTWSYGKKHGLTLEQLSLLWSKKPATFAGLESKGAIAVGNHADIVVWKPEVEFDLNEDYPVFLKHPSLSAYMGRRLSGKVLETFVRGNLVFKKGKHAPSACGVPILAK

SEQ ID NO: 6826 - protein, 176 aa, Triticum aestivum
  misc_feature (108)..(109): Xaa can be any naturally occurring amino acid
  misc_feature (123)..(123): Xaa can be any naturally occurring amino acid
  misc_feature (127)..(127): Xaa can be any naturally occurring amino acid
  misc_feature (130)..(130): Xaa can be any naturally occurring amino acid
  misc_feature (132)..(132): Xaa can be any naturally occurring amino acid
  misc_feature (146)..(146): Xaa can be any naturally occurring amino acid
  misc_feature (151)..(151): Xaa can be any naturally occurring amino acid
  misc_feature (159)..(160): Xaa can be any naturally occurring amino acid
  misc_feature (164)..(164): Xaa can be any naturally occurring amino acid
  misc_feature (166)..(166): Xaa can be any naturally occurring amino acid
MAPTVMASSATSVAPFQGLKSTAGLPVSRRSNGASLGSVSNGGRIRCMQVWPIEGIKKFETLSYLPPLSTEALLKQVDYLIRSKWVPCLEFSKVGFIFREHNASPGYXXAGNWAMWKLPKFGXCTDXTQXVXTKWKEVKKEYPDAXVRIIXFDNMRQVXXVSFXAXKPTGCEVRKG

SEQ ID NO: 6827 - protein, 259 aa, Candida albicans SC5314
MTLTTVSGDPITIGIGTGTSIKDLKRGQPTAENKARIVDILRYALSIGYNHIDTAEVYTTQPEVGTAIAGFQREKLWITTKYSVTSSMIKKKSFTPTDFVEQALDEMNTNYIDLLLIHFPPKPNDPYTIQSLWQEFVSIKATGKVRYIGVSNFDIPQLNTLLEIGTPTINQIQYYLGSDNLEVVEFCKNHGILVEAYGPLTPLRNPNPKTDALIEKLQNANHLTKSQALFRYLLDNNILPITTSFKKERLKEALHSYTY

SEQ ID NO: 6828 - protein, 422 aa, Pseudomonas aeruginosa UCBPP-PA14
MSDLKTAALEYHAQPRPGKLSVELTKPTATARDLSLAYSPGVAEPVREIARDAELAYQYTGKGNLVAVISDGTAILGLGNLGPLASKPVMEGKGVLFKRFAGIDVFDIEVDAESPQAFIDTVKRISITFGGINLEDIKAPECFEIERALIEQCDIPVFHDDQHGTAIVTAAGMLNALELAGKKLEEAKIVCLGAGAAAISCMKLLVSMGAKVENIYMIDRKGVIHAGRDDLNQYKSVFATETDKRTLADALEGADVFVGLSGANLLEPEDLKRMAPNPIVFACSNPDPEIKPELAHATRNDVIMATGRSDYPNQVNNVLGFPFIFRGALDVRATRINEEMKIAAALALRDLAKQPVPEDVCAAYGVDKLEFGREYIIPKPMDKRLITVVSDAVAKAAIETGVATLPYPKNYPLKSVDEVFNG

SEQ ID NO: 6829 - protein, 392 aa, Wolbachia endosymbiont of Drosophila melanogaster
MDHVVNAYNRLDTPIVRGEGAYLFDKDGKKYLDFAAGISTTSLGHCHPYITDKLKEQSSSLWHCSNIFTIPEQERLAEHLTTLTFADKVFFCSSGLEATEAAIKFIRRYFYSKGQAKRNRIITIEGGFHGRSIAAISAGGNEKSREGFAPLLSGFDKVPRNNIKALEEKINNEIAAVFLEPIQSEGGVYPLDVEYLQKVREITKAQGIILCFDEVQCGYGRIGSLFHYQNVGIEPDMLTCAKAMGNGFPVAACLVKDYIAEAITPGTHGSTYGGNPLAMTVGNAVLDIMLKEGFFDHVKRISKYLKEKLLLLAKEFPEMILEVRGEGLLMGIELATLVADKIISRSLDKGLIITRVLNNKVVRVTPPLIIEDEHVNAACNMLYDLFLKIKGI

SEQ ID NO: 6830 - protein, 302 aa, Pyrodictium abyssi
MQRELPRLLEDAVEVLRRRGPVVRLGAGSVLVAGDTHGYPEVSRWVLGLADELGVDAVVFLGDYVDRGPRGVENLSLLVERLLAEPGRVVLLRGNHESPSMNLYYGFRGEFAAKVGVEHLDILHGFYSCLPYAALMGRVLLVHGGVPCRECQGGPEEPLRLGEIEERLRGLFCRRWLLEWGDSVAVQLLWNDPRGELDWFAPSLRGPGIYYYGRLAWKGFLEANGLELIVRAHEAVDAHHVWTSSGRPVHGLEHGYTMGLEELRGSVVTVFSSLYHGAGAGALLLREGEVVFLRYPGGAQGL

SEQ ID NO: 6831 - protein, 173 aa, Oryza sativa (japonica cultivar-group)
MAGVGRTMIAPLLVLNLIMYLIVIGFASWNLNHYINGETNHPGVAGNGATFYFLVFAILAGVVGAASKLAGVHHVRSWGAHSLAAGAASALIAWAITALAFGLACKEIHIGGYRGWRLRVLEAFVIILAFTQLLYVAMLHGGLFSGNHAAGAGGYGGDYPADHHHKPAAAARV

SEQ ID NO: 6832 - protein, 391 aa, Wolbachia endosymbiont of Drosophila melanogaster
MTISPILPVYSPVNINFSHGKGIYLYDVDGERYVDFHSGIAVSSLGHTNSRLISALKLQGEKLWHISNTYNIPAANNFAEKLINNSFADTVFFSNSGSEAVECGLKIARIYQNGKGNKNRHRILTFHGAFHGRTFLTCATNDKQKFSELLNPYIDWCDNIEPNIESVKKAISSGIGVILIEPIQGQGGIKVMNEVFMKELRRLCDENDILLFFDCVQCGAGRTGKLFAYEHIGVEPDICALAKGIGGGFPLGACLATENAAKYMAVGMHGSTFGGNPLATSVGNAVLEELLSPGFLKNVEIRGKYLKNKLEDLASKFPIIEEVRGKGLMLGIKVKADNQKFAEELSHRGLLTVGVTSDNVVRILPPLIITEKEIDEGIEILTQYLSEKSSD

SEQ ID NO: 6833 - protein, 381 aa, Zea mays
FGSRKLDAQQKAHVSLPMDTFKSYVLKEPIGVVALITPWNYPLLMATWKVAPALAAGCAAILKPSELASVTCLELAEICKEVGLPPGVLNILTGLGPEAGAPLAAHPDVDKIAFTGSSATGSKIMTAAAQLIKPVSLELGGKSPIIVFEDVDLDKAAEWTIFGCFWTNGQICSATSRLIVHESIATEFLNRIVKWVKNIKISDPLEEGCRLGPIVSEGQYEKILKFISNAKSEGATILTGGSRPEHLKKGFFVEPTVITDVTTSMQIWREEVFGPVLCVKTFSTEEEAIDLANDTVYGLGSAVISNDLERCERITKAFKAGIVWINCSQPCFTQAPWGGIKRSGFGRELGEWGLDNYLSVKQVTQYISDEPWGWYQSPSRL

SEQ ID NO: 6834 - protein, 157 aa, Triticum aestivum
  misc_feature (41)..(41): Xaa can be any naturally occurring amino acid
PTTLEAKAGSGAFQGLPAIRPAPFRKGGHLVIRGRPCKAFXVSTSNNGKHGHAKCHFVAMTVLDVRNLEDIVLSSHSRGVPHVVRQDYQVIAITHDRYVSVVTQRVIPKDGLQLPTDDLPRGQIKTGFTDGKGPIQYVMHRMGEAQLCAVKEIGGGN

SEQ ID NO: 6835 - protein, 334 aa, Mesorhizobium sp. BNC1
MTAWKVAPALAAGCSCIVKPAEQTPLSAIRMAELAQQAGLPDGVLNILPGLGETAGQAIGRHNDVDIISFTGSTEVGGFFLRYSGESNLKVVGLEMGGKSPFIVLDDADLNDDLVEHAVSSAFWNGGQNCSANMRQLVDTRVADEFVERVVARAEKYKVGDPLDPSTDIGAMVTEEHMKRVVGYIERGESEGARRLTGGARQGRGYFIEPTVFSGLRPEMTIAREEIFGPVLGVMPVKGLDDALRIASDTIYGLHATVFTRDLDRALHLARRLPCGTVSVNGFSEGDIKTPFGGYKQSGSLSRDNGTEAMDQYLQTKTIWITLRGPSNRGSIAG

SEQ ID NO: 6836 - protein, 463 aa, Nostoc sp. PCC 7120
MADLTPNSSFSVTLRLQIPNRVGMLASITQAIASSGGNLGQIDLIEQTRQVSLRDLTVDAASTEHAETIVQAVKAIPDIKLVSVYDRTFNLHRGGKISITSRIPLKSVSDLAMAYTPGVGRVCTAIAQDPSQVYNLTIKQNTVAIVTDGSAVLGLGNLGPHAALPVMEGKAMLFKEFAGLDAFPICLATQDTEEIIQAVKNIAPVFGGVNLEDIAAPRCFEIEKRLRDELDIPVFHDDQHGTAIVTLAALFNSLKLVQKSLADIRIVINGAGAAGVAIARLLRKAGAEKIWMCDSKGIISTTRTDLNEEKQEFAVKAQGTLAGAVQGADVFIGVSAPGVLTPEMVKSMAKDAIVFAMANPIPEIQPELISKDVAVIATGRSDYPNQINNVLAFPGVFRGALDCRAQTITTTMYLEAASAIASLVNPSDLSREHIIPSVFDERVVTAVAAAVQRAAREEGIARG

SEQ ID NO: 6837 - protein, 454 aa, Enterococcus faecalis V583
MQAELVIKNGLVILETGEVITDVAVQGGKIVAIGQDLSGERVIDATGLVVSPGMVDAHVHITDPGGGYRDEWEGYVTGTAACAKGGVTTFMEMPLNQIPATVDKTSLEIKYKAGENKLKVDVGSFGGVVPTNLADGIQELDEGGVSGYKCFLGTCGDRSIEGDFQNVDDYSLYEGMKQVAKTGKVLAIHAENAPITDKLGAVAYQNGETTLAAYVATRPVFTEVEAIQKAILFAKETGCRIHICHVACQEGVEEVLKAQAEGVDVTCETCTHYLYFTTDELDAIGPVVKCSPPIRDADQQAALWNHVQTGGIAFVTSDHSPCTPDLKDTTNAFEAWGGISGVQNNVDVLFDEAVQKRGLSLKQFADMIAANPADRYHLAQKGRISIGKDADFVLIKPNAPYILKAEDLEYRNKISPYIGREIGAQVIQTILRGETIYAQETGVTEAFNGVFIKN

SEQ ID NO: 6838 - protein, 356 aa, Rickettsia sp.
GFMSTASCRSTITYIDGDQGILRHRGYDIKDLAEKSDFLEVAYLLIYGELPNSKQYNDFTKKVAHHALVNERLHYLFQTFCSSSHPMAIMLAAVGSLSAFYPDLLNFFKEADYELTAIRMIAKIPTIAAMSYKYSIGQPFVYPDNSLDFTENFLHMMFATPCEKYKVNPVVKNALNKIFILHADHEQNASTSTVRIAGSSGANPFACVSTGIASLWGPAHGGANEAVINMLKDIGSVENIPKYIAKAKDKNDNFRLMGFGHRVYKNYDPRAAVLKETCKEVLKELGQLDNNPLLQIAIELEAIALKDEYFIERKLYPNVDFYSGIIYKAMGIPPQMFTVLFATARTVGWMAQWKEM

SEQ ID NO: 6839 - protein, 159 aa, Corynebacterium glutamicum ATCC 13032
MTSIHDISVTLNDGTETTMADWAGHLLLIVNVASKCGLTPQYEGLQKLYEEYQDRGFFVIGVPCNQFNGQEPGTDAEVCAFAQNQYDVTFPLLSKTEVNGEGAHPLYKVLKEATDGSEIEWNFEKFLVDAEGNTIKRFAPRTEPSAAEVVEAIEENLPI

SEQ ID NO: 6840 - protein, 371 aa, Pyrococcus furiosus
LAKGLEDVYIDQTNICYIDGKEGKLYYRGYSVEELAELSTFEEVVYLLWWGKLPSLSELENFKKELAKSRGLPKEVIEIMEALPKNTHPMGALRTIISYLGNIDDSGDIPVTPEEVYRIGISVTAKIPTIVANWYRIKNGLEYVPPKEKLSHAANFLYMLHGEEPPKEWEKAMDVALILYAEHEINASTLAVMTVGSTLSDYYSAILAGIGALKGPIHGGAVEEAIKQFMEIGSPEKVEEWFFKALQQKRKIMGAGHRVYKTYDPRARIFKKYASKLGDKKLFEIAERLERLVEEYLSKKGISINVDYWSGLVFYGMKIPIELYTTIFAMGRIAGWTAHLAEYVSHNRIIRPRLQYVGEIGKKYLPIELRR

SEQ ID NO: 6841 - protein, 300 aa, Zea mays
MRTTTHATGATAGTKVGRGFPQHVRSPSASWIPSIGEEDDEEDEEVVVVEEDRVPREWTAQVEPGVQITFVSTAGGAGNDIKRIRFSRDMFNKWEAQRWWGENYDRVVELYNVQTFSRQQGVSTPTSSIDDATQRDSSFYSRAGSTRDSPVILPPTAVGREQPIARATSCRATAAAASTARAACNPSSSAVPDPSDHVWAHHFNLLNSAPAPAPAAPHLDPSRATTSSLDEASVSVSNASDLEATEWVEQDEPGVSITIREFGDGTRELRRVRFSRERFGEERAKVWWDQNRNRIHAQYL

SEQ ID NO: 6842 - protein, 500 aa, Glycine max
  misc_feature (403)..(403): Xaa can be any naturally occurring amino acid
  misc_feature (407)..(407): Xaa can be any naturally occurring amino acid
  misc_feature (409)..(410): Xaa can be any naturally occurring amino acid
  misc_feature (420)..(420): Xaa can be any naturally occurring amino acid
MGLVKKIGKYQLGRTIGEGTFSKVKLAVNGNNGQKVAIKVIDKHMVLENNLKNQAKREIRTMKLLHHPNIVRIHEVIGTKTKIYIVMEYVSGGQLLDKISYGEKLNACEARKLFQQLIDALKYCHNKGVYHRDLKPENLLLDSKGNLKVSDFGLSALQKHNDVLNTRCGSPGYVAPELLLSKGYDGAAADVWSCGVILFELLAGYLPFNDTNLMNLYGKIWKAEYRCPPWFTQNQKKLIAKILEPRPVKRITIPDIVEDEWFQTDYKPVFASEFDQNINLDDVDVAFNSIKENIRESTIPKSSSFINAFQLIAMSQDLDLSGLFEEQDEKKQRTRLGSKHTINETIEKIEAAATDVGLSIEKMNNFKIKMQPKQIMTRCSRSYLSAQVIEVAPTHCVIEISKXTGDXRXXHKFCESLSNXLKQKPDPSQSQDSVDCAAERKNKMLDATKSQKVKIANLFLAINLLEDGLNPCLFHFSEVHGSLTRMKQSTKKNHVANFLL

SEQ ID NO: 6843 - protein, 381 aa, Phanerochaete sordida
MAFSTLVALVALAAIARAAPTTDSAVCSDGTTVNNAACCAFIPLAQDLQANLFQNDCGEDAHEVIRLTFHDAIAISQSQGPTAGGGADGSMLLFPTVEPNFGANNGIDDSVNNLIPFMQKHNTISAGDLVQFAGAVALANCPGAPRLEFLAGRPNKTTAAIDGLVPEPQDSVTKILQRFADAGNFSPFEVVSLLASHSIARADKVDETIDAAPFDSTPFTFDTQVFLEVLLKGVGFPGAANNTGEVTSPLPTGSGADTGEMRLQSDFALARDSRTACFWQGFVNEQAFMASSFRAAMSKLAVLGHSRSALIDCSDVVPQPKPAVNKPATFPASTGPQDLELACTTSKFPTLTTDPGASETLIPHCSDGSMSCPAIQFDGPA

SEQ ID NO: 6844 - protein, 474 aa, Aspergillus nidulans FGSC A4
MWSPFLEVAKALREGHVVEFITQKYNEYGWTFEQNVLGRSGISTIEPENLKALLATQFNDFCLGTREREFGPLLGQGIFTLDGAGWSHSRALLRPQFTRDQVADLDLMESHISRLIELVPKDGSAFDIQRLFFLMTLDSSTHFLFGESVHCMDEGNVLARSTVNNAQGFANAFNTALDYLNWRSVAGNFYWMITSKEFRDANKRVHEVVDYYVHQAIEAKRHPEKKEPGRYIFAEALAADNDNPKVLRDNMLNILLAGRDTTASLLSSAFFYLSRHPAVWEKLRRVIIEEFGDVQNPKGEITHAKLKDLPYLRYVLNEVLRLQPPVPLNLRVAVKDTSLPVGGGPDGKSPVFVEKDQPVLYSVYAMHRRKDLWGPDADSFRPERWEENAKHGWEYLPFNGGPRICLGQQYALTEASYTMVRLMQRFSKVENGEPGLDEPLIRATLTMSHENGVKVRFKLQHVRRKPSPLQTCTR

SEQ ID NO: 6845 - protein, 377 aa, Phanerochaete sordida
MAFTTLFAFVALAAMTRAAPTAVCSDGTRVSNAACCAFVPLAQDLQQTLFMGDCGEDAHEVVRLTFHDAIAISQSQGPKAGGGADGSMLLFPTIEPNFGANNGIDDSVNNLIPFMQKHNTISAGDLVQFAGAVALANCPGAPRLEFLAGRPNKTIAAVDGLIPEPQDSVTKILQRFEDAGNFSPFEVVSLLASHSIARADKVDETIDAAPFDSTPFTFDTQVFLEVLLKGTGFPGQTNVTGEVASPIPVGSGEDTGEMRLQSDFALARDSRTACFWQGFVNEQAFMAASFRAAMAKLAVLGHNRNSLIDCSDVVPQPKPAVNKPATFPATKGPKDLELTCNARFPTLTTDPGAQETLIPHCSDGGMDCPAVQFDGPA

SEQ ID NO: 6846 - protein, 445 aa, Ralstonia solanacearum GMI1000
MKPAPHPLETTDLSYFWMPFTANRQYKAAPRLLVSAQGMYYRDADGREVLDGTAGLWCVNAGHCRKAIVDAITAQAAAMDFAPTFQMGHPVAFRAAEKVAEIMPAGLNRIFFVNSGSEAVDTALKIALAYHRARGEGQRTRFIGRERGYHGVGFGGISVGGIAPNRKAFSANLMPGVDHLPHTHAPEHNAFSKGQPAWGAHLADELERIVTLHDPSTIAAVIVEPLAGSTGVLVPPKGYLERLRALCDKHGILLIFDEVITGFGRLGAATASAFFGVTPDLLTMAKGINNAAVPMGAVAVRQSLHDAVIEAGAPGAIELFHGYTYSAHPLAAAAAVAAIDLYRTEGLFERARALSPAFEAAAHSLKGAPHVKDIRNLGLVAGIELEPRPGAVGARAYEVFLKCLERGVLVRYTGDTLAFSPPLIISEAEIARIFDTVRTVLQEVA

SEQ ID NO: 6847 - protein, 382 aa, Phanerochaete sordida
MAFASLLAIFALVAVASARPRPNPGAVCSDGTRVSNGACCAFIPLMQDLQQNVFQNECGEDAHEVIRLTFHDAIAISRSQGPKAGGGADGSMLLFPTVEPNFAANNGIDDSVNNLIPFMQKHNTISAGDLVQFAGAVALTNCPGAPRLEFLAGRPNKTIAAVDGLIPEPQDDVTKILKRFDDAGGFTPFEVVSLLASHSVARADKVDSTIDAAPFDSTPFTFDTQVFLEVLLKGTGFPGLSNNTGEVASPLPVGTGSDTGEMRLQSDFALARDERTACFWQSFVNEQEFMSASFKAAMSKLAVLGHNRNTLTDCSEIIPEPLPAVKKPATFPATTSAKDLQLTCRALRFPTLTTDQGAQQTLIAHCPNGSMNCTSVQFNGPA

SEQ ID NO: 6848 - protein, 455 aa, Magnaporthe grisea 70-15
MSSTTQAAANKRKRLTGGSTTSLPDEVAAAERAQISESRDASAEEGDTTAAETPATAPTSHPPIKRQRSSNNAVGDATVDLGEPSDTTEASVDIENRVGRKGRKSSNPEKEEESMAPPPIGKLTHPVGYRTNDPPVGRPVRIYADGVFDLFHLGHMRQLEQAKKAFPDVYLIVGVTGDAETHKRKGLTVLSGKERAETVRHCKWVDEVIENCPWIVTPEFLEEHKLDYVAHDDIPYGADEGDDIYGPIKAEGKFLVTQRTEGVSTTGIITKIVRDYEKYIARQLKRGTSRQELNVSWLKKNELDLKRHVQDLRENIRSNWTTTGQELSRELRQYWPASRPQSPAPSRPSLQVPNGDQLTSPQQQSSLREAQLRSPTTPGGANVNSNDFVAGYAVGLIGGVRSWMTKSRRSLRDERDDSSSRPPSDDSSEESEGKEKTTRTRRVVPKGNNAAATGA

SEQ ID NO: 6849 - protein, 243 aa, Triticum aestivum
  misc_feature (90)..(90): Xaa can be any naturally occurring amino acid
NLFGTTVVNCSLNWQTICRYYLKDVALEGGQPFHRAHGMTAYEYNSTDPRANCLFNEAMLNHSTIITKKLLEFYRGFDNVETLVDVAGGXVGATAHAITSKYPHIKGVNFDLPHVISEAPPYPGVQHIAGDMFKKVPSGDAILLKWILHNWTDDYCMTLLRNCYDALPMNGKVVIVEGILPVKPDAMPSTQTMFQVDMMMLLHTAGGKERELSEFEELAKGAGFSTVKTSYIYSTAWVIEFVK

SEQ ID NO: 6850 - protein, 508 aa, Arabidopsis thaliana
MGSANNEYEFLSEIGLTSHNLGSYVAGKWQANGPLVSTLNPANNQPIAQVVEASLEDYEQGLKACEEAAKIWMQVTAPKRGDIVRQIGDALRSKLDYLGRLLSLEMGKILAEGIGEVQEVIDMCDFAVGLSRQLNGSVIPSERPNHMMLEMWNPLGIVGVITAFNFPCAVLGWNACIALVCGNCVVWKGAPTTPLITIAMTKLVAEVLEKNNLPGAIFTAMCGGAEIGEAIAKDTRIPLVSFTGSSRVGSMVQQTVNARSGKTLLELSGNNAIIVMDDADIQLAARSVLFAAVGTAGQRCTTCRRLLLHESVYDKVLEQLLTSYKQVKIGNPLEKGTLLGPLHTPESKKNFEKGIEVIKSQGGKILTGGKAVEGEGNFVEPTIIEISADAAVVKEELFAPVLYVLKFKSFGEAVAINNSVPQGLSSSIFTRNPENIFRWIGPLGSDCGIVNVNIPTNGAEIGGAFGGEKATGGGREAGSDSWKQYMRRSTCTINYGNELPLAQGINFG

SEQ ID NO: 6851 - protein, 65 aa, Brassica napus
  misc_feature (17)..(17): Xaa can be any naturally occurring amino acid
  misc_feature (25)..(25): Xaa can be any naturally occurring amino acid
  misc_feature (29)..(29): Xaa can be any naturally occurring amino acid
  misc_feature (32)..(32): Xaa can be any naturally occurring amino acid
  misc_feature (58)..(60): Xaa can be any naturally occurring amino acid
  misc_feature (63)..(63): Xaa can be any naturally occurring amino acid
MSTFLMRILLALLVLAXTVSQQLEXESEXWCXADEQTPDDELQAALDWACSKGGADCXXXQQXNQ

SEQ ID NO: 6852 - protein, 471 aa, Triticum aestivum
  misc_feature (423)..(423): Xaa can be any naturally occurring amino acid
MGATGDSEVAAAEGAAAGCRARAALLGAYELGRTLGEGNFGKVKQARHRATGEHFAVKILDRGRVLSLRGADDQVRREIATLTMLAHPNVVRLHEVAASKTKIYMVLEFVNGGELFDRIAIKRKLSEREGTRLFQQLIDGVSYCHGKGVYHRDLKPENVLIDRKGNIKISDFGLSALPQHLGNDGLLHTTCGSPNYIAPEVLQNRGYDGSLSDIWSCGVILYIMLVGHLPFDDRNMVVLYQKIFKGDTQIPEWLSPGAQNLLKRILEPNPMKRINMAEIKLHEWFQKDYIPAAPYDDDDEDVRLGAILPIKQQISEAPGDKSTHQMNAFQLIGMASSLDLSGLFEEEGVSQRKIRFTSAHPPKDLFDKIEVSATQSGFHVQRAHSKLKITGNCNGPNNPTPFLVCAEVFALGPSLHGVELRKXHGDTAVYKKLCDRISSDLGIDKTFGMGSLFDDNLPGFDSRATTPLVAL

SEQ ID NO: 6853 - protein, 166 aa, Vitis vinifera
SRSRKEKENVSFKNHVVQWFEVLDGLLGPYWKAVGLAFNCTFLLIGSVIQLIACASNIYYINDKLDKRTWTYIFGACCATTVFIPSFHNYRIWSFLGLGMTTYTAWYLAIAALIHGQSEGVEHSAPTKLVLYFTGATNILYTFGGHAVTVEIMHAMRKPQKFKYIY

SEQ ID NO: 6854 - protein, 470 aa, Gibberella zeae PH-1
MAPSTIADFQDVPCHQAYTPIKPIHREGALMHRSLVQHPYMVESAQGIELKLSTGQTIIDGCGGAAVALIGHGREEVIHAITEQARKVSYVHTQSYTTAPAEELANVLLQGNPYGLEKAFFVGSGSEAVESALKLARQYHYEKGGLEKVHIISRRQCYHGNTMATMSISTNIARRAPYHGFLYPNVSHVSPAFAYHYKDSSESEDQFTARLLVELEEEFLRVGPQKVAAFIAETVVGATSGCVAAPAGYFQGVRALCDKYDVVMILDEIMCGIGRTGTFFAFEQEGVVPDITTVAKGLGGGYAAIAGVLIHKRVVDVLRQGSAAFNHGHTYQAHPISCAAALAVQRIVRRDNLVERCAEMGLVLEKMLKEDLSGCRSVGDIRGRGLFWGVEFVKDRQSKQPFDPAAKFGLLVQQLAFEKGVALYPGGATIDGVKGDHILLAPPFTVTEGSGGGGKNSLLGLTTAHKNMTI

SEQ ID NO: 6855 - protein, 351 aa, Streptococcus agalactiae NEM316
MRAATYLSANELSLTDKAKPQVIKPTDAVVRLVKTTICGTDLHILGGDVPACKPGTTLGHEGIGIVEEVGSAVNHFKVGDKVIISCVTACNTCYYCKHQLPSHCEDGGWILGHLIEGTQAEYVHIPHADGSLYHAPEGVCDDALVMLSDILPTSYEIGVLPSHIKPGDTVCIVGAGAIGLSALLTAQFYSPAKIIMVDLSQKRLEASKKFGATHTILSTSTQEVKEEIDKITKGRGVDVVLECVGYPATFDICQNVVSIGGHIANVGVHGKPVEFNLQDLWIKNITLNTGLVNANTTEMLLEVLETGKIDATQLVTHHFKLSEIEEAYKVFKAAEENNTLKVIIENDITPA

SEQ ID NO: 6856 - protein, 202 aa, Triticum aestivum
MRWSPPGPRELITYHHQRPFLPPSSSSRVLIHHPAQVMIKVAMSDSEDHHFESKADAGASKTYPMQAGAIRKGGFLVIKNRPCKVVEVSTSKTGKHGHAKCHFVALDIFNGKKLEDIVPSSHNCDVPHVDRTEYQLIDISEDGFVSLLTDNGSTKDDLKLPTDDAILTQLKDGFAEGKDLALTVMSAMGEEQICAVKDVGPR

SEQ ID NO: 6857 - protein, 1023 aa, Schizosaccharomyces pombe
MNAQPFHNNTSDVQSFQDIISNSYQKPLSLVDSTDRALPDSSLSSLSRSTFQFHKHHLSGNENPQPSSESPYFTNNERLNSSSFPQIHDNQLSPSFNTSYQAIPSSSSNRSRGGPYTPSIRDDSLLALLSFSSNHRLHSMPSQLQPFNNASSYTTPMAPFTASFSNKVSHSAYPTRRLPSQAKKTSAIERVPVNLNFLQSDNLVVQSSPQTNFENFEFPKKIPSKEDLETREVLLLPPQTSKLSNKNLDTKSFTDVNKISQQGFVEISSNSSKVTPNTSLHQSFGIASSSSNNYMQTSSELTSSTEKMNGSHPLQLSNKSLLSIHLMQSKNQGHVSMTGSDKLSSHVQSETENAPVSKPSKPNTLTEDEKPLQSTKLPGNSLTVGELYQEPKSIQLPELSVSRTTYSAQSSSVKNCNERIPSAKALKKQKHLVPENKSKLQYVWQKKESLPYANLTSASNTHFFLSENQNDTSERLTRTLRKSTKNYTFGSYILGRTIGTGEFGKVKLGWPLPKANSTIHRSTPQVVIKIVLSTKQNCQTSRLMREVAILKGLGNNHPHIVKYLDFVKTKHHFGIVLDYVNGGELFDYILARRRLEDSVACRLFAQLISGVAYLHSRGVVHRDLKLENILLDTNRNIVIADFGFATTFGHFNTLSEHSLPTEKPDLFSTSCGSPCYAAPELVNCKSGMYAGTQADIWSCGVILYAMLAGYLPFDDDPHNPNGENVPRLYRYICSTPLIFPEFFKSKARDILKKILVPDPAKRVRMSAIMNHAYLRSHVSLFETYNDDEATSLRPSPIRLLSQKSLASVSSVSSISTYSSSIELTPQITKTSLNREKPALHGSINLKHSTRPVVPIADGIYASTTLHPIDNAKNRLVSLLRRPKHKVKHAKVETRESPMKNKPTKKQHKRAFSMFERPTSQKAPLSPVESKINLMVAPKRVLNCASDSLRALLAGKTDKSFWGSRIPFLFNKLKSKQKAVSSSFNTENSFLILQAVSPLTFGGCFKEENAYGQKKQHMRHATVF

SEQ ID NO: 6858 - protein, 315 aa, Magnaporthe grisea 70-15
MAAATQKSCLQKLEEMLDVDVDDMDADYIRSMPIKPHDQTSNQAFVDVALAQESNKDLVFQVATEMKGSDWLAVYTRIAVLMCKKNLDLISGRVLLQTSPSKAYDTAATLAHARLYDAEFTRAGVPRDRFCIKIPSTGPGLNAAKVLQGEGISTLGTALFSVVQAVACSQAGCLSISPYFNGHFISVEEAMAAAEMGCQSATLSREILTKLAETPYDANTQPGEGRPKPPHAYNAPEPLPARLQPLLKHDPLTEGWDGSSPSTDVDYLADGGAALQAAIEADPATQKRVRDALEFFVDAEERSRKRIETVMAAVA

SEQ ID NO: 6859 - protein, 317 aa, Zea mays
  misc_feature (110)..(110): Xaa can be any naturally occurring amino acid
MMDPALLDDVIRRLLEVKNLKPGKNAQLSESEIKQLCAAAKEIFLHQPNLLELEAPIKICGDVHGQYSDLLRLFDYGGYPPQANYLFLGDYVDRGKQSLETICLLLAYKXKYPENFFLLRGNHECASVNRIYGFYDECKRRFSVKLWKTFTDCFNCLPVSALIDEKILCMHGGLSPELNKLEQILNLSRPTDVPDTGLLCDLLWSDPSNEATGWAINDRGVSYTFGPDKVSEFLEKHDLDLICRAHQVVEDGYEFFASRQLVTMFSAPNYCGEFDNAGAMMSVDETLMCSFQILKPARKVLGGSTNNKSGFKSSRGW

SEQ ID NO: 6860 - protein, 229 aa, Triticum aestivum
MGERVKGTVKWFNVTKGFGFISPEDGSEDLFVHQSAIKSDGYRSLNENDTVEFEVITGDDGRTKASDVTAPGGGALSGGSRPGDGGGDRGGRGGYGGGGYGGGGGGGGYGGGGGGYGGGGGGYGGGGGGRGCYKCGEEGHISRDCPQGGGGGGGYGGGGYGGGGGGGRECYKCGEEGHISRDCPQGGGGGGGGGGYGGGGGRGGGGGGGGCFSCGESGHFSRECPNKAH

SEQ ID NO: 6861 - protein, 139 aa, Aeropyrum pernix
MSVNYATLGDLKKGSYIVIDGEPCRIVEMSRAKTGKHGSAKAHVVAICVFSGQKKSLVAPVDTRVQIPVIEKRLGQVLADMGDMVQIMDLETYDTFEVEKPGGNEEEEQLAAKLQPGVTVEYWLIMGKPKIIRIRSSSS

SEQ ID NO: 6862 - protein, 275 aa, Salmonella typhi
  misc_feature (175)..(175): Xaa can be any naturally occurring amino acid
MANPTIIRLQDGNVMPQLGLGVWKASNEEVIAAIHKALEVGYRSIDTATAYQNEEGVGKALKAASVAREELFITTKLWNDDQKRPREALQESLKKLQLDYLDLYLMHWPVPAIDHYVDAWKGMIALQKEGLVKSIGVCNFQIHHLQRLIDETGVPPVINQIELHPLMQQRQLHAXNATHKIQTESWSPLAQGGEGVFDQKVIRELADKYGKTPAQIVIRWHLDCGLVVIPKSVTPSRIAENFAVWDFRLDKDELGEIAKLDQGKRLGPDPDQSGG

SEQ ID NO: 6863 - protein, 428 aa, Aspergillus nidulans FGSC A4
MALFLTGYLLLTFTLTLSFSTLRVWAAGRWPDVVAQELGPQLSSLASIITEPGAVESDFERWSAYSAPQPGVVVSVATEEDVAKTVKFCVSNSIRFLAQNGGHGWADTFDLGPNRRGLLIDITQLNTVVFNANRTQVTLGGGVSIGEAVAAAVEHDTLIPTGNCNCVGTLGAILGGGYGNLLGMVGFGVDNVLELKVVLADGEVHTVTPGRQGKDHDLFWALRGAGPNYGIVTSATLKAYPVDSATNITAWMGQLVFSGEQVEAVVQAIEELTLTPEMNIFLYYMTVNGTQRFIATPFYYGDEGEARGRAAFASLLDIGPIEDQTAEVPYARWNDGSDGFCTSGGYKPAYSAALQTQNSVVIMEAYSLDRARALPDDSAAFPGRSRVNFQAVAIPWYYDQGLENSAIAWGETMRALWWETDGLDDPAV

SEQ ID NO: 6864 - protein, 174 aa, uncultured marine gamma proteobacterium EBAC31A08
MNKFYIFGLLFFTLNAFSCSDLLDTDMRVLDSAESRNLCEFEGKALLVVNVASRCGYTYQYAGLQKLYESYKDEDFLVIGIPSRDFLQEYSDESDVAEFCSTEYGVEFPMFSTAKVKGKKAHPFYKKLIAESGFTPSWNFNKYLISKEGKVVSTYGSKVKPDSKELISAIEGLL

SEQ ID NO: 6865 - protein, 284 aa, Desulfitobacterium hafniense DCB-2
MELWYTEEHTENVRFSIKVDRQLYSGQSEFQRIDVFESKEFGTFFTLDGLMMVTQKDEFIYHDMIVHVPMATNPQIKDVLVIGAGDGGTVRELTRYDSIVNIDMVEIDKLVVDVCKEYLPQTACKLEDPRVRLFFEDGLRFIRTKENSYDLIIVDSTDPFGPGEGLFTKEFYGNCYKALKDDGILVNQHESPYYETYAQNMGRAHQRIKEFFPVCRVYQAHIPTYPSGHWLFGFASKKYDPLIDIDEQAWNDLGIKTQYYNTEIHKGCFALPNYVKEQLADAVE

SEQ ID NO: 6866 - protein, 252 aa, Zea mays
MASKSTLRSLVLIMGLLLLSCSGMSSAARLLEEVAPKEEYPHPEVPELPKPELPPHPTVPELPKPVVPELPKPEVPVHPAVPELPKPEIPPHSTVPELPKPEVPELPKPEVPEHPAVPELPKPELPPHPTVPELPKPEVPELPKPEVPEHPAVPELPKPELPPHPTVPELPKPEVPELPKPEVPEHPAVPELPHPDVPEHPASVPELPKPEVPEHPTVPELPKQELPPLPEPELPLPPKAESHYPEPGMAKP

SEQ ID NO: 6867 - protein, 461 aa, Sorghum bicolor
MDERRTILMDRYEIGRQLGQGNFAKVYFARNLTDGQSVAIKMIDKDKITRVGLIVQIKREISIMRLVKHPNVLQLFEVMASKSKIYFVLEYAKGGELFNKISKGKFSEDVARRYFHQLISAVDYCHSRGVYHRDLKPENLLLDENENLKVSDFGLSALAESKRHDGLLHTTCGTPAYVAPEVLSRRGYDGTKADIWSCGVILFVLVAGYLPFHDPNLIEMYRKISKAEYRCPRSFSGELKDLLFRMLDPDPSTRISISRIKRSTWYRKPIEVNSAKIKHDTTRDKVCNGEATTSNSIECSNSEETRGSSSLPNLNAFDIISLSTGFDLSNLFEEKYGRREERFTTRQPAGTVFAKLNELAERLKLKIKKKENGVLKLASPKEGIKGFLELDAEIFELAPSFLLVELKKTNGDTIEYQRLVKEEIRPALKDMVWAWQSDRHQQRNESVQGEQQLSSPLPPQQ

SEQ ID NO: 6868 - protein, 466 aa, Shigella flexneri 2a str. 301
MDQKLLTDFRSELLDSRFGAKAISTIAESKRFPLHEMRDDVAFQIINDELYLDGNARQNLATFCQTWDDENVHKLMDLSINKNWIDKEEYPQSAAIDLRCVNMVADLWHAPAPKNGQAVGTNTIGSSEACMLGGMAMKWRWRKRMEAAGKPTDKPNLVCGPVQICWHKFARYWDVELREIPMRPGQLFMDPKRMIEACDENTIGVVPTFGVTYTGNYEFPQPLHDALDKFQADTGIDIDMHIDAASGGFLAPFVAPDIVWDFRLPRVKSISASGHKFGLAPLGCGWVIWRDEEALPQELVFNVDYLGGQIGTFAINFSRPAGQVIAQYYEFLRLGREGYTKVQNASYQVAAYLADEIAKQGPYEFICTGRPDEGIPAVCFKLKDGEDPGYTLYDLSERLRLRGWQVPAFTLGGEATDIVVMRIMCRRGFEMDFAELLLEDYKASLKYLSDHPKLQGIAQQNSFKHT

SEQ ID NO: 6869 - protein, 181 aa, Zea mays
  misc_feature (52)..(52): Xaa can be any naturally occurring amino acid
MASSMLSSATMVASPAQATMVAPFNGLKSSAAFPATRKANNDITSITSNGGXRVNCMQVWPPIGKKKFETLSYLPDLTDSELAKEVDYLIRNKWIPCVEFELEHGFVYREHGNSPGYCDGRYWTMWKLPLFGCTDSAQVLKEVEECKKEYPNAFIRIIGFDNTRQVQCISFIAYKPPSFTG

SEQ ID NO: 6870 - protein, 174 aa, Triticum aestivum
  misc_feature (45)..(45): Xaa can be any naturally occurring amino acid
  misc_feature (112)..(112): Xaa can be any naturally occurring amino acid
  misc_feature (127)..(127): Xaa can be any naturally occurring amino acid
  misc_feature (137)..(137): Xaa can be any naturally occurring amino acid
MSDTDEHHFESKADSGASKTYPQQAGAIRKGGHIVIKARPCKVVXEVSTSKTGKHGHAKCHFVAIDIFNGKKLEDIVPSSHNCDVPHVDRQDYQLIDITDDGYVSLLTESGXTKDDLKLPTDDGLLXQIKTGFADGXDWILAVMSAMGEEQICAVRKIGWQVAVAWLATCDTCI

SEQ ID NO: 6871 - protein, 498 aa, Medicago truncatula
MGILSYLCYSLFYLSIFFIIRLLFQSRKFKNLPPGPTSLPIIGNLHHLKRPLNRTFKALTEKYGNVISLWFGSRLVVVVSSLSEFQECFTKNDVVLANRPRFLSGKYIFYNYTTLGSTSYGEHWRNLRRITSLDVLSNHRINNFAPIRRDETQRLIKKLAEDSSTKFAEVELTFRFFDMTFNNIMRMISGKRYYGDDCDISEVQEASQFRDMVSELLQLSGANNKTDFMPLLKFLDFENLEKRVKRIGEKNDVFLSGLLQEQRSKKERTNTMIDHLLNMQESQPEYYTDTIIKGLCLAMLLAGTDSSAVTLEWTMSNILNYPEVLKKVRDEVDTHVGQDRLVDESDLPKLTYLRNVIYETLRLYTPAPLLLPHSTADECIMGGYKVPRDTIVLINAWAIHRDPETWSEATTFKPERFDKKGELEKMIAFGMGRRACPGEGLALRAISMTLALLVQCFDWKRINDEKIDMSERDGFTMTKLLPLKAMCKTRPVVNKVFK

SEQ ID NO: 6872 - protein, 291 aa, Saccharomyces cerevisiae
  misc_feature (1)..(1): Xaa can be any naturally occurring amino acid
XVHVASVEKGRSYEDFQKVYNAIALKLREDDEYDNYIGYGPVLVRLAWHISGTWDKHDNTGGSYGGTYRFKKEFNDPSNAGLQNGFKFLEPIHKEFPWISSGDLFSLGGVTAVQEMQGPKIPWRCGRVDTPEDTTPDNGRLPDADKDAGYVRTFFQRLNMNDREVVALMGAHALGKTHLKNSGYEGPWGAANNVFTNEYYLNLLNEDWKLEKNDANNEQWDSKSGYMMLPTDYSLIQDPKYLSIVKEYANDQDKFFKDFSKAFEKLLENGITFPKDAPSPFIFKTLEEQGL

SEQ ID NO: 6873 - protein, 484 aa, Triticum aestivum
MANNNSSYGENVSRKSHTPSAIVIGGGFAGIAAANALRNASFRVVLLESRDRIGGRVHTDYSFGFPVDLGASWLHGVCEENPLAPIIGRLGLPLYRTSGDDSVLFDHDLESYALYDTNGSQVPQEFVEKIGEVFEAILEETAKLREEMREDISIAKAIAIVLERNPHLRQEGIAHDVLQWYWCRMEGWFATDADAISLQCWDQEVLLPGGHGLMVRGYRPVINTLAKGLDIRLGHRVVEIVRHWNRVEVTVSNGKTFVADAAVITVPLGVLKSNTIKFEPRLPEWKEEAIRELSVGVENKIVLHFSEVFWPNVEFLGVVSSTTYGCSYFLNLHKATGHAVLVYMPAGRLACDIEKMSDEAAAQFAFSQLKKILPNAAEPLNYLVSHWGSDENTLGSYTFDGVGKPRDLYEKLRIPVDNLFFAGEATSVQYTGTVHGAFSTGEMAAEECRMRVLEKFRELDMLEMCHPMAEQTATVSVPLLISRL

SEQ ID NO: 6874 - protein, 291 aa, Saccharomyces cerevisiae
  misc_feature (1)..(1): Xaa can be any naturally occurring amino acid
XVHVASVEKGRSYEDFQKVYNAIALKLREDDEYDNYIGYGPVLVRLAWHISGTWDKHDNTGGSYGGTYRFKKEFNDPSNAGLQNGFKFLEPIHKEFPWISSGDLFSLGGVTAVQEMQGPKIPWRCGRVDTPEDTTPDNGRLPDADKDAGYVRTFFQRLNMNDREVVALMGAHALGKTHLKNSGYEGPWGAANNVFTNEKYLNLLNEDWKLEKNDANNEQWDSKSGYMMLPTDYSLIQDPKYLSIVKEYANDQDKFFKDFSKAFEKLLENGITFPKDAPSPFIFKTLEEQGL

SEQ ID NO: 6875 - protein, 254 aa, Acinetobacter sp. ADP1
MTPQQIELVKSTVPVLREHGVTLTSYFYNRMLNNHPELKNVFNLDHQSTGRQPRALAAAVLAYAEHIEQPEKLAKAVERITTKHVSLNIQPEQYAIVGENLLHSISEVLNVPFESELIEAWKQAYLQLADILIEVEKEKYHQLAKQDGGWTGWRSFKIIAIQEQYEGKCFKISATDQQAILAATLGEYISVKVHVPEKELDQPQQFNLNTTQADDHYEFVVKPEPAHSDYDVANILLNHYSLGDEVMVSAPIRN

SEQ ID NO: 6876 - protein, 534 aa, Glycine max
MGNCCATPSTDETANKKGKKGKKENPFAIDYGFNATAANGSKLTVLKSPTGREIEARYELGRELGRGEFGITYLCTDKGTGEELACKSISKKKLRTAIDIEDVRREVEIMRHLPQHANIVTLKDTYEDDNAVHLVMELCEGGELFDRIVARGHYTERAAAAVTKTIVEVVQMCHKQGVMHRDLKPENFLFANKKETAALKAIDFGLSVFFKPGEKFNEIVGSPYYMAPEVLKRNYGPEVDIWSAGVILYILLCGVPPFWAETEQGVAQAIIRSVVDFKRDPWPKVSDNAKDLVKKMLDPDPKRRLTAQDVLDHPWLQNAKKAPNVSLGETVRARLKQFSVMNKLKKRALRVIAEHLTVEEAAGLKEGFQLMDTNNRGKINIDELRVGLHKLGHQVPESDVQALMDAGDVDGDGHLDYGEFVAISVHLRKMGNDEHLRKAFQFFDQNKSEYIEIEELRSALSDDLDTNSEEVISAIMHDVDTDKDGRISYDEFATMMKAGTDWRKASRQYSRERFASLSLTLMRDGSLHLNNEKQ

SEQ ID NO: 6877 - protein, 501 aa, Medicago truncatula
ALFYYSLLSLSFIITIKILLKITSRRLKNLPPGPPTIPIIGNLHHLKHPLHRTFTTLSQTYGDIFSLWFGSRLVVVVSSPSLAHECFTKNDIILANRPRFLTGKYIFYNYTTLGSASYGDHWRNLRRITTIDVLSNNRLNSFLGVRRDETNRLIQKLLKDVVSEGFGFTKVELRPRLTEMTFNAMMRMISGKRYYGDDGDVSDVEEAKQFREIISEMMSLLGANNKGDFLPLLRVVDLDNLEKRCKRIAKRSNAFLEGLIEEHRRGNIHSDGGTMIDHLLKLSESQPEYYSDHLIKGLIQGMLLAGTDTSAVTIEWVMSELLNHPEVLKKAKEELDTQIGKNKLVDEQDLSKLPYLQNIISETLRLHPPAPLLLPHYSSEDCTIGEFNVPKDTIILTNVWGIHRDPKHWNDALSFKPERFEKEEEVNKVMAFGLGRRACPGLSLAQRTVGFTVGLLIQCFEWERESEEKLDMMEGKGITMPMKIPLRAMCKALPIANDVTK

SEQ ID NO: 6878 - protein, 384 aa, Exiguobacterium sp. 255-15
MLTPSAITIIKSTVPVLAEHGHSITRVFYQRLFENHPEMKHIFNQSNQKNDRQSQALATAVYAAAAYIDQLETLKPTLLPVLHKHRSLQIKPYMYDIVGTELIGAIQDVLKDAATPDIIDAWTAGYGEIAKLFISLEAELYQQDEQATDFEGYQPFVIETMTTESSDIKAFTLRPADGRPLAPYQTGQYVTVRLQAPDGLWQNRQYSLTTVANGTSYTIGVKQDGSVSRQLHGLSVGEKVLLSAPAGSFTLTDASTPFVGLAGGIGLTPLLAMTEAALAVGRKTTLYVAVQDDLDRPFAEQLARFEEQGATIIRYAERNALPGTTPGRLSVADVTNIDPAADTYVCGPEAMIQFVRRYFSGQADKLHFEVFGPSLALEAPTAVS

SEQ ID NO: 6879 - protein, 120 aa, Glycine max
  misc_feature (45)..(45): Xaa can be any naturally occurring amino acid
FGTNKAAQLASSMISSPAVTTVNRAGAGMVAPFTGLKSMAGFPTXKTNNDITSIASNGGRVQCMQVWPPVGKKKFETLSYLPDLDDAQLAKEVEYLLMKGWIPCLEIQLEQRFVFREPHQ

SEQ ID NO: 6880 - protein, 1238 aa, Brassica napus
MDGKGKKCGSKKESKVFDFEDDDEPIGSLLKVMKHKTATKSKVETETTGKQRQKGAVEKKLTHVRKDSEDMDDTLASFRKRLKGHKKRVRNDKDVPPVDTVTDSNLIPSPDMADDASELGREGTVNKKSLDDIYKTKVKSSTRSVTLEKEADADDKSKRPLPNVDVYPPVDRKDVSVPSPDQHIHLGEPESESGHFREEKIVMCDCGIQFNFEDRSLDSNSEVAICQKCKRSSHRDASNGGGIQVNTLKDGTAEASPVSVTPYEDEDFRGDAVSLPNSGKPSTLQRPERIARKRKHENMVYGEDMNWENEQGFLDCQSDKSFKGSDKCDFGPFISKEFEIGRAAAVAAGLKAQSVSPVEKTILKEVLKRKGSHQEYLRCRNSILGLWSKNVSRILPVTECVVGHSESEFPSAGLIREVYKFLDQRGYINTGVSSVRGKGGPSTNHDDDLSQGKKLEESSMASVANSDGDTFIFGQVKAVESTSEGKNCALQNDETEIVECATSAMLGSTRKTCEASIIDDCKHSVSINALLADANAPKVEKCPETISVRKTVLSSTLSSANCDQMRGRDCVQGEVEDEKKVIVIGAGPAGLTAARHLQRQGFSVTVLEARSRVGGRVYTDRSSLSVPVDLGASIITGIEADVPSERMPDPSALVCNQLGEKVPPELDDALQGEFNSLIDDMDLLVEEIGKDRANKMSLEDGLEYGLQRLRMPHEKVNIERFGIGNSINGSFSRTGITGTFKHDGRLKEDFLNPLERRVMNWHFAHTEYGCAAVLKEVSLSNWNQDEFYGGFGGPHAMIKGGYSRVAESLAEGLDIRLNNVVSEVSYASDVSAMHNNKHKVIVSTSNGGEYLGDAVLVTVPLGCLKAETIKFSPPLPDWKYSSIKQLGFGVLNKVVLEFSKVFWDDSLDYFGATAEETDQRGECFMFWNVKKTVGAPVLIALVVGKAAVDYKDKSKSEHVNHAMMVLRKLFGGDLVPDPVASVVTDWGADPYSYGAYSYVAIGASGEDYDVLGRPVQNCLFFAGEATCKEHPDTVGGAMMTGVREAVRIIDILRSGNDYTAEIETLEKAQRKSVSIRDEVSDLIKRLEVVELSNVLARHSLLRNMFFSAKTTVGRLHLAKELLNLPGETLKSFAGTKEGLTVLNSWILDSMGKNGTQLLRHCVHILVRVTSDLFAVRLSDSKGNLSNGNYTTTDGEIEDNQLPMSEEEKAVFATAEAARVAAEAAAKASFFYLRMSEMH

SEQ ID NO: 6881 - protein, 324 aa, Magnaporthe grisea 70-15
MDSYQEPTGEEPPTIDPYEVLSLDHTATPDQVKAAYRKAALKNHPDKVPEDQKASAHEKFQQIAFAYAVLSDPARRARYDATGSTSESIVDSDGFDWSDFYRAQFADAVSGEAIEKFARTYKGSDEERDDVLAAYEAGRGDLDVVYESVMLSNVLEDDERFRAWIDEAISKGDVEGFKAYTKESKKKRDKRVKDAKGEAAEAEEYAKELGVHGKLFGGGAAGEGKGKGKGKKKDAGGEDALAALIRGRQADRMDALDRLAEKYGAAAPKAKKKGKKRAAEDEDDEDGGEPSEEAFQATQARLFGKKSNGEKAAAGSTKKRTRRG

SEQ ID NO: 6882 - protein, 315 aa, Bradyrhizobium japonicum USDA 110
MPVVLDPDAAAVYMAFQEAGRPAYETLTAAEARAYYAQARFATNPEPPELARVAPLAIPAPHGTIPARIYVPNDPRRHDGLSPALVFFHGGGWVIGDLDSHDVVCRQLAVEAALIVISVDYRLAPEHKFPAAADDAIAATKWVAANACELGIDASRLSIGGDSAGGNLAAVVALAARDDSGPAIAGQILIYPAVDFAMTHGSHSEPETSVLLTHSVIRWFRDHYLNGAADIHDWRASPARAENLAGLPPAYVLTAGADPLRDEGDEYAARLKQAGVSVTYKHFPGQFHGFFTMGKLLREANVAVSEIGAWLKGLG

SEQ ID NO: 6883 - protein, 468 aa, Methanosarcina acetivorans C2A
MISRKMNLESLDESKKYRVGAYSARYVPKTKEKGIPKYEFPEEGMSPRAAYQLVHDEQSLDGNPFLNLASFVNTWMEPEADKLVMENISKNIIDIFEYPQTSRVIHHNMVNMLGRLFNGHHTDFVGTSTAGSSEAIMLGLLAHKWSWKKSGRGTDKPNIIFGNDAHVCWDKFARYFDVDTRKVPIDKDRRTITAEAVAERIDENTICVGCVLGTTFTGEIDPVKDINDLLLEYKEEKGWDIPIHIDAASGGFILPFTEPDFEWDFRLERVKSINVSGHKYGLTYPGLGWLIFRNKNALPEDLIFHVNYLGEMEDSYTLNFSGGSAMVAAQYYNFLRFGRAGYTGIMKKILAVSQDLAEKVDRLGRFEMLNKGERLPIIAFRQKEKTGYSLLQLSHKLREKGWIVPAYCLPENAADIEIMRIVVRENLTPDMASIIVEDLEKACQFLENGTEAGAEKPCPSGKDMAHIC

SEQ ID NO: 6884 - protein, 437 aa, Methylobacillus flagellatus KT
MPISLLPLTLLFSLCIVPLPVSAGEGAPQALAVDSVWVAISGALVFMMQAGFAMLESGMTRAKNAVNVMMKNYMDLAVGALLFWLVGYGLMFGSNPSGWIGTDHFALAHGDDWGASMLFFQVMFAATAATIVSGAMAERTNFIAYLLGACGIMALIYPVFGSWAWNEHGWLKQMGFIDFAGSTVVHSVGAWCALAGIMVLGPRLGRFGSKGEVHMIPGHNLSLVAMGGFLLWFGWFGFNGGSTLAAGVEIGPILLNTHMAGAAGAVGALLVALAMRRPILMAYVVNGSLGGLVAITAGCASMDVPFAVLTGFIGGIVTMLGVWALEKLRLDDVVGAVAVHGFSGVWGTVAAGLFLKDNMFDLNQVLVQMIGVAVAFVWVFLSALLMYGLLARTIGLRVSTMHEQRGLDITEHGEVGYPEFNREAAYQPEHVQHLSRL

SEQ ID NO: 6885 - protein, 206 aa, Zea mays
  misc_feature (160)..(160): Xaa can be any naturally occurring amino acid
  misc_feature (168)..(168): Xaa can be any naturally occurring amino acid
MTTGEGAEAAAVPRVVSILSALLQRVAERNDAAAAAPPPAAAAGPPVLSAFQGLTKPAISIGGYLERIFRFAGCSPSCYVVAYIYLDRFLRRRPALAVDSFNVHRLLITSVLTAVKFVDDICYNNAYFARVGGISLVEMNYLEVDFLFGIGFDLNVAPGXFGDYCAVXRSELLCAEAAPAPLRLQHCCLSEDDAGAGCSAQQQLAA

SEQ ID NO: 6886 - protein, 252 aa, Zea mays
  misc_feature (148)..(148): Xaa can be any naturally occurring amino acid
MAKNYPTVSAEYSEAVEKARRKLRALIAEKSCAPLMLRLAWHSAGTVRRVVEDRAVPFGTMKCPAELAHGANAGLDIAVRLLEPIKEEFPTLSYADFYQLAGVVAVEVTGGPEIPFHPGREDKPQPPPEGRLPDATKGSDHLRQVFAXKQMGLSDQDIVALSGGHTLGRCHKERSGFEGAWTTNPLVFDNSYFKELLSGDKEGLLQLPSDKALLSDPVFRPLVEKYAADEKAFFDDYKEAHLKLSELGYADA

SEQ ID NO: 6887 - protein, 124 aa, Brucella melitensis biovar Abortus
MADLAKIVEDLSALTVLEAAELSKLLEEKWGVSAAAPVAVAAAGGAAPAAAAEEKTEFDVVLADGGANKINVIKEVRALTGLGLKEAKDLVEGAPKAVKEGASNDEAEKIKAQLEAAGAKVELK

SEQ ID NO: 6888 - protein, 225 aa, Listeria innocua Clip11262
MNEINPTSERVNTEKRTNKQIIMQKILNWFVFSLLLASIGAAIGSKLSPELYLPLVVLEVALLITAMVVRRSKTINKVVGYPVVLAFAFVTGLTLGPTLTYYFGAGQGAAVLMAFVTATITFTTLAFIGAKMKRDLSFLSSALFAAIIILIIFSFAGVFLPLGSMLTTIISAGGTIIFSLYILYDFNQIMKRDVELADVPMLALNLYLDFLNLFMFLLRLFTGRD

SEQ ID NO: 6889 - protein, 423 aa, Kluyveromyces lactis
MRVIRQLHTSKRLLQSLVDKQKYQATTYARPNHLVLTRGKNAILYDDVNNKEYIDFTAGIAVTALGHANPEVAEIMYKQSKKLIHSSNLYYNEECLKLSENLVEATKSFGGQYDASRVFLCNSGTEANEAALKFAKRYGILKSPSKQGIIAFQNSFHGRTMGALSVTSNPKYREPFGSLIPGVEFLNINDELTKLDQQVSSLKEKTAGLIVEPIQGEGGVFPIPLDSLVGLKKICEDHDIIVIYDEIQCGLGRSGKLWAHSYLPKEAHPDIFTTAKALGNGFPIAATVTNDKVNDILKVGDHGTTYGGNPLGSAVGNYVVNVIAEQKFLDEVNKKGEIITNRLRKLQERFPEHIKDIRGKGLMIGCDFDEAPAKIVDAARDSGLLIITAGKTTVRFVPALTIEDNLLEKGLNIFEKAVEKVYS

SEQ ID NO: 6890 - protein, 437 aa, Cicer arietinum
NSARVMTLKLGQVTTVVISSADMAKEVLLTHDLITSNRTVPDALSVLNHDQYSLSFMRVSPRWRDLRKICNYQLFSNKTLDSSQALRRRKLQDLLNDIERCSKVGEAVDVGKAAFKTTVNLLSNTFFSVDFVHSAKEAGEYKEIIVSILKEVGVPNVSDFFPMLKFLDLQGIRKRSIVSVKKVLSIFKRFVGERVKMREGTGSIGNDDVLDALLNMSSDGGKIEMDKDEIEHLLLNIFVAGTDTTTYTLEWAMAELIHNPEMMSKLKEELEKTVGKGIPVEETDIAKLPYMQAVIKETFRLHPPVPLLLPRRAEIDVKIGDYVIPKDAQILINAWVVGRDPTKWENPNVFIPERFLDSEIDIKGHHFELIPFGSGRRTCPGLPLAIRMLPLMLGSLVNCFDWKLEDGLNVEDFNKEDEFGITLEKSQPVRIVPTKLY

SEQ ID NO: 6891 - protein, 320 aa, Vibrio cholerae
MIKKIGVLTSGGDAPGMNAAIRGVVRTALGAGLEVFGIYDGYQGLYEDRIKQLDRSSVSDVINRGGTFLGSARFPQFREVEVREKAIENLKKHGIEALVVIGGDGSYMGAKKLTEMGFPCIGLPGTIDNDIAGTDYTIGYLTALNTVIEAIDRLRDTSSSHQRISIVEIMGRHCGDLTLTSAIAGGCEYIITPETGLNMEQLISNIKDGIAKGKKHAIIALTELMMDANKLAKEIESATGRETRATVLGHIQRGGKPTAFDRVLASRMGNYAVHLLMEGHGGRCVGIQKEQLVHHDIIDAIENMKRPVRTDLYKVAEELF

SEQ ID NO: 6892 - protein, 371 aa, Populus alba
MSFLQQQETHNQSPALALDGLYCEEDGFGEDYSCGLDDETSQVYDQNVKKEQNLSSVLLEQDLFWEDSELLSLISKEKETHVVFDSVGSRDGSLMVVRREAVEWFLRVKAHYGFSALTGVLAVNYFDRFISSSRFRRDKPWMGQLAAVACLSLAAKVEETQVPLLLDLQVEDAKYVFEAKTIKRMELWVLSTLHWRMNPVTSISFFDHIIRRLGLKTHMHWEFLWRCERLLLSVISDSRFMSYLPSILATATMLHVIKEVEPRNQLQYQTQLMAVLKTNEDEVNECYRLILEQPGSQNQRHKRKYLSTPSSPNGVIDASFSSENSNDSWAVASSISSSSSVPQFKRSRAQVQQMRLPSLNRMCVDVLSSPH

SEQ ID NO: 6893 - protein, 316 aa, Salmonella enterica subsp. enterica serovar Typhi Ty2
MNQLDGIKQFTTVVADSGDIESIRHYQPQDATTNPSLLLKAAGLEQYGHLIEDAIAWGKKHGGTQEQQVAAASDKLAVNFGAEILKSIPGRVSTEVDVRLSFDKEKSIEKARHLVDLYQQQDVDKSRILIKLAATWEGIRAAEQLEKEGINCNLTLLFSFAQARACAEAGVYLISPFVGRIYDWYQARSPLEPYVVEEDPGVKSVRNIYDYFKQHRYETIVMGASFRRTEQILALTGCDRLTISPNLLKELKEKEEPVIRKLVPSSQMFHRPTPMTEAEFRWEHNQDAMAVEKLSEGIRLFAVDQRKLEDLLAAKL

SEQ ID NO: 6894 - protein, 280 aa, Glycine max
MKGEYVEQQQQHPKSETPPSMFSKLQPQHHPFPHHPFQLSAEDATTITPSTAQKANSSGGDGATIEVVRRPRGRPPGSKNKPKPPVIITRDPEPAMSPYILEVSGGNDVVEAIAQFSHRKNMGICVLTGSGTVANVTLRQPSTTPGTTVTFHGRFDILSVSATFLPQQSGASPAVPNGFAISLAGPQGQIVGGLVAGGLMAAGTVFVIAASFNNPAYHRLPPEEEGASAGDGHSPPVSGGGDSGHGQAESCGMSMYSCHLPSDVIWAPTARPPPPPPPPY

SEQ ID NO: 6895 - protein, 402 aa, Bacillus cereus ATCC 10987
MLSEKTIEIVKSTVPLLQEKGVEITTRFYEILFSEHPELLNIFNHTNQKKGRQQQALANAVYAAATYIDNLEVIIPVVKQIGHKHRSLGIKAEHYPIVGTCLLRAIKEVAGAPDEVLNAWGEAYGVIADAFISIEAEMYEEAAHKEGGWKDFRNFVVVKKVKESDVITSFYLKPEDGGKVSSFIPGQYVTVQINIEGETYTHNRQYSLSDAPGKEYYRISVKKEKGVDTPDGKVSNYLHDHVKEGDMLPVSAPAGDFVLNMDSTLPVVLISGGVGITPMMSMLNTLIEQDSKRNVCFVHAALNSNTHAMKEHVEALDNEYEQVKAYTCYSAPTEKDLEMKNFDKEGLIEAEWLQTIIPTTEAEFYFCGPVAFMKHINATLTDLGVKQEHIHYEFFGPAASLQ

SEQ ID NO: 6896 - protein, 510 aa, Oryza sativa (japonica cultivar-group)
MAEFRQRGQVPEDVESSIGTVLSYIHFAIPDAPVSSHARLSALPPDDDDDGVDRLSLLPDALLRRIVSRLPVKDAARTAALSSRWRDAWRSTPLVLVDADLLPAGVSDADTDAAREEARAVTFAVSRVIAAHPGPFRRLHLTSSFMDQYQGLLASWLQVLAVKGIQELILVNRPFPADLTLPATFFGMATLTRLYLGLWKFPDTAALPRAACFPNLRDLGFSLIGITNHDMDFVLARSPVLETLCLQANTLQRVRVASRSLRCLMMMGFDQDVNVVNAPRLERLIMLYSCGSSMLVKIGRAPSLRAIGYLDLETHVLEIGDTIIKAGTRASPSTMVPSVKILGIIVCFGVRNEAKMLPSFLRCFPNVETLHVESRKTDELTGKLNLKFWQDAGAIECIQSHITVMIFRRFRATRGEINFLKFVLESARMLKKLIIVSPKGTFASTDEANFRLKPLFATKWASKCCSLVVLESDASAGESNWNFERGCDFSLMDPFAIIIRSSRLDISGSC

SEQ ID NO: 6897 - protein, 322 aa, Neurospora crassa
MVPAIKLNSGFDMPQVGFGLWKVDGSIASDVVYNAIKAGYRLFDGACDYGNEVECGQGVARAIKEGIVKREELFIVSKLWNTFHDGDRVEPIVRKQLADWGLEYFDLYLIHFPVALEYVDPSVRYPPGWHFDGKSEIRPSKATIQETWTAMESLVEKGLSKSIGVSNFQAQLLYDLLRYAKVRPATLQIEHHPYLVQQNLLNLAKAEGIAVTAYSSFGPASFREFNMEHAQKLQPLLEDPTIKAIGDKYNKDPAQVLLRWATQRGLAIIPKSSREATMKSNLNSLDFDLSEEDIKTISGFDRGIRFNQPTNYFSAENLWIFG

SEQ ID NO: 6898 - protein, 396 aa, Escherichia coli O157:H7
MLDAQTIATVKATIPLLVETGPKLTAHFYDRMFTHNPELKEIFNMSNQRNGDQREALFNAIAAYASNIENLPALLPAVEKIAQKHTSFQIKPEQYNIVGEHLLATLDEMFSPGQEVLDAWGKAYGVLANVFINREAEIYNENASKAGGWEGTRDFRIVAKTPRSALITSFELEPVDGGAVAEYRPGQYLGVWLKPEGFPHQEIRQYSLTRKPDGKGYRIAVKREEGGQVSNWLHNHANVGDVVKLVAPAGDFFMAVADDTPVTLISAGVGQTPMLAMLDTLAKAGHTAQVNWFHAAENGDVHAFADEVKELGQSLPRFTAHTWYRQPSEADRAKGQFDSEGLMDLSKLEGAFSDPTMQFYLCGPVGFMQFAAKQLVDLGVKQENIHYECFGPHKVL

SEQ ID NO: 6899 - protein, 499 aa, Medicago truncatula
MTTFYLSLIISLFFLIITLKVFFNTSRKFKNLPPGPQCLPIIGNLHQLKQPLHHTFHTLSQKYGQIFSLWFGSRLVVVVSSLTIAQECFTKNDIVLANRPHFLTGKYIGYNNTTVAQSPYGDHWRNLRRILSIEILSSHRLNSFLEIRRDEIMRLIQKLAQKSYNGFTEVELRPMFSEMTFNTIMRMVSGKRYYGNDCDVSDVEEARLFRGIIKEVVSLGGANNVGDFLGFLRWFDFDGLEKRLKKISKRTDAFLQGLIDEHRFGKRNSNTMIDHLLTQQQSQPEYYTDQIIKGLMVVMLLAGTDTSSVTIEWAMSNLLNHPEIMKKAKNELDTHIGHDRQVDEHDISKLPYLQSIVYETLRLHAAAPLLVPHLSSEDFSLGGYNIPQNTILMVNAWVIHRDPNLWSDPTCFKPERFEKEGEVNKLLSFGLGRRACPGENLSQRTEGLTLGLLIQCFEWKRIGEEKIDMVEAKGITAGKKTSLNAMCKVRHPLKINDVF

SEQ ID NO: 6900 - protein, 341 aa, Streptomyces avermitilis MA-4680
MLGCVIHGRGDLRVDELPEPAAGPGQALVAVRYGGVCGSDLHYWRHGGVGDFRLREPMVLGHEVVGTVLSYGPGAAGPAPGTAVAVHPATPCGVCPECADGRANVCRDTRYLGSAARMPHVQGGFAARVVVPAAQVRALPEGLDLRRAALAEPLSVALHAVRRAGPVAGRPVLVTGAGPIGCLVVAAAKAAGAGRVTVTDLLPRALSYAAGVGADDVVRADDPADAGWPDSVDVAVEASGVAAGLDTCLRLVRRGGVVVQLGMLPPGQTPFAGNLVVSREIELRGAFRFADEFDEALTLLAREPAFDSLISAVVPLEEAESAFALAADRGEACKVLLDFGV

SEQ ID NO: 6901 - protein, 213 aa, Arabidopsis thaliana
MGCFHSTAAREFPDHENPVKLASETAFSVSEVEALYELFKSISSSVVDDGLINKEEFQLALFKNRKKENLFANRIFDLFDVKRKGVIDFGDFVRSLNVFHPNASLEEKTDFTFRLYDMDCTGFIERQEVKQMLIALLCESEMKLADDTIEMILDQTFEDADVDRDGKIDKTEWSNFVIKNPSLLKIMTLPYLRDITTTFPSFVFNSEVDEIAT

SEQ ID NO: 6902 - protein, 294 aa, Daucus carota
MDQYEKVEKIGEGTYGVVYKARDRVTNETIALKKIRLEQEDEGVPSTAIREISLLKEMQHENIVRLQDVVHSEKRLYLVFEYLDLDLKKHMDSCPEFAKDPRLIKMFLYQILRGIAYCHSHRVLHRDLKPQNLLIDRRTNALKLADFGLARAFGIPVRTFTHEVVTLWYRAPEILLGSRHYSTPVDVWSVGCIFAEMVNQQPLFPGDSEIDELFKIFRIVGTPNEDTWPGVTALPDFKSAFPKWPSKELGNVVPNLDVAGLNLLKKMLCLDPSRRITARSALEHEYFKDIGIVP

SEQ ID NO: 6903 - protein, 375 aa, Zea mays
MDSTLNQVKEESHGEGGDLMAGTVEAADGPSAAVAAAPKPMEGLHDPGPPPFLTKTYDMVDDSDTDLIVSWSATNNSFVVWDPHAFATVLLPRHFKHNNFSSFVRQLNTYGFRKVDPDRWEFANEGFLRGQRHLLKNIRRRKPPAQNATNQQSIGPYLEVGHFGYDAEIDMLKRDKQLLMAEVVKLRQEQQNTKANLKAMEDRLQGTEQKQQQMMAFLARVMRNPEFLKHLVSQNEMRKELQDAISKKRRRRIDQGPEADDLGASSSLEQGSPVLFNAQDPVEFLVDGIPADLESPAFDGHGLIGPHDIDIDIDIGSTSEQQQDMPQEDLNDNFWEQLLNEGLGEENDSPVIEDDMNVLSEKMGYLNSDGPTSSN

SEQ ID NO: 6904 - protein, 408 aa, Pirellula sp.
MLSEKTIRIVKEITPLVAANAETITRRFYERMFEANPEVKAFFNQAHQHSGGQQKALAGAICAYFTHIDNPAVLMPAVELIAQKHVSLGIKPEHYPIVGSNLLAAIGDVMGDAATPEIVEAVSEAYGFLADIFIGREGAIYEEQASMPGGWNGTRTFVVTKKVRESEIVTSFYLKPEDEGPLPPFKPGQYITVHMDHPHTPTSPRNYSLSDCASQPHYRISVKREERLVPDAPDGLISNHLHDGIEEGHRIELGPPCGEFTVDPATIAKPIVLIAGGIGVTPLLSMAKSIVHANPNAELHFIQAARNSKVHAFADELRRLAQAGPNVHTKVIYDSPLPGDVEEGKCDEAGFVTENQIRESTPFTDADFYFCGPKPFMKNVHSCLRELGVDEHRVRYEFFGPKEELVAV

SEQ ID NO: 6905 - protein, 481 aa, Haemophilus somnus 129PT
MNIQHLLKTQAYINGEFISAKNHRTFPVINPANQQVICEIACCGKEETELAIKSAKQAQVHWKKYTAKERSKILKKWFELIMQHQESLAYLLSLEQGKPLSESRAEIAYGASFVEWFAEEAKRAYGEIIPQVREDHRLLVIKQPVGVVAAITPWNFPNAMITRKAAPALAAGCAIIIKPAPETPLSALALAALAEQAGIPKGIFNVLPTVYAEEVGSVLTRSTDVRKLTFTGSTKIGKILMQQCADTVKKISLELGGNAPSLIFNDADLDRTVDSVIASKFRNSGQTCICTNRIYVQSEIYRAFADKLKQKVRSFIVGDFQQEAVNIGPLINESAVRKIERHIEDALSKGAILTLGGQRHSLGGTFFEPTILENVSQDMLVCHEETFSPLAALIPFDTEEQAISMANDSEFGLAAYVYTQDFSRIWRLSEELECGLVGVNEGIISNEVSPFGGVKQSGLGREGSRHGLDEFLEMKYLCMKV

SEQ ID NO: 6906 - protein, 250 aa, Brassica juncea
MTKNYPTVSEVYQKVYEKCKRKLRGLIAEKNCAPIMVRLAWHSAGTFDCASRTGVPFGTMRFDGELAHGANSGLHIALRLLEPIREQFPTISFADFHQLAGVVAVEVTGGPDIPFHPGREDKPQPPPEGRLPDATKGCDHLRQVLLKQMVLTDQDIVALSGAHTLGRYRAAPSGFEGAWTSNPLIFDNSYFKELLTGEKEGLLQLVSDKALLDDPVFRPLVEKYAADEEAFFADYAEAHLKLSELGFADA

SEQ ID NO: 6907 - protein, 214 aa, Ustilago maydis 521
MAPAAIRRKLVIVGDGACGKTSLLCVFAIGEFPQEYEPTIFENYVAEIRLDGKPVQLALWDTAGQEEYERLRPLSYSQAHVILIAFAIDTPDSLENVQVKWMEEVRQICGPSVPVLLVGCKKDLREDAIAKGKPVQGHYVERQQAKLVAAQIGARSYHECSSLNNQGVDAVFEAATRAAMLVRNSGASSGGAISQSKTKEALHNDAGSCKCIVL

SEQ ID NO: 6908 - protein, 282 aa, Craterostigma plantagineum
MKTQNTSETLGALISICPNTTDEERVSNVETSAMFGLDDECFASEKKRRLSNEQVKALEKYFEVENKLEPERKVKLAQELGLQPRQVAVWFQNRRARSKTKNLERDYGVLKSNYNALKHDFETLKRDNESLLKEIHELKSKLNEDDDSKSVEEEPFVEALELDANSDDVEPDSNQLFGSSDSDSSAILNEDNNNSRSSFLDDHRRKLSKIHGGSSPPSSAKIASEKNGSDESCKRAAAYKPQFVKIEEQHNLFREEDESCTTTFFSDEQAPTLNWYTPDEWN

SEQ ID NO: 6909 - protein, 481 aa, Pseudomonas sp.
MFHVPLLIGGKPCSASDERTFERRSPLTGEVVSRVAAASLEDADAAVAAAQAAFPEWAALAPSERRARLLRAADLLEDRSSEFTAAASETGAAGNWYGFNVYLAAGMLREAAAMTTQIQGDVIPSNVPGSFAMAVRQPCGVVLGIAPWNAPVILGVRAVAMPLACGNTVVLKSSELSPFTHRLIGQVLHDAGLGDGVVNVISNAPQDAPAVVERLIANPAVRRVNFTGSTHVGRIIGELSARHLKPAVLELGGKAPFLVLDDADLDAAVEAAAFGAYFNQGQICMSTERLIVTAVADAFVEKLARKVATLRAGDPNDPQSVLGSLIDANAGQRIQVLVDDALAKGARQVVGGGLDGSIMQPMLLDQVTEEMRLYREESFGPVAVVLRGDGDEELLRLANDSEFGLSAAIFSRDVSRAMELAQRVDSGICHINGPTVHDEAQMPFGGVKSSGYGSFGSRASIEHFTQLRWLTIQNGPRHYPI

SEQ ID NO: 6910 - protein, 1859 aa, Gibberella zeae PH-1
MAPRIEFSIEQIRNKARKDLLYLLEGVRGKKNVILDQSLVGPIGTIVKVATLQEYGVDKFFILENDNADTSQRNVVFISRGECGRHAETIAAQIKRIQRESQTGHEFHIFWIPRRTLVSDKLLEDAGVLGDVNISELPLSFFPLEKDVLSLELDGSFRDLYLSKDVTPNFLMAKALMEIQQNHGLFPRVIGKGDNAKRVADLLSRMRQELLAGEGTAEANKIGLTPSTTNESVIIIDREVDFVTPLLTQLTYEGLIDEVFEIHNNQTKVDTTVVGAPAQASAATSQSRKRTIQLDSTDKLYEQLRDANFAIVGSLLNKVARRLQKVQSDYESKHKTKTIAELKDFVSQLPGYQQEQQSVKTHTGLAEEIMKHTRTDEFKGLLEVQQNLAAGADPSSQFDGIEELISRDAPIAQTLRLLCIYSCISGGIRPKEFDQFKRLILQGYGYQHLLTLSNLEKLQLFLSKSSPLAGMIPIPGTNVGAVTIGSKTNYTYLRKQLRLIVDEVQEDDPNDVSYVYSGYAPLSIRLVQCILQKQYLLSVTKGNNASAAGAPPGVGTQGWQGFDEAVKHVRGQTFYEHQKGEDKAVKARALLSGSGNKQTVFVVFVGGITFTEIAALRFIAKQEEGRRNIVICTTSIINGNKMMESAIEKESFTKEKYCQLAGCCFGMFYVGASRLIKKRQDTWLRRAQDQENNDKTMLVVRVEVRIVAVMGTRPTAESISKRSWYRNEPINYKFLSLVIDSLTSNDNGSSQTNRDQYQKKPRTNAAMGTDFGQSFRKGIGIRKRDVDEGNVIDSVPPSDTSPISGVPGRISPPITPDVVSVPQSRQTSMEIASEIAPEIVVWTEDMDIDMDIDNASPVESDDELSSLKTDPEEEPLQVDADPTPMQTSTNGGAVGSFPSSLSNLTELSDLSSIPSTASSKATTPTPVEAEGSQDQEQPIDEQPPSHQQSPSHEAERYNFNIRSKASIPTDISPYRYASECISAAESSRLNPYALHPEEYHLLRHHISYAQVTTYLNVRNGILRLWSKRPWVGVTRLEAVGCANARWFDAASVCYDWLVRRGYINYGCVQVPETETEDSIAPVRRQKTIAVIGAGISGLACGRQLEGLFKQFADRFHERGEPPPRVVVLEGRSRVGGRVYSREFQTKPKEPMPAFKGKRHTAEMGGMIITGFDRGNPINILLRGQLSLPYHALTADTTIYDSSGRAVDPVRDQLVEKLYNDCLDRVSEYKHKNRTAKLIEGRRDLIEEGRDSPGDGSKTMFQEEEAAAAQPYAAPVAQQNVPEKVNLIPVSSDKLTGRVHMEPGTPATIKASDKAKLMGWTIRDSADGENIDLVPAVNEEGATLGSVLDSAISQYKQIVGLNAQDHRLINWHVANLEYSNATSLHNLSLPLWDIDAGNEWEGSHTMVVGGYQSVARGLAQCPSPLDLKTKFPVKSVSYHTGEGMASAAIECEDGSVVDADAVVCTVPLGVLKQNNIVFNPPLPSWKTDVVERLGFGILNKVVLVYDEIFWEQDRHIFGVLRESTNRHSTSQKDYATSRGRFFQWFNVSNTTGLPCLIALMAGEAGFETEHSSNDSLVAEATEVLRRVFGKDVPYPVEAMVTRWGSDRFARGSYSSAAPGMQPEDYDVMARPVGNLFFAGEHTIGTHPATVHGAYLSGLRAASEVLEALIGPVEVPTPLILPRDSVLLRKRKEPAKDLKPARLQAYEQDIQAHIQAKIGDRPSRPAKVASNPYILYSKDLFDVARKRCEENRKPGRGGRAVPNEVRIMTSKMWKEATPEERKPYEDQATEMKRGYAEAVQSWNQATEKWDRESAALRTAYEKENPFDSYKIQMEDPREASYKQRRTRNISYAEDGDSDVGF

SEQ ID NO: 6911 - protein, 1124 aa, Gossypium hirsutum
MDNNPHQHPYPYHHGYPPNQDPYAAFPYQYPYNTPQYPHAPHMYPPSAHVPVAAPIDYRHAHSHSGQVPYQYSHPVPPNPSQLQHHGNFQYGSTPYPYQQSLSGHYPPPEINPQSSSTYQQPAQYPPQSSSSYQQPAQYPPPESNAEHLSRHVSFSGHNRQDSTSSLGANMRSASPAYPPLDHQLNNMHLSGSHSSAPASPPAPSVPILAAGTSTPDYASNSSNWEGPSLGRADLANRSSFSHKDSFKGSQQVQGMQIVPFQKGSLRVLLLHGNLDIWVLEAKNLPNMDMFHKTLGDMFGNFSSNISKKIGGRSEGKNTSDPYVTIAVSGAVIGRTFVINNDENPVWRQHFYVPVAHHAAEVQFVVKDIDILGSEIIGVVTIPVEQIYAGEKIEGTYPVLNGNGKPCKPGAVLKLSIQYTPMEKLSFYHHGVGAGPEYVGVPGTYFPLRKGGKVTLYQDANVPDGCLPNIKLDQGMHFVQGKCWSDIFDAIRQARRLVYITGWSVWHKVRLVRDVAPASDCTLGDILRSKSQEGVRVLLLLWDDPTSRSILGYKTDGIMTTHDEETRSYFKHSSVHVLLCPRIAGKKHSWVKQKEVGTIYTHHQKTVIVDADAGNSNRKIIAFLGGLDLCDGRYDNPDHALFRTLQTYHKDDYHNPTYTGSTAGCPREPWHDMHSKIDGPAAYDVLVNFEERWLKAAKPHGLKKLKKPFDDALLRIERIPDIMGVSDFTENENDPERWHVQIFRSIDSNSVKGFPKDSKDATSKNLVCGKNVLIDMSIHTAYVKAIRAAQHFIYIENQYFLGSSYNWSSYKDLGADNLIPMEIALKIASKIKANERFAAYIVIPMWPEGVPTGSATQRILYWQNKTRSMMYETVYRALVEAGLDSTFVPEDFLNFYCLGNRELDGYQPPADGSPRAANSPEVIYTKSQKPFLFGNSTSWAISWYSKILKPDPKALPKLPRLALSQKSRRFMIYVHSKGMIVDDEFIIVGSANINQRSLEGTRDTEIAMGAYQPQHTWAAKHSSPHGQIYGYRMSLWAEHVGVVEDCFARPESLECVRRINQMTILNWRQFAAEEVTEMRGHLMKYPVEVDPKGKVKPLPGAETFPDTGGNVVGSFLGIQENLTI

SEQ ID NO: 6912 - protein, 368 aa, Gibberella zeae PH-1
MSFAGMLNRLHGQPESYDKKAKYKFGRTLGAGTYGVVREADGPTGKVAVKIILKRNVKGNEQMVYDELEMLQKLKHPHIVKFVDWFESRDKFYIVTQLATGGELFDRICEQGKFTEKDAAETIKQVLLAVDFLHKNNIVHRDLKPENLLYLNRDPESDLVLADFGIAKMLDGKGESLKTMAGSFGYAAPEVMRKEGHGKPVDMWSMGVITYTLLCGYSPFRSENLQDLIRECTDNSVVFHERYWKDVSNDAKDFILKLIDPDADKRWTSEEALGHIWLTGENATDYNLLPEIKSFRARSRFRRIIEKIKLQARIEKLKAMEEDPDNSDLSAIFSEVARAKLADEKEEREVLRITQEVEKEVKRRSFQA

SEQ ID NO: 6913 - protein, 500 aa, Pseudomonas fluorescens
MNTLPSQVWRTNIGSAPSQLLNYIDGNFVTSASSFANINPVNGKLISDVFEADAKQVNEAVVAAQNALKGPWGKLSVQDRAALIHKIADGIQARFEEFVAAEVADTGRPVHQARTLDIPRAIANFRTFADLAKTSHTDLFEMSTSDGSGALNYTVRKPLGVIGVISPWNLPLLLFTWKVAPALACGNTVVAKPSEESPSSATLLAEVMHDAGVPPGVFNLIHGFGKDSAGEFLTQHPGISALTFTGESKTGSTIMKAVADGVKEVSFELGGKNAAVVFADADLDAAIEGVLRSSFTNSGQVCLCSERVYVHRSIFDEFVSGLKVEAERLVVGYPDQDGVNMGPLISHGHRDKVLSYYRLAVDEGATVVTGGGVPKFNDERDQGAYVQPTIWTGLSDKARCVTEEIFGPVCHISPFDDEDEVINRVNDSNYGLACAIWTTNLSRAHRVSRQIHVGLVWVNTWYLRDLRTPFGGVKLSGLGREGGRFSMDFYSDIANICIKI

SEQ ID NO: 6914 - protein, 329 aa, Coffea canephora
MCGGAILEGLIPPRNNNDGTRRLSSADLWPSAADFWPNSHLAKPSRSNPTDAPHKATHETCHDPHDEAGGKQQVLPKGAKRQRKNLYRGIRQRPWGKWAAEIRDPRKGVRVWLGTFNTAEEAARAYDKEARKIRGKKAKVNFPNEDSTSYPTCIPSQTQYQQVHIPSPPTFCGPSSSNCKFNQLRVGSSDCSASDCYHANSIDDCARFTNMMGFRNPSEEVSGSGSSDNECFLGHLKQVAKAAAEEEAASVITENDTKDNNKAAESEEYQVEKLSEELLAYESFMKFYQIPYIDGQSAAASANPAQELATSIQLWSFDDVSPANRPMPL

SEQ ID NO: 6915 - protein, 451 aa, Methylococcus capsulatus str. Bath
MGSAGRQWMERDLAVLWHPCSQMKDHESLPLIPIRRGEGVWLEDFDGRRYLDAISSWWVNLFGHCHPAINAALADQLGRLEHVIFAGFSHEPGIRLAERLVDITPPGLERCFYADNGSAAVEVALKMSFHYWRNRGRPGKTRFVTLENSYHGETLGALAVGDVPLYKETYRPLLMEAVAAPSPDAYGREPGETEAGYAERRFRDMLAILERGADEICAVIVEPLVQCAGGMRMYDPLYLRLLRAACDRLGIHLIADEIAVGFGRTGTLFACEQAGISPDFLCLSKGLTGGYLPLAAVLTRPEIYAAFYDDYGTLKAFLHSHSYTGNPLACRAALATLELFDATDVLGRNRELARCMADATERFQEHPHVAEVRQRGMILAIEMVKDKTTREPYPWQERRGLRVYRRALERGVLLRPLGNVIYFMPPYLITPEQIRLMAEVAWEGLLVAAED

SEQ ID NO: 6916 - protein, 318 aa, Burkholderia cepacia R1808
MLEAQIAAFVAAVDAAYPAGTAARSPAEQRRIYDRFAAAWTPAELPPGIVRHDALWRAPHGPAIALRRYAPAHGAPRGTVLFFHGGGFVVGSLDSHALITAQLAADTGLAVIAVAYRLAPEHRAPAALEDCLAVTRAARDAAHWPFGPCARPLTLAGDSAGGNLAAAVATALRDAGEAGLDGIALAYPMLGIEPQAPARDTEAHARMLTLDDVRRYRALYWAQADAAALSADPLLRASVPLVASRFDGLPPVLAIGAQHDPLRDDARVYVERIVAAGGVARYWMGEGLVHGCWRALGTSPQAARMHRMIGGFLLAPHA

SEQ ID NO: 6917 - protein, 336 aa, Glycine max
  misc_feature (272)..(272): Xaa can be any naturally occurring amino acid
MADESVVESPVKRQRDDDEENEVSVSMDVEGGKDPLSNGLSSVIPGWFSEISSMWPGEAHSLKVEKILFQGKSEYQNVMVFQSSTYGKVLVLDGVIQLTERDECAYQEMITHLPLCSIPNPKKVLVIGGGDGGVIREVAHHSSVEKIDICEIDKMVVDVSKQYFPDVAVGYDDPRVTLHIGDGVAFLKEVPEGTYDAVIVDSSDPIGPAQELFEKPFFSSVAKALRPGGVVCTQAESIWLHMDIIEDIVANCRQIFKGSVNYAWTTVPTYPXSGMIGFMLCSTEGPPVDFKHPVNPIDENESQKSVRPLKFYNSEIHTAAFCLPSFAKRKIGSKAN

SEQ ID NO: 6918 - protein, 364 aa, Populus balsamifera subsp. trichocarpa x Populus deltoides
MGSTGETQMTPTQVSDEEAHLFAMQLASASVLPMILKTAIELDLLEIMAKAGPGAFLSTSEIASHLPTKNPDAPVMLDRILRLLASYSILTCSLKDHPDGKVERLYGLAPVCKFLTKNEDGVSVSPLCLMNQDKVLMESWYYLKDAILDGGIPFNKAYGMTAFEYHGTDPRFNKVFNKGMSDHSTITMKKILETYKGFEGLTSLVDVGGGTGAVVNTIVSKYPSIKGINFDLPHVIEDAPSYPGVEHVGGDMFVSVPKADAVFMKWICHDWSDAHCLKFLKNCYDALPENGKVILVECILPVAPDTSLATKGVVHIDVIMLAHNPGGKERTEKEFEGLAKGAGFQGFEVMCCAFNTHVIELRKN

SEQ ID NO: 6919 - protein, 503 aa, Brassica napus
MAITVPRRQLFIGGQWTEPLRRQTLPVVNPATEDIIGYIPAATSEDVELAVEAARKALTRNKGNDWSKASGAVRARYLRAIAAKVTERKSELANLEAIDCGKPLDEAAWDMDDVAGCFEYYADLAQGLDSKQKAPLSLPLDTFKGYVLKEPIGVVGLITPWNYPLLMAVWKVAPALAAGCTAILKPSELASVTCLELADICREVGLPPGVLNILTGLGTEAGAPLASHPHVDKIVFTGSTATGSNIMTSAAKLVKPVSLELGGKSPIIVFDDVKIDKAVEWTMFGCFWTNGQICSATSRLLVHEKIADEFLDKLVKWTKNIKISDPFEEGCRLGPVVSKGQYERVVKFVSNARKEGATVLCGGARPGHLKKGYFVEPAIISNVTTSMEIWRDEVFGPVLCVKTFSTEDEAIQLANDSQYGLAGAVLSNDLERCDRVSKAFEAGIVWVNCSQPCFCQAPWGGTKRSGFGRELGEWGLENYLSVKQVTQYISNEPWGWYKSPSKL

SEQ ID NO: 6920 - protein, 494 aa, Medicago truncatula
MAASPAYQAHLPTSPEWLNKGDNAWQMTAATLVGLQSMPGLVILYASIVKKKWAVNSAFMALYAFAAVLICWVLVAYRMAFGDELLPFWGKGAPALGQKFLVARAKVPASTHYYKNGVDIETPMEEPFFPMASLVYFQFTFAAITMILLAGSVLGRMNIKAWMAFVPLWLIFSYTVGAFSLWGGGFLYHWGVIDYSGGYVIHLSSGIAGFTAAYWVGPRIKSDRERFPPNNVLLMLAGAGLLWMGWSGFNGGAPYAANVASSIAVLNTNICAATSLLVWTSLDVVFFGKPSVIGAVQGMMTGLVCITPGAGLVQSWAAIVMGILSGSIPWVSMMILHKKSSLLQKVDDTLGVFHTHAVAGLLGGLLTGLFAEPALCRLLLPVTNSRGAFYGGSGGMQLLKQLVAAMFVIGWNIVSTTIILLVIQLFIPLRMPDEQLEIGDDAAHGEEAYALWGDGEKYDPTRHGSLNTGNTGVSPYVNGARRCDYKFMSHNLQV

SEQ ID NO: 6921 - protein, 274 aa, Exiguobacterium sp. 255-15
MEFVTLNNGLVMPQLGYGVFKVPEQEVYEAVREALRVGYRSIDTAMIYENEAGVGRALKDSGIPREDIFLTTKVWNKDQGYERTLAAFETSLQKLGVDYVDLYLIHWPMPDEDLYMDTWRALEQLYRDGKAKAIGVSNFHIPHLTRVLEEGTVVPAVNQIELHPFLSQEAIRAFCQKNGIVVEAWSPLMKGRDALTDPVITDIAARHGKTPAQVVLRWHLQHDIIAIPKSVTPSRIQENLDIFDFVLSPDDMRQIDQLNRNERTGSNPDEMHKK

SEQ ID NO: 6922 - protein, 124 aa, Desulfitobacterium hafniense DCB-2
MSGYVAGAAFAKGHRESWPDAVDPPIRYIVAPRFLLATSTRTFALTTPRFRERVAMSGKEIGTVKWFNDAKGFGFISRENGEDVFVHFRAIQSQGFKSLKEGQKVSFTVVQGQKGLQADAVEPL

SEQ ID NO: 6923 - protein, 308 aa, Helianthus annuus
MAILSRYSSSNTLFCIEEQVHEDEDELTHQDSSAIHPLDLQDLCWEHEELVSLFTKEEEQQKQTPWPSSCTLSFRKEAVDWILKVKGCHGFTPLTAILAINYLDRFLSSLHFQKANTPWMIHLVAVTCLSLAAKIQETHVPLLLDLQLEESKFLFEAKNIQKTELLVMSTLKWRMNLVTPISFLDHIVRRLGLSNHLHWDFFKKCEAMILYLVADSRFVCYKPSVLATATMLCVVEEIDPTNSIGYKSQLLDLLKTTKDHINECYKLVMDLSYDNHNKGKRDENERTIYPVSPAGFIGFMCHESSNDS

SEQ ID NO: 6924 - protein, 508 aa, Psychrobacter sp. 273-4
MLYAYPNTENSPVQFRKKYDNFINGEWVAPIDGEYFDNSSPIDGKTFCQIARSKEADVEAALDAAHAAKDAWGKTSVTERSNMLLKLADGIEANLEKIAIAESYENGKPVRETLAADIPIAIDHLRYFAGVIRAQEGGISQIDEDTVAYHFHEPLGVVGQIIPWNFPILMAIWKIAPALAAGNCVVLKPAEQTPASILYMLDVIGAADILPKGVLNVVNGFGVEAGKPLASNPRIDKVSFTGETTTGRLIMQYASENIIPVTLELGGKSPNIFFADVMDEDDDFLDKAVEGLVMFALNQGEVCTCPSRALVHESIYDEFMKRCIARVKAIKMGNPLDTDTMIGAQASSDQLEKILSYLDIGKKEGAKVLVGGELAKHDGDIANGYYVQPTIFEGTNDMRVFQEEIFGPVLAVTTFKDDEEAMALANDTLYGLGAGVWTRNGTRAYRFGRGIKAGRVWTNCYHLYPAHSAFGGYKQSGIGRENHLMMLDHYQQTKNMLVSYSPKAMGFF

SEQ ID NO: 6925 - protein, 490 aa, Arabidopsis thaliana
MESRKNSDRQMRRANCFSAGERMKTRSPSVIVIGGGFGGISAARTLQDASFQVMVLESRDRIGGRVHTDYSFGFPVDLGASWLHGVCKENPLAPVIGRLGLPLYRTSGDNSVLYDHDLESYALFDMDGNQVPQELVTQIGVTFERILEEINKVRDEQDADISISQAFSIVFSRKPELRLEGLAHNVLQWYVCRMEGWFAADAETISAKCWDQEELLPGGHGLMVRGYRPVINTLAKGLDIRVGHRVTKIVRRYNGVKVTTENGQTFVADAAVIAVPLGVLKSGTIKFGPKLPEWKQEAINDLGVGIENKIILHFEKVFWPKVEFLGVVAETSYGCSYFLNLHKATGHPVLVYMPAGQLAKDIEKMSDEAAANFAVLQLQRILPDALPPVQYLVSRWGSDVNSMGSYSYDIVGKPHDLYERLRVPVDNLFFAGEATSSSFPGSVHGAYSTGLMAAEDCRMRVLERYGELDLFQPVMGEEGPASVPLLISRL

SEQ ID NO: 6926 - protein, 89 aa, Zea mays
MSEGTANCVDILIAIILPPLGVFLKYGCGHEFWICLLLTFLGYIPGIIYAIYGHHQEQLASHPCRRRSMSLYLRLFICPDADLCCMPVA

SEQ ID NO: 6927 - protein, 162 aa, Crypthecodinium cohnii
MSDEDHTFESTDAGASATYPQQAGEIRKGSYLMIKGRPCKCIEVSTSKTGKHGHAKAHIVALDIFSGKKYEDLCPTSHNLDVPFVKRTEYLLTADGTLARACDGHKDDLNLPTVVKVGEPTDRDKKVTAEILESVEKGTTIFVIVQAASGEEKIIQTKTTSG

SEQ ID NO: 6928 - protein, 425 aa, uncultured marine gamma proteobacterium EBAC31A08
MSCLVLKILEIFGHLIFELKPRYNIFMKEIIKEYTNYMVPFYAPADFVVKKASGSHVWDLNNKKYIDFTAGIAVTNLGHSNKDLIKILKKQSEELWHLSNLYINEPSVTLARKLCKNSFADKVFFCNSGAESIEAAVKIARKFCSSTVNKNKNEVISFSTSFHGRTMLGIALAKAKHLTDGFAPLPRGIKNHPYNDITNLEKVFSDKTAAVILELVQWQSGITKADKKFIAKIKKLAKKHKALVIIDEVQSGIGRTGTLFAYEQFNITPDILCFAKGISNGFPLGGILTSDKVSKHMSAGSHGTTFGGGPIACAIGNEVIDTISKKSFLNKVLKKEVRFINLLNKINEKHKCFEKITSAGLWVGVEVSKDSKIQIDDLIKKSHHNGLMILKANASTVRFSPSLIIENELVDEGLKIFEKSIISLL

SEQ ID NO: 6929 - protein, 158 aa, Clostridium perfringens str. 13
MEIYDISVKDINGENVSLERYRGKVLLIVNTASKCGFTKQFDGLEELYEKYKDEGFEVLGFPCNQFKEQDPGSNSEIMNFCKLNFGVTFPMFEKIDVNGENESLLYSYLKEQKSGMFGSKIKWNFTKFLVDREGNVIKRFSPQTTPKSIEKDIEELLA

SEQ ID NO: 6930 - protein, 183 aa, Arabidopsis thaliana
MASSSEEIVSAGESSEIEEAVASLTMSSNKILLTSSDGESFEIDEAVARKFLIIVHMMEDNCAGEAIPLENVTGDILSKIIEYAKMHVNEPSEEDEDEEAKKNLDSWDAKFMEKLDLETIFKIILAANYLNFEGLLGFASQTVADYIKDKTPEEVREIFNIENDFTPEEEEEIRKENAWTFNE

SEQ ID NO: 6931 - protein, 177 aa, Rubrobacter xylanophilus DSM 9941
MDQGKSDEWIADALGTSASSVQSFRSRNDIYRRERVQREPESIFEGVLDHGERDGWGLWLDPSVAEDPIWKRHWQDVDAVVVKLAREAIVLEPDRAEQEGGEKPARQARPSQREQGRVKWFDPEKGYGFLVRPGGEDLFVHHSEVEGDASSLGQGVEVEYEVGRNERGPNARRVRVL

SEQ ID NO: 6932 - protein, 109 aa, Brassica napus
MASSMLSSAAVVTSPAQATMVAPFTGLKSSSAFPVTRKANNDITSIVSNGGRVSCMKVWPPVGKKKFERRLISVLKEMVRLQSEFLKPMRPRPKLLKKRLQYQQQEEEE

SEQ ID NO: 6933 - protein, 305 aa, Arabidopsis thaliana
MARCVGRCYVSPAFGESESHRLSERRFLKLSSSTNSDPAGSKSLKLRGKIHRRMSYFRPIMAKDESISSRSGETKQINGKQKNIVWHDCPVTKSDRQELIKHKGCVIWITGLSGSGKSSLACALSRALHNRGKLSYILDGDNVRHGLNSDLSFEADDRAENIRRVGEVAKLFADSGIICIASLISPYRIERAACRALLPQGDFIEVFMDVPLHVCEARDPKGLYKRARAGKIKGFTGVDDPYEAPLDCEIVIQNSRDKGLSSSSSSSSSPSSSSSSLCEMADIVVSYLDQNGYLKKHSTKSRDCM

SEQ ID NO: 6934 - protein, 1162 aa, Gossypium hirsutum
MDNNPHQNPYPYHHGYPPPNQDPYAPPPYQYPYNSPQYPPALHMYPPPAHALAAAPIDYGHSHSYSGPIPYQYSHPIPPNSSQPAPQYHGSFQYGSTFNPYQQSLSGHYPPPKSNPQSSSTYQQPAQYPPQSSSSYQQPGQYTPPESNSELLSTHISFSGHNRQDSTKYGSTFNPYQQSLSGHYPPPKSNPQSSSTYQQPAQYPPQSSSSYQQPGQYTPPESNSELLSTHISFSGHNRQDSTSYLAANSGSASPAYPLLDHQFSNMHLSGSHPSAPASPLAPLGPPLAAATSTPDYASESSNWEGLSLGRADSANHSTFSHNHSFNGSQKGQGMQIVPFQKGSLRVLLLHGNLDIWVLEANNLPNMDMFHRTLGDMFANFSSNISKKVGGRSDEKITSDPYVTIAVAGAVIGRTFVISNNENPVWMQHFNVPVAHHAAEVQFVVKDSDILGSDIIGVVAIPVEQIYAGGKIEGTYPVLNAAGKPCKPGAVLKLSIQYTPMEKLSFYHQGVGAGPEYVGVPGTYFPLRKGGKVTLYQDAHVPDGCLPNIKLDQGIHFVQGKCWTDMFDAIRQARRLVYITGWSVWHKVRLVRDVAPASDCTLGDILRSKSQEGVRVLLLLWDDPTSRSILGYKTEGIMATHDEETRSFFKHSSVQVLLCPRIAGKKHSWVKQKEVGTIYTHHQKTVIVDADAGNNHRKIIAFVGGLDLCDGRYDNPDHVLFRTLQTYHKDNYHNPTYTGSTVGCPREPWHDMHSKIDGPAAYDVLVNFEERWLKAAKPHGLKKLKKPFDDALLRIERIPDIMGVSDFTENENDPERWHVQIFRSIDSNSVKGFPKDPKDAPSKIWCAVRTSLIDMSIHTAYVKAIRAAQHFIYIENQYFLGSSYNWSSYKNLGADNLIPMEIALKIASKIKANERFAAYVVIPMWPEGVPTGAATQRILYWQNKTMSMMYETIYRALVEAGLDSTFVPEDFLNFYCLGNRELDGYQPPVDESPKAANTPEALSRKSRRFMIYVHSKGMIVDDEFIIVGSANINQRSMEGTRDTEIAMGAYQPQHTWAAKRSSPLGQINGYRMSLWAEHVGVVEDCFARPESLECVRRINQMAKLNWRQFAAEEVTEMRGHLLKYPVEVDPKGKVKPLPGSESFPDTGGSVVGSFIGIHENLTI

SEQ ID NO: 6935 - protein, 52 aa, Zea mays
MVLEATMICIDNSEWMRNGDYAPSRFQAQADAVNLICGAKTQSNPENTVRRE

SEQ ID NO: 6936 - protein, 262 aa, Capsicum annuum
MNTAIIAKSSGVRKGAWTEEEDFLLRKCIQNYGEGKWHLVPIRAGLNRCRKSCRLRWLNYLRPHIKRGDFGWDEIDLILRLHKLLGNRWSLIAGRLPGRTANDVKNYWNSHLQKKLITAPHRQEKKYNTALKITTKNVLRPRPRTFSSSAKNNISWCTNKSTVITNTLDKDERDKEIGLNICQKLTSETSSTIDDGVQWWTSLLENCKEIEEDVAAVGIFEEKNKLVPSLLHDEINSLTMQQGQSDGWDDFSADIDLWNLLN

SEQ ID NO: 6937 - protein, 452 aa, Neurospora crassa
MAPSDPVNPPGTPAPSLLEGRLWVDGCFDFFHHGHAGAVVQARQLGTELYVGVHSDEAILENKGPTVMTLRERLLATDACRWVTKSVAYAPYVTQLDWISHFGCKYVVHGDDITSDSSGEDCYRFVKAANRFKVVKRTPSISTTDLVGRMLLCTRTHFIKDLEKMLEGEEGNGTAEEKKKVGEEMKERIRLYATDETAKNPGANVWFWKGDEKKKKKEDEGKEEEKGVFRELFGGIGPKPGQRVVYVDGGFDLFSSGHIEFLRLVTQKEEELARQEGWYSQQAIDERKGKGADYGPAFVVAGVHDDEVINREKGVNYPIMNVFERGLCVLQCKYINAVVFGAPFKPTKGYLTSLPWGTPDAVYHGPTSFMPHTEDVYAVPKEMGIYKEIGQHEYKDVNAGTIVQRIMKSRDLYEARQKAKGMKADIEAAHRERELLEEQQRQKEEAIAAQKE

SEQ ID NO: 6938 - protein, 427 aa, Bacillus sp. KSM-K16
MAMKVTGGFILDENGEQVAKDVYIKDGKIVEHVADGDIRQQFDATGLLISPGFVDVHVHLREPGGEKKETIETGTKAAARGGFTTVAAMPNTRPVPDNAEQLDLLQARISETAVVRVLPYASITTRQLGQELTDFKALKEAGAFAFTDDGVGIQEAGMMLSAMKEAAALNMAVVAHCEDNSLINGGAVHEGHYAKAHGLNGIPSVCEAVHIARDVLLAEAAGAHYHVCHVSTKESVRTIRDAKKAGIRVTAEVTPHHLLLCEDDIIGKDPNFKMNPPLRAKEDRDALVAGLLDGTIDFIATDHAPHTAEEKSASLERAPFGIVGLETAFPLLYTHFVKPGTFTLKQLIDWLTVKPAQTFNLPYGTLQVGAAADLTLIDLKANETIDPSMFLSKGKNTPFAGWDCAGIPQATMVAGKTVYKKERITNE

SEQ ID NO: 6939 - protein, 443 aa, Glycine max
MKLEESVSNSNITAPLLPPEDPSPSPQNGSISGAVFNITTTMIGAGIMSIPATMKVLGIVPGLVVIVLVALITDVTVEFMLRYTSSGKSSTYAGMMAESFGSIGSLAVKICVIITNLGVLIIYFIILGDVLCGNESNGITHLGILQEWFGINWLTSRAFALLFVALFIMLPLVMLRRVDSLRYSSAISILLALVFVVICSSMAVSALLSGKSQTPRIVPDFSQVTVLDLFTAIPVFVTGFGFHVNVHPIRAELIKVEHMGLAARISLIICVAIYFAIGFFGYLLFGDSIMPDVLVNFDQNSHTSTGRLLNAIVRLSYALHLALVFPIMNYSLRANIDELIFSNKNKPPLASDTPRFVSLTLTLLALTYLVAVTIPNIWYFFQFLGSTTIVSTSFIFPAAIVLRDMHGISKTKDQVMAIVVIVLAVGTSGIAIWTNLNGSGDDQ

SEQ ID NO: 6940 - protein, 497 aa, Methanosarcina acetivorans C2A
MCGIAGVFGTPDSNLKVKKMLAALGHRGPDACGIHTAGDLSIGNTLLKITGDMPQPLTGKGALVLNGEIFNFRELAAEIGIKIDSDTELLFSLIETGVKEGSTPIDAVCSALSKVNGDYALAYACGGELVLARDPSGVKPLFYCSGTEGEKPEIAFASEKKALAFISRKAKPFPQGGILGFNTESGKITEKIPEGYLEIKSPEKRIYTEHEALSQLKETLEKAVELRLTPTTGIAFSGGIDSTFLAALAKRIDPGVSLYAVGLPDSHDITQAERAAEAIGMRKNLKVHFLSPEEIEAAVPRVVYATESTDPMTVAIGIPLYIVAKTAKEDGKRVLLTGQGADELFGGYRRHEEFLKKGAEVLDREIYSDLATISKINLERDDMVTMANSVELRVPFLDKEVIKTGLAIRPELKVLKKDGYYEDGYYERKYILRKAAKGLIPPEILWKEKKAMQYGTGVQKVLDRLARDSGFSKKQESHIEKYLMQIASEKGFEFVNN

SEQ ID NO: 6941 - protein, 196 aa, Oryza sativa (japonica cultivar-group)
NILFKHIKELLSGDTALIAETGDSWFNCQKLRLPEGCGYEFQMQYGSIGWSVGATLGYAQAAKDKRVMSCIGDGSFQMTAQEVYTMLRCGQKSIIFLINNGGYTIEVEIHDGPYNVIKNWDYTGLIDAIHNSDGNCWTKKVRTEEELIEAIATATGAKKDCLCFIEIIVHKDDTSKELLEWGSRVSAANSRPPNPQ

SEQ ID NO: 6942 - protein, 209 aa, Brassica napus
MPKKKNASNSLVDDTRGSLYPALSDRSSQLNFQSEKMQQRKTTAAAAGRPSGTDGSDFSYRMVVDSRYTKVTKGRSRLRLLILVQATIYLIGLSCAFMTSTKNEERNTLGIASASIGLLFAFIGDFGCRRSRVNLLRLYTAASTVVMVLSVFSAVRSRLTMEERNSSGTAANLELLGFISAQLGAVVQILAIIVTGSLVNNMSPPTKTE

SEQ ID NO: 6943 - protein, 434 aa, Escherichia coli O157:H7 EDL933
MFDFVCNHMSAKSEWFKNYLQQQPGFEDFFIAVDPQTDLSAVTRPRALPLLTPFQMDDNSTRHLWTTFSDDQIDLNYRSPDVLLAMVDVLLCYLEKGAEYVRLDAVGFMWKEPGTSCIHLEKTHLIIKLLRSIIDDIAPGTVIITETNVPHKDNIAYFGEGDDEAHMVYQFSLPPLVLHAVQKQNVEALCQWAQSLSLPSGKTTWFNFLASHDGIGLNPLRGLLPESEILALVEALQQEGALVNWKNNPDGTRSPYEINVTYMDALSRRESSDEERCARFILAHAILLSFPGVPAIYIQSILGSRNDYAGVEKLGYNRAINRKKYHSEEITRELNDEATLRHAVYHELSRLITLRRSHNEFHPDNNFTIDTVNSSVMRIQRSNAEGNCLTGLFNVSKNIQHVNITGLHGRDLISEVDILGNKITLRPWQVMWIK

SEQ ID NO: 6944 - protein, 414 aa, Azoarcus sp. EbN1
MSTSHITVPTGGQKIIPGQPIPDNPIIPFIEGDGIGVDITPVMIKVIDAAVAKAYGGKRKIHWMEVYAGEKSTQVYGPDEWLSKETLDALKEYSVSIKGPMTTPVGGGIRSLNVALRQELDLYQCVRPIQYFKGVPSPLKNPELTNMVIFRENTEDIYAGIEWQADSEQARKVIAFLQNEMGVRKIRFPATSGIGIKPVSVEGTQRLVRAALKYVIDNDRKSLTIVHKGNIMKFTEGLFRDVAYELAQKEFGAQPIDGGPWCKFKNPNTGREIVVKDSIADAFLQQILLRPAEYDVIATTNLNGDYISDALAAQVGGIGIAPGANISDQYACFEATHGTAPKYAGLDKVNPGSLILSAEMMLRFMKWTEAADLVIKGMEAAIGDKVVTYDFARLMEGAQEVSCSAFGDAMIARM

SEQ ID NO: 6945 - protein, 484 aa, Azotobacter vinelandii
MQLTDSTLLRTRAFIAGQWVDADDGATFVVTDPADLSPIGTVASLGAAETARAIAAAEAALPAWRAKTAKERSVLLRKWFELIMANREDLARLLSREQGKPLAESRGEIAYGASFIEWFAEEAKRTYGDVIPHDKQGRRLVVIRQPIGVVAAITPWNFPNAMITRKAGPALAAGCTIVIKPASETPLSALALAELAVRAGIPAGVINVVTGDPRVIGGELTRNPAVRKLSFTGSTGIGKLLMAQCADTMKKVSMELGGNAPFIVFDDADLDAAVAGALASKYRNSGQTCVCTNRLLVQEGVYDAFARRLVAAVKALKVGPACEEGAQLGPLINAKAVLKVQEHIEDALTKGARLLAGGKPHSLGGSFFEPTVLGEATPEMLVAREETFGPLAPIFRFRSEAEAIQMANDTEFGLASYLYTRDLSRAWRVSEALEYGMVGVNEGVISTEIAPFGGIKESGTGREGSKFGIDDYVELKYLCFGIDA

SEQ ID NO: 6946 - protein, 119 aa, Triticum aestivum
  misc_feature (51)..(51): Xaa can be any naturally occurring amino acid
  misc_feature (63)..(63): Xaa can be any naturally occurring amino acid
  misc_feature (70)..(70): Xaa can be any naturally occurring amino acid
  misc_feature (85)..(85): Xaa can be any naturally occurring amino acid
  misc_feature (91)..(91): Xaa can be any naturally occurring amino acid
  misc_feature (99)..(99): Xaa can be any naturally occurring amino acid
  misc_feature (110)..(110): Xaa can be any naturally occurring amino acid
MSDTDEHHFESKADSGASKTYPQQAGAIRKGGHIVIKARPCKVVEVSTSKXLGKHGHAKCHFXVAIDIFXMGKNFEDIVPSSHNXDFPHVXRQDYQLIXDITDDGIQPSXTEIGNTKDD

SEQ ID NO: 6947 - protein, 216 aa, Thermoanaerobacter tengcongensis MB4
MKFFLDTANIEEIKEAYSLGVISGVTTNPSLVAKEGRDFKEVIREIAEIVDGPISAEVISDDHEGMVKEARELAKIHKNIVIKIPMTAEGLKAVNILSKEGIKTNVTLIFSANQALLAARAGATYVSPFVGRLDDINTDGMQIIEDIVTIFTNYDIQAEIITASVRHPIHVLEAAKLGAHIATVPYKVLMQMIKHPLTDIGIERFKEDWKKAGLKI

SEQ ID NO: 6948 - protein, 109 aa, Brassica napus
  misc_feature (14)..(14): Xaa can be any naturally occurring amino acid
  misc_feature (28)..(28): Xaa can be any naturally occurring amino acid
  misc_feature (47)..(47): Xaa can be any naturally occurring amino acid
  misc_feature (52)..(52): Xaa can be any naturally occurring amino acid
  misc_feature (69)..(69): Xaa can be any naturally occurring amino acid
  misc_feature (78)..(78): Xaa can be any naturally occurring amino acid
  misc_feature (89)..(89): Xaa can be any naturally occurring amino acid
RHKVDMHSGCTYNXHSYVKGNTIEVDNXSWMSTVFYCYGEYLSLHFXHFNFXLAPVYMAFLHYMGDETXTWCYNYSLXVGGYGRKPIWXGTLRCVRYSHWKVRDSHDGL

SEQ ID NO: 6949 - protein, 178 aa, Streptomyces avermitilis MA-4680
MTTGATIWLTGLPSAGKTTIAYELAGRLREEGHLVEVLDGDEIREFLTADLGFTRADRHTNVQRIGYLADLLARNGVKALVPVIAPYADSREAVRKRHGASGAAYLEVHVATPVEVCSQRDVKGLYAKQAAGEISGLTGVDDPYEAPASPDLRIESHTQTVQESAAALHALLTERGLA

SEQ ID NO: 6950 - protein, 294 aa, Zea mays
  misc_feature (185)..(185): Xaa can be any naturally occurring amino acid
  misc_feature (222)..(222): Xaa can be any naturally occurring amino acid
MTMYSQSVRAPPPPPCRFVPRPCYVMARPLLVFTPSGALLKAAVRDVWASNFDEELSNLSAVLPRYPCVCVDTEFPGAVHDSDLPRYMRGPRESYELVKRNVDDLKLLQVGIALSGPAGRFPIAWQFNIRGFDPALHPHAPASIAMLREQGMDFAMLNEFGIDPEDFAAGFRCSGLACGRLTWTXFSGSYDFGYLAKALTGGQPLPDTVDGFLALVRRLFGXSVFDVKHLARCCAMRGGLEQVATALGVKRAAGRAHCAGSDSLLTTDVLLLMLHRFFRNVDVLAHAGTIVDLT

SEQ ID NO: 6951 - protein, 411 aa, Bacillus halodurans
MSTATLSQETKQIVKATVPILAEHGEAITKHFYKRMFSHHPELLNIFNQTHQKQGRQPQALANSIYAAAEHIDNLEAILPVVSRIAHKHRSLNIKPEQYPIVGENLLAAMREVLGDAASDDVLEAWREAYELIADVFIQVEKKMYEEASQAPGGWREFRSFVVEKKQRESATITSFYLKPEDGKALASYKPGQYITVKVTIPGHEHTHMRQYSLSDAPEKGYYRITVKREEGDGDLPPGIVSNYLHQHIHEGDVLEITAPAGDFTLQEEGERPIVFISGGVGITPLMSMFNTLMQRGVKREVIFIHAAINGFYHAMHDHLAQTASQQENVHYAVCYERPTPGDRMNPFMKKEGFIDESFLRSILHDREADFYFCGPVPFMKTIAQILKDWDVPEQQVHYEFFGPAGTLASS

SEQ ID NO: 6952 - protein, 275 aa, Bifidobacterium longum NCC2705
MAIQSTIMLNNGTVIPQVGLGVFQTPDGDTTVNAVQTALENGYRHIDTAMIYHNEASVGEGIRRAGVPRSDFFLTTKLWNDDIRARRGKDAFQESLDRLGVDYVDLYLIHWPADGWQQAWDDLQEIYASGRAKAIGVSNFQKHHIDELLTHSDVVPAVDQVESSPQFTNQELIGQLRAKGIHTEAWSPLGGTGGNLLSNPVLAGIGAKYGRSAAQVVIRWHIQRGIVVLPKSTHAERIKQNFEVFDFNLSVDDMTAISAINTGKRNGADPDNFNF

SEQ ID NO: 6953 - protein, 160 aa, Arabidopsis thaliana
MAGNYHSFQNPIPRYQNYNFGSSSSNHQHEHDGLVVVVEDQQQEESMMVKEQDRLLPIANVGRIMKNILPANAKVSKEAKETMQECVSEFISFVTGEASDKCHKEKRKTVNGDDICWAMANLGFDDYAAQLKKYLHRYRVLEGEKPNHHGKGGPKSSPDN

SEQ ID NO: 6954 - protein, 277 aa, Halobacterium sp. NRC-1
MRMAQDTQQRAAVVEEMPEFGLGTWENEDPSACADSVRTALEMGYRHIDTAQIYENEDAVGDGIAAADVDREDVFLATKVWTSELGDGDVAPATEQSLEKLGVDYVDLLYVHWPANQYDATETLAALADLQADGVTERIGVSNFEPRHLDEAEDVLGELPFANQVEFHPLLQQEELREYADGEDIELVAYSPLARGEVFDVPEIQAVAEKHGVSEAQVSLAWVRRKGVTAIPKATGEDHIADNWASLDLELDDEDVAKIDGIDRRERQVDPEFGPWN

SEQ ID NO: 6955 - protein, 415 aa, Neurospora crassa
MSFANMLNRLHGQPESYDKKSKYSFGRTLGAGTYGIVREASGPTGRVAVKIILKKNVKGNEQMVLDELEMLQRLKHPHIVKFVDWFESRDKYYIVTQLATGGELFDRICEQGKFTEKDASQTIKQVLGAVNYLHENNVVHRDLKPENLLYLTRDADSDLVLADFGIAKMLDNKDEVLTTMAGSFGYAAPEVMLKQGHGKPVDMWSMGVITYTLLCGYSPFRSENLQDLIDECSSGSVVFHERYWKDVSNDAKDFILRLLQPKPENRWTSQVRLTLAHPWLRGDSATNHNLLPEIKAYLTKARLRRGIEMVKLANRIEALKMQEDDPENTDMPGDATLAADQAQSRHRALSLASTKGGSSDAENATAPAEKRTLSKTIKTAIFREVVLAKVREMKEAEEANKLKEEAETKAKSFQA

SEQ ID NO: 6956 - protein, 220 aa, Zea mays
  misc_feature (208)..(208): Xaa can be any naturally occurring amino acid
MARRAASSLVSRCLLARAPAGAPPAAPSAPRRTVPADGMHRLLPGVLQRFSTAAAVEEPITPSVHVNYTKLLINGNFVDSASGKTFPTLDPRTGEVIAHVAEGDAEDINRAVAAARKAFDEGPWPKMTAYERFRILLRFADLIEKHNDELAALETWDNGKPYEQAAQIEVPMVARLMRYYAGWADKIHGLIVPADGLHHVQILHEPIXIAGPLIPLISYL

SEQ ID NO: 6957 - protein, 453 aa, Persea americana
MDNKGGILMQRFELGRLLGQGTFAKVYHARNLKSSQSVAIKVIDKEKVLKVGMIDQIKREISTMRLASHPNVVQLYEVMATKTKIYFVLEYVKGGELFNKVAKGKLKEDVAWKYFQQLVSAVDFCHSRGVYHRDLKPENLLVDENENLKVTDFGLGALAESKRQDGLLHTTCGTPAYVAPEVISRKGYDGAKADIWSCGVILFVLLAGYLPFHDSNLMELYRKVGKAEYKCPNWFPPEVRRLLARILDPNPNTRISIAKIKDNSWFKRGFEAKFAKGETKSKELAPLDTDAAFASSDTGVAARKPELVKPQHLNAFDIISLSAGFDLSGLFEDTNCRKEARFASKQPASAIISKLEDIAKRLRLKVKKKDEGILKLEGSKEGRKGVLSIDAEIFVVNPSFHLVEVKKSSGDTLEYQKLWNQDMRPALTDIVWAWQGDQQQQQESLVCSLGQSL

SEQ ID NO: 6958 - protein, 101 aa, Glycine max
  misc_feature (15)..(15): Xaa can be any naturally occurring amino acid
  misc_feature (55)..(55): Xaa can be any naturally occurring amino acid
  misc_feature (66)..(66): Xaa can be any naturally occurring amino acid
  misc_feature (75)..(75): Xaa can be any naturally occurring amino acid
  misc_feature (90)..(90): Xaa can be any naturally occurring amino acid
MRTKRKEMASSMISXPADTSGNRASSGLDARFAVLKSMAGFPTSETNKDITLIAXNCGRVLCMQVXSPIVMMKFXTLCYLPDLDDAQLAXEVRYLLKNGWI

SEQ ID NO: 6959 - protein, 189 aa, Leptospira interrogans serovar Copenhageni str. Fiocruz L1-130
MKEGASFMYSKYFIWFMTLGIFLPLAGIFAKGSFYDFKVKDIKGNEVSLSKYKGKVVMVVNVASKCGYTYQYEHLEKVYKKYKDQGFAVVGFPANNFGGQEPGTDQEIETFCRIQKGASFDMMSKISVKGKDIHPLYFYLIQNSPNPGEVEWNFEKILISKSGTIEARYRSSVEPDSSAVTQKIETLLK

SEQ ID NO: 6960 - protein, 457 aa, Mesorhizobium sp. BNC1
MLYHRAKNSWEQRDQENVFHGFTDLETLNQNGPVVLTHGEGIHVFDVHGKSYMDANSGLWNNVAGFNHKGLIEAICDQARRFPGYHAFFGRIADTTVALSEKLIEISPFPSGRVYYTNSGSEANDTVVKMLWLLHRRNGQPQRRKIITRVNAYHGVTVATASMTGKTYNAEFGLPLPGFLHADCPHHWRYGEPGESEAAFSQRLARKLEELIIKEGPDTIAGMFAEPVQGAGGVIPPSRGYFEAIRPILRKYGIPLIADEVITGFGRTGEMWGGDKYNVEPDAIVASKCITAGYFPMGAIILGPELADALTRACEAAEEFPHGFTSGGNPLGSAIALKALEVIETEGLLDNVRRVSPRFLAGLDRLARHDHAGEARGVGLMGAVELVADKNSKAPLDGALRIPERIANKALEKGLICRPLGQAIVLGPPFIITEGQIGEIFDILEDTMAEVFADVGL

SEQ ID NO: 6961 - protein, 105 aa, Bacillus cereus G9241
MSKRDYYEVLGLSKGASKDEIKKAYRRLAKKYHPDVSKEENAIEKFKEVQEAYEVLSDDQKRAQYDQFGHAGANQGFGGFGGGGDFGGGFGFEDIFSSFFGGGGG

SEQ ID NO: 6962 - protein, 238 aa, Schedonorus arundinaceus
MCGIKREMSGESGLSCSGEYHSPSTSPEQQQGHSQKQTAWMKRPAGRTKFRETRHPVFRGVRRRGNAGRWVCEVRVPGRRGSRLWVGTFDTAEIAARAHDAAMLALAAGDACLNFADSAELLAVPASYRNLAEVRHAVTEAVEDFERRQELGEKDSLSGTSSSTPSSSSLTDDEEASSQADNSPFELEVLSDMGWDLYYSSLAQGMMLMAPPFLAASAAFGDYGEVNLADVPLWSYQS

SEQ ID NO: 6963 - protein, 382 aa, Burkholderia cepacia R1808
MMRDAANFEPVDSRVTHPAFWNALPERWTSDVEETLVCCHVRQETHDVKSFFFRSPQGRTFSFEPGQFITLELDIDGETINRCYTISSSPARPHTISITVKRVPGGKVSNWLHDNLQPGAPVRVLGPAGEFTCARHPARKYLFLSAGSGITPLMSMSRAHHDLAEDRDIMFVHSARTPDDIIFARELDLIASNHTNFRTSFVVERVGARTNWPGVTGFLTLPLLKLIAPDFMEREIFTCGPAPYMKAVRDLLDEAGFDRKQYHEESFSFETLAQTASDDVLAELVPAADGGDVATKQYTVSFAKSNREISCGSEQHVLDAARQSGVRLPASCTQGMCGTCKVKLVSGQVEMKHNGGIRQREIDQGMVLLCCSKPLSDLVIDK

SEQ ID NO: 6964 - protein, 285 aa, Burkholderia cepacia R18194
MSTTLLFHPTPDAAYGFPNARRLARVASPHQQIEVWETPQLGRLFTLDGRPMTSVGDEYVYHECMTHPAALAHPAPRRALVLGGGDGGAARQLLKHACIERIVIAELDDEVVGMARRYLDDVHQGALDDPRVEVVIGDAAHFVESTVEHFDLVVFDLTPPDSPAAGLYTRAFYARLKRILTPCGAISMHLGSPVFHAARIAALLDDLRACFAVVDPLSAHVPLYGSQWLMAIASDTLDAAALFAHDIDERLAARRVQGLRYYDARLHASLFALPCALRDTLGVRR

SEQ ID NO: 6965 - protein, 180 aa, Zea mays
MAEAPASPGGGGGSHESGSPRGGGGGGGGSVREQDRFLPIANISRIMKKAIPANGKIAKDAKETVQECVSEFISFITSEASDKCQREKRKTINGDDLLWAMATLGFEDYIEPLKVYLQKYREMEGDSKLTAKSSDGSIKKDALGHVGASSSAAQGMGQQGAYNQGMGYMQPQYHNGDISN

SEQ ID NO: 6966 - protein, 484 aa, Geobacter metallireducens GS-15
MMILKNSSLLKQQCYLDGHWCCADGGATIDVTNPATGEILGVVPKMGTQETRRAIEAANGALDGWKARTAKERSAILRRWFELIMENLEDLAVIMTAEQGKPLAESRGEIAYAASFIEWFAEEGKRIYGDTIPSYARDKRIVVIKEPIGVCAAITPWNFPAAMITRKAGPALAAGCTMVVKPATATPFSALALALIGEQAGIPAGVFSVITGSSKEIGDEMTGNPIVRKLTFTGSTEVGKQLTAQCAGTMKKVSMELGGNAPFIVFDDADLDAAVEGAIASKYRNTGQTCVCTNRILVQESVYEAFSAKLVAAVSKMTVGDGLKGEVQQGPLIDMTALEKVEEHIADAVAKGARVVLGGKRHALGGTFFEPTIITDVTPGMLVAREETFGPLAPLFKFSTDEEAIRMANDTEFGLASYFYSRDIRRVWKVSEALEYGMVGINTGLISSEVAPFGGVKESGVGREGSKYGIEEFVEVKYLCMGGI

SEQ ID NO: 6967 - protein, 128 aa, Rickettsia sp. TwKM03
GPAHGGANEAVINMLKEIGSSENIPKYIAKAKDKNDPFRLMGFGHRVYKNYDPRAAVLKETCKEVLKELGQLENNPLLQIAIELEAIALKDEYFIERKLYPNVDFYSGIIYKAMGIPSQMFTVLFAIA

SEQ ID NO: 6968 - protein, 280 aa, Zea mays
  misc_feature (133)..(133): Xaa can be any naturally occurring amino acid
QTNEDGLLHTACGTPNYVAPEVLADKGYDGMAADVWSCGIILFVLMAGYLPFDDANLMRLYKLICHATFSCPPWFSSGARKFIKRILDPNPDTRIKIAEILEDEWFKKGYKPPHFEQGEDVNLDDGDAAFNDXEDRLVAEKREKPESMNAFALISRSQGFNLGNLFEKEMMGMVKRETSFTSQCTAQEIMSKIEDACGPLGFNVRKQNYKMKLKGDKSGRKGHLSVATEVFEVAPSLHMVELRKTGGDTLEFHNFYKNFSSELKDIVWKAESDASMKQTK

SEQ ID NO: 6969 - protein, 495 aa, Escherichia coli O157:H7 EDL933
MNFHHLAYWQDKALSLAIENRLFINGEYTAAAENETFETVDPVTQAPLANIARGKSVDIDRAVSAARGVFERGDWSLSSPAKRKAVLNKLADLIEANAEELALLETLDTGKPIRHSLRDDIPGAARAIRWYAEAIDKVYGEVATTSSHELAMIVREPVGVIAAIVPWNFPLLLTCWKLGPALAAGNSVVLKPSEKSPLSAIRLAGLAKEAGLPDGVLNVVTGFGHEAGQALSRHNDIDAIAFTGSTRTGKQLLKDAGDSNMKRVWLEAGGKSANIVFADCPDLQQAASATAAGIFYNQGQVCIAGTRLLLEESIADEFLALLKQQAQNWQPGHPLDPATTMGTLIDCAHADSVHSFIQEGESKGQLLLDGRNAGLAVAIGPTIIVDVDPNASLSREEIFGPVLVVTRFTSEEQALQLANDSQYGLGAAVWTRDLSRAHRMSRRLKAGSVFVNNYNDGDMTVPFGGYKQSGNGRDKSLHALEKFTELKTIWISLEA

SEQ ID NO: 6970 - protein, 539 aa, Zea mays
MGNCCVTPKAADDAGGGKKPKEPKQKKGKKPNPFSIDYNRSGQASAPKLVVLRDPTGRDIAARYELGAELGRGEFGVTYLCTDRASGEALACKSISKKKLRTAVDLEDVRREVEIMRHLPKHPNVVTLRDTYEDDNAVHLVMELCEGGELFDRIVARGHYTERAAALVLRTIVEVVQMCHKHGVMHRDLKPENFLFANKKESAALKAIDFGLSVFFTPGERFSEIVGSPYYMAPEVLKRNYGPEVDVWSAGVILYILLCGVPPFWAETEQGVAQAIIRSVIDFKRDPWPRVSDNAKDLVREMLNPDPKRRLTAHQVLGHPWLQNIKKAPNVNLGETVKARLQQFSVMNKFKKHALRVIAEHLSVEEAADIKDMFEKMDLNKDQMLSFEELKLGLHKFGHQMPDADVQTLMEAADADGNGSLNYGEFVTLFVHLRKIGNDEHLHKAFAYFDRNQSGFIEIDELRESLADDLGQNREEIINAIIRDVDTDKDGKISYDEFATMMKAGTDWRKASRQYSRERFTSLSLKLQKDGSLQMTSTR

SEQ ID NO: 6971 - protein, 279 aa, Triticum aestivum
MNIQVDPSSQVQWPQQQPVPQPHQPFSQQPQQTFPQPQQTFPHQPQQQFPQPQQPQQQFLQPQQPFPQQPQQPYPQQPQQLFPQTQQPQQLFPQSQQPQQQFSQPQQQFPQPQQPQQSFPQQQPPFIQPSLQQQVNPCKNFLLQQCKLVSLVSSLWSMIWPQSDCQVMRQQSCQQLAQIPQQLQCAAIHTVIHSIIMQQEQQQGMHILLPLYQQQQVGQGTLVQGQGIIQPQQPAQLEAIRSLVLQTLPTMCNVYVPPECSIIKAPFSSVVAGIGGQYR

SEQ ID NO: 6972 - protein, 106 aa, Arabidopsis thaliana
MDNTDRRRRRKQHKIALHDSEEVSSIEWEFINMTEQEEDLIFRMYRLVGDRWDLIAGRVPGRQPEEIERYWIMRNSEGFADKRRQLHSSSHKHTKPHRPRFSIYPS

SEQ ID NO: 6973 - protein, 141 aa, Triticum aestivum
MGERVKGTVKWFNVTKGFGFISPEDGSEDLFVHQSAIKADGYRSLNENDVVEFEVITGDDGRTKAADVTAPGGGALAGGSRPGDGGGDRGGRGGGGYGGGGYGGGGGGYGGGGGGYGGGGGGCFSCGESGHFSRECPNKTN

SEQ ID NO: 6974 - protein, 487 aa, Mesorhizobium loti MAFF303099
MRAQPTASHYVNGRYIDDEQGAPLPVIYPATGETIAMLRSATPNVLELAIEAARAAQPAWARLKPVERGRILRRAADILRARNADLARIETLDTGKAIQETLVADAPSAADCLEYFGGAVAAYNGEAVDLGGPFAYTRREALGVCVGIGAWNYPIQIAGWKSAPALAMGNAMVFKPSENTPLSALALAEIYSEAGLPDGLFNVVQGYGDVGAGLVGHDVVAKVSVTGSVPTGRKVLSLAGSKMKHATMELGGKSPLIVFDDADIENAIGGAMLGNFYSTGQICSNGTRVFVQSGIHDRFVERLVERTKKIRIGNPLDPETQMGPLVSKAQHEKVVGYIGIGKQDGAVLACGGNVPSLQGFDGGFFVEPTVFTGVTDTMRIAREEIFGPVMSVLKFDGEDEVIDRANDTEFGLAAGVFTRDLPRAHRVIAELQAGTCWINAYNLTPVEIPFGGFKQSGIGRENSLAALALYSQLKSIYVETGDVASPY

SEQ ID NO: 6975 - protein, 505 aa, Gibberella zeae PH-1
MAHELPFKIPTLQVKQQAPSQVQPLTSSVILPSNSLTTLTTPDPGTNKPWAKVKDNSADDVDHTVQVAYDAFQTFKKTSPRLRAQWLLKWDALIREHKADLATLLVYETGKPYAEAIGEMDYSLTFTSWFAGEAERIQGTCFMPSAPNRRVFTIKQPLGVAVALVPWNFPVAMVLRKAAAALAAGCTMVVKPSPETPVTAMALAKLASEAGFPNGVLNILPTSLDNTPSLSEALCKHDLVKKVTFTGSTRVGTLVANLCSLGLKKVVLELGGNCPCLIFNDADIEAALRELVGLKWRHAGQACVTVNRFLVQSAVYDKFLQRFAEETAKYVVGHGASEGTTLGPVTKPESLDRAERLIKDAVSKGARIVTGGNRLSPKDGEGGYFFEPTILADMTHDTLISCEECFAPIAAFYKFETEEEAVRVANDTPMGLASYAFTKDADRIWRLFENLEAGMIALNTGNSSAAESPFGGIKMSGYGKEAGKDVAVNEYMIQKTGTITVDGLV

SEQ ID NO: 6976 - protein, 492 aa, Gibberella zeae PH-1
MALTVELSTPVTGTYQQPIGLFIDGKWVEGVDKGKFEVINPSTEEVITSVCEGTEKDIDLAVAAARKAFDGEWKNTAPQTRGNLLLKLADLAEKNLDLLAAVESLDNGKSITNARGDVGAVVGCLRYYGGWADKIEGKTIDIAPDMFHYTRSEPIGVCGQIIPWNFPLLMLAWKIGPALATGNTVVMKTAEQTPLSALVFTQFIEQAGFPAGVFNLVSGYGKTAGAALSSHMDVDKIAFTGSTVIGRQIMKAAASSNLKKVTLELGGKSPNIVFEDADIEEAINWVNFGIYYNHGQCCCAGTRIFVQESIYDKFLAAFKKRAEENKVGDPFNEETFQGPQVSQLQYDRIMGYIKAGKDEGATVEIGGERLGDKGYFIKPTIFSNVRPDMKIMQEEIFGPVCAISKFKDEAEVIDLAHDTAYGLAAAVHTKNLNTALRVSNALKAGTVWVNCYNMLHHQLPFGGYKESGIGRELGEAALANYTQNKSVAIKLY

SEQ ID NO: 6977 - protein, 376 aa, Zea mays
  misc_feature (99)..(99): Xaa can be any naturally occurring amino acid
MAAASWSAPTTSFAPAPAPPWGPWRTKAAPLPIRTLPRRVLLNAVGESAMVAAGDTLLGLYEKERLGLLQYADDESKEERYWETLDADLRYWTRSLRPXGQWYPGHIAKTEKELKEQLRLMDVVIEIRDARIPLSTSHPKMDSWLGNRKRIIVLNRKDMISTEDMNAWATYFGNQGIKVVFSNGQLGMGTMKLGRMAKSVASVANTKRKEKGLLPRPVRAGIVGYPNVGKSSLINRLLKRRMCPAAPRPGVTRELKWVRFGTDLELLDSPGILPMRISDQTSAIKLAICDDIGERSYDFADVAAILVQMLIRHPAVGSEAFRRRYKIDVDSECGKTFVTKLSVHLFNGDTSQAAFRILSDYRKGKFGWVALERPPT

SEQ ID NO: 6978 - protein, 171 aa, Triticum aestivum
  misc_feature (126)..(126): Xaa can be any naturally occurring amino acid
MAAFLRSKCSSVGRTLMGGVGNNLYGGINSSVETVTRPSRCDAISQQIRTFIQMRTNLKVVDNSGAKRVMCIQSLRGKKGARLGDMIIGSVKEAQPRGKVKKGDVVYGVVVRAAMKKGRSDGSEVXKFDDNAIVIVNNKGELIGTRVFGPVPHELKKKKHLKILALAEHIV

SEQ ID NO: 6979 - protein, 179 aa, Brassica napus
VDPASGLEQRARWKSKQLETEFNILRQNYNDLASQFESLKKENQGLVSELDRLNEAMQKKRVEGRECCGDQTVVALSSTDHESEKEENTNPEPEEVRPDMEVYEKGHHDDYGYNSHIKREYFGGFEEEADHLMNIVEPADSCLTSSVGWRGFKPNTNILDQSSSNYPWWHFLVITYIRL

SEQ ID NO: 6980 - protein, 347 aa, Burkholderia cepacia R18194
MCVVIHGPNDLRVEEQDAGEIGPGQVRVDVAMGGICGSDLHYFRHGGFGAIRLQQPMVLGHEVAGTVAEVAPDVTSVKVGDRVAVNPSRPCGACRYCLEGLPNQCLDMRFYGSAMRMPHVQGAFRNALVCDAVQCVKVADHVPLSLAALAEPFAVGLHAVSRAGPLIGKRVLVSGCGPIGVLAVAAARVHGAAEIVATDVVEAPLEVASALGADRTINAATDAGWVERYAADKGTFDVMIECSGNARALRDGLDVMRPRGVVVQLGLGGDVSLPQNVVVAKELSICGSFRFHAEFALAVQLINAGRVDLRPAVTRVFPMRDANLAFELAGDRQRAMKVLIDFADEAA

SEQ ID NO: 6981 - protein, 263 aa, Prunus ilicifolia
AHYKTEVDVGNAIAEAIRSGLVKREELFITSKASNHGHVVEACKNSLEKLQLDYLDLYLVHYPLATKHSGVGTTASLLDENKVLDIDVTVSLESTWHDMEKTVSLGLVRSIGLSNYELFLTRDCLSYAKIKPQVSQFETHPYFQRESLVRFCKKHGVTPMAHTPLGGATANVKSFGSISPLEDPVLLGLAKKYKKSVAQIALRWNIERDTPVIPKSSKVERLKENLEVLNFKLEKEDIELINTIDKKSRTTLPSKTWGLDVYA

SEQ ID NO: 6982 - protein, 215 aa, Arabidopsis thaliana
MTEESPEEDHGSPGVAETNPGSPSSKTNNNNNNNKEQDRFLPIANVGRIMKKVLPGNGKISKDAKETVQECVSEFISFVTGEASDKCQREKRKTINGDDIIWAITTLGFEDYVAPLKVYLCKYRDTEGEKVNSPKQQQQRQQQQQIQQQNHHNYQFQEQDQNNNNMSCTSYISHHHPSPFLPVDHQPFPNIAFSPKSLQKQFPQQHDNNIDSIHW

SEQ ID NO: 6983 - protein, 170 aa, Zea mays
  misc_feature (37)..(37): Xaa can be any naturally occurring amino acid
MAPTVMMASSATAVAPFQGLKSTASLPIARRSSRSLXNVSNGGRIRCMQVWPAYGNKKFETLSYLPPLSTDDLLKQVDYLLRNGWIPCLEFSKVGFVYRENSTSPCYYDGRYWTMWKLPMFGCNDATQVYKELQEAIKSYPDAFHRVIGFDNIKQTQCVSFIAYKPPGSD

SEQ ID NO: 6984 - protein, 250 aa, Prunus andersonii
LKSEADVGNAIAEAIQSGLVKREELFITSKASNHGHVVEACKNSLKKLQLDYLDLYLVHYPLATKHSGVGTTASLLDENKVLDIDVTVSLETTWHDMEKTVDLGLVRSIGLSNYELFLTRDCLSYAKIKPQVSQFETHPYFQRESLVRFCKKHGVVPMAHTPLGGATANVNAFGSISPLEDPVLIGLAKKYQKSVAQIALRWNIERGTPVIPKSSKVERLKENLEVLNFKLEKEDIELINTIDKKSRTTL

SEQ ID NO: 6985 - protein, 355 aa, Burkholderia multivorans
MKIAVLPGDGIGPEIVTEAVKVLNALDEKFELEQAPVGGAGYEARGHPLPDATLKLAKEADAILFGAVGDWKYDSLERALRPEQAILGLRKHLELFANFRPAICYPQLVDASPLKPELVAGLDILIVRELNGDIYFGQPRGVRAAPDGPFAGEREGFDTMRYSEPEVRRIAHVAFQAAQKRAKKLLSVDKSNVLETSQFWRDIMIDVSKEYADVELSHMYVDNAAMQLAKAPKQFDVIVTGNMFGDILSDEASMLTGSIGMLPSASLDKNNKGLYEPSHGSAPDIAGKGIANPLATILSAAMLLRYSLNRAEQADRIERAVKTVLEQGYRTGDIATPGCKQVGTAAMGDAVVAAL

SEQ ID NO: 6986 - protein, 232 aa, Brassica oleracea var. botrytis
MASSSYAPFSAVFSGFAATKPNPPPTCSAFLVPKRRSNSRNLKNGVSLKSWNKHGFQFKSRNLSVYARATEEKTVHDFTVKDISGKDVSLDKFKGKPLLIVNVASKCGLTSSNYTELSQLYDKYRNQGFEILAFPCNQFGGQEPESNPDIKRFVCTRFKAEFPIFDKVDVNGPSTAPIYQFLKSKSGRFLGDLIKWNFEKFLVDKKGNVVQRYPPTTPPLQIEKDIQKLLVA

SEQ ID NO: 6987 - protein, 115 aa, Bartonella sp. BM51YN
MLQEIGSIKRIPEFIARAKDKNDPFRLIGFGHRVYKNYDPRAKIMQKTCHKVLKELNIQDDPLLDIAIELEKIALSDEYFIEKELYPNVDFYSGIILKALGFPTEMFTVLFACPH

SEQ ID NO: 6988 - protein, 217 aa, Triticum aestivum
  misc_feature (46)..(46): Xaa can be any naturally occurring amino acid
  misc_feature (51)..(51): Xaa can be any naturally occurring amino acid
  misc_feature (57)..(59): Xaa can be any naturally occurring amino acid
  misc_feature (61)..(61): Xaa can be any naturally occurring amino acid
  misc_feature (63)..(65): Xaa can be any naturally occurring amino acid
  misc_feature (68)..(68): Xaa can be any naturally occurring amino acid
  misc_feature (71)..(72): Xaa can be any naturally occurring amino acid
  misc_feature (74)..(75): Xaa can be any naturally occurring amino acid
  misc_feature (77)..(83): Xaa can be any naturally occurring amino acid
  misc_feature (85)..(87): Xaa can be any naturally occurring amino acid
  misc_feature (89)..(89): Xaa can be any naturally occurring amino acid
  misc_feature (91)..(91): Xaa can be any naturally occurring amino acid
  misc_feature (93)..(93): Xaa can be any naturally occurring amino acid
  misc_feature (96)..(98): Xaa can be any naturally occurring amino acid
  misc_feature (100)..(101): Xaa can be any naturally occurring amino acid
  misc_feature (103)..(104): Xaa can be any naturally occurring amino acid
  misc_feature (108)..(109): Xaa can be any naturally occurring amino acid
  misc_feature (111)..(113): Xaa can be any naturally occurring amino acid
  misc_feature (116)..(122): Xaa can be any naturally occurring amino acid
  misc_feature (125)..(125): Xaa can be any naturally occurring amino acid
SSPSAGRKIDDHGGHGQLHRHHPRHHPPAPRRLPQVRLRARVLDLXAAHLXRVHPGXXXEXVXXXPRXDSXXGXXGXXXXXXXRXXXGXAXGXGDXXXGXXAXXLWGXXWXXXAPXXXXXXXAGXISLVISVVAAESLLSSTASPPSTDRVKSSPSAGTSTTMAGTANCIDIILAIILPPLGVFLKFGCGHEFWICLLLTFLGYIPGIIYAIYAITK

SEQ ID NO: 6989 - protein, 405 aa, Chromobacterium violaceum ATCC 12472
MTKPRAVYLQSGGPTAVLNASAQGAIETARRLGLSLYAAYDGLAGLLDGRLCDTDGVSDTAIAQLAFMPGGSFGVSRRMIGTFEEAPEDWLRLRDVLAKHDIHYLLINGGNGSLGCAERLVDFEKHTGYKLGVIGIPKTIDNDLVGTDNSPGYGSSAKFLASAMREVGLDMTSMGWGRVFIMETMGRHTGWLAAACAAASRNPHEAPHLLLLPEVPFDQARFLAALDASLAKYGQCAIAVAEGITGQDGRFVAEAKKSETYGHEQLGGAGHWLAQLILRERGISAHVAQVDYLQRAGGHLASATDVRQAYVMGERAVEWLLAGKTGLMAGIRRLNDHPYCWDVAEVPLSAVGDKEKRLPPEFIGADGFSVTQAFLDYVKPLIEGERIPPFKDGLPDYRPIAWPRV

SEQ ID NO: 6990 - protein, 250 aa, Zea mays
MVKAYPTVSEDYLKAVDKAKRKLRGLIAEKNCAPLMLRLAWHSAGTFDVATKTGGPFGTMKNPAEQAHGANAGLEIAVRLLEPIKEQFPILSYADFYQLAGVVAVEVTGGPDVPFHPGRQDKPEPPPEGRLPDATQGSDHLRQVFSTQMGLSDQDIVALSGGHTLGRCHKDRSGFEGAWTSNPLIFDNSYFTELLSGEKEGLLQLPSDKALLSDPSFRPLVDKYAADEDAFFADYAEAHLKLSELGFAEA

SEQ ID NO: 6991 - protein, 168 aa, Zea mays
MNERSSGTHQSLSHSRRADPLSLVRDYRVKEQLAAEGIDVQSFNADLLYEPWEVLDEDRRPFTMFAPFWNRCLCMPDPAAPLLPPKRINSGDLSRCPWDELVFEDESERGSNALLARAWSPGWQNADKALTAFLNGPLMDYSVNRKKADSASTSLLSPYLHFGELRRR

SEQ ID NO: 6992 - protein, 412 aa, Glycine max
MGNCWGSPPHNPTPTTTGNLSTGTTGTSQAISSGSYTTTTTTTTNSSGSGSSSINSKFSVSSGDQPYPNGQILPTSNLRIFTFAELKAATRNFKADTVLGEGGFGKVFKGWLEEKATSKGGSGTVIAVKKLNSESLQGLEEWQSEVNFLGRLSHTNLVKLLGYCLEESELLLVYEFMQKGSLENHLFGRGSAVQPLPWDIRLKIAIGAARGLAFLHTSEKVIYRDFKASNILLDGSYNAKISDFGLAKLGPSASQSHVTTRVMGTYGYAAPEYVATGHLYVKSDVYGFGVVLVEILTGLRALDSNRPSGQHKLTEWVKPYLHDRRKLKGIMDSRLEGKFPSKAAFRIAQLSMKCLASEPKHRPSMKDVLENLERIQAANEKPVEPKFRSTHAASRQGHQAVHHRSPRQDGSN

SEQ ID NO: 6993 - protein, 297 aa, Acinetobacter sp. ADP1
MIEPKLKIETAQTNPMSIEKNIPDLILHDGHSIPALGFGTYTLKGQQGVDTMLRALGHGYRMLDSAFNYENEGAVGAAVRQSGLLRDEIFITSKLPGRHHAYDKAMETIEESLYRMQFDYLDLYLIHWPNPQQGLYIEAWQALIDAQKKGYIRSIGVSNFLPKHIETLRRETGVIPVINQVELHPYFNQAEQRAYDESQQIITMAWSPLGRAKAILDDAVLKQIAQETSRTVVQVVLRWQVQMGVIPIPKAASDQNQMANQAIFDFSLSDDQVQRINALTCADGRIRNQDPAVYEEF

SEQ ID NO: 6994 - protein, 345 aa, Zea mays
MMSSQQQQQQMARPDRQAMYGAPVLPEIPTRFVYMPQTATDVMSGSSSLWKTGAPPHDTLAESAAMYTATLSSQQQQQMARPGPTGDVRGAPVPPPMNMRFIPNTMPAADAMDRTPSPLQRVEVRQVWAHNFDSEAKLIESLLPKFRYVAVETEFPGTVYRPAGPAYKLEPAERYRLLRCNVDALHPVQLGLTLFDAGCVLPGGATRYVWQFNFRDFDVRRHRHVAESVTALRSRGVDLDRTRQYGVAAAAAFGPRLRKWTRAGLGRAAVRVAVQLPGFRCPAAPSRGGVRRGAAEQRRGSRLGRGSTASPRRRRSARACASGRVPASAAPAVSHVPRRLRPSRT

SEQ ID NO: 6995 - protein, 483 aa, Acinetobacter sp. ADP1
MDLQQQPLFRQKALVAGQWCDADNAEKTPIFNPATQELIGYVPNMGRAETERAIEAAYASWEMWKTKTAKERSALLKKWYDLILLNLDVLAEILTTEQGKPFNEAKGEIIYAASFIEWFAEEAKRIYGDIIPSPYPDARIVVNKQPIGVVAAITPWNFPAAMITRKVAPALAAGCPCIVKPAPETPFTALALADLAIQAGIPAEIMSVVTGDAAQIGDAIFASDHVRKFTFTGSTPIGKLLLEKSAKTLKKVSLELGGNAPFIVFDDADIEAAVEGALIAKFRNAGQTCVCVNRFLVQSGVYEKFIQVFKAKIESLKIGNGLEAGSEIGPLINAQAVAKVQSHIEDALSKNGRLITGGQVHATGELFFEPTLIADANTEMMVATQETFGPLAAIFKFDTEQQAIQMANDTEFGLAAYCYTRDLGRAWRMSEQLEYGMVGINKGLISNEVAPFGGIKHSGLGREGSKYGIEDYLEIKYTLFGGL

SEQ ID NO: 6996 - protein, 505 aa, Alteromonas sp.
MIYAKPGSEGSVVSFKESYGNFINGEWVAPVKGEYFTATSPVDGSDIAQVPRSTSEDVELALDAAHAAKKGWAEKSVAERSNVLLKIADRIEENLELLAVAETWDNGKAVRETLNADIPLCADHFRYYAGCIRSQEGTIGEIDKNTVAYHFHEPYGVVGQIIPWNFPLLMAAWKLAPALVTGNVVVLKPAEQTPVSILLFAELIQDLLPPGVLNIVNGFGAEAGQALATSTRIAKIAFTGSTPVGGHILRCAAENLIPSTVELGGKSPNLFFADIMDHEPEFIDKCAEGLVLGYFNQGEVCTCPSRAIIQEDIYDAFMEKVLEKIQKIKRGNPLDTETMVGAQASNEQFEKILKYIDIGKSEGAQVVTGGEKEQLPGFDDGYYIQPTILKGENHMRVFQEEIFGPVIAVQTFKTEEEAIEIANNTSFGLGAGVWSRDANVAFRVGRAIEAGRVWTNCYHLYPAHAAFGGYKKSGIGRETHKMMLDHYQQTKNLLVSYDINPLGFF

SEQ ID NO: 6997 - protein, 354 aa, Prunus armeniaca
MGSVRASHELLQAQAHIWNHIFSFINSLSLKCAVQLDIPDVIQKHGQPMTLSELVSALPISPTKAHFIPRLMRILVHSGFFAKESLSGCGEQGYILTDASALLLKDNPMSARPFLLAMLSPILTDPYQYLTTWFQNDNPTPFHVVNGMTCWDYVNQDPTLAHFFNDAMASDAQLISSLVIDDCKEVFQGVDSLVDVGGGTGTVAKSIADAFPHMKCTVLDLPHVVADLKGSKNLEYVAGDMFEAVPAADAIFLKWILHDWSDEECVKILERCKAAVTREGKKGKVIIVEMTVENKNTDKESGETQLFFDMHMMVMSTGKERNEKEWAKLFSDAGFSQYKITPLFGFKSLIEVYP

SEQ ID NO: 6998 - protein, 251 aa, Prunus andersonii
AHYKSEADVGNAIAEAIQRGLVKREELFITSKASNHGHVVEACKNSLKKLQLDYLDLYLVHYPLATKHSVGTTASLLDENKVLDIDVTVSLETTWHDMEKTVDLGLVRSIGLSNYELFLTRDCLSYAKIKPQVSQFETHPYFQRESLVRFCKKHGVVPMAHTPLGGATANVNAFGSISPLEDPVLIGLAKKYQKSVAQIALRWNIERGTPVIPKSSKVERLKENLEVLNFKLEKEDIELINTIDKKSRTTL

SEQ ID NO: 6999 - protein, 488 aa, Acinetobacter sp. ADP1
MQQFQLYINGKFEDGAAQFDSINPATGEIWAKMPEARTDQVNRAVDAAEQAFYDSSWSGLTASQRGKLLYKLADLVEKSAPRLAALETTDTGKIIRETSSQIAYVAEYYRYYAGLADKIEGSFIPVDKPDMQAWLVREPVGVVAAIVPWNSQLFLSAVKVGPALAAGCTVVLKASEEAPAPLLEFAKLIDEAGFPAGVVNVITGFGPECGAVLSAHPKVAHIAFTGGPETAKHIVRNSAENLAKVSLELGGKSPFIVFADTDINSALNAQIAAIFAATGQSCVAGSRLLIEESIKDEFLQRLAERVQSIKMGLPDDMQTEYGPLCTLKQREKIQQVVQRSVEQGAKLITGGQVCDGAGYYYPPTILDCSGVSDAQSIHTELFGPVLSVDTFSTEAEAIQKANSTPYGLASGVFTSNLTRAHRMTRAIRSGIVWLNTYRVVSPLAPFGGYGLSGHGREGGLSAALEYTTTKTVWLRMSDQPIDDPFVMR

SEQ ID NO: 7000 - protein, 252 aa, Prunus mexicana
AHYKSEADVGNAIAEAIQSGLVKREELFITSKASNHGHVVEACKNSLKKLQLDYLDLYLVHYPLATKHSGVGTTASLLDENKVLDIDVTVSLETTWHDMEKTVDLGLVRSIGLSNYELFLTRDCLSYAKIKPQVSQFETHPYFQRESLVRFCKKHGVVPMAHTPLGGATANVKAFGSISPLEDPVLIGLAKKYQKSVAQIALRWNLERGTPVIPKSSKVERLKENLEILNFKLEKEDIELINTIDKKSRTTL

SEQ ID NO: 7001 - protein, 78 aa, Zea mays
FVFEKNLVQSFRLLVDYACTPEEVQQHFQACGTVNRVTILTDKFGQPKGFAYVEFLEQEAVQEALNLNESELHGRQIK

SEQ ID NO: 7002 - protein, 83 aa, Zea mays
MTCLLGCLSLFCLKVRAGIVGYPDVGKSSLINRLLKRRMCPAAPRPGVTRELKWVRFGTDLELLDSPGILPMRISDQTSAIKL

SEQ ID NO: 7003 - protein, 501 aa, Burkholderia cepacia R1808
MTRRAVANLEILMSVYGLQRLYIGGAYVDATSGKTFDTFDPATGELLAQVQQASAADVDRAVASAQQGQREWAALTAMQRSRILRRAVDLLRERNDELAAIETRDTGKPIGETLAVDIVTGADVIEYYAGLATAIEGLQVPLRAESFVYTRREPLGVCAGIGAWNYPIQIACWKTAPALAAGNAMVFKPSEVTPLTALKLAEIYTEAGVPAGVFNVVQGDGSVGALLTGHPDIAKVSFTGGVETGKKVMSLAGASSLKEVTMELGGKSPLIVFDDADLDRAADIAVIANFFSSGQVCTNGTRVFVQRSIKDAFTAKVLERVKRIRVGKPTDADTNFGPLVSAAQLDKVLGFIASGKAEGAKLLAGGTRLTDGHFADGQYVAPTVFGDCRDDMKIVREEIFGPVMSILDFESEDEVIARANDTHYGLAAGVVTENLSRAHRTIHRLEAGICWINTWGESPAEMPVGGYKQSGVGRENGITTLEHYTRIKSVQVELGRYNPVF

SEQ ID NO: 7004 - protein, 303 aa, Zea mays
  misc_feature (15)..(15): Xaa can be any naturally occurring amino acid
WYPRFCRELIYIENXYFLGSSYGWKPEGINPQEIGALHLIPKELSLKIVSKIEAGERFTVYVVVPMWPEGVPESASVQAILDWQRRTMEMMYTDIAQALEANGIEANPKDYLTFFCLGNREVKQEGEYEPEEHPEPDTDYIRAQEARRFMIYVHTKMMIVDDEYIIIGSANINQRSMDGARDSEIAMGAYQPYHLATRQPARGQIHGFRMSLWYEHLGMLEDVFQRPESVECVQKVNEVAEKYWDLYSSDDLEQDLPGHLLSYPIGVTADGSVTELPGMENFPDTRARVLGNKSDYLPPILTT

SEQ ID NO: 7005 - protein, 251 aa, Prunus fasciculata
AHYKSEADVGNAIAEAIQSGLVKREELFITSKASNHGHVVEACKNSLKKLQLDYLDLYLVHYPLATKHSGVGTTASLLDENKVLDIDVTVSLETTWHDMEKTVSLGLVRSIGLSNYELFLTRDCLSYAKIKPQVSQFETHPYFQRESLVRFCQKHGVVPMAHTPLGGATANVKAFGSISPLEDPVLIGLAKKYQKSVAQIALRWNIERGTPVIPKSSKVERLKENLEVLNFKLEKEDIELINTTDKKSRPL

SEQ ID NO: 7006 - protein, 67 aa, Triticum aestivum
MAESTAIAPPPPPDGTTTFLCLILAFFIPPLGVFLKYKCEIEFWICLILTFLAYAPGIIYAVWVIVK

SEQ ID NO: 7007 - protein, 485 aa, Agrobacterium tumefaciens
MQNKVQFITYVDRLTRGGFRQLKELVDGKFAGLFGGVHVLPFFNPIDGADAGFDPTDHTIVDPRLGDWEDVRALSGSVEIMADLIVNHVSSQSGAFTDFIAKGSASEFADMFMTFDKVFPDPATEEDLLRIYRPRPGLPFSKVTLADGTQRMLWTTFTPEQIDIDVHSAKGTTYLETILDRFSEANVTAIRLDAAGYAIKKAGSSCFMIDDTYAFLEEVAGKARNRGMEVLVEIHSYHRDQIEIAKKVDRVYDFALPPLILHALFTGDATPLAKWLAISPRNAITVLDTHDGIGVIDVGAHSDGRAGLLEPQAIDNLVGEIHRRSDGQSRQATGAAASNLDLYQVNCTYYDALGRNDNDYLIARAIQFFAPGIPQVYYVGLLGGVNDMDLLAKTGVGRDINRHYYGNDEIGTALETPLFHRLSNLIRFRNTHPAFGGALKATIADAGALVLSWQHGDAFAELKISFADRKASIAASGQSEMQIVE

SEQ ID NO: 7008 - protein, 252 aa, Prunus fasciculata
AHYKSEADVGNAIAEAIQSGLVKREELFITSKASNHGHVVEACKNSLKKLQLDYLDLYLVHYPLATKHSGVGTTASLLDENKVLDIDVTVSLETTWHDMEKTVSLGLVRSIGLSNYELFLTRDCLSYAKIKPQVSQFETHPYFQRESLVRFCQKHGVVPMAHTPLGGATANVKAFGSISPLEDPVLIGLAKKYQKSVAQIALRWNIERGTPVIPKSSKVERLKENLEVLNFKLEKEDIELINTIDKKSRTTL

SEQ ID NO: 7009 - protein, 293 aa, Oryza sativa (japonica cultivar-group)
MSDPTAAVIPKPGGIGVGGGGGDDEEPVEIREVWADNLEEEFALIRDVVDEFPFVAMDTEFPGIVCRPVGAFRSPADYNYATLKANVDMLHLIQLGLTFSSPRGELPALGPGRRRCVWQFNFREFDDARDIFASDSIELLRRSGIDFRRNSERGVDARRFAELLMSSGVVLNDSVYWVTFHAGYDFGYLLKILTCSSLPDTQAGFFKLMKIYFPTVYDIKHLMKFCNSLHGGLNKLAELLDVERVGESHQAGSDSLVTSCAFWKLKDSFFAGSTEKYAGVLYGLNAENVVSAH

SEQ ID NO: 7010 - protein, 334 aa, Triticum aestivum
  misc_feature (237)..(237): Xaa can be any naturally occurring amino acid
MGSTATDMAASADEEACMYALQLVSSSILPMTLKNAIELGLLETLVAAGGKLLTPAEVAAKLPSTANPAAADMVDRMLRLLASYNVVSCTMEEGKDGRLSRRYGAAPVCKFLTPNEDGVSMAALALMNQDKVLMESWYYLKDAVLDGGIPFNKAYGMSAFEYHGTDPRFNRVFNEGMKNHSIIITKKLLEVYKGFNGLDTLVDVGGGIGATVGAITAHYPTVKGINFDLPHVISEAXILHDWSDEHCATLLKNCYDALPAHGKVVLVECILPVNPEATPEAQGGFHLDMIMLAHNPGGRERYEREFEALAKGAGFGAIKTTYIYANIWVIEFTK

SEQ ID NO: 7011 - protein, 366 aa, Thermosynechococcus elongatus BP-1
MQGTTIFRGDAFAKVSMKAQVFRGVNQLSYEEIPIPEIAADEVLVRVRVVGLCQSDIKKIRYPLYEPPRIFGHETAGEIAAVGDAVTGWQVGQRVVVMHHIPCMHCAYCLNENYSMCHVYKTVTTTAGFIPSGGGFAEYVKVPGHIVEHGGLIPIPDPISDEEASFVEPTNCCLKAVKKAGIAPGQTVLITGAGPIGLMFIMLVNLFGARAIATDLLPSRIAKAKEVGAAAAFDARDPDLSAKVQALTHGLGVDVSLLAVPSEKAFFQALECTRKGGKILFFAEFPDEVEIPLNPNILYRREIDLMGSYSSSYRLQSLACDIIFNRRIDVKTLVSDRYPLSKLAEAVEQAVHPTPETYKILIYPES

SEQ ID NO: 7012 - protein, 252 aa, Prunus subcordata
AHYKSEADVGNAIAEAIHSGLVKREELFITSKASNHGHVVEACKSSLKKLQLDYLDLYLVHYPLATKHSGVGTTASLLDENKVLDIDVTVSLETTWHDMEKTVDLGLVRSIGLSNYELFLTRDCLSYAKIKPQVSQFETHPYFQRESLVRFCKKHGVVPMAHTPLGGATANVKAFGSISPLEDPVLIGLAKKYQKSVAQIALRWNIERGTPVIPKSSKVERLKENLEILNFKLEKEDIELINTIDKKSRTTL

SEQ ID NO: 7013 - protein, 175 aa, Triticum aestivum
MAPTVMASSATSVAPFQGLKSTAGLPVSRRSNGASLGSVSNGGRIRCMQVWPIEGIKKFETLSYLPPVSTEALLKQVDYLIRSKWVPCLEYSKVGFIFREHNASPGYYDGRYWTMWKLPMSGCTDATQVINEVEEVKKEYPDAYVRIIGYHNMRQVQCVSFIAFKPPGCEESGKA

SEQ ID NO: 7014 - protein, 130 aa, Glycine max
MGYGRSRASSVLDGFSLNPVPYPVLLILSLILLFLGISWYLSYEEVVEAAEEQLGWMLLATPVVLILVVRWLSSVDTSEWFFFNSSPWERRRRTHHFPSEGSSPWGVAALILLVLVLLHYHSTFLDAWFV

SEQ ID NO: 7015 - protein, 87 aa, Zea mays
  misc_feature (17)..(17): Xaa can be any naturally occurring amino acid
FGQPKGFAYVEFLKLNXFQEAIKLNESELPGRQLKVAPKRTNVLGMKHPPGRGFNPYHGPPYMRPDGYSPYGYGRFPRFPRPRSPYF

SEQ ID NO: 7016 - protein, 168 aa, Avena agadiriana
VMASSATSVAPFQGLKSTAGLPVSRRSNAGLGSVSNGGRIRCMQVWPIEGIKKFETLSYLPPLSEEALLKQIDFLIRSKWVPCLEFSKVGFIFREYGSTPGYYDGRYWTMWKLPMFGCTDASQVIKEVEEVKKEYPDAYVRIIGFDNIRQVQCVSFIAFKPPGCEESG

SEQ ID NO: 7017 - protein, 373 aa, Triticum aestivum
  misc_feature (202)..(202): Xaa can be any naturally occurring amino acid
MAASAWAALPRPAPGRPSRPLTAQIKDMALKAPGLSLSVGQRGRACARSPAAGCSRASPARGGSGAGCRRWTSRRRTRTSSMPARAWEALPRPAPGRPSRRSRPRSRTWRSRRRARTGTASPAPAPPRGRRGATTRTTTAAAAACRDADDVLQLPLTRTAALRAGEAARRSAETCANVTALYNVQRFNHQSVPLPTTPKSEXDESSKEDSPVTPPLDKERVPRSLQRPTSGGGAMGYSSSDSLEHHSNHYCNGLHPHHGHQCYDSVGLASTPKLSSISGAKTETSSMDASMRTSSSPEEVDRSGELSVSISNASDQEREWVEEDQPGVYITIRALPGGIRELRRVRFSREKFSEMHARLWWEENRARIHEQYL

SEQ ID NO: 7018 - protein, 308 aa, Azotobacter vinelandii
MTSKLEQLKQHTTVVADTGDLDAIARLQPVDATTNPSLLLKAASLPRYAGLLEHAITGCSGDLGLACDRFAVAVGQEILGVIPGRISTEVDARLSFDSQATIGRAERLIGLYEQAGITRERVLIKIAATWEGIRAAERLEKAGIQTNLTLLFSFAQAAACADAGVFLISPFVGRIYDWYKKAEGRDFASVEDPGVQSVTRIYNYYKANGYDTVVMGASFRNLGQIEQLAGCDRLTISPELLQQLAGEQGSLERKLAPGSSGEPRQTLDEPTFRWALNEDAMATEKLAEGIRLFARDQIKLEALLSEKI

SEQ ID NO: 7019 - protein, 436 aa, Helicobacter pylori 26695
MNFQENLAALDLEYLWHPCSQMQEHQNFPIIPIKKAQGIYLYDFNDNAYMDLISSWWVNLFGHNNAYISQQLKNQIDDLEHVLLASFSHKPIITLSQRLCQLTHMDKCFYADNGSSCVEIALKMSYHAHFLKNQTRRKKLFLSLSNSYHGETLGALSVGDVKLYKDTYTPLLLKNLTTPVPKNDHEIENSLNALKRLLDKHSEEICAFIAEPLLQCAGNMHIYSARYLKQAVLLCKQKNIHIIFDEIATGFGRTGSMFAYEQCEIKPDFLCLSKGISGGYLPLSALLTHNEIYNQFYAPYEENKAFLHSHSYTGNALACACANATLDIFEKENVIEKNKALSGFIFNTLQNALKPLMEQQVVSDLRHLGMVFAFEVFIQTKERLSLAVFKKTLKKGLLLRPLNNTIYLMPPYIITHEEVKKAVAGLVEILDELRKG

SEQ ID NO: 7020 - protein, 54 aa, Brassica napus
MGTATFIDILLAILLPPLGVFLRYGCGVEFWICLVLTLLGYLPGIIYALFVLTK

SEQ ID NO: 7021 - protein, 456 aa, Pseudomonas fluorescens PfO-1
MTTSRETRDYQAADAAHHIHAFVDQKALNDEGPRVMVRGDRLHLWDNDGRRYLDGMSGLWCTNLGYGRKDLNAAASRQLEQLPYYNMFFHTTHPQVIELSELLFSLLPGHYSHAIYTNSGSEANEVLIRTVRRYWQVLGKPEKKIMIGRWNGYHGSTLAATALGGMKFMHEMGGMIPDIAHIDEPYFFAHEGNLTPAEFGLRAAQQLEAKILELGADKVAGFIAEPFQGAGGMIFPPESYWPEIQRICRQYDVLLCADEVIGGFGRTGEWFAHEYFGFEPDTLSIAKGLTSGYIPMGGLILSKKMADVLVEQGGVFAHGLTYSGHPVAAAVAIANLKALRDEGVVTRVKDDIGPYLQQCLREVFGNHPLVGDIQGTGMVAALQLAEDKATRKRFANENDIAWRCRTIGFEEGVIIRSTLGRMIMAPALIASREEIDELVGKTLKALDRTAQEYGRL

SEQ ID NO: 7022 - protein, 279 aa, Exiguobacterium sp. 255-15
MAKARREVTEKLKLIDVVIELVDARLPMSSRNPMVEQITAGKPRLIVLNKSDMADARLTEKWMHALRKDGVDVIAVDAKHSKGLGQIHEGALRLMKDKHDRMRDKGRNPSAIRALIIGIPNVGKSTLINRLAGRNIAITGDRPGVTKRQQWIKMKTGEMELLDTPGILWPKFDDQLVGYRLAATGAIKDDILNIDDIALFAIRELKSRYPEQLKARYRLQDVSGEAVEVLEAIGKNRGFVTGGYVDFERTSEMLLHELRTEKIGRVTLETVEEWATVTE

SEQ ID NO: 7023 - protein, 400 aa, Lycopersicon esculentum
RILGLGDLGCQGMGIPVGKLALYTALGGVRPSACLPITIDVGTNNEKLLNDEFYIGLRQRRATGQEYYDFLHEFMSAVKQNYGEKILVQFEDFANHNAFELLAKYRNSHLVFNDDIQGTASVVLAGLIASLKLLGGALCDHTFLFLGAGERGTGIAELIALEISNKTNIPVEETRKKIWLVDSKGLIVSGRKETLQAFKKPWAHEHEPVNNLLDAVKAVKPTVLIGTSGTGRTFTKEVVEAMACMNKRPLIMALSNPTSQAECTAEEAYSWSEGRAVFASGSPFPSFEYDGKLNIPGQANNCYIFPGFGFGLVMSGTIRVDDDMLLAASEALAAQVTEEHYAKGMIYPPFADIRKISAHIAASVARKAYELGVATSLPRPADLVKYAESCMYTPNYRSYR

SEQ ID NO: 7024 - protein, 297 aa, Zea mays
  misc_feature (221)..(221): Xaa can be any naturally occurring amino acid
MDPMDIVGKSKEDVSLPKSTMVKIIKEMLPPDVRVARDAQDLLVECCVEFINLLSSESNEVCSREEKKTIAPEHVIKALSDLGFREYIEEVYAAYEQHKLETLDSPKAGKFTRIEMTEEEAVAEQQRMFAEARARMNNGAPKPKEPEQEPPQLPQAQPQLQLHTEPQQPMQSQVQLHSQTQHSLQPQLQLHHQPQQLPQVQLHSQPQLQPQVHLHPQPQLXPQLQVHQQLQQSPQVQVHEQPQVQPQEAQLQSSAQQTSQPQPQVQLQSQGHSQAQLQAGLLGQLQTQAQTGPGMDS

SEQ ID NO: 7025 - protein, 254 aa, Oryza sativa (indica cultivar-group)
MEAGYPGAAANGAAADGNGGAQQAAAAPAIREQDRLMPIANVIRIMRRVLPAHAKISDDAKETIQECVSEYISFITGEANERCQREQRKTITAEDVLWAMSRLGFDDYVEPLGVYLHRYREFEGESRGVGVGVGAARGDHHHGHVGGMLKSRAQGSMVTHHDMQMHAAMYGGGAVPPPPHPPPHHHAFHQLMPPHHGQYAPPYDMYGGEHGMAAYYGGMYAPGSGGDGSGSSGSGGAGTPQTVNFEHQHPFGYK

SEQ ID NO: 7026 - protein, 397 aa, Magnaporthe grisea 70-15
MATKAMQLEECFEHLNVNDENDHGDRLVQKSKISMSTAQISHGSSRPNLFKVALQSQSANTVTSVTLPSQAAQRKMAPPPKSREPPSPSKHKKDSVSSSVDELANEEVEASAPRVPKEFHLGMFEIGRPLGKGKFGRVYLARERTTGFICALKVLYKKELESGSVEKQVRREIEIQTNLCHPNILKMYGHFHDNKRIFLILEFAGKGELYKHLRKENRFPEWKAAQYVAQMASALKYLHRKHVIHRDIKPENILVGLHGELKISDFGWSVHAPNNRRKTLCGTLDYLPPEMIKSGNKDNTYDEKVDLWSLGVLTYEFVVGEAPFEDTPVMTQRRIARADMTIPSFVSPECRDLIKKLLVLDPVKRLSLDAVQKHPWIIKHCVKGERATNREKGRGSD

SEQ ID NO: 7027 - protein, 246 aa, Arabidopsis thaliana
MVDVIVTTTGGVEEDLIKCLAPTFKGDFSLPGAYLRSKGLNRIGNLLVPNDNYCKFEDWIIPIFDEMLKEQKEENVLWTPSKLLARLGKEINNESSYLYWAYKMNIPVFCPGLTDGSLGDMLYFHSFRTSGLIIDVVQDIRAMNGEAVHANPKKTGMIILGGGLPKHHICNANMMRNGADYAVFINTGQEFDGSDSGARPDEAVSWGKIRGSAKTVKVYCDATIAFPLLVAETFATKRDQTCESKT

SEQ ID NO: 7028 - protein, 377 aa, Hypocrea jecorina
MSPSAVDDAPKATGAAISVKPNIGVFTNPKHDLWISEAEPSADAVKSGADLKPGEVTIAVRSTGICGSDVHFWHAGCIGPMIVEGDHILGHESAGEVIAVHPTVSSLQIGDRVAIEPNIICNACEPCLTGRYNGCEKVEFLSTPPVPGLLRRYVNHPAVWCHKIGNMSWENGALLEPLSVALAGMQRAKVQLGDPVLVCGAGPIGLVSMLCAAAAGACPLVITDISESRLAFAKEICPRVTTHRIEIGKSAEETAKSIVSSFGGVEPAVTLECTGVESSIAAAIWASKFGGKVFVIGVGKNEISIPFMRASVREVDIQLQYRYSNTWPRAIRLIESGVIDLSKFVTHRFPLEDAVKAFETSADPKSGAIKVMIQSLD

SEQ ID NO: 7029 - protein, 252 aa, Zea mays
  misc_feature (186)..(186): Xaa can be any naturally occurring amino acid
  misc_feature (198)..(198): Xaa can be any naturally occurring amino acid
  misc_feature (227)..(227): Xaa can be any naturally occurring amino acid
MAVLRGRLTLVLILSLSCCFSFPTVLSSVTSDGFLQCLSDNIPVGLIYTQGSTNFTDELVSSVRNPRLFTSATVRPLCIVTPVDASHVQAAVRCGRASGVRLRVRSGGHDYEGLSYRSERPEVFSVVDLSNLRAITVSADDDERPVPPTASAWVDSGATLGELYYTVAKNNPELAFPAGICPTIGXSAGTWSGGGIGXMMRRFGLSVDNVLDAKLVNASGDLVDGRXMGEDHFWAIPGGGGESFRVRGVVGK

SEQ ID NO: 7030 - protein, 252 aa, Prunus besseyi
AHYKSEADVGNAIAEAIQSGLVKREELFITSKASNHGHVVEACKNSLKKLQLDYLDLYLVHYPLATKHSGVGTTASLLGENKVLDIDVTVSLETTWHDMEKTVDLGLVRSIGLSNYELFLTRDCLSYAKIKPQVSQFETHPYFQRESLVRFCKKHGVVPMAHTPLGGATANVNAFGSISPLEDPVLIGLAKKYQKSVAQIALRWNIERGTPVIPKSSKVERLKGNLEILNFKLEKEDIELINSIDKKSRTTL

SEQ ID NO: 7031 - protein, 462 aa, Thermosynechococcus elongatus BP-1
MVKLTPTPAYSLTLRLETSLDPTELGTVLQIIGGQQGQVGSIRLLEKTANRILRELVVVAASQEHGQAIVNAVKSDGQATVLEVSDRTFRLHEGGKITIKSKHPLQEYDDLAMAYTPGVGRVSQAIADDPDLVHKLTIKSHTVAIVSDGSAVLGLGNIGPEAALPVMEGKAMLFQEFAGLDAFPICLATQEVDEIVATVKRIAPVFGGINLEDISAPRCFDIEARLQAELDIPVFHDDQHGTAIVTLAALKNALQFVGKSLETVRIVINGAGAAGIAVARLLRKAGAKDLILCNRRGILSLQTDLTPAQKEFAVTQTGTLADALGDADVFIGLSAPGVLTVEMVQRMAKEAIVFAMANPVPEIQPELIYNHVAVVATGRSDYPNQINNVLAFPGVFKGTLACRAPRMTEEMFLAAAEAIAGLVSPSERHSAYIVPSVFDPRVAPAVAKAVEDCARSLGLARA

SEQ ID NO: 7032 - protein, 252 aa, Prunus salicina
AHYKSEADVGNAIAEAIQSGLVKREELFITSKASNHGHVVEACKNSLKKLQLDYLDLYLVHYPLATKHSGVGTTASLLDENKVLDIDVTVSLETTWHDMEKTVDLGLVRSIGLSNYELFLTRDCLSYAKIKPQVSQFETHPYFQRESLVRFCKKHGVIPMAHTPLGGATANVKAFGSISPLEDPVLIGLAKKYQKSVAQIALRWNLERGTPVIPKSSKVERLKENLEILNFKLEKEDIELINTIDKKSRTTL

SEQ ID NO: 7033 - protein, 328 aa, Blumeria graminis
MDTKMEDVGKTPEPIRFQTTTEPASISTLDGWIENLMACKQLPEVDVLRLCEKAREVLHSESNVQPVKCPVTVCGDIHGQFHDLMELFRIGGPNPDTNYLFMGDYVDRGYYSVETVTLLVALKIRYPQRITILRGNHESRQITQVYGFYDECLRKYGNANVWKYFTNLFDFLPLTALIENQIFCLHGGLSPSIDTLDNIKSLDRIQEVPHEGPMCDLLWSDPDDRCGWGISPRGAGYTFGQDISEAFNHNNGLTLVARAHQLVMEGYNWSQDRNVVTIFSAPNYCYRCGNQAAIMEIDEHLKYTFLQFDPCPRAGEPMVTRRTPDYFL

SEQ ID NO: 7034 - protein, 252 aa, Prunus armeniaca
AHYKSEADVGNAIAEAIQSGLVKREELFITSKASNHGHVVEACKNSLKKLQLDYLDLYLVHYPLATKHSGVGTTASLLDENKVLDIDVTVSLETTWHDMEKTVDLGLVRSIGLSNYELFLTRDCLSYAKIKPQVSQFETHPYFQRESLVRFCKKHGVVPMAHTPLGGATANVKAFGSISPLEDPVLIGLAKKYKRSVAQIALRWNLERGTPVIPKSSKVERLKENLEILNFKLEKEDIELINTIDKKSRTTL

SEQ ID NO: 7035 - protein, 168 aa, Avena strigosa
VMASSATSVAPFQGLKSTAGLPVSRRSNAGLGSVSNGGRIRCMQVWPIEGIKKFETLSYLPPLSEEALLKQIDFLIRSKWVPCLEFSKVGFIFREHGSTPGYYDGRYWTMWKLPMFGCTDASQVIKEVEEVKKKYPDAYVRIIGFVNIRQVQCVSFIAFKPPGCEESG

SEQ ID NO: 7036 - protein, 220 aa, Prunus emarginata
  misc_feature (104)..(104): Xaa can be any naturally occurring amino acid
NAIAEAIQSGLVKREELFITSKASNHGHVVEACKSSLKKLQLDYLDLYLVHYPLATKHSGVGTTASLLDENKVLDIDVTVSLETTWHDMEKTVSLGLVRSIGLXNYELFLTRDCLSYAKIKPQVSQFETHPYFQRESLVRFCKKHGVIPMAHTPLGGATANVKAFGSISPLEDPVLLGLAKKYQKSVAQIALRWNIERDTPVIPKSSKIERLKENLEILN

SEQ ID NO: 7037 - protein, 168 aa, Avena clauda
VMASSATTVAPFQGLKSTAGLPVSRRSASSLGNVSNGGRIRCMQVWPIEGIKKFETLSYLPPLSEEALLKQIDFLIRSKWVPCLEFSKVGFIFREHGSTPGYYDGRYWTMWKLPMFGCTDASQVIKEVEEVKKEYPDAYVRIIGFDNIRQVQCVSFIAFKPPGCEESG

SEQ ID NO: 7038 - protein, 274 aa, Clostridium acetobutylicum ATCC 824
MLDINSFTVLNNGVKMPWLGFGTYKIEYEESSVDYIKTALKVGYRHLDTAAVYGNEPIVGKAVKESGIPRNEIFITSKVWNNKHGYDKTLKAFEDTLKRLDTDYLDLYLIHWPKTLNKETWKALEKLYKDGRVRAIGVSNFKVHHLEEILEDCEIVPMVNQVEYHPQFPQTEVHEFCKKNKIQLESWGPLMQGKIFDIPLMKELSLKYGKTISQIALRWDLQMGVVTIPKSINENRIKENCDLYDFEISKEDMKKIESLNTGVRIGHDPDTITF

SEQ ID NO: 7039 - protein, 223 aa, Lolium perenne
MCQIKKEMSGESGSPCNGEYCSPSTSSEQKQQTVWTKRPAGRTKFRETRHPVYRGVRRRGNAGRWVCEVRVPGRRGSRLWVGTFDTAEIAARAHDAAMLALAAGDVCLNFADSAELLDMPASSYRSLDEVRHAVTEAVEEFERRQALGEEDALSGTESSTLTDDEESSTPFELDVLSDMGWDLYYASLAQGMLMSSPFLAASAALGDYGEANLADVPLWSYLS

SEQ ID NO: 7040 - protein, 168 aa, Avena sterilis subsp. ludoviciana
VMASSATSVAPFQGLKSTAGLPVSRRSNAGLGSVSNGGRIRCMQVWPIEGIKKFETLSYLPPLTEEALLKQIDFLIRSKWVPCLEFSKVGFIFREHGSTPGYYDGRYWTMWKLPMFGCTDASQVIKEVEEVKKEYPDAYVRIIGFDNIRQVQCVSFIAFKPPGCEESG

SEQ ID NO: 7041 - protein, 77 aa, Zea mays
  misc_feature (11)..(11): Xaa can be any naturally occurring amino acid
MAHAYCCTFLXILLAIILPPFGVFLRFGCYRIEFCICVMLTILDYDPGIIYPMYVIVALDFDQHDSEYDTHDYSIWL

SEQ ID NO: 7042 - protein, 271 aa, Triticum aestivum
  misc_feature (64)..(64): Xaa can be any naturally occurring amino acid
TRPRTRGRTRGHHPWDAPASVLQAAGVELGSNYPLPIVELDTAQVRLQEALSEMWQLEAASRAXAMDTGMEEGLGDSSEVPPIEFPQDLQMEVHWEPARVAPNVLTTAQRRQDQMVPTMTASLNRVETEISADLGNSVDSRAEVPFRMHFEPRTEREEVIQSTGNAAGTNGIHHHNNFQQPQHRMRNIFAPSVSEASSSWTGRDGGVVPVWSPPAASGHSETYGADEADVSSRSYLDRHPQSHRIMNWHQLSQSLTTGRDVENSVQPNFIG

SEQ ID NO: 7043 - protein, 192 aa, Chromobacterium violaceum ATCC 12472
MGWLGRENAMKRWGAMLMLWGQAALAACPALLNHSVPGLMGGQINLCQYADRPLLVVNTASHCGFTPQFTQLESLYKQYGPRGLMVIGFPSNDFFQELDKPSEIGAFCQANYGVTFPMAGKGHVRGADAQPLFKDLIAATDDAPSWNFHKYLILPGASKVISIGTRTKPDAPEVVNAFLPYLQPETQAAAKP

SEQ ID NO: 7044 - protein, 767 aa, Zea mays
MDGRRTILMGRYEIGKQLGQGTFAKVFYARNLTTGLAVAIKMINKDKVMKVGLMEQIKREISIMRLVKHPNILQLYEVMASKSKIYFVLEYAKGGELFNKIAKGGKLSEDAARKYFQQLVSAVDFCHSRGVYHRDLKPENLLLDENENLKVSDFGLSALAESKRQDGLLHTTCGTPAYVAPEVLSRKGYDGAKEERFTTRQPVTTVFTKLKELAKRLKLRVKKKENGTLKLAAPKEGKKGMLELDAEIFERNVSPGDIQRHPDMSPSKKQLTNNNDSLYWSNEKYDYSCSWLDDRAMISALLDVVIEEDSARALSPLPLVAGVEAELHPVSVGHKSMDAEMKQPLEGSMSLNIDSEGEPHIGNGSIVVENPASDLVKSESDRIKTFYQTVLSAIMVFVTAALSSYKDMKPLYSTTSHGKAHLSNLLVDEGLFIFMTFLCAMVLMMSEFVVHQHGRRGHVWCWVRTILVAVTGVMLIVADTILLIVTNRSNMLLSVLLVPEVLLFGVAVSVGAWMQESLPSSELGSRYDSAMKGTFDIATVGTIVSFTLQGGIVFGYLKTPDSNQVKHDPPLDLAACYATSTLSLTGMTMCAMPLAYLPNGMLEVLVRVVERLRSAVLAALAMMALVVSVEFLDGFVVVSFFPDAVTIALYYVVKLFSACQPREEISQLDFTFRIVAAAGFTLMTGLYAAFTGTDHYGFNLKTAMFILLLAVVSSLSRLAIPLHMPEAGVGGVIEFGIVSIALSFPLLALLAAIPLVFKVFVDHYINR

SEQ ID NO: 7045 - protein, 249 aa, Zea mays
  misc_feature (189)..(189): Xaa can be any naturally occurring amino acid
MAAAARQRGTVKWFNDTKGFGFISPEDGSEDLFVHQSSIKSEGFRSLAEGEEVEFSVSEGDDGRTKAVDVTGPDGSFVRGGGGGGGGGGGGYGSRGGGGSGGGGRSYGGSWGGGRRSGGGGGPGACYKCGEPGHMARDCPSADGGGYGGGGYGGGGYGGGGGGGGGGCFKCGEPGHMARDCSSGRRRLXGGGGGGGGGCYNCGQAGHMARDCPSGGGGGGGRFGGGGGGGDRSCYNCGEAGHIARDCPT

SEQ ID NO: 7046 - protein, 363 aa, Exiguobacterium sp. 255-15
MAGVVWYRKDLRVDDHEALTRACEEEKIVRAVFVRQTADGRGKQQMTFEEETLQSLNEHLVQLGIELTILQGETVEQLTSFIQPEDVVYFHRMTGEYEARQEQEVQKRFNTRMYETQTLHLRDDIGSDELKRVFTAFRKRVEQDGRFAEPIEAPGNIQYIELPQTRGGYDPRTAFPFIGGEAAGRNRLAAYLEQPIFTYKETRNGFNVDDSSKLSAWLANGSLSPRRVMAELQRTEQEHGANESTYWLYFELLWRDFFHLTMRETGHRLFRSNGLKDGRLTWKTDQAAIDSWMAGETGEPFVDAFMREIKDTGWMSNRGRQITASYLIHDLKQDWRIGARYFEQQLIDYDVASNYGNWAYIAG

SEQ ID NO: 7047 - protein, 496 aa, Amaranthus hypochondriacus
MRKINKVEAMKFLLFLVMGLLVSLISASSYPSVIVIGAGMSGISAAKTLHDNNIKDFIILEATNRISGRIHKTEFAGYTVEKGANWLHGAEGPEKNPMYEIAEKINLKNFYSDFSNVSLNTYKQNGEKYSMEEVEAAIALADDNEEFGTKLAEQFSANTKEDDDMSLLAAQRLNKKEPKTILERMVDFYFNDGEQAEAPRVSSLKHILPRPEFSLYGDGEYFVADPRGFEGITHTIAKSFLSYTNHTVTDPRLMFNQVVTEIEYKRRSVTVKTEDGNVYKAKYVIVSPSLGVLQSDLITFTPELPLWKRRAISEFSIGIYTKIFLKFPYKFWPTGPGTEFFFYVHARRGYYAIWQQLENEYPGSNILFVTVADEESKRVEQQPDEVTKAEAMEVLRKIFGEDIPEATDIMIPRWYSDRFYRGTFTNWPVGYTNKKHKNLRAPVGRVFFTGEHTHPELFGYADGAYFAGITTANDILARLKGGILPWHNQDMKLMKI

SEQ ID NO: 7048 - protein, 534 aa, Glycine max
  misc_feature (205)..(205): Xaa can be any naturally occurring amino acid
MDSNSSSPSPNNHASTTKINGFFHPKLGSQPATSSRSRLAMASPVNSDPKVVTGTAGYILEDVPHFTDYIPNLPTYPNPLQDNPAYSVVKQYFVHVDDSVPQKVVVHKDGARGVHFRRAGPRQKVYFEADEVQAAIVTCGGLCPGLNTVIRELVCGLHHMYGVKRVLGINGGYRGFYARNTITLTRYHTEETLTRCLRGTVCFGXQVIPRVNSTKVRGINKDYINGGDGTEKGASSIFEEVRWCGLKVSVVGFPKTIDSDIPVIDKSFGFDTAVEEAQRAINAAHVEAESVENGIGVVKLMGRNSGFIAMYATLASRDVDCCLIPESPFYLEGPGGLYEYIEKRLKENGHMVIVIAEGAGQELVSESVQSMSKQDASGNKLFQDVGLWISQKIRDHFAAQKTLPITLKYIDPTYMIRAIPSNASDNVYCTLLAQSAVHGAMAGYTGYTSGLVNGRQTYIPFYRITERQNHVVITDRMWARLLSSTNQPSFLDSKGDNEEKKEEEAALNQLPDGHCSKDTSLANKEINSIYPTTC

SEQ ID NO: 7049 - protein, 215 aa, Gracilariopsis lemaneiformis
MPFVSVRPVDYLFKVVLIGDAGVGKSNLLSRFTRNEFSLESKSTIGVEFATRSIQCEGKIIKAQIWDTAGQERYRAITSAYYRGAVGALLVYDITKKDSFDNVQRWLKELKDHADANIVIMLVGNKSDLQHLKAVTTDDASAFAESNGLSFIETSALDNSNVEEAFRSILSEIYRLGSKKALEKGSTSNFAPNATQTIVINPPADEGKTEKAKCC

SEQ ID NO: 7050 - protein, 74 aa, Glycine max
MAFVPICVQCGTRSNPCRCKVVGPTLGFVALVVAGVVEWPLGAAVYLFRHRKGRRIMGHPTTVVYPRVTGAIPI

SEQ ID NO: 7051 - protein, 149 aa, Glycine max
  misc_feature (106)..(106): Xaa can be any naturally occurring amino acid
MAHDTTVGLSMAGVVAPFTGLKCMAGFPTRKTNNDITSIASNGGRVQCMQVWPPVGKKKFETLSYLPDLDDAQLAKEVEYLLRKGWIPCLGFELEPRFVYREHNRXPGYYDGRYWTMWKLAMFGWPGASQEWNELKELPLYTGAGYCYH

SEQ ID NO: 7052 - protein, 273 aa, Panax ginseng
PYYVAPEVLLKHYGPEADVWTAGVILYILLGGVPPFWAETQQGIFDAVLKGHIDFESDPWPLISDSAKDLIRKMLCSRPSDRLTAHEVLCHPWICENGVAPDRALDPAVLSRLKQFSAMNKLKKMALRVIAESLSEEEIAGLKEMFKAMDTDNSGAITFDELKAGLRKYGSTLKDTEIRDLMDAADVDNSGTIDYGEFVAATIHLNKLEREEHLMAAFQYFDKDGSGYITVDELQQACAEHNMTDVFLEDIIREVDQDNDGRIDYGEFVAMMK

SEQ ID NO: 7053 - protein, 324 aa, Haemophilus ducreyi 35000HP
MAKEIKKIAVLTSGGDAPGMNAAIRGVVRAALNEGLEIFGVQDGYYGLYHDKVIPLDRRSVSEIINRGGTFLGSARFPQFKDIEVRKQAVKILAKYEIDALVVIGGDGSYMGAKLLTEEFGYPCIGLPGTIDNDIVGTDYTIGYQTALQTAVEAIDRLRDTSTSHQRISIVEIMGRHCGDLTISAALAGGCEYIIVPEKGLDKESLIHSIADNFRKGKRHAIIAITELMTDVHQLARELEEKFGHETRATVLGHIQRGGSPCPFDRILASRMGVYAVDLLRQGFGGRCVGIQNEHLVHHDIIDAINNMRRPFKQDIFEAASKLA

SEQ ID NO: 7054 - protein, 227 aa, Cicer arietinum
PEVLKRSYGPEVDVWSAGVILYILLCGVPPFWAETEQGVALAILRGVLDFKREPWPQISDSAKSLVRQMLEPDPKKRLTAEQVLEHPWLQNAKKASNVPLGDIVRTRLKRFSLMNRFKKRALRVIADHLSLEEVEIIKDMFTLMDTDKDGRITYEELKAGLQKVGSQLAEPEIKLLMDVADVDGNGVLDYGEFVAVTIHLQRMENDEHFRKAFKFFDKDGSGYIELS

SEQ ID NO: 7055 - protein, 127 aa, Escherichia coli
MADTKAKLTLNGDTAVELDVLKGTLGQDVIDIRTLGSKGVFTFDPGFTSTASCESKITFIDGDEGILLHRGFPIDQLATDSNYLEVCYILLNGEKPTQEQYDEFKTTVTRHTMIHEQITRLFHAFRR

SEQ ID NO: 7056 - protein, 317 aa, Burkholderia cepacia R1808
MTTALDQLKQYTTVVADTGDFQQLAQYKPQDATTNPSLILKAVQKDAYKPILEKTVRDHRNESTDFIIDRLLIAFGTEILKLIPGRVSTEVDARLSFDTQRSIDKGRELIKLYEAAGIGRERILIKLASTWEGIRAAQVLQQEGIKCNMTLLFSLVQAAACAEAGAQLISPFVGRIYDWYKKQAGADWDEAKDGGANDPGVQSVRRIYTYYKTFGYHTEVMGASFRTTSQIIELAGCDLLTISPDLLQKLQDSNDPVERKLSPDALHDKPTERVAIDEASFRFQLNDDAMATEKLAEGIRVFAADAVKLEKLIAALR

SEQ ID NO: 7057 - protein, 422 aa, Haemophilus ducreyi 35000HP
MGDLKQAALDFHEFPIPGKISVTPTKSLKTQHDLALAYSPGVAEPCLAIEKDPSTARRYTAKGNLVAVISNGTAVLGLGNIGALASKPVMEGKGVLFKKFAGIDVFDIEINEQDPDKLIDIIASLEPTFGGINLEDIKAPECFYIEQKLRERMGIPVFHDDQHGTAIIVGAAVLNGLQIVGKSLDQVRLVVNGAGASAIACTNLLCSLGIKKENITMCDSKGIIFKGRGDQIDQTKQAYAIVDNGWRTLSDAINGADVFLGCSKAGALTQAMVKKMAKDPLILALANPVPEITPDEVKQARLDAIVCTGRSDYRNQVNNVLCFPFLFRGALDVGATEINEEMKIAAAKAIADLAKQPVSLEVLSTYGELSFGPEYIIPMPFDPRLIVEVSTAVAKAAMASGVATRPISDCAVYAEKLKTLLA

SEQ ID NO: 7058 - protein, 252 aa, Prunus fremontii
AHYKSEADVGNAIAEAIQSGLVKREELFITSKASNHGHVVEACKNSLKKLQLDYLDLYLVHYPLATKHSGVGTTASLLDENKVLDIDVTVSLETTWHDMEKTVDLGLVRSIGLSNYELFLTRDCLSYAKIKPQVSQFETHPYFQRESLVRFCKKHGVVPMAHTPLGGATANVNAFGSISPLEDPVLIGLAKKYQKSVAQIALRWNIERGTPVIPKSSKVERLKENLEVLNFKLEKEDIELINTIDKKSRTTL

SEQ ID NO: 7059 - protein, 252 aa, Prunus dulcis
AHYKSEADVGNAIAEAIQSGLVKREELFITSKASNHGHVVEACKNSLKKLQLDYLDLYLVHYPLATKHSGVGTTASLLDENKVLDIDVTVSLETTWHDMEKTVSLGLVRSIGLSNYELFLTRDCLSYAKIKPQVSQFETHPYFQRESLVRFCKKHGVVPMAHTPLGGATANVKAFGSISPLEDPVLIGLAKKHQKSVAQFALRWNLERGTPVIPKSSKVERLKENLEVLNFKLEKEDIELINTIDKKFRTTL

SEQ ID NO: 7060 - protein, 233 aa, Prunus persica
NAIAEAIQSGLVKREELFITSKASNHGHVVEACKNSLKKLQLDYLDLYLVHYPLATKHSGVGTTASLLDENKVLDIDVTVSLETTWHDMEKTVSLGLVRSIGLSNYELFLTRDCLSYAKIKPQVSQFETHPYFQRESLVRFCKKHGVVPMAHTPLGGATANVKAFGSISPLEDPVLIGLAKKYQKSVAQIALRWNIERGTPVIPKSSKVERLKENLEVLNFKLEKEDIELINT

SEQ ID NO: 7061 - protein, 168 aa, Avena maroccana
VMASSATSVAPFQELKSTAGLPVSRRSNAGLGSVSNGGRIRCMQVWPIEGIKKFETLSYLPPLSEEALLKQIDFLIRSKWVPCLEFSKVGFIFREHGSTPGYYDGRYWTMWKLPMFGCTDASQVIKEVEEVKKEYPDAYVRIIGFDNIRQVQCVSFIAFKPPGCEESG

SEQ ID NO: 7062 - protein, 491 aa, Escherichia coli
MTEPHVAVLSQVQQFLDRQHGLYIDGRPGPAQSEKRLAIFDPATGQEIASTADANEADVDNAVMSAWRAFVSRRWAGRLPAERERILLRFADLVEQHSEELAQLETLEQGKSIAISRAFEVGCTLNWMRYTAGLTTKIAGKTLDLSIPLPQGARYQAWTRKEPVGVVAGIVPWNFPLMIGMWKVMPALAAGCSIVIKPSETTPLTMLRVAELASEAGIPDGVFNVVTGSGAVCGAALTSHPHVAKISFTGSTATGKGIARTAADHLTRVTLELGGKNPAIVLKDADPQWVIEGLMTGSFLNQGQVCAASSRIYIEAPLFDTLVSGFEQAVKSLQVGPGMSPVAQINPLVSRAHCDKVCSFLDDAQAQQAELIRGSNGPAGEGYYVAPTLVVNPDAKLRLTREEVFGPVVNLVRVADGEEALQLANDTEYGLTASVWTQNLSQALEYSDRLQAGTVWVNSHTLIDANLPFGGMKQSGTGRDFGPPLAGRAGC

SEQ ID NO: 7063 - protein, 252 aa, Prunus maritima
AHYTSEADVGNAIAEAIQSGLVKREELFITSKASNHGHVVEACKNSLKKLQLDYLDLYLVHYPLATKHSGVGTTASLLDENKVLDIDVTVSLETTWHDMEKTVDLGLVRSIGLSNYELFLTRDCLSYAKIKPQVSQFETHPYFQRESLVRFCKKHGVVPMAHTPLGGATANVKAFGSISPLEDPVLIGLAKKYQKSMAQIALRWNLERGTPVIPKSSKVERLKENLEILNFKLEKEDIELINTIDKKSRTTL

SEQ ID NO: 7064 - protein, 404 aa, Sinorhizobium meliloti
MAKKKVAMLTAGGLAPCLSSAVGGLIERYTDIAPDYELVAYRSGYQGLLLADRIEITPAMREKAHVLHRHGGSPIGNSRVKLTNTADCVKRGLVKEGENPLRVAAERLASDGISILHTIGGDDTNTTAADLAAYLGANGYDLTVVGLPKTVDNDVVPIRQTLGAWTAAEYGARFFDHVSNEQSAAPRTLVVHEVMGRHCGWLTAATARAYIHLAGNKEYVDGFMMNAQLKNIDGLYLPEMAFDLEAEAARLREVMDRAGFVTLFVSEGACLDAIVAEREAAGETVKRDAFGHVKIDTINVGNWFSKQFAALLGAERSMVQKSGYYARSAPANVDDLRLIQSMVDLAVESALNKVSGVTGHDEDQGGRLRTIEFPRIKGGKHFDTSAKWFGEVMDVVGQKWQTAD

SEQ ID NO: 7065 - protein, 96 aa, Brassica napus
IFFFVPTKTVKMDRRRRRQSKAKASCSEEVSSIEWEAVKMTEEEEDLISRMYKLVGDRWELIAGRIPGRTPEEIERYWLMKHGVVFANRPRDFVRR

SEQ ID NO: 7066 - protein, 168 aa, Avena maroccana
VMASSATSVAPFQGLKSTAGLPVSRRSNAGLGSVSNGGRIRCMQVWPIEGIKKFETLSYLPPLSEEALLKQIDFLIRSKWVPCLEFSKVGFIFREHGSTPGYYDGRYWTMWKLPMFGCTDASQVIREVEEVKKEYPDAYVRIIGFDNIRQVQCVSFIAFKPPGCEESG

SEQ ID NO: 7067 - protein, 231 aa, Prunus maritima
  misc_feature (6)..(7): Xaa can be any naturally occurring amino acid
NAIAEXXQSGLVKREELFITSKASNHGHVVEACKNSLKKLQLDYLDLYLVHYPLATKHSGVGTTASLLDENKVLDIDVTVSLETTWHDMEKTVDLGLVCSIGFSNYELFLTRDCLSYAKIKPQVSQFETHPYFQRESLVRFCKKHGVVPMAHTPLGGATANVKAFGSISPLEDPVLIGLAKKYQKSVAQIALRWNLERGTPVIPKSSKVERLKENLEILNFKLEKEDIELI

SEQ ID NO: 7068 - protein, 404 aa, Oryza sativa (japonica cultivar-group)
MASAAAEVPSYFVCPISLQLMRDPVTLPTGISYDRAAIARWLAAPGARRTCPVTRQPLEHGLELTPNHTLRRLIQSWAASVSPGSAVDEEVAALRPVSSDEVASLLSDAAAAQVGALRRLRELAAECEDSRAMLESQGGVFDVLSRVVTSGSACSTAREEAVGVLASLRIPEQELIGVSTRHGNLAESLTAVLRSSNLQSRAHAVQLVRTLADAVVPAWVIGLNAELLAEVVGVVRDRVSARATKASLHALAALCPYGRHRVKIVGAGAVAALVELLLDEPERRVCELALAVLDRLCTCAEGRAELVAHAAGVAVVGKKVLRVSEAASERAVRVLRSVARHAATPAVLQEMAQCGVVGKLCLALRSEQCGVKTKEKAHEVLKLHSRVWRASPCLSPSFLALYPS

SEQ ID NO: 7069 - protein, 141 aa, Brassica napus
MRNLRTISSHLSRGLRSIQPHPIQSHRSYSSQSENVSKIVTELSNLTLLETMDLTELLRKKLGVTEMPVMAAMAFPGSGGGGSPGAAAGGKGEEKKKAEAKTAFDVMLQGFESASKIKVIKEVRTVTDLGLKEAKDLVEKA

SEQ ID NO: 7070 - protein, 163 aa, Rubrivivax gelatinosus PM1
MITTTIYDFEARSIDGRTVSLADYRGKVLLIVNTASACGFTPQFAGLQSLWQAYGERGLAVLGFPSNEFGGQDPGSNDEIASFCQLNYGVSFPMMAKVEVNGAGAHPLYRWLTGEVKGLLGTRAIKWNFTKFLVGRDGRVLGRYAPTDKPESLTRDIEAALAA

SEQ ID NO: 7071 - protein, 595 aa, Zea mays
MAGPEKTVVWFRRDLRIEDNPALAAAAKGGSVLPIFIWCPSDYGQYYPGRCSRWWLKQSLAHLGKSLELLGCPLVLIRAEDSTLAALLECVRSISATRVVYNRLYDPISLVLDNKIKNELPAHGISVQSFNGDLLYEPWDVYDENGQAFTTFNKYWEKCMNLPIEISQYLAPTRLVAAPGLANVRCCSIDDLGLESSKDVESSNALLSRAWSPGWRNAENMLEEFVSYGLPEYSEHGMKVGGSTTSLLSPYLHFGELSVRMIYQLVKMRQVKWQNEGKSEAEESVRLFLRSIGFREYSRYLCFNYPFTHERSFLGNLKHYPWLLDEGRFKSWRQGMTGYPLVDAGMRELWATGWTHNRIRVIVSSFAVKFLQIPWIWGMKYFWDVLLDADLESDILGWQYISGSLPDGHELSRLDNPEVQGQKYDPDGEYVRTWIPELARMPTEWIHSPWAAPNSILQVAGVELGFNYPKPIVELHMARECLDDAISTMWQLDTAAKLAELDGEVVDDNLNNIRNFDIPKVVLNKKLSPSTSSMEHRVLSTNGKDEKSQPTEVKALYKQIIRDDMMNDSNMDDTCSTANLKVTRKRSSSDSAARA

SEQ ID NO: 7072 - protein, 127 aa, Corynebacterium efficiens YS-314
MPVGTVKWYDPERGFGFVSNPGGEDCFVGKQVLPKGVTELHQGQRIEFDFAAGRKGPQALRVKVLETPRRRPQHTYKPEELNGIISDMVTMLEGTVQPALLKGHYPDRKVGEQVAKILRAVAKELEA

SEQ ID NO: 7073 - protein, 97 aa, Glycine max
  misc_feature (24)..(24): Xaa can be any naturally occurring amino acid
  misc_feature (27)..(27): Xaa can be any naturally occurring amino acid
  misc_feature (59)..(59): Xaa can be any naturally occurring amino acid
  misc_feature (76)..(76): Xaa can be any naturally occurring amino acid
MACRKMITLCLIDCLSLFSLTKNXGLXAKVPFLDKNFIGVAMNMDPDYKMIKQEHCRIXKCVLKRPFDDEERPYLXRHGMQLMEQVSDVSGYGWMHG

SEQ ID NO: 7074 - protein, 136 aa, Glycine max
MQHRNLTSGRPSGTDGSDYSYRMVVDSRYQLVAKGKKRLSLYFITEAVLLLIGVTLTYLPGIEADAPNTVAYSSVIVSVVSLIIGNIGRRRSRSGLLRFYAAVSSIAMLLLIASLAQQHLLLKAIQDSKLWKTGKV

SEQ ID NO: 7075 - protein, 355 aa, Cryphonectria parasitica
MSRSQAPNPAGSRKISFNVSEQYDIKDVVGEGAYCVVCSAIHKPSGQKVAIKKITPFDHSMFCLRTLREMKLLRYFNHENIISILDIQRPRNYESFNEVYLIQELMETDMHRVIRTQDLSDDHCQYFIYQTLRALKAMHSANVLHRDLKPSNLLLNANCDLKVCDFGLARSAASQEDKSGFMTEYVATRWYRAPEIMLTFKEYTKAIDVWSVGCILAEMLSGKPLFPGKDYHHQLTLILDVLGTPTMEDYYGIKSRRAREYIRSLPFKKKVPFKTLFPKTSELALDLLEKLLAFNPVKRITVEEALKHPYLEPYHDPDDEPTAPPIPEEFFDFDKHKENLSKEQLKQLIYQEIMR

SEQ ID NO: 7076 - protein, 396 aa, Salmonella typhimurium
MLDAQTIATVKATIPLLVETGPKLTAHFYDRMFTHNPELKEIFNMSNQRNGDQREALFNAIAAYASNIENLPALLPAVEKIAQKHTSFQIKPEQYNIVGTHLLATLDEMFNPGQEVLDAWGKAYGVLANVFIHREAEIYHENASKDGGWEGTRPFRIVAKTPRSALITSFEFEPVDGGTVAEYRPGQYLGVWLKPEGFAHQVFRQYSLTRKPDGKGYRIAVKREDGGQVSNWLHHHASVGDVVHLAAPAGDFFMNVAADTPVSLISAGVGQTPMLAMLDTLAKEQHTAQVNWFHAAENGDVHAFADEVSELGRTLPRFTAHTWYREPTEADRAQRLFDSEGLMDLSKLEAAISDPAMQFYLCGPVGFMQFAAKQLVSLGVNNENIHYECFGPHKVL

SEQ ID NO: 7077 - protein, 54 aa, Glycine max
NSDRFRLTKWPYTARDVMFLRGNLRHTYASNDMAKKLWRLLNNHQSYGTVSKTF

SEQ ID NO: 7078 - protein, 316 aa, Vibrio cholerae O1 biovar eltor str. N16961
MSNKLAQLRKLTTVVADTGEIDAIKKYQPEDATTNPSLILKAAQIAEYAPLIDQAIAYAKTQSNDKAQQVQDTCDMLAVNIGKEILKTIPGRISTEVDARLSYDTERSVAKARQLVKMYNDAGISNDRILIKLASTWEGIRAAEILEKEGINCNLTLLFSFAQARACAEAGVFLISPFVGRIMDWYKAKEGRDFAASEDPGVLSVTKIYNYYKEHGYKTVVMGASFRNIGEILELAGCDRLTIAPSLLAELEAAEGELVAKLVDSKGSKARPAPMTHSEFLWEHNLDAMAVEKLAEGIRNFAVDQGKLEAMIAAKL

SEQ ID NO: 7079 - protein, 226 aa, Gossypium hirsutum
MLQCLDGLKHLFASVLHCCDIDLCKQSRGLEDPELLARETVFSVSEIEALYELFKKVSSAVIDDGLINKEEFQFALFKTNKKESLFADRVFDLFDTKHNGILGFEEFARALSVFHPNAPIDNKIDFSFQLYDLKQQGFIERQEVKQMVVATLAESGMNLSDDVIESIIDKTFEEADTKHDGRIDKEEWRSLVLRHPSLLKNMTLQYLKDITTTFPSFVFHSQVDDT

SEQ ID NO: 7080 - protein, 93 aa, Glycine max
MFFIQVLVVGGGDGGVLREVARHSSVEHIDICEIDKMVIDVSRKFFPQLAVGFEDSRVHLHVGDAVDFLKSAPEGKYDAIIVGSSDPVGMSFQ

SEQ ID NO: 7081 - protein, 243 aa, Schizosaccharomyces pombe
MVLEATMILIDNSEWMINGDYIPTRFEAQKDTVHMIFNQKINDNPENMCGLMTIGDNSPQVLSTLTRDYGKFLSAMHDLPVRGNAKFGDGIQIAQLALKHRENKIQRQRIVAFVGSPIVEDEKNLIRLAKRMKKNNVAIDIIHIGELQNESALQHFIDAANSSDSCHLVSIPPSPQLLSDLVNQSPIGQGVVASQNQFEYGVDPNLDVELALALELSMAEERARQEVAAQKSSEETEDKKMQE

SEQ ID NO: 7082 - protein, 392 aa, Picrophilus torridus DSM 9790
MDRIMFENGSWIVPEKPVILYANGDGIGPEIMDATRKVVDAATAMEKKSIAWKEILLGDRAEELKGDRFPEESIKAINDYRVLLKAPLNTPVGKGFKSINVRIRMLLDLYANIRPVKFMPGLESPLKNPEKVNLTIFRENTDDLYLGYEWSYDTDEAKRIRKFLKDEFNIDISDDSGIGIKPMSRYKTQRITRLAVKYAMDNNLKKITIMHKGNVMKYTEGAFREWAYETALNEFSDYVSRDDDKKIIINDIIADNMFQQIITRPDEYQLILAPNVDGDYISDAAGALIGNIGTLGGANIGDNGAMFEAVHGTAPKYAGKNVADPLGLIRGAQLMLRYMGWNRAADAIEKAIQASINEKKVTNDLARFFNVEPLGTREYGDYLVDKIKVLVS

SEQ ID NO: 7083 - protein, 365 aa, Picrophilus torridus DSM 9790
MDVDLGLENTYIKHTKLTYIDGELGVLRYRGYDINDVVNNLSFMETAYLMLYGRIPDPKELKLFSSYIGDGKLPERIFSMIDTFPEGDPLSMASSVFAALAIDNNMKWSIDENKRNAGRIIGLSFNVFANIYLHIKGKKLYNIDLGDPVSGFLRVTNNMDQKNVKAFEAAMILYMDHEIPASTTAALVTASTLSDMLSSLSSAMNALKGPLHGGAAENAFLEFLDIGSPENVKPWFNEHIIKNRERLIGFGHRVYKTYDPRIKKFRELSMSLCDEKNRIILDTALELERVALDYFMEKKIYPNTDFFSGLLFNELGFEHWFFTSLFALSRVTGILAHIIEYNENEQRLIRPRAIYNGDGERFIKR

SEQ ID NO: 7084 - protein, 87 aa, Glycine max
DSSMISSPMLPLSTVARAGMYAPFSGLESMAVFPTRMTNNDITSFASYLGILQCMSGCAPDVKKTFDTLSYLPDLDDALLDYEVSIL

SEQ ID NO: 7085 - protein, 277 aa, Bacillus cereus ATCC 10987
MSLTSLKDYTTLHNGVKMPWFGLGVFKVEDGSEVIESVKAAIKNGYRSIDTAAIYQNEEGVGQAIRESGVSREELFITSKVWNSDQGYETTLQAFETTLEKLGLEYLDLYLVHWPVKGKYTESWKALEKLYKDGRVRAIGVSNFHIHHLQDVFEIAEIKPMVNQVEYHPRLAQEELHAFCKEHNIQLEAWSPLMQGQLLDNPTLQEIATKYNKSTAQIILRWDLQNEVVTIPKSIKEHRIIENANIFDFELSADDMKAIQALNEDRRVGPDPDNFNF

SEQ ID NO: 7086 - protein, 291 aa, Lactobacillus gasseri
MTEVPTITLNDGNKMPQVGLGVFRIPDHDKARQTVEMALANGYRMIDTAEAYDNQIAVGEAIAESAVNRDDIFLTTKIWVSNMSFEKATKAIDHDLKELGTDYIDLVLLHQPYGDTFGAWNALEAAKSAGKIRSIGLSNFYPDQYMNLELAHEDKPAINQIEISPWFQQANDVKFFQGRNVAVEAWAQFANGKHDIFNNKVLTEIAETHHKTVGQVILRWLTQKSIIVIPKAVHDEHQKENINIFDFELTQDEMAKIGELDKGESQFFDHRDPAAIDDIFGESLKQLRDSE

SEQ ID NO: 7087 - protein, 214 aa, Zea mays
PAVPVRNSRVPNLSIGFKDPRVRLHVGDAVDFLRNSPEGKYDAIIVDSSDPIGPAQALVEKPFIQTIARALKPGGVLCNLAESMWLHTHLIQDMLAICRQTFKGAVHYAWTSVPTYPSGVIGFLLCAKEGRAVNFLTPVNPIEKIEGTSKAGRELRFYNSEIHRAAFVLPTFVRRELEAYTSPSTSAENEKPKESVSEPQKIKILSNNAILTAS

SEQ ID NO: 7088 - protein, 198 aa, Gossypium barbadense
MAPKKDGVSKRVFNKGSWTAEEDRRLAKYIEIHGAKRWKTIAIKSGLNRCGKSCWLRWLNYLRPNIKRGNISDEEEDLIIRLHKLLGNRWSLIAGRLLGRTDNEIKNYWNSHLSKKIINHDVRTEQTSSSEQIVPHKAWETVQMEEEEVVKGSDEIENSEFSIDVDEFFDFTTEGCFSLDWVNKFLELDDQQDPLAMV

SEQ ID NO: 7089 - protein, 152 aa, Zea mays; identical to SEQ ID NO: 357

SEQ ID NO: 7090 - protein, 194 aa, Saccharomyces cerevisiae
MVTSNVVLVSGEGERFTVDKKIAERSLLLKNYLNDMHDSNLQNNSDSESDSDSETNHKSKDNNNGDDDDEDDDEIVMPVPNVRSSVLQKVIEWAEHHRDSNFPDEDDDDSRKSAPVDSWDREFLKVDQEMLYEIILAANYLNIKPLLDAGCKVVAEMIRGRSPEEIRRTFNIVNDFTPEEEAAIRRENEWAEDR

SEQ ID NO: 7091 - protein, 252 aa, Prunus maritima
AHYKSEADVGNAIAEAIQSGLVKREELFITSKASNHGHVVEACKNSLKKLQLDYLDLYLVHYPLATKHSGVGTTASLLDENKVLDIGVTVSLETTWHDMEKTVDLGLVRSIGLSNYELFLTRDCLSYAKIKPQVSQFETHPYFQRESLVRFCKKHGVVPMAHTPLGGATANVKAFGSISPLEDPVLIGLAKKYQKSVAQIALRWNLERGTPVIPKSSKVERLKENLEILNFKLEKEDIELINTIDKKSRTTL

SEQ ID NO: 7092 - protein, 252 aa, Prunus maritima
AHYKSEADVGNTIAEAIQSGLVKREELFITSKASNHGHVVEACKNSLKKLQLDYLDLYLVHYPLATKHSGVGTTASLLDENKVLDIDVTVSLETTWHDMEKTVDLGLVRSIGLSNYELFLTRDCLSYAKIKPQVSQFETHPYFQRESLVRFCKKHGVVPMAHTPLGGATANVKAFGSISPLEDPVLIGLAKKYQKSVAQIALRWNLERGIPVIPKSSKVERLKENLEILNFKLEKEDIELINTIDKKSRTTL

SEQ ID NO: 7093 - protein, 416 aa, Polytomella sp. Pringsheim 198.80
MPAPSAHADRWTGISRVFSEKDVERLRGSVTIEHTLARIGAEKFWKLLHTEDYVPALGALTGHQAVEMISAGLKAIYLSGWQVAGDNNSAYQTYPDQSLYPADSVPKVVKRINNAFQRADQIQHSQGSTEVDFFAPIVADAEAGFGGVLNAYELMLGMIEAGAACVHFEDQLASAKKCGHMGGKVLVPTNEFIQKITAARLAADVANVPTLIIARTDALGAYLLTSDIDERDKAFCTGERTAEGFYRVRGGIDAAIARGLSYAPYADLVWFETGEPNMEEAKKFAAAIHAKFPGKLLAYNCSPSFNWKKLLSDEEIGAFQKTLGALGYKFQFVTLAGFHALNYGMFSLAKEYSKTGMTAYSELQANEFASEKDGYKATTHQRFVGTGYFDALSQVITEGTSSVTALSGSTEEEQFH

SEQ ID NO: 7094 - protein, 505 aa, Populus balsamifera subsp. trichocarpa x Populus deltoides
MDLLLLEKTLLGSFVAILVAILVSKLRGKRFKLPPGPIPVPVFGNWLQVGDDLNHRNLTDLAKKFGDIFLLRMGQRNLVVVSSPDLSKEVLHTQGVEFGSRTRNVVFDIFTGKGQDMVFTVYGEHWRKMRRIMTVPFFTNKVVQQYRYGWEEEAAQVVEDVKKNPEAATNGIVLRRRLQLMMYNNMYRIMFDRRFESEDDPLFNKLKALNGERSRLAQSFDYNYGDFIPILRPFLRGYLKICQEVKERRLQLFKDYFVDERKKLASTKNMSNEGLKCAIDHILDAQKKGEINEDNVLYIVENINVAAIETTLWSIEWGIAELVNHPEIQKKLRHELDTLLGPGHQITEPDTYKLPYLNAVIKETLRLRMAIPLLVPHMNLHDAKLGGFDIPAESKILVNAWWLANNPAHWKNPEEFRPERFLEEEAKVEANGNDFRYLPFGVGRRSCPGIILALPILGITLGRLVQNFELLPPPGQSKIDTAEKGGQFSLHILKHSTIVAKPRSF

SEQ ID NO: 7095 - protein, 200 aa, Schizosaccharomyces pombe
MTTELRRKLVIVGDGACGKTCLLIVFSKGTFPEVYVPTVFENYVADVEVDGRHIELALWDTAGQEDYDRLRPLSYPDSHVVLICFSVDAPESLDNVQEKWISEVLHFCSNLPILLVGCKVDLRNDPKTIEELSKTSQKPITFEEGQVVAQKIGAYKYLECSAKLNEGVNEVFETAARASMLKFKPASVPKTKKKKHCILL

SEQ ID NO: 7096 - protein, 231 aa, Prunus maritima
AHYKSEADVGNAIAEAIQSGLVKREELFITSKASNHGHVVEACKNSLKKLQLDYLDLYLVHYPLATKHSGVGTTASLLDENKVLDIDVTVSLETTWHDMEKTVDLGLVRSIGLSNYELFLTRDCLSYAKIKPQVSQFETHPYFQRESLVRFCKKHGVVPMAHTPLGGATASVKAFGSISPLEDPVLIGLAKKYQKSVAQIALRWNLERGTPVIPKSSKVERLKENLEILNF

SEQ ID NO: 7097 - protein, 252 aa, Prunus takesimensis
  misc_feature (18)..(18): Xaa can be any naturally occurring amino acid
AHYKSEADVGNAIAEAIXSGLVKREELFITSKASNHGHVVEACKNSLKKLQLDYLDLYLVHYPLATKHNGVGATASLLDENKVLDIDVTVSLETTWHDMEKTVSLGLVRSIGLSNYELFLTRDCLSYAKIKPQVSQFETHPYFQRESLVRFCKKHGVIPMAHTPLGGATANVKAFGSISPLEDPVLLALAKKYQKSVAQIALRWNLERDTPVIPKSSKVERLKENLEVLNFKLEKEDIELINTIDKKSRTTL

SEQ ID NO: 7098 - protein, 121 aa, Triticum aestivum
  misc_feature (54)..(54): Xaa can be any naturally occurring amino acid
GPMLIYPMLKSKWDPNTSVALPEGEVFYLVALLRFCPGGSGAAVEELVARRHRXAGGCRSSGYDFKTYFPHYRTEADWARHFGAKWARFVDRKARYDPLAILAPGQKIFARTPSSSRTDRS

SEQ ID NO: 7099 - protein, 490 aa, Oryza sativa (japonica cultivar-group)
MAIFLVLALSIAQLLPSLVAGTGRPRVIIVGAGISGISAGKRIWEAGIADVLILEATDRIGGRMHKQSFAGVNVEIGANWVEGVNGEKKNPIWPIVNSTLKLRSFRSDFDSLAQNVYKDGGLCDEAYVQKRMDRADEVDKSGENLSATLHPSGRDDMSILSMQRLNDHLPNGPSSPVDMAVDYFTYDYEFAEPPRVTSLQNTVPLPTFTDFGDDTYFVADQRGYESVVHHLAGQYLNADKSGNIADARLKLNKVVREISYSSTGVTVKTEDNSTYQADYVMVSASLGVLQSDLIQFKPQLPSWKILAIYQFDMAVYTKIFVKFPKKFWPEGAGREFFLYASTRRGYYGVWQEFEKQYPDANVLLVTVTDEESRRIEQQPDSQTKAEIMEVVRCMFPDEDVPDATDILVPRWWSDRFFRGSFSNWPIGVSRYEYDQLRAPVGRVYFTGEHTSERYNGYVHGAYLAGIDSAEILINCAQKKMCKYNVGGKHG

SEQ ID NO: 7100 - protein, 470 aa, Corynebacterium efficiens YS-314
METFVSRNNILAARDASDLVIESGDLPQPGGTDKKFEREIVASDNNKAVLHYPGGEFEMGIKQATEGNSGVILGKMLSETGLVTFDPGYVSTGSTESKITYIDGDAGILRYRGYDIADLAENATFNEVSYLLIKGELPTPEELHKFNDEIRHHTLLDEDFKSQFNVFPRDAHPMATLASSVNILSTYYQDQLDPLDEAQLDKATVRLMAKVPMLAAYAHRARKGAPYMYPDNSLNARENFLRMMFGYPTEPYEVDPIMVKALDKLLILHADHEQNCSTSTVRMIGSAQANMFVSIAGGINALSGPLHGGANQAVLEMLEEIAANGGDATDFMNRVKNKEKGVRLMGFGHRVYKNYDPRAAIVKDTAHEILEHLGGDPLLDLALKLEEIALNDDYFISRKLYPNVDFYTGLIYRAMGFPTDFFTVLFAIGRLPGWIAHYREQLADPGAKINRPRQIYTGETARKIIPREER

SEQ ID NO: 7101 - protein, 122 aa, Lotus corniculatus var. japonicus
MIQPQTHLNVADNSGARKLMCIRIIGASNRRYAYIGDIVVAVIKEAVPNTPLERSEVIRAVIVRTCKELKRSNGIIIQYDDNAAVVIDQEGNPKGTRIFCAIARELRQFNFTKIVSLAPEIL

SEQ ID NO: 7102 - protein, 102 aa, Zea mays; identical to SEQ ID NO: 326

SEQ ID NO: 7103 - protein, 322 aa, Paenibacillus macquariensis
MTIKKIAVLTSGGDSQGMNAAVRAVVRSGLFYGLEVYGIQRGYQGLLNDDIFSMDLRSVGDIIQRGGTVLQSARCKEFMTPEGQQKGADILRKRGIDGLVVIGGDGSYHGANKLSKLGINTMALPGTIDNDISYTDFTIGFDTSVSIVVDAINKLRDTMSSHERSSIVEVMGRHCGDIALYAGLASGAETIIVPEVPFDMDEIAERMKQNFAHGKRHSIVVVAEGAGNGENVAKQLVERCETLEPRVTVLGHIQRGGTPTPADRNLASRLGDFAVRMLIAGESAKACGIISNELVLTDIDKVVNSKKEFNMELYELAARLSQ

SEQ ID NO: 7104 - protein, 284 aa, Corynebacterium efficiens YS-314
MSPTPSPTLSLSDGSEIPQIGLGTWQMHGEEAYRTVREAIGMGYRHIDTAKLYDNEVEVGRAVTDAIRSGEVTRDELFITSKVWNDDQGREQAARAFQASLARLGLDYLDLYLVHWPCPRKGLYNETFEAVARIQGLGQVQSIGVANFYAGVLEDLVVTTGIVPAVNQVELHPGFSQAPLRALHDRLGVVTTAWAPLARGGVLSHPVIKGIAGRYGVPASAVVLRWLVQLGVVAIPKSSDPGRLRSNLDVHGFQLSVEEVERITALDEGPGMGRLFHDPEEFPA

SEQ ID NO: 7105 - protein, 168 aa, Glycine max
  misc_feature (151)..(151): Xaa can be any naturally occurring amino acid
  misc_feature (158)..(158): Xaa can be any naturally occurring amino acid
  misc_feature (160)..(160): Xaa can be any naturally occurring amino acid
MGSLALETEDVISDIYLSLGLKESDKGVGVPRVLSLLSSLLERSVQRNETLLEAKHVKDVVTVFHGLRAPTLSVRKYIDRIFKYSGCSPSCFVVAHIYVDRFIQHTEIKLTSLNVHRLLITSIMLAAKFIDDAFYNNAYYAKVGGVSTSEXNRLEMSXLXGIEFRLQF

SEQ ID NO: 7106 - protein, 326 aa, Medicago sativa
MEQAVLDDIINRLLEVRCRPGKQVQLSETEIRQLCSTAREIFLQQPNLLELEAPIKICGDIHGQYSDLLRLFEYGGLPPQANYLFLGDYVDRGKQSLETICLLLAYKIKYPENFFLLRGNHECASINRIYGFYDECKRRFNVRIWKVFTDCFNCLPVAALIDEKILCMHGGLSPDLHNLDQIRNLQRPTDVPDTGLLCDLLWSDPSKEVQGWGMNDRGVSYTFGADKVSEFLQKHDLDLICRAHQVVEDGYEFFANRQLVTIFSAPNYCGEFDNAGAMMSVDETLMCSFQILKPADKKTKLNFGSTTTTKPGNSPAGVKSFLGTKV

SEQ ID NO: 7107 - protein, 325 aa, Medicago sativa
MEQSVVDIINRLLEVRNRPGKQVQLSESEIRQLCNVSRDIFLKQPFLLQLEAPIKICGDVHGQYSDLLRLFEYGGFPPEANYLFLGDYVDRGKQSLETICLLLAYKIKYPENFFLLRGNHECASINRIYGFYDECKRRFNVRLWKTFTDCSNCLPVAALIDEKILCMHGGLSPDLHNLDQIRNLQRPTDVPDTGLLCDLLWSDPSKDVQGWGMNDRGVSYTFGADKITEFLEKHDLDLICRAHQVVEDGYEFFANRQLVTIYSAPNYCGEFDNAGAMMSVDETLMCSFQILKPADKKTKLNFGSTTTAKPENSPAGVKYLLGAKV

SEQ ID NO: 7108 - protein, 154 aa, Rickettsia conorii str. Malish 7
MTFIITSTAFKHNDRIPDKFTCKGQNVSPHLEWSNAPSDTKSFALIMDDPDAPVEIAPPHGIWDHWVIYNISASITKLSEGQIDSSIKILNNSWQEKKYGGPCPPAGKPHRYFFKLYALNDYLELDENASKPDLVLALQKHLLAEAALIGIYSI

SEQ ID NO: 7109 - protein, 483 aa, Streptomyces coelicolor A3(2)
MRHRLSELSELSDLSEPSERLPDELRVLNPATEEVVATVPAASAADVDAAVARAARAQTAWAALAPGDRARLLRRFAVTVDEHLEELARLEVRQAGHLLGNARWEAGNVRDLLDYAAGGVERLTGRQIPVAGGLDVTLLEPLGVVGVIAPWNFPMPIAAWATAPALAAGNAVLLKPAETTPLTALRLAELALVAGLPEDLFQVLPGHGPVAGDALVEHPDVAKIVFTGSTAVGRQVAAKGAALLKPVTLELGGKSPNIVFADADVEAAAAATPMSFLDNSGQDCCARTRILVQRSVHDRFLELLAPAIEAVRVGDPADESTEMGPLISRAQLERVRSHVPADAAGIRGRAPRGGPGFWFPPTVLTGVDAHARVAVEEVFGPVAVVLPFDDEADAVRLANATDYGLAGSLWTRDVGRALRVSGAVRAGNLSVNSHASVRYWTPFGGFKQSGIGRELGPDALTAFTETKNVFFSTTPSSTEGPAQ

SEQ ID NO: 7110 - protein, 453 aa, Pirellula sp. 1
MNSRSRTSTSKQPSPLLTGRRNSKDSIGSWKIHAFASLELSEPILMSIKRVGILTAGGLAPCLSSAIGALIEAYTEQAPEIEILCYRSGYKGLLLGDSFVVDAHSRKNAAILHQHGGSPIGNSRVKLTNVADCVKRGLVSEGQDPLQVAAERLQSDEVDVLHTIGGDDTNTTAADLAAYLAKHEYQLTVVGLPKTIDNDVIPIKQSLGAWTAAEEGAKFFENVVGEHNANPRMLIIHEVMGRNCGWLTAATAAKYRERLQKLNFLPEMGLSQERRDVHGVFVPEMSFDLEEEAKRLRAIMDEIDCVNIFISEGAGVDTIVKEMESRGESVPKDAFGHYKLDAVNPGKWFGKQFADMLGAEKTLVQKSGYFSRAAAANAEDIALIGRCAKKAVECAMQGIGGVVGEDEDQNNELRAIEFERIAGGKPFDINVEWFGDLLSQMGQPKGEVLETSH

SEQ ID NO: 7111 - protein, 132 aa, Ehrlichia canis str. Jake
MSTVDIDSLVEQICSLDLCKAAELVDKMEQKLGFPKGGLLTAVPAAGGGQAESSAAEEKTDFSVIFDSYAADKKISVIKAVRECTNLGLKEAKEFVEKEGAKELIEGKKYKKEEAEEIKKKLEDAGAKVIIK

SEQ ID NO: 7112 - protein, 332 aa, Glycine max
  misc_feature (89)..(89): Xaa can be any naturally occurring amino acid
  misc_feature (140)..(140): Xaa can be any naturally occurring amino acid
  misc_feature (166)..(166): Xaa can be any naturally occurring amino acid
TTLAPTPLPSLPHPSPDMDRRTGSTRNILFNKYEIGKLLGQGNFAKVYHGRNLSTNESVAIKVIKKERLQQKERLVKQIKREVSVMSLXCVTPTSSNKKRVMANKAKIFLVVEYVKGGELFAKVAKGKMKEDVARKYFQXQLISAVEFCHSRGVTHRDLKPENLLXDENEDLKVSDFGLSALPDQRRSDGMLLTPCGTPAYVAPEVLKKKGYDGSKADIWSCGVILFALLSGYLPFQGENVMRIYSKSFRADYAFPEWISPGAKNLISNLLVVDPQKRYSIPDIMKDPWFQIGFMRPIAFSMKESAVEDNIDFSGDDVSIITIRLGLDLLPM

SEQ ID NO: 7113 - protein, 365 aa, Phaeosphaeria nodorum
MPSHNIVVLAGDGVGPEVVAEAFKILKVVEKHTDNTFNFQEHLFGGCSIDAHNNPLTDEALAAAKGADAIILGAVGGPKWGTGKVRPEQGILKLRKELGTFGNLRPCFFASDSLVDSSPLKAENVRGVNFNIIRELTGGIYFGERKEDEGDGKAMDTEPYSVEEIERVVRLAGSLASAENPPVPVWSLDKANVLATSRLWRKTFERIMKDEYPHLKSGTHLIDSAAMLMIKNPRALNGVVVTSNLFGDIISDEASVIPGSLGLLPSASLGGIPDGKTKLNGIYEPIHGSAPDIAGQGIVNPIATILSISMMFKYSLCLPELALKIDEATKITIDKGVRTGDIGGTSKTAEVGDAIAAELETLLKK

SEQ ID NO: 7114 - protein, 252 aa, Prunus fruticosa
VDYKSEADVGNAIAEAIQSGLVKREELFITSKASNHGHVVEACKNSLKKLQLDYLDLYLVHYPLATKHNGVGATASLLDENKVLDIDVTVSLETTWHDMEKTVSLGLVRSIGLSNYELFLTRDCLSYAKIKPQVSQFETHPYFQRESLVRFCKKHGVIPMAHTPLGGATANVKAFGSISPLEDPVLLALAKKYQKSVAQIALRWNLERDTPVIPKSSKVERLKENLEVLNFKLEKEDIELINTIDKKSRTTL

SEQ ID NO: 7115 - protein, 319 aa, Burkholderia cepacia R18194
MPLNPKIAQVLDMIERAKRPSYHHQTPQQARAAYEKSAPILDVASAPMHSVEECVVPTRDGRTIGARLYLPVEPSLAEPLPALVYYHGGGFTVGSVDTHDALCRMFARDAQCAVLSVGYRLAPEHRFPTAVNDADDALQWLHREAATFGIDAARLAVGGDSAGGTLATVCAVLARDAGIRLALQMLIYPGVTGYQDTESHARLANGYLLTQDTIQWFFTQYVRDRADRDDWRFAPLDGTRDAPSFAGVAPAWIATAEYDPLSDEGAAYAEKLRAAGNVVTLVCYPGMIHEFFKMGGYVPEVRAAHADAVAALKAAFDDV

SEQ ID NO: 7116 - protein, 226 aa, uncultured bacterium
MAGVQLGAGCWICEYLSPWDVYAHGVAKTLVHRKTKFQEMHIIETGTFGKALILDGFWQSCTGDEFLYHEPLVHPAMLLHGRPRRVLVLGGAEGAAVREVLRWKSVEQVVMVDIDGEVVEACRQHLPEMHQGACDDPRVEVRIQDALVYLDETRSTFDVIISDLSDPIEDGPSFKLFTRETFERARGSWRRRGCSSCKPAASRRPSCTCTPAWSARSDGCSPTPPH

SEQ ID NO: 7117 - protein, 502 aa, Delphinium grandiflorum
MSISLFLAGAAILFFVTHLLLSPTRTRKLPPGPKGWPVVGALPMLGNMPHVALANLSRRYGPIVYLKLGSRGMVVASTPDSARAFLKTQDLNFSNRPTDAGATHIAYNSQDMVFADYGPRWKLLRKLSSLHMLGGKAIEDWAVVRRDEVGYMVKAIYESSCAGEAVHVPDMLVFAMANMLGQVILSRRVFVTKGVESNEFKEMVIELMTSAGLFNVGDFIPSIAWMDLQGIVRGMKRLHNKFDALLDKILREHTATRSERKGKPDLVDVLMDNRDNKSEQERLTDTNIKALLLNLFSAGTDTSSSTIEWALTEMIKNPSIFRRAHAEMDQVIGRNRRLEESDIPKLPYLQAVCKETFRKHPSTPLNLPRVAIEPCEVEGYHIPKGTRLSVNIWAIGRDPNVWENPLEFNPDRFLTGKMAKIDPRGNNSELIPFGAGRRICAGTRMGIVLVEYILGTLVHAFEWKLRDGEMLNMEETFGIALQKAVPLAAVVTPRLPPSAYVV

SEQ ID NO: 7118 - protein, 468 aa, Oryza sativa (japonica cultivar-group)
MAIFLSIVLLSMAQLPSLVAGTGRPRVIIIGAGISGISAGKRLSEAGITDILILEATDHIGGRMHKQRFAGVNVEIGANWVEGVNGEKMNPIWPIVNSTLKLRNFLSDFDSLAQNVYKDGGLCDAAYVQKRIDLADEADKSGENLSATLHPSGRDDMSILSMQRLNNHLPNGPSSPVDMVVDYFTYDYEFAEPPRVTSLRNTVPLPTFTDFGDDNYFVADQRGYEAVVYYLAGQYLEADKSGNIVDARLQLNKVVREISYSSTGVTVKTEDNSTYQADYVMVSASLGVLQSDLIQFKPQLPSWKILAIYQFDMAVYTKIFVKFPKKFWPEGAGREFFLYASTRRGYYGVWQEFEKQYPDANVLLVTVTDEESRRIEQQPDSQTKAEIMEVVRSMFPDEDVPDATDILVPRWWSDRFFQGSFSNWPIGVSRYEHDQLRAPVGRVYFTGEHTSERYNGYVHGAYLAGIYA

SEQ ID NO: 7119 - protein, 443 aa, Botryotinia fuckeliana
GWKRAYPSSVMARKLFNLIKEREANGKPIHTMGAIDPVQMTQQAANQEVLYISGWAYSSVLTTTNEVSPDFGDYPYNTVPNQVQRLAKAQSMHDRKQWDARRKLSKEERAKTPYTDYLRPIIADGDTGHGGLSAVLKLAKLFAENGAAAVHFEDQMHGGKKCGHLAGKVLVPVGEHINRLVAARFQWDVMGSENLVIARTDSESGKLLSSAIDVRDHEFIKGVAEDGIESLAETLQAMELAGATGADIDIFEAEWVKKTELMTCDEAVVKQLKEQGVSESSINGYLEATKKDRDMSITKRKDLATKYSKTPIIFNIDIPRTREGFYHYKAGMEAATKRAIQYAPYADLLWVETGDPNVENAAKFSGEIRAKYPGKGLVYNLSPSFNWMGHGFTDETLKSFIWDIAKHGFVLQLISLAGLHSTATITSELSKAFKDEGTLASNR

SEQ ID NO: 7120 - protein, 562 aa, Glycine max
MAPSTTVPNGTLPSGSVTGRLASVYSEVQKTRVDHALPLPSVLKHPFTILHGPPSSAAGNPDEIAKLFPHLFGQPSAALARSDAAQTQKKLKIGVVLSGGQAPGGHNVISGIFDYLQERAPGSTLYGFKGGPAGIMKCKYVELTSEYIYPYRNQGGFDMICSGRDKIETPEQFKQAEETAKKLDLDGLVVIGGDDSNTNACLLAENFRSKNLKTSVIGCPKTIDGDLKCKEVPTSFGFDTACKIYSEMIGNVMIDARSTGKYYHFVRLMGRAASHITLECALQTHPNITIIGEEVAAKKLTLKNVTDYIVDVVCKRAEINYNYGVILIPEGLIDFIPEVQHLIAELNEILAHDTVDEGGLWKKKLTDQSLKLFDFLPQAIQEQLMLERDPHGNVQVAKIETEKMLIQMVETELEKRKQEGKYKGEFKGQSHFFGYEGRCGLPTNFDATYCYALGYGAGALLHSGKTGLISSVGNLCAPVKEWTVGGTALTSMMDVERRHGKFKPVIKKAMVELEGAPFKKFASLRDEWALKNCYISPGPIQFSGPGSEVINHTLLLELEAQA

SEQ ID NO: 7121 - protein, 57 aa, Zea mays
MKEGTANCVDILIAIILPPLGVFLKFGCKVEFWLCLLLTFLAYLPGIIYAIYAITKD

SEQ ID NO: 7122 - protein, 217 aa, Volvox carteri
MARIPGRPDYDALIKLLLVGDSGVGKSCLLLRFTDDMFTSSFITTIGIDFKIKKVDVDGKLVKLQIWDTAGQERFRTITSAYYRGAQGIILVYDITDEASFNNVRNWMRNIEQHASDNVNKILVGNKLDLAEDKRVVSIARGQALADEFGFRFYETSAKDNVHVEEAFIAVAKDVLARMEGEHANQQLLQQQQLSAAQPVRLTSGSPSPAQGKSCCR

SEQ ID NO: 7123 - protein, 480 aa, Zea mays
  misc_feature (239)..(239): Xaa can be any naturally occurring amino acid
SVPPRLLHGKSSRAYGSIWESTVRNVKFVSDKTVKPVYIITPTEAAHIQATVACGRKHGLRVRVRSGGHDYEGLSYRSAKPETFAVVDLSMMRQVRIDGKAATAWVDSGAQLGELYYAVAKMTPSLGFPAGVCATIGVGGHFSGGGFGMLLRKYGTAGDNVIDAKVVDANGTLLDRKSMGEDYFWAIRGGGGESFGIVVSWQVQLVPVPPKVTVFQIHGGGVKDGAIDLINKWQQVAPXLPDDLMIRIMAMEQDAMFEALYLGTCKDLLPLMASRFPELGVKQEDCNEMPWIQSVAFIPMGKSATVMDLLNRTSNIKAFGKYKSDYVKDPIPRDVWEKIYTWLAKPGAGVMIMDPYGARISSIPQDATPFPHRQGVLFNIQYVSYWFGEGDGAAPTQWSRDMYAFMEPYLSKNPRQAYANYRDLDLGVNEVVGDVSTYDSGRVWGEKYYNGNFERLARTKAKVDPCDYFRNEQSIPPLLK

SEQ ID NO: 7124 - protein, 181 aa, Brassica napus
MASSMLSSAAVATSPAQATMVAPFTGLKSSAAFPVTRKSNTDITSIASNGGRVSCMKVWPPVGKKKFETLSYLPDLTDVELAKEVDYLLRNKWIPCVEFELEHGFVYREHGSTPGYYDGRYWTMWKLPLFGCTDSAQVLKEVQECKTEYPNAFIRIIGFDNNRQVQCISFIAYKPPSFTGA

SEQ ID NO: 7125 - protein, 461 aa, Erwinia amylovora
  misc_feature (7)..(7): Xaa can be any naturally occurring amino acid
  misc_feature (11)..(11): Xaa can be any naturally occurring amino acid
  misc_feature (16)..(18): Xaa can be any naturally occurring amino acid
  misc_feature (20)..(20): Xaa can be any naturally occurring amino acid
  misc_feature (23)..(23): Xaa can be any naturally occurring amino acid
  misc_feature (25)..(25): Xaa can be any naturally occurring amino acid
  misc_feature (27)..(27): Xaa can be any naturally occurring amino acid
  misc_feature (30)..(30): Xaa can be any naturally occurring amino acid
  misc_feature (36)..(36): Xaa can be any naturally occurring amino acid
  misc_feature (47)..(47): Xaa can be any naturally occurring amino acid
  misc_feature (437)..(437): Xaa can be any naturally occurring amino acid
MKNVSSXVAVXRNPAXXXVXARXPXAXIDXVARALXLTHGAFQDWRXSVMSDRVRLLRNVAGALRQQARELAEMMTSEMGKPVDQGLAEVEKSARLCEWYAEHGPAFLQREPTLVEGNKAFVDYLPLGPVLSVMPWNFPVWQVLRGAVPILLAGNSYLLKPAPNVMGCALLLQQILSRAGVPQGLFAVVNADNDGVAQAINDRRIAAVTVTGSVRAGAAIAALSGAAIKKCVLELGGSDAFIVLAEADIDAAVKGAIAGRFMNNGQLCISAKRIIVEAAVFETFRDKFVCAVREMKIGDPRESGTWIGPMARYDLRDELDAQVQATLKEGATLLLGGHVLPGEGNYYAPTVLSDVKPGMTSFVQELFGPVASLIMADDAGHAVAMANDSEFGLGGSLWSRDLAVAQKLASRIETGSVFINSPSFSDPRVPIGGVKKXGFGRELSHFGLREFTNAQTVWMEG

SEQ ID NO: 7126 - protein, 148 aa, Novosphingobium aromaticivorans DSM 12444
MRIASEHAKTIVKATAPAIEKHGVDITTAMYKRLFQNDEVKAMFDQAAQDSGEQPRRLAGAILAYAKNIDKLENLGSAVQRMVQRHVDTGVKAEHYPYVAEALLPAIRDVLGAEVATDEVLAAWGEAYWMLADILIAAEKQAYLEAVA

SEQ ID NO: 7127 - protein, 396 aa, Salmonella typhimurium LT2
MLDAQTIATVKATIPLLVETGPKLTAHFYDRMFTHNPELKEIFNMSNQRNGDQREALFNAIAAYASNIENLPALLPAVEKIAQKHTSFQIKPEQYNIVGTHLLATLDEMFNPGQEVLDAWGKAYGVLANVFIHREAEIYHENASKDGGWEGTRPFRIVAKTPRSALITSFEFEPVDGGTVAEYRPGQYLGVWLKPEGFAHQEIRQYSLTRKPDGKGYRIAVKREDGGQVSNWLHHHASVGDGVHLAAPAGDFFMNVAADTPVSLISAGVGQTPMLAMLDTLAKEQHTAQVNWFHAAENGDVHAFADEVSELGRTLPRFTAHTWYREPTESDRAQRLFDSEGLMDLSKLEAAISDPAMQFYLCGPVGFMQFAAKQLVSLGVNNENIHYECFGPHKVL

SEQ ID NO: 7128 - protein, 486 aa, Pseudomonas putida
MKEFLNFINGEYVRNASGKTFQDINPVNGQVIGNIYEAGQVEVDAAVAAARAALKGDWGRLSVAERCKLLDAVAGEINRRFDDFLQAEIADTGKPHHLASHVDIPRGAANFQIFIDTIKSTATESFNMRTPDGKTALSYGVRVPRGVIAVVCPWNLPLLLMTWKVGPALACGNTVVVKPSEETPATATLLGEVMNAVGMPKGVYNVVHGFGPASAGEFLTKHPGVNGITFTGETRTGTAIMKAAADGVRPVSLEMGGKNAAVVFADCDFQVTIDTLTRSCFENAGQVCLGTERVYVERPIFDKVVAALKERAEAMKPGLPFDHDTRIGPLISKKHQAKVLGLYKTAKDEGATIVTGGGIPDMPEELKNGSWVQPTIWTGLPETATVVTEEIFGPCCHISPFDSEEEVLGKVNANRYGLATAIFTQDIARANRLAHQIEVGLCWINAWFLRDLRTPFGGSKQSGIGREGGVHSLEFYTELRNVMVKF

SEQ ID NO: 7129 - protein, 176 aa, Triticum aestivum
  misc_feature (9)..(9): Xaa can be any naturally occurring amino acid
  misc_feature (79)..(79): Xaa can be any naturally occurring amino acid
  misc_feature (87)..(87): Xaa can be any naturally occurring amino acid
  misc_feature (108)..(108): Xaa can be any naturally occurring amino acid
QPGRPLMAXSATSLAPFQGLKSPAGFPVKRRSKGGSLGRVRNGGRIRCMQVWPIEGIKKFETLFYLPPLSTEALLKQVXYLIRSKWXPCLEFSKVGFIFREHNGSPGXYDGRYWTMWKLPMFGCTDATQVINEVEEVKEEYPDGYVRIIGFDNMPQVQWVSFIAFKPPGCEESGKA

SEQ ID NO: 7130 - protein, 600 aa, Glycine max
MWKVVRFAAARSRRFSTAIPGPCKVHKRGTDILHDPWFNKDTGFPLTERDRLGLRGLLPPRVISFEHQYDRFMNSYRSLEKNTQGQSDRFVSLSKWRILNRLHDRNETLYYRVLIDNIKEFAPIIYTPTVGLVCENYSGLFRRPRGMYFSAKDKGEMMSMIYNWPSDQVDMIVLTDGSRILGLGDLGVQGIGIPIGKLDMYVAAAGINPQKILPVMLDVGTNNQKLLEDPLYLGVRQPRLEGEEYLLIVDEFMEAVHARWPKAIVQFEDFQMKWAFETLKRYRERFCMFNDDIQGTAGVALAGLLGTVRSQGQPLSDFLKQKIVVVGAGSAGLGVLSMAVQAVSRMSGGSGTDANSQFFLIDKDGLVTTERSNLDPAAVPFAKNPRDLEGLSEGASIIEVVKKVKPHVLLGLSGVGGVFNTEVLKAMRESVSTKPAIFAMSNPTMNAECTAIEAFSHAGENIVFASGSPFENVDLGNGEVGHVNQANNMYLFPGIGLGTLLSGARHITDGMLRAAAECLASYMTEDDVRKGILYPSIDCIRDVTAEVGAAVVCAAVAEKQAEGHGDVGFKELENMSKEETVEYVRGNMWYPEYCPLVHEK

SEQ ID NO: 7131 - protein, 201 aa, Pseudomonas fluorescens PfO-1
MPPRSDVLAPTASISRAQREARNGHRGTAMLLTGLPAAGKSTLAQALHAELFSRGLQSVVLDGDGLRVGLNRDLGFTDADRLENIRRASELAALLVENGQIVILAMIAPLAELREVFARRLGEDYREVWCSAALAVCEQRDPKGHYARARRGELAGFTGVSAPYEAPAQASLVLDTGTLTVEACLDRLLTWLGESAVLPKA

SEQ ID NO: 7132 - protein, 129 aa, Triticum aestivum
  misc_feature (55)..(55): Xaa can be any naturally occurring amino acid
  misc_feature (71)..(71): Xaa can be any naturally occurring amino acid
  misc_feature (79)..(79): Xaa can be any naturally occurring amino acid
  misc_feature (100)..(101): Xaa can be any naturally occurring amino acid
  misc_feature (108)..(108): Xaa can be any naturally occurring amino acid
  misc_feature (116)..(116): Xaa can be any naturally occurring amino acid
  misc_feature (120)..(120): Xaa can be any naturally occurring amino acid
MDAAAAAVTTLSALAVFASTLHQGAVRSVHGYRVVAMGGRCAWDRWVEREVRLLXPPPGREVPLPAAAPRXILPVEWRXRPGYREGASCWGALGAGVPGXXIPIRRPXAVSGPKPXPRFXWPPSGEPGG

SEQ ID NO: 7133 - protein, 229 aa, Thermococcus kodakaraensis
MNVEEMKKAVAKEALKFIEDEMVVGLGTGSTTAYFINYLGKLLMEGELEDVYGVPTSHQARLLALEAGIPVVSLDEVDAIDIAVDGADEVDPHMNLIKGRGAALTMEKIIEYRAGMFIVLVDESKLVEYLGQKMPVPIEVIPAAWRAIAEELEVFNATAELRMAVKKDGPVVTDNGNFILDAKFARIEDPLDLEIELNTIPGVVENGIFADIADIILVGTPEGVKRMER

SEQ ID NO: 7134 - protein, 304 aa, Glycine max
MALNYNIALAFSAVLTLLLFPLPTVGELVEEQPLVLKYHNGQLLKGRITVNLIWYGTFTPIQRSIIVDFINSLSSAPNAPLPSTATWWKTTEKYKVGGGSSALVVGKQFLHSAYSLGKNLKGKDVLALASKFNELKSITVVLTAKDVAVEGFCMSRCGTHGSTRNVKNAARTAYIWVGNSETQCPGQCAWPFHQPIYGPQTPPLVAPNGDVGVDGMVINLATLLAGTVTNPFNNGYFQGPPTAPLEAVSACTGVFGSGSYPGYPGRVLVDKATGASYNAHGANGRRYLVPAMWDPQTSTCKTLV

SEQ ID NO: 7135 - protein, 425 aa, Thermococcus kodakaraensis
MNPLEFHRDNFPGNGKIEVIPKVPVNRETLSLAYTPGVAEPSKAIANGADPDEYTVIPNTVAVVTDGSAILGLGDIGPVAGMPVMEGKAVLFKALAGVDAFPILINTKDVDEIVRTVELISPGFGGINLEDISAPRCFEIEERLRERLDIPVFHDDQHGTAVVTLAGLINALKLVGKKFSEIKVAISGAGAAGIAIAKILHSVGVKEIVTVDRKGIIHEGREDLNPYKREVAEYNVHGIEGGLKEAMEGADVFIGVSAGGIVTPDMVRAMADDAIVFAMANPIPEIMPEEAKRAGARIVATGRSDFPNQINNVLGFPGIFRGALDVKAEDITPSMKLAAAEAIASVVSDDELGEDYIIPSPLHPDVFPKEARAVAEVAMKEGVAGRKVSGEWVEEHTRRLREFYSAFIEPLNEKRKTFSGRGSSP

SEQ ID NO: 7136 - protein, 663 aa, Zea mays
MISARTAAASPASLWKQGGRSEGGGSCDGCRTYRNTLRRAAAAKVRALPSRAVEAVKMGSAAEMEQEEAEVAAAAAGVVVEDHYGEDSATEELPILPWAFSVARYVSFSWLKKYAEESYFYISGYTLLRDPHHNKGLAFMEKERDAHHLRGLLPPAVVPQELQIKKIMHNLRQYQVPLQRYMAMMDLQERNERLFYKLLIDNVEELLPVVYTPTVGEACQKYGSIFRQPQGLYVSLRDKGKVLEVLRNWPHRNIQVICVTDGEAILGLGDLGSQGMGIPVGKLALYTALGGVRPSACLPITIDVGTNNEKLLNDEFYIGLRQKRATGEEYHELMEEFMAAVKQIYGEKVLIQFEDFANHNAFNLLAKYSKSHLVFNDDIQGTASVVLAGLLAALKVVGGTLAEHTYLFLGAGEAGTGIAELIALEISKQTSAPIEECRKKIWLVDSKGLIVDSRKNSVQSFKKPWAHEHEPLTTLYDAVQSIKPTVLIGTSGVGRTFTKEVVEAMASFNERPIIFSLSNPTSHSECTAEEAYNWTQGRAIFASGSPFDPVEYDGKVFVPGQSNNAYIFPGFGLGLVISGAIRVHEDMLLAASEALAAQATQENFDKGSIFPPFTNIRKISARIAAAVAAKAYELGLATRLPPPRDLVKYAQSCMYTPVYRNYR

SEQ ID NO: 7137 - protein, 479 aa, Mesorhizobium loti MAFF303099
MKSMSLTTLDRGKTTVDAATIETLSAQLRGTLLQQGDAAYNEARTVWNATVDRRPGLIVCCVGASDVIRAVNFARENRLLVSVRGGGHNIAGSAVCDGGLMIDLSPMKSVRVDPVARRAWVGPGATLADVDRETQAFGLAVPTGINSTTGISGLTLGGGFGWITRKFGLTIDNLVSADVVTADGKLLRASQTENPDLFWALRGGGGNFGIVTAFEFQLHQMGPQVLSGLVVHPFADAEKVLEEYRNALETAPDELTCWVVMRQAPPLPFLPAEWHGKDVLVLAMCYCGDLQAGEKATKKLRAIGSPIADVVGPNPFTGWQQAFDPLLAPGARNYWKSHDFTELSDRAAEIVTEAIRELPGPECEIFIGHVGGAAGRVAQNATAFPQRSSHFVMNVHARWRDPAMDRACIGWARGLYEAAKPYAAGTAYVNFMPEDEVDRVEAAYGGNYQRLLEIKQRYDPLNLFRMNQNLRPKQSQRAA

SEQ ID NO: 7138 - protein, 581 aa, Zea mays
MGNTCIGPSAPSDRHSFFNTVSLAVLWRTPAAADPAEPSPTAEPSSSTPCSPPSRAPNPVTISDSEHPPHSTSTALGPAAPPNPNGKPKPKPKVKRVQSAGLLAGSVLKRDSERLKDVYTLGKKLGQGQFGTTYQCVEKATGKHFACKSIAKRKLVTDEDVEDVRREIQIMHHLAGHPNVVSIVGAYEDAVAVHLVMELCAGGELFDRIIQRGHYSEKAAAQLARVIIGVVEACHSLGVMHRDLKPENFLFVNQKEDAPLKAIDFGLSIFFKPGEIFSDVVGSPYYVAPEVLKKRYGCEVDVWSAGVIIYILLSGVPPFWAESEQGIFKQVLKGGLDFSSDPWPSISESAKDLVRKMLNRDPRKRLTAHDALCHPWVCVDGVAPDKPLDSAVLTRLKQFSAMNKLKKMALRVIAENLSEDEIAGLKEMFKMLDTDNSGQITLEELKIGLKRVGANLKDSEITTLMEAADIDNSGSIDYGEFLAATLHLNKVEREDNLFAAFSYFDKDGSGYITHDELQKACEEFGIEDAHLEDIIHDVDQDNDGRIDYNEFVTMMQKGNNPLGKKGHCQMSFGLREALKLG

SEQ ID NO: 7139 - protein, 136 aa, Glycine max
HASDHAYGCELRRRSKWLPSMISSPAVTTVNRAGAGMVAPFTGLKSMAGFPTTKTNNDITSIASNSGRVPCMQVWPPACTKNFETLSYLPYLDDAQLAKAVVYLPKKAWISCWAFELEHVYLYREHIMSPGYYYGR

SEQ ID NO: 7140 - protein, 72 aa, Glycine max
SSSQVLRTRNRAGAGMGAPFTGLKSMAGLKTRKTNDDITYIASNGCRVQCMHETTPIGMKNLETLDYLPDDL

SEQ ID NO: 7141 - protein, 155 aa, Mesorhizobium loti MAFF303099
MKARFCAALLVLMLALGFAGTALAVKPDEMLADPALEARARALSEGLRCMVCQNQSIDESDADLARDLRILVRQRLVAGDTDQQVMDYVVSRYGEFVLLKPRFDLRNALLWGTPVLLLLVGGVFIVLTARSRRTLATKTLSADEQAALDAILHRD

SEQ ID NO: 7142 - protein, 278 aa, Zea mays
  misc_feature (24)..(24): Xaa can be any naturally occurring amino acid
  misc_feature (48)..(48): Xaa can be any naturally occurring amino acid
  misc_feature (197)..(197): Xaa can be any naturally occurring amino acid
  misc_feature (212)..(212): Xaa can be any naturally occurring amino acid
GCGTHKAPINGNFVDSASGKTFPXLDPRTGEVIAHVAEGDAEDINRAXIEVPMVARLMRYYAGWADKIHGLIVPADGPHHVQILHEPIGVAGQIIPWNFPLLMYAWKVGPALACGNTLVLKTAEQTPLSALYISKLLHEAGLPEGVVNVVSGFGPTAGAALASHMDVDKIAFTGSTDTGKIILELAAKSNLKTVTLXELGGKSPFIIMDDAXDVDLAVELAHFALFFNQGQCCCAGSRTFVHERVYDEFVEKAKARALKRVVGDPFRKGVEQGPQVHL

SEQ ID NO: 7143 - protein, 117 aa, Brassica napus
MAQCIDGFKHLCTSVLGCFDLDLYKQPGGLGDPELLARDTVFSVSEIEALYELFKKISSAVIDDGLINKEEFQLALFKTNKKESLFADRVFDLFDTKHNGILGFEEFARALSVFHPN

SEQ ID NO: 7144 - protein, 168 aa, Xylella fastidiosa Temecula1
MSSIYTFTFTRLDGRPQALADWRGQVLLLVNVASRCGFTPQYAGLEMLWQRYRDAGLIVIGFPCDQFAGQEPGDEAKIAEFCTLTYGVDFPMAAKIKVNGADAHPLWQWLKHRRRGLFGVAAIKWNFTKFLIGRNGQPIARYSPIKSPEQLEVHIVRALGEEGGGNTH

SEQ ID NO: 7145 - protein, 368 aa, Glycine max
  misc_feature (119)..(119): Xaa can be any naturally occurring amino acid
MPGHRSKSEKHDVDGGGGEKQLRRDPYEVLGVSRNSTDQEIKTAYRKMALKYHPDKNANDPKAADMFKEVTFSYNILSDPDKRRQYDSAGFEAVESDNQELELDLSSLGAVNTMFAALXFPIKTTVSATVLEEALNGLVTIRPLPLGHNIAKRVEKQCAHFYSVTITEEEAQAGFVCRVQSPDKSKFKLLYFDQEDNSGLSLALQEDSAKTGKVTSAGMYFLGFPVYRLDQTMNSIAAAKDPDTSFFRKLDAFQPCELTELKAGTHVFAVYGDNFFKSANYTIEALCAAPFSEEKENLRNIEAQILSKRAEISKFEAEYREVLAQFSDMTNRYAHEMQAIDELLKNRNEIQASYTSAPLKRTTSRSKK

SEQ ID NO: 7146 - protein, 218 aa, Bacteroides thetaiotaomicron VPI-5482
MKFFIDTANLEQIQEAYDLGVLDGVTTNPSLMAKEGIKGTENQREHYIKICKIVNADVSAEVIATDYEGMIREGEELAALNPHIVVKVPCIADGIKAIKYFTEKGIRTNCTLVFSVGQALLAAKAGATYVSPFVGRLDDICEDGVGLVGDIVRMYRTYDYKTQVLAASIRNTKHIIECVEVGADVATCPLSAIKGLLNHPLTDSGLKKFLEDYKKVNG

SEQ ID NO: 7147 - protein, 254 aa, Oryza sativa (japonica cultivar-group)
MEAGYPGTAANGAAADGNGGAQQAAAAPAIREQDRLMPIANVIRIMRRVLPAHAKISDDAKETIQECVSEYISFITGEANERCQREQRKTITAEDVLWAMSRLGFDDYVEPLGVYLHRYREFEGESRGVGVGVGAARGDHHHGHVGGMLKSRAQGSMVTHHDMQMHAAMYGGGAVPPPPHPPPHHHAFHQLMPPHHGQYAPPYDMYGGEHGMAAYYGGMYAPGSGGDGSGSSGSGGAGTPQTVNFEHQHPFGYK

SEQ ID NO: 7148 - protein, 435 aa, Rickettsia conorii str. Malish 7
MTNENNNDSEFAELKIRGKIFKLPILKASIGEDVIDISRVSAEADCFTYDPGFMSTASCQSTITYIDGDKGILRHRGYDIKDLAEKSDFLEVAYLLIYGELPSGEQYNNFTKQVAHHSLVNERLHYLFQTFCSSSHPMAIMLAAVGSLSAFYPDLLNFKEADYELTAIRMIAKIPTIAAMSYKYSIGQPFIYPDNSLDFTENFLHMMFATPCTKYTVNPIIKNALNKIFILHADHEQNASTSTVRIAGSSGANPFACISTGIASLWGPAHGGANEAVINMIKEIGSSEYIPKYIAKAKDKNDPFRLMGFGHRVYKNYDPRAAVLKETCKEVLKELGQLDNNPFLQIAIELEAIALKDEYFIERKLYPNVDFYSGIIYKAMGIPSQMFTVLFAIARTVGWMAQWKEMHEDPEQKISRPRQLYTGYVHREYKGIRER

SEQ ID NO: 7149 - protein, 363 aa, Candida milleri
MSTTKTIVVLPGDHVGTEITEEATKVLNAIAEKRPNIKFDFQHHLIGGAAIDATGVPLPDEALEASKKADAVLLGAVGGPKWGTGDVRPEQGLLKIRKELGLYANLRPCNFAFDSLLDMSPLKPEYARGTDFTVVRELVCGIYFGKRKEDTGDGVTWDSEQYSVPEVQRITRMAASLALQHNPPLPIWSLDKANVLASSRLWRKTVEETIKNEFPTLSVQHQLIDSAAMILVKNPTKLNGLVITSNMFGDIISDEASVIPGSLGLLPSASLASPPDTNKAFGLYEPCHGSAPDLPKGKVNPVATILSVAMMLKLSLDMVEEGIAVEKAVRKVIDNGIRTADLRGTNSTTEVGDAIAAAVKEFL

SEQ ID NO: 7150 - protein, 427 aa, Coxiella burnetii
MTELTGVSIVTYQHIKVPSQGEKITVNKAVLVVPDRPIIPFIEGDGIGIDIAPVMKNVVDAAVEKSYAGKRKIEWMEIYAGEKATKVYGKDNWLPDETLEAIKEYQVAIKGPLTTPVGGGIRSLNVALRQQLDLYVCLRPVRYFTGVPSPVKTPEKVNMVIFRENSEDIYAGIEWPAGSPEAVKLINFLQNEMGVKKIRFPETAGIGIKPVSKEGTSRLVRRAIQYAIDNDRDSVTLVHKGNIMKFTEGAFKDWGYEVAVKEFGAKPLDGGPWHVFENPKTGQKITIKDVIADAFLQQILLRPAEYSVIATLNLNGDYISDALAAEVGGIGIAPGANLSDTVGLFEATHGTAPKYAGQDKVNPGSLILSAEMMLRYLGWKEAADLVVQGIEGAIESKTVTYDFARLMTGAKEVSTSQFGKAIIKHIL

SEQ ID NO: 7151 - protein, 471 aa, Bacillus megaterium
TIKEMPQPKTFGELKNLPLLNTDKPVQALMKIADELGEIFKFEAPGRVTRYLSSQRLIKEACDESRFDKNLSQALKFVRDFAGDGLFTSWTHEKNWKKAHNILLPSFSQQAMKGYHAMMVDIAVQLVQKWERLNADEHIEVPEDMTRLTLDTIGLCGFNYRFNSFYRDQPHPFITSMVRALDEAMNKLQRANPDDPAYDENKRQFQEDIKVMNDLVDKIIADRKASGEQSDDLLTHMLNGKDPETGEPLDDENIRYQIITFLIAGHETTSGLLSFALYFLVKNPHVLQKAAEEAARVLVDPVPSYKQVKQLKYVGMVLNEALRLWPTAPAFSLYAKEDTVLGGEYPLEKGDELMVLIPQLHRDKTIWGDDVEEFRPERFENPSAIPQHAFKPFGNGQRACIGQQFALHEATLVLGMMLKHFDFEDHTNYELDIKETLTLKPEGFVVKAKSKKIPLGGIPSPSTEQSAKKVR

SEQ ID NO: 7152 - protein, 440 aa, Zea mays
MSTTKVKRRVGKYELGRTIGEGTFAKVRFARDTVTGEAVAIKILDKEKVLRHKMVEQIKREISTMKLIKHPNVVRIYEVMGSKTKIYIVLEFATGGELFDTIVNHGRMREDEARRYFQQLINAVDYCHSRGVYHRDLKPENLLLDSYGNLKVSDFGLSALSQQIKDDGLLHTTCGTPNYVAPEVLEDQGYDGAMADLWSCGVILFVLLAGYLPFEDSNLMTLYKKISNAEFTFPPWTSFPAKRLLTRILDPNPMTRITIPEILEDEWFKKGYKRPEFDEQYDTTLDDVDAVFNDSEEHHVTEKKEEEPVALNAFELISMSAGLNLGNLFDSEQEFKRETRFTSKCPPKEIVRKIEEAAKPLGFDVQKKNYKLRLEKVKAGRKGNLNVATEILQVAPSLHMVEVRKAKGDTLEFHKFYKNLSKTLKDVVWKSDDLQTQHAS

SEQ ID NO: 7153 - protein, 238 aa, Oryza sativa (japonica cultivar-group)
MGEEAPEEYELGGGEDERVMEWETGLPGADELTPLSQPLVPAGLAAAFRIPPEPGRTLLDVHRASAATVSRLRRASSSSSSSFPAFASKGAGTGADEAESGGGADGGNGNTNNSSSKRARLVWTPQLHKRFVEVVAHLGMKNAVPKTIMQLMNVEGLTRENVASHLQKYRLYVKRMQGLSNEGPSPSDHIFASTPVPHASLHDQVPSPYHPHPHHHSYNNAAYAATVSSYHHYHHANH

SEQ ID NO: 7154 - protein, 427 aa, Coxiella burnetii
MTELTGVSIVTYQHIKVPSQGEKITVNKAVLEVPDRPIIPFIEGDGIGIDIAPVMKNVVDAAVEKSYAGKRKIEWMEIYAGEKATKVYGKDNWLPDETLEAIKEYQVAIKGPLTTPVGGGIRSLNVALRQQLDLYVCLRPVRYFTGVPSPVKTPEKVNMVIFRENSEDIYAGIEWPAGSPEAVKLINFLQNEMGVKKIRFPETAGIGIKPVSKEGTSRLVRRAIQYAIDNDRDSVTLVHKGNIMKFTEGAFKDWGYEVAVKEFGAKPLDGGPWHVFENPKTGQKITIKDVIADAFLQQILLRPAEYSVIATLNLNGDYISDALAAEVGGIGIAPGANLSDTVGLFEATHGTAPKYAGQDKVNPGSLILSAEMMLRYLGRKEAADLVVQGIEGAIESKTVTYDFARLMTGAKEVSTSQFGKAIIKHIL

SEQ ID NO: 7155 - protein, 471 aa, Bacillus megaterium
TIKEMPQPKTFGELKNLPLLNTDKPVQALMKIADELGEIFKFEAPGRVTRYLSSQRLIKEACDESRFDKNLSQALKFVRDFAGDGLFTSWTHEKNWKKAHNILLPSFSQQAMKGYHAMMVDIAVQLVQKWERLNADEHIEVPEDMTRLTLDTIGLCGFNYRFNSFYRDQPHPFITSMVRALDEAMNKLQRANPDDPAYDENKRQFQEDIKVMNDLVDKIIADRKASGEQSDDLLTHMLNGKDPETGEPLDDENIRYQIITFLIAGHEATSGLLSFALYFLVKNPHVLQKAAEEAARVLVDPVPSYKQVKQLKYVGMVLNEALRLWPTAPAFSLYAKEDTVLGGEYPLEKGDELMVLIPQLHRDKTIWGDDVEEFRPERFENPSAIPQHAFKPFGNGQRACIGQQFALHEATLVLGMMLKHFDFEDHTNYELDIKETLTLKPEGFVVKAKSKKIPLGGIPSPSTEQSAKKVR

SEQ ID NO: 7156 - protein, 71 aa, Triticum aestivum
MASRSCTFLEILLAIILPPLGVFLHYGCCSMEFCICLLLTILGYIPGIIYAVYMLVALGSEERDRDYNTLA

SEQ ID NO: 7157 - protein, 88 aa, Brassica napus
MRVHDQRLRFDVTPKPMGLTGSSFITARSIAVLLFVSLSLLILPPFLPPLPPPPATFLLLPLILMILLIFLAFSPSNEPSLAVESLYP

SEQ ID NO: 7158 - protein, 371 aa, Triticum aestivum
  misc_feature (211)..(211): Xaa can be any naturally occurring amino acid
  misc_feature (277)..(277): Xaa can be any naturally occurring amino acid
  misc_feature (311)..(311): Xaa can be any naturally occurring amino acid
  misc_feature (316)..(316): Xaa can be any naturally occurring amino acid
  misc_feature (338)..(338): Xaa can be any naturally occurring amino acid
  misc_feature (359)..(359): Xaa can be any naturally occurring amino acid
YNKFVQKSRLVPVRNSRDIVDPRVRGRVGNRAARKGAPTTPLITIAMTKIVASVFEKNNLPSAIFTAFCGGAEIGQAIALDTRIPLVSFTGSTKVGQMVQQQVSARFGKCLLELSGNNAIIVMDDADIPLAVRSVLFAAVGTAGQRCTTCRRLLLHESIYQTFLDQLVEVYKQVRIGDPMEKGTLLGPLHTTTSKESFLKGIQTIQSQGGXILLGGSAIESEGNFVQPTIVEISPAAPVVREELFGPVLYAMKFLALNNPDLCVIHLLYMALISLSXAYVPWLSIILQTLKEAIEINNSVPQGLSSSIFTXEPDAXFKWIGPHGSDCGIVNVNIPTNXAEIGGALGGKKATGGGQEQEXPWKQYMRRATVN

SEQ ID NO: 7159 - protein, 272 aa, Thellungiella halophila
MATQPPSSSSAREEFVYMAKLAEQAERYEEMVEFMEKVAKAVDKEELTVEERNLLSVAYKNVIGARRASWRIISSIEQKEESRGNNDHVSLIRDYRTKIETELSGICDGILKLLDTMLIPAAASGDSKVFYLKMKGDYHRYLAEFKTSQERKDAAEHTLNAYKAAQDIANAELAPTHPIRLGLALNFSVFYYEILNSPDRACNLAKQAFDDAIAELDTLGEESYKDSTLIMQLLRDNLTLWTSDMQDDDDVIKEAAAAAPAAPKPAEEQQQS

SEQ ID NO: 7160 - protein, 258 aa, Triticum aestivum
  misc_feature (242)..(242): Xaa can be any naturally occurring amino acid
MSATCAADLAPLLGAAAMNATDYLCNRFADTTSAVDSTYLLFSAYLVFAMQLGFAMLCAGSVRAKNTMNIMLTNVLDAAAGALFYYLFGFAFAFGTPSNGFIGKHFFGLKDMPQTGFDYSFFLFQWAFAIAAAGITSGSIAERTQFVAYLIYSAFLTGFVYPVVSHWIWSVDGWASAARTSGPLLFKSGVIDFAGSGVVHMVGGIAGFWGALIEGPRIGRFDHAGRSVALKGHSASLVVLGXFLLWFGWYGSTGVLRH

SEQ ID NO: 7161 - protein, 526 aa, Glycine max
  misc_feature (122)..(122): Xaa can be any naturally occurring amino acid
  misc_feature (235)..(235): Xaa can be any naturally occurring amino acid
FGSRSLVSHLRLLVLLLSVSLGNSASLQENFVQCLNLNSDRTFPFNPLIYTPKSPSFTSVLDSSGKNQRLLVPSTPKPKFIFTPTRDSHVQAAVICSKKLGIHLRVLSGGHDFEGVSYVSEXQSPFIVVDLIKLRDINVDIKSNTAWVQAGATNGELYYRIYEKSSLHGFPAGTCTSLGIGGHITGGAYGSMVRKYGLGADNVLDAKIVDANGRILDRKAMGEDLFWAIRGGGGXGSFGILLWWKVKLVPVPPTVTVFTVKKTLEQGATKLLHRWQEVAPFLDENLFIRVRIQRAQSTVTTSYEGLFLGGARKLLKIMKTSFPELGVTRKDCMETSWIKSVLYIAGFPSGTPPEVLLKGKPIAKFFFKGKSDFVRKPIPETGLEGLRQRLLVEDSPLILWSPYGGRMNQFSESDTPFPYRNGTLFISLYISLWQEGEKNVAKHIDWIGNLHNYMGAYVPSFPRGQYVNYRDLDLGINTKNNTGNIQESAWGYRYFKNNFDRLVKIKTKVDPQNVFRHEQSIPPLPK

SEQ ID NO: 7162 - protein, 254 aa, Zea mays
MRKKLGTRFPAARIKKIMQADEDVGKIALAVPVLVSRALELFLQDLIDRTYEITLQSGAKTLNSFHLKQCVKRYSSFDFLTEVVSKVPDLGGADSCGDERVLPRRRKSNGSDPENDESRSSKMAIRNANISPRGRGRGRGRGRGRPPTKRKEVGYVQFEDESSMFAEQGEPLPGEETVQEINGNETMPQSTQPPVEAPPTALAQATTSSKAEEANSDHQSDWPMPDAIGSIGVVPSGFGHLTVQVEDEDYDNED

SEQ ID NO: 7163 - protein, 435 aa, Erwinia carotovora subsp. atroseptica SCRI1043
MTTSRTQQVQHIEKEWKTARWEGITRPYSAEDVINLRGSVNPECTLAQLGAARLWSLLHGEARKGYVNCLGALTGGQALQQAKAGIEAIYLSGWQVAADANLASSMYPDQSLYPANSVPAVIERINNTFRRADQIQWANHIEPGDKRHTDYFLPIVADAEAGFGGVLNAFELMKSMIEAGAAAVHFEDQLASAKKCGHMGGKVLVPTQEAVQKLVAARLAADVMGVPTLVVARTDADAADLMTSDCDEYDRDFITGERTVEGFYRTRAGIEQAISRGLAYAPYADLVWCETSTPDLSLARRFAEAIHAKFPGKLLAYNCSPSFNWKKNLDDSTIARFQDELSAMGYKYQFITLAGIHSMWFNMFDLAHAYAQGEGMRHYVEKVQQPEFEAIKDGYTFSSHQQEVGTGYFDKVTNIIQGGQSSVTALTGSTEEQQF

SEQ ID NO: 7164 - protein, 496 aa, Crocosphaera watsonii WH 8501
MRSLTYFGSLIKEQPLINDHCMYEKLTAPTTGSKITFEDGNPIVPNDPIIPFIRGDGTGIDIWPATEKVIDAAVKTAYGDSKKINWFKVYAGDEACDQYGTYQYLPEDTLTAIKEYGIAIKGPLTTPVGGGIRSLNVALRQIFELYACVRPCRYYPGTPSPHKSPEKLNVIVYRENTEDIYLGIEWTEGTEIAQKLINYLNNELIPATAEHGKKQIRIDSGIGVKPISKTGSQRLVRRAIEHALRLPKAKQMVTLVHKGNIMKYTEGAFRDWGYELATSEFRDVCVTERESWILSNKEGKADISIEDNARKVEPGYDSLTPEKKQEICDEVKGVIDAIWDSHGDGKWKEKIMVNDRIADSIFQQIQTRPDEYSILATMNLNGDYLSDAAAAVVGGLGMGPGANIGDTCAIFEATHGTAPKHAGLDRINPGSVILSGVMMLEYMGWQEAADLIKKGIGNAIANRQVTYDLARLMEPKVDPPLKCSEFAQAIIDYFND

SEQ ID NO: 7165 - protein, 498 aa, Rhodobacter sphaeroides 2.4.1
MTLLTTEDYKAIAAGLTLPTGAFIDGRFRPAQSGATFETRNPATGQLLAEVAACGPADVDLAVQKARDAFEDGRWSRLPPRARKEVLIRLAKLLKRHARELAVMESLDSGKTIYDCETVDLPETIHCLTWHAELIDKIYDQTAPASDDHLALVLREPVGVVGLVLPWNFPLLMLAWKIGPALAAGCSVIVKPAEETPLTALRVAELATEAGVPPGVFNVLPGHGPEVGEPIGRHMDIDAVSFTGSTETGRRFLRYAAESNLKEVTLEMGGKNPAVVLDDAENLDRVAAHVVTGAFWNMGENCSAASRLIVQSGVKEALIARILAHAREWPMGDPLDPANRVGALVSPAHLDKVRSYLAEGPTVLLGGKAHGAFVEPTILEITDREAAPAREEIFGPVLSVLTVESFDEAIALANDTPYGLAASIFTANVKKALRGARALRAGTVTVNSFGEGDITTPFGGFRQSGFGGRDNGIHAHDQYTQLKTIWIDLADDAAEAVS

SEQ ID NO: 7166 - protein, 86 aa, Glycine max
MASSMISSPAVTTVNRAGAGMVAPFTGLKSMAGFPTRNTNSDITCVASNGGRVRWVRVWPPIGEREWESVCSLPNVPDRAVRGDVQ

SEQ ID NO: 7167 - protein, 570 aa, Triticum aestivum
MWRHAAARRSAQIRRLLSTSAPSAGAVRGPCIVHKRGTDILHDPWYNKDTAFPLTERDRLGLRGLLPPRVMSFEQQYERFINSYHSLEHNTQGEPDSVVSLAKWRILNRLHDRNETLYYRVLIDNIKDFAPIIYTPTVGLVCENYSGLFRRPRGMYFSAKDKGEMMSMIYNWPAEKVDMIVVTDGSRILGLGDLGVQGIGIPIGKLDVYVAAAGINPQKVLPIMLDVGTNNEELLEDKLYLGLRQPRLEGEEYLAVVDEFMEAVHARWPKAIVQFEDFQMKWAFETLQRYRSRFCMFNDDVQGTAGVALAGLLGAVRAQGRPLADFTKQKIVVVGAGSAGIGVLNMAKHAMLRMPGTHKIGELGEGHNQFWVLDKDGLITKSRKDLDPAVARFARGYGPEEVEDLHEGASLVEVVKKVKPHVLLGLSGVGGIFNEEVLKAMKESDSPCPAIFAMSNPTTKAECTPEDVFKHVGENAVFASGSPFSNVTLSNGRKGYANQANNMYLFPGIGLGALLSGARHISDGMLHAAAECLASYITDDAIRKGILFPSISSIRHITARARRCSRPCCR

SEQ ID NO: 7168 - protein, 564 aa, Zea mays
MAAAAVTSNGGAVAANGPAPGRLASVYSEVQTNRLLHALPLPSVLRSNFSVVDGPASSAAGNPDEIAKLFPNLFGQPSASLVPSAEPAATRPLKVGVVLSGGQAPGGHNVICGIFDYLQERAKGSTLYGFKGGPAGIMKCKYVELTSDFVYPYRNQGGFDMICSGRDKIETPEQFKQAEDTANKLDLDGLVVIGGDDSNTNACLLGEYFRSRNMKTRVIGCPKTIDGDLKCKEVPTSFGFDTACKIYSEMIGNVMTDARSTGKYYHFVRLMGRAASHITLECALQTHPNAALIGEEVAAKKQTLKNVTNYITDIICKRADLGYNYGVILIPEGLIDFIPEVQKLIAELNEILAHDVVDEAGAWKSKLQPESRELFEFLPNTIQEQLMLERDPHGNVQVAKIETEKMLISMVETELEKRKAEGRYSAHFRGQAHFFGYEGRCGLPTNFDSNYCYALGYGAGALLQSGKTGLISSVGNLAAPVEEWTVGGTALTSLMDVERRHGKFKPVIKKAMVELDAAPFKKYASMRDEWAIKNRYISPGPIQFSGPGSNDSNHTLMLELGAAL

SEQ ID NO: 7169 - protein, 198 aa, Trillium camtschatcense
QVTFSKRRNGLLKKAFELSVLCDAEVGVIVFSPRDKLYEFSSTSMQSTIDRYRMHTKCVNTNMPTEHNTQQWKYEAVSMANKIELLEASKRKLMGESLEPCTVDELQELESQIERSLSNIRGRKDYLLEQQIEELKEKERRLLEDNELLRHKSEEETELQLATPKGVQYDHGSQQMELETELHIGWPPKVATQCISHA

SEQ ID NO: 7170 - protein, 179 aa, Glycine max
  misc_feature (122)..(122): Xaa can be any naturally occurring amino acid
  misc_feature (125)..(125): Xaa can be any naturally occurring amino acid
  misc_feature (162)..(162): Xaa can be any naturally occurring amino acid
MASSMISSPAVTTVNRAGAGMVAPFTGLKSMAGFPTRKTNNDITSIASNGGRVQCMQVWPPVGKKKFETLSYLPDLDDAQLAKEVEYLLKKGWIPCLEFELKHSFIYHKHNKSPKYYDRRYXNHXKLPIFNYTNTSQVLKELQQAKTTYPNHFIHIIKFDNXVRQVHYIIFITYKPPSF

SEQ ID NO: 7171 - protein, 297 aa, Triticum aestivum
IDGGFSWVQIKDMALKASGAYRHCKPCAGSSAGASGRHHPYHHRGGSGFRGSDASDRFHYAYRRAAGGGSSGEATPSMSARTDFPAGDEEEEEEEDGMSSGGGGGKEDNAKEWVAQVEPGVLITFVSLPQGGNDLKRIRFSREMFNKWQAQRWWAENYDKVMELYNVQRFNHQSVPLPTTPKSEDESSKEDSPVTPPLDKERVPRSLQRPTSGGGAMGYSSSDSLEHHSNHYCNGLHPHHGHQCYDSVGLASTPKLSSISGAKTETSSMDASMRTSSSPEEVDRSGELSVSISNASD

SEQ ID NO: 7172 - protein, 175 aa, Triticum aestivum
MAPAVMASSATSVAPFQGLKSTAGLPVSRRSNGASLGSVSNGGRIRRMQVWPIEGIKKFETLSYLPPLSTEALLKQVDYLIRSKWVPCLEFSKVGFIFREHNASPGYYDGRYWTMWKLPMFGCTDATQVINEVEEVKKEYPDAYVRIIGFDNMRQVQCVSFIAFKPPGCEESGKA

SEQ ID NO: 7173 - protein, 234 aa, Yersinia pestis KIM
MPWFAVISHIGVRVICWGVNSVPAHQLDDHNQETRSDDENIVWHPHAITRQDREQQHGHQGVVLWFTGLSGSGKSTLAGALEQALFARGVSTYLLDGDNVRHGLCRDLGFSDADRRENIRRVGEVAKLMVDAGLVVLTAFISPHRAERKMVQDMLASGQFIEVFVDTPLAICEARDPKGLYKKARAGELKNFTGIDSVYESPASPDIHLQGEQLVTNLIEQLLDVLRGRAIIKS

SEQ ID NO: 7174 - protein, 469 aa, Streptococcus pyogenes MGAS8232
MVSVMWFRRDLRIDDQKALAHVIASQSPTLCVFQFNKEQLNLLHSRNQSSFITSVLAFRKLLKCEGIDLYLMYGDLMTCFEQLLTQLKDWTDVYFNYDESGYGRLRDQKAAQFFKKNGIAVHTYQDHYLHGSQEIINQSGQPYKVFTPYYRIWQNYPKETPIKVELSQGRWLNLETPDDVLRTVESFKDEKYQDVATFDEASKQLNRFIQDQLAAYHANRDFPAQLGTSRLSPFLRIGAIGIRTVYHAVRQAPNSLGQATFLKELAWRDFYNMVYVAYPDQKTQPIQKAFSQIEWVNNPDWFQLWKEGKTGYPIVDAAMLQLQKTGWMHNRLRMIVASFLTKDLLCDWRLGEQYFQQQLIDYDAASNIGGWQWAASTGTDAVPYFRIFNPVTQGKRFDPKGEFIKAYLPQLEHVPEKYLHEPWKMPKNLQESVSCIIGTDYPQPIVDHAKQREQAIAKYEWAKEKAKIE

SEQ ID NO: 7175 - protein, 175 aa, Triticum aestivum
MAPAVMASSATSVAPFQGLKSTAGLPVSRRSNGASLGSVSNGGRIRCMQVWPIEGIKKFETLSYLPPLSTEALLKQVDYLIRSKWVPCLEFSKVGFIFREHNASPGYYDGRYWTMWKLPMFGCTDATQVINEVEEVKKEYPDAYVRIIGFDNMRQVQCVSFIAFKPPGCEESGKA

SEQ ID NO: 7176 - protein, 112 aa, Bartonella sp. af82up
AYETCLKMLQEIGAVQKIPEFIARAKNKNDRFRLMGFGHRVYKNYDPRAKIMQQTCHEVLKELNIQDDPLLDIAMELEKIALNDEYFIEKKLYPNVDFYSGITLKALGFPTE

SEQ ID NO: 7177 - protein, 283 aa, Triticum aestivum
  misc_feature (114)..(114): Xaa can be any naturally occurring amino acid
PRVRPRVRRWVGTINDFVYAVIDKKMEQMGRDGHEFAKKGDILSRFLLEREKDPGCFGNKYLRDIILNFVIAGRDTTAGTLSWFLHVLCRDQRIQDKIAREVREATSTGDRQGXAGVREFTARLTEDAIGSMHYLHAALTETLRLYPAVPVDVKCCFSDDTLPDGHAVRRGDMVNYQPFAMGRMKFLWGDDAEESRPERWLDDDGVFVPESPYKFTAFQAGPRICLGKEFAYRQMKIFAAVLLYLFRFEMSEHNSTVGYRPMLTLKMDGPLYVCVSPRRSTGN

SEQ ID NO: 7178 - protein, 173 aa, Triticum aestivum
MAPAVMASSATTVAPFQGLKSTAGLPVSRRSSEPRPRHNGGRIRCMQVWPIEGIKKFETLSYLPPLSTEALLKQVDYLIRSKWVPCLEFSKVGFVFREHNSSPGYYDGRYWTMWKLPMFGCTDATQVLNEVEEVKKEYPDAYVRVNGFDNLRQVQCVSFIAFRPPGCEESGKA

SEQ ID NO: 7179 - protein, 112 aa, Bartonella sp. ma106up
LNEACLKMLQEIGSIERIPEFIARAKDKNDPFRLMGFGHRVYKNYDPRAKIMQKTCHEVLKELNIQDDPLLDIAIELEKIALSDEYFIEKKLYPNVDFYSGITLKALGFPTE

SEQ ID NO: 7180 - protein, 395 aa, Campylobacter jejuni subsp. jejuni NCTC 11168
MKMDYKEQSHIIPTYKRFDIVLEKGQGVYLFDDKAKKYLDFSSGIGVCALGYNHAKFNAKIKAQVDKLLHTSNLYYNENIAAAAKNLAKASALERVFFTNSGTESIEGAMKTARKYAFNKGVKGGQFIAFKHSFHGRTLGALSLTANEKYQKPFKPLISGVKFAKYNDISSVEKLVNEKTCAIILESVQGEGGINPANKDFYKALRKLCDEKDILLIADEIQCGMGRSGKFFAYEHAQILPDIMTSAKALGCGLSVGAFVINQKVASNSLEAGDHGSTYGGNPLVCAGVNAVFEIFKEEKILENVNKLTPYLEQSLDELINEFDFCKKRKGLGFMQGLSLDKSVKVAKVIQKCQENALLLISCGENDLRFLPPLILQKEHIDEMSEKLRKALKSF

SEQ ID NO: 7181 - protein, 91 aa, Brassica napus
MDTVAPRLSRSSTRYGPISSSAASFSGPVRKWRKAWVPLTGTGTGTAGSGGGSSRGDNKVVLFRWTPVNGCSGGGGGTDGGMELAAAGAST

SEQ ID NO: 7182 - protein, 168 aa, Glycine max
MAGVREQDQYMPIANVIRIMRRILPAHAKISDDAKETIQECVSEYISFITAEANERCQREQRKTVTAEDVLWAMEKLGFDNYAHPLSLYLHRYRESEGEPASVRRASSAMGINNNMVHPPYINSHGFGMFDFDPSSQGFYRDDHNAASGSGGFVAPFDPYANIKRDAL

SEQ ID NO: 7183 - protein, 112 aa, Bartonella sp. af170up
ANEACLKMLQEIGSVERIPEFIARAKDKNDPFRLMGFGHRVYKNYDPRAKIMQKTCHEVLKELNIQDDPLLDIAIELETIALNDEYFVEKKLYPNVDFYSGITLKALGFPTE

SEQ ID NO: 7184 - protein, 189 aa, Zea mays
MGVYTKIFLKFPERFWPVGEGKQFFMYASSRRGYYALWQSFEREYPGANVLLATVTDDESRRIERQSDDQTKAEVAEVLRDMFPAADVPGPDQIDIYVPRWWSDRFFKGSYSNWPVGVSRYEYDQLRAPVGKVYFTGEHTSERYNGYVHGAYLAGIDSANILINYIFKNEEYKVRGKYDVEDDLIAQAR

SEQ ID NO: 7185 - protein, 112 aa, Bartonella sp. sa192up
ANEACLKMLQEIGSVERIPEFIARAKDKNDPFRLMGFGHRVYKNYDPRAKIMQKTCHEVLKELNIQDDPLLDIAIELEKIALSDEYFVEKKLYPNVDFYSGITLKALGFPTE

SEQ ID NO: 7186 - protein, 498 aa, Nostoc punctiforme PCC 73102
MTTPLSCRNYINGQWLNAVGEATLESRNPADKTEIVATYPRSQVNDVDTAVASARKAYRSWRTVPAPARAEYIFRVGEILLQHKEELAQLISREMGKPLTEARGDVQEGIDCAFYSAGEGRRLFGQTTPSEMSNKFAMTVRMPIGVCALITPWNFPVAIPCWKAMPALVCGNTVILKPAEDTSACATKLIEIFQQAGLPPGVINLVHGVGEEAGKALVEHPNVDLVSFTGSSETGAFVGATCGRTHKRVCLEMGGKNAQIVMEDADLELALDGAVWGAFGTTGQRCTATSRLILHRDIKEKFTTMLYERTSKLRLGAGNDTDTDIGPIINEKQLQQVSKYLDIAREEGAKVLIGGEIASEGSLKNGYFFQPTILDRVTPDMRVAREEIFGPVVALIEVSSFEEAIAILNDSNYGLSSSVYTRDINRAFTAMRDIEAGITYINGPTIGAEVHLPFGGVKQTGNGHREAGTTALDVFTEWKSVYVDFSGSLQRAQIDNRS

SEQ ID NO: 7187 - protein, 381 aa, Xylella fastidiosa Ann-1
MPLLAEHGTTIIEAMYHQLFEDPQIEALFNQANQKNGTQIHALAGAILAYARNIDNPGVLASAIERISQKHVGYAIHPEHYPHVATALLGAIKQVLGDVATSEVLQAWGEAYWFIANLLKDREAVIREGIMTKNGGWIHWRRFVISKRIPESETITSFMLHPDDGGPVVPHQAGQYLTFRFDAAGMPGMKRNYSISCGPNSDHYRITVKREHGTGASAFLHDQAKVGTIIECTPPVGDFFLPSVIERPIVLLSGGVGLTPMVSMMEQIAEAYPDAQVWYVHGTQNRETHAMDAHIRALVSRHKHMKATTFYTQRSEADDAEAGFITIDWLRANTPFQKADFYLCGPRPFLRTFVRDLIGAGVPAAQVHYEFFGPMDEEMAA

SEQ ID NO: 7188 - protein, 390 aa, Onion yellows phytoplasma OY-M
MNIKEKALEIHEKNKGKVGIVSKVKVQNLDDLALAYTPGVAEPCLKIKENPSDVYRYTMKGNMVGVVTNGTAVLGLGNIGPKASLPVMEGKAILFKELAGIDSFPICIDSTDSQEIVNIVSKISTVFGAINLEDIKSPQCIEVEDALEAKLDIPVFHDDQHGTAIVVAAGILNSLKVVKKSIEDVQVVINGAGSAGMAIAKMLLLLKVNNIVLVDKTGALYKGVANLNEPQKKLVEVTNKYQEKGTLKEVLKGKDIFVGVSAPGIVTAEMVSTMAKDAIVFALANPVPEIMPDEAKKGGARIVATGRSDFPNQVNNCLAFPGVFRGALDAKATKITEEMKKAAIYALKNIIKEQDLNENNILPTSFNKEVVKQIALAVCKVAKETGVVRK

SEQ ID NO: 7189 - protein, 204 aa, Glycine max
  misc_feature (91)..(91): Xaa can be any naturally occurring amino acid
  misc_feature (127)..(127): Xaa can be any naturally occurring amino acid
  misc_feature (144)..(144): Xaa can be any naturally occurring amino acid
  misc_feature (164)..(164): Xaa can be any naturally occurring amino acid
  misc_feature (186)..(186): Xaa can be any naturally occurring amino acid
MAEEESPSVMPKVITFLSSLLERVAESNDHNQQHQKISVFHGLTRPNISIHSYLERIFKYANCSPSCFVVAYVYLDRFTQRQPSLPINTFXNVHRLLITSVMVAAKFMDDMYYNNAYYAKVGGITKXEMNFLELDVSCFGFGFXLNVTPGTFQAYCVNLQREMXLIQQPLNFADSTLNFGKSTKGXLCFNEDESSHQKQKQQQH

SEQ ID NO: 7190 - protein, 108 aa, Zea mays
VDYACTPEEVQQHFNSCGTVNRVTILTDKFGQPKGFAYVEFVEVEAVQEAIKLNESELHGRQLKVAPKRTNVPGMKQPRGRGFNPYHGHPYMTPYGYSPYGYGQVVTG

SEQ ID NO: 7191 - protein, 146 aa, Triticum aestivum
MDPMDIVGKSKEDVSLPKSTMTKIIKEMLPPDVRVARDTQDLLVECCVEFINLLSSESNDVCSRDDKKTIAPEHVMMFLGKSCTSGARAKQTTSSPPSMSLQNEGDADHGRRISLVVLFVKKIECATVVTVVKVIDWYLVWCVVQR

SEQ ID NO: 7192 - protein, 403 aa, Onion yellows phytoplasma OY-M
MFDFMINHLSSKSLMYQDFKKNHNNSQYKDFFLRWEKFWQQVGPNRPTKQDVDSIYKRKDKAPTHLIEFDDGTTEHLWNTFGTDQIDLNVKEPIVKEFIKTTLTNMVKQGASIIRLDAFAYACKKADTSFFVEPDIWQLLDEVRDVLKPLDVELLPEIHENHSISHKISEHGYFIYDFALPLVVLYTLYSKNPQRLVEWLKKSPMKKFTTLDTHDGIGVIDAYDILTDKEIKYTSEQLYKQGANVKKVYSSSLYNNLDIYQINFTYYSALGNDDDAYLLSRAFQIFAPGIPQVYYVCLFAGENDIKLLESSKEGRNTNRHYYSRQEIKEEVKRPVVANLFKLLAWRNKSNAFDLDGVMECSAYASKIKILRKDKLGNNVAVLDADLMNKKFVIVENDKQIFSN

SEQ ID NO: 7193 - protein, 387 aa, Chloroflexus aurantiacus
MQIEYTLARMGAERLWNLLHTEPYINALGALTGNQAMQQVKAGLKAIYLSGWQVAADANLAGQMYPDQSLYPANSGPQLVRNINNALRRADQIYHSEGRNDIYWFAPIVADAEAGFGGPLNVFEIMKAYIEAGAAGVHFEDQLASEKKCGHMGGKVLIPTQAAIRNLVAARLAADVMGVPTIIVARTDANAATLLTSDIDERDRPFCTGERTSEGFYRVRAGLDQAIARGLAYAPYADMIWCETSEPNLEEARRFAEAIHAQFPGKLLAYNCSPSFNWKKKLDDATIAAFQRELGAMGYKFQFVTLAGFHALNYSMFELARNYRDRGMAAYSELQQAEFAAEAYGYTATRHQREVGTGYFDEVAQVIAGGEISTTALTGSTEEEQFH

SEQ ID NO: 7194 - protein, 495 aa, Rhodospirillum rubrum
MPEGTTRIAALDIVREAGLLKDKAYIDGAWVGADDGGDFPVLDPATGREIGRVPNMGAAETRRAIDAAAAAWPAWRARTAKDRAAVLRRWYGLIMDNQEALAVLMTAEQGKPLGEARGEIAYGASFVEWFAEEGKRLYGEVVPAHGTDKRILTLREPIGVVAAITPWNFPSAMITRKVAPALAAGCPVVLKPAEDTPLSALALVELAERAGLPKGLINVVTTHEAKAVGGEMTANPIVRKLSFTGSTEVGKILMAQCAGTVKKVSLELGGNAPFIVFDDADLEAAVAGAIASKYRNAGQTCVCANRLYVQEGIYEAFTEKLKAKVEAMRVGPALEGDVQQGPLINKKGLDKVDGLVRDALDKGATAVLGGKVHALGGTFYEPTILTGVTAAMRMATEEIFGPVAPLYRFSTEAEAIALANATRFGLAAYFYTRDIGRVWRVAEGLEYGIVGINEGIISTESAPFGGVKESGIGREGSRHGIDDFVEIKYLCMGGI

SEQ ID NO: 7195 - protein, 222 aa, Phanerochaete chrysosporium
TLTFVIYFLTQHPDVLQRLRQEILDVVGPSNLPTYDDIKQMKYLRAVLNETQRLYPPVPWNMRYAVEDSIVPNSEPEGKPWFIPAGASVSYSVHCMHRRKDYWGPDAEEFDPDRFLDERLHKYLTPNPFIFLPFNAGPRICLGQQFAYNEMSFFLVKLLQTFEDISFERDAFEPNALPPAEWAKFPGRKGKEKFWPRAHLTLYSEGGMWVKMREAQAMGQVA

SEQ ID NO: 7196 - protein, 123 aa, Glycine max
  misc_feature (12)..(12): Xaa can be any naturally occurring amino acid
MEAVGSRLSRAXSRYGAPTVFSGPVRKWKKKWVHVTPSSLPNNNSHSHTNNFTTTTTNDSSRLLLRRWTPTTADDSAGAVSDDPPRRKFRYTPIAVLEEQKKMNVVKAEHEPTIEADQLAFRQ

SEQ ID NO: 7197 - protein, 107 aa, Triticum aestivum
  misc_feature (41)..(41): Xaa can be any naturally occurring amino acid
  misc_feature (43)..(43): Xaa can be any naturally occurring amino acid
  misc_feature (65)..(65): Xaa can be any naturally occurring amino acid
  misc_feature (81)..(81): Xaa can be any naturally occurring amino acid
  misc_feature (88)..(88): Xaa can be any naturally occurring amino acid
  misc_feature (93)..(93): Xaa can be any naturally occurring amino acid
  misc_feature (103)..(103): Xaa can be any naturally occurring amino acid
ETVTRPSHCDAISQQIRTFIQMRTNLKVVDNSGAKRVMCIXGXGGKKGARLGDMIIGFCEGSATXGKVKKGDVGYGVVVRXAMKKDVXDGSEXHFDDNAISSXNNKS

SEQ ID NO: 7198 - protein, 414 aa, Azotobacter vinelandii
MTIDFKKTALDYHEFPTPGKIGIELSKPAETAAHLSLAYSPGVAEPVREIARDPENAYRFTAKGNLVAVISNGSAILGLGNLGPLASKPVMEGKALLFKRFAGINAVDIEVTAESPAAFIDTVVRIADTFGGINLEDIKAPDCFEIEQLLIEQCSIPVFHDDQHGTAIVTAAGMLNALEIQGKRLEEARIVCLGAGAAATACMRLLISLGARKDNLYMIDSRGVIHSGRDGLNRYKQEFVNDGGARTLLEAMQGADVFLGLSGANLLPPEALLAMAPRPIVFACSNPDPEIDPELAKATRQDLILATGRSDYPNQVNNVLGFPFIFRGALDVRARRVDEAMKIAAVEALRQLAKEPAPAEVLKAFAIDRLQFGPDYILPKPMDARLLGAVAGAVAKAAVESGVARLPYPAHYPL

SEQ ID NO: 7199 - protein, 328 aa, Rubrobacter xylanophilus DSM 9941
MIRAVTVKCVEDYGYEVVGIKRGWRGLLAPQEDSVEKLTVDGVRYILDEGGTVLLSSRTNPYKKEGDAEKVVKNMQEFGIDALVAIGGDDTLGVASRLHKDFGVQVVGCPKTIDNDLSGTDICFGYDTAVSIATEALDRVRTTAKSHERILVVEIMGRHAGWITYGAGLAGAANVTLIPEVEPDIDAIADLFKKRAERGERWGVVAVSEGVTIGEEYITQSAERDEFGHVRLGGIGETLAKELKERTGIDTRHVVLGHLQRGGTPTAYDRILSTRYGLRAAEAVKNGEWGKMVALRGSDIVTVPLEEATGETRTVPEDLYGVLKTFFG

SEQ ID NO: 7200 - protein, 333 aa, Pantoea agglomerans
NGIAGSYAEYVPVVHIVGAPRLTSQRKGELLHHTLGDGEFCHFMRMSAPVSVAQASLTPENALAEIDRVIEEVMYSSRPGYLLLPSDVPALPVSTRAHALPARQPPFSPSSLEAFTAAAQTQLRGANRVSLLADFLADRFKVKKALEQWMEEVPLGTSTLLMGKGLFNEQQAHFAGTYSGAASAPSTKEAIEGADVVITVGVKFTDTITAGFYQQRPSGNASTSALFAARAIRSSITGRSKNGQRDAPPPPLNLAFRPGRLILLNTTHCRWSRDNSLGQYAFWQQIQDSLQPGDVLVAEQGTACFAAAALNLPQDLQFVVQPLWGSIGYTLAA

SEQ ID NO: 7201 - protein, 332 aa, Enterobacter cloacae
NGVAGSYAEYVPLLHIVGAPCSGVQQRGELLHHTLGDGDFHHFYRMSEPVTAARAILTAQNACYEIDRVLEVMLMQSRPGYLMLPADVAKKPATPPVNALTTPPFPVNEACLNAFRQHAQAMLSVGSSVALLADFLAAFGFIQMLQCWMTDQLPTHTTVILGKGIVKRKHGGFSYPYHGAGGQRGPVPAIEGADTVICIGTRFTDTVTAGFTQQFARERTIEIQPFAARVGDVWFSGIPMREAINALIPLVRARAHAAANHRPPQAARAPVHQGTLNQETLWQTVQQFIRPDDILLADQGTAAFGAASLRLPAGAELLVQPLWGSIGYTLAA

SEQ ID NO: 7202 - protein, 480 aa, Pseudomonas fluorescens PfO-1
MQLKDTQLFRQQAFIDGAWVDADNGQTIKVNNPATGEILGTVPKMGAAETRRAIEAADKALPAWRALTAKERAGKLRRWFELMIENQDDLARLMTLEQGKPLAEAKGEIVYAASFIEWFAEEAKRIYGDVIPGHQPDKRLIVIKQPIGVTAAITPWNFPAAMITRKAGPALAAGCTMVLKPASQTPFSAFALAELAQRAGIPKGVFSVVSGSAGDIGSELTSNPIVRKLSFTGSTEIGRQLMSECAKDIKKVSLELGGNAPFIVFDDADLDKAVEGAIISKYRNNGQTCVCANRLYIQDSVYDAFAEKLKVAVAKLKIGNGLEEGTTTGPLIDEKAVAKVQEHIADAVSKGATVLAGGKPMEGNFFEPTILTNVPKDAAVAKEETFGPLAPLFRFKDEADVIAMSNDTEFGLASYFYARDLGRVFRVAEALEYGMVGVNTGLISNEVAPFGGIKASGLGREGSKYGIEDYLEIKYLCLGI

SEQ ID NO: 7203 - protein, 448 aa, Methanococcus maripaludis S2
MQLEVVAIGGYEEVGRNMTAVNIDGEIIIFDMGVRLDRIMIHEDTDISKMHSLNLIEMGVIPDDTVMKNIEGEVKAIVLTHGHLDHIGAITKLAHRYNAPIIGTPYTLELVKREILSEKKFDVRNPLITLENGNKLDLTANITLEFVKITHSIPDAAMAVLHTPYGAVVYGNDFKFDNFPVVGEKPDYKALKRIGKQGVIAMVSESTRVDFEGKTASEGVAANLLKNDLLGTDNEDNAVVVTTFSSHIARIKSITDIASKMGRIPVLVGRSMSKYCGIAQDIGLVKFPKETKICWDPSSIDKTFHQIMKDGKENYLMVVTGHQGEEGAVLSRMATNKTPFRFEKYDQVVFSADVIPNPMNAAQRYLLEARLNLAGVRLFKGAHVSGHAAKEDHRDILRWLQPEHLIPAHGDFNLTSAYAKLAEEEGFRLGEDVHLLRNGQSLKFERVI

SEQ ID NO: 7204 - protein, 382 aa, Yersinia pestis KIM
MCDKKPLKESSMSHENLKGAQMAEGIPETMRAVVAYGPRDYRFERVPVPTIDAKEILVKVEGCGICAGDTKAFEGAPSFWGDDKQPAYIKAPMIPGHEFIGHVVGLGADVEGFELGDRVTSEQIVPCWGCRFCNHGQYWMCEKHDLYGFQSNVNGAMAEYLKFTKEAINYHVPDHLPLEKAILIEPYACAFHAVQRAKIKLGDVVVLAGSGTLGLGMIGAIKKSGAAKLIVLDLSDDRLALAKKFGADLVLNPSRDDVNTLIKEMTGGYGCDIYIDATGAQKAVEQGLTLLRKLGTFVEFSVFKDPVTVDWSIISDRKELDVLGSHLGPYCFPLVIEGISNGDLPTEGVVTHILPLEKYAEGIELVKRGVDSLKVVLNPNLT

SEQ ID NO: 7205 - protein, 211 aa, Leuconostoc mesenteroides subsp. mesenteroides ATCC 8293
MTPLKAEILPEIHEHYSIPKKINDHGYFTYDFALPMTTLYTLYSGKTNQLAKWLKMSPMKQFTTLDTHDGIGVVDARDVLTDEEIDYASEELYKVGANVKKTYSSASYNNLDIYQINSTYYSALGNDDAAYLLSRIFQVFAPGIPQIYYVGLLAGENDIELLESSKEGRNINRHYYSVDEVKEEVKRPVVAKLLKLLSWRNNFAAFDLDGS

SEQ ID NO: 7206 - protein, 646 aa, Zea mays
MTRGLGAAPVSSCLALGAAAVVLLVAAALPSPASGVDVTAVLSVFPNFADFARLLASTPVASELSGRSSLTLLAVPNANLPQSPSAFVASAGADIADVLRYHVLLEYLSPSDLARLSPSGKLVTTLFQTTGRAPSDFGAVNLTVGGNSTVVVRSPAPSLGSNATVLGAVTAVPYNLSVLAVGGLIIPSGFDLAASESRPPPPVNITRVLTDARGFNVAASMLQASGVASEFEADEHGAGITVFVPTDDAFAGLPATDRLQSLPAERKAVVLRFHVLHSYYPLGSLEGPRRDLAVDPAAARAALVTCGGLCPGLNTVLRELVVGLQELYGVRHRFVALDRGSLRHPQWQEVAEVVSSRDSYSKAPKSDVQCKNRIDTLKKKYKVEKAKHDSDWRYFDRLDDLLAPVLLKPNSSSSSAAAATAAAAARSAGPMVPPRINFPQRTRTPLHSSAGAKWRMPSPLPQPSASSDSSDGFPPSAVANGKRQRVEEPAAAAADNGAESSVSRAQGLRELAQAIRRLGEVYERVESAKRDQELRMERERLDSARQLEEQRVQFSTSMPRSSRITRTAQAPPGAMTTAATRTRKLRRMRKTKRKRASDCSPLQQWNGNSTQKSGEREGKTRSKKAWRRETHPGKKRREGKTRKEIC

SEQ ID NO: 7207 - protein, 273 aa, Synechococcus elongatus PCC 6301
MSEAGTPAEALTYEQAIANLRQTADTGDRYYAAWWLGRFRMKQPEAIALLIEALDDSLDRAPDGGYPLRRNAARALGKLESPEAIAPLIACLQCEDYYVREAATQSLGELQATVAVPALLKLLEGGPEAIAAIPGKPHLTQPADAVMETLGQLRATVAVPVVQAFLEHPIDKIRLAAARSLYQLTGDDHYAERVVQGLSDPKLQRRRSALMDLGAIGYLPAAPQIAQTLAENSLKLISLKGLLDTHLRQQTPEAIAELDESAIALMDLMDGLL

SEQ ID NO: 7208 - protein, 464 aa, Listeria monocytogenes str. 1/2a F6854
MLYSKENKESYLEPVFGSSAEDRDIPKYTLGKEPLEPRIAYRLVKDELLDEGSARQNLATFCQTYMEDEATKLMSETLEKNAIDKSEYPRTAELENRCVNIIADLWHAPKDQKFMGTSTIGSSEACMLGGMAMKFAWRKRAEKLGLDIYAKKPNLVISSGYQVCWEKFCVYWDIDMRVVPMDKEHMQLNTDQVLDYVDEYTIGVVGILGITYTGRYDDIYALNEKLEEYNSKTDYKVYIHVDAASGGFFTPFVEPDIIWDFRLKNVISINTSGHKYGLVYPGIGWVLWKDESYLPEELIFKVSYLGGEMPTMQINFSRSASHIIGQYYNFLRYGFEGYRTIHQKTSDVAQYLAHAVEQTGYFDIFNDGSHLPIVCYKLKNDANVKWTLYDLADRLQMRGWQVPAYPLPKSLENIIIQRYVCRADLGFNMAEEFIQDFQASIQELNNAHILFHNTQQSGVHGFTH

SEQ ID NO: 7209 - protein, 507 aa, Triticum aestivum
  misc_feature (158)..(158): Xaa can be any naturally occurring amino acid
  misc_feature (194)..(194): Xaa can be any naturally occurring amino acid
MDSPLLVAALSSLLLLLALYLLGGKRRRRSYPPVAGAMLQQLLHWGRLPEYMTELSRRYGTFRMLTLTCNWVYTVDPANVEHILRTNFANYGKGPMTHGVLGDLLGDGIFNVDGAKWRHQRKVASFEFTTRALREYSSGVFRDMAAELAGIVAAAAAXGERLDMENLFMRSTLDSIFTVGFGGHLGALSQSTRXGAAFARAFDDASEQVLYRFFDPLWKAKRLLNVLSEAAMKRSVRTINDFVYAVIDKKIEQMGRDEHEFAKKQDILSRFLLEREKDPGCFDNKYLRDIILNFVIAGRDTTAGTLSWFLYVLCRDQRIQDKIAREVREATTGDRQNVGGVQEFTACLTEDAISSMHYLHAALTETLRLYPAVPTDVKCCFSDDTLPDGHTVRRGDMVNYLPYAMGRMKFLWGDDAEEFRPDRWLDDEGVFVPESPYKFTAFQAGPRICLGKEFAYRQMKIFAATLLYLFRFEMWERDSTVGYRPMLTLKMDGPLCVRASPRRSTGN

SEQ ID NO: 7210 - protein, 510 aa, Picrophilus torridus DSM 9790
MKMDMNVFHDLGLEEVNSGVYDGEWARPSGKMIDVKSPIDGSDIARVSMATESDYERIISRAVEEFKKWRMIPAPKRGIIIKEIGDELRKEKKNLGKIVTMEVGKTASEGEGEIQEMIDVSDLALGLSRQLYGLTIASERPYHRMYEQWIPLGPVAVISSFNFPASVWSWNAFIAAVDGDVVIWKPSSKAALTAVAVMRVIESVLKRNNAPNIFFLMVSPGHDGGEWITNDKRIPLVSFTGSVAVGKKISENVAKRLGKTILELGGNNGAIVSDKSDINIALRGVVFGALATAGQRCTTTRRVIVQENIYDDFLERLKNAYSTIKVGDPRDKGVLVGPLIDEDAVKNYERAIETAIKQGGKLVFGGRRIKISGCENGHYVMPAIIEAKPDMAIVSEETFAPILYVMKYRNIEEAIEIHNSVPQGLSSSIFTNDLREEEAFLSAYGSDCGLANVNTSTAGAEIGGAFGGEKDTGGGRESGSDAWKYYMRRQTVTKNWGKTLPLAQDVVFDF

SEQ ID NO: 7211 - protein, 160 aa, Brassica napus
  misc_feature (117)..(117): Xaa can be any naturally occurring amino acid
  misc_feature (137)..(137): Xaa can be any naturally occurring amino acid
  misc_feature (144)..(144): Xaa can be any naturally occurring amino acid
  misc_feature (146)..(146): Xaa can be any naturally occurring amino acid
MTKVCPETEERTLQEPVLTVSTDVSFASNHFPTYKLGPDNEIVDEPKEDEKGPSVKETVEEESQLLSDQHKRLSVRDLASKFDKKLAAAVSLADEAKLKEVASLEGHVMLKKLRDAXEYMRGRTDGQNREDVEKAIXMVEALAXEXTQNEGELIQEKFEV

SEQ ID NO: 7212 - protein, 78 aa, Brassica napus
  misc_feature (12)..(12): Xaa can be any naturally occurring amino acid
  misc_feature (18)..(18): Xaa can be any naturally occurring amino acid
AILMESKMILSXDELLTXMIIDKTFADADADKAGKISKEEWKVYVLKHPTLLKNMTLPYLKDVTTAFPSFIFNTEVED

SEQ ID NO: 7213 - protein, 294 aa, Glycine max
MSEALEEVVPSMKGGCEEEGLNLKATELRLGLPGCESPEREGVFKSVVVSGAKRGFSDAIDGNWNGGGSEKDAAALFSPTSRGAVSVSVSAAKSLTLTATDCTNQPTALGASVLKETVPRSPKPLHENKPQISAPAAKAQVVGWPPIRSFRKNSMASQPQKNDAAADAEAKSGCLYVKVSMEGAPYLRKVDLNSFTTYKDLSLALEKMFSCFTLSQCGSYGVSSRENLSESRLMDLLHGSEYVLTYEDKDGDWMLVGDVPWEMFTESCKRLRIMKSSEAIGLAPRAMEKCKSRY

SEQ ID NO: 7214 - protein, 415 aa, Tradescantia virginiana
TTPISIEDVRREVKILKALSGHKHLVKFYDACEESLNVYLIMELCEGGELLDRILSRGGKYTEEDAKAIVMQILNVVAYCHLQGVVHRDLKPENFLFINRDENAPMKLIDFGLSDFTRPDERLNDIVGSAYYVAPEVLHRSYSMEADIWSIGVITYILLCGSRPFWARTESGIFRSVLRADPNFDDSPWPTASPEAKDFVKRLLNKDYRKRMTAAQALSHPWLRDKEPQIPLDILIYKQTKLYLRATPLKRAALKALSKALTEDELVYLRLQFKLLEPNNDGRVSLENFHTALAQNATEAMKESRVLDILNSLESLAYRRMDFEEFCAAAISCYQLEALEHWEQIASTAFEYFEQDGNRVVSVEELAQDLNLPQNAYAILKDWIRQSDKKLSFLGYTRYTRYLHGVTPRPNTRQH

SEQ ID NO: 7215 - protein, 405 aa, Thermoplasma acidophilum
MAYIQVKEDGTLQVPDRVTIGYIEGDGIGPDISKTTINVLNAALDIAYGGKRSIEWKKILAGDEAYDKTGDRLPQSSLDELKKCVVSLKGPLTTPIGEGFRSLNVTLRQYLDLYANIRPVRYFPGVPSPVVHPEYMNMVVFRENTEDLYAGIEWRYDSDGAKKVREFLASTFNINLTSDTGIGIKPISKFKSTRLVRKAIQYAIANKRKSVTLVHKGNIMKYTEGAFKEWGYEVAKTEFGNYTVTETEYLQDPEKYSNKIVIKDRITDNMFQQVLTRTQEYDVIATPNLNGDYLSDALAAQVGGIGLAPGANIGDHYAVFEAVHGTAPKYAGMDVANPTSLILSGEMMLQHIGWNEAANILDEAIMQTYRDQKLTQDIARLLNVKALKCSEFGEEIINRMKKPVH

SEQ ID NO: 7216 - protein, 166 aa, Bordetella parapertussis 12822
MNTMYDFSAPTITGAERALADFRGQVALVVNVASRCGFTPQYSGLEELYRSYRNEGFVVLGFPCNQFGRQEPGDEAAIAQFCETQYAISFPLFAKIDVNGAHAHPLYRWLKAHKPGLLGTRAIKWNFTKFLVGRDGLPLRRYAPAHTPESLRHDIARACAAPGPTP

SEQ ID NO: 7217 - protein, 328 aa, Capsicum annuum
MASQSFVPPIFENPFLNIEELAGDTIVRKPEPLTQANSDPNGTSLVVSKDVDLDINKKTWLRIYVPQRIITNHNDDEKLPVIFYYHGGGFVFFHANSFAWDLFCQGLAGNLGAMVISLEFRLAPENRLPAAYDDAMDGLYWIKSTQDEWVRKYSDLSNVYLFGSSCGGNIAYHAGLRVAAGAYKELEPVKIKGLILHQPYFSGKNRTESEEKLKDDQLLPLHAIDKMFDLSLPKGTLDHDHEYSNPFLNGGSKHLDDVIAQGWKILVTGVSGDPLVDNARNFANFMEEKGIKTFKLFGDGYHAIEGFEPSKAAALIGATKDFICATTN

SEQ ID NO: 7218 - protein, 365 aa, Glycine max
MGSTGETQITPTHVSDEEANLFAMQLASASVLPMVLKSALELDLLEIIAKAGPGVHLSPTDISSQLPTHNPDAPVMLDRILRLLACYNILSFSLRTLPDGKVERLYGLAPVAKYLVRNEDGVSIAALNLMNQDKILMESWYYLKDAVLEGGIPFNKAYGMTAFEYHGTDPRFNKVFNKGMADHSTITMKKILETYTGFEGLKSLVDVGGGTGAVVNMIVSKYPTIKGINFDLPHVIEDAPSYPGVEHVGGDMFASVPKADAIFMKWICHDWSDEHCLKFLKNCYEALPDNGKVIVAECILPVAPDSSLATKGVVHIDVIMLAHNPGGKERTEKEFEALAKGSGFQGFRVLCCAFNTYVMEFLKKV

SEQ ID NO: 7219 - protein, 476 aa, Photorhabdus luminescens subsp. laumondii TTO1
MPVPTLRHFINSQYVESKSSEYFDLISPVTGETYARSPNATIADVNEAYASAKEAFKIWGRSTPSARQQALLALADAVEKNSERLIEAQSRNTGQLKHLIASEEVAASVDHIRFFAGAARFLEGKATAEYLPDMTTSIRREPLGVVGQVTPWNYPLMMAVWKIAPALAAGNTVVLKPSDTTPESTLLLAELAAPFFPTGAFNVVLGNASAGALVVSHKTPAMVSITGSVRAGLQVASSAAANLTRAHLELGGKAPVVVFADADMDKAVETIATAGYFNAGQDCTAASRVLVHESVYDTFVAKLVAAAKATRFGYPEDEEALYGPLNNARQLEQVKGFIARLPAHACIETGGRQAERSGYYFEPTVITGLEQHDEAIQTEIFGPVITVQKFRDEQDAIEKANDVKYGLASSVWTRDHGRALRLSRELDFGTVWINTHIPLTAEAPHGGFKSSGYGKDLSAYGFDEYTRIKHVMSSND

SEQ ID NO: 7220 - protein, 238 aa, Wolinella succinogenes
MSLYDRNYLNSSAQDQGAFGGARESLSESALVGFVKQTYQLFAGSLLAATVGAYVGLGMAPVIASWYWGLVILEFALLFGMFFLKDKPGINLVVLFAFTFMTGLTLTPLLSRIFNMPGGASIVANAFLLTTAIFGIMSIFALKTKSDLASMGKMLFIALIVVVVASIINLFLGSPLLQVIIAGAGAILFSLYIAYDTQNIVRGVYDSPVMAAISLYLSFLNLFISLLQLLGILGNSDE

SEQ ID NO: 7221 - protein, 122 aa, Staphylococcus epidermidis ATCC 12228
MANQEQIIEAIKEMSVLELNDLVKAIEEEFGVTAAAPVAAAGAAGGGDAAAEKTEFDVELTSAGSSKIKVVKAVKEATGLGLKDAKELVDGAPKVIKEAMPKEDAEKLKEQLEEVGASVELK

SEQ ID NO: 7222 - protein, 280 aa, Synechococcus sp. WH 8102
MGGWIDEEHRGVRYGLAGDVLVEETSPFQRISVIRSERYGKGLLLDGCWMTAEQQERHYHEALVHPALCSAEAIERVLVIGGGDGGTARECLRYPEVIHLDLVEIDGRVVELSQEHLPGIGGAVWSDSRCQLTVGDGIAWAANAPDQSYDVVLVDGSDPAGPAEGLFNRAFFEHCRRILKPGGVFATQSESPEAFREVHVAMVRLLREVFGHADPLYGWVPMYPSGWWSWTFAAVDGPRYRTVQPARAALVAEGCEIWSPRWQQGALDAVPAFIARELAP

SEQ ID NO: 7223 - protein, 71 aa, Glycine max
MAETRRSTGTVKWFNAHKGFGFITPQDGTDDLFVHFTSIRSDGYRSLSDGQSVEFLLDDSDDRRAMGVEGS

SEQ ID NO: 7224 - protein, 339 aa, Streptomyces tenebrarius
MKALSFEAPGEAVFGTREVPVPAPGEALIHLGYNSICGSDLSLYRGVWHGFSYPVVPGHEWSGTVVEVNGPGAELVGRDVVGDLTCACGSCAACGRGTPVLCENLQELGFTRDGACAEYMTIPTGNLHVLPEGLSLRAACQVEPVAVALHAVSTVGVEPGERVAVLGAGGIGLMLMQVARQRGGVITTVGEPVAERRAVAAQLGARTVTTGRPGELAELVAKHPDLTPDVVLEASGYPVAVQEAIEVVRPGGRIGLVGYRVEEVGPMATHHVAVKALTIRGSLGPGGRFPEAIDLLARGEIEVEPLLSHEFALDDHARALDLALRRAEGNVRSFFNLRA

SEQ ID NO: 7225 - protein, 112 aa, Bartonella sp. RT222SM
NEACLKMLQEINSVKRIPKFIARAKDKNDPFRLMGFGHRVYKNYDPRAKIMQQTCHEVLKELNIQDDPLLDIAIELEKIALNDEYFVEKKLYPNVDFYSGITLKALGFPTEM

SEQ ID NO: 7226 - protein, 511 aa, Erwinia carotovora subsp. atroseptica SCRI1043
MAHDNLEGRSAFGEVGSLDLKKRYDNFIGGTWVPPDAGQYFVNLTPVTGQPMCEVASSSTRDIDHALDAAHKAKAEWGGLSVQERALVLNRIADRMEQNLERLAQVETWDNGKPIRETSGADVPLAIDHFRYFAACIRAQEGAISEIDGDTVAYHFHEPLGVVAQIIPWNFPLLMACWKMAPALAAGNCIVLKPAKLTPMSVLILMELIQDLLPAGVINVVNGSGSEIGEYLATSKRVAKVAFTGSTEVGQQIMSYAAQNVTPVTLELGGKSPNIFFADVMDKEDSFFDKALEGFTLFAFNQGEVCTCPSRALVQESIYDRFMERAIKRVEAIRIGNPLDSKTMMGAQVSAGQLETILNYIDIGKKEGARVLTGGQRKAMPGGLAEGYYLEPTILFGKNSMRVFQEEIFGPVLAVTTFKTMEDALEIANDTEYGLGAGVWSRNGNVAYRMGRGIQAGRVWTNCYHAYPAHAAFGGYKQSGIGRENHKMMLDHYQQTKCLLVSYSDKPMGLF

SEQ ID NO: 7227 - protein, 494 aa, Bacillus cereus ATCC 10987
MLTKNIELKPKVKAFLNEEIKMFINGEFVPSISGKTFETYNPATEDVLAVVCEAQEEDINVAVKAARSAFESGPWAEMTTAERAHLIYKLADLIEEHGEELAQLEALDNGKPYQVALDDDIAATVENYRYYAGWATKIIGQTIPISKDYLNYTRHEPVGVVGQIIPWNFPLVMSSWKMGAALATGCTIVLKPAEQTPLSLLYTAKLFKEAGFPKGVVNFVPGFGPEAGAAIVNHHDIDKVAFTGSTVTGKYIMRQSAETIKHVTLELGGKSPNIILEDADLEEAINGAFQGIMYNHGQNCSAGSRVFVHRKHYETVVNELVKMANNVKLGAGMEKETEMGPLVSKKQQERVLHYIEQGKAEGATVAAGGERAFEKGYFVQPTVFTNVTDDMTIVKEEIFGPVVVVLPFDSTEEVIERANRSSYGLAAGVWTQNIKTGHQVANKLKAGTVWINDYNLENAAAPFGGFKQSGIGRELGSYALDNYTEVKSVWVNIK

SEQ ID NO: 7228 - protein, 304 aa, Glycine max
MTLNYNIALAFSAVLTLLLFPLLTVGELVEEQPLVLKYHNGQLLKGRITVNLIWYGTFTPIQRSIIVDFINSLSSAPNAPLPSTATWWKTTEKYKVGGGSPALVVGMQFLHPAYTLGKNLKGRDLLALASKFNEINSITVVLTAKDVAVEGFCMSRCGTHGSTRNVKSNARTAYIWVGNSETQCPGQCAWPFHQPIYGPQTPPLVSPNGDAGVDGMVINLATLLAGTVTNPFNNGYFQGPPTAPLEAVSACTGVFGSGSYPGYPGRVLVDKATGASYNAHGANGRRYLVPAMWDPQTSTCKTLV

SEQ ID NO: 7229 - protein, 514 aa, Zea mays
RCPWEDHIFEDQSERGSNALLARAWSPGWQSADKALTAFLNGPLVDYSANHKKADSASTSLLSPYLHFGELSVRKVFHLVRMKQLMWSNDGDRAGEESCTLFLRAIGLREYSRYLTFNHPCSLEKPLLSHLRFFPWVVDEVHFKVWRQGRTGYPLVDAGMRELWATGWVHDRIRVVVSSFFVKVLQLPWRWGMKYFWDTLLDADLESDALGWQYISGSLPDGRELDRIDNPQFEGYKFDPHGEYVRRWLPELARLPTEWIHHPWDAPESVLQAAGVELGSNYPRPIVELDAANSRLQGALSEMWELEAASRAAIENGMEEGLGDSTDEPPIDFPQELRMEVDRQPAQPAIIHTPVVAGWRREDQRVPSMTSSLIRAETELTADFGNTSEDSRPEVPSNIHLQARPEREETVDGGTGNAVRVHGNHHQQNLQNNMHRVLGIAPSISEASSSWTGRDGGVVPVWSPPAASGHSDPYAADEADISSRGYLDRHPQSHTMMNWSQLSQSLTTGWEVDN

SEQ ID NO: 7230 - protein, 339 aa, Schizosaccharomyces pombe
MAELEFTDEKFTKVDPELKEILKKHPAGTENITNIWQMRAMDEECRKQLAETILPLPDDVSVTDILIPTRDGTEIDGRVFTPVSVPADYRSLMVFYHSSGWCMRGVRDDDSLFKILTPKFGCVCVSVDYRLAPESKFPVAHNDAIDSFKWVASNIEKLGANPKRGFFLGGASAGGNFVSVLSHIARDEKIKPELTGLWHMVPTLIHPADLDEETMAQFRSYKETIHAPVITPKIMDIFFENYQPTPKSPLVNPLYYPTGHKDLPPSFFQCCGWDPLRDEGIAYEKALKAAGNETRLIVYEGVPHCFWVYYPMLSLRKKYFEDAIDGFTWLLSHVKKEDD

SEQ ID NO: 7231 - protein, 352 aa, Leptosphaeria maculans
MPPTGSGSSRKISFNVSEQYDIQDVVGEGAYGVVCSALHKPSGQKVAIKKITPFDHSMFCLRTLREMKLLRYFNHENIISILDIQKPRNYETFTEVYLIQELMETDMHRVIRTQELSDDHCQYFIYQTLRALKAMHSANVLHRDLKPSNLLLNANCDLKVCDFGLARSAASTEDNSGFMTEYVATRWYRAPEIMLTFKEYTKAIDVWSVGCILAEMLSGKPLFPGKDYHHQLTLILDVLGTPTMEDYYGIKSRRAREYIRSLPFKKKIPWKAMFPKTNDLALDLLERLLAFNPVKRITVEEALKHPYLEPYHDPDDEPTADPIPEEFFDFDKNKDNLTKEQLKLLIYQEIMR

SEQ ID NO: 7232 - protein, 309 aa, Zea mays
SVRPASAQRPPSVRRCAGAARRSPSEPTTNPMPPHRAGGAAGGGDTSAFFAATLVLWAVSVGFEIGVRGRRELAPVAAGFAFFQAANTAVRGSVSRDPLFVNTAVSLLHSSLTSVSVIFVLANQWRNKGLENMFEHEELFGGSWIGAYSALCFSCGYFAYDQLDMLRYRLYSGWLPGILMHHLILLICFTLALYRNVTINYLILSLVCELHSIFLHVRKVRRMGGFRDFDRTMVKLEWLLNWTTFVAARVICHILITYKLVADAHKFGKGIELPLALLGMAGMNLLNIFLGLDLLKAFTRERNQQSHQD

SEQ ID NO: 7233 - protein, 481 aa, Rhodobacter sphaeroides 2.4.1
MTDFRREKILVGGDWIQADAGGRIEVTNPATGAVIGTVPDAGAAETARAVAAAEAAFGPWRALTAAERATHLRRLAQAILDHREALAELLTEEQGKPLAEARGEVGMSAAYIQWFAEEARRVYGEVIPSPWPDRRLLVTRQPVGVVAAITPWNFPSSMLARKIGPALAAGCTVVAKPASQTPFSGLAWGVLGEMAGLPAGVLNIVTGSARAIGGELTANPSVRKITFTGSTPVGKVLLAQAAGTVKKMSMELGGNAPFLVFDDADLDRAVEGAIAAKFRNAGQTCVCTNRFYAQAGIHDEFVKRLAAATAALKVGPGAQDGSEIGPLIDAAAVAKTEEMVADATAKGGRIVTGGRRHTAGAGFYEPTVIADATDAMTFAREEIFGPVAPVFRFETEEEAIRRANATEYGLACYFYTSDLGRAFRVSEALDYGIVGVNEGLVTTEVAPFGGVKESGFGSEGSHHGMQDYLTLKYTAMGGLGR

SEQ ID NO: 7234 - protein, 337 aa, Rhodobacter sphaeroides 2.4.1
MKAAIFDGSPTLRLTDLPIQEPGPDEVLIRIDSATICGTDQHILEGKFWAKPPVVLGHEFAGYVERVGERVQNCRPGDLVSVEPHVYCGCCKPCRLGKPHLCLDRLAWGINLNGGFEQYATVRMDTVYQVPEGIGPEEAALGEITGCCMHGIDRVGVELGDLVVILGGGAAGLILARLAELRGAARIVISEPNAARREQIRAFGYPDVVDPLNEDLAARIGALTDGLGADVVIEAAGRAETAAQAVELVCHGGRVLFFGVAAPGTMAAIEPNRIFAREITVVGSIRNPYTHHRVMEILPRLRLKDIVTHRFPLENIAEAFDAAHRGEGLKICIKPNG

SEQ ID NO: 7235 - protein, 284 aa, Bacillus halodurans C-125
MTIQWFPGHMAKARREVTEKLKLIDVVIELLDARVPLSSRNPMMDEIVAHKPRLVLLNKDDLADPSKTKEWTRFFEEGGATVLPINAQTGQGVSRISPACQTLAQALIEKQRAKGMKPRAIRAMILGIPNVGKSTLINRLASKRIAKVGDRPGITKQQQWIKVGKELELLDTPGILWPKFDDQATGFRLAATGAIKDELLDFQDVALFVLRYMREMYPDRLMDRYKLNELPEDGVTLFDAIGKKRGHLLSGGYIDYDKTAEMILRELRAGTLGRITLEVPGKTV

SEQ ID NO: 7236 - protein, 307 aa, Sinorhizobium meliloti
MDSKTTKPMPTEAGIRAFHERCEAFYPADAVNASVEQQRQWYDALCAEFDAPSPEGLTRRDERVAGRIPVRYYRPAEVASGTRVFYIHGGGFVVGSLESHDAICAELAHGAQVELVSVDYRLAPEHLWPAAFEDCCDVLEALLADGRPLVVAGDSAGGNLSAGIVLKAKAEGLAGIVGQVLIYPGLGGDLTRGSYIEMAQAPLLSTADVDYYREVLKAPADEPFAHPLRAADLSGLPPAYVSGAYFDPLRDDARAYAARLAQAGVDVTYREEPQMVHSWLRARRMSPGAREGFVRLVQAVARLAGTA

SEQ ID NO: 7237 - protein, 469 aa, Vibrio cholerae O1 biovar eltor str. N16961
MRLVWFRRDLRSFDNTALTAALNSGDPVAAMYIATPEQWHQHHLAPIQADLIWRRLAELQQELAALNVPLFYQQVADFQAAAVAVSQLAKTLNATQVLANRDYELDEQQRDQLAQQLLSEQGIIWSAFDDKCVLPPGSVRTKQGEFFKVFTPFKRAWLTLFQPPVIGKNRPVALWNVPSALAELVWHPEQAFDYPRIDSTPWAADFETVRAQLRDFCRERVQDYHQARDFPAREGTSSLSPYLAIGVLSARQCVARLYHESSMGELSEGAQVWLSELIWREFYQHLVAIEPNLSKSRDFVEWGARLEWWNDNEKFQLWCEGKTGYPIVDAAMRQLNQTGWMHNRLRMIVASFLTKDLHIDWRWGERYFMSRLIDGDYAANNGGWQWCASTGCDGQPYFRIFNPVSQGEKFDPNGDFIRRWVPELRSVSSAYIHQPWTYPAVNSVLYPARLVDHKQEREVTLRLYKTAKG

SEQ ID NO: 7238 - protein, 340 aa, Micromonospora echinospora
MGGRMRALQFHGGHKAQIIDTPRPEAPPGWAVVKVHYCCLCGSDLWLYRGKWHGNRYPIVPGHEWAGVVDSAPEGYESWVGRPVTGDLIVGCQGCGPCRDGLPVMCENLIEIGFTVDGGCAGYVAVPITNLYLLPEGMDLAAASQTEPLAVALHAVDRINLRPAERVAVLGAGGIGQLILQSARATGATVTLATDLVAERRKIAEESGAAAAVHPSELPELTSYADKVDVVFEASGDPESVVRALDLVRPGGRVCLVGYQVGAEHALETARLPLSYASLVGVMGPGGKYREAVDLLANGAIDTQPILTDIVTLDDYAPAIDRAINRTDGTVRVVFDLRNE

SEQ ID NO: 7239 - protein, 492 aa, Oryza sativa (japonica cultivar-group)
MVLSKAVSESDMSVHSTFASRYVRASLPRYRMPENSIPKEAAYQIINDELMLDGNPRLNLASFVTTWMEPECDKLIMAAINKNYVDMDEYPVTTELQNRCVNMIAHLFHAPLGEDETAVGVGTVGSSEAIMLAGLAFKRRWQNKRKAEGKPFDKPNIITGANVQVCWEKFARYFEVELKEVKLRDGYYVMDPEKAVDMVNENTICVAAILGSTLNGEFEDVKLLNDLLDKKNKETGWETPIHVDAASGGFIAPFLYPELEWDFRLPWVKSINVSGHKYGLVYAGIGWCIWRNKEDLPEELIFHINYLGTDQPTFTLNFSKGSSQVIAQYYQLIRHGFEGYRNIMENCHENAMVLKEGLVKTGRFDIVSKDEGVPLVAFSLKDRSRHDEFEISDMLRRFGWIVPAYTMPPDAQHVTVLRVVIREEFSRTLAERLVLDIEKVMYQLDALPSRLMPPVPPAPLLVVAKKSELETQRSVTEAWKKFVLAKRTNGVC

SEQ ID NO: 7240 - protein, 277 aa, Thermoanaerobacter tengcongensis MB4
MELWFTEHQDENLRFSIKVKETLVVEKTPYQHLAILDSYQFGRVLVLDGILQTTEKDEFVYHEMIVHVPLFTHKNPKDVLIIGGGDGGSVREVLKHSSVERVVLAEIDEAVIRNSKKYLPTISSALDDPRVEIMIGDGIKYVNEHKNEFDVVIVDSTDPIGPAVGLFTSDFYRAVYECLREDGIIVAQTESPFIYGKLINKISKMFKEIYPITKAYIATVPTYPGSLWTFTMGSKKYDPEEVDINSIPRIQTKYYTPEIHKAAFVLPKFVKDIFDEV

SEQ ID NO: 7241 - protein, 343 aa, Mycobacterium leprae TN
MRIGILTGGGDCPGLNAVIRAIVRTCDARYGSSVVGFQDGWRGLLENRRMQLCNDDRNDRLLAKGGTMLGTAHVHPDKLRAGLHQIKQTLDDNGIDVLIPIGGEGTLTAAHWLSQEDVPVVGVPKTIDNDIDCTDVTFGHDTALTVATEAIDRLHSTAESHQRVMLVEVMGRHAGWIALSSGLASGAHMTLIPEQPFDVEEVCCLVKRRFQRGDSHFICVVAEGAKPVPGSITLRQGGMDEFGHERFTGVAAQLGAEVEKRINKDVRVTVLGHVQRGGTPTAFDRVLATRFGVNAADASHAGEYGQMVSLRGQDIGRVPLEDAVRQLKLVPESRYDDAAAFFG

SEQ ID NO: 7242 - protein, 466 aa, Magnetospirillum magnetotacticum MS-1
MSMSDELRDAALEYHRLPTPGKISVTPTKPLATQRDLALAYSPGVAAACELIVADEDSAADVTARGNLVAVVTNGTAVLGLGPIGPLAAKPVMEGKGVLFKKFAGIDVFDMELAELDPDKLVDIIAAMEPTFGAINLEDIKAPECFEVERKLQERVKIPVMHDDQHGTAIVVGAAMVNALRVVGKDIGEVKLVASGAGAAALACLNLLCKLGVKRENVWVTDIKGVVYEGRTELMDQYKSIYSKKTDMRTLAEVIEGADIFLGLSAPRVLTGEMVDKMAQKPIVFALANPTPEILPDEVKAVRPDAIIATGRSDYPNQVNNVLVFPYIFRGALDVGATQINDEMKLACVYALANLAMAESDERVRAAYGTAPLTFGPEYLIPKPFDSRLIIKIAPAVAKAAMESGVARRPIIDFDVYMDRLNQFVFRSGLVMKPVFDRARQDMRRIVYTEGEGRRVLHAVQTVVDE

SEQ ID NO: 7243 - protein, 408 aa, Methanococcus maripaludis S2
MATADLFADPTNIVTGLSTLATSGDVMFLVLMGVLVFSMQLGFALLEGGQVRKKNVNNVMMKNMADWLIGAVSWLFIGGVLSVSLVPADFFSWWGQIFTTNFANNGIDLANWFFGLVFAATAATIVSGGVAERIKFKSYLLMSIIITAILYPLFVYLGPWGSGMIPFNDYAGSFVVHGLGGFLALGAIAALGPRIGKFVNKKAISIPGHNIPMSVFGAFVLAIGWYGFNVGSSFAVADISGLVCATTTLAMAGGGIGALLASKDDVLFTANGIVAGLVAICSGTDVVSPIGALIIGLVAGIQVPIVYKIVEKMGLDDVCGVIPVHGTAGILGGILTGVFGMAALGGAGGVSLVNQLIAAGLTVVYGTGLGFGLGKLVGGFTGGLRVTEEEEKMGLDLAEHKLPAYPDE

SEQ ID NO: 7244 - protein, 312 aa, Triticum aestivum
  misc_feature (24)..(25): Xaa can be any naturally occurring amino acid
  misc_feature (29)..(30): Xaa can be any naturally occurring amino acid
  misc_feature (32)..(32): Xaa can be any naturally occurring amino acid
  misc_feature (34)..(38): Xaa can be any naturally occurring amino acid
  misc_feature (40)..(40): Xaa can be any naturally occurring amino acid
  misc_feature (42)..(42): Xaa can be any naturally occurring amino acid
  misc_feature (45)..(45): Xaa can be any naturally occurring amino acid
  misc_feature (50)..(50): Xaa can be any naturally occurring amino acid
  misc_feature (53)..(53): Xaa can be any naturally occurring amino acid
  misc_feature (61)..(64): Xaa can be any naturally occurring amino acid
  misc_feature (67)..(68): Xaa can be any naturally occurring amino acid
  misc_feature (73)..(74): Xaa can be any naturally occurring amino acid
  misc_feature (194)..(194): Xaa can be any naturally occurring amino acid
  misc_feature (240)..(240): Xaa can be any naturally occurring amino acid
  misc_feature (256)..(257): Xaa can be any naturally occurring amino acid
NGYFFFFNEKKLKAGKGCTRVSRXXYTAXXVXLXXXXXRXKXAPXTKWPXKLXWRTLKAHXXXXRAXXTFGAXXPVQVKIMAKHLNTIYVSGWQCSSTHTSTNEPGPDLADYPYDTVPSKVEHLFFAQQYHDRKQQEARMSLPRAERAHAPFVDFLKPIIADGDTGFGGATATVKLCKLFVERGAAGVHLEDQXSSVTKKCGHMAGKVLVAVSEHVNRLVAARLQFDIMGVETVLVARNXTPVAATLIKNNIHARXXKFILGATNPRLKKPASTGNSGPSARRNGGFKAIQGWTQRGKKNLPRVGKIAKGKL

SEQ ID NO: 7245 - protein, 447 aa, Glycine max
RPTRSGHRAAAADPRVQYHRPRAWVTAWERQRIWLRAADLFEKHNDDLAALETWDNGKPYEQSAQIEIPMLVRLFRYYAGWADKIHGLTVPADGPYHVQTLHEPIGVAGQIIPWNFPLVMFAWKVGPALACGNTIVLKTAEQTPLSALYASKLLHEAGLPPGVLNIISGFGPTAGAAIASHMDIDKLAFTGSTETGKIVLELAARSNLKPVTLELGGKSPFIVCEDADVDEAVELAHFALFFNQGQCCCAGSRTFVHERVYDEFIEKAKARALKRAVGDPFKGGIEQGPQIDSEQFQKILKYIRSGVESGATLETGGDRFGNSGFYIQPTVFSNVKDDMLIAKEEIFGPVQTILKFKDLDDVIQRANNTHYGLAAGVFTKNINTANTLTRALRAGTVWVNCFDTFDAAIPFGGYKMSGQGREKGEYSLKNYLQVKAVVTSLKNPAWL

SEQ ID NO: 7246 - protein, 373 aa, Bacillus sp. KSM-K16
MQVEQTYHPGLDGVIAAETDLSFLDTEQGQIIIHGYDLIQLSKTNGYLDIVHLLLKGELPSEQERLALAERLSGSYDLPEAVLDVLKRLPASTHPMDALRTGVSVLGGFDTRLDDRSEEANRERAYELLAKLPAVVANSYRILEKKQVLTPKDSLSYSANFLYMITGNVPSELEERVFDQSLLLYSEHEMPNSTFAARVIASTLSDMYGALTGAVASLKGHLHGGANEAVMYMLLDANSPEEFETLLSNKLKKKEKIMGFGHRVYMKKIDPRALIMKEALAELSQAAGDDRLLQMCEAGEALMAKEKGLYPNLDYYAAPVYWMLGIPISLYTPIFFSSRTAGLSAHVIEQHRNNKLFRPRVKYTGPRYTSVQK

SEQ ID NO: 7247 - protein, 464 aa, Zea mays
MVNGEQRADAECTRASLLGRYEIGRTLGEGNFGKVKYARHIATGGHFAIKILDRSKILSLRIDDQIRREIGTLKLLKHPNVVRLHEVAASKTKIYMVLEFVNGGELFDKIAIKGKLSEHEGRRLFQQLIDGVSYCHDRGVYHRDLKPENVLVDRKGTIKISDFGLSALPQHLGSDGLLHTTCGSPNYIAPEVLQNRGYDGSLSDLWSCGVILYVMLVGCLPFDDRNLVVLYQKIFKGDCQIPKWLSPAAQDLLKRILQPNPMKRINVAGIREHEWFKKDYVPAVPHDDDEDVLPSPAPSIKEPIDEPAQEKCTPINAFQLIGMASSLDLSGFFEEEDAAQRKIRFTSTHPPKDLFDKIESVVMEMGFKVHRGAGKLKVLKNSKCSRNSRNPSSLLVCTEVFELGPSLYVVELRKSHGDSTLYRQLCERLSDELGACKTDQIARTESSSDDLSSLDGEAFPLSGF

SEQ ID NO: 7248 - protein, 391 aa, Clostridium tetani E88
MSLDVKEEALRIHEEKKGKLEIIGTMSVETPRDLSLAYTPGIAAPCLEISKDKEKAYKYTIKGKTVAVITNGTAVLGLGDIGPEAGLPVVEGKALLLKRFGGVNAVPISIDSKDADDIVNTIKNISPGFGGIHLEDIKAPECFYIEDKLKEKLNIPVYHDDQHGTSIAVLAGLYNSLKILKKDIEDIKVVINGAGASGIAIAKLLIKAGVKEIILCDLQGALVEGDSTLNNAQKEIAKVTNRNFEKGSLEDVIKNKDVFIGVSDGNLLTKEMVNSMNKDSIVFALANPVPEIMPEEAKKGGARIIATGRSDFPNQINNVLVFPGIFKGALKVGAKDICNEMKIAAAKGLANLIKDNELNEEYIVPSVFEDGVADAVANEVISIAKKLNLTR

SEQ ID NO: 7249 - protein, 506 aa, Brassica napus
MTSINVKLLYHYVITNLFNLCFFPLTAIVAGKAYRLTIDDLHHLYYSYLQHNLITIAPLFAFTVFGSVLYIATRPKPVYLVEYSCYLPPTHCRSSISKVMDIFYQVRKADPSRNGTCDDSSWLDFLRKIQERSGLGDETHGPEGLLQVPPRKTFAAAREETEQVIIGALENLFKNTNVNPKDIGILVVNSSMFNPTPSLSAMVVNTFKLRSNVRSFNLGGMGCSAGVIAIDLAKDLLHVHKNTYALVVSTENITYNIYAGDNRSMMVSNCLFRVGGAAILLSNKPGDRRRSKYELVHTVRTHTGADGKSFRCVQQGDDENGKIGVSLSKDITDVAGRTVKKNIATLGPLILPLSEKLLFFVTFMGKKLFKDKIKHYYVPDFKLAIDHFCIHAGGRAVIDVLEKNLALAPIDVEASRSTLHRFGNTSSSSIWYELAYIEAKGRMKKGNKVWQIALGSGFKCNSAVWVALNNVKASTNSPWEHCIDRYPVKIDSDSGKSETRVQNGRS

SEQ ID NO: 7250 - protein, 504 aa, Triticum aestivum
  misc_feature (470)..(470): Xaa can be any naturally occurring amino acid
MGSNEGGGCDGKPVVVVPEIKYTKLFINGEFVDAASGKTFETRDPRTGDVLAHIAEADKADVDLAVEAAREAFEHGKWPRMSGYERSRAMNKLADLMEQHIEELAALDGADAGKLLLLGKIIDIPSAVQMLRYYAGAADKIHGESLRVSGKYQGYTLKEPIGVVGIIIPWNFPSLMFFLKISPALAAGCTVVVKPAEQTPLSALYYAHLAKLAGIPDGVINVVPGFGPTAGAAIASHMDVDSVAFTGSGEVGRLIMEASARSNLKTVSLELGGKSPLIIFDDADVDMAVELSRLAIFFNKGEVCVAGSRVYVQEGIYDEFVKRAVVAAQNWKVGDPFDVATNMGPQVDKEQFERVLRYIEHGKSEGATLLTGGKPASDKGYYIEPTIFADVKEDMKIAQDEIFGPVMSLMKFKTVDEAIEKANCTKYGLAAGIITKNLDIANRVSRSVRAGTVWVNCYFAFDPEAPFGGXYKMSGFGRDQGMMAIDKYMQVKSVITAVPDSPWY

SEQ ID NO: 7251 - protein, 382 aa, Aspergillus nidulans FGSC A4
MAPTITALQYYGAKNVRLQQVQPRPCHADEVRIQIAYCGICGSDIHEYLGGPVFSPPPGKKNPYTGAELPVTLGHEISGTIVELGSSVPASDPNLKLGMRVAVNPAMNDRHHGVEKCTACQLGLPNICKRYTSYGFSAAGGGLASEIVVKHYACIPLPDSISLKVGALLEPLAVAWHCIRISGFQRDQTVLILGAGPIGLAILMILRVWGVKTVVISEVAASRKRMARELGADLVLDPTELGSSKDGLDPVVVATQKAMKADGADVTFDCTGLQSTLDTAIAATRPGGTVFNVAIHEKPLMVNLNELTLGERRLTGGICYTDVDFQELIAALEAGKIQAERLITSIVDLDDVIDKALMELIHNKAAHVKILVKPNHVRSVRL

SEQ ID NO: 7252 - protein, 198 aa, Gossypium barbadense
MCGGAIISDFVAPKYDRKLTGDDLWSELDIFSDLLGFDNNGKSFVNHQFHNNNNNKLINPKDNQLNKERSETIQKTSQVTKKVEKTQRTRKNFYRGIRQRPWGKWAAEIRDPQKGVRVWLGTYNTAEEATRAYDEAAKRIRGDKAKLNFPQTPTKNQAASPALTLLPPAKKRCIVPGVNSTEFTRLDSPPISLWVLGV

SEQ ID NO: 7253 - protein, 634 aa, Glycine max
  misc_feature (479)..(479): Xaa can be any naturally occurring amino acid
MGSNRTIVWFRRDLRIEDNPALAAAAKEGSVLPVYIWCPKEEGQFYPGRVSRWWLKQSLAHLDQSLKSLGSRLVLIKTHSTVTALVECVKAIQATKVVFNHLYDPVSLVRDHNIKEKLVEQGISVQSYNGDLLYEPWEVYSESGRAFTTFNAFWKKCLHMQMDIVSVVPPWQLIPAEGKVEECPLEELGLENESEKPSNALLGRAWSPGWRNADKALTEFVEQHLLDYSKKRLKVGGDSTSLLSPYLHFGELSVRKVFQVTRMKQILWTNEGNSAGEESVNLFLRAIGLREYSRYLCFNFPFTHEKALLGHLKFFPWNPDADIFKNWRQGRTGFPLVDAGMRELWATGWIHNRIRVIVSSFAVKMLLLPWKWGMKYFWDTLLDADLESDILGWQYISGGLPDGHELERLDNPEIQGVKFDPQGEYVRQWLPELARMPTEWIHHPWDAPLTVLRAAGVELGQNYPKPIIDIELARERLTXAIFKMWESEAAAKAAGSEPRDEVVVDNSNSLENLDTQKVVVLGKAPCATISANDQKVPALQDSKNEPPTRKRPKHMIEEGQNQDHSQNHNKDTGLSSIDQDICSTADSSSCKKQCASTSSYSFSVPQQCSSSSNLKWPWQDQIDMEQSSSKDGAM

SEQ ID NO: 7254 - protein, 475 aa, Sinorhizobium meliloti
MDTQLLIGSRFEAGTEAEEHILNPRTGAGIIDLAEASHAQIDAAVDAAERAFVGWSQTTPAERSNALLKIADAIEKEADEFAALEALNCGKPINAVKNDELPAIIDCWRFFAGAVRNLHAPAAGEYLPGHTSMIRRDPIGIVGSIAPWNYPLMMMAWKLAPAIGGGNTVVFKPSEQTPLTALKLARLIADILPEGVVNVITGRGETVGNALINHPKVGMVSITGDIATGKKVLAAAAKTVKRTHLELGGKAPVIVYGDADLEAVVNGIRTFGYYNAGQDCTAACRIYAEAGIYEKLVADLTSAVSTIRYNLDDDTENEIGPLISRRQRDRVASFVERAADQKHIEITTGGRTGSDEGFFFQPTVVAGATQEDEIVRREVFGPVVSVTRFTGKDDAVAWANDSDYGLASSVWTKDISKAMRAASRLQYGCTWINTHFMLTNEMPHGGIKQSGYGKDMSVYALEDYTAVRHIMINHG

SEQ ID NO: 7255 - protein, 449 aa, Bacillus cereus G9241
MKTKQTDELLAKDEQYVWHGMRPFSPNSTMVGAKAEGCWVEDIQGKRYLDGMSGLWCVNSGYGRKELAEAAYKQLQTLSYFPMSQSHEPAIKLAEKLNEWLGGEYVIFFSNSGSEANETAFKIARQYYAQKGEPHRYKFMSRYRGYHGNTMATMAATGQAQRRYQYEPFASGFLHVTPPDCYRMPEIERENIYDVECVKEVDRVMTWELSETIAAFIMEPIITGGGILMPPQDYMKAVHETCQKHGALLISDEVICGFGRTGKAFGFMNYDVKPDIITMAKGITSAYLPLSATAVKKEIYEEFKGKGEYEFFRHINTFGGNPAACALALKNLEIMENENLIERSAQMGSLLLEQLKEEIGEHPLVGNIRGKGLLVGIELVNDKETKEPIDNDKIASVLNACKEKGLIIGRNGMTTAGYNNVLTLAPPLIISSEEIAFVVGTLKTAMERI

SEQ ID NO: 7256 - protein, 159 aa, Capsicum frutescens
MSMIPSFFGGRRSNIFDPVSLDLWDPFEGFPISSTIANTPSSARETSAFPNARIDWKETPQAHIFKVDVPGIKREEVKVQVEEGRILQITGERSREQEEKNDQWHRMERSSGKFLRRFRLPENTKMGEIKAAMENGVLTVTVPKEEEKRSEVKAIDISG

SEQ ID NO: 7257 - protein, 489 aa, Halobacterium sp. NRC-1
MPAAQPPGMQLFWHRRDLRTTDNRGLAAAAPGVTAVDGGHDQGPVAAVFCFDDEVLAHAAPPRVAFMLDALAALRERYRDLGSDLIVRHGDPAAVLPAVANDLDATRVVWNHDYSGLATDRDAGVRDALDAAGVAHAQFHDAVHHRPGEIRTNAGDPYSVYTYFWRKWQDREKNPPAPEPEPADLAADTALADTSPLPSVQELGFAEPEAAVPDAGTAAARSLLDAFRESGDIYRYEDRRDYPHEEPTSRLSPHLKFGTIGIRTVYEAARAAKSDADTDDERENVAAFIGQLAWREFYAQVLYFNQNVVSENFKAYEHPIEWRDDPAALQAWKDGETGYPIVDAGMRQLRAEAYMHNRVRMIVAAFLTKDLLVDWRAGYDWFREKLADHDTANDNGGWQWAASTGTDAQPYFRVFNPMTQGERYDPDADYITEFVPELRDVPADAIHSWHELSLSERRRHAPEYPDPIVDHSQRREDAIAMFERARGDE

SEQ ID NO: 7258 - protein, 318 aa, Thermobifida fusca
MPLDPETRALIDELVSGSPPGEAVGVPDASLHSSLRERRIVGPGVALVRDLTIPSPAGGIPARLYHPAPDNPATGCAVFFHGGGYVFGNLDTHDHIARLLAAESRAAVVAVDYRLAPQHRFPAAVEDAFTATRWVAEHATRLGVDAARLAVVGDSAGGGLAAAVALLVRDGGPPLAAQVLIYPVIDLTGYPVTADTPYPSRIAHGEGCFLTTAAMQHVVEQYLADPADAADFRASPIRAADLSGAAPALVVSAEFDPLRDEAEAYARALAAVGVPATTVRINGGVHGMFGLGPVLPLSRHAELPVIALLRDTLQPPQR

SEQ ID NO: 7259 - protein, 334 aa, Arabidopsis thaliana
  misc_feature (26)..(26): Xaa can be any naturally occurring amino acid
  misc_feature (51)..(51): Xaa can be any naturally occurring amino acid
  misc_feature (54)..(54): Xaa can be any naturally occurring amino acid
  misc_feature (109)..(109): Xaa can be any naturally occurring amino acid
  misc_feature (149)..(149): Xaa can be any naturally occurring amino acid
  misc_feature (155)..(155): Xaa can be any naturally occurring amino acid
  misc_feature (242)..(242): Xaa can be any naturally occurring amino acid
  misc_feature (278)..(278): Xaa can be any naturally occurring amino acid
SDAKETSATDLKRPREEDDNGGAATXETENGDQKKEPACFSTVIPGWFSEXSPXWPGEAHSLKVEKVLFQGKSDYQDVIVFQSATYGKVLVLDGVIQLTERDECAYQEXITHLPLCSIPNPKKVLVIGGGDGGVLREVARHASIEQIDXCEIDKXVVDVSKQFFPDVAIGYEDPRVNLVIGDGVAFLKNAAEGSYDAVIVDSSDPIGPAKELFEKPFFQSVARALRPGGVVCTQAESLWLHXDIIEDIVSNCREIFKGSVNYAWTSVPTYPSGVIGFXLCSTEGPDVDFKHPLNPIDESSSKSNGPLKFYNAEIHSAAFCLPSFAKKVIESKAN

SEQ ID NO: 7260 - protein, 267 aa, Triticum aestivum
  misc_feature (2)..(2): Xaa can be any naturally occurring amino acid
  misc_feature (56)..(57): Xaa can be any naturally occurring amino acid
  misc_feature (192)..(192): Xaa can be any naturally occurring amino acid
  misc_feature (203)..(203): Xaa can be any naturally occurring amino acid
  misc_feature (230)..(230): Xaa can be any naturally occurring amino acid
MXFLIFVLLAMAMKIATAARELNPSNKELQSPQQSFSYQQQPFRQPQQPFYQQPQXXFPQPQQAFPHQPQQQFPQPQQPQQQFPQPQQPQQPFPQPQQAQLPFPQQPQQPFPQPQQPQQPFPQSQQPQQPFPQPQQPQQSFPQQQQPLIQPYLQQQMNPCKNYLLQQCNPVSLVSSLVSMILPRSDCQVMQXQQCCQQLAQDXPAKLQVCKPSISVVHSNRHASKEQQQXNTRFSGQLVQAPSKGKGIIQPQQPGIGGRFGPFQNKV

SEQ ID NO: 7261 - protein, 122 aa, Cucumis sativus
MIQPQTLLNVADNSGARELMCIRIIGASNRRYAHIGDVIVAVIKKAVPNTPLERSEVIRAVIVRTCKELKRENGMIIRYDDNAAVVIDQEGNPKGTRIFGAIARELRQLNFTKIISLAPEVL

SEQ ID NO: 7262 - protein, 411 aa, Methanococcus maripaludis S2
MVTADLFNNPTNIMDALNTLANSSDVMFLIFTGAFIFIMHLGFAMLEGGQVREKNVNNAMMKNMGDWIIGCISWLLVGSVIARTLNPADFFIWWGKIASATPFLTNNGLELANWFLGLVFAATAATIVAGGIAERIKFKSYILISIVITALLYPFFSYLGPWGAGVIPFHDYAGSLMVHGVGGFLALGLIAAIGPRFGRFVNKKAITIPGHNIPMSILGAYILAFGWYGFNVGSSLALSDISGLVCATTTLAMAGGGLGGCLFSKNDVLYTANGLLAGTVAICAGTDIVSPLGALIIGFIAGSQVPLIFKIVEKMGLDDVCGVIPVHATSGALGAILAGIFGMTAFGGVGGVSLTEQIIATLICAVYGTGAGFILGKLVGAVTGGLRVKESEEKAGLDISIHKLPAYPKEN

SEQ ID NO: 7263 - protein, 494 aa, Bacillus anthracis str. Ames 0581
MLTTNIELKPKVKAFLDEEIKMFINGEFVPSISGKTFETYNPATEDVLAVVYEAQEEDIDVAVKAARSAFESGPWVEMTTAERAHLIYKLADLIEEHGEELAQLEALDNGKPYQVALDDDIAATVENYRYYAGWATKIIGQTIPISKDYLNYTRHEPVGVVGQIIPWNFPLVMSSWKMGAALATGCTIVLKPAEQTPLSLLYTAKLFKEAGFPNGVVNFVPGFGPEAGAAIVNHHDIDKVAFTGSTVTGKYIMRQSAETIKHVTLELGGKSPNIILEDADLEEAINGAFQGIMYNHGQNCSAGSRVFVHRKHYETVVNELVKMANNVKLGAGMEKDTEMGPLVSKKQQERVLHYIEQGKAEGATVAAGGERAFEKGYFVQPTVFTDVTDDMTIVKEEIFGPVVVVLPFDSTEEVIERANRSSYGLAAGVWTQNIKTGHQVANKLKAGTVWINDYNLENAAAPFGGFKQSGIGRELGSYALDNYTEVKSVWVNIK

SEQ ID NO: 7264 - protein, 274 aa, Mesorhizobium sp. BNC1
MQTVTAHGATIPALGFGVFRMSDAEVERIIPAALEAGFRHFDTAQIYQNEAALGRALERAGARREDLFLTTKVWVDNYSADKFAASVDESLEKLKVDQVDLLLLHWPAHEVPVAAQIERLNAVKDAGKTRFIGVSNQNIAQMRESIARSAAPIVTNQVELHPYLPQHSLVAAARDSAVAVTAYYGMADGAVPKDPVLQQIGARYGKSAAQVGLRWLVQQGYVALSKTANPARVAENIAIFDFALDETDMAAIAKLARPDGRLVSPPGLAPDWDA

SEQ ID NO: 7265 - protein, 482 aa, Rhodococcus rhodochrous
MSMQYDSLFIGGDWIAPSSSKRITAISASTEQPIGSVPEAQEADVDAAVAAARRALDDPAGWAHWAPAARAAAIERLADVLERRAEDVVQCVSAQNGMPVAVARQLEGVFPVVLLRYYAGLARDTATEETRPGLFGGSTLVCREPLGVVGAIVPWNFPQTLAAFKYAPALAAGCTLVIKPSPETVLDAFVFAEAVAEAGIPAGVVNVVPGGREVGAYLVEHPGVDKISFTGSTAAGRSIGEVCGRLLRPVTLELGGKSAAIVLDDAGLDLQTMSEKLFAATLLNNGQTCFLGTRVLAPRSRYSEIVDLFTDLAGTLKVGDALDDTTQIGPMATAAQRDRVEQYIAKGLGDGARITIGGGRPADQDKGWFVEPTIFADVENNHTIAQEEIFGPVLSVIPYSDEDEAVRIANDSDFGLGGTVWTNDPDRGLALAKRVQTGTIGINGYLPEPTAPFGGVKASGLGRELGPEALSNYQQLKSIYLD

SEQ ID NO: 7266 - protein, 280 aa, Vigna radiata
GEGTYGVVYKARDRVTNEAIALKKIRLEQEDEGVPSTAIREISLLKEMQHRNIVRLQDVVHSGKRLYLVFEYLDLDLKKHMDSSPEFAKDLRQVKMFLYQILCGIAYCHSHRVLHRDLKPQNLLIDRSTNSLKLADFGLARAFGIPVRTFTHEVVTLWYRAPEILLGSPRYSTPVDIWSVGCIFAEMVNQRPLFPGDSEIDELFKIFRILGTPNEDTWPGVTSLPDFKSAFPKWQPKDLKTVVPNLDPAGLDLLSRMLHLDPSKRITGRSALEHEYSERH

SEQ ID NO: 7267 - protein, 499 aa, Escherichia coli
MTEPHVAVLSQVQQFLDRQHGLYIDGRPGPAQSEKRLAIFDPATGQEIASTADANEADVDNAVMSAWRAFVSRRWAGRLPAERERILLRFADLVEQHSEELAQLETLEQGKSIAISRAFEVGCTLNWMRYTAGLTTKIAGKTLDLSIPLPQGARYQAWTRKEPVGVVAGIVPWNFPLMIGMWKVMPALAAGCSIVIKPSETTPLTMLRVAELASEAGIPDGVFNVVTGSGAVCGAALTSHPHVAKISFTGSTATGKGIARTAADRLTRVTLELGGKNPAIVLKDADPQWVIEGLMTGSFLNQGQVCAASSRIYIEAPLFDTLVSGFEQAVKSLQVGPGMSPVAQINPLVSRAHCDKVCSFLDDAQAQQAELIRGSNGPAGEGYYVAPTLVVNPDAKLRLTREEVFGPVVNLVRVADGEEALQLANDTEYGLTASVWTQNLSQALEYSDRLQAGTVWVNSHTLIDANLPFGGMKQSGTGRDFGPDWLDGWCETKSVCVRY

SEQ ID NO: 7268 - protein, 160 aa, Triticum aestivum
  misc_feature (100)..(100): Xaa can be any naturally occurring amino acid
  misc_feature (113)..(113): Xaa can be any naturally occurring amino acid
  misc_feature (116)..(116): Xaa can be any naturally occurring amino acid
  misc_feature (118)..(118): Xaa can be any naturally occurring amino acid
  misc_feature (131)..(131): Xaa can be any naturally occurring amino acid
  misc_feature (134)..(134): Xaa can be any naturally occurring amino acid
PAVMASSATTVAPFQGLKSTAGLPVSRRSGSAGLSSVSNGGRIRCMQVWPIEGIKKFETLSYLPPLSTEALLKQVDYLIRSKWCPASIQQVGSVSVSTTXPRYYDGRYWDMWXLPXFXCTDQPSAQQVEEXRRXLTLAVQFDKQMLTHASGTARASKSIE

SEQ ID NO: 7269 - protein, 499 aa, Ruegeria sp. PR1b
MNAASFTKSFWHDEAKKLEFRTKHLINGEWVDSEDGTTFDTINPATGETIAKVASGKAADIDKAVKNARETFKSGVWSMLAPRERLAVIERFSALIEENAVEFALLDCLDMGKPVMDMINIDIPESVKNLKFFAETADKVHGSLTATDPSVVHYILRQPLGVVGLITPWNYPLMMAAWKLGPALITGNSVVLKPAEQAPLSCALLGDLFLKAGGPAGVLNVVQGLGEEAGKAIGLHPDVDKIGFTGSTEVGKLLMTYAGQSNMKRVTTECGGKTPQIVFADYDNLDKAVTSAVYGIYGNMGEMCNAGSRILVQRPIYDEFIKRFSELTASNMVVGDPLDPDTTIGPLVTVEQQERVLEYIEIGKKEGATLALGGGRGLNSGCYVEPTLFTDVTNSMRVAQEEIFGPVGTVIPFDTAEEALEIANDSLYGLAAAVWTNDLKTAHRFGRDLESGFVWVNTFDIGDMTSIWGGYKQSGNGRDTCIEALSQYTQTKSVWMDMA

SEQ ID NO: 7270 - protein, 146 aa, Clostridium tetani E88
MFDMIPFKRNNSMKRDSYFDEFFDNFFNNDFLVPIKFPKNNFRADLKETNNEYIIEADLPGISKDAVKVNYSNNNLVISAKREDIIENKDENYIRRERSYGEFKRAFYVDNVDENNIKASFKNGVLRINLTKLEDTTKARKQIEIE

SEQ ID NO: 7271 - protein, 110 aa, Triticum aestivum
  misc_feature (76)..(76): Xaa can be any naturally occurring amino acid
MDSQFGALERGGSRQRRGPALARPNTAKRHMQQQRANAADKKVVIPNYFGIEAFFVLACLTVSLLILPLVLPPLPXPPSLLLFVPVCLLILLMVLAFMPNDVRSMATSYL

SEQ ID NO: 7272 - protein, 230 aa, Triticum aestivum
MKTLLILTILAMATTIATANMQVDPSGQVQWPQQQPFPQPQQPFCQQPQRTIPQPHQTFHHQPQQFPQTQQPQQPFPQPQQTFPQQPQLPFPQQPQQPFPQPQQPQQPFPQSQQPQQPFPQPQQQFPQPQQPQQSFPQQQQPAIQSFLQQQMNPCKNFLLQQCNHVSLVSSLVSIILPRSDCQVMQQQCCQQLAQIPQQLQCAAIHSVAHSIIMQQEQQQGVTILRPLFQ

SEQ ID NO: 7273 - protein, 292 aa, Zea mays
MPSVEVEVQVGGAGGWRPKQQHHHPLEIRQVWADNVDREFKLIRAAIERFPYVSMDTEFPGVIHHPPPAVHHSTLTAPQRYALLKSNVDALHLIQVGLALAPSPGSPPALAFQINLRGFDPRVHRHAPDSVRLLAASGLDLAAHRARGVPARAFAALLASSGLICNPAVAWVTFSSAYDFAYLVKLLMGRKLPRALPDFLRYVRVYFGAAVYDVKHMARVACASHGEVALLGGLERVAAALRVRRAAGQGHQAASDSVLTWDTFREMARIYFPKEGSLEPCAGVLYGLELPN

SEQ ID NO: 7274 - protein, 272 aa, Leptospirillum ferrooxidans
GPQDRKNTPKMAKSNAHCGPKHSPLLFLGTFILWLGWFGFNPGSTLMATTPSVGYFAYIAMTTNLAAAAGALAAMFTAWKILGAPDMSMVANGAIAALVAITASCAFVDPWASVVIGAVAGVIAVVGVLAIDRIHIDDPVGAVSVHGMAGIWGTLSNGLFATPDRVKLLAVGTPGLFYGGGFHQLLVQAEGVSASLAYVFFVSLLVFYVIKVTIGLRVSEHDEVSGLDISEHKMWGYPEMFSGGFGGGTAPGELAGRSEMSMSAAKPVTQRT

SEQ ID NO: 7275 - protein, 506 aa, Bacillus sp. KSM-K16
MAYQQPNTEGALVHFKERYDNFIGGEWVAPVNGRYFENRSPVTGKPFCEVARSSAEDVELALDAAHNAKASWGKMPAAQRANLLNKVADRIEENLEMLAVAETWDNGKPIRETLNADIPLAVDHFRYFAGVIRAQEGTLSQIDENTVAYHFQEPLGVVGQIIPWNFPILMAVWKLAPALAAGNCVVLKPAEQTPASIFVLLELLSDLLPPGVVNVVSGFGLEAGKPLASSPRIAKIAFTGETTTGRLIMEYASANLIPVTLELGGKSPNIFFRDVMEKEDDFLDKAIEGFVLFALNQGEVCTCPSRALIDETIYDAFIEKALQRVAAIKQGNPLDPETMMGAQASEEQLEKILSYLAIGKEEGAEVLAGGNQRQLSGDYSGGYYVEPTVFKGTNNMRIFQEEIFGPVVSVATFKDADEALRIANDSLYGLGAGVWTRNINTAYRFGRQIEAGRVWVNCYHAYPAHAAFGGYKKSGVGRETHLMMLNHYQQTKNMLVSYNDDSQGFF

SEQ ID NO: 7276 - protein, 219 aa, Coxiella burnetii RSA 493
MYRYGNLFQTPILRSPLEDQFSDYVLWRLDCEPFVEVLERTCRMNDEKLRTQNVEATLFDSAKKPEISFADYIWRIVAYARLTHSQMIHTLIYLDRCQENFFLTSLNFYRLFLVAALVAQKFHQDDSFSNKSFADLVGITVKELNILEAKFLFAISFSLYVLPKTYKEYNRIVGGQRINRQLVEARRSNLSFFSLFPHTVNTFPHRKRNSYHFLHRPRF

SEQ ID NO: 7277 - protein, 430 aa, Oryza sativa (indica cultivar-group)
AAAGAKEDVKEDGAAAAAAAADYDGSPPPPRGKKKKDDEERSSSLPEEKDAKNGGGDEVLSAVTTEDSSAGAAKSCSPSAEGHSKRKPSSSSSSAAAGKNSHGKRKVKVDWTPELHRRFVQAVEQLGIDKAVPSRILELMGIECLTRHNIASHLQKYRSHRKHLMAREAEAASWTQKRQMYTAAAAAAAVAAGGGPRKDAAAATAAVAPWVMPTIGFPPPHAAAMVPPPPHPPPFCRPPLHVWGHPTAGVEPTTAAAPPPPSPHAQPPLLPVWPRHLAPPPPPLPAAWAHGHQPAPVDPAAYWQQQYNAARKWGPQAVTPGTPCMPPPLPPAAMLQRFPVPPVPGMVPHPMYRPIPPPSPPQGNKLAALQLQLDAHPSKESIDAAIGDVLVKPWLPLPLGLKPPSLDSVMSELHKQGIPKVPPAASGAAG

SEQ ID NO: 7278 - protein, 186 aa, Thermus thermophilus
ATGPRYKVPMRRRREARTDYHQRLRLLKSGKPRLVARKSNKHVRAQLVTLGPNGDDTLASAHSSDLAEYGWEAPTGNMPSAYLTGLLAGLRAQEAGVEEAVLDIGLNSPTPGSKVFAIQEGAIDAGLDIPHNDDVLADWQRTRGAHIAEYDEQLEEPLYSGDFDAADLPEHFDELRETLLDGDIEL

SEQ ID NO: 7279 - protein, 262 aa, Triticum aestivum
  misc_feature (234)..(235): Xaa can be any naturally occurring amino acid
  misc_feature (241)..(242): Xaa can be any naturally occurring amino acid
  misc_feature (248)..(249): Xaa can be any naturally occurring amino acid
  misc_feature (253)..(255): Xaa can be any naturally occurring amino acid
MERKSAILMNRYELGRMLGQGTFAKVYHARSLATNQSVAIKVIDKDKVLRVGMIDQIKREISIMRLVRHPNIVQLHEVMASKSKIYFAMEYVRGGELFARVAKGRLKEDAARKYFQQLIGAVDFCHSRDVYHRDLKPENLLVDEHGNLKGSDFGLSALKECQKQDGLLHTTCGTPAYVAPEIINKKGYDGEKADIWSCGVILFVLLAGYLPFQDSNLMEMYRKISKGDVRYPQXXSSDARXXLSRLLXXNPNXXXTMDKLIE

SEQ ID NO: 7280 - protein, 430 aa, Brucella suis 1330
MSDKTASFTLDGKTFDLPVRKGTVGPDVVDIGPLYKNSHAFTYDPGFTSTASCESKITYIDGDEGVLLYRGYPIDQLAEHGDFLETCYLLLYGELPTATQKADFDYRVTRHTMLHEQMTKFFTGFRRDAHPMAVMVGCLGAMSAFYHDSTDITDPHQRMVASIRLIAKVPTLAAMAYKYHIGQPFVYPKNDLDFASNFLHMCFTVPCEEYKVNPVLARAMDRIFILHADHEQNASTSTVRLAGSSGANPFACIAAGVACLWGPAHGGANEAALNMLSEIGSVDRIPEYIARAKDKNDPFRLMGFGHRVYKNYDPRAKIMQKTCHEVLGELGIKDDPLLDVAMELERIALTDEYFIEKKLYPNIDFYSGITLKALGFPTEMFTVLFALARTVGWVAQWKEMIEDPQQKIGRPRQLYTGATERDYVPLAKRK

SEQ ID NO: 7281 - protein, 325 aa, Triticum aestivum
  misc_feature (146)..(146): Xaa can be any naturally occurring amino acid
  misc_feature (165)..(165): Xaa can be any naturally occurring amino acid
MKTLLILTIIAVALTTTTANIQVDPSGQVQWPQQQQPFPQPQQPQQIFPQPQQTFPHQPQQAFPQPQQTFPHQPQQQFPQPQQPQQPFPQQPQQQFPQPQQPQQPFPQQPQQQFPQPQQPQQPFPQPQQPQLPFPQQPQQPFPQPXQPQQPFPQLQQPQQPLPPXPKQHWLTPIPPCKTFLVFALLALAAASAVAQISQQQQQPPFSQQQQPPFSQQQQSPFSQQQQQPPFLQQQQPPFSQQPPISQQQQPPFSQQQQQGIQIMRPLFQLVQGQGIIQPQQPAQLEVIRSLVLGTLPTMCNVFVPPECSTTKAPFASIVADIGGQ

SEQ ID NO: 7282 - protein, 95 aa, Zea mays
YPPVHPGNVGRLRMRLTKGKSVVAKEFYSSSMQLCGVRGGGEAASQAMFWRPRNDLSLVLAFESTRERNAAIMLARRFAVDCNIILAGPGDKTPW

SEQ ID NO: 7283 - protein, 267 aa, Escherichia coli K12
MAIPAFGLGTFRLKDDVVISSVITALELGYRAIDTAQIYDNEAAVGQAIAESGVPRHELYITTKIWIENLSKDKLIPSLKESLQKLRTDYVDLTLIHWPSPNDEVSVEEFMQALLEAKKQGLTREIGISNFTIPLMEKAIAAVGAENIATNQIELSPYLQNRKVVAWAKQHGIHITSYMTLAYGKALKDEVIARIAAKHNATPAQVILAWAMGEGYSVIPSSTKRKNLESNLKAQNLQLDAEDKKAIAALDCNDRLVSPEGLAPEWD

SEQ ID NO: 7284 - protein, 472 aa, Rhodobacter sphaeroides 2.4.1
MRNIDRFFIGGAWTAPLGTDRHRLVNPATEEEIAAIPMASTEDVDRAVTAARAAFEGWQASSKEERLLLLRRLLDLYNEAYDELAELMTREMGTVARFSREAQAWVGRAHLEAAIEALEAESFEEMRGSTLISKEPIGVCALITPWNWPMNQLVVKVAPALAAGCTVVAKPSEFSPLSSIRFAELVEAAGFPPGVYNHITGAGPVAGEALARHPDVDMISITGSTRAGIAVARAAADTVKRVTQELGGKSANIILPDADLATAVRQGVLDCFGNAGQACKAPARMLVPAERMEEAAALAGAAAEALTVGAPEGEVDLGPVVNESQWRRIQSLIEAGIAEGARLVTGGPGRPDHLPRGWYVRPTVFADVAHGSTIATEEIFGPVVALIPYRDEEEAVRIANDSIYGLAGYIQTGDPETARRIARKLRVGMVYINGAGWDARAPFGGYKQSGNGREHGAWGLADYLETKATAGL

SEQ ID NO: 7285 - protein, 170 aa, Triticum aestivum
MAAFLRSKCSSVGRAMMGSLGNNLYGGATSSIETVARPSRSDAVCQQIRTFIQMRTNLKVVDNSGAKRVMCIQSLRGKKGARLGDMIIGSVKEAQPRGKVKKGDVVYGVVVRAAMKKGRSDGSEVQFDDNAIVIVNNKGELIGTRVFGPVPHELRKKKHLKILALAEHIV

SEQ ID NO: 7286 - protein, 488 aa, Listeria innocua Clip11262
MSIKETSLPKVQTKLFINGKWIDGDNKETKDIVNPANGEVIAKIAQAGPKETKQAIKAAKDAFPDWAKMELADRVKLLHNIADLMEERADTLAKIMTLEQGKPLKESKGEVLTGAENFRFAAEEARRLYGETIPAPNNHAFIVKKQPIGVVAAITPWNFPGGMVTRKLAPALATGNTIVLKPSGDTPLSALAIFEIFEEAGLPKGVANIVMGSSKEIGETLTDSDDVRKLTFTGSTKVGQTLFKQSADTLKKISLELGGHAPFIVFADANLEAAVDDLITAKFRNNGQVCVSPNRIFVAKEIKEKFTKTLVAKVEKLKVGNGLDDVNVGPLIREDAIDKIDKQLKNATDKGAKVLTGGERLTGSDYDKGNFYKPTVLDNVTREMDIFYEETFGPVIPLIVFENEDEAIEMANDSEFGLASYFYTKDLARVEKVGAALEYGMVGANEIAISNPETPFGGVKHSGFGRENGHYGMEEYIQVKFINLKYRD

SEQ ID NO: 7287 - protein, 133 aa, Triticum aestivum
  misc_feature (28)..(28): Xaa can be any naturally occurring amino acid
  misc_feature (49)..(49): Xaa can be any naturally occurring amino acid
  misc_feature (90)..(90): Xaa can be any naturally occurring amino acid
  misc_feature (110)..(110): Xaa can be any naturally occurring amino acid
  misc_feature (113)..(113): Xaa can be any naturally occurring amino acid
  misc_feature (117)..(117): Xaa can be any naturally occurring amino acid
  misc_feature (125)..(125): Xaa can be any naturally occurring amino acid
MAPTVMASSATSVAPFQGLKSTAGLPVXRRSNGASLGSVSNGGRIRCMXVWPIEGIKKFETLSYLPPLSTEALLKQVDYLIRSKWVPCLXFNKVGFIFREQNATPGYYHXRYXWTMXWKLPMFGXCTDPTQGD

SEQ ID NO: 7288 - protein, 440 aa, Glycine max
  misc_feature (184)..(184): Xaa can be any naturally occurring amino acid
  misc_feature (268)..(268): Xaa can be any naturally occurring amino acid
  misc_feature (295)..(295): Xaa can be any naturally occurring amino acid
MSGKQAVRPRTRVGKYELGKTIGEGSFAKVKFAKNVENGNHVAIKILDRNHVLRHKMMEQLKKEISAMKMINHPNVVKIYEVMASKTKIYIVLELVNGGELFNKIAKNGKLKEDEARRYFHQLINAVDYCHSRGVYHRDLKPENLLLDSNGVLKVTDFGLSTYAQQEDELLRTACGTPNYVAPXEVLNDRGYVGSTSDIWSCGVILFVLMAGRRRQGYWDGRSIFFPFVLILLCNECSTRAYPAWKIVIALFDQLSKLKKEELKKDHXWFKKGYKPTTFVEEEDVKVDDVAAAFXDSKENLVTERKEKPVSMNAFELISRSQSFNLENLFEKQTQGIVKRETHFTSQRPANEIMSKIEEAAKPLGFNVHKRNYKMKLQGDKSGRKGHLSVATEVFEVAPSLHMVELRKTGGDTLEFHKFYKSFSSSSGLQDIVWHSEAKQ

SEQ ID NO: 7289 - protein, 170 aa, Glycine max
MADSDNDSGGAHNGGKGSEMSPREQDRFLPIANVSRIMKKALPANAKISKDAKETVQECVSEFISFHSPGGLAGECQKEKRKTINGDDLLWAMTTLGFEEYVEPLKVYLHKYRELEGEKTAMMGRPHERDEGYGHATPMMIMMGHQQQQHQGHVYGSGTTTGSASSARTR

SEQ ID NO: 7290 - protein, 377 aa, Lactuca sativa
MGEVVKEAGVIENLRSVVFKESESLEGSCAKIQGYDFNTGINYSQILKSLISTGFQASNLGDAIETVNQMLDWRLSHEQVTEDCSEEESNPAYRESVKCKIFLGFTSNLISSGVRDIIRYLTQHHMVDVIVTTTGGIEEDLIKCLADTYRGEFSLPGAALRSKGLNRIGNLLVPNDNYCKFEDWIIPIFDQMLQEQNTQHVLWTPSKVISRLGKEINNESSYLYWAYKNDIPVFCPGLTDGSLGDMLYFHSFRNPGLVIDVVQDIRAINSEAVHANPRKTGMIILGGGLPKHHICNANMMRNGADYAVFINTAQEFDGSDSGARPDEAVSWGKIRGSAKSVKVHCDATIAFPLLVAETFAAKREGEMKNVESTKALV

SEQ ID NO: 7291 - protein, 388 aa, Ajellomyces capsulatus
MFSLRTAQPAQSLFRAATNTYSTSLPRSAIAARSFATVQSDIFKPTKYGGKYTVTLIPGDGIGTEVAESVKTIFKADNVPIEWEQVDVSGLDAGNKHSEDLFKESIASLKRNKLGLKGILHTPVERSGHQSFNVALRQELDIYASIVLIKNIPGYKTRHDNVDLCIIRENTEGEYSGLEHQSVSGVVESLKIITRAKSERIAKFAFSFALANNRKKVTCIHKANIMKLADGLFRSTFHKVAESYPTLETNDMIVDNASMQAVARPQQFDVMVMPNLYGGILSNVGAALVGGPGIVPGCNMGRDVAVFEPGCRHVGLDIKGKDQANPTALILSGSMLLRHLGLDEHANRISKAVYDVIGEGVTRTRDMGGQASTHEFTRAVLDKMESAL

SEQ ID NO: 7292 - protein, 1807 aa, Phytophthora infestans
MPGPDDDVREPTAAARTNNSGYGLRAAPSSITSGLDSVVSVNSYRSSELNAEEVNVDDQECADSDILESPNDGMTIMNDDDADLSEEEEEVMENSIDFSVNRATVTKAGVIPCCVFVGRVRWGTTDWEIYFGQKQLLRLHFNLHLYSLFNRHKLLRGVHLPCTIWREKRAEKRVMDVYVVQDYIRQLLKDRDLRNSEPLLSFLEVSPSRAMLRLGPSLKEGYVHMRINGPFQLPLYTCFNRTIEALYRHLYRAWMRIAFVSAIVGFIFPICLVIVTSLPTFFSPQKELVNSDSGTKEVSTKLNTAGVFLGLAVLGGILFFAVFVYKFFQHRLGVIRRWVVLKPSCFAAYRNRNDREPSEVFLFDKNFTARKGSYRQGVSWMPSGLVVGSKAGDIEIDTGHYYTRLTAFVALMGVCYGIMRLSNSIYDFEYLSLDKSMGVPITNASGYENWTESRDAEYCGYYFIVPKGTTVYVESKDDSAVISQLQMPSSNSMTANLGFFWQSDSMGYSLNVITNAVGAGTMVSVVKPIDAKNDRFFESGTNYSMPTVGNLTLEGVKTDIDVQSFSNVESFCAITVRIAPLTWRSYVYYILFLFAGGIIAPVVGFLANYFVTYLGIWHPHVRRDHWFRCVRRLQKLKRQETSTRFNSFAPQHISTIDDDESATITAKAKAAKLAIGNTPTSNINQVVDSVVKQEAETASRMGTGNLAPASSRVDSSTQSEDSFEAPKPPPSSVSWHVDAEDTYAAMYKAISNAKYEILIAGWWVCPDLFLLRPGRKLPPREADEDPDGQQVNKTMLRQVLMKKAEAGVKIYVLIYREVKLALTLNSAYTKRSLMVHPNIRVLRDPIFQIQSLGFWSHHEKIVCIDQSLAFVGGLDLCFGRYDHHGHPISDPSDDPVWTGKDYSNPIIKDFVRVNKPFEDLIDRASQPRMPWHDVHCSISGPPVQDVAYHLIQRWNFVCSKNDYQLRTGWCICFRSRRFKFLPKCLVPMDFNGWTLQYPSSDPEPMRDGSTRTTIPLVREDSLSMVEPFQVVQSVNPMYPCTATGPQWPPTSSLHPINPMRPPLTSASTTTGPLDDGEVLRAQRGESILQVFHPSANICNIQVCRSVSMWSAGVPTEASIQAAYMDVIANSKHFLYIENQFFVSGMDGNGIVRNRILQALVDRIERAVQRDEKFRVYVVMPLLPAFEGNIRSHELTNLHAVMHWQFATICRGRYSLFEALKGVTNHPENYVAFFGLRKYGIMPNGCAATEQIYIHSKLMIADDRCAILGSANINDRSMNGDRDSEIALVIEDMQYEDGVMNEKPYRRGVAASKLRLQLFREHLGLADDDLSVADPTSDHTWQAIKSTASSNTKIFEAVFDCAPSNRMRAFVNFQSIEVTQIFENQRMNVLKVPGRSHVWDAQNLKDGDYAPWTDVNGVPIAADRVDLRDFEVDNYRDKKKKLFSMDHDGWCYARNFSIFQEVRTMKTDYKKREKLQHLVADRLMAQVRRRRWVKKGLLPPRDPRESSFSLASDDEEHGRFYSLWRRLQQGDFSRSNSVSTPTNFSQLDTDGGISGSVSVGGTNHGRRLYNSNSMPSNASILGDNPTTRPPVLGDAPSYPNSPSVASFQHTPQSPAIATGARSVRSARTSSLLCTGAGVRTRGNTRSARGSFYGMFSVTGNRNLDTDDESSDAGSEYGGGHGIRASLKRWYSTMDVLDFGRRSKFNAEYFDTDEDHLHSDDPLLEDGRGSYHAATREGLLTEEAVEGSDDEDAECQIGHVQTAATVRKEDETRARAQLSEIRGHLVEFPLDFLVEEILKPSVLPADIHI

SEQ ID NO: 7293 - protein, 158 aa, Escherichia coli CFT073
MKLISNDLRDGDKLPHRHVFNGMGYDGDNISPHLAWDDVPVGTKSFVVTCYDPDAPTGSGWWHWVVVNLPADTRVLPQGFGSGLVAMPDGVLQTRTDFGKTGYDGAAPPKGETHRYIFTVHALDVERIDVDEGASGAMVGFNVHFHSLASASITAMFS

SEQ ID NO: 7294 - protein, 178 aa, Glycine max
MASSMISSPAVTTVNRAGAGMVAPFTGLKSMAGFPTRKTNNDITSIASNGGRVQCMQVWPPVGKKKFETLSYLPDLDDAQLAKEVEYLLRKGWIPCLEFELEHGFVYREHNRSPGYYDGRYWTMWKLPMFGCTDASQVLKELQEAKTAYPNGFIRIIGFDNVRQVQCISFIAYKPPGF

SEQ ID NO: 7295 - protein, 107 aa, Brassica napus
MARMKKSLFAILLSSPLLIICLIAFLADPISVGARRLLEEIPKLEIPKLPELPHPELPKFEVPKLPELPKPELPKLPDFPKPELPKMPEIPKPELPKFPEIPKPELP

SEQ ID NO: 7296 - protein, 317 aa, Ralstonia solanacearum
MSWQNWVVSWLARNRIKKPTERLPFDPIATRVNAETRSMPMPVRLPPDWRIVRADGALPGEWIEPADSDSLGDAPPVVFYLHGGGYFFCSPRTHRSITIGLAVHARARVFALDYRLAPEHPFPAAVLDALAGYRGLLAQRVAPSRIVVAGDSAGGGLSLALLVALRDAGDPLPAGAILYSPWTDLAATGASLVENDASDVMFRGAWMARGATLYLGDSGVPADHPLASPLYADFTGLPPLHCYVSTSEVLRDDTLRMAERARAAGVSVSVELGRRLPHVWPIFYPFLPEARKALRQSGDAVRRMTAGRAVPAECAPA

SEQ ID NO: 7297 - protein, 466 aa, Mesorhizobium loti MAFF303099
MVEPALSLNETGAPTNERFHLIQAAPLAGSIGAEARELITSSEDIFVTDQSGRKLIDGPAGMWCINVGHRNQALADTLRDQAMSMTYSTPWYTSNAPAEKLAQMLAERAPGDLNHVFLTTGGSSAVETAIRLVQFYNNVRGLPQKKLLISRQGSYHGSTYLTASLNGRPRDHDWMDGAGDLVRKLTCPNPFHRPANLSLEAFEDFLVNEFRALIEHEGAQQIAAFIAEPIQASGGVLMSPPNYLKRMRALCTENDILFITDEVVTAFGRLGHIFASQDVFGIQPDMITFAKGVTSGYFPLGGVMVSDRLLSELRRLNHPKANFVHGLTYSSHPIGCAVAIRNIELLEDGLLHHAREIGPYFQEQLRTLEELPLVGEVRGAGLMAGIECVADAKTEDRLDLDLTVGKRIDFHCQENGLLVRPLINMCVMSPPLTISRSQIDMMTDALRKGIEATADDLIREGLWKPA

SEQ ID NO: 7298 - protein, 481 aa, Burkholderia cepacia R18194
MANVTYTDTQLLIDGEWVDAASGKTIDVVNPATGKPIGKVAHAGIADLDRALAAAQRGFDAWRKVPAHERAATMRKAAALVRERADAIAQLMTQEQGKPLTEARVEVLSAADIIEWFADEGRRVYGRIVPPRNLGAQQTVVKEPVGPVAAFTPWNFPVNQVVRKLSAALATGCSFLVKAPEETPASPAALLRAFVDAGVPAGVIGLVYGDPAEISSYLIPHPVIRKVTFTGSTPVGKQLAAMAGLHMKRATMELGGHAPVIVAEDADVALAVKAAGGAKFRNAGQVCISPTRFLVHNSIRDEFTRALVKHAEGLKVGNGLEEGTALGALANPRRLTAMASVVDNARKVGARIETGGERIGTEGNFFAPTVIADVPLEADVFNNEPFGPVAAIRGFDKLDDAIAEANRLPFGLAGYAFTRSFANVHLLTQRLEVGMLWINQPATPWPEMPFGGVKDSGYGSEGGPEALEPYLVTKSVTVMAV

SEQ ID NO: 7299 - protein, 269 aa, Archaeoglobus fulgidus DSM 4304
MVWFFEYYDGCGLAIKVKKKLYEAEGVQKVEIYETESMGKMLVIDGKIQLTELDEPFYHEMLVHVPMLSHENPRKVAVIGGGDGGALREVLKHNVERAVLVDIDRNVIDLSRKFLKIDHGAFEDERVEIAIMDGKEFLRDCEIFDVIIVDSTDPVGVSDTLFDREFFELARQKCDVISLQSQSPLIQKEYFRTLLVNSAPFERRDVYLSCVPTYPLALWSFIIGGEYDFSNLEERFERIKGKTVHYNPDVHRAAFALPEWLKKEVEACI

SEQ ID NO: 7300 - protein, 496 aa, Mesorhizobium loti MAFF303099
MPSAAEPMARTNNNLTGASMQSDNASKFYIDGQWVMPGGAGRMDVVNPATEQSFMQIAIGTTEDADLAVQAAFEAFPTFSQTSRTERVELLRNVLRCYNDRYDDIARAVSTELGAPLKFAREAQAWAGQIHLESTIAALEAFSFDELHGSSMITWEPIGVCALITPWNWPLNQIVCKVAPALAAGCTVVLKPSELAPLSAIIFAEVLEEAAIPKGVFNLINGTGPEVGQYLAGHPRVDMVSFTGSTRAGIMVAKTAAETVKRVAQELGGKSANIVLADADLENAVVKGVEACFSNSGQSCDAPTRLLIPADRHAEALDIARRVAAATRVGDPSSEDTDMGPVISQQQFDKIQRMIGLGIEEGATLVAGGPGKPEGLDVGFYVKPTIFGGVTPEMTIAREEIFGPVLSIIPYDTEADAIRIANDSIYGLAAYVQGGSLEGARAVARKLQAGSVYVNYAPWDTHAPFGGYKQSGNGREYSHWGIRDFMEVKGIVGWGA

SEQ ID NO: 7301 - protein, 388 aa, Nicotiana attenuata
MEVISTNTNGSTIFKNGAIPMNGYQNGTSKHQNGHQNGTSEHRNGHQNGISEHQNGHKNGTSEHQNGHQNGTSEQQNGTISHDNGNELQLLGSSNSIKPGWFSEFSALWPGEAFSLKVEKLLFQGKSDYQDVMLFESATYGKVLTLDGAIQHTENGGFPYTEMIVHLPLGSIPNPKKVLIIGGGIGFTLFEMLRYPSIEKIDIVEIDDVVVDVSRKFFPYLAANFNDPRVTLVLGDGAAFVKAAQAGYYDAIIVDSSDPIGPAKDLFERPFFEAVAKALRPGGVVCTQAESIWLHMHIIKQIIANCRQVFKGSVNYAWTTVPTYPTGVIGYMLCSTEGPEVDFKNPINPIDKETTQVKSKLAPLKFYNFDIHKAAFILPSFARSMIES

SEQ ID NO: 7302 - protein, 192 aa, Sinorhizobium meliloti
MADRTSSKDVIHNGEFGNDALDLIEITGVIKWFDVAKGFGFIVPDNGMQDVLLHVTCLRRDGYQTVLEGARVVALIQKRDRGYQAFRILSMDQSTAVHPSQLPPVRTHVQVTPTSGLERVLVKWFNRTKGFGFLTRGEGTEDIFVHMETLRRFGLTELRPGQVVLCRFGDGEKGLMAAEIHPDGPTPTTRSH

SEQ ID NO: 7303 - protein, 1106 aa, Neurospora crassa
MVDMLGTNANVLQSRDPISEFLQLLQDPFAAQLSSNSIYAALGSSVSITVAVALGFSLVRPLNTVVYAPKLKHADDKHAPPQLGKGFFSWIKPLWTTTEQDLVRLVGMDATIFMRFTRMCRNIFLCLAVLCCCIQIPINWYKNAAPESPWLQKVTPMNVWNQWQWATVVMSWVTTLIVCFFLWWNYRKVCELRIQYLRSEEYQQSLHARTLMLYDIPKNLTSDEGIARIIDSVAPSSSFSRTAVARDVKILPTLIEEHEKTVRKLEQVLAKYLKDPKNLPVTRPVCRPSKKDPSFSTYPKDKKLDAIDYLTQRIKLLELEIKEVRQRIDKRGSMPYGFASYSDISEAHAIAYLCRSKKPQGARVTLAPKPNDIVWENMPLSSASRATRRLWNNLWITVLTVVWVAPNAMIAIFLVNLSNLARVWPDFQKSLETNRNFWAIVQGIASPALTSLVYMVLPIIFRRLSMKAGDMTKTGRERHVVAKLYSFFVFNNLFVFSLFSALWSFGATVIKNTATDDDAWQAILDADFGTTVFVSLCGISPFWVVWLIQRQLGAAIDLSQLWKLIYGSIMRKFTNPTPRELIELTAPPPFDYASYYNYFLFYATAALCYAPIMPLVLPAAGMYFAIDVALKKYLLMYVFVTKTESGGMFWRILFNRILFGLMLSHLIVFLVVWVRGFGYKTQAYAVVPLPILIIIFKFVCSWIYDNKITYFSTRIIKHRNAEEGFGLKEQGPRNDRLASRFGHPALYKPLITPMVHAKAQNILASVYQGRLSDGRDAGLGDSMSVSGYSDTYALDSMASGKVGKLSSAVPGFEVVPESRLDFEFYKNRDEFAADHGAGELFGRASDIVRPDTPGTMATGSDNNSRPGTPVGGMGFSHNRRFFSNQSDMGNTAYVGGYMSPSQQYSSNNQAPYSPPILGPSEVPGRGRSPLYHMGDNGNDSSSNLVYNAAGMPTSTPAGFEVADDGLHRERSFDSTRSRGALGGFSIPNPRAPGVLGASRYGYGNVPQTDDDMMQTPPNAIQSSHFQPNQGQNDPMQYDYFRGNRRQGPPPGAPGRGKPRRTVNEVVELSTLNKGKKRDILRFWVRKTTAESEHERLASSAPGDEEN

SEQ ID NO: 7304 - protein, 217 aa, Methanocaldococcus jannaschii DSM 2661
MKFFLDTANVEEIKKYAELGLVDGVTTNPTLVAKEGRDFYEVVKEICEIVEGPVSAEVISTDAEGMVKEARELAKLADNIVIKIPMTKDGMKAVKILSAEGIKTNVTLVFSPLQALVAAKAGATYVSPFVGRLDDIGHVGMKLIEDVVKIYKNYDIKTEVIVASVRHPWHVLEAAKIGADIATMPPAVMDKLFNHPLTDIGLERFLKDWDEYLKSRK

SEQ ID NO: 7305 - protein, 226 aa, Davidia involucrata
SLPNNATFFLTYVALKFFVGYGLELSRIVPLIIYHLKRKYLCKTQAELKEAWSPGDLGYATRFPGDMLIITIVLCYSVIAPIIVPFGVLYFGLGWLVLRNQVLKVYVPSYESYGRMWPHMHTRILAALLLYQVTMFGYFGVKKFYYVPILIPLPILSLIFAFVCKKKFYHFFQATALEVACREMKETPNMELVFRSFIPPSLSAEKSDDDQFEDAKSQVSRAASFV

SEQ ID NO: 7306 - protein, 422 aa, Azotobacter vinelandii
MSDLKTAALEYHAQPRPGKLSVELTKPTQTARDLSLAYSPGVAEPVREIARDPELAYRYTGKSNLVAVISDGTAILGLGNLGPLASKPVMEGKGVLFKRFAGVDVFDIEVDAESPQAFIDTVKRISVTFGGINLEDIKAPECFEIERALIEQCNIPVFHDDQHGTAIVTAAGMLNALEIAGKSLPTARIACLGAGAAAISCMRLLVSLGARVENIHMIDRQGVIHAGRDDLNQYKAVFAHETDKRTLADALDGADVFVGLSGANLLSAENLLRMAPNPIVFACSNPDPEISPELAHATRGDVIMATGRSDYPNQVNNVLGFPFIFRGALDVRATRINEEMKIAAAHALRELAKLPVPKAVCEAYGVSGLEFGREYIIPKPMDPRLITVVSDAVARAAIESGVASLPYPRHYPLQSVEEVFNS

SEQ ID NO: 7307 - protein, 521 aa, Glycine max
MHHQHNTTMSKTTTSSEQTARNRLATLAAHLLPSDATSAAAILHPHRLSAPTGDLPPANLKGTLTVVDERTGKKYQIEVTPDGTVRASDFKKISSGKNDKGLKLYDPGYLNTAPVISRISYIDGDAGILRYRGYPIEDLAEKSTFTEVSYLILYGNLPSESQLAEWEFALSQHSAVPQGVLDMIESMPHDAHPMGMLVNAMSALSVFHPDANPALKGLDIYDSKQIRDKQITRVIGKITTIAAAVYLRLAGRPPVLPSNKLSYTENFLYMLDSFGNRSYKPNPRLTRALDIIFILHAEHEMNCSTSAVRHLSSSGVDVYTAIAGAVGALYGPLHGGANEAVLKMLSEIGTVENIPAFIEGVKARKRKLSGFGHRVYKNYDPRAKVLRKLTEEVFSIVGRDPLIEIAVALEKIALSDEYFIKRKLYPNVDFYSGLIYRAMGFQPEFFTVLFAIPRMAGYLAHWRESLDDPDTKIMRPQQVYVGEWLRHYAPINQRTASSNTDKLGQLAVSNASKRRLAGSGA

SEQ ID NO: 7308 - protein, 313 aa, Pyrobaculum calidifontis
MPLSPILRQILQQLAAQLQFRPDMDVKTVREQFEKSSLILVKMANEPIHRVEDITIPGRGGPIRARVYRPRDGERLPAVVYYHGGGFVLGSVETHDHVCRRLANLSGAVVVSVDYRLAPEHKFPAAVEDAYDAAKWVADNYDKLGVDNGKIAVAGDSAGGNLAAVTAIMARDRGESFVKYQVLIYPAVNLTGSPTVSRVEYSGPEYVILTADLMAWFGRQYFSKPQDALSPYASPIFADLSNLPPALVITAEYDPLRDEGELYAHLLKTRGVRAVAVRYNGVIHGFVNFYPILEEGREAVSQIAASIKSMAVA

SEQ ID NO: 7309 - protein, 487 aa, Zea mays
MDPNGLKTGGLLLPTIERRCTSPPSVIVIGGGISGVAAARALSNSSFKVTVLESRDRIGGRIHTDNSFGCPIDMGASWLHGVCNENPLAPLISYLGLRLYRTSDDNSVLYDHDLESYALFDKDGNQVPKETVDKVGETFERILEETVKVRDEQEHDMPLLQAISIVFERHPHLKLEGLDDQVLQWCVCRLEAWFAADADEISLKNWDQERVLTGGHGLMVNGYYPVIEALAQGLDIRLNQRVTEITRQHNGVKVTTEDGTSYLADACIISVPLGVLKANVIKFEPELPQWKSSAIADLGVGTENKIAMHFDRVFWPNVEVLGMVGPTPKACGYFLNLHKATGNPVLVYMAAGRFAQEVEKLSDKEAVGLVVSHLKKMLPDATEPTQYLVSRWGSDPNSLGSYSCDLVAKPADVCARFAAPVENLHFAGEAASAEHSGSVHGAYSSGIAAAEECRKRLLALKGIPDLVQVAAWEEMAGAVAPLQICRT

SEQ ID NO: 7310 - protein, 156 aa, Glycine max
ASATQLFRPSKRRTARASSKKESIESQAGVSRSMVAPLLVLTLVMYIVVIGLASWNLNHFINGTTNYAGVAGNGATFYFLLFAILAGVVGAASKLAGVHHVRTWRGDSLATSASSALVAWAITALAFGLACKEIHVGGHRGWRLRVLEAFIIILAF

SEQ ID NO: 7311 - protein, 129 aa, Kineococcus radiotolerans SRS30216
MPTGKVKWFDADKGFGFLAAEDGAEVFVHASALPAGTTTLSKGSRVEFGVVQGKNGTQALSVRLLDPVHSVARATRKKPEDVVPIVEDLIKLLDGVSGSLRRGRYPDKAGAKKVATVLRAVADDFEAGA

SEQ ID NO: 7312 - protein, 508 aa, Haloarcula marismortui ATCC 43049
MSSDSKQQSATERKSAIKKRHEQAANEVLPDRRELYIGGEWVQSSGGETFETIDPTTGETLAEVQAGTAEDIDSAVAAAWNAYDETYSELSTGERQAMLDGIADAIAERSEEFAKLESLDNGKPITEARIDIDLVIDHFRYFAGLARSGEGRTIETDDSRHVQTLREPYGVVGQIIPWNFPLLMAAWKLAPALSAGNTVVLKPAEETPLSILKLMEITEDVIPDGVVNVVTGFGPEAGEPLSKHPDIRKLAFTGSTEIGSKVMQSAAESITDVTLELGGKSPLVVFPDADLEQAVQTTITSIFFNTGECCCAGSRLFVHEDIKDEFLDELAAAAEDLTVDDPLLESTDLGPKVTAEQVERTLGYIEEAEREGAAFVTGGSQPDDEALSDGCFVAPTLIDEIDHDSKAVQEEIFGPVQEVFSWSEYDEMIELANDVDYGLAAGVLTEDLSKAHQCAKDIEAGNIWVNTYNDFPAGQPFGGYKQSGIGREIGQETIDHYTQTKTVNISLD

SEQ ID NO: 7313 - protein, 262 aa, Oryza sativa
MSQPAELSREENVYMAKLAEQAERYEEMVEFMEKVAKTVDSEELTVEERNLLSVAYKNVIGARRASWRIISSIEQKEESRGNEDRCTLIKEYRGKIETELSKICDGILKLLDSHLVPSSTAPESKVFYLKMKGDYYRYLAEFKTGAERKDAAENTMVAYKAAQDIALAELPPTHPIRLGLALNFSVFYYEILNSPDRACNLAKQAFDEAISELDTLSEESYKDSTLIMQLLRDNLTLWTSDISEDAAEEIKEAPKGESGDGQ

SEQ ID NO: 7314 - protein, 175 aa, Zea mays
  misc_feature (43)..(43): Xaa can be any naturally occurring amino acid
  misc_feature (67)..(67): Xaa can be any naturally occurring amino acid
  misc_feature (77)..(77): Xaa can be any naturally occurring amino acid
  misc_feature (83)..(83): Xaa can be any naturally occurring amino acid
MAGIGRNMVAPLLVLNLIMYIIVIGFASWNLNHFINGQTNYPXGVAGNGATFYFLVFAHPGPGVVGXAASKLAGVHXHVRAWXRHDSLATNAASSLIAWAITALAFGLACKEIHIGGHRGWRLRVLEAFVIILAFTQLLYVLMLHTGLFGGSGGYRDHDYGVGGAAGEPKGVTRV

SEQ ID NO: 7315 - protein, 361 aa, Triticum aestivum
MKTLLILTILAMAITIGTANIQVDPSGQVQWLQQQLVPQLQQPLSQQPQQTFPQPQQTFPQPQQTFPHQPQQQVPQPQQPQQPFLQPQQPFPQQPQQPFPQTQQPQQPFPQQPQQPFPQTQQPQQPFPQQPQQPFPQTQQPQQPFPQLQQPQQPFPQPQQQLPQPQQPQQSFPQQQRPFIQPSLQQQLNPCKNILLQQCKPASLVSSLWSIIWPQSDCQVMRQQCCQQLAQIPQQLQCAAIHSVVHSIIMQQQQQQQQQQGMHIFLPLSQQQQVGQGSLVQGQGIIQPQQPAQLEAIRSLVLQTLPSMCNVYVPPECSIMRAPFASIVAGIGALMMEHSGGTYTLHMDGRVCNTNDLIASN

SEQ ID NO: 7316 - protein, 121 aa, Glycine max
MASSMLSSAAVGTSPAQATMVAPFTGLKTSAAFPATRKANNDITSIASNGGRVSCMKVCPPDGKKKFETLSYLPDLTEVELGKEVDYLLRNKCTPCAEFQLEHEFVYRDHRSKPGYYDARY

SEQ ID NO: 7317 - protein, 188 aa, Zea mays
  misc_feature (71)..(71): Xaa can be any naturally occurring amino acid
  misc_feature (87)..(87): Xaa can be any naturally occurring amino acid
  misc_feature (106)..(106): Xaa can be any naturally occurring amino acid
  misc_feature (115)..(115): Xaa can be any naturally occurring amino acid
HSECQTDSVCHVFDHLYEEYGDVLEGMLDGVLFFALVDTRNKSCIAIGDALGFRPWCMGWALGGSLWMTAXMNDWKHYRELSITFLXWHMYCSMTRGLRRSCNPPXFHRLLIKPXYIALLLQKMVDKTVITKLTTDVPLCVLLYCGLDSSVAASDCLQTLDETQGDRQWRTKWLTLCVGSEGTADLKA

SEQ ID NO: 7318 - protein, 81 aa, Triticum aestivum
KGSYSNWPVGVNRYEYDQLRAPVGGRVYFTGEHTSEHYNGYVHGAYLAGIDSADILMNKVLNNVEFKVRPKYDEEQKAEAK

SEQ ID NO: 7319 - protein, 382 aa, Pinus radiata
MDSNMNGLAKSNGCEISRDGFFESEEEELQGQAEAWKCTFAFAESLAVKCVVLLGIPDMIAREGPRATLSLGEIVAKLPTESPDAACLFRIMRFLVAKGIFRASKSAREGGAFETRYGLTPASKWLVKGRELSMAPMLLMQNDETTLAPWHHFNECVLEGGVAFQKANGAEIWSYASDHPDFNNLFNNAMACNARIVMKAILSKYQGFHSLNSLVDVGGGTGTAVAEIVRAYPFIRGINYDLPHVVATASSLSGVQHVGGDMFETVPTGDAIFMKWIMHDWNDEDCIKILKNCRKAIPDTGKVIIVDVVLDADQGDNTDKKRKKAVDPIVGTVFDLVMVAHSSGGKERSEKEWKRILLEGGFSRYNIIEIPALQSVIEAFPR

SEQ ID NO: 7320 - protein, 319 aa, Clostridium tetani E88
MRKIAVLTSGGDAPGMNAAIRAVVRTGLDKGITVLGIERGFDGLLNGEIFEMTRRSVADIIQRGGTILRTARSEEFKTEEGQKKATDILRVFGVEGLVVIGGDGSFQGAKSLSELGVKTIGIPGTIDNDLAYTDYTIGFDTAVNTVLDAINKLRDTSTSHGRASVVEVMGRNCGDIALYAGLAGGAESIIVPELRFDIDKLCKTILEGKKNGKMHNLIIVAEGAGKANDIAKTIEKVTGVGTRATVLGHIQRGGSPTANDRILASRMGNRAVELLLEEKSSRVVGINDNRIVDMDIHEALSIEGKFDEKLYEIAKALSY

SEQ ID NO: 7321 - protein, 420 aa, Listeria monocytogenes str. 1/2a F6854
MSQKIQVENGVLKTPNNPVIPFIEGDGTGPDIWAAAKRVLDAAVKKAYNGEKEIAWKEVLAGEKAFKQTGEWLPQATLDTIDEYLIAIKGPLTTPIGGGIRSLNVALRQELDLYVCLRPVRYFKGVPSPVKRPEDTDMVIFRENTEDIYAGIEFKEGSIESKKLIDFLKSEFGVDKIRFPETSGIGIKPISKEGTERLVRSAIEYAIKEGRKSLTLVHKGNIMKFTEGAFKNWGYNLCEREYGDKVFTWNEYDRIKEAEGTEVADAKQNEALAAGKILVKDSIADIFLQQILTRPAEFDVVATMNLNGDYISDALAAQVGGIGIAPGANINYLTGHAIFEATHGTAPKYAGLDKVNPSSVILSGTLLLEHIGWGEAAALINQSMEKTIAAKTVTYDFARLMDGATEVKCSEFADELIKNF

SEQ ID NO: 7322 - protein, 184 aa, Physcomitrella patens subsp. patens
MASAVASTVVAPVSVTVASSSVAASRESSSVKAFSGLKSATLFTSKSQQLSSVQNGSRVQCMQVWNPIGQPKFETFSYLPPLSDDQIARQVDYMIQQNLIPCIEFDTVGAVSRTNFSGSGSSGYYDGRYWTMWKLPMFGCTDSSQVLREIQECKTSYPSCWVRVLGFDSKKQVQICGFLVARPN

SEQ ID NO: 7323 - protein, 337 aa, Aspergillus nidulans FGSC A4
MTTSRWWLYVQAVFWRCLMRLGMIFHNIPHPRPPSPSFSRSFPSGSSKVVLQFYCPPGYSQTRKEGRRLPVVVNFHGGGFTLGGPSDDSRWAQAVLSEVGAVVVSVGYRRAPEHPFPAAVDDGVLALQYLASHAVELGLDISRIALSGFSAGGNLAVTVPLRFRDMLIQAEHEGWLSRADSTVQLVSPTASDLHIVALFCWYPILDFEEPREHRRAMSIEPNKTLPSFFTNLFDESYLPDLEQRKSPYASPVHATDDALRDSLPHDIFFFICEWDMLLNEGQLFCRRLQDINKHVRAMMVEKARHAWDKSPNPFRNTTEVNILYKDACADMKAIFEK

SEQ ID NO: 7324 - protein, 371 aa, Nicotiana attenuata
MEVISTNTNGSTIFKNGAIPMNGHQNGTSKHQNGTSEHPNGHQNGTSEHQNGHQNGTSEQQNGTISHDNGNKLVGNSNCIKPGWFSEFSALWPGEAFSLKVEKLLFQGKSDYQDVMLFESATYGKVLTLDGAIQHTENGGFPYTEMIVHLPLGSIPNPKKVLIIGGGIGFTLFEMLRYPSIEKIDIVEIDDVVVDVSRKFFPYLAANFNDPRVTLVLGDGAAFVKAAQAEYYDAIIVDSSDPIGPAKDLFERPFFEAVAKALRPGGVVCTQAESIWLHMHIIKQIIANCRQVFKGSVNYAWTTVPTYPTGVIGYMLCSTEGPEVDFKNPVNPIDKETTQVKPKLAPLKFYNSDIHKAAFILPSFARSMIES

SEQ ID NO: 7325 - protein, 271 aa, Dunaliella salina
MGYVKVVKTSPYFSRYQVKYRRRRQGKTDYRARLRLVRQDKNKYNTHKYRLVVRFSNKNVTCQIVYSTIQGDVVMAAAYSKELPNYGLKVGLTNYSAAYCVGLLVARRILTKLNLADTYKGQEEPDGEDYNVEPVEDGPKPFYCLLDTGLKRTSTGSKVFAAMKGALDGGLDIPHNEKRFVGYADKKLDTEVLQKYIYGGHVAEYQETMQEEEPEKYQAHFSSYVENEIEPDGIEDMYKEVHAKIRENPCPPKKERTKPADAKRWSPQAHL

SEQ ID NO: 7326 - protein, 383 aa, Neurospora crassa
MATDGKSNLSFVLNKPLDVCFQDKPVPKINSPHDVLVAVNYTGICGSDVHYWLHGAIGHFVVKDPMVLGHESAGTIVAVGDAVKTLSVGDRVALEPGYPCRRCVHCLSGHYNLCPEMRFAATPPYDGTLTGFWTAPADFCYKLPETVSLQEGALIEPLAVAVHITKQAKIQPGQTVVVMGAGPVGLLCAAVAKAYGASKVVSVDIVPSKLEFAKSFAATHTYLSQRVSPEENARNIIAAADLGEGADAVIDASGAEPSIQAALHVVRQGGHYVQGGMGKDNITFPIMALCIKEVTASGSFRYGSGDYRLAIQLVEQGKVDVKKLVNGVVPFKNAEEAFKKVKEGEVIKILIAGPNEDVEGSLDTTVDEKKLNEAKACGGSGCC

SEQ ID NO: 7327 - protein, 180 aa, Escherichia coli
VPENPIIPYIEGDGIGVDVTPAMLKVVDAAVEKAYKGERKISWMEIYTGEKSTQVYGQDVWLPAETLDLIREYRVAIKGPLTTPVGGGIRSLNVALRQELDLYICLRPVRYYQGTPSPVKHPELTDMVIFRENSEDIYAGIEWKADSADAEKVIKFLREEMGVKKIRFPEHCGIGIKPCS

SEQ ID NO: 7328 - protein, 439 aa, Pyrobaculum aerophilum str. IM2
MAVDIEKIKQGIPNIVPYAGKYVDPPEGDYVEYTGPGQFKVPDKVVIGYIEGDGIGPEVAYAAIRVANAAVEKAYGKSRKVIWYEVVVGEKAEKIFGNRLPDQSINVLKKIRVFLKAPLETPVGGGFRSINVTLRQLFDLYANIRPVKYFPGLPSPLKRPEVVDLVIFRENTEDVYAGIEWPYNSPEASKIRDFLRREFGINIRDDAGIGIKPISKFGTQRIARLALKFAIENKRRVVTVMHKGNIQKYTEGAFKDWAFEVARNEFREHVVFEDELAQYGGQVPPGKVLVNDRIADNMLQQLLTRTGEYDVILAPNLNGDYVSDEAAGLVGGLGVAPGIDVGDWGMMAEPVHGTAPKYRGKNYVNPTATILALELLFRFLGWREAANYIIKGVETAYREGYFTGDLARQMDEEERKHRVKEVLGTQEFADKVVEIIKRL

SEQ ID NO: 7329 - protein, 424 aa, Methylobacillus flagellatus KT
MNILIKQGRLIDPRHRVDAVQDLYVSNGKVVGIDHAPDDFMPNEVIDASGLIVCPGLVDVSARLREPGNEYKASLKSELHAAVAGGVTSLACPPDTDPVLDESGLVEMLRHRAKQLHLSNVHPLGALTRQLAGKQLTEMSELTDAGCVGFSQADEPIMDTLVLWRALQYAATFGFTVWLRPQEPYLAQGGVAHDGEVAARLGLKTIPVAAETLALATILHIVRETGAKVHLCRLSSAEGVAMVREAKQQGLHISSDVSAHHLHLTEHDIGFFDANCHLRPPLRSQRDRDALRQGLADGTIDLVCSDHAPVDDDAKLVPFGEAEAGATGLELLLPLTLKWAEEQKVALVEALARITSTPANILGIAKGHLGLNAAADICIFDPAQYWKVTAANLRSQGKNTPLNGLELAGKVRYTIVNGGIAYRS

SEQ ID NO: 7330 - protein, 503 aa, Chrysanthemum lavandulifolium
MTTIPSRQLFIDGEWREPVKKNRIPVINPSTEQIVGDIPAATAEDVDVAVKAARKALKRNGGKDWASATGAHRAKYLRAIAAKITGKKELFSKLEAIDCGKPYDEAAWDIDDVAGCFEYNADLAEALDKKQNAPIELPMDTFKCHVIKEPIGVVGLITPWNYPLLMATWKVAPALAAGCAAILKPSELASLTCLELGEVCKEVGLPAGVLNILTGLGPDAGAPLAAHPDVDKIAFTGSSATGSKIMTAAAPNVKPVTLELGGKSPIVVFDDVDIDKAVEWTLFGCFWTNGQICSATSRLILHESIAKEFLDKLVKWAKNIKISDPLEEGCRLGPVVSSGQYERVLKFVETARSEGATILSGGQRPQHLKKGFFIEPAIITDITTSMQIWRDEVFGPVLCVKTFSSEEEAIELANDTHYGLGSAVISNDLDRCDRVTRAFDAGIVWVNCSQPCFCQAPWGGKKRSGFGRELGEWGLDNYLSVKQVTRYISNDAWGWYTPPSPKL

SEQ ID NO: 7331 - protein, 365 aa, Aegilops tauschii
MKTFLIFALLAVAATSAIAQMETSHIPGLEKPSQQQPLPLQQILWYHQQQPIQQQPQPFPQQPPCSQQQQPPLSQQQQPPFSQQQPPFSQQELPILPQQPPFSQQQQPQFSQQQQPFPQQQQPLLLQQPPFSQQRPPFSQQQQQPVLPQQPPFLQQQQQQPILPQQPPFSQHQQPVLPQQQIPYVQPSILQQLNPCKVFLQQQCSPVAMPQSLARSQMLWQSSCHVMQQQCCQQLPRIPEQSRYDAIRAIIYSIVLQEQQHGQGFNQPQQQQPQQSVQGVSQPQQQQKQLGQCSFQRPQQQQLGQWPQQQQVPQGTLLQPHQIAQLELMTSIALRTLPMMCSVNVPVYGTTTSVPFGVGTQVGAY

SEQ ID NO: 7332 - protein, 251 aa, Triticum aestivum
GAMEQGEEDGDWMVEPAAGKKGGAMIDRKKRFSEEQIKSLESMFATQTKLEPRQKLQLARELGLQPRQVAIWFQNKRARWKSKQLERQYAALRDDYDALLSSYDQLKKDKQALVNQLEKLAEMLREPGGAKCGDNAGAAARDDVRLAVAGMSMKDEFVDAGGASKLYSASEGCGGSGKLSLFGEDDDDAGLFLRPSLQLPTAHDGGFTASGPAEYQQQSPSSFPFHSSWPSSAAEQTCSSSQWWEFESPSE

SEQ ID NO: 7333 - protein, 384 aa, Rickettsia bellii
DISKVYSEADCFTYDPGFMSTASCRSTITYIDGDQGILRHRGYDIKDLAEKSDFLEVAYLLIYGELPNNKQYNDFTKKVAHHALVNERLHYLFQTFCSSSHPMAIMLAAVGSLSAFYPDLLNFFKEADYELTAIRMIAKIPTIAAMSYKYSIGQPFVYPDNSLDFTENFLHMMFATPCEKYKVNPVIKNALNKIFILHADHEQNASTSTVRIAGSSGANPFACVSTGIASLWGPAHGGANEAVINMLKEIGSVENIPKYIAKAKDKNDNFRLMGFGHRVYKNYDPRAAVLKETCKEVLKELGQLDNNPLLQIAIELEAIALKDEYFIERKLYPDVDFYSGIIYKAMGIPPQMFTVLFATARTVGWMAQWKEMHEDPEQKISRPR

SEQ ID NO: 7334 - protein, 1048 aa, Magnaporthe grisea 70-15
MTTAISSNHEPPYPPSSGDRGQAYPPVSRSQSTRHRPSTAQPPAPHRSVSHNHSGSMSSRPSSSARPVQDVLPNNDYETTNVAQKATKDSRPPQSSRDTATRQHRRSGSQRSGHHGHDGNAEAGPSTPSQASHGSSDPRTRKMRTVIPAQSGKWNLGKTIGAGSMGKVKLARKEDGTEQVACKIIPRVTPDDGHTPRAERERADLSKEVRTAREAAIVTLLSHPHICGLRDVVRTNFHWYMLFEYVNGGQMLDYIISHGKLKEKQARKFSRQIASALDYCHRNSIVHRDLKIENILISKTGDIKIIDFGLSNLFAPKSHLKTFCGSLYFAAPELLQARPYTGPEVDVWSFGIVLYVLVCGKVPFDDQNMPALHAKIKKGVVDYPNWLSSECKHLLGRMLVTDPKQRITMAEILSHPWMVKGYSGPPENYLPNREPLTLPLDQEVINGMTGFSFGPPEVIKAQLTRIIESEDYQRSIRAYQREKETQQTPKDPEKKRGFGFYRRRNSFSSKDTLTTPSSEGLALGNDPLNAFNPLVSVYYLVREKQEKDSASRRPATSARPNAVPEIAPPQEAHTNASAYEMPGENATGGRTRPRARTHGEDDAPTEPIRPPQLSPPAAPPPERLEPPKKESAAAGLLRRFSTRRRKEQPERLDKDRSHPPVVQVHSPAENSSQPTSAIRKSFSIRRGRRDREEQASAESQARMRAGSSQPQHSDLLSPPLSAGANTQTFRKGLGRSASVNSGEFSRRRAMGTARTSKDPPPTSGSDHSTIHEKPPKEQQEKRSPTTAGPSQSMTSRAKSLGHARQESIQARRQRREAEKKREANVPEETDAEVNGADDSSKERVTDFDLDKPVYLKGLFSVSTTSGKPVREIRTDIKRVLKQLGVDYTEIKGGFYCRHSPSIDLQNVADNGAASPAQTPSGAKRRFSFGALRSDGKEESNGERVPVTPRTPGRSGGGSGTDRDRHDSSSEVSENSEAREETSRRRDHPAGETRTHVRSDMGESMVSEFEIFIVKVPMISLHGIQFKRLGGNTWQYKNLADQILKELKL

SEQ ID NO: 7335 - protein, 471 aa, Rhodobacter sphaeroides 2.4.1
MMADAPLILWFRRDLRLADNPMLAEAAATGRPLIPLFILDPETEALGAAPKWRLGLGVEAFARALEGLGSRLVLRRGPALAVLEALVAETGAAGVHWSRLWEPDWRARDEGVKAGLRQAGIEAASHAGHTIFEPREVETGQGGFYRVYTPFWKAVKDRPVAASSPPPARLLSPAEWPVSERLACWDLGRAMHRGAAVVAPHLAVGEAAAAERLTRFLSGPLDRYAAERDRPDAPVTSRLSENLTYGEISARSLWHAGMRARAEGRAGAEKFLQELAWREFGWHLLYHTPEIARRNWRGDWDAFPWRGDNPDAERWRRGMTGEPFVDAAMRELFVTGTMHNRARLIAGSYLTKHLLTDWRVGQAWFEDCLIDWDPASNALGWQWVAGSGPDASPYFRIFNPATQAEKFDPESAYRQRFLAEIARRPGPEALAFFEAVPRSWGLRPDRCYPRPVVGLAEGRERALAAYGRRNN

SEQ ID NO: 7336 - protein, 506 aa, Chrysanthemum lavandulifolium
MTTTIPIPSRQLFIDGEWREPVKKNRISVINPSTEQIVGDIPAATAEDVDVAVKAARKALKRNGGKDWASATGAHRAKYLRAIAAKITEKKELFSKLEAIDCGKPYDEAAWDIDDVAGCFEYNADLAEALDKKQNAPIELPMDTFKCHVIKEPIGVVGLITPWNYPLLMATWKVAPALAAGCAAILKPSELASLTCLELGEVCKEVGLPAGVLNILTGLGPDAGAPLAAHPDVDKIALTGSSATGSKIMTAAAQNVKPVTLELGGKSPIVVFDDVDIDKAVEWTLFGCFWTNGQICSATSRLILHESIAKEFLDKLVKWAKNIKISDPLEEGCRLGPVVSSGQYEKVLKFVETARSEGATILSGGQRPQHLKKGFFIEPAIITDITTSMQVWREEVFGPVLCVKTFSSEEEAIELANDTHYGLGSAVISNDLDRCDRVTRAFDAGIVWVNCSQPCFCQAPWGGKKRSGFGRELGEWGLDNYLSVKQVTRYISNDAWGWYTPPSPKL

SEQ ID NO: 7337 - protein, 344 aa, Aegilops tauschii
MKTFLIFALLAIAATSAIAQMETSRVPGLEKPWQQQPLPPQQQPPCSQQQQPFPQQQQPIIILQQSPFSQQQQPVLPQQQPVIILQQPPFSQQQQPVLPQQPPFSQQQQPPFSQQQQPVLPQQPPFSQQQQPPFSQQQQPSSQQPPFPQQHQQFPQQQIPVGQPSVLQQLNPCKVFLQQQCSHVAMSQRLARSQMWQQSSCHVMQQQCCQQLPQIPEQSRYEAIRAIVYSIILQEQQQGFVQPQQQQPQQSGQGVSQHQQQSQQQQQLGQCSFQQPQQLQQFGQQPQQQQIPQGIFLQPHQISQLEVMTSIALRTLPTMCGVNVPLYSSTTSMPFSIGTGVGGY

SEQ ID NO: 7338 - protein, 396 aa, Triticum aestivum
MALSISAPTSSPFLPAPRQVGRWSSSPSSAKPAVFSLRRPVVVARAAAGNAPSSPAGAVVTEFDVPSGRSEIVPDTGVFDDFEKFAPTAATVSSSLLLGIAGLPDTKFKSAIDTALVDGECNTMEKPGDRMSCYLTKALGNVGAELALQVPGRVSTEIDARLAYDTQGIVQRVHELLQIYNEHDIPSERLLFKIPATWQGIEASRLLESEGTQTHLTFVYSFAQAAAAAQAGASVVQIFVGRIRDWAKNHSGDPEIDEALKKGEDAGLALVKKAYVYIHKNGYKTKLMAAAVRNKQDVFSLLGIDYIIAPLKILQSLDESVTDSDEKYGYVQRLTPSLDKMYNFSQEELVKWDHLSLAAAMGPAAEELLASGLEGYANQARRVEELFVKIWPPPNV

SEQ ID NO: 7339 - protein, 143 aa, Triticum aestivum
MAMAYKMATEGMNIKEECKRWFTEMKWKKVHRFVVYKIDERTRAVLVDKVGGPGEGYEELVAALPGDDCRYAVFDFDFVSVDNCQKSKIFFIAWSPAASRIRAKILYATSKQGLRRVLEGVHYEVQATERSEMGFDVIRERAQ

SEQ ID NO: 7340 - protein, 407 aa, Zea mays
MMSKTKAAVRPRSWHLPFLFLLLLAQTCSPQEQGGGGALHGSFVRCVARLSPATTDTSRLVHAPSAASYPSLLNATIQNLRFASPRTPRPALLLTPATVAEARACVTCCRRHGLTVRARSGGHDYEGLSYRSVAGARPFAVVDVAALRDVRVDAGRRVARAGPGATLGELYYAVTRESGGALGFPAGICPTVCVGGHLSGGGFGPMMRKHGLGADNVVDAEVVDAEGRLLDRAAMGEGLFWAIRGGGGGSFGVVVSWTVRLVPVPPVVGVFTVRRLVRRGDQRQTQAAVRLLTKWQRVAHALPEDLFVKVAMEPEVDDAGERHPSVTFKSLFLGNCSGMVAEMSAHLPELDVRAGDCREMSWIQSTLYFYGYTGEQAAEVLLDRSLQPKDYYKVKLDYLTSPIPAAG

SEQ ID NO: 7341 - protein, 213 aa, Zea mays
MAATRVSPVLLLLLTVQLSLLFRLPDSPSTLALALAAEPEQQNAKQHRQPALLVQSTCNSTSFYDLCIAALAADPASSTADVPGLGAIAVSAAANNASGTAAFLGNASDAAATPQADRALLRTCAGKYAAARDALVQARASLAEQAYDYAFVHVSAAGEYPAVCRTLFRRRQQQRGASRTAYPAELAKREEALRRLCTIALDIISLLQNQETY

SEQ ID NO: 7342 - protein, 240 aa, Glycine max
MHLSNLIHTVPTRDMRVVNGELCCLENPLPPTHFASSSSSFLCFVNTEMSAVNITNVTVLDNPASFLTPFQFEISYECLTALKDDLEWKLIYVGSAEDETYDQLLESVLVGPVNVGNYRFVLQADPPDPSKIREEDIIGVTVLLLTCSYLGQEFIRVGYYVNNDYDDEQLREEPPPKVLIDRVQRNILSDKPRVTKFPINFHPENNENEEQQPPPSEHPSETGEDPLAVVDRDPPDEKDS

SEQ ID NO: 7343 - protein, 243 aa, Schizosaccharomyces pombe
MSLAFTLLTSKDNTDEDEEHLELSSFNQEKLLEMISVFLSRLTRLNDSKQEATESDQIPLSPTSLKNPCLIFSAKNVPSISIQAYLTRILKYCPATNDVFLSVLIYLDRIVHHFHFTVFINSFNIHRFLIAGFTAASKFFSDVFYTNSRYAKVGGIPLHELNHLELSFFVFNDFNLFISLEDLQAYGDLLLSWYRQNGQNYNPTDVSCSIESPISHTPQQNQQDEQPRRPIMDRRLLSSHSIG

SEQ ID NO: 7344 - protein, 364 aa, Glycine max
  misc_feature (45)..(45): Xaa can be any naturally occurring amino acid
  misc_feature (64)..(64): Xaa can be any naturally occurring amino acid
  misc_feature (77)..(77): Xaa can be any naturally occurring amino acid
  misc_feature (101)..(101): Xaa can be any naturally occurring amino acid
MARRSLPLLKHLLSRRIPARSVTYMHRPGDGSPRPVTLIPGDGIXGPMVTGAVEQVMEAMHAPXYFEKFEVHGNMKXVPPEVLDSIRKNKVCLKGGLVTPXGGGVSSLNVQLRKELDLYASLVNCFNLPGLPTRHDNVDIVVIRENTEGEYSGLEHEVVPGVVESLKVITKFCSERIAKYAFEYAYLNNRKKVTAVHKANIMKLADGLFLESCREVATKYPGIKYNEIIVDNCCMQLVSKPEQFDVMVTPNLYGNLVANTAAGIAGGTGVMPGGNVGAEHAVFEQGASAGNVGSDKIREQKKANPVALLLSSAMMLRHLQFPAFADRLETAVEKVILEGKCRTKDLGGTSTTQEVVDAVIDALD

SEQ ID NO: 7345 - protein, 504 aa, Arabidopsis thaliana
MVVINSLRRLARTTQVHLHSRYATCMSGNSTSRRIFTTEAAPEKKNTVGSKGHDMLAPFTAGWQSADLDPLVIAKSEGSYVYDDTGKKYLDSLAGLWCTALGGNEPRLVSAAVEQLNTLPFYHSFWNRTTKPSLDLAKVLLEMFTANKMAKAFFTSGGSDANDTQVKLVWYYNNALGRPEKKKFIARKKSYHGSTLISASLSGLPPLHQNFDLPAPFVLHTDCPHYWRFHLPGETEEEFSTRLAKNLEDLIIKEGPETIGAFIAEPVMGAGGVIPPPATYFEKVQAVVKKYDILFIADEVICAFGRLGTMFGCDKYNIKPDLVTLAKALSSAYMPIGAILMSQEVADVINSHSSKLGVFSHGFTYSGHPVSCAVAIEALKIYKERNIPEYVAKVAPRFQDGVKAFASGSPIIGETRGTGLILGTEFVDNKSPNEPFPPEWGVGAFFGAECQKHGMLVRVAGDGILMSPPLIISPEEIDELISIYGKALKATEEKVKELKAQHKK

SEQ ID NO: 7346 - protein, 183 aa, Triticum aestivum
  misc_feature (93)..(93): Xaa can be any naturally occurring amino acid
PKHSTKFNNKQSNAVQPEEIDRARDQRARMAGMVFGLDAPMMAALQHLLDIPDGEAGAAGGEKQGPTRAYVRDARAMAATPADVKELPGAYAXVVDMPGLGSGDIKVQVEGEGVLVIGGERGREEKEDAKYRRMERRRKFVLPENADMEKISAVCRDGVLTVTVHKLPAPEPKKPKTIQVQVA

SEQ ID NO: 7347 - protein, 499 aa, Cicer arietinum
MEYNFLTYIIFLSLFLITTKLLFSKRKFKKLPPCPPSIPIIGNLHQVKQPIHHTFYNLSKKYGPIFTLKFGSQPVVVVSSASLVEECFTKNDIIFANRIHSAKTKYLGYNNTNMVSTSYGDLWRNLRRISSIEILSTHRLNSFSEIRKDETMRLIGKLAKKSHKDFTKVELRSLFGELTFNTIMRMVCGKRFYGEESDGTNAEEAKKFRDMMNEMQEFGLGSNLGDFVPLFKLFDFSGGHKKLKKVGEKMDALFQGLVDEHRNNKDKNLNTMIDHLLSLQESQPDYYSDQIIKGLIMALIVAGTETSSVTLEWAMSNLLNHPEILEKAKIELDNHIGQEHLIEEAEATKLQYLQNIISETLRLHPPVTMLLPHLSSHDCTIGGYDVPRNTMLMVNAWAIHRDPNLWADPMSFKPERFENGQGDIGGFIPFGMGRRACPGSGLALRTLGLTLGSLIQCFEWKRIGKEEVDMSEGSGTVVPKAIPLEAQCKARPIINKIFN

SEQ ID NO: 7348 - protein, 365 aa, Apium graveolens
MAKSSEIEHPVKAFGWAARDTTGLLSPFKFSRRATGEKDVRLKVLFCGVCHSDHHMIHNNWGFTTYPIVPGHEIVGVVTEVGSKVEKVKVGDNVGIGCLVGSCRSCESCCDNRESHCENTIDTYGSIYFDGTMTHGGYSDTMVADEHFILRWPKNLPLDSGAPLLCAGITTYSPLKYYGLDKPGTKIGVVGLGGLGHVAVKMAKAFGAQVTVIDISESKRKEALEKLGADSFLLNSDQEQMKGARSSLDGIIDTVPVNHPLAPLFDLLKPNGKLVMVGAPEKPFELPVFSLLKGRKLLGGTINGGIKETQEMLDFAAKHNITADVEVIPMDYVNTAMERLVKSDVRYRFVIDIANTMRTEESLGA

SEQ ID NO: 7349 - protein, 169 aa, Saccharomyces cerevisiae
  misc_feature (4)..(4): Xaa can be any naturally occurring amino acid
  misc_feature (39)..(39): Xaa can be any naturally occurring amino acid
  misc_feature (52)..(52): Xaa can be any naturally occurring amino acid
  misc_feature (105)..(105): Xaa can be any naturally occurring amino acid
  misc_feature (132)..(132): Xaa can be any naturally occurring amino acid
GAHXVTSNVVLVSGEGERFTVDKKIAERSLLLKNYLNDXGDDDDEDDDEIVXPVPNVRSSVLQKVIEWAEHHRDSNFPDEDDDDSRKSAPVDSWDREFLKVDQEXLYEIILAANYLNIKPLLDAGCKVVAEXIRGRSPEEIRRTFNIVNDFTPEEEAAIRRENEWAEDR

SEQ ID NO: 7350 - protein, 276 aa, Mesorhizobium loti MAFF303099
MPELITLNDGAAIPQLGLGVWQVDHGITADVVGWAIKAGYRLIDTAQGYQNEEGVGEAIRAADVARSELYITSKLRNGAHERDAALRAFDDTMEKLGIEQIDLFLIHWPVPSRDKYVEAWKTLIELKQAGRIKSIGVSNFNRDHLERIIGETGVVPVANQIELHPRFQQRELREFHAGHNIQTESWSPLGSGRLLGDPTIAGIAKKHGKSAAQTIIRWHLQQGLIVIPKSVRQDRIAANFDVFDFELDAQDLKTIAGMDSADGRDGPNPATAAFLF

SEQ ID NO: 7351 - protein, 383 aa, Rickettsia sp. COOPERI
DISRVSAEADCFTYDPGFMSTASCQSTITYIDGDKGILRHRGYDIKDLAEKSDFLEVAYLLIYGELPSGEQYNNFTKQVAHHSLVNERLHYLFQTFCSSSHPMAIMLAAVGSLSAFYPDLLNFKEADYELTAIRMIAKIPTIAAMSYKYSIGQPFIYPDNSLDFTENFLHMMFATPCTKYTVNPIIKNALNKIFILHADHEQNASTSTVRIAGSSGANPFACISTGIASLWGPAHGGANEAVINMLKKIGSSEYIPKYIAKAKDKNDPFRLMGFGHRVYKNYDPRAAVLKEACKEVLKELGQLDNNPLLQIAIELEAIALKDEYFIERKLYPNVDFYSGIIYKAMGIPSQMFTVLFAIARTVGWMAQWKEMHEDPEQKISRPR

SEQ ID NO: 7352 - protein, 357 aa, Anabaena variabilis ATCC 29413
MRKKIGILTSGGDCPGLNCVIRAVVSHATLTYDWEVFGIPYATQGLLERQAIALNMHGWDLRGIDPLLNMGGTILGTINKGDTLAHVDEMLASYEALALDALIVIGGDGSLGILHELASRGNWNLVAIPKTIDSDVALTERAVGFDTAVNTIVDALNRLTFTAASHDRVMIVEVMGRSAGHLALHAGIAGGADVILIPEISYTISGLCQYIAELRDRWQRKFAIVVVAEGAKLCLEDVQENIASACVSPKCGRGQYIAEQIARCSKNLIDTRVSVLGHIQRGGIPSALDRLTATVFGKTAVDLVAQGKFGQMVAWQNGEAIPVPIQDVVAQSPLHVNPQGSLVQSARCLGIYVGEKT

SEQ ID NO: 7353 - protein, 244 aa, Oryza sativa (japonica cultivar-group)
MFRYEKGGDVEAGTSGGARELYPGMTEPPEMRWALIRKIYVILSMQLLLTAAVAAVVVKVRAISHFFVSSHAGLGLYIFLIILPFIVLCPLYYYHQKHPVNLILLGLFTVAISFAVGMTCAFTSGKVILESAILTTVVVFSLTAYTFWAAKRGRDFSFLGPFLFASLIVLLVFAFIQILFPLGRISQMIYGGIASLIFSGYIVYDTDNIIKRYTYDQYVWAAVSLYLDVINLFLSLMTLFRAAD

SEQ ID NO: 7354 - protein, 478 aa, Bacillus anthracis str. A2012
MKIAGRNLNHHGTSAAFVKNKLLWKVEEMMKTKQTDELLAKDEQYVWHGMRPFSPNSTMVGAKAEGCWVEDIQGKRYLDGMSGLWCVNSGYGRKELAEAAYKQLQTLSYFPMSQSHEPAIKLAEKLNEWLGGEYVIFFSNSGSEANETAFKIARQYYAQKGEPHRYKFMSRYRGYHGNTMATMAATGQAQRRYQYEPFASGFLHVTPPDCYRMPGIERENIYDVECVKEVDRVMTWELSETIAAFIMEPIITGGGILMPPQDYMKAVHETCQKHGALLISDEVICGFGRTGKAFGFMNYDVKPDIITMAKGITSAYLPLSATAVKREIYEAFKGKGEYEFFRHINTFGGNPAACALALKNLEIIENENLIERSAQMGSLLLEQLKEEIGEHPLVGDIRGKGLLVGIELVNDKETKEPIDNDKIASVVNACKEKGLIIGRNGMTTAGYNNILTLAPPLVISSEEIAFVIGTLKTAMERI

SEQ ID NO: 7355 - protein, 198 aa, Zea mays
  misc_feature (83)..(83): Xaa can be any naturally occurring amino acid
MASSMLSSAAVVTSPAQATMGAPFTGLKSSAAFPVTRKANNDITSIASNGGRVSCMKVCPPAAKKKFETLSYLPDLTELELGXGEVDYLLRNKWIPCVEIRCWKHGILCNREHGSTPRNTTRARYWTMWEAFPLFRMALNSWLQGVERKTPKKGRNREVTPKTLPLHQGILRDFNTTTRPRPQGDSSFQSPQTSPHKL

SEQ ID NO: 7356 - protein, 438 aa, Pirellula sp. 1
MSPSLFFAAIFCGSCFLLFVGSADAIEEWEWKRLTRKRLPKLRSGKAIDAVSAKLADQSASAAKPDVTNHPSRWKGWRSASVQSVKDESLDCRSFVFVPTDGEPFPPFLGGQYLTVRLKDPSSGKNVSRCYSLSSGPDEPHYRITVKRVPGGTMSNLLHDTIDVGDRIEIQAPKGRFHYSVEESQSANLEPLNLVAAGIGITPMLSMLFQSLNERTDRDVNLFYQVRNAVDAPFLAPIREIAKMLEATTGVRVHLWFSKPEDDDLRPGDSVGRLSAERIVERLGHHRGEYLICGPDVFMNAIAEGLIECGASADRVMFESFGGKSKSAGALAVPACDPCSDASDVDESNSDDSVGWNVTFQTSGKSASFEAGMDGLLDVAESLDVDVDSGCRSGDCGACVRRLLSGEVRYAETPECDVEDGEAVLCVAKPVSEVVVDA

SEQ ID NO: 7357 - protein, 336 aa, Escherichia coli CFT073
MDKITQVLFSDIGKVTTQYVEVPHQQLKPHEVRIAPVFYGICGSDLHVLKGGHPFAKPPVVPGHEIAARVTEVGSDVKNVQPGDHVVVDPIMACMECRACKAGRFNLCEPPQVAGFRAPGFARSQHIVPARNCHVAPASLPLKVLAFAEPAACARHCVNRMPKASLESVLVIGAGTIGLSIVQALRIMGAGKITVIEPDAAKRALALKLGAAEVWAPGELAADVRFTGAIDVVAAQATLNDACTRVYAGGTVVCMGVPSGPREIPLPMMQRFERDLLNSGMYIPEDFDAVIEWLADGRFDTSELVTDLFAIEDAAAAFERAQQNDSIKVMLQFAPE

SEQ ID NO: 7358 - protein, 122 aa, Ureaplasma parvum serovar 3 str. ATCC 700970
MIQHMTRLKVADNTGAKEVGVIKVLGGSKKRYASVGDIVVVSVKKATPAGLIAKGQMAKAVIVRTKKSIRRESGLLIRFDENACVLIKEDKTPRGSRIFGPVAREIRDRGYTKIASLAPEVL

SEQ ID NO: 7359 - protein, 312 aa, Burkholderia cepacia R18194
MPLDPQAQALLAAFAQAPAIDFAQLTVPAYRASLADGGAFAPGDAVVAEEDWQIPASGRQLSARLYRPAVDGPLPLTVFFHGGGFVSCGIDTHANLCRSLAARARTLVLSVDYRLAPEARFPAAAHDACDAMRWAAASARDLGARAGALAVAGDSAGGNLAAVAALQLRGSGIAIAHQLLLYPVVDCATEHPSYETLGNGYFLTADMMRWFKRQYFDEGADRASPLASPLAAPDVAGAAPATIVSAEFDPLRDEAEAYALRLAQAGTPVTLVRWPGQLHGFASMLGAVDAADRVLTFGADALRRAFDATEAP

SEQ ID NO: 7360 - protein, 307 aa, Zea mays
MDGGRPEMRRTMTLSEQLSSTPDPAIRDFLKIPHDADVGGILHDGDSPSAVDAQGPRAGRTSGWKPLRDRLRLRRAAGAWQTPPKPGAAAAHAPTNSGNLSNRYNYNPGEAAAAFSRTFSRAPSLRAPSLRATPTFSRVASTRLGPASSRSSSRRPATYDFRDLDERRHDADADDGGEEEEEDDEGEEDDDEGDEEDEKEEAPAAQMSLMALLEQTDSQWDDDEDEEESGGGGGARKKGEGDDDEDDGEGREEEMVHVCCVCMVRHKGAAFIPCGHTFCRLCSRELWVSRGNCPLCNGFIQEILDIF

SEQ ID NO: 7361 - protein, 192 aa, Pirellula sp. 1
MSRFLLLTLALGCLMNAPQPVSAADSTADHECVLAHEAKTIEGKEVDLHDYEGKVVLIVNVASKCGYTKQYAGLQSLYEAHKDDGLVILGFPCNQFGSQEPGTNADILEFCSARYNVTFPMMGKVDVNGDDASPLYKQLTSVEAKPAGKGPISWNFEKFLIGRDGQVVGRYKSKVAPSDEELVSAIKSALKG

SEQ ID NO: 7362 - protein, 100 aa, Agrobacterium tumefaciens
MATGKVKWFDATKRFGFITPDDGGPDVFLHLSSITDPACPTLHPGFRLHYGVEQRGGKVTASDVRPAPVEQAVHRAPVTPPQGEEEFSDAFEREWGLRRG

SEQ ID NO: 7363 - protein, 327 aa, Triticum aestivum
  misc_feature (217)..(217): Xaa can be any naturally occurring amino acid
MPGDTEPRVVEDFLGVVQLLSDGSVVRGDEAVLRSNEPLPDVPGVQWKDVLYHAAHGLSVRVYRPASSVAGGSKLPVLVYFHGGGYCLGSFAEPNFHSFCLRAAAEISAVVLSVQYRLAPEHRLPAAIDDGASFLSWLRGQAELGAGADPWLAESADFAGTFLSGHSAGANLAHHVTVQVASGEIATTPVRIVGYILLSAFFAGADRTATEADPPGXVSLTTAMADQLWRMSLPVGASMDHPLANPFGPESPSLAPVELPPALVVAPLSDVLRDRVLGYGARLKDMGKAVEVVQFEGEQHGFSVRQPFGEAADELLRVIKRFVYSGN

SEQ ID NO: 7364 - protein, 94 aa, Zea mays
  misc_feature (22)..(22): Xaa can be any naturally occurring amino acid
  misc_feature (32)..(32): Xaa can be any naturally occurring amino acid
  misc_feature (41)..(41): Xaa can be any naturally occurring amino acid
ESSINKINTRDHQFIVRDTNPXGIKGQSLAAXLSAGISAGXSGRELQAIDDEWLDAARLKTFSECVRDAIAGLGVAGHVNHRTLQEWDRATGGV

SEQ ID NO: 7365 - protein, 143 aa, Glycine max
MAMAFKMATTGMWVTDECKNSFMEMKWKKVHRYIVFKIDEKSRLVTVDKVGGPGESYGDLAASLPDDDCRYAVFDFDFVTVDNCRKSKIFFIAWSPTASRIRAKMLYATSKDGLRRALDGISYEVQATDPTEMGFDVIQDRAK

SEQ ID NO: 7366 - protein, 455 aa, Rhodobacter sphaeroides 2.4.1
MRDDAPNSWESRADASSFYGFTDLPSVHQRGTVVLTHGKGPYIYDVHGRAYLDANSGLWNMVAGFDHPGLIEAAKAQYERFPGYHAFFGRMSDQTVMLSEKLVEVSPFARGRVFYTNSGSEANDTMVKMLWFLGAAEGHPERRKIITRVNSYHGVTAVSASMTGKPYNSLFGLPLPGFIHVGCPHYWRFGQAGETEAEFTQRLARELEATIIKEGPDTIAGFFAEPVMGAGGVIPPSEGYFQAVQPVLKRYGIPLIADEVICGFGRTGNTWGCQTYDFMPDGIISSKNITAGFFPMGAVILGPELADRLQAASEAVEEFPHGFTASGHPVGCAIALKAIDVVMNEGLAENVRALTPKFEAGLAYLAENPNIGEWRGKGLMGALEAVKDKATKTPFPGDLSVSERIANSCTDHGLICRPLGQSIVLCPPFIMTEAQMDEMFEKLGAALKKVFAEVA

SEQ ID NO: 7367 - protein, 363 aa, Methanothermobacter thermautotrophicus str. Delta H
MTYTSGRILGSMCTSSHPLARRVYCDFLESNLGDPGLFRGTRELESGVIGMLGELLSEPDAAGHIITGGTEANLMAMRAARNMAGAEKPEIIVPKSAHFSFRKAADILGLRLREAELDQDYRVDVESVRKLISENTVAVVGVAGTTELGRIDPVEELSEICLDEDIHLHIDAAFGGFIIPFLRETGAELPEFDFKLQGVSSITVDPHKMGLAPIPSGCILFRDASYLDAMSIETPYLTEKQQSTIVGTRTGASAAATWAIMKHMGREGYRKLALRVMGVTRRLRDGLVELDYQLVVEPELNIVAFNHPAMGPHELADRLEELGWAVSVSSCPPAIRVVLMPHIMEEHIELLLRDLEGIRLREE

SEQ ID NO: 7368 - protein, 250 aa, Rehmannia glutinosa
MVKNYPTVSEEYLNAVEKCKKKLRGLIAEKNCAPIMLRLAWHSAGTFDQCSKTGGPFGTMRFKAEQGHAANNGLDIALRLLQPIREQFPILSHADFYQLAGVVAVEVTGGPEVPFHPGRPDKEEPPVEGRLPDATKGSDHLRDVFTKQMGLSDQDIVALSGAHTLGRCHKERSGFEGPWTANPLIFDNSYFKELLSGEKEGLLQLPSDKALLADPSFRPLVEKYAADEDAFFADYAEAHLKLSELGFADA

SEQ ID NO: 7369 - protein, 441 aa, Lactococcus lactis subsp. lactis Il1403
MNKSAKLIVLSVIYERKKMTLLIKNGRLVDPKSNRDEVLDILIENDKIVKIGLNLSVENAEIVDARGLVVAPGLIDVHVHFREPGQTHKETIHSGAKSAAAGGFTRVVMMANTKPILSTPKVLTETLEIADKEDIKIDAVGSITQDFDGEHLTDFDELIKAGAIGFSDDGIPLTDAGVLRKALQKAKLTDSLISIHEEDPNLIGTLGVNDGEVAHKCGFTGAPTVSEYSMMARDSMIAYETGARLHIQHLSAGESVEVVRFAKNLGAKITAEVTPQHFSITEQMIFEQGTNAKLNPPLRSTTDIGKIIEGLKDGTIDVIATDHAPHTREEKNVSLDKAPSGMIGLETSLQLGLTNLVAKGHLTLSELLTKMTVNPAKLYNFDAGYLAENGPADLVIFDAENDYQVGETFDSKATNSPFIKQKVQGQVKYTICDGKIVYQAK

SEQ ID NO: 7370 - protein, 351 aa, Clostridium beijerinckii
MKGFAMLGINKLGWIEKERPVAGSYDAIVRPLAVSPCTSDIHTVFEGALGDRKNMILGHEAVGEVVEVGSEVKDFKPGDRVIVPCTTPDWRSLEVQAGFQQHSNGMLAGWKFSNFKDGVFGEYFHVNDADMNLAILPKDMPLENAVMITDMMTTGFHGAELADIQMGSSVVVIGIGAVGLMGIAGAKLRGAGRIIGVGSRPICVEAAKFYGATDILNYKNGHIVDQVMKLTNGKGVDRVIMAGGGSETLSQAVSMVKPGGIISNINYHGSGDALLIPRVEWGCGMAHKTIKGGLCPGGRLRAEMLRDMVVYNRVDLSKLVTHVYHGFDHIEEALLLMKDKPKDLIKAVVIL

SEQ ID NO: 7371 - protein, 427 aa, Campylobacter jejuni subsp. jejuni NCTC 11168
MQNQILKNLDLKHIWHPCTQMKDHETLPLIPIKKAKGVWLYDFDDKAYMDCVSSWWVNLFGHCNEKIANAIKKQVDELEHVILAGFTHEPIIKLSARLCEKVGRNFNKCFYADNGSSAIEVALKMSFHYHLNKGVKKSKFLSLSNSYHGETLGALSVGDVALYKDTYKALLLECLSTPVPQGKDYTKELEILKDILEKNASEICAFILEPLVQCAGNMHMYEARFIDEAIKLCHKFGVQVIFDEIAVGFGRTGTLFALHQCKQSPDFICLSKGITGGFMPLSVVLTRDEIYNAFYDTYESQKAFLHSHSYTGNTLACAAANAVLDIFEDENILVKNQILSEFIKKEFSRLEKFDFLGNFRTCGMISAFDILSTKYKRVGLFVFQKALEKGLLLRPLANTIYFMPPYIITKEQIVYVLESLEQIFKEF

SEQ ID NO: 7372 - protein, 486 aa, Azoarcus sp. EbN1
MTLALNDPDLFRSRCLVGGTWADADSGATIAIHNPATGEQLGTIPKMGAAETRRAIDAASRAWPAWRALTAGARARVLRKWFDLIVEHQEDLALLMTSEQGKPLGEARGEVLYAASFVEWFAEEAKRIYGDVIPGHQPDKRIVVTKEPVGVCAAITPWNFPLAMITRKAGPALAAGCTMVLKPATQTPYSALALAVLAERAGVPAGVFSVLTGSATEIGGELTANPIVRKLTFTGSTEVGIKLAAQCAPTIKKLSLELGGNAPFIVFDDADLDAAVDGALASKYRNTGQTCVCANRLLVQDSVYDAFAEKLTAAVAKLKVGNGVDEGVTQGPLIDMRAVEKVEEHIADALAKGARVVTGGGRHALGRTFFEPTILADVTPQMKVAREETFGPVAPLFRFKDEAEAIRMANDTEFGLAAYFYSVGMNRVWRVSGALEYGIVGINTGIISTEVAPFGGMKSSGLGREGSKYGIEDYLEIKYLCMGGVQ

SEQ ID NO: 7373 - protein, 356 aa, Verticillium fungicola
MSRANPPNNASASRKISFNVSEQYDIQDVVGEGAYGVVCSAIHKPSGQKVAIKKITPFDHSMFCLRTLREMKLLRYFNHENIISILDIQKPRGYDSFNEVYLIQELMETDMHRVIRTQDLSDDHCQYFIYQTLRALKAMHSANVLHRDLKPSNLLLNANCDLKVCDFGLARSAASQEDNSGFMTEYVATRWYRAPEIMLTFKEYTKAIDVWSVGCILAEMLSGKPLFPGKDYHHQLTLILDVLGTPTMEDYYGIKSRRAREYIRSLPFKKKVPFRTLFPKTSDLALDLLEKLLAFNPVKRITVEEALKHPYLEPYHDPEDEPTAPPIPEEFFDFDKHKDNLSKEQLKQLIYQEIMR

SEQ ID NO: 7374 - protein, 137 aa, Aspergillus nidulans FGSC A4
MPASVHSQDNDQSMLDAQAQNQDHIDETLLEQKRIIVLPGATDTAASFQFEGEGHTLGNALRFAIMKNPEVEFCGYTIPHPSESKMNIRIQTYDSTTAVEALEKGLDTLMDLCDVVTDKFTAARDEFNAEQANRMES

SEQ ID NO: 7375 - protein, 166 aa, Zea mays
MATSFQGTTTKCTACDKTVYLVDKLTADNRIYHKACFRCHHCKGTLKLANYNSFEGVLYCRPHFDQLFKRTGSLDKSFEGTPKVVKPERNVGNENATKVSSAFAGTREKCVGCSKTVYPTERVTVNNTMYHKSCFKCCHGGCTISPSNYIAHEGKLYCKHHHISVG

SEQ ID NO: 7376 - protein, 498 aa, Shewanella oneidensis MR-1
MSTPKTRSDWENLAVSLAINGKAFINGEYRDASSGNTFDCISPIDGRLLAPVASCDLMDANIAVANAREVFDSGVWSKAAPVKRKQVMIRFAELLEENANELALLETLDMGKPIRFSKAVDVAGAARAIRWSGEAIDKLYDELAPTAHNEIGMITREPVGVVAAIVPWNFPLLMACWKLGPALVTGNSVILKPSEKSPLTAIRIAELAVQAGIPKGVLNVLPGYGHTVGKALALHMDVDTLVFTGSTKIAKQLMIYAGESNMKRVWLEAGGKSPNIVFNDAPDLKAAAVAAAEAIGFNQGEVCTAGSRLLVESGVKDELVGLIAEELASWQPGHPLEPTTVSGAVVDKQQLDTILSYIKAGQNEGASLVYGGQQVLAETGGVYVQPTVFSNVKNQMKIASEEIFGPVLSVIEFNGMEEAIAIANDTIYGLAAGVWTADISKAHKTAKALRSGMVWINHYDGGDMTAPFGGYKQSGNGRDKSLHSFDKYTEIKATWIVL

SEQ ID NO: 7377 - protein, 446 aa, Shewanella oneidensis MR-1
MADSPNNLAHEHPSLEHYWMPFTANRQFKASPRLLAQAEGMYYTDINGNKVLDSTAGLWCCNAGHGRREISEAVSKQIRQMDYAPSFQMGHPIAFELAERLTELSPEGLNKVFFTNSGSESVDTALKMALCYHRANGQASRTRFIGREMGYHGVGFGGISVGGLSNNRKAFSGQLLQGVDHLPHTLDIQHAAFSRGLPSLGAEKAEVLEQLVTLHGAENIAAVIVEPMSGSAGVILPPQGYLKRLREITKKHGILLIFDEVITAFGRVGAAFASQRWGVIPDIITTAKAINNGAIPMGAVFVQDYIHDTCMQGPTELIEFFHGYTYSGHPVAAAAALATLSIYQNEQLFERSFELERYFEEAVHSLKGLPNVIDIRNTGLVAGFQLAPNSQGVGKRGYSVFEHCFHQGTLVRATGDIIAMSPPLIVEKHQIDQMVNSLSDAIHAVG

SEQ ID NO: 7378 - protein, 462 aa, Arabidopsis thaliana
MASNGVDEQIKLVEGPAGYVLEDVPHLSDYILDLPTYPNPLQSNAAYSVVRQYFVDEDDTVQEKIVVHKDSPRGTHFRRAGPRQKVYFKPSDVRACIVTCGGLCPGLNTVIREIVCGLHFMYGVTEVIGVDCGFRGFYSKNTVALTPKTVSDIHKRGGTILGTSRGGHDTSKIVDNIQDREINQVYIIGGDGTQKGANAIYKEIRRRGLKVAVAGIPKTIDNDIPVIDKSFGFDTAVEEAQRAINAAHVEATSVENGIGIVKLMGRYSGFIAMYATLASRDADCCLIPESPFYLEGKGGLYEFIAKRLRENGHMVIVIAEGAGQDLVAESIEQQDASGNKLLKDVGLWMSLKIKEYFAKHNVMDITLKYIDPTYMIRAIPANASDNVYSTLLAQSAVHGAMAGYTGFVSGLVNGRHTYIPFNRITERQNKVVITDRMWARMLSSTNQPSFMNPPKGTTEFTD

SEQ ID NO: 7379 - protein, 337 aa, Zymomonas mobilis
MKAAVITKDHTIEVKDTKLRPLKYGEALLEMEYCGVCHTDLHVKNGDFGDETGRITGHEGIGIVKQVGEGVTSLKAGDRASVAWFFKGCGHCEYCVSGNETLCRNVENAGYTVDGAMAEECIVVADYSVKVPDGLDPAVASSITCAGVTTYKAVKVSQIQPGQWLAIYGLGGLGNLALQYAKNVFNAKVIAIDVNDEQLAFAKELGADMVINPKNEDAAKIIQEKVGGAHATVVTAVAKSAFNSAVEAIRAGGRVVAVGLPPEKMDLSIPRLVLDGIEVLGSLVGTREDLKEAFQFAAEGKVKPKVTKRKVEEINQIFDEMEHGKFTGRMVVDFTHH

SEQ ID NO: 7380 - protein, 280 aa, Streptococcus pneumoniae TIGR4
MNTYQLNNGVEIPVLGFGTFKAKDGEEAYRAVLEALKAGYRHIDTAAIYQNEESVGQAIKDSGVPREEMFVTTKLWNSQQTYEQTRQALEKSIEKLGLDYLDLYLIHWPNPKPLRENDAWKTRNAEVWRAMEDLYQEGKIRAIGVSNFLPHHLDALLETATIVPAVNQVRLAPGVYQDQVVAYCREKGILLEAWGPFGQGELFDSKQVQEIAANHGKSVAQIALAWSLAEGFLPLPKSVTTSRIQANLDCFGIELSHEERETLKTIAVQSGAPRVDDVDF

SEQ ID NO: 7381 - protein, 266 aa, Glycine max
GNIISVMVYLAPVPTFYRIYKKKCTDGFHSLPYLLSLMSSMLWLYYAFLKIHDGVVPLITINSIGCVIELIYILTYIKYAHKDARNLTYTLFAAMNIGFLALVLSSRFALNGSHRVKVIGWICDAVSLSVFASPLSIMAKVIRTKSVQFMPFYVAFILTLNAITWFVYGLSMQDKCIYIPNVGGFALGLVQMVLYGIYRKGSESEKEQGLGEGVINIVVVNPLGPAEVFPIAVDDNKVKDLVVVDDVTVSQQEKEKNVEAKDDCPV

SEQ ID NO: 7382 - protein, 306 aa, Escherichia coli CFT073
MSSTMALEKGIAELVEEFIAAGRPSSRQQSITQRREGYIASAVLAGETETRVDIQTIELEGMTLRIVSPLNAPTLLPTIIYYYGGCFVSGGFATHDNQLRQLAYYGQCRIIAVQYRLAPEHTFPAAHDDAQRGAELVRQHAERLGVDKQRITLAGDSAGGHLALVTALRLKRAGEWQPAQLILIYPMLDATGHFESYIRNGHDYIITRDTLLSGFEMYLPGIERRHPEASPIWRNDFNGLPPVHIITAEYDPLCDEGEALYHRMTGQGVQCTCQRYLGVIHGFFQLGGISEAARSALRDVAWRAGR

SEQ ID NO: 7383 - protein, 327 aa, Glycine max
MRPPTRPPTRPPTRPGNPNNNNLFDGCQGESDHWSELDTDLYHWTKALRPVQWFPGHIAKAEKELKEQLKLMDVVIEVRDGRIPMSTSHPQMDLWLGNRKRILVLNREDMISTADRNAWADYFTRNGTKVVFSNGQLGMGTMKLGRLAKELAADVNVKRRSKGLLPRAVRAGIVGYPNVGKSSLINRLLKRRMCPAAPRPGVTRELRWVRFGKDLELLDSPGILPMRISDQSAAIKLAICDDIGERSYDVADVAAILVQMLSKLPTVGRDALCKRYKIDVDCRDGRIFIEKLAVRVFNGDVHQAAFRVLADFRKGKFGWTALERPPK

SEQ ID NO: 7384 - protein, 391 aa, Synechocystis sp. PCC 6803
MGKNLLEQLRQFTVVVADTGDIQAIETFTPRDSTTNPSLITAAAQMPQYQEIVDSTLLKAKDEAGENASIKDIVRLAFDRLAVAFGLKILQIIPGRVSTEVDARLSYDTEATIAKARYLIGEYAKAGIDKKRILIKIASTWEGIKAAEVLEQEGIHCNLTLLFGLHQAIACAEAKVTLISPFVGRILDWYKKSTGKEYDSHEDPGVQSVTTIYNYYKRFGYKTEVMGASFRNIGEIIELAGCDLLTISPQLLDQLRNTEGDLPRKLDPATVPQDIEKIVMDKATFDKMHAEDPMASEKLAEGIAGFTKALEVLEHLLEERLKVLDGQEHIKHGAEEIFHAYDLDGDGFITREEWAGTDVVFDALDRDHDGKITAAEMSAGLGAAFRLASVG

SEQ ID NO: 7385 - protein, 350 aa, Glycine max
  misc_feature (201)..(201): Xaa can be any naturally occurring amino acid
DQKSSILKHSNVRPGLACGNTIVLKTDEQTPLSALYASKLFHEAGLPAGVLNVVSGFGPTAGAALASHMEVDKLAFTGSTDTGKVVLELAAKSNLKPVTLELGGKSPFIVCEDADVDQAVELAHFALFFNQGQCCCAGSRTFVHESVYDEFVEKAKARALKRVVGDPFKGGIEQGPQIDSDQFEKILRYIRSGVESGATLXTGGDKLGNKGFYIQPTVFSNVKDGMLIAKDEIFGPVPSILKFKGLGEVVQRANNPRYGLSAGVFTKNMDPANPFTRALKVGTVWINCFDTFDAAIPFGGDKMSGQGREKGEYSLQNYLQVKAVVNPFKNPAWLLETLVPSLDPSPPGPP

SEQ ID NO: 7386 - protein, 250 aa, Lycopersicon esculentum
MGKCYPTVSEEYLKAVDKCKRKLRGLIAEKNCAPIMLRLAWHSAGTYDVCSKTGGPFGTMRFKAELQHGANNGLDIALRLLEPIREQFPTLSHADFHQLAGVVAVEVTGGPDVPFHPGREDKPEPPVEGRLPDATKGCDHLRDVFKKQMGLSDQDIVALSGAHTLGRAHKERSGFEGPWTANPLIFDNSYFTELLSGEKQGLLQLPSDKALLCDPAFRPLVEKYAADEDAFFADYAEAHLKLSELGFAEA

SEQ ID NO: 7387 - protein, 294 aa, Schizosaccharomyces pombe
MPFIKAVKSSPYFSRYQTKYRRRREGKTDYYARKRLIAQAKNKYNAPKYRLVVRFSNRFVTCQIVSSRVNGDYVLAHAHSSELPRYGIKWGLANWTAAYATGLLVARRALAKVGLADKYEGVTEPEGEFELTEAIEDGPRPFKVFLDVGLKRTSTGSRVFGAMKGASDGGLFIPHSPNRFPGFDIETEELDDETLRKYIYGGHVAEYMEMLIDDDEERYQKQFSGLIADGIESDQLEDIYAEAYAKIREDPSFQKSGKDAAAFKAESLKYTQRKLTAEERKERFNAKVIEAGRA

SEQ ID NO: 7388 - protein, 199 aa, Triticum aestivum
MEGVGARLGRSSARYGPAMTFTGPVRKWRKEWVTISAATATATSAAASSTGTGSRGNNLILFKWTPLNGANEGDEEQTAPAKTATRRRRYVPVSVVQDQRQESAKSDDENKANDGEPSSTETEQSIGKTNMDDILMDESQASDEVRDSGNFVGGTDINLNLGPKDPDREDEGDTGEQHEVRTEHRLKRKSVTPDLEMRM

SEQ ID NO: 7389 - protein, 257 aa, Brassica napus
IQFLLECDEARVDYEDLYAAVMRGDQESCLLYVDKLKQRCVDGFKEGVLSIEQLASVDGLCEWVLKAIGASDPVQTYNINLSVFTSIPDLWGIDQLFPIVPIHKLDQRPGARGVLSDLTCDSDGKIDKFIGGESSLPLHELDGGGGGRYFLGMFLGGAYEEALGGVHNLFGGPSVVRVSQSDGPHSFAVTRAMPGQSSADVLRAVQHEPEIMFQSLKHRAEKLMHTKGGGEDEDDEELNNVVACLDRSFNNMPFLAT

SEQ ID NO: 7390 - protein, 346 aa, Dictyoglomus thermophilum
MSKMRIGVLTGGGDCPGLNPAIRGIVMRALDYGDEVIGLKYGWAGLLKADTMPLSLEMVEDILEIGGTILGSSRTNPFKKEEDVQKCVENFKKLNLDALIAIGGEDTLGVASKFSKLGLPMIGVPKTIDKDLEETDYTLGFDTAVEVVVDAIKRLRDTARSHARVIVVEIMGRHAGWLALYGGLAGGADYILIPEVEPNLEDLYNHIRKLYARGRNHAVVAIAEGVQLPGFTYQKGQEGMVDAFGHIRLGGVGNVLAEEIQKNLGIETRAVILSHLQRGGSPSIRDRIMGLLLGKKAVDLVHEGKSGLFVAVKGNELVPVDITLIEGKTKNVDPAFYESVKTFFNK

SEQ ID NO: 7391 - protein, 500 aa, Atriplex centralasiatica
MAFPMPVRQLFIDGEWREPLLKNRIPIINPSTEEIIGDIPAATAEDVEVAVVAARKAFKRNKGRDWAATSGAHRARYLRAIAAKITERKDHFVKLETLDSGKPLDEAVLDIDDVATCFEYFAGQAEALDAKQKAPVTLPMDRFKSHVLRQPIGVVGLISPWNYPLLMATWKIAPALAAGCTAVLKPSELASVTCLEFGEVCNEVGLPPGVLNILTGLGPDAGAPIVSHPDVDKIAFTGSSATGSKIMASAAQLVKPVTLELGGKSPVIMFEDIDIETAVEWTLFGVFWTNGQICSATSRLLVHESIAAEFVDRMVKWTKNIKISDPFEEGCRLGPVISKGQYDKIMNFISTAKSEGATILCGGSRPEHLKKGYYIEPTIITDITTSMQIWKEEVFGPVICVKTFSTEDEAIELANDTEYGLAGAVFSKDLERCERVTKALEVGAVWVNCSQPCFVHAPWGGVKRSGFGRELGEWGIENYLNIKQVTSDISDEPWGWYKSP

SEQ ID NO: 7392 - protein, 425 aa, Blastocladiella emersonii
MTLIDKLMEKTKKVVGSSDKDAPAPASPSSPSTAAGAGSASSTASSTTTAAASGNLSIPSPLVAGSTTSSSISHAQKMATAAHTNSDYSPSPAATPSAPLDAVAERRRRKTTLADLELRQTLGTGSFGRVHLVRLRSTGKYYAMKVLKKAEVVKHKQVEHTLNEKGILEQIDHPFLVALHSSFQDSANLYMVMEYVTGGELFTYLRRSQRFSNNVAKFYAAEVVLAFEYLHSKDIIYRDLKPENLLLDAQGHVKITDFGFAKHVPDITWTLCGTPDYLAPEIIQSRGYGRAVDWYALGVLIFEMLAGYPPFYDEDHVRMYEKILQGKVKWPSHFDPAAKDLLKRLLTTDLTKRYGNLKGGSKDIKMHKWFAGLDWTKLFNKQIPPPYTPPNRGDGDTSNFDAYPEETEPYGKVQPDPYAQLFKDF

SEQ ID NO: 7393 - protein, 200 aa, Nicotiana tabacum
MATSGNKNMNAKLVLLGDVGAGKSSLLLRFVKGQFIEFQESTIGAAFFSQTVAVNDATVKFEIWDTAGQERYHSLPPMYYRGAAAAIIVFDITNQASFDRAKKWVQELQAQGNPNMVMALAGNKADLLDARKVAAEEAQTYAQENGLFFMETSAKTASNVNDIFYEIANRLPRLQPAQNPSGMVLMDRPAQTPASASCCS

SEQ ID NO: 7394 - protein, 500 aa, Atriplex centralasiatica
MAFPMPVRQLFIDGEWREPLLKNRIPIINPSTEEIIGDIPAATAEDVEVAVVAARKAFKRNKGRDWAATSGAHRARYLRAIAAKITERKDHFVKLETLDSGKPLDEAVLDIDDVATCFEYFAGQAEALDAKQKAPVTLPMDRFKSHVLRQPIGVVGLISPWNYPLLMATWKIAPALAAGCTAVLKPSELASVTCLEFGEVCNEVGLPPGVLNILTGLGPDAGAPIVSHPDVDKIAFTGSSATGSKIMASAAQLVKPVTLELGGKSPVIMFEDIETVVAVEWTLFGVFWTNGQICSATSRLLVHESIAAEFVDRMVKWTKNIKISDPFEEGCRLGPVISKGQYDKIMNFISTAKSEGATILCGGSRPEHLKKGYYIEPTIITDITTSMQIWKEEVFGPVICVKTFSTEDEAIELANDTEYGLAGAVFSKDLERCERVTKALEVGAVWVNCSQPCFVHAPWGGVKRSGFGRELGEWGIENYLNIKQVTSDISDEPWGWYKSP

SEQ ID NO: 7395 - protein, 449 aa, Triticum aestivum
MYRAKRAALSPKVKRRVGKYELGRTIGEGTFAKVRFAKNTETMEPVAIKILDKEKVQKLRLVEQIRREICTMKLIKHPNVVRLHEVMGSKARIFIVLEYITGGELFDTIYTNGRLKEEEARKYFQQLINAVDYCHSRGVYHRDLKLENLLLDAAGNLKVSDFGLSALTEQVKADGLLHTTCGTPNYVAPEVIEDRGYDGAAADIWSCGVILFILLAGFLPFEDENIIALYKKISEAQFTCPSWFSTGAKKLITRILDPNPATRITIPQILEDPWFKKGFKPPVFDDKYETSFDDVYAAFGDSEDQHVKEETEHKPTSMNAFELISLNQGLNLDNLFEAKEEHKRETRFTSQCPPKEIISKIAEAARPLGFDIQKKNYKMRMENPKAGRKGNLNVATEVFQVAPSLHVVELKKAKGDTLEFQMFYRSLSTQLKDVVWKCGGEVEDNGTAA

SEQ ID NO: 7396 - protein, 229 aa, Haloarcula marismortui ATCC 43049
MSVAVDRAGAVALTERVGKVRVRVQSLSSHAPVLGQQERGVFVDPRAVAHDLHVRRFGAEPQMAAGTTFLCLSVISPDMADLQLRSPAFDDGDRIPEEHGYSAANTNPPLEIENVPSDASSLLLIVDDPDAEEPAGKVWDHWLVWNIPPDIGRIPAGWEPDEATEGQNDFGEVGWGGPNPPDREHTYRFLLYALDTTLDRSPAADKDDVYDAASGHVVEKAQLNGTYPA

SEQ ID NO: 7397 - protein, 618 aa, Glycine max
DQLRRPPPQGVTLMMSDSTNVLSPGRTTSESVVADALLRNISAAKGRVITTQFASNIHRLGSVKAAADLTGRKLVFVGMSLRTYLDAAWKDGKSPIDPSTLVKAEDIDAYAPKDLLIVTTGSQAEPRAALNLASYGSSHAFKLAKEDVVLYSAKVIPGNESRVMKMLNRISEIGSTIVMGKNEGLHTSGHAYRGELEEILRIVKPQHFLPIHGELLFLKEHELLGKSTGIRHTTVIKNGEMLGVSHLRNRRVLSNGFISLGKENLQLMYSDGEKAFGTSSDLFIDERLKIALDGIIVVNMEIFRPQNLDSPVENTLKGKIRITTRCLWLDKGKLLDALHKAAHAALASCPVSCPLAHMEKIVSEMLRKMVRKYSGKRPEVIAIAIENPAAVLANEINTKLSGKLNVDGMSALRKVVDGHEKENQRTEMQIRDRIDVGGLLPTKDNAISSGAEDGLSDAEDPNDYFKPFVESSPVEKSIKTNNGYVPRKEKSSPLKDDCSEDTEECNSVNTSDSEPKSSKSAKRNKWKHEEVKKLIDMRGELNDRFQVVKGRMALWEEISQNLLANGISRSPGQCKSLWTSLLQKYEQEVKNEKKNKKKWPYFEDMERILADNKTLETK

SEQ ID NO: 7398 - protein, 433 aa, Porphyromonas gingivalis W83
MTIDEMLRLDRNHLWHPYTSTIDPLPVFPVKRAEGVRIYLEDGRELIDGMSSWWAAIHGYNHPRLNAAVERQLREMSHIMFGGFTHRPAVELAELLLSILPSELNKIFYADSGSVAVEVAMKMALQYQQACGQSRRTRFATIRSGYHGDTWHAMSVCDPVTGMHGIFSGALPVQYFLPQPKSRFGGEWLPADIEPLRDLLSAKGAELAALILEPIVQGAGGMYFYYPRYLVEARRLCSEAGVLLIFDEIATGFGRTGELFALRHAATVPDILCLGKSLTGGYMTLSATITTEAIARTICSGEAGCFMHGPTFMGNPLACAVAAESIRLLLESPWQERVRAIEAQLREELSPAISFDGVAEVRVLGAIGVVEMKRPVDMATLQQRFIREGIWVRPFGRLCYLEPPFIISPEDLRILTHGLLRVLGQDRSISFTR

SEQ ID NO: 7399 - protein, 434 aa, Pyrobaculum aerophilum str. IM2
MTEKWYQLSVEIHRKYGGKISITPKVPIRSMDDFAIYYTPGIAEVSRQIHKNPELAFELTSRWNIIGVITDGTRVLGLGNIGPEAAYPVMEGKALIFKYLGGVDAVPIPIRVKTQEEFVFVAKALEPALGGINLEDIESPKCFYLLERLREELRIPVWHDDQQGTATATLAGLINALKLVGKKISDVTIALIGAGASNIYTARILIKYGAKPGNLILVDSRGILHPERDDIDKLMIENPWKYKYAIETNAERRKGGIPEAMRGADVVIAASSPGPGVIKKEWVASMNKDAIVFALANPVPEIWPWEAKEAGAKIVATGRSDFPNQVNNSLIFPAVFRGALDVRATAITDEMLIAAAEEVAKFAEEKGIHEEYIIPKMTEWEVYVREAAAVAATASAQKVARIPRSYKEELEIAGSIIGKSIKMLEVLMMEKIIE

SEQ ID NO: 7400 - protein, 409 aa, Pyrobaculum aerophilum str. IM2
MSEQTVQVKTTGKILQSPCGPIIHGLEDVLIKSTSISDIDGEKGILWYRGYRIEELARLSTYEEVSYLILYGRLPTKRELEDYINRMKKYRELHPATVEVIRNLAKAHPMFALEAAVAAEGAYDEDNQKLIEALSVGRYKAEEKELAYRIAEKLVAKMPTIVAYHYRFSRGLEVVRPRDDLGHAANFLYMMFGREPDPLASRGIDLYLILHADHEVPASTFAAHVVASTLSDLYSSVAAAIAALKGPLHGGANEMAVRNYLEIGTPAKAKEIVEAATKPGGPKLMGVGHRVYKAYDPRAKIFKEFSRDYVAKFGDPQNLFAIASAIEQEVLSHPYFQQRKLYPNVDFWSGIAFYYMGIPYEYFTPIFAMSRVVGWVAHVLEYWENNRIFRPRACYIGPHDLQYIPLEQR

SEQ ID NO: 7401 - protein, 293 aa, Zea mays
CVSATPSTLAASSTSSSSAIIQDIIRGLADTTAARVRTDAEATARASTDFGTNATADDAARPAAVFYPSCAADIAALLRASSASASPFPVSARGRGHSTRGQATAPGGVVVDMASLAVAAGPARLAVSVDGRYIDAGGEQLWVDVLHAALAHGLTPRSWTDYLRLTVGGTLSNAGISGQAFRHGPQISNVLELDVVTGTGDMVTCSKEKDADLFDAVLGGLGQFGIITRARIPLAPAPERARWLRLLYTGAADLTADQERLIADDERRGGALAGLMDYVEGSVVTDLQQGLIG

SEQ ID NO: 7402 - protein, 425 aa, Vibrio parahaemolyticus RIMD 2210633
MSEDNRQAATPEEEHRQKALDYHAYPTPGKIAVELTKPAETAGDLALAYSPGVAEPVREIAQNPDNVYKYTAKGNMVAVISNGTAILGLGNLGPLASKPVMEGKALLFKRFAGLDSIDIEVKHRTIDEFVDTVANIADTFGGINLEDIKAPDCFEIEKRLIERCDVPVFHDDQHGTAIVTAAGMLNAIELQGKKLEDSTIVCLGAGAAAVACMELLIKCGAMREKIYMLDRKGVIHTRRDDLNEYKQLFANNTDKRTLEDVIEGADLFLGVSGPNLLPPEALKLMADKPVVFACSNPDPEIKPELAHAVRDDLIMGTGRSDYPNQVNNVLCFPFIFRGALDVRASEINDDMKLAAVDAIRALAKEPVPESVLKAAGVEKLEFGSDYIIPKPMDPRLLPRVAKAVAQAAVDSGVARIEMPENYMAE

SEQ ID NO: 7403 - protein, 286 aa, Deinococcus radiodurans R1
MGWPEGRAPVAPEQGAPGPFFSDRGGVCWRHPAQVRQGKSGAGPAVPLRRTHMEFFIDTAIVDEIREINAWGVLSGVTTNPSLIVASGRDFKEVIGEIAELVPGGAISAEVTALDAEGMIKEGKDVAAWHKQVVVKLPLTPAGLQACKALTSEGIKTNVTLCFSVPQALLAARAGATYVSPFVGRVDDTGWDGSELIRQIKEAFVLGDIQTKVLAASIRHPQHVVQAALAGADVATIPYKVFTQMVKHPLTQAGLDSFMADWAKRQGASPETPPSEAGTNPVKKEG

SEQ ID NO: 7404 - protein, 264 aa, Triticum aestivum
MEAAVGGSWTRVRTLGRGASGAVVSLAADDLSGALFAVKSAPAAAADQLRREGDILSGLSSPHVLPCLGFRAAAGECQLFLEFAPGGSVADVAARSGGRLEECAVRAYAADVARGLAYLHGRSLVHGDVKARNVVVGADGRAKIADFGCARAVGSSDRPVGGTPAFMAPEVARGEEQGPAADVWALGCTVVEMATGRAPWSDMDDVLTAMHRIGYTDAVPEVPAWLSAEAKRFLAMCFARDARDRCTAAQLLEHPFLASAGCGV

SEQ ID NO: 7405 - protein, 503 aa, Triticum aestivum
MVAPAAIPQRQLFIDGDWRAPALGRRLPVINPTTEVTIGEIPAGTSEDVDAAVAAARAALKRNRGRDWSRAPGAVRAKYLRAIAAKMIERKSDLARLEALDCGKPLDEAAWDMDDVAGCFEFFAGHAEALDKRQNAAVALPENFKCHLKKEPIGVVALITPWNYPLLMAVWKVAPALAAGCTAVLKPSELASVTCLELGDVCKEIGLPSGVLNIVTGLGHEAGAPLSSHPDVDKVAFTGSYATGQKIMVAAAPTVKPVTLELGGKSPIVVFDDVDIDKAVEWTLFGCFWTNGQICSATSRLLIHKNIAKEFVDRMVAWSKNIKVSDPLEEGCRLGPVVSEGQYEKIKKFVANAKSEGATILTGGVRPKHLEKGFFIEPTIITDINTSMEIWREEVFGPVLCVKEFSTEEEAIELANDTHYGLAGAVISGDRERCQRLAEEIDAGCIWVNCSQPCFCQAPWGGNKRSGFGRELGEGGIDNYLSIKQVTEYTSDAPWGWYKAPAN

SEQ ID NO: 7406 - protein, 307 aa, Glycine max
IRLERLELLGICGLPDTIFRNAVEMALADSECYGLENPNARLSCFVNKAFANIGSDMAKLVPGRVSTEVDARLAYDTHAIIRKVHDLLKLYNDSNVPPQRLLFKIPSTWQGIEAARLLESEGIQTHLTFVYSFAQAAAAAQAGASVIQIFVGRIRDWARNHSGDTEIESAQLRGEDPGLALVTKAYNYIHKYGHKSKLMAAAVRNKQDLFSLLGVDYIIAPLKVLQSLKESVASPDEKYSFVRRLSPQSAAKYTFSDEELVRWDEDSLSKAMGPAAVQLLAAGLDGHADQAKRVEELFGKIWPPPNV

SEQ ID NO: 7407 - protein, 166 aa, Zea mays
MTKAATIYGSKTQSDALRPGPLRPANIIRNKFPTYKNGSNGIVIKLADGPEIPPLKEIVAKETADLLDRRQRLSVRELAMKFEKGLSTATLLSNEVKWRQVALMERDILLKNLKSVLESLRGQVTGKTKDEIEESISMVEILTVQLFKRESELVQQKEEVTKLAKS

SEQ ID NO: 7408 - protein, 337 aa, Zymomonas mobilis
MKAAVITKDHTIEVKDTKLRPLKYGEALLEMEYCGVCHTDLHVKNGDFGDETGRITGHEGIGIVKQVGEGVTSLKVGDRASVAWFFKGCGHCEYCVSGNETLCRNVENAGYTVDGAMAEECIVVADYSVKVPDGLDPAVASSITCAGVTTYKAVKVSQIQPGQWLAIYGLGGLGNLALQYAKNVFNAKVIAIDVNDEQLAFAKELGADMVINPKNEDAAKIIQEKVGGAHATVVTAVAKSAFNSAVEAIRAGGRVVAVGLPPEKMDLSIPRLVLDGIEVLGSLVGTREDLKEAFQFAAEGKVKPKVTKRKVEEINQIFDEMEHGKFTGRMVVDFTHH

SEQ ID NO: 7409 - protein, 286 aa, Zea mays
  misc_feature (207)..(207): Xaa can be any naturally occurring amino acid
MAPKAAAAARKTRVGPYEVGKTIGEGSFAKVKHARDSRTGAVRAIKVLDRNHVLRHRMVEQIKREISTMKLIKHPNVVQLHEVMASKTKIYMVLEFVDGGELFDKIVNSGRLGEDEARIYFHQLINAVDYCHSRGVYHRDLEPENLLLDSHGTLKVSDFGLSAFAPQTKEDGLLHTACGTPNYVAPEVSFSPLLSCQLICVVTLCDXCTSRCVSIAHFLQVLADKGYDGMAADVWSCGIILFVLMAGYLPFDDANLMRLYKLICHATFSCPTWFSSGARKFIKRIL

SEQ ID NO: 7410 - protein, 191 aa, Zea mays
  misc_feature (68)..(68): Xaa can be any naturally occurring amino acid
  misc_feature (158)..(158): Xaa can be any naturally occurring amino acid
MAQDDQSAARSTGTVNWFSDAKGYGFIAPDDGGDELFVHQSSIVSDGFRTLTVDEPVEYAIAVGNDGXTKAVDVTAPGGGSLNKKEMSSRGNGGSCFSCGEVGHMAKDCAGGKRYGGGGRRSGGEGSCYVCGNVGHFARDCRQNAGGNSGGGGGGECXNCGVVGHMAKDCRGGNRIRGRGSGGEGCYTWWR

SEQ ID NO: 7411 - protein, 352 aa, Bipolaris oryzae
MPPAGSGSSRKISFNVSEQYDIQDVVGEGAYGVVCSALHKPSGQKVAIKKITPFDHSMFCLRTLREMKLLRYFNHENIISILDIQKPRNYETFTEVYLIQELMETDMHRVIRTQELSDDHCQYFIYQTLRALKAMHSANVLHRDLKPSNLLLNANCDLKVCDFGLARSAASTEDNSGFMTEYVATRWYRAPEIMLTFKEYTKAIDVWSVGCILAEMLSGKPLFPGKDYHHQLTLILDVLGTPTMEDYYGIKSRRAREYIRSLPFKKKIPWKAMFPKTNDLALDLLERLLAFNPVKRISVEDALKHPYLEPYHDPDDEPGADPIPEEFFDFDKNKDNLTKEQLKLLIYQEIMR

SEQ ID NO: 7412 - protein, 202 aa, Triticum aestivum
  misc_feature (144)..(144): Xaa can be any naturally occurring amino acid
MKPCTAIALLLVVAAQCAALATAAGPRVIIVGAGMSGISAGKRLSEAGITDLVILEATDRIGGRIHKTKFAGVNVEMGANWVEGVNGDEMNPIWTMANGTGGLNLRTFRSDFDHLASNTYKQDGGLYDEKVVEKIIERMDEVEXSGSKLSAPFTTAATGLAVWPATPLHPWAWKAGDWGSLSHFSPDPAVQPNQFRNFGKLF

SEQ ID NO: 7413 - protein, 123 aa, Phytophthora infestans
MIQIQTKLKVNDNSGIKIGQCLKIYKKKVGKIGDTILISAKKLRLNQKKKIKIIKGDLFKALIIHTTYQKKSTIGNLIKFDKNCIIILNNQNKPLGTRIFGPITSEFRKQKNFKILALASNIL

SEQ ID NO: 7414 - protein, 481 aa, Papaver somniferum
SLVAVVITTFLYLIFRDSSPKGLPPGPKPWPIVGNLLQLGEKPHSQFAQLAETYGDLFSLKLGSETVVVASTPLAASEILKTHDRVLSGRYVFQSFRVKEHVENSIVWSECNETWKKLRKVCRTELFTQKMIESQAEVRESKAMEMVEYLKKNVGNEVKIAEVVFGTLVNIFGNLIFSQNIFKLGDESSGSVEMKEHLWRMLELGNSTNPADYFPFLGKFDLFGQSKDVADCLQGIYSVWGAMLKERKIAKQHNNSKKNDFVEILLDSGLDDQQINALLMEIFGAGTETSASTIEWALSELTKNPQVTANMRLELLSVVGKRPVKESDIPNMPYLQAFVKETLRLHPATPLLLPRRALETCKVLNYTIPKECQIMVNAWGIGRDPKRWTDPLKFSPERFLNSSIDFKGNDFELIPFGAGRRICPGVPLATQFISLIVSSLVQNFDWGFPKGMDPSQLIMEEKFGLTLQKEPPLYIVPKTRD

SEQ ID NO: 7415 - protein, 570 aa, Triticum aestivum
  misc_feature (313)..(313): Xaa can be any naturally occurring amino acid
MASHIILPPDGDDDEQQRREDEENDGGGSGSGGDGEQQQQGGGNAKAALPFSAMCVRISRDSYPNLRALRNASHASLTDAAYVKISEGDFGYVLDDVPHLADYIPDVPTYPNPLQDHPAYSTVKQYFVNEDDTVPQKVVVQKNSRRGVHFRRAGPRQRVNFESDEVKACIVSCGGLCPGLNTVIRELVCGLAHMYNVNNIFGIQNGYKGFYSSNYVAITPKTVNDIHKRGGTVLGTSRGGHDTKKIVDNIQDRGINQVYIIGGDGTQKGAYEIYKEIRKRGLKVAVAGVPKTIDNDIAIIDKSLGFGSPVEEXAQRAINSAHGEASSAENGIGLVKLMGRYSGFIAMYATPASRDVDCCLIPESPFYMDGEGGLLPYVERRLKENKHMVFVVAEGAGQDIIAKSIPASDQQDASGNKLLLDIGLWLTHKIKDHFKSKKMEMTIKYIDPTYMIRAIPSNAADNVYCTLLAHSAIHGAMAGYSFTVGMVNGRHAYIPFYRVTSTRNKVKITDRMWARLLSSTNQPSFLSQKDIDEAREADRLANKPPLPSVANHNVAKAFDQSASASSNGEI

SEQ ID NO: 7416 - protein, 513 aa, Glycine max
  misc_feature (219)..(219): Xaa can be any naturally occurring amino acid
  misc_feature (225)..(225): Xaa can be any naturally occurring amino acid
MGACVSTPQGCVGGRLSSSKKKTRKRRREGLRRRVTSRLCKESSEKVDVAGLPDCSFANPTFQAGSIEEAWFDSIAVFDSDCDDDYQSVPDDVVSLSGIEGGSVSSFPSSRDATRGVSTDQVQKQKELLAGSEAARSSDVQYFGVDVIDSQREPVFLDEISSVDANSNKDDGLLDNCGILPNNCLPCLASTIPSVEKRRSSSSSPPNARKKGSCKTFLXWKEGHXNATLFSSKMLLQRPIAGSQVPFCPIEKKMLDCWSQIDASTFKVRGVNYFKDKKKDFAPNYPAYYPFGVDVFLSPRKVDHIARFVELPVMSSSVKFPPILVVNVQVPLYPATLFQGETDGEGMSIVLYFKLSESYSKELPPPFQESIRRLMDDEVEKVKGFPVDTIAPFRERLKILGRVVNLEDLHLSAAERKLMQAYNEKPVLSRPQHEFYTGENYFEIDLDMHRFSYISRKGFEAFLERLKVCTLDVGLTIQGNKQEELPENVLCCIRLNGIDYMNYHQLGLTQDPL

SEQ ID NO: 7417 - protein, 50 aa, Lactococcus lactis subsp. lactis
KGFGFITTEEGNDVFAHFSAIQTDGFKTLDEGQKVTFDVEEGPRGPQAAN

SEQ ID NO: 7418 - protein, 400 aa, Candida albicans SC5314
MPIDINTKAKCYFDTRPLTKGERKIIKDSIPILEYLDIQFGEKFFKRLIKQFPQYKPYFNETHLKLLRQPRSFHHCLLEFARNIDDLRPMKDFIMRIASKHVARQVSPDQYRVFGQVLVEVMMDQFPKEFVDQEFVEAWTMAFRILANILINIEVREYQDKPWYGFKAFRVTRLQPECVGTKSFFITPVDGTPVPIPKRGQYLCMRWKFPGEKQERLREYTISEFPKNNEYRITVRYIPGGKVTTYIHEKLAVGDIVQVSPPCGDCYYRSSKRNMVMLAGGNGVVALAPMIEKGLAEGRKVKFLYSNRSTETRSFGQFFRDLKQKYGDQLEVVEYLSRRRVIDPIDKYYRRSLTVEDLDFIVPEDDVYLIGPRTYMKMIEDYLKGRGVNVTLDYFGPQEV

SEQ ID NO: 7419 - protein, 343 aa, Listeria monocytogenes EGD-e
MKAVVKTNPGYDQMELKDVEEPQVYGDKVKIKVAFTGICGSDIHTFKGEYKNPTTPVTLGHEFSGVVVEVGPDVTSIKVGDRVTSETTFETCGECIYCKEHDYNLCSNRRGIGTQANGSFAEFVLSREESCHVLDERISLEAAALTEPLACCVHSALEKTTIRPDDTVLVFGPGPIGLLLAQVVKAQGATVIMAGITKDSDRLRLAKELGMDRIVDTLKEDLAEVVLGMTGGYGAERVFDCSGAVPAVNQGLPLTKKKGDFVQVGLFAEKKNAIDEESIIQREIAYIGSRSQKPSSWILALDLLANGKIDTDKMITKVYGLDDWREAFEAVMAGNEIKVLVKS

SEQ ID NO: 7420 - protein, 350 aa, Listeria monocytogenes EGD-e
MRAAVLYENNVIKAEQIDEATCGKDQVRVEVKAVGICGSDIHKMQTRWKYPLPAVMGHEFAGVITEIGSEVTNVAMGDRVAGIPLEPCMECNYCKAGDFALCDNYRMVGSHFHGGFAENVVMKADNVISIGDLDFEEGAMIEPLAVSMHGVLGIQPRLGDTVIVFGIGTIGILVVQCLLLAGVKDIIAVDISDKKLADAREFGCKYTINPKNEDLKERVFAYTNGLGADIALECAGSKITQEQCLLVTKKKGKVGFLGIAYADVLLHEEAFENIFRRELTLKGFWNSYSAPFPGEEWRTSIEFVKQGRIKLKPLISHRYKLEETKEAFDMILSREHDYNKVMILPQKGDD

SEQ ID NO: 7421 - protein, 50 aa, Lactococcus lactis subsp. cremoris
KGFGFITSEDGQDVFAHFSQIQTSGFKTLDEGQKVTFDVEAGQRGPQAAN

SEQ ID NO: 7422 - protein, 475 aa, Synechocystis sp. PCC 6803
MYEKLQPPSVGSKITFVAGKPVVPNDPIIPYIRGDGTGVDIWPATELVINAAIAKAYGGERKINWFKVYAGDEACELYGTYQYLPEDTLTAIKEYGVAIKGPLTTPVGGGIRSLNVALRQIFDLYTCVRPCRYYPGTPSPHKTPEKLDIIVYRENTEDIYLGIEWAEGTEGAKKLIAYLNDELIPTTPALGKKQIRLDSGIGIKPISKTGSQRLVRRAILHALRLPKAKQMVTLVHKGNIMKFTEGAFRDWGYELATTEFRAECVTERESWILGNKESNPDLTIEANAHMIDPGYDTLTEEKQAVIKQEVEQVLNSIWESHGNGQWKEKVMVNDRIADSIFQQIQTRPDEYSILATMNLNGDYLSDAAAAVVGGLGMGPGANIGDSAAIFEATHGTAPKHAGLDRINPGSVILSGVMMLEFMGWQEAADLIKKGIGAAIANREVTYDLARLMEPKVDKPLKCSEFAQAIVSHFDD

SEQ ID NO: 7423 - protein, 50 aa, Lactococcus lactis subsp. cremoris
KGFGFITSEEGKDLFAHFSAIQSDGFKTLDEGQKVEFDVEEGQRGPQAAN

SEQ ID NO: 7424 - protein, 526 aa, Triticum aestivum
MAMAMRRAAALGARHILAASASASSRVASRRHMGSVDAGAAMDKIRAAGLLRTRGLIGGQWVDAYDGKTTEVQNPATGEVLANVACMGNRETADAITSANTTFYTWSKLTASERSKALRKWHDLLMSHKEELALLMTLEQGKPMKEALGEVNYGASFIEFFAEEAKRVYGDIIPPTLADRRLLVLKQPIGVVGAITPWNFPLAMITRKVGPALACGCTVVVKPSEFTPLTALAAADLALQAGIPAGALNVVMGNAPEIGGELMQSTQVRKITFTGSTAVGKKLMAGSANTVKKVSLELGGNAPCIVFDDADIDVAVKGSLAAKFRNSGQTCVCANRILVQEGIYEKFASAFVKAVQSLQVGNGLEESTSQGPLINEAAVEKVEKFVGDATSKGANIMLGGKRHSLGMSFYEPTVVGNVSNDMLLFREEVFGPVAPLIPFKTEEEAIHLANDTNAGLAAYMFTKSIARSWRVSEALEYGLVGVNEGLISTEVAPFGGVKQSGLGREGSKYGMDDYLEIKYVCMGNLG

SEQ ID NO: 7425 - protein, 327 aa, Chlamydia trachomatis D/UW-3/CX
MSSQFDQLKLWSVLVGDTGDPALIKTLGVQDATTNPSLILKVAQEPKYQSMLTEAISWGIRQNGDDVQTLTFVLDKIQVNLGLEILKHVPGRVSLEIDARLSFNTEAMVQRAIFLSQLFEKMGGDKKRLLVKIPGTWEGICAAEVLESQGIACNVTLIFNLVQAIAAAKAKVTLVSPFVGRIYDWWIAAYGAEGYSIEADPGVASVANIYSYYKKFDIPTQIMAASFRTKEQVLALAGCDFLTISPKLLEELKKDQQPVERKLSVEEAKKLDIQPVELSESVFRFLMNEDAMATEKLAEGIRIFSGDTQILESAVTEFIRQIAAQEA

SEQ ID NO: 7426 - protein, 188 aa, Triticum aestivum
  misc_feature (151)..(151): Xaa can be any naturally occurring amino acid
  misc_feature (185)..(185): Xaa can be any naturally occurring amino acid
MAIVYVLLVALITAASHAPHGAHGQTWHGDLAALAAAGKLRSDPNATLAASTDFGNITAALPAAVLFPSSPADVAALLRAAHTTVAWPYTISFRGRGHSVMGQALALGGVVVDMPSLGGPSSAARINVSADGQYVDAGGEQMWIDVLRAAXARGVAPQSWTDYLHTHVGGTLSNAGISGQTYRHXPQI

SEQ ID NO: 7427 - protein, 130 aa, Chlamydia trachomatis D/UW-3/CX
MTTESLETLVEQLSGLTVLELSQLKKLLEEKWDVTAAAPVVAVAGAAAAGDAPASAEPTEFAVILEDVPSDKKIGVLKVVREVTGLALKEAKEMTEGLPKTVKEKTSKSDAEDTVKKLQEAGAKAVAKGL

SEQ ID NO: 7428 - protein, 339 aa, Bacillus firmus
DQVLKKDGTPYKVFTPYYKAWAKERKRTPAVIKRDVLLGSVHKGTAPDREAETLFNNLIKKCSYDWSAIGEEHAIKRLQMFTKKRLSGYKANRDFPSITGTSRLSPYIKTGAVSSRSIYYHILNAEADSYSAETFLKELAWRDFYRMVHFYEPDCKDREIMEGYRELNWSHDQDDLTSWKRGETGFPIVDAGMRQLLNEGWMHNRLRMITASFLTKDLLIDWRLGERYFERMLIDYDPSSNIGGWQWAASVGTDAVPYFRIFNPVTQSKRFDENGTYIRTYIPELNHVPDHYIHEPWKMSEEEQVKYKCRLDEDYPLPIVDHSKQRKKALSFFKGDDEE

SEQ ID NO: 7429 - protein, 110 aa, Sinapis alba
MSGVWVFKNGVIRLVENPNQSGGDTNSRRKVMVYLPTGEVISSYSTLEQILRSLGWERYFGGGDTDLLQFHKRSSIDLISLPKDFTKFSSVYMYDIVVKNPNYFHVRDSN

SEQ ID NO: 7430 - protein, 339 aa, Clostridium thermocellum ATCC 27405
MVSPGKIEFHEVEKPELKPGQVLIKIMRIGICGSDIHVNHGKHPFTKYPVTQGHEVSGKIVEVAEDVEHLKVGQKVTIEPQVVCGKCHPCRTGKYNLCEELKVMGFQTVGAGSEYFAVDAKNVTTVPDHLSYDEAAMIEPLAVTVHAANRVGDVKDKDIVVIGAGPIGILLVQTLKAKGARKVMVTDVSDYRLELALKCGADFAVNTKKEDFGEAMLRCFGPDKADVIYDCAGNNTTMEQAIKHSRKGSIIVLVAVFEGMATVDLATLNDKELDLNTTMMYRHEDYVEAIELVEAGKVKLTPLMSKHFAFRDWEKAYEYIDNNREITMKVLIDVNNDDD

SEQ ID NO: 7431 - protein, 339 aa, Bacillus subtilis subsp. subtilis str. 168
MKAVQVRKAYDLVTAEVKKPVLSKDDEVLVKVKRVGICGSDMHIYHGTNPLATLPRVIGHEVTGQVEAVGANVQSLKPGDHVVIEPISYCGSCYACRKGRPNVCAKLSVFGVHEDGGMREYIVLPERQLHAVSKDLPWEEAVMAEPYTIGAQAVWRGQVEKGDTVLIQGAGPIGICVLKMAKLAGAAVMMTDLNNERLAFAKENGADAVVNVQAEHVAERVLEWTGNEGANVVIDAVCLPETFALSIEAVSPAGHVVVLGFDERAAQISQLPITKKEVTITGSRLQTNQFPKVVELLNGGRLMHNGLVTHTFSVDDVHHAFQFIKEHPDQVRKAVITFD

SEQ ID NO: 7432 - protein, 110 aa, Bartonella sp. SC12uk
ANEACLKMLQEIGSVRRIPEFITRAKDKNDPFRLMGFGHRVYKNYDPRAKIMQQTCHEVLKELNIQDDPLLDIAIELEKIALNDQYFGEKKLYPNVDFYSGITLKALGFP

SEQ ID NO: 7433 - protein, 110 aa, Bartonella sp. SV06uk
ANEACLKMLQEIGSVKRIPEFIARAKNKNDPFRLMGFGHRVYKNYDPRAKIMQKTCHEVLKELNIQDDPLLDIAIELEKIALNDEYFVEKKLYPNVDFYSGITLKALGFP

SEQ ID NO: 7434 - protein, 159 aa, Glycine max
MDFRVMGLDSPLFHTLQHMMDMSEDAAGDNKTYSAPTRSYVRDAKAMAATPADVKEYPNSYVFEIDMPGLKSGDIKVQVEDDNVLLISGERKRDEEIEGVKYLRMERRIGKFMRKFVLPENANTDAISAVCQDGVLSVIVQKLPPPEPKKPKTIEVKVA

SEQ ID NO: 7435 - protein, 342 aa, Streptomyces avermitilis MA-4680
MRVGVLTGGGDCPGLNAVIRGVVRKGVQEYGYDFVGFRDGWRGPLEGDAVRLDIPAVRGILPRGGTILGSSRTNPLKLDDGIRRIKENLAKQEVDALIAIGGEDTLGVAARLTDEYGVPVVGVPKTIDNDLSATDYTFGFDTAVGIATEAIDRLHTTAESHMRVLVCEVMGRHAGWIAIHSGLAGGANVILIPEQRFDVDQVCAYVTSRFKASYAPIVVVAEGAMPKDGQMVLKDESLDSFGHVRLSGVGEWLAKEIEKRTGKEARTTVLGHVQRGGTPSAFDRWLATRFGLHAIEAVRDGDFGKMVALRGTDIVRVPIAEATAKLKTVDPKLYEEVGVFFG

SEQ ID NO: 7436 - protein, 495 aa, Triticum aestivum
  misc_feature (175)..(175): Xaa can be any naturally occurring amino acid
  misc_feature (300)..(300): Xaa can be any naturally occurring amino acid
  misc_feature (322)..(322): Xaa can be any naturally occurring amino acid
SLRGENRAEQIANNNSRYGQNLIRKSHTPSDIGMAGGYCGCDCAKALGNAASDFAFPQSGKLLRNAAEPLYSFGSPWGLEESWLGCYTFDGVGKPSDLYEKLRIPGDNLFFAGEATSVQDTGTVHGAFSTRVPQAEVGRIRVLFEAILEETGKLCHPMAEHTATASVPLLISRLXQSPPKLPTYCRGRFAGRSFQWLLGEGGVGAISPCSSSWHEACGRVTLWPAGHGLCGRGYRPGRLAWALGPGCRRGCLVSGIERRSTYQLCTVSRGCTLVADAAVITVPLGVLKSNTTKYERRLPXVEGGIGVENKIVRRYSEVFWPXNVEFLGVVEFLGVVSSTTYGCSYSTGHAVLVYMPAGRLACDIEHVSDEAAAQFAFSQLKKILPNAAEPLNYLVSHWGSDENTLGSYTFDGVGKPRDLYEKLRIPVDNLFFAGEATSVQYTGTVHGAFSTGEMAAEECRMRVLEKFRELDMLEMCHPMAEQTATVSVPLLISRL

SEQ ID NO: 7437 - protein, 133 aa, Parietaria judaica
MRTVSMAALVVIAAALAWTSSAEPAPAPAPGEEACGKVVQDIMPCLHFVKGEEKEPSKECCSGTKKLSEEVKTTEQKREACKCIVRATKGISGIKNELVAEVPKKCDIKTTLPPITADFDCSKIQSTIFRGYY

SEQ ID NO: 7438 - protein, 106 aa, Rickettsia prowazekii
AVINMLKEIGSSENIPKYVAKAKDKNDPFRLMGFGHRVYKSYDPRAAVLKETCKEVLNELGQLDNNPLLQIAIELEALALKDEYFIERKLYPNVDFYSGIIYKAMG

SEQ ID NO: 7439 - protein, 133 aa, Parietaria judaica
MRTVSMAALVVIAAALAWTSSAELASAPAPGEGPCGKVVHHIMPCLKFVKGEEKEPSKSCCSGTKKLSEEVKTTEQKREACKCIVAATKGISGIKNELVAEVPKKCGITTTLPPITADFDCSKIESTIFRGYY

SEQ ID NO: 7440 - protein, 176 aa, Parietaria judaica
MRTVSAPSAVALVVIVAAGLAWTSLASVAPPAPAPGSEETCGTVVRALMPCLPFVQGKEKEPSKGCCSGAKRLDGETKTGLQRVHACECIQTAMKTYSDIDGKLVSEVPKHCGIVDSKLPPIDVNMDCKTLGVVPRQPQLPVSLRHGPVTGPSDPAHKARLERPQIRVPPPAPEKA

SEQ ID NO: 7441 - protein, 257 aa, Zea mays
KTDIIAIDDEIYSNDDDPERWDVQVCLPKGSINHCKISNSDIHGRALSKFHLNFFCLGNREAEDTTCTSSGPFSASNPQDQARKNRRFMVYVHSKGMIVDDEYVIIGSANINQRSMEGTRDTEIAMAAYQPQHTWANMLSAPRGQIFGYRMSLWAEHIGAIEESFTRPESLECTRQVRHIGQQNWEKFISSHVTEMKGHLLKYPVSIDSRGKVNPLSGCATFPDLGGNICGSFLQHCISRKKNPYFLNRFKRSPSFL

SEQ ID NO: 7442 - protein, 352 aa, Escherichia coli CFT073
MLYYLHIRWITSMCKKTSGNRFHFAFQSSEVVMIKKIGVLTSGGDAPGMNAAIRGVVRSALTEGLEVMGIYDGYLGLYEDRMVQLDRYSVSDMINRGGTFLGSARFPEFRDENIRAVAIENLKKRGIDALVVIGGDGSYMGAMRLTEMGFPCIGLPGTIDNDIKGTDYTIGFFTALSTVVEAIDRLRDTSSSHQRISVVEVMGRYCGDLTLAAAIAGGCEFVVVPEVEFSREDLVNEIKAGIAKGKKHAIVAITEHMCDVDELAHFIEKETGRETRATVLGHIQRGGSPVPYDRILASRMGAYAIELLLAGYGGRCVGIQNEQLVHHDIIDAIENMKRPFKGDWLDCAKKLY

SEQ ID NO: 7443 - protein, 143 aa, Zea mays
  misc_feature (56)..(56): Xaa can be any naturally occurring amino acid
MAMAYKMATEGMNVKEECQRWFMEMKWKKVHRFVVYKIDERSRAVLVDKVGGPGEXHEELVAALPGDDCRYAVFDFDFVTVDNCQKSKIFFIAWSPAASRIRAKILYATSKQGLRRLLDGVHYEVQATDPSEMGFDVIRGRAQ

SEQ ID NO: 7444 - protein, 50 aa, Lactobacillus acidophilus
KGFGFITGEDGQDVFVHFSAINGEGYKSLDEGQAVSYDVEQSDRGPQAAN

SEQ ID NO: 7445 - protein, 386 aa, Lactobacillus plantarum WCFS1
MVEQDEILKLHAAHTGVLDIHSDLAVTDKADLGKAYTPGVAVISKLIAAHPELKAKYTMSGKLVALITDGSAVLGLGNIGPAGGLPVVEGKALLYKNLAGINAIPLALNQVSVPAMVATIKNMSLSFAGIHLEDITAPKCFELEAALKDELDIPVYHDDQEGTAIVVLAGLINAAHVVGKSLRQMRIVVNGVGASGLATARLLAAVGVKQLTLVDVYGVVTADDQRYNQYQRNLAKQLGTPAQLKGQPLAKVMADQDVFIGLSDANVLSAGAVHLMNHDPIVFALANPVPEINPAVAEKAGATVIATGSSQYPNQVNNILAFPGLFKGLLTNGVKQVDNALQIQVAQALAKTVSNPTATTIVPSVFDSQVVPNVTAAVAAYAQAQH

SEQ ID NO: 7446 - protein, 50 aa, Lactobacillus helveticus
KGFGFITGSDNKDVFVHFSAIKTDGFKSLEEGQKVSYDVEQGGRGPQAAN

SEQ ID NO: 7447 - protein, 183 aa, Avena sativa
YRVSIGLPGNGGWCSGWGRGDDGGAANARASVQGRGETWVRRRSGRQGCGGGGGRREEEGAGPAAKAQVVGWPPIRSYRKNTMATSLSAPRSKDEVEAKQAPVAGCLYVKVSMDGAPYLRKVDLKMYKNYKDLSLELEKKFSCFTVGHGESNGKSGRDGLSDCRLMDPKSGAELVLTYEDKDG

SEQ ID NO: 7448 - protein, 50 aa, Streptococcus thermophilus
KGFGFITSEDGQDLFAHFSSIQSDGFKSLDEDQKVEFDVEVGQRGPQAAN

SEQ ID NO: 7449 - protein, 302 aa, Magnaporthe grisea 70-15
MPFHKLVKNSAYYSRFQTKYKRRQQGKTDYYARKRLITQAKNKYNAPKYRLVVRFTNRDIIMQIVTSEISGDKVFASAYSHELKAYGITHGLTNWAAAYATGLLIARRVLKKLGLDEDFTGVEEPEGEFTLTEAAETDEGTRRPFKAYLDVGLARTSTGARVFGAMKGASDGGILIPHSENRFPGFDIESKELDSETLKKYIFGGHVAEYMETLADDDEERYKSQFQQYIDEDIDADGLEDIYTEAHAAIREDPFKKPEGAEAKKSKEEYKKESLKFKAKKLTLAERKARVQERIAELRDAE

SEQ ID NO: 7450 - protein, 361 aa, Synechocystis sp. PCC 6803
MGEIKRIGILTSGGDCAGLNAVIRSVVHHAIGTYGWEVIGIQEATQGLMENPSKAIALHRDNIDHLLMMGGTFLGTTNKGNPFAFPMADGTVRDRTEDIIAGYRQLGLDALIGIGGDGSLAILRRIAQQGGINLVGIPKTIDNDVGATEISIGFDTATNIATEALDRLHFTAASHNRVMVLEVMGRDAGHIALAAGIGGGADIILIPEIPYRIQSVCNKIRQRQAEGKNFCLVMVSEAVRTELGDQVKQIQQFGEDRYGGIGKYIAEQIAQRTGAETRVTVLGHIQRGGIPSPFDRLLGSVFGVAAVDLIAEGKFDHMVAWRNRQTISVPIEEAIQTYQTVQLDGTLVKTARGLGICLGND

SEQ ID NO: 7451 - protein, 120 aa, Avena sativa
GSVVGWPPVRSYRRNAMTVQSVKIKKEEETEKQQPASAVAAAAAAATAGGNGSAFVKVSMDGAPYLRKVDLKMYNTYKDLSIALQKMFSTFTATGNEGKMVEAVNGSDVVTTYEDKDGDW

SEQ ID NO: 7452 - protein, 312 aa, Saccharomyces cerevisiae
MDSQPVDVDNIIDRLLEVRGSKPGQQVDLEENEIRYLCSKARSIFIKQPILLELEAPIKICGDIHGQYYDLLRLFEYGGFPPESNYLFLGDYVDRGKQSLETICLLLAYKIKYPENFFILRGNHECASINRIYGFYHECKRRYNIKLWKTFTDCFNCLPIAAIIDEKIFCMHGGLSPDLNSMEQIRRVMRPTDIPDVGLLCDLLWSDPDKDIVGWSENDRGVSFTFGPDVVNRFLQKQDMELICRAHQVVEDGYEFFSKRQLVTLFSAPNYCVEFDNAGAMMSVDESLLCSFQILKPAQKSLPRQAGGRKKK

SEQ ID NO: 7453 - protein, 56 aa, Triticum aestivum
MKVSMSDSEDHHFQSKADAGASKTYPMQAGAIRKGGLLVMKNPPCKVADVSTSKTG

SEQ ID NO: 7454 - protein, 293 aa, Aspergillus fumigatus
MSEITHPTIKDGWFSEQSDMWPGQAMNLKVNQILHHEKSKYQDVLVFESTDYGTVLVLDNVIQCTERDEFSYQEMITHLAMNSHPNPKKVLVIGGGDGGVLREVVKHESVEEAILCDIDEAVIRVSKKYLPGMSIGFQHPNVKVHIGDGFQFLKERKNEFDVIITDSSDPEGPAESLFQKPYFELLRDALRDGGVITTQGSENQWLHLSLITDLKKACKEVFPVAEYAYTTIPTYPSGQIGFMVCCKDATRNVREPVRTWSREEEERLCRYYNQDIHRASFVLPNFARKALDV

SEQ ID NO: 7455 - protein, 358 aa, Cryphonectria parasitica
MAEFVRAQIFGTTFEITSRYSDLQPVGMGAFGLVCSARDQLTNQNVAIKKIMKPFSTPVLAKRTYRELKLLKHLRHENIISLSDIFISPLEDIYFVTELLGTDLHRLLTSRPLEKQFIQYFLYQIMRGLKYVHSAGVVHRDLKPSNILVNENCDLKICDFGLARIQDPQMTGYVSTRYYRAPEIMLTWQKYDVEVDIWSAGCIFAEMLEGKPLFPGKDHVNQFSIITELLGTPPDDVINTIASENTLRFVKSLPKRERQPLASKFKNADEQAVDLLERMLVFDPKKRITASDALAHEYLAPYHDPTDEPVAEEKFDWSFNDADLPVDTWKIMMYSEILDYHNVDASGASAAMGEFNGQ

SEQ ID NO: 7456 - protein, 490 aa, Synechococcus sp. WH 8102
MTTAFHSPTSRRRKTLQEANLLEGPLMLIKSIRGFSSNRAMTWLACAPLALMGLGIFTLSAKAEELPDLNAAFLANNLWLLVATILVIFMNAGFAMVEAGMCRQKNAVNILAKNLFVFALAVTAYWFVGYSFMYGDAAIDGWLYFGGLFFDPTVTAETISDAGLVPTVDFLFQAAFAGTAATIVSGLVAERIKFGEFVVFALILTAFIYPVAGSWEWNGGWLNSVGNAEFIDFAGSSIVHSVGAWAGLVGAALLGPRIGKYVGGNVQAIPGHNMSIATLGALILWIGWYGFNPGSQLAMDQWVPYVAVTTTLGAAGGAIGATVISTITSKKPDLTMIINGILAGLVSVTAGCGNLTLTGSWVAGLVGGIIVVFSVSALDSAGIDDPVGAFSVHGVCGVWGTLVIGLWGFDVQGDGSPLGLLVGGGIEQLGIQALGTAAYAIWTVVTCFIAWQIIGALFGGIRVTEQEETEGLDIGEHGMEAYAGFSTTNN

SEQ ID NO: 7457 - protein, 501 aa, Arabidopsis thaliana
MANLRLMITLITVLMITKSSNGIKIDLPKSLNLTLSTDPSIISAASHDFGNITTVTPGGVICPSSTADISRLLQYAANGKSTFQVAARGQGHSLNGQASVSGGVIVNMTCITDVVVSKDKKYADVAAGTLWVDVLKKTAEKGVSPVSWTDYLHITVRGTLSNGGIGGQVFRNGPLVSNVLELDVITGKGEMLTCSRQLNPELFYGVLGGLGQFGIITRARIVLDHAPKRAKWFRMLYSDFTTFTKDQERLISMANDIGVDYLEGQIFLSNGVVDTSFFPPSDQSKVADLVKQHGIIYVLEVAKYYDDPNLPIISKVIDTLTKTLSYLPGFISMHDVAYFDFLNRVHVEENKLRSLGLWELPHPWLNLYVPKSRILDFHNGVVKDILLKQKSASGLALLYPTNRNKWDNRMSAMIPEIDEDVIYIIGLLQSATPKDLPEVESVNEKIIRFCKDSGIKIKQYLMHYTSKEDWIEHFGSKWDDFSKRKDLFDPKKLLSPGQDIF

SEQ ID NO: 7458 - protein, 55 aa, Zea mays
MAGTANCIDIILAIILPPLGVFLKFGCGHEFWICLLLTFLGYIPGIIYAIYAITK

SEQ ID NO: 7459 - protein, 200 aa, Anabaena variabilis ATCC 29413
MSRRRDFLLQSFSIIGLVKLSAIACSSVGNKNTEIASTPSSKLTTERKSMKLESVFGANSQIPAKYTCDGVDISPTLSWDEPPEETQSLALIVDDPDAPRHTFVHWVIYDIPPTVRQLPEHITATKTLPSGGVQGKNDFGKLGYGGPCPPSGTHRYFFKLYALDKNLGLPPGATKEQILQAMKGHVLATAELIGGYQRQP

SEQ ID NO: 7460 - protein, 279 aa, Zea mays
MASTPLLLLSPQRLCLAALPSPGRDHPPPGLLPPGPRRAMEEPPPGSSKAAAARAPRVVGVLAGLLERAAERGDTATPAPAGSAFRGRALPGIPVRRYAERIYRYAGCSPACFVVAYVYLDRLARGRRDAGAGEDEDEDEAAVVGIDSYTVHRLLITSVLVAAKFMDDRHHNNAYFARVGGVEVAEMNALELRLLFALRFRLNVAPDTFARYCAALECHVDTPDAGGPVPRMPPSSHVDGEEAVTSSKDKVAAAGGGSVVVQRSHRQRRAVVQIMTTAQ

SEQ ID NO: 7461 - protein, 119 aa, Aspergillus nidulans FGSC A4
MIQLKTLLNCIDNSGAAVVECVNVLKKKRAATVGDRIVIVVQKQRNFGPEGTSSTGIANKVRRGDIRHAVVVRVKKEMQRPDGTLVKFDDNACVLVNKSGDPIGTRMNEHTFPGISLIT

SEQ ID NO: 7462 - protein, 447 aa, Triticum aestivum
  misc_feature (358)..(358): Xaa can be any naturally occurring amino acid
MSTGRRQASLKVRRRVGTYELGRTIGEGTFAKVRFAKDTESGDPVAIKILDKAKVHKHGLVEQIRREICTMKLIQHPNVVRLHEVMGSKARIFIVLEYVTGGELHDIIAARGSLKEDEARRYFQQLINAVDYCHSRGVYHRDLKLENLLLDTAGNLKVSDFGLSAISEQAKADGLLHTTCGTPNYVAPEVIQDKGYNGALADLWSCGVILFVMLAGYLPFEDDNVSALYKKISGAQFTCPSWFSDGAKRLIPRILDPNPSTRITIPQLLKDPWFKKGYKPPVFDEKHQTSLDDVDAAFGDSEEKQVEEEMEGQPASMNAFELISLNKGLKLDNFFEADKKYRRETRFTSQCPPEEIIXRIEEAAKPLGFDIQKKNYKMRMKNLEAGRKGNLNVATEVFQVAPSLFVVELKKAKGDTLEFQKFYKTLSAQIKDVVWVCESEAEERGST

SEQ ID NO: 7463 - protein, 416 aa, Arabidopsis thaliana
MGLFGTKKIGKYEIGRTIGEGNFAKVKLGYDTTNGTYVAVKIIDKALVIQKGLESQVKREIRTMKLLNHPNIVQIHEVIGTKTKICIVMEYVSGGQLSDRLGRQKMKESDARKLFQQLIDAVDCCHNRGVYHRDLKPQNLLLDSKGNLKVSDFGLSAVPKSGDMLSTACGSPCYIAPELIMNKGYSGAAVDVWSCGVILFELLAGYPPFDDHTLPVLYKKILRADYTFPPGFTGEQKRLIFNILDPNPLSRITLAEIIIKDSWFKIGYTPVYHQLSDSIKDNVAEINAATASSNFINAFQIIAMSSDLDLSGLFEENDDKRYKTRIGSKNTAQETIKKIEAAATYVSLSVERIKHFKVKIQPKEIRSRSSYDLLSAEVIEVTPTNCVIEISKSAGELRLYMEFCQSLSSLLTAEVS

SEQ ID NO: 7464 - protein, 449 aa, Xylella fastidiosa Ann-1
MNPTLIVNARLVNEGREFDSDLRIENGRIARIDTGLSAQSKDIVIDAAGRRLLPGMIDDQVHFREPGLTHKGDIVSESAAAVAGGLTSFMDMPNTNPPTLGAAALQAKYDAARGRAWGNYGFYLGASNDNLAAIQALDPKTSPGIKVFMGASTGNMLVDNETTLEGIFRHAPTPIITHCEDTPTINATLAKYHSRYGNTLSAEQHPDIRSRQACLKSSQLAVSLAKKNGTRLHVLHISTADELRLFEAGPLVDAAGKRRKQITAETCIHFLHFDRMDYARLGNLIKCNPAIKEASDREALIAALAKDVIDVLATDHAPHTWEEKQQPYAQAPSGLPLVQYALVAALELVHAGRLSVTEIVRKFAHAPAQLFDVIERGFLREGYWADLVLVEDTPFTVKRQEILSKCGWSPFEGTTFRSRIASTWVNGNHVWDGNRLVGVPNGQRLEFDR

SEQ ID NO: 7465 - protein, 140 aa, Triticum aestivum
  misc_feature (44)..(44): Xaa can be any naturally occurring amino acid
  misc_feature (57)..(57): Xaa can be any naturally occurring amino acid
  misc_feature (62)..(63): Xaa can be any naturally occurring amino acid
  misc_feature (65)..(65): Xaa can be any naturally occurring amino acid
  misc_feature (69)..(69): Xaa can be any naturally occurring amino acid
  misc_feature (72)..(73): Xaa can be any naturally occurring amino acid
  misc_feature (78)..(78): Xaa can be any naturally occurring amino acid
  misc_feature (91)..(92): Xaa can be any naturally occurring amino acid
  misc_feature (101)..(101): Xaa can be any naturally occurring amino acid
  misc_feature (112)..(112): Xaa can be any naturally occurring amino acid
  misc_feature (119)..(120): Xaa can be any naturally occurring amino acid
  misc_feature (125)..(125): Xaa can be any naturally occurring amino acid
GKVVEVSTSKTGKHGHAKCHFVAIDIFNGKKLEDIVPSSHNCDXPHVDRQDYQLIDXITDDXXVXPPKXEKXXTTKGXLKASQLMMFCLGXXKTGFADGKXLILSVMSAMGXEKQICAXXGIRGXKLTTVRGCPTATLGT

SEQ ID NO: 7466 - protein, 358 aa, Zea mays
HASAEDQDSWNVQLFRSIDGGACFGFPSTPEAAAQSGLVSGKNNVLDRSIHDAYIHAIRRAKHFIYIENQYFLGSSFAWKADGIKPEEIEALHLVPRELSLKIVSKIEAGEHFAVYVVLPMWPEGPPASGSIQGILDWQRRTMEMMYNDISVALDAKRIDRDPRDYLTFFCLGNREVKMDGEYEPSGRPLDGTDYARAQNARRFMIYVHSKMMIVDDEYIIVGSANINQRSMDGGRDSEIAMGAYQPCHLNTKGQVARGQVHGFRMSLWYEHLGMLHDDFLNPGSLECVRRVNQMADRYWDLYAGDSLDADLLGHLLRYPVTVTKEGTVTELPGAKFFPDTQALVLGALSKLPPILTT

SEQ ID NO: 7467 - protein, 499 aa, Glycine max
  misc_feature (175)..(175): Xaa can be any naturally occurring amino acid
  misc_feature (299)..(299): Xaa can be any naturally occurring amino acid
MNSNGYPASSFKIPTVKFTKLFINGHFVDSLSGGEFETIDPRTGEVIARIAEGTKEDIDLAVKASRLAFDHGPWPRMPAVERARIMMKWADLIDQHVEEIAALDAIDAGKLYHMCKAIEIPATANTIRYYAGAADKIHGEVLKTSREFHAYTLLEPLGVVGHIIPWNFPSIMFVXKVSPCLAAGCTMVLKPAEQTPLSALFYAHLAKLAGIPDGVLNVVPGFGATAGAAISSHMDIDKVSFTGSTEVGREVMRAAANSNLKPVSLELGGKSPFIIFDDADLDKAVELALMAVVYNQGRXCAAGSRVFVQEGIYDEFEKRLVEKAKAWVVGDPFDPNVQQGPQVDKKQFEKILSYIEHGKREGATLLTGGKRVGNKGYYIEPTIFSNVKEEMLIAQDEIFDPVIALMRFKTIEEAIKSANKSRYGLVAGVVTKSLDTANTMSRSIRPGVVWINCYFAFENDIPYGGCKMSGFGKDSGLEALHKYLHVKSVVTPIYNSPWL

SEQ ID NO: 7468 - protein, 375 aa, Pseudomonas syringae pv. tomato str. DC3000
MAEAKVLSGAGLRGQVAGQTALSTVGMAGAGLTYRGYDVRELAAEAQFEEVAYLLLYGELPTQSQLAAYLGKLKGLRDLPQALKEVLERIPADTHPMDVMRTGASMLGTLEPELSFDQQRDATDRLLAAFPAIMCYWYRFSHDGQRIDCTTDESSIGGHFLHLLLDKTPSELHRKVMDVSLILYAEHEFNASTFTARVCASTLSDLYSCVTAAIGTLRGPLHGGANEAAMEMIQRFASADEATQGTLGMLERKEKIMGFGHAIYKESDPRNEVIKGWSKKLADEAGDSVLFPVSEAIDKVMWEQKKLFPNADFYHASAYHFMGIPTKLFTPIFVCSRLTGWAAHVFEQRANNRIIRPSAEYIGVEQRSFVPIEQR

SEQ ID NO: 7469 - protein, 170 aa, Zea mays
MAGIGRNMVAPLVVLNLIMYIIVIGFASWNLNHFINGQTNYPGVAGNGATFYFLVFGILAGVVGAASKLAGVHHVRAWRHDSLATNAASSLIAWAITALAFGLACKEIHIGGHRGWRLRVLEAFVIILAFTQLLYVLMLHTGLFGGSGGYRDHDYGVGGAAGEPKGVTRV

SEQ ID NO: 7470 - protein, 493 aa, Aspergillus nidulans FGSC A4
MPPPVGRYGPTGLTGPYSHLAQQQAHLQQQQQAQHHPAHAQSSNTALPPPSLGVHPGFTTANANANMNPFTLAGAGVGNGMSVAGFGAAGDGGGTGLASHAAQMGFARGAQMQQQQLHQAHDGRFTLEGKGGGVKTRIRDVWKHNLAQEMAVLRHLVERYPYISMDTEFPGIVARPIGSFTNKADYHYQTLRCNVDLLKMIQLGITLFSPKGEVPPPDATDANGQPLGNGLVPAPCTWQFNFRFSLEEDMYAQESTAMLAKAGIDFATHEKNGIDPLEFGALLISSGLVLLDDVHWISFHSGYDFGYLMKIMLCQALPENEEEFHKLLNIFFPSLYDIKYLMKHATRNQAVNDSPLTPAAAQIISNLGQKSGLQDIADELGVKRVGIAHQAGSDSLVTGEIFWKMRQLVFNGKIDDSKYSGQIWGLNGQMPTVTYHNNPHQTPNLNGATIYSAAGTPSTPNNAGVQTPQNHTPGALTPGATGGVLGQYQMAKS

SEQ ID NO: 7471 - protein, 151 aa, Rhizobium etli
MMRRLLLVLALMLSAVPAFAVNPDEVLADPALEARARALSAELRCMVCQNQSIDDSNAELAKDLRLLVRERISNGDSDAAVLNYIVSRYGEFVLLKPRFSMRTVLLWGAPVLLVLAGGVSLLVFARKRTGRPTGSKLTPEEQAKLSELLEK

SEQ ID NO: 7472 - protein, 146 aa, Rickettsia peacockii
ANEAVINMLKEIGSSEYIPKYIAKAKDKNDPFRLMGFGHRVYKNYDPRAVVLKETCKEVLKELGQLDNNPLLQIAIELEAIALKDEYFIERKLYPNVDFYSGIIYKAMGIPSQMFTVLFAIARTVGWMAQWKEMHEDPEQKISRPR

SEQ ID NO: 7473 - protein, 116 aa, Zea mays
  misc_feature (105)..(105): Xaa can be any naturally occurring amino acid
MAMAYKMATEGMNVKEECQRWFMEMKWKKVHRFVVFKIDDWRYAVFDFDFVTVDNCQKNKIFFIAWSPAASRIRAQILYATSKQGLRRLLDGVHYEVQATDPSEXMGFDVIRGRAQ

SEQ ID NO: 7474 - protein, 145 aa, Zea mays
MCPTKKEMSAESSGSASSWTSASTSTSPEHQTVWTSPPKRPAGRTKFRETRHPVFRGVRRRGSAGRWVCEVRVPGRRGCRLWLGTFDAAEAAARAHDAAMLAIAGASACLNFADSAWLLAVPASYASLAEVRRAVAEAVEDFQRR

SEQ ID NO: 7475 - protein, 42 aa, Triticum aestivum
ILLPPVGVFLRYGIGVEFWICLLLTILGYIPGIIYAVYVLVA

SEQ ID NO: 7476 - protein, 147 aa, Brassica napus
MDFGRFPIISILEDMLEVPEEHSEKGRSNPWRAYVRDQKAMAATPADVIEHPDAYAFVVDMPGIKGDEIKVQVESDNLLVVSGERKRENKEKEGVKYVRMERRMGKFMRKFQLPENADLEKISASCNDGVLKVTVGKLPPPEPKKPK

SEQ ID NO: 7477 - protein, 466 aa, Methanothermobacter thermautotrophicus
MCAIAGFRGDDAPVKVQEMLDVLRHRGPDATGIYHDSRIVIRTATGEDVKEAPQSAEIAVGHNLLSIVGGPQPVSGDGVLVFNGEIYNQEELNWTGSDSELILDLIEGHGGDLEDALRFTVNKIDGDYAFAYTDGENLASRQDPVGVKPLYHSGEAFASEKKALWRIGLRNVETLPPGHAMINGVKVKLRGLPRAEPSDAEPEELRENLKSALRESVERRVRGLDEAALVFSGGVDSTLLAVLLDEHIDVRLYTVGLPGSSDPQFASRAAADLGMELEVLEVTEDTIREALPHVLGAIEEYNLMKIGVAMPLYLASEAASADGYRVMFSGQGADELFAGYHRYRRLLAEGRLEDALRHDLENIHHVNLERDDAVTMANSVELRVPFLDLQLIGVALTIPADLKIRGPEDELRKRILREAALEMGVPEYIAMRPKKAAQYGSGIDKVLRRKVLPGFDHETFLRRLMF

SEQ ID NO: 7478 - protein, 162 aa, Ureaplasma parvum serovar 3 str. ATCC 700970
MERLNMKLSDYPVLDIDKKLFNWSKVKNKLVLIVNVASKCGYAKQYEQLEYLYKKYKNKGFIIVAFPCRQFMFQEFDDNNKIKEFCSTKYNVTFPIMDLTNVVGSNISPLYKQLITEYPWSPKAKAVKWNFEKFFVKNDEIIGRFESKCEPNDLEEFIKNNL

SEQ ID NO: 7479 - protein, 411 aa, Deinococcus radiodurans R1
MCPARSHLFVTPAGTFDRPFFAPWKKGRCYPLLTMSNIAKGLEGVLFTESKLTFINGSEGILTHLGIPIQEWAEKSTFEELSLALLDAKLPTAEELAKFDAELKANRAIPDQLVGIIRDMPKGVHPMQALRTAVSYLGLLDPQAEDITPEARRAISTRMIAQFSTIIAAINRAQEGQDIVAPRADLTHAGNFLYMLTGNEPTPEQARLFDIALVLHADHGMNASTFTAIATSSTLSDMYSCMVSAIGALKGPLHGGANEAVMTMLDEIGTVDKAEAYITGKLDNKEKIMGVGHRVYKYFDPRSRVLRDYAEHVANKEGKSNYYQILEAIEKIIVDRMGAKGIYPNVDFYSGTVYSDLGIKKEYFTPIFALARISGWCASVIEYSQDNRLLRPDAEYTGARDQHYVDIKDRQ

SEQ ID NO: 7480 - protein, 253 aa, Triticum aestivum
  misc_feature (218)..(218): Xaa can be any naturally occurring amino acid
MKTLLIVTILAMATTIATANMQVDPGYQVHWPQQQPFPQPQQPFCQQPQQTIPQPHQTFHHQPQQTFPQPQQTYPHQPQQQFPQTQQPQQPFPQPQQTFPQQPQLPFPQQPQQPFPQPQQPQQQFPQSQQPQQPFPQPQQQFLQPQQPQQSFPQQQQPLIQLSLQQQMNPCKNFLLQQCNPVSLVSSLISMILPRSDCQVMQQQCCQQLAQIPQQLQXCAAIHKGGIPINQCSKNNGPRRCRIRRATGFSSVG

SEQ ID NO: 7481 - protein, 250 aa, Zea mays
MAKNYPTVSAEYSEAVDKARRKLRALIAEKSCAPLMLRLAWHSAGTFDVSSRTGGPFGTMKHQSELAHGANAGLDIAVRLLEPIKEEFPILSYADFYQLAGVVAVEVTGGPEIPFHPGREDKPQPPPEGRLPDATKGSDHLRQVFGKQMGLSDQDIVALSGGHTLGRCHKERSGFEGAWTTNPLVFDNSYFKELLSGDKEGLLQLPSDKALLSDPVFRPLVEKYAADEKAFFDDYKEAHLKLSELGFADA

SEQ ID NO: 7482 - protein, 318 aa, Shewanella oneidensis MR-1
MANTLEQLKSYTTIVADTGDIEAIKRYQPEDATTNPSLILKAAQIPEYSALIDNAIAWAKLQSTDIEQQIDDASDKLAVNIGVEILKLVPGRISTEVDARLSFDKEKSIAKAHKLVRLYQEAGVDKSRILIKLASTWEGICAAKELEQEGINCNLTLLFSFSQARACAEAGVYLISPFVGRILDWYKKDTGKDYDAVNDPGVVSVTEIYNYYKQHGYNTVVMGASFRNIGEIIELAGCDRLTIGPSLLEELANSQLAIQPKLVPTSTTVAVAEPLTEAQFRWEFNQDAMAVDKLAEGIRNFAIDQGKLEVMLKAKLAN

SEQ ID NO: 7483 - protein, 374 aa, Glycine max
  misc_feature (226)..(226): Xaa can be any naturally occurring amino acid
  misc_feature (353)..(353): Xaa can be any naturally occurring amino acid
MSQPKIKRRVGKYEVGRTIGEGTFAKVKFARNSETGDPVALKILDKEKVLKHKMAEQIRREVATMKLIKHPNVVRLCEVMGSKTKIYIVLEFVTGGELFDKIVNHGRMSENEARRYFQQLINAVDYCHSRGVYHRDLKPENLLLDAYGNLKVSDFGLSALSQQVRDDGLLHTTCGTPNYVAPEVLNDRGYDGVTADLWSCGVILFVLVAGYLPFDDPNLMNLYKKXRKLITRILDPDPTTRITIPEILDDEWFKKDYKPPVFEENGETNLDDVEAVFKDSEEHHVTEKKEEQPTAMNAFELISMSKGLNLENLFDTEQGFKRETRFTSKSPADEIINKIEEAAKPLGFDVQKXNYKMRLANVKAGRKGNLNVAT

SEQ ID NO: 7484 - protein, 509 aa, Oryza sativa
MGSFARKEHQFLAELGLAPRNPGSFACGAWGGSGPVVTSTNPTNNQVIAEVVEASAREYEEGMRACYDAAKTWMAIPAPKRGEIVRQIGDALRAKLHHLGRLVSLEMGKILPEGIGEVQEIIDMCDYAVGLSRQLNGSIIPSERPNHMMMEVWNPLGVVGVITAFNFPCAVLGWNACIALVCGNCVVWKGAPTTPLITIAMTKIVASVLERNNLPGSIFTAFCGGADIGQAISLDTRIPLVSFTGSTKVGLMVQQQVNARFGKCLLELSGNNAIIVMDDADIQLAVRSVLFAAVGTAGQRCTTCRRLLLHESIYRTFLDQLVEVYKQVRIGDPLENGTLLGPLHTPASRDAFLKGIQTIRSQGGKILYGGSAIESEGNFVQPTIVEISPSAPVVREELFGPVLYVMKVQNLKEAVEINNSVPQGLSSSIFTKRPDIIFKWIGPHGSDCGIVNVNIPTNGAEIGGAFGGEKATGGGREAGSDSWKQYMRRATCTINYGSELPLAQGINFG

SEQ ID NO: 7485 - protein, 254 aa, Methanosarcina mazei Go1
MTSYKALVKDVINKADVLLEVVDARFPDETRNSEVEKEIIRLKKPFIIVINKCDLVSKEKLDKTKSRLSRIAPTVFISSKDRSGTTMLRHQILASACIKGRDILVGTLGYPNVGKSSVINGVTGRHRASTSPVSGHTKGVQHVDAGSHIMFMDTPGVIPFDENDEYVQGLLGIKDSTHLKDPVGVALMIIDKMLAENRTALESFYNVTLESPDSYSVLEQIGRKCNFLQKKGEIDEMRTATKIIGDWQNGLLLV

SEQ ID NO: 7486 - protein, 283 aa, Listeria monocytogenes str. 4b F2365
MKTVKLNNGVEVPILGFGTYQITDAAEAEQAVKDAIKTGYRHIDTAQSYMNEEAVGRGIAASGVDRKELFITTKIWVENVSYKGVMSSFDRSLKRLGLDYIDLLLIHQPFNDVYGAWIAMEELQASGKIRAIGVSNFSPDRVIDLAAFNEVTPQVNQIEVNPFQQQAANLAVLRKEGVTIEAWAPFAEGKNDIFNNPVLTKIGAKYGKSAAQVILRWLVEQDIIVLAKSVKPERMAQNLAIFDFELTEADKGEIASLDQGESQFFSHADPEMVKWMASRKLNV

SEQ ID NO: 7487 - protein, 509 aa, Streptomyces avermitilis MA-4680
MAGQQARQAGQTQRTIHVGGEWREADSRATREILDPADAKPFAVVAEGDERDADAAVAAARRAFDSGEWPHTPVAERAALLRRVADLLVRDRESLGLLESRDAGKTLEEGRVDIDCVADAFRYFADLVVGEGGGRVVDAGSPDIHSVVVHEPVGVCAMITPWNYPLLQASWKIAPALAAGNTFVIKPSEITPLTTAALVDLLVEAGAPAGVANIVTGPGHTVGARLAEHPDVDLISFTGGLASGTKVAQAAAVSVKKVALELGGKNPNVVFADACATDEDFDTAVDQALNAAFIHSGQVCSAGGRLIVEESVRERFVAELVRRAGRIRLGRGTEDGVECGPLVSEQQRDKVEGYVASALSEGAVLRTGGRRPEPSDVRPAAGYFFEPTVLDQCHRGMKVVREEVFGPVLTVETFRTEDEAVALANDTEYGLAGAVWTSDAGRARRVAGRLRHGTVWINDFHPYLPQAEWGGFGKSGVGRELGPAGLAEYRETKHVYQNLAPKPVRWFAG

SEQ ID NO: 7488 - protein, 88 aa, Brassica napus
  misc_feature (35)..(35): Xaa can be any naturally occurring amino acid
  misc_feature (74)..(74): Xaa can be any naturally occurring amino acid
RGRIKFLLEGDWGVVDYKDFYVVVMRAAQKSFFFXLEKLKKKCFDGLKEGVLGIEKLVFVNGLCKGVLKVIGAXDRVQIKKTNLPVLI

SEQ ID NO: 7489 - protein, 596 aa, Zea mays
MATMKLGSKPEIFVLQDLTWLCTTELESDVVVEVGEMSFYLHKFPLLSRSGVLQRMISEYQAPADGGGMCTLQLDDIPGGAKAFELAAKFCYDVKIELNALNVVCLRCAAEYLRMTDDYAEGNLITQAECFLVDVLANWKDSIKALETCEGVLPTAEDLHLVSRCITALASKACGSDAAAPVVRNASVDKDALWNGIRSGDTTSSAAAAAAAAGMDWWYEDVSFLSLPMFKRLIQAMEAKGMRDESIAGAIMFYAGRFLPGLKRNRNITPRAASVSAPSEGDQRYFLEEIVALLPTKKGVASTKFLLGMLRTAMLLHASPLCRENLERRIGAQLEDASLDDLLVPNLGYHVETLYDIDCVQRILDYFMSSTDGIGTGYTSPALAEEGGGSLGIPQGATPSSSLSPITMVAKLMDGFLAEVAPDTNLKLPKFQALAAVVPDYARPVDDGIYRAIDIYLKSHPWLSESEREQLCRLLNCQKLSLEACTHAAQNERLPLRVVVQVLFFEQLRLRTSIAGWFFVSDNAAGGDGARPHAGGAIVPKGTDVKARVSDLEKECKSMKQEIRRLGKPRRSWSLLTRKCGFGAKVQQAQTAMSGK

SEQ ID NO: 7490 - protein, 141 aa, Triticum aestivum
  misc_feature (85)..(85): Xaa can be any naturally occurring amino acid
MSEAVGTPESGGAKEQERFLPIANIGRIMRRGVPENGKIAKDAKESIQECVSEFISFITSEASDKCMKEKRKTINGDDLIWSMGXTLGFEDYVEPLKLYLKLYREMEGDTSKGSKSEQAGKKVGALNGQPGSSFNGMYGGE

SEQ ID NO: 7491 - protein, 394 aa, Vibrio parahaemolyticus RIMD 2210633
MLSNQTIEIVKATAPLIAETGPKLTAHFYDRMFTHNPELKDIFNMSNQRNGDQREALFNAICAYAANIENLPALLGAVEKIAHKHTSFLITKDQYQIVGKHLIATIDELFNPGQEVLDAWAEAYGVLANVFIQREEQIYQANASQEGGWRGLREFELVGKQLESEHICSFVFKPTDGSKVTKYKPGQYLGIYINSDKFENQEIRQYSLSSSVQENTYRISVKREQGGKVSNYLHDELNIGDKVKLAAPAGDFFMDVDTNTPVVLISAGVGLTPTLSMLESLTEHHAPVTWVHATENSKHHAFKEHVNQLVTAKENMNALIWYNQPTAEDKIGEDFHFTGFVNLHEIEAALKQDNVQVYFCGPVGFMQHVAKQLQELGVPQEQFHYECFGPHKVV

SEQ ID NO: 7492 - protein, 129 aa, Thermoplasma volcanium GSS1
MSWQEAEVRELKVGRYILIDDVPCKIVEITMSKPGKHGEAKGRIVAIGVFDNQKRSVVYPVKHKVKIPIIEKKNAQVLSVMNNEAQLMDSETFETFVLPLDPEIADKVKPGMEVPYWEAMGVRKIMLQN

SEQ ID NO: 7493 - protein, 167 aa, Solanum demissum
MVDPVDRIRKACPKFHFPKRSLVFRVYISVAGCRCSPWSSPYSGLTLVEVTEVSSIIMKRLGMTEQPTVGVMKAGAAELAAAMKGPEAAKEEKKPEKTVFELKLESFESAQKIKIIKEVRSSTDLGLKEAKDLVEKTPAVFKKGVSKEKAEQIIDKMKAVGAKVVME

SEQ ID NO: 7494 - protein, 181 aa, Zea mays
  misc_feature (101)..(101): Xaa can be any naturally occurring amino acid
MASVRLSSATMTSSLAHATMVAPFIGLKSSAAFPVTCKANTEITSITSNGGRINCMKVWPPVGKKKFETLSYLPGLTDVEIAQEIDYLIRNKWTPCIEFEXEHGFVYREHGNIPGYYDGRYWTMWNLPLFGCTDPPQVLKEVQQCKREYPNAFIRIIGSDNNRQAQCISFIPHKPPSFTDA

SEQ ID NO: 7495 - protein, 576 aa, Glycine max
  misc_feature (121)..(121): Xaa can be any naturally occurring amino acid
  misc_feature (136)..(136): Xaa can be any naturally occurring amino acid
  misc_feature (222)..(222): Xaa can be any naturally occurring amino acid
  misc_feature (275)..(275): Xaa can be any naturally occurring amino acid
MAASLFMPSSIVDEEARFEAEVAEVQAWWNSERFRLTKRPYTARDVVSLRGNLRQTYASNEMAKKLWCLLKNHQANGTASRTFGALDPVQVTQMAKHLDTIYVSRWQCSATHTTSNEPGPXTLQSYPYDILADVAXHLLFGQEYHDRKQREDRMRMRREKRGKTPYVDYLRPIIADGDTGFGGTTATVKLCKLFVERGAAGIHIEDQSSVTKKCGHMAESAXLLLSEHINRLVAARLQFDVMGVETVLVARTDAEAHNLIQSNIDTRDPQFYVGXVTNPNMQQGMAAGKNGAELQALEDEWLSKAQLKTLSEAVVEAIERQNNIGEEEKRRKLNEWMHHSSYERCLSNEEGREIAEKLGVRNLFWDWDLPRTREGFYRFKGSVTASVVRGCAFSPHADVIWMETASPNVVECTEFSEGVRSKHPQMMLGYNLSPSFNWDASGMSDEQMSMSDEQMRDFIPKIAKLGYVWQFITVGGLHSNALITSTFARDFANRGMLAYVERIQREERNNGVDTLAHQKWAGANYYDRYLKTVQGGVASTAAMGKGVTEEQFKESWTRPGAVEIDRGSIVVAKARM

SEQ ID NO: 7496 - protein, 462 aa, Gloeobacter violaceus PCC 7421
MTRITPNSSFSLTLRLHLPNQPGMLAKATAAIGEAGGNIGDIELIEQERAYTVRDLIVDATSEEHAHAIAERVSAIPELKLLQVDDRTFQIHQGGKIQIVSKIPLRTRSDLAMAYTPGVGRICMAIARNPERVYELTIKRNTVAVLTDGSAVLGLGDIGPAGALPVMEGKALLFKEFANIDAFPVCLSTQNVDEIVETAVRISTVFGGINLEDISAPRCFEVERLLQERLDIPVFHDDQHGTAIVVLAALENALKLVDKSLASVRIVINGAGAAGIAIHQLLTAAGARAIVMCDSHGIVSAGRADLNAEKRAVAVEQTGALADAMAGADVFLGVSKGGVLSRAMVQSMATDPVVFAMANPVPEILPEEAEGVVAVMATGRSDYPNQINNVLAFPGIFRGALDCRARRVNLEMKMAAARAIAALVSPDEIAPESIIPSVFDRRVVVAVSAAVQQAARATGVAR

SEQ ID NO: 7497 - protein, 280 aa, Listeria monocytogenes EGD-e
MTLSFSDTYRLNNGIEMPRHGFGVYKLTDEARMRTALETAVDVGYRLFDTASFYHNEKELGDFFASSGLKRDEFFVTTKMWNTEQGYDETLRAFEKSQKKLQLDQIDLYLVHWPKQDTFFDTWRAVEKLYDEGLVRAIGVSNFEAHHLDRLRTSANVLPVVDQLETHPHFPNHLLHRYLEELHIVHQAWSPLGRGGVLQEQILIDLAEKHGKSPAQIVLRWHLQNNISIIPKSETPSRIRENAAIYDFELSEADMRQVERLNTGERVSHAPDVMYVRSEI

SEQ ID NO: 7498 - protein, 123 aa, Clostridium acetobutylicum ATCC 824
MTREEIIEAIKGMSVLELNELVKACEEEFGVSAAAPVAVAGAAGAAGAAAGEEKTEFDVVLAEAGAKKLQVIKVVRELTGLGLKDAKALVDGAPKTIKEGVAKEEAESMKAKIEEAGGKVELK

SEQ ID NO: 7499 - protein, 338 aa, Pseudomonas fluorescens PfO-1
MNIKKTLAASLLALSIGNAFAAESTGVEHNTQAFLDALAAGGGKPLEQLSPKDARAVLTGAQASVKVDLSGVEVSDKAIKVDGQTINLKVVRPAKVKGELPVFMFFHGGGWVLGDFPTHQRLIRDLVVGSGAVAVYVDYTPSPEAQYPTAINQAYAATKWVAEHGKDIGVDGKRLAVAGNSVGGNMAAVVALMAKEQKTPALRFQLLMWPVTNAGFDNGSYQQFAEGHFLTKGMMQWFWDNYTTNPAERAQIHASPLNASAEQLKGLPAALVQTAEFDVLRDEGEGYARHLDAAGVPVTSVRYNGMIHDFGLLNPLNGIPEVKAAVRQAAAELKTHLN

SEQ ID NO: 7500 - protein, 480 aa, Arabidopsis thaliana
MASRTTPSRSTPSRSTPSGSSSGGRTRVGKYELGRTLGEGTFAKVKFARNVENGDNVAIKVIDKEKVLKNKMIAQIKREISTMKLIKHPNVIRMFEVMASKTKIYFVLEFVTGGELFDKISSNGRLKEDEARKYFQQLINAVDYCHSRGVYHRDLKPENLLLDANGALKVSDFGLSALPQQEDGLLHTTCGTPNYVAPEVINNKGYDGAKADLWSCGVILFVLMAGYLPFEDSNLTSLYKKIFKAEFTCPPWFSASAKKLIKRILDPNPATRITFAEVIENEWFKKGYKAPKFENADVSLDDVDAIFDDSGESKNLVVERREEGLKTPVTMNAFELISTSQGLNLGSLFEKQMGLVKRKTRFTSKSSANEIVTKIEAAAAPMGFDVKTNNYKMKLTGEKSGRKGQLAVATEVFQVAPSLYMVEMRKSGGDTLEFHKFYKNLTTGLKDIVWKTIDEEKEEGTDGGGTNGAMANRTIAKQST

SEQ ID NO: 7501 - protein, 115 aa, Citrus sinensis
MAALKLVSALVLCMLVTGPLSAQAITCGQVSGSLAPCIGFLRSGGPIPMPCCNGVRSLNAAARTTPDRQTACNCLKQAAGSIPNLNLNNAAGLPGACGVSIPYKISTSTDCSKVR

SEQ ID NO: 7502 - protein, 505 aa, Ralstonia eutropha JMP134
MKAQEIAACWQSMGLPRPWSDGTPAGTVIVRSPVDGEAFGHVPACTPAEADARIVRAHAAQSSWALVPAPVRGDIVRRFGEVLREHKTALGRLVSLESGKIQQEGLGEVQEMIDICDFAVGLSRQLHGLTIASERPQHAMRETWHPYGLCGVISAFNFPVAVWAWNAALALVCGNAVLWKPSEKTTLCALAAHGLLERVLAATAPHYVGISAVLPGGRMVGTHLVGHPAVRLVSATGSTRMGREVGIACAQHFKRSILELGGNNAAIVTPSADIELAVRAITFAAAGTAGQRCTTLRRCFVHADLMDTMASRLVTVFDRLPVGDPLEDGTLLGPLIDTGAADAMANALASCRAQGNIVTGGERLLADRFPHASYVRPALVMTDEQHDTMLTETFAPILYLMPYTSLDEAISLNNAAAHGLSSCIFTESLREAERFLSSAGSDCGIANVNIGTSGAEIGGAFGGEKATGGGRESGSDAWKGYMRRATNTINYGDTLPLAQGIRFEI

SEQ ID NO: 7503 - protein, 158 aa, Oceanobacillus iheyensis HTE831
MSVHDFTVTTIEGEEKRLSDYKGKVILIVNTASQCGFTPQLEDLQKLYKQYQDNDFEILGFPCNQFGNQDPGASEEISAFCQKNYGVTFQMFKKVDVKGKEAHPLYKHLTEEKKGILGGQIKWNFTKFLIDQNGNVIERFSPQKNPNTLNKDIEVLLR

SEQ ID NO: 7504 - protein, 463 aa, Oryza sativa (japonica cultivar-group)
MESEVCWLLCAALAAAMACYYLTGTMRRRSRRLPPGPTPLPVIGNVLSLRGNMHHALARLAGEHGPVMALKLGLVTTVVVSSAGAAREAFTKHDRRLAARAVPDTTRARGFASRSMIWLPSSDPRWKTLRGVAATHVFSPRSLAAARGVRERKVRDIVGHLAGHAGEVVDVGKVVYGGVLNLRRLDLQGWRRWAEKRYDKVFGIFDSVINSRLADASTGKHADAGAGDFLDSLLDLMSAGTIARDDVTSIMYDLFGAGTDTIAITVEWAMAELLRNPSVMAKARAEMNHVLAGKVKATEMEENDVEKLPYLQAVVKEVMRLHPAAPILVPHRAEEDDAEIGGYAVPKGSTVIFNVWAIMRDPVAWERPEEFMPERFLDMAEEVDFRGKDHKFMPFGTGRRLCPGLSMAKRVVPFILASLLHAFEWRLPAGVTAEALDLSEKFTTVNVLVTPIKAIPILASDQI

SEQ ID NO: 7505 - protein, 214 aa, Physcomitrella patens
LSDIHCTQCLPIRLSLVLSSALSKFRESVAMASAVVSTVVAPVALGGASSCVGAPSESSSVKAFSGLKSATLFSGKTQKLSSVQNGSRVQCMQVWNPIGQPKFETFSYLPPLTDDQIAKQVDYMIQQNLIPCIEFDTVGSVSRTNFSGAGSSGYYDGRYWTMWKLPMFGCTDSSQVLREIQECKSQFPSCWVRVLGFDSKKQVQICGFLVSRPN

SEQ ID NO: 7506 - protein, 357 aa, Azoarcus sp. EbN1
MTTMKAAVFKAPGRIELVDKPLPQVGPNDALVRITTTTICGTDVHILKGEYPVATGLTIGHEPVGVIEQLGSNVQGYVEGQRVIAGAICPSFTSYGCQDGVPSQDGGHVGHGYKPMGGWRFGNTIDGTQADYVLVPDAIANLAPVPDGLTDEQVLMCPDIMSTGFAGAEAANIRIGDIVAVFAQGPIGLCATAGAKLRGASLIIAVDGVDERLRISRNMGADVTLNFREVDVVSEILRITGGRGVDAAVEALGLQSTFESALRVLKPGGTLSSLGVYSSDLTIPLGAFHAGLGDNKIVTSLCPGGKERMRRLMNVVASGRDDFGALVTHTYKLDDIVAAYDLFANQRDGVLKIAIKP

SEQ ID NO: 7507 - protein, 582 aa, Glycine max
  misc_feature (259)..(259): Xaa can be any naturally occurring amino acid
  misc_feature (266)..(266): Xaa can be any naturally occurring amino acid
  misc_feature (325)..(325): Xaa can be any naturally occurring amino acid
FEQQYDRFMNSFRSLENNTQGQPDKVVSLAKWRILNRLHDRNETLYYRVLIDNIKEFAPIIYTPTVGLVCQNYSGLFRRPRGMYFSAKDKGEMMSMIYNWPAHEVDMIVLTDGSRILGLGDLGVQGIGIPIGKLDVYVAAAGINPQRILPVMLDVGTNNQKLLEDRLYLGLRQPRLEGEEYLSIVDEFMEAVHARWPKAIVQFEDFQMKWAFETLKRYQKRFCMFNDDIQGTAGVALAGILGTVRAQGRPLTDFVNQKXIVVVGAXGGLGVLKMAIQTVAKISGCSELAAKSQFYLIDKDGLVTTERNSLDPAAAPFAKNPRDIXGLTEGASIIEVVKKIRPHVLLGLSGVGGIFNEEVLKAMRESVSTKPAIFAMSNPTMNAECTSIDAFKHAGENIVFASGSPFENVDLGNGKVGHVNQANNMYLFPGIGLGTLLSGAHLITAGMLQAASECLASYMAEEDILKGILYPSVDFYMYMGTAECTAIDAFKHAGENMVFASGSPFENVDLGNGIVGHVNQANNMYLFPGIGLGTLLSGAHLITDGMLQAAAEWYDVNLENCFFFINQKPLELALMEVWQDVF

SEQ ID NO: 7508 - protein, 126 aa, Brassica napus
  misc_feature (20)..(20): Xaa can be any naturally occurring amino acid
PIDPDAGLQSEIESLMKKSXSDFSVVISQMNGQDYASRSHVLTIGKTRIKLSRGWITKAREIYSTSMQLCGVRGNIKAPAKALFWQPRKSLTFTLTFESEQERNTAISLARKYAFDCNVTLLGPDD

SEQ ID NO: 7509 - protein, 204 aa, Triticum aestivum
HEAFPTPPRSANHRLLLPPPFSPLRSSPPARAFFIRVSGRGMADDDSGSPRGGGGVREQDRFLPIANISRIMKKAVPANGKIAKDAKETLQECVSEFISFVTSEASDKCQKEKRKTINGDDLLWAMATLGFEEYVDPLKIYLQKYRDMEGDSKLTSKSGEGSVKKDIIGAHSGATSSNAQAMVQHGAYAQGMGYMQPQYHNGDT

SEQ ID NO: 7510 - protein, 145 aa, Zea mays
  misc_feature (36)..(36): Xaa can be any naturally occurring amino acid
  misc_feature (102)..(102): Xaa can be any naturally occurring amino acid
RIDGRTHASADTCDDYSAVAMDSESQGVERLPMRTXMSPSEYHYASLQAYMLMLKLIHLKLRFYDQHRGLSALGPYMGTCIWQCIFGRFDPQTDLATSDSIXLRRHIGIDLSRHAADREHSRYYAELLIRSGVVSNSELHNLTSH

SEQ ID NO: 7511 - protein, 290 aa, Glycine max
SWSISVFEQVKWIRVLYADFTAFIRDQEKLIFAEKAFDYVEGFVIINRTGLLNNWSSSFNPQDPVQASEFKSDGRTLFCLELAKYYNLEETLLVNQEVEKHLSRLNYIPSTLFLTEVTYVDFLDRVHTSEVKLRSKGLWDVPHPWLNLFIPKTKIHHFAEVVFGNIVKETSNGPVLIYPVNKSKWDNRTSVVIPEEDIFYLVAFLASAVPSSNGPDGLEHILSRNKKILEYCERANLGVKQYLPHYSTQEEWTAHFGSQWEIFKKRKSLYDPLAILAPGQGIFQKSITFS

SEQ ID NO: 7512 - protein, 113 aa, Bartonella sp. Rn1691yn
ANEACLKMLQEIDSVKRIPKFIARAKDKNDPFRLMGFGHRVYKNYDPRAKIMQQTCHEVLKELNIQDDPLLDIAIELEKIALNDEYFVEKKLYPNVDFYSGITLKALGFPTEM

SEQ ID NO: 7513 - protein, 280 aa, Zea mays
MDAPAPAVEIREVWASNLEEEFEVIRDVVDAYPYVGMDTEFPGFVVQPIAEYRFTCDRIYAGLEGNVNVLKLIQLGLTFSNEAGTLPPCGTGGQCCIWQFNFRGFNPHTDPYSPDSIDLLRRSGIDFDLFAVEGVDSTRFAELMMSSGIVLNDDVQWVTFHGSHDFGYLLRLLTGREMPNTLDEFLKLTKIFFPVMYDVKHLMKFCGPGLYGGLSRLGKLLKVERVGTGHQAGSDCLLTLQCFMKLKQLYLKESVKLYDGLLFGLIPGEVEIKTAPPPIG

SEQ ID NO: 7514 - protein, 502 aa, Pseudomonas aeruginosa
MEKTTTSPVGATYWRSRAENVEFEGRCLIDGKLIEAHSGQTFDCVSPVDGRVLTKVAEGGEADINKAVAAARAAFQDRRWAGQSPIFRKRTLQAFAALIRLHRDELALLETLDMGKPISASRSVDVEAVANCFDWYAEAIDKLYEQIAPTAENDLALITREPLGVVGAIVPWNFPMLTTAWKVAPALATGNSVVLKPAEQSPLTAIRLGQLALEAGIPEGVFNVVPGFGRSAGKALACHMDVDGIFFTGSTATGRLLTEYAAKTNLKRVCLELGGKSPNIILASYGDIEKAAVTAAESMFNNQGEVCIAPSRLIVERSIHKQVVEIVAEIARQRQPGDPLDPATRIGALVNAQHADRVMGFIERAKTDGATLAAGGTRALTETGGSYVVPTVFDNVSNDMEIAREEIFGPVLSVIPVSSVDEAVSVANDSPYGLGAGVWTDSLSDAHKISRKLRAGVVYVNCYNDCDITTPFGGVKQSGNGRDKSLYALDEYTELKTTWIRL

SEQ ID NO: 7515 - protein, 115 aa, Brassica napus
MALALRFFTCLVLTVCIVASVDAAVSCGTVTSSLAPCANYLSKGGDVPPPCCAGVTKLNGMAQTTPDRQQACKCLQSAAKTVSGLDPSLAAGLPGKCGVSIPYPISMSTNCDNVK

SEQ ID NO: 7516 - protein, 360 aa, Candida albicans SC5314
MTNPSLVLNKIDDISFEDYESPEITSPRDVIVEVKKTGICGSDIHYYAHGSIGPFVLRKPMVLGHESAGVVVAVGDDVTNLKVGDKVAIEPGVPSRYSDEYKSGNYHLCPHMAFAATPPVNPDEPNPPGTLCKYYKAPADFLFKLPDHVSLELGAMVEPLTVGVHACKLANLKFGENVVVFGAGPVGLLTAAVAKTIGAKNIMVVDIFDNKLQMAKDMGAATHTFNSKTGDDLVKAFDGIEPSVVLECSGAKQCIYTGVKILKAGGRFVQVGNAGGDVNFPIADFSTRELTLYGSFRYGYGDYQTSIDILDKNYINGKENAPINFELLITHRFKFKDAIKAYDLVRGGNGAVKCLIDGPE

SEQ ID NO: 7517 - protein, 249 aa, Magnaporthe grisea 70-15
MGMGDSDTANGTVRTSVPGVPVTIERKPFVQDEHEDQRLPNAGTARVNTAASYEHPNGTTEDGYARRHSHQTVLQQHCDFFDRDQDGVIWPQDTFVGFYRLGFGVILSLISVFIIHGNFSYPTSPSWIPDAFFRIHLDRIHKDKHGSDTGTYDTEGRFVPQKFEDIFAKYAPGQDSLTWRDVMQVLHGQRLYADPIGWFAAVFEWLATYILLWPEDGHMKKDDIRGVYDGSIFYTIAARREERVRQKSS

SEQ ID NO: 7518 - protein, 77 aa, Triticum aestivum
PHVGPQDYQLIAITDDGYVRLLTESGPPKDDLKLPPDDVLLGPIQTGFADGQDLILFVMSPLGEEPICPVKEIGGGQ

SEQ ID NO: 7519 - protein, 325 aa, Zea mays
CIASAVGVNEKKRTPSSRTHSIRCLFEAFLKKKSGEAHPSSTLLSTKDFLERPLAGSQVQLCLLETNTLNSWSRIDPGTFRVRGANYFRDKKKELAPNYAAYYPFGVDVYLSPQKLNHISRFVQLPDIQLSSKLPPLLVVNVQVPLYPASLFQNETDGEGMSFVLYFRLSDGYSKELPHSFIESIRRLVDDHVEKIKAFPMETTIPFRERLKILGRVANLEDLPLSAAERKLMHAYNEKPVLSRPQHEFYLSDNYFEIDIDMHRFSYISRKGFETFLDRLKACVLDVGLTIQGNKAEELPEQILCCVRLNGIDYTKYQPLLTHGA

SEQ ID NO: 7520 - protein, 488 aa, Leptospira interrogans serovar Copenhageni str. Fiocruz L1-130
MSEKTKIAIAYGDGIGPEIMDATLKILNAAGAKIEPIEIEIGEKVYKEGHSSGIKPEAWDILRQTKVFLKAPITTPQGGGYKSLNVTVRTTLGLFANVRPCFSLYPYVETKHPSLDIVIIRENEEDLYTGIEHRQTNDTVQCLKLISHPGSEKIIRYAFEYARAYGRKKVTAMVKDNIMKQTDGLFHDIFKEVAKEYPELEVNSQIIDIGAANLADRPQNFDVVVTLNLYGDIISDIVAQIAGSVGMAGSSNIGEIVSMFEAIHGSAPDIAGKNLANPSGLLNAAVMMLVHIGQPDIAAKINNAWLLTIEEGIHTGDIFKPGVSRIKVGTKEFSDAVIGNLGHLPGKFKPVSFGKAKKIIIPEYKRNIQKKDLVGVDIFLDWVGKDPNELGNKLKSVSDELMLKIITNRGVKVYPDGQPETFLIDHWRCRFVSKNALIKQEDPSYHPISHKQVAELLLKLDLAGFDTIKTENLYYFNGKRAFSLGQGE

SEQ ID NO: 7521 - protein, 127 aa, Pinus radiata
MAEKKSRSVSGAVICVCIWACMGVFLHQPASAALDCNTIIQQITSCATYLTTGTPVPQEESSCCQGVQSLYGDATTTEEIQQICTCLKNEAINYNLNDRALQSLPSNCGLQLSFTITRDIDCSSISL

SEQ ID NO: 7522 - protein, 487 aa, Sinorhizobium meliloti 1021
MNPETTAVPYERLGILIDGRWIYEAERSTEVVDPATGQTIARLPFAADGEIAEAVASSQRAFESWKDRSPLERGRILRRFADLARKHADEIARNMTRDQGKPLSEAIGEIRFAADHADWHAEEARRIYGRVIPARDPRVQQMVLREPVGVCIAFTPWNFPFSQALRKVVAALASGCTIILKGPGESPSSTVAIGRLMQEAGLPDGCLNILWGDPAHLSETLLAAPEVRKISFTGSVEVGKHLASLAGRHMKRSTMELGGHAPVILFDDADIEAAADALAGQKVRNAGQVCISPTRFYVQAKGHDRFLARFAEKIASTRVGNGFQESVQMGPLCHGRRVAAMEGFIQDAREQGAEIVTGGERVGNAGFFYAPTVVAAGTDELRLMKEEPFGPIAVVTPFGDFDEVIRRANSLPFGLASYVFTGSSSRAQNAARALAAGMVSVNHFGLALPETPFGGINDSGYGSEGGSETFDGYLNTKFVTRFDQIPQ

SEQ ID NO: 7523 - protein, 461 aa, Sinorhizobium meliloti 1021
MNDRPNSLHALDKQSLVHPYTNLAVHQETGPHVITGGDGIYVVDDEGKRYIEGLAGLFCAGLGFSEQRLVEAATRQLKTMPFYHSFAHKSTEPGIRLAEKLLSIAPVPMSKVFFAGSGSEANDTAIKLIWYYNNALGRPEKKKIISRRKAYHGVTVATASLTGLPFNHRDFDLPIANILHTDCPHYWRFAETGETEEDFATRMANNLEAIILEEGPETIAAFFAEPVMVSGGVITPPKTYFEKVQAVLRKYDILLIADEVICGFGRTGNMFGSETYGLKPDMISCAKQLSAAYMPISALMINAKIADALVDQSRKIGTFSHGFTYGGHPVAAAVALEALTIYEEIDIVGHVRSVAPAFQDRVRKLGEHPLIGEARGVGLVAGLEFVKDKATRENFPPAWQVANQAGKFATARGVLTRGLGDMVSLCPAMIIDDEQIDDLMTRMGLALDDTLAWARAQGHVG

SEQ ID NO: 7524 - protein, 400 aa, Psychrobacter sp. Ant300
MTIKLASTDRIDNDIREENGTQENRLTVKQKVLSYNPLTTCQPHTLHYAMKGVGYLPTPLLESLVGYLKGPSSKQYLHADAHLRLILAVNSKLVHWEDKVIANADDGDMTIRCYQSDASSHGLGFKKADTHNSDETVLLYFHGGGFCIGDVNTHHEFCHAVCEQTGWPIVSVDYRLAPEHPAPAALKDCITAYAWLAEHCHTLGALPSRIVLAGDSAGGGLSTLIAQQLSAPSQVAWSDLGSAGQKMFDLLERLPKPLAQMPLYPVTDIETDYPSWELYGEGLLLDHADVAVFDAACLDNSPLPRQHILNCPMLGDNSKVCPTYIVAAELDVLRDEAFAYAKQLKVHGIAVKTHTILGAPHGFIHFMSIHQGIGQKTGDIIKGFASFVRDVINTQSQLAA

SEQ ID NO: 7525 - protein, 363 aa, Zea mays
MTASQSSMSGGGEPGVRTVVWFRRDLRVEDNPALAAAARTAGEVVPAYVWSPEEDGPYYPGRVSRWWLSQSLKHLDASLRRLGACRLVTRRSSDAVVALIDLVRSTGATHLFFNRLYDPLSLVRDHRVKEQLSAEGITVQSFNADLLYEPWEVLDDDGFPFTMFAPFWNRCLCMPDPAAPLLPPKRINSGIRDLSRCPWDELIFEDESEKGSNALLARAWSPGWQNADKALTAFLDGPLVDYSANHKKADSASTSLLSSYLHFGELSVRKVFHQVRMKQLMWSNDGDRAGEESCTLFLCSIGPRRRGELHPVPLLHRPAGVLEGGEAGEEYAGAVGEPWRRIWRSPKRKKGKSWTLMWRVSLV

SEQ ID NO: 7526 - protein, 495 aa, Shigella flexneri 2a str. 301
MNFHHLAYWQDKALSLAIENRLFINGEYTAAAENETFETVDPVTQAPLAKIARGKSVDIDRAVSAARGVFERGDWSLSSPAKRKAVLNKLADLMEAHAEELALLETLDTGKPIRHSLRDDIPGAARAIRWYAEAIDKVYGEVATTSSHELAMIVREPVGVIAAIVPWNFPLLLTCWKLGPALAAGNSVILKPSEKSPLSAIRLAGLAKEAGLPDGVLNVVTGFGHEAGQALSRHNDIDAIAFTGSTRTGKQLLKDAGDSNMKRVWLEAGGKSANIVFADCPDLQKAASATAAGIFYNQGQVRIAGTRLLLEESIADEFLALLKQQAQNWQPGHPLDPATTMGTLIDSAHADSVHTFIREGEGKGQLLLDGRNAGLAAAIGPTIFVDVDPNASLSREEIFGPVLVVTRFTSEDQALQLANDSQYGLGAAVWTRDLSRAHRMSRRLKAGSVFVNNYNDGDMTVPFGGYKQSGNGRDKSLHALEKFTELKTIWISLEA

SEQ ID NO: 7527 - protein, 220 aa, Brassica napus
MVLEATMICIDNSEWMRNGDYSPSRLQAQTEAVNLLCGAKTQSNPENTVGILTMAGKGVRVLTTPTSDLGKILACMHGLDVGGEINLTAAIQIAQLALKHRQNKNQRQRIIVFAGSPIKYEKKALEVVGKRLKKNSVSLDIVNFGDDDDEEKPQKLEALLAAVNNNDGSHIVHVPSGANALSDVLVSTPVFTGDEGASGYVSDATAETATDGDCDFGVDP

SEQ ID NO: 7528 - protein, 374 aa, Ralstonia eutropha JMP134
MDEACARLGVRPQTVYAYVSRGKIEVMSDPVDTRRSLYRAEDVATLAKRKQAGRKHETLATNTLFGAEPSIPTAISTFLRERLYYRGRDAVVLAETATLEEAAQLLWDSAQPVNFSSSTKVAKPGRVAAFKALAELAATGHSTHGRMTRVLHAEGQGLVGQMANAFGAQPGQQALHMRFAQGWGLKPAGAELLRMAMVLLVDHELTSSAFASRIAASNGASLPACLLSGLATLSGPLHGDASGRVKALFNDVERQGEDQVITHYLSTGQALAGFGHHLYPEGDPRAAALLSRFEPPPVIARFIAQATRLTGLQPNIDVALAALVIHCGLPDDAAFGMFATARSIGLLAHSLEQLGVGQVIRPRGRYVGVVPERV

SEQ ID NO: 7529 - protein, 385 aa, Lycopersicon esculentum
MGSQIKKQWLQFACLLTFFLIATCSMAYSPYNSYESSDSTYNKVPTTVVKSEDFKVPSESEKEYKSSFLPKNDYYKKPSISEDNYKKVSFVPEHESFLPKNDYYKKPLFSEDNYKKESYVQEVPSKAKPEYKESFFSKFDYFKKPSFFEDNYKKTSYVPKVPSMAKPEYKESFFPKFDYFKKPSVSEDNYKKTSYVSEVPSMAKPEYKESFFPKFDYFKKSLAPEDKYKKAPYVPEVSTEPKPEYKVPSLPKNDYYKKPTIPEDNYKKVSYVSKVPSVPKEEYKAPTLPKNDYYKKPSVQEENYKKVPLISKLPSVPKEEYKVPSLSKKDYYKKPLVSEDNYKKVSYVPKVPSVPKEEYKAPSLSKNDYYKKSSPSPSPPPPPYY

SEQ ID NO: 7530 - protein, 312 aa, Pseudomonas aeruginosa
MTDTAKRPLYVPHAGPSLLEMPLLNKGSAFSTQERIDFNLQGLLPHNIETIEEQTERAYSQYNLCNTDLDRHIFLRSIQYNNETMFFRLLEEHLEEMMPIIYTPTVGQACQEFSKIYRTHRGLFISYPDRERIDDILRSATKNNVKIVVVTDSERNLGLGDQGIGGMGIPIASCPCTCGGISPAYTLPVVLDVGTNKPDLLNDPMYMAWRHERVSGAQYEEFVDLFIQAIKRCWPNVLLQFEDFAQTNAMPLLERYKDELCCFNDDIQGTAAVAVGTLLAACKAKGEKLSEQTVTFVGWPPPVAASPNRSSR

SEQ ID NO: 7531 - protein, 291 aa, Saccharomyces cerevisiae
  misc_feature (1)..(1): Xaa can be any naturally occurring amino acid
XVHVASVEKGRSYEDFQKVYNAIALKLREDDEYDNYIGYGPVLVRLAWHISGTWDKHDNTGGSYGGTYRFKKEFNDPSNAGLQNGFKFLEPIHKEFPWISSGDLFSLGGVTAVQEMQGPKIPWRCGRVDTPEDTTPDNGRLPDADKDAGYVRTFFQRLNMNDREVVALKGAHALGKTHLKNSGYEGPWGAANNVFTNEFYLNLLNEDWKLEKNDANNEQWDSKSGYMMLPTDYSLIQDPKYLSIVKEYANDQDKFFKDFSKAFEKLLENGITFPKDAPSPFIFKTLEEQGL

SEQ ID NO: 7532 - protein, 207 aa, Arabidopsis thaliana
MASVSPLAKYKLVFLGDQSVGKTSIITRFMYDKFDTTYQATIGIDFLSKTMYLEDRTVRLQLWDTAGQERFRSLIPSYIRDSSVAVVVYDVANRLSFLNTSKWIEEVRNERAGDVIIVLVGNKTDLVEKRQVSIEEGDSKGREYGVMFIETSAKAGFNIKPLFRKIAAALPGMESYSNTKNEDMVDVNLKPTSNSSQGDQQGGACSC

SEQ ID NO: 7533 - protein, 291 aa, Saccharomyces cerevisiae
  misc_feature (1)..(1): Xaa can be any naturally occurring amino acid
XVHVASVEKGRSYEDFQKVYNAIALKLREDDEYDNYIGYGPVLVRLAWHISGTWDKHDNTGGSYGGTYRFKKEFNDPSNAGLQNGFKFLEPIHKEFPWISSGDLFSLGGVTAVQEMQGPKIPWRCGRVDTPEDTTPDNGRLPDADKDAGYVRTFFQRLNMNDREVVALMGAHALGKTHLKNSGYEGPWGAANNVFTNEFYLNLLNEDWKLEKNDANNEQWDSKSGYMHLPTDYSLIQDPKYLSIVKEYANDQDKFFKDFSKAFEKLLENGITFPKDAPSPFIFKTLEEQGL

SEQ ID NO: 7534 - protein, 339 aa, Ralstonia solanacearum GMI1000
MNRIAKFVAGSLLAVATGAALAAGSPGVERNTQAFLDALAAGGGKPLETLSPAEARAVLVGAQAAPKVPLPPADVSEKTINVDGKPIRLTIVRPAGAKGELPAFMFFHGGGWILGDFPTHERFVRDLVADSGAVAVFVNYTPSPEARYPVAINEAYAATRWVAENGAQINVDGTRLAVAGNSVGGNMAAVVALMAKTRGAPALRAQVLFWPVTNASFENASYDAFAEGHFLTRPMMKWFWDAYTANPAQRQEITASPLLATPGQLKGLPPTLVQTAEKDVLRDEGEAYARKLDAAGVTVVATRYNGMIHDFGLLNALSGLPATRAALHQASETLKLRLK

SEQ ID NO: 7535 - protein, 249 aa, Phytophthora infestans
MDRDSLVFLAKLAEQAERYDEMVDHMKAVANNHNVELTVEERNLLSVAYKNVIGSRRASWRVISSIENKGDSERSEHIKAYRQKIEGELVDICNDILTIIENNLIPNSSSEEGKVFYYKMKGDYHRYLAEFQVDDERKESSDKALESYKQASTIAMAELPPTHPIRLGLALNFSVFYYEILNSPDRACNLAKQAFDDAIAELDTLSEESYKDSTLIMQLLRDNLTLWTSDQEPDNADANQGDMNVQDVE

SEQ ID NO: 7536 - protein, 448 aa, Bacillus subtilis
MTHDLIEKSKKHLWLPFTQMKDYDENPLIIESGTGIKVQDINGKEYYDGFSSVWLNVHGHRKKELDNAIKKQLGKIAHSTLLGMTNVPATQLAETLIDISPKKLTRVFYSDSGAEAMEIALKMAFQYWKNIGKPEKQKFIAMKNGYHGDTIGAVSVGSIELFHHVYGPLMFESYKAPIPYVYRSESGDPDECCDQCLRELEQLLKEHHEEIAALSIESIVQGASGMIVMPEGYLAGVRELCTTYDVLMIVDEVATGFGRTGKMFACEHENVQPDLMAAGKGITGGYLPIAVTFATEDIYKAFYDDYENLKTFFHGHSYTGNQLGCAVALENLALFESENIVEQVAEKSKKLHFLLQDLHALPHVGDIRQLGFMCGAELVRSKETKEPYPADRRIGYKVSLKMRELGMLTRPLGDVIAFLPPLASTAEELTEMVAIMKQAIHEVTSLEN

SEQ ID NO: 7537 - protein, 120 aa, Onion yellows phytoplasma OY-M
MIQRESRLVVVDNSGAKEVLVIGILGGTRRSHVNIGDIVLVTVKSGSGTVKKHDVLKAVIVRTKKGLRRKNGSYIKFDDNAVVLLKEDLNIIGTRIFGPVVRELSDKKFSKIVSLAQLVL

SEQ ID NO: 7538 - protein, 125 aa, Triticum aestivum
  misc_feature (59)..(59): Xaa can be any naturally occurring amino acid
  misc_feature (65)..(65): Xaa can be any naturally occurring amino acid
  misc_feature (118)..(118): Xaa can be any naturally occurring amino acid
  misc_feature (120)..(120): Xaa can be any naturally occurring amino acid
  misc_feature (124)..(124): Xaa can be any naturally occurring amino acid
MAPTVMASSATSVAPFQGLKSTAGLPVSRRSNGASLGSVSNGGRIRCMQVWPIEGIKKXSKTLSXLPTLKQREGLLKARSELTLIRFKVGLPCLRSSTRVGFNFREQNATPGYYDGRXWXMWKXP

SEQ ID NO: 7539 - protein, 435 aa, Pseudomonas aeruginosa
MTALISSSNYPLPVVHHARGVFIYDDSGKSYIDGSGGAMTVSIGHGVPEVLSAMSRQAQQVCFTYRTHFTSTAAEELAKEIVALAPGDLNKVFFVNSGSEATELSMRTAIQYWQARGQPTKTKILGRAISYHGMTMGSLSMSGHAARRADYSNLLHQFAVAPPPYAYRFEVPNDGTFGASVWEKIIQEQGADTIAAVIVEPIVGAAGGALTPPIGYLKALREICDRHSILLISDEVITGMGRTGTWFGCEHDGIVPDIIATGKGMSSGYTPMGGVIIRDGIMEALGERVKLFGHTFSANPLSAATCLAVIRYMKEHAILDNVAARSVQLESGLKDLSVRYPWMADVRGRGLLWGFEFVKDATTKEPIDAARQPNLRFAQHCFDAGLIAYPAGIAPLNNSALLAPPLVISASETEELLSRLEIGLQRFGNEMGLPA

SEQ ID NO: 7540 - protein, 545 aa, Glycine max
RAIQATKVVFNHLYDPVSLVRDHNIKEKLVEQGISVQSYNGDLLYEPWEVNSESGRAFTTFNAFWKKCLHMQMDIVSVVPPWQLIPAEGKIEECSLEELGLENESEKPSNALLGRAWSPGWRNADKALREFVELHLLHYSKKRLKVGGESTSLLSPYLHFGELSARKVFQVTCMKQILWTNEGNSAGEESANLFLRAIGLREYSRYLCFNFPFTHERALLGHLKFFPWNPDPDIFKTWRQGRTGFPLVDAGMRELWATGWIHNRIRVIVSSFAVKMLLLPWKWGMKYFWDTLLDADLESDILGWQYISGGLPDGHELERLDNPEIQGAKFDPEGEYVRQWLPELARMPTEWIHHPWDAPLTVLRAAGVELGQNYPKPIIDIDLARERLTEAIFKMWESEAAAKAAGSEPRDEVVVDNSHTVENLDTQKVVVLGKAPCATISANDQKVPALQDSKNEPPTRKRPKHMIEEGQNQDHSQNHNKDTGLSSIDQDICSTADSSSCKKQCASTSSYSFSVPQQCSSSSNLKWPWQEKIDMEQSSSKDGAM

SEQ ID NO: 7541 - protein, 1098 aa, Magnaporthe grisea 70-15
MPPTDASRQREFVHPEAAHARKKTPPSPFVLQPITAFYFFLAANLIAAVFAPIQDCDETFNYWEPTHYLTHGYGLQTWEYSPEYSIRSWLYVSLHAIVANIRRILPQSTKVSEFYFVRYVLGFICALAQTLLYRSISLTISPRTGTWFVMVLVASPGNFHASAAYLPSSFAMYACMLGAAAFIHWRGGLKTSHGIFWFAVAGVIGWPFAAALCAPFLAEEGLLPLFGDGERRFDCFVRVGRGVVAALLLVVFDTCINTFFYRKMEVISWNIVKYNVFSSSGGPNLYGTEPWTFYFKNLALNFNIWFVLAMLSMPLFLMRNLIVPSGHELRSGWRTTVFLTPFYMWLGIFTAQPHKEERFMYPAYPFLALNAAVAFHIIVTALGNANPKTLIGMIPGKLKLAVLSIAVLLAFDVSLARVYGVYTAYSAPLSLYKPLGTGVLGEQGLGGSGDSVCFGKEWYRFPSSFFLPRKMRAKFIRSEFRGLLPGEFSEARTGFGIFGGTWLTPSGMNDRNEEDMGNGQRQLGGRTMYPILGCSEYELPRPGALGPSAVLYTGSHAEKVGLSLSFAKTEGFIKKSNISAGLYIASLYDYWHHRTRNFGVMQENLLLMELREQGAVVDFGSLHLGALKRIVTGGVAIPGDPGYEDAIRRWSALAVKQAGIVVFPTTAREVSGAIVYANGHSIPFTVCCGGHATSGSSSIGPDGMLIHLRLMQAISVDAQARTVTFGGGCLWRQVDAATSEYGMATPGGTISHTGVGGLILGGGFGWLSGRYGLCIDNLLEVEVVLGDGRIVTANAASEPDLFWAMRGAGHSFGVATRFTSRLYPQGDVWGGLLEFPHERLAEVTAVVNEMINKGDEDQCLMVTSTYATSKDSKSTVRAKVTTVCCFYNGTAEKAEGEIFKPLLSLRPHTSTAKQLPYAEMNRVLDEFLTYGSMMRQGGTNVLPHLTAQVLCGAANKLFDWVDEMLRKSDGRVDARDSIIAWELIPFDKTASVPGSATATGNRGRYYNVGMVVCNSSSDASQDDEMRAFKRELSASIATAGFKADMVGHGGVGHYVNYAEEQLSAEAGFGGNAKRLRELKTRYDPDNRFRKLWRLDTNV

SEQ ID NO: 7542 - protein, 294 aa, Listeria innocua Clip11262
MTKTLQDRMILPGNETIPYIGLGVFQVTEQEFIAGAVEKAIEVGYRLFDTAAVYNNEAIVGQAILDSAVPREELFISSKVWNGDLGYDETLFAFERTLRNLKLDYLDLYLIHWPVAGKYRDSWRAMERLHDEKLIKSIGVANFKQHHLSDLLVAANEKPVLNQVETHPLLPQNDLRKYLAEQNIAHAAWSPLAKGILMQNPVITEIAKKHQASVDQVILQWHLNRNTIIFPKSITSSRIEENSRLSYFQLDASDMEKIDRLETGKRVGPDPDDLEYFLSSIERERAYLTGGEKE

SEQ ID NO: 7543 - protein, 144 aa, Methylococcus capsulatus str. Bath
MTIGRNEPWSLLNQLQRELERSFEGRQGSDSAATAEWTPAVDIKEEADRYVLLADLPGVSTDNIDVSMEQGVLTLRGERNTEARTERSGYKRIERVYGSFYRRFSLPDTADADGISARYNNGVLEIVIPKKAAIQPRRIVVSAD

SEQ ID NO: 7544 - protein, 96 aa, Brassica napus
ESFHWRRKTIEPLTKCGLMKTSDEEIRHFFKNSSVQVIICPRSGGKGHHSFVKKTEVGTIYTHHQKTLIVDAEAAQGRRKIIAFVGGLDICKGRFD

SEQ ID NO: 7545 - protein, 207 aa, Zea mays
  misc_feature (161)..(161): Xaa can be any naturally occurring amino acid
MTKAATLYGSKTQSDALRPGPLRPANIIRNKFPTYKNGSNGIVIKLADGPEIPPLKEIVAKETADLLDRRQRLSVRELAMKFEKGLSTATLLSNEVKWRQVALMERDILLKNLKSVLESLRGQVTGKTKDEIEESISMVEILTVQLSKREAELVQQKEEVXKLAKSLKQMCFTLLYNLCKHVLVISGIKIYLLQIFQSSPCHHSVTK

SEQ ID NO: 7546 - protein, 266 aa, Photorhabdus luminescens
MNKKILILPGDGIGQEVCDAALPVFQALNLPVTLEIGDIGWTCWERDGDPVPASTWEKIASVDAVLLGAITSKGKEEAQQALPPHLRVKTRNYVSPVIQLRQRLGLYANIRPVRYVEGDRKPFRCCVIRENTEGLYAGFDFKGIPSTATTWLQHPNIDKYGPEEAAWTVRLQTRFGLERLFITAFEYAKENNYSRVTFADKPNVMRESGHFAKGIFDTVAAHYPEIKADIHNIDAVALWMVKKPHEFGVIVSENMFVIFCLIWQRA

SEQ ID NO: 7547 - protein, 171 aa, Glycine max
MAESDNESGGHTGNASGSNEFSGCREQDRFLPIANVSRIMKKALPANAKISKEAKETVQECVSEFISFITGEASDKCQKEKRKTINGDDLLWAMTTLGFEEYVEPLKVYLHKYRELEGEKTAMMGRPHERDEGYGHATPMMIMMGHQQQQHQGHVYGSGTTTGSASSARTR

SEQ ID NO: 7548 - protein, 350 aa, Agrobacterium tumefaciens str. C58
MKALVLEEKGKLSLRDFDIPGGAGSGELGPKDVRIRTHTVGICGSDVHYYTHGKIGHFVVNAPMVLGHEASGTVIETGSDVTHLKIGDRVCMEPGIPDPTSRASKLGIYNVDPAVRFWATPPIHGCLTPEVIHPAAFTYKLPDNVSFAEGAMVEPFAIGMQAALRARIQPGDIAVVTGAGPIGMMVALAALAGGCAKVIVADLAQPKLDIIAAYDGIETINIRERNLAEAVSAATDGWGCDIVFECSGAAPAILGMAKLARPGGAIVLVGMPVDPVPVDIVGLQAKELRVETVFRYANVYDRAVALIASGKVDLKPLISATIPFEDSIAGFDRAVEARETDVKLQIVMPQ

SEQ ID NO: 7549 - protein, 252 aa, Ustilago maydis 521
MFVNGGGKGEIPRKVDIDPYFDNTKLVFGEAGTKVPYTPQNTWKDPNGDRKDYLDRTKGLTTMQKHVAFFDGDCDGVIWPTDTFFAFLSLGFGFLLSAMAVAIIHGPFSYPTLPRKDNKLLDWLPDPFMRIYVANIHRCKHGSDSESYDRRGHFRQSQFETILDDYSTRHGKDALSFSDAMAMIRERRDLMDLFGCFAFMFEWGSTYMLLWPADGYMRKDDILGIFDGSIFVVLAHRHRNGQGGGAFKPKRA

SEQ ID NO: 7550 - protein, 509 aa, Brassica napus
  misc_feature (171)..(171): Xaa can be any naturally occurring amino acid
  misc_feature (221)..(221): Xaa can be any naturally occurring amino acid
MGSSCEEYEFLSEIGLSSSHNLGNYVGGKWLGNGPLVSTLNPANNQPIAQVVEASLEDYETGLKACEEAAKAWMQVPAPKRGDIVRQIGDALRSKLDYLGRLLSLEMGKILAEGIGEVQEVIDMCDFAVGLSRQLNGSVIPSERPDHMMLEMWNPLGIVGVITAFVDPRVXGWNACIALVCGNCVVWKGAPTTPLITIAMTKLVAEVLEKNHLPGAIFTAXMCGGAEIGEAIAKDTRIPLVSFTGSSKVGLTVQQTVSARSGKTLLELSGNNAIIVMDDADIQLAARSVLFAAVGTAGQRCTTCRRLLLHESVYDKVLEQLLTSYKQVKIGDPLEKGTLLGPLHTPESKKNFEKGIEVIKSQGGKVLTGGKAVEGEGNFVEPTIIEISSDAAVVKEELFAPVLYALKFKTFEEAVAINNSVPQGLSSSIFTRSPENIFKWIGPMGSDCGIVNVNIPTNGAEIGGAFGGEKATGGGREAGSDSWKQYMRRSTCTINYGNELPLAQGINFG

SEQ ID NO: 7551 - protein, 486 aa, Delftia tsuruhatensis
MKEFLNFINGEYVRNASGKTFQDINPVNGSVIGNIYEAGQAEVDAAVAAARAALKGDWGRLSVAERCKLLDAVAGEINRRFDDFLQAEIADTGKPHHLASHVDIPRGAANFQIFIDTIKSTATESFNMRTPDGKTALSYGVRVPRGVIAVVCPWNLPLLLMTWKVGPALACGNTVVVKPSEETPATATLLGEVMNQVGMPKGVYNVVHGFGPGSAGEFLTQHPGVNGITFTGETRTGTAIMKAAADGVRPVSLEMGGKNAAVVFADCDFQVTIDTLTRSCFENAGQVCLGTERVYVERPIFEKVVAALKERAEAMKPGLPFDHDTKIGPLISKKHQAKVLGLYKTAKDEGATIVTGGGVPDMPDALKDGSWVQPTIWTGLPETATVVTEEIFGPCCHISPFDSEEEVLGKVNANRYGLATAIFTQDIARANRLAHQIEVGLCWINAWFLRDLRTPFGGSKQSGIGREGGVHSLEFYTELRNVMVKF

SEQ ID NO: 7552 - protein, 150 aa, Caulobacter crescentus CB15
MKRLRALLIAAAAVALTAGASDPSERLPDQAQEARARTLFKEVRCLVCQNESIDDSEAQLAGDLRQIVREQVKAGSSDAQIRDFLVERYGEFVLLKPRFSMGNAVLWLAPVVVLLVGGVLMAGLLRRRETPEPALSQDEEARVRRLLEGD

SEQ ID NO: 7553 - protein, 481 aa, Microbulbifer degradans 2-40
MKIHNMKNFINGEYIASQADGAIDVLSPSTGKKVGDIPAGCVEDAQLALDTANAAQKLWAKKTNRERAKILRVFAANIRAAADDLAKLLVSEQGKLLSVAQMEVEATATFIEYACDNALTIEGDILPSDNPNEKIYIHKVPRGVVVAITAWNFPLALAGRKIGPALVTGNAIVVKPTQETPLATLALGELANAAGIPAGVLNIVNGRGSVVGQHLCESPITRLITMTGSTPAGQRIYRTSADHLTPVMLELGGKAPFIVMEDANLESAVEAAFTTRYANCGQVCTCAERLYVHESIYPAFMDKLLEKVKAIKVGDPMAADTDMGPKVNQSEIENIDALVKKGIEQGATLLHGGKRAHVPGFEGGNWYEPTLLGDVQQSNILVHEETFGPILPVVKINSIEQAIEYTNDSEYGLSTYLFTQNLKYIHQYIAEVEAGEVYVNRGIGEQHQGFHNGWKLSGAGGEDGRYGLEQYLEKKTVYFAE

SEQ ID NO: 7554 - protein, 201 aa, Klebsiella aerogenes
MAQHDENVVWHAHPVTQQQREQHHGHRGVVLWFTGLSGSGKSTVAGALEEALHERGVSTYLLDGDNVRHGLCSDLGFSDEDRKENIRRVGEVARLMVDAGLVVLTAFISPHRAERQMVRERLGEGRFIEVFVDTPLAICEARDPKGLYKKARAGELRNFTGIDSVYEAPEKAEIHLDGEQLVTNLVHQLLDLLQQSDIIRS

SEQ ID NO: 7555 - protein, 236 aa, Oryza sativa (japonica cultivar-group)
MGMGTFTTDESDKHEESYLSLGLTVSQSKKNNTEYPKVLLLLAAYLDRSVQKNEDLLDSNKIKDSSTIFHGHRAPDLSIKLYAERIFKYSECSPSCFVLALIYMERYLQQPHVYMTSLSVHRLLITSVVVAAKFTDDAFFNNAFYARVGGISTVEMNRLELDLLFNLDFRLKVDLETFGSYCLQLEKETMVLVIDRPIQQVHGVNSTKDLSRNSSIDESCKSELMRYSSQALQGCS

SEQ ID NO: 7556 - protein, 168 aa, Magnaporthe grisea 70-15
MSEGQLQKVNLQSNDGQSIEVDRAVACRSRLIKDLIGDLGEEMVASTPIPIPNVSEAVLRKVLEWCEHHRNDPVQTSDEDSESRKKTTDIDEWDQKFMQVDQEMLFEIILASNYLDIKPLLDVGCKTVANMIKGKSPEEIRKTFNITNDFTPEEEEQIRRENEWAEDR

SEQ ID NO: 7557 - protein, 475 aa, Synechocystis sp. PCC 6803
MYEKLQPPSVGSKITFVAGKPVVPNDPIIPYIRGDGTGVDIWPATELVINAAIAKAYGGREEINWFKVYAGDEACELYGTYQIFPEDTLTAIKEYGVAIKGPLTTPVGGGIRSLNVALRQIFDLYTCVRPCRYYPGTPSPHKTPEKLDIIVYRENTEDIYLGIEWAEGTEGAKKLIAYLNDELIPTTPALGKKQIRLDSGIGIKPISKTGSQRLVRRAILHAKRLPKAKQMVTLVHKGNIMKFTEGPFRDWGYELATTEFRAECVTERESWICGNKESNPDLTIEANAHMIDPGYDTLTEEKQAVIKQEVEQVLNSIWESHGNGQWKEKVMVNDRIADSIFQQIQTRPDEYSILATMNLNGDYLSDAAAAVVGGLGMGPGANIGDSAAIFEATHGTAPKHAGLDRINPGSVILSGVMMLEFMGWQEAADLIKKGIGAAIANREVTYDLARLMEPKVDKPLKCSEFAQAIVSHFDD

SEQ ID NO: 7558 - protein, 72 aa, Triticum aestivum
  misc_feature (43)..(43): Xaa can be any naturally occurring amino acid
MASRSCTFLEILLAIILPPLGVFLHYGCCSMEFCICLLLTILXGYIPGIIYAVYVLVALGSEERDRDYDTLA

SEQ ID NO: 7559 - protein, 426 aa, Glycine max
MPSPSRYGFGISQITLRLMMLLFLFFARAASGLNLTALLSTVPELSQFTSLLASATPLAADLSDRSSLSILAVPNAYLAADDHLSRHHLSPAALADVLRYHVLLQFLSWSDLRALPPSGKLITTLLQTTGRATDNFGSVNLTRDSQSGVISIRSPAPYSPSNATILSLIKTLPYNVTIFAVNSLLIPYGLDLMASETRPNIVLNITNALVNGHNFNVAASMLAASGVVQEFEADEGGAGITLFVPVDDAFADLPPSVALQSLPADKKAVVLKFHVLHSYYPLGSLESVVNPFQPTLATEAMGAGSFTLNISRVNGSVAINTGIVQASITQTVFDQNPVAIFGVSKVLLPREIFGRNPIVSAKPLDNAPPPDDDALSPENSPGFDGQPSHLSSPPGFREDVRSHAGGSGGSLNFVVLLCCIGLYFVV

SEQ ID NO: 7560 - protein, 236 aa, Candida albicans SC5314
MRSIKSVVVGDGGVGKTCLLISYTTNTFPNDYIPTVFDNYSASVMIDGEPIKLGLWDTAGQSEYDRLRPLSYPQTEIFLCCFSVISPDSFQNVKSKWIPEILHHCPKDILILLIGTKVDLRDDLHVLDELTARNLSPVTFDQGNKLAREIGAIKYMECSAATQVGVKEIFDYAIRAVLDPPNANKGEYVTNDSVPGMGVNNSSGSKKHNEKNGSGTATAGTGKKRKIKRAKKCTIL

SEQ ID NO: 7561 - protein, 469 aa, Streptococcus pyogenes SSI-1
MVSVMWFRRDLRIDDQKALAHAIASQSPTLCVFQFNNEQLNLLHSRNQSSFITSVLAFRKLLKCEGIDLYLMYGDLMTCFEQLLTQLKDWTDVYFNYDESGYGRLRDQKAAQFFKKNGIAVHTYQDHYLHGSQEIINQSGQPYKVFTPYYRIWQNYPKETPIKVELSQGRWLNLETPDDVLRTVESFKDEKYQDVATFDEASKQLNRFIQDQLAAYHANRDFPAQLGTSRLSPFLRIGAIGIRTVYHAVRQAPNSLGQATFLKELAWRDFYNMVYVAYPDQKTQPIQKAFSQIEWVNNPDWFQLWKEGKTGYPIVDAAMLQLQKTGWMHNRLRMIVASFLTKDLLCDWRLGEQYFQQQLIDYDAASNIGGWQWAASTGTDAVPYFRIFNPVTQGKRFDPKGEFIKAYLPQLEHVPEKYLHEPWKMPKYLQESVSCIIGTDYPQPIVDHAKQREQAIAKYEWAKEKAKIE

SEQ ID NO: 7562 - protein, 343 aa, Candida albicans SC5314
MSTAAVATKPSVTSKPATKQVSNYTKEKKVGEGTYAVVYLGKQISTKRQIAIKEIKTGLFKDGLDMSALREVKYLQELKHPNVIELVDVFSATNNLNLVLEFLPCDLEVLIKDKSIVFKSADIKSWLLMTLRGIHHCHRNFILHRDLKPNNLLLAPDGQLKIADFGLARALVNPNEDLSSNVVTRWYRAPELLFGARHYTGAVDIWSIGIIFAELMLRIPYLPGKDDVDQLDVTFRAYGTPTEQIWPNVSSLPMYNALHVYPPPSRQELRNRFSAATEKALDLLISMTQLDPSRRCDSTLALLHDYFTESPRPTDPKKLPKKSSPEKRENEDEQNNGSKRRHV

SEQ ID NO: 7563 - protein, 276 aa, Gibberella zeae PH-1
MASKTKYQTAPQSDPDDDYTHAPPAYAEGSAARDETQGLFGAPRDSEDNLPDDFKFGGSVAEATVDIRNQFVRKVYTILTVQLLATAGVSSLTFFSTGYKDWIQSHPGVVWASLFGSMIFMGLTYWKRKSYPTNLLFLSLFTLAEAYTISVIVSFYKTSIVLNAVVLTAGIFVFLTLFACQTKYDFTSWMPYLFGALWGLVIFGFMAMFFPYSSTGELIYGGLAALIFSGYILVDTQLVLRHHHVEEEIAAAISLYLDIINLFLAILRILNSQSNN

SEQ ID NO: 7564 - protein, 346 aa, Bacillus subtilis subsp. subtilis str. 168
MKAARWHNQKDIRIEHIEEPKTEPGKVKIKVKWCGICGSDLHEYLGGPIFIPVDKPHPLTNETAPVTMGHEFSGEVVEVGEGVENYKVGDRVVVEPIFATHGHQGAYNLDEQMGFLGLAGGGGGFSEYVSVDEELLFKLPDELSYEQGALVEPSAVALYAVRSSKLKAGDKAAVFGCGPIGLLVIEALKAAGATDIYAVELSPERQQKAEELGAIIVDPSKTDDVVAEIAERTGGGVDVAFEVTGVPVVLRQAIQSTTIAGETVIVSIWEKGAEIHPNDIVIKERTVKGIIGYRDIFPAVLSLMKEGYFSADKLVTKKIVLDDLIEEGFGALIKEKSQVKILVRPN

SEQ ID NO: 7565 - protein, 236 aa, Methanococcoides burtonii DSM 6242
MEGIFMKERNANASSSEKEAAGNAAASLVEDGMIIGLGTGSTTAFAIAEVGRRVREEGLNVLAVVTSYQAEMLAIEAGVPLTSLAEHPVLDLAIDGADQVDAKLNVIKGGGAAHTHEKVVAHSAKRFIVVVDESKISEELDHFVPIEVLPYARELAKKQFIELGGKPQIRLASRKDGPVISDNGNVIIDVEFGVIEDAAELSQKLSTCVGVVEHGIFLNTDEVYVGMKDGSVKIIN

SEQ ID NO: 7566 - protein, 276 aa, Arabidopsis thaliana
MKGEYREQKSNEMFSKLPHHQQQQQQQQQQHSLTSHFHLSSTVTPTVDDSSIEVVRRPRGRPPGSKNKPKPPVFVTRDTDPPMSPYILEVPSGNDVVEAINRFCRRKSIGVCVLSGSGSVANVTLRQPSPAALGSTITFHGKFDLLSVSATFLPPPPRTSLSPPVSNFFTVSLAGPQGQIIGGFVAGPLISAGTVYVIAASFNNPSYHRLPAEEEQKHSAGTGEREGQSPPVSGGGEESGQMAGSGGESCGVSMYSCHMGGSDVIWAPTARAPPPY

SEQ ID NO: 7567 - protein, 344 aa, Arabidopsis thaliana
MQPKTEFVKFLRKGAYGSVDLVKYIKRDDNALPLYAAVKTAECEDYNSLEREIQILSKLEGCRRIVQCYGNYTLEEDFDVGGFRVYKMVMEYAAAGSLFSFMDSYKDRKLPETMIKDFTRMILQGLVSVHRLGYVHCDLKPDNLLVFPCRQSYELKISDFGSSRKVGEYSDCWDVDLPFVGTPVYMSPESVRSGVAEKALDLWSLGCIVLEMYTGVIPWSEVEFEDLAPALSKGKAPEIPKSLPCDARKFLETCFSRNPKERGSASDLLSHQFLRGEVVSGFSLPPLKLKIKLAPEKPTNVSKKPLKLKIIPPKPPQFKKGGIKPLKLKIMPLKPPASSFVSVQ

SEQ ID NO: 7568 - protein, 308 aa, Sorghum bicolor
MEINIVDKYEKLEKVGEGTYGKVYKAQDKATGQLVALKKTRLEMDEEGIPPTALREISLLNLLSHSIYVVRLLAVEQAAKNGKPVLYLVFEFLDTDLKKYLDVYRRGPAARPLPATLIKNFLYQLCKGVAHCHGHGVLHRDLKPQNLLVDKDKGILKIADLGLGRAFTVPMKSYTHEIVTLWYRAPEVLLGATHYSTGVDMWSVGCIFAEMARRQALFPGDSELQQLLHIFRLLGTPSEEQWPGVSELRDWHEFPQWKPQSLARVVPTLEPEGVDLLSKMLQLDPSNRISAIAAMEHPYFDSLDKSQF

SEQ ID NO: 7569 - protein, 245 aa, Eucalyptus globulus
MGRGRVQLKRIENKINRQVTFSKRRCGLLKKAHEISVLCDADVALIVFSTKGKLFEYATDCCMERILERYERYSYAESQVLTNNAETNGNWTLEHAKLKARMEILQKNQKNLMGEELDSLSLKELQNLEHQLDTALKNIRSRKIQLMCESISELQRKDKALQEQNNMLAKKVKEKEKALAQQTQWDNPQDDGLTSSSVILSQSLQPLNIGGPYHPSGIEEGAALGPPQHRNATLFPSWMLSHLQE

SEQ ID NO: 7570 - protein, 178 aa, Clostridium perfringens str. 13
MLYDFKVKDIEGNEVSLGEYKGKVLLIVNTATGCGFTPQYEGLEVLYKKYHDKGFEILDFPCNQFFEQAPGSNEEIVGFCKLNYGTTFKTFAKVEVNGENACELYKFLKKEAPMAKEDETSLGFYDKLKGLGFTTEGEEIKWNFTKFLIDKNGEVVARFAPTFEPEKLDELIEELLEE

SEQ ID NO: 7571 - protein, 496 aa, Corynebacterium glutamicum ATCC 13032
MVKYPQSTLGDLVTATFAGIDATKHLIGGQWVEGNSDRISTNINPYDDSVIAESKQASIADVDAAYEAAKKAQAEWAATPAAERSAIIYRAAELLEEHREEIVEWLIKESGSTRSKANLEITLAGNITKESASFPGRVHGRISPSNTPGKENRVYRVAKGVVGVISPWNFPLNLSIRSVAPALAVGNAVVIKPASDTPVTGGVIPARIFEEAGVPAGVISTVAGAGSEIGDHFVTHAVPKLISFTGSTPVGRRVGELAINGGPMKTVALELGGNAPFVVLADADIDAAAQAAAVGAFLHQGQICMSINRVIVDAAVHDEFLEKFVEAVKNIPTGDPSAEGTLVGPVINDSQLSGLKEKIELAKKEGATVQVEGPIEGRLVHPHVFSDVTSDMEIAREEIFGPLISVLKADDEAHAAELANASDFGLSAAVWSKDIDRAAQFALQIDSGMVHINDLTVNDEPHVMFGGSKNSGLGRFNGDWAIEEFTTDRWIGIKRS

SEQ ID NO: 7572 - protein, 157 aa, Lactococcus lactis
MNFYDFSAVKMNGETVSMSDYKGKVVIVVNTASKCGFTPQFEGLEKLYETYKDQGLEILGFPCNQFANQDAGENTEINEFCQLNYGVTFTMFQKIKVNGKEAHPLYQFLKKEAKGALSGTIKWNFTKFLIDRDGQVIERFAPKTEPEEMEEEIKKLL

SEQ ID NO: 7573 - protein, 443 aa, Zea mays
  misc_feature (136)..(136): Xaa can be any naturally occurring amino acid
MEDAMAADGKSVLQGRYELGRVLGHGNFGRVHAARDLRTGRSVAVKVVAKDKLERAGMAEQIKREIAVMKMVSHPNIVELHEVMATRSKIYLALELVRGGELFSRIARAGRVREDVARCYFRQLVAAVDFCHGRGXFHRDLKLENLLLDEVGNLKVADFGLSALAGHARSDGLLHTACGTPSYVAPEVLGGKGYDGAKADLWSCGVILYVLLVGSLPFHEDNLMVMYRKMQRGEFLCPPWVSADARKLIGELLDPDPSTRITVARLVETPWYRKPLPVLPPLNLKEPTPDARRATSDKEEPEVLNAFHLISFSEGFDLSPLFDQGRGGGVGRSSAGGIRFVTREAASSVVSRLESLVTGRGANMRVTKSGSRGVRLEAVSRGRSGARLAVAAEIFSVAPSVLLVDVKKDGGDTMEYRSFCSEELRPALKDIVWASSQDTPGAA

SEQ ID NO: 7574 - protein, 122 aa, Psilotum nudum
MIQPQSYLKVTDNSGARKLMCIRILGTNNCKYANTGDTIIAVVKESVPNMPVKKSEIVRAVIVRTRKEMKRDNGIIIRFDDNAAVVINREGNLKGTRVHGPVDRELWKKNFTKIVSLAPEAF

SEQ ID NO: 7575 - protein, 319 aa, Phytophthora infestans
MDSRGEMKALDAQIDRLRRAENLTETEIYELCQKAKEILAGESNVQPVKCPVTVCGDIHGQFYDLLELFRIGGACPDTNYLFMGDYVDRGYYSLESVALLVALKVRHRERITILRGNHESRQITQVYGFYDECLRKYGNANVWKYFTDLFDHLPMTALIENRVFCMHGGLSPSIDTLDHARALDRVQEVPHEGPMCDLVWSDPDDRCGWGISPRGAGYTFGQDITEQFKRSNGLTFIARAHQLVMEGYQWTHNRGVVTIFSAPNYCYRCGNQAALMEIDEVMADRNGDKVYETCKFIQFDPAPRDSNFNEKKRTPDYFL

SEQ ID NO: 7576 - protein, 498 aa, Bordetella bronchiseptica RB50
MTLHDSAYWRAQAAALAPEGRAYIDGAYCDAADGATFAAHSPIDGRKLADVAACGAADVDRAVAAARRAFEAGVWSGLAPRERKHRLLRLAALITKHQEELALLETLDMGKPIRDALAFDLPETARCYAWYGEAIDKRYDEIAPTGADALATITREPLGVVAAVVPWNYPLMMAAWKVAPALAVGNSVILKPAEQASLSALRLAALAEQAGIPPGVFSVVPGLGAQAGQALGLHPDVDCIAFTGSTATGKRFMTYSGQSNLKRVWLECGGKSPHIVFADCPDLDRAAQVAALAIFSNQGEVCIAGSRLYVQHGIYDAFMEKVAAFAATLRPGNPLDPDSALGAMVDERQTQAVMARIAAGAQEGARLRLGGRQVLTNSGGYYIEPTIFDCPGQDNSLVREEIFGPVLAAQGFADEDEAVALANDSIYGLGAGLWTADLGRAHRLSRRLRAGLVWVNCYADGDITVPFGGVKQSGFGRDKSLHAMDKYSDLKTTWISLR

SEQ ID NO: 7577 - protein, 457 aa, Staphylococcus aureus subsp. aureus MRSA252
MAIAVLLNRMFRMEHNPLFEYIYQQKEDIDACYFIIPEEDMSSASDLKAQFYRGTLQRFYQSLHAEKLTPYVMSYDDIISFCKENNISEVVIAGDIMSYHLEEYDILHQRSLFNEARIAVTLIRGNHYFKASKTMNQQGEPYKVFTSFSKKWRPYLRHRDVYHYDLKSFEDFVIASPDDLVFDDIAFGSSQIIEQNKWQHFLDQDIQNYESGRDYLPEVLTSQLSVALAYGLLDIIEIFNDLLARYDEDEANYEAFIRELIFREFYYVLMTQYPETSYQAFKSKYRQIKWSQNEADFNAWCEGQTGFPIIDAAIMELTQTGFMHNRMRMVVSQFLTKDLFIDWTWGEKFFRKHLIDYDAASNIHGWQWSASTGTDAVPYFRMFNPIRQSERFDPKALYIKTYLPIFNQIDAKYLHDTQRNESNLFELGIELGRHYPRQMVDHQEKRTQVLAAFKALD

SEQ ID NO: 7578 - protein, 418 aa, Colletotrichum lagenarium
MGDLQGRKVFKVFNQDFIVDERYTVTKELGQGAYGIVCAAVNNQTQEGVAIKKVTNVFSKKILAKRALREIKLLQHFRGHRNITCLYDMDIPRPDNFNETYLYEELMECDLAAIIRSGQPLTDAHFQSFIYQILCGLKYIHSANVLHRDLKPGNLLVNADCELKICDFGLARGFSVDPEENAGYMTEYVATRWYRAPEIMLSFQSYTKAIDVWSVGCILAELLGGRPFFKGRDYVDQLNQILHILGTPNEETLSRIGSPRAQEYVRNLPFMPKKPFPQLFAQANPDALDLLDRMLAFDPSSRISVEQALEHPYLHIWHDASDEPDCPTTFNFDFEVVEDVGDMRKMILEEVYRFRQLVRTVPGSTQAGAQAAGQAGAGQVPIPSGNPGWTSSDPRPQEYVGQGGGLEADLAGGLDHRR

SEQ ID NO: 7579 - protein, 447 aa, Leptospira interrogans serovar Copenhageni str. Fiocruz L1-130
MKLSRSEFIKLGILTAAGISGLPGIKLSAQGTSSRKTVIVMGGGISGLYASYLLSKTGIKVQLIEATDRLGGRIRTVTDVSGNFLDLGAEWIQAEHRTAKSLIRELGLKTTDFEVQSDLFFGSYRKFGTWDISPKSQEILNKLVQMNSKINSTQQQELDRISFYNFLNYQGMSLEDLNILNFKYSLYYGDSLRSLSAQKVLSDLVNFPKYNTRVEGGMETLTRALVSSLENTEIIFSDPVVSVSQGEGKVIVTTVSGKKIEGNACISTLPANQLTTIQWDPELDKEKKLSALRIRYSRIYKTFLMLREAPWTRGSFSAYSDSVAGFIYDAGTKINSEDKILGMISTGDRYDVLASSTDAMKVEYIRLALESLGQGRELQVLRIQSSETSQSKFIPTGIATFPPGSYGSIISLLKPMDRIFFAGEHTAELNGTVEGALASAIRAVNQV

SEQ ID NO: 7580 - protein, 248 aa, Gibberella zeae PH-1
MSDSPQSPPKEVDQGAPSPDDEAQMNEQQDPQSANAAGYEFEGVKEQDRWLPIANARSAVHIWIPLMSCDSSSKSPKASRASKADRADELDANIRNFAPVARIMKNALPDNAKIAKEAKECMQECVSEFISFITSEASEKCQQEKRKTVNGEDILFAMTSLGFENYAEALKVYLSKYREQQNQSNRERVNMDNGQWGSGTMMGDAKAESGAVGDFGHDGNSVESGADPNYMYGSQPGHNGNAPEARER

SEQ ID NO: 7581 - protein, 359 aa, Lycopersicon esculentum
MVFPLDSQLQNPISALLDGLYCEEDRFLDDDLGEWSSLDVGNENVKKTLPLLECDMFWEHDELATLLSKENEFHLGFQSLISDGSLMGARKEALDWMLRVIAYYGFTATTAVLAVNYFDRFVSGWCFQKDKPWMSQLAAVACLSIAAKVEETQVPLLLDLQVADSRFVFEAKTIQRMELLVLSTLKWKMNLVTPLSFIDHIMRRFGFMSNLHMDFLKKCERLILDIITDSRLLHYPPSVIATASMFYVINDIEPSNAMEYQNQLMSVLKVRKDIFEECHDLILELMDTACYKLCQSLKRKHHSVPGSPSGVIDAYFSSESSNESWSVASSISSSPEPQYKRNKTQDQRMTLAPLGSNLH

SEQ ID NO: 7582 - protein, 283 aa, Enterococcus faecium
MNSLTSTYRLSNGYEIPVVGFGTWQTPDGDVAVSSVKEALAAGYRHIDTAQGYKNEESVGQAIKESGIPREEIFLTTKLWNANHSYELVMSSFEESLKKLQTDYLDLFLIHWPNPVAFRDNWEQANADTWRAFEELYEAGKIKAIGVSNFLPHHLDTLAKTAKIMPMVNQVFLAPGELQTTVVEYAKKHDMILEAYSPLGTGKIFDVPEMKQIAEAHDKTIAQVALRWSLQHEFLPLPKSVTPSRIKENTELFDFELTEEEMKQIDQLDGVVGKAKDPDTTQF

SEQ ID NO: 7583 - protein, 506 aa, Gibberella zeae PH-1
MSRPRRRGHKDGGYGGQATTLSSVVNLLNTSFQVVGAGTLAMPSVMSHMGIMLGVILIIWSGLTAAFGLYLQSRCARYLERGTASFFALSQITYPNAAVIFDAAIAIKCFGVGVSYMIIIGDLMPGVVLGFLSNANSAPYLVDRNFWITAFMLLIIPLSFLRRLDSLKYTSIVALVSIGYLIVLVIYHFASDKHADPGSIRVIQWGGAIETLSALPVVVFAYTCHQNMFSILNELKDNSPRSVVGVIGTSIGSASSIYIVVAITGYLTFGNAVVGNIVSMYPTGAASTIGKAAIVVLVTFSVPLQVHPCRASLDAVLKWRPNRNSSNNGRTATPLLPASPPGDHGSTAPMSDLRFAVITTFILTFAYMTALSVTSLDRVLAFVGSTGSTSISFILPGLFYYKISNPDSTYHQRLVKEDDDIDEDSSTSDVEESAALAQSTTSVRSGVSVVSNASTRSNRNSWRWRRKWRWDLEHIEHHHLRRMALALAIYGAVVMSTWYWVALQYK

SEQ ID NO: 7584 - protein, 196 aa, Glycine max
  misc_feature (154)..(154): Xaa can be any naturally occurring amino acid
MVLEATMICIDNSEWMRNGDYSPSRFQAQADAANLICGAKTQSNPENTVGVLTMAGKGVRVLVTPTSDLGKILACMHGLEIGGEMNLAAGIQVAQLALKHRQNKKQQQRIIVFAGGPVNHEKKMLEMIGRKLKKNSVALDVVNFGEEDEGMTCXLEALLSAVINNDTSLIVHVPSCPNALSDVLISTFIFTGEGWG

SEQ ID NO: 7585 - protein, 341 aa, Streptomyces avermitilis MA-4680
MRIGVLTAGGDCPGLNAVIRSVVHRAVTMYGDEVIGFEDGYAGLLDGRYRALDLNAVSGILARGGTILGSSRLQRDRLREACENAQDMAREFGIDALIPIGGEGTLTAARMLSDAGLPVVGVPKTIDNDISATDRTFGFDTAVGVATEAMDRLKTTAESHQRVMVVEVMGRHAGWIALESGMAAGAHGICLPERPFDPAHLVKMVEERFARGKKFAVLCVAEGAHPVVGSMDYSHGAIDQFGHERFQGIGTALAAELEHRLGKEAKPVILGHIQRGGTPTAYDRVLATRFGWHAVEAAHRGDFGRMTALRGTDVQMVPLAEAVTELKTVPKDRMDEAESVF

SEQ ID NO: 7586 - protein, 164 aa, Triticum aestivum
  misc_feature (101)..(102): Xaa can be any naturally occurring amino acid
GLNALAGRLKYDDPLEAAQLHGGCGAWGIIFTALFAKKQYVEEIYGAGRPYGLFLGGGGRLLAAHIVQILVIAGFVSCTMGPLFFALKKLGLLRISAEDEXXGMDLTRHGGFAYVYHDDERARQVGWRASCSSRGHTRVEAGQAGGPTRPALTKSNPGVRLQEK

SEQ ID NO: 7587 - protein, 496 aa, Pseudomonas aeruginosa UCBPP-PA14
MFELSDWQRRAATQRFIDQALIGGRQRPAASGATFDAIDPASNRLLARVAACDAADVDAAVAAARRAFDEGPWARLAPVERKRVLLRLAELMLAHREELALLDSLNMGKPVMDAWNIDVPGAAHVFAWYAESLDKLYDQVAPTAQQALATITRVPLGVIGAVVPWNFPLDMAAWKLAPALAAGNSVVLKPAEQSPFSALRLAELALEAGVPEGVLNVVPGLGEQAGKALGLHPEVDALVFTGSTEVGKYFMQYSAQSNLKQVWLECGGKSPNLVFADCRDLDLAAEKAAFGIFFNQGEVCSANSRLLVERSIHDEFVERLLAKARDWQPGDPLDPASRAGAIVDRRQTAGILAAIERAQGEGATLLGGGRQLTINGSDNFIEPTLFGDVRPDMQLAREEIFGPVLAISAFDSEDEAIRLANDSRYGLAASLWSDDLHRAHRVARRLNAGTVSVNTVDALDVAVPFGGGKQSGFGRDLSLHSFDKYTQLKTTWFQLR

SEQ ID NO: 7588 - protein, 285 aa, Salmonella enterica subsp. enterica serovar Typhi Ty2
MKSVKNVTFCGQVTLPAIGQGTWYMGERADQRQREVSALRAGLDLGLRLIDTAEMYADGGAEKVVGEALAGRRDEAFLVSKVYPWNAGGQKIVAACEESLRRLKTDYLDLYLLHWAGGFSFEETVEGMERLIAQGKIRRWGVSNLDYDDMQALWRIPGGQQCATNQVLYHLASRGIEYDLLPWCQQQRMPVMAYSPLAQAGRLRSGLLNHPVVNEIAQAHNATAAQILLTWVIAHPGVMAIPKAGSTEHVKQNAAALEITLSANELALLDNAWPAPKGKTALDMV

SEQ ID NO: 7589 - protein, 201 aa, Helicobacter hepaticus ATCC 51449
MQNQSIQSKQTSQQDNQQTSTMCSKQQGAVIWICGLAGAGKTTIAKEIFTLLEQKYSNVIFLDGDEFREIFGRSGFSKEERLEVARLIAKLCVFLSKSGLIVVCATISLFDEIYAFNRSHIARYFEVFVECSMEELLRRDKKALYSQALKGDIKDVIGIDLTYDTPKAHYVLQNNTADKLDSKVKELYNAVEKFLIQKGAK

SEQ ID NO: 7590 - protein, 214 aa, Saccharomyces cerevisiae
MSFNSPFFDFFDNINNEVDAFNRLLGEGGLRGYAPRRQLANTPAKDSTGKEVARPNNYAGALYDPRDETLDDWFDNDLSLFPSGFGFPRSVAVPVDILDHDNNYELKVVVPGVKSKKDIDIEYHQNKNQILVSGEIPSTLNEESKDKVKVKESSSGKFKRVITLPDYPGVDADNIKADYANGVLTLTVPKLKPQKDGKNHVKKIEVSSQESGGN

SEQ ID NO: 7591 - protein, 266 aa, Zea mays
  misc_feature (194)..(194): Xaa can be any naturally occurring amino acid
  misc_feature (238)..(238): Xaa can be any naturally occurring amino acid
  misc_feature (250)..(250): Xaa can be any naturally occurring amino acid
  misc_feature (257)..(257): Xaa can be any naturally occurring amino acid
PRGRPHEAAISLVHYFKLLVLLALARLTMHVPDEDVLLSLGALRLDGHFSFHDVSAMARDFGNQCSFLPAAVLHPGSVSDIAATVRHVFSLGEGSPLTVAARGHGHSLMGQSQAAQGIVVRMESLRGPRLQVNDAGVSPPSVDAPGGELWINVLRETLKHGLAPKSWTDYLHLTVGGTLSNAGVSGQAFRHGPXGRGDAVTCSPDDNADLFYAALGGLGQFGIITRARIALEPAPKMXRWIRVLYSDFEXFTEDQRXLIMAENSFD

SEQ ID NO: 7592 - protein, 323 aa, Candida albicans SC5314
MSSNSLEQLKATGTTIVTDTGEFEQIAKYKPQDATTNPSLILAATKNPEYASVIDVAIEYAKDKGSSPKEKAEIALDRLLIEFGKNILDIVPGRVSTEVDARLSFDKEATVKKALELIDLYKQQGIEKDRILIKIASTWEGIQAARELESKHGIHCNLTLLFSFAQAVACAEAGVTLISPFVGRILDWYKASTGEEYTAETDPGVQSVKAIYNYYKKYGYKTIVMGASFRNTGEIKALAGCDFLTISPKLLEQLYNSTEEVPKQLDAATAKDEDVEKVTYVDDESAFRFALNEDAMATEKLSQGIRQFGKDAVTLLTELESRF

SEQ ID NO: 7593 - protein, 162 aa, Pseudomonas putida KT2440
MAATMLNIPCVTLGGEHKTLGDFPGKVLLVVNTASQCGFTPQYKGLEQLWQAYRDRGLVVLGFPCNQFGKQEPGDAREIAQFCERNFGVSFPLFRKVEVNGPGAHPLFVELKQRAPGILGSQKIKWNFTKFLVDPASGQVKRYAPTTKPQALEADIERLLSR

SEQ ID NO: 7594 - protein, 340 aa, Zea mays
DGEVGNKLRGTAPPRGTRGRHHHGGRSHAHRREGGHRAANVSIAAVAAAKGGRFRHAAPAFATAPAATGSDAAPLVSASGGEVPPAAAQWAASWELDDWEFADCGDVAPAAVVAEREATAAAAKPRLVFAPPSREEAEEATTELRDAIGRAYFNESPVEVVKEQDKEFNKLATDAIIPSMPGHVVQAFTLLKSSTEAQSVVASLASDRNVWDAVLKNEKVMEFYKTHQTTPVQTFPEEAATAESPGKFEDATSENASNSELPTGSGASFADFVDNAKKKVMDVVHNITDFFRDLFNDSAEAQTGAGPSAEKGFSATEMAVGGSFMALTIAVILVVLFKRA

SEQ ID NO: 7595 - protein, 157 aa, Glycine max
  misc_feature (104)..(104): Xaa can be any naturally occurring amino acid
  misc_feature (139)..(139): Xaa can be any naturally occurring amino acid
GIRHEAGAGMVAPFTGLKSMAGFPTRKTNNDITSIASNGGRVQCMQVWPPVGKKKFETLSYLPDLDDAQLAKEVEYLLRKGWIPCLEFHLEHGFVFREHNRSPXYYHGRYWTMWKLPMCGRTVASQVVKELKEDKTECXSGFIRVIGCTTAPSAVFE

SEQ ID NO: 7596 - protein, 457 aa, Bordetella bronchiseptica RB50
MSKSPEQMTPYDQFNIEVPEDHFPVEGMSARAAQALVLSDEWTDTNPMLNMSSFVTTFAEPEAVRIAEKNMYKNYIDHDMYPQLFAMEQRMVRWLHQLWNGPKDAEPYGTATVGSSEACMLAGLAHKWNWRQRREREGKDATRPNMVTGGNVQIVWKKFLRYFDVEPRIVPLKPGQYCLTAEDLDKYVDENTIAVVAIAGQTFTGEDDDIQGIHDWLDAYEKKTGVSVPMHIDGASGGFVNPFLYPDYKWDFRLPRVQSINASGHKYGLTPPGLGWVIFRERKVFNEDLVFYVNYLGGEMPTATLNFSRNSFQVAVQYYQFLRLGFDGFKRVMQRTLDNAIALRQHLVDSGYFTIMNDTQRIPVVAVTLDPKVKKFNEFDVSNKVRERGWVISAYTMPPDAESVRSLRVVVRPHINRNVALLLAEDIVKACKYLEQHGGTATPPALHDTHKSSPAKC

SEQ ID NO: 7597 - protein, 293 aa, Magnetospirillum magnetotacticum MS-1
MVRNMTIASELGYLHVPEGVLIDLKKVDSLRDDEIVLMCTGSQGEPMAALSRMANGDHKVQVGHGDTVILASSLIPGNENAVFRIINGLTRLGARVVHGGNAKVHVSGHASAGELLYCYNVLKPKNVMPVHGEVRHLVANGALAVRTGVPADRVVLAEDGVVVDLVDGRASVVGAVPCGYVYVDGSSVGEITDAELKDRRILGEEGFVSVFAVVDSATGKVLAGPQILARGFAEDDKVFQDIQPEVVKALEDAIAGGATDTHQLQQVMRRVIGRWVSNRLRRRPMIVPVVVEA

SEQ ID NO: 7598 - protein, 279 aa, Staphylococcus aureus subsp. aureus MRSA252
MLNEIQILNNGYPMPSVGLGVYKISDEDMTKVVNAAIDAGYRAFDTAYFYDNEASLGRALKDNGVDREDLFITTKLWNDYQGYEKTFEYFNKSIENLQTDYLDLFLIHWPCEADGLFLETYKAMEELYEQGKVKAIGVCNFNVHHLEKLMAQSSIKPMVNQIEVHPYFNQQELQEFCDRHDIKVTAWMPLMRNRGLLDDPVIVKIAEKYHKTPAQVVLRWHLAHNRIIIPKSQTPKRIQENIDILDFNLELTEVAEIDALNRNARQGKNPDDVKIGDLK

SEQ ID NO: 7599 - protein, 214 aa, Listeria monocytogenes EGD-e
MRFFIDTANVEEIKKANRMGFISGVTTNPSLVAKEGRDFNEVIQEITSIVDGPISGEVVSLEADEMIAEGRVIAKIHPNMVVKIPMTGEGLAAVKVLTEEGIKTNVTLVFSATQALLAARAGATYVSPFLGRLDDIGDDGLVLIRDIADIFEIHGIPTEIISASVRHPIHVIECAKAGADIATVPFKVFEQMLKHPLTDSGIDKFLADWEAAKK

SEQ ID NO: 7600 - protein, 617 aa, Triticum aestivum
  misc_feature (313)..(313): Xaa can be any naturally occurring amino acid
MDSDYGVPRELSEVQQKRTLYQPELPPCLQGTTVRVEYGDVAIAADPAGAHVISHAYPHTYGQPLAHFLRKAANVPDAKVISEHPAVRVGIVFCGRQSPGGHNVIWGLHEAIKAHNVNSKLIGFLGGTDGLLAQKTLEITNEVLSSYKNQGGYDMLGRTKDQIRTTEQVNGAMATCQALKLDALVIIGGVTSNTDAAQLAETFAEAKCATKVVGVPVTLNGDLKNQFVETTVGFDTICKVNSQLISNMCTDALSAEKYYYFIRMMGRKASHVALECALQSHPNMVILGEEVAASKLTIFDITKQICDAVQARXAEKDKNHGVILIPEGLVESIPELYALLQEINGLHGKGVSVENISSQLSPWASALFEFLPQFIRQQLLLRPESDDSAQLSQIETEKLLAQLVETEMNKRLKEGTYKGKNFNAICHFFGYQARGAMPSKFDCDYAYVLGHVCYHILAAGLNGYMATVTNLKSPLNKWRCGAAPISSMMTVKGWSRGPATTQIGKPAVHMASVDLRGKAYEMLRQNSSSCLLEDIYRNPGPLQFEGPGADAKPISLCVEDQDYMGRIKKLQEYLEKVKSIVKPGCSQDVLKAALSAMSSVTETLAIMTSSSTGQPPL

SEQ ID NO: 7601 - protein, 502 aa, Gibberella zeae PH-1
MSPPSIPLIAPNGVKWSQPTGLFINNEFVSSSSSRTLTSIDPATENEIATVQAADAQDIDKAVKAAKAALRHPSWKDLPASDRGQLMARLADLIEAKRELFATIDAWDNGKTYIETLENDLVEAVGVIRYYSGWADKTFGQTINTTPQKFAYTIRQPIGVIAQIIPWNYPLSMATWKLGPALACGNAVVIKAAEQTPLSLLVLGELIKEAGFPPGVVNIVNGLGKDTGAALVQHPLVDKIAFTGSTATAANIMGVAAKTLKNITLETGGKSPLIVFDDAEMDQAVKWSHFGIMSNQGQICTATSRILVQETIYEEFIKKFIDTLNTVSKVGDQWDKTTYQGPQVSKVQYERILEYIEIGKKEGATLAAGGGPLKINGSDKGFYISPTVFTDVKPSMRVFREEIFGPVVVVSTFKTEEEAIELANDTTYGLGAAAFTTNLEKAHRVAAAIEAGMVWINSSQDCDPRVPFGGVKQSGIGRELGEAGLEAYTQIKSVHINMGNRL

SEQ ID NO: 7602 - protein, 171 aa, Glycine max
MADGPASPGGGSHESGEHSPRSNVREQDRYLPIANISRIMKKALPANGKIAKDAKETVQECVSEFISFITSEASDKCQREKRKTINGDDLLWAMATLGFEDYIDPLKIYLTRYREMEGDTKGSAKGGDSSSKKDVQPSPNAQLAHQGSFSQGVSYTISQGQHMMVPMQGPE

SEQ ID NO: 7603 - protein, 460 aa, Pseudomonas aeruginosa UCBPP-PA14
MTAQLNPQRDTRDYQQLDAAHHIHAFLDQKALNREGPRVMVRGDGLQLWDNDGKRYLDGMSGLWCTNLGYGRQDLAAAASRQLEQLPYYNMFFHTTHPAVVELSEMLFSLLPDHYSHAIYTNSGSEANEVLIRTVRRYWQILGKPQKKIMIGRWNGYHGSTLGSTALGGMKFMHEMGGMLPDFAHIDEPYWYANGGELSPAEFGRRAALQLEEKILELGAENVAAFVAEPFQGAGGMIFPPQSYWPEIQRICRQYDVLLCADEVIGGFGRTGEWFAHEHFGFQPDTLSIAKGLTSGYIPMGGLVLGKRIAEVLVEQGGVFAHGLTYSGHPVAAAVAIANLKALRDEGVVTRVREETGPYLQRCLREVFGDHPLVGEVQGAGFVAALQFAEDKATRKRFANENDLAWRCRTIGFEEGVIIRSTLGRMIMAPALVAGRAEIDELIDKTRIAVDRTAREIGVL

SEQ ID NO: 7604 - protein, 390 aa, Oryza sativa (japonica cultivar-group)
MGNRLCCHDAADDEKPAAAAVSGGGGGGGREEYRRWPIAAESGGGETGRVLDMPRLRVFTLAELRAVTRGFKPEMVLGEGGFGTVYKGWADERTLNPAKSSAGVVVAVKKLNPESVQGLHEWQSEVNFLGRLVHPNLVKLLGYCKEERELLLVYEFMPKGSLENHLFRRGAFDPLSWSLRLKIAIGAARGLAFLHSSERQIIYRDFKASNILLDVDYTPKLSDFGLAKNGPVAGRSHVTTRIIGTYGYAAPEYVATGHLYVKSDVYCFGVVLLELLTGLRAHDLNRPSHQQNLVEWARPYIAGGKKLAGLMDPRLAGDYPAKAAARAAKLADKCLCGDPKSRPSMDDVVVALQEIESVGTARPAAAKLPPRAPPPAAHRSPHRNPYSKPR

SEQ ID NO: 7605 - protein, 427 aa, Escherichia coli K12
MADTKAKLTLNGDTAVELDVLKGTLGQDVIDIRTLGSKGVFTFDPGFTSTASCESKITFIDGDEGILLHRGFPIDQLATDSNYLEVCYILLNGEKPTQEQYDEFKTTVTRHTMIHEQITRLFHAFRRDSHPMAVMCGITGALAAFYHDSLDVNNPRHREIAAFRLLSKMPTMAAMCYKYSIGQPFVYPRNDLSYAGNFLNMMFSTPCEPYEVNPILERAMDRILILHADHEQNASTSTVRTAGSSGANPFACIAAGIASLWGPAHGGANEAALKMLEEISSVKHIPEFFRRAKDKNDSFRLMGFGHRVYKNYDPRATVMRETCHEVLKELGTKDDLLEVAMELENIALNDPYFIEKKLYPNVDFYSGIILKAMGIPSSMFTVIFAMARTVGWIAHWSEMHSDGMKIARPRQLYTGYEKRDFKSDIKR

SEQ ID NO: 7606 - protein, 212 aa, Triticum aestivum
  misc_feature (69)..(69): Xaa can be any naturally occurring amino acid
  misc_feature (76)..(76): Xaa can be any naturally occurring amino acid
  misc_feature (83)..(83): Xaa can be any naturally occurring amino acid
  misc_feature (102)..(102): Xaa can be any naturally occurring amino acid
  misc_feature (118)..(118): Xaa can be any naturally occurring amino acid
  misc_feature (141)..(141): Xaa can be any naturally occurring amino acid
MAPTVMASSATSVAPFQGLKSTAGLPVSRRSNGASLGSVSNGGRIRCMQVWPIEGIKKSETLSYLPPLXSTEALLXKQVDYLXIRSKWVPCLEFSKVGFIFXREHNASPGYYDGRYWXTMWKLPMSGCTDATQVVNEVEEXKKEYPDPYSAHRVHNIASASSAHRLNQPAARSGRLNTHHDSILNANLQMLGFHYFYCPKRFLGLSMAKQPL

SEQ ID NO: 7607 - protein, 168 aa, Bacillus subtilis subsp. subtilis str. 168
MNIYVEANPYLHDKYSKYADEKYKREGNPFVSFPIHFDDIPSGAKTLALTFIDHDAIPVCGFSWIHWTAANIPAYIGELPEHASEERQDLMIQGQNSFASPLAGSNDPKVIHQYCGPTPPDKDHAYTLTVYALDAELNLQPGFYLNELYQEMKEHILAETSIELLARV

SEQ ID NO: 7608 - protein, 123 aa, Zea mays
  misc_feature (85)..(85): Xaa can be any naturally occurring amino acid
THASERLQDRPSIICVFLHLICHMHVYVSELRVGKHSLPLYELPTHATRCYYLGMFLRGAYHDALSRLHNLFGLPSMVRVSQCDXPHCFSVTLADKIPSCANMLQAIQYEPLVMYYVLKHYTY

SEQ ID NO: 7609 - protein, 331 aa, Saccharomyces cerevisiae
MRSIKCVIIGDGAVGKTSLLISYTTNSFPTDYVPTVFDNYSTTIAIPNGTASSPLELDNGNDKRGSLSSASSSPSTDRKLYKINLWDTAGQEDYDRLRPLCYPQTDIFLICFSVSEHASFANVTEKWLPELKQTSNIEGTSLYTKLGKYPILLVGTKSDLRDDPATQKKLQEANSDYVSQEEIDELVQRCGFMGYTECSAATQAGVREVFEQAVRYAIYEPESPNQKSANHTLTDELTTATTNTNGDKNIREQKQQPHHNNSTDSTLPKGSLQQEKEALNIKPTKKGQKDKIHEQSKSKGSKIASNNHHNKQAKPKTRNDKKKKKSKCVIL

SEQ ID NO: 7610 - protein, 413 aa, Cucumis sativus
GDDVEDVRREVQIMHHLTGHPHIVELKEVYEDRHYVNLIMELCAGGELFDRIIAKGHYSECTAASLCRQIVTVVHNCHSMGVMHRDLKPENFLFLSADENSPLKATDFGLSVFFKPGDVFKDLVGSAYYVAPEVLRRRYGPEAAVWSAGVILYILLSGVPPFWAENDQGIFDAVLRGHIDFSSDPWPSISSGAKDLIRKLLHSDPKERLSAIEALNHPWMKEDGEASDKPLDIAVLTRMKQFRAMNKLKKVALKVIAENLSEEEIVGLKEMFKSMDTDNSGTITFEELKAGLPKLGTKLSESEVRQLMEAADVDGNGSIDYIEFITAAMHMNRVEREDHLFKAFEYFDKDKSGYITMEELETALKKYNMGDETTIKEIIAEVDTDNDGRINYDEVVAMMRKGNQELTTTSRQK

SEQ ID NO: 7611 - protein, 131 aa, Flaveria ramosissima
SNGGRVQCMKVWPPLGKKKYETLSYLPDLTEAQLAKEVDYLLRNKWVPCLEFELEHGFVYRENARSPGYYDGRYWTMWKLPMFGCTDSAQVMKELQECKKEYPQAWIRIIGFDNVRQVQCISFIASKPDGF

SEQ ID NO: 7612 - protein, 136 aa, Zea mays
MDARMFGLENPLVAALHHLLDARAMAATPADVKELAGAYAFVVDMPGLSTGDIRVQVEDERVLVISGERRREEREDAKYLRMERRMGKFMRKFVLPDNADVDKVAAVCRDGVLTVTVEKLPPPEPKKPKTIEIKVA

SEQ ID NO: 7613 - protein, 151 aa, Desulfitobacterium hafniense DCB-2
MWCETGKPDLEFARKFAEAIHAQFPGKLLAYNCSPSFNWKKNLDDATIAKFQKEIASYGYKFQFITLAGFHSLNYGMFNLAHGYARRQMSAFVELQEAEFAAAEKGFTAVKHQREVGTGYFDAVTQTIQGGQSSTVALKGSTEEDSSTSRK

SEQ ID NO: 7614 - protein, 131 aa, Flaveria palmeri
SNGGRVQCMKVWPPVGKKKYETLSYLPELTEAQLAKEVDYLIRNKWVPCLEFELEHGFVYRENASSPGYYDGRYWTMWKLPMFGCTDSAQVMKELQECKKEYPQAWIRIIGFDNVRQVQCVSFISPKPTGF

SEQ ID NO: 7615 - protein, 141 aa, Brassica napus
  misc_feature (23)..(23): Xaa can be any naturally occurring amino acid
  misc_feature (25)..(26): Xaa can be any naturally occurring amino acid
  misc_feature (29)..(29): Xaa can be any naturally occurring amino acid
  misc_feature (36)..(36): Xaa can be any naturally occurring amino acid
  misc_feature (45)..(45): Xaa can be any naturally occurring amino acid
  misc_feature (124)..(124): Xaa can be any naturally occurring amino acid
  misc_feature (136)..(136): Xaa can be any naturally occurring amino acid
RLTPGSEMPNLELNLWDFNTKQXEXXLGXTLAGKPXAPKLEMVCXASQDMSENFLFCPMVNNDREPSGFWSLLSPDENRVHAPVESCPLSLSFSPVQQHTSVGPPPQSTTGFTMGSSMQPNMLXSRPWMAVSAPFXQTHYL

SEQ ID NO: 7616 - protein, 381 aa, Triticum turgidum
VAATSAIAQMETSHIPSLEKPLQQQPLPLQQILWYQQQQPIQQQPQPFPQQPPCSQQQQPPLLQQQQPPFSQQQPPFSQQQQPVLPQQPPFSQHQQPPFSQQPPFSQQQQPLLPQQQQPIQQQPQPFPQQPPHFIQQQQQPFLQQQQWSFQQQQPLFQQQQPPVFQQQPPFSQQQQPVLPQQPPFSQHQQPVLPQQQIPSVQPSSLQQLNPCKVFLQQQCSPVAMPQSLARSQMLWQSSCHVMQQQCCRQLPQIPEQSRYDAIRAIIYSIVLQEQQHGQGFEQPQQQQPQQSVQGVSQPQQQQKQLGQCSFQQPQQQQLGQWPQQQQVPQGTLLQPHQIAQLEVMTSIALRTLPTMCSVNVPVYGTTTIVPFGVGTGVGAY

SEQ ID NO: 7617 - protein, 335 aa, Streptococcus pneumoniae TIGR4
MKRIAVLTSGGDAPGMNAAIRAVVRQAISEGMEVFGIYDGYAGMVAGEIHPLDAASVGDIISRGGTFLHSARYPEFAQLEGQLKGIEQLKKHGIEGVVVIGGDGSYHGAMRLTEHGFPAIGLPGTIDNDIVGTDFTIGFDTAVTTAMDAIDKIRDTSSSHRRTFVIEVMGRNAGDIALWAGIATGADEIIIPEAGFKMEDIVASIKAGYECGKKHNIIVLAEGVMSAAEFGQKLKEAGDTSDLRVTELGHIQRGGSPTARDRVLASRMGAHAVKLLKEGIGGVAVGIRNEKMVENPILGTAEEGALFSLTAEGKIVVNNPHKADIELSSLNKSLS

SEQ ID NO: 7618 - protein, 483 aa, Rhodopseudomonas palustris CGA009
MLMPSDPGLLAERCLIGGKWCGEPVDAVFNPATGERIGAVPRFGTDEAEEAVRAAEIAFRQWSKLLAKQRATMLRAWFDQIIANRDDLALLLTREQGKPLAEALGEIDYAASFVEFYAEEARRIYGETIPSHRADARTMVIRQPVGVVAAITPWNFPAAMITRKVAPALAAGCTVVIKPAPETPLTALALGVLAQRAGFPPGVLNIITGDAPAIGKAWTEHPTVRAISFTGSTEVGKILMRQAASTVKKVALELGGNAPFIVFDDADLDAAVEGVIASKFRNMGQTCVCANRIYAQDGIYDAFVEKLTAKVATLQVGNGVDAGVTQGPLITTEAIAKVERHVSDAVAKGAKVVLGGKRHKLGRTFFEPTVLAGVTTAMLITREETFGPVAPVYRFTDEADVIAQANDSPFGLASYFYARDLGRVFRVAEALESGMVGVNSALLGADVVPFGGVKQSGLGREGSRHGIEEYVETKYILLGGLDR

SEQ ID NO: 7619 - protein, 231 aa, Zea mays
MEYAAVGYGYGYGYDERQEPAESADGGGGGDDEYATVLSAPPKRPAGRTKFRETRHPVYRGVRRRGPAGRWVCEVREPNKKSRIWLGTFATPEAAARAHDVAALALRGRAACLNFADSARLLQVDPATLATPDDIRRAAIQLADAASQQDETAAVAADVVAPSQADDVAAAAAAAAAAAMYGGGMEFDHSYCYDDGMVSGSSDCWQSGGGGWHSSVDGDDDGAGDMTLWSY

SEQ ID NO: 7620 - protein, 174 aa, Griffithsia japonica
MSTNTATLQSGAKMPLNGFGTWKASVEETEQAVTAALRAGYRHIDCAAVYWNEAAVGTAISKAISGGVVKREDLFITSKVWNTCHATDKVVDSCRQSLKDHQVDYFDLFLVRDIGVSNYSVALLVDTLNYARIKPSVNQCEAHVYFARPQLRDVCREFGVHLPCTPSSQRPKGR

SEQ ID NO: 7621 - protein, 152 aa, Triticum aestivum
MASAEDVKQRQVVEDRARNISHNVRCTECGSQSIEDSQADVAVLLRRLIRDEIKSGKSDKEIYKKLEEDFGETVLYAPKFDLQTAAIWLSPVIVGGVAAGVWAYQKHRQRTNVHIMALNLVRGVPLTPREKETMIDILTPPPPARRWWWPLK

SEQ ID NO: 7622 - protein, 535 aa, Zea mays
MGNCCAAPSTEGSGKTRPKKQKENPYNVAYNRGAAAPPPPPARPGLVVLRDPTGRDLGAEYELGGELGRGEFGVTYLCTEPATGARYACKSISKRKLRTPVDVEDVRREVDIMRHMPPHPNIVSLRAAYEDEDAVHLVMELCEGGELFDRIVARGHYTERAAAAVTRTIVEVVQMCHRHGVMHRDLKPENFLYANKKESSPLKAIDFGLSVFFRPGERFTEIVGSPYYMAPEVLKRNYGPEVDVWSAGVILYILLCGVPPFWAETEQGVAQAIIRSVVDFKREPWPRVSEPAKDLVRRMLDPNPLTRFTAAQVLEHPWLHDSKNTPDVSLGDTVRARLQQFAAMNKLKKKALRVIAEHLSAEEVADIKQMFDKMDVNKNGKLTFEEFKAGLRKLGNQMHDSDFQILMDAGDVDRNGTLDYEEFVTVSVHVRKIGNDEHIQKAFAYFDRNKSGYIEIEELREALADELDGSDEDIIGGVIRDVDTDKDGKIGYDEFAAMMKAGTDWRKASRQYSRQRFSNLSLKLQKDGSLGADTR

SEQ ID NO: 7623 - protein, 282 aa, Ralstonia eutropha JMP134
MSEINQAMDPGQQLSQDWWRTEIIDMRPGEIRYRGYPIEQLIGQVSFAQMIWLMLRGELPGPGQGELLDAALMAAVDHGPQAPSIAIARMAATCGVGLNNAMASAVNVLGDVHGGAGEQAVELYQDIAGRIDEGAALDQAVSAGLAHYRDLHGRFVSGFGHRFHPVDPRAPRLLALVDQAAEKSVVNGRFAAIARAVERALGEGRSKPVPMNIDGATAVIYAELGFPAPLARGLFCLSRSVGILAHAWEQTQQGGRNKGPIPRQFLWTYDGTPQRDVPAQGD

SEQ ID NO: 7624 - protein, 290 aa, Triticum aestivum
MAGLSMEHPWAFAFGLLGNVISFSSLLAPIPTFYRIFKSKSTEGFQSVPYVVALFSAMLWIFYALVKTGEGLLISINAAGCVIETVYIVMYLVYAPRKAKIFTAKIVLLLNIAGFGLIFLLTVFAFQGETRVVSLGWICVGFSVWVFVAPLSIIGRVIKTKSVEYMPFTLSLTLTLSAIVWFLYGLLIKDKYVALPNILGFTFGVIQMVLYVFYMNKTPVASEVKEGKEAWKVPAEDHVVVINVGKADKSSCAEVRPVTEMAGAVDVPRRCAAEAAAAPGMDFARSVDVV

SEQ ID NO: 7625 - protein, 291 aa, Saccharomyces cerevisiae
  misc_feature (1)..(1): Xaa can be any naturally occurring amino acid
XVHVASVEKGRSYEDFQKVYNAIALKLREDDEYDNYIGYGPVLVRLAWHISGTWDKHDNTGGSYGGTYRFKKEFNDPSNAGLQNGFKFLEPIHKEFPWISSGDLFSLGGVTAVQEMQGPKIPWRCGRVDTPEDTTPDNGRLPDADKDAGYVRTFFQRLNMNDREVVALMGAGALGKTHLKNSGYEGPWGAANNVFTNEFYLNLLNEDWKLEKNDANNEQWDSKSGYMMLPTDYSLIQDPKYLSIVKEYANDQDKFFKDFSKAFEKLLENGITFPKDAPSPFIFKTLEEQGL

SEQ ID NO: 7626 - protein, 458 aa, Sinorhizobium meliloti 1021
MLERSNELTAWDRDHFFHPSTHMGMHARGETPTRVIGGGEGVYITDISGKRSLDAFAGLYCVNVGYGRQKIADAIAEQAKNLAYYHAYVGHGTEASIRLSKMIIDRAPEGMSRVYFGLSGSDANETNIKLIWYYNNILGRPEKKKIISRWRGYHGSGVMTGSLTGLHLFHNAFDLPRAPILHTEAPYYFRRPDRSMSEEQFSQYCADKLEEMILAEGPDTVAAFIGEPILGTGGIVPPPKGYWEKIQAVLQKYDILLVADEVVTGFGRLGTMFGSDHYGIKPDLITIAKGLTSAYAPLSGTIVSDKLWQVLVKGSDELGAIGHGWTYSAHPICAAAGIANLELIDELGIVENAGSTGAYFRAELQKAVGDHRHVGEVRGDGLMAAIEFVEDRDDRAFFDPGRKVGPQVAAALLERGVIGRAMPQGDILGFAPPLCLTRDEADIVVKAAADTIQSVLGR

SEQ ID NO: 7627 - protein, 498 aa, Sinorhizobium meliloti 1021
MTAVFARTAFHDALKNLSDRQLLRELAYVGGRWVAGRDGTCLEVSDPASGAALAFVASLDAAQTSEAIDAAQKAFRSWHNMLPQARAAILRKWHDLMLEAREDLALLMTLEQGKPLAESRGEIDYAASFIEWYAEEGKRLNAESVTSHLAGAEMIVRREALGVVGIVTPWNFPSAMITRKAAAALAAGCTVVAHPSSETPLSALALAELGERAGLPAGVFNVVTGKAATIVGRMCEDARVRAMSFTGSTEIGRLIASQCAPTMKRLVMELGGHAPLIVFADANVEKAADIAIAAKFATSGQDCLAANRIYVERPALKAFQEAFAARIAGLKVGSGMEPDTDIGPLMHERAVAKVEEQVADALKLGARLAVGGKRHAAGPLFFQPTLLTDVPDDALIMREETFGPVAAVTAFDSEEEVVARANDTEYGLVAYVVTENGARQMRLARALEYGMVAVNRVKITGGPIPFGGWKQSGLGREGSRHGMEAFTELKYLCIDTAA

SEQ ID NO: 7628 - protein, 196 aa, Zea mays
  misc_feature (154)..(154): Xaa can be any naturally occurring amino acid
MASPFSVPSLIMEEEGRFEAEVAEVESWWGTERFRLTKRPYTARDVVLLRGTLRQSYASGEMAKKLWRTLKAHQAGGTASRTFGALDPVQVTMMTKHLDTIYVSGWQCSSTHTSTNEPGPDLADYPYYTVPNKVEYLFFPHIYHYRDQLQARMXLARADCARVPYLNFFDPICDQGDTALVSCPHLRTALEALILP

SEQ ID NO: 7629 - protein, 289 aa, Zea mays
MVIRSFATTSLIAAFFAIAHLAAWVTPPQAAATAAPPSSPDTASFLRCLGAHLPPQAVYTNASRSYTSVLESSIKNLLFVTPATPTPAAVRCGARHGVGVRPRSGGHDYEGLSYRSLSARRPFAVVDLARLRAVSVDARNRTAWVGSGATLGELYYAIASRSARLGFPGGVGPTVGVGGHLSGGGFGLLLRKHGLAADHVVDAVVVDAAGSLRDRAAMGEDLFWAIRGGGGGSFGVVLSWKLRLVRVPPVVAVSTVHRPRNQSASALLARWQHVAPALPRDAILRVVLQ

SEQ ID NO: 7630 - protein, 87 aa, Brassica napus
MPRSLEPLDLGLQIPYHFRCPISLELMRDPVTVCTGQTYDRTSIESWVSTGNNNTTCPVTRAPLSDHTLIPNHTLRRLIQEWCVANR

SEQ ID NO: 7631 - protein, 179 aa, Fritillaria agrestis
MAASSTMLSSVATAACAAPAQASMVAPFVGLKSTSAFPVTQKPATGLSTLPSNGGRVQCMKVWPIVGLKKFETLSYLPTLSVESLLKQIEYLIRNGWVPCLEFSLEGFVSRDNNKSPGYYDGRYWTMWKLPMFGCTDAAQVVKEAAECKKEYPAAFIRVIGFDNVRQVQCVSFIVERPE

SEQ ID NO: 7632 - protein, 148 aa, Pseudomonas syringae pv. phaseolicola
DVIDVRGLTATGRFTFDPGFMSTASCDSKITYIDGDNGILLHRGYPIEQLAEQSDYLETSYLLLNGELPTAEQKAQFVAVVKNHTMVHEQLKTFFNGFRRDAHPMAVMCGVVGALSAFYHDSLDINNPQHREISAVRLVAKMPTLAAM

SEQ ID NO: 7633 - protein, 131 aa, Flaveria palmeri
SNGGRVQCMKVWPPVGKKKYETLSYLPELTEAQLAKEVDYLHRNKWVPCLEFELEHGFVYRENASSPGYYDGRYWTMWKLPMFGCTDSAQVMKELQECKKEYPQAWIRIIGFDNVRQVQCVSFIASKPTGF

SEQ ID NO: 7634 - protein, 354 aa, Schizosaccharomyces pombe
MYCNLAKMYEVEPSEKEDNVERQTKKYNFEIDEPEEQEKKDEKEDDKEESPSKSLEEISQSVSPVEEEPRDVRFKELSTPFSYPINDPPEGRPVRVYADGVFDLFHIGHMRQLEQAKKVFPNVHLIVGLPNDQLTHRLKGLTVMNDKERAEALRHCKWVDEVLENAPWVITPEFLEEHKIDFVAHDDIPYASDDSGDIYLPVKKVGKFIPTKRTEGVSTSDLITRIIRDYDQYVMRNLARGVNRKELNVSLFKKNELDLRHHIKVLRDTLRNHWVSTTRDLKADIKSFLSMATTDYQLQKNPLHGSSEPSSPGPTGFLGGINRWMQRRSSSHYDLPRVGNEIAASSSSATEENH

SEQ ID NO: 7635 - protein, 179 aa, Fritillaria agrestis
MASSATMLSSVATAACAAPAQASMVAPFVGLKSASAFPVTQKTATGLSTLPSNGGRVQCMKVWPIVGLKKFETLSYLPTLSVESLLKQIEYLIRNGWVPCLEFSLEGFVSRDNNKSPGYYDGRYWTMWKLPMFGCTGAAQVVKEAAECKKEYPAAFIRVIGFDNVRQVQCVSFIVEKPE

SEQ ID NO: 7636 - protein, 467 aa, Streptomyces aureofaciens
MPTPEAGSASGREAVRFPVVDPATGETFDEAPDQQPGELDDVVARAQRAWHGWRADPAARTAALRGAADAVETAGDDLARLLTREQGKPLAESYAEIARTAARLRYFADLAPRTRRIDDGRPVHSEVRWRPLGPVAAIVPWNFPLQLAAAKFAPALAAGNTVVLKPSPFTPLATRMLGSVLATALPEDVLTVVTGREPLGARLASHPGIRHVTFTGSVPTGRAVAGAAAASLARVTLELGGNDAALLLDDVDVDRIADRLFWAAFRNCGQVCMAVKRVYVPARLHAEVVEALAQRAKTVAVGPGLDPGTRLGPVNNARQLARVEQVTEQALADGARAAWGGHRLDGPGYFFAPTILTDVLPGSPVVTEEQFGPVLPVLPYRSLDEAVDAANSTGFGLGGSVWGTDLDQAETVADRLECGTAWINHHAELSLAQPFAGVKDSGVGVAGGPWGLYGNLRPFVVHRPQEV

SEQ ID NO: 7637 - protein, 131 aa, Flaveria palmeri
SNGGRVQCMKVWPPVGKKKYETLSYLPELTEAQLAKEVDYLIRNKWVPCLEFELEHGFVYRENASSPGYYDGRYWTMWKLPMFGCTDSAQVMKELQECKKEYPQAWIRIIGFDNVRQVQCVSFIASKPTGF

SEQ ID NO: 7638 - protein, 436 aa, Glycine max
MSGKQAVRPRTRVGKYELGKTIGEGSFAKVKFAKNVENGNHVAIKILDRNHVLRHKMMEQLKKEISAMKMINHPNVVKIYEVMASKTKIYIVLELVNGGELFNKIAKNGKLKEDEARRYFHQLINAVDYCHSRGVYLKPENLLLDSNAILKVTDFGLSTYAQQEDELLRTACGTPNYVAPEVLNDRGYVGSTSDIWSCGVILFVLMAGYLPFDEPNHATLYQKIGRAQFTCPSWFSPEAKKLLKRILDPNPLTRIKIPELLEDEWFKKGYKPTTFVEEEDVNVDDVAAAFNDSKENLVTERKEKPVSMNAFELISRSQSFNLENLFEKQTQGIVKRETHFTSQRPANEIMSKIEEAAKPLGFNVHKRNYKMKLQGDKSGRKGHLSVATEVFEVAPSLHMVELRKTGGDTLEFHKFYKSFSSSSGLQDIVWHSEAKQ

SEQ ID NO: 7639 - protein, 157 aa, Triticum aestivum
  misc_feature (83)..(83): Xaa can be any naturally occurring amino acid
  misc_feature (95)..(95): Xaa can be any naturally occurring amino acid
  misc_feature (98)..(98): Xaa can be any naturally occurring amino acid
  misc_feature (110)..(110): Xaa can be any naturally occurring amino acid
  misc_feature (116)..(116): Xaa can be any naturally occurring amino acid
  misc_feature (124)..(124): Xaa can be any naturally occurring amino acid
  misc_feature (127)..(127): Xaa can be any naturally occurring amino acid
MAPTVMASSATSVAPFQGLKSTAGLPVSRRSNGASLGSVSNGGRIRCMQVWPIEGIKKFETLSYLPPLKHGGLLKQVDYLIRXKWVPCLRFSKLXYLXVRQRTPGYYDGXYWDMWXCLVRCTDXPGXNEVEESRRIPDPIPHQVNIACLSHGLDPAK

SEQ ID NO: 7640 - protein, 331 aa, Streptomyces avermitilis MA-4680
MQLRELVFGAACAAAVRAAAKLGVADALGEKPATAEELAAVLGTEPRPLLRLLRALSCYGIFAQNDDGRFVHTSMSRLLREDDPHSLRYISLWCTEPWTWDAWPRLDEAVRSGGSVFHELYGKGFFDYLHEDAHDSAQVFNQAMTTSSEQSARDVAELLDLTGVSTVADIGGGQGHVLASLLEKHPDIRGTLLDLPRVVEKADPRLRDGGPLAARARIVGADCREEIPVEADLYIIKNILEWDDDSTRRTLRNVMTKARPGARVVIIENLVDDTPSMKFTTSMDLMLLLNVGGAKHTKESLVTRMTEAGLTVGEIRPVNAYLHAFECTVPA

SEQ ID NO: 7641 - protein, 369 aa, Oryza sativa (japonica cultivar-group)
MGKGGKGAEAAAAAVAGAGEEENMAAWLVAKNTLKIMPFKLPPVGPYDVRVRMKAVGICGSDVHYLREMRIAHFVVKEPMVIGHECAGVIEEVGSGVTHLAVGDRVALEPGISCWRCRHCKGGRYNLCEDMKFFATPPVHGSLANQIVHPGDLCFKLPENVSLEEGAMCEPLSVGVHACRRADVGPETGVLIMGAGPIGLVTLLAARAFGATRVVIVDVDEHRLSVARSLGADAAVRVSARAEDVGEEVERIRAAMGGDIDVSLDCAGFSKTVATALEATRGGGKVCLVGMGHNEMTVPLTSAAIREVDVVGIFRYKDTWPLCIEFLRSGKIDVKPLITHRFGFSQEDVEEAFEVSARGRDAIKVMFNL

SEQ ID NO: 7642 - protein, 148 aa, Pseudomonas syringae pv. pisi
DVIDVRGLTATGRFTFDPGFMSTASCDSKITYIDGDNGILLHRGYPIEQLAEQSDYLETCYLLLNGELPTAEQKAQFVAVVKNHTMVHEQLKTFFNGFRRDAHPMAVMCGVVGALSAFYHDSLDINNPQHREISAIRLVAKMPTLAAM

SEQ ID NO: 7643 - protein, 378 aa, Antarctic bacterium DS2-3R
TEPTIHKGLAGVTADVTAISKVNSDTNSLLYRGYPVQELAAKCSFEQVAYLLWNSELPNDSELKAFVNFERSHRKLDENVKGAIDLLSTACHPMDVARTAVSVLGANHARAQDSSPEANLEKAMSLLATFPSVVAYDQRRRRGEELIEPREDLDYSANFLWMTFGEEAAPEVVEAFNVSMILYAEHSFNASTFTARVITSTLADLHSAVTGAIGALKGPLHGGANEAVMHTFEEIGIRKDESLDEAATRSKAWMVDALAQKKKVMGFGHRVYKNGDSRVPTMKSALDAMIKHYDRPEMLGLYNGLEAAMEEAKQIKPNLDYPAGPTYNLMGFDTEMFTPLFIAARITGWTAHIMEQVADNALIRPLSEYNGPEQRQVP

SEQ ID NO: 7644 - protein, 500 aa, Triticum aestivum
  misc_feature (86)..(86): Xaa can be any naturally occurring amino acid
  misc_feature (97)..(97): Xaa can be any naturally occurring amino acid
  misc_feature (100)..(100): Xaa can be any naturally occurring amino acid
  misc_feature (104)..(104): Xaa can be any naturally occurring amino acid
  misc_feature (172)..(172): Xaa can be any naturally occurring amino acid
  misc_feature (250)..(250): Xaa can be any naturally occurring amino acid
  misc_feature (306)..(306): Xaa can be any naturally occurring amino acid
MGRSERTVVWFRRDLRIDDNPALAAAARDGAVLPVFIWCPAEEGRFYPGRCSRWWLKESLAHLARSLEALGCPLVLIPAQTTLAAXLQCVDSIGATXVVXNIYXPISLVRDDKIKNELLGLGISMQSFNGDLLYEPWEVYDENGLAFTTFNKYWEKCMKLPIEISPFLAPWXIENICSSSIDNLGLESSKDEESSNALLSRAWSPGWRNAEKTLEDFVSHGLLDYSKDRMKVTGTTTSLLSPYLHYGEVXLLGNLKHYPWRADEDRFKSWRQGMTGYPLVDAGMRELWATGWTHNRIRIFGWQYIXSGSLPDGHELGRLDNPEVQGQKYDPDGEYVRTWIPELARMPGEWIHHPWDAPSSILEVAGVELGFNYPMPIVELHTARECLDDAISTMWQLDTAEKLAELDGEVVEDNLSHIKSFDVPKVVLKELSPHCDREVPTDDGRNLELQPKELKGTNKQTICVDVIKASKMEDTGSIANSPISRKRSSSGSVFNVPSYV

SEQ ID NO: 7645 - protein, 340 aa, Zea mays
  misc_feature (76)..(76): Xaa can be any naturally occurring amino acid
  misc_feature (310)..(310): Xaa can be any naturally occurring amino acid
  misc_feature (319)..(319): Xaa can be any naturally occurring amino acid
  misc_feature (335)..(335): Xaa can be any naturally occurring amino acid
CSHPPSACSCSLKSKQLIRWREQQARETSARAHYTRTDQTPAMATLATAAAAWTREEDKAFENAVAAAAAPPADGXPDDGWFTALVASVPARTVEEVRRHYEALVEDVAAIEAGRIPLPRYAGEESSAATPEGSGSAASAPKDAGGGGGGGGGHRREERKSGVGVDVGKSSSKAEQERRKGIPWTEEEHRLFLLGLDKFGKGDWRSISRNFVISRTPTQVASHAQKYFIRLNSMNRDRRRSSIHDITSVSAGEVAAAGAPITGGPTTAGAMPMGPAGMKHHHHHPAPPMGMYGHAPMGHPVSGHMVAPAXRRTPVMFPXGHHSPYVMPVGYPAPXGQMHP

SEQ ID NO: 7646 - protein, 497 aa, Magnaporthe grisea 70-15
MNIQLSAPNGKKWIQPTGLFINNEFVKSSNGQKLTTVNAATEEDITSVYSATEEDIDKAVKAARAAFKHPSWRNLSGTERGEMMHKLADLVVKNAETLATIEALDGGKPYSVALGEDVVEFEKTIRYYAGFADKNFGQTIDVGPNKFAYTIKEPIGVCGQIIPWNYPLCMAAWKLGPALACGNTVVLKLAEQTPLSMLYVATLIKEAGFPAGVVNVINGLGGEAGAAIVQHPDIDKVAFTGSTATGKQIMKACAGTMKNITLETGGKSPLLVFDDADLDLAAEWSHIGIMSNQGQICTATSRILVHESVYDKFVGRFKDTVEKVSIVGDPFDEKTFQGPQVTKAQYEKVLGYIKLAQEEGATIATGGKPAPQNGKGFYVAPTVFTNVKTSMRVYKEEIFGPCVSIISFKDEEEAVELANDTTYGLGAAVFTRNLTRAHRVAREIQSGMVWINSSNDSDCRVPFGGVKQSGIGRELGEAGLASYCNIKSVHVNMAAHL

SEQ ID NO: 7647 - protein, 250 aa, Fragaria x ananassa
MGKCYPTVSEEYKKAIDKAKRKLRGLIAEKNCAPLMLRLAWHSAGTYDVKTKTGGPFGTMKQSAELAHGANNGLDIAVRLLEPIKEQFPILSYADFYQLAGVVAVEVTGGPDVPFHPGREDKPEPPPEGRLPDAGKGSDHLREVFGKTMGLSDQDIVALSGGHTLGRAHKERSGFEGPWTPNPLIFDNSYFTVLLSGEKEGLLQLPTDKALLSDPVFRPLVEKYAADEDAFFADYALAHQRLSELGFAEA

SEQ ID NO: 7648 - protein, 161 aa, Vibrio parahaemolyticus RIMD 2210633
MRKVILAVFAALTFSLAAHAAIEVYEFDNLEQEQQFKELGHTLRCPKCQNNTISDSNAELAQDLRHKVYEMTKEGKSKEEIVDYMIARYGNFVTYNPPFTMSTAILWLGPLAVVLGGFGLIVLRSRKSKAKVTANNDEKWDEQKEARLKALLEEENNGDNK

SEQ ID NO: 7649 - protein, 121 aa, Setaria italica
MAPMRKMQAVFALAMVFAAAALVASAAAAITCGQVASSLAPCIPYATGNANVMPSGCCGGVRSLNNAARTSADRQAACRCLKSLAGTIKKLNMGTVAGIPGKCGVSVPFRISMSTDCNKVS

SEQ ID NO: 7650 - protein, 397 aa, Candida albicans SC5314
MRGIKGLVWEGSVLDPIEGIRFRGRTIPDIQKELPKAPGGEEPLPEALFWLLLTGEVPTDAQTKALSEEFAARSALPKHVEELIDRSPSHLHPMAQFSIAVTALESESQFAQAYAKGANKSEYWKYTYEDSIDLLAKLPTIAAKIYRNVFHDGKLPAAIDSKLDYGANLASLLGFGDNKEFVELMRLYLTIHSDHEGGNVSAHTTHLVGSALSSPFLSLAAGLNGLAGPLHGRANQEVLEWLFKLREELNGDYSKEAIEKYLWETLNSGRVVPGYGHAVLRKTDPRYTAQREFALKHMPDYELFKLVSNIYEVAPGVLTKHGKTKNPWPNVDSHSGVLLQYYGLTEQSFYTVLFGVSRAFGVLPQLILDRGIGMPIERPKSFSTEKYIELVKNINKA

SEQ ID NO: 7651 - protein, 1611 aa, Schizosaccharomyces pombe
MSSFPTRVVALYPYRSSFSDDLEFDPGQVIDVVSNLDGDWYTGTYVDSDGNRKIGSFPKDFTEPAEDAVFVERASEMALHQPTPTSAVHSRNSSLGYAPSITRSIKSISNNTEHLGADTESYLSANDFIDSTSEALTKIVDVDTLSAPFGNDSNSRPHSLKNVEKLHTFSAPYTISEETPSCSTENDSLPLTATHTITGGEDAATGAAVTNTTTTHITTSTNTSTVIPSNPNSVFLVDCTHSQCPTDLPNIATTQHSLRYLDNASASAITVLERTHPAASSTMATESSHQSPSADSQAEELSKSQRVAKDDDPFVVSNTANSDEPASSSKPAKPLTDLNRAFSQRLNLDPQKPGKSQGEISEQEEDEYDDAESDEMHSPYSTHEPESEPEDQDEPSEKDDENKDVEEEQEQEQEEEQIDPEEAKRIALRERMAKMSGGIGMHVFGLPGLAAPIGRKNTLRRTPAKSSEEAKSTTNDSSPPKDSSSTSTQPTEQSNAQQAPSPKEEERPLPSEPSQNQPAEYRDTPDTPRNIMPLPGLMSADQPIKVTEPSNDADKAIVAEGPNNEEETKGPVIPETQETSEQQVHKTPSPEKQKVLSPPPIITNFDKETLASNEAHEAVPQKPSAPQVTRLMAPQDSSSVVTPSPTSLLDPARAVRKVIDGIDPPKEAGAGATADVESAANSPITPPRTWHSPDFTSKSFEPIERKLPSRISEVTEDSIDEDKQNEVDPSTSARALPPPGLRFGKVDTLASLAHDDLDDLPAVPRIFSPPPLPKTPSGEFGDNEFMFPKKSNRVRGHQSRPSTGSQLRNVVPVSIVTSGGRPALPDEMASPSSSIGHPLPSPPPADFNSLNVDFYEPHSYLESPAPEPQPSYEEESFNATVIHAPTPSTATFQGHPTISNVATPPLKQDVTESKASPVADASATHQSSTGLTQEITQLGSNMRLPTKLTRPSNDGRKASGPRPAAPPSIPPPLPVSNILSSPTSEPPKDHPPSAPLSKPVSTSPAAPLARVPPVPKLSSKAPPVPLPSADAPPIPVPSTAPPVPIPTSTPPVPKSSSGAPSAPPPVPAPSSEIPSIPAPSGAPPVPAPSGIPPVPKPSVAAPPVPKPSVAVPPVPAPSGAPPVPKPSVAAPPVPVPSGAPPVPKPSVAAPPVPAPSGAPPVPKPSVAAPPVPAPSSGIPPVPKPAAGVPPVPPPSEAPPVPKPSVGVPPVPPPSTAPPVPTPSAGLPPVPVPTAKAPPVPAPSSEAPSVSTPRSSVPSPHSNASPSPTSSSMASAAPARTSVSRSKSKAERHETSTSSRKSSKSGEHHHHHNEGHADSSSTRTSLAHQDSRKSLHRHLSRSSSRASKKPSIVSTTGPFNESFSAKPVEPCASEKWWLNSTAVPKSVVQMNDSVLYMIKEGITGQDKKYKSVHILFPDYSQTVLTATFNPHNQNITQLSQLQLAPPAQPSKARLDEEYACYGSTILKKARAYQGSMVGDGSAFTFVNSVMSILAHNLEPINKQTFGGVIYKNVGNVTVQQIGEIRPGDIVTFDKAKFSGQKGTLRSKYSLEVGKPMHYGIISEWDVSKLKIRVLEQGRESKKVSVASYKFGDLKSGEVTVWRVMRRSWLGWN

SEQ ID NO: 7652 - protein, 151 aa, Triticum aestivum
MASAEDVKQRQVVEARARNISHNVRCTECGSQSIEDSQADVAVLLRRLIRDEIKSGKSDKEIYKKLEEDFGETVLYAPKFDLQTAAIWLSPVIVGGVAAGVWAYQKHRQRTNVHIMALNLVRRVPLTPREKETMIDILTPPPPARSWWWLK

SEQ ID NO: 7653 - protein, 154 aa, Brassica napus
AMWKPRKFKSIYLMATLYVFTLTLPSASAVYWAFGDQLLNHSNAFSLLPKTRFRDAAVILMLIHQFITFGFACTPLYFVWEKAIGMHHTKSICLRAIVRLPVVVPIWFLAIIFPFFGPINSAVGALLVSFTVYIIPALAHMLTYRTASARRNAA

SEQ ID NO: 7654 - protein, 465 aa, Gibberella zeae PH-1
MIATTLFSELKAHLANTQAKTYAPDAPDYKKIEQCFIETPVQTLGVVRLQNGDDVASVVRFCVERNVEFSIRGGGHDCASRTLVDGALVIDMRDIKHVVVSQDKKTARVGGGILSGDLARALGNDGLGTPTATVASVGYTGWATLGGYGLLTSHYGLGVDQIIGAKIVNARGELQDANEELLVGIRGGGGSLGVIVELTIKVYPIDKILSSTIIYDSTDLTAALTSYTQHYEKLLESGQLPVYLQLQPMIAQMPGQPVILMIIATWHGEDKDEGRSWIKNIAGAADCVMEDTKEITIAEMLENNEKLVTWPSYGRVYTLNAKRMTETALKIVGKHCVNAPGGSLIFSYHTLLSSQEPEQKSVFGTRARHHMFEIYSILADKDIAEERVRWAAQVKADLQAEDADNILEGSYISLGSHEDVDLKKVYGKHYETLAALKRKYDLGNVFKHSVPRLVLTGEENGIMEA

SEQ ID NO: 7655 - protein, 308 aa, Datura stramonium
MEEANNKESPYISSILPGWFSEISPLWPGEAHSLKVEKILFQGKSDYQNVMVFQSSTYGKVLILDGVIQLTERDECAYQEMITHLPLCSIPNPKKVLVIGGGDGGVLREVSRHSSVEQIDICEIDKMVIDVSKQFFPNVAIGYEDPRVKLHVGDGVAFLKFVAEGTYDAVIVDSSDPIGPAQELFEKPFFESVARALRPGGVVCTQAESIWLHMHIIEDIVANCRQIFKGSVNYAWTTVPTYPSGVIGFMLCSTEGPAVDFKNPINPVDADDSHTKTRGPLKFYNSEIHSASFCLPSFAKRVIESKGK

SEQ ID NO: 7656 - protein, 317 aa, Datura stramonium
MEVANHNNNNNGCTNDKESPCISSVLPGWFSEISPLWPGEAHSLKVEKILFQGKSDYQDVMVFQSTTYGKVLVLDGVIQLTERDECAYQEMITHLPLCSIPNPKKVLVIGGGDGGVLREVSRHSSVEQIDICEIDKMVVEVAKQFFPDVAVGYEDPRVNLHIGDGVAFLKNVPAGTYDAVIVDSSDPIGPAQELFEKPFFETIARALRPGGVVSTQAESIWLHMHIIEEIVANCREIFKGSVNYAWTTVPTYPSGMIGFMLCSTEGPAVDFKNPINPIDDESHGQTIGPLKFYNSEIHQASFCLPSFAKRVIETKGK

SEQ ID NO: 7657 - protein, 44 aa, Triticum aestivum
VLTLAHHGSLAAAAGGGPRVIIVGAGLSGISAGKRLSEAGITDL

SEQ ID NO: 7658 - protein, 511 aa, Gerbera hybrid cultivar
MNTLQLIFLLFFFPTLLFLYCLPYKRNQNHRRLPPSPPSFPIIGHLHHLGPLIHQSFHALSTRYGSLIHLRLGSVPCVVVSTPDLAKDFLKTNELAFSSRKHSLAIDHITYGVAFAFAPYGTYWKFIKKLFTVELLGTQNLSHFLPIRTHEIRELLRTLMVKSRAKERVNLTEELLKLTNNVISQMMMSIRCSGTNSEADEAKNLVREVTKIFGQFNVSDFIWFCKNIDLQGFKKRYEGTHRRYDALLERIIMGREENRRRGKIKDGEGKDFLDMLLDVLEDGKAEIKITRDHIKALILDFLTAGTDTTAIAIEWALVELINNPNALEKARQEIDQVIGDERLVQESDTPNLPYIQAIIKEALRLHPPIPMLIRKSTENVIVQGYDIPAGTLLFVNIWSIGRNPQCWETPLEFKPHRFLDGGDLKSSLDIKGHNFQLLPFGTGRRGCPGVNLAMRELSVVIANLIQCFDWDVVGERLLNTDERAGLTAPRAVDFVCVPLERGNTLKILGSN

SEQ ID NO: 7659 - protein, 286 aa, Clostridium acetobutylicum ATCC 824
MLDLWYSESHADDTKFSIRVKEHLYSEKTPFQQIDFFKSETFGTFFTLDGYIMMTEKDEFIYHEMITHVPMAVNPKIKKVLIVGGGDGGTSREILRYNTIEKVDMVEIDERVVRLCQKYLTQTSCKLDNDSRLTMHFEDGKEFVKRAETGFYDLILVDSTDPIGPGEGLFTNEFYRDCERILSDDGILINQHESPYYKDYCHEMKRAHSKIKDKFPISMVYQFHMPTYASGHWLFGFASKKYHPLNNLNADSWNSLGLKTKYYNTNLHKGAFALPNYVIDELEKTE

SEQ ID NO: 7660 - protein, 510 aa, Xanthomonas axonopodis pv. citri str. 306
MSADLLKALDLAASNSGTYLGEATWSQATGAGVLQPLNPTTNAVIAEVQATTPEDYELIVQRAQAAFKVWRTTPAPRRGEAVRLCGEALRAHKDALGSLVALEMGKSKPEGDGEVQEMIDIADFAVGQSRMLYGYTMHSERPGHRMYEQYQPLGLVGIISAFNFPVAVWAWNAFLAAICGDICIWKPSNKTPLTAIATMKICNAALKDAGFPDIFFLINDAGTALSEKLVEDTRVPLISFTGSTQIGRVVAEKVARRLGRCLLELGGNNAIILDETADLKLAIPGIVFGAVGTAGQRCTTTRRLIVHASIYDTVLATLVKAYKQLDSKIGDPTDPANLMGPLNSQGAVAQFLDSIAKAKAAGGTVEVGGTAIDRPGNFVLPAIVTGLQNSDAVVQHETFAPILYVMKYSTLDEAIELQNGVPQGLSSSIFTQNLKAAEKFLSAAGSDCGIANVNIGTSGAEIGGAFGGEKETGGGRESGSDAWKVYMRRQTNTINYSDSLPLAQGIKFDL

SEQ ID NO: 7661 - protein, 351 aa, Saccharomyces bayanus
MSSQAIPESQKAIVFYETNGKLEYKDIAVPEPKANEILVHVKYSGVCHSDLHAWRGDWPFQLKFPLIGGHEGAGVVVKLGSNVKGWKVGDLAGIKWLNGTCMSCEYCEVGNESQCPHLDGTGFTHDGTFQEYATADAVQAAHLPENVDLAEVAPILCAGVTVYKALKRANLIPGQWVTISGACGGLGSLAIQYATAMGYRVIGIDEGETKKQLFEGLGGEVFIDFTKEKDIVGAVIKATDGGSHGVINVSVSEAAIEASTRYCRPNGTVVLVGMPAHAYCKSDVFNQVVKSISIVGSCVGNRADTREALDFFARGLIKSPIHLASLSDVPEIFEKMEKGEIVGRYVIDTSK

SEQ ID NO: 7662 - protein, 500 aa, Escherichia coli K12
MMTEPHVAVLSQVQQFLDRQHGLYIDGRPGPAQSEKRLAIFDPATGQEIASTADANEADVDNAVMSAWRAFVSRRWAGRLPAERERILLRFADLVEQHSEELAQLETLEQGKSIAISRAFEVGCTLNWMRYTAGLTTKIAGKTLDLSIPLPQGARYQAWTRKEPVGVVAGIVPWNFPLMIGMWKVMPALAAGCSIVIKPSETTPLTMLRVAELASEAGIPDGVFNVVTGSGAVCGAALTSHPHVAKISFTGSTATGKGIARTAADHLTRVTLELGGKNPAIVLKDADPQWVIEGLMTGSFLNQGQVCAASSRIYIEAPLFDTLVSGFEQAVKSLQVGPGMSPVAQINPLVSRAHCDKVCSFLDDAQAQQAELIRGSNGPAGEGYYVAPTLVVNPDAKLRLTREEVFGPVVNLVRVADGEEALQLANDTEYGLTASVWTQNLSQALEYSDRLQAGTVWVNSHTLIDANLPFGGMKQSGTGRDFGPDWLDGWCETKSVCVRY

SEQ ID NO: 7663 - protein, 463 aa, Triticum aestivum
  misc_feature (364)..(364): Xaa can be any naturally occurring amino acid
MAASVREGAAAAAAAGHAVDDYDVSDGEMDVDVDVEAGSELQHAGGAGDDGRRDGDGDDEYALLTRITDTSAAEARAGKDIQGIPWERLQITRQDYRKARLEQYKNYENFPQSGELMDKLCKQVESSSKYYEFQYNTRIVKPSILHFQLRNLLWATSKHDVYFMSNSTVGHWSSLSHKMTDVLDFSGHVAPAKKHPGCALEGFTGVQVSTLAVNEGLLVAGGFQGELVCKSLGERDVKFCTRTTLSDNAITNAMDIHRSTSGSLRITVSNNDSGVREFDMERFQLLNHFRFNWPVNHTSVSPDKKLLAVVGDDRDALLVDSRNGKVTSTLVGHLDYSFASAWHPDGVTFATGNQDKTCRVWDIXRNPSTSLAVLRGNIGAIRCIRYSSDGRFLLFSEPADFVHVYSAAECYRKRQEIDFFGEISGISLSPDDESLFVGVCDRVYASLLNYRMVHANGYLDSYM

SEQ ID NO: 7664 - protein, 169 aa, Lycopersicon esculentum
MATQTSNPQSVYDFTVKDAKGKDVDLSIYKGKVLIIVNVASQCGLTNSNYTDMTELYKKYKDQGLEILAFPCNQFGGQEPGNIEDIQQMVCTRFKAEYPIFDKVDVNGDNAAPLYRFLKSSKGGFFGDGIKWNFSKFLIDKEGHVVDRYSPTTSPASMEKDIKKLLGVA

SEQ ID NO: 7665 - protein, 101 aa, Phaseolus vulgaris
MASSMISSPAVTTVNRAGAGAGMVAPFTGLKSLGGFPSRKMNNDITSVANNGGRVQCIQVWPTVGKKKFETLSYLPPLTKQQLAKEVDYLLRKGWVPCLEF

SEQ ID NO: 7666 - protein, 277 aa, Corynebacterium sp.
TVPSIVLNDGNSIPQLGYGVFKVPPADTQRAVEEALEVGYRHIDTAAIYGNEEGVGAAIAASGIARDDLFITTKLWNDRHDGDEPAAAIAESLAKLALDQVDLYLVHWPTPAADNYVHAWEKMIELRAAGLTRSIGVSNHLVPHLERIVAATGVVPAVNQIELHPAYQQREITDWAAAHDVKIESWGPLGQGKYDLFGAEPVTAAAAAHGKTPAQAVLRWHLQKGFVVFPKSVRRERLEENLDVFDFDLTDTEIAAIDAMDPGDGSGRVSAHPDEVD

SEQ ID NO: 7667 - protein, 441 aa, Arabidopsis thaliana
MGKDRISELPDALLIKILSFLPTKIVVATSVFSKQWRPLWKLVPNLEFDSEDYDDKEQYTFSEIVCKSFLSHKAPVLESFRLEFESEKVDPVDIGLWVGIAFSRHLRELVLVAADTGTGTAFKFPSSLCTCNTLETLRLVLLILVDISSPVVMKSLRTLHLELVSYKDESSIRNLLSGCPILEELLVIRGEDSDIEVFTIDEVPSLKRLTINDDHDGQEFWGYVINAPSLKYLLIEDLRCPGFCLNAPELMEANIFDGTSITNDNFLGYLTSVKRLLLNLSPWKITYPTGSIFYQLVSLEMYTREIDWWDLLTLMLEHSPKLQVLKLTDNCVKFHKNGLPGGKWNEPKYVPECLLSHLETFVWRRFDWGREEEKEIATYILKNARRLNKATFSTNPVNSEELDKLKERRKVHNELDGVVRASNSCQFVFKFDTSYHVSDSS

SEQ ID NO: 7668 - protein, 122 aa, Selenomonas ruminantium
MTKEEIMEAIENMTVLELSELVKAMEEKFGVSAAAPVAVAAVGGAAAGAAEEKSEFTVMLASAGDKKINVIKAVREATGLGLKEAKALVDGAPAAVKENVAKAEAEELKAKLEEAGATVELK

SEQ ID NO: 7669 - protein, 439 aa, Triticum aestivum
  misc_feature (55)..(55): Xaa can be any naturally occurring amino acid
VDMIVVTDGSRILGLGDLGVQGIGIPIGKLDVYVAAAGTSPQKVLPIMLDVGNKXNEELLEDKLYLGLRQPRLEGEEYLAVVDEFMEAVHARWPKAIVQFEDFQMKWAFETLQRYRSRFCMFNDDVQGTAGVALAGLLGAVRAQGRPLADFTKQKIVVVGAGSAGIGVLNMAKHAMLRMPGTHKIGELGEGHNQFWVLDKDGLITKSRKDLDPAVARFARGYGPEEVEDLHEGASLVEVVKKVKPHVLLGLSGVGGIFNEEVLKAMKESDSPCPAIFAMSNPTTKAECTPEDVFQHVGENAVFASGSPFSNVTLSNGRKGYANQANNMYLFPGGGGAALLSGARHISDGMLHAAAECLASYITDDAIRKGILFPSISSIRHITARVGAAVARAAVDEDLAEGCPDLDPRDLRSMSESDTVDYVARKMWYPVYSPLVNDK

SEQ ID NO: 7670 - protein, 85 aa, Triticum aestivum
WLSSATCVAPFQGLKCTGVLRVSRRSNGASLGSVSIGGRIRCMHVWSFEGIKKFETLSYLPPLSTVALLKQVDYLMRSKRVPWLE

SEQ ID NO: 7671 - protein, 286 aa, Streptococcus pneumoniae TIGR4
MDLWFSEVHTPDVKLSLRTAKQLYAGKSEWQDIEVLDTPAFGKILILNGHVLFSDADDFVYNEMTVHVPMAVHPNPKKVLVIGGGDGGVAQVLTLYPELEQIDIVEPDEMLVEVCREYFPDFAAGLDDPRVTIYYQNGLRFLRNCEDDYDIIINDATDPFGHTEGLFTKEFYGNSYRALKEDGIMIYQHGSPFFDEDESACRSMHRKVNQAFPISRVYQAHIPTSPAGYWLFGFASKKYHPVKDFDKEGWKKRQLFTEYYTANLHVGAFMLPKYVEDILEEEEGKK

SEQ ID NO: 7672 - protein, 156 aa, Prunus dulcis
MDVRIAGLDSPLFSTLQHIMDFTDEPDKSFNAPTRTYVRDAKAMASTPADVKEYPNSYVFVVDMPGLKSGDIKVQVEDDNVLLITGERKREEEKEGAKYVRMERRVGKFMRKFVLPENANVEAISAVCQDGVLTVTVEKLPPPEPKKSKTIEVKIA

SEQ ID NO: 7673 - protein, 86 aa, Brassica napus
  misc_feature (7)..(7): Xaa can be any naturally occurring amino acid
  misc_feature (12)..(12): Xaa can be any naturally occurring amino acid
  misc_feature (15)..(15): Xaa can be any naturally occurring amino acid
  misc_feature (22)..(22): Xaa can be any naturally occurring amino acid
  misc_feature (34)..(34): Xaa can be any naturally occurring amino acid
  misc_feature (41)..(41): Xaa can be any naturally occurring amino acid
  misc_feature (54)..(54): Xaa can be any naturally occurring amino acid
  misc_feature (66)..(66): Xaa can be any naturally occurring amino acid
  misc_feature (69)..(69): Xaa can be any naturally occurring amino acid
  misc_feature (85)..(85): Xaa can be any naturally occurring amino acid
KRRQEVXVYSMXSSXAVVTSPXQATMVAPFTGLXSSSAFPXTRKANNDITSIVXNGGRVNCMQGWXPPXEKKKFETLSYLPDLTXS

SEQ ID NO: 7674 - protein, 140 aa, Campylobacter jejuni subsp. jejuni NCTC 11168
MTKEQIQIIKDCVPILQKNGEDLTNEFYKIMFNDYPEVKPMFNMEKQISGEQPKALAMAILMAAKNIENLENMRSFVDKVAITHVNLGVKEEHYPIVGACLLKAIKNLLNPDEATLKAWEVAYGKIAKFYIDIEKKLYDK

SEQ ID NO: 7675 - protein, 184 aa, Zea mays
LTKEEAAFSPSHPAMQRHVASGRPSGTDGSDFSYRMVVESRYQRVAEGRSRLARLILVQALHLVAGGLLLLLSLSKGAAVNKFAVLSMAAGFLAIVVGELGRMRTMSVLLRLYTSLSSIAVAFSVTCIIRSELFLKVMKQNTEAITSYEMLDAVRVALGILLQMVVIATTTRLLQNMSPPKRAS

SEQ ID NO: 7676 - protein, 435 aa, Aeropyrum pernix K1
MQVMASPPCTTEELSPPPGGSLVEYSGGSLRVPDNPVVAFIRGDGVGPEVVESALKVVDAAVKKVYGGSRRIVWWELLAGHLAREKCGELLPKATLEGIRLARVALKGPLETPVGTGYRSLNVAIRQALDLYANIRPVRYYGQPAPHKYADRVDMVIFRENTEDVYAGIEWPHDSPEAARIRRFLAEEFGISIREDAGIGVKPISRFATRRLMERALEWALRNGNTVVTIMHKGNIMKYTEGAFMRWAYEVALEKFREHVVTEQEVQEKYGGVRPEGKILVNDRIADNMLQQIITRPWDYQVIVAPNLNGDYISDAASALVGGIGMAAGMNMGDGIAVAEPVHGTAPKYAGKDLINPSAEILSASLLIGEFMGWREVKSIVEYAIRKAVQSKKVTQDLARHMPGVQPLRTSEYTETLIAYIDEADLNEVLAGKRG

SEQ ID NO: 7677 - protein, 321 aa, Pseudomonas aeruginosa
MALNPDIAAYLELVGNGRSSGKSLPMHQLTVQQAREQFDQSSALMDPGLDEPLPRVETLFVPARDGTPLPARLYSPQGLSASPPLPGVLYLHGGGYVVGSLDSHDALCASLAERAGCVVLSLAYRLAPEWRFPTAAEDAEDAWCWLAAEAARLGIDPQRLAVAGDSVGGSLCAVLSHRLALRGDASQPRLQVLIYPVTDASRTRQSIERYAVGHLLERDSLEWFYQHYQRSPEDRQDPRFSPLLGVVPADLAPTLLLVAECDPLHDEGIAYAEHLRQGGARVELCVYPGMTHDFLRMGAIVDEADEAKDMIADALVAALAP

SEQ ID NO: 7678 - protein, 309 aa, Mycobacterium tuberculosis CDC1551
MLSTSRIFGVDGLAVDDDIVASRAHMRAICEAMPGPQIHVDVTDLSIPGPAGEIPARHYRPSGGGATPLLVFYHGGGWTLGDLDTHDALCRLTCRDADIQVLSIDYRLAPEHPAPAAVEDAYAAFVWAHEHASDEFGALPGRVAVGGDSAGGNLSAVVCQLARDKARYEGGPTPVLQWLLYPRTDFTAQTRSMGLFGNGFLLTKRDIDWFHTQYLRDSDVDPADPRLSPLLAESLSGLAPALIAVAGFDPLRDEGESYAKALRAAGTAVDLRYLGSLTHGFLNLFQLGGGSAAGTNELISALRAHLSRV

SEQ ID NO: 7679 - protein, 321 aa, Parasitella parasitica
MVVDYLTLDRTEDKMPLRGFGCWKIEKKDAENTIYQAIKIGYRLFDGACDYGNEVEVGRGINKAIKEGLVKREELFIVTKLWNTFHSKQHVRTAFDRQLKDWGLEYFDLYLIHFPIPLQYVDPAVSYPPEWYVPHADKLNFERSPIHECWAEMEKLVQAKLTRNIGVANFNCQAILDLLSYAKIKPAVLQIEIHPLLPQERLVKWVQEQGIQVTAYSSFGPTSYVDLCESGKTYSSLLANADVKSIANKHNANTGQILLRYALDRNIAVIPKSVHEDRMKSNLDILNIQLDQDDRKILNSLKTNQRFNDPMIFGFGLPLFD

SEQ ID NO: 7680 - protein, 190 aa, Glomerella cingulata
MVVATIKCVVVGDGAVGKTCLLISYTTNKFPSEYVPTVFDNYAVTVMIGDEPYTLGLFDTAGQEDYDRLRPLSYPQTDVFLVCFSVTSPASFENVARSGSRGTSPLPGVLLIVAPVTERGSSVREKLSKQKMSPVRKEDGERMAKDLGAVKYVECSALTQFKLKDVFDEAIVAALEPPAPKKKSHKCLVL

SEQ ID NO: 7681 - protein, 506 aa, Brassica napus
MTSINVKLLYHYVITNLFNLCFFPLTAIVAGKAYRLTIDDLHHLYYSYLQHNLITIAPLFAFTVFGSVLYIATRPKPVYLVEYSCYLPPTHCRSSISKVMDIFYQVRKADPSRNGTCDDSSWLDFLRKIQERSGLGDETHGPEGLLQVPPRKTFAAAREETEQVIIGALENLFKNTNVNPKDIGILVVNSSMFNPTPSLSAMVVNTFKLRSNVRSFNLGGMGCSAGVIAIDLAKDLLHVHKNTYALVVSTENITYNIYAGDNRSMMVSNCLFRVGGAAILLSNKPGDRRRSKYELVHTVRTHTGADDKSFRCVQQGDDENGKIGVSLSKDITDVAGRTVKKNIATLGPLILPLSEKLLFFVTFMGKKLFKDKIKHYYVPDFKLAIDHFCIHAGGRAVIDVLEKNLALAPIDVEASRSTLHRFGNTSSSSIWYELAYIEAKGRMKKGNKVWQIALGSGFKCNSAVWVALNNVKASTNSPWEHCIDRYPVKIDSDSGKSETRVQNGRS

SEQ ID NO: 7682 - protein, 118 aa, Ambrosia artemisiifolia
MDCIRILWSVAVGLLLVSWRPTMFAASPTCDTVQNILAPCAGFLTGQEPSKACCTGVNNLNNSRKTKADRVAVCNCIKELTKSIAYDPKRMPLLSTKCGVKPDFPAVDKNLDCSKLPV

SEQ ID NO: 7683 - protein, 222 aa, Saccharomyces cerevisiae
AYSSRFQTPFRRRREGKTDYYQRKRLVTQHKAKYNTPKYRLVVRFTNKDIICQIISSTITGDVVLAAAYSHELPRYGITHGLTNWAAAYATGLLIARRTLQRLGLDETYKGVEEVEGEYELTEAVEDGPRPFKVFLDIGLQRTTTGARVFGALKGASDGGLYVPHSENRFPGWDFETEEIDPELLRSYIFGGHVSQYMEELADDDEERFSELFKGYLADDID

SEQ ID NO: 7684 - protein, 360 aa, Arabidopsis thaliana
MAKISDLSDELLVKILSFLPTKEAVSTSVCRNNGSFFGCGCPNSSSTLVMDLKSWVRIAVSRCVRELSISLHDTTAAVSLPSSLYTCKSLVTLKLYGKKVLLDVPRTVFLPSLKTLQLERLRYSDEDSLRLLLSYCPVLEDLSIVREDYDNLRALVVIVPSLQRLSLEIPGNCSSDGYVIVTPSLKYFKVVDYRESMSYLIEQMPELEEADIVVLQYPEKLLESVTFFKRLSIRVIFNTYTETVYRDGIVFNRLENLKLCICNGDWSKLLIQFLKDSPNLRVLNLLVDDYPSSLGDYEPVRWKNNKSSVPKCLLESLETFEFAGYIGTPEERDFLSYIFKHARCLKSSSILSRPERYHGI

SEQ ID NO: 7685 - protein, 400 aa, Glycine max
  misc_feature (200)..(200): Xaa can be any naturally occurring amino acid
  misc_feature (244)..(244): Xaa can be any naturally occurring amino acid
  misc_feature (290)..(290): Xaa can be any naturally occurring amino acid
MVLEATMICIDNSEWMRNGDYSPSRFQAQTDAVNLICGAKTQSNPENTVGVLTMAGKGVRVLVTPTSDLGKILACMHGLEIGGEMNLAAGIQVAQLALKHRQNKKQQQRIIVFAGGPVKHEKKMLEMIGRKLKKNSVALDIVNFGEEDEGKTEKLEALLSAVNNNDTSHIVHVPSGPNALSDVLISTSIFTGDGEGVSGXFCSISCNAINFLIVLFIQPQQKNDAKPIKRGGEEVIFETPFALXGFIFLVAFFAAVTNRGNYLRMFQCVSLHFNWNQCYVPVIEYWMIFXLPMQVIAMSMDDSAISHDVKDTDMSEASASDPDLALALQLSITDSAKDQSSQSDMSKLLADQSFVSSILASLPGVDPNDPSVKDLLASMQNQSEPQQKNDDKPSNEEEKK

SEQ ID NO: 7686 - protein, 308 aa, Pseudomonas sp. B11-1
MPLDKQIAAVLQQFSELPAPDFSQLDAAQYRQFCDNLLPAIPGDPMIEVRNLRVAAAAGELDARLYRPLEEDNLPLLVFFHGGGFVMGNLDTHDNLCRSLASQTEAVVVSVAYRLAPENHFPAAPLDCYAATCWLVEHAAELGVDGRRLALAGDSAGGNLALAVSRLAAQRQGPKISYQCLFYPVTDARCDSQSYEEFAEGYFLTGAMMYWFWQQYLQDTGQGDDPLASPLRAETLADLPPTTLITAEFDPLRDEGEAFALRLQQAGVSVRVQRCEGMIHGFISMAPFVERAAHALSDAAADLRRALN

SEQ ID NO: 7687 - protein, 489 aa, Cucumis sativus
MLGQKQAEEAIVPTTANEVEHGGGKEEGEEADGGEQPQNSVFQMKNLLWHGGSAWDAWFSCASNQVAQVLLTLPYSFAQFGMLSGIIFQIFYGLIGSWTAYLISVLYIEYRSRKEKENVNFKNHVIQWFEVLDGLLGPHWKALGLAFNCTFLLFGSVIQLIGCASNIYYINDHLDKRTWTYIFGACCATTVFIPSFHNYRIWSFLGLGMTTYTAWYLAARALIHGQTEGVTHSGPTKLVLYFTGATNILYTFGGHAVTVTVEIMQSDVETQKFKYIYLMATLYVFTLTLPSASAVYWAFGDELLNHSNAFSLLPKNRFRDAAVILMLIHQFITFGFACTPLYFVWEKVIGMHDTKSLCLRALVRLPVVVPIWFLAIIFPFLGPINSAVGALLVSFTVYIIPAAAHMLTYRKASAKQNAAEKPPFFLPSWTAMYVLNSFIVVWIFVFGFGFGGWATITNFVRQINSFGLFAKCYQCKPSHPPAPPPTHRH

SEQ ID NO: 7688 - protein, 533 aa, Glycine max
MKSLRSILATFVVLLSISLTISLPIEEAFNHCLTQHSQTPNQFPSSIYTYTNGSFTSILESTAQNLRYLLPSVPKPDFIFTPLDDSQVQAAVVCAKKLGIHMRVRSGGHDYEGLSYVSLIEKPFMILDLAKLRAVNVDIARNTAWIQAGATIGEVYYRISEKSAVHGFPAGLCTTLGIGGHITGGAYGSMMRKYGLGADNVLDARIVDANGKVLDRKAMGEDLFWAIRGGGGGSFGVILWWKIKLVPVPQTVTVFTVTKTLEQGGSKLLHRWQQVAPHIDENLFIRVIIQPGNGTVPGKRTVTTSYNALFLGGANRLLQVMKHGFPELGLTRKDCVETSWIESVLYIAGYPDGTAPEVLLQGKSTTKAYFKAKSDFVREVITEKSLNALWKIFLQDDGPLMIWNPYGGKMSRIAESATPFPHRKGVLYKIQHVTGWLDGEKSMAKHMNWMRKFYFYMAPYVSKYPRETYVNYRDLDIGMNQKNNTSLLKASSWGYRYFKGNFNRLVKVKTKVDPSNFFRHEQSIPLLPTGKKE

SEQ ID NO: 7689 - protein, 314 aa, Shigella flexneri 2a str. 301
MLTSGGDAPGMNAAIRGVVRSALTEGLEVMGIYDGYLGLYEDRMVQLDRYSVSDMINRGGTFLGSARFPEFRDENIRAVAIENLKKRGIDALVVIGGDGSYMGAMRLTEMGFPCIGLPGTIDNDIKGTDYTIGFFTALSTVVEAIDRLRDTSSSHQRISVVEVMGRYCGDLTLAAAIAGGCEFVVVPEVEFSREDLVNEIKAGIAKGKKHAIVAITEHMCDVDELAHFIEKETGRETRATVLGHIQRGGSPVPYDRILASRMGAYAIDLLLAGYGGRCVGIQNEQLVHHDIIDAIENMKRPFKGDWLDCAKKLY

SEQ ID NO: 7690 - protein, 354 aa, Ammi majus
MAEMKTSPSQDEEAGVVAMQLATSTVLPMILKSAIELDLLNTIAKAGPGNYLSPSDLASKLLLSNPDAPVMLARILRVLATYKVLGCKRGEVEWLYCWTPVCKYLSNNEDGASIAPILLVHQDKVTIKSWYHLTDAVRDGGTAFNKAHDMSIFEYASQDPQFNKAFNRSMRGHSTITMKKILETYKGFEGLKSIVDVGGGTGATLNMIISKYPTIKGINFDLPHVVGDAPSLPGVEHVGGNMFASVPKGDAIFLKWIFHSWGDEECLKILKKCHQALGDNKKVIVAEFILPEDPGGSDSATKSAVHLDAIMLAYVPGGKERTEKEFESLAKRAGFKSFTKVCCAFNTWIMEFSK

SEQ ID NO: 7691 - protein, 463 aa, Streptomyces avermitilis MA-4680
MRPHVSHPHELVVLDPATEEVVATVPAATPQDVDAAVVRASKAQVRWAALAPGERARLLRRFAVVVDEHLEELARLEVREAGHVIGNARWEAGNVRDLLDYAAGGVERLTGRQIPVPGGLDITILEPLGVVGVIAPWNFPMPIAAWGTAPALAAGNAVILKPAETTPLTALRLAELALEAGLPEHLFQVLPGAGPVAGNALVEHPGVAKIVFTGSTAVGKQVWAKGSALLKRVTLELGGKSPNIVFADADVEAAAAAAPMAFLDNSGQDCCARTRILVQRSVYDRFLALLAPAVESVAVGDPLDERTAMGPLISKVQLERVRSYVPAGAPALRGKAPEGPGFWFPPTVLTDVDPHAPVAVEEVFGPVAVVLPFEDEADAVRLANATEYGLAGSIWTRDVGRALRVSGAVRAGNLSVNSHSSVRYWTPFGGFKQSGIGRELGPDALTAFTETKNVFISTEGPAQ

SEQ ID NO: 7692 - protein, 420 aa, Saccharomyces cerevisiae
MSIKGDSPSSTNASSSPKSTYSIQSDDKANLGSGNVDIRTDNSQQDSNNRRDIVVVTRVASEETLESQSSTSSMGIRPESSFNYEDASNQARVEMNNRVHGSNMNTINKYYPVRFPKNNERQLSDTNNLNEKVQGTHTVQSSTQEDKILDGDTSNSQVTPSLNIAEFPTDKLLKMLTALLTKIIKSNDRTAATNPSLTQEIENGRCLALSDNEKKYLSPVLGFRGKHVPQIGLDQYFQRIQKYCPTTNDVFLSLLVYFDRISKRCNSVTTTPKTNTAKHESPSNESSLDKANRGADKMSACNSNENNENDDSDDENTGVQRDSRAHPQMFVMDSHNIHRLIIAGITVSTKFLSDFFYSNSRYSRVGGISLQELNHLELQFLVLCDFELLISVNELQRYADLLYRFWNNAKAQSQALVTGM

SEQ ID NO: 7693 - protein, 568 aa, Zea mays
NSRVDPRVRLYEPWEVVDDEGQPFTMFDPFWNRCLSMPYDPPAPLLPPKRINSGDLSMCPSEDLIFEDESERGSNALLARAWTPGWQNADKALTAFLNGPLADYSVNRKKADSASTSLLSPHLHFGELSVRKVFHLVRMKQLVWSNEGNHAAEESCTLFLRSIGLREYSRYLSFNHPSSHERPLLAHLRFFPWVVDESYFKIWRQGRTGYPLVDAGMRELWATGWLHDRIRVVVASFFVKVLQLPWRWGMKYFWDTLLDADLESDALGWQYITGSLPDGRELDRIDNPQFEGYKFDPHGEYVRRWIPELARLPTEWIHHPWDAPVSVLQAAGIELGSNYPLPIVELDAAKGRLQAALSEMWQLEAASRATMNNGTEEGLGDSSEVLFPQELQMEVDRQPAPAEAAANVHVHVHVPMPARRRGDQMVPTMTTSSLNRAGTEVSADLVVANSEEEDTRAQVPFHAHLHLHPRAEAPPAARRTNNGARQHDAFQQPRNHRRDALLAPSASEASSSWTGREGAVVPVWSPPAASGHSDAFAADEADVSSRSYLGRHPQSHRLMNWSQLSQSS

SEQ ID NO: 7694 - protein, 136 aa, Triticum aestivum
  misc_feature (35)..(35): Xaa can be any naturally occurring amino acid
  misc_feature (58)..(58): Xaa can be any naturally occurring amino acid
  misc_feature (72)..(72): Xaa can be any naturally occurring amino acid
  misc_feature (85)..(85): Xaa can be any naturally occurring amino acid
  misc_feature (90)..(90): Xaa can be any naturally occurring amino acid
  misc_feature (92)..(92): Xaa can be any naturally occurring amino acid
  misc_feature (96)..(96): Xaa can be any naturally occurring amino acid
  misc_feature (99)..(100): Xaa can be any naturally occurring amino acid
  misc_feature (102)..(103): Xaa can be any naturally occurring amino acid
  misc_feature (105)..(105): Xaa can be any naturally occurring amino acid
  misc_feature (110)..(110): Xaa can be any naturally occurring amino acid
  misc_feature (118)..(118): Xaa can be any naturally occurring amino acid
  misc_feature (133)..(133): Xaa can be any naturally occurring amino acid
MAPAVMASSATTVAPFQGLKSTAGLPVGRRSSGSXQQASSNGGRIRCMQVWPIEGIKXKFENLSYLATLSKXGLLKQVHYLIRSXKWVAXLXFNKXGFXXRXXNXSPGYXEGRYWAMXELPMFRCTDPNKVLXEGE

SEQ ID NO: 7695 - protein, 513 aa, Vicia sativa
MELETLISWLLFSTSLFWFLFLATKTKSKPPKTPSSTTNTPIPKSYPIFGSAFSLLANFHRRIQWTSDILQTIPSSTFVLHRPFGARQVFTAQPAVVQHILRTNFTCYGKGLTFYQSINDFLGDGIFNADGESWKFQRQISSHEFNTRSLRKFVETVVDVELSDRLVPVLSQASNSQTTLDFQDILQRLTFDNICMIAFGYDPEYLLPSLPEIPFAKAFDESSQLSIERLNALIPLLWKVKRFLNIGVERQLKEAVAEVRGLATKIVKNKKKELKEKALQSESESVDLLSRFLSSGHSDESFVTDMVISIILAGRDTTSAALTWFFWLLSKHSHVENEILKEITGKSETVGYDEVKDMVYTHAALCESMRLYPPLPVDTKVAVHDDVLPDGTLVKKGWRVTYHIYAMGRSEKIWGPDWAEFRPERWLSRDEVGKWSFVGIDYYSYPVFQAGPRVCIGKEMAFLQMKRVVAGIMGRFRVVPAMVEGIEPEYTAHFTSVMKGGFPVKIEKRSPLV

SEQ ID NO: 7696 - protein, 272 aa, Griffithsia japonica
RFVQACTRRLMSDVPVGVFISGGLDSSLVASIAKKHLPDGYVFHSFSCGLEGSPDVRAAQKVADYLGTKHHVLTFTVEDGISALRDVIYHLETYDVTTIRASTPMYLLSRLCKQYVKVVLSGEGADEVYGGYLYFHNAETERDFHEETVRRVKLLYTSDVLRGDRSTAAQSLELRVPFLDRDFLDVSMSFSAQDKVTQKGKRIEKWPMRQAFAKEFCGEEFLPDDILWRSKEQFSDGVGYNWIDGLKEFCDKEVSDKLLANASDKFPHQPPK

SEQ ID NO: 7697 - protein, 222 aa, Mesembryanthemum crystallinum
WLVDSKGLIVSSRKNSLQEFKKPWAHEHEPLGDLSSAVKAIKPTVLIGSSGVGRTFTKEVIEAMASFNEKPLIMALSNPTTQSECTAEEAYTWSKGRAIFASGSPFNSVEYEGKTFVPGQSNNAYIFPGFGLGLVISGAIRVHEDMLLAASEALAGQVTQENYDKGMIYPPFSNIRKISAAIAANVAAKAYDLGLATRLPRPENLVKYAENCMYSPVYRSFR

SEQ ID NO: 7698 - protein, 238 aa, Prunus tomentosa
AHYKSEADVGNAIAEAIQSGLVKREELFITSKASNHGHVVEACKSSLKKLQLDYLDLYLVHYPLATKHSGVGTTASLLDENKVLDIDVTVSLETTWHDMEKTVDLGLVRSIGLSNYELFLTRDCLSYAKIKPQVSQFETHPYFQRESLVRFCKKHGVVPMAHTPLGGATANVKAFGSISPLEDPVLIGLAKKYQKSVAQIALRWNIERGTPVIPKSSKVERLKENLEILNFKLEKEDI

SEQ ID NO: 7699 - protein, 252 aa, Prunus padus
AHYKSEADVGNAIAEAIQSGLVKREELFITSKASNHGHVVEACKNSLKKLQLDYLDLYLVHYPLATKHNGVGTTASLLDENKVLDIDVTVSLETTWHDMEKTVSLGLVRSIGLSNYELFLTRDCLSYAKIKPQVSQFETHPYFQRESLVRFCKKHGVIPMAHTPLGGATANVKAFGSISPLEDPVLLGLAKKYQKSVAQIALRWNIERGTPVIPKSSKVERLKENLEVLNFKLEKEDIELIDTIDKKSRTTL

SEQ ID NO: 7700 - protein, 347 aa, Magnaporthe grisea 70-15
MSDLPKTMKALQYSKPKEFAVVDVPLPELRDDDVLVKVKACGVCGTDLHIHEGEFIAKFPLIPGHETVGVVAAVGKDVKDFKVGDRVSADNAELCGHCFYCRRGESLLCENWAGHGTTLSGGFAEYCAYPQGKVFKFNNMTDVEATLIEPASCACHGLDKIKPRLGSSVLMFGAGPTGLMLAQLLRQNGCSQVTIAAPAGLKMDLARSLDAADTYVDLSREDSGPQLEQLKKDNPYGFDIVIEATGSVKILEDSINYCRRGGTLVVYGVYGDQDKVSWKPTKIFGDEIRIIGSFSEVFMFPQTIDYLDNGKVKTKGIVNKTFKLEQFGEALESIKNKSAIKAAIVFD

SEQ ID NO: 7701 - protein, 413 aa, Burkholderia cepacia R1808
MPIYKGTMGPDVIDIRKLYGQTGKFTYDPGFMSTASCNSAITYIDGDKGELLYRGYPIDNLAQNADFLESCYLLLKGELPNAAQKKEFVDTVTKHTMVHEQMHFFFRGFRRDAHPMAILVAAVGALSAFYHDSLDINDPRHREVSAIRMIAKLPTLVAMAYKYSIGQPFVYPKNSLSYSANFMHMMFSNPCEEYKVNDVLVRALDRILILHADHEQNASTSTVRLAGSSGANPFACIAAGIACLWGPAHGGANEAALNMLEQIGSPDNIPEFIKQVKDKNSGVKLMGFGHRVYKNYDPRAKLMRETCYEVLNELGLHDDPLFKLAMQLEKIALEDEYFVSRKLYPNVDFYSGIVQRALGIPTSMFTCIFAMARTVGWIAQWNEMIADPEQKIGRPRQLFIGDTPREAKPLNAR

SEQ ID NO: 7702 - protein, 252 aa, Prunus caroliniana
AHYKSEADVGNALAEAFETGLVKREELFIISKASNHGHVVEACKDSLKKLQLDYLDLYLVHYPLATKHSGVGTTASLLDKNKVLDIDVTVSLESTWHDMEKTVSLGLVRSIGLSNYELFLTRDCLSYAKIKPQVSQFETHPYFQRETLVRFCRKHGVCPMAHTPLGGATANVKAFGSMSPLEDPVLHGLAKKYKKSVAQIALRWNIERDTPVIPKSSKVERLKENLEVLNFKLEKEDIELINTIDKKSRTTL

SEQ ID NO: 7703 - protein, 299 aa, Corynebacterium glutamicum ATCC 13032
MLLHPDAQFYIDTLPTLSAEEQVSFGKDAPVSEADATHVATDQDIAGVPVRVYTPLSGAGDLPCLVYFHGGGWSGGTLNMIDATVHSLVVGLPIIAISVDYRLAPAHPFPAAIDDAFAVVSAVLDGVSGLSIDTSRVAIGGDSAGGNIAAVTAQQLRERAVGSTPVLAHQVLIFPVTDVSTTSTPSYLTFGKDCYLTKDAMERYIEQYADGHDRTDPRLSPLLASDLSDLPPTTIVYGECDVLAHEVRAYGQALLEAGNSVTMTEFKGQIHAFINLGGISSDARAARRLIRAELEAALC

SEQ ID NO: 7704 - protein, 305 aa, Gibberella zeae PH-1
MKLSAVTLLTLATGIIAAPVADVSKEVRSYASYEPPKDTYEQPKTPKQEKPKKPEYNQPKAPKPHHEKPKAPKPHHDKPKHYAPPHHEKPKAPKPHHEKPKTPSYEKPKAPKPHHEKPKKPETPKKPEYNQPKAPKPHHEKPKKPETPKKPAYEQPKAPKPHHEKPKKPETPKKPEYNQPKAPKPHHEKPKKPETPKKPEYNQPKAPKPHHEKPKKPETPKGPSYEQPKAPKPHHEKPKKPETPKKPEYNQPKAPKPHHETPKAPKPHHETPKKPSYEQPKPKQEQPKKPSYEAPKQPAYEAPHY

SEQ ID NO: 7705 - protein, 468 aa, Glycine max
  misc_feature (6)..(6): Xaa can be any naturally occurring amino acid
MGACVXTPQGCVGGRLSSSKKKTKKRRREGLRRRVTSRLWLPDCSFANPTFQGSIEEAWFDSIAVFDSDCDDDYQSVPDDVVSLSGIEGGSVSSFPSSRDATRGVSTDQVQKQKELLAGSEAARNVIDSQREPVFLDEISSVDANSNKDDGLLDNCGILPNNCLPKPTTKLSFKWKEGHGNATLFSSKMLLQRPIAGSQVPFCPIEKKMLDCWSQIDASTFKVRGVNYFKDKKKDFAPNYPAYYPFGVDVFLSPRKVDHIARFVELPVMSSSAKFPPILVVNVQVPLYPATLFQGETDGEGMSIVLYFKLSESYSKELPQTFQESIRRLMDDEVEKVKGFPVDTIAPFRERLKILGRVINLEDLHLSAAERKLMQAYNEKPVLSRPQHEFYMGENYFEIDLDMHRFSYISRKGFEAFLDRLKVCTLDVGLTIQGNKQEELPEHVLCCIRLNGIDYMNYQQLGLTQDPL

SEQ ID NO: 7706 - protein, 223 aa, Prunus caroliniana
  misc_feature (61)..(61): Xaa can be any naturally occurring amino acid
  misc_feature (188)..(188): Xaa can be any naturally occurring amino acid
GLVKREELFITSKASNHGHVVEACKNSLKKLQLDYLDLYLVHYPLATKHSGVGTTASLLDXNKVLDIDVTVSLETTWHDMEKTVSLGLVRSIGLSNYELFLTRDCLSYAKIKPQVSQFETHPYFQRESLVKFCKKHGVTPMAHTPLGGATANVKSFGSISPLEDPVLLGLAKKYKKSVAQIALRWNIXRDTPVIPKSSKVERLKENLEVLNFKLGKEDIELIN

SEQ ID NO: 7707 - protein, 122 aa, Rickettsia prowazekii str. Madrid E
MIQMQSILEVADNSGAKKVMCIKVLGGSHHMMAKLGDVIVVSIKEAIPGGKVKKGDVYKGVIVRTKTGVVRSDGSTIKFDKNALVLLNKQDEPIGTRVFGPVTRELRAKKYVRIMSLAEEVL

SEQ ID NO: 7708 - protein, 251 aa, Prunus laurocerasus
AHYKSEADVGNAIAEAIQRGLVKREELFITSKASNHGHVVEACKNSLKKLRLDYLDLYLVHYPLATKHSGVGTTASLLDENKVLDIDVTVSLESTWHDMEKTVSLGLVRSIGLSNYELFLTRDCLSYAKIKPQVSQFETHPYFQRETLVRFCRKHGVCPMAHTPLGGATANVKAFGSISPLEDPVLRALAKKYKKSVAQIALRWNLDRNTPVIPKSSKIERLKENLEVLNFKLEKEDIELINSIDKNPGPL

SEQ ID NO: 7709 - protein, 131 aa, Zea mays
AGSGPYPPPPAFRLQTEDLRYHHQLSRHIAQLGRIEAMASRLLAAASSSSASSSPLARLISSRRMAGAADHHGSTKVNMWQEPLNPGNWKEEHFVLASLAMWGAIIYGGLKAFGGKKEVKTEAGPAAAPAH

SEQ ID NO: 7710 - protein, 225 aa, Glycine max
MGDVMGPDLISDLPQSIIESILVQLPIRDAVRTSILSSKWRYKWASITQLVFDDKCVPFSNDREAVEKSVVKFITRVLFLHQGPIHKFQITNSKLQSCPEIDQWILFLSRNDIKELVMELGEGEFFRIPSSLFNCGKLTRLDLSRCEFDPPHSFKGFVCLRSLNLHQVLISPDAIESLISRCPLLESLSLSYFDNLALTICAPNLKYLYLEGEFKDICLEDTPLL

SEQ ID NO: 7711 - protein, 370 aa, Agrobacterium tumefaciens
MTVRSVFLLPGDGIGPEAMTEVRKLIEYMNSAHNAGFTVSEGLVGGSAYDAHGVAISDADMEKALAADAILFGAVGGPKWDGVPYEHRPEAGLLRLRKDLELFANLRPAICYPALAAASSLKPELVEGLDILIVRELTGGVYFGEPKQIIDLGNGQKRGIDTQIYDTFEIERIASVAFELARSRDNRVCSMEKRNVMKSGVLWNQVVTETHAAKYKDVQLEHMLADAGGMQLVRKPKQFDVIVTDNLFGDMLSDVAAMLTGSLGMLPSASLGAPDAKTGKRKAMYEPVHGSAPDIAGKSIANPIAMIASFAMCLRYSFNMVDEATKLEAAIANVLDKGIRTADIMADGCRQVGTSDMGDAVLAEFKALSA

SEQ ID NO: 7712 - protein, 319 aa, Wolinella succinogenes
MRIGLVCSGGDCAGMNPATKKFVEYSLELGYEPYFIREGLEGLIEGKIEPATLKEVSGILHKGGTILQSSRSKRFFDPAFRLQAYQNLQRHSIEALVTLGGDGSFRAMEVLAKEHSLLYAGIPATIDNDIRASDYALGVDSALNVILESTDRLRDTAESFRRAFVVEVMGRDCGYLALASAIACGAEVCIIPEMGYSLQSLGARLKEELGTGKRRYVLAIVSEGAKASSEVVSWLKEEVGIETRITILGHVQRGGSPSVYDRLMGFRFMQKALDSLSLGKSGVVVLREGRVEFLSSQEASSAPASLPLDMVRLASRLMF

SEQ ID NO: 7713 - protein, 178 aa, Triticum aestivum
  misc_feature (66)..(66): Xaa can be any naturally occurring amino acid
  misc_feature (74)..(74): Xaa can be any naturally occurring amino acid
  misc_feature (150)..(150): Xaa can be any naturally occurring amino acid
MAPTVMASSATSVAPFQGLKSTAGLPVSRRSNGASLGSVSNGGRIRCMQVWPIEGIKKFETLSYLXPPLSTEAXLLKQVDYLIRSKWVPCLEFSKVGFIFREHNASPGYYDGRYWTMWKLPMFGCTDATQVINEVEEVKKEYPDAYVPHXSGFDNMRQVQCVSFIAFKPPGCEESGKA

SEQ ID NO: 7714 - protein, 148 aa, Zea mays
EAGGAGSGLNGAVQAKGTGADDGSAKRLPPCCVKARAAAPESEARCHATVVSGWFTEPRSRCGEANSLKVEKILYQGKSLYQEVLVFESSTYGKVLVLDGIVQLTDKDECAYQEMITHLPLCSIPSPKKVCLLISKIGLIVKLVCRHA

SEQ ID NO: 7715 - protein, 147 aa, Triticum aestivum
  misc_feature (130)..(130): Xaa can be any naturally occurring amino acid
MGERVKGTVKWFNVTKGFGFISPEDGSEDLFVHQSAIKSDGYRSLNENDTVEFEVITGDDGRTKASDVTAPGGGALSGGSRPGDGGGDRGGRGGYGGGGYGGGGGGGGYGGGGGGYGGGGGGYGGGGGGXGCYNAQEAISDCQRVGR

SEQ ID NO: 7716 - protein, 169 aa, Zea mays
LEIGGEANLTAAIQVAQFALKNRQNKQLRQRIIVFVGSPVIDEKNWLEPEKLEALVAAVNSGGNSHIIHIPAGRDLSDALFSDSAAAARGASGFEFDVDPNVDPELALVLLISMEEERLRQEAAAKKAREESSKTENEGQSSTSNGDIVMADAEPEPNSYTEDKGLHCK

SEQ ID NO: 7717 - protein, 427 aa, Coxiella burnetii
MTELTGVSIVTYQHIKVPSQGEKITVNKAVLEVPDRPIIPFIEGDGIGIDIAPVMKNVVDAAVEKSYAGKRKIEWMEIYAGEKATKVYGKDNWLPDETLEAIKGYQVAIKGPLTTPVGGGIRSLNVALRQQLDLYVCLRPVRYFTGVPSPVKTPEKVNMVIFRENSEDIYAGIEWPAGSPEAVKLINFLQNEMGVKKIRFPETAGIGIKPVSKEGTSRLVRRAIQYAIDNDRDSVTLVHKGNIMKFTEGAFKDWGYEVAVKEFGAKPLDGGPWHVFENPKTGQKITIKDVIADAFLQQILLRPAEYSVIATLNLNGDYISDALAAEVGGIGIAPGANLSDTVGLFEATHGTAPKYAGQDKVNPGSLILSAEMMLRYLGWKEAADLVVQGIEGAIESKTVTYDFARLMTGAKEVSTSQFGKAIIKHIL

SEQ ID NO: 7718 - protein, 444 aa, Desulfitobacterium hafniense DCB-2
MYDIQIINAKIQTEQGQIEGNITINNGKIEAISSSPLANVKQTIDAEGLLVLPGFIDQHVHFMDPTETDREDFIHGTTAAAMAGVTTVIEHTHSRPILTVEDFLKYKSYIEERSLVDFGFAAHIWPGQYDQLEKLWQEGIAYFKVFTCTTHGVPGQNSASLHGAFTKVASFGGRVLVHCEDDSLTAENEKVLKGNNRDDGHVIQEWRSKAAEAISVANVCFIAKETGAHVTIAHLSHPDVVGIVQEAKEAGAKVLAEICPQYLYLEENTLAARGSFGKFTPPSRSARESQELMELVGKGELDILASDHAPSTKRHKDSGSIWTSPFGLPGIDTTSSVMLTAVNNNKLSLAGFVRMYAENPAKALGLYPKKGCIRVGADADLVLVDMKKKWTIQDDGICSKAKWSPFNGFQCTGKPVMTLLRGQIIMSEGKLLGKPGDGNYVKRA

SEQ ID NO: 7719 - protein, 387 aa, Zea mays
MAGGAGNGSNEAVQAKGSGGDGSAAKPLPPCCVKARSAAPESEAKCHATVVSGWFTEPRSHCGKATKVQYYNNPMWPGEAHSLKVENILYQGKSPYQEVLVFESSTYGKVLVLDGIVQLTDKDECAYQEMITHLPLCSIPSPKKVLVIGGGDGGVLREISRHSSVESIDICEIDQLVIDICKEFFPHLSVGFEDPRVQLHVGDAVEFLRNAPEGTYDAIIVDSSDPIGPAQELVEKPFFETIARALRPGGVLCNQAESMWLHTHLIQDMLSICRETFKGSVRYAWASVPTYPSGVIGFLLCAKDGPPVNFLTPVNPIEEVEGATKAGREIRFYNSEMHMAAFVLPTFAKRELEAYCASTETEQAEEVAATAPQKLTAAPKRGITTAS

SEQ ID NO: 7720 - protein, 427 aa, Coxiella burnetii
MTELTGVSIVTYQHIKVPSQGEKITVNKAVLEVPDRPIIPFIEGDGIGIDIAPVMKNVVDAAVEKSYAGKRKIEWMEIYAGEKATKVYGKDNWLPDETLGAIKEYQVAIKGPLTTPVGGGIRSLNVALRQQLDLYVCLRPVRYFTGVPSPVKTPEKVNMVIFRENSEDIYAGIEWPAGSPEAVKLINFLQNEMGVKKIRFPETAGIGIKPVSKEGTSRLVRRAIQYAIDNDRDSVTLVHKGNIMKFTEGAFKDWGYEVAVKEFGAKPLDGGPWHVFENPKTGQKITIKDVIADAFLQQILLRPAEYSVIATLNLNGDYISDALAAEVGGIGIAPGANLSDTVGLFEATHGTAPKYAGQDKVNPGSLILSAEMMLRYLGWKEAADLVVQGIEGAIESKTVTYDFARLMTGAKEVSTSQFGKAIIKHIL

SEQ ID NO: 7721 - protein, 414 aa, Arabidopsis thaliana
MGLCWGSPSDSPPTTTPSSTGNISSVGTFKSSNNTTTTGTSRGSNISSKSGFSVASGEDAYPDGQILPIPNLRIFSLAELRASTRNFRSENVLGEGGFGKVFKGWLEDKTPGKQSNGTVIAVKKLNAESFQGFEEWQCEVNFLGRVSHPNLVKLLGYCLEGEELLLVYEYMQKGSLENHLFRKGSAVQPLSWEIRLKIAIGAAKGLAFLHASEKQVIYRDFKASNILLDGSYNAKISDFGLAKLGPSASQSHITTRVMGTHGYAAPEYVATGHLYVKSDVYGFGVVLAEILTGLHALDPTRPTGQHNLTEWIKPHLSEKRKLRSIMDPRLEGKYPFKSAFRVAQLALKCLGPEPKNRPSMKEVVESLELIEAANEKPLERRTTRASPSIRQQQGHYRPQQLSSFRPRHTVSRAH

SEQ ID NO: 7722 - protein, 441 aa, Glycine max
MSQPKIKRRVGKYEVGRTIGEGTFAKVKFARNSETGEPVALKILDKEKVLKHKMAEQIRREVATMKLIKHPNVVRLCEVMGSKTKIYIVLEFVTGGELFDKIVNHGRMSENEARRYFQQLINAVDYCHSRGVYHRDLKPENLLLDAYGNLKVSDFGLSALSQQVRDDGLLHTTCGTPNYVAPEVLNDRGYDGVTADLWSCGVILFVLVAGYLPFDDPNLMNLYKKISVAEFTCPPWLSFSARKLITRILDPDPTTRITIPEILDDEWFKKDYKPPVFEENGETNLDDVEAVFKDSEEHHVTEKKEEQPTAMNAFELISMSKGLNLENLFDTEQGFKRETRFTSKSPADEIINKIEEAAKPLGFDVQKKNYKMRLANVKAGRKGNLNVATEIFQVAPSLHMVEVRKAKGDTLEFHKFYKKLSTSLDDVVWKTEDDMQMRETK

SEQ ID NO: 7723 - protein, 427 aa, Coxiella burnetii
MTELTGVSIVTYQHIKVPSQGEKITVNKAVLEVPDRPIIPFIEGDGIGIDIAPVMKNVVDAAVEKSYAGKRKIEWMEIYAGEKATKVYGKDNWLPDETLEAIKEYQVAIKGPLTTPVGGGIRSLNVALRQQLDLYVCLRPVRYFTGVPSPVKTPEKVNMVIFRENSEDIYAGIEWPAGSPEAVKLINFLQNEMGVKKIRFPETAGIGIKPVSKEGTSRLVRRAIQYAIDNDRDSVTLVHKGNIMKFTEGAFKDWGYEVAVKEFGAKPLDGRPWHVFENPKTGQKITIKDVIADAFLQQILLRPAECSVIATLNLNGDYISDALAAEVGGIGIAPGANLSDTVGLFEATHGTAPKYAGQDKVNPGSLILSAEMMLRYLGWKEAADLVVQGIEGAIESKTVTYDFARLMTGAKEVSTSQFGKAIIKHIL

SEQ ID NO: 7724 - protein, 275 aa, Bacillus cereus ATCC 10987
MHIPTTTLHNGVKMPMIGLGVYKAKEGDEVKQAVKTALEVGYRSIDTATVYENESGVGEAVRESGIPREEIFITTKVWNDDQGYEETLEAFEKSLKKLQMDYVDLYLIHWPIRGKYVDTYRALEKLYEEGKVRAIGVSNFHKHHLELLLPNCKVKPMVNQVELHPMLTQFELRNFCQGEQIQMEAWSPLMRGGEVFQHPIIQAIATKYEKTPAQVILRWDIQSGVVTIPKSVTPSRIQENFSIFDFSLTEEEMTQINTLNRNLHVGTNPDKYDTL

SEQ ID NO: 7725 - protein, 114 aa, Triticum aestivum
  misc_feature (48)..(48): Xaa can be any naturally occurring amino acid
  misc_feature (55)..(55): Xaa can be any naturally occurring amino acid
  misc_feature (86)..(86): Xaa can be any naturally occurring amino acid
MSMPSTREDTIKMKCRVLQENVGFAHRYGKRGHSKSHFGDIDIFDGKXLVDMVPXYKKGDRPHGDRLTYQLIEITEDGYVRLITRXGNTEDDLKLCKEDVLLGQIKTGFDDGKD

SEQ ID NO: 7726 - protein, 494 aa, Zea mays
MTRASTIDFGRRKQSELFGSGPLRPANIIRNKFPTYKNGSNGIVIKLADGPEMPSLKEAVAKEATDLLDRCQRPSVRELTMKFEKGFNTATLLSNEAKWRHAALLERDILLKDLKSVLESLRGRVGGKNKDEIEESLSMVDILAIELSKREDELLRQKTEVTKIADTLKLASTDAKRIIDEERANARLEIESAKASVQKIQSALKEQEIFSQRTGKQDADELKEEVQEARRVKMLHCPSKAMDIENEIQVLRDQLAEKSSDSLRLLKELELHRSYGENDMPLYELKGLETLGSTLHIVVHDCASVDFSNSSIQWFRIQPEGSKKEIISGATKPVYAPEPHDVGRYIQAEVKSGGQISVAKTAGSIDPAAGLVEYVETLVMNPETDYNVVILQVNGVAQAADSVHVLCIGRLRMRLAKEKTVVAKEFYSSSMQLCGVRGGGDAAPQAIFWQPRKGLSFVLAFETTRERNSALMLARRFAIDCNIILGGPGDKTSW

SEQ ID NO: 7727 - protein, 98 aa, Triticum aestivum
  misc_feature (4)..(5): Xaa can be any naturally occurring amino acid
  misc_feature (13)..(13): Xaa can be any naturally occurring amino acid
  misc_feature (23)..(23): Xaa can be any naturally occurring amino acid
  misc_feature (26)..(26): Xaa can be any naturally occurring amino acid
  misc_feature (44)..(44): Xaa can be any naturally occurring amino acid
  misc_feature (50)..(50): Xaa can be any naturally occurring amino acid
  misc_feature (53)..(53): Xaa can be any naturally occurring amino acid
  misc_feature (55)..(56): Xaa can be any naturally occurring amino acid
  misc_feature (60)..(63): Xaa can be any naturally occurring amino acid
  misc_feature (65)..(69): Xaa can be any naturally occurring amino acid
MSAXXLTNVAVLXNPTSFVNPFXFEXSYECLVALEDDLEWKLIXVGSAEXENXDXXLDSXXXXPXXXXXPYRCSGGPDFQRSARRTIGTACIHNFPQV

SEQ ID NO: 7728 - protein, 254 aa, Oemleria cerasiformis
SEADVGQAFAEAFKTGLVKREELFITSKANHGHVVEACKNSLKKLQLDYLDLYLVHYPLATKHSGVGTTASLLDENKVLDIDVTVSLEETWRGMEKAVSLGLTRSIGLSNYELFLTRDCLSYAKIKPAVSQFETHPYFQRESLVRFCQKHGVVATAHTPLGGATANTKYFGSISPLGDPVLHDVAKKYQKSVAQICLRWNIERNTPVIPKSSKVERLKENLQVLEFKLEKEDIELINGIDKKSRSTLPSLSWGL

SEQ ID NO: 7729 - protein, 160 aa, Griffithsia japonica
PIVRLPIHPTPNSRRPQPLSTAPPSPASRLSFPPRRRRLCPPAIGAAASASVYDLSAFKNGRPYPFSPLSGKLTLFVNVASYCALTPQYEGLVALHTAYQPKGFEVVASPCNQFGRQEPQPDDEICAFVKERFGARFVLLDKLVVNERPADGRSPRSTVS

SEQ ID NO: 7730 - protein, 264 aa, Sorbus aucuparia
AHYKSEADVGEALTEAFKTGLVKREELFITTKIWNSDHGHVVEACKNSLEKLQLDYLDLYLVHYPMPTRHNAIGKTASLLGEDKVLDIDVTVSLQQTWEGMEKAVSLGLVRSIGLSNYDLFLTRDCLAYSKIKPAVSQFETHPYFQRDSLIKFCIKHGVLPTAHTPLGGAAANKDMFGSVSPLDDPVLNDVAKKYGKSVAQICLRWGIQRKTAVIPKSSKIQRLKENLEVLEFQLSDEDMQLIYSIDRKYRTSLPSKTWGLDVS

SEQ ID NO: 7731 - protein, 242 aa, Triticum aestivum
MASLVFLVALLLSCSSMSSAARYLEEVVPKKEYPPHPIVPELPKPELPPHPAVPELPKPEPPHPLVPEVPHPMVPETPKEPEVSHPVVPEVPKHELPPHPAMPELPKPELPHPVVPEVPKETEAPHPIVPKVPKDHDLPHPAVPETPKEPEVPHPVVPEVPKEHELPHPPVPEVPTEPHVPHPEVPKEPELPHPVVPEVPKHEMPPFPKAELPPKPEVHFPGASGQAMIGLATSAHCPLSKY

SEQ ID NO: 7732 - protein, 438 aa, Oryza sativa (japonica cultivar-group)
MAHDLHDDLEFVSGDDDDYYLEFDHDPGHGFHTSAATSASQTLIGALYFRTSRWTIPWERLNYSRNQYREMRLRQYKNYENLTMPRDGLEKECKQVERKDTFYDFHLNTRLVKSTIVHFQLRNLLWATSKHDVYLMQNYSVMHWSSLLQRGKEVLNVAGQLAPSQNVRGAMPLSRVQISTMAVKGNLMVAGGFQGELICKYVDKPGVAFCTNLTGNNNSITNAVDIYQAPNGGTRITTANNDCVVRTFDTERFSLISHFAFPWSVNNTSVSPDGKLLAVLGDSSDCLIADSQSGKEMARLKGHLDYSFSSAWHPDGRVVATGNQDRTCRVWDVRNMSRSVAVLEGRIGAVRGLRYSPDGRFLAASEPADFVHVYDAAAGYADAQEIDLFGEIAGVAFSPAGNNGGGGEALFVSIADRTYGSLLEFHRRRRHGYLDCYV

SEQ ID NO: 7733 - protein, 279 aa, Gibberella zeae PH-1
MSVVSLLGVNVLNNPAKFVDKYEFEITFECLEQLEKDLEWKLTYVGSATSDQYDQELDSLLVGPIPVGVNKFIFEADAPNISRIPDAEILGVTVILLTCAYDGREFIRVGYYVNNEYDSEELNAEPPVKPIIERVKRNVLAEKPRVTRFAIKWDSEASAPAEYPPEQPEADLVADGDEYGAEEADEEAAEEAEEEAKSKGKASSGEDAEMAGVEHEGENAADEDELSDDGSVDIEGESEDDLEEEEEGEGEGEADGDAMEVDSAEKPATSTAKPVSVAS

SEQ ID NO: 7734 - protein, 265 aa, Kageneckia oblonga
AHYKSEADVGEALAEAFKSGLVKREELFITTKIWNSDHRYVAEACKNSLEKLQLQYLDLYLVHYPLPTRHNAIGKTASLLGEDKVLDIDVTIPLQQTWEGMEKTVALGLVRSIGLSNYDLFLTRDCLAYSKIKPAVSQFETHPYFQRDSLVKFCMKHGVLPTAHTPLGGAAANKDMFGSVSPLDDPVLNDVAKKYGKSVAQICLRWGIQRKTAVIPKSSKIQRLKENLEVLEFQLSDEDMQLIYSIDKKYRTSLPSKTWGLDVYA

SEQ ID NO: 7735 - protein, 307 aa, Triticum aestivum
MKTLLILTILAMAITISTANMQVDPSGQVQWPQQQLVPQPQQPLSQQPQQAFPQPQQTFPHQPQQQQPQQPFPQQPQQPFPQTQQPQQPFPQQPQQPFPQTQQPQQPFPQFQQPHQPFPQPQQQFPQPQQPQQSFPQQQRPFIQPSLQQRLNPCKNILLQQCKPASLVSSLWSIIWPQSDCQVMQQQCCQELAQIPQQLQCAAIHSVVHSIIQQQQQQQQQQGMHILLPLSQQQQLGQGTLVQGQGIIQPQQLAQLEAIRSLVLQTLPTMCNVYVPPECSIHQGTICQHQGIIRAPFASIVAGIGGQ

SEQ ID NO: 7736 - protein, 265 aa, Vauquelinia californica
AHYKSEADVGEALAEAFKTGLVKREELFITTKIWNSDHGHVVEACKNSLEKLQLDYLDLYLVHYPMPTRHNAIGKTASLLGEDKVLDIDVTISLHTTWEGMKKAVSLGLVRSIGLSNYDLFLTRDCLAYSKIKPAVSQFETHPYFQRDSLVKFCMKHGVLPTAHTPLGGAAANKDMFGSVSPLDDPVLNDVAKKYGKSVAQICLRWGIQRKTAVIPKSSKIQRLKENLEVLKFQLSDEDMQLIHGIDRKYRTSLPSKTWGLDVYA

SEQ ID NO: 7737 - protein, 497 aa, Pseudomonas aeruginosa PAO1
MTTLTRADWEARAKDLKIEGRAFVNGEYSNAASGETFDCLSPVDGRFLAKVASCDLADAEQAVKVARNAFDSGAWSRLAPAKRKQTMIRFADLLLENAEELALLETLDMGKPISDSLHIDVASAANSLRWSAEAIDKIYDEVAATPHAELGLVTREPVGVVAAIVPWNFPLLMSCWKLGPALATGNSVILKPSEKSPLTAIRIAQLAVEAGIPKGVFNVLPGYGHTVGKALALHMDVDTLVFTGSTKIAKQLMVYAGESNMKRVWLEAGGKSPNIVFADAPDLKAAAEAAAGAIAFNQGEVCTAGSRLLVERSIKDKFLPLVIEALKGWKPGNPLDPETNVGALVDTQQMNTVLSYIEAGHNDGAKLVAGGKRTLEETGGTYVEPTIFDGVTNAMKIAREEIFGPVLSVIEFEDAEEAVRIANDTPYGLAAAVWTSNLSKAHLTAKALRAGSVWVNQYDGGDMTAPFGGFKQSGNGRDKSLHAFDKYTELKATWIKL

SEQ ID NO: 7738 - protein, 112 aa, Bartonella sp. Tm6313nv
ANEACLKMLQEIGSVKRIPEFIARAKDKNDPFRLMGFGHRVYKNYDPRAKIMQQTCHEVLKELNIQDDPLLDIAIELEKIALNDEYFVEKRLYPNVDFYSGITLKALGFPTE

SEQ ID NO: 7739 - protein, 444 aa, Pseudomonas aeruginosa PAO1
MTMNDEPQSSSLDNFWMPFTANRQFKARPRLLESAEGIHYIAQGGRRILDGTAGLWCCNAGHGRREISEAVARQIATLDYAPPFQMGHPLPFELAARLTEIAPPSLNKVFFTNSGSESADTALKIALAYQRAIGQGTRTRLIGRELGYHGVGFGGLSVGGMVNNRKAFSANLLPGVDHLPHTLDVARNAFTVGLPEHGVEKAEELERLVTLHGAENIAAVIVEPMSGSAGVVLPPKGYLQRLREITRKHGILLIFDEVITGFGRVGEAFAAQRWGVVPDLLTCAKGLTNGSIPMGAVFVDEKIHAAFMQGPQGAIEFFHGYTYSGHPVACAAALATLDIYRRDDLFQRAVELEGYWQDALFSLRDLPNVVDIRAVGLVGGVQLAPHADGPGKRGYDVFERCFWEHDLMVRVTGDIIAMSPPLIIDKPHIDQIVERLAQAIRASV

SEQ ID NO: 7740 - protein, 483 aa, Pseudomonas fluorescens
MKTKLFINNAWIDSSDQQTFEGKDPVNSEVMTERANATVTDAIKAAQVAEEAFKTWKDVGPSECRRLLLKVADVMESKTPKFIEVMAMEVGASALWAGFNVHASANVFREAASLATQIQGETIPTDKAETLSMTLRQPVGPILSIVPWNGTAVLAARAIAYPLVCGNTVVFKGSEFIPATHALITQCVQEAGMPAGVLNYLNSSPDRSPEIADALISAKEIRRINFTGSTRVGSIIAQKAAQHLKRCLLELGGKSPLIVLDDANIDAAVKAAVFGSFLFQGQICMYTERLVVDEKIADEFVSKFVEKTKRLSAGDLCVTGDCIIGPMVSLNSGYRINGLFKDAIDKGSKVVCGGMVQGAVMPSTILDHVKSDMRIYDEETFGPITVVIRCKGEAEAIRIANDSVYGLSSGVFGRDINRALRVGMSIEYGCVHINGSTVQNEVQAPYGGTKNTGYGRFDGRAVVDEFTELKWLTIEPFEQQYPF

SEQ ID NO: 7741 - protein, 284 aa, Crocosphaera watsonii WH 8501
MDYSQDNNGTGSPTDQGLLDDPAYTIEQALNNLQQTDDPSARYYAAWWIGRFRVNEPVAIQGLLTALEDNSDRSPDGGYPLRRNAAKALGKSGDVSVVPALIEALQCPDYYVRESAAQSLEMLGDQQAIPGLISLLNGGVAAAQQVEGKPHLIQPYEAILEALGTLQAKNAISLIEPFVEHFVPKVKFAAARALYQLTNDPVYGEILVTALQETTLQVRRSALMDLGAIGYLGGVDAIGNTLAENSLKLISLKGILEHHLSQQEMPQELNDDLVHLMNVMDSLL

SEQ ID NO: 7742 - protein, 265 aa, Amelanchier alnifolia
AHYKSEADVGEALAEAFNTGLVKREELFITTKIWNSDHGHVVEACKNSLEKLQLDYLDLYLVHYPMPTRHNAIGKTASLLGEDKVLDIDVTISLQQTWEGMEKAVTLGLVRNMGLSNYDLFLTRDCLAYSKIKPAVSQFETHPYFQRDSLVKFCIKHGVLPTAHTPLGGAAANKDMFGSVSPLDDPVLNDVAKKYGKSVAQICLRWGIQRKTAVIPKSSKIQRLKENLEVLEFQLSNEDMQLINGIDRKYRTSLPSKTWGLDVYA

SEQ ID NO: 7743 - protein, 315 aa, Actinobacillus pleuropneumoniae serovar 1 str. 4074
MSQLDALREMTVVVADTGDIEAIKQYQPQDATTNPSLILSASALPQYASLIDDAVAYAKARSDDKAQQLIDAEDKLAVNIGLEILKIVPGRISTEVDARLSYDTKATIEKARQIMKLYNDAGISNDRILIKIASTWQGIRAAEVLEKEGINCNLTLLFSQAQARACAEAGVYLISPFVGRILDWYKAAEKKEYAPAEDPGVISVTNIYNYYKQYGYQTVVMGASFRNVGEITEIAGCDRLTIAPPLLKELAESNAPLVRKLEYKGEVKTRPAPLTEAEFYWQHNQDPMAVEKLAEGIRKFAVDIEKLEAMLAAKL

SEQ ID NO: 7744 - protein, 175 aa, Triticum aestivum
MAPAVMASSATSVAPFQGLKSTAGLPVSRRSSSAGLSSVSNGGRIRCMQVWPIEGIKKFETLSYLPPLSTEALLKQVDYLIRSKWVPCLEFSKVGFVFREHNSSPGYYDGRYWTMWKLPMFGCTDATQVLNEVEEVKKEYPDAYVRVIGFDNLRQVQCVSFIAFRPPGCEESGKA

SEQ ID NO: 7745 - protein, 175 aa, Zea mays
QMEVDRQPAPAEAAANVHVHVPMPARRRGDQMVPTMTTSSLNRAGTEVSADLVVANSEEEDTRAQVPFHAHLHLHPRAEAPPAARRTNNGARQHDVFQQRRNHRRDALLAPSASEASSSWTGREGAVVPVWSPPAASGHSDAFAADEADVSSRSYLGRHPQSHRLMNWSQLSQSS

SEQ ID NO: 7746 - protein, 464 aa, Glycine max
  misc_feature (76)..(76): Xaa can be any naturally occurring amino acid
  misc_feature (132)..(132): Xaa can be any naturally occurring amino acid
  misc_feature (139)..(139): Xaa can be any naturally occurring amino acid
MDRRSHPTGTVSTRNILFNKYEIGKLLGQGNFAKVYHGRNLSTNESVAIKVIKKERLQKERLVKQIKREVSVMRLXVRHPHIVELKEVMANKAKIFMVVEYVKGGELFAKVAKGKMKEDVARKYFQQLISAXVDFCHSXRGVTHRDLKPENLLLDENEDLKVSDFGLSALPDQRRSDGMLLTPCGTPAYVAPEVLKKKGYDGSKADIWSCGVILFALLSGYLPFQGENVMRIYSKSFKADYAFPEWISPAAKNLISNLLVVDPQKRYSIPDIMKDPWFQIGFLRPIAFSMKESALEDNIDFSGDDVPSPGSDDGNSSSNNEDGELTGAKPARPSYNAFEIISSLSHGFDLRNLFETRKRSPSMFISKFSASAVMAKLEGVAKKLNFRVTGKKEFMVRMQGATEGRKGKLAMTVEVFEVAPEVAVVEFSKSAGDTLEYLNFCEDQVRPSLRDIVWSWQGDANCHQ

SEQ ID NO: 7747 - protein, 427 aa, Coxiella burnetii
MTELTGVSIVTYQHIKVPSQGEKITVNKAVLEVPDRPIIPFIEGDGIGIDITPVMKNVVDAAAEKSYAGKRKIEWMEIYAGEKATKVYGKDNWLPDETLEAIKEYQVAIKGPLTTPVGGGIRSLNVALRQQLDLYVCLRPVRYFTGVPSPVKTPEKVNMVIFRENSEDIYAGIEWPAGSPEAVKLINFLQNEMGVKKIRFPETAGIGIKPVSKEGTSRLVRRAIQYAIDNDRDSVTLVHKGNIMKFTEGAFKDWGYEVAVKEFGAKPLDGGPWHVFENPKTGQKITIKDVIADAFLQQILLRPAEYSVIATLNLNGDYISDALAAEVGGIGIAPGANLSDTVGLFEATHGTAPKYAGQDKVNPGSLILSAEMMLRYLGWKEAADLVVQGIEGAIESKTVTYDFARLMTGAKEVSTSQFGKAIIKHIL

SEQ ID NO: 7748 - protein, 140 aa, Triticum aestivum
  misc_feature (120)..(120): Xaa can be any naturally occurring amino acid
  misc_feature (128)..(128): Xaa can be any naturally occurring amino acid
  misc_feature (130)..(130): Xaa can be any naturally occurring amino acid
MAPTVMASSATSVAPFQGLKSTAGLPVSRRSNGASLGSVSNGGRIRCMQVWPIEGIKKFETLSYLPPLSTEALLKQVDYLIRSKWVPCLEFSKVGFIFREHNASPGYYDGRYWTMWKLPXFGCTDATXVXNEVEESRRST

SEQ ID NO: 7749 - protein, 427 aa, Coxiella burnetii
MTELTGVSIVTYQHIKVPSQGEKITVNKAVLEVPDRPIIPFIEGDGIGIDITPVMKNVVDAAVEKSYAGKRKIEWMEIYAGEKATKVYGKDNWLPDETLEAIKEYQVAIKGPLTTPVGGGIRSLNVALRQQLDLYVCLRPVRYFTGVPSPVKTPEKVNMVIFRENSEDIYAGIEWPAGSPEAVKLINFLQNEMGVKKIRFPETAGIGIKPVSKEGTSRLVRRAIQYAIDNDRDSVTLVHKGNIMKFTEGAFKDWGYEVAVKEFGAKPLDGGPWHVFENPKTGQKITIKDVIADAFLQQILLRPAEYSVIATLNLNGDYISDALAAEVGGIGIAPGANLSDTVGLFEATHGTAPKYAGQDKVNPGSLILSAEMMLRYLGWKEAADLVVQGIEGAIESKTVTYDFARLMTGAKEVSTSQFGKAIIKHIL

SEQ ID NO: 7750 - protein, 345 aa, Sulfolobus solfataricus P2
MVEGFSPMKSVIMENGKAVIKELPLPKLQQGDVLVKMKACGLCGTDIEKICGQYTASQPILGHEPTGIIQESTVDWLKPGDRVFAHHHVPCYECYYCKKGSPTMCPYYRKTNLDPGGFSEYFRVPAWNVARGGVLKLPDNVSFEEGAFIEPLATVIRAQKRVAIDNGDTVFIVGIGPMGLLHAMMAKVNKAGVIIASDVSDFRTEFGYKVGINYSLNAKKVNVVDEVKRLTDGRGADVTIIASGSPSAIVSGLNATRKGGRVLLFGVPYKGTILNYDISDLLNNEISIIPSNAAVEEDTKEALAIIANKKIDVTKLITHRFSLDEFNEAVRIGKEGNAIKVIIYS

SEQ ID NO: 7751 - protein, 359 aa, Candida rugosa
MSKSIVLLPGDHVGTEVVAEAVKVLKAIERTTPGTSFSFSTHLIGGAAIDATGVPLPDEALEAAKASDAVLLGAVGGPKWGTGDVRPEQGLLKIRKELGLYANLRPCSFASSKLVDLSPLKREIVEGTDFVVVRELVGGIYFGERKEDDGSGVASDTETYSVPEVERITRMAAFLALQHNPPQTVWSLDKANVLASSRLWRKTVTRVMTEEFPTVPFQHQLIDSAAMILVQKPTKLNGVVLTSNMFGDIISDEASVIPGSLGLLPSASLASLPDTNTAFGLYEPCHGSAPDLPAGKVNPLACILSAAMMLRLSLDNAAAADRIEQAVREVIDSGVATADLGGSSSTGEVGDAIVKALEK

SEQ ID NO: 7752 - protein, 427 aa, Coxiella burnetii
MTELTGVSIVTYQHIKVPSQGEKITVNKAVLEVPDRPIIPFIEGDGIGIDITPVMKNVVDAAVEKSYAGKRKIEWMEIYAGEKATKVYGKDNWLPDETLEAIKEYQVAIKGPLTTPVGGGIRSLNVALRQQLDLYVCLRPVRYFTGVPSPVKTPEKVNMVIFRENSEDIYAGIEWPAGSPEAMKLINFLQNEMGVKKIRFPETAGIGIKPVSKEGTSRLVRRAIQYAIDNDRDSVTLVHKGNIMKFTEGAFKDWGYEVAVKEFGAKPLDGGPWHVFENPKTGQKITIKDVIADAFLQQILLRPAEYSVIATLNLNGDYISDALAAEVGGIGIAPGANLSDTVGLFEATHGTAPKYAGQDKVNPGSLILSAEMMLRYLGWKEAADLVVQGIEGAIESKTVTYDFARLMTGAKEVSTSQFGKAIIKHIL

SEQ ID NO: 7753 - protein, 427 aa, Coxiella burnetii
MTELTGVSIVTYQHIKVPSEGEKITVNKAVLEAPDRPIIPFIEGDGIGIDITPVMKNVVDAAVEKSYAGKRKIEWMEIYAGEKATKVYGKDNWLPDETLEAIKEYQVAIKGPLTTPVGGGIRSLNVALRQQLDLYVCLRPVRYFTGVPSPVKTPEKVNMVIFRENSEDIYAGIEWPAGSPEAVKLINFLQNEMGVKKIRFPETAGIGIKPVSKEGTSRLVRRAIQYAIDNDRDSVTLVHKGNIMKFTEGAFKDWGYEVAVKEFGAKPLDGGPWHVFENPKTGQKITIKDVIADAFLQQILLRPAEYSVIATLNLNGDYISDALAAEVGGIGIAPGANLSDTVGLFEATHGTAPKYAGQDKVNPGSLILSAEMMLRYLGWKEAADLVVQGIEGAIESKTVTYDFARLMTGAKEVSASQFAKAIIKHIL

SEQ ID NO: 7754 - protein, 427 aa, Coxiella burnetii
MTELTGVSIVTYQHIKVPSEGEKITVNKAVLEVPDRPIIPFIEGDGIGIDITPVMKNVVDAAVEKSYAGKRKIEWMEIYAGEKATKAYGKDNWLPDETLEAIKEYQVAIKGPLTTPVGGGIRSLNVALRQQLDLYVCLRPVRYFTGVPSPVKTPEKVNMVIFRENSEDIYAGIEWPAGSPEAVKLINFLQNEMGVKKIRFPETAGIGIKPVSKEGTSRLVRRAIQYAIDNDRDSVTLVHKGNIMKFTEGAFKDWGYEVAVKEFGAKPLDGGPWHVFENPKTGQKITIKDVIADAFLQQILLRPAEYSVIATLNLNGDYISDALAAEVGGIGIAPGANLSDTVGLFEATHGTAPKYAGQDKVNPGSLILSAEMMLRYLGWKEAADLVVQGIEGAIESKTVTYDFARLMTGAKEVSASQFAKAIIKHIL

SEQ ID NO: 7755 - protein, 227 aa, Camellia sinensis
GDHILDAQQKGEINEDNVLYIVENINVAAIETTLWSIEWGIAELVNHPQIQKKLRHELDTMLGLGVQITEPDTYKLPYLQAVVKETLRLRMAIPLLVPHMNLHDAKLSGYDIPAESKILVNAWWLANNPDNWKNPEEFRPERFLEEEAKVEANGNDFRYLPFGVGRRSCPGIILALPILGITLGRLVQNFELLPPPGQAKIDTAEKGGQFSLHILKHSTIVLKPRSF

SEQ ID NO: 7756 - protein, 112 aa, Bartonella weissi
ANEACLKMLQEIGSTEKIPEFIERAKDKNDPFRLMGFGHRVYKNYDPRAKLMQKTCHEVLKELNIQDDPLLDIAMELEKIALNDEYFIEKKLYPNVDFYSGITLKALGFPTE

SEQ ID NO: 7757 - protein, 297 aa, Saccharomyces cerevisiae
MSGPPPPYEEQSSHLYGQPASSQDGNAFIPEDFKYSTVVISCEPIIRQRFMHKVYSLLSCQLLASLSFCYWASVSTSLQNFIMAHIALFYICMVVSLVSCIWLAVSPRPEDYEASVPEPLLTGSSEEPAQEQRRLPWYVLSSYKQKLTLLSIFTLSEAYCLSLVTLAYDKDTVLSALLITTIVVVGVSLTALSERFENVLNSATSIYYWLNWGLWIMIGMGLTALLFGWNTHSSKFNLLYGWLGAILFTAYLFIDTQLIFRKVYPDEEVRCAMMLYLDIVNLFLSILRILANSNDDN

SEQ ID NO: 7758 - protein, 265 aa, Amelanchier alnifolia
AHYKSEADVGEALAEAFNTGLVKREELFITTKIWNSDHGHVVEACKNSLEKLQLDYLDLYLVHYPMPTRHNAIGKTASLLGEDKVLDIDVTNFLQQTWEGMEKAATLGLIRNIGLSNYDLFLIRDCLAYSKIKPAVSQFETHPYFQRDSLVKFCIKHGVLPTAHTPLGGAAANKDMFGSVSPLDDPVLNDVAKKYGKSVAQICLRWGIQRKTAVIPKSSKIQRLKENLEVLEFQLSNEDMQLINGIDRKYRTSLPSKTWGLDVYA

SEQ ID NO: 7759 - protein, 170 aa, Glycine max
SPSVRGSLSDLTCDSDGKIDKFINGESSLPLHEREGGRTYYLGMFLGGAYEEALGGVHNLFGGPSVIRVSQSDGPHSFAVTRAVPGPSCGDVLRVMQHQPELMFETLKHRAQEYVSHDNAAAVLAAGLARTFDRMPYLLPLSSFVADDVAAAAAVPAGEDDEEQWSYICA

SEQ ID NO: 7760 - protein, 265 aa, Gillenia stipulata
AHYKSEADVGEVLAEAFKTGLVKREELFITTKIWNSDHGHVVEACKNSLEKLQLDYLDLYLVHYPMPTKHNGVGKTASLLGEDKVLDIDVTISLQQTWEGMEKTVSLGLVRSIGLSNYELFLTRDCLAYSKIKPAVSQFETHPYFQRDSLVKFCLKHGVLPTAHTPLGGAAANKDMFGSVSPLDDPVLNDVANKYGKSVAQICLRWGIQRKTAVIPKSSKIQRLKENLEVLEFQLSEEDMQLIYSIDRKYRISLPSKTWGLDVYA

SEQ ID NO: 7761 - protein, 160 aa, Manihot esculenta
  misc_feature (52)..(52): Xaa can be any naturally occurring amino acid
MSDEEHHFESKADAGASKTFPQQAGTIRKNGYIVIKNRPCKVMEVSTSKTGXHGHAKCHFVGIDIFNGKKLEDIVPSSHNCDVPHVNRTDYQLIDISEDGFVSLLTETGNTKDDLRLPTDENLLSQIKDGFAEGKDLVVSVMSAMGEERICSLKDIGPKN

SEQ ID NO: 7762 - protein, 398 aa, Pneumocystis carinii
MQSEAYQTNLQCSGETSHKLGIKEAKSTSKTSLIDQIPILTLSIPSRRSIPHIFDATRITDNSDNSHNENQDFKGILEENGSPDPFSYNRSYFTKIMLDEVWQRSAHSDEIIELEKLGEGISGSVSKCILKNTGTLFALKTILVDTNPEIQQQILRELSINRTCSSEYIVQYYGTFVDEASSNISMAMEYCAGGSLDRLYKKVRANGARIGEYPILKIAENALKGLNYLHTRKIIHRDIKPSNILMTLEGQAKLCDFGVSGELVSSMAKTFTGTSYYMAPERIKGETYSITSDIWSLGLTLMEISQNRFPFPPEGPPLVPIELLNYIVNISNFELVDEPDNKIKWSEDFKHFLKTCLERDGAKRPNSQRMLEHPWVMKHSIIKIDMAKWIKQILELPL

SEQ ID NO: 7763 - protein, 379 aa, Nicotiana tabacum
MGEALNVMESVRSIVFKESENLEGSATKIEGYDFNKGVNYAELFKSMASTGFQAANLGDAIQIVNQMLDWRLSHEQPMEDCSEEERDVAYRESVTCKIFLGFTSNLVSSGVRDTIRYLVQHRMVDVVVTTAGGIEEDLIKCLAPTYKGDFSLPGAVLRSKGLNRIGNLLVPNDNYCKFENWIIPIFDQMYEEQIKEKVLWTPSKVIARLAKEINDETSYLYWAYKNRIPVFCPGLTDGSLGDMLYFHSFKKGDPDNPDLNPGLIIDIVGDIRAMNSEAVHAGSRKTGMIILGGGLPKHHVCNANMMRNGADFAVYINTAQEFDGSDSGARPDEAVSWGKIRGGAKTVKVHCDATIAFPILVAETFAAKRKELSHIRCQV

SEQ ID NO: 7764 - protein, 166 aa, Triticum aestivum
  misc_feature (92)..(92): Xaa can be any naturally occurring amino acid
  misc_feature (102)..(102): Xaa can be any naturally occurring amino acid
  misc_feature (116)..(116): Xaa can be any naturally occurring amino acid
  misc_feature (146)..(146): Xaa can be any naturally occurring amino acid
  misc_feature (148)..(148): Xaa can be any naturally occurring amino acid
MAPTVMASSATSVAPFQGLKSTAGLPVSRRSNGASLGSVSNGGRIRCMQVWPIEGIKKFETLSYLPPLSTEALLKQVDYLIRSKWVPCLEFXSKVGFIFREXHNASPGYYDGRYWXTMWKLPMFGCTDATQVINEVEEVKKEYPDXYXRIIGFDNIRQVQCVSSSP

SEQ ID NO: 7765 - protein, 227 aa, Spiraea cantoniensis
HGHEVEACKNSLQKLQLDYLDLYLVHYPLATRHRVGTTASLLDENKVLDIDVTVSLESTWRGMEKAVELGLVRSIGLSNYELFLTRDCLSYAKIKPAVSQFETHPYYQRESLVRFCQKHGICATAHTPLGGGTANTKYFGSTSPLGDPVLNEVAKKYKKSVAQICLRWNIDRCTAVIPKSSKVERLKENLQVLDFKLEKEDIELIBTIVRKRRTTLPSLSWGLDVYA

SEQ ID NO: 7766 - protein, 151 aa, Ralstonia metallidurans CH34
MILWRVALFFFLFTAPVWASDQAAEDRMLGIASELRCLVCQNESIAASQADLAADLRQQIREQIRAGKSDDDIRTYMVERYGDFVLYRPPLKPTTMLLWFGPFVVLALGIVVLVMNLRSRNRKPKHAALNEEERRHADALLAPPHNVLDET

SEQ ID NO: 7767 - protein, 219 aa, Holodiscus microphyllus
WNSDHGHVVEACKNSLKKLQLDYLDLYLVHYPLATKHSVGNTASLLDENKVLDIDVTVSLESTWHAMEKAVKLGLVRSIGLSNYELFLTRDCLSYAKIKPAVSQFETHPYYQRDSLVKFCQKHGVCATAHTPLGGATANTKYFGSVSPLGDPVLNEVAKKYQKSVAQICLRWGIERKTAVIPKSSKPERLKENLQVLEFKLEREDIELINSIDRKYRTS

SEQ ID NO: 7768 - protein, 389 aa, Lactobacillus plantarum
MTMQHVFPTYQRFPFAITDGQGVHLTDNHGKTYLDFTAGIGVCNFGYHQPQIQAAVTQQLTHIWHTSNLYENELQDAVAGLLANGEERLVYFANSGTEANEAALKLARKYTGKTGILAFQHSFHGRTYGAMSMTGNPHIQAGYAPLVPGITFATYNDDAALDKITPELAAVILEVVQGEGGVFAGQTAWLQAVNAKCQATGVLLIIDEVQTGIGRTGYRMAYEGYGLDPDIYTVAKGLANGLPVGAMVGRRQLATAFGPGSHGSTFAGNAVAMAAAKRVLTQLTPALLTTVRAHAKLVWQSLATQVEPIPVVKQITGKGLMIGIHLDEQIPVNQVITRLQVEGLLTLSAGDNTLRLLPPIVMQPADLLAGIALIAKVLTTLTTEVTTNE

SEQ ID NO: 7769 - protein, 250 aa, Glycine max
KSLGVKMVISGEGSDEIFGGYLYFHKAPNKEEFHQETCRKIKALHKYDCLRANKSTFAWGLEARVPFLDKEFIRVAMNIDPECKMIKKEEGRIEKWALRRAFDDEEHPYLPKHILYRQKEQFSDGVGYGWIDGLKAHAEKHVTDRMMLNAANIFPFNTPTTKEAYHYRMIFERFFPQNSARLTVPGGASVACSTAKAVEWDAAWSNNLDPSGRAALGVHISAYENQNNKGVEIEKIIPMDAAPLGVAIQG

SEQ ID NO: 7770 - protein, 278 aa, Silene vulgaris
EAHSLKVEKILFQGKSKLQDVMVFQSSTYGKVLILDGVIQLTERDECAYQEMISHLPLCSIPNPKKVLVIGGGDGGVLREVARHSSVEHIDICEIDEMVVTVSKEFFPEVAVGYDDPRVNLHIGDGVAFLKAATEGSYDAVIVDSSDPIGPAKELFEKPFFESVAKALRPGGVVCTQAESIWLHMHIIEDIVSNCREIFKGSVNYAWTTVPTYPSGVIGFMVCSTEGPAVDFRNPVNPIDKMEDEKRPLKFYNAEIHSAAFCLPSFAKRIIEAKANST

SEQ ID NO: 7771 - protein, 624 aa, Triticum aestivum
  misc_feature (590)..(590): Xaa can be any naturally occurring amino acid
MRGLRRSSLARIASTTRAASARQCSSSILGGARAAPYCTMAGRSGEEADAAMAGVATGGVEDAYGEDRATEDQPVTPWAVCIASGHSLLRDPRHNKGLSFTEKERDAHYLRGLLPPVVLSQELQEKRLLQNVRQLDVPLQRYMFLMDLQERNERLFYKLMIDNVEELLPVVYTPTVGEACQKYGSIFRRSQGLYISLKDKGRVLEVLRNWPEKSIQVIVVTDGERILGLGDLGCQGMGIPVGKLALYTALGGVRPSACLPITIDVGTNNEELLNDEFYIGLRQKRATGQEYTELLDEFMVAVKQNYGQKVLVQFEDFANHNAFTLLEKYKATHLVFNDDIQGTAAVVLAGLMAGLKFAGGTLADHTFLFFGAGEAGTGIAELVALEISMQSKTSQEEARKNIWLVDSKGLIVSSRKDSIQPFKKLYAHEHEPVKDLLSAIKDIKPTALIGSAGVGQSFTKEVIEAMSSINKRPIILALSNPTSKSECTAEQAYSWSQGRAIFGSGSPFDPVKYNDKLFVPAQANNAYIFPGFGLGVVTSGAIRVKDDMVLAAAEALAEQVTAEHFDKGLIYPPFSSIRKISANIAARVGXKAYDLGLASHLPRPKDLVKYAESCMYSPIYRSYR

SEQ ID NO: 7772 - protein, 106 aa, Glycine max
  misc_feature (67)..(67): Xaa can be any naturally occurring amino acid
NEEGREIAEKLGVRNLFWDWDLPRTREGFCGFKGSMTASVVRGCAFCPHADDIWMVTASPYVVERPXLFNGVMSKHAHMMLEYYLSSCLNWDAFVMSGEHIKGSIP

SEQ ID NO: 7773 - protein, 278 aa, Silene latifolia
EAHSLKVEKILFQGKSKYQDVMVFQSSTYGKVLILDGVIQLTERDECAYQEMISHLPLCSIPNPKKVLVIGGGDGGVLREVARHSSVEHIDICEIDEMVVTVSKEFFPEVAVGYDDPRVNLHIGDGVAFLKAATEGSYDAVIVDSSDPIGPAKELFEKPFFESVAKALRPGGVVCTQAESIWLHMHIIEDIVSNCREIFKGSVNYAWTTVPTYPSGVIGFMVCSTEGPAVDFKNPVNPIDKTEDEKRPLKFYNAEIHSAAFCLPSFAKRIIEAKANST

SEQ ID NO: 7774 - protein, 427 aa, Coxiella burnetii
MTELTGVSIVTYQHIKVPSEGEKITVNKAVLEVPDRPIIPFIEGDGIGIDITPVMKNVVDAAVEKSYAGKRKIEWMEIYAGEKATKVYGKDNWLPDETLEAIKEYQVAIKGPLTTPVGGGIRSLNVALRQQLDLYVCLRPVRYFTGVPSPVKTPEKVNMVIFRENSEDIYAGIEWPAGSPEAVKLINFLQNEMGVKKIRFPETAGIGIKPVSKEGTSRLVRRAIQYAIDNDRDSVTLVHKGNIMKFTEGAFKDWGYEVAVKEFGAKPLDGGPWHVFENPKTGQKITIKDVIADAFLQQILLRPAEYSVIATLNLNGDYISDALAAEVGGIGIAPGANLSDTVGLFEATHGTAPKYAGQDKVNPGSLILSAEMMLRYLGWKEAADLVVQGIEGAIESKTVTYDFARLMTGAKEVSASQFAKAIIKHIL

SEQ ID NO: 7775 - protein, 238 aa, Zea mays
  misc_feature (122)..(122): Xaa can be any naturally occurring amino acid
  misc_feature (228)..(228): Xaa can be any naturally occurring amino acid
IIDKSIHTAYVRAIRSAQHFIYIENQYFLGSSYEWPSYVNSGADNLIPMELALKIATKIRAGERFAVYVVIPMWPEGVPTSASVQEILFFQAQTMEMMYGVIARELKAMNIEDAHLQDYLNXYCLGNREEPSTDGSPESDKSTDKSAAGLARKHRRFMIYVHAKGMIVDDEYVILGSANINQRSLAGSRDTEIAMGAYQPHHAWSSKKGHPHGQVYGYRNSLWAEHLXMVDDHFKEPS

SEQ ID NO: 7776 - protein, 227 aa, Arabidopsis thaliana
MPVHDEQEHEVYGGDIPEEEEGEMDTEEYEEHGGEEGAAAGDEELEPGSSSRDLEDMKKRIKEIEEEAGALREMQAKAEKDMGASQDPSGGVSAAEKEEVDSRSIYVGNVDYACTPEEVQQHFQSCGTVNRVTILTDKFGQPKGFAYVEFVEVEAVQNSLILNESELHGRQIKVSAKRTNVPGMRQFRGRGRPFRPMRGFMPGVPFYPPYAYGRVPRFRRPMRYRPY

SEQ ID NO: 7777 - protein, 353 aa, Triticum aestivum
MGSISDDEAACIYAMQLAAAAVLPMTLKNAIELGMIEILVGAGGKMLSPSEVAAQLPSTANAEAPAIVDRMLRLLASHNVVSCEVEEGKDGRLARRYGTAPVCKWLSPDEDGVSLAPMVLLNDKVMLESWYHLKDTVLNGGLPFEKAYGMTAFDYQGTDPRFNRVFNEAMKTHSMIITKKLLEFYKGFDGVGTLVDVGGGVGATIHTILCRYPSIEGVNFDLPHVISEAPSFAGVHHIGGDMFKKVPSGDAILMKWILHDWNDEHCTTLLSNCYDALPAHGKVVIVEYILPVKPDETATAQRSFEADMIMLTHTPGGKERYLREYEELARSAGFASVKATYVYSNIWVIELNK

SEQ ID NO: 7778 - protein, 509 aa, Glycine max
  misc_feature (282)..(282): Xaa can be any naturally occurring amino acid
  misc_feature (288)..(288): Xaa can be any naturally occurring amino acid
  misc_feature (296)..(296): Xaa can be any naturally occurring amino acid
MGSDNHQNLEFLKEIGLGSSNIGSYINGQWKATGSSVTSVNPSNNQSIAQVTEATLQDFEEGLQACSEAAKTWMTIPAPKRGEIVRQIGEALRAKLDPLGRLVSLEMGKILPEGIGEVQEIIDMCDYCVGLSRQLNGSIIPSERPDHMMFEVWNPLGIVGVITAFNFPCAVLGWNACIALVCGNCVVWKGAPTTPLITIAVTKLVAEVLERNKLPGAIFTSFCGGADIGQAIAKDTRIPLVSFTGSSKVGLMVQQTVNERFGKCLLELSGNNAIIVMDDADXSNWLYXYFVCSCGXAGQRCTTCRRLFLHESIYADVLDQLIGVYKQVKIGNPLEKGTLVGSLHTPTSVENFQKGISVIKSQGGKILTGGSVLESAGNFVQPTIVEISPDAPVVKEELFGPVLYVMKFQTLEEAIALNNSVPQGLSSSIFTQRPGTIFKWIGPRGSDCGIVNANIPTNGAEIGGAFGGEKATGGGREAGSDSWKQYMRRSTCTINYGSELPLAQGINFG

SEQ ID NO: 7779 - protein, 225 aa, Zea mays
  misc_feature (204)..(204): Xaa can be any naturally occurring amino acid
MAISTDSRGEEKPSQHSQEEKRWVLSDFDVGKALGRGKFGHVYLAREKRSSHIVALKVLFKSQLKQSQVEHQLRREVEIQSHLRHPNILRLYGYFYDQTRVYLILEHAAKGELYKELQRCKHFSERRSATYIASLARALIYLHGKHVIHRDIKPENLLVGLQGELKIADFGWSVHTFNRRRTMCGTLYYLPPEMVEKTEHHYHXVDICELGHPMLLDFLYGLPTF

SEQ ID NO: 7780 - protein, 527 aa, Zea mays
MAMAMMAMRRAVALGARHIPAAAASSFRVVSLRHMSADAGAAMEKIRAAGLLRTQGLIAGQWVDAYDGKTIEVQNPATGEVLANVSCMGSRETSDAIASAHSTFYSWSKFTASERSKALRKWYDLIISHKEELALLMTLEQGKPMKEALGEVNYGASFIEYFAEEAKRIYGDIIPPTLSDRRLLVLKQPVGVVGAITPWNFPLAMITRKVGPALACGCTVVVKPSEFTPLTALAAADLALQAGIPAGALNVVMGNAAEIGDALLQSTQVRKITFTGSTAVGKKLMAGSANTVKKVSLELGGNAPCIVFDDADIDVAVKGSLAAKFRNSGQTCVCANRILVQEGIYEKFAKAFIQAVQSLKVGNGLEESTSQGPLINEAAVQKVEKFINDATSKGANVMLGGKRHSLGMSFYEPTVVGNVSNDMLLFREEVFGPVAPLIPFKTEEEAVHMANDTNAGLAAYIFTKSIPRSWRVSESLEYGLVGVNEGIISTEVAPFGGVKQSGLGREGSKYGIDEYLELKYICMGNLG

SEQ ID NO: 7781 - protein, 462 aa, Bacillus cereus ATCC 10987
MTFSKSTTDKPSYTYEELSEKNKAYVWHPFTQMKDYLEEDPVIIERGEGRKLYDVNGNEYWDGVSSIWLNVHGHQVPELDEAIREQLNKISHSTMLGLANVPSILLAEKIIEVVPEGLKKVFYSDSGSSAVEIAIKMAFQYWQHKGKPKKQRFVTLKEAYHGDTIGAVSVGAIDLFHQVYSSLLFEAIKMPYPYTYRSPYGNNKEEIVKKHLEEMEELLKDKHEEIAAIIVEPLMQGAGGMITMPKGYLKGLRNLCTKYNVLFITDEVATGFGRTGKMFACEHENVTPDILTAGKGLTGGYLPVAITVTTDEIYNAFLGGYEEQKTFFHGHSYTGNPLGCAVAIANLELYEKTNLIEEVARKTEYVATQLEDLFAYKHVGDIRQCGLMVGIELVKNKETKEAFEWTERVGVQVCKRSRELGMILRPLGNTIVFMPPLASTIDEIDDMLRILYKAISDVTEGE

SEQ ID NO: 7782 - protein, 444 aa, Thermococcus kodakaraensis
MIRVYTISGYEEVGKNMTAVGYSDGRKEEVVIIDMGIRLDRVLIHEDVNIQQFPTKELQRLGAIPDDSILRNKKVVAITFTHGHLDHIGAVGKIAPHYPDVPIYGTPYTIKLAKSEVKSEQYFEVKNPMYETEFGEIVQVSENLAIEFVRITHSIPQAAMVVVHTPEGAVVHTGDFKFDNNNPLGERPDYKRLKELGKEGVKVLIAESTRVAEPTKTPSEAVAQMLLEDFFLYEGMDEKGLIATTFASHIARLQELIWIANKMGRQAVFVGRSLAKYTGIAKQLGLIKMKGARAVRSPNAIKKVLAEVSGARENYLLVVTGHQGEPGAVLTRMANGELYDIGKQDTVVFSAGTIPNPLNRAQRYILETKLKMKGVRMIKDLHVSGHASREDHRYLLRMLNPENIVPAHGEFRMLTHYAELAEEEGYLIGRDVFVSRNGYTVEIE

SEQ ID NO: 7783 - protein, 325 aa, Schizosaccharomyces pombe
MSIKEFAKNAREAYFTLPNGDKIPSIGLGTWRSGKDETKNAVCAALKAGYRHIDTAHIYGNEKEIGEGIRESGVPRTDIWVTSKLWCNAHRAGLVPLALEKTLQDLNLEYIDAYLIHWPFALLSGPEELPRNEKGELIYEDVPIEETWQAMEELLETGKVRYIGISNFNNEYLDRVLKIAKVKPTIHQMELHPYLPQTEYLEKHKKLQIHVSAYSPLANQNDAYNSDISKLIEHKTLVDIANARGEGITPANIAISWAVKRGTSVLPKSVNESRIVSNFLYIPLTDKEMEAINNIGVVRRFSHGKFAPKPMFVGLQDGTPKQTHA

SEQ ID NO: 7784 - protein, 172 aa, Burkholderia cepacia R1808
MATFATAPARAEGPFTVTSTDLAPGGRVGAAQLFDRGECNGENRSPQLSWRNPPPGTRGYAVTIFDPDAPGHGWWHWAVADLPATVTSLPANASASGFLRRIGASEARNDFGTDGYGGPCPPPGKPHRYVITVYALKGTDLRVAQGRPAPMFEHEIGTLTIGTAQLTVTYGR

SEQ ID NO: 7785 - protein, 503 aa, Nierembergia sp. NB17
MMQLSTELAIAAIIFLLAHILISKTSGRRLPPGPRGWPVIGALPLLGDMPHVSLAKMAKKYGPIMYLKVGTCGMAVASTPHAAKAFLKTLDINFSNRPPNAGATHFAYNAQDMVFAPYGPRWKLLRKLSNLHMLGGKALEDWSNVRANELGHMLKSMLDLSREGQRVVIADMLTFAMANMIGQVILSKRVFVDKGVEVNEFKNMVVELMTVAGYFNIGDYIPCLAWLDLQGIEKGMKILHKKFDVLLTKMFDEHKTTSHEREGKSDFLDMVMANRDNSEGERLSTTNIKALLLNLFTAGTDTSSSVIEWALTEMLKNPSILKKAQVEMDQVIGKNRRLLESDISNLPYLRAICKETFRKHPSTPLNLPRISSESCEVDGYYIPKNTRLSVNIWAIGRDPDVWENPLKFNPERFLSGKYAKIDPRGNDFELIPFGAGRRICAGTRMGIVMVEYILGTLVHSFDWKLPSDVIELNMEEVFGLALQKAVPLEAMVTPRLPLNVYAP

SEQ ID NO: 7786 - protein, 185 aa, Zea mays
  misc_feature (161)..(161): Xaa can be any naturally occurring amino acid
MTKAATIYGSKTQSDALRPGPLRPENIFRNKFPTYKNGSNGIVIKLADGPEIPPLKEIVAKETAYLLDRRQRLSVRELAMKFEKGLSTATLLSNEVKWRQVVLMERDILLKNLKSVLESLRGQVTGKTKDEIEESISMVEILTVQLSKREAELVQQKEEVXKLAKSLKQMCFTLLYNLCKHVLVI

SEQ ID NO: 7787 - protein, 250 aa, Suaeda salsa
MGKSYPTVSEENQKSIEKAKKKLRGLISEKHCAPIMLRLAWHSAGTFDVQSKTPGPFGTMRHQAELAHGANNGLDIALRLLEPIKEQFPEISFADFYQLAGVVAVEVTGGPEIPFHPGREDKPEPPQEGRLPDATKGCDHLRDVFIKQMGLTDQDIVALSGGHTLGRCHKDRSGFEGPWTPNPLVFDNSLLKELLSGEKDGLLQLPSDKALLADPVFRPLVEKYAADEDAFFADYSDAHLKLSELGFADA

SEQ ID NO: 7788 - protein, 154 aa, Sorbaria sorbifolia
SIGLSNYELFLTRDCLSYAKIKPAVSQFETHPYYQRETIVRFCQKHGVVPVAHTPLGGATANTKYFGSVSPLGDPVLNELAKKYQKSVAQICLRWNIERNTPVVPKSTKVERLKENFQALDFKLEKEDIDLINTIDRKSRTTLPSLSWGLDVYA

SEQ ID NO: 7789 - protein, 347 aa, Escherichia coli CFT073
MKNSKAILQVPGTMKIISAEIPVPKEDEVLIKVEYVGICGSDVHGFESGPFIPPKDPNQEIGLGHECAGTVVAVGSRVRKFKPGDRVNIEPGVPCGHCRYCLEGKYNICPDVDFMATQPNYRGALTHYLCHPESFTYKLPDNMDTMEGALVEPAAVGMHAAMLADVKPGKKIIILGAGCIGLMTLQACKCLGATEIAVVDVLEKRLTMAEQLGATVVINGAKEDTIARCQQFTEDMGADIVFETAGSAVTVKQAPYLVMRGGKIMIVGTVPGDSAINFLKINREVTIQTVFRYANRYPVTIEAISSGRFDVKSMVTHIYDYRDVQQAFEESVNNKRDIIKGVIKISD

SEQ ID NO: 7790 - protein, 222 aa, Arabidopsis thaliana
MDSLAISPRKLRSDLYSYSYQDDSNTVPLVISVLSSLIERTLARNERISRSYGGFGKTRVFDCREIPDMTIQSYLERIFRYTKAGPSVYVVAYVYIDRFCQNNQGFRISLTNVHRLLITTIMIASKYVEDMNYKNSYFAKVGGLETEDLNNLELEFLFLMGFKLHVNVSVFESYCCHLEREVSIGGGYQIEKALRCAEEIKSRQIVQDPKHHHHHQFSRIML

SEQ ID NO: 7791 - protein, 394 aa, Burkholderia cepacia R18194
MARVKATAPVLAVHGATITKHFYQRMFARHPELKNLFNQTHQKTGSQPETLAKAVYAYAANIDNLGALGGAVTKIAHKHASLNIRPEHYPIVGENLLASIVEVLGDAVDAETLEAWRVAYGQLAQILIGVEADLYAGAAWSGFRPFKVERKVRESDEITSFYLTPADGGAAPTFEPGQYITVKRFVGDLGVDQPRQYSLSDAPHGKWLRISVKREAGKPEVIPAGKVSTLMHDGVEEGAIVEVTAPMGEFSLKRGVETPVVLISGGVGITPMMSMASTLIAEGSQREVRFVHACRSGAVHAFRDWLNDTVRDHANVKRTVLYELVGPNDRAGIDYDLEGRLTPERVQQYALVPDADYYICGPIGFMKAQRDALVALGVAPERVNTEIFGSGALE

SEQ ID NO: 7792 - protein, 149 aa, Chamaebatiaria millefolium
NYELFLTRDCLSYAKIKPAVSQFETHPYYQRETIVRFCQKHGVCPVAHTPLGGATANTKYFGSVSPLGDPVLNEVAKKYQKSVAQICLRWNIERNTAVVPKSTKVERLKENFQVLDFKLEKEDIDLINTIDRKSRTTLPSLSWGLDVYA

SEQ ID NO: 7793 - protein, 54 aa, Triticum aestivum
MGSETFVEILLAILLPPVGVFLRYGIGVEFWICLLLTVLGYIPGIIYAIFVLVA

SEQ ID NO: 7794 - protein, 293 aa, Gibberella zeae PH-1
MAPDVCTFTLNTGDEMPAVGFGTWNIPRSQAAKAVETALRAGYRHIDTALAYGNEKEVGAGIRASGVPREEIWVSGKLRNNWHKHARKCLQTSLKNLGVGYLDLYLIHWPCSRDADNPAICYEDWDYVDTWMEMEELLDEGKVLNIGVSNFGIQQLERLLTSTEIVPAVNQIELHPCNPSPKLVAYCNNRGIHSEGYSCLGSGHSALHRNKTLRDIADAKEKTVQQVLLQWGIEKGWGVVCKSVTPSRIKSNFELSGWELTDDDMEAIDGIKKRFKAVGDGFLPHRVFFGDDE

SEQ ID NO: 7795 - protein, 358 aa, Escherichia coli CFT073
MKALARFGKAFGGYKMIDVPQPICGPEDVVIEIKAAAICGADMKHYNVDSGSDEFNSIRGHEFAGCIAQVGEKVKDWKVGQRVVSDNSGHVCGVCPACEQGDFLCCTEKVNLGLDNNTWGGGFSKYCLVPGEILKIHRHALWEIPDGVDYEDAAVLDPICNAYKSIAQQSKFLPGQDVVVIGTGPLGLFSVQMARIMGAVNIVVVGLQEDVAVRFPVAKELGATAVVNGSTEDVVARCQQICGKDNLGLVIECSGANIALKQAIEMLRPNGEVVRVGMGFKPLDFSINDITAWNKSIIGHMAYDSTSWRNAIRLLASGAIKVKPMITHRIGLSQWREGFDAMVDKTAIKVIMTYDFDE

SEQ ID NO: 7796 - protein, 149 aa, Exochorda racemosa
NYELFLTRDCLSYAKIKPAVSQFETHPYYQRESLVRFCQKHGVVAAAHTPLGGATANTKYFGSTSPLGDPVLHDVAKKYQKSVAQICLRWNIERNTPVIPKSSKVERMKENLQVLDFNLEKEDIELINGIDRKSRTTLPSLSWGLDVYA

SEQ ID NO: 7797 - protein, 503 aa, Panax ginseng
MAIRIPTRQLFIDGEWREPAKKNRIAIINPATEQIIGNIPAATSEDVDIAVEAARRALARNGGSDWASASGAYRAKYLRAIAAKITERKSELAKLETLDCGKPLEEAAWDIDDVAACFEYNADLAEALDGKQKSPISLPMETFKSYILKEPIGVVGLITPWNYPMLMATWKVAPALAAGCAAILKPSELASVTCLELGEVCKEVGLPPGILNILTGLGPEAGAPLASHPHVDKIAFTGSTATGSKIMTAAAQQVKPVTLELGGKSPILVFEDVDLDKAAEWTIFGCFWTNGQICSATSRLLVHESIAAEFLDKLMKWTKNIKISDPLEEGCRLGPVVSGGQYEKVMESISTAKKEGATILCGGARPKHLEKGFFIEPTIISDVTTSMQIWREEVFGPVLCVKTFRTEDEAIELANDTRYGLGGAVISNDLERCERVTKALQSGIVWINCSQPCFCQAPWGGKKRSGFGRELGEWGLDNYLSVKQVTQYVSDEPWGWYQSPSKL

SEQ ID NO: 7798 - protein, 204 aa, Zea mays
  misc_feature (110)..(110): Xaa can be any naturally occurring amino acid
MAAAAAGATRRAASSLASRCLLSRPAASPAAVPSALRRADGARGLLPGLLQRFGTAAAAEEPISPSVQVGETQLLINGKFVDAASGKTFPTLDPRTGEVIARVSEGDAEXVDRAVVAARKAFDEGPWPKMTAYERSRILLRFADLIEKHNDEIAALETWDNGKPYEQVPHIEVPMLARLMRYYAGWTDKIHGLIVPADGPSYLQ

SEQ ID NO: 7799 - protein, 153 aa, Nicotiana clevelandii
MKMIVLRSSDGETFEVEESVALESQTIKHMIEDDCADTSIPLPNVTSKILAKVIEYCKRHVDAASKTEDKAVEDDLKAFDADFVKVDQSTLFDLILAANYLNIKSLLDLTCQTVADMIKGKTPEEIRKTFNIKNDFTPEEEEEVRRENAWAFE

SEQ ID NO: 7800 - protein, 297 aa, Glycine max
  misc_feature (113)..(113): Xaa can be any naturally occurring amino acid
MLLLERQRILLRAADLLEKHNDELAALETWDNGKPYEQAAKIEVPMLVRLIRYYAGWADKIHGLTVPADGPYHVQTLHEPIGVAGQIIPWNFPFLMFCCCVGSRTFVHESVSXVVEKAKARAFKRVVGDPFKGGIEQGPQIDSDQFEKILRYIRSGVESGATLETGGDKLGNKGFYIQPTVFSNVKDGMLIARDEIFGPVQSILKFKDLGEVVQRANNTRYGLAAGVFTTNMDTAYTLTRALRVGTVWINCFDTFDAAIPFGGYKMSGQGREKGEYSLKNYLQVKAVVNPLKNPAWL

SEQ ID NO: 7801 - protein, 278 aa, Silene latifolia
EAHSLKVEKILFQGKSKYQDVIVFQSSTYGKVLILDGVIQLTERDECAYQEMISHLPLCSIPNPKKVLVIGGGDGGVLREVARHSSVEHIDICEIDEMVVTVSKEFFPEVAVGYDDPRVNLHIGDGVAFLKVAPEGSYDTVIVDSSGPIGPAKELFEKPFFESVAKALRPGGVVCTQAESIWLHMHIIENIVSSCREIFKGSVNYAWTTVPTYPSGVIGFMVCSTEGPAVDFKNPVNPIDKTEDEKRPLKFYNAEIHSAAFCLPSFAKRVIEAKAKST

SEQ ID NO: 7802 - protein, 118 aa, Brassica napus
MYYQLTKSSYMDSLKILEADIEHANGLAAEIPMGKSGVRLQVKLVCSNLAPFFIFLLQWMDFSCLLPRYFDFFHILIYKVRADGRWNRSRYGRKATIREFYCKFNTFVCVVYTIGLVL

SEQ ID NO: 7803 - protein, 430 aa, Zea mays
MAYAAGRKKRVGRYEVGRTIGQGTFAKVKFAVDADTGAPVAMKVLDKETIFAHRMLHQIKREISIMKIVRHPNIVRLNEVLAGKTKIYIILELVTGGELFDKIPRYGKLRENEARKYFQQLIDAIDYCHSKGVYHRDLKPQNLLLDSRGNLKLSDFGLSTLSQNGVGLVHTTCGTPNYVAPEVLSSNGYDGSAADIWSCGVILYVLMAGYLPFEENDLPHLYEKITAAQYSCPYWFSPGAKSLIQRILDPNPRTRITIEEIREDPWFKKNYVTIRCGEDENVSLDDVQAIFDNIEDKYVSDEVTHKDGGPLMMNAFEMIALSQGLDLSALFDRQQEFVKRQTRFVSRKPAKTVVATIEVVAESMGLKVHSRNYKVFEVAPSLFMVDVRKVAGDTPEYHRFYENLCSKLCSIIWRPTEVSAKSTPLRTTTC

SEQ ID NO: 7804 - protein, 150 aa, Silene latifolia
FLKVAPEGSYDTVIVDSSGPIGPAKELFEKPFFESVAKALRPGGVVCTQAESIWLHMHIIENIVSSCREIFKGSVNYAWTTVPTYPSGVIGFMVCSTEGPAVDFKNPVNPIDKTEDEKRPLKFYNAEIHSAAFCLPSFAKRVIEAKAKST

SEQ ID NO: 7805 - protein, 443 aa, Zea mays
MESTGKILMERYEVGRLLGKGTFGKVHYAKNLESNESVAIKMMDKDKVLKAGLSEQIRREITTMRLVAHKNIVELHEVMATRNNIYFVMEYVKGGELFDKIGKSGKLTEAAAHKYFQQLIGAVDYCHSRGVYHRDLKPENLLLDENENLKVSDFGLSALSESKGQDGLLHTTCGTPAYVAPEVISKTGYDGAKSDIWSCGVVLFVLVAGYLPFRAPNMMEMYRKIQNGDFRCPSWFSHKLKKLLYKILDPSPDTRISVQKIKESTWFRKGPVETRTVKEKILSENDTTNAAPAVAMRRKKNVHEDVKPPTVTSLNAFEIISFSTGLDLSGLFIRKECKKETRFTSDKGAVSIISKLEDVAKALNLRVRKKDNGVVKIQGRKVGRKGVLEFDTEIFEITASYHLIEMKQTGGDSLEYKKLLEEDIRPALKDIVWAWHGDDQQQK

SEQ ID NO: 7806 - protein, 304 aa, Oryza sativa (japonica cultivar-group)
MGGFVKTQKTHAYFKRFQVKFKRRRQGKTDYRARIRLTNQDKNKYNTPKYRFVVRFTNKDITAQIVYATIAGDIVMAAAYSHELPRYGLEVGLTNYAAAYCTGLLLARRVLTLRGLDQEYEGNVEATGEDYYVEPADERRPFRALLDVGLIRTTTGNRVFGALKGALDGGLDIPHSDKRFAGFKKDEKQLDSDIHRKYIYGGHVADYMRSMAEEEPEKFQAHFSEYLKKGIDADGMESLYKKVHAAIRADPTMAKSTKKEPATHKRYNLKKLTYEQRKASLVERLNALNSSAGADDDDEEEDDE

SEQ ID NO: 7807 - protein, 304 aa, Oryza sativa (japonica cultivar-group)
MGGFVKTQKTNAYHKRFQVKFKRRRQGKTDYRARIRLTNQDKNKYNTPKYRFVVRFTNKDITAQIVYATIAGDIVMAAAYSHELPRYGLEVGLTNYAAAYCTGLLLARRVLKLRGLDQEYEGNIEATGEDYYVEPADERRPFRALLDVGLIRTTTGNRVFGALKGALDGGLDIPHSDKRFAGFKKDEKQLDSDIHRKYIYGGHVADYMRSMAEEEPEKFQAHFSEYLKKGIDADGMEALYKKVHAAIRADPTMAKSTKKEPATHKRYNLKKLTYEQRKASLVERLNALNSSAGADDDDEEEDDE

SEQ ID NO: 7808 - protein, 205 aa, Arabidopsis thaliana
MAEGSMRPPEFNQPNKTSNGGEEECTVREQDRFMPIANVIRIMRRILPAHARISDDSKETIQECVSEYISFITGEANERCQREQRKTITAEDVLWAMSKLGFDDYIEPLTLYLHRYRELEGERGVSCSAGSVSMTNGLVVKRPNGTMTEYGAYGPVPGIHMAQYHYRHQNGFVFSGNEPNSKMSGSSSGASGARVEVFPTQQHKY

SEQ ID NO: 7809 - protein, 309 aa, Triticum aestivum
  misc_feature (102)..(102): Xaa can be any naturally occurring amino acid
MAFLNMEQHTWAFTFGILGNIISLMVFLSPLPTFYRVYRKKSTEGFQSTPYLVTLFSCLLWMYYAFLKSGSELLLTINAVGCVIESLYIAMYLVYAPKSARXLTAKLFIGLDVGLFGLIALVTMLASHGPLRVQVVGWICVAVALGVFAAPLSIIRLVIRTKSVEFMPFSLSFFLVLSAVIWFAYGALKKDIFVAMPNVLGFLFGVAQMALYMAYRNKKPATVVLVHEEMKLPEHVKEVAGGAKPQGGAPTEGRISCGAEVHPIDVLPAVADEQAAAAADEDVIRDDQNMLRPEQPAVIKPDVAIVVQA

SEQ ID NO: 7810 - protein, 177 aa, Triticum aestivum
  misc_feature (53)..(53): Xaa can be any naturally occurring amino acid
  misc_feature (66)..(66): Xaa can be any naturally occurring amino acid
  misc_feature (73)..(73): Xaa can be any naturally occurring amino acid
  misc_feature (91)..(91): Xaa can be any naturally occurring amino acid
  misc_feature (98)..(98): Xaa can be any naturally occurring amino acid
  misc_feature (135)..(135): Xaa can be any naturally occurring amino acid
MSDTDEHHFESKADSGASKTYPQQAGAIRKGGHIVIKARPCKVVEVSTSKTGXKHGHAKCHFVAIXDIFNGKXSLEDIVPSSHNCDVPHVXRQRYQLXIDITGWMDMSTLPTGEWATPKDDLELPNRMISAWGSXDGFADGKDWILSVIPPWGERTSLPVKETVVASNTSAWPTAIL

SEQ ID NO: 7811 - protein, 349 aa, Mesorhizobium sp. BNC1
MVKPTSRLGRTIFVNESNLLKNGSGTLCPIDPEISLFLERLREGWSRHPPLSAVSSAEARWIAEIVREPFRQGGPVMAETLELLIPTRHGDMRARLYDPGLGEDAPVLIYLHGGGFTLFSINTHDRLMREYAHAARVKVLGLDYYLAPEHKYPVALDQVEDTLEWIGSANLGVDMQRLALGGDSAGGNLSLAAAIRMRDKGRPAAVKGLLFNYAGFATDCSDEAEALHGGPGSVMDRDEVRSFIRNYTRSPEDMKNPEVNLLDANVDHLPPSFFVIADRDIIAENSLAMAGKLRAAGNAMTCKIYRGATHSFLEAMSMSALARQAIADGADFIARILNTDAKYGLRAAS

SEQ ID NO: 7812 - protein, 364 aa, Nicotiana tabacum
MESSTKSQIPTQSEEERNCTYAMQLLSSSVLPFVLHSTIQLEVFEILAKSNDTKLSASQIVSQIPNCTKPEAPTMLNRMLYVLASYSLFTCSIVEDEKNNGGQKRVYGLSQVGKFFVKNENGASMGPLLALLQNKVFINSWFELKDAVLEGGVPFDRVHGVHAFEYPKSDPKFNDVFNKAMINHTTVVMKKILENYKGFENLKTLVDVGGGLGVNLKMITSKYPTIKGTNFDLPHVVQHAPSYPGVEHVGGDMFESVPEGDAIFMKWILHDWSDSHNLKLLKNCYKALPDNGKVIVVEAILPVKPDIDTAVVGVSQCDLIMMAQNPGGKERSEEEFRALATEAGFKGVNLICCVCNFWVMEFCK

SEQ ID NO: 7813 - protein, 495 aa, Bradyrhizobium japonicum USDA 110
MMSVAYDFAHSPASEFMARPQHLLIDGRRVPASSGRTFKSLNPATGQVIATVAEGNEADVDHAVAAARRAFEGPWRTMRASERGQILLRWAELLKANAEEIIELESIDAGKPISATLRQDFPAAVDTLIYYAGWADKISGDVVPVRDDALTYTVREPVGVVAAIVPWNFPLMIGMWKLAPALACGCTIVMKPAELTSLSALRIAELALQAGLPAGVFNVVTGPGRVVGDALVNHPDVDKVTFTGSPGVGRGIMKGAAGNFKRVSLELGGKSANVIFDDADLEAASKAAASGIFFNAGQVCSAGSRVLVQEKAYDEVVERLAARAKSLKIGDPLDRKTALGPVISEKQMKSILDYVDIGQKEGASLVTGGTRVGERGYFISPAVFANVEHEMRISQEEIFGPVVSIIKFRDEADALRIANGTAYSLAAGVWSRDIGKLQRFAKRARAGTVWMNTYGYTDVRLPWGGERDSGLGREHGTAALDNFTEPKAVWMNLAV

SEQ ID NO: 7814 - protein, 450 aa, Zea mays
  misc_feature (223)..(223): Xaa can be any naturally occurring amino acid
  misc_feature (239)..(239): Xaa can be any naturally occurring amino acid
MDIKDMKTRGKTLTERYEMGKLLGKGAFGKVHYARDLESNQGVAIKIMDKDRVLKAGLSEQVKREITTMRLVEHKNIVRLHEVMATRNKIYIIMEYAKGGELLDKVKRSGRLTEADTHRYFQQLIGALDHCHSRGVYHRDLKPENLLLDENGDLKVSDFGLSAFSESRRTDGLLHTVCGTPVYIAPEVIKKTGYDGAKSDIWSCGVVLFVLAAGYLPFQGPNXMEIYRKIHDRDFRCPXWFSHKLKRLLYKILNPNPSMRPSIQEIKESTWFRKGPREISAVNEKVLSENATTTNAAPVLAARRKEIAHEDMKSLVATNLNAFEIIALSAGLDLSGLFIKECRKETRFTSDKPALAIIAKLEDVAKALNLRIRKKDNNTVSIQGRKEGGNGVLKFDTQIFEITPSCHLVQIKQTSGDLLEYEKLLEEGIRPGLKDVVSAWHGDDLQQKQK

SEQ ID NO: 7815 - protein, 1575 aa, Streptococcus gordonii
MNKRKEVFGFRKSKVAKTLCGAVLGAALIAIADQQVLADEVTETNSTANVAVTTTGNPATNLPEAQGEATEAASQSQAQAGSKEGALPVEVSADDLNQAVTDAKAAGVNVVQDQTSDKGTATTAAENAQKQAEIKSDYAKQAEEIKKTTEAYKKEVEAHQAETDKINAENKAAEDKYQEDLKAHQAEVEKINTANATAKAEYEAKLAQYQKDLAAVQKANEDSQLDYQNKLSAYQAELARVQKANAEAKEAYEKAVKENTAKNAALQAENEAIKQRNETAKANYDAAMKQYEADLAAIKKAKEDNDADYQAKLAAYQAELARVQKANADAKAAYEKAVEENTAKNTAIQAENEAIKQRNAAAKATYEAALKQYEADLAAAKKANEDSDADYQAKLAAYQTELARVQKANADAKAAYEKAVEDNKAKNAALQAENEEIKQRNAAAKTDYEAKLAKYEADLAKYKKELAEYPAKLKAYEDEQAQIKAALVELEKNKNQDGYLSKPSAQSLVYDSEPNAQLSLTTNGKMLKASAVDEAFSHDTAQYSKKILQPDNLNVSYLQQADDVTSSMELYGNFGDKAGWTTTVGNNTEVKFASVLLERGQSVTATYTNLEKSYYNGKKISKAVFKYSLDSDSKFKNVDKAWLGVLPDPTLGVFASAYTGQEEKDTSIFIKNEFTFYDENDQPINFDNALLSVASLNRENNSIEMAKDYSGTFVKISGSSVGEKDGKIYATETLNFKQGQGGSRWTMYKNSQPGSGWDSSDAPNSWYGAGAISMSGPTNHVTVGAISATQVVPSDPVMAVATGKRPNIWYSLNGKIRAVNVPKITKEKPTPPVAPTEPQAPTYEVEKPLEPAPVAPTYENEPTPPVKTPDQPEPSKPEEPTYETEKPLEPAPVVPTYENEPTPPVKTPDQPEPSKPEEPTYETEKPLEPAPVAPTYENEPTPPVKTPDQPEPSKPEEPTYDPLPTPPVAPTPKQLPTPPVVPTVHFHYSSLLAQPQINKEIKNEDGVDIDRTLVAKQSIVKFELKTEALTAGRPKTTSFVLVDPLPTGYKFDLDATKAASTGFDTTYDEASHTVTFKATDETLATYNADLTKPVETLHPTVVGRVLNDGATYINNFTLTVNDAYGIKSNVVRVTTPGKPNDPDNPNNNYIKPTKVNKNKEGLNIDGKEVLAGSTNYYELTWDLDQYKGDKSSKEAIQNGFYYVDDYPEEALDVRPDLVKVADEKGNQVSGVSVQQYDSLEAAPKKVQDLLKKANITVKGAFQLFSADNPEEFYKQYVSTGTSLVITDPMTVKSEFGKTGGKYENKAYQIDFGNGYATEVVVNNVPKITPKKDVTVSLDPTSENLDGQTVQLYQTFNYRLIGGFIPQNHSEELEDYSFVDDYDQAGDQYTGNYKTFSSLNLTMKDGSVIKAGTDLTSQTTAETDAANGIVTVRSKEDSLQKISLDSPFQAETYLQMRRIAIGTFENTYVNTVNKVAYASNTVRTTTPIPRTPDKPTPIPTPKPKDPDKPETPKEPKVPSPKVEDPSAPIPVSVGKELTTLPKTGTNDSSYMPYLGLAALVGVLGLGQLKRKEDESN

SEQ ID NO: 7816 - protein, 315 aa, Azotobacter vinelandii
MRQHSIVVADTGDLEAIRRFAPEDATTNPSLILKAVQSGQYDGLVARVLGEVGGARSPEAAVDDACDRLVVALGERILASVPGRVSTEVNARLSFDREASIAKARRLVGLYEAAGIGRERILIKLAATWEGIRAAEVLEKEGIPCNLTLIFGFAQARACAEAGVHLISPFVGRILDWYRQADPATAYAPAEEPGVRSVRRIFDYFRRHAYPTVVMGASFRNVGEILALAGCDRLTISPALLEELAASEGVLAPALADTGEREARPAQRLGEAEFRWQMNEDAMATEKLAEGIRGFEADQLKLEALLRARLAGGVA

SEQ ID NO: 7817 - protein, 450 aa, Bacillus cereus ATCC 14579
MMKTKQTDELLAKDEQYVWHGMRPFSPNSTMVGAKAEGCWVEDIQGKRYLDGMSGLWCVNSGYGRKELAEAAYKQLQTLSYFPMSQSHEPAIKLAEKLNEWLGGEYVIFFSNSGSEANETAFKIARQYYAQKGEPHRYKFMSRYRGYHGNTMATMAATGQAQRRYQYEPFASGFLHVTPPDCYRMPEIEGQHIYDVECVKEVDRVMTWELSETIAAFIMEPIITGGGILMPPQDYMKAVHEMCQKHGALLISDEVICGFGRTGKAFGFMNYDVKPDIITMAKGITSAYLPLSATAVKKEIYEAFKGKGEYEFFRHINTFGGNPAACALALKNLEIMENENLIERSAQMGSLLLEQLKDEIGEHPLVGNIRGKGLLVGIELVNDKETKEPIDNDKIASVVNACKEKGLIIGRNGMTTAGYNNVLTLAPPLVISSEEIAFVVGTLKTAMERI

SEQ ID NO: 7818 - protein, 117 aa, Brassica napus
LEAGSKPEILLAMSCLCKGNNEAFLICNGFKDAEYVSLALLGRKLALNTVIVLEQEEELDLVIDLSHKMNVRPVIGLRAKLRTKHSGHFGSTSGEKGKFGLTTTQIVRVVRKLSEAC

SEQ ID NO: 7819 - protein, 500 aa, Gibberella zeae PH-1
MSDLYVNLEAPNGVKYRQPTGLFINNEFVPGSSTQKITSIDPATEKEIATVHAANADDVDKAVKAAYDAFRNPSWKKLPPPQRGVLMNKLADYIEERTKIFATSEAWDNGKVYTDAEGGDVVEVINTIRYYAGWADKITGQTITANPNKLAYTLRQPLGVVAQIIPWNYPLAMAAWKIGPALACGNTIVMKAAEQTPLSILLLGEAIKAVGFPPGVFNALNGYGSEAGPALVEHPLVDKVAFTGSTATGARIMEMASKTLKNITLETGGKSPLLVFSDSDIDEAVKWSHMGIMSNQGQICTATSRLLVQDKVYDEFVQRFIETTKTVSKVGHQWDSETYQGPQVSKQQYDRILEYIQIGKSEGATLLAGGQPVDSSKKGFFIQPTVFGDVHHQMRVFREEIFGPVVVITKFSDEAEALKLANDTTYGLGAAVFTKDVERAHRVAAEIEAGMVWINSTQDSEPYIPFGGVKQSGIGRELGEAGLEAYSNTKSIHVNLGSRL

SEQ ID NO: 7820 - protein, 316 aa, Vibrio parahaemolyticus RIMD 2210633
MSNKLEQLRKLTTVVADTGEIDAIKKYQPEDATTNPSLILKAAQIAEYAPLIDASIEYAKAQSNDKAQQVQDTCDMLAVNIGKEILKTIPGRISTEVDARLSYDMEGSVAKARQLVKMYNDAGITNDRILIKLASTWEGIRAAEILEKEGINCNLTLLFSFAQARACAEAGVFLISPFVGRIMDWYKAKEGRDFEASEDPGVLSVTKIYNYYKEYGYKTVVMGASFRNIGEILELAGCDRLTIAPALLAELEAAEGEVVEKLVDSKGAAERPAPMTHAEFLWEHNQDPMAVEKLAEGIRNFAVDQGKLEAMIEAKL

SEQ ID NO: 7821 - protein, 215 aa, Streptococcus agalactiae NEM316
MKYFLDTADVSEIRRLNRLGIVDGVTTNPTIISREGRDFKEVINEICQIVDGPVSAEVTGLTCDEMVTEAREIAKWSPNVVVKIPMTEEGLAAVSQLSKEGIKTNVTLIFTVAQGLSAMKAGATFISPFVGRLEDIGTDAYALIRDLRHIIDFYGFQSEIIAASIRGLAHVEGVAKCGAHIATIPDKTFASLFTHPLTDKGIETFLKDWDSFKKK

SEQ ID NO: 7822 - protein, 168 aa, Avena clauda
VMASSATSVAPFQGLKSTAGLAVSRRSNAGLGSVSNGGRIRCMQVWPIEGIKKFETLSYLPPLSEEALLKQIDFLIRSKWVPCLEFSKVGFIFRVHGSTPGYYDGRYWTMWKLPMFGCTDASQVIKEVEEVKKEYPDAYVRIIGFDNIRQVQCVSFIAFKPPGCEESG

SEQ ID NO: 7823 - protein, 494 aa, Gibberella zeae PH-1
MAENYHKEVISGLKNKSLFIQDAFINGQWVAKENKFDVFEPSTATVLGQVANCALEDFQTAIKSADVAQTKYFDSTTGASRGAMLRKWYDLVLANQEDLAKILSLENGKTYSEALGEVIYSASFISWFAEEATRSYGVTIPSSAPHTTLMTIREPVGVCGIITPWNFPAAMITRKIAPALAAGCSVVIKPPSETPYSALAFTKLAIEAGLPPATIQVLPTRDRQAATELATNPLVKKISFTGSTGVGKYLAKLAAGTLKKLSLELGGNAPFIVFEDADLDLAAEGAMFCKFRCSGQTCVCANRLYVQKSVAKEFTAKLVEKVNALKMGGGLDKTTTQGPLVNKSAIDKVKEHIADATSKGAKIATGGSTPDSPGFFHQPTVLTGVTQEMAVAKDETFGPLAPVFEFDTEEDAIRLANDTEFGLAGYFFSKDISRVMRVAHKMQVGMVGANTGKISAAEAPFGGVKESGYGKEGSLYGMAEYQNIKSITIGNLNN

SEQ ID NO: 7824 - protein, 296 aa, Zea mays
MAVATESRGSEDRASAHANQEKRWVLSDFEVGKPLGRGKFGHVYLAREKRSSEIVALKVLFKSQLKQSQVEHQLRREVEIQSHLRHPNILRLYGYFYDQTRVYLILEYAAKGELYKELTRCKHFSERRTATYVASLARALIYLHGKHVIHRDIKPENLLVGVQGEIKIADFGWSVHTFNRRRTMCGTLDYLPPEMVEKAEHDYHVDIWSLGVLCYEFLYGVPPFEAKEHSETYRRIVKVDLKFPLKPFVSPAAKDLISQMLVKSSAQRLPLHKVLEHPWIVQNADPSGVYREGRSI

SEQ ID NO: 7825 - protein, 182 aa, Triticum aestivum
MAGVGRNMVAPLLVLNLIMYIIVIGFASWNLNHFINGLTNRPGVGGNGATFYFLVFAILAGVVGAASKLAGVHHVRTWRGDSLATSASSALVAWAITALAFGLACKEIHIGGYRGWRLRVLEAFVIILMFTQLLYVLALHSGLFGNQFGNHAGAGGYGAEHGAYGAGDPHNKGMGTGGVARV

SEQ ID NO: 7826 - protein, 350 aa, Azotobacter vinelandii
MKAVMAYAPGDYRLEEVAVPKAGPGEIIAKVEACGICAGDIKSFGGAPSFWGDETQPAYIKAPMIPGHEFIAHIVELGKGVEGYELGDRVISEQIVPCWNCRFCKRGHYWMCQKHDLYGFQNNVNGAMAEYIRFTKESINYKVPRDLPIEKAVLIEPYACSMHAVQRAQIQFGDVVVLAGAGTLGLGMIGAAKKAGPGKLVVMDLFEDRLELAKKFGADLVINPAKEDPVARIKEITDGYGCDVYIEATGHPKSVEQGLSMIRNLGRFVEFSVFKDPVTVDWSIISDRKELDVLGAHLGPYCYPLVIEGIADGSLPTEGVVTHNFPLERFMDGFKLAMSGKDSLKVILTP

SEQ ID NO: 7827 - protein, 317 aa, Methanosarcina thermophila
MDFEASAKILTTPVKGAKIVSNMTVDELVREYAGCAFGAGRLAKAVDIYYEMLASEKTTKFFGLAGAMTPAGMRNIIADLIRDGYIDVLVTTGANMVHDTVEALGLHHYKGSDCTNDIQLRHECIDRIYDVYLPDQHFTDLEEFLQGVYAGLPQEKLSIRQVLTEIGKNLDDDSSILKTAAEMGVPVYCPALQDSVIGLQAWLYKEGNPLHVDAFADMHEFMEICFETESAGAMLLGGGVPKNYILQSMLVTPRSFDYAIQLTMDHPETGGLSGATLDEAQSWGKVGENAKSVTVYADSTITLPLIVSAVRTRLSKR

SEQ ID NO: 7828 - protein, 1008 aa, Chlamydomonas reinhardtii
MPHEFKTAVVWFRRDLRVDDNPALVAALAAAPNVIPVFIWAPEEEGQFQPGRCSRWWSKHSLVDLQQALAALGSRLVIRRSTDSTAALLQLVTELGAEAVFFNHLYDPISLMRDHDCKRGLTAAGVAHRTFNGDMLYEPWDVLDPNKQPYSTFDDFWNSVRAMPVPPPFPVSAPASMPAVPAAVPSMTVAEVDWFFTPEQEASSDQLKFKWKPGVGGAISELEHFLAERLTEFEHDRAKVDRDSTSRLSPWIHIGSISVRYIFYRVRQCQAEWLAAGTDRAQSCDDFLQQMGYREYSRYLAFHFPFIHERSLLGHLRACPWRIDQHAFKAWRQGQTGYPIVDAAMRQLWSSGWCHNRGRVVAASFLVKDLLLPWQWGLKHYWDAQIDADLECDALGWQYVSGGMSDAHPFSYMMDLEKEARRFDPDGEYVRRWLPALSRLPTEYIHAPWKAPASVLAAADVELGCNYPLPIITRSDAKANVDYACGVLEKSAVAPTGSESSGRYPYRAPTYPNAGGGGGASGGVDGAGSSGGNPTAAMGASGGAGPSSGTGTGGQGGAFRGRGDGGGSAPVSQQGGMLPPGVAVCVTAGTGGTQPDSRTVSGAHAGVSNSAGGVACDMPPPSHSHPRGGSSGVAAAGVGGVSGGPSSGGAAAPGATRKATAPGGAVFYHPGEASGEGHALLERILQQQRRQRGAANRQDGSGTNQPPPPVSMPGMLDAAGAAGGGGGGGGGLAGLPGVLQGLHGGAGATAAPAVAWAGRVAAGGVDDMDAVALWQQQQQLLQGGAAAFAFEQAMELLLARRRAGDGVSGFCGGDAPGRGGGDADEADGLMLEEDSEEVVSNTVDLHLSAFTGASCHRQSGTARGARAAERRLKKEAGSPEVTDGGGSAGAGCGEEDAMQCEDEEHGERGSPARRTADEEAQPPAEEGGAGSEDAGAAASEGDEAEGYGSESASEDNGGATPVEEADQMVVDGGGGGGGGGGGGGGRGGGQHKRRRSQLEGEQGDAAWE

SEQ ID NO: 7829 - protein, 101 aa, Triticum aestivum
  misc_feature (71)..(71): Xaa can be any naturally occurring amino acid
  misc_feature (82)..(82): Xaa can be any naturally occurring amino acid
  misc_feature (84)..(84): Xaa can be any naturally occurring amino acid
MAPTVMASSATSVAPFQGLKSTAGLPVSRRSNGASLGSVSNGGRIRCMQVWPIEGIKKFETLSYLPPLSTXALLKQVDYLIXRXKWVPCLEVQAKVGFIFR

SEQ ID NO: 7830 - protein, 414 aa, Vibrio vulnificus YJ016
MERYIMELTTTVSELRYALDTFFFLISGALVMWMAAGFAMLEAGLVRSKNTTEILTKNFCLYAIACTTYLVVGYNIMYVDNSEGGWLPSIGALIGSQAEGADHSLESDFFFQVVFVATAMSVVSGAVAERMKLWSFLLFSAILTAFIYPVEGYWTWGGGFLSAAGFSDFAGSGIVHMAGASAALAGVLLLGARKGKYGKNGEVYPIPGSNMPLATLGTFILWFGWFGFNGGSQLMVSDFENATAVGQIFLNTNAAAAAGAITALFVCKTTWGKADLTMILNGALAGLVAITADPLSPSPLYSVAIGAVAGALVVFSIVGLDKLKIDDPVGAISVHGVCGFFGLMVVPISNGDASFLSQLFGAVVIFAWVFGASLAVWAVLKATIGIRVSEEEEMEGMDMHDCGVGAYPEFVTVK

SEQ ID NO: 7831 - protein, 109 aa, Zea mays
QRTKARDNRCVNESIAMASRLVAAAASSSSLSSASPLARLISRRGLAGAADGHGSAKVPLWKDPLSPSKWKEEHFVLASLSMWGVIFYGGYKLFSGKKEAKTEAGSPQA

SEQ ID NO: 7832 - protein, 207 aa, Avicennia marina
MLRVMKKSFKDSLKALEADIQHANTLASDYPTEHDGACLQMRLSYSPCAHLFLFLVQWADCHLAGVLGLIRILIYKAYEDGKTTRSICERKASLREFYGVIFPSLLQLHRGITDVEERKQRVIIPQLNTRRRDEMAKGKLSEIEIEREEECAICMEMNSKVVLPSCSHSMCMKCYRNWRARFSVVPVLSRQSKEDEFWGALDLHKPL

SEQ ID NO: 7833 - protein, 139 aa, Glycine max
  misc_feature (69)..(69): Xaa can be any naturally occurring amino acid
  misc_feature (87)..(87): Xaa can be any naturally occurring amino acid
VQIYHLNLTIWTFVPDSLSINHVCPIIHIHPMKQKPSKRDLLSDLTCDSHLKIDMFINRQSNLPLHEMXRGSYYLKMLLPSAYEEAXGGAHNIFGNLSLITVTHSDGSHSFMLTRAVLVPSYGDVLTVMQHQTRLMFKT

SEQ ID NO: 7834 - protein, 479 aa, Erwinia carotovora subsp. atroseptica SCRI1043
MSTTQKRMYINGEFVENRSGKWIDVVNPATEQVISQVPEGSADDAKRAIDAAEAAQPSWEALPAVERGVWLHKIAAGIREREAELTDTIIAEGGKTHGLAQTEVLFTADYLDYMAEWARRYEGEIIQSDRPNENIFVFRKAIGVTTGILPWNFPFFLIARKAAPALITGNTIVIKPSEITPNNAVIFAEIIHKIGLPKGVINFVTGYGPTVGQELAGNPKVGMVSLTGSVAAGIATMTAAAQNVTKVSLELGGKAPAIVMDDADLDLAVKAIVSSRVINSGQVCNCAERVYVQKGIYDEFIIRIKAAMEQVTFGNTAEKKTLDMGPLISAAALQRVEDKVAKAVSQGAKVLLGGKSESGTGYFYPPTLLVNVTQEMPIMHEEVFGPVLPVATFDTLEDAIAMANDSEYGLTSSIYTQNINTAMKALKGLKFGETYINRENFEAMQGFHAGWRKSGVGGADGKHGLQEYLQTHVAYLQFH

SEQ ID NO: 7835 - protein, 139 aa, Brassica napus
  misc_feature (7)..(7): Xaa can be any naturally occurring amino acid
  misc_feature (9)..(10): Xaa can be any naturally occurring amino acid
  misc_feature (12)..(12): Xaa can be any naturally occurring amino acid
  misc_feature (16)..(18): Xaa can be any naturally occurring amino acid
  misc_feature (21)..(22): Xaa can be any naturally occurring amino acid
  misc_feature (29)..(29): Xaa can be any naturally occurring amino acid
  misc_feature (34)..(38): Xaa can be any naturally occurring amino acid
  misc_feature (45)..(49): Xaa can be any naturally occurring amino acid
  misc_feature (51)..(52): Xaa can be any naturally occurring amino acid
  misc_feature (54)..(54): Xaa can be any naturally occurring amino acid
  misc_feature (58)..(60): Xaa can be any naturally occurring amino acid
  misc_feature (62)..(63): Xaa can be any naturally occurring amino acid
  misc_feature (65)..(65): Xaa can be any naturally occurring amino acid
  misc_feature (82)..(82): Xaa can be any naturally occurring amino acid
  misc_feature (85)..(87): Xaa can be any naturally occurring amino acid
  misc_feature (91)..(91): Xaa can be any naturally occurring amino acid
  misc_feature (101)..(101): Xaa can be any naturally occurring amino acid
  misc_feature (111)..(111): Xaa can be any naturally occurring amino acid
  misc_feature (115)..(115): Xaa can be any naturally occurring amino acid
  misc_feature (118)..(119): Xaa can be any naturally occurring amino acid
  misc_feature (121)..(122): Xaa can be any naturally occurring amino acid
  misc_feature (127)..(127): Xaa can be any naturally occurring amino acid
  misc_feature (131)..(131): Xaa can be any naturally occurring amino acid
  misc_feature (133)..(133): Xaa can be any naturally occurring amino acid
MASSMLXSXXGXTSPXXXTMXXPFSGLKXSAAFXXXXXGNNDITXXXXXGXXVXCMKXXXPXXKXKFETLSYLPDLTEVELXKEXXXLLRXKWIPCVEFEXQHGFAYREHXSTPXYYXXRXXTMWKXPLFXCXDSAQVL

SEQ ID NO: 7836 - protein, 166 aa, Glycine max
  misc_feature (54)..(54): Xaa can be any naturally occurring amino acid
  misc_feature (68)..(68): Xaa can be any naturally occurring amino acid
  misc_feature (106)..(106): Xaa can be any naturally occurring amino acid
  misc_feature (134)..(134): Xaa can be any naturally occurring amino acid
MRTKKKEVAYSMISCPVVTTRQRAHGDRYWTVPFTGLKSMAGFPTRKTNNDITXIASNGGRVQCMQVXWPPIGKKKIETLSYLPDLDDAQLAKEVEYLIRKGWIPXLEFELEHGFEYREHNGSPGYYQGLYWTXWKLPMSGCTDASQVLKEHQEAKTAYPNGFIRI

SEQ ID NO: 7837 - protein, 335 aa, Bacillus cereus G9241
MKQTKLTGRIVVPSDPDYDVARMNLNLSIPKLPCIIVFCQNKNDVCNALKWARERHVPFRLRSGRHSYENFSLLNRGLIIDVSEMHRITVHTDKLTATIEAGANLGIVYKELWNYGVTIPAGTSASVGIVGLALGGGIGMLSRLFGLTCDQLIEVEMVQACGKFGAKIIRASEHENHNLFWACRGGGGGNFGIITSLTFRVHPIKNVSIFSITWEWEDFITAFQAWQNWAPYVDERLTSSIELFTKQQNKIEAQGEFVGSPSELHSLLSPLLETGTPSLFIDEVPYIKAVEFFNSGNIPENFKRSGSYVYKPIPLKGIQIMQYFLSHAPNKDASI

SEQ ID NO: 7838 - protein, 175 aa, Glycine max
PCSCLQEMFIFSFKNVFPLCLFVFFVENAYLALISGGDMTNGESKRVKLNRMKHLREAMEVLKDMFGPNIPDATDILVPRWWNNRFQRGSYSNYPVISNLQVVRDVKAPVGRIFFTGEHTSERFSGYVHGAYLAGINSSKELLEEMRKDNKRKNKSQSRVLEPLSALTECNIPRQ

SEQ ID NO: 7839 - protein, 316 aa, Glycine max
MALPYPFSYLLFLLLILLSSLPNISQATSRAPNRMLALVQNQPLVLKYHKGPLLKGNITLHLLWYGTFTPTQRSIVIDFLESLTSTSAPGAPSVSTWWQTTESYRGGPCTLVVGNQILDETYSLGKSLKNDHLVALASNPKLNSAPGDRVIHVILTAADVAVEDFCMNQCGTHGRGKNGNSEKIAYAWVGNSVTQCPGQCAWPFHQPLYGPQTAPLVAPNGDVGVDGMVINLATVLAGAVTNPFEDGYYQGPASAPLEAVSACTGIFGKGAYPGYAGNVLAENATGASYNAVGVRGRKFLLPAMWDPLTSTCKTLV

SEQ ID NO: 7840 - protein, 233 aa, Magnaporthe grisea 70-15
MADVDMTDAPGGAGPVAKKKGGDGAAGEGKKRFEVKKWNAVALWAWDIVVDNCAICRNHIMDLCIECQANQASATSEECTVAWGICNHAFHFHCISRWLKARQIPPPKSHDHHRSAFSSITMFCDVCSGFDPPPTGSHLTGWRLKNGQGGRTRANAEPLISLAYNNVAAQSPSLRQLNAIVGSKTGPDPTLGLSGLRSLPHKTSGCINSPLSLDSSRRKSCSIKIYKDLRRVW

SEQ ID NO: 7841 - protein, 334 aa, Bradyrhizobium japonicum USDA 110
MTSNPWLTLLGLINGFQVTQAIHVASTLRIADHLKGDSRSAEELAPLTQSHPGALYRLLRALAAVGVFEEDEDRRFALTPMGDCLRTDSATPIGAWAECVGSPYVWSTWGHLLHSIRTGENAFQSLNGKDIWNYRAERPEESAVFDRAMTEFSRGGAEAVIGAYDFSAFHHVVDVGGGRGLMLAAILTAHPRMQGTLFDQPGVIAGAEAVLEAHGVVDRCRMVSGSFFESVPEGGDAYVMRVVIHDWDDDEAIAILKACRRAMRETAKLVLIERIIAPANEVPATKFMDLHMLALPGGRERTRDEFSDLLAKSGFELTRVVPAGRINVIEARPY

SEQ ID NO: 7842 - protein, 279 aa, Bacillus cereus ATCC 14579
MKNLQSKAVLNNGVEMPWFGLGVFKVEEGPELVEAVKSAIKAGYRSIDTAAIYGNEKAVGEGIRAGIEATGIAREELFITSKVWNADQGYETTIAAYEESLKKLGLDYLDLYLVHWPSEGKYKDTWRALETLYKEKRVRAIGVSNFQIHHLQDVMKDAEIKPMINQVEYHPRLTQKELQAFCKEQGIQMEAWSPLMQGQLLDNETLQEIAEKHGKTTAQVILRWDLQNGVITIPKSTKEHRIIANADVFNFELTKEDMEKIDALNQNHRVGPDPDNFDF

SEQ ID NO: 7843 - protein, 169 aa, Oryza sativa
MASSATTVAPFQGLKSTAGMPVARRSNSSFGNVSNGGRIRCMQVWPIEGIKKFETLSYLPPLTVEDLLKQIEYLLRSKWVPCLEFSKVGFVYRENHKSPGYYDGRYWTMWKLPMFGCTDATQVLKELEEAKKAYPDAFVRIIGFDNVRQVQLISFIAYKPPGCEESGGN

SEQ ID NO: 7844 - protein, 153 aa, Glycine max
  misc_feature (112)..(112): Xaa can be any naturally occurring amino acid
  misc_feature (115)..(115): Xaa can be any naturally occurring amino acid
NFLYQWAFAIAAAGITSGSIAERTQFVAYLIYSSFLTGFVYPVVSHWFWSADGWASAISSADHVFSPGDRLLSTGVIDFAGSGVVHMVGGVAGFWGALIEGPRIGRFDHGGXRAXALRGHSASLVVLGTFMLWFGWYGFNPGSINKILVSYGN

SEQ ID NO: 7845 - protein, 278 aa, Corynebacterium sp.
MTVPSIVLNDGNSIPQLGYGVFKVPPADTQRAVEEALEVGYRHIDTAAIYGNEEGVGAAIAASGIARDDLFITTKLWNDRHDGDEPAAAIAESLAKLALDQVDLYLVHWPTPAADNYVHAWEKMIELRAAGLTRSIGVSNHLVPHLERIVAATGVVPAVNQIELHPAYQQREITDWAAAHDVKIESWGPLGQGKYDLFGAEPVTAAAAAHGKTPAQAVLRWHLQKGFVVFPKSVRRERLEENLDVFDFDLTDTEIAAIDAMDPGDGSGRVSAHPDEVD

SEQ ID NO: 7846 - protein, 161 aa, Oryza sativa (japonica cultivar-group)
MSDSEEHHFESKADAGASKTYPQQAGTIRKNGHIVIKNRPCKVVEVSTSKTGKHGHAKCHFVAIDIFNGKKLEDIVPSSHNCDVPHVNRTDYQLIDISEDGFVSLLTESGGTKDDLRLPSDEALLTQIKDGFAEGKDLIVTVMSAMGEEQICALKDIGPKN

SEQ ID NO: 7847 - protein, 355 aa, Trichoderma atroviride
MSRSTAPNASASRKISFNVSEQYDIQDVVGEGAYGVVCSAIHKPSGQKVAIKKITPFDHSMFCLRTLREMKLLRYFNHENIISILDIQKPRSYDSFNEVYLIQELMETDMHRVIRTQDLSDDHCQYFIYQTLRALKAMHSANVLHRDLKPSNLLLNANCDLKVCDFGLARSAASQEDNSGFMTEYVATRWYRAPEIMLTFKEYTKAIDVWSVGCILAEMLSGKPLFPGKDYHHQLTLILDVLGTPTMEDYYGIKSRRAREYIRSLPFKKKVPFRTLFPKTSDLALDLLEKLLAFNPVKRITVEDALKHPYLEPYHDPEDEPTAPPIPEEFFDFDKHKDTLSKEQLKQLIYQEIMR

SEQ ID NO: 7848 - protein, 135 aa, Brassica napus
  misc_feature (2)..(2): Xaa can be any naturally occurring amino acid
  misc_feature (12)..(12): Xaa can be any naturally occurring amino acid
  misc_feature (26)..(28): Xaa can be any naturally occurring amino acid
  misc_feature (33)..(33): Xaa can be any naturally occurring amino acid
  misc_feature (43)..(43): Xaa can be any naturally occurring amino acid
  misc_feature (45)..(45): Xaa can be any naturally occurring amino acid
  misc_feature (49)..(50): Xaa can be any naturally occurring amino acid
  misc_feature (55)..(55): Xaa can be any naturally occurring amino acid
  misc_feature (58)..(60): Xaa can be any naturally occurring amino acid
  misc_feature (62)..(62): Xaa can be any naturally occurring amino acid
  misc_feature (64)..(64): Xaa can be any naturally occurring amino acid
  misc_feature (67)..(67): Xaa can be any naturally occurring amino acid
  misc_feature (71)..(73): Xaa can be any naturally occurring amino acid
  misc_feature (79)..(80): Xaa can be any naturally occurring amino acid
  misc_feature (82)..(83): Xaa can be any naturally occurring amino acid
  misc_feature (85)..(85): Xaa can be any naturally occurring amino acid
  misc_feature (93)..(93): Xaa can be any naturally occurring amino acid
  misc_feature (99)..(100): Xaa can be any naturally occurring amino acid
  misc_feature (104)..(104): Xaa can be any naturally occurring amino acid
  misc_feature (107)..(109): Xaa can be any naturally occurring amino acid
  misc_feature (122)..(122): Xaa can be any naturally occurring amino acid
  misc_feature (125)..(125): Xaa can be any naturally occurring amino acid
  misc_feature (130)..(130): Xaa can be any naturally occurring amino acid
  misc_feature (133)..(134): Xaa can be any naturally occurring amino acid
MXSSMLSSAAVXTSPAQATMVAPFTXXXSSAAXPVTRKANNDXTXIASXXGRVSXMKXXXPXAXKKXETLXXXPDLTEXXLXXEXDYLLRNKXIPCVEXXLEHXLVXXXHGSTPGYYDGRDXTMXKLPLXFGXXD

SEQ ID NO: 7849 - protein, 230 aa, Oryza sativa (japonica cultivar-group)
MDSLYDISCFAAGLAGNIFALALFLSPVTTFKRILKAKSTERFDGLPYLFSLLNCLICLWYGLPWVADGRLLVATVNGIGAVFQLAYICLFIFYADSRKTRMKIIGLLVLVVCGFALVSHASVFFFDQPLRQQFVGAVSMASLISMFASPLAVMGVVIRSESVEFMPFYLSLSTFLMSASFALYGLLLRDFFIYFPNGLGLILGAMQLALYAYYSRKWRGQDSSAPLLLA

SEQ ID NO: 7850 - protein, 295 aa, Oryza sativa (japonica cultivar-group)
MPMSDPTAAVIPKPGGIGVGGGGGDDEEPVEIREVWADNLEEEFALIRDVVDEFPFVAMDTEFPGIVCRPVGAFRSPADYNYATLKANVDMLHLIQLGLTFSSPRGELPALGPGRRRCVWQFNFREFDDARDIFASDSIELLRRSGIDFRRNSERGVDARRFAELLMSSGVVLNDSVYWVTFHAGYDFGYLLKILTCSSLPDTQAGFFKLMKIYFPTVYDIKHLMKFCNSLHGGLNKLAELLDVERVGESHQAGSDSLVTSCAFWKLKDSFFAGSTEKYAGVLYGLNAENVVSAH

SEQ ID NO: 7851 - protein, 73 aa, Zea mays
  misc_feature (59)..(59): Xaa can be any naturally occurring amino acid
MADGRCCTFLEILFAIILPPLGVFLRFGCCRIEFCICLLLTILGYVPGIIYAIYVLVAXLDSDQHEREYYTLA

SEQ ID NO: 7852 - protein, 342 aa, Parachlamydia sp. UWE25
MKGLVKKISAPGLWMENLPIPSHVKDDEVLIKTIKTSICGTDVHIYKWDAWAQKNVPVPLVIGHEFIGEIAEFGKNVKGFKIGERVCGEGHIVCNQCPNCRMGRKHVCMHTKGLGYHISGCFAEYFVLPAENVFSLPPSISDDLGAIFDPYGNAVHTTLAFNLIGEDVLITGAGPIGIMAAAIAKQAGARHIVITDVNDYRLDLARTMGVSHAINVNRESLDNFMQSLGIKYGFTVGLEMSGHPDGLKTLTEKIRHGGNIALLGILPPATSIDWNLVIFKMLTLKGIYGREIFSTWYQMVHLLEIGLNLAPIITHHFSVDNFEKGFEVMLSGQSGKVILDWV

SEQ ID NO: 7853 - protein, 302 aa, Zea mays
  misc_feature (19)..(19): Xaa can be any naturally occurring amino acid
  misc_feature (231)..(231): Xaa can be any naturally occurring amino acid
MDPMDIVGKSKEDVSLPKXTTMFKIIKEMLPPDVRVARDAQDLLVECCVEFINLLSSESNEVCSREEKKTIAPEHVIKALSDLGFREYIEEVYAAYEQHKLDTLDSPKAGKFTGIEMTEEEAVAEQQRMFAEARARMNNGAPKPKETEQEPPQQPQAQPQLQLHTEPQQPVQSQVQLHSPTQHSLQPQVQLHPQPQQLPQVQVHSQTQLHPQPQQPQVQVHPQLQQLPQLXAHSQPPQPQVQIHPQPQQPPQVQLQSSVQQTSQPQPQVHLYNHRGGSQAQLQPQLPGQLQTQGQTGPGIDS

SEQ ID NO: 7854 - protein, 369 aa, Triticum aestivum
  misc_feature (342)..(342): Xaa can be any naturally occurring amino acid
MDRVLLPVRVKEEWPPPPPEEEEELEHGGLAPRPMEGLHETGPPPFLTKTFDLVADPATDGVVSWGRAGNSFVVWDPHLFAAVLLPRFFKHSNFSSFVRQLNTYGFRKIDPDRWEFANEGFIRGQRQLLKMIKRRRPLSYLPSPQHQALGSCLEVGQFGLDEEIEVLKRDKNALLEEVVKLRQEQQSSRADMRAMEERLHRVEQKQLQMMGFLARAIQNPDFFLQLIQQQDKLKDLEDAYSNKRRRSIDVMPFLGPEETSQSEPLESTFIFEDREFSELENLAMNIQGIRKGMEGDRGGRDQGCGEAELTDDFWEELLSEGMRDEAEMVELERRRSRYVDAXAPSMGHLSYSDPKSTRIHNHLIYIPLY

SEQ ID NO: 7855 - protein, 121 aa, Zea mays
KLAGCSGVRDHRRGTKARDNRCVNESIAMASRLVAAAASSSSLSSASPLARLISRRGLAGAADGHGSAKVPLWKDPLSPSKWKEEHFVLASLSMWGVIFYGGYKLFSGKKETKTEAASPQA

SEQ ID NO: 7856 - protein, 348 aa, Pyrococcus abyssi GE5
MSEKMVAIMKTKPAYGAELVEVDVPKPGPGEVLIKVIATSICGTDLHIYEWNEWAQSRIKPPQIMGHEVAGEVVEVGPGVEGIEVGDYVSVETHIVCGKCYACRRGQYHVCQNTKIFGVDTDGVFAEYAVVPAQNVWKNPKSIPPEYATLQEPLGNAVDTVLAGPISGKSVLITGAGPLGLLGIAVAKASGAYPVIVSEPSDFRRELAKKVGADYVINPFEEDVVKEVMDITDGNGVDVFLEFSGAPKALEQGLQAVTPAGRVSLLGLYPGKVSIDFNNLIIFKALTVYGITGRHLWETWYTVSRLLQSGKLNLDPIITHKYKGFDKYEEAFELMRAGKTGKVVFMLK

SEQ ID NO: 7857 - protein, 162 aa, Zea mays
MCPIKRETTSAESGSPCSSSTSTSSSSEHHQTAWASPPKKRPAGRTKFRETRHPVFRGVRRRGRAGRWVCEVRVPGRRGCRLWLGTFDTAEAAARAHDAAMLAVAAGAARLNFADSAWLLAVPTASYASLADVRRAVAEAVESCPVPQFGNCTKVTAASINE

SEQ ID NO: 7858 - protein, 296 aa, Methylobacillus flagellatus KT
MTSARKKAEETMEFTDVVIEVLDARVPEASHNPMIEELRLHRQRPSLKILNKADLADPAVTQAWLNHFNRQDGIKAVALSCKKPGDAKKIPDLCRSLAPHRGSHLKPLRMMIMGIPNVGKSTLMNALLNRRIAKVGDEPAVTKSQQRFELSPQLTITDTPGMMWPKIKYDSDGYMLAASHAIGRNAVIDEEVAEFLAGILLERYPALLQSRYKIDVSNMDAIDLLEAIGKRRGYLLKGGALDMEKTAMAFLVDYRSGTLGRISLETPESRAAMMTEALARQKAREESQEEKTKTEP

SEQ ID NO: 7859 - protein, 473 aa, Aspergillus nidulans FGSC A4
MSMPPAALSSLRTALTSSLVFTPGDEGYLDSLRRWSDTGRKEAGIVIQPTETADIQTALKWVQEHQIDLAVKCGGHSVSGTSSSAGGLVIDLSRMNGVSVDIQKKTVTVGGGAVWKDVDEAAAAYGLAAVGGTVNHTGVGGLTLGGGYGWLSGQYGLTIDNLVSATVILANGETVIASETENSDLFWALRGAGYNFGVVTSFTFQAHEQPEPVYAGILAYTPDKVERVVEILNALLLDKPDPRSGAICIFAEPPGAPTPMVNVLVFYNGTQAEGEARFADLLGLSPIANTVSMIPYSQMNSLQNPMATYGDRKSFKGVFFNPPLSPQFAKTMLEEFTAKVKSDPDLAASALLLEFYDMTKTVSVPRAATAFASRGTTQNGIITLRWSDATKDLEHRAWAREVQERWKDVLEKETDANLDAAGKAGVPQYINYAEPGDAVVGNIYGENLPRLKALKAKYDPTNVFRKMHPITLD

SEQ ID NO: 7860 - protein, 384 aa, Arabidopsis thaliana
MRNQGFTKEDRMNQLPEDLILRILSFLPTELVIATSVLSKQWRSLWKLVPNLEFDSDDYEINPVDIGLWIGIAFARHLRELVLYVAPKQTFTFPSSLCICNTLETLKLILGIHVDIPCPVLLKSLRTLHLDSVSYKDEESIRNLLSSCPILENLVVYEYWYNVVNFDIEVPSLKRLEICDVLHKKEFRRYTINVPCLKYLRIEGLNKDFELCLNAPELVEAYFTKGSLIIADKFLGSLKSAKRLSLDILALKMHTRREEWWNLLTVMLDSSPKLQVLKLIDHTQDVSKDNVVSEKWNEPKYVPECLLSHLETFVWIRYDWEREEEKEVATYILRNARWLKKGTISTNPIESKDLEKLEERRKMLNELDSVVRASNSCNLVFEFE

SEQ ID NO: 7861 - protein, 451 aa, Arabidopsis thaliana
MEQGESLRIRVVMGKDRISELPDGLLLKILSSLPTNIVVATSVLSKQWRSLWKLVPNLEFDSDDYESEHYTFSEIVCKSFLSHKAPVLESFRLKFVNFNPVDIGLWVGIAFSRHLRELVLDFYPAELGKGVTFTFPSSLCTCNTLETLKLVLCILVDIPSPVLMKSLRTLHLEFVRYKDESSVRNLLSGCPGLEELRLYRGDDSDIKVFTIEVPSLQRLTIHDNNDGPEFWGYVINAPFLKYLLIEELRCPEFCLNAPELVEANIAEVTSITIEKFLGSFTSVSRLLLNLSPLKITYPTGSMFYQLVSLEMYTREAEWWNLLTLMLENSPKLQVLKLTDRSQNFHKDGLVSGKWNEPKDVPECLLSQLETFVWRRFDWGREEEKEIATYILKNGRRLKKATFSTNPIESEELNKLKERRKVLNGLDGVVRASNSCQLVFKFDPSYLGSDSP

SEQ ID NO: 7862 - protein, 428 aa, Tropheryma whipplei TW08/27
MTRQSFFIKNVTLPGLGARTLFLSGGLIQEIICKDIEEHQFLSTKNTDKASCRVIDAEGFIALPGLVDLHTHLRNSRDGSIRDVTSAAIAGGYTTVSSMPNMHPVQDSPEAVNILKAIAKEDAVCDIRPVGAVTKGLRGNEITDMHSLLDAGVNIFSDDGNCVYDPGIIHQALSFAGRNNCVIAQHAQDPTLTKSAQGDTQGPIVAPKSLWPSIAESTIVARDILLARAANARLHVCHVSSQESVYAIAWGKSLGVQVTAEVTPHHLLFYDSLVMTGDTRFKVNPPLRSKESVECLRDALIRGVIDVVATDHAPHRNKSPFWHSAPNGMTGLEFSVSVIQKIFVNSGHLTWPEVVRIMSNKPAEILGMTPNTVKEGSAANFFLYNPDVTRFVTFDDSLGPSVNSPYAGMNLPGKVMYTFYEGRLVFEN

SEQ ID NO: 7863 - protein, 355 aa, Glycine max
GVLVCAAGQEFRGDVALCTVPLGVLKKGDIEFVPELPQRKKDAIHRLGFGLLNKVAILFPYNFWGGDIDTFGHLTEDLSMRGEFFLFYSYSSVSGGPLLVALVAGEAAIRFEMMLPVESVKRVLDILKDIFNPKGIVVPDPVQAVCTRWGKDHFAYGSYSYVAVGSSGDDYDILAESVGDGRVFFAGEATSKQYPATMHGAFLSGMREAANILRVAKRRSSMTIDTTKSVNQENDDLNKLFVKPDLTFGSFSALFDLNLNDHDSSSLLRVKIGGVVLDSGSLYLYAWLSKKRVIELSQVEGDENRMRMLNRNFGVSLVGRKGLSSAAESLIANIKLSRPNFNETENGLMAEKENS

SEQ ID NO: 7864 - protein, 427 aa, Arabidopsis thaliana
HREGIYLNDFAKFIVPINENGTTESERKRGVVREDLISELPEDLLLLILSYLPTKKVITTKNVGRSLFLHKAPVLESFHLKVCDINDDRPACDDIDIGIWIGIAFERHVRELVLDLCLQKSVRFPISSMFSTLETLILKYLALVDVPSPVCMKSLRTLHLDCVNFKHNESFSNLISGCPNLEDLFMYQYYPLDVVMNFIIVAPSLKRLVIIDYREAGGYVINAPTLKYLKIKGLSHCGFCLIENAPVLVEAKIRNLFYIYKEKILGSLKSAKRLSLDLSPLECPIDSIFYQLVHLEIYTCKEEWWNLLKLMLDSSPKLQVLKLIGKNLDFKKVGMVGGKWNEPKNVPECLLSQLKMFVWTSYHWESEVEKEVATYILKNARQLKNVSFSTRPIHSKEHNKLEEKCKMLKELDGVVRASSSCHLVFIE

SEQ ID NO: 7865 - protein, 247 aa, Brassica napus
  misc_feature (235)..(235): Xaa can be any naturally occurring amino acid
VGFKSNLKAVSLELGGKSPFIVCEDADVDQAVEMAHFALFFNQGQCCCAGSRTFVHERVYDEFVEKAKARAINRAVGDPFKSGIEQGPQVDSEQFEKILKYIRHGVDSGATLQAGGDRHGSKGYYIQPTVFSDVKDDMLIAKDEIFGPVQTILKFKNLDEVIARANNSRYGLAAGVFTQNLDTANRLMRALRVGSVWINCFDVFDATIPFGGYKMSGIGREKGIYSLNNYLQVKXAVVTSIKNPAWL

SEQ ID NO: 7866 - protein, 165 aa, Capsicum annuum
MASQREENVYMAKLAEQAERYEEMVEFMEKVVAALDGGDELTVEERNLLSVAYKNVIGARRASWRIISSIEQKEESRGNEDHVTSIKNYRSKIEIELTSICNGILKLLDSKLIGSAATGDSKVFYLKMKGDYYRYLAEFKTGAERKEAAENTLSLISLLRILLMP

SEQ ID NO: 7867 - protein, 307 aa, Staphylococcus aureus subsp. aureus Mu50
MNAAVRAVVRTAIYNEIEVYGVYHGYQGLLNDDIHKLELGSVGDTIQRGGTFLYSARCPEFKEQEVRKVAIENLRKRGIEGLVVIGGDGSYRGAQRISEECKEIQTIGIPGTIDNDINGTDFTIGFDTALNTIIGLVDKIRDTASSHARTFIIEAMGRDCGDLALWAGLSVGAETIVVPEVKTDIKEIADKIEQGIKRGKKHSIVLVAEGCMTAQDCQKELSQYINVDNRVSVLGHVQRGGSPTGADRVLASRLGGYAVDLLMQGETAKGVGIKNNKIVATSFDEIFDGKDHKFDYSLYELANKLSI

SEQ ID NO: 7868 - protein, 111 aa, Bartonella tribocorum
ANEACLKMLQEIGSIKRIPEFIARAKDKNDPFRLMGFGHRVYKNYDPRAKILQKTCHEVLKELNIQDDPLLDIAIELEKIALNDEYFIEKKLYPNVDFYSGITLKALGFPT

SEQ ID NO: 7869 - protein, 503 aa, Arabidopsis thaliana
MGNCCRSPAAVAREDVKSNYSGHDHARKDAAGGKKSAPIRVLSDVPKENIEDRYLLDRELGRGEFGVTYLCIERSSRDLLACKSISKRKLRTAVDIEDVKREVAIMKHLPKSSSIVTLKEACEDDNAVHLVMELCEGGELFDRIVARGHYTERAAAGVTKTIVEVVQLCHKHGVIHRDLKPENFLFANKKENSPLKAIDFGLSIFFKPGEKFSEIVGSPYYMAPEVLKRNYGPEIDIWSAGVILYILLCGVPPFWAESEQGVAQAILRGVIDFKREPWPNISETAKNLVRQMLEPDPKRRLTAKQVLEHPWIQNAKKAPNVPLGDVVKSRLKQFSVMNRFKRKALRVIAEFLSTEEVEDIKVMFNKMDTDNDGIVSIEELKAGLRDFSTQLAESEVQMLIEAVDTKGKGTLDYGEFVAVSLHLQKELCDALKEDGGDDCVDVANDIFQEVDTDKDGRISYEEFAAMMKTGTDWRKASRHYSRGRFNSLSIKLMKDGSLNLGNE

SEQ ID NO: 7870 - protein, 174 aa, Triticum aestivum
  misc_feature (173)..(173): Xaa can be any naturally occurring amino acid
MAPTVMASSATSVAPFQGLKSTAGLPVSRRSNGASLGSVSNGGRIRCMQVWPIEGIKKFETLSYLPPLSTEALLKQVDYLIRSKWVPCLEFSKVGFIFREHNASPGYYDGRYWTMWKLPMFGCTDATQVINEVEEVKKEYPDAYVRIIGFDNMRQVQVRQLHRFKPPGCEESXG

SEQ ID NO: 7871 - protein, 385 aa, Cupriavidus necator
MSEAQPLVTPKPKKSVALSGVTAGNTALCTVGRTGNDLHYRGYDILDIAETCEFEEIAHLLVHGKLPTKSELAAYKAKLKSLRGLPANVKAALEWVPASAHPMDVMRTGVSVLGTVLPEKEDHNTPGARDIADRLMASLGSMLLYWYHYSHNGRRIEVETDDDSIGGHFLHLLHGEKPSALWERAMNTSLNLYAEHEFNASTFTARVIAGTGSDMYSSISGAIGALRGPKHGGANEVAFEIQKRYDNPDEAQADITRRVENKEVVIGFGHPVYTTGDPRNQVIKEVAKKLSKDAGSMKMFDIAEALETVMWDIKKMFPNLDWFSAVSYHMMGVPTAMFTALFVIARTSGWAAHIIEQRIDNKIIRQSANYTGPENLKFVPLKDRK

SEQ ID NO: 7872 - protein, 355 aa, Pyrococcus abyssi GE5
MKQKKAWRIVKEVIGEADIVVEVVDARDPIGTRNRKLERMVIESGKKLLIVMNKADLVPKEWAEEYKKRSEIPVIFISARERKGTGILRKELKKMAKTIDKDKVKVALIGYPNVGKSTIINVLKGKHAVGTAPIPGYTKGKHLIRLTKRLWLLDTPGVVPIDDFDELVIKGGFPADKIEEPVKPALKLIRRILETRKEALTEKFDIREFRDEEDILRKIGERRGIIREGGEVDIEETARWFLREWQTGRFTLFSNDEEKKEEYIESFGEILEVIKQENLTEPRIILWKFRDLLEEYVGSEKRFGAIEVGDFTVAIATGFKKCPNAIKFIERITGKNVITSECFGKKWKGVVAILD

SEQ ID NO: 7873 - protein, 494 aa, Bacillus cereus ATCC 10987
MSQLAVNLHEKVEKFLQGTKKLYVNGSFIESASGKTFNTPNPATGETLAVVSEAGREDIHKAVVAARMAFDEGPWSRMSTAERSRLMYKLADLMEEHKEELAQLETLDNGKPIRETMAADIPLAIEHMRYYAGWATKIVGQTIPVSGDYFNYTRHEAVGVVGQIIPWNFPLLMAMWKMGAALATGCTIVLKPAEQTPLSALYLAELIEEAGFPKGVINIVPGFGESAGQALVNHPLVDKIAFTGSTPVGKQIMRQASETLKRVTLELGGKSPNIILPDADLSRAIPGALSGVMFNQGQVCSAGSRLFVPKKMYDNVMADLVLYSKKLNQGAGLSPETTIGPLVSEEQQKRVMGYIEKGIEEGAEVLCGGSNPFDRGYFVSPTVFADVNDEMTIAKEEIFGPVISAIPFNDIDEVIERANKSQFGLAAGVWTENVKTAHYVASKVRAGTVWVNCYNVFDAASPFGGFKQSGLGREMGSYALNNYTEVKSVWLNLN

SEQ ID NO: 7874 - protein, 447 aa, Zea mays
  misc_feature (141)..(141): Xaa can be any naturally occurring amino acid
  misc_feature (256)..(256): Xaa can be any naturally occurring amino acid
MSAAATKVKRRVGKYELGRTIGEGTFAKVRFAKNTETGEPVAVKILDKEKVLRHKMAEQIKREISTMKLIKHPNVVRIYEVMGSKTKVYIVLEYVTGGELFDTIANQGRMREGEARSYFQQLINAVDYCHSRGVYHRDLKXNLLLDSYGNLNVSDFGLSALSQQIKDDGLLHTTCGTPNYVAPEVLEDQGYDGAMADLWSCGVILFVLLAGYLPFEDSNLMTLYKKISNAEYTFPPWTSFPAKRLNLLTRLVEQSXENSCDFRITIPEILEDEWFKKGYKRPEFDEKYDTPLDDVDAVFNDSEEHHVTEKKEEEPVALNAFELISRSAGLNLGNLFDSEQEFKRETRFTSKCPPKEIIRKIEEAAKPLGFGVQKKNYKLRLEKVKAGRKGNLNVATEILQVAPSLHMVQVRKAKGDTLEFQKFYKNLSKTLKDVVWKSEDLQMRAAS

SEQ ID NO: 7875 - protein, 148 aa, Glycine max
  misc_feature (33)..(33): Xaa can be any naturally occurring amino acid
  misc_feature (139)..(139): Xaa can be any naturally occurring amino acid
  misc_feature (143)..(143): Xaa can be any naturally occurring amino acid
  misc_feature (146)..(147): Xaa can be any naturally occurring amino acid
IKYEKKALEVVGKRLKKNSVSLDVVNFGDDDDXDKPLKLEALLSSVNNNDGSHIVHVPSGPNALSDVLLSTPVFTGDEGASGYVSAAAAAAAAGGDFDFGVDPNIDPELALALRVSMEEERARQEAAAKKAADEAGQKXQDGXSAXXS

SEQ ID NO: 7876 - protein, 489 aa, Mesorhizobium loti MAFF303099
MLGIRAGDGDERAVFQQGKGHGEDKRLILQNGWPLRKPLTLPPQESMAMTYDLILTGGTVVNHDGEGARDIGVKNGRIAAIGDLRQASADETIDCRGLHILPGVVDSQVHFREPGLEHKEDLETGSRAAVLGGVTAVFEMPNTNPLTTSEATLADKVRRGSGRMHCDFAFWVGGTRDNARDVGELERLPGAAGIKVFMGSSTGDLLVEDDEGVASILRNTRRRAAFHSEDEFRLRERLGERIEGDPSSHPVWRDEIAALRCTERLVRIARDVRARIHVLHISTAEEILFLEQHKDVATCEATPHHLTLSADDYLRLGTLIQMNPPVRASRHRDGVWHGIAQGIVDVLGSDHAPHTLAEKAKPYPASPSGMTGVQTLVPIMLDHVNAGRLTLQRFVDLSSHGPQRIFGMARKGRIAAGYDADFTVVDMKRRETITNAQAGSKAGWTPYDGKEVTGWPVGTVIRGRRVMWEGEIVTPGQGRAVEFSEALPA

SEQ ID NO: 7877 - protein, 506 aa, Ralstonia eutropha JMP134
MNMAEIAQLGVTNPYKQQYENYIGGAWVPPAGGEYFEAITPITGKPFTRVPRSKQEDVDAALDAAHAAKAAWGRTSTTERANILNRIADRIEANLTLLAVAETIDNGKPVRETMAADLPLAVDHFRYFAGCIRAQEGGISEIDAETIAYHFHEPLGVVGQIIPWNFPLLMATWKLAPALAAGNCVVLKPAEQTPASILALMEVIGDLLPPGVVNVINGFGLEAGKPLASSPRISKVAFTGETTTGRLIMQYASQNLIPVTLELGGKSPNIFFEDVLAADDAYFDKALEGFAMFALNQGEVCTCPSRALIQESIYDRFMERALKRVAAIRQGHPLDKGTMIGAQASAEQLEKILSYIDLGRKEGAQCLAGGERNQFDGDLAGGYYVKPTVFKGHNKMRIFQEEIFGPVVSVTTFKDEEEALAIANDTLYGLGAGVWTRDGARAFRMGRGIQAGRVWTNCYHAYPAHAAFGGYKQSGIGRENHRMMLDHYQQTKNLLVSYSPNALGFF

SEQ ID NO: 7878 - protein, 147 aa, Myxococcus xanthus
MQTRNPFNSAVVVNPLMRDVDALFRELTQPMWRQAPRERTPAADITESESGLTLHLDMPGLEAKAIQVTVEKDILTVQSERKAEPRAEGVNVRRQERAFGTFARSFALPDTVDASRVEARYEQGVLTLTLPRREESKPRVIEVKVQG

SEQ ID NO: 7879 - protein, 490 aa, Pseudomonas aeruginosa PAO1
MARFEEQKLYIGGRYVEASSGATFETINPANGEVLAKVQRASREDVERAVQSAVEGQKVWAAMTAMQRSRILRRAVDILRERNDELAALETLDTGKPLAETRSVDIVTGADVLEYYAGLVPAIEGEQIPLRETSFVYTRREPLGVVAGIGAWNYPVQIALWKSAPALAAGNAMIFKPSEVTPLTALKLAEIYTEAGVPDGVFNVLTGSGREVGQWLTEHPLIEKISFTGGTSTGKKVMASASSSSLKEVTMELGGKSPLIIFPDADLDRAADIAVMANFFSSGQVCTNGTRVFIHRSQQARFEAKVLERVQRIRLGDPQDENTNFGPLVSFPHMESVLGYIESGKAQKARLLCGGERVTDGAFGKGAYVAPTVFTDCRDDMTIVREEIFGPVMSILVYDDEDEAIRRANDTEYGLAAGVVTQDLARAHRAIHRLEAGICWINTWGESPAEMPVGGYKQSGVGRENGLTTLAHYTRIKSVQVELGDYASVF

SEQ ID NO: 7880 - protein, 534 aa, Glycine max
MGNCCATPSTDETANKKGKKGKKENPFAIDYGFNATAANGSKLTVLKSPTGREIEARYELGRELGRGEFGITYLCTDKGTGEELACKSISKKKLRTAIDIEDVRREVEIMRHLPQHANIVTLKDTYEDDNAVHLVMELCEGGELFDRIVARGHYTERAAAAVTKTIVEVVQMCHKQGVMHRDLKPENFLFANKKETAALKAIDFGLSVFFKPGEKFNEIVGSPYYMAPEVLKRNYGPEVDIWSAGVILYILLCGVPPFWAETEQGVAQAIIRSVVDFKRDPWPKVSDNAKDLVKKMLDPDPKRRLTAQDVLDHPWLQNAKKAPNVSLGETVRARLKQFSVMNKLKKRALRVIAEHLTVEEAAGLKEGFQVMDTNNRGKINIDELRVGLHKLGHQVPESDVQALMDAGDVDGDGHLDYGEFVAISVHLRKMGNDEHLRKAFQFFDQNKSEYIEIEELSSALSDDLDTNSEEVVNAIMHDVDTDKDGRISYDEFSTMMKAGTDWRKASRQYSRERFASLSLTLMRDGSLHLNNEKQ

SEQ ID NO: 7881 - protein, 194 aa, Magnaporthe grisea
MVVATIKCVVVGDGAVGKTCLLISYTTNKFPSEYVPTVFDNYAVTVMIGDEPYTLGLFDTAGQEDYDRLRPLSYPQTDVFLVCFSVTSPASFENVREKWFPEVHHHCPGVPCLIVGTQVDLRDDPSVREKLSKQKMQPVRREDGERMAKELGAVKYVECSALTQYKLKDVFDEAIVAALEPPTPKRKSKKCLIL

SEQ ID NO: 7882 - protein, 374 aa, Zea mays
MVLEATMICVDNSEWMRNGDYPPSRFAAQAHAFAVLSGAKTEANLESTVGLVAMAGKGVSVLVPPTNDFGKVLSGMNGLEIGGEANLTAAIQVAQFALKNRQNKQLRQRIIVFVGSPVIDEKNWLEVIGKNLKKNNVALDVVNFGESDNEKPEKLEALVAAVNSGGNSHIIHIPAGRDLSDALFSSPIILSEDRGSDSAAAARGASGFEFDVDPNVDPELALVLLISMEEERLRQEAAAKKAREESSKTENEGQSSTSNGDIVMADAEPEPNSYTEDKGLHCKDEGQLLEKARKIRIEDYISFEELFDGVTSDTMSAFQEEETCTQSDAGKDFGHQPFEPSPKKRHKKYKRRHHQKKPKKKREKKEDEAEGDKL

SEQ ID NO: 7883 - protein, 301 aa, Arabidopsis thaliana [sequence omitted]

SEQ ID NO: 7884 - protein, 378 aa, Glycine max
SARDFVMEYAKGGELFKKVAKGKLKEEVAHKYFRQLVSAVDFCHSRGVYHRDIKPENILLDENENLKVSDFGLSALAESKRQDGLLHTTCGTPAYVAPEVIKRKGYDGAKADIWSCGVVLFVLLAGYFPFHDPNMMEMYRKISKAEFKFPSWFPQGVQRLLRKMLDPNPETRISIDKVKQCSWFRKGPNGRQKTQEGENLCVSPSVTNHSEQCGDESDDLAAEAREEQVVPVSINAFDIISLSPGFNLCGFFEDSIQKREARFTSRQPASVIISRLEEIAKQMRMKKKKRAAGLLKLEGLHEGRKGILSIDTEIFEVTPLLHLVEVKKSNGDTLEYEKILKEDIRPALKDVVWVWQGDQQEQSQQLEQQKQQQQLPQS

SEQ ID NO: 7885 - protein, 301 aa, Arabidopsis thaliana
MVFVKSSKSNAYFKRYQVKFRRRRDGKTDYRARIRLINQDKNKYNTPKYRFVVRFTNKDIVAQIVSASIAGDIVKASAYAHELPQYGLTVGLTNYAAAYCTGLLLARRVLKMLEMDDEYEGNVEATGEDFSVEPTDSRRPFRALLDVGLIRTTTGNRVFGALKGALDGGLDIPHSDKRFAGFHKENKQLDAEIHRNYIYGGHVSNYMKLLGEDEPEKLQTHFSAYIKKGVEAESIEEMYKKVHAAIRAEPNHKKTEKSAPKEHKRYNLKKLTYEERKNKLIERVKALNGAGGDDDDEDDEE

SEQ ID NO: 7886 - protein, 328 aa, Glycine max
SPRAEFGTRPRADLVPIRHEATIVFPNSSAQQRMPVVGMGSAPDFTCKKDTKEAIIEAVKQGYRHFDTAAAYGSEQALGEALKEAIHLGLVSRQDLFVTSKLWVTENHPHLVLPALRKSLKTLQLEYLDLYLIHWPLSSQPGKFSFPIEVEDLLPFDVKGVWESMEECQKLGLTKAIGVSNFSVKKLQNLLSVATIRPVVDQVEMNLAWQQKKLREFCKENGIILTAFSPLRKGASKGPNEVMENDVLKEIAEAHGKSIAQVSLRWLYEQGVTFVPKSYDKERMNQNLQIFDWALTEEDHHKIDEIYQSRLISGPTKPQVTDLWDDEI

SEQ ID NO: 7887 - protein, 497 aa, Chromobacterium violaceum ATCC 12472
MSTGTINWQKKAEQLHFEGRAYIDGAYRKALSGKEFTTINPATGKVLASIEWCGKEDVELAVCAARRAFDGGAWSELATRSRMEILKRFASLIQDNIEELALLESLDVGKPIANSLSVDISNTAYCISWFAELIDKAPGEVVPVDPALLGMVTREPVGVVAAIVPWNFPLMMASWKFAPALAAGNAVILKPSEKSPLTAIRVAALAEAAGIPPGIFQVLPGAGDVGQALASHLDVDCVAFTGSTAVGKQIANYAAQSNLKRVWLELGGKSPNIILADCKDLKEAAKAAAGAICYNAGQMCTAGSRVLVAREIREAFLSELKVAMADYRPGDPLSPETNLGAVVDQRQFDKILSYITQGQNEGAKLLQGGAAVQTVHPNGLFIEPAIFDCPQPNLTICREEIFGPVLSVITFDDVDEAVRIANDSQYGLGAAVWTQNVSTAHKVARRLRAGTVWVNCYEEGGDMNLPFGGYKQSGNGRDKSLHALEKYTELKSTLIKL

SEQ ID NO: 7888 - protein, 332 aa, Triticum aestivum
  misc_feature (27)..(27): Xaa can be any naturally occurring amino acid
  misc_feature (61)..(61): Xaa can be any naturally occurring amino acid
  misc_feature (186)..(186): Xaa can be any naturally occurring amino acid
MKTLLILTIIAVALTTTTANIQVDPSXGQVQWPQQQQPFPQPQQPQQIFPQPQQTFPHQPXQQAFPQPQQTFPHQPQQQFPQPQQPQQPFPQQPQQQFPQPQQPQQPFPQQPQQQFPQPQQPQQPFPQPQQPQLPFPQQPQQPFPQPQQPQQPFPQLQQPQQPLPQPQQPQQPFPQQQQPLIQPYXLQQQMNPCKNYLLQQCNPVSLVSSLVSMILPRSDCKVMRQQCCQQLAQIPQQLQCAAIHGVVHSIIMQQEQQQQQQQQQQGIQIMRPLFQLVQGQGIIQPQQPAQLEVIRSLVLGTLPTMCNVFVPPECSTTKAPFASIVADIGGQ

SEQ ID NO: 7889 - protein, 264 aa, Brassica napus
RFLWLCWSSGDIHGQYQDLLRLFEYGGYPPSANFLFLGDYVDRGKQSLETICLLLAYKIRYPSKIYLLRGNHEDAKINRIYGFYDECKRRFNVRLWKIFTDCFNCLPVAALIDDKILCMHGGLSPELDNLNQIREIQRPTEIPDSGLLCDLLWSDPDQKIEGWADSDRGISCTFGADKVAEFLDKNDLDLICRGHQVVEDGYEFFAKRRLVTIFSAPNYGGEFDNAGALLSVDESLVCSFEIMKPALASSSGHPLKKVPKMGKS

SEQ ID NO: 7890 - protein, 201 aa, Triticum aestivum
  misc_feature (173)..(173): Xaa can be any naturally occurring amino acid
SRPGVCAIRQLFPIIPSQRLQERPAVDGVLSDLTCDSDGKVDQFIGGRSSLPLHELPAHGTRGYYLGMFLGGAYQEALGGLHNLFGGPSVVRVSQSDGPHCFAGTPAAPGPSCADGLRAMEPARAATREVLKQRTTDDGATAAALARAFGSMPYLSFDAEEAVAMSGAESSGXMSSDSEGSAAGAAEDDDEEWEFMRGLTV

SEQ ID NO: 7891 - protein, 403 aa, Oryza sativa (japonica cultivar-group)
MKDLFGDGIFATDGDMWRHQRKLASYEFSTKVLRDFSSDTFRRNAAKLAEKISCAAANRISINIQDLLMRATMDSIFKVGFGFELNTLSGSDESGIQFSKAFDEANSLVYYRFVDIMWKLKRYLNIGSEAKLKRNIQIIDSFVMKLIHQKREQMKIAADYKTKEDILSRFVLASEQDPGTMDDRYLRDIVLNFLIAGKDTTGNTLTWFFYLLCKNPIVQDKVALEIREFVEWSKEDNTIESFTKRLDEGAISKMHYLQATISETLRLYPAVPVDAKMADEDDVLPNGYRVVKGDGINYMIYAMGRMTYLWGEDAQEFRPERWLVNGVYQQESPFKFVSFNAGPRICLGKEFAHRQMKIMAATLIHFFKFRLEDESKEPIYKTMFTLHIDNGLHLLANPREISP

SEQ ID NO: 7892 - protein, 482 aa, Oryza sativa (japonica cultivar-group)
MVPAGDQAEEAIVADAGKEEAEVRAAMGVEQDGKFSMTSLLWHGGSVWDAWFSCASNQVAQVLLTLPYSFSQLGMLSGLLLQVFYGLMGSWTAYLISVLYVEYRARKEKEGVSFKNHVIQWFEVLDGLLGPYWKAAGLAFNCTFLLFGSVIQLIACASNIYYINDRLDKRTWTYIFGACCSTTVFIPSFHNYRIWSFLGLGMTTYTAWYLAIAAAVHGQVDGVTHSGPSKMVLYFTGATNILYTFGGHAVTVEIMHAMWKPQKFKYIYLVATLYVFTLTLPSASAMYWAFGDALLTHSNAFSLLPRSGWRDAAVILMLIHQFITFGFACTPLYFVWEKAIGMHGTRSVLTRALARLPIVVPIWFLAIIFPFFGPINSAVGALLVSFTVYIIPSLSHILTYRSASARLNAAEKPPPFLPSWSGMFVVNVFVVAWVLVVGFGLGGWASVTNFIKQIDTFGLFAKCYQCPPRAHAGAPLPAPPRH

SEQ ID NO: 7893 - protein, 267 aa, Bordetella parapertussis 12822
MTIPSFGVGTFRLTGQTVIDSVRNAIDLGYRAVDTAQIYGNETEVGQAIAESGVARSELFVTTKIWTDNYARAKLLPSLRASLEKLRTDYVDLTLIHWPAPGNGVALPEYMEALAEAKALGLTRRIGISNFNIALTRQAIAAVGQGEIATNQIELSPYLQSARLTAFLREQGIAVTSYMTLAYGKVLKDPVLARIADKHRSTVAQVALAWALQQGYAVIPSSTKRENLASNLLARGLALDADDMARIAALERNGREVDPEGLAPAWD

SEQ ID NO: 7894 - protein, 386 aa, Arabidopsis thaliana
MVLEATMICIDNSEWMRNGDYSPSRLQAQTEAVNLLCGAKTQSNPENTVGILTMAGKGVRVLTTPTSDLGKILACMHGLDVGGEINLTAAIQIAQLALKHRQNKNQRQRIIVFAGSPIKYEKKALEIVGKRLKKNSVSLDIVNFGEDDDEEKPQKLEALLTAVNNNDGSHIVHVPSGANALSDVLLSTPVFTGDEGASGYVSAAAAAAAAGGDFDFGVDPNIDPELALALRVSMEEERARQEAAAKKAADEACQKDKDGDTASASQETVARTTDKNAEPMDEDSALLDQAIAMSVGDVNMSEAADEDQDLALALQMSMSGEESSEATGAGNNLLGNQAFISSVLSSLPGVDPNDPAVKELLASLPDESKRHEEEESSSKKGEDEKK

SEQ ID NO: 7895 - protein, 122 aa, Arabidopsis thaliana
MEHGSFTNVSHASFTLSEEDHTLANAVRFVLNQDPRVTVAAYTIPHPSLEQVNIRVQTTGDPAREVFKDACQELMQMNRHVRSVFDKAVAEYKDEQKRKEEAEEEELKRQRDMFGSMDIENN

SEQ ID NO: 7896 - protein, 443 aa, Glycine max
MREAQNDIVATEFATTTNDEEVPSGVVLFGKYELRRLLGVGAFAKVYHATSVDDTHQSVALKAVSKNKVLNGGFAANVEREISIMRRLHHPNIINLFEVLATKTKIYFVMEFAAGGELFHEVAGKGRLTEETARFYFRQLISAVKHCHSRGVFHRDLKLDNLLLDEDGNLKVSDFGLSAVTGQIRPDGLLHTVCGTPTYVAPEILAKRGYDGAKVDLWSCGVVLFALIAGYLPFNDYNPSVLYRKIYRGQFRFPRWISHDLRFLLSRLLDTNPKTRITVDEIYKDTWFNADGEYRFNRVLVKESECEKQLGRTGFKSLNAFDLISFSTGLDMSGLFEDPTGSNSVERVVSTVVPEKIMERVEAMTEEGRVVVRREKNGGGAKLEGQDGNLIGIVVVYQLTDELVVVEMKRSEKGGGFGGQFWKDKLRPLLLELASELEEPVSR

SEQ ID NO: 7897 - protein, 284 aa, Lactobacillus plantarum WCFS1
MANIQWYPGHMAKAIHQIQDNLHLVDIVFELVDARIPVASRNPEIEKTVQQKPHLLIMTKKDLADPQATADWVKYYEDQGQVAIAVDSRSRTIGKQMTQAASDMLADKLAKIAARGITNRPIRAVCVGIPNVGKSTLLNHIVNKKIAKVGDRPGVTKGQQWLKASNKLELLDTPGILWPKFEDQVVGTKLAVTGAIKENIYPNDDVALFALDFFKQHYAARLVDRYHLTAEQLTLPNPELLIAMTKNAGMRDDWERFCVAFLLDIRKGRLGRFTLDLTGDQPDA

SEQ ID NO: 7898 - protein, 258 aa, Triticum aestivum
LANVGAELAHQVPGRVSTEIDARLAYDTQGIIHRVHELLNLYNQHDVSTDRLLFKIPATWQGIEASRLLESEGVQTHLTFVYSFAQAAAAAQAGASVVQIFVGRLRDWARNHSGDPEIDEALKKGEDAGLALAKKVYAYIHRNGYKTKLMVAAIRNKQDVFSLLGIDYIIAPLKILQSLEESVTDPDVKYGYVPKLTPAIGKTYNFTEEELVKWDQLSLSAAMGPAAEELLASGLEGYVNQARRVEELFGKIWPPPNV

SEQ ID NO: 7899 - protein, 233 aa, Thermoplasma acidophilum
MGLKESKKENLNLNSGWLTLSIILLWVGWFGFNPGSELAFTTETVIVVITTFLAAASAMVSTMLTKFLVSKQDPGLIYAVNGVLMGLIVITPLAGYVSPGSAIILGLISGPIFVSAESIFSKHKWYSDPIGVLPGHMVGGIFGLLMIAFFTQTPFADASGASNLPNGILFGGGIMALHQLGLEAMAVVVVGAFVFTVSYASVYAISLLLNGILRDSEYSPARPANRLAKDTGA

SEQ ID NO: 7900 - protein, 133 aa, Zea mays
MSYYGDRRAESSIVEAFTLSPLPYPVILVLLMVTLLLGASWFFTYDDFIEEASQQLSWALLGVPIALVLLIRWISSVDSFEGYLGFYPRESRWKGRYERGPAEGSSPWGVALLVLLLLVLASFHSTIHDMWGP

SEQ ID NO: 7901 - protein, 171 aa, Brassica napus
  misc_feature (97)..(97): Xaa can be any naturally occurring amino acid
  misc_feature (168)..(168): Xaa can be any naturally occurring amino acid
MSAMTVPNLAVGSDHHLMPVIGFGTAASPPPEPLLLKQAVIDAIKLGYRPFDTSPRYLTEEPLGEALAEAVSLGLIGSRSELFVTSKLWCADAHGGXLVVPAIQRSLKNLKLDYLDLYLIHWPVSSKPGKYKFPIEEDDFLPMDYGAVCSEMEECKRLGLAKSRGLSXPHP

SEQ ID NO: 7902 - protein, 331 aa, Pseudomonas aeruginosa PAO1
MAAKYPLSPAMWRFVEHSRAFASDSPRLDAQRAAYARMCQAFAPPRPAGLRVLDSCLPAAPPVRVRRYRPDRPAPPGGWPALLYLHGGGWMLGGLDSHDFICADLAARLGLLVLAVDYRLAPEHPFPAALQDCLRAWQALSLGELDEALDGRRLLVAGDSAGGNLAAALCLALRDGGAPSPAAQILLYPLLSAAPSPSRIDCADAPLLGLGDVQACLDAYLPLAALHRQPLALPLEAADFTGLPPAFVAVAEFDPLRDDGERYGAALRAAGGEAGFYPGSGLVHGCLRGHGIDEVEALHEALRRAVQGFLAEDSGERQAGEESTAEHQPGE

SEQ ID NO: 7903 - protein, 496 aa, Nostoc sp. PCC 7120
MRSTVAEPPVLDKIIKNVRVVRPHNDAVELLDIGIKDGKFAQIAPNITPDTGQEIFDAKNLLGFPGVVDAHMHIGIYQPLDKDAVTESKAAAMGGVTTSLNYIRTGQYYLNKGGSYRDFFPEVLALSAGNFFVDYSYHVAPIASQHIDEIPLLFEEHGVTSFKIFMFYGGYGLHGLSDQQNLFLMINKEERYDFAHFEFIMRGVTRLMAEYPEARDYISLSLHCEVAEILNAYTKIVENDSSLSGLHAYSAARPPHSEGLAISIAAYLAHETNCANINLLHLSSRKAMEAALIMQTAFPHINFRREVTVGHLLLDVDTPNGTWAKVNPPIRPRADVEYLWQAVLNHQVDWIVSDHACCSAEQKRSAKDPNNIWLAKSGFGGTEYLLSGVVSEGSKRGMSYNHMAKLLSWNPSRRFGLLTKGDIAIGYDADLVLVDPNESFVVRAAESESQQGYTPFEGMELTGRVKSTFLRGSLIYHNGQVLGSPNGRYVRRSLGG

SEQ ID NO: 7904 - protein, 504 aa, Glycine max
MSALSNSSSSHGNSFLKMPAIKFTKLFINGDFVDSISGRTFETIDPRKEEVIARVSEGDKEDIDIAVKAARQAFDSGPWPRLPGSERAKIMMKWADLVDENIEELAALDTIDAGKLYYINKVAEIPSATNALRYYAGAADKIHGDVLKMNGDFHAYTLLEPIGVVGHIIPWNAPSLSFFIKVSPSLAAGCTMVLKPAEQTPLSALFYAHLAKLAGIPDGVLNIVPGFGPTAGAAISSHMDIDAVSFTGSIEVGREVLQAAAWSNLKPVSLELGGKSPLIIFNDADIDKASELALFGIMSNKGEICVAGSRVFVQEEIYDEFEKKLVEKAKSWVVGDPFDPKSLQGPQADRNQLEKILSYIEHGKREGATLLTGGNTVGNKGYYIEPTIFCNVKEDMLIARDEIFGPVLALMKFKTMEEAIKSANNTKYGLAAGIVTKNLDTANTMSRSIRAGIVWINCYLTVGSDVPFGGYKMSGFGRDLGLQALHKYLQVKSVVTPIHNSPWL

SEQ ID NO: 7905 - protein, 153 aa, Triticum aestivum
  misc_feature (120)..(120): Xaa can be any naturally occurring amino acid
  misc_feature (133)..(133): Xaa can be any naturally occurring amino acid
  misc_feature (138)..(138): Xaa can be any naturally occurring amino acid
  misc_feature (148)..(148): Xaa can be any naturally occurring amino acid
MAPTVMASSATSVAPFQGLKSTAGLPVSRRSNGASLGSVSNGGRIRCMQVWPIEGIKKFETLSYLPPLSTEALLKQVDYLIRSKWVPCLEFSKVGFIFREHNASPGYYDGRYWTMWELPXMFGCTDATKVINXWRSQXEYLTRIRIIXFENPQ

SEQ ID NO: 7906 - protein, 421 aa, Oryza sativa (japonica cultivar-group)
MQERCRVLLRFADLIEQHADEIAALETWDGGKTLEQTTGTEVPMVARYMRYYGGWADKIHGLVVPADGPHHVQVLHEPIGVAGQIIPWNFPLLMFAWKVGPALACGNAVVLKTAEQTPLSALFVASLLHEAGLPDGVLNVVSGFGPTAGAALSSHMGVDKLAFTGSTGTGKIVLELAARSNLKPVTLELGGKSPFIVMDDADVDQAVELAHRALFFNQGQCCCAGSRTFVHERVYDEFVEKARARALQRVVGDPFRTGVEQGPQIDGEQFKKILQYVKSGVDSGATLVAGGDRAGSRGFYIQPTVFADVEDEMKIAQEEIFGPVQSILKFSTVEEVVRRANATPYGLAAGVFTQRLDAANTLARALRVGTVWVNTYDVFDAAVPFGGYKMSGVGREKGVYSLRNYLQTKAVVTPIKDAAWL

SEQ ID NO: 7907 - protein, 344 aa, Sinorhizobium meliloti
MTNMMKALVKTKPEVGLWMERVPVPEIGPNDVLIRVRKSAICGTDVHIWNWDQWAEKTIPVPMVVGHEFMGEVVEVGPAVSKHHVGERVSGEGHIVCGKCRNCRAGRGHLCRNTLGVGVNRPGSFAEFVCLPEYNVVSIPDDVPDEIAAIFDPFGNAVHTALSFDLVGEDVLVTGAGPIGIMGAMVAKRCGARKVVITDINPVRLDLARKLGIDHVVDASKEKLADVMRVIGMTEGFDVGLEMSGAAPAFRDMIDKMNNGGKIAILGIAPAGFEIDWNKVIFKMLNLKGIYGREMFETWYKMIAFVQGGLDLSPIITHRIGIDDFRDGFEAMRSGNSGKVVMDW

SEQ ID NO: 7908 - protein, 231 aa, Brassica napus
  misc_feature (222)..(222): Xaa can be any naturally occurring amino acid
MEGIQNPVVSRSVEEVFGDFRGRRAGLLKALSTDVRKFYHECDPDKENLCLYGLPNETWEVNLPVDEVPPELPEPALGINFARDGMPEKDWISLGAVHSDSWLISVAFYFGARFGFGKNERKRLFQMINDLPTIFEVITGNAKQTKDQSANNHNSSRTKPSGVKASKTSPPPREDDDSGEDEEDDEQGAVCGACGDNHDDFWICCDACEKWFHGKCVKITPXKAEHIKHYN

SEQ ID NO: 7909 - protein, 201 aa, Thermococcus kodakaraensis
MAHGPRYRVPFRRRREGKTNYHKRLKLLKSKKPRLVVRKTLNHHIAQIVVYDPKGDKTLVSAHTMELMRDFGWKGHGGNTPSAYLLGLLIGYKAKQAGIEEAILDIGLHPPTRGSSIFAVLKGAVDAGLNVPHSEEIYPEDYRINGEHIANYAKALKEEDEALYRKQFSGYLVKGLEPEKLPEHFEEVKAKIIEKFEGARE

SEQ ID NO: 7910 - protein, 311 aa, uncultured archaeon
MPLDPQIKPILERIRALSIAASPQELRRQVEEQSRLLTAAVQEPIAETRDVHIPVSGGSIRARVYFPKKAAGLPAVLYYHGGGFVFGSIETHDHICRRLSRLSDSVVVSVDYRLAPEYKFPTAVEDAYAALKWVADRADELGVDPDRIAVAGDSAGGNLAAVVSILDRNSGEKLVKKQVLIYPVVNMTGVPTASLVEFGVAETTSLPIELMVWFGRQYLKRPEEAYDFKASPLLADLGGLPPALVVTAEYDPLRDEGELYAYKMKASGSRAVAVRFAGMVHGFVSFYPFVDAGREALDLAAASIRSGLQPS

SEQ ID NO: 7911 - protein, 267 aa, Picrophilus torridus DSM 9790
MIGMLTKDDVISVILEARDIIKSMENGPFLEPVNADRVLFVGDTHCAVDVTETVFRNYSDFDKIVFLGDYVDRGNTGIENLITILSMMINDPDKIIVLRGNHESPITNENYGFYNEITEKYDRETYYYAADLFSVMPYATVVNDYFCVHGGLASGLNYIDEIKELPLYDVVPDNQTAFELMWNDPREMINGFIPSPRGDNIFYFGEDIVDDFLNKNNLKGIIRGHETADGFRDDMNGKVRTVFSSRYHRLRAGVLRMENGEFFKDYI

SEQ ID NO: 7912 - protein, 124 aa, Glycine max
  misc_feature (49)..(49): Xaa can be any naturally occurring amino acid
MEPMDIVGKAKEDASLPKATMTKIIKEMLPPDVRVARDAQDLLIECCVXLGFGEYIEEVYAAYEQHKLEFMQDSLKGAKWSNRAEMTEEEALAEQQRMFAEARARMNGGAIQSKEPEADQSLES

SEQ ID NO: 7913 - protein, 357 aa, Chlamydomonas reinhardtii
MAAANQKPGPAGRPEPLIGHPRYEKIKDLNSGTFGFVQLARDKLTGETWAVKFIERGDKITKYVEREIINHRCLVHPHIVQFREVFLTPTHLCIVMEFAPGGDMFEYVVRKNGLREDEARWFFQQLIVGLDYCHRMGVVNRDIKLENTLLDSSPRPLVKICDFGYSKHEKFQSAPGSRVGTPAYLAPEVILTTKGKTYDGKIADIWSCGVMLYVMLVGAYPFERPEDKHDNQKLQKMIQRILHVDYHIPPHVRASEDCKDLLAKILVADPHKRITVDGIYNHKWYLKGLPPGVREMNDRVQPPPEGLQSVEEIKRLIEEARHVGVGAPGYVNPVETDEYIDDAMDNMYDEGSLDYND

SEQ ID NO: 7914 - protein, 362 aa, Sorghum bicolor
MGSTAEDVAAVADEEACMYAMQLASSSILPMTLKNALELGLLEVLQKDAGKALAAEEVVARLPVAPTNPAAADMVDRILRLLASYDVVKCQMEDKDGKYERRYSAAPVGKWLTPNEDGVSMAALALMNQDKVLMESWYYLKDAVLDGGIPFNKAYGMTAFEYHGTDPRFNRVFNEGMKNHSVIITKKLLEFYTGFDESVSTLVDVGGGIGATLHAITSHHSHIRGVNFDLPHVISEAPPFPGVQHVGGDMFKSVPAGDAILMKWILHDWSDAHCATLLKNCYDALPEKGGKVIVVECVLPVTTDAVPKAQGVFHVDMIMLAHNPGGRERYEREFRDLAKAAGFSGFKATYIYANAWAIEFIK

SEQ ID NO: 7915 - protein, 197 aa, Medicago sativa
  misc_feature (78)..(78): Xaa can be any naturally occurring amino acid
  misc_feature (110)..(110): Xaa can be any naturally occurring amino acid
MSASRFIKCVTVGDGAVGKTCLLISYTSNTFPTDYVPTVFDNFSANVVVNGSIVNLGLWDTAGQEDYNRLRPLSYRGXDVFILAFSLISKASYENVSKKWIPELKHYAPXVPIILVGTKLDLRDDKQFCIDHPGAVPITTAQGEELRKLINAPAYIECSSKSQENVKAVFDAAIRVVLQPPKQKKKKNKAQKACSIL

SEQ ID NO: 7916 - protein, 358 aa, Aspergillus oryzae
MGAPPKTAQNLSFVLEGIHKVKFEDRPIPQLRDAHDVLVDVRFTGICGSDVHYWEHGSIGQFVVKDPMVLGHESSGVISKVGSAVTTLKVGDHVAMEPGIPCRRCEPCKEGKYNLCEKMAFAATPPYDGTLAKYYVLPEDFCYKLPENINLQEAAVMEPLSVAVHIVKQANVAPGQSVVVFGAGPVGLLCCAVARAFGSPKVIAVDIQKGRLEFAKKYAATAIFEPSKVSALENAERIVNENDLGRGADIVIDASGAEPSVHTGIHVLRPGGTYVQGGMGRNEITFPIMAACTKELNVRGSFRYGSGDYKLAVNLVASGKVSVKELITGVVSFEDAEQAFHEVKAGKGIKTLIAGVDV

SEQ ID NO: 7917 - protein, 322 aa, Candida tenuis
MSASIPDIKLSSGHLMPSIGFGCWKLANATAGEQVYQAIKAGYRLFDGAEDYGNEKEVGDGVKRAIDEGLVKREEIFLTSKLWNNYHDPKNVETALNKTLADLKVDYVDLFLIHFPIAFKFVPIEEKYPPGFYCGDGNNFVYEDVPILETWKALEKLVAAGKIKSIGVSNFPGALLLDLLRGATIKPAVLQVEHHPYLQQPKLIEFAQKAGVTITAYSSFGPQSFVEMNQGRALNTPTLFAHDTIKAIAAKYNKTPAEVLLRWAAQRGIAVIPRSNLPERLVQNRSFNTFDLTKEDFEEIAKLDIGLRFNDPWDWDNIPIFV

SEQ ID NO: 7918 - protein, 285 aa, Xylella fastidiosa Ann-1
MTTNDTWFTEHFQATGSAIGFRVTGKLDEVQSPFQKIEIYNSTDWGKLMVIDGALMLTSRDNFLYHEMISHPALFTHTAPKCVVIIGGGDCGTLREVLKHPDIEQVTQCDIDEQVTRMAEKHFPELCTSNNDPRATLLFSDGVAYMADCPTNSVDVIIVDSTDPVGPAKGLFNRTFYESCFRALKNDGLLIQQSESPLALLELIKEMRHEMSKAGFKAFKTLPFPQPCYPTGWWSVTLSSKQPNANFAFRQTDAQTKPFDTLYYNAHLHHGVLVPPPFIAHALGE

SEQ ID NO: 7919 - protein, 384 aa, Bacillus anthracis str. A2012
MHEDLLGLEEIMMKAEEKFSPGLDGIVAAETKISFLDTVKGEIVIQGYDLIELSKTKEYLDIVHLLLEEHLPNEDEKATLEKKLKEEYAVPEGVFNVLKALPKETHPMDGLRTGVSALAGYDNDIENRSLEVNKSRGYKLLSKVPNIVANSYHILNNEEPIEPLKELSYSANFFYMLTGKKPTELEEKIFDRSLVLYSEHEMPNSTFTARVIASTQSDLYGALTGAVASLKGSLHGGANEAVMYMLLEAGNVEKFEELLQKKLYNKEKIMGFGHRVYMKKMDPRALMMKEALKQLCDVKGDYTLYEMCEAGEKIMEKEKGIYPNLDYYAAPVYWMLGIPIQLYTPIFFSSRTVGLCAHVIEQHTNNRLFRPRVNYIGERHVLSK

SEQ ID NO: 7920 - protein, 506 aa, Ruta graveolens
MDLLLLEKALLGLFAAAVVAIAVSKLRGKRFKLPPGPLGFPVFGNWLQVGDDLNQRKLANLSKKFGDVYLLRMGQRNLVVVSSPEMAKEVLHTQGVEFGSRTRNVVFDIFTGKGQDMVFTVYSEHWRKMRRIMTVPFFTNKVVQQQRFNWEDEAARVVEDVKKDPQAATTGIVLRRRLQLLMYNNMYRIMFDRRFESVDDPLFNKLKALNGERSRLAQSFEYNYGDFIPILRPFLRGYLKLVKEVKERRLKLFKDYFVEERKKLTSTKSMTEENFKCAIDHVLDAQQKGEINEDNVLYIVENINVAAIETTLWSIEWGIAELVNHPDIQKKLRAEIDRVLGPDHQITEPDTHKLPYLQAVIKETLRLRMAIPLLVPHMNLNDAKLAGYDIPAESKILVNAWWLANNPAHWKDPQVFRPERFLEEESGVEANGNDFRYIPFGVGRRSCPGIILALPILGITIGRMVQNFELLPPPGQSKIDTSEKGGQFSLFILNHSTIVLKPRSSV

SEQ ID NO: 7921 - protein, 465 aa, Oryza sativa (japonica cultivar-group)
MDDDGETPMPSLELHKLPTLAGAAIPNPIARHPLYHPSPSFFISPTDVVLRDILFDASPASAAGERRRRHVAAYHRAGPRREVAFDPATVRAAIFTCGGLCPGTNTVVRELVVGLSELYGVRGGVFGVRNGYRGFYSDEVVPLDPAAVEHWHKAGGAALGTSRGGFDLARIVDAIERHGFNQVYAVGGDGTMRGAARIHREVRRRGRLAVAVAGIPKTVDNDVGVVDRSFGFHTAVEAAQQAIAAGHVEAESAANGVGLVKLMGRSAGHIALHATLSSRDVDCCLIPEEDFYLRGAGGLFDFLYRRIKDNGHAVVVVAEGAGQRLIPRTTTTSASGACAGADESGNETFLDVGAWLKAEMRAWWEEEHAGEVFTVKYIDPTYMIRAVPANAGDNLYCTLLAHAAIHGAMAGYTGFVSGTINGNYAYIPMDEVAEAKNPVDTKDHKWAWVRSITNQPDFIRAGPTS

SEQ ID NO: 7922 - protein, 412 aa, Arabidopsis thaliana
MLLSKRFKSQWLLVPKLEFDDSTHLPETWGYQEPDYGNFRRFVDRSLLSREGRVLQTLFLKLGRQCSYDDIAIWVGIAVKRGLMELKLKYTDSYYPKRSSLPRSLYTCETLVVLKLKKGYLDVPDLVCLRSLKTLSLRDMNYSNASCLLRLLASCPVLEELFIQQGYYDSCALSFKIILPCLKKLSYLPKRKKKYSGIDRSEVSGGISGLVLDAPSLKYLHIVDRSGLFSVSEIININAVVKATLEVNASRPEKLLYSLVSVEHIRLCLSATEVVYPVGLGSSFHKLKRLEVCTCKSEWLDLFIHLLEDSPSLQDIKINQCHPVTNPRPQWNQPGSVPRCLSSSLETLEWVEYGGTHEEKELSTYLFKTAVCFKKASFTAKWSGGDANKKLQMLQELALSPRVSPTCELVFN

SEQ ID NO: 7923 - protein, 428 aa, Arabidopsis thaliana
MDKISQLHDELLLGILSLLPNAKDVVATMVLSKRWRYLWMMVPSLVYDDSYQDIDYGRFSRFVDRSLALHKAPVIDTLHFKLGHICGSGDTLIGAAEKCCVRKLIIKIDDTSSRSSKTDQVILPMSLCSGVHIMLADLKLQNVVLVDVSTPVSFPSLKRLRLKSVKYPGNEFVNNLISSCPVLEDLVVKQCSDDNVTILTVRVPSLKRLSLIQRAELEIDVPHDFVIDTPSLEHLKIVDYTYGSRVVKSTMNRIITASMDVFSPQTKEILGSLTSTKRLFLCLPTSKDAYPVGNIFGSLIHLTICTCETEWLNVLIRVLRDSPNLKTLKIEQYHNLRDEDPRPCWNETSLVPEYLLPSLETFEWVDYEGTKTEKQVVAFILRIASCLKQATIVSFKYIDHDKKLEMLNDFPVSSRRSPACMLAFSWNL

SEQ ID NO: 7924 - protein, 450 aa, Arabidopsis thaliana
MNLIRFLLVFQGKIQMNESRKKLNCQSRQFNVDKISDLPEDLLVHILSLLPTTNDIVATSGVSKRWESLWTKVHKLRFNDRIYDGKRYDSFLHFVEKSLILHKAPTLVSLRLSVGPKCTADDIGLWIKLALDRNICELIIKHYPDHGHIRLSRRLCDSKTLVSLKLKNAILGAIWLPTCFISLKTLHLRYVKYSGDESVRTLISSCPSLRNLVVKRHNEDNVKRFAIIVRYLQSLTVYLSPLHGVADSDAYVINTPNLKYLNIKDHYTDLCSFEDMPYLDEANLDVAFTHTENFFESLTSVKKLSLCLKKSNYPEGIIFSQLDHLELCTCDDSKWLNILAMLLPDSPKLRVLKLNDKYHPLRAKEPRPRWNEPSSVPECILYSLETFKWVHYEGMEEEKELVGFIFRNGSLLKKATIIPPNSIDSDTKLEMLMELSLSSRRSPICQLEFS

SEQ ID NO: 7925 - protein, 250 aa, Brassica napus
MNSVSTFSELLGSENESPVGSDYCPMLAASCPKKPAGRKKFRETRHPIYRGVRLRKSGKWVCEVREPNKKSRIWLGTFKTAEIAARAHDVAALALRGRGACLNFADSAWRLRIPETTCAKDIQKAAAEAALAFEAEKSDTTTNDHGMNMASQVEVNDTTDHDLDMEETIVEAVFREEQREGFYMAEETTVVGVVPEEQMSKGFYMDEEWMFGMPTLLADMAAGMLLPLPSVQWGHNDDFEGVADINLWSY

SEQ ID NO: 7926 - protein, 1305 aa, Neurospora crassa
MATTTALPTLATAVTTAVSTASISGSVLSTISSALASTITTSASLTSSSSSTSSRVLTTTTSVPPKQVPNTDAAGSAQKFGGISLVAFLTALATSLVVFGVQMGLFLLLRHKLARIFKPKTYLVPERERTEPPPASPWNLLSTVLRYNDREIIKKCGLDAYFFLRYLQTLLVLFIPIAIVVIPILIPINYVGGLGHQVVDTNTTDTDDSDVPTGLDTLAWGNVRPEHYRRRWAHLILALLVIIWVCGVFFAELRVYVKIRQDYLTSAEHRLRASANTVLVSSIPDKWLTEDALRGLFDVFPGGIRNVWLTRDFTKLLEKIHRRDAIHVQLEEAETELIREAKRRQLKQRSLEEKRIRKAHQVKAESKKERKHRAKAEDDEAKRRAEDNGGLSVGDDDAVPHDVATAVHGGEKLEGKGLGDIQEGESEGSPHHGPRGGNGLFKVGENLGRGLRKGVGFVEETGHNILVLPKALQHNVEGELERTGGFDFIKDGAQSSPTSSTSSEYDSKLHPGDDDAQPKPSFASETPLQASQARHAHTLSEATQASTVQKGPDTRTIGNTTRKVSNVNDMYVTEKTRWYEFWKPPSGGYVSPVPQGYEREDYPWKVERTKWQKFKAAIPFYHSDIEDVEYPPAFTKDYTTEKEEGAEWQKWLSAKDRPHHRLALFDWTPGWLPALPLLNKKVDTIYWCRAELAKLNLEIEEDQQHPERYPIMNSAFIQFNHQVAAHMACQSVTYHIPKQMAPRTVEISPNDVIWDNMAIKWWHEWARSALVFAVVTGMLVLWAFPVAWTASLAQLDALVEKYSWLHWLVENKTIHNVIKGVAGVLPAAVLAILLILVPIALDWLATFQGAKTGSQTTETVQTYYFAFLFVQVFLVVSITSSTFQTIANITQDITSTPEVLAENLPKAANYFFSYMILQALSTSSGTLLQIGTLFMWYIMARILDNTARAKWTRNTQLPSVTWGSFFPVYTNFACIALIYSVVAPLISIFAIITFALLWCAHRYNMLYVTRFRTDTGGVLYPRAINQTFTGLYVMELCLIGLFFLAVDENDQVACVPQAIIMIIALIFTILYQYLLNRSFGPLLRYLPITFEDEAVIRDEAFQRAQERRLGIIRDDDEATALNRSGPGASDGKDIELRNLHKRTKSEADSLSRLGKLNPVRGIVQAGSWAARGGRQVRQAAFGKAEENLRTATIYRNERRQKDIEAQRAIGDALFGGYHDEIEDLTPEERDVLVRKAFQHYALRARRPTVWIPRDDIGVSDDEIKRTQEFSKYIWISNEGTALDSKVRVVYGRNPPDFSEVDIINL

SEQ ID NO: 7927 - protein, 159 aa, Medicago sativa
MSDEEHHFEPAADAGASKTYPQQAGTIRKNGYIVIKSRPCKVVEVSTSKTGKHGHAKCHFVAIDIFNGKKLEDIVPSSHNCDVPHVNRTDYQLIDISEDGFVSLLTDNGSTKDDLKLPTDDSLLTQIKDGFADGKDLVVSVMSAMGEEQICALKDIGPK

SEQ ID NO: 7928 - protein, 294 aa, Glycine max
MSEALEEVVPSMKGGCEEEGLNLEATELRLGLPGCESPEREGVFKSVVVSGAKRGFSDAIDGNWNGGGSEKDAAALFSPTSRGAVSVSVSAAKSLTLTATDCTNQPTALGASVLKETVPHSPKPLHENKPQISAPAAKAQVVGWPPIRSFRKNSMASQPQKNDAAADAEAKSGCLYVKVSMEGAPYLRKVDLNSFTTYKDLSLALEKMFSCFTLSQCGSYGVSSRENLSESRLMDLLHGSEYVLTYEDKDGDWMLVGDVPWEMFTESCKRLRIMKSSEAIGLAPRAMEKCKSRY

SEQ ID NO: 7929 - protein, 160 aa, Azotobacter vinelandii
MSAFHDLTLRGLDGQDLPLAQFRDKVVLVVNVASKCGLTPQYAGLEKLHLQYRERGFSVLGLPCNQFAGQEPDNEAQIREFCSLNYGVTFPLAAKLEVNGSGRHSLYRLLAGEGAEFPGDITWNFEKFLVGRDGRVLARFSPRTAPDDPALLQAIEKALG

SEQ ID NO: 7930 - protein, 151 aa, Rhodobacter sphaeroides
MRLAALLLAALLATPAFAVQPDEILPDPALEARARDISQGLRCLVCRNENIDDSNAQLARDLRLLVRERLAAGDSDAEVVEFVVDRYGEYVLLNPTTGGANLILWIAGPAMLAGGLGLAALYLRRRRTAPDAASAALSDEEQARLPEILKD

SEQ ID NO: 7931 - protein, 402 aa, Bacillus cereus G9241
MPKHRKQSKIKIYRITSYKKDKRSELDSDKFELEQQEIENKQDKHGKQGKQDKHDKQDKQDKQDKQDEQDKQDKQDEQDEQDEQDKQDKQDKQVQTENVVIVPTDSHNLDIWDEISLKEIQAGEHTSLLNEKSNYQNINLVQVSDIRLYLDNQLQFSSVDEQIYHEALVHPIMAKVIDPKRVLILGGGDGLALREVLKYETVLHVDLVDLDEAMINMARNVPEIVSLNKNAFFDNRVNVHVCDAKEFLNSPSSLYDVIIIDFPDPATEVLSTLYTSELFARIATFLTEDGAFVCQSNSPADAPLVYWSIGNTIENAGLIVKSYHIIVPSFGTDWGFHIAANSSHILDQIEQLYVVPTPRTLPSLLFPLFQFKEEYLEQCNHALINSESNLILHQCYKQEMEF

SEQ ID NO: 7932 - protein, 319 aa, Lactobacillus sakei
MKRIGILTSGGDAPGMNAAVRAVARKAMHEGLEVYGINYGYAGLVAGDIFKMDPITVGDKIQRGGTFLYSARYPEFAQVEGQLKGIEQLNKFGIEALVVIGGDGSYHGALRLTEHGYNAIGLPGTIDNDIPFTDQTIGFDTAVNTVLESIDRIRDTAASHERTFVVEVMGRGAGDIALWAGVAGGAQDIIIPERDFDVKAVAEKLRASREHGQKHAIIVLAEGVMHADEFSEKLSEYGDFHLRSTVLGHVVRGGSPTASDRVLASRLGSKAVELLLEGKGGVALGIEKNEIIAHDMLDLFNHKHHAMLDLYDLNEDLAY

SEQ ID NO: 7933 - protein, 186 aa, Zea mays
MASLGLPGPSSYHDLCCYGAGIAGNIFAFVLFISPLPTFRRIVRNGSTEQFSATPYIYSLLNCLVCMWYALPFVSYGVVLVATVNTIGAAFQLAYTAVFIAYADAKKRLKVSVLLAGVFCVFGLIVYVSMALFDPKPRRTFVGYLSVASLIFMFASPLSIINLVIRTKSVEYMPFYLSLSMSLMSM

SEQ ID NO: 7934 - protein, 428 aa, Bacillus halodurans C-125
MKTLIKNGSIVTKEGTVKTQDVLLHDGVISAIGLNLEETDAHVIEANGKLVTPGLVDLHVHLREPGGEAKETIETGTKAAAKGGFTTVAAMPNTRPVPDSAEQMSWLTGRIDETGVVRVLPYAAITTRQLGRELTDFAKLKEAGAFAFTDDGVGVQSAAMMLEAMKEAAKLEMAIVAHCEENTLIQNGSVHEGVFSKKHGIAGIPSVCESVHIARDVLLAEAAGVHYHVCHISTKESVRVVRDAKRAGIRVTAEVTPHHLLLCDEDIPGLDAHYKMNPPLRGKEDREALIEGLLDGTIDFIATDHAPHTEEEKGQGMERAPFGIVGLETAFPLLYTHFVKKGTFTLKQLVDWLTIDPAETFQLPYGRLEEGAPADVTIIDLEAERAIDPAHFASKGRNTPFAGWTCQGWPVATLVGGKLVWEEKEVAR

SEQ ID NO: 7935 - protein, 154 aa, Oryza sativa (japonica cultivar-group)
MAEEQRWQEGCHRLCANNCGFFGSPATLDLCSKCYRDRQGRESTAPVVVAAAASACPATHPSSPSSSSCPAFLPSSTAAEAGVVVAAVAKASRCASCRKRVGLTGFACRCGGTFCGAHRYPERHACGFDFKAAGRDAIARANPLIKGDKLKDKI

SEQ ID NO: 7936 - protein, 157 aa, Zea mays
  misc_feature (29)..(29): Xaa can be any naturally occurring amino acid
  misc_feature (67)..(67): Xaa can be any naturally occurring amino acid
  misc_feature (99)..(99): Xaa can be any naturally occurring amino acid
MAASSTATSVHDFIVKDASGKDVDLSTYXKGKVLLIVNVASQCGLTNSNYTELAQLYEKYKDQGFEXPGTNEEIVQFACTRFKAEYPIFDKVDVNGNNXAPIYKFLKSSKGGLFGDSIKWNFSKFLVDKEGRVVDRYAPTTSPLSIEKDIKKLLGSS

SEQ ID NO: 7937 - protein, 496 aa, Pseudomonas fluorescens PfO-1
MTTTRNDWEQRFQSLTLESRAFINGEYRPAISGETFECLSPVDGRFLASVASTDEADANLAVEAARQSFNAGVWANKAPAERKRILIRFADLILQHQEELALLETLDMGKPISDSMSIDIPATANAIRWSAEAIDKIYDEVAATPHDQLGLVTREPSGVVAAIVPWNFPLIMASWKFAPALAAGNSFILKPSEKSPLTAIRIAQLALDAGIPKGVFNVLPGFGHTVGKALALHMDVDVLAFTGSTAIAKQLMIYAGQSNMKRVWLEAGGKSPNVVFADAPDLRAAAQAAAGAIAFNQGEVCTAGSRLLVERSIREQFIPLLVEALQAWKPGHALDPATTVGAVVDQRQLDNVLRYISIGREQGAELIAGGRRTLEDTGGTYIEPTIFDGVTNAMTIAKEEIFGPVLSLITFDTVEEALHIANDSIFGLAAGVWTSNLSKAHTFARGLRAGSVWVNQYDGGDMTAPFGGFKQSGNGRDKSLHAFDKYTELKATWIKL

SEQ ID NO: 7938 - protein, 361 aa, Erwinia carotovora subsp. atroseptica SCRI1043
MKALAKLRPEEGIWMMDAPMPELGHNDIMIKIRKSAICGTDVHIYNWDEWSQKTIPVPMVVGHEYVGEIVAIGQEVNGFHIGDRVSGEGHITCGYCRNCRAGRRHLCRNAIGVGVNRPGSFAEYLVIPAYNAFRIPDNISDELAAIFDPFGNAVHTALSFDLVGEDVLITGAGPIGMMAAAVCRHVGARNVVITDVNAYRLELASKMGATRAVNVAEEKLTDVMIELGMTEGFDIGLEMSGAPSAFRAMLKAMNHGGRIAMLGIPHEPMSIDWGEVIFKGLFIKGIYGREMFETWYKMSALIQSGLDLSPIITHRFHIDEFQKGFDAMRSGQSGKVILNWDEAYTRHTSSCMCVDCATRHT

SEQ ID NO: 7939 - protein, 1569 aa, Streptococcus gordonii
KSKVAKTLCGAVLGAALIAIADQQVLADEVTETNSTANVAVTTTGNPATNLPEAQGEATEAASQSQAQAGSKDGALPVEVSADDLKKVTDAKAAGVNVEQDQTSDKGIATTAAENAQKQAEIKSDYAKQAEEIKKTTEAYKKEVEAHQAETDKINAENKAAEDKYQEDLKAHQAEVEKINTANATAKAEYEAKLAQYQKDLAAVQKANEDSQLDYQNKLSAYQAELARVQKANAEAKEAYEKAVKENTAKNAALQAENEAIKQRNATAKANYDAAMKQYEADLAAIKKAKEDNDADYQAKLAAYQAELARVQKANADAKAAYEKAVEENTAKNTAIQAENEAIKQRNAAAKATYEAALKQYEADLAAVKKANEDSEADYQTKLAEYQTELARVQKANADAKAAYEKAVEDNKAKNAALQAENEEIKQRNAAAKTDYEAKLAKYEADLAKYKKKLAEYPAKLKAYEDEQAQIKAALVELEKNKDQDGYLSKPSAQSLVYDLEPNAQLDLKTEGKLLTAAAVDEAFKKDTDQYGKKNLQLDNLNVKNLENGATTSSVELYGNINNKSDWTTNVGNKTEVKWGSVLLERGQSVTATYTNLQNSYYNGKKISKIVYKYTVDPSSQFKNPSGKVWLGIFTDPTLGVFASAYTGQVEKDTSLFIKNEFTFYDENDQPINFDNALLSVASLNREHNSIEMAKDYSGKFVKISGSSIGEKNGMIYATETLNFRQGQGGSRWTMYPRANEPGSGWDSSDAPNSWYGAGAISMSGPNNYVTVGATSATNVMPVAEMPQVPGRDNTEGKRPNIWYSLNGKIRAVNVPKITKEKPTPPVAPTEPQAPTYEVEKPLEPAPVVPTYENEPTPPVKTPDQPEPSKPEEPTYETEKPLEPAPVAPTYENEPTPPVKTPDQPEPSKPEEPTYETEKPLEPAPVAPSYENEPTPPVKIPDQPEPSKPEEPTYDPLPTPPLAPTPKQLPTPPVVPTVHFHYSSLLAQPQINKEIKNEDGVDIDRTLVAKQSIVKFELKTEALTAGRPKTTSFVLVDPLPTGYKFDLDATKAASTGFDTTYDEASHTVTFKATDETLATYNADLTKPVETLHPTVVGRVLNDGATYTNNFTLTVNDAYGIKSNVVRVTTPGKPNDPDNPNNNYIKPTKVNKNKEGLNIDGKEVLAGSTNYYELTWDLDQYKGDKSSKEAIQNGFYYVDDYPEEALDVRPDLVKVADEKGNQVSGVSVQQYDSLEAAPKKVQDLLKKANITVKGAFQLFSADNPEEFYKQYVATGTSLVITDPMTVKSEFGKTGGKYENKAYQIDFGNGYATEVVVNNVPKITPKKDVTVSLDPTSENLDGQTVQLYQTFNYRLIGGLIPQNHSEELEDYSFVDDYDQAGDQYTGNYKTFSSLNLTMKDGSVIKAGTDLTSQTTAETDATNGIVTVRFKEDFLQKISLDSPFQAETYLQMRRIAIGTFENTYVNTVNKVAYASNTVRTTTPIPRTPDKPTPIPTPKPKDPDKPETPKEPKVPSPKVEDPSAPIPVSVGKELTTLPKTGTNDSSYMPYLGLAALVGVLGLGQLKRKEDESK

SEQ ID NO: 7940 - protein, 503 aa, Arabidopsis thaliana
MDKITGFSDDELLVKILSFLPTKAAVTTSILSKQWKFLWMRLPKLEYHDDIKIYILYMRGGSRSRTDSILLEKSQRMWRFIDKNLPLHSSPVIESLRLTIYNELFQPESINLWVEIAVSRCVKELSVRFSPFKGKRDALLPTTLYTCKSLVTLKLRENILVDVPHVFCLPSLKTLHLSHVTYADEESLQRLLSNCFVLEDLVVERRVGDNVRNFAVIIPSLLSLSFEILGQCSSEEYVIHTPSLKYFKARDFGECSTCLILNMPKLEEVFVSTAGHNIKKLLESVTYVKRLSLFIPDNNAEAFTALYGDVIVFNQLEHLTFIIWEAYCSKLLYWLLIASPKLRNLEFNDQFSSDGMDTLVFWEQMITSVPQCLLSSLQTFKWLGNGDSIEGKDLATFILRNSCQLKTATISIGQGQNKLEIEKELLLHQNMDKISGISDDVLLVKILSFRPTKVAVSTSVLSKQWKYLRKRVLKLEYDDTECKTKPSKSSHKRFRCFVKRFCK

SEQ ID NO: 7941 - protein, 268 aa, Zea mays
  misc_feature (99)..(99): Xaa can be any naturally occurring amino acid
MFGYRKAGPDLEAGGSSLLYPGMTESPELRWAFVRKIYVILAVQLAMTAAVSAFVVKVPAVSNFFVSSNAGVALYIFLIILPFLGKPGSPVFWGIFSPXAEIGCNLLRAVLCPLRYYHQKHPVNLLLLGLFTVAISFAVGMTCAFTSGKIILEAAILTAVAGISLTAYTFWAAKRGHDFNFLGPFLFAAIMVLMVFSLIQIFFPLGKISVMIYGGLASLIFCGYIIYDTDNVIKRYTYDEYIWAAVSLYLDVINLFLSLLQLLRAADS

SEQ ID NO: 7942 - protein, 422 aa, Arabidopsis thaliana
MVSYRDRLSQLPDDFLLQILSWLPTKDVLVTSLLSKRWRFLWTLVPRLNYDLRLHDNTCPRFSQFVDRSLLLHKAPTLESLNIKIGSICFTAEKDVGVWVRIGVDRFVRELSVSYCSGEEPIRLPKCLFTCSTLAVLKLENITLEDASCYVCFQSLKTLHLLDVKYLDDQSLPRIISSCSSLEDLVVQRCPGDNVKVVTVTAPSLKTLSLHKSSQAFEGDDDGFLIDTPKLKRVDIEDYWGGFCYIENMPEVVEANVDVIYKNTEKLLGSITSVKRLALCLITSDAAYPAGTIFSQLVHLELCTCAPRWWDLLTRLIEDSPKLRVLKLRQKHIRRAPSPRASWKQPALPKCLLFHLETFKWELYEGSQKQKEVATFILKHAIRLKTAIISPKPTSTLLEKHEMLKDLSSSPRGSSTCELLFD

SEQ ID NO: 7943 - protein, 482 aa, Ehrlichia canis str. Jake
MSIPITVAYGDGIGPEIMEAVLLILSEAESGLVIETIEVGHNLYKKEWSSGIAPSSWDSIFRTKVLLKSPTMTPQGQGHKSLNVTLRKKLGLYANIRPCISYHPVIKTKYPNLNIVIIRENEEDTYTGIEHRLTSDTYQCSKVITRSGSERICNYAFHYATVHNRKKVTCLIKDNIMKMTDGIFHKSFSKIAENYPSITSDHYIVDIGMAKVAANPENFDVIVTTNLYGDIVSDIVAELSGSIGLAGSANIGDNYAMFEAVHGSAPDIAGKNIANPSGLLNAAIQMLIYLKKFDKAELIYNALLKTLEDGMHTADIYQSQVSKGKVSTMGFAKAIIDNFGQSPTQFPKSIFQNSAGESGISYTYKPSYATKVLVGVDLSISCDSADLNLKQLISNIQGVTHDKLELVLIHSKGLEIWPDESSNANLSYMDQICCRFYMKGQSDKIVNEHVNQLLFDMSKKKIDVVKMEKLYLYDNQPGFFTM

SEQ ID NO: 7944 - protein, 322 aa, uncultured crenarchaeote DeepAnt-EC39
  misc_feature (315)..(315): Xaa can be any naturally occurring amino acid
MDHHHFKGNDIPHIKLDPDMSIEDLVKIYSESGFNGRKLGEAAKVYAKMIKEDATICLTASGALTPVGFGGIFKTLIERGFVDWIITTGANVYHEDHFAWGLPVKQGDFQVDDMKLYDMEIVRIRDVFIKFYETLEAQDQVIQKTFKNNFVDKPFTTAEFCNFLGKISSENSKYPEKSFVTTAYNYDVPVYISTLKDSSLALNLAIHRLREKTYNLDFVREILEQASILYNSKKSGIVELGGGVPKNAAQQTGPLLDQILRQNVGGQDYIIQITDARPDTGGLSGATLQEGKSWGKVQDAHHDMITVYADATIGXFLFLHCM

SEQ ID NO: 7945 - protein, 535 aa, Glycine max
MSVIAVLPFLLHVLMAASESEPFQDSILQCLSLYSDPSLPNPISAVTYFPNSPSYPPILDSYIRNLRFSSSTTPKPSFIVAPTHVSHIQASIICCKSFNLEIRIRSGGHDYDGLSYVSEAPFVILDMFMLRSVKVNLDDDDDTAWVDSGSTIGELYHAIAERSKIHAFPAGVCHSVGVGGHFSGGGYGNMMRMFGLSVDHVLDAIIVDAQGRVLDRKLMGEDLFWAIRGGGGASFGVVVSWKIRLVPVPEVVTVFRVERTLEQGATDVVHKWQYVADKLHDGLFIRVVLSSVKRKGVKTIRAKFNALFLGNSQELLGVMNKSFPELGLVAEQCIEMSWIDSVLFWDNYPVGTSVDVLLQRHNTQEKYLKKKSDYVQQPISKTGLEGIWNKMMELEKPALALNPYGGKMGEISEVETPFPHRAGNIYKIQYSVTWKEEGEDVANRYLDRIRRLYDYMTPYVSSSPRSSYINYRDVDIGVNGPGNASYAEARVWGEKYFKRNYDRLVEVKTKVDPSNFFRYEQSIPSLASGLSIMSE

SEQ ID NO: 7946 - protein, 430 aa, Arabidopsis thaliana
MDRISLLPDDVVFKILSFVPTKVVVSTNLLSKRWRYLWKHVPKLDYRDPSLVDTEHWRASRFVDKFLLLHEAPVLETLHLSLSRNCPPSDIETWISVAISRRVRNLHIYRYIPSTGPIRLPRSLYTCETLVSLYLLLDFTVDDAPFMFCFRSLKVLVLLFAKFSSDEIVNRLLSGCPVLEGLILIRRNDNVKNFTIAAPSLQRLIAIDCRSQVPGDDVGFVIKAPSLKSLTLLNFSPHSGFRSLVKMPDLVKASIKVRHGDSKMFMGCLTSTKRLALCLQPPLDSCPIGVFNQLVSLSLCTCSLGWCRLILNHTPKLRVLRFEQRQAKFYQLLDPLKRCCSSSVDVQTQWEQPSSVPKCLISSLETVEWIDYKGREVEKKVVMYLLENSRQLKTMAIRSLKSTNDNEKLKMLQELSSIHRICTKCGLSFT

SEQ ID NO: 7947 - protein, 396 aa, Gossypium hirsutum
  misc_feature (195)..(195): Xaa can be any naturally occurring amino acid
  misc_feature (284)..(284): Xaa can be any naturally occurring amino acid
  misc_feature (301)..(301): Xaa can be any naturally occurring amino acid
MSLSLQSSPSSFLSSSLPKLRLGFANGCPSSSLLFKFNASFPAIRASSGFSSSLDTGLRTELDAVSTFSEIVPDTVIFDDFEKFPPTAATVSSSLLLGILSLPDTIFRNAVDLALADSTCSRLDNPELRLACFFNKALVNVGGDLAKLVPGRVSTEVDARLAYDTHGIIRRVHDLLKLYNEIDVPPERLLFKIPXTWQGIEASRLLESEGIQTHLTFVYSFAQAAAAAQAGASVIQIFVGRVRDWARNHSGDPEIEAAIQRGEDPGLGLVTKAYNYIHKYGHKXKAYGLQQFETKQDLFSXLGVDYIIAPLKILQSLKESITAPDEKYSYIRRLSPQSAANHDFTAEELTKWDQLSLASAMGPASMQLLAAGLEGYVNQANRVEELLDKIWPPPNV

SEQ ID NO: 7948 - protein, 329 aa, Zea mays
  misc_feature (183)..(183): Xaa can be any naturally occurring amino acid
  misc_feature (241)..(241): Xaa can be any naturally occurring amino acid
MAAKCYPTVSDEYLAAVAKARRKLRGLIAEKNCAPLMLRLAWHSAGTFDVATKTGGPFGTMKCPAELAHGANAGLDIAVRLLEPIKEQFPILSYADFYQLAGVVAVEVTGGPEVPFHPGRQDKPEPPPEGRLPDATQGSDHLRQVFSTQMGLSDQDIVALSGGHTLGRCHKERSGFEGAWTAXNPLIFDNSYFTELLSGEKEGLLQLPTDKTLLTDPGLSAHLWDKYAADVDALRVADYGXRHNQASQLGFLRGAWSSNPSILRQLLLQGETERTKKKEGLLQLPSDKALLSDPSFRPLVDKYAADEDAFFADYAEAHLKLSELGFAEA

SEQ ID NO: 7949 - protein, 204 aa, Rubrivivax gelatinosus PM1
MMVLYSGTTDPYSHRCRFVLFEKGMDFEIRDVDLFAKPEDIALMNPYNEVPILVERDLILYESHIINEYIDERFPHPQLMPGDPVARARVRLFLFNFEKELFAHVNLLEGRSGVKATDKQLEKARSQIRDRLTQLAPIFLKNKYMLGDDFSMLDVAIAPLLWRLDYYAIDLSKNALPLLKYAERIFSRPAYIEALTPSEKVMRK

SEQ ID NO: 7950 - protein, 427 aa, Oryza sativa (japonica cultivar-group)
MRGGAGALPVPGGLALGVVLLLVLAVLPSRAAGVNVTAALAAFPSFADFARLLESSPVAGELAARSSLTLLAVPNNNLPRSPSAFAAASGADIADVLRYHVLLEYLSPSDLARLPASGKLVTTLFQTTGRAPSDLGAVNLTVGGNSTVVVRSPAPFPGSSATVLGAVTAVPYNLSVLAVGGLIVPSGLDVAASDSRPAGGVNITHVLADARGFNVAASMLEASGVADEFTADERGAGITVFVPTDDAFADLPATDRLQSLPADRKATVLRFHVLHSYYPLGSLESIVNPVQPTLATERFEAGQFTLNITRVNGSVAIDTGIVQASITRTVFDQNPVAVFAVSKVLLPKEMFGRGGADSDVMAPPPDAMAPDAAENVRTPPTRLSSPPALRGGADSESSSALSTARAVNWWCIRLVLLNLHLLLLPLV

SEQ ID NO: 7951 - protein, 356 aa, Tropheryma whipplei TW08/27
MRMKALVYHGPGKRSLDTVDDPTIKLGTDVILEMETTTICGSDLHILKGDVAAVKPGTVLGHEGIGKIVEVGKDVKSHSVGDRVIVSPMSSCGVCRFCRANNNGHCLGDSEGPGGWRLGGLINGVQAQFARIPLADNSLHKLPSGLDPKVGILVSDVLPTGHEVGAQAGQVTLGSVVAVIGCGPVGLGAIVTSLLYSPSKVIAVDADSNRLELARKLGATDTVRVNRERPLDAIEDVKKLTEGGFGVDVAIEAVGVPVTFSMALGIAAPGGRVANIGVHGAPVDFPLQDLWDKNIAVTLGIVSTHTIPLLLAALSEGKIDASQFVTHEFDLSDLERAYDVFSAAAQHNVVKVAIRA

SEQ ID NO: 7952 - protein, 472 aa, Mesorhizobium loti MAFF303099
MAAVRDLKATEMAASGGDDAIELGKRHLIQPWPYAGSVGAEARALIGEGDGIYITDNTGKRLIDGPAGMWCVNVGHRREELARVMYDQAMALSYNTPWYTMNAPSAELAMRIAGHAPDDLSHVFYTTGGSSAVETALRFMQFYNNVRGRPEKKLILSRGGAYHGSTYLSASLNGRPRDRDWMDGADELVIKLSSPDPFRRPQGMSLAAFTDFLVDQFRDTVARVGADKIGAFVGEPVQASGGVVIPPDGYLKRIREICRVNDILYVSDEVVTGFGRLGHVFASGDVFGIDPDMITFAKGVTSGYFPLGGVIISERLLQELRRSNHPDAMFGHGLTYTSHPVGCAVALKNLDLLEESVLAHTQAVAPYFQAQLKTLEELPLVGEVRGAGLMGCVECVADRESKNPLQLDKDVGKRIDAHCHELGLLVRPLINMCVMSPPLIITREQIDDMVGILREGISRTMDDLWKEGVWRG

SEQ ID NO: 7953 - protein, 225 aa, Halobacterium sp. NRC-1
MKQAGGSAEQKRRAGEAAVAEEVTEGAVVGLGTGSTVAHAIRALGAEASDVSGVATSFESRRRAVDAGVTVTSLEAASVDVAIDGADQVADGVLVKGGGAAHTREKYVAASADRFVVVADPSKESDVVDVPVPVAVVPDAWPVVVDRVEALGGTATLRDAERKDGPVVTDTGSLVVDCDFGAIETPEAVAASLSAVPGVVEHGLFVGMADAVYVGTDDGVRVRDP

SEQ ID NO: 7954 - protein, 508 aa, Burkholderia cepacia R1808
MNPFDLKQLGLDVEYPYRQQYDNYIGGKWVPPVKGDYFENVSPINGKPFCRVPRSGAEDIEAALDAAHAARRKWAKTSVTERANLLLAAADRMEKNLKLLAVAETIDNGKPLRETMAADLPLAVDHFRYFAGCIRAQEGGISEIDDNTVAYHFHEPLGVVGQIIPWNFPLLMAAWKLAPALAAGCCVVMKPAEQTPASVLVLMELIGDLFPAGTINIVNGFGKEAGEALATSKRIAKIAFTGSTPVGKHILRAAAESLIPSTVELGGKSPNIFFADVLDQDDAFLDKTLEGLAMFALNQGEVCTCPSRILIQESIYERFIEKAVARVERIKAGHPLDLQTMIGAQASQQQLDKILSYIDIGRGEGAQCLTGGERTAPAADLGAGYYVKPTMLLGNNKMRVFQEEIFGPVASVMTFKDEQEAIELANDTFFGLGAGVWTRNGTRAYRMGREIEAGRVWTNCYHLYPAHAAFGGYKQSGIGRETHKMALSNYQQTKCLLVSYQAEALGFF

SEQ ID NO: 7955 - protein, 277 aa, Corynebacterium sp.
MPNIPTISLNDGRPFAEPGLGTYNLRGDEGVAAMVAAIDSGYRLLDTAVNYENESEVGRAVRASSVDRDELIVASKIPGRQHGRAEAVDSIRGSLDRLGLDVIDLQLIHWPNPSVGRWLDTWRGMIDAREAGLVRSIGVSNFTEPMLKTLIDETGVTPAVNQVELHPYFPQAALRAFHDEHGIRTESWSPLARRSELLTEQLLQELAVVYGVTPTQVVLRWHVQLGSTPIPKSADPDRQRENADVFGFALTADQVDAISGLERGRLWDGDPDTHEEM

SEQ ID NO: 7956 - protein, 205 aa, Triticum aestivum
MASGNRALPIENGEVLPAAGGNGEGGNGGSGDGFNRNRSSVDQQIDDMRRRLRELEETEREMLAAAAAATHEDPAAAVTALEKAEVDARSIYVGNVDYGCLPEEVQEHFQDCGTINRVTILTDFYGNPKGYAYVEFHEAEAVQNALQLNDTELHGRPLKVCPKRTNVPGMSHHRGRHPFQPYYPPYPAFGRSPRFRRSPRFYPYY

SEQ ID NO: 7957 - protein, 277 aa, Staphylococcus aureus subsp. aureus MSSA476
MEVKTFYNGNTMPQIGLGTFRVENDENCMESVKYAIEQGYRSIDTAKVYGNEEQVGAGIRAGLESTGIAREDLFITSKLYFEDFGRENVAAAYEASLSRLGLKYLDLYLVHWPGTNEAVMVDTWKGMEDLYKNNKVKNIGVSNFEPEHLEALLAQVSIKPVINQVEYHPYLTQHKLKLYLAAQHIVMESWSPLMNAQILNDETIKDIAQELGKSPAQVVLRWNVQHGVVTIPKSVTPNRISENFQIFDFELSDEQMTRIDGLNQDKRIGPDPKTFEG

SEQ ID NO: 7958 - protein, 158 aa, Brucella melitensis biovar Abortus
MKKNNLFRALLISATFALQATAALAVNPDEVLSDPKLEKRAREISAELRCMVCQNESIDDSNADLARDLRILVRERLTKGDTDGQVIDFVVDRYGEFVLLKPRFNAQTALLWGFPVIILLIGGGALLVAFRRAARCWHSPTAPSESEKAELSRLLDGK

SEQ ID NO: 7959 - protein, 353 aa, Podospora anserina
MSNAQARGGARKISFNVSEQYDIQDVVGEGAYGVVCSAIHKPSGQKVAIKKITPFDHSMFCLRTLREMKLLRYFNHENIISILDIQKPRSYESFNEVYLIQELMETDMHRVIRTQELSDDHCQYFIYQTLRALKAMHSANVLHRDLKPSNLLLNANCDLKVCDFGLARSAASQEDNSGFMTEYVATRWYRAPEIMLTFKEYTKAIDVWSVGCILAEMLSGKPLFPGKDYHHQLTLILDVLGTPTMEDYYGIKSRRAREYIRSLPFKKKVPFRTLFPNTSDMALDLLEKLLAFNPVKRITVEEALKHPYLEPYHDPEDEPTAPPIPEEFFDFDKHKDNLSKEQLKQLIYQEIMR

SEQ ID NO: 7960 - protein, 443 aa, Arabidopsis thaliana
MGSGRDRDDPLSFTSNPSTASSPVTVSDYLDNFLGEPTSRSGSFQSESLLGGGGGESINDADFGFARPDFRSEQLAGTVQFYERHVFLCYKKPSVWPARIEAAEFDRLPRLLSAAVSARKGSMKKETRLTICEGHDGTETSNGDVLIFPDMIRYRRLTHFDVETFVEEVLVKDGEWLPGNPELLKGSYVFVCSHGSRDRRCGVCGPSLVSRFREELEFHGLQGKVSISPCSHIGGHKYAGNVIIYRSNINREVTGHWYGYVTPEDVPILLEQHINKGEIVDRLWRGEMGLSEEDQKKTQEGRFQLNGTVHSVKINGKVSQESSVHNADVSCCQSRAAEPNGCCQQNGNSSSCCQDDTTLMLSLGTSEDNQLESENNTEKLTPGRKIAEKTFFRINSDKGSSTRKVCGIPTWLESWEREDTYAALAVVCAAASVAVAYTCYKQL

SEQ ID NO: 7961 - protein, 112 aa, Bartonella sp. RN10617LA
ANEACLKMLQEIGSIQRIPEFIARAKDKNDPFRLMGFGHRVYKNYDPRAKIMQKTCHEVLKELNIQDDPLLDIAIELEKIALSDEYFIEKKLYPNVDFYSGIILKALGFPTE

SEQ ID NO: 7962 - protein, 205 aa, Juglans regia
KRRNGLLKKAYELSVLCDAEVALIVFSSRGRLYEYANNSVKSTIDRYKKARADSSNTGSVSEANTQFYQREAATLRQQINSVQESNRKMLGESLSGMAFRDLKSLESKLESGIRRIRSKKNELLFAEIEYMQKREVDLHNNNQLLRAKIAENERNQQNLNVMPGGGNLELMHSQPFDSRNYFQVDALQPNHDQYPRQDQMALQLV

SEQ ID NO: 7963 - protein, 262 aa, Rickettsia sp. ARANHA
LAAVGSLSAFYPDLLNFKEADYELTAIRMIAKIPTIAAMSYKYSIGQPFIYPDNSLDFTENFLHMMFATPCTKYKVNPIIKNALNKIFILHADHEQNASTSTVRIAGSSGANPFACISTGIASLWGPAHGGANEAVINMLKEIGSSEYIPKYIAKAKDKNDPFRLMGFGHRVYKNYDPRAAVLKETCKEVLKELGQLDNNPLLQIAIELEAIALKDEYFIERKLYPNVDFYSGIIYKAMGIPSQMFTVLFAIARTVGWMAQW

SEQ ID NO: 7964 - protein, 112 aa, Bartonella sp. RN10627LA
ANEACLKMLQEIGSIKRIPEFIARAKDKNDPCRLMGFGHRVYKNYDPRAKIMQKTCHEVLKELNIQDDPLLDIAIELEKIALSDEYFIEKKLYPNVDFYSGITLKALGFPTE

SEQ ID NO: 7965 - protein, 157 aa, Glycine max
  misc_feature (25)..(25): Xaa can be any naturally occurring amino acid
  misc_feature (144)..(144): Xaa can be any naturally occurring amino acid
MSSAKKITLKSSDGEAFEVEEAVAXLESQTIKHMIEDDCADSGIPLPNVTSKILAKVIEYCKKHVEAANPEDKPSEDDLKAWDAEFVKVDQATLFDLILAANYLNIKSLLDLTCQTVADMIKGKTPEEIRKTFNIKNDFTPEEXEEEVRRENQWAFE

SEQ ID NO: 7966 - protein, 2376 aa, Aspergillus nidulans FGSC A4
MSNETFYLLPLNDDGSPDVPGGFIYLPPPDHPKYSLRFLIEGSSSICRDGTLWINIPEIGKSFDRQSFRPFKLYPDFSRNIQIDVPVTCPGSFAYYVTYSPLPEFTITSSAPVKPARTPTHYIDVSPRLSLAGEGIPLNALSIFSVNSKFMGKYPEDWNQYLNSISRRKYNMVHFTPLMKRGASNSPYSIFDQLQFDDIAFPNGENDVQKLIKDMEEKHSLLSLADVVWNHTANNSKWLEEHPEAGYSVETAPWLEAALELDTALLKFSHELQKRGLPTDFKTVDDLTLVMNEVKNHVIEDLCLWEFYVLDVKSNARRVIDEWKVSTNSDIERGRWAQLDLGAYKAWSLEDQASLIRQKGVPTAGQILGRYSREIDTQLGVAIATALFGNFDATSSDLTAVENTLRKLLDVVNVPFYKEYNSDVTEIMSQLFNRIKYLRIDDHGPKLGPVTDQNPLIESYFTRLPLNEITKKHSPKALALANNGWIWNADAMRDNAGPNSRAYLRREVIVWGDCVKLRYGDGPEDNPFLWDFMARYTRLMAKYFSGFRIDNCHSTPLVVAEYLIDEARKIRPDLAIFAELFTGSEEADYIFVKRLGINALIREAMQAWSAGELSRLVHRHGGRPIGSFELDLPSPGLDLSKSQVSGSEREIIRSIRPIPVPALFMDCTHDNEMPAQKRTATDTLPNAALVAMCDSAIGSVMGYDEVYPKIVDLVHETRLYSFFDLPESPTLDELVNLKGISGLKRLLNELHTMMGQMGYDETFIHHDGEYITVHRVHPQTRKGIFLIAHTAFPGQNSGALLAPIHLAATRAKPIGSWLLKVQELSDDKERALSDKVYLQGLPSEVLKIEGARIEETDRETIISVLDPFIPGSIALFETSIPSLEHADELSNDAITDGAVEAFSELSLIDLNFVLYRCDAEERDSSGGQDGVYDIPNHGPLVYAGLQGWWSILEGIIRYNELGHPLCDHLRQGQWALDYIVNRLMKATKNPQYAALRRPAEWLEAKFQIVRGLPSFLLPRYFAIIVQTAYVAAWNRGIQLLGDDVRVGQAFTQQLAMVSVQQTGFVNSASLWPKKSVPSLAAGSGKLPRYNSRDSIWFLLQAIQDYTKMAPDGLELLQDKTPRRFLPYDDTWFPFDDPKAYSQTSTIVDIIQEVFQRHAQGISFREYNAGPELDVQMKSEGFNIDIRVNWETGLIFGGSQHNCGTWQDKMGESEKAGNKGVPGTPRDGAAIEITGLLYSALKWVTELNKQGLFPYDKVDIGNGKSITFEGWAAKVKTNFERCYYIPLDPNDDDQYDIDSGIVNRRGIYKDLYRSGKPYEDYQLRSNFPIAMVVSPELFDPSKALGALAIADSVLAGPLGMATLDPSDLNYRPDYNNAEDSTDFATSKGRNYHQGPEWVWLRGYFLRALLYFDLARRKTADERTEAFQQVTRRLAGCKKALRESPWKGLTELTNRNGNHCADSRPSIVKTNCRYSLASKTRSPLQGGLREYHVWYCYRSLALDKPDCSSTVVRLEKQHSASQCFNNGANPSTHLRRQEPPLHKAMSLTESVAAMATAITVANHHGTNNGTDDDGPGRKWDDQLKGDLYTQLVISLALGITAFLSFCFLRPKWTELYAARRRQRRAALYLPELPDSFFGWIPVLWKITEEQVLQSAGLDAFVFLSFFRFAIRFTSTVFILAFVVLLPIHYSYTKKLGIPDWDKSIDVGEDGKKKFIDDPPYLWTYVVFTYIFTGLAIFMLFQETKKIIQTRQKYLGSQTSTTDRTIRLSGIPAEMGSEENIREFIEGLHIGEVESITLCRNWSSLDHLIEERLKVLRNLETSWVQYLGYKRVRKSGDTLPLRRQPIDSSIFSEDDERMRLLLENGQDDAFDRSRKRPMVRLWYGPLKLRYRKVDAIDYYEERLRRLDEEIQSARQKEYPPTELAFVTMKSIAAAQMLVQAILDPHPMKLLARLAPAPADVIWKNTYLPRARRMFQSWSITVLICFLSVFWSVLLVPVGTLLKWETLHKVLPQLADALARHPLVKSLVTTGLPTLAFSLLTVAVPYLYNWLSNHQGMMSRGDIELSVISKNFFFSFFNLFVIFTVIGTATNFYGLWEHLRDSFKDATTIATALANSLENLAPFYMNVFVLQGLGLFPLKLLEVGSVFLYPINYLMAKTPRDYAELSTTATFSYGYSIPQSILILVICVIYGVFPASWLICFFGLVYFTIGNFIYKYQLLYAMDHRQHSTGRAWPMICNRVLVGLVVFQLAMAGTLGLRKAITLALLIVPLIGATVWFSYFYSQSYEPLTKFIALKSIYRDTPTSGDISPSTTSTFSPPLALDRDAFPIRLGGQVLGLKLKRYVNPSLILPLDSAWLPGRNPMPELQEDFEYYEDQNHVSV

SEQ ID NO: 7967 - protein, 477 aa, Burkholderia fungorum LB400
MSQYRSFINGEWLGTTSTLPNLNPSDLSDVVGEALLADDALVADAIAAARHAFRSWSLTTPQQRADILDAAGTRILQRKEELGTLLAREEGKRLPEAIGEVGRAGNIFKFFAGEALRIGGEVVSSVRPGMTVEVTREPLGVIGMITPWNFPIAIPAWKIAPALAYGNTVVIKPAEAVPACATELVKILEESGLPAGVVNLLLGPGRVVGEALVASPDIDAISFTGSESTGRAIAVKCVTSGKKVQLEMGGKNPLVVIDDADLDVAVEAALDGSFFSTGQRCTASSRLIVTSAIHGQFVAALQRKASELVVGHALDKATQIGPVLDDRQLQQNLKYLKIAAEEGGQVLGGERVERPTRGYFMRPALVIGTDNTMRINREEVFGPVASVIKVADYEEALAVSNDTPYGLAAGICTTSLKYASHFRRHAEAGMVMVNAPTAGVDYHVPFGGRKRSSYGPREQGTYAREFYTVVKTAYVKA

SEQ ID NO: 7968 - protein, 484 aa, Rubrobacter xylanophilus DSM 9941
MSGAAEHRMYVAGRWTGSASGARMEASSPATGERLGTVPEGTREDVRRAVAAAGKAATLWAGRSAFERAAAMERVAGIIEERREELSRTLVLDQGKTLAEARDEVEELALYFRMAAADAPRLEGSAPPSVDAGKRVLVYRVPRGVVGVISPWNWPYTMPAELIAPALACGNAVVWVPAPSTSVCAVALAGCLADAGLPAGVFNMVTGPGPVVGDEVAANPGTHAVGFIGSVETGRRVAARAAGKALLLEMGGNGPVVILDDADLDAAVEASISSAFMCAGQSCTAGELFMVHERVREAFLERLLAKVERGVRLGDPFSPETTMGPLNNEPTAQKVDRHVRDALERGARLLAGGSRAEGFPTRLYYEPTVLDGVTPQMQIFREETFGPVIPVAGIRDESEALSAVNASPYGLLSAVFTRDLERGLRFAEAVRTGWVNVNASSNHWESHLPFGGRSGSASGVGRVGGRYPMEAFTEPKTVILDLGR

SEQ ID NO: 7969 - protein, 315 aa, uncultured crenarchaeote DeepAnt-EC39
MNEPIKNIRLLLEEITIKCDASWIAFSGGLDSSILAEIKKEQNLNAITIISKDFLATDLSYSQITAKHIDIPLEIKYVSIDQMLGAIESTIKILKNFNDIEIRNSIVPYLYMNALKEKNITNVITGDGADEIFAGYNFLLKKDHNELKNELKRIKKIMHFTSQKIANKLGMSIQMPFIDEKIIELVETLPINLLINQKNGIKFGKWVLRKAFENTLPTNVIWRKKTAMQDGSGTTNLTKLFDSIITDDIFTKKVKKIKSECNIKIRTKESLYYYELFKENFIIPECEDKKNICPDCNAEIVSNSKFCRMCGKFPI

SEQ ID NO: 7970 - protein, 369 aa, Neurospora crassa
MSPNPEHGASAPTDPPAADAEQKSDSSAPATPPPAPVPSADPKLFRQITQSHTGESDQDVDDIYKVSPLAALKLLSAGIETLVSFTGDIPPTPPPRSPTIPHMRGMDAEKQSIVRSNSEKNLARLLQQKSATNSPRRPFSPAPQRHPHPPPSREGHKQSQSIDGVQLRTPNPTPPPGLSSSDAKSALEPYIIVGENSQPLNTQHSAITRKFYSRLPPPISITDYLLRIHQYCPMSTAVYLAASLYIHRLAIIERAIVVTKRNAHRLLLAGIRVAMKALEDLSYPHSKFAKVGGVSETELARLEISFCFLVGFELRVDEEALRGQWEMLKSGVEAWEGVEHDFYGKREVITLRNPPPGREGMQAEAAAEA

SEQ ID NO: 7971 - protein, 247 aa, Petunia integrifolia subsp. inflata
MVFPNQEFESSSSQRKSGRGKIEIKRIENTTNRQVTFCKRRNGLLKKAYELSVLCDAEVALIVFSSRGRLYEYANNSVRATIDRYKKHHADSTSTGSVSEANTQYYQQEAAKLRRQIRDIQTYNRQIVGEALSSLSPRDLKNLEGKLEKAIGRVRSKKNELLFSEIELMQKREIEMQNANMYLRAKIAEVERATQQMNLMPGGGSEYQQQPMSSTSQPYDARNFLPVNLLEPNPHYSRQDQTALQLV

SEQ ID NO: 7972 - protein, 156 aa, Brassica napus
IETSLVAEMAAALASRLTKGRSLLGGLTNAFSGLMSSSSGSILSQQQQRTFIQMGTTLKVVDNSGGKEVTCIQSLRGKKGARLGDIVIGSVKEAAHKVDVKKGKDAIQKGKVKKGNVVYGVVVRAAMQKGRVDGSQVRFDDNAIVILGIKEKKKDE

SEQ ID NO: 7973 - protein, 286 aa, Triticum aestivum
  misc_feature (35)..(35): Xaa can be any naturally occurring amino acid
  misc_feature (115)..(115): Xaa can be any naturally occurring amino acid
  misc_feature (153)..(153): Xaa can be any naturally occurring amino acid
  misc_feature (202)..(202): Xaa can be any naturally occurring amino acid
  misc_feature (226)..(226): Xaa can be any naturally occurring amino acid
  misc_feature (233)..(233): Xaa can be any naturally occurring amino acid
  misc_feature (240)..(240): Xaa can be any naturally occurring amino acid
REQKLELHRGGGRSRTSGSPGLQEFGTRATTMATXNMQVDPSGQVQWPQQQPFPQPQQPFWQQPQRTIPQPHQTFHHQPQQTFPQPQQTYPHQPQQQFPQTQQPQQPFPQPQQTXPQQPQLPFSQQPQQPFPQPQQPQQPFAQSQQPQQPFPXPQQQFPQAQQPQQSFPQQQQPAIQSFLQQQMNPCKNFLLQQCNHVSLVXSLVSIILPRSDCQVMQQQWCQQLXAQIPQQXRCAAIHXVAHSIIMQQEQQQGVPILRPLFQLAQGLGIIQPQQPGPPSTYHMPT

SEQ ID NO: 7974 - protein, 119 aa, Zea mays
  misc_feature (72)..(72): Xaa can be any naturally occurring amino acid
  misc_feature (83)..(83): Xaa can be any naturally occurring amino acid
MDRRPPARRRPGDPHRRGAAMHGAVEQQKQHRGRRSPQGTVPPQQPPPAGYFTAELLLAFVFVAASLAFLPXLVLPPLSPPAXLLLLVPVGLLAVLLALAFVPLDAHSHLVVVGSGSSR

SEQ ID NO: 7975 - protein, 147 aa, Aspergillus nidulans FGSC A4
MSDREFSSNDDLSLPKVTATVQKIITEILPPSSGQSFSKDARDLLMECCVEFITLISSEANDISEKEAKKTIACEHVERALRDLGFGDYVPDVLAVAEEHKEQLKSREKKQSKMEQSGLSEEELLRQQQELFRSATEKYHAAPEGTE

SEQ ID NO: 7976 - protein, 196 aa, Zea mays
HRVKKKKKEKKIEGPLKKYKKVHGNVDMAAAGDDATKLQELDEMKRRLKEMEEEAAALRDMQAKVAKEMQGGDPSASTAEAKEQVDARSVYVGNVDYACTPEEVQQHFQACGTVNRVTILTDKFGQPKGFAYVEFLEQEAVQEAINLNESELHGRQIKVAPKRTNVPGMKQRPPRGYNSYHGYPYRSFGAPSFPPL

SEQ ID NO: 7977 - protein, 278 aa, Zea mays
MASSSRSTVFSLLLLVALLLSCSGMSSAARLLEEAPPKEEHPHPAVPELPEPELPPHPTDVVPPELPKPELPPHPAVVPELPKPEVPHQVPEQPKPELPPHPTAVPELPKPEVPHPVPELPKPEVPPHPTAVPELPKPEVPHPVPELPKPELTPHPAAVPELPKSEVPHPVPELPKPEVPPQPTAVPELPKPEVPHPVPELPKPELPPHPAVPELPKPEVPHQVAPELPKPELPPHPTVPKLPHPEVPEVPNHELPPLPKAELPPKPEGHYPEPEAKP

SEQ ID NO: 7978 - protein, 384 aa, Mycobacterium tuberculosis H37Rv
MRAVVIDGAGSVRVNTQPDPALPGPDGVVVAVTAAGICGSDLHFYEGEYPFTEPVALGHEAVGTIVEAGPQVRTVGVGDLVMVSSVAGCGVCPGCETHDPVMCFSGPMIFGAGVLGGAQADLLAVPAADFQVLKIPEGITTEQALLLTDNLATGWAAAQRADISFGSAVAVIGLGAVGLCALRSAFIHGAATVFAVDRVKGRLQRAATWGATPIPSPAAETILAATRGRGADSVIDAVGTDASMSDALNAVRPGGTVSVVGVHDLQPFPVPALTCLLRSITLRMTMAPVQRTWPELIPLLQSGRLDVDGIFTTTLPLDEAAKGYATARARSGEELRFCLRPDSRDVLGAHETVDLYVHVRRCQSVADLQLEGAADGVDGPSMLN

SEQ ID NO: 7979 - protein, 320 aa, Lactobacillus plantarum WCFS1
MKRIGILTSGGDAPGMNAAVRAVAGKAMAEGLEAYGINYGFAGLVAGDIHKIEAADLDGVIQRGGTLLYSARYPEFAHEEGQLKGIEQLKRFGIDALVVIGGDGSYHGALRLTEHGYNTIGLPGTIDNDIPYTDFTIGFDTAVNTNVQALDRIYDTAHSHDRTFVVEVMGRGAGDVALWSGVSIGATAIVVPEVDWDMEEIANKIKHNRANGHRSNLIVLAEGVMGAQEFVEKLSEYGDFDARGNTIAHMQRGGNPTAKDRVMASKMGAYAVELLLAGKGGLAVGIQNNQLVNHNILDLFESKHDVEVSLDKLNEEISFK

SEQ ID NO: 7980 - protein, 185 aa, Oryza sativa (japonica cultivar-group)
MAAGTACRRYIGPLLCVNLVMHAAVLGLAGWSLNKFIDGETHHHLGGNTSSGYLLVFSLMAGVVGVCSVLPRLLHVRAWRGETLAAAASTGLVSWALTALSFGLACKHITLGNRGRRLRTLEAFIAILTLTQLLYLILLHTGSLGSSMTLGLSRRNCDDDEELRCDEIPREELYTNKKPAIVAGA

SEQ ID NO: 7981 - protein, 338 aa, Methanococcus maripaludis S2
MIFMSDPKNVVFKESEELNGVFIEGPDFDETIDLKDVLTDYYEKIGFQATHLGKAVKIWKQIEEVRKNEEVVVFMGYTSNMVSSGLREIISYLVKHKKVDVLVTTAGGIEEDFIKCIKPFVLGEWDMAGSDLREKGINRIGNVYVPNDRYIEFETYMTKFFETLLKKQQDENKIISASEFCFELGRFMDENLGQEKEKSIIYWAYVNKIPIFCPAITDGSIGDMLYFFKKNEKGTDLKIDVASDIVRLNDMAIDANKTACIVLGGSLPKHSIINANLFREGTDYAIYITTAVPWDGSLSGAPPEEGVSWGKIQEKADFVEIWADATIVFPMLVYGVFK

SEQ ID NO: 7982 - protein, 242 aa, Glycine max
  misc_feature (13)..(13): Xaa can be any naturally occurring amino acid
  misc_feature (222)..(222): Xaa can be any naturally occurring amino acid
ALFRLERATGQEXAELLEEFMPAVKQNYGEKVLVQFEDFANHNAFDLLEKYSSSHLVFNDEVRGTASVVLAGLLASLKLVGGTLADHTFLFLGAGEAGTGIAELIALEISKQTKAPVEKTRKKIWLVDSKVKMPQGLIVSSRLESLQHFKKPWAHEHEPVKTLLDAVKAIKPTVLIGSSGAGKTFTKEVVETMASLNEKPLILALSNPTSQSECTAEEAYTXWSKGKSNPLLVGSPFDPWWI

SEQ ID NO: 7983 - protein, 209 aa, Triticum aestivum
MEDEEHEVYGQEIPVDGEDVDMGAGGDDAAKLHELDEMKRRLKEMEEEAAALREMQAKVAKEMQGGDPNATTSEAKEEMDSRSVFVGNVDYACTPEEVQQHFNSCGTVNRVTILTDKFGQPKGFAYVEFVEAEAIQEAVKLSESELHGRQIKVAPKRTNVPGLKQPRGGRGFNPYGGHPYMRPYPPPFYNPYGGYGRAPRFRRPRRPFY

SEQ ID NO: 7984 - protein, 409 aa, Arabidopsis thaliana
MDRISGLPDEVLVKILSFVPTKVAVSTSILSKRWEFLWMWLTKLKFGSKRYSESEFKRLQCFLDRNLPLHRAPVIESFRLVLSDSHFKPEDIRMWVVVAVSRYIRELKIYSSHYGEKQNILPSSLYTCKSLVILKLDGGVLLDVPRMVCLPSLKTLELKGVRYFKQGSLQRLLCNCPVLEDLVVNLSHHDNMGKLTVIVPSLQRLSLSTPSSREFVIDTPSLLSFQLVDRNDNSHTFLIENMPKLREAYINVPFADIKSLIGSITSVKRLAISSEVGYGEGFIFNHLEELTLWNKYSSNLLVWFLKNSPNLRELMLVSETDDHENLGMLSWNQPSIVPECMLSSLQKFTWFKYLGRPQDRDIAVYILKNACRLRTATIKSDTRLFTKLEMITELRLSSQASSTCELNFS

SEQ ID NO: 7985 - protein, 142 aa, Glycine max
  misc_feature (24)..(24): Xaa can be any naturally occurring amino acid
  misc_feature (113)..(113): Xaa can be any naturally occurring amino acid
  misc_feature (126)..(126): Xaa can be any naturally occurring amino acid
FSFGIDAIEDVLYHIETYDVTTIXACTPICLMSRLIKSLGVKWVIPREGSSEIFGGYLYLHKAPYKEEFLREPCLWIKALDHYDRLRANRSTFGWGLEARVPFWDKACINAAXEFSPEWNMMKRDXGRIEKWVLRRAFDDEE

SEQ ID NO: 7986 - protein, 1037 aa, Saccharomyces cerevisiae
MTVANTETHSAAKPSSTIGPWKLGETLGFGSTGKVQLAQHERTGHRTAVKVISKSIFNNNGNHSNDDSVLPYNIEREIVIMKLLSHPNVLSLYDVWETNNNLYLILEYAEKGELFNLLVDHGPLPEREAINCFRQIIIGISYCHALGIVHRDLKPENLLLDSFYNIKIADFGMAALQTDADLLETSCGSPHYAAPEIVSGLPYEGFASDVWSCGVILFALLTGRLPFDEENGNVRDLLLKVQKGQFEMPNDTEISRDAQDLIGKILVVDPRQRIKIRDILSHPLLKKYQTIKDSKSIKDLPRENTYLYPLADSNNHTSASIDDSILQNLVVLWHGRHADDIVSKLKENGTNKEKILYALLYRFKLDSVRGSNKKNRNKIKKTKKNKRSSTLSSSSSLLLNNRSIQSTPRRRTSKRHSREFSSSRKRSSFLLSSNPTDSSPIPLRSSKRITHINVASANTQATPSGVPNPHKRNSKKRSSKRLSYMPNTKRSSLTSKSLSNFTNLIDDDDWEYIEKDAKRTSSNFATLIDEIFEPEKFELAKREKAELQRKVQEAKRQSVNAQKINEDEFGSEVSDGMKELKKINDKVSSPLINYEFSQQELLQDIDTLLTNRYQLSSYTRPISRLDPGLTPVTETLPNNLKEKTALLQDTEKKIIETIRRSKFLGSLLNVRGGLSPGKSELAPIEESPIVSTTPLIYNDRMEPRRISDVEVPHFTRKSKHFTTANNRRSVLSLYAKDSIKDLNEFLIKEDPDLPPQGSTDNESRSEDPEIAESITDSRNIQYDEDDSKDGDNVNNDNILSDFPQGVGISQEYDMKDKNPNQSPISKSAEPTLVVKLPSLSSFQGKNASGLGLYQREPSKVTLPSLTSNNSSVGENIEDGAEKGTESEKIAASLSDDDLKEDNDKKDNDTVNAPTTVKKPPNSVLLKKFSKGKILELEIHAKIPEKRLYEGLHKLLEGWKQYGLKNLVFNITNMIITGKLVNDSILFLRSTLFEIMVLPNGDGRSLIKFNKKTGSTKTLTKLATEIQIILQKEGVLDK

SEQ ID NO: 7987 - protein, 153 aa, Lactobacillus gasseri
MIDAQRFGLIRSVGVSNFEPEHIEYLYRETGVMPAVNQVELHPYWSSKKVREYDNQHHIITEAWSPLQRGGEAFQEKEIIELAQKYHKSPAQIILRWETQINVVPIPKASSYEHQLSNLDIFDFKLAPEEVQSLINLDKESARRFDPNEHEEF

SEQ ID NO: 7988 - protein, 411 aa, Anaplasma platys
MKENAVLMCGDKKVSLPMLSGTDGIQLIDITTLYRDHKVLTYDPGFMSTAACSSEITFIDGEKGILRHRGLDIADLIGIKGGFCSVAHLLLYGVLPSDTVFEQFSAAIGAQHALSSDVLGVISSFRRDAHPMAILMACFSTLAAKYHGDNRGNEELAVLAIAQVPSLVAAIYRHRMGLELVSPDTSLSYTGNFVKMMFGALEKTRADAIEEALDAIFIMHADHEQNASTATVRMAGSAGTELFACLAAGTATLWGPAHGGANEAVIRMLESIGSPDKVEEFIGFVKDNNSKVRLMGFGHRVYKSYDPRAKILGQISRSVLDNLGCSDELLGVAEELERCALQDEYFVERKLYPNVDFYSGIVLRAMGVPVEMYTTFFALARTAGWVSQWCELLRGSESLKICRPRQLYAGK

SEQ ID NO: 7989 - protein, 100 aa, Triticum aestivum
MCGILAVLGCGDESQGKRVHVLELSRRLKHRGPDWSGLHQVADNYLCHQRLAIIDPASGDQPLYNEDKSIAVAVNGEVYNHEELRARLSFFFFFLSNHPV

SEQ ID NO: 7990 - protein, 203 aa, Capsicum annuum
MNPEYDYLFKLLLIGDSGVGKSCLLLRFADDSYLDSYISTIGVDFKIRTVEQDGKTIKLQIWDTAGQERFRTITSSYYRGAHGIIIVYDITDQESFNNVKQWLSEIDRYASENVNKLLVGNKSDLNDNRAVSYDTAKAFADEIGIPFMEASAKSATNVEQAFMAMAAEIKNRMATQPASNNAKPPTVQIRGQPVNQKSGCCSS

SEQ ID NO: 7991 - protein, 399 aa, Pseudomonas syringae pv. syringae B728a
MSGNRGVVYLGAGKVEVQSIPFPKMEDPRGKRIEHGVILRVVSTNICGSDQHMVRGRTTAQTGLVLGHEITGEVLEAGRDVEHLKVGDLVSVPFNVACGRCRSCKEQNTGVCLTVNPARPGGAYGYVDMGDWVGGQAEYVLVPYADFNLLKLPDRDAAMEKIRDLTCLSDILPTGYHGAVTAGVGPGSTVYVAGAGPVGLAAAASARLLGAAVVIVGDVNPTRLVHAKAQGFEIADLSQDTPLHEQIAALLGEPEVDCAIDAVGFEARGHGHAGAQAEAPATVLNSLMGVVRVAGKIGIPGLYVTEDPGAVDAAAKMGSLSIRFGLGWAKSHSFHTGQTPVMKYNRQLMQAIMWDRIKIADIVGVEVISLDDAPRGYGEFDSGVPKKFVIDPHGLFGAA

SEQ ID NO: 7992 - protein, 283 aa, Ralstonia solanacearum
MRRIQHRTQGNAMNDTFTMPAFGLGTFRLTGEAAIDSVRTALELGYRAIDTAQIYANEAEVGQAIAASGVPRRDLFLTTKIWVDNLAADRLIPSLKASLARLRTEQVDLALIHWPSPGGAVPMAEYLGALDEARREGLTRALGVSNFTVALLREAIETVGAAQIATNQIELHPYLQNRKVAAFAQSQGIHVTSYMTLGVGRVLADPVLADIARAHGATPAQVVLAWAMQLGCSVIPSSTRRANLQSNLAARDLRLTGDDMARIGALDRGERIADPAGIAPDWD

SEQ ID NO: 7993 - protein, 478 aa, Burkholderia cepacia R18194
MKIYDQFYIDGAWRKPAGTGTIDVIDSGTEAVIGRIPEGVASDAQDAIRAARAAFDAWAATPPATRAGYLRKIVEHLLARSEELAQSITGEVGMPIKLSRAIQVGGPIYNWKAYAKLAESFEFEAQVGNSLVVREPVGVVAAITPWNYPLNQVTLKVAPALAAGCTVVLKPSEVAPLNAFMLAEAIHEAGLPAGVFNLVCGYGPVVGEVLATDPDVDMVSFTGSTRAGKRVAELAAAGVKRVALELGGKSASVILDDADFATAVKGTVNACYLNAGQTCSAHTRMLVPEARYDEARAIAKAAAETYVAGDPRQDATRLGALASAVQQQRVQDYIQRGIDEGAELVTGGTGLPEGLDKGFFVKPTVFGRVDPKSTIAQEEIFGPVLSIITYRDEDEAVRIANDSPYGLGGAVWAGSDERAMGIARRIRTGQVDINGGAWNMAAPFGGYKQSGHGRENGVYGLEEYLEYKSMQLKPAKPA

SEQ ID NO: 7994 - protein, 330 aa, Halobacterium sp. NRC-1
MTGDDADETHENVVPGSDEDLDTPDVRGYDFSGEFDFFELLDSYATTGFQASHLADAVDITREMREDDATIYLTLTSNIVSSGLREVVAHLVRENYVDVIITTSGSLTEDIIKTAKPFKMGEWDVDEAALREEGINRLGNIFVPSDRYVWLEEYLYDFFEEFFADQKVRTPTAFARELGATLDDEDSILKNAADNDIPVFCPALTDAEIGNFLYYYRQGYDSEVGIEILDDYDALIEEGLLADTTGLICVGAGVPKHHAIMTNLFRGGADYAVYISTGMEGDGSLSGAPPEEAVSWGKIKDEDAEPNYALIEAEATLVFPLLVAGAFENP

SEQ ID NO: 7995 - protein, 367 aa, Buchnera aphidicola (Tetraneura caerulescens)
MIKKFKLAILAGDGIGPEVMEEGIKILEVIKKKFMLKLDIKEYLVGGVAIDKFGTALPKSTIDGCLNADAVLFGSVGGDKWKHLPVEQQPERAALLPLRKILNLFVNIRSSKLYSSLSHLSPLKSKIVNNGFDILCVRELIGGIYYGIPKGQKMDNYKRRYAVDTSIYYEEEITRIANFAFEIATFRRKKVTSVDKANVLETSILWREVVNKVAKKYPEISLNHLYVDNASMQIIKNPMDFDVILCPNLFGDILSDECGMITGSIGMLPSASLNKSKFGLYEPAGGSAPDISGKNIANPIALILSISMLFKYSFEQLNIADAIESSVINVLKDGYRTFDILTTNTNEKLLSTSSMGSKISDYLKHEE

SEQ ID NO: 7996 - protein, 126 aa, Glycine max
YFVVGKGEVVTCSGNRNADLFYGVLGGLGQFGIITRARISLEPAPMMVKWIRVLYSEFSTFTMDQEYLISLNNTFDYIEGFVIINRTGILNNWRSSFDPKNPLQASQFSSDGKTLHCLEMAKYFNP

SEQ ID NO: 7997 - protein, 300 aa, Aegilops longissima
GTANMQVDPSGQVQWTQQQPVPLPQQPFSQQPQQTFPQPQQTFPHQPQQQIPQPQQPQQQFLQPQQPFPQQPQQPYPQQPQQPFPQTQQPQQLFPQSQQPQQPYPQQPQQPFPQTQQPQQQFPQSQQPQQPFPQPQQPQQSFPQQQPPFIQPSLQQQLNPCKNLLLQQCRPMSLVSSLWSMIWPQSDCQVMRQQCCQQLAQIPQQLQCAAIHSVVHSIIMQQEQQQQQQQQQQQQQGLRIPLPLYQQQQVGQGTLVQGQGIIQPQQPAQLEAIRSLVLQTLPTMCNVYVPPECSIIKAPL

SEQ ID NO: 7998 - protein, 320 aa, Chloroflexus aurantiacus
MQQVIDSAEAYGRKVMLAGRSMETNARIAFELGYLRADESTIIRPHEMSAYPDEEIAIVCTGSQGEPMSALNRMANRDYPNVKIKPGDTVVLSATPIPGNEVSVNKVINNLFKLGADVIYGPEARVHVSGHAAQEELKLVLALLRPSYIVPFHGDYRHLMLYRKLATTIGAVPDSERVLLAEGGTIMEFSPGFGKITGKAPVGYIYVDGTTVGDVGNVVVRDRQLLAKDGMLIVVVSIDSATGQLVAGPDVVSRGFVYMRQSQDLIEATKETVRAALANRNGSNPVDAAYINRKIRDVVSEFLYRETRRRPMVLPMVMEV

SEQ ID NO: 7999 - protein, 186 aa, Zea mays
  misc_feature (73)..(73): Xaa can be any naturally occurring amino acid
  misc_feature (87)..(87): Xaa can be any naturally occurring amino acid
  misc_feature (110)..(110): Xaa can be any naturally occurring amino acid
  misc_feature (125)..(125): Xaa can be any naturally occurring amino acid
MAPTVMMASSATAVAPFQGLKSTASLPVARRSSRSLGNVSNGGRIRCMQVWPAYGNKKFETLSYLPPLSTDDXLLKQVDYLLRNGWXIPCLEFSKVGFVYRENSTSPVLXDGRYWTMWKLPMFGXCTTPTQVYKELQEAIKSYPDAFHRVIGFDNIKQTQCVSFIAYKPPGQRLDRAAPAAPPPAS

SEQ ID NO: 8000 - protein, 486 aa, Pichia angusta
MEMAYTQINIDQEERDFQKEVEEIKKWWAEPRLEGHQESLSGRGDCEKTVHHQKPQRFRHDGKEGVQVARGAPKNKTVSFTFGALDPIHVTQMAKYLDTIYVSGWQCSATASTSTSLHQILPLPYGHCSNKVQHSVFVFAQLFHDRKQRHERFSLSKEERAKLPYIDFMRPIIADADTGHGGITAIVKLTKLFIEAGAAGIHIEDQAAGTKKCGHMAGKVLVPIQEHINRLIAIRTSADIFGSDLLCVARTDSEAATLITSTIDTRDHYFIIGATNPDVEPLVEVMNRAEQEGAYGAELEEIEKQWTEKAGLKLFHEAVIDEIKASDIKNKDEAIKKFTSTVTPLSGHSHRQARELAKSILGKDIFFDWDAPRVREGYYRYQGGTQCAINRARAVRSVRRHCCGWRRSYQSTKQAKEFAEGVLAKYPEKWLAYNLSPSFNWNAAMSPADQETYIKKLADLGFICNSFSCWFHTTVPAVQRRGVPLL

SEQ ID NO: 8001 - protein, 294 aa, Aegilops longissima
GTANMQVDPSGQVQWPQQQPVPLPQQPFSQKPQQTFPQPQQTFPFPHQPQQQFPQPQQPQQQFLQPQQPQQPYPQQPQQTFPQTQQPQQLFPQSQQPQQPYPQQPQQPLSQTQQPQQQFPQSQQPQQPFPQPQQPQQSFPQQQPPFIQPSLQQQLNPCKNLLLQQCRPVSLVSSLWSMIWPQSDCQVMRQQCCQQLAQIPQQLQCAAIHSVVHSIIMQQEQQQQQQQQQQGLRIPLPLYQQQQVGQGTLVQGQGIIQPQQPAQLEAIRSLVLQTLPTMCNVYVPPECSIIKAPL

SEQ ID NO: 8002 - protein, 340 aa, Cordyceps bassiana
MSRANPPNNASASRKISFNVSEQYDIQDVVGEGAYGVVCSAIHKPSGQKVAIKKITPFDHSMFCLRTLREMKLLRYFNHENIISILDIQKPRGFDSFNEVYLIQELMETDMHRVIRTQVLSDDHCQYFIYQTLRALKAMHSANVLHRDLKPSNLLLNANCDLKVCDFGLARSAASQEDNSGFMTEYVATRWYRAPEIMLTFKEYTKAIDVWSVGCILAEMLSGKPLFPGKDYHHQLTLILDVLGTPTMEDYYGIKSRRAREYIRSLPFKKKVLFRTLFADTSDLALDLLEKLLAFNPVKRITVEEALKHPYLEPYHDPEDEPTAPPIPEEFFDFDKHKDN

SEQ ID NO: 8003 - protein, 502 aa, Sinorhizobium meliloti
MLHQKIVENPYKQKYGNFIGGEWREPVAGRYFDNTTPITGGTLCEVARSDAADIEIALDAAHAAREKWGRTSTTERSNILMKIAARMEDNLELLARAETWDNGKPIRETMAADIPLAIDHFRYFAACIRAQEGSIGEIDHDTVAYHFHEPLGVVGQIIPWNFPILMAAWKLAPALAAGNCVVLKPAEQTPGSILVWAELIGDLLPPGVLNIVNGFGLEAGKPLATSPRIAKIAFTGETTTGRLIMQYASQNLIPVTLELGGKSPNIFFADVASEDDDFFDKALEGFAMFALNQGEVCTCPSRALVQESIYDRFMERAVKRVEAIRQGNPLDEATMIGAQASSEQLEKILAYIEIGKEEGAEVLTGGGRNVLEGDLSGGYYVKPTVFHGHNRMRIFQEEIFGPVVSVTTFKTEAEALEIANDTLYGLGAGVWSRDANRCYRFGRAIEAGRVWTNCYHAYPAHAAFGGYKQSGIGRETHKMMLDHYQQTKNMLVSYSPKALGFF

SEQ ID NO: 8004 - protein, 304 aa, Brassica napus
MAARSRVSSLLSRSFSASSPFLSRSQGKNLNNGSRIVRRFGTSSAAEEVISPSVQVSYTKLLIDGNFVDAASGKTFPTLDPRTGEVIAHVAEGDAEDINRAVKAARKAFDEGPWPKMTAYERSRVMLRFADLVEKHSEELAALESWDNGKTYEQALTAEIPMVARLFRYYAGWADKIHGLTVPADGNYHVQTLHEPIGVAGQIIPWNFPLLMFAWKVGPALACGNTIVLKTAEQTPLTAFYVGKLFLEAGLPPGVLNIVSGFGATAGASLASHMDVDKLAFTGSTDTGKVILGLAANSNLKPVT

SEQ ID NO: 8005 - protein, 219 aa, Rhodobacter sphaeroides 2.4.1
MKFFVDSADVAAIAELNALGMVDGVTTNPSLILKSGRNILEVTKEICNLVSGPVSAEVVAAKAEDMIEEGRHLAEIAPNIAVKVPLTWDGLRACKVLSDEGRMVNVTLCFSVNQALLAAKAGATFISPFIGRLDDINLDGMELIADIRQVYDNYDFKTEVLAASVRTPNHVADCARIGADVITAPPAVIKALANHVLTDKGLDMFNADWAKTGQSILLK

SEQ ID NO: 8006 - protein, 338 aa, Agrobacterium tumefaciens str. C58
MTMHAIQFVEKGRAVLAELPVADLPPGHALVRVKASGLCHTDIDVLHARYGDGAFPVIPGHEYAGEVAAVASDVTVFKAGDRVVVDPNLPCGTCASCRKGLTNLCSTLKAYGVSHNGGFAEFSVVRADHLHGIGSMPYHVAALAEPLACVVNGMQSAGIGESGVVPENALVFGAGPIGLLLALSLKSRGIATVTMADINESRLAFAQDLGLQTAVSGSEALSRQRKEFDFVADATGIAPVAEAMIPLVADGGTALFFGVCAPDARISVAPFEIFRRQLKLVGSHSLNRNIPQALAILETDGEVMARLVSHRLPLSEMLPFFTKKPSDPATMKVQFAAE

SEQ ID NO: 8007 - protein, 373 aa, Pichia stipitis
MSTVTKTITVLPGDHVGTEICNEAIKVLEAIEQATPYQKIHFEFKHHLIGGAAIDSTGVPLPDDSLAAAKLSDAVLLGAVGGPKWGTGAVRPEQGLLKIRKELNLYANLRPCNFASDALLELSPLKSEIVKGTNFTVVRELVGGIYFGERQEQEESADGESAWDTEKYSVAEVTRITRMAAFMALQHNPPLPIWSLDKANVLASSRLWRKTVDKVMKEEFPQLTIQHQLIDSAAMILVQSPTKLNGIVITSNMFGYIISDEASVIPGSLGLLPSASLASLPDTNSAFGLYEPCHGSAPDLPENKVNPIATILSVAMMLRLSLDSLKEAEALEEAVRQVLDSGVRTADLRGTNSTKEVGEAVVAGVTKILKDAA

SEQ ID NO: 8008 - protein, 297 aa, Sulfolobus tokodaii str. 7
MVIILFFSMSEEYSKVLELMEEAKEIFKIQGPFAGEYKARRIAFVGDTHGAVDVTQYVFNEIFDKVDLLVFLGDYVDRYPPSGVENLMIILEKFLQNKDKVVILRGNHESPITNLYYGFYEEVALKFGDEKVYEKFKDFFSYIPYVAIVNNYFCVHGGLPGKDNGGEMKLGIHSVDEIKSLPYPDINPDDPIAFQLLWNDPREGLDDFGFLPNIRGEGTFYFGEKIVKEFLDSTGYSGIIRGHEAVDGFRIDINGKVITVFSSRYHGQSAGVLLMDEGKIKRVYLYQDGSVKAFEGL

SEQ ID NO: 8009 - protein, 70 aa, Zea mays
MATPAVEKPEDVQIRDARTDNLETEIAVIRDIVYDYPYVAMHTEFPIVVSRPLGTHKSVIDFNYATLKAN

SEQ ID NO: 8010 - protein, 208 aa, Synechococcus elongatus PCC 6301
MIADPASRNVVWHDATITRSDRERLNGHRGVILWFTGLSGSGKSTLAHAVEAQLFERGCRTFVLDGDNVRHGLCADLGFSDSDRQENIRRIGEVAKLFMEAGVITLAAFVSPFRADRDRVRALVADGEYIEVYCQASLDICEQRDVKGLYAKARAGQIPEFTGISSPYEAPEAAELQIDTGSRSLEDCVAQVLDYLASQGIIPASDRA

SEQ ID NO: 8011 - protein, 294 aa, Glycine max
MLVLFLFLIFLQEHILTGGHGLMVQGYDPVVKALANDLDIRLNHRVTKISDGYNMVMVTVEDGRNFVADAVIVTVPIGILKANLIEFSPKLPHWKAEAIKDIGMGNENKIALRFDAVFWPNVEVLGIVAPTSYACGYFLNLHKATGHPILVYMAAGKFAYDLEKLSDESAANFAMQQLKKMFPDASKPVQYLVSHWGTDPNSLGCYACDLVGMPDDVYERLRAPVGNLFFGGEAVSMDDHQGSVHGAYSSGVMAAENCQRHLLQKQGHMESLPLVPSVRHEIFETTIPPQISRI

SEQ ID NO: 8012 - protein, 181 aa, Brassica napus
NVLVMGAGPIGLVTMLAARAFGVPKIVIVDVDDNRLSVAKRLGADGIVKVTTSLEDVGSEVEQIKKAIGSNIDVTFDCAGFNKTMSTALAATRCGGKVCLVGMGHGIMTVPLTPAAAREVDVVGVFRYKNTWPLCLEFLTSGKIDVKPLITHRFGFSQKEVEDAFETSARGSNAIKVMFNL

SEQ ID NO: 8013 - protein, 1063 aa, Saccharomyces cerevisiae
MDDYHVNTAFSMGRGNQQDDGNSERNSMHTQPSTMAPATLRMMGKSPQQQQQQNTPLMPPADIKYANNGNSHQAEQKERQVELEGKSRENAPKPNTTSQSRVSSSQGMPKQFHRKSLGDWEFVETVGAGSMGKVKLAKHRYTNEVCAVKIVNRATKAFLHKEQMLPPPKNEQDVLERQKKLEKEISRDKRTIREASLGQILYHPHICRLFEMCTLSNHFYMLFEYVSGGQLLDYIIQHGSIREHQARKFARGIASALIYLHANNIVHRDLKIENIMISDSSEIKIIDFGLSNIYDSRKQLHTFCGSLYFAAPELLKANPYTGPEVDVWSFGVVLFVLVCGKVPFDDENSSVLHEKIKQGKVEYPQHLSIEVISLLSKMLVVDPKRRATLKQVVEHHWMVRGFNGPPPSYLPKRVPLTIEMLDINVLKEMYRLEFIDDVEETRSVLVSIITDPHYGLLSRQYWTLAAKMNAESSDNGNAPNITESFEDPTRAYHPMISIYYLTSEMLDRKHAKIRNQQQRQSHENIEKLSEIPESVKQRDVEVNTTAMKSEPEATLATKDTSVPFTPKNSDGTEPPLHVLIPPRLAMPEQAHTSPTSRKSSDNQRREMEYALSPTPQGNDYQQFRVPSTTGDPSEKAKFGNIFRKLSQRRKKTIEQTSVNSNNSINKPVQKTHSRAVSDFVPGFAKPSYDSNYTMNEPVKTNDSRGGNKGDFPALPADRENMVEKQREKQIEEDIMKLHDINKQNNEVAKGSGREAYAAQKFEGSDDDENHPLPPLNVAKGRKLHPSARAKSVGHARRESLKYMRPPMPSSAYPQQELIDTGFLESSDDNKSDSLGNVTSQTNDSVSVHSVNAHINSPSVEKELTDEEILQEASRAPAGSMPSIDFPRSLFLKGFFSVQTTSSKPLPIVRYKIMFVLRKMINEFKEVKGGFVCMQRFSSNNVAAKREGTPRSIMPLSHHESIRRQGSNKYSPSSPLATNTHQRNSSITETYGDDKHSGTSLENIHQQGDGSEGMTTTEKEPIKFEIHIVKVRIVGLAGVHFKKISGNTWLYKELASSILKELKL

SEQ ID NO: 8014 - protein, 169 aa, Paracoccidioides brasiliensis
MSAPENSKITLIPSDEPEDGRGIEVERVIIERSILIKNMLEDLGDSGEPIPIPNVNKAVLEKVIEWCEHHRNDPPTTNDEDYDSRRKTTDIDEWDQKFMLVDQEMLFEIILAANYLDIKALLDVGCKTVANLIKGKSPDDIRKTFNIQNDFSEQEEAQIRAENEWAEDR

SEQ ID NO: 8015 - protein, 1153 aa, Saccharomyces cerevisiae
MPNPNTADYLVNPNFRTSKGGSLSPTPEAFNDTRVAAPATLRMMGKQSGPRNDQQQAPLMPPADIKQGKEQAAQRQNDASRPNGAVELRQFHRRSLGDWEFLETVGAGSMGKVKLVKHRQTKEICVIKIVNRASKAYLHKQHSLPSPKNESEILERQKRLEKEIARDKRTVREASLGQILYHPHICRLFEMCTMSNHFYMLFEYVSGGQLLDYIIHDGSLKEHHARKFARGIASALQYLHANNIVHRDLKIENIMISSSGEIKIIDFGLSNIFDYRKQLHTFCGSLYFAAPELLKAQPYTGPEVDIWSFGIVLYVLVCGKVPFDDENSSILHEKIKKGKVDYPSHLSIEVISLLTRMIVVDPLRRATLKNVVEHPWMNRGYDFKAPSYVPNRVPLTPEMIDSQVLKEMYRLEFIDDIEDTRRSLIRLVTEKEYIQLSQEYWDKLSNAKGLSSSLNNNYLNSTAQQTLIQNHITSNPSQSGYNEPDSNFEDPTLAYHPLLSIYHLVSEMVARKLAKLQRRQALALQAQAQQRQQQQQVALGTKVALNNNSPDIMTKMRSPQKEVVPNPGIFQVPAIGTSGTSNNTNTSNKPPLHVMVPPKLTIPEQAHTSPTSRKSSDIHTELNGVLKSTPVPVSGEYQQRSASPVVGEHQEKNTIGGIFRRISQSGQSQHPTRQSGTYSSKENLQHICQNQMKFPSKYRKAIVVLYQTYIPSARRYPSYVPNSVDVKQKPAKNTTIAPPIRSVSQKQNSDLPALPQKRQLIVQKQRQKLLQENLDKLQINDNDNNNVNAVVDGINNDNSDHYLSVPLSVPKGRKLHPSARAKSVGHARRESLKFTRPPIPAALPPSDMTNDNGFLGEANKERYNPVSSNFSTVPEDSTTYSNDTNNRLTSVYSQELTEKQILEEASKAPPGSMPSIDYPKSMFLKGFFSVQTTSSKPLPIVRHNIISVLTRMNIDFKEVKGGFICVQQRPSIETAAVPVITTTGVGLDSGKAMDLQNSLDSQLSSSYHSTASSASRNSSIKRQGSYKRGQNNIPLTPLTTNSIHQRKTSIPMSPNYGNQSNGTSGELSSMSLDYVQQQDDILTTSRAQNINNVNGQTEQTNTSGIKERPPIKFEIHIVKVRIVGLAGVHFKKVSGNTWLYKELASYILKELNL

SEQ ID NO: 8016 - protein, 176 aa, Glycine max
  misc_feature (46)..(46): Xaa can be any naturally occurring amino acid
  misc_feature (82)..(82): Xaa can be any naturally occurring amino acid
  misc_feature (90)..(90): Xaa can be any naturally occurring amino acid
  misc_feature (92)..(92): Xaa can be any naturally occurring amino acid
  misc_feature (106)..(106): Xaa can be any naturally occurring amino acid
  misc_feature (115)..(115): Xaa can be any naturally occurring amino acid
MVLEATMICIDNSEWMRNGDYSPSRFQAQADAVNLICGAKTQSNPXNTVGVLTMAGKGVRVFVTPTSDLGKILACMHGLDIXGEMKLAAXIXVAQLASKHPQNKNXQQRFMAFVXNPVKHEKKMLELLEKVKKKKGPLELEFWEKNRGKKKIGTPPPCLKKRTPPLFVVPRGQRRF

SEQ ID NO: 8017 - protein, 457 aa, Mesorhizobium loti MAFF303099
MLANSLIELDRAHLIHPVSSYRGHEALGVRVLKSAKGATVTEASGRQLVDGFAGLWCVNAGYGHDSIVEAAARQMRELPYATAYFDLGAEPAIRLASELAERAPGDLNHVFFTLGGSDAVDSTVRFVRYYWNARGAPKRDQFISIEQGYHGSSVVGAGLTALPAFHAGFGIPFEWQHKIPSPYPYRNPVGEDANAIIAASLAALKAKIEELGPERVAAFYAEPIQGSGGVIVPPKGWIKAMRELCREYGILFIADEVITGFGRTGPLFACTDEEIVPDFMTTAKGLTSGYVPMGAVFMADHVYDVIADGAGASSVGHGYTYSAHPVSAAVALEVLKLYEDGLLENGIKAGARLMAGLSGLSDHPLVGDVRGRGMLAAIELVVDKEKKTPLPASAMPARRIFDRAWDNGLIIRAFANGVLGYAPPLCCTDADIDAIIERTRRTLDQTLADPDVRQALA

SEQ ID NO: 8018 - protein, 143 aa, Zea mays
MAMAYKMATEGMDVKEECQRWFMEMKWKKVHRFVVYRIDERSRAVLVDRVGGPGEGYEELVAALPGDDCRYAVFDFDFVTVDNCQKSKIFFIAWSPAASRIRAKILYATSKQGLRRLLDGVHYEVQATDPSEMGFDVIRGRAQ

SEQ ID NO: 8019 - protein, 321 aa, Zea mays
KCGHMAGKVLVAVSEHVNRLVAARLQFDVMGVETVLVARTDAVAATLIQTNVDARDHQFIVGATNPGLRGQSLAAVLSAGMSAGKSGRELQGIEDEWLAAAQLKTFSECVRDAIAGLGVAAQEKQRRLQEWDRATGGYDRCVSNDQARDIAASLGVTSVFWDWDLPRTREGFYRFRGSVAAAVVRGRAFAPHADVLWMETSSPNVGECTAFAEGVKAACPEAMLAYNLSPSFNWDASGMTDAEMAAFIPSVARLGYVWQFITLAGFHADALVTDTFARDFARRGMLAYVERIQREERINGVETLEHQKWAGANFYDRVLKA

SEQ ID NO: 8020 - protein, 537 aa, Zea mays
  misc_feature (91)..(91): Xaa can be any naturally occurring amino acid
  misc_feature (404)..(404): Xaa can be any naturally occurring amino acid
MMAAVLKTSGSFCSTQQQHFQQSRRDQFLHGSYSYFKHCKSKKIIKPAPLCARVTSSKVELDVKDPYWKQKFQEDWENRFDLPSITDIYDXNQGRCSTICCCPSRTLTGDENVDMWNGYVNNDDRALLKVIKYSSPTSAGAECVDLDCSWVEQWVHRAGPRKEIYYEPEEVKAAIVTCGGLCPGLNDVIRQIVFTLETYGVKNIVGIPFGYRGFFEKGLKEMPLSRGLVENINLNGGSFLGVSRGGAKTSEIVDSIQARRIDMLFVLGGNGTHAGANAIHEECRKRKLKVSVVAVPKTIDNDILLMDKTFGFDTAVEEAQRAINSAYIEARSAYHGIGLVKLMGRSSGFIAMHASLSSGQVDVCLIPEVPFTLDGEFGVLRQLEHLLKSKGFCVVCVAEAAGQXYAKIHSCLDLLQESGATDASGNVILSDIGVHMQQKIKMHFKDIGVPADVKYIDPTYMVRACRANASDAILCTVLGQNAVHGAFAGFSGITSCICNTHYVYLPITEVITAPKRVNPNSRMWHRCLTSTGQPDFH

SEQ ID NO: 8021 - protein, 427 aa, Erwinia carotovora subsp. atroseptica SCRI1043
MTVRTSTLTAEGQASIALEMRSGVLGKTAVDIRPLGEHGLCSYDPGFANTAGCESAITYIDAANSVLLHRGFPVEQLAEQCDFTEVCYILLHGDAPSPEAYAKFADNITRHTLVHEQITRMFSGFRRDSHPMALMCAVVGALAAFYHDVLDINNAEHRELAAVRLLSKMPTLAAMCYKYSVEQPSVYPRNSLSYTGNFLHMLFSIPAEKYEVNPVLERAMNRILILHADHGQCPSTMAVRASGSSGANPFACIAAGLASMWGPLHGGANEACMRMLEEIKTVDRVPEFVRRAKDRCDSFRLMGFGNSVYQHFDPRAAILRKTCYEVLNELGMEDSLLQVAMELEHIAMTDAYFLENKLYPSVDFYTSVILKAMGLPSSMFTVISTVGRTIGWIAHWDEMHKQQEISIYRPRQIYTGQPQRDYVSLKG

SEQ ID NO: 8022 - protein, 526 aa, Triticum aestivum
  misc_feature (95)..(95): Xaa can be any naturally occurring amino acid
  misc_feature (118)..(118): Xaa can be any naturally occurring amino acid
  misc_feature (155)..(155): Xaa can be any naturally occurring amino acid
  misc_feature (176)..(176): Xaa can be any naturally occurring amino acid
  misc_feature (193)..(193): Xaa can be any naturally occurring amino acid
  misc_feature (219)..(219): Xaa can be any naturally occurring amino acid
  misc_feature (425)..(425): Xaa can be any naturally occurring amino acid
LSPPSLITPSPARPLRSLHSPNLPGQGGAAATCAACPAALRGAAGATATNSPCYRCTGSTAAVASTDPTFSAFPAFRVSARLLPFSTPCAASARXTMNIMIINVLKRARRRRPSALLXLFRFPFAFRSNGFVGKDFFGLRDMAQPGFDYGFFFFXLWAVVRAPDGMTYGVLLSVKXHLICDLIIGRCFPGTVXPMLCRSCVRWQDCKIGTQVRGASLLXSVIDYTRSGVVHIVGMVTCWWGVFTLGTRIDRFDHACRSVALKGHSASLVVLGTFLLWFGWYGFNPGSFVTILKSYGPPGSINGQWSGVGRTAVTTTLAGSVAALTTLFGKRLQTGHWNVVDVCNGLLGGFAAITAGCSVVDPWAAVICGFVSAWVLIGLNALAGRLKYDDPLEAAQLHGGCGAWGIIFTALFAKKQYVEEIYGAXGRPYGLFLGGGGRLLAAHIVQILVIAGFVSCTMGPLFLALKKLGLLRISAEDEMAGMDLTRHGGFAYVYHDDDEHDKSVGGFMLRSAQTRVEPAAAANSQV

SEQ ID NO: 8023 - protein, 485 aa, Mesorhizobium loti MAFF303099
MKTLKDKNLFREAGLIGGEWVAAGSGKTVDVIDPATQAAIGTVPDMAGSDTRAAIDAAASAYGDWKKKTNAERADLLEAWHGLMLAHLDDLALILTTEQGKPLDEAKGEIRYGASFVKWFAEEARRINGHTIPSPTQDRRIIVLKEPVGVCGIITPWNFPNAMITRKVAPALAAGCTVVIKPSEFTPYSALALGVLAERAGIPAGVINIVTGMPAEIGNEIMANETVRKISFTGSTRVGSLLMRGAADSVKRLSLELGGNAPFIVFDDADLDLAVEGALVSKFRNGGQTCVCANRILVQAGVYEAFAAKLSARVNAMTVGPGTQPGVAIGPMINMAAVEKINRHVEDALAKGAAIITEKPALPEGPQYVAPLVLSGATKDMQLAGEETFGPVAPLFRFETEEEAIALANGTPYGLASYFYTENLKRAWRVGEALEFGMVGLNTGSVSMEVAPFGGIKQSGLGREGAQAGIEEYLEMKSFHIGGLG

SEQ ID NO: 8024 - protein, 141 aa, Triticum aestivum
  misc_feature (30)..(30): Xaa can be any naturally occurring amino acid
LVETVARPSRSDAVCQQIRTFIQMRTNLKXVVDNSGAKRVMCIQSLRGKKGARLGDMIIGSVKEAQPRGKVKKGDVVYGVVVRAAMKKGRSDGSEVQFDDNAIVIVNNKGELIGTRVFGPVPHELRKKKHLKILALAEHIV

SEQ ID NO: 8025 - protein, 490 aa, Xanthomonas axonopodis pv. citri str. 306
MPRFPDQLLYIGGRYVPARGGHTLEVVNPATGEVLANVHNAGVDDLDAAVDSAKAGQQRWAALTTVERSRILLRAVALLRERNDALAQLETLNTGKPLSETRSVDVVTGADVLEYYAGVAQALQGAQVPLREGSFFYTRHEPLGVVGAIGAWNYPIQIALWKAAPALAAGNAMIFKPSEVTPLTALKLAEIFTEAGLPDGVFNVLPGDGASVGTALTEHPQIEKISFTGGTATGRKVMASASSSSLKEVTMELGGKSPLIVCADADLDVAADIAMMANFYSSGQVCTNGTRVFVPRALRHAFEARLLARVQRIHIGDPLDERTTFGPLASAAHMQRVLEHIEQGKAEGARLLCGGERLQDGALVQGYYVAPTIFSDCTDVMTIVREEIFGPVLSLLTYDDEDEAVTRANATTYGLAAGVVTPDLARAHRLIHRLEAGICWVNTWGESPAPMPVGGYKQSGVGRENGLATLQAYTRTKSVQIELERYASVF

SEQ ID NO: 8026 - protein, 487 aa, Mesorhizobium loti MAFF303099
MGLSFDPDTVSLPVGHFIGGELIAAEGAIEMRRPSDGKAYAASPVADVDMVDRAVASAKAALKASNWGGVRPRERTKALQAWADLIEAEAEALAKIEALCSTRPVGQLVAGDIAITAEQIRFFAEFADKEGSELVPTDDSSLGMIMSEPYGVVGAITPWNFPISMAGWKLGPALAAGNAVVLKPSEMTPFSAVYMAQLALRAGLPAGLVNVVLGDGPTTGTALTGHSEIAKVSFTGSTRAGSAIMENVARTGVKPMTLELGGKSPQIVFADADLDKAATAIAGSVTFNAGQACVAGTRLIAEKSVADRLTATILEKMKAARPGPTWDDATQYSPIISERQRARVDGIVRAAVEAGGECLTGGHTMDGPGYFYEPTLITDVDQANPAIVEEIFGPVLTVQTFETEEEALALSTHPTYGLASGLFTADLSRTIRFARKLEAGTVWVNRYSRSRDHILPTGGYKRSGIGKDLGREAYLANRRSKSVLISL

SEQ ID NO: 8027 - protein, 124 aa, Brassica napus
MSGVWVFNKNGVMRLVENPYNQSGGDWSESSSSGGSQQQRMRRKILVHLPTSEVVSSYKSLERILKCLGWERYYNGDNADHLLQFHKRTSIDLISLPRDFSKFNSIHMYDIVVKNPNVFHVRDM

SEQ ID NO: 8028 - protein, 363 aa, Buchnera aphidicola (Chaitophorus populeti)
MHKKYKIAILPGDGIGPEVMQETYKIIEIIKKKLLINIQTSEYDIGGISIDKHGIALPKKTLIGCEKSDAILLGSIGGPKWDILPPKERPEIASLLPIRKHFNLFANLRPSILHKKLNYLSPLKKNNIKDGFDILCVRELTGGIYFGKPRIEINKKNMHYAIDTSIYHKYEIQRIAEIAFQESLKRRCKVTSIDKANVLYTSKLWRKTVNKISKKYPKVHLSHLYFDNAVMQIIKNPNQFDVILCPNLIGDVISDECGSLTGSIGMLPSASLNTKNFGLYEPAGGAAPDTQGKNIANPIAQILSLSMLIKHSLKMNHISNLINTAVYKTLLKGFRTHDISHDKNFVTTKEMGNEIVKSFIEEL

SEQ ID NO: 8029 - protein, 175 aa, Triticum aestivum
MAPTVMASSATSVAPFQGLKSTAGLPISRRSSSAGLSSVSNGGRIRCMQVWPIEGIKKFETLSYLPPLSTEALLKQVDYLIRSKWVPCLEFSKVGFVFREHNSSPGYYDGRYWTMWKLPMFGCTDATQVLNEVEEVKKEYPDAYVRVIGFDNLRQVQCVSFIAFRPPGCEESGKA

SEQ ID NO: 8030 - protein, 367 aa, Mycobacterium tuberculosis H37Rv
MAIAETDTEVHTPFEQDFEKDVAATQRYFDSSRFAGIIRLYTARQVVEQRGTIPVDHIVAREAAGAFYERLRELFAARKSITTFGPYSPGQAVSMKRMGIEAIYLGGWATSAKGSSTEDPGPDLASYPLSQVPDDAAVLVRALLTADRNQHYLRLQMSERQRAATPAYDFRPFIIADAGTGHGGDPHVRNLIRRFVEVGVPGYHIEDQRPGTKKCGHQGGKVLVPSDEQIKRLNAARFQLDIMRVPGIIVARTDAEAANLIDSRADERDQPFLLGATKLDVPSYKSCFLAMVRRFTNWASRSSMVIFSMRLATASTRRPAVGLSAKAFSAWSPTRSTRGGRTASSRSTAFSTRSSRGSWRPGRTTRA

SEQ ID NO: 8031 - protein, 398 aa, Mycobacterium tuberculosis H37Rv
MTYGEAVADVLEFGQSEGEPIGMAPEEWRAFAARASLHAARAKAKELGADPPWDCELAKTPEGYYQIRGGIPYAIAKSLAAAPFADILWMETKTADLADARQFAEAIHAEFPDQMLAYNLSPSFNWDTTGMTDEEMRRFPEELGKMGFVFNFITYGGHQIDGVAAEEFATALRQDGMLALARLQRKMRLVESPYRTPQTLVGGPRSDAALAASSGRTATTKAMGKGSTQHQHLVQTEVPRKLLEEWLAMWSGHYQLKDKLRVQLRPQRAGSEVLELGIHGESDDKLANVIFQPIQDRRGRTILLVRDQNTFGAELRQKRLMTLIHLWLVHRFKAQAVHYVTPTDDNLYQTSKMKSHGIFTEVNQEVGEIIVAEVNHPRIAELLTPDRVALRKLITKEA

SEQ ID NO: 8032 - protein, 77 aa, Glycine max
MGLWTLLEGFLLLANALAILNEDRFLTPRGWGLSDFSAGQTKSFKGQLIGLIYATQYLRFPLLLLNSVFIIVKLVSG

SEQ ID NO: 8033 - protein, 641 aa, Zea mays
GDGIIFHTGDWKIDESPVDGKNFDRQALEELSKEGVTLMMSDSTNVLSPGRSISESVVAGSLLRHISEAKGRVITTQFASNIHRIGSIKAAADLTGRKMVFVGMSLRTYLEAAFKDGKAPLDPSTLIKVEDMDAYAPKDLLVVTTGSQGEPRAALNLASYGGSHALKLSKEDVLLYSAKVIPGNETRVMKMMNRLTDLGPKIIMGKDSGLHTSGHAYREELEEVLRIVKPQHFLPVHGELLFLKEHESLGRSTGIRHTTVIKNGEMLGVSHLRNRRVLSNGFVSLGKEDLQLMYSDGDKAFGTSTDLCIDERLRIASDGIIFVSMEIFRPQKEHGLAQSGLKGKFKITTRCLWLDNGRLLDALYKAAHAALSSCPVNCPHSHMERMVAEILRKMVRKYSGKRPDVIAVATENTTAGFSEHLDTKASGNFGPSSATSHLSRSPATSLEGSYKTHPDNPEVDAEEILPETVRTTPDDATTSSNGEALFSSDLHQPKTLEHFWESFKSPTAVKIARIVNGGNKQNFGKIGIMGQDSLIQSAPAPVKSSKRNKWKPEEIKSLIQMRGEMNEKFQSVKGRMVLWKEISDTMLNQGVSRTPAQCKSLWTSLVQKYEESKDTESMKTWPYFSAMDKILSQQGEMATKG

SEQ ID NO: 8034 - protein, 435 aa, Saccharomyces cerevisiae
MTTNEEFIGTQIFGTVFEITNRYNDLNPVGMGAFGLVCSATDTLTSQPVAIKKIMKPFSTAVLAKRTYRELKLLKHLRHENLICLQDIFLSPLEDIYFVTELQGTDLHRLLQTRPLEKQFVQYFLYQILRGLKYVHSAGVIHRDLKPSNILINENCDLKICDFGLARIQDPQMTGYVSTRYYRAPEIMLTWQKYDVEVDIWSAGCIFAEMIEGKPLFPGKDHVHQFSIITDLLGSPPKDVINTICSENTLKFVTSLPHRDPIPFSERFKTVEPDAVDLLEKMLVFDPKKRITAADALAHPYSAPYHDPTDEPVADAKFDWHFNDADLPVDTWRVMMYSEILDFHKIGGSDGQIDISATFDDQVAAATAAAAQAQAQAQAQVQLNMAAHSHNGAGTTGNDHSDIAGGNKVSDHVAANDTITDYGNQAIQYANEFQQ

SEQ ID NO: 8035 - protein, 150 aa, Brassica napus
MSGGDGNNGGGRRKGSVKWFDTQKGFGFITPDDGGEDLFVHQSSIRSEGYRSLAPEESVEFEVEVDNSGRTKAIEVSGPDGAPVLGNSGGSSGGRGGFGGGGRGGGRGGGGRGYGGGDSYGGGGYGGGGGYGGGGYGGRGGGGGDGACYK

SEQ ID NO: 8036 - protein, 284 aa, Zea mays
MTAVALALPTDDDKDGGRRGVDHSPTAPAPPPPPPPPQELVMVARAVQRLVARNDAVVPPAPDGRGGGRRLGMRAFEAAEGAAAPRIGVPEYLERVHRYAALDPECYVVAYAYVDMAAHRRPAAAVASRNVHRLLLASLLVASKVLDDFHHSNAFFARVGGVSNAEMNRLELELLDVLDFAVAVDHRVYRRYREHLEKETTLMMLRRDDGHGPPVPVPVPGSGAAPTKSRTAASSVVKPPLTEDRRRPAEAGDADGGGEHDDRRKLPNSATAAASLRELWAFDY

SEQ ID NO: 8037 - protein, 186 aa, Brassica rapa subsp. pekinensis
YIGLKQRRATGQEYAEFLHEFMCAVKQNYGEKVLVQFEDFANHNAFDLLSRYMDSHLVFNDDIQGTASVVLAGLIAAQKVLGKSLADHTFLFLGAGEAGTGIAELIALKISKETGAPIEETRKKIWLVDSKGLIVSSRKESLQHFKQPWAHEYEPVKDLIGAVNAIKPTVLIGTSGVGQTFTKEVV

SEQ ID NO: 8038 - protein, 344 aa, Zea mays
  misc_feature (306)..(306): Xaa can be any naturally occurring amino acid
MPFGLLAFLVQISSATLLFGTCRSYSLCIYIYASTGFTSFQIYKRFYFHTIFNYEHVCNICLMFGRAWEELKKEVREARRIKMLHQPSKAMDLENEIRILRNTFAEKSKDCVSLLKEWETHKRLKENGTIPSFDLEGLQCLGSMLRIVGLSGTHMDLSNISIQWFRIHPKESNKEIISGATRPVYALEPHDVGRYLQAEIDVGGEIAVAKTAGPVDPDAGLVDYVETLVRKPETEFNVVVLQSNGVDQPKESVHVLNVGRLRMRLTKGKSVVAKEFYSSSMQLCGVRGGGEAASQAMFWRPRNDLXLVLAFESTRERNTAIMLARRFAVDCNIILAGPGDKTPW

SEQ ID NO: 8039 - protein, 94 aa, Brassica napus
MSLFLKDDSIQIREVWNDNLLEEMDLIRQVVDDFPYVAMDTEFPGIVVRPVGTFKSNADYHYETLKLNVNILSIIQLGLTFSNEQGNLPTCGTD

SEQ ID NO: 8040 - protein, 407 aa, Yersinia pestis KIM
MEIILGVVMFTLIVLALTVMILFAKSKLVNTGDITVEINEDEDKSFTAPAGDKLLNMLSSHGIFVSSACGGGGSCGQCRVTIKEGGGDILPTELSHISKREAKEGCRLACQVNVKQNLKIELPEEIFGVKKWTCEVISNDNKATFIKELKLKIPDGDVVPFRAGGFIQIEAEPHTVKYADFDVPTEYRGDWDKFNLFRFESVVTEPTVRAYSMANYPEEHGIILLNVRIATPPPSVPDAPPGIMSSYIWSLKPGDKVVISGPFGEFFAKDTDAEMVFIGGGAGMAPMRSHIFDQLKRLHSKRKISFWYGARSRREMFYEEDFDQLQAENDNFRWHVALSDPQPEDNWTGYTGFIHNVLLENYLKDHPAPEDCEFYMCGPPMMNAAVIKMLKDLGVEDENIMLDDFGG

SEQ ID NO: 8041 - protein, 77 aa, Glycine max
MASLMLSSPAVTTDNRAGAGMVAPFTGLKSMAGFPTRKTINDITSIASTGGRVLCMQVRPPLGKKTFETLSYLPDLD

SEQ ID NO: 8042 - protein, 120 aa, Zea mays
ESGVSMLLHGDLDIQIIEAKCLPNMDLMTERMRKCFTGYGACSNDCGKSEPPHPDMRKIITSDPYVSVCLSGATVAQTRVIANSENPKWDEHFYVQVAHSVSRVEFHVKDNDVFGAELIG

SEQ ID NO: 8043 - protein, 506 aa, Oryza sativa (japonica cultivar-group)
MESPLSHPAMVALSLLLLVALYLARRAVLGKKRRYPPVAGTMFHQLLNFGRLLEYHTELSRKYRTFRMLTPTCNYVYTVEPANVEHILKTNFANYGKGPMTHDVLEDLLGDGIFNVDGGMWRQQRKVASLEFSTRVLRDYSSAVFRDTAAELAGILERGPAAKGRERVDMQDLLMRATLDSFFRVGFGVNLGVLSGSSKEGLVFARAFDDASEQVLFRFFDLLWKVKRFLNISSEATMKQSIRTINDFVYSIIDRKIEQMSREQHEFAKKEDILSRFLLEREKDPGCFDNKYIRDIILNFVIAGRDTTAGTLSWFLYAVCKNQRVQDKIAREVRDATTGDRDVGVQDFSSFLTEDAINKMQYLHAALTETLRLYPGVPLDVKYCFSDDTLPDGHAVKKGDMVNYQPYPMGRMKFLWGDNAEEFKPERWLDDSGMFVAESPFKFTAFQAGPRICLGKEFAYRQMKIVSAVLLYFFRFEMWDDDATVGYRPMLTLKMDGPFYLRALAR

SEQ ID NO: 8044 - protein, 206 aa, Aspergillus nidulans FGSC A4
MATNITHHAGITRNERNQLRKQKGLTIWLTGLSASGKSTIAVELEHQLLQRGLHAYRLDGDNVRFGLNKDLGFSDADRNENIRRIAEVAKLFADSSSIAITSFISPFRADRDTARKLHEVPTPNDSTGLPFVEVFVDVPIEVAEKRDPKGLYKKAREGIIKEFTGISSPYEAPENPEVHVKNVDLPIQEAVKQIIDYLDSKKLLDA

SEQ ID NO: 8045 - protein, 438 aa, Zea mays
  misc_feature (251)..(251): Xaa can be any naturally occurring amino acid
GSRKLLGQGTFAKVYHARNTATSESVAIKVIDKEKVMKVGLIDQIQREISVMKLVRHPNIVQLYEVMATKTKIYFVLEHVKGGELFNKIQRGRLKEDAARKYFQQLICAVDFCHSRGVYHRDLKPENLLLDENSNLKVSDFGLSALAECHRQDGLLHTTCGTPAYVAPEVINRKGYDGAKADIWSCGVILFVLLAGYLPFHDKNLMDMYKKIEKADFKCPSWFSTDVRRLLQRILDPNPSRRISVEKIMEXPWFRKGLGAKLLRYDLQNKNAPHVDKNADFDSLSTNVTTESKQHEEKKPTNMNAFDIISLSTGLDLSGLFEESNKKRESKFTSTNTSSTIISKIEDIAKNLRLNLTKKDGGLLKMEASKPGRKGVMGIDAEVFEVSPNFHLVEIKKTNGDTLEYQKVLNQEMRPALKEIVWAWQGEQSKQKQEQQSC

SEQ ID NO: 8046 - protein, 347 aa, Clostridium thermocellum ATCC 27405
MKGKMKVCVLTGKEKLEWVERDIPQPGRGELQIKLKHVGVCGSDLHFYKEGRLANWELDGPLALGHEPGGIVSAIGEGVEGFEIGDKVALEPGVPCGECEDCRKGHYNLCKHIKFMAIPHEKDGVFAEYCVHSASMCYKLPENVDTMEGGLMEPLSVALHATELSNAKIGETAIVLGSGCIGLCTVMALKARGVSEIYVTDVVDKRLEKALEVGATRVFNSQREDIVEFAKTLPGGGADQVYECAGSRVTTLQTCKLIKRAGKVTLVGVSPEPVLELDIATLNAMEGTVYSVYRYRNMYPIAIAAVSSGVIPLKKIVSHVFDFKDCIEAIEYSTNHKDEVIKSVIKF

SEQ ID NO: 8047 - protein, 279 aa, Glycine max
  misc_feature (161)..(161): Xaa can be any naturally occurring amino acid
MGVFSEDPNPNPNPIVIREVWASNLESEFELIRELIDRYPFISMDTEFPGVIFRPHVDPTKPFNHRNRPSDHYRLLKSNVDALNLIQVGLTLTDAAGNLPDLAGNRSIWEFNFRDFDVARDAYAPDSIDLLRRQGIDFARNTADGVDSTCFAELMMSSGLXVCNDAVSWVTFHSAYDFGYLVKILTRRNLPTRLEEFLKTVKVFFGDNVYDVKHMMRFCDTLYGGLDRVARTLNVDRAVGKCHQAGSDSLLTWHAFQKIVDIYFVKEEHRKHAGVLFGL

SEQ ID NO: 8048 - protein, 503 aa, Oryza sativa (japonica cultivar-group)
MATAIPQRQLFVAGEWRAPALGRRLPVVNPATESPIGEIPAGTAEDVDAAVAAAREALKRNRGRDWARAPGAVRAKYLRAIAAKIIERKSELARLETLDCGKPLDEAAWDMDDVAGCFEYFADLAESLDKRQNAPVSLPMENFKCYLRKEPIGVVGLITPWNYPLLMATWKVAPALAAGCTAVLKPSELASVTCLELADVCKEVGLPSGVLNIVTGLGSEAGAPLSSHPGVDKVAFTGSYETGKKIMASAAPMVKPVSLELGGKSPIVVFDDVDVEKAVEWTLFGCFWTNGQICSATSRLILHKKIAKEFQERMVAWAKNIKVSDPLEEGCRLGPVVSEGQYEKIKQFVSTAKSQGATILTGGVRPKHLEKGFYIEPTIITDVDTSMQIWREEVFGPVLCVKEFSTEEEAIELANDTHYGLAGAVLSGDRERCQRLTEEIDAGIIWVNCSQPCFCQAPWGGNKRSGFGRELGEGGIDNYLSVKQVTEYASDEPWGWYKSPSKL

SEQ ID NO: 8049 - protein, 362 aa, Saccharum hybrid cultivar
MGSTAEDVAAVADEEACMYAMQLASASILPMTLKNALELGLLEVLQAEAPAGKALAPEEVVARLPVAPTNPDAADMVDRMLRLLASYDVVKCQMEDKDGKYERRYSAAPVGKWLTPNEDGVSMAALTLMNQDKVLMESWYYLKDAVLDGGIPFNKAYGMTAFEYHGTDPRFNRVFNEGMKNHSVIITKKLLEFYTGFEGVSTLVDVGGGIGATLHAITSHHPQIKGINFDLPHVISEAPPFPGVQHVGGDMFKSVPAGDAILMKWILHDWSDAHCATLLKNCYDALPENGKVIVVECVLPVNTEAVPKAQGVFHVDMIMLAHNPGGRERYEREFHDLAKGAGFSGFKATYIYANAWAIEFIK

SEQ ID NO: 8050 - protein, 512 aa, Aspergillus nidulans FGSC A4
MALLGLLETYRDPLAFVAALSAVFYLLSCLHRRWRRYQFAKENGCEPVVGKIPSYDPFLSLDRLYRLTKLARNRKLLENNVQRFKEFGNTHRAKRITTPMIVTRDPQNIKAILSLKFGDYSMGDRIRIFGPLLGHGIFTSDGEDWARSRHMIRPNFVKEQVAHLEIFEELMDDLFALIPTDGSTVDLQELFFGFTIDSATEFLCGHNVHSLKKRRSGVIDDEPDFAEAFNYSLDNISKNGRFGPLMFLNRDPKAVESHRICHESMDQFVDKAIRMRERYNEEKIVDEAAERRYMFLYGLAQQTGDRRRIRDEVLNILLAGRDTTASLLSNMFFLLAKHPSTWAKLQEEVATLEGRAPTYEQLRNMKYLKYCLNETLRLFPVVPVNSRTAIRDTVLPVGGGPDGQSPAFVPKGTMVAYSVYAMHRREDYYGADAEEFRPERWADLRPGWEYLPFNGGPRICVGQQYALTEAAYVTTRLAQRYSILESRDPGPWEEKLTLTLCSYNGTQVSLRH

SEQ ID NO: 8051 - protein, 335 aa, Triticum aestivum
YQVYKQVDEGSPECGIIVNRHRRWLRNLLWATSKHDVYVTQNYSVMHWSSLLRRGKEVPNVAGPNQDMRGGRPLSRVQISTMTVKDNLLAAGGFHGELICKYVDQPGVAFCTNLAGNKKSITNAVEIYESPNGSTRVVAANNDCVVRTFDTEKYSLLTQFPFAWSVNNMSVSPDGKLLAVVGDSSDCLIADSGSGKEIASLRGHADYSFASAWHPDGRVLATGSQDRTCRLWDVRNPSDAFAVLEGRIGAVRGLRFSPDGRFLAAAEPADFVRVYDVAAGYARAQEIDLFGEIAGVSFSPDDGAEALFVGVADRTYGSLLEFRRRHRHAYLDCYL

SEQ ID NO: 8052 - protein, 293 aa, Saccharomyces cerevisiae; identical to SEQ ID NO: 315

SEQ ID NO: 8053 - protein, 52 aa, Triticum aestivum
DGSSKDDLKLPTDDAILTQLKGGFDEGKDLAMTVMSAMGEEQICAVKKVGPR

SEQ ID NO: 8054 - protein, 504 aa, Mesorhizobium loti MAFF303099
MTIAKETAELLAKLGVAKDALVGGDLIVRSPVTGEQIAALKTISPADAAKTIDAAHKAFQSWRLVPGPKRGELVRLLGEELRAHKAELGRLVSIEVGKIPSEGLGEVQEMIDICDFAVGLSRQLYGLTIATERPGHRMMETWHPLGVVGVISAFNFPVAVWSWNAALALVCGDAVVWKPSEKTPLTALACEAIFKRAVKRFGADAPQGLAPVLIGDRAVGEILVDHPKVPLVSATGSTRMGRDVGPRLAKRFARAVLELGGNNAGIVCPTADLDMALRAIAFGAMGTAGQRCTTLRRLFVHESVYDALVPRLKKAYQSVSVGNPLETSSLVGPLIDKAAFDAMQKALTEAAAHGGKVAGGARVENGHPDAYYVHPALVEMPKQVSPVTEETFAPILYVMKYSDFDAVLDEHNAVGAGLSSSIFTRDLQESERFLGVDGSDCGIANVNIGTSGAEIGGAFGGEKETGGGRESGSDAWKAYMRRATNTVNYSKALPLAQGVSFDID

SEQ ID NO: 8055 - protein, 105 aa, Triticum aestivum
MWTERRARRSGSMAGGGGGRARGAEGKRAAPQGQRAPAATAGYFTAELAALFLCLTALLVFLPLVLPPLPPPPSLLLLVPVGLMAVLVALAFVPSDSRSMASSCH

SEQ ID NO: 8056 - protein, 665 aa, Glycine max
KSRRQLALFPPSSGAYFFHGFVTSVYSVFVSIFMNTLGKSCLCKSDVQLSLSCRTEGINSRTNSNGTFRKLEKLSRATVIAKSSRLWGFFIACQWVSIVTFPVLWRSYKQLSWLGAKSSPYYQPMHEQFAIVVRDIPHVPQGQTRKEQVDSYFRDIYPETFYRSMIVTDNKVVNKIWESLEKYTKKLARAEAVYAGSKTTAKPEGTRPTNKTGFLGLVGKKVDTIEYCNEKINELEARLESEQKVTLREKQQDAAVVFFSSRVVAASASPNLHAQIPNMELIFRAYIPPRLRWEKIDDDRVEDALSQCSRTAPVGCNYLNFNLFLRVRCSLVEILLDVLLIVHIKPIVNIKALKTVLEAYLPQLALIIFLALLPKLLLFLSKFEGIPTESHAVRAASGKYFYFTVLNVFIGVTIGGTLFKAFKRIREHPTLDEISSLLAESLPGNATFFLTYVALKFFIGYGLELSRIVPLIIYHLKRKYLCKTEAELKEAWRPGDLGYGTRVPGDMLIVTIVFCYSVIAPVIIPFGALYFGLGWLVLRNQALKVYVPTFESYGRMWPHIHNRILASLILYQITMFGYFGTQKFYYTPLVLPLPILSLVFGFVCAKKFYPAFQHPALEVAANTLKEVPNMELIFGAYIPPSLRSEKIDGDRVEDALSQASRTTPV

SEQ ID NO: 8057 - protein, 422 aa, Streptococcus pyogenes M1 GAS
MILIKNGRVMDPKSQRDQVADVLIDGKQIVKIASAIECQEAQVIDASGLIVAPGLVDIHVHFREPGQTHKEDIHTGALAAAAGGVTTVVMMANTNPVISDVETLQEVLASAAKEKIHIYTNASVTQAFNGKDVTDFKALLEAGAVSFSDDGIPLESSKVLKEAFDLANANQTFISLHEEDPQLNGVLGFNEGIAEEHFHFCGATGVAEYSMIARDVMIAYDRQAHVHIQHLSKAESVQVVAFAQQLGAKVTAEVSPQHFSTTEDLLLIAGTSAKMNPPLRTQRDRLAVIEGLKSGVITVIATDHAPHHKDEKTVDDMTKAPSGMTGLETSLSLGLTHLVEPGHLTLMSLLEKMTLNPALLYGFDAGYLAENGPADLVIFADKQERLITENFASKASNSPFIGNKLKGVVKYTIADGEVVYPN

SEQ ID NO: 8058 - protein, 432 aa, Myxococcus xanthus
  misc_feature (265)..(265): Xaa can be any naturally occurring amino acid
  misc_feature (323)..(323): Xaa can be any naturally occurring amino acid
MAPPSSGEKISLQSGKLSVPDNPIIPFIEGDGTGRDIWRASQAVFDAAVEKAYKGKKKIAWYEVLAGEKSFKAVNNWLPEETVEAFRTYLVGIKGPLTTPVGGGIRSLNVALRQMLDLYVCLRPVRYFKGVPSPVKMPDKVDMTIFRENTEDIYAGIEFEAGTAAAEKFLGLLKQEFPKEFGKIRFPSDVGLGIKPVSHEGSDRLIRAAIQYAVDHKRKSVTLVHKGNIMKFTEGAFRKWGYELAAREFGDKVYTWDQWEATKAXKGEDAANAEQKAALAAGKILIKDSIADITLQQVLTRPDEFDVIATLNLNGDYLSDALXAQVGGIGIAPGGNINYVTGHAVFEATHGTAPKYADQDKVNPGSVILSGEMMFRHLGWYEAADLMIQGMDRAIASKTVTYDFARLMKQEGQSGVSEVKCSEFGQAIIKNM

SEQ ID NO: 8059 - protein, 447 aa, Arabidopsis thaliana
MSGSRRKATPASRTRVGNYEMGRTLGEGSFAKAKYAKNTVTGDQAAIKILDREKVFRHKMVEQLKREISTMKLIKHPNVVEIIEVMASKTKIYIVLELVNGGELFDKIAQQGRLKEDEARRYFQQLINAVDYCHSRGVYHRDLKPENLILDANGVLKVSDFGLSAFSRQVREDGLLHTACGTPNYVAPEVLSDKGYDGAAADVWSCGVILFVLMAGYLPFDEPNLMTLYKRICKAEFSCPPWFSQGAKRVIKRILEPNPITRISIAELLEDEWFKKGYKPPSFDQDDEDITIDDVDAAFSNSKECLVTEKKEKPVSMNAFELISSSSEFSLENLFEKQAQLVKKETRFTSQRSASEIMSKMEETAKPLGFNVRKDNYKIKMKGDKSGRKGQLSVATEVFEVAPSLHVVELRKTGGDTLEFHKFYKNFSSGLKDVVWNTDAAAEEQKQ

SEQ ID NO: 8060 - protein, 117 aa, Zea mays
LQAVIKRLMTDVPFGVLLSGGLDSSLVASVASRHLNETKVDRQWGNKLHTFCIGLKGSPDLKAAREVADYLSTVHHEFHFTVQMVISGEGSDEIFGGYLYFHKAPNKKEFHEETCRK

SEQ ID NO: 8061 - protein, 112 aa, Bartonella sp. RR13863PO
ANEACLKMLQEIGSIKRIPEFIARAKDKNDPFRLMGFGHRVYKNYDPRAKILQKTCHEVLKELNIQDDPLLDIAIELEKIALNDEYFIEKKLYPNVDFYSGITLKALGFPTE

SEQ ID NO: 8062 - protein, 320 aa, Emericella nidulans
MDKSQQPSSFQQLEKLGEGTYATVFKGRNRQTGELVALKEIHLDSEEGTPSTAIREISLMKELKHESIVSLYDVIHTENKLMLVFEYMDKDLKKYMDTRGDRGQLDQATIKSFMHQLMSGIAFCHDNRVLHRDLKPQNLLINKKGQLKLGDFGLARAFGIPVNTFSNEVVTLWYRAPDVLLGSRTYNTSIDIWSAGCIMAELYTGRPLFPGTTNEDQLQKIFRLMGTPSERSWPGISQLPEYRANFHVYATQDLGLILPQIDPLGLDLLNRMLQLRPEMRIDAHGALQHPWFHDLPQLQAQLQQQQMAGYGGMMPPQQAY

SEQ ID NO: 8063 - protein, 155 aa, Codonopsis lanceolata
MALIPSIFGGRRSNVFDPFSHDIWDPFQGLSSALANARDQETAAIANTRIDWKETPEAHVFKADLPGLKKEEIKVEVEDGRVLQISGERSKEQEEKTDTWHRVERSVGKFHRRFRLPENAKVDQVTASMENGVLTVTVPKKEEKEPEVKAIDISG

SEQ ID NO: 8064 - protein, 112 aa, Bartonella sp. MM5136CA
ANEACLKMLQEIGSIERIPEFIARAKDKNDPFRLMGFGHRVYKNYDPRAKIMQKTCHEVLKELNIQDDPLLDIAIELEKIALSDEYFIEKKLYPNVDFYSGITLKALGFPTE

SEQ ID NO: 8065 - protein, 433 aa, Oryza sativa (japonica cultivar-group)
MERYKVIREIGDGTCGNVFRAYNTETNEIVAVKKMKRKFFQWEECISLREVKALQKLNHPNIVKLKEVTMENHELFFIFENMECNLYDVIRERQAAFSEEEIRNFMVQILQGLAYMHNNGYFHRDLKPENLLVTDGTVKIADFGLAREVSSSPPYTDYVSTRWYRAPEVLLQSSAYTPAIDMWAVGAILAELFTLSPLFPGGSETDQLYKICAVLGTPDHTVWPEGMNLPRSSSFNFFQIPPRNLWELIPNATLEAIDLIQQLCSWDPRRRPTAEQSLQHPFFNVGNWVPRPLHASHTKTIETRPNPRLELNLWDFGTEPEDNYLDLTLSLKPSFPGTDFSNNVPEHTKEEILLYPGFENPPVQSGFWPLVASDRPMGDVPAMSSWPQAYVVDGQATLPAVGFSGSPFGLSPLQPNLFENRSFATPIRQVNFF

SEQ ID NO: 8066 - protein, 206 aa, Bartonella taylorii
AYKYSIGQAFVYPRNDLSYAANFLRMCFCVPCEEYKVNSVLTRAMDRIFILHADHEQNASTSTVRLAGSSGANPFACIAAGVACLWGPAHGGANEACLKMLQEIGSVERIPEFIARAKDKNDPFRLMGFGHRVYKNYDPRAKIMQKTCHEVLKELNIQDDPLLDIAIELEKIALNDEYFVEKKLYPNVDFYSGITLKALGFPTESL

SEQ ID NO: 8067 - protein, 367 aa, Triticum aestivum
  misc_feature (55)..(55): Xaa can be any naturally occurring amino acid
  misc_feature (86)..(86): Xaa can be any naturally occurring amino acid
  misc_feature (95)..(95): Xaa can be any naturally occurring amino acid
  misc_feature (106)..(106): Xaa can be any naturally occurring amino acid
  misc_feature (232)..(232): Xaa can be any naturally occurring amino acid
  misc_feature (253)..(253): Xaa can be any naturally occurring amino acid
  misc_feature (296)..(296): Xaa can be any naturally occurring amino acid
MGSTATDMAASADEEACMYALQLVSSSILPMTLKNAIELGLLETLVAAGGKLLTXSTWCRARWRRARMGACPGGTAPRPCASSSPXTRTASPWAXHALMNMLRLLXSYNVVSCTMEEGKDGRLSRRYGAAPVCKFLTPNEDGVSMAALALMNQDKVLMESWYYLKDAVLDGGIPFNKAYGMSAFEYHGTDPRFNRVFNEGMKNHSIIITKKLLEVYKGFEGLGTIVDVGGGXVGATVGAIVAAYPAIKGINFXLPHVISEAPPFPGVTHVGGDWSDEHCATLLKNCYDALPAHGKXVVLVECILPVNPEATPKAQGVFHVDMIMLAHNPGGRERYEREFEALAKGAGFKAIKTTYIYANAFAIEFTK

SEQ ID NO: 8068 - protein, 205 aa, Triticum aestivum
  misc_feature (28)..(28): Xaa can be any naturally occurring amino acid
  misc_feature (49)..(49): Xaa can be any naturally occurring amino acid
  misc_feature (136)..(136): Xaa can be any naturally occurring amino acid
  misc_feature (182)..(182): Xaa can be any naturally occurring amino acid
MKTFLIFVLLAMAMNIATAARQLNPSNXELQSPQESFSHQQQPFPQQPXAAFSQPQDSFPWQPHQPFPQTQQSFPLQPQQPFPQQPQQSFPQPQPQQPQQPFPQQPQQPFPLRPQQPFPQQPQQSQQSFPQPQPQXPQQPSILQPQQPLPQQPQQPFQQPQQQLSQQPEQTISQQPQQPFPXHQPQQPYPQQQPYGSSLTSIGGQ

SEQ ID NO: 8069 - protein, 157 aa, Brassica napus
MMDGVTGGDSKSGEATTAPPLRNPHPATLLGANALPPPFLSKTYDMVEDPASDAIVSWSPANNSFVVWDPPEFSRSLLPRYFKHNNFSSFVRQLNTYGFRKVDPDRWEFANEGFLRGQKHLLKTISRRKSTHGHGTSSSNTQSHQGSHGFVIFMRRG

SEQ ID NO: 8070 - protein, 484 aa, Mycobacterium avium subsp. paratuberculosis str. k10
MSRDDWISADEGPRRTVSTTIPVFNPSTEEQIAEVPDSDQAAVDAAVARARETFELGVWRKAPASHRANVLFRAARIIEERKDELAALESQDNGMNLTAAGHIIPVSVDMLKYYAGWVGKIHGESANLVSDGLLGTWETYHTFTQLEPVGVVGLIIPWNGPFFVAMLKVAPALAAGCSAVLKPAEETPLTALKLEEIFREAGLPDGVLNVITGYGETTGAALTAHPDVDKISFTGSTEVGRLIVKAAAGNLKRLTLELGGKSPLIMFDDANLDKAIMGAGMGLLAGSGQNCSCTSRIYVQRGIYDQVVEGLAEFAKMLPMGGSDDPNSVLGPLISEKQRQRVEGIVNDGVAAGAKVITGGKPMDRKGYFYEATIITNTTPDMRLIREEIFGPVGCVIPFDDEDEVIAAANDTHYGLAGAIWTENLSRAHRVVNELRAGQIWVNSALAADPSMPISGHKQSGWGGERGRKGIEAYFNTKAVYIGL

SEQ ID NO: 8071 - protein, 285 aa, Lactobacillus gasseri
MNFHSIEDTYTLNNGVEIPIIGFGTWQTPDGDIAKHAVEVALNAGYRHIDTAAAYGNEKSVGQAIKKSGINRHDLFITTKLWNADHGYQSTKAAIDRSLQNLKVDYLDLYLIHWPNPVAMRDHWAEANAESWRAMEEAVQAGKIRAIGVSNFRKRHLDELLKTAEIKPVVNQIMLNPSDLQSDVVKVNNKLGLLSEAYSPLGTGGLLGNETVKEIASEVGKSPAQVLIRWSLEHGFLPLPKSVHDKYIQANVEVFDFNLNSEQMNKLDSLHGVSGLATDPDTANF

SEQ ID NO: 8072 - protein, 433 aa, Neisseria meningitidis Z2491
MPSETARPLYADTCAAHTLVWFRQNLRIRDNAALCAAVAEGLPVIGIWIDDAETDNPRRAAFYRQSAAELAQGLAGRGIPLYTAASPAELVRLAVRLNIRAVIADESHTFADKLADNALWHELNKHGIALTFVNDRAVFGKTDLIPDGGTAHTDFDRYREVWLDRFSKQPPAGPDLFAAYRQPFPENLSAPPPAALSDGIFLPQNSGETAAWRQWRRFLEQADSYSVLKDFPSRKHTSLMGAYLSAGCISPRLLARESLERRLNAWADNIIRRDFFLQLALQHTDDDPSDGNPEHTLRLTLWQQGRTGIPIIDAAMRCLHKTGSLHPALRRLSADFFCHVLNLPRREGEIWFARQLTDFDAAINQGNWRLAASRHTCPDIAAAAHKTDPDGTFVRRHIPELAHLSADTVHTPWRFACSVDTHGYPAHPVAGIP

SEQ ID NO: 8073 - protein, 490 aa, Escherichia coli K12
MSRMAEQQLYIHGGYTSATSGRTFETINPANGNVLATVQAAGREDVDRAVKSAQQGQKIWASMTAMERSRILRRAVDILRERNDELAKLETLDTGKAYSETSTVDIVTGADVLEYYAGLIPALEGSQIPLRETSFVYTRREPLGVVAGIGAWNYPIQIALWKSAPALAAGNAMIFKPSEVTPLTALKLAEIYSEAGLPDGVFNVLPGVGAETGQYLTEHPGIAKVSFTGGVASGKKVMANSAASSLKEVTMELGGKSPLIVFDDADLDLAADIAMMANFFSSGQVCTNGTRVFVPAKCKAAFEQKILARVERIRAGDVFDPQTNFGPLVSFPHRDNVLRYIAKGKEEGARVLCGGDVLKGDGFDNGAWVAPTVFTDCSDDMTIVREEIFGPVMSILTYESEDEVIRRANDTDYGLAAGIVTADLNRAHRVIHQLEAGICWINTWGESPAEMPVGGYKHSGIGRENGVMTLQSYTQVKSIQVEMAKFQSIF

SEQ ID NO: 8074 - protein, 320 aa, Solanum chacoense
MEKNQEAEVMWKRGRTLGQGGFGFVSLACTTHSDDSPLIPSLIAVKSCMLSHSESLEDEIEFLRMCQDCPHVIRSFGVKVTQEDDILLYNLLLEYASAGSLADRLLNNDQLGLPEFQVQNHTKSVLLGLRFIHRKGIIHCDIKPHNILLTSTDDDDAEEVAKIADFGLSLTLEQSWTQTQGMRGTKRYMAPESLLKQEYGPEADIWALGCTVYELITGTPLWESSNSDPEFDDVLHRIMYEEPNLENDKLSTEAKDFMSYCLIKNPKSRWSAGLLLNHSFLKSADSVLPPKKRKRQQVTCPGYRGERKHSGHSHTFVIWL

SEQ ID NO: 8075 - protein, 304 aa, Solanum chacoense
MASIRWSRGRTIGKGAEGTVTLATTHNNFSIAVKSSLFSCSKSLQKEREFLNEFQDCSQIIRCFGADVTEEDNNILYNILLEYAIGGSLAHRIGKKSGLPDFEVKKYSKPILLGLRVVHGKGFVHGDIKPHNILLVGTEKRAKIADFGFASKVGIGSKKRKLRGTPMYMAPESVLDDEYGTPADIWAFGCTVFEMITGKKVWDCTGINDPLHLLCKIGMQSPDLHDDKMSKQAEDFLNKCVDRDPHSRWTADLLLNHPFLSSDNNDVHQRKRKELNLVDLCNSTELKPMKLLTNKRRRKLVERC

SEQ ID NO: 8076 - protein, 213 aa, Volvox carteri f. nagariensis
MSYAYLFKYIIIGDTGVGKSCLLLQFTDKRFQPVHDLTIGVEFGARMINIDGKQIKLQIWDTAGQESFRSITRSYYRGAAGALLVYDITRRETFNHLASWLEDARQHANPNMTIMLIGNKCDLTHRRAVTTEEGEQFAKEHGLIFLETSARTAHNVEEAFINTAKEIYKKIQDGVFDVSNESYGIKVGYGAGNAGPQAAKPGEGDARKSSSCC

SEQ ID NO: 8077 - protein, 436 aa, Triticum aestivum
MPSASSAVPSAAAPGDESQSLAAPKLLLGRYELGGLLGRGASAKVYRARDILTGRDVAIKSFPNPRAGAREGEGSAGSAAIEREAAILSRLRHRHVVRLHEILGTRKKVHFVLDLAAGGELFSLVDSDGRMTEDLARHYFRQLVSAVRYCHSRGVYHRDIKPENLLLDGDGDLKVADFGLGAIADESLHHTLCGTPAYVAPEILSKQGYHPAKVDIWSCGVVLFVLAAGYLPFNDASLINMYRKIYAGRFRCPNWFSPALRHLLRRILDPNPSTRIDTDGIMEHPWFRHGASGDGELEELMRGHEEEAWFKTEFKEDMARDMTAFDILAFSPGSDLSGLFGAGPGTERVFVGEPAAAVLARVEDAGKKQGHRVRREGKGRAGPVYVEAEAGGIVAKVTVFRIADAVSVVEVVKGHGAEAAAFWSDWLEPAVKPQAV

SEQ ID NO: 8078 - protein, 333 aa, Saccharomyces cerevisiae
MSEPSEKKQKVATSSLEQLKKAGTHVVADSGDFEAISKYEPQDSTTNPSLILAASKLEKYARFIDAAVEYGRKHGKTDHEKIENAMDKILVEFGTQILKVVPGRVSTEVDARLSFDKKATVKKALHIIKLYKDAGVPKERVLIKIASTWEGIQAARELEVKHGIHCNMTLLFSFTQAVACAEANVTLISPFVGRIMDFYKALSGKDYTAETDPGVLSVKKIYSYYKRHGYATEVMAASFRNLDELKALAGIDNMTLPLNLLEQLYESTDPIENKLNSESAKEEGVEKVSFINDEPHFRYVLNEDQMATEKLSDGIRKFSADIEALYKLVEEKM

SEQ ID NO: 8079 - protein, 381 aa, Staphylococcus epidermidis ATCC 12228
MLTEKEQDIIKQTVPLLQDKGTEITSIFYPKMFEANPELLNMFNQTNQKKGMQSAALAQAVLAAAMNINNLGAIKPAIMPVAHKHCALQVYPEHYPIVGENLLAAIQDVTGLESDDPVIQTWAKAYGEIADVFIKLEQEIYNHMLWKGFKPFKITNITQETSDIKSFTVESEEYDLSQFEPGQYITVDVSSEKLPYRAKRHYSIIDGDENHLVFGVKRDVTTEHEGEVSTILHDEISEGDMINLSAPVGGFSIENTERPQLFIGSGVGMTPLVSMFKKAASLNVPTQMIQAVVTEDERPFAQKLDSITDNYEQAQLHLHVKDKEGYLEAKELEQYLSEQPEIYICGGTKFLHSIINSLKELNYDMNHVHFETFIPRLSVQV

SEQ ID NO: 8080 - protein, 358 aa, Cordyceps bassiana
MAEFVRAQIFGTTFEITSRYSDLQPVGMGAFGLVCSARDQLTNQNVAVKKIMKPFSTPVLAKRTYRELKLLKHLRHENVISLSDIFISPLEDIYFVTELLGTDLHRLLTSRPLEKQFIQYFLYQIMRGLKYVHSAGVVHRDLKPSNILVNENCDLKICDFGLARIQDPQMTGYVSTRYYRAPEIMLTWQKYDVEVDIWSAGCIFAEMLDGKPLFPGKDHVNQFSIITELLGTPPDDVINTIASENTLRFVKSLPKRERQPLRNKFRNADDSAIDLMERMLVFDPKKRITAAEALSHDYLAPYHDPTDEPVAEEKFDWSFNDADLPVDTWKIMMYSEILDYHNVEAGASGLEDGSVPAQ

SEQ ID NO: 8081 - protein, 467 aa, Listeria monocytogenes str. 1/2a F6854
MLYSEDDKRKQESYRIPLFGSEEESTSIPKYVLKKEPMEPRIAYQLVKDQLMDEGNARQNLATFCQTYMEKEAEILMAETLEKNAIDKSEYPQTAELENRCVNILADLWNAPKDMSYLGTSTVGSSEACMLGGLAMKFRWRNNAEKRGLDIQAKRPNLIISSGYQVCWEKFCVYWDVDMRVVPMDKNHLSLDVDKVFDLVDEYTIGVVGILGITYTGKFDDIQLLDEKVEAYNATNEHQLVIHIDGASGAMFTPFVNPELPWDFRLKNVVSINTSGHKYGLVYPGVGWILWKDKEYLPKELIFEVSYLGGSMPTMAINFSRSASQIIGQYYNFLRYGFEGYREIHEKTKKTALYLAKTVEKSGYFEIINDGANLPIVCYKMKEGLDVEWTLYDLADQLLMKGWQVPAYPLPADLSDTIIQRFVCRADLGYNVAEEFAADFADAIHNLEHARVLYHDKERNDSYGFTH

SEQ ID NO: 8082 - protein, 289 aa, Arabidopsis thaliana
MDKINGLPDDLLVKILSYVPTDIAVSTSILSKRWEFLWMWLPNLDYTSRWCRKPGDVGLRDFIHKNLPLHRAPVIESLRFHSNSPDIKPEDIRRWIEIAVSRHVHDLDIDHFSENENIFLSSFFACKSLVTLKLRSVTLRDIPSMVCLPSLKTLLLDNVSFVEGKSLQELLSICPVLEDLSVYCDDYENTKELTIVVPSLLSLSLYIPDEWLLDGYWIDTPSLEYLKLEDWNSCDHLSLIKNMPKLREAYVDAKCFLPKSVIESITSVKHLTICSKVPFLSTAGCQSKL

SEQ ID NO: 8083 - protein, 298 aa, Arabidopsis thaliana
MGKEVMVSDYGDDDGEDAGGGDEYRIPEWEIGLPNGDDLTPLSQSLVPSILALAFSMIPERSRTIHDVNRASQITLSSLRSSTNASSVMEEVVDRVESSVPGSDPKKQKKSDGGEAAAVEDSTAEEGDSGPEDASGKTSKRPRLVWTPQLHKRFVDVVAHLGIKNAVPKTIMQLMNVEGLTRENVASHLQKYRLYLKRIQGLTTEEDPYSSSDQLFSSTPVPPQSFQDGGGSNGKLGVPVPVPSMVPIPGYGNQMGMQGYYQQYSNHGNESNQYMMQQNKFGKMVTYPSVGGGDVNDK

SEQ ID NO: 8084 - protein, 193 aa, Streptomyces coelicolor A3(2)
MRARPRDPGKIQTAPPSILCMTSAPNTRNDDNLPLDVEIGALQGGAADLSQYAGRVVLVVNVASKCGLTPQYAGLERLHERYAEQGFTVLGVPCNQFMGQEPGSADEIAEFCSATYGVTFPMTGKAEVNGEGRHPLYDRLTGFADAEGHSGDIRWNFEKFLIGRDGKVAARFSPQTEPEAAEVVAAVEERLAG

SEQ ID NO: 8085 - protein, 147 aa, Glycine max
MGDNNIGKVLEREGFKYNFTAAASDTSAQDEVIKEQDRLLPIANVGRIMKQILPPNAKISKEAKETMQECVSEFISFVTGEASDKCHKEKRKTVNGDDICWALATLGFDDYSEPLKRYLHKYREFEGERANQNKGNNNTYENNIANI

SEQ ID NO: 8086 - protein, 494 aa, Neurospora crassa
MAPKLKDPSLFKKDVCYVNGEWVKAHSGKTFEVNATGKLIGTCPEFDAQDTKKAIDAAETAFETFRHKTGRERSKLLRKWYDLMVENHDDLTTLITLENGKPLADAKGEVTYAANFFEWFSEEAPRIYGDTIPSSVPGNRVWTIKEPVGVCGLITPWNFPAAMITRKVGPALAVGCTVVCKAPGETPFTALAIAELAHRAGIPPGVVNVITALENTPEVGSTLTTDPVVRKISFTGSTAVGKLLMKQCSGTLKKLSLELGGNAPFIVFDDADVDAAVTGAIASKFRSSGQTCVCANRIYVQRGIYDEFSQKFAEQVKNNFRVGNGFEEGVTHGPLIHHRAIEKVEQHVRDAEKKGAKVVVGGHRLESLGPNFYEPTVITGMTPDMAMASEETFGPVAGLFPFDTEDEVVKLANATQVGLAGYFFSRDIHRCVRVAEHLEVGMVGINTGLISDPASPFGGVKESGFGREGSLYGIGEYQVTKMVTVGGMGQPLQK

SEQ ID NO: 8087 - protein, 451 aa, Burkholderia cepacia R18194
MTDITTAQQDETNLRTDAAWLDAHWMPFTANRQFKADPRMIVSGKGAYYTDGEGRKIFDGLSGLWCTGLGHGRTEIVEAVSRQVAQLDYAPAFQFGHPKSFELANKIKDLTPAGLDYVFFTGSGSEAADTSLKLARAYWRAKGKGTKTRLIGREKGYHGVNFGGISVGGIGPNRKLFGQGLDADFLPHTQLAENKFSRGMPEHGAELADRLLELIALHDASNIAAVIVEPFSGSAGVVVPPKGYLKRLRDICTAHDILLIFDEVITGFGRAGAMTGADAFGVVPDIMNFAKQVTNGVQPLGGVIATKEIYDTFMAAGGPEYMLEFPHGYTYSAHPVACAAGVAALDLLVKEDAVARVRDLAPHFEAAVHGLKGQRHITDIRNYGLAAGLTIAALPGEPARRPYEIAMRCWAKGFYVRYGGDTIQLAPPFISEKREIDNLVNALSDALNEVD

SEQ ID NO: 8088 - protein, 323 aa, Zea mays
MAAAARQRGTVKWFNDTKGFGFISPEDGSEDLFVHQSSIKSEGFRSLAEGEEVEFSVSEGDDGRTKAVDVTGPDGSFVRGGGGGGGGGGGGYGSRGGGGSGGGGRSYGGSWGGGRRSAPDAAFGSVLSGTAGDAAPSDQWFVDALNAPAPHPIERVRSESSSIVSDVPDYLFSLDSPSDDPSPGPSAARAKSDPAETPHHHGDDVPPSARQIPHVAGGASSWPAPPPPYMAQPMYYFPVPPPVHYLDQSAQSGYMPRPIYHIVGGGGSEAPGGDLHAAGGVYGVSHHMQGFPPMMYAPPRAVIYNYKSEGMPSLPPEGGAHSS

SEQ ID NO: 8089 - protein, 461 aa, Vibrio parahaemolyticus RIMD 2210633
MKSLENTTIEHFKSHFQGDVVLPTDSNYDEVRQIWNGMIDRKPSLIARCKSADDVVMAVNFARDNGQLLSVRGGGHNIAGNAVCDNGVMIDLSLLTQVRVDENAKRAFVEPGCTLGDLDEASQKHGLATPVGINSTTGIAGLTLGGGFGWLSRKYGMTIDNLVSANVVTADGRQLLASETENEDLFWALRGGGGNFGIVTQFEFQLHPVGPEVLSGLIVFPFDQAKSVITQFAKFTESAPEELSVWMVSRKAPPLPFLPESVHGKEVVVLAICYAGDPSEGEKLIAPLRDFGDAHGEHVGVQPFAAWQQAFDPLLTPGARNYWKSHNFNSLSEGVIDAAIEYAGKLPSPQCEIFIASLGCAASRPDPESMAYSSRDANYVLNVHGRWDSAEDDQACIAWARDFFTKTKPYASGGAYINFLTQDEAERTESAYGPTFARLQEVKKKFDPNNLFRMNQNIKPE

SEQ ID NO: 8090 - protein, 512 aa, Oryza sativa
MGLCSSSSARRDAGTPGGGNGAGNKDNAGRKGIVACGKRTDFGYDKDFEARYALGKLLGHGQFGYTFAAVDRRSSERVAVKRIDKNKMVLPVAVEDVKREVKILKALQGHENVVHFYNAFEDDNYVYIVMELCEGGELLDRILAKKDSRYSEKDAAVVVRQMLKVAAECHLHGLVHRDMKPENFLFKSTKEDSSLKATDFGLSDFIRPGKHFRDIVGSAYYVAPEVLKRKSGPESDVWSIGVITYILLCGRRPFWDKTEDGIFKEVLKNKPDFRRKPWPNITPCAKDFVQKLLVKDPRARLTAAQALSHEWVREGGQASDIPLDISVLHNMRQFVKYSRFKQFALRALASTLNAEELSDLRDQFNAIDVDKNGTISLEELKQALAKDVPWRLKGPRVLEIVEAIDSNTDGLVDFEEFVAATLHVHQLVEHDTEKWKSLSQAAFDKFDVDGDGYITSDELRMQTGLKGSIDPLLEEADIDRDGKISLDEFRRLLKTASMSSRNVQTPRSVHRS

SEQ ID NO: 8091 - protein, 168 aa, Triticum aestivum
MAAASSATSVHDFTVKDASGKDVDLSVYKGKVLLIVNVASQCGLTNSNYTELSQLYPKYKDQGFEILAFPCNQFGGQEPGTNDEIVQFACTRFKAEYPIFDKVDVNGNNVSPLYKFLKSSKGGLFGDSIKWNFSKFLVDKEGRVVDRYAPTTSPLSIEKDIKKLLGSS

SEQ ID NO: 8092 - protein, 171 aa, Triticum aestivum
  misc_feature (82)..(82): Xaa can be any naturally occurring amino acid
TRPPKSVNDIHKRGGTVLGSSRGGHDTHKIVDNIQDRGINQVYIIGGDGTQKGAYEIFKEIRRRGLKVAVAGIPKTIDNDIXDKSFGFDTAVEEAQRAIDAAHVEASSAENGIGLVKLMGRYSGFIAMYATLASRDVDCCLIPESPFFLEGEGGLFEYIERRLKENQPHGH

SEQ ID NO: 8093 - protein, 378 aa, Zea mays
SESEAASGRQGEMGKGAQGSDAAAAGGEVEENMAAWLVAKNTLKIMPFKLPPVGPYDVRVRMKAVGICGSDVHYLREMRIAHFVVKEPMVIGHECAGVVEEVGAGVTHLSVGDRVALEPGVSCWRCRHCKGGRYNLCEDMKFFATPPVHGSLANQVVHPADLCFKLPDGVSLEEGAMCEPLSVGVHACRRAGVGPETGVLVVGAGPIGLVSLLAARAFGAPRVVVVDVDDHRLAVARSLGADAAVRVSPRAEDLADEVERIRAAMGSDIDVSLDCAGFSKTMSTALEATRPGGKVCLVGMGHNEMTLPLTAAAAREVDVVGVFRYKDTWPLCIDFLRSGKVDVKPLITHRFGFSQRDVEEAFEVSARGRDAIKVMFNL

SEQ ID NO: 8094 - protein, 238 aa, Glycine max
MTSASELFHTRRHRLGRNALDLGLDTELHAADSLRQLRLRHYYLRRHHPERASDRIDGRYRRSFVSESVDSEENVRSSLRGSSSERLPVGVVLARARLLQRLRGEPLSTNRQYDRDSFGEDRESESSNEDPSGASLVTELTSQMARSQFLQELNTKPPGLTQEALDCLHQEVFSSSGNEIGLESRVLQDCSICLESFTDGDELIRLPCGHKFHSVCLDPWIRCCGDCPYCRRSIVVIN

SEQ ID NO: 8095 - protein, 348 aa, Chloroflexus aurantiacus
MRAVYYEAFGQMPWIATLPDPAPTPDGVVLAVRATGLCRSDWHGWMGHDPDIKLPHVPGHELAGEIVAVGSQVRRWRIGDRVTVPFVCACGFCPQCQAGQQQVCDNQFQPGFTHWGSFAEYVAIDRADLNLVRLPADMSFTTAASLGCRFATAFRAVVDLGQVRGGEWVAVYGCGGVGLSAIMLASALGGQVIGIDINLERLALARAVGATAVIDATTEPDVVSVVRDLSRGGVHLAIDALGSPMTCANAIASLRKRGRHVQVGLLLADQRMPPLPMDIVVARELTIMGSHGMQAYRYDAMLDLIQSGKVQPQRLIGRTISLSEAPAALVDLDSFRGSGVTVITEFQG

SEQ ID NO: 8096 - protein, 408 aa, Bacillus halodurans C-125
MKAIQFDLSIPKYALSKAMGKMNSSLYVESPFSCLQLRDVEKPALPNDHWVEIKVKYGGICGSDLNLIFLNDSPATSPFVSFPFTLGHEMVGTISKARKSVTNLQVGQRVVIDPLLSCEVRGITPVCSECANGNYNLCHHMNDGDIAPGLLTGTCKDTGGSWGRYLVAHQSQVISLPSSVDDDNGVLVEPFACALHAVLQNRPKPSDTVFVIGSGVIGICVIAAIRALEIPCKIVTLAKHPFQAELAKQFGADEIVFLSRKRDYVTAVAESFNANVLHPVFGEPIVHGGADIVYECVGNRKSLHDSLRFARKGGKVVLIGLASFIDNLDMTMIWLNELEVKGSFTYGMEDWQGGKKRTLQIAVDLIADGKVDLSPLITHRFPLEAYREALATAANKKKGQTMKVVFEP

SEQ ID NO: 8097 - protein, 220 aa, Triticum aestivum
  misc_feature (161)..(161): Xaa can be any naturally occurring amino acid
PVPDFPEILKPRFREWGPGALYWVEGYEKPRGPPPSRLYTYIAQPWAPTVMASSATSVAPFQGLKSTAGLPVSRRSNGASLGSVSNGGRIRCMQVWPIEGIKKFETLSYLPPLSTEALLKQVDYLIRSKWVPCLEFSKVGFIFREHNASPGYYDGRYWTMXKLPMFGCTDATQVINEVEEVKKEYPDAYVRIIGFDNMRQVQCVSFIAFKPPGCEESGKA

SEQ ID NO: 8098 - protein, 394 aa, Vibrio cholerae O1 biovar eltor str. N16961
MLTQEHINIIKSTIPLLESAGPALTQHFYQRMFSHNPELKHIFNMTHQKTGRQSVALFEAIAAYAKHIDNLAALTSAVERIAHKHTSFNIQPEHYQIVGHHLLETLRELAPDAFTQPVEEAWTAAYFFLAQVFIDREGALYLERKQALGGWRDGRTFVVREKQVESAYVTSFVLVPADGGAVLDYQPGQYIGIEVTPEGSDYREIRQYSLSHASNGREYRISVKREGVGSDNPGLVSHYLHNNVKVGDSVKLYAPAGDFFYVERERPVVLISAGVGATPMQAILHTLAKQNKSGVTYLYACNSAKEHTFAQETAQLIAQQGWMQQVWYRDESADDVLQGEMQLAELILPIEDGDFYLCGPIGFMQYVVKQLLALGVDKARIHYEVFGPHAQLAA

SEQ ID NO: 8099 - protein, 143 aa, Brassica napus
MSSKKVEGSSAPANRRDPYEVLSVARDATDQEIKSAYRKLALKYHPDKNANNPEASDLFKEVAFSYSILSDPEKRRQYDNAGFEALDADGMEMEIDLSNLGTVNTMFAALFSKLGVPIKTTVSANVLEEAMSRPGPPMFLRRL

SEQ ID NO: 8100 - protein, 227 aa, Eucalyptus occidentalis
MAREKIQIKKITNATARQVTFSKRRRGLFKKAEELSVLCDADVALIVFSSSGKLFEYCSSSMKEILERHHSHSENLGKLDQPSLKLQLVENGDYSRLSKEVAEKGHQLRQMRGEELQGLNIDELQQLEKSLEAGLNRVIEKKGEKIMKEITDLQQKGAKLMEENKRLKQQVTEISGRKTTATDSETIINEEGLSSESITNVCSSSSGPPQEDDSSDISLKLGLPYNG

SEQ ID NO: 8101 - protein, 209 aa, Triticum aestivum
MKTLLILTILAMATTIATANMQVDPSSRVQWPQEQPPPQSQQPFSQQPQQIFPQPQQTFPHQPQQAFLQPQQTFPRRPQQQFPQPQQPQQPFPQPQQPQLPFPQQPQQPFPQPQQPQQPFPQSQQPQQPFPQPQQQFPQPQQPQQSFPQQQQWMIQSFLQQQMNPCKNFLLQQCNPVSLVSSLVSIILPRSDCQLMQATMVANNLAQIP

SEQ ID NO: 8102 - protein, 307 aa, Mycobacterium avium subsp. paratuberculosis str. k10
MSLEPQIAAIIEQLDSGFPPVQQMSGAEARALIRSRLVPPAQPEPVAEVADRLVEGPGGPLRIRVYRPEAAAPLPVVVYAHGGGFVFCDLDSHDGLCRNLANLVPAVVVSVDYRLAPENAWPAAAEDVYAVTCWARDHADALGADPARLVVGGDSAGGNLAAVTTVMCRDRGGPAPAAQLLIYPVIAADFDTESYRLFGQGYYNPAPALRWYWDCYVPSTRDRAHPYATPLNADLRGLPPAVVVVAGHDPLRDEGLAFGAALEAAGVPTVQLRYEGGIHGFMTMPMLDIAHRARNEAAAALADLLQW

SEQ ID NO: 8103 - protein, 489 aa, Bordetella parapertussis 12822
MTQLTQPLSRAELLRDACYIDGKWVGAGNGPSIPVDNPSTGKTIISVPKLGRKEAEQAIDAAEAALPAWSARTGKERAAILLKWAQLTMENQQDLAVIMTSEQGKPVAEAAGEIAYAASFLEWFAEEAKRIDGDILQSPKGGQRLMVLKQPIGVTAAITPWNFPAAMITRKVGPALAAGCTMVVKPAQQTPLTALALAVLAEQAGVPAGVFQVVTGSSREIGAALCESEVVRKLSFTGSTEVGRTLMEQCAPTIKKLSLELGGNAPFIVFDDADLDRAIDGILASKYRNAGQTCVCANRIYVQAGVYEEVAKRLVEKVNAMKVGDGFEQGVTQGPLIDTAAVAKVQEHIADATAHGAKVIAGGQPHALGGSFFQPTVVRDVTQSMRFAVEETFGPVAPLFKFESEDEVIGMANNTIFGLAAYFYTRDYARIWRVSEALEYGIVGINTGIISNEVGPFGGVKQSGLGREGSKYGIEDYLELKYLCVDLGA

SEQ ID NO: 8104 - protein, 183 aa, Zea mays
GVKQEGEYQPEEHPEPGSDYIRAQEARRFMIYVHAKMLIVDDEYIIIGSANINQRSMDGARDSEIAMGAYQPYHLATRQPARGQIHGFRMSLWYEHLGMLDDVFQRPESVECVQKVNKIAEKYWDLYSSDDLEQDLPGHLLSYPIGVTADGTVTELPGMENFPDTRARVLGNKSDYLPPILTT

SEQ ID NO: 8105 - protein, 423 aa, Ehrlichia canis str. Jake
MYINTCAWFNKGYQNIWMPYTQMKNSPLPLSVKSASGCYIILEDGKRLLDGISSWWSVCHGYSHPHIVQKVQDQVAKLSHVMFSGLAHEQSYVLASRLVKISPEQKKVFFSDSGSTAVEVAMKMAVQYHQNLGNKNKYNFVSFVNGYHGDTMGCMSISDPTKIHGTKFKKYHPSQFILPLPSTEEEIKNFANTIYSIRDQVAAVILEPILQAAGGMLIHSANILKKIYDIAKANNILFIADEVATGFGRTGTMFGCNQANIVPDIIVIGKALTGGFCTLAATLTTQEVYDAFLSDNIDDAFMHGPTFMANALACAAANASLDIFESQDLIRNIGLIENQLKSELGVFKQLDCVTDIRVKGATGVIELKDGLIDKHDIINKGVELNIWIRPLNNVIYVMPPFIINSNELTQLITSIYKILKSNI

SEQ ID NO: 8106 - protein, 160 aa, Xylella fastidiosa Ann-1
MNVVRYTPWPGQAVLQNEIKQVFDRFFEHNGDTDESAVVTAQWVPRVDIKEEPNQFVLYADLPGIDPADIEVQMDKGILSIKGERKTESSSQTEHFSRIERRYGSFHRRFALPDSADADGITASGSHGVLRILIPKQAATTPRRIQVGNAVSSDVALQSM

SEQ ID NO: 8107 - protein, 239 aa, Leuconostoc mesenteroides subsp. mesenteroides ATCC 8293
MDNFNMNARRDVTGVDEGMRAFFKQTYSFMGIAVLLTAVTGFIVQNFFLEQVAKLLVGNVIGLLALLGIQMLIITMIGRATFKNPARAFGLLMAFAVVEGLTLGVLLAVYTGASVVMAFVSASAVFGGMAAYGVFTKRDLTGLGSILFGLLIGLLIASIANMFFYSGIVSLLLSWASVVVFSLFTAYDNQNLKVMYSQFAGQADTTGLAVNGALRLYLDFVNIFFALLRIFGVVSGSRD

SEQ ID NO: 8108 - protein, 379 aa, Methanococcoides burtonii DSM 6242
MEENGKTKEEILLFLKKAKSADASYERVLSSMCTYPHEIAVLAHTQFIESNMGDPGLFPGTFNLEKQVLAMFGKMLHHKNSPEKAGYLTTGGTESNIQAIRSMHNFRHDISRPNIVMPESAHFSFDKVANLSGIEIRKASLDKLLKVDLDSVRSLIDKNTIGLVGIAGTTEFGQLDPINELSKIAIEKGIFLHIDAAFGGFVIPFMDIDYTYDFRLEGVTSMTIDPHKMALSTIPSGGLLFKEPEYFECLEIHTPYLSVNKQYSLTGTRSGAGVASTYAVMKHLGRKGYKKVVSDCMSVTKKLVDGAEKLGINTVIDPVLNIVALDVPEADLVRKKLLDEYGWHVSITRNPRALRIVIMPHIKNETIELFLKDLAKVIK

SEQ ID NO: 8109 - protein, 419 aa, Thermotoga maritima MSB8
MAERLGILVGGGPAPGINSVISSVTIEAINNGLEVIGIYDGFKHLVEGKTNMVKKLSIEDVSRIHIEGGSILRTSRVNPAKSEETLEKTVQTLKKLGIKYLVTIGGDDTAFSASKVCERSKGEIKVVHVPKTIDNDLPLPENMPTFGFETARHVATELVYNLMQDSRTTNRWYFVAMMGREAGHLALGVGKAASATITIIPEEFKEGVTLEEVCDVLDGAILKRKLMGRDDGVAVIGEGIAEKMDPEELANIPGVIVEKDPHGHLRLAEIPLATILKRAIERRYAERGERIHIVDVTIGYELRSARPIPFDIVYTRTLGYGAVRFLLGDYSDLPGGMVCVVGGRIKILPFDAFMDPKTGRTKVRVVDVRSEDYRVARKYMIRLEKKDLEDPETLEKLAKLAKMEPEEFKKKYWHTTELP

SEQ ID NO: 8110 - protein, 367 aa, Thermotoga maritima MSB8
MIQKGLEGVKICESSICYLDGINGRLYYRGIPVEELAEKSTFEETAYFLWYGKLPTKSELEEFKRKMADYRELPAEALGILYHLPKNLHYIDVLKIFLSIHGSMDGNDEDLREKAIRVASVFPTILAYYYRYSKGKELIRPRKDLSHVENFYYMMFGERNEKIRLLESAFILLMEQDINASTFAALVIASTLSDLYSCIVGALGALKGPLHGGASEKVPPMLEEIGSEDRVEEFVQKCLKEKRKIMGFGHRVYKTYDPRAVFLKRVLQEHFPDSKLFRIASKLEEYIVSNKIKNIYPNVDLYSSVLFEELGFPRNMFTALFATARVVGWTAHVIEYVSDNKLIRPTSEYVGPMDVEYIPIERRDENG

SEQ ID NO: 8111 - protein, 496 aa, Nicotiana tabacum
MVLSKTASESDVSIHSTFASRYVRTSLPRFKMPENSIPKEAAYQIINDELMLDGNPRLNLASFVTTWMEPECNKLMMDSINKNYVDMDEYPVTTELQNRCVNMIAHLFNAPLGDGETAVGVGTVGSSEAIMLAGLAFKRKWQNKMKAQGKPCDKPNIVTGANVQVCWEKFARYFEVELKEVKLSDGYYVMDPEKAVEMVDENTICVAAILGSTLNGEFEDVKRLNDLLIEKNKETGWDTPIHVDAASGEFIAPFLYPELEWDFRLPLVKSINVSGHKYGLVYAGIGWAIWRNKEDLPDELIFHINYLGADQPTFTLNFSKGSSQVIAQYYQLIRLGFEGYKNVMENCQENARVLREGLEKSGRFNIISKEIGVPLVAFSLKDNSQHNEFEISETLRRFGWIIPAYTMPPNAQHVTVLRVVIREDFSRTLAERLVIDIEKVLHELDTLPARVNAKLAVAEANGSGVHKKTDREVQLEITTAWKKFVADKKKKTNGVC

SEQ ID NO: 8112 - protein, 279 aa, Caulobacter crescentus CB15
MSKLVPAVRSGDVLMPALGFGTWQLENGTAVPLVEKALEIGYRHIDTAQIYGNERDVGAAIRNSGVKRDEIFLTTKVWIDQFADGDLQRSAEKSLEKLGVDQVDLLLLHWPKPEVPLAETLKALNAVRAKGWTRAIGLSNFPSAQLEEAAKLSEAPIATDQVEYHPYLSLKTLKAKADQLGVSITAWSPLAQGKVAQDPVLIEIGRAHGKTPGQVTLRWIIQQGIIAIPRTSNPKRIEENFDILDFELSEKEMAQIHGLARPDGRIGDWIDRAYAWDAE

SEQ ID NO: 8113 - protein, 519 aa, Triticum aestivum
  misc_feature (140)..(140): Xaa can be any naturally occurring amino acid
MGNRTSRHRRAAADQPATAPPPTAQPKPQPPPKPQTAPAPAPTPEAGQVAMGRVLGRPMEDVRATYTFGRELGRGQFGVTYLVTHKATGQRFACKSIATRKLVHRDDIEDVQREVQIMHHLTGHRNIVELRGAYEDRHSXVNLIMELCEGGELFDRIIARGHYSERAAALLCREMVSVVHSCHSMGVFHRDLKPENFLFLNNKEDSPLKATDFGLSVFFKHGEQFKDLVGSAYYVAPEVLKRHYGAEADIWSAGIILYILLSGVPPFWADNEDGIFEAVLLGHIDFSSDPWPSISNGAKDLVKKMLRQDPKERLTAAEILNHPWIREDGEAPDKPLDITVISRMKQFRAMNKLKKVALKIVAESLSEEEIAGLREMFRSLDTDNSGTITLEELRSGLPKLGTKISESEITQLMEAADVDGNGTIDYSEFVSATMHMNRLEKEDHILKAFEYFDKDHSGYITVDELEEALKKYDMGDDKTIKDIIAEVDTDHDGRINYQEFVAMMRNNSPEIVPNRRRMF

SEQ ID NO: 8114 - protein, 514 aa, Glycine max
  misc_feature (80)..(80): Xaa can be any naturally occurring amino acid
  misc_feature (89)..(89): Xaa can be any naturally occurring amino acid
  misc_feature (295)..(295): Xaa can be any naturally occurring amino acid
MLSQKQGEDAIITNLNHTEHEDGSKISRDEEEQDHSMFNFKSLLWHGGSVWDAWFSCASNQVAQVLLTLPCSFSSSRIGXAQLGMVSGXILLQIFYGLIGSWTAYLVSVLYIEYRTRKEKENVSFKNHVIQWFEVLDGLLGRYWKAVGLAFNCTFLLFGSVIQLIACASNIYYINDKLYKRTWTYIFGACCAFTVFIPSFHNYRIWSFLGLGMTTYTAWYLAIAAILHGQVENVTHSGPTKLILYFTGATNILYTFGGHAVTVEIMHAMWQPRKFKSIYFLATLYVFTLTIPSAXAVYWSFGDQLLDHSNAFSLLPKNVFRDAAVILMLIHQFITFGFACTPLYFVWEKVIGMHDTKSIWLRALARFPVVLPIWFLAIIFPFFGPINSAVGSLLVSFTVYIIPALAHMLTYRNASARQNAAEKPPFFMPSWTAMYVFNAFIIGWVLVVGFGLGGWASMINLINQIDTFGLFAKCYQCPEPPPPAGAPPPLTHPVVEGGVDLVEPWAPPNLLKII

SEQ ID NO: 8115 - protein, 352 aa, Acinetobacter sp. NCIMB9871
MHCYCVTHHGQPLEDVEKEIPQPKGTEVLLHVKAAGLCHTDLHLWEGYYDLGGGKRLSLADRGLKPPLTLSHEITGQVVAVGPDAESVKVGMVSLVHPWIGCGECNYCKRGEENLCAKPQQLGIAKPGGFAEYIIVPHPRYLVDIAGLDLAEAAPLACAGVTTYSALKKFGDLIQSEPVVIIGAGGLGLMALELLKAMQAKGAIVVDIDDSKLEAARAAGALSVINSRSEDAAQQLIQATDGGARLILDLVGSNPTLSLALASAARGGHIVICGLMGGEIKLSIPVIPMRPLTIQGSYVGTVEELRELVELVKETHMSAIPVKKLPISQINSAFGDLKDGNVIGRIVLMHEN

SEQ ID NO: 8116 - protein, 280 aa, Triticum aestivum
MENDGVPNGPAAPAPTQGTPVVREQDRLMPIANVIRIMRRALPAHAKISDDAKEAIQECVSEFISFVTGEANERCRMQHRKTVNAEDIVWALNRLGFDDYVVPLSVFLHRMRDPEAGTGGAAAGDSRAVTSAPPRAAPPVIHAVPLQAQRPMYAPPAPLQVENQMQRPVYAPPAPVQVQMQRGIYGPRAPVHGYAVGMAPVRANVGGQYQVFGGEGVMAQQYYGYGYEEGAYGAGSSNGGAAIGDEESSSNGVPAPGEGMGEPEPEPAAEESHDKPVQSG

SEQ ID NO: 8117 - protein, 365 aa, Prunus dulcis
MGSTGETQMTPTQVSDEEANLFAMQLASASVLPMVLKAAIELDLLEIMAKAGPGVFLSPTDIASQLPTKNPDAPVMLDRMLRLLASYSILTYSLRTLADGKVERLYGLGPVCKFLTKNEEGVSIAPLCLMNQDKVLLESWYHLKDAVLEGGIPFNKAYGMTAFEYHGTDPRFNKVFNRGMADHSTITMKKILETYKGFEGLTSVVDVGGGTGAVLNMIVSKYPSIKGINFDLPHVIEDAPQYPGVEHVGGDMFVSVPKGDAIFMKWICHDWSDEHCLKFLKNCYAALPDNGKVILGECILPVAPDSSLATKGVVHIDVIMLAHNPGGKERTEQEFQALAKGAGFQGFNVACSAFNTYVIEFLKKN

SEQ ID NO: 8118 - protein, 416 aa, Zea mays
MGNICGGSGKDRVAEDFRPSSPGTTMTSKTSGSITTSLSTTGKLSSVGSSFMASAGSRSTSGGFDEGAKYSDGQILEAPNLRTFTFIELKTATKSFRPDSVLGEGGFGRVYKGWVDEKTMAPTRNGTGMVVAVKKLNSESMQGFEEWQSEINFLGRLSHPNLVKLLGYCWEDRELLLVYEFMAKGSLENHLFRRGCAPLSWELRLKIAIGAARGLAFLHASEKQVIYRDFKASNILLDANYNAKLSDFGLAKLGPTGSKSHITTRVMGTYGYAAPEYVATGHLYVKSDVYGFGVVMLEMLSGQRALDPNRPNGQLSLADWAKPFLADRRRLARLMDPRFEGQYNSKQAFQAAQLTLNCLAGEPRSRPSMKEVVETLEQIESVKSRAREARGGSSRDRHHGRAGAAHQRSPRAGGEP

SEQ ID NO: 8119 - protein, 411 aa, Oryza sativa (japonica cultivar-group)
MLACIACSTKDGGEGGHRSATATPNSGKSLTSQLKDMVLKFSGSGRHQYKSGGSPSLRTSRFHRSSRLAAYPGIIDESGFTSDGAGEAYTYMRTTTASAGARAAPSTWDLPPKVNHRSFQPRVIRSPSASGVPSIGEEDYDDDDDDDDEETVLLEEDRVPREWTAQVEPGVQITFVSIPGGAGNDLKRIRFSREMFNKWEAQRWWGENYDRVVELYNVQTFSRQQGFSTPTSSVDEAMQRDSFYSRVGSTRESPAMMMPPPPPLPSSGAGREHPISRTASSKAQLSSSSSVAAARPPFYPSTAVPDPSDHVWAHHFNLLNSAAAGPAAPYDPSRGTTSSRDEASVSISNASDLEATEWVEQDEPGVSITIREFGDGTRELRRVRFSRERFGEERAKVWWEQNRDRIHAQYL

SEQ ID NO: 8120 - protein, 368 aa, Nostoc punctiforme PCC 73102
MTTNVTSSIVERGKTNVKAQVFRGVNQLSYEDIPVPTVEPDEVLVQVRVVGLCQSDIKKIRYPLYEPPRIFGHETAGTIAAIGNNVKGWQVGQRVAVMHHIPCMRCAYCLNDNFSMCDVYKNISTTAGFNASGGGFADYVKVPGHIVENGGLIPIPDNISFEEASFVEPTNCCLKAVRKAQIAPGQTVLVTGAGPIGLMFIMLVKYFGAKAIATDLLPSRIDKALSVGAEAAFDARDPDLPAKISALTGGLGVDVTLLAVPSEKAFFQALDSTRKGGKILFFAEFPDEVEIPINPNILYRREIDLIGSYSSSYRLQNLSADIVFNQRIDVKALISDRYPLKDLSAAVEQAIAPTPDTYKILIYPQKED

SEQ ID NO: 8121 - protein, 122 aa, Triticum aestivum
  misc_feature (68)..(68): Xaa can be any naturally occurring amino acid
  misc_feature (79)..(79): Xaa can be any naturally occurring amino acid
  misc_feature (91)..(91): Xaa can be any naturally occurring amino acid
  misc_feature (110)..(110): Xaa can be any naturally occurring amino acid
  misc_feature (115)..(115): Xaa can be any naturally occurring amino acid
MAPTVMASSATSVAPFQGLKSTAGLPVSRRSNGASLGSVSNGGRIRCMQVWPIEGIKKFETLSYLPTXSTTEALLKQVXYLIRSKWVPCLXFNKVGFIFREHNASPWVLXWPYWXMWKLLSG

SEQ ID NO: 8122 - protein, 484 aa, Medicago truncatula
MLPQKQGEEAIVSSFNETDQQEGVVGREEEVEDHSFSVKNFLWHGGSVWDAWFSCASNQVAQVLLTLPYSFSQLGMLSGILLQVFYGILGSWTAYLISVLYVEYRSRKEKENVNFKNHVIQWFEVLDGLLGPYWKALGLAFNCTFLLFGSVIQLIACASNIYYINDNLDKRTWTYIFGACCATTVFIPSFHNYRIWSFLGLGMTTYTAWYLTIASIVHGQAENVTHTGPKKLVLYFTGATNILYTFGGHAVTVEIMHAMWKPQKFKYIYLMATLYVFTLTIPSATAVYWAFGDELLNHSNAFSLLPKNGWRDGAVILMLIHQFITFGFACTPLYFVWEKVIGMHDTRSICLRALARLPVVIPIWFLAIIFPFFGPINSAVGALLVSFTVYIIPSAAHMLTYRKASARKNAAEKPPFFMPSWTAMYIFNAFIVIWVLVVGFGFGGWASMTNFIRQIDTFGLFAKCYQCKPPPVMAAAPPPHALHH

SEQ ID NO: 8123 - protein, 446 aa, Fusobacterium nucleatum subsp. vincentii ATCC 49256
MISNLSELQKKDLKYVFHPCAQMKDFEENPPLVITKGDGIYLIDENGNRYMDCISSWWVNLFGHCNKRINKVITEQVNTLEHVIFANFAHEPAAELCEELTKVLPKGINKFLFSDNGSSCIEMALKLSFQYHLQTGNPQKTKFISLENAYHGETIGALGVGDVDIFTETYRPLIKEGRKVRVPYINSKLSDEEFTKLEDECIKELEDLIKKKHNEIACMIVEPMVQGAAGIKIYSARFLKAARDLTKKYNIHLIDDEIAMGFGRTGKMFACEHAGIEPDMMCIAKGLSSGYYPIAMLCITTDIFNAFYADYKEGKSFLHSHTYSGNPLGCRIALEVLKIFKDDDVLRTINKKGTHLKNKMEEIFKDKSYIKDIRNIGLIGAIELKDNLLPNVRIGREIYNLALKKGIFVRPIANSVYFMPPYIITYEEINKMLQVCKESIEEILKI

SEQ ID NO: 8124 - protein, 289 aa, Arabidopsis thaliana
MSLFNTENTWAFVFGLLGNLISFAVFLSPVPTFYRIWKKKTTEGFQSIPYVVALFSATLWLYYATQKKDVFLLVTINAFGCFIETIYISMFLAYAPKPARMLTVKMLLLMNFGGFCAILLLCQFLVKGATRAKIIGGICVGFSVCVFAAPLSIIRTVIKTRSVEYMPFSLSLTLTISAVIWLLYGLALKDIYVAFPNVLGFALGALQMILYVVYKYCKTSPHLGEKEVEAAKLPEVSLDMLKLGTVSSPEPISVVRQANKCTCGNDRRAEIEDGQTPKHGKQSSSAAAT

SEQ ID NO: 8125 - protein, 147 aa, Funaria hygrometrica
MDFPLFQILSFPDELEKSLNPQSQKYVRDTKAMVSTAVDVKELPDAYIFVADMPGLKSADVKVQLENDNVLVIGGTRKREEPDPKVKYIRMERNSGSFMRKFTLPQNSNLDKIAASCVNGILTVTVPKIPPPEPAKPRTIEVTMGNQ

SEQ ID NO: 8126 - protein, 161 aa, Funaria hygrometrica
MDFVVFDTDPFLTTLHQLVHEPGSDLERKIKRQRRNHHDEPRHVTIATPVDVKEIKDAYLFVADVPGLQKTDIEVQVENENVLTMRGKRKLDEKVNEKEEDTKFIRMERSPVKLLRKFTLPSDANADAITANCVDGVLTVTVPKIPPPEPAKSKTVQIAVD

SEQ ID NO: 8127 - protein, 482 aa, Medicago truncatula
MLSQNQAEEAIVTNMNETEQEGGSSLEEIAEDQSMFNFKSFLWHGGSVWDAWFSCASNQVAQVLLTLPYSFSQLGMVSGIVFQIFYGLIGSWTAYLISVLYVEYRARKEKENVNFKNHVIQWFEVLDGLLGRYWKALGLAFNCTFLLFGSVIQLIACASNIYYINDKLDKRTWTYIFGACCATTVFIPSFHNYRIWSFLGLGMTTYTAWYMAIAAIVNGQIENVVHSGPTKLVLYFTGATNILYTFGGHAVTVEIMHAMWKPQKFKYIYFLATLYVFTLTIPSAVAVYWAFGDELLNHSNAFSLLPKNGFRDAAVILMLIHQFITFGFACTPLYFVWEKVIGMHDTKSICLRALVRLPVVIPIWFLAIIFPFFGPINSAVGALLVTFTVYIIPALAHMLTYRTASARKNAVEKPPSFLPSWTAVYVLNAFIVVWVLVVGFGFGGWASMTNFIRQIDTFGLFAKCYQCKPPTPPQAPSPHARH

SEQ ID NO: 8128 - protein, 113 aa, Zea mays
RVHDFASSSREKAEIEELRKEVREARRIKMLHQPSKVMDMEFELQALRTLISEKTQLCNQLKKELAMIKRLEDDSSGLFELEGSNTLGSQLCIIPRVDGASNRWPKRPKHLMK

SEQ ID NO: 8129 - protein, 434 aa, Nostoc punctiforme PCC 73102
MTELLQKVRVIDPVSEIDEIFDVLIADGHIKEVASHIADIHPNTQIRDCQGLVLGPGLVDLYSHSGEPGFEERETLLSFLQAATAGGFTRVSILPDTSPAIDNPALVAQLQQKRAEGQRGRGVEENLSPLLPCSPAPLLHIWGAITLDVAGNQMTELADLASAGVVGFSDGKPFENLALVRRVLEYLQPLGKPVAFWPSDRQLTANGVMREGPDALRFGLPPIPASAETTAIAAMLELVAAIGTPVHIMRVSTSRSVELIASAKAAGLPITASTTWMHLLLDTKAVKSYHTSLHLDPPLGNPRDVAALRAGVRAGAIDAIAIDHTPYSYEEKVQAFAEAPPGAIGLELALPLLWQYLVETEEFTALELWRALSIRPAKCLGQEVSAIVPHQPAELTLFDPQKIWNVERKSLYTLSQNTPWLGQQLKGHVVQTWC

SEQ ID NO: 8130 - protein, 379 aa, Neurospora crassa
MLALRSIAAPAQRQAFRAAPRAVSVSFQNRFYSSRVAQFTGQKDASGKYTVSLIEGDGIGPEIAVAVKDIFAAAQTPINWEPINVDPILKDGKTAIPDAAIESIRRNKIALKGPLATPIGKGHVSLNLTLRRTFNLFANLRPCRSVAGFKTPYDGVDTVLIRENTEGEYSGIEHVVVDGVVQSIKLITREASERVLRYAFEQARAINRKKVRVVHKATIMKMSDGLFLNTAREVAQDFPDIEFDAELLDNTCLKMTTDPTPYNDKVLVMPNLYGDILSDMCAGLIGGLGLTPSGNIGDECSIFEAVHGSAPDIAGKGLANPTALLLSSMMMLRHMGLNEYADKIEKAAFDTLAEGKVLTGDLGGKASTKDFTSAIIDRL

SEQ ID NO: 8131 - protein, 253 aa, Haloarcula marismortui ATCC 43049
MDLPPVGLGTMGIEDEAVVRTAIDCGYRHLDTAQIYDNESTVGAGIAAADTDRADLTVATKLWIDALEATAVRPATEASLDRLGLDAVDLLYVHRPRGDYDPETTLPAVEAVREAGLTAHVGLSNFDPDQLVVAREFLDKIAAHQVEFHPLFWRESLLTDAQKHDYPLVAYAPLAGGRVFEEPTILNIAAQHETTPAAVSIAWVTSYENVVTIPKASSQSHLEANLAAADLELTDAEIARIEAIEREEELFPE

SEQ ID NO: 8132 - protein, 117 aa, Legionella pneumophila
MLDFSLNRDPQTGELYIETSLCGKPLLTTPQLNKGTAFTQEERKDFGLLGKLPHRVETLDEQVKRAYLQYSSYTTRLQQHIYLNNLHDKNQIVFYKLLSRHLGEMLPIIYTPIVGAA

SEQ ID NO: 8133 - protein, 295 aa, Brassica napus
  misc_feature (195)..(195): Xaa can be any naturally occurring amino acid
MNRGIEVMSPATYLETSPNWLFQENRGTKWTAEENKKFENALAFYDKDTPDRWFKVAAMLPGKTVGDVIKQYRELEEDVSDIEAGLIPIPGYASDSFTLDWGGYDADNMNGYYFAAVGGKRGSAARAAEHERKKGVPWTEEEHRQFLMGLKKKGKGGRRNIARNFVTTRTPTQVASHAQKYFIRQVNGGKDKRRXSSIHDITTVNIPDSFDAAAADTAITNAPCSPPSLGGSQREGSGQWDGQTINDETAGTFYNPNAFQETLLGMSSTPYMAKLQEQSFLNASQFESYNAYLQM

SEQ ID NO: 8134 - protein, 223 aa, Zea mays
  misc_feature (44)..(44): Xaa can be any naturally occurring amino acid
NIPVILTGGFPCVHYRQEGIAHEVLQGYLCPMEGWFAPDANSIXLQGWDQEVLFPGGHGLMVRGYRPVINTLAKGLDIRLNHKVLEIVRHRNRVEVTVSSGQTFVADAAVVTVPLGVLKVKTIRFEPRLPEWKEEAIRELTVGVENKIVLHFGQVFWPNVEFLGVVSSSTYGCSYFLNLHKATGPPVLVYMPAGRLARDIEKMSDEAAAQFAFSQLKKILPTA

SEQ ID NO: 8135 - protein, 275 aa, Bacillus subtilis
SELWYTEKQTKNFGITMKVNKTLHTEQTEFQHLEMVETEEFGNMLFLDGMVMTSEKDEFVYHEMVAHVPLFTHPNPEHVLVVGGGDGGVIREILKHPSVKKATLVDIDGKVIEYSKKFLPSIAGKLDDPRVDVQVDDGFMHIAKSENQYDVIMVDSTEPVGPAVNLFTKGFYAGIAKALKEDGIFVAQTDNPWFTPELITNVQRDVKEIFPITKLYTANIPTYPSGLWTFTIGSKKYDPLAVEDSRFFDIETKYYTKDIHKAAFVLPKFVSDLIK

SEQ ID NO: 8136 - protein, 218 aa, Thermotoga maritima MSB8
MKIFLDTANLEEIKKGVEWGIVDGVTTNPTLISKEGAEFKQRVKEICDLVKGPVSAEVVSLDYEGMVREARELAQISEYVVIKIPMTPDGIKAVKTLSAEGIKTNVTLVFSPAQAILAAKAGATYVSPFVGRMDDLSNDGMRMLGEIVEIYNNYGFETEIIAASIRHPMHVVEAALMGVDIVTMPFAVLEKLFKHPMTDLGIERFMEDWKKYLENLKK

SEQ ID NO: 8137 - protein, 441 aa, Geobacter sulfurreducens PCA
MALKETLKQKIEEHRPRTTRLVKEFGKVIIDQVTIDQCIGGARDIRCLVTDISYLDPQEGIRFRGKTIPETFEALPKAAGSDYPTVESFWYFLLTGEVPTQAQVDEVVAEWKVRQEVPQYVFDAIRALPRDSHPMVMLSVGILALQKDSKFAGFYNSGKFNKMTAWEYVYEDAYDLVARIPVIAAFIYNLKYKGDKQLPIDPSADCGANFARMIGQCKEYEDVARMYFILHSDHESGNVSAHTTHLVHSALSDPYYAYSAGLNGLAGPLHGLANQEVLDWTIKFQEKYCKDVEPTKELVTKALWDTLNAGQVVPGYGHAVLRKTDPRYTSQREFCLKTPGLKDDPLFKLVAMIFETAPGVLMEHGKAKNPWPNVDAQSGVIQWYYGLREWDFYTVLFGVGRALGCMANITWDRGLGYAIERPKSVTTPMLEKWAEEGGRKF

SEQ ID NO: 8138 - protein, 128 aa, Glycine max
  misc_feature (13)..(13): Xaa can be any naturally occurring amino acid
  misc_feature (64)..(64): Xaa can be any naturally occurring amino acid
  misc_feature (117)..(118): Xaa can be any naturally occurring amino acid
MGERVKGTVKWFXVTKGFGFISPEDGSEDLFVHQSAIKSDGYRSLNENDTVEFEVITGDDGRTXASDVTAPGGGALSGGSRPGDGGGDRGGRGGYGGGGYGGGGGGGGYGGGGGGYXXGGGGYGGGGG

SEQ ID NO: 8139 - protein, 205 aa, Triticum aestivum
  misc_feature (84)..(84): Xaa can be any naturally occurring amino acid
  misc_feature (91)..(91): Xaa can be any naturally occurring amino acid
MPESDNDSGGPSNTGGEGELSSPREQDRFLPIANVSRIMKKALPANAKISKDAKETVQECVSEFISFITGEASDKCQREKRKTXNGDHASXLLWAMTTLGFEDYVDPLKHYLHKFREIEGERAAATSTSTSTTPDMPRNNNNNATGYADAPGGMMMMGQPMYGSPPPPQQQQQHQHQIAMGGRAGFPYLGGGGGSSSSSGFGRKE

SEQ ID NO: 8140 - protein, 193 aa, Monacrosporium haptotylum
MADIRRKLVIVGDGACGKTCLLIVFSKGTFPEVYVPTVFENYVADVEVDGEHVELALWDTAGQEDYDRLRPLSYPDSHVILICFAIDSPDSLDNVQEKWISEVLHFCQGLPIILVGCKKDLRFDSKTMEELRKTSQKPVTPEEGEQVRGKIGAAKYLECSAKTNDGVREVFEHATRAALTTFKKKKSSKCSIL

SEQ ID NO: 8141 - protein, 134 aa, Zea mays
  misc_feature (22)..(22): Xaa can be any naturally occurring amino acid
  misc_feature (109)..(109): Xaa can be any naturally occurring amino acid
TLPRPLGTRKRFLFLNRRAITXTGVLNAWAGYFGNKGIKVVFSNGQLALVPMKLGGMAKSVPFVATPKGRGRGLFPRPVRAGIVGFPNVGKFSLINRLLKRKMCPAEPXRPGLTGKLKWFRFGTDLKLLDSPGI

SEQ ID NO: 8142 - protein, 194 aa, Monacrosporium haptotylum
MTTQSLKCVVTGDGAVGKTCLLISYTTNAFPGEYIPTVFDNYSASVMVDGKPISLGLWDTAGQEDYDRLRPLSYPQTDVFLICFSLVSPPSFENVKTKWFPEISHHAPNVPIILVGTKLDLRDDPKIQQSLKDKKMAPIQFTNGVAIAKDIGAVKYLECSALTQKGLKNVFDEAIRAVLSPPPKPTKSKKCTIL

SEQ ID NO: 8143 - protein, 357 aa, Lycopersicon esculentum
MKKGSFAPNLKLSLPPPDEVALSKFLTESGTFKDGDLLVNRDGVRIVSQSEVAAPSVIQPSDNQLCLADFEAVKVIGKGNGGIVRLVQHKWTGQFFALKVIQMNIDESMRKHIAQELRINQSSQCPYVVICYQSFFDNGAISLILEYMDGGSLADFLKKVKTIPERFLAVICKQVLKGLWYLHHEKHIIHRDLKPSNLLINHRGDVKITDFGVSAVLASTSGLANTFVGTYNYMSPERISGGAYDYKSDIWSLGLVLLECATGHFPYKPPEGDEGWVNVYELMETIVDQPEPCAPPDQFSPQFCSFISACVQKHQKDRLSANDLMSHPFITMYDDQDIDLGSYFTSAGPPLATLTEL

SEQ ID NO: 8144 - protein, 62 aa, Glycine max
  misc_feature (8)..(8): Xaa can be any naturally occurring amino acid
  misc_feature (20)..(20): Xaa can be any naturally occurring amino acid
  misc_feature (29)..(29): Xaa can be any naturally occurring amino acid
GSVWISSXLKGLNDDCEHFXCFPPVHLFXSYKEGFLHSTIPPWFYNATPYTPYYPLLLIHTF

SEQ ID NO: 8145 - protein, 450 aa, Bacillus anthracis str. Ames 0581
MMKTKQTDELLAKDEQYVWHGMRPFSPNSTMVGAKAEGCWVEDIQGKRYLDGMSGLWCVNSGYGRKELAEAAYKQLQTLSYFPMSQSHEPAIKLAEKLNEWLGGEYVIFFSNSGSEANETAFKIARQYYAQKGEPHRYKFMSRYRGYHGNTMATMAATGQAQRRYQYEPFASGFLHVTPPDCYRMPGIERENIYDVECVKEVDRVMTWELSETIAAFIMEPIITGGGILMPPQDYMKAVHETCQKHGALLISDEVICGFGRTGKAFGFMNYDVKPDIITMAKGITSAYLPLSATAVKREIYEAFKGKGEYEFFRHINTFGGNPAACALALKNLEIIENENLIERSAQMGSLLLEQLKEEIGEHPLVGDIRGKGLLVGIELVNDKETKEPIDNDKIASVVNACKEKGLIIGRNGMTTAGYNNILTLAPPLVISSEEIAFVIGTLKTAMERI

SEQ ID NO: 8146 - protein, 320 aa, Vibrio parahaemolyticus RIMD 2210633
MIKKIGVLTSGGDAPGMNAAIRGVVRTALSEGLEVFGVYDGYLGLYEGRIEKLDRSSVSDVINKGGTFLGSARFPEFKQVEVREKAIENLKKHGIDALVVIGGDGSYMGAKKLTEMGYPCIGLPGTIDNDIAGTDYTVGYLSALNTVIDAIDRLRDTSSSHQRISIVEIMGRHCGDLTLMSAIAGGCEYIITPETGLDKDKLISNIQDGIAKGKKHAIIALTELMMDANELARDIEAATGRETRATVLGHIQRGGRPTAFDRVLASRMGNYAVHLLLEGHGGRCVGIVKEQLVHHDIIDAIENMKRPVRNDLYKVAEELF

SEQ ID NO: 8147 - protein, 130 aa, Cyanidium caldarium
MDKIDEIVEKIKLLSLLEASELVKRIEDTFQVNVSNIQPVTGLSSNLTTTQQTPESAEVKEKWDVILENVPADKKIAILKVVRSITGLGLKEAKEFVESVPKIIKQSISQADAEHIKQQIEDAGASVVLK

SEQ ID NO: 8148 - protein, 512 aa, Ralstonia eutropha JMP134
MQGADTPAHARPPYRIDHQFDRGLVWFRRDLRSTDHAALHYALKHCREVWCVFVFDRDILDPLLARGLKGDRRVDFIRASLIELDATLRAAGGGLIVMNDSAASAIPALARELGVQAVFANHDYEPDAVARDAAVRDSLAGDARVLFTFKDQVIFERDEILTSQGKPFAVFTPYKNAWLKTIQPFDLRPYPIEPYLHALAPLPSKRLVPLPSLEDLGFAPSNLAEVAMPTGSSGGQALFEEFTSRMGDYGRRRDYPALRGPSYLSVHLRFGTVSIRTLARAAHGAVLRGGADSAGAATWLSELVWRDFYFMILHHHPRVAAGEAFHPAYDIIRWRDGETGDRYFESWRDAATGYPLVDAAMLQIRQSGYMHNRLRMVTASFLVKDLGVDWRRGEHYFADQLNDFDFAANNGGWQWAASTGCDAQPWFRIFNPVTQSEKFDPQGRFIRKYLPQLAALPDKYVHAPWTAPQDVLLAAGVRLGENYPRPLVQHDVARKETLERYAVVKEWRRPEG

SEQ ID NO: 8149 - protein, 326 aa, Glycine max
MDQALLDDIINRLLEVRSRPGKQVQLSESEIRHLCAASREIFLQQPNLLELEAPIKICGDVHGQYSDLLRLFEYGGLPPEANYLFLGDYVDRGKQSLETICLLLAYKIKYPENFFLLRGNHECASINRIYGFYDECKRRFNVRLWKTFTECFNCLPVAALIDEKILCMHGGLSPDILNLDQIRNLQRPTDVPDTGLLCDLLWSDPSKEVQGWGMNDRGVSYTFGADKVSEFLQKHDLDLICRAHQVVEDGYEFFANRQLVTIFSAPNYCGEFDNAGAMMSVDETLMCSFQILKPADKKAKLNFGSTTTTKPGNSPAGIKSFLGTKV

SEQ ID NO: 8150 - protein, 1112 aa, Gibberella zeae PH-1
MADIMIPNVRSPLSEASNRINSNHPPQEAHRYKPRHDRPPASTNNPPRASYGHPAAYFSGRPPPTQPQSTGPKPQGNPTLKPPTDMDDDRRHSGASYDSSGSGHSKKNYKTHIGPWQLGKTLGKGSSARVRLCRHNVTHQLAAVKIVNRRMAYLVQDSSLAALSKWDNNLPEQIDGEIRVPMAIEREVAILKLIEHPHIMKIYDIWENRSEVYLILEYIDQGDLFTFINMKGRLSEEVSVYFFRQIISAISYCHSFNICHRDLKPENILISANLKIKIADFGMAALHQTDTHRLNTACGSPHYAAPELLKNRQYRGDKADLWSMGVILFAMLTATLPFDDPDIRVMMSKTKKGQYEMPDYLSPEAEDLIRRMLQVNPDRRITLKEIWRHPLVKKYAYLDNLDDLNSQPPDIRKGFQYTPVPAQDVDSQLVRQLRSMWHTFSENDLKLKLTCDEPNDQKAFYWLLYQYREQQLEDFKPEIAHSTSDYHHMKPGTWKKHPQAASLSKKTTMALTPGNQKGFEVDQVRAVDVEHQLEPPPQDAYYHREARCRPCTAVDKARRMHATRATNEESTSRMSGSVPPYVTEQGSTYQLEMARPFTPDVSELPSTVLPKTKDRHEAQVNTKRASGQAMRIALGSRYASEIFKEELRHFSSNIAKDCDEAFKSSLIEEDSIAGSLTEPDRTQYESTPISFTIDAPDESAPDILDLTAKSFSNRPLPPLPTPLQGHDERSLAPTPIGSRPTTGDSHLEELRAEQVKVAQPVILTRHAERRVVSAPAYHQKSKMNPALPSINETGAISNDKARIVSAPPHTPTKRGVDRIRGIEYLSQVENSIRVVNSPGDESPVKMPKPLNVRKKFCDSEEEEEDVMVKRASKVESTHGRESVDWQDCNSYLTSSDGKRSDSTTTDAPSKKKTFNFNFWKSNKQRDSIMSITKEPDDKEERPSVELSVVGKTNTSTKVSQSRWHESNSGPVRNIEVKQNWLARLFRVKPATDHICMTISRRRARQEVTILLREWRKYGIRDIQVDKQRNIVFARVADKNFLNLKEVSFAAEVITVIEHGKKQPLSIIRFTQERGAASSFYRVVDTMRMMFETRALVISDKNKQKMMIKTLNS

SEQ ID NO: 8151 - protein, 447 aa, Zea mays
  misc_feature (150)..(150): Xaa can be any naturally occurring amino acid
  misc_feature (165)..(165): Xaa can be any naturally occurring amino acid
  misc_feature (183)..(183): Xaa can be any naturally occurring amino acid
  misc_feature (193)..(193): Xaa can be any naturally occurring amino acid
  misc_feature (220)..(220): Xaa can be any naturally occurring amino acid
  misc_feature (238)..(238): Xaa can be any naturally occurring amino acid
MSNYYDDYDDIDGMEDDYDMDDPIDDMVDEQQGIRDSDVEDNDYGQPNDKIPDTSSADARKGRDIQGIPWEQINITRKKYRQSRLEQYKNYENVPNSGEEAMKDCKPTEKGGIYYEFRRNTRSVKSTILHFQLRNLVWATSKHDIYLVSXYSIRHWSALRGVDTXVAPSEKHSGSLSEGSIYXYKISTLAVKXDLLTAWAGLHGAVMCKNLAGECYFILXEINFCCRSTYDYNAITNXVGVFNSSRGAVHFMASINYSGVRYYDMERFQLFKHFQFEWPVNHASLSPDRKVVVIVGDDPDGLLIDANSGKTVHSIKGHRDYSFASAWSPDGRTFATGNQDKTCRIWDVRNLSKSVHVLRGNLGAIRSIRFTSDGQFMSMAEPADFVHIYDVKSDYNKRQELDFFGEISGTSFSPDTDTLFVGVWDRMYGSLLQFGRLYNYSYLDSLF

SEQ ID NO: 8152 - protein, 375 aa, Capsicum annuum
MVDANMGAAGGQFPEFPNIVTHGGQYVQYDIFGNFFEITTKYRPPIMPIGRGAYGIVCSVFNAELNEMVAVKKIANAFDNYMDAKRTLREIKLLRHLDHENVIGLRDVIPPPLRREFSDVYIATELMDTDLHQIIRSNQGLSEDHCQYFMYQLLRGLKYIHSANVIHRDLKPSNLLLNANCDLKICDFGLARPNLENENMTEYVVTRWYRAPELLLNSSDYTEAIDVWSVGCIFMELMNRKPLFAGKDHVHQIRLLTELLGTPTESDLSFLRNEDAKRYIRQLPQHPRQQLAKVFPHVNSLAIELVDKMLTLNPTGRITVEEALAHPYLAKLHDAADEPVCPVPFSFDFEQQGIGEEQIKDMIYQEALVLNPEYA

SEQ ID NO: 8153 - protein, 457 aa, Staphylococcus epidermidis ATCC 12228
MAIGVILNRVFRLNNNPLFDYIYSNKESINHCYFIIPTEEFEEEAKKKAQYYYGSIQKFMYELQRYDIEPFLMSYDKLIDFCKKQAIDKVVVAGDIMSYHHEEYDILHQRKRFKQANIQVISLRANHYFNPRKTYNKQGEPYKVFTSFYRKWRPYLMIRDEYDYHLEDISKVVVKSQHKIKEDYHSYGISERDVQNRWSEFLSQDIENYKENREYLPEVLTSQLSIYLAYGMIDIIQVFNDLLQNYDKNEQNYETFIRELIFREFYYVLMTNYPETAHVAFKEKYQQLKWSYNEENFKLWKDGNTGFPIIDAAMEELKTTGFMHNRMRMVVSQFLTKDLFIDWIWGESFFKQKLIDYYAASNVHGWQWSASTGTDAVPYFRMFNPIRQSERFDNNARYIKTYIPRLNQVDAKYLHDTHKFEQQIKGQGVEIGKDYPKQMIDHKESRQRVMSEFKALD

SEQ ID NO: 8154 - protein, 1367 aa, Neurospora crassa
MASELSPRAVRFSQTDDEPIARLDKHKTVSRPNPRANDSDNSNPSTDAHDDLHVREQIDELGSLSRYVESHSGSVPSLVPGSLTSSLPLANGSSSRRGASSETYANGTPSRPQRPTAPARTPSNTYQPYNQRRPPQGQPSSYMANNPHARDGSRPRPLAGTSTFRAQEREYVRRLRQQDYNNDYFDAYGSGEQYDSDSEGETPSSEGAFDSYDDAHIMFASNEDIQITEEDLRDPESRERLEWHGMLEAVLTGDVVRQEKKRLIGSNDEAFGKSAHNVELWLGIRARLCGRHLPVQKRVVEDARAALDRSINDIINFAIAGESEAGKPPFEQVRDVVNKIERIESLYPSSRELMTALKPGVYSAYQETCDAVISWYNVNEMINTELSILKKWVGNDALDFSRTKEKSPSGNGLSDESSFLDRLMKEEGLKSLHEDKGSEPKSLKKKSRLDGISRVITKAKDTLIQNAEGFQKRHLPPYIEELLTLISFPSRLIEEIIKMRLAYAKKMKDSAQQNPMMQDQMISQFQVLLKLAIKIKREYMEIARPEPGWDLPPCIDEDFDRVILEALKYYFKLLNWKLSGNKNTFKEAELLFQEWGFGNEIGRYLAHGDVEVAEQFSSLTYKAWNRLSQTFEKEVQRRPKESVPEMTKRYKQILDSVRVRQRMLQRFSRMLNDNYENACDYTIAFEQPQMLHQLYDRLIETGHFQVYSASPEHKDILIIASPTLHNRDDEIQVLMGTFTYEAAIEDPSDPYLLIIKAEDPPQWLGPVHTLRVRNEPLDIKLGHMRLIAGGCQPRLLNARKAFVDRIDMQVDPVVEQRSNLQKVNFRLMEIRKVAFKLSNAFMDSVEAIRRQTRGLNCQELIQTCFIFATEFGQRSLLYMDNNRRTMNNLKLTKLALDWVSFICDDCISSDRKTFRWAVQALEFAMGMTRGRHILGLGEDEYARLRAKVAGCMALLISHFDIMGARSSVAAQAEKKRLEGLVNQIKRLNKGQMLDDNEAAKYYQEHRLEELAKVDNYRKEILLQQSAMGRVLEASNEVDRSLAWLSSTATNFTMRWQQGHFVGGGTFGNVYAAVNLDTGQLMAVKEIRLQDPKLIPTIAGQIRDEMRVLETVDHPNVVSYYGIEVHRDRVYMFMEFCSGGSLANLLEHGRIEDEQVIMVYALQLLEGLAYLHELKIAHRDIKPENILLDHNGIIKYVDFGAAKLIARQGRTLVQDVASTKPNKSMTGTPMYMSPEVIKGENAGHFGAVDIWSLGCVILEMATGRRPWANLDNEWAIMYNIAQGNPPQLPSQDQLSPEGIDFLRRCFMRDSTKRATAMELLQHEWIMTIRNRVVEPATPSSDAGSSTTSQGALNPGNSSRGGFPGDGMY

SEQ ID NO: 8155 - protein, 394 aa, Capsicum annuum
MDGPAQQTDTVMAEAAAAQQPAPPSQPVAGIDNIPATLSHGGRFIQYNIFGNVFEVTAKYKPPIMPIGKGAYGIVCSALNSETNEHVATKKIANAFDNKIDAKRTLREIKLLRHMDHENIVAIRDIIPPPQREAFNDVYIAYELMDTDLHQIIRSNQGLSEEHCQYFLYQILRGLKYIHSANVLHRDLKPRNLLLNANCDLKICDFGLARVTSETDFMTEYVVTRWYRPPELLLNSSDYTAAIDVWSVGCIFMELMDRKPLFPGRDHVQQLRLLMELIGTPSEAEMEFLNENAKRYIRQLPLYRRQSFVEKFPHVNPAAIDLVEKMLTFDPRRRLTVEDALAHPYLTSLHDISDEPVCTTPFSFDFEQHALTEEQMKELIYREGLAFNPEYQHM

SEQ ID NO: 8156 - protein, 448 aa, Glycine max
MVIINLVKKKKKSEREGMRLGKYELGRTLGEGNFGKVKFARNTDSGQAFAVKIIEKNKIVDLNITNQIKREIATLKLLRHPNVVRLYEVLASKTKIYMVLEYVNGGELFDIIASKGKLTEGECRKLFQQLIDGVSYCHTKGVFHRDLKLENVLVDNKGNIKITDFGLSALPQHLREDGLLHTTCGSPNYVAPEVLANKGYDGATSDTWSCGVILYVSLTGHLPFDDRNLVVLYQKIFKGDAQIPKWLSPGAQNMIRRILDPNPETRITMAGIKEDPWFKKGYIPANPEDEDVHVDNEAFSSHEEPNEAEQRNSGSPTLINAFQLIGMSSCLDLSGFFEKEDVSERKIRFASILSVKDLIDRIEDTVTEMEFRVEKKNGKLKVMRENKVHKTLGCLSVVVEVFEISPSLYVVELRKSYGDGSVYKQLCKKLLNDLGVPPKQGLVRSAAN

SEQ ID NO: 8157 - protein, 379 aa, Cercospora zeae-maydis
MATEQIPDKGLAGVCVNEGPDFKVEVQEVDIPEPSKQNCWTISVNSSLTERWPESGELLIRLNCTGLCMSDIHFMVNDWAVPPMSQFGTKCAGHEGAGVVVKLGPNVSGWEVGDRAGIKPLWDVCHNCEHCWNGRENYCQHGVYTGLVAEGTYRQYLTSPAIYTSRIPEGVPDEVAGPIMCSASTMHRALVDSGLKAGDFVVFPGGGGGVGIQGVQLAKAMGMRPIVIDSGEAKSKLSKELGAEEFIDFKEHEDVAARVKEVAGGIGAHGVLVTAYQAYKDSFSYLGNRIGGRIMCIALPPAGTVNMGTDPNFIVFKNVRVIGTLVGTMQDTAAALEYARRGLLKGIAKVQGVSRFDKSVQALQRGKVAGRIVIDFNKK

SEQ ID NO: 8158 - protein, 168 aa, Avena agadiriana
VMASSATTVAPFQGLKSTAGLPVSRRSSGSLGSVSNGGRIRCMQVWPIEGIKKFETLSYLPPLSEEALLKQIEFLIRSKWVPCLEFSKVGFIFREHGSTPGYYDGRYWTMWKLPMFGCTDASQVIKEVEEVKKEYPDAYVRIIGLDNIRQVQCVSFIAFKPPGCEESG

SEQ ID NO: 8159 - protein, 399 aa, Bacillus subtilis subsp. subtilis str. 168
MLDNKTIEIIKSTVPVLQQHGETITGRFYDRMFQDHPELLNIFNQTNQKKKTQRTALANAVIAAAANIDQLGNIIPVVKQIGHKHRSIGIKPEHYPIVGKYLLIAIKDVLGDAATPDIMQAWEKAYGVIADAFIGIEKDMYEQAEEQAGGWKEYKPFVIAKKERESKEITSFYLKPEDSKPLPEFQAGQYISIKVRIPDSEYTHIRQYSLSDMPGKDYYRISVKKDGVVSSYLHDGLQEGDSIEISAPAGDFVLDHASQKDLVLISAGVGITPMISMLKTSVSKQPERQILFIHAAKNSEYHALRHEVEEAAKHSAVKTAFVYREPTEEDRAGDLHFHEGQIDQQFLKELIANTDADYYICGSPSFITAMHKLVSELGSAPESIHYELFGPQLSLAQSV

SEQ ID NO: 8160 - protein, 492 aa, Burkholderia fungorum LB400
MDSFNPDDVAIRSGHYIGGEYVEAGGRRIEVARPSDGVVYATVPLADAGMVDRAVENAWQAFRHSGWARMAPRERAKILRRFAELVEADAPTLGRLEALGSTRPIAQAIGWDVPFTAEGIRFYAEFADKLGGDVAATDHDHLGMTIAEPYGVIGAIAPWNFPLVMASWKIAPALAAGNAVVLKPSEMTPFSVLRLAELAVQAGVPAGIFNVIQGDGRVTGDELVRHPKISKVTFTGSTRTGASIMAACANSGTRPVTLELGGKSPQIVFADAPRLDDVARRIAGAITGNAGQVCVAGSRLLVERSLAEPLAERIGKIFAELKPGATWAAGTTLSPIISAPQAARIEGIVGRTLEAGATLRYGGVRADVGSNGAFYTPTLLTNVTAHSEAVREEIFGPVLTLQTFDTEEEALALAQHPEYGLAAGVHTADLGRALRFVRGLEAGTVWVNRYGRTSDFMIPTGGYKRSGIGKDLGRQAYEANLRFKSVLIDLRP

SEQ ID NO: 8161 - protein, 327 aa, Haloarcula marismortui ATCC 43049
MTHEIAVIPGDGIGQEVTPAAVEVLEAIDGVDFDFVEGEAGDAVKEETGDALPEETRELAADADATLFGAAGETAADVILPLRQVVGSFANVRPARSYPGLDAVQPDTDIVFIRENTEGVYKGIESEISEGVTTCTRVITEDASEKIAEYGFSYAKQNSYDDVTIAHKANVMRTTDGLFLDAASAVGEDRDASYDTALMDALAMHLVMNPQDYGVVICPNLAGDMLSDLAAGLVGGLGLLPSANIGEENALFEPVHGSAPDIAGEGIANPSAMILSAAMLLDHLGYDEQGDAVRTAVESVLDSGPRTPDLGGDASTEDVTAAVIDEL

SEQ ID NO: 8162 - protein, 168 aa, Avena strigosa
VMASSATSVAPFQGLKSTAGLPVSRRSNAGLGSVSNGGRIRCMQVWPIEGIKKFETLSYLPPLSEEALLKQIDFLIRSKWVPCLEFSKVGFIFREHGSTPGYYDGRYWTMWKLPMFGCTDASQVIKEVEDVKKKYPDAYVRIIGFVNIRQVQCVSFIAFKPPGCEESG

SEQ ID NO: 8163 - protein, 168 aa, Avena clauda
VMASSATTVAPFQGLKSTAGLPVSRRSSASLGSVSNGGRIRCMQVWPIEGIKKFETLSYLPPLSEEALLKQIDFLIRSKWVPCLEFSKVGFIFREHGSTPGYYDGRYWTMWKLPMFGCTDASQVIKEVEEVKKEYPDAYVRIIGFDNIRQVQCVSFIAFKPPGCEESG

SEQ ID NO: 8164 - protein, 455 aa, Triticum aestivum
MARDEPSAAAVDVADGDSPSSSPTLTRLREALAALSKAFESGDTASSDAAAALVAEILSPSDADASAALSEQMLREVHAFLSRPSSNQMAIDALSLELPKPVAKLGARMGNCRDIARTIIEFFVSNCSPRDMLCILCEALDTPVALNGSAYLVILLDGLASTLILIQRRHIEQVKVVLPAILRVMHANLSECDGEHGMSAVDLFSAALRIGNAIQEMCKTMVNHRKEELCSILGLYALQNIALVSSESKHQNIQSTCGSVVLQYSKLLMFCGFTYLGLLTGNDVTSATTKLSKEEDDNFLDCFSSAMDGASLVVVWTSMHDDMSKYAGAEFESALKEVQDNCIRKWEAINMFRYVLSSVNYSWAIKSHSLDLLLTLVDDKCSEETNDHVHFPYSTQIFATLNAIERVMIAAPDTLMRKKAFSALKRVISAVPSTQRFDILQALIENSMFPSLTAI

SEQ ID NO: 8165 - protein, 369 aa, Ustilago maydis 521
MTASTVPIIVNAASQLEIDVDTLDVALTQQLASVGVQPNDMTSNQFIVADALRLAQNEALLDDVVRGSGAGDWLAILDRVSVRLCAQNLANISGRALLQVSPTHAYDTEQIVEHALAYDREFSALGIGKHRYCIKILATPAGVKAAWILESQHAIRTLATGVFSVAQALAAAQAGCLYISPYYNEILAHFTAPDERAVYDDPVSQHPMSPRMAHIYQAYRELTLANPAARPPVIKSASFIGINEVLAMPQLGAQQATILAPILSEMIQRTGMRATTKPYRPSKTYDVALPDSTLALLKIDRLRADGVAQQFDLSVDYLSHNAQQLALAISNDPETQRRLNDAIRVFETAQLNAKTVIDAAIARVNAAHS

SEQ ID NO: 8166 - protein, 138 aa, Mycobacterium avium subsp. paratuberculosis str. k10
MRPVPTGKVKWYDADKGFGFLSQEDGEDVYVRSSALPAGVEGLKAGQRVEFGIASGRRGPQALSLKLIEPPPSLTKARREGPAEHKHSPDELHGMVEDMITLLESTVQPELRKGRYPDRKTARRVSEVVRAVARELDA

SEQ ID NO: 8167 - protein, 475 aa, Geobacter sulfurreducens PCA
MAKRYKVLVGGEWTGDDRPGIEVVNPYDDSVIGVVPEATNEDVDHAIRAAQAGFAEMSALPAYRRSDILDRTSELIKRDREEIAEIIAREAGKSWKFALAEADRSAETFRFASLEARNAHGEIVPMDASPVSAGRFGFYLRTPIGVIGAIAPFNFPLNLVAHKVAPAIAAGNAIVLKPATKTPLSSIKLAELMVEAGLPAGALNLVIGSGRTVGNRLVEDDRLAMVTFTGSPPVGVQIKERSGLKRVTLELGSNSPTIIEDDGDVDAAVARCVVGSFANSGQVCISVQRIFVHQRRYREFVDKFVAATQKLKVGDPMDRDCDIGPMISREELQRAVEWLGEATSLGARLETGGTVAGNCLTPAILSGVTPDMKVVCSEVFAPIVSVIPYETFDQALDMADDSIYGLQAGVYTSDINKAFKAIRRLDVGGVIINDIPTFRVDHMPYGGNKQSGLGREGIRYAMEEMTNIKFVCLNL

SEQ ID NO: 8168 - protein, 224 aa, Populus tomentosa
IMHAMWKPQKFKYIYLMATLYVFTLTIPSATAVYWAFGDDLLNHSNAFALLPKNGFRDAAVILMLIHQFITFGFACTPLYFVWEKVIGMHDTKSICLRALARLPVVIPIWFLAIIFPFFGPINSAVGALLVSFTVYIIPSLAHMLTYRKSSARQNAAEKPPFFLPSWTAMYVVNTFVVVWVLVVGFGFGGWASMTNFVRQVDTFGLFAKCYQCKPAGAAPPRPH

SEQ ID NO: 8169 - protein, 334 aa, Nostoc punctiforme PCC 73102
MSKNLLEQLREVTVVVADTGDIQAIEKFKPQDATTNPSLITAAAQMPEYQGIVDQTLLQAKKDAGDGATQAQIVSLAFDRLAVAFGLKILQIIPGRVSTEVDARLSYDTEATLTKARDLIAQYKAAGIGRDRVLIKIASTWEGIRAAEILEKEGIHCNLTLLFGLHQAIACAEAGVTLISPFVGRILDWYKKDTGRDSYPATEDPGVLSVTKIYNYYKKFGYKTEVMGASFRNLGEITELAGSDLLTISPSLLAELQSTVAELPRKLDPAKAASLSIEKISIDKASYDKMHAADRMATDKLDEGIKGFTKALEDLEKLLADRLVRLEGEVVASH

SEQ ID NO: 8170 - protein, 58 aa, Glycine max
  misc_feature (33)..(33): Xaa can be any naturally occurring amino acid
QNGRQSRTSCLDMLLDIILPPVGVFLKHCCKVXIWIRMVLTLVGYISGIIYAVYAITK

SEQ ID NO: 8171 - protein, 115 aa, Brassica napus
  misc_feature (114)..(114): Xaa can be any naturally occurring amino acid
MSAINITNVTALDNPAPFVSPFQFEISYECLTSLKDDLEWKLIYVGSAEDETYDQTLESVLVGPVNVGNYRFVLQADPPDPSKIREEDIIGVTVLLLTCSYMGQEFLRVGYYVXN

SEQ ID NO: 8172 - protein, 419 aa, Neurospora crassa
MPALTGIAVSAALAVTTRRTHLGVGTVVMGIEGFNVESSLRIPMTSREAFHKFLRSASPSSSQSPRSLSPAAQGTNRVARAPYLLRSQAVLVTTLTPPSFGVTQPKVLENPPIPISPSKRTWRRRDGTAAEGQTTFFASTRAPSFSPIVPSSAPSHHATNTFFLATSFSRLYKKAVLSRSTKRVDRIARDTIATSSSSINHTSNMSSVVNEGEKPQEAAQEQQEEQQQQQQQQEQQNAGDDVNDDEEEISAMKRRVAEMEEEAAKLREMQASLDQQHHELTENKEDIDSRSIFVGNVDYSASPEEIQAHFQSCGSINRVTILLDKFTGQPKGYAYVEFTEPSLVAQALVLNESVFKGRNIKVVPKRTNIPGMSRGGRGGRGSFRGGGRGGYFGGRGGFPPRGGYRGGYRGRGRGGYAPY

SEQ ID NO: 8173 - protein, 247 aa, Gerbera hybrid cultivar
MGRGRVELKRIENKINRQVTFSKRRNGLLKKAYELSVLCDAEVGLIIFSSRDKLYEFGSVGVMKTLERYQRCCFNPQDNNNERETQSWYQEVSKLKAKFESLQRTQRHLLGEDLGPLSVKELHNLEKQLEGALTQARQRKTQIMVEQMEELRRKERELGDMNKHLKIKVSHELSTFDAEGQGYRAQLPCPWNSGTNNTFTMHPSQSNPMDCQQEPILQIGYNQFMHGEGSSVQRNMVGENGIHGWVL

SEQ ID NO: 8174 - protein, 1021 aa, Candida albicans SC5314
MEAMKKRMTTHSPKPESPKPATSPDSDSLEGLSPELVPIVTLLSSQAHRRYNEGIFMLYYDLNGDGKPADREWREVYGILTGNQLAYWDAANLAQFKNNPSALLETSSKPNYINFTDSVYNAMKTLPAAKQNLDNVIIVSTTLKNRYLLQFKSYKDLTVWYAALRLSNFEYSSLQEAYTGALLSARGSRLSDIRTILAEKRFDHEDWVSIRYGSGMAWKRCFAVVEPSTLKKKVFTPGRILFYENEQKKKKQLMAVVTNATAVAAIYPQSHLLIDHSTMLKMEGYINFTSPSLSTKVSKKSASDFKHTSLFLMPEQHSSVPGFDTLIRFLVPLLDSFGLYGRPKRLKANRNDTDSLLFGLPTLPHVHYLELNDVLDLTRGDFLSWDLKTWTDNIKGILKTKIDRGYEGCGSQRGIKGAVTSLSSPVTSTGSPRFASGQGFSSRSTSSSSSQPRQNQQTPQQRKPPPPGPELKPAGKSFDKNVNDLHIGVSNDNLLSADKMKNNHKSVQLAEIYQKYSDLKTPSDNYTDRNILLNGSHEHLMEDELPAGIQQMKLHDNIYPKDDDGLFSDDDDDDDLAKVDVRKIGMNNDGSSQSLDPTLGALKVPYSDDRAGSYSSVISPMSQFNNLKESYQNVDRRAPYPNNSDNESDDDSPPPPVPSHDQKYQTGLQGKSSAFSQGAATSRGAGGMINGSSSESRSQGQQKPKYISSPNSSQNHIHRIHSPEKGSPLGRANVQYPISPERLTDVHKSSDNLADAIKLPVLPAINKVPPQEEQRQPQKYPQPQPQPQSQPHPYQQQQQQQQPRQQQLYSPQQVQQQKYHQQQQQQLQQQQQQYYQQQKFQQSQQPQRPLQQQQQQPPQQQHYQKQPQQQPQQQPHRVPPPQQQPQQQLSQAYRAAPPTQQKQPPPQQQLYGRSQPQSFPREPPNGHPQGSGFMQNRGVIPRNNGQAPPPQPQNGARGFVSQQQQQQQQQYQYSYLPSGASGQPKQQQQQQPQQQPQPHRGHHPYGAQYTSQNPNGQARYY

SEQ ID NO: 8175 - protein, 354 aa, Petroselinum crispum
MKKGNLGPGLKLSLPPPDEDSLTKFLTQSGTFMDGDLLVNRDGVRIVSQTDVQAAPPIQATDNQLSLADFDAIKVVGKGSGGIVRLVQHKWTGQFFALKVIQMNIQESARKQIAQELKINQSSQCLNVVVCYQSFYDNGAISIILEYMDGGSLADFLKIVKNIPEPYLAAIFKQVLKGLWYLHHEKHIIHRDLKPSNLLINHRGEVKITDFGVSAILATTSGQANTFVGTYNYMSPERISGGQHGYSSDIWSLGLVLLECATGYFPYSPPEQDEGWSNVFELMDTIVNQAPPCAPPDEFSPEFCSFVSACVQKDPRKRPSANELLRHPFINMYEHLNIDLAGYFTEAGSPLATL

SEQ ID NO: 8176 - protein, 116 aa, Glycine max
MASSMISSPAATTDNRAGAAMGASFTGLKPMAGYPTRKTSSDITYIASNGGRVHCLLVWPPGGLKKYVTLSYLPDLDDAQLAKAVEYLITMGRIPCSAFEMERCFQHREHTREPGY

SEQ ID NO: 8177 - protein, 347 aa, Thermoanaerobacter tengcongensis
MDGLMTAVVKQYHKEGADIVKKEIPKIGPDEVLIKVKATSICGTDVHIYVWNEWAKSRIKPPKTMGHEFVGEVVEIGENVTSVKVGDLVSAETHIVCGKCRACRTGNAHICENTLILGVDTDGAFAEYIKVPESNVWINDKNIPLEILSIQEPLGNAVHTVFSGDVVGKSVAVIGCGPIGMMAIPLLKRTGAAAIFAIEPADYRRELAHKLGATRVINPLREDVVSIIKSETEGYGADVVLDFSGNPTAIRQGLEYIAKGGRMSILGLPDNEVPIDITNNVVFKGITIQGITGRRMYDTWYTVKGLLKSGLAEDLKPIITHTFPLTEYQKGMELMIKGQCGKVVLYP

SEQ ID NO: 8178 - protein, 299 aa, Glycine max
MVYVKSQKSKAYFKRYQVKFKRRREGKTDYRARIRLINQDKNKYNTPKYRFVVRFSNKDIVAQIISASIAGDIVLAAAYAHELPRYGLEVGLTNYAAAYCTGLLLARRVLKTLEMDEEYEGNVEATGEDYSVEPAESRRPFRALLDVGLIRTTTGNRVFGALKGALDGGLDIPHSDKRFAGFDKEKKELDAEVHRKYVFGGHTTFFFLQILAEDEPEKYQSHFSEYIKRGIEADGIEALYKKVHAAIRADPSLKKSEKQPPKEHKRYNLKKLTYEERKAKLIARVAAINSAADNDEDDE

SEQ ID NO: 8179 - protein, 526 aa, Triticum aestivum
  misc_feature (520)..(520): Xaa can be any naturally occurring amino acid
MAAIKPPPPDRPPQAARLPSPSSSSSAAAAAKRGGTGSRGLLMGRYELGRVLGKGTFAKVYHARHVQTGESVAIKVLDREKAVRSGLVSHIKREIAVLRRVRHPNIVHLFEVMATKTKIYFVMELVLGMEVVRGGELISRVSKGSVQEDFARRYFQHVFSAAGGCHTRGVFHRDLKPDEAGNLKVSDFGLSAVAEPFQPEGLLHTFCGTPAYVAPEVLARRGYEGAKADIWSCGVILFVLMAGYLPFHDQNLMAMYRKVYKGEFRCPRWFSKDLTSLIMRFLDTNPSTRITLPEVMESRWFKKGFRPVKFYIEDDQLYNVIDAENDMLDLGLPDPLPQPLPPPPPSPSPQQVDGDDSGSESDASVVSCPATSSFEERHRLRGPLPRPASLNAFDIISFSRGFNLSGLFEEKGDEVRFISGEPMPDIITKLEEIANVKSFAVRKKDWRVSLEGTREGVKGPLTICAEIFELTPSLVVVEVKKKAGDKEEYDDFCNKELKPGMQHLVHQMAPVPITPTISEXAERPSR

SEQ ID NO: 8180 - protein, 384 aa, Arabidopsis thaliana
MLTCIARSKRAGDESSGQPDDPDSKNAKSLTSQLKDMALKASGAYRHCTPCTAAQGQGQGQGPIKNNPSSSSVKSDFESDQRFKMLYGRSNSSITATAAVAATQQQQPRVWGKEMEARLKGISSGEATPKSASGRNRVDPIVFVEEKEPKEWVAQVEPGVLITFVSLPGGGNDLKRIRFSRDMFNKLQAQRWWADNYDKVMELYNVQKLSRQAFPLPTPPRSEDENAKVEYHPEDTPATPPLNKERLPRTIHRPPGLAAYSSSDSLDHNSMQSQQFYDSGLLNSTPKVSSISVAKTETSSIDASIRSSSSRDADRSEEMSVSNASDVDNEWVEQDEPGVYITIKVLPGGKRELRRVRFSRERFGEMHARLWWEENRARIHEQYL

SEQ ID NO: 8181 - protein, 219 aa, Arabidopsis thaliana
MADQIEIQRMNQDLQEPLAEIMPSVLTAMSYLLQRVSETNDNLSQKQKPSSFTGVTKPSISIRSYLERIFEYANCSYSCYIVAYIYLDRFVKKQPFLPINSFNVHRLIITSVLVSAKFMDDLSYNNEYYAKVGGISREEMNMLELDFLFGIGFELNVTVSTFNNYCCFLQREMAMLMKMKSLFLEPSSFKISSKTKLVMYPHEEDSLSTHHNKKQLAAA

SEQ ID NO: 8182 - protein, 145 aa, Monacrosporium haptotylum
MSRSGVRVQPECTTAFDELKLGKKFKYIIYGLTNGNTEIEVVKAAPAAGSSEEEAYEDFMAQFPENGCLWAIYDFAFKTAEGAPRNKIVFYAWSPDGAPIKAKMVSASSKESLRKSMSGIAVEVQGTDFDEVSFDTVLEKCMKGR

SEQ ID NO: 8183 - protein, 341 aa, Rhodobacter sphaeroides 2.4.1
MRALVKAKAEPGLWMEERPVPEIGPDEVLIRVRKTGICGTDVHIWNWDDWAAKTVPVPLVTGHEFAGEIVEVGRDVRDLSPGQRCSGEGHLIGHHSRQVRAGRFHLDPETRGIGVNVPGAFADYLRLPAFNVVPLPDAIDDEVGAILDPLGNAVHTALSFDLVGEDVLVTGAGPIGIMAAAVARHVGARHVVITDVNADRLRLSTEVADVVPVNVATEDLRSVMGRLKIVQGFDVGMEMSGAPAGFDQMVEAMVMGGRIAMLGIPPGRSPVDWSRIVFKALTIKGVYGREIFETWYKMIAMLENGLDIRRVITHRFPVADFAEGFAAMRSGASGKVVLDWG

SEQ ID NO: 8184 - protein, 222 aa, Solanum macrocarpon
MVRQKIQIKKIDNLTARQVTFSKRRRGLFKKAQELSTLCDADIGLIVFSATGKLFEYSSSSMMQLIEKHKTQSERDNMNGSEQLKSSNLQSEKKTYAMLSRELVEKNRELRQLHGEELQGLGLDELMKLEKLVEGGISRVLKIKSDKFTREISSLKKKEAQLQEENSQLKHQSQARLNEEGQNAIEQGHSADSITNNRSLVSSHQDYDDSDTSLKLGLGFPY

SEQ ID NO: 8185 - protein, 429 aa, Caldococcus noboribetus
MVSHPCTADEAKPPSEGQLARFENGKLIVPDNLIVAYFKGDGIGPEIVESAKKVLDAAVDKAYGGTRRIVWWEVTAGEEAQKECGSLLPDGTLQAFKLARVNLKGPLTTPVGGGFRSLNVTLRMVLDLYSNVRPVKWYGQPTPHCHPENIDWVIFRENTEDVYAGIEWPFDSPEAQKIRDFLKKEFGIELTPDTGIGIKPISKWRTQRHVRRAMEWAIRNGYKHVTIMHKGNIMKYTEGAFRQWAYDLILSEFRDYVVTEEEVNTKYGGKAPEGKIIVNDRIADNMLQQIITRPGEYNVIVTPNLNGDYISDEANALVGGIGMAAGLDMGDGIAVAEPVHGSAPKYAGKNVINPTAEILSGMYLLSDFVGWPEVKLLVEYAVKQAIAHKQVTYDLAREMGGVTPISTTEYTDVLVDYIRHADLKALKGQ

SEQ ID NO: 8186 - protein, 100 aa, Triticum aestivum
  misc_feature (39)..(39): Xaa can be any naturally occurring amino acid
  misc_feature (68)..(68): Xaa can be any naturally occurring amino acid
  misc_feature (70)..(70): Xaa can be any naturally occurring amino acid
  misc_feature (74)..(74): Xaa can be any naturally occurring amino acid
  misc_feature (79)..(79): Xaa can be any naturally occurring amino acid
  misc_feature (85)..(85): Xaa can be any naturally occurring amino acid
  misc_feature (88)..(88): Xaa can be any naturally occurring amino acid
  misc_feature (90)..(90): Xaa can be any naturally occurring amino acid
  misc_feature (96)..(97): Xaa can be any naturally occurring amino acid
SSATTAAPFQGLKSTAGLPVSRRSCSAGLSSVSNGGRIXRCMQVWPIEGIKKFETLSYLPPLSKEALXKXVDYXIRSSXVPASNXTKXGXSSGEQXXSPR

SEQ ID NO: 8187 - protein, 119 aa, Brassica napus
MFFTSRLLSLPRRNMVLSRTSIDSNDTVSSTFGSRYDLIALPTYHIGDSSILVDAAYHIIKYDLMRASNPRLNLVSFVTTCMESTCDKLIMDFINRSYVDMDQYPVITELNKRCLNMIT

SEQ ID NO: 8188 - protein, 279 aa, Staphylococcus epidermidis ATCC 12228
MTNDVQILNNGYPMPAVGLGVYKIADEQMEEVVRTALDAGYRAFDTAYFYGNEKALGSALKHSNVERDELFITSKLWNDYQGYDQTIEYFNKSLDNLGLDYLDLFLIHWPCENDQLYIESYKALEHLYEEGKIKAIGVCNFKIHHLEKLMKETKITPQVNQIELHPYFNQQDVQDFCDEHDIKVTAWMPLMRNKGLLDDPVITDIAHRYDKTPAQIVLRWHLAHNRIIIPKSQTPKRIKENFDIFDFNLELTDVAEIDSLNKNARQGKDPDDVSIGDLK

SEQ ID NO: 8189 - protein, 161 aa, Lactobacillus salivarius subsp. salivarius
LLNQSKDTIIYLCVLKKQHLFQSDKPESIETTLKNAADGRDIRLIVVTDAEGILGIGDWGVDGVDIAIGKLMVYTAAAGINPAQVLPVSIDAGTNNKELLNDPLYLGNKHKRVYGEKYNELIDKFVAAVQKLFPESMLHFEDFGRSNADVILNKYKDKILT

SEQ ID NO: 8190 - protein, 507 aa, Burkholderia fungorum LB400
MLLGHPVLFKSLCYVDGRWVHSASAASVAVHNPADQQVLGHVPMLDAAQITEAVGAAQRAFSTWRWLPVSQRSALLLRWHELILRHQHDLAAILSLEQGKPLAEARGEIAYGASFVEWFAHEVRRLNGRTIPTHIDGAHLGTMIEPVGVAALITPWNFPCAMITRKAAAALAAGCTVVVKPAHETPFSALALAQLAEEAGFPAGVFNVVLGEPQMAMERLVGDSRVRSVSFTGSTRVGALVMQAAARAGIKKTALELGGNAPFIVTGDADLDQAVRVAVAAKFQTSGQDCCAANRIFVARPLYEAFVAQYSDAVKALKVGAAFEANVDVGPLMHQAAFDSTAQRVADAKARGARITAGGGAHERGGWFFEPTVVADAAPGMRIYDEENFAPISAVSPFDSLDEVVERANDTEYGLAAYVCARDLNTVFQLIRRLDFAMVSVNGAKFTGAPIPFGGIKSSGLGREGGAEGFEPFVETRYFCLGQLGLPVTESLPAHRLAAATGAAATA

SEQ ID NO: 8191 - protein, 162 aa, Lactobacillus rhamnosus
VVADSIEQYNELFLDPQNAAFVSVDAPEDIEATLKNAADGRDIRLVVVTDAEGILGMGDWGVNGVDIAIGKLMVYTAAAGIDPSQVLPVSIDAGTNNQKLLDDPLYLGNRHKRVSGEQYYDVIDKFVAAEQQLFPDSLLHFEDFGRDNAQVILDKYKDQIAT

SEQ ID NO: 8192 - protein, 380 aa, Lactococcus lactis subsp. lactis Il1403
MVDFNKVLDLHELHTGVLDIQADIDVKKPSDLAEAYTPGVAELSKLIQSDPEAKRKYTMSGKLVAVVTDGTAVLGLGNMGPAGGLPIVEGKALLYKELAGVDAIPIAVEQIGAEKIIETIKNISQSFAGIHLEDISAPQCFEIEERLSKNLNIPVYHDDQAGTAIVVLAGLMNAAKLVNKKLEDLKIVINGVGAAGVATGRLFAEVGIKNVTLIDIEGKVNDKVKSYNRYQLELAKRFNQVAGTTLDEVIDGQDVFIGLSDAKVLTGTQVERMAKDAIIFALANPVPEILPEEALKHGAAVVATGSNQWPNQVNNVLVFPGLFKGLLSANVQHVDYKLQANIATAIADVIKNPDRNHIVPGVFDAGVVESVTKAVKDSAK

SEQ ID NO: 8193 - protein, 236 aa, Streptomyces coelicolor
MKAVQVVGYGKNLEMAEVPAPEVTGPYDVIVRIGGAGVCRTDLHILEGQWAEKSGVELPYTIGHENAGWVHAVGSAVTNVSEGDKVIVHPLITCGLCRACRAGDDVHCENNRFPGIDTAGGYAEYLKTSARSVVRLDDSLEPADVAALADAGLTAYHAAAKAARRLRPGDRCVVIGAGGLGHIGIQVLGALTAAEIVVVDRNPDAVDLAVSVGADHGVLADGGHVDRVRELTGGHG

SEQ ID NO: 8194 - protein, 238 aa, Glycine max
MEYTYSAGVEAETHTSSSTTPSRSKKRNNNTRRFSDEQIKSLETMFESESRLEPRKKLQLARELGLQPRQVAIWFQNKRARWKSKQLERDYGILQSNYNSLASRFEALKKENQTLLIQLQKLNHLMQKPMEPGQRCTQVEAANSMDSESENGGTMKCEAEGKPSPSMEISEHLLGVLSDDDTSIKVEDFGLEDEHGLLNFAKHVDGSLTSPEDWNAFESNDLLGQSTTDDYQWWDFWS

SEQ ID NO: 8195 - protein, 178 aa, Lactobacillus brevis
NPVVYDPTVADSIEQYSHLFTDPQNAAFISVDAPEDIEATLKNAAGDRDIRLVVVTDPKNFGYGPTGVLTGLDIAVGKLMVYTAAAGMIQHKSCQLALMAGTNNQTLLNDRYYLGNHHERVYGDKYHAVIDQFVAAEQKLFPESLLHWEDFGRSNAQVILDKYKDKIATFNDDIQGTG

SEQ ID NO: 8196 - protein, 77 aa, Glycine max
  misc_feature (66)..(66): Xaa can be any naturally occurring amino acid
MVSSFTCLKSMAGFPTRKTNNDITSIACNRLRVQCIHVSPPIVKKKFDTFSYLPYLYYSQLSNEVXYLLTKGLIPFF

SEQ ID NO: 8197 - protein, 210 aa, Brassica juncea
MLCSEYESPVTLGGEYCPKLASSCPKKPAGRKKFRETRHPVYRGVRLRKSGKWVCEVREPNKKSRIWLGTFLTAEIAARAHDVAAIALRGKSACLNFADSAWRLRIPETTCPKEIQKAAAEAAVAFQAELNDTTADHGLDVEETIVEAIFTEESSEGFYMDEEFMFGMPTLWASMAEGMLLPPRPYNSDLTMTSTEMLTCPFGVMSTCNH

SEQ ID NO: 8198 - protein, 180 aa, Lactobacillus fructivorans
NSVVYDPTIADSIENYSRLYVNPQNAAFLSIDHDDPETIRESLKNTAAGRNIKLIVVTDGEGILGIGDWGTQGIDIPVGKLMVYSAAAGIDPSEVLPVVMDVGTTNKSLLDNPLYLGNHQDRDYGQKYYDFVDKFVKEAEDLFPNLYLHFEDFGRRNASNILDKYKDDYLVFNDDIQGTG

SEQ ID NO: 8199 - protein, 112 aa, Bartonella sp. strain Pm650nm
GANEACLKMLQEIGSVKRIPEFIARAKDKNDPFRLMGFGHRVYKNYDPRAKIMQKTCHEVLKELNIQDDPLLDIAIELEKIALNDEYFVEKKLYPNVDFYSGITLKALGFPT

SEQ ID NO: 8200 - protein, 112 aa, Bartonella sp. strain Pm662wy
ANEACLKMLQEIGSVKRIPEFIARAKDKNDPFRLMGFGHRVYKNYDPRAKIMQKTCHEVLKELNIQDDPLLDIAIELEKIALNDEYFVEKKLYPNVDFYSGITLKALGFPTE

SEQ ID NO: 8201 - protein, 276 aa, Anabaena variabilis ATCC 29413
MIEPSVEEFPADNGPQLTPELAIANLQSSDLSLRYYAAWWIGKYRVKEGAAVDGLIAALEDEADRTELGGYPLRRNAARALGKLGDRKAVPGLIKCLDCPDFYVREAAAQSLEMLKDKAAAPALIKLLDGGVAQAVQVTGRPHLVQPYEAVLEALGAIGATDAIPLIQPFLKHPVSRVQCAAARAMYQLTQEPVYGELLVKVLEGNDLNLRRVALGDLGAIGYLAAAEAIANAKAENSFKLIALKGLLEHQMSAESNALSISDQAIRVMKLMDSLL

SEQ ID NO: 8202 - protein, 283 aa, Listeria monocytogenes str. 4b H7858
MKTVKLNNGVEVPILGFGTYQITDAAEAEQAVKDAIETGYRHIDTAQSYMNEEAVGRGIVASGVDRKELFITTKIWVENVSYKGVMSSFDRSLKRLGLDYIDLLLIHQPFNDVYGAWIAMEELQASGKIRAIGVSNFSPDRVIDLAAFNEVTPQVNQIEVNPFQQQAANLAVLRKEGVAIEAWAPFAEGKNDIFNNPVLTKIGAKYGKSAAQVILRWLVEQDIIVLAKSVKPERMAQNLAIFDFELTEADKGEIASLDQGESQFFSHADPEMVKWMASRKLNV

SEQ ID NO: 8203 - protein, 286 aa, Listeria monocytogenes str. 1/2a F6854
MILPGNGTIPYIGLGVFQVTEQEFIAGAVEKAIEVGYRLFDTAAVYNNEAIVGQAIASSAVSREELFISSKVWNGDLGYDETLFAFERTLRNLKLDYLDLYLIHWPVAGKYRDSWRAMERLHDEKLIKSIGVANFKQHHLSDLLVAANEKPVLNQVETHPLLPQNDLRKYLVEQNIAHAAWSPLAKGILMQNPVITEIAKKHQASVDQVILQWHLNRNTIIFPKSITSSRIEENSRLSYFQLDASDMEKIDRLETGKRVGPDPDDLEYFLSSIERERAYLASENEE

SEQ ID NO: 8204 - protein, 225 aa, Pisum sativum
MLQCLEGFKSLLASVLRCCDIDINQPRGLEDPELLARETVFSVSEIEALYELFKKISSAVIDDGLINKEEFQLALFKTNKKESLFADRVFDLFDTKHNGILGFEEFARALSVFHPNAPIDDKIEFSFQLYDLKQQGFIERQEVKQMVVATLAESGMNLSDDVIESIIDKTFEEADTKHDGKIDKEEWRNLVLRHPSLLKNMTLQYLKDITTTFPSFVFHSQVDDT

SEQ ID NO: 8205 - protein, 184 aa, Magnaporthe grisea 70-15
MHEHTFDSTDAGASTTYPMQCSALRKGGHVVIKGRPCKIVDMSTSKTGKHGHAKVHLVAIDIFTNKKLEDLSPSTHNMDVPNVTNETFELIDIEGDGFLQLMDSNGEMREDIKLPEGSDKAEEVAKEIRRLHELKQQDENKEVCRLLIQPSAAHSFDSDTDNMCAQLSSSPRLWVRRFLPRPSN

SEQ ID NO: 8206 - protein, 231 aa, Sinorhizobium meliloti
MDARQMKIKAAEAALEHVESGMRLGIGTGSTAEEFVRLLAEKVASGFQISGVPTSERTARLCLELGVPLKSLDELPELDLTIDGADEVDGKLRLIKGGGGALLREKIVASASTRMIVIADESKVVDVLGAFKLPIEINPFGQVATRLAIEKTASRLGLAGEIVVRSSGDGVFMTDGGHLILDASFGRIPDADALAVELNAIPGVVEHGLFIDVASMAIIAGPEGARTLTAS

SEQ ID NO: 8207 - protein, 503 aa, Pseudomonas putida KT2440
MRYPMKDSSDTHPNHLPDSCYGLFIDNQWVTAEYGETLDIINPANGKILTNIPNATAADVDRAVQAAQRAFVTWRTTSPAERANALLKIADLLEADADRFAVLETLDVGKPIRESRSVDIPLAIDHFRYFAGVIRSQSDEAVMLDEQTLSIALSEPLGVVGQVIPWNFPLLMAAWKIAPAIAAGNTVVIKPSELTPVTILELAKIFAKVLPAGVVNIVTGLGTTVGQALLDHPDLRKLAFTGSTRVGELVANAAAKKIIPATLELGGKSANIVFPDANWDKAVEGAVLAILWNQGQVCESGARLFVHESIYERFLAELKHKFEAVRVGDPLNPDTMMGAQVSKTQMERILGYVDIAKEEGAEVLIGGGRLTGADYDAGFFIQPTILVGVRNDMRVAYEEIFGPVLCVIPFKDEAEVIAMANDSEYGLAGAVWTQDINRALRVARAVETGRMWVNTYHEIPAHAPFGGYKKSGLGRETHKSMLEAYSQKKNIYVSLNEAPLGLF

SEQ ID NO: 8208 - protein, 352 aa, Amycolatopsis methanolica
MTSTTFRRSDQMRVGVLTGGGDCPGLNAVIRAVVRKGIEAHGWEIVGFRSGWRGPLTGDSRPLGLDDVEEILIRGGTILGSSRTNPYKEEGGVEKIRAVLADQGVDALIAIGGEDTLGVAKKLTDDGIGVVGVPKTIDNDLAATDYTFGFDTAVHIATEAIDRLRTTAESHYRAMVVEVMGRHAGWIALHAGLAGGANVILVPERPFSVEQVVEWVERRFEKMYAPIIVVAEGAVPEGGAEVLRTGEKDAFGHVQLGGVGTWLADEIAERTGKESRAVVLGHTQRGGTPTAYDRVLATRFGLHAVDAVADGDFGTMVALRGTDIVRVKLAEATAELKTVPPERYEEAEVFFG

SEQ ID NO: 8209 - protein, 222 aa, Physalis peruviana
MVRQKIQIKKIDNLTARQVTFSKRRRGLFKKAQELSTLCDADIGLIVFSATGKLFEYSSSSMMQLIEKHKMQSERDNMDSVEQLQSSNLQSEKKTHAMLSREFVDKNRELRQLHGEELQGLGLEELMKLEKLVEGGISRVLKIKGDKYMREISSLKKKEAQLQEENSQLIHQSQARLNEGGQNVIEQGHSADSIANNLSLVNSHQDYDDSDTSLKLGLAYPY

SEQ ID NO: 8210 - protein, 443 aa, Zea mays
MEDAMAADGKSVLQGRYELGRVLGHGNFGRVHAARDLRTGRSVAVKVVAKDKLERAGMAEQIKREIAVMKMVSHPNIVELHEVMATRSKIYLALELVRGGELFSRIARAGRVREDVARCYFRQLVAAVDFCHGRGVFHRDLKLENLLLDEVGNLKVADFGLSALAGHARSDGLLHTACGTPSYVAPEVLGGKGYDGAKADLWSCGVILYVLLVGSLPFHEDNLMVMYRKMQRGEFLCPPWVSADARKLIGELLDPDPSTRITVARLVETPWYRKPLPVLPPLNLKEPTPDARRATSDKEEPEVLNAFHLISFSEGFDLSPLFDQGRGGGVGRSSAGGIRFVTREAASSVVSRLESLVTGRGANMRVTKSGSRGVRLEAVSRGRSGARLAVAAEIFSVAPSVLLVDVKKDGGDTMEYRSFCSEELRPALKDIVWASSQDTPGAA

SEQ ID NO: 8211 - protein, 222 aa, Physalis peruviana
MVRQKIQIKKIDNLTARQVTFSKRRRGLFKKAQELSTLCDADIGLIVFSATGKLFEYSSSSMMQLIEKHKMQSERANMDSLEQLQSSNLQSEKKTHAMLSREFVDKNRELRQLHGEELQGLGLEELMKLEKLVEGGISRVLKIKGDKYMREISSLKKKEAQLQEENSQLIQQSQARLNEEGQNVIEQGHSADSIANNLSLVNSHQDYNDSDTSLKLGLAYPY

SEQ ID NO: 8212 - protein, 506 aa, Zea mays
MASPFSVPSLIMEEEGRFEAEVAEVESWWGTERFRLTKRPYTARDVVLLRGTLRQSYASGEMAKKLWRTLKAPARVYHDRKQREARMSLPRAERARAPYVDFLKPIIADGDTGFGGATATVKLCKLFVERGAAGVHLEDQSSVTKKCGHMAGKVLVAVSEHVNRLVAARLQFDVMGVETVLVARTDAVAATLIQTNVDARDHQFIVGATNPGLRGQSLAAVLSAGMSAGKSGRELQAIEDEWLAAAQLKTFSECVRDAIAGLGVAAQEKQRRLQEWDRATGGYDRCVSNDQARDIAASLGVTSVFWDWDLPRTREGFYRFRGSVAAAVVRGRAFAPHADVLWMETSSPNVAECTAFAEGVKAACPEAMLAYNLSPSFNWDASGMTDAEMAAFIPSVARLGYVWQFITLAGFHADALVTDTFARDFARRGMLAYVERIQREERINGVETLEHQKWSGANFYDRVLKAVQGGISSTAAMGKGVTEEQFKDPRPATGSSGLQVMAKSRI

SEQ ID NO: 8213 - protein, 239 aa, Solanum macrocarpon
MAREKIKIKKIDNITARQVTFSKRRRGLFKKAEELSVLCDADVALIIFSATGKLFDFASTSMKDILGKYKLQSASLEKVEQPSLDLQLENSLNMRLNKEIADKTRELRQMRGEELEGLSLEELQQIEKKLEAGFNRVLEIKSTRIMGEITNLQRKGAELMEENKQLKQKMEIMKKGKLPLVTEMVMEDGQSSESIITSNNVCSSNSGPPPDQDDSSKIGGNAVEDDCSITSLKLGLPFS

SEQ ID NO: 8214 - protein, 176 aa, Rhodobacter sphaeroides 2.4.1
MTVRPHLALAFACLAGPALAAGPPPVTFDSIDGGQIRLDELRTAGPVLVVNTASLCGFTPQYDDLQALWDRYRDAGLTVLAVPSNDFKQELDDAGAVRDFCATNFDLTLPMTTITPVTGAEAHPFYRWLAEEHGVEPRWNFHKVLIDRDGDLVASWSSPVRPTDREIVGRIEALLP

SEQ ID NO: 8215 - protein, 178 aa, Oenococcus oeni
PIVYDPTIADTIENYSELFVEPQGAAFLDINHPENIQSTLKNAANGRDIKLLVVSDAEGILGIGDWGVQGVDIAVGKLMVYTVAAGIDPSTVLAVVIDAGTNNEKLLKDPMYLGNKFNRVRGDKYYDFIDKFVNHAESLFPNLYLHWEDFGRSNASNILNSYKDKIATFNDDIQGTGI

SEQ ID NO: 8216 - protein, 420 aa, Thermus thermophilus HB27
MGPLLVWHRGDLRLHDHPALLEALARGPVVGLVVLDPNNLKTTPRRRAWFLENVRALREAYRARGGALWVLEGLPWEKVPEAARRLKAKAVYALTSYTPYGRYRDAKVQEALPVPLHLLPAPHLLPPDLPRAYRVYTPFARRFLGVEAPLPAPEALPKGPEEGEIPREDPGLPLPEPGEEAALAGLRAFLEAKLPRYAEERDRLDGEGGSRLSPYFALGVLSPRLAAWEAERRGGEGARKWVAELLWRDFSYHLLYHFPWMAERPLDPRFQALPWQEDEALFRAWYEGRTGVPLVDAAMRELHATGFLSNRARMNAAQFAVKHLLLPWKRCEEAFRHLLLDGDRAVNLQGWQWAGGLGVDAAPYFRVFNPVLQGERHDPEGRWLKRWAPEYPSYAPKDPVVDLEEARRRYLRLARDLARG

SEQ ID NO: 8217 - protein, 392 aa, Prochlorococcus marinus subsp. marinus str. CCMP1375
MEQKAIDNQNDPCNMVLKPGLEGVPVTQSAICDINGLKGELKYRGYSIAELAAKSSFLETTYLLIWGDLPSSKQLREFEDAIQMHRRLSFRVRDMMKCFPATGHPMDALQSSAASLGLFYSRRAIDNPQYIYDAVVRLIAKIPTMVAAFQLIRKGQDPIQPRDDLPYSANFLYMLTEREPDPLAARVFDRCLILHAEHSLNASTFSARVTASTLTDPYAVVASAVGTLAGPLHGGANEDVIAMLEEIGAPENARNYLKQAIDQKSKIMGFGHREYKVKDPRATLLQGFAEDLFARFGKDEMYDVARSVEEEASPLLGPRGIYPNVDFYSGLVYRKLGIPRDLFTPIFAISRVAGWLAHWREQLSANRIFRPTQIYTGKKTRAWCALEERNKN

SEQ ID NO: 8218 - protein, 178 aa, Lactobacillus hilgardii
PVVYDPTIADTIENYSHLFLDPQNAAFLSIDDQDDIEASLKNASAGCDIKLIVVTDGEGILGIGDWGVQGVDISVGKLMVYTAAAGVDPKSVLPVVLDVGTNRKELLADDLYMGNHTQRVTGDKYYNFVDKFVETAENLFPDMYLHFEDFGRSNAANILNKYKDNILTFNDDIQGTGI

SEQ ID NO: 8219 - protein, 323 aa, Oryza sativa (japonica cultivar-group); identical to SEQ ID NO: 347

SEQ ID NO: 8220 - protein, 178 aa, Leuconostoc mesenteroides subsp. mesenteroides
PVVYDPIVAESIEQYNEIYTNPQNAAFLSIDHPENIESSLKSVADGRDIELVVVTDAEGILGMGDWGVNGVDIAVGKLMVYTAAAGIDPATVLPVSIDAGTNNKILLENPLYLGNKHERIAGEKYLEFIDEFVTAEQKLFPASLLHWEDFGRSNAQVILDKYKDSIATFNDDIQGTGI

SEQ ID NO: 8221 - protein, 177 aa, Lactobacillus plantarum
NPVVYDPVVADSIEQYNELFLDPQNAAFVSVDAPEDIEATLKNARGRRDIRLVVVTDAEGILGMGDWGVNGVDIAIGKLMVYTAAAGIDPSQVLPVSIDAGTNNQKLLDDPLYLGNRHKRVSGEQYYDVIDKFVAAEQQLFPDSLLHFEDFGRDNAQVILDKYKDQIATFNDDIQGT

SEQ ID NO: 8222 - protein, 102 aa, Triticum aestivum
  misc_feature (33)..(33): Xaa can be any naturally occurring amino acid
  misc_feature (52)..(52): Xaa can be any naturally occurring amino acid
  misc_feature (70)..(70): Xaa can be any naturally occurring amino acid
  misc_feature (88)..(88): Xaa can be any naturally occurring amino acid
MAPTVMASSATSVAPFQGLKSTAGLPVSRRSNXLALGSVSNGGRIRCMQVWXPSRGIKKFETLSYLPPLXAREGLLKQVDYLIRSKWXCPCLQFNKVGFIFP

SEQ ID NO: 8223 - protein, 201 aa, Prochlorococcus marinus subsp. marinus str. CCMP1375
MTAQASNIVWHKASVDRESIEKERGHKSVIIWFTGLSGSGKSTLANALNVALFKKGLATYVLDGDNIRHGLCNDLGFSDSDREENIRRIGEVAKLFLDAGVIVLTAFVSPFRSDREKARKLVKENDFLEIYCAANLDICETRDTKGLYAKARAGEIKDFTGISSPYEEPENPDLKIDTGLKDIDQCVEEVISKLIELNLVK

SEQ ID NO: 8224 - protein, 390 aa, Mycobacterium avium subsp. paratuberculosis str. k10
MLPAGSVRPRAGCENFPMTVVPENFVPGLEGVVAFTTEIAEPDKDGGALRYRGVDIEDLVSQQVTFGDVWALLVDGKFGHGLPPAEPFPLPIHTGDVRVDVQAGLAMLAPIWGYKPLLDTDDATARDQLARASVMALSYVAQSARGIYQPAVPQRVIDECETVTARFMTRWQGEPDPRHIEAIDAYWVSAAEHGMNASTFTARVIASTGADVAAALSGAIGAMSGPLHGGAPARVLPMIEEVERTGDARGLVKKILDSGDKLMGFGHRVYRAEDPRARVLRATAERLGAPRHEVAVALEQAALAELRERRPDRAIETNVEFWAAVILDFARVPANMMPAMFTCGRTAGWCAHILEQKRLGKLVRPSAIYVGPGPRSPESVEGWDRSLTNA

SEQ ID NO: 8225 - protein, 161 aa, Pediococcus parvulus
IADTIENYSDLFIQSQNAVFLSIDDPDSMKASLKNAADGRDIRLIVVTDAEGILGIGDWGTNGVDISVGKLMVYTAAAGIDPSQVMPVVLDVGTNNQDLLKNPMYLGNRHERITGDRYYKFVDQFVNTAEDLFPKLYLRFEDFGRDNAANILNKYKDQITT

SEQ ID NO: 8226 - protein, 431 aa, Mycobacterium avium subsp. paratuberculosis str. k10
MADTDDIATLKYPGGETDLEIVSATEGADGIALGSLLSKTGYTTFDNGFVNTASCKSAITYIDGDAGILRYRGYPIEQLAEKSTFLEVSYLLIYGELPDKDQLAEFTKRIQLHTMLHEDLKRFFDGFPRNAHPMPVLSSAVNALSAYYPDSLDPMDTEDVELSTIRLLAKLPTIAAYAYKKSVGQPFLYPDNKLSLVENFLRMTFGLPAEPYQADPEVVRALDMLLILHADHEQNCSTSTVRLVGSSQANLFTSISGGINALWGPLHGGANQAVLEMLEKIRQSDDDVSEFVRKVKNREAGVKLMGFGHRVYKNYDPRARIVKEQADKILAKLGGDDDLLDIAKQLEEAALTDEYFIERKLYPNVDFYTGLIYRALGFPTRMFTVLFALGRLPGWIAHWREMHDEGDSKIGRPRQIYTGYTERDYVTIDAR

SEQ ID NO: 8227 - protein, 378 aa, Weissella paramesenteroides
MNRVLKVHKSHTGVLDIKADISIKTPDDLSEAYTPGVSGIAKMIAEDEALKNVYTMSGKLIPIITDGSAVLGLGNIGPAAGLPIVEGKALIYKEFSGVNAIPMALNQVDVDEFVETIKTMAPSFAGIHLEDIAAPRVFEIEKRLNEELDIPVYHDDQTGTAVVVLAALINAAKVVNKPLKDLKVVINGMGAAGVATAKILLASGMKNLTLVDIHGVIRADDNDYNEYQRELATAVNQVDGRSLDDVIDNQDVFIGLSDANVLSKEQVTRMAQDAIVFALANPVPEILPEEAHEGGATITATGSSQWANQVNNVLVFPGLFKGLLATDIKKVELSLQVKLAEGLAQMVTTPTADHIVPRVFDDGVVDAVSNAVIAYAKA

SEQ ID NO: 8228 - protein, 128 aa, Brassica napus
  misc_feature (106)..(106): Xaa can be any naturally occurring amino acid
MADSDNDSGGHKDGGSASSREQDRFLPIANVSRIMKKALPANAKISKDAKETVQECVSEFISFVTGEASDKCQREKRKTINGDDLLWAMTTLGFEDYVEPLKVYLXKYREVEGERTTTGKQVDKEGGA

SEQ ID NO: 8229 - protein, 310 aa, Hordeum vulgare
MKTFLTFVLLAMVMSIVTTARQLNPSSQELQSPQQSYLQQPYPQNPYLPQQPFPVQQPFHTPQQYFPYLPEELSPQYQIPTPLQPQQPFPQQPQQPLPRPQQPFPWQPQQPFPQPQQPIPYQPQQPFNQQPQQIISQQPQQPFPQQPQQPFPQPQQPFPWQPQQPFPQPQQPFPLQPQQPFPWQPQQPFPQPQQPIAHQPQQPFSFSQQPQQPFPLQPQQPFPQQPQQPFPQQPQQIIFQQPQQSYPVQPQQPFPQPQPVPQQRPQQASPLQPQQPFPQGSEQIIPQQPQQPFPLQPHQPYTQQTIWSMV

SEQ ID NO: 8230 - protein, 335 aa, Glycine max
SSQLRRPPPEAEALTDEIEKESQYVEEVFRIKDIFLNYEEESDSVLFDSLRRLQLMELTVDLLKATEIGKAVNPLRKHGSRDICQLARTLIDGWKQMVDEWVKDTTAIAGSEGTPDSVNPSVVDDEEGLPSPPMDEGALFAAPTGSMELSQFFDGMDDDGNPQHSGEFIKNHEHGRRPSLNSQNTAKRKPQASNEANIIAKDSKGQQAKKNEAAVRPNKSVIADSGPSRPPKSTMQKKGNIEPKMQQNIVKSAIPRNPHIHQLDKPKCSDDAAVHVKLEATKRKLQERYQQAEKAKRQRTVQVMELHDLPKQGIGHRNPHVKPGNHKRQWGHGRR

SEQ ID NO: 8231 - protein, 120 aa, Triticum aestivum
  misc_feature (72)..(72): Xaa can be any naturally occurring amino acid
  misc_feature (86)..(86): Xaa can be any naturally occurring amino acid
  misc_feature (95)..(95): Xaa can be any naturally occurring amino acid
MAPTVMASSATSVAPFQGLKSTAGLPVSRRSNGASLGSVSNGGRIRCMQVWPIEGIKKFETLSYLPPLSTEXLLKQVDYLIRSKWXPCLDSASWXIFREHNALLGTTMAYWHVELPISVH

SEQ ID NO: 8232 - protein, 359 aa, Aspergillus nidulans FGSC A4
MSSQTPTAQNLSFVLEGIHRVKFEDRPIPKLKSPHDVIVNVKYTGICGSDVHYWDHGAIGQFVVKEPMVLGHESSGIVTQIGSAVTSLKVGDHVAMEPGIPCRRCEPCKAGKYNLCEKMAFAATPPYDGTLAKYYTLPEDFCYKLPESISLPEGALMEPLGVAVHIVRQANVTPGQTVVVFGAGPVGLLCCAVAKAFGAIRIIAVDIQKPRLDFAKKFAATATFEPSKAPATENATRMIAENDLGRGADVAIDASGVEPSVHTGIHVLRPGGTYVQGGMGRSEMNFPIMAACTKELNIKGSFRYGSGDYKLAVQLVASGQINVKELITGIVKFEDAEQAFKDVKTGKGIKTLIAGPGAA

SEQ ID NO: 8233 - protein, 334 aa, Phytophthora infestans
MAASPNKKLREASQLDQLKQFTTVVADTGDFEQINKYKPQDATTNPSLLFKAAQMEQYSALVDDAVSYGKGLSADLSEKERLGYVIDKLSVNFGLEILKVVPGYVSTEVDARLSFDTESTIARAHRIIDLYEKAGIKKDRILIKIASTWEGIQACKHLQKEGISCNMTLLFGFAQAVGCAEAGATLISPFVGRILDWHKAKTGKSSYESHEDPGVVSVTKIYQYYKKYDYKTIVMGASFRNTGEITELAGCDRLTISPALLEELTKSTATLAKKLDAETAGKAYTGEKLSYDEKDFRLSMNEDAMATEKLAEGIRGFSADIVKLEQILKTKLGA

SEQ ID NO: 8234 - protein, 205 aa, Erwinia carotovora subsp. atroseptica SCRI1043
MSLRHSPTDDNVVWHAHNVTRESREKLRGHQGVVIWFTGLSGSGKSTLAGALEQALHQRGVSTYLLDGDNVRHGLCRDLGFTDDDRRENIRRVGEVAKLMVDAGLVVLTAFISPHRAERKMVQDLLGEGQFIEVFVDTPLATCEARDPKGLYKKARAGELRNFTGIDSAYEAPEAPDSHLDGEQFVTNLTDQLLDLLGKRAIIKL

SEQ ID NO: 8235 - protein, 511 aa, Zea mays
  misc_feature (293)..(293): Xaa can be any naturally occurring amino acid
  misc_feature (442)..(442): Xaa can be any naturally occurring amino acid
  misc_feature (484)..(484): Xaa can be any naturally occurring amino acid
MGAFAKEEHQFLAELGLAQRNPGAFACGAWGGSGPTVTSTSPTNNQVIAEVVEASVHDYEEGMRACFDAAKTWMAIPAPKRGEIVRQIGDALRAKLHHLGRLVSLEMGKILPEGIGEVQEIIDMCDYAVGLSRQLNGSIIPSERPNHMMMEVWNPLGVVGVITAFNFPCAVLGWNACIALVCGNCVVWKGAPTTPLITIAMTKIVASVLEKDNLPGAIFTSFCGGTEIGQAIALDIRIPLVSFTGSTRAGLMVQQQVSARFGKCLLELSGNNAIIVMDDVDIQLAVRSVLFAXAVGTAGQRCTTCRRLILHENIYQTFLDQLVEVYKQVRIGDPLEKGTLLGPLHTPASKENFLKGIQTIKSQGGKILFGGSAIESEGNFVQPTIVEITPSAPVVKEELFGPVLYVMKFQSLKEAIEINNSVPQGLSSSIFTKRPDIIFKWXGPHGSDCGIVNVNIPTNGAEIGGAFGGEKATGGGREAGSDSXWKQYMRRATCTINYGSELPLAQGINFG

SEQ ID NO: 8236 - protein, 170 aa, Zea mays
  misc_feature (19)..(19): Xaa can be any naturally occurring amino acid
  misc_feature (66)..(66): Xaa can be any naturally occurring amino acid
MAPTVMMASSATAVAPFQXLKSAASLPVARRSTRSLGNVSNGGRIRCMQVWPAYGNKKFETLSYLXPLSTDDLLKQVDYLLRNGWIPCLEFSKLGFVYRENSTSPCYYDGRYWTMWKLPMFGCTDATQVYKELQEAIAAYPDAFHRVIGFDNVRQTQCVSFIAYKPPGSE

SEQ ID NO: 8237 - protein, 447 aa, Methanococcoides burtonii DSM 6242
MTDIGIIAVGGYNEMGRNMTAIRVDEDIIIVDMGLRLDRVQIHEDVEIDKMHSLELIEMGAIPDDTIMKQVNGNVAAIVCTHGHLDHIGAIPKLAHRYTAPIIGTPYTAALIKQQIESERKFGVKNKIIPIEAGGTYQINDDVSIELIRVQHSIIDAVFVAVHTPVGAVLYACDFKLDRTPTLGEAPDFERLRELGKEGVICMIVESTNANRKGKTPSEQIAHDMVRDVLLGTEESDVGMIVTTFASHIARINSIIQVAGEMGRIPVLMGRSMDKYVVTAKNMGYIDFPKNVEIYGKRKDIDRAFKKIMSEGKEKYLPIVTGHQGEPGAILSRVASGDTPFEVESGDRIIFSANIIPSPMTQANRYALETKLKMKGARIYDDVHVSGHAYREDHWELLRMINPEHVIPAHGNIGMHSAYIEMAEDAGYILGDTVHMLRNGEELYIEE

SEQ ID NO: 8238 - protein, 250 aa, Raphanus sativus
MTKNYPAVSEEYQKEIEKCKRKLRGLIAEKNCAPIMVRLAWHSAGTFDCASRTGGPFGTMRFDDELAHGANNGLHIALRLLEPIREQFPTISHADFHQLAGVVAVEVTGGPEIPFHPGREDKPQPPPEGRLPDATKACDHLRQVFLKQMGLTDQDIVALSGAHTLGRCHKDRSGFEGAWTSNPLIFDNSYFKELLSGEKEGLLQLPSDKALLDDPVFRPLVEKYAADEEAFFADYAEAHLKLSELGFADA

SEQ ID NO: 8239 - protein, 183 aa, Xanthomonas axonopodis pv. citri str. 306
MSQTLYDIPVTRIDGQPTTLADYRGKVLLVVNVASKCGLTPQYEGLEALYRDKRAQGLEVLAFPANDFNGQEPGSEAEIAQFCQLTYDVTFPMFAKIAVAGDQAHPLYGALTSTHPHTTGEGPMREKLAGYGIAPNPAPGVVWNFEKFLIGRDGKIIDRFAPDIPADDARLRAAIDAALATRS

SEQ ID NO: 8240 - protein, 249 aa, Physalis peruviana
MAREKIKIKKIDNITARQVTFSKRRRGLFKKAEELSILCDADVALIIFSSTGKLFDFSSSSMKDILGKYKLQSANLDKVDQPFLDLQLENSLNVRLRKQVADKTRELRQMKGEELEGLSLEELQQIEKRLEAGFNRVLEIKGTRIMDEIANLQRKGAELMEENKKLKQKMEMMKLGKLPLLTDMDCMVMEEGQSSDSIITTNNVCSSNTGPPPEDDSSNASLKLGCNNGLAPVDDDCSITSLKLGLPLS

SEQ ID NO: 8241 - protein, 464 aa, Deinococcus radiodurans R1
MPGKLSSLNEGRWPQRKTPPHGGRGGPDSHSRSDTMTPTPKTPAEILEKTWQTEERWQGIKRNYTAEDVVRLRGSLPIEYTLAKHGANKLWQQMKEMPFVNALGALTGNQAMQQVKAGLKAIYLSGWQVAGDANNAGQMYPDQSLYPASSVPDVVKRINNTLRRADQIQTSEGKNDIDYFVPIVADAEAGFGGPLNAFELMKAMIEAGAAGVHFEDQLASEKKCGHLGGKVLVPTSQFIRTLNAARLAADVSGVPTVLIARTDADAANLLTSDVDDNDKPFCTGERTPEGFFYVKPGIDQAISRALAYAPYADVIWCETSVPNLEDAKKFADAVHAQFPGKLLAYNCSPSFNWKKNLDDETIAKFQVELGKMGYKFQFITLAGFHALNMSMFDLAYGYARKQMSAFVELQEREFAAQERGFTAVRHQREVGTGYFDLVSQAAGGGQSSTTALAGSTEAEQFAHH

SEQ ID NO: 8242 - protein, 247 aa, Physalis peruviana
MAREKIKIKKIDNITARQVTFSKRRRGLFKKAEELSILCDADVALIIFSSTGKLFDFSSSSMKDILGKYKLQSANLDKVDQPFLDLQLENSLNVRLRKQVADKTRELRQMKGEELEGLSLEELQQIEKRLEAGFNRVLEIKGTRIMDEIANLQRKGAELMEENKKLKQKMEMMKLGKLPLITEMECMVMEEGQSSDSIITTNNVCSSNTGPPPEDDSSNASLKLSCNNGLAPVDDDCSITSLKLGLS

SEQ ID NO: 8243 - protein, 107 aa, Schizosaccharomyces pombe
MEDEMQIDKKEVEIEQKPPRFEIKKWNAVALWQWDIVVDNCAICRNHIMDLCIECQANTDSAAAQECTVAWGTCNHAFHFHCISRWLNTRNVCPLDNREWEFQRYGH

SEQ ID NO: 8244 - protein, 132 aa, Brassica napus
  misc_feature (2)..(2): Xaa can be any naturally occurring amino acid
  misc_feature (11)..(11): Xaa can be any naturally occurring amino acid
  misc_feature (16)..(16): Xaa can be any naturally occurring amino acid
  misc_feature (32)..(32): Xaa can be any naturally occurring amino acid
  misc_feature (35)..(35): Xaa can be any naturally occurring amino acid
  misc_feature (40)..(40): Xaa can be any naturally occurring amino acid
  misc_feature (47)..(47): Xaa can be any naturally occurring amino acid
  misc_feature (51)..(51): Xaa can be any naturally occurring amino acid
  misc_feature (60)..(61): Xaa can be any naturally occurring amino acid
  misc_feature (65)..(65): Xaa can be any naturally occurring amino acid
  misc_feature (67)..(67): Xaa can be any naturally occurring amino acid
  misc_feature (70)..(70): Xaa can be any naturally occurring amino acid
  misc_feature (75)..(75): Xaa can be any naturally occurring amino acid
  misc_feature (84)..(85): Xaa can be any naturally occurring amino acid
WXSSMLSSAAXVTSPXQATMVAPFTGLKSSAXFPXHPAKXTTNITSXASNXRKELTCMKXXPPPXKXKVXNLSYXPDLTEIELXXEVEYPPPRGFPWVPWKGFPGSGKGLGFGKGENFPPFGRPQRGPKGKG

SEQ ID NO: 8245 - protein, 1401 aa, Schizosaccharomyces pombe
MGLEHTFYPAEDRFEPLLEHSEPVNFVPKENAKSYVRQGFASPHQSLMDNLVDSTESTKRSENFVSHIPLTPSHSGQSEKLMSTRTSHSPYISPTMSYTNHSPANLTRNSSFNHQHYSTTLRSPPSMRGRGIDVNSSHYPHISRPRTSSDSQKMYTRAPVDYYYIQENPYFNNIDQDSISDKSLPSTNQSLHHSEEDTESDNDFSESIHPEFDIDVFYKVSNILYDESDLQDPEKRERLEWHSMLSSVLKGDVMQTEKRRLRLTEPDGHSGTYISEVWLGLQAWLHGRLNADQAEVIRKSREGVEPVLREVIDFQIQDEETTKPPLEQVTEILEKVEQCKQFYISSREMEENVPLSASKEFNYKLNALISWSNVMESIQVETLVLQKWVGNDEFDLTMRTPQFNYDGVENTSSFVERIFRQSGLQRTFEQRTLTTLNRIIHQAKQTISENAQAFEEMKLPTYEDKLLPLVRFPIKLLEEALRLRLAYAKKIKGPNFLIVDSMLDDFKIALSVAVRIKREYIKIASPSPGWSLPTNVDEDYDNVLLDSLKFYFKLLTLKLSSGNKNLYFKEIDFLENEWAFLNEHIYWINGGDIHMAGQFSYLSNSLLLNVHRYVESHLNGPTERTAASLTNWYSTLLKNTQIRFRKILRFSETLNSRFENASDFVISEGHLPDLVNRLSTTGHFLAYTANLERDGVFVIADHTLSENPEALKALLFSKDISNLETIQQNCSYVLILCPVHPIVWKGRIEKVDVPDFSVDLKTNRVRIIASNKREHLQAAKSVFQSISGDLVTLAVECRSSITRVYKEFIRLSKLCMRISSTVVDCVSAVREACSGVNCHDLIYHVFSFAAEFGQRILRFLSFDSYWQTKLKRKITSLAVEWISFICDECDLMDRKTFRWGVGALEFLMLMIRGNNILLIDDAMFLKIREKVGKSMAFLLTHFDVLGAKSKVAAKLQRESTEVSSSPRLTSFGDVEEEALSIQLLQKETMLRIDELEIERNNTLLERLAIGHVLDDSVFRNRDFIKLASSFSNITIRWQQGHFVRSGMFGDVYTGVNMETGDLLAVKEIKLQDSRTFRSTVDQIHNEMTVLERLNHPNVVTYYGVEVHREKVYIFMEFCQGGSLADLLAHGRIEDENVLKVYVVQLLEGLAYIHSQHILHRDIKPANILLDHRGMIKYSDFGSALYVSPPTDPEVRYEDIQPELQHLAGTPMYMAPEIILGTKKGDFGAMDIWSLGCVILEMMTGSTPWSEMDNEWAIMYHVAAMHTPSIPQNEKISSLARDFIEQCFERDPEQRPRAVDLLTHPWITDFRKKTIITMPPATITKKTSLSHTITEEKTAQLLAGRHDDSKAETDSLAASYKEESALPVASNVGLRQPNELRIDSINLPPAIVTPDTINYSVD

SEQ ID NO: 8246 - protein, 229 aa, Oryza sativa (japonica cultivar-group)
MGSRLGRRVIHFANLPLKLMLPPAPLSSVQEFAVKTVPSASKVDIRRCLESMYGFSVAEVRTLNMEGKKLRRGPFLAAKPDYKKAYVTLRAPLPVSPDLFPIGLVLGERERKASAAAARRKAVEGAEVEGEGKGKHWMEDEKVGFSRAGRGKVVYGNPGRLGKKRNGGTKVKDRAGEEVGKFPWSGTRLATEKKPARKQQYAPKKKGIVLKQKSWKGSVHRQPKKKVEA

SEQ ID NO: 8247 - protein, 321 aa, Arabidopsis thaliana
MGEPKDSLALFLCHESESSLNEDDDETIERSDKQEPHFTTTIDDEDYVADLVLKENLRFETLPSKTTSSSDRLIAIDWILTVHKNKIWVPTSNSLHCNLILRSVSPQKIHRYETWAMRLLSVACLSLAAKMEERIVPGLSQYPQDHDFVFKPDVIRKTELLILSTLDWKMNLITPFHYFNYFLAKISQDNHSVSKDLVLLRSSDSLLALTKEISFTEYRQFVVAAVTTLLASSSTSSDIRLTREEIANKFGSISWWTSNENENVYLCYQRTLEIEERKHMTPPPEIAVSREPPASGSGAKRRLSFDDSDQSSPPAKRMRRL

SEQ ID NO: 8248 - protein, 455 aa, Glycine max
EKATGQEYACKYIAKRKLVTDDDVEDVRREIQIMHHLAGHPNVISIKGAYEDAMAVHVVMELCAGGELFDRIIQRGHYTERQAAELTRTIVGVVEACHSLGVMHRDLKPENFLFVNQHEDSLLKTIDFGLSVFFKPALKTDDLSLPGDIFNDVVGSPYYVAPDVLRKRYGPEADVWSAGVILYILLSGVPPFWAENEQGIFEQVLRGDLDFSSDPWPSISESAKDLVRKMLVRDPRRRLTAHQVLCHPWIQVDGVAPDKPLDSAVLSRLKQFSAMNKLKKMALIIIAESLSEEEIAGLKEMFKMIDADNSGQITFEELKAGLKRVGANLKESEIYDLMQAADVDNSGTIDYGEFLAATLHRNKIEREDNLFAAFSYFDKDGSGYITQEELQQACDEFGIKDVRLEEIIKEIDEDNDGRIDYNEFVAMMQKGNLPAVGKKGLENSFSIKFREALKL

SEQ ID NO: 8249 - protein, 146 aa, Pediococcus acidilactici
TIADTIENYSELYVQSQNATFLSIDDPDNMETALKNAADGRDIRLIVVTDAEGILGIGDWGTNGVDISVGKLMVYTAAAGIDPSQVLPVVLDVGTNNEKLLKDPMYLGNRHERIKGDRYFEFVDQFVQTAENLFPNMYLHFEDFGA

SEQ ID NO: 8250 - protein, 175 aa, Triticum aestivum
NSPDGTYDAIIVDSSDPIGPAQELVEKPFFETIARALRPGGVLCNQAESMWLHTHLIQDMLSICCETFKGSVHYAWASVPTYPSGAIGFLLCAKEGPPVNFLAPINPIEKLEGAMTAGRDIRFYNTEMHRAAFVLPTFAKRELEAYGGSTRRAQEEKSAEPAKVAVAPHSEILTA

SEQ ID NO: 8251 - protein, 204 aa, Burkholderia fungorum LB400
MAVVAPLTPGTDVPETLVPVSATVVPTAVMRLLAWVTMLPTGVEEVPEVPEVPEVPEVPEVPEVPEVPEVPEVPEVPEVPEVPEVPEVPEVPEVPEVPEVPEVPEVPEVPEVPEVPEVPEVPEVPEVPEVPEVPEVPEVPEVPEVPEVPEVPEVPEVPEVPEVPEVPEVPEVPEVPEVPEVPDPEVPPSPPPPILGVLRVDPQP

SEQ ID NO: 8252 - protein, 476 aa, Ralstonia eutropha JMP134
MQQRDKLFINGKWVSPHGTGLIDVIHSTTEAVMGRIPEGSARDAEDAIQAARAAFDGWAATPPAERAGYIRKIAEGLKARTEELAQLIAGEVGMPIKLARAIQVGGPVYNWGQAAKLLEGFDFEEEVGNSLVVREPVGVVAAITPWNYPLNQITLKVAPALAAGCTVVLKPSEVAPLNAFVLAEVIAEAGLPPGVLNLVTGYGPVVGEVLASHPEVDMVSFTGSTRAGKRVSELASQSVKRVALELGGKSASVILDDADLPAAVKGTINACFLNSGQTCSAHTRMLVPRSRYDEVKAIAAKVVEGFTVGDPLQETTRLGPLISAVQKDRVMGYIRRGLEEGAELVAGGPDAPAGLEKGFFVKPTVLGNVEPRATVAQEEIFGPVLSIICYNTEEDAVRIANDSIYGLGGGVWAGDEARAVRVARRIRTGQVDINGGPFNMSAPFGGYKQSGNGREAGKYGLEEFLEYKSLQFKKPA

SEQ ID NO: 8253 - protein, 129 aa, Glycine max
  misc_feature (77)..(77): Xaa can be any naturally occurring amino acid
  misc_feature (100)..(100): Xaa can be any naturally occurring amino acid
  misc_feature (110)..(110): Xaa can be any naturally occurring amino acid
FLQLSFIARLPDVLKNLLESLQSVIDYAIQSGGFEFYFQGTYSVKCIQDRFLVKDFEKFNSPFRLGLEAGSKPELLXGMSCLLKSNPDALLICNGFKDAXYILLALAANXLALKTVIVEEQDEEGALIR

SEQ ID NO: 8254 - protein, 63 aa, Brassica napus
  misc_feature (53)..(53): Xaa can be any naturally occurring amino acid
CSGQEIYQQFSRRKKECSSRRHLDLASRGLCLMPISASYPVAAAAASAAEMNXHLTSGILHSR

SEQ ID NO: 8255 - protein, 213 aa, Glycine max
MALEVAVKAAVGAPNVLGDCPFSQRVLLTLEEKKIPYKLHLIDLSSKPEWFLGVNPEGKVPVVLFDGKWVADSDVIVGILEEKYPEPSLVTPPEFASVGSKIFGSFVSFLKSKDTNDGTEQTLVAELSALDEHLKAHGPYIAGEKVTAVDLSLAPKLYHLVVALSHFKNWNIPESLTHVHNYTKLLFSRESFEKTKPPKVEYVISGWAPKVNA

SEQ ID NO: 8256 - protein, 160 aa, Citrullus lanatus
IIAKGHYTERAAASLLRTIVQIVHTCHSMGVIHRDLKPENFLLLSKDEDSPLKATDFGLSVFYKQGEVFKDIVGSAYYIAPEVLKRRYGPEVDIWSVGVMLYILLCGVPPFWAESEHGIFNAILRGHIDFTSDPWPTISPAAKDLVRKMLNSDPKQRLTA

SEQ ID NO: 8257 - protein, 263 aa, Triticum aestivum
  misc_feature (28)..(28): Xaa can be any naturally occurring amino acid
  misc_feature (36)..(36): Xaa can be any naturally occurring amino acid
  misc_feature (73)..(73): Xaa can be any naturally occurring amino acid
NPEGWAATWRRVWPNPKVLQRVPFVPMXTEFPGMVXRPLGAFRSPAEYKYATLKGQGGLLHLIQLGSPFSGPXGEVPALGAGPRRCVWQFNFREFDDERDIFATDSIELLRHSGIDFRRNAERGVDARRFAELLMSSGVVLNDAVYWVTFHAGYDFGYLLKILTCNSLPDTQAGFFKLMKIYFPTVYDIKHLMKFCNSLHGGLNKLAELLDVERVGESHQAGSDSLVTSCAFWKLKDSFFAGSTEKYAGVLYGLNAENGVSAH

SEQ ID NO: 8258 - protein, 467 aa, Listeria monocytogenes str. 1/2a F6854
MTSVMWFRRDLRVSDNKALYHACKEDDLLLLFQVNPAQFITGSPSHQAFFASVAHFKQEVDKTALLQIMFGEPVECLKQLKETLPSWDKVYFNRDETGYGAERDEAAKTFFDEQEIEVQAFHDSYLHSAEEVKKSPTEYYKIFTPYYKKWREEIKETPFKVTLKADNIRKENLFPKYEEQFAEMTCDLPILDSGEKTANTRLANFIKHDVADYDKARDFPELDKTSHLSRYLRTGEISVRTIWQALQENEATEGRAIFEKELCWRDFYNMIYVSFPNQKNEPIQENYRFIEWENNREFFKAWQDGKTGFPLVDAAMRQLKETGWMHNRLRMVTASFLTKDLLIDWRFGEKYFQQMLIDYDPASNIGGWQWAASTGTDAVPYFRIFNPTTQSQKFDPTGKFIRKYVKELANLPDKYIHQPEKMSEIEQKEYGLLLGKDYPFPLIDHKERRKLAIARYEFSKEHYRGNI

SEQ ID NO: 8259 - protein, 459 aa, Schizosaccharomyces pombe
MTETVTTTSSDKSEKKNYLFYTSPNHRPPTVVRAEGVYLYLEDGTRIMDATGGAAVACLGHGNKEVIDAMHKQSEKVCYIHSMGFSNEPADKLANLLVSEHPDVFARAYFANSGSEAVETCLKLILQYWQLVGEKQRCHIIARKQGYHGNTLFALSVGGMKPRKQPYEGVFSHTTSHVSPCFEYRYKENGETTEEYVARLAKELEDEILRVGPEKVAAFVAETVSGACTGCATPVPGYFKAMRKVCDKYGVIFYLDEVMSGIGRTGTMHAWEQEGVTPDIQSIAKCLGGGYQPISGALVGHRIMNVFEQKDAAMAGFFTYQAHPIACSAALAVQTILRRDHLVERAAEMGKYLSEKLHETFDSHPNVGNIRGRGLFWGLEIVKDKATKECFPPEYKVGSLANKIGCEHGVFVYPGMGTIDGTRGDHVLLAPPYIITREQIDELVEALSKTITSTVAALP

SEQ ID NO: 8260 - protein, 343 aa, Listeria monocytogenes str. 4b F2365
MKAVVKTNPGYDQMELRDVEEPQVYGDKVKIKVAFTGICGSDIHTFKGEYKNPTTPVTLGHEFSGVVVEVGPDVTSIKVGDRVTSETTFETCGECIYCKERDYNLCSNRRGIGTQANGSFAEFVLSREESCHVLDERISLEAAALTEPLACCVHSALEKTTIRPDDTVLVFGPGPIGLLLAQVVKAQGATVIMAGITKDSDRLRLAKELGMDRIVDTLKEDLAEVVLGMTDGYGAERVFDCSGAVPAVNQGLPLTKKKGDFVQVGLFAEKKNAIDEESIIQREIAYIGSRSQKPSSWILALDLLANGKINTDKMITKVYGLDDWREAFEAVMAGNEIKVLVKS

SEQ ID NO: 8261 - protein, 350 aa, Listeria monocytogenes str. 4b F2365
MRAAVLYENNVIKAEQIDEATCGKDQVRVEVKAVGICGSDIHKMQTRWKYPLPAVMGHEFAGVVTEIGSEVTNVAIGDRVAGIPLEPCMECNYCKAGDFALCDNYRMVGSHFHGGFAENVVMKADNVISIGDLDFEEGAMIEPLAVSMHGVLGIQPRLGDTVIVFGIGTIGILVVQCLLLAGVKDIIAVDISDKKLADAREFGCKYTINPKNEDLKERVFAYTNGLGADIALECAGSKITQEQCLLVTKKKGKVGYLGIAYADVLLHEEAFENIFRRELTLKGFWNSYSAPFPGEEWRTSIEFVKQGRIKLKPLISHRYKLEETKEAFDMILSREHDYNKVMILPQKGDD

SEQ ID NO: 8262 - protein, 328 aa, Magnaporthe grisea 70-15
MAKTSIKLNSGYEMPLVGFGIWKVPVDKTAQAVYDAIKLGYRQIDGAYDYTNSKEAGEGVRRAIEEGIVKREDLFITSKLWNNYHKHEHAIEMAKHEVDTWGIGYLDLFLIHFPISLEYISHSKMPYPCFWPDREKSRSTPLQYTPVAETWAALESLVKTDSNPDGILRSIGVANFRAQLLTDLWGSAKIKPAVNQIEHHPYLVQPQLLAFLKDHGIAITAYSSFGPQSFVELDHPRVSKVEPLFTHPTIKAIADKHGRTGAQVLLRWATQRDIVVIPKSNNVDRLKQNLDCVSFDLSDDEVKQISDLDCGVRFNDPADLSPPIYIFD

SEQ ID NO: 8263 - protein, 205 aa, Triticum aestivum
  misc_feature (6)..(8): Xaa can be any naturally occurring amino acid
  misc_feature (83)..(83): Xaa can be any naturally occurring amino acid
IRHQIXXXHQTFHHQPQQTYPHQPQQQFPQTQQPQQPFPQPQQTFPQQPQLPFPQQPQQQFPQPQQIPQQQQIPQQPQQFPQXQIPQQRGPQQHQMPQQPQQFPQQQFPQQHQSPQQQFPQQQFPQQQQFPQQQQLTQQQFPRPQQSPEQQQFPQQQFPQQPPQQFPQQQFPIPYPPQQSQEPSPYQQYPQQQPSGSDVISISGL

SEQ ID NO: 8264 - protein, 1122 aa, Burkholderia cepacia R18194
MMIKVWPDETHPTGHAMCMKGKAAPELVHSPNRVLYPMRRTRPKGAADPGWKRIGWEEALSEIAERLAYFKRENGAESVAFGVTTPSGTPMSDSIDWVERFVWLFGSPNICYATEICNWHKDSAHVFTFGCGMPTADYQQADLIVLWGNNPANTWLAQADAIAKGRRRGAKLIVVDPRPTPLAREADLWLRVNPGTDGALAMAIARQMIAIGNVDEPFVRRWTNGPLLVRADTGRFLRERDIDPHASGNRYALWNQTLDRLELVEEEAGTALSDLSMTGTRHVGITDSAGRCTQVECTPAFDLYARALAAYTPELASTITGIDAADIMKAAQMLHPGQGIAYHAWSGVGMHTNATQTERAIATLYALTGAFDTRGSNREWAKQPANAVSSYAMLNPGQRAKALGLAERPLGPPSQGWVTARDVYRAILDAEPYRVRALFAFGTNMVLSQADGGIAHNALCALDFHVHCDLFETPSSRYADILLPVNTPWEREGLRLGFEINERAVELVQLRQRMVPPRGESRADYDIVFDLAVRLGMKDRFFGGSIEAGWNHVLEPLGMDVALLRTHPEGIARPLTQYERRYASATPDGVRGFNTETLRVELYSEKLHRHGYPAVPQYVPPQHGLGEGVNDRRRFPYTLTSMKNGYYCHSQHRGLPSLRRRAPYPVAELNDALAAEHGIVDDDWFLVETTNGSARFKARIVPELAHDVIVAEYGWWQACDEIGMDALAVEGRNHSNFNRLVSAARLDPVSGSSPLRSVRCRIRPDPSTDPSRRAWKGRRDFVVSAIHEEASGVRTVTFRASDRGALPDYLPGQHVTVHVPALGDGGTTRAYSLTGAASEDDRRTYSISVRHQKGRTGEGVPFEGAMSSYIHGSLKVGDPVLLGAPAGTFIVPPASKQPVVMFAGGIGITPFISYLESIRDRGAQAPESRLFYANQNSGTHAFRERIERLKQRLPKLEVVNCYNQPHDEVLGRDYQIRGYLTADVVSDDLIQRRARFYLCGPEPMMQAITAGLIERGVPPFDIFKEAFRSPSRPALDPSKRFVVQFTRSRRVSTWTPRDGSLLSFAESLGVVMPSGCRVGQCESCAVKVVSGEVAHLSGHGPDEPDVCLACQAIPATDVAIDA

SEQ ID NO: 8265 - protein, 424 aa, Hordeum vulgare
MVVTVAATGPDTAETLHSTTFASRYVRDQLPRYRMPENSIPKEAAYQIISDELMLDGNPRLNLASFVTTWMEPECGKLIMDSVNKNYVDMDEYPVTTELQVCWEKFARYFEVELKEVKLTEGYYVMDPKKAVEMVDENTICVAAILGSTLTGEYEDVKLLNDLLVEKNKETGWNVPIHVDAASGGFIAPFLQPELEWDFRLPLVKSINVSGHKYGLVYPGVGWVIWRSKDDLPEELIFHINYLGADQPTFTLNFSKGASQIIAQYYQLIRLGFEGYKHIMENCKLNAAVLKEGIDATGRFDVLSKADGVPLVAIRLKDSTNFSVFDISENLRRFGWIVPAYTMPADAEHVAVLRIVIREDFNRSLAQRLLADINKIIGELDAHAVHAIKLSTAAAGGDGASKSAVDAATEAFKDLAGKKKAGVC

SEQ ID NO: 8266 - protein, 318 aa, Zea mays
  misc_feature (27)..(27): Xaa can be any naturally occurring amino acid
MLHGRELGPVHGGSRARIRLEPAPRRXRWVPLAYTDVATFTKDQEFLISNRASQVGFDYVEGQVQLSRSLVEGPKSTPFFSGADVARLAGLASRTGPAAIYYIEGAMYYTKDTAISVDKKMKALLDQLSFEPGFAFTKDVTFVQFLDRVREEERVLRSAGAWEVPHPWLNLFVPRSRILDFDDGVFKALLKDSNPAGIILMYPMNKDRWDDRMTAMTPATNDDDVFYAVSFLWSALSADDVPQLERWNKAVLDFCDRSGIECKQYLPHYTSQDGWRRHFGAKWSRIAELKARYDPRALLSPGQRIFPVPVEASGIASA

SEQ ID NO: 8267 - protein, 439 aa, Escherichia coli CFT073
  misc_feature (394)..(394): Xaa can be any naturally occurring amino acid
MEHLHMKTRTQQIEELQKEWTQPRWEGITRPYSAEDVVKLRGSVNPECTLAQLGAAKMWRLLHGESKKGYINSLGALTGGQALQQAKAGIEAVYLSGWQVAADANLAASMYPDQSLYPANSVPAVVERINNTFRRADQIQWSAGIEPGDPRYVDYFLPIVADAEAGFGGVLNAFELMKAMIEAGAAAVHFEDQLASVKKCGHMGGKVLVPTQEAIQKLVAARLAADVTGVPTLLVARTDADAADLITSDCDPYDSEFITGERTSEGFFRTHAGIEQAISRGLAYAPYADLVWCETSTPDLELARRFAQAIHAKYPGKLLAYNCSPSFNWQKNLDDKTIASFQQQLSDMGYKFQFITLAGIHSMWFNMFDLANAYAQGEGMKHYVEKVQQPEFAXAKDGYTFVSHQQEVGTGYFDKVTTIIQGGTSSVTALTGSTEESQF

SEQ ID NO: 8268 - protein, 195 aa, Methanocaldococcus jannaschii DSM 2661
MATGPTYRVKFRRRREAKTDYRKRLKLLLSRKPRLVARRTLNHCIAQIVLYDEKGDKTVVSAHSRELIKLGYKGHTGNLPSAYLTGYLLGKKALAKGYTEAVLDIGLHRATKGNAIFAILKGALDAGMEIPHGEEILPSEERIRGEHIKAYAEMLKEQDEERYKKQFSKYLEKGLEPEKLPEHFEEIKAKIDSMF

SEQ ID NO: 8269 - protein, 135 aa, Triticum aestivum
  misc_feature (98)..(98): Xaa can be any naturally occurring amino acid
  misc_feature (112)..(112): Xaa can be any naturally occurring amino acid
MRDDPEDVDSRSIFVGNVDYSSSPEEIQAHFQSCGSINRVTILLDKFTGHPKGYAYVEFTEPSFVAQALVLNESVFKGRNLKVVPKRTNIPGMTRGKXRGGPRGRGYGGRGXTHQEESGYRGGFRGSRGRGYSPY

SEQ ID NO: 8270 - protein, 409 aa, Vibrio vulnificus CMCP6
MELTTTVSELRYALDTFFFLISGALVMWMAAGFAMLEAGLVRSKNTTEILTKNFCLYAIACTTYLVVGYNIMYVDNSEGGWLPSIGALIGSQAEGADHSLESDFFFQVVFVATAMSVVSGAVAERMKLWSFLLFSAILTAFIYPVEGYWTWGGGFLSAAGFSDFAGSGIVHMAGAAAALAGVLLLGARKGKYGKNGEVYPIPGSNMPLATLGTFILWFGWFGFNGGSQLMVSDFENATAVGQIFLNTNAAAAAGAITALLVCKTTWGKADLTMILNGALAGLVAITADPLSPSPLYAVAIGAVAGALVVFSIVGLDKLKIDDPVGAISVHGVCGFFGLMVVPISNGDASFLSQLFGAAVIFAWVFGASLAVWAVLKATIGIRVSEDEEMEGMDMHDCGVGAYPEFVTVK

SEQ ID NO: 8271 - protein, 348 aa, Deinococcus radiodurans
MRALSKQQPGEGIWMIETEVPTPGPNDLLIRIRKGSICGTDVHIYKWDDWASQTVPVPMVVGHEYVGVVAGMGSEVRGFEIGDRVSGEGHVTCGHCRNCRAGRRHLCRNTQGVGVNRPGSFAEYLVLPAFNAFKLPDDIPDDVAAIFDPFGNAVHTALSFDLVGEDVLITGAGPIGCMAAAVARHVGARNVVITDVNDYRLDLARQMGVTRAVNVAREDLWTVATQELDMHEGFDVGMEMSGSGPAFAQMVSVMNNGGKVALLGIPSGEVQIDWNAVIFKMLTIKGIYGREMFETWYKMAALIQSGLDLTPVITHHYGIGDFQQGFDAMLSGQSGKVILDWETEEQSA

SEQ ID NO: 8272 - protein, 235 aa, Solanum tuberosum
MAREKIKIKKIDNITARQVTFSKRRRGLFKKAEELSVLCDADVALIIFSATGKLFDFASTSMKDILGKYKLQSASLEKVDEPSLDLQLENSLNMRLSKQVADKTRELRQMRGEELEGLSLEELQQIEKRLEAGFNRVLEIKGTRIMDEITNLQRKGAELMEENKQLKHKMEIMKKGKFPLLTDMVMEEGQSSESIITTNNPDQDDSSNASLKLGGTTAVEDECSITSLKLGLPFS

SEQ ID NO: 8273 - protein, 127 aa, Desulfovibrio desulfuricans G20
MSDITKEQVVEFIAGMTVLELSEFIKELEEKFGVSAAAPVAAMAAAPAEAAAPAEEEKTEFDVILKSPGANKIAVIKVVRALTGLGLKEAKEKVDGTPSTLKEAVSKDDAEEAAKQLKEAGAEVEVK

SEQ ID NO: 8274 - protein, 352 aa, Sinorhizobium meliloti 1021
MSGAPTRTRFARLYGPRDLRLEVADVPAPGDGEVLLKMAAGGICGSDLHYYQDGGFGPVRVREPIIPGHEASGRVAVLGAGVSGLAIDDLVAVNPSQPCGTCRFCGEGLPVHCLDMRFLGSAMRLPHTQGMFRDWLVVPAVQCHPAGSQVSPGEAACAEPLAVCLHAAAQAGEIRGKKVLVTGAGPIGALVVAAARHAGADEIVVTDLADAALDRAKAMGATRIVNVHRDPAGLAAYEADKGKFHVAFECSAAEPALRGAVAAVRPRGTIVQVGVTGEITLPLHALVGKELRLVGSQRFDGEFALAVALISDRRIDVRPIISHQFPVDEAVRAFEQAGDRSAACKVQLTFLS

SEQ ID NO: 8275 - protein, 295 aa, Zea mays
MAGLSLQHPWAFTFGLLGNVISFMTFLAPTPTFYRIYKSKSTEGFQSVPYVVALFSAMLWIFYALIKSNETFLITINAAGCVIETVYVVMYFVYATKKGRMFTAKIMLLLNVGAFGAILLLTLLLFKGDKRVVMLGWICVGFSVSVFVAPLSIMRRVIQTKSVEYMPFSLSLSLTLSAVVWFLYGLLIKDKYVALPNILGFTFGVVQMVLYVVYMNKTPLPVADGKAAGKLPSAADEHVVVNVTKLSPGRLPPVTQMAAVPTKSCATEAAAPATLPSRDVVDVLVNRHSPAVHVT

SEQ ID NO: 8276 - protein, 184 aa, Pseudomonas aeruginosa PAO1
MKPRVLLSVLALAGLPLSGWAADCPELLQGQLTKLRSKESIDLCQRYAGKPLVVVNTASHCGFTPQFKGLEALYQRYKGQGLEVLGVPSDDFKQEAADTAETAKICYGNYGVTFAMTQPQHVRGDEAIPLFRQLAEQSGQAPRWNFYKYVVDRQGRVVAQFSSKTTPDDPQLQAAIEKAIASQP

SEQ ID NO: 8277 - protein, 107 aa, Zea mays
RTRGFFLSYFSLYFPHHLFLGLSLLLSLHFFFFLLLFFFLSLKSIPSNLFTKHSFHFHYTPHHKNKLSLTSSQILSTVTNLKAITMLYCLQLLHSHIGSHIPTTSLL

SEQ ID NO: 8278 - protein, 119 aa, Bartonella sp. Bb6966bgl
GPAHGGANEACLKMLQEIGSIKRIPEFIARAKDKNDPFRLMGFGHRVYKNYDPRAKIMQKTCHEVLKELNIQDDPLLDIAIELEKIALSDEYFIEKKLYPNVDFYSGITLKALGFPTEM

SEQ ID NO: 8279 - protein, 113 aa, Bartonella sp. Bb7700bgl
GPAHGGANEACLKMLQEIGSIKRIPEFIARAKDKNDPFRLMGFGHRVYKNYDPRAKIMQKTCHEVLKELNIQDDPLLDIAIELEKIALSDEYFIEKKLYPNVDFYSGITLKAL

SEQ ID NO: 8280 - protein, 433 aa, Methylococcus capsulatus str. Bath
MPLIFGVCCLVVAAAHMVPAARAAAGEFFNGLLGKRMTKSADVLFVLLGAIMVLAMHAGFAFLEVGTVRRKNQVNALVKILSDFAMSTIAYFFIGYELAYGVDFFDSALALTVDNGYGLVKFFFLLTFAAAIPAIVSGGIAERSKFNPQLAATFLLVGFVYPLFEGIAWNSNLGFQGWLQTRFGAQFHDFAGSVVVHAVGGWIGLAAVLLLGPRRGRYHRDGMIAAHPPSSIPFLALGAWILTVGWFGFNVMSAQNLNGISGLVAVNSLMAMVGGTLAALLAGRNDPGFVHNGPLAGLVAVCAGSDLMHPIGALAVGAVAGFLFVYLFTLTQNRWKIDDVLGVWPLHGLCGAWGGIAAGIFGQSALGGIGGISFMAQVLGTGLGVAIALAGGLAVYGAAKTLIGLRLTPEEEFDGADLTLHRISSSPEKEAGW

SEQ ID NO: 8281 - protein, 110 aa, Bartonella sp. Rr7684bgl
GGPAHGGANEACLKMLQEIGSVKRIPEFIARAKDKNDPFRLMGFGHRVYKNYDPRAKIMQQTCHEVLKELNIQDDPLLDIAIELEKIALNDEYFVEKKLYPNVDFYSGIT

SEQ ID NO: 8282 - protein, 471 aa, Blumeria graminis
MPTFGFLKKRKKVSLGHRDLDSPASTLSQPASPITPSTSRGLGEPIDTTSSKITSPGQKLGSNITKDHRGTRTTVEDLPSMTDVSHLQQAYRNLSQGSTASKSNLLTIHNLINPPQHDGAGQSKVMPEKHMNNKTERPVQGKAAVAQVRQTKGKYSLSDFEILRTLGTGSFGRVHLVQSKHNQRFYAVKVLKKQQVVKMKQVEHTNDERSMLQEVKHPFLITLWGTFQDSKNLYMVMDFVEGGELFSLLRKSQRFPNPVAKFYAAEVTLALEYLHKKDIIYRDLKPENLLLDRHGHLKITDFGFAKKVTDITWTLCGTPDYLAPEVVSSKGYNKSVDWWSLGILIFEMLCGYTPFWDNGSPMKIYENILKGRVKYPPYIHPDAQDLIQRLITADLTKRLGNLHGGAEGIKSHQWFAEVTWERLAKKDIDAPYVPPVKAGSGDASQFDKYPEETERYGQTGPDEHGSLFENF

SEQ ID NO: 8283 - protein, 252 aa, Prunus microcarpa
AHYKSEADVGNAIAEAIQSGLVKREELFITSKASNHGHVVEACKNSLKKLQLDYLDLYLVHYPLATKHSGVGTTASLLDENKVLDIDVTVSLETTWHDMEKTVDLGLVRSIGLSNYELFLTRDCLSYAKIKPQVSQFETHPYFQRESLVRFCKKHGVIPMAHTPLGGATANVKAFGSISPLEDPVLIGLAKKYQKSVAQIALRWNLERGTPVIPKSSKVERLKENLEVLNFKLEKEDIELINTIDKKSRTTL

SEQ ID NO: 8284 - protein, 183 aa, Pseudomonas syringae pv. tomato str. DC3000
MKIRFVSIPLLLLSMSGAVMAADCPPLLQGELPKLRAKENIDLCKRFAGKPLVVVNTASFCGFAPQFKGLEELSQRYKGQGLEVLGLPSNDFKQEAKDGEETAKVCYVNYGVTFTMTEPQAVRGDDATHLFKVLAEQSSAPRWNFYKYVVDRQGKVVANFSSMTKPDDPELIAAIEKAIASKP

SEQ ID NO: 8285 - protein, 252 aa, Prunus lusitanica
AHYRSEADVGNALAEAFETGLVKREELFITSKASNHGHVVEACKNSLKKLQLDYLDLYLVHYPLATKHSGVGTTASLLDENKVLDIDVTVSLESTWHDMEKTVSLGLVRSIGLSNYELFLTRDCLSYAKIKPQVSQFETHPYFQRETLVRFCRKHGVCPMAHTPLGGATANVKAFGSISPLEDPVLRALAKKYKKSVAQIALRWNLDRNTPVIPKSSKIERLKENLEVLNFKLEKEDIELINTIDKKSRTTL

SEQ ID NO: 8286 - protein, 199 aa, Colletotrichum trifolii
MAQPGVQSLKCVVTGDGAVGKTCLLISYTTNAFPGEYIPTVFDNYSASVMVDGKPISLGLWDTAGQEDYDRLRPLSYPQTDVFLICFSIVSPPSFDNVKAKWYPEIDHHAPNIPIILVGTKLDLREDPNTLESLRQKRMEPVSYDQALICAKEIKAHKYLECSALTQRNLKSVFDEAIRAVLNPRPVAQQKKKSKCTIL

SEQ ID NO: 8287 - protein, 252 aa, Prunus virginiana
AHYKSEADVGNALAEAFDTGLVKREELFITSKASNHGHVVEACRNSLKKLQLDYLDLYLVHYPLATKHSGVGTTASLLDENKVLDIDVTVSLESTWHDMEKTVSLGLVRSIGLSNYELFLTRDCLSYAKIKPQVSQFETHPYFQRETLVRFCRKHGVCPMAHTPLGGSTANVKSFGSISPLEDPVLHGLAKKYKKSVAQIALRWNLDRNTPVIPKSSKIERLKENLEVLNFKLEKGDIELINTIDKKSRTTL

SEQ ID NO: 8288 - protein, 57 aa, Zea mays
MPFTASDICKILLAIILPPVGVFLERGCGADFLINILLTILGYIPGIIHALYIIFKF

SEQ ID NO: 8289 - protein, 295 aa, Onion yellows phytoplasma OY-M
MKAFNWFPGHMKKTFDQIKNNLSLVDIVLVILDARIPLSSLNSQIFSLINQRQKPLLILLNKFSLTDPCKINNFIANYHKKQIPVLTIDAIKSPKLQEIYQKALTTIKAKNPLFKSRRIATQTPNIKAMIVGTPNVGKSTLINSFAQKKVLKTANLAGTTKRIQWIDIAKPNIQFLDTPGVLWHNFSDPRISLALALAGCFKDSILPLEKLGIHALCYLIKHYGTNLQKRFNLDQNDLSNPNLVDIIGQKRNIYTKNQKVDQSRVYQMLLQEIRQGNLGKLNFDLDVLSLFEKLF

SEQ ID NO: 8290 - protein, 275 aa, Gibberella moniliformis
MLEDPAHQDVARWGKDGDTFVVVENEKFTRSILPKHFKHSNMASFVRQLNKYDFHKVRQTNDSGSAANGANTLEFKHPNFRVGSKDDLDNIRRKAPAPRRTQATEDFTTSHHISVMTEQLTATQQQVQQLQELFTEVSQTNRLLVNEVLTLQKMLNAQKQSQHEMLNYLSPSNNRHQQSMHLNVGTSPLDGSDDSAPELRRARELLSSVTPDQIADRELERLQGVYGSPADSAVVIPQASMPMMHDPMNDINRYPVYPVGQTVGIDPFHSDHIHK

SEQ ID NO: 8291 - protein, 458 aa, Streptococcus mutans UA159
MAYKTTYPYTNEVLKEFANNSDADLEKALVTGHALYKKWRAEGGLEERKAQLHKVADILRRDVDKYAEVMTKDMGKLFTEAKGEVELCAEIADYFADKAEEFLEPKAFEPIHGDAYYIKQAVGVLFMVEPWNFPFYQIMRVFAPNFMIGNPTVLKHASICPASAQAFENLVKEAGAPEGSFKNLFLTYDQVNKAIADPRIQGVALTGSERGGASIAAEAGANLKKSALELGGNDAFLILEDADFELLKDTIFFARLYNAGQVCTSSKRFIVVGEENYKKFLDMVVETFKTAKWGDPMDPETTLAPLSSAEAKEEVLGQIKLAADNGARVVYGNKPIDHPGNFVFPTVLTDITKENPIYNQEIFGPVASIYKVDTEEEAIALANDSSYGLGGTVFSKDLEHAKAVAAKIETGMTFINSGWSSYPEVPFGGIKNSGYGRELSNLGFDAFVNEHLVFIPKQ

SEQ ID NO: 8292 - protein, 539 aa, Glycine max
MASSLRISRLLSRSFLSASTTTPLFSRGGSGALGAGLSKFSTAAAIEEPIKPPLKVEHTQLLIDGKFVDAATGKTFPTLDPRTGDVISHVAEGDHEDVDRAVAAARKAFDRGPWPKMTAYERQRILLRAADLFEKHNDELAALETWDNGKPYEQSAQIEIPMLVRLFRYYAGWADKIHGLTVPADGPYHVQTLHEPIGVAGQIIPWNFPLVMFAWKVGPALACGNTIVLKTAEQTPLSALYASKLFHEAGLPAGVLNVISGFGPTAGAAIASHMDIDKLAFTGSTETGKIVLELAARSNLKPVTLELGGKSPFIVCEDADVDEAVELAHFALFFNQGQCCCAGSRTFVHERVYDEFIEKAKARALKRAVGDPFKGGIEQGPQIDSEQFQKILKYIRSGVESGATLETGGDRFGNSGFYIQPTVFSNVKDDMLIAKEEIFGPVQSILKFKDLDDVIQRANNTHYGLAAGVFTKNINTANTLTRALRAGTVWVNCFDTFDAAIPFGGYKMSGQGREKGEYSLKNYLQVKAVVTSLKNPAWL

SEQ ID NO: 8293 - protein, 187 aa, Zea mays
SARGLSIALVYPPPTGLRQSAMAAASSVHGFTVKDASGEDVHLSTFKGKVLLIVNVASQCGLTNSNYTELAQLHEMYKDQDFEILAFPCNQFGGQEPGTSEEIVQLVCARFKAKYPILHKVDVNGEDAAPIYKFLKSSKTGPMGEDIKWNFAKFLVDRQGHVAERYAPTTYPLSIQKDIKKLLGGSY

SEQ ID NO: 8294 - protein, 332 aa, Onion yellows phytoplasma OY-M
MKNENQKAKTKTKENKKIAVLTSGGDAPGMNAAIRALVFESAKQGFEVFGVKDGYLGLFNNQIEILNPQTFPRVLNVSGTFLGTSRFLDFQNNLDVRKQCAQNLKTLGIDKLVVIGGDGSYKGASKLHELGIKCVGLPATIDNDICATDFTIGFSTALNNIVDAIEKLRDTSVSHNRCSIIEVMGRHKGDLALFGGLAAGADVIVTRENLLSQKTICQKIKSLRQANQRHAIVVVTEHIFDVASLAKEVENYSGFETRAQVLGHIQRGGKPTAEDLVLAFRMGSYAVSLLQQNIFNCAVGTCGLNLHYTTFGDLFEKTYEKNELFNVVAKLL

SEQ ID NO: 8295 - protein, 363 aa, Neurospora crassa
MASSASKTNIGVFTNPQHDLWISEASPSLESVQKGEELKEGEVTVAVRSTGICGSDVHFWKHGCIGPMIVECDHVLGHESAGEVIAVHPSVKSIKVGDRVAIEPQVICNACEPCLTGRYNGCERVDFLSTPPVPGLLRRYVNHPAVWCHKIGNMSYENGAMLEPLSVALAGLQRAGVRLGDPVLICGAGPIGLITMLCAKAAGACPLVITDIDEGRLKFAKEICPEVVTHKVERLSAEESAKKIVESFGGIEPAVALECTGVESSIAAAIWAVKFGGKVFVIGVGKNEIQIPFMRASVREVDLQFQYRYCNTWPRAIRLVENGLVDLTRLVTHRFPLEDALKAFETASDPKTGAIKVQIQSLE

SEQ ID NO: 8296 - protein, 112 aa, Arabidopsis thaliana
MADTPSSPAGDGGESGGSVREQDRYLPIANISRIMKKALPPNGKIGKDAKDTVQECVSEFISFITSEASDKCQKEKRKTVNGDDLLWAMATLGFEDYLEPLKIYLARYREVW

SEQ ID NO: 8297 - protein, 322 aa, Arthrobacter nicotinovorans
MPVIPALQTLLDSLPATGLGDLTDLPAVRQAGLEGANALAALVAQEPLDVGSVHTAMVPVNGGEIKVRIYQPGTPGPHPIHVFYHGGGWMAGTIEETFVDNVCRERTALAGYVTVAVEYRLAPEFKFPIPLEDSYAALEWVVEHAADYDGDPENVTIGGGSAGGNLSAAIALKARNENGPHITFQVLEVPALDLTLASPSVEQYSGGEYPLPKAEIDLCVEGYLRSPEDARNPYASPLLADDVSGLPPALIISSEFDPLQMDGSRYAQRLQEVGVHAAFRLGEGHVHGSSQFTKLLPEAAAWRDQVIDALKTHAADHRRVTP

SEQ ID NO: 8298 - protein, 292 aa, Aeropyrum pernix K1
MECYRDIHGFMAGHLAEAVEVLREGLEASSVRVLTFTGNLVATGLRGVLAQLIDGGLFNVVFTTAGALDHDIARFMGGKYLKGRFEADDTELHRRGVHRLGNVFIPVESYGPLVERFVRTLAEQAAGVRGEWGVYELLRLAGSLMEGDRDSILAAAARRGVDVFVPGWPDGAFGTSLFMERQRGTSITVDYFRDMARLADIFFPQEGEAAALIVGGGISKHHAIWWSQFRGGLDYAVYVTTAVEYDGSLSGAHPREAVSWGKIKESSRRVVVYGDATITLPVIAYCLLHGCG

SEQ ID NO: 8299 - protein, 510 aa, Eustoma grandiflorum
MAVGNGVLLHIARSLMLFFHVQKLVQYLWMNSRRHRLPPGPIGWPVLGALPLLGTMPHVALANMAKKYGPVMYLKVGSCGLAVASTPEAAKAFLKTLDMNFSNRPPNAGATHLAYNAQDMVFADYGPRWKLLRKLSNIHILGGKALQGWEEVRKKELGYMLYAMAESGRHGQPVVVSEMLTYAMANMLGQVMLSKRVFGSQGSESNEFKDMVVELMTVAGYFNIGDFIPSIAWMDLQGIQGGMKRLHKKFDALLTRLLEEHTASAHERKGSPDFLDFVVANRDNSEGERLHTVNIKALLLNMFTAGTDTSSSVIEWALAELLKNPIILKRAQEEMDGVIGRDRRFLEADISKLPYLQAICKEAFRKHPSTPLNLPRIASQACEVNGHYIPKGTRLSVNIWAIGRDPSLWENPNEFNPDRFLERKNAKIDPRGNDFELIPFGAGRRICAGTRLGILLVEYILGTLVHSFDWELPSSVIELNMDEPFGLALQKAVPLAAMVTPRLPLHIYCP

SEQ ID NO: 8300 - protein, 436 aa, Streptococcus pneumoniae
MFASKNERKVHYSIRKFSIGVASVAVASLFMGSVVHATEKEVTTQVATSSNKANKSQTEHMKAAKQVDEYIEKMLSEIQLDRRKHTQNVGLLTKLGAIKTEYLRGLSVSKEKSTAELPSEIKEKLTAAFEQFKKDTLKSGKKVAEAQKKAKDQKEAKQEIEALIVKHKGREIDLDRKKAKAAVTEHLKKLLNDIEKNLKKEQHTHTVELIKNLKDIEKTYLHKLDESTQKAQLQKLIAESQSKLDEAFSKFKNGLSSSSNSGSSTKPETPQPETPKPEVKPELETPKPEVKPELETPKPEVKPELETPKPEVKPELETPKPEVKPELETPKPEVKPELETPKPEVKPELETPKPEVKPDNSKPQADDKKPSTPNNLSKDKQSSNQASTNENKKQGPATNKPKKSLPSTGSISNLALEIAGLLTLAGATILAKKRMK

SEQ ID NO: 8301 - protein, 340 aa, Burkholderia cepacia R18194
MENAAKQVLDTLFGRWRSRILYAGTRLGVFDAVTTDTPASSAALAAKLDVDEPLLYRLLRALASLGLLDEDTRRGFRATASGALLHADAPSTLRDFVLLQEGPEHYAIWAHLPDMVREGQQNGFVREFGAMAFDYAKDHERYRTDFKRAMSSFSTVQSEQVVDALRDVTFAPGTHACDIGGGQGHMLCSVLRRFQSLTGVVFDLPEVIDGDADDWAQRMGVSARCSKAGGNMFDAVPAADVYLLKLILHDWNDDECVAILKRARESARDGARVFVIERVVPAPGVAHFSKLYDIHMMCWGSGRERTRDEYDALLVAAGWRPAGVRPAPDGQIDVIEAVAA

SEQ ID NO: 8302 - protein, 442 aa, Synechocystis sp. PCC 6803
MKPKNFPLARYVLGAMLAFLFVGVAQAQTETTSIAEVTYAINNLFLLAAAVLVLFMQAGFAMLEAGLSSHKNTVNVLFKNTFDVCVGVLLYFLFGYSLMYGENPVLGGFFGWGGFGITNNLDNVEGLSPQVDWLFQAAFAATAATIVSGAVMGRMYFKAYLIYSAVITGLVYPISGHWKWGGGWLDKLGFHDFAGSLLVHSVGGFAALAAVVVMGPRIGRFEGNKINSLGYQGITSSSLGVFILWVGWYGFNPGSQLAFVGALNTNTTMLIAVNTTLSAAAGGLAALAFDWITENKRKPNLLVTLNGILGGLVGITAGCDTVSNWSAIAIGVVAGILSVLGTKLLDRLRIDDGVGAWPVHGLCGIWGGIAVGIFSTNVEHKLSAQIVGSLVIPFWAFITMFFLFYVMDLWGILRVKPSQEKVGLDIVEHGQTEKGVEIAFED

SEQ ID NO: 8303 - protein, 366 aa, Triticum aestivum
MKTLLILTILAMAITISTANMQVDPSGQVQWPQQQLVPQPQQPLSQQPQQAFPQPQQTFPHQPQQQVPQPQQPQQPFLQPQQAFPQQPQQPFPQTQQPQQPFPQQPQQPFPQTQQPQQPFPQQPQQPFPQQSQQPFPQTQQPQQPFPQQPQQPFPQTQQPQQPFPQFQQPHQPFPQPQQQFPQPQQPQQSFPQQQRPFIQPSLQQRLNPCKNILLQQCKPASLVSSLWSIIWPQSDCQVMQQQCCQELAQIPQQLQCAAIHSVVHSIIVQQQQQQQQHHPQPRPFQHTQGTHILLPLSQQQQLGQGTLVQGQGIIQPQQLAQLEAIRSLVLQTLPTMCNVYVPPECSIIRAPFASIRASSGHHLPA

SEQ ID NO: 8304 - protein, 121 aa, Bartonella sp. Rr7703bgl
GPAHGGANEACLKMLQEIGSVKRIPEFIARAKDKNDPFRLMGFGHRVYKNYDPRAKIMQQTCHEVLKELNIQDDPLLDIAIELEKIALNDEYFVEKKLYPNVDFYSGITFKALGFPTEMFT

SEQ ID NO: 8305 - protein, 177 aa, Synechocystis sp. PCC 6803
MQQRGVTIWLTGLSGAGKTTITHALEKKLRDSGYRLEVLDGDVVRTNLTKGLGFSKEDRDTNIRRIGFVSHLLTRNGVIVLVSAISPYAAIRQEVKHTIGDFLEVFVNAPLAVCEERDVKGLYAKARSGEIKGFTGIDDPYEPPTNPDVECRTDLEELDESVGKIWQKLVDLKYIEG

SEQ ID NO: 8306 - protein, 125 aa, Bartonella sp. Rr7624bgl
GPAHGGANEACLKMLQEIGSIQRIPEFIARAKDKNDPFRLMGFGHRVYKNYDPRAKILQKTCHEVLKELNIQDDPLLDIAVELEKIALSDEYFIEKKLYPNVDFYSGITLKALGFPTEMFTVLFA

SEQ ID NO: 8307 - protein, 364 aa, Nicotiana tabacum
MGSTSESQSNSLTHTEDEAFLFAMQLCSASVLPMVLKSAVELDLLELMAKAGPGAAISPSELAAQLSTQNPEAPVMLDRMLRLLASYSVLNCTLRTLPDSSVERLYSLAPVCKYLTKNADGVSVAPLLLMNQDKVLMESWYHLKDAVLDGGIPFNKAYGMTAFEYHGTDPRFNKVFNRGMSDHSTMSMKKILEDYKGFEGLNSIVDVGGGTGATVNMIVSKYPSIKGINFDLPHVIGDAPTYPGVEHVGGDMFASVPKADAIFMKWICHDWSDEHCLKFLKNCYEALPANGKVIIAECILPEAPDTSLATKNTVHVDIVMLAHNPGGKERTEKEFEALAKGAGFTGFARLVALTTLGSWNSTSN

SEQ ID NO: 8308 - protein, 110 aa, Bartonella sp. Pm6740co
GPAHGGANEACLKMLQEIGSVKRIPEFIARAKDKNDPFRLMGFGHRVYKNYDPRAKIMQKTCHEVLKELNIQDDPLLDIAIELEKIALNDEYFVEKKLYPNVDFYSGITP

SEQ ID NO: 8309 - protein, 343 aa, Chrysosplenium americanum
MLFAMQLASASVLPMVLKSAIELDLLEIIRGQDTCMSPTEIASHLPTTNPDAPAMVDRILRLLSCYSVVTCSVRSVDDQRVYGLAPVCKYLTKNQDGVSIAALCLMNQDKVLMESWYHLKDAVLDGGIPFNKAYGMSSFEYHGTDPRFNKVFNRGMSDHSTITMKKVFQAYQGFQGLTSLVDVGGGTGATLTMILSKYPTIRCINFDLPHVIEDAPEYPGIEHVGGDMFVSVPKGDAIFMKWICHDWSDEHCLKLLKNCYDALPNNGKVILAECILPEVPDSSLATKGVVHIDVITVAHNPGGKERTEKEFEALAKAAGFQGFQVFCNAFNTYIIEFSKQICN

SEQ ID NO: 8310 - protein, 159 aa, Streptococcus pyogenes SSI-1
MPNLYDFTVKAQDGSDISLVNYKEKVVLVVNTATKCGLTPQYQALQALYDTYHDKGFEVLDFPCNQFLNQTPGEAEEINRFCSLTYHTTFPRFAKIKVNGKDADPLFTWLKEEKSGPLGKRIEWNFTKFLIDQNGQVIKRYSSKTDPKLIEEDLKALLG

SEQ ID NO: 8311 - protein, 328 aa, Methanosarcina acetivorans C2A
MLDSGMLTRNAYRVKLPLSLEKKLLHRKYCRQADFEVSGKALKPLRTFFQGIYRGGSVTSANNHEKAKMKEELGLLLPKINDLLESEPAVLRIDPEPAESIMLIGDIHGDLDALDFVMGMREELGCKQMLFLGDYVDRGMQGTEVLVKLFRLKLEEPQNIFLLRGNHETVDMNLYYGFFEEIGFDRGFLLNISRTYDRLPVAAVISGQIFCVHGGINGIESIDTITKEGAFPYLWNDPSKHPGMSSSLRGSTVKEFGPDIVDGFLETNGLKRIVRGHTALRTGYEWWFDGKLLSLFSCPDYVGLGNAAAFAVIEKGEIKIITFKNRNR

SEQ ID NO: 8312 - protein, 119 aa, Bartonella sp. OH_CU1214
GPAHGGANEACLKMLQEIGSVKRIPEFIARAKDKNDPFRLMGFGHRVYKNYDPRAKIMQQTCHEVLKELNIQDDPLLDIAIELENIALNDEYFVEKRLYPNVDFYSGITLKALGFPTEM

SEQ ID NO: 8313 - protein, 252 aa, Prunus emarginata
AHYKSEADVGNALAEAFETGLVKREELFITSKASNHGHVVEACKNSLKKLRLDYLDLYLVHYPLATKHSGVGTTASLLDENKVLDIDVTVSLETTWHTMEKTVYLGLVRSIGLSNYEFFLTRDCLSYAKIKPQVSQFETHPYFQRESLVRFCKKHGVTPMAHTPLGGATANVKAFGSISPLEDPVLLGLAKKYKKSVAQIALRWNIERDTAVIPKSSKVERLKENLEVLNFKLEKEDIELINTIDKKSRTTL

SEQ ID NO: 8314 - protein, 252 aa, Prunus emarginata
AHYKSEADVGNAIAEAIQRGLVKREELFITSNASNHGHVVEACKNSLKKLRLDYLDLYLVHYPFATKHSGVGTTASLLDENKVLDIDVTVSLETTWHTMETTVYLGLVRSIGLSNYEFFLTRDCLSYAKIKPQVSQFETHPYFQRESLVRFCKKHGVTPMARTPLGGATANVKAFGSISPLEDPVLLGLAKKYKKSVAQIALRWNIERDTAVIPKSSKVERLKENLEVLNFKLEKEDIELINTIDKKSRTTL

SEQ ID NO: 8315 - protein, 466 aa, Shigella flexneri 2a str. 301
MDKKQVTDLRSELLDSRFGAKSISTIAESKRFPLHEMRDDVAFQIINDELYLDGNARQNLATFCQTWDDENVHKLMDLSINKNWIDKEEYPQSAAIDLRCVNMVADLWHAPAPKNGQAVGTNTIGSSEACMLGGMAMKWRWRKRMEAAGKPTDKPNLVCGPVQICWHKFARYWDVELREIPMRPGQLFMDPKRMIEACDENTIGVVPTFGVTYTGNYEFPQPLHDALDKFQADTGIDIDMHIDAASGGFLAPFVAPDIVWDFRLPRVKSISASGHKFGLAPLGCGWVIWRDEEALPQELVFNVDYLGGQIGTFAINFSRPAGQVIAQYYEFLRLGREGYTKVQNASYQVAAYLADEIAKLGPYEFICTGRPDEGIPAVCFKLKDGEDPGYTLYDLSERLRLRGWQVPAFTLGGEATDIVVMRIMCRRGFEMDFAELLLEDYKASLKYLSDHPKLQGIAQQNSFKHT

SEQ ID NO: 8316 - protein, 252 aa, Prunus emarginata
  misc_feature (193)..(193): Xaa can be any naturally occurring amino acid
AHYKSEADVGNALAEAFETGLVKREELFITSKARHHGHVVEACKNSLKKLQLDYLDLYLVHYPLATKHSGVGTTASLLDENKVLDIDVTVSLESTWHDMEKTVSLGLVRSIGLSNYELFLTRDCLSYAKIKPQVSQFETHPYFQRETLVRFCRKHGVCPMAHTPLGGATANVKAFGSISPLEDPVLRALAKKXKKSVAQIALRWNLDRNTPVIPKSSKIERLKENLEVLNFKLEKEDIELINTIDKKSRTTL

SEQ ID NO: 8317 - protein, 550 aa, Zea mays
  misc_feature (115)..(115): Xaa can be any naturally occurring amino acid
MARRAASSLVSRCLLARAPAGAPPAAPSAPRRTVPADGMHRLLPGVLQRFSTAAAVEEPITPSVHVNYTKLLINGNFVDSASGKTFPTLDPRTGEVIAHVAEGDAEDINRAVAAXARKAFDEGPWPKMTAYERSRILLRFADLIEKHNDELAALETWDNGKPYEQAAQIEVPMVARLMRYYAGWADKIHGLIVPADGPHHVQILHEPIGVAGQIIPWNFPLLMYAWKVGPALACGNTLVLKTAEQTPLSALYISKLLHEAGLPEGVVNVVSGFGPTAGAALASHMDVDKIAFTGSTDTGKIILELAAKSNLKTVTLELGGKSPFIIMDDADVDHAVELAHFALFFNQGQCCCAGSRTFVHERVYDEFVEKAKARALKRVVGDPFRKGVEQGPQIDDEQFNKILRYIRYGVDGGATLVTGGDRLGDKGFYIQPTIFSDVQDGMKIAQEEIFGPVQSILKFKDLNEVIKRANASQYGLAAGVFTNSLDTANTLTRALRAGTVWVNCFDVFDAAIPFGGYKMSGIGREKGVDSLKNYLQVKAVVTPIKNAAWL

SEQ ID NO: 8318 - protein, 251 aa, Prunus emarginata
AHYKSEADVGNAIAEAIQRGLVKREELFITSKANHGHVVEACKNSLKKLRLDYLDLYLVHYPLATKHSRVSTTASLLDENKVLDIDVTVSLETTWHTMEKTVYLGLVRSIGLSNYEFFLTRDCLSYAKIKPQVSQFETHPYFQRESLVRFCKKHGVTPMAHTPSGGATANVKAFGSNSPLEDPVLLGLAKKYKKSVAQIALRWNIERDTAVIPKSSKVERLKENLEVLNFKLEKEDIELINTIDKKSRTTL

SEQ ID NO: 8319 - protein, 287 aa, Prochlorococcus marinus subsp. marinus str. CCMP1375
MSTQIIQWYPGHIAKAEQQLSKSLEKVDLVVEVRDARIPLATGHPCLHKWIRNKKHLLVINRRDMISQKAFNSWDNWFKENGQEAWWCNAKDGNGTNKIKEAAIKLGNDLNNRRESRGMRKRAVRALILGFPNVGKSALINRLVNKKVVKSARRAGVTKSLQWVRVGQQLDLLDAPGVLPPQLEDQEAAVKLALCDDIGQASYDVESVAIKFLNILNQVKNESDFETSNQILEKRYGISWEESNNNVHLWLENAANYHTSGNTNRMSQRLLDDFRKRLIGTISLELP

SEQ ID NO: 8320 - protein, 364 aa, Glycine max
  misc_feature (41)..(41): Xaa can be any naturally occurring amino acid
  misc_feature (95)..(95): Xaa can be any naturally occurring amino acid
  misc_feature (151)..(151): Xaa can be any naturally occurring amino acid
  misc_feature (194)..(194): Xaa can be any naturally occurring amino acid
  misc_feature (289)..(289): Xaa can be any naturally occurring amino acid
MASQLLRRTFGSRILANPRAFSFSSAASTPIRATLFPGDGXSGPEIADSVKQIFQAADVPIEWEEHYVGTEIDPRTQSFLTWESLESVRKNKVGXKGPMATPIGKGHRSLNLTLKKELNSYVNFRPCYSLPGYKTRYDNVNLITIRENTEXGEYSGLEHQVVRGVVESLKIITRQASLRVAEYAFHYAKAHGKXKVSAIHKANIMQKTDGFFLKCCREVAEKYPEITYEEVVIDNCCMMLVKNPALFDVLVMPNLYGDIISDLCAGLIGGLGLTPSCNIGEGGIALAEXAVHGSAPDIAGKNLANPTALLLSGVTMLRHLDLHDKAEQIQKAILNTIAEGKYRTADLGGSSKTTEFTKAIIDHL

SEQ ID NO: 8321 - protein, 252 aa, Prunus emarginata
SSLQSEADVGNAIAEAIQSGLVKREELFITSKASNHGHVVEACKNSLKKLRLDYLDLYLVHYPLATKHSGVGTTASLLDENKVLDIDVTVSLETTWHDMEKTVSLGLVRSIGLSNYELFLTRDCLSYAKIKPQVSQFETHPYFQRESLVRFCKKHGVTPMAHTPLGGATANVKAFGSISPLEDPVLLGLAKKYKKGVAQIALRWNIERDTAVIPKSSKVERLKENLEVLNFKLEKEDIELINTIDKKSRTTL

SEQ ID NO: 8322 - protein, 189 aa, Lycopersicon esculentum
MESALKDLSTPTGGVEDVYGEDCATEDQVITPWTIAVSGYNLLRDPRYNKGLAFTERERDADYLRGLLPPVISSQELQEKKLMQSIRQYDVPLHKYVAMMELQERNERLFYKLLIDNVEELLPIVYTPTVGEACQKYGSLFKRPQGLYISLNEKGRILEVLKNWPEKSIQVIVVTDGERILGLGDLGCQ

SEQ ID NO: 8323 - protein, 1196 aa, Aspergillus nidulans FGSC A4
MANDLGSALEHAGGKGQEREGISLKTFIASLAAALIIFAVEFLLFLVLKGKLTRIYQPRTYLVPDRERTEPSPPGLFKWISPIFRTSSSEFVQKCGLDAYFFLRYLRMLLKIFVPLGCIIVPTLITVNRVDGKNQTYKNGTDTGDRWNVTGLDQLAWGNVAPENTHRYWAHLVMAVILIVYVCFVFFDELRGYIRLRQAYLTSPHHRLRASATTVLVTTIPKKWLTVEALEGLYDVFPGGIRNIWINRNFDDLNEKVKERDRLALKLETAETELIIKCKKAQMKQAKAAAKKARRKGAEQKEQDVADTKASKPTIGAGISSGNPHQAHTLQEVLHRDTMASNDGRTHKRKYMNPLEPAVGLAGAVGQGVGKLGKSVLGTVKKHDHHGAPDEELPHQDNLSDANAADRSVWEGSAAMPAGESTEGDSSQPKRPFWRSRPSAMSKSSNRTEADELPLTAPESPVDVEDGEFSSSSGNSLTKARDENDIDITRNDGAEIEDDTYPVAYNENFEKEDLGEPLWKKYIRQEDRDTMRLPIFGISWMPSIWLLGKKVDTIDYCRKEVARLNLEIEIDQQHPERFPLMNSAFIQFNHQVAAHMACQAVSHHVPKQMAPRTVEISPDDVIWDNMSIKWWERYLRTFGVYAIVTGMVIGWAFPVAFTGLLSQLSYLEGAFTWLSWINRMPEWLISAVQGILPPLFLAILMALLPLMLRFLCRAQGLQTGMGIELTVQNYFFAFLFVQLFLVVAIASSFSTIIDNITNFTNWPELLAQNIPSSSNYFFSYMILQALSVSAGALVQIFSLVSWFILAPILDSTARRKWARTTNLNQMQWGTFFPVYTTLASIGLIYSVIAPLIMVFNVITFGLFWFVYRYNTLYVTKFRFDTGGLLFPRAINQLFTGIYVMELSLIGLFFLVRDTHGSVSCKGQAIIMIIMTILTVGFQILLNEAFGPLIRYLPITLEDDAVRRDEEFARVQRARLGLDDDNEEEAEEEQDTLEHRLKERERVEIQANEDSREIELKKIEGGISRRASGLRHKGQGLGPETAAKLGASRRPSWAVQTAQSPNRRSKYFGANSADAVPSIQRMREKLEKDAEAQGPVAGHSRSSALFAGIHDELEDLTPDERDQLVQRAFQHDALRSKRPVIWIPRDDLGVSDDEIYRTQRFSKHIWISNEYQALDGKCRTIFSRSPPDFSEVDLIQL

SEQ ID NO: 8324 - protein, 303 aa, Zea mays
MQIAGFNVHYRVGWFKKKKKKKKQAPQQLLRSSLSRVAPHRILRFEALCSQGTMAKNYPTVSAEYSEAVEKARRKLRALIAEKSCAPLMLRLAWHSAGTFDVSSRTGGPFGTMKCPAELAHGANAGLDIAVRLLEPIKEEFPTLSYADFYQLAGVVAVEVTGGPEIPFHPGREDKPQPPPEGRLPDATKGSDHLRQVFGKQMGLSDQDIVALSGGHTLGRCHKERSGFEGAWTTNPLVFDNSYFKELLSGDKEGLLQLPSDKALLSDPVFRPLVEKYAADEKAFFDDYKEAHLKLSELGYADA

SEQ ID NO: 8325 - protein, 314 aa, Triticum aestivum
  misc_feature (70)..(70): Xaa can be any naturally occurring amino acid
MPGRLLWATTKHVVCTAHTQSMTHWSSLNQISTELINGDDCIIPKQRGHGSQSVSMVQFTTMAVDNDFLXVVGGFHGELICKRLEDDGIVFSTRVTDDENAITNSLEIYQDPNGSRRLVVANNDCSVRIFDTKYFDLLNHYVFPWSVNSVSVNPDATLFAVLGDHEDGLVVDPKCGKPIGKVRGHLDYSFSSAWHPDGNILATGSQDTTCRLWDIRNLSQSLAVLGGRLGSIRCIKFSSDGRFLATAEPIDFVHIYDCFADYGKSHEIDFFGEIAGLSFSPDTEAFYIGVADQTYGGLMEFKRRHQHHYLNCLW

SEQ ID NO: 8326 - protein, 197 aa, Beta vulgaris subsp. vulgaris
MSASRFIKCVTVGDGAVGKTCLLISYTSNTFPTDYVPTVFDNFSANVVVNGATVNLGLWDTAGQEDYNRLRPLSYRGADVFILAFSLISKASYENVSKKWIPELKHYAPGVPIVLVGTKLDLRDDKQFFIDHPGAVPITTAQGEELRKLIGAPAYIECSSKTQQNVKAVFDAAIKVVLQPPKTKKKKSKAQKACSIL

SEQ ID NO: 8327 - protein, 395 aa, Dichomitus squalens
MAFKWSSILALVTLATLASAAPTQSTVTCSDGTVVPDSVCCEFIPLREALNDQVIQSDCGEDAHELLRLTFHDAIAISQSLGPSAGGGADGSMLLFPTVEPAFFANLGIADSVNNLIPFMSQFPNISPGDLVQFAGAVAITNCPGAPQLEFLAGRPNGTAPAIDGLIPEPQDSIDDILARFDDAGGFTPFEVVSLLASHTVARADHVDPTLDAAPFDSTPFTFDTQIFLEVLLKGTGFPGTDNNTGEVASPIPVTNGTDVGELRLQSDFGLAHDSRTACFWQGFVNQQDFMAQSFKAAMAKLAVLGHNAADLVNCSAVIPTPLPATGKPATFPATLGPDDLELSCTTEPFPSLTTDPGAQETLIPHCSDGSMDCESVQFDGPATNFGGDDDDDDS

SEQ ID NO: 8328 - protein, 235 aa, Zea mays
GRVGGRVGGRVGGRVGCAPLMLRLAWHSAGTFDVATKTGGPFGTMKNPAEQAHGANAGLEIAIRLLEPIKEQFPILSYADFYQLAGVVAVEVTGGPDVPFHPGRQDKPEPPPEGRLPDATQGSDHLRQVFSTQMGLSDQDIVALSGGHTLGRCHKDRSGFEGAWTSNPLIFDNSYFTELLSGEKEGLLQLPSDKALLSDPSFRPLVDKYAADEDAFFADYAEAHLKLSELGFAEA

SEQ ID NO: 8329 - protein, 482 aa, Brevibacterium flavum
MNANVRVFILNSLAMNDPQRPPTLLWFRDDLRLSDNAALKWAADHGPVIGLFIDETINRSIGAAARWWREQSLNALAQDLSFYGVPLLRRTGNPLEILPKIVSEMEVKAVTWNRRYHQPLCEVDATLKKNLRDQGIEVHSHPGFLLTEPWEVSTATGTPYKVFTPFSKAAWEVARGHAYETVKNNVTVPSHLTGPEGVELPIPEMEQPFWATTLVKECAPGEKNASEKLFDFLEHLQDYPQARDSLARSATSKLSAHLRFGEISIHRVWAETAAIDSEGTELFLKELLWRDFAWHRLYALPHMDTQNVRMQFNRFGWSWDPSEKDKLNTPSTPLIPTKADQFHEDLAAWRAGKTGIPLVDAGMRELWATGSMHNRVRMVVASFLTKNLQIHWRHGEEWFWETLVDADPASNAFNWQWAAGSGDDASPYFRIFNPVTQAKKFDPDETYIRRWVPEYGTPSYPDPIVDLKESRQIALDAYSAIK

SEQ ID NO: 8330 - protein, 390 aa, Dichomitus squalens
MAFKLWSMLPLVALATVAVAAPSRQTVCSDGTVVPDSVCCEFVPLAQALQKEVLMGDCGEDAHELLRLTFHDAIAISRSKGPSAGGGADGSMLIFPTVEPAFFANLGIADSVNNLIPFLSQFPKISAGDLVQFAGAVAVGNCPGAPQLEFRAGRPNATAPAIEGLIPEPQNNITEILERFDDAGGFSPFEVVSLLASHTVARADHVDPTLDAAPFDSTPFTFDTQIFLEVLLKGVGFPGTGNNTGEVSSPLPVSSGTDVGELRLQSDFGLAHDERTACFWQGFVNEQEFMAQSFKAAMAKLAVLGHNADDLVDCSAVVPKPKPATGKPASFPATKGPKDLELSCTSKKFPTLTTDHGAQETLIPHCSNGSMNCTTVQFDGPATNFDGDDS

SEQ ID NO: 8331 - protein, 402 aa, Triticum aestivum
  misc_feature (52)..(52): Xaa can be any naturally occurring amino acid
  misc_feature (71)..(71): Xaa can be any naturally occurring amino acid
MSLRATRAALSPKVKRRDGLYKFGPTIGQGTFARVRFAKNTETLEPVAIKIXILLEYITGRELLDNIYTNXRLKEEEARKYFQQLINAVDYCHSRGVYHRDLKLENLLLDAAGNLKVSDFGLSALTEQVKADGLLHTTCGTPNYVAPEVIEDRGYDGAAADIWSCGVILFILLAGFLPFEDENIIALYKKISEAQFTCPSWFSTGAKKLITRILDPNPATRITIPQILEDPWFKKGFKPPVFDDKYETSFEDVYAAFGDSEDQHVKEETEHKPTSMNAFELISLNQGLNLDNLFEAKEEHKRETRFTSQCPPKEIISKIAEAARPLGFDIQKKNYKMRMENPKAGRKGNLNVATEVFQVAPSLHVVELKKAKGDTLEFQMFYRSLSTQLKDVVWKCGGRGRR

SEQ ID NO: 8332 - protein, 497 aa, Ustilago maydis 521
MPTLNLDLPNGIKSTIQADLFINNKFVPALDGKTFATINPSTGKEIGQVAEASAKDVDLAVKAAREAFETTWGENTPGDARGRLLIKLAELVEANIDELAAIESLDNGKAFSIAKSFDVAAVAANLRYYGGWADKNHGKVMEVDTKRLNYTRHEPIGVCGQIIPWNFPLLMFAWKLGPALATGNTIVLKTAEQTPLSAIKMCELIVEAGFPPGVVNVISGFGPVAGAAISQHMDIDKIAFTGSTLVGRNIMKAAASTNLKKVTLELGGKSPNIIFKDADLDQAVRWSAFGIMFNHGQCCCAGSRVYVEESIYDAFMEKMTAHCKALQVGDPFSANTFQGPQVSQLQYDRIMEYIESGKKDANLALGGVRKGNEGYFIEPTIFTDVPHDAKIAKEEIFGPVVVVSKFKDEKDLIRIANDSIYGLAAAVFSRDISRAIETAHKLKAGTVWVNCYNQLIPQVPFGGYKASGIGRELGEYALSNYTNIKAVHVNLSQPAPI

SEQ ID NO: 8333 - protein, 423 aa, Pseudomonas putida KT2440
MTISILGARVIDPNSGLDQVTDLHLDGGRIVAIGAAPAGFSASRTIQADGLVAAPGLVDLGVSLREPGYSRKGNIASETRAAVAGGVTSLCCPPQTKPVLDTSAVAELILDRAREAANSKVYPVGALTKGLEGEQLAELVALRDTGCVAFGNGLKEIPNNRTLARALEYAATFDLTVVFHSQDRDLAQGGLAHEGAMASFLGLPGIPESAETVALARNLLLVEQSGVRAHFSQITSARGARLIAQAQALGLPVTADVALYQLILTDESLREFSSLYHVQPPLRTAADRDGLREAVKSGVIQAISSHHQPHERDAKLAPFGATEPGISSVELLLPLAMTLVQDGLLDLPTLLARLSSGPAAALRLPAGELKVGGAADLVLFDPQASTVAGEQWFSRGENCPFIGHCLPGAVRYTLVDGHICHEA

SEQ ID NO: 8334 - protein, 198 aa, Candida albicans SC5314
MVNGPAELRRKLVIVGDGACGKTCLLIVFSKGTFPEVYVPTVFENYVADVEVDGRKVELALWDTAGQEDYDRLRPLSYPDSNVILICFSVDSPDSLDNVLEKWISEVLHFCQGVPIILVGCKSDLRDDPHTIEALRQQQQQPVSTSEGQQVAQRIGAADYLECSAKTGRGVREVFEAATRASLRVKEKKEKKKKCVVL

SEQ ID NO: 8335 - protein, 1313 aa, Ustilago maydis 521
MQPMNSVSGSASLVLAALLVQQAAAQDAANSGASTSTVISAIVLNAVIFAILFTVFLLARPRFKRVYAPRTYLVTPEEQIEPLPQSLFGWLPVWLKTPTSTILEKNGLDAYMFVEYLEMMLWIFIPIFLLSWIVLMPVYGAGTNGIGDGFNRFILSRVGKSPQQQKRYIAPLLIQWIFTFWLMWNIRSRVAKFIKLRQDFLVSPQHAASVQARTVLITGIPNELLSEKKLRALYSQLPGGVAKVWLNRNLKDLPDLFDEREKWCNKLEAAETSLIKTAYKLVKKGKAQDASGSLPETDVEINAEVADQYVPKKKRPTHKLGKIPCMGEKVDTIHWCREEIARLNKEIQTKRSEIAVDYKNYPAQSSAFILFNTQIAAHMAVKTQAHHQPYRMTNRYVEAHPDDVVWANMNMNPYERKIRTVVGWAITIGLIIFWAIPVAFVGIISNVKGLADNVPFLGWLNDIPNVVVGIIQGILPTVLLAVLNMLLPIFLRLLSRLSGTPTRSAIELDLQGRFAAFQIVQNFLFLTLVSGNAGQIAEYVQRVASQPTQFPGLLAEAIPKGSLFFLSFIALQGLSGAAGLFAQIAPLIVYYVKKFLLASTPRKVWHIDHDTSGPAWGTLFPSMTLITVIGTGYVVIAPILNGFVAFTFFLFFLGYKYLFLYVYDTKPSSETSGLFFGKAIRHIFAGLYVEMVMLTAIFFLAQSEDAAGQKKQSAIPEGAFMVVLIVIVVAFHYFLNDSFKALETALPLTLVAGNNAEVQLHGNPTRTSGETAYNEKKPLNEHAASSYDATPVSQGDLNGKGVQGAGVSGEKHQAVAGLSEEQESAFYHPSLTGEQKPIWLPNDKFGIGRAGVASARKAGLEATYEQTSVTEKGQVQTDAYEPPAFTEKWSVNCSARPRRRVEVEKLRTQQGGLLTIARGHAHAKGFAVYGDRSADDSDTRLAIMARCTHVFDWPPSILSAAVCEVPPVRNCKFSEARMMTGTCSNSSGVGRSGTFAQGNLPRFDDIPAVDGMPHGCAWNVWGQGDELGTLNLLTPEVVARSAAENIRTGERVQIDWGLDSVDVPANQRMHFQHDLIDLKPKLGVYATDDEMHLNTQTSSQWDGFNHFAHQATHMYYGGVKHDDLHSGKIDKQHRNSMHKWCLNGGIAGRGVLVDWVRWWEATRTEPLPAGNSSYAIPLSQIQEVLEWQKTELRTADILLLRTGVVRWFEHATDAEKVKGMIENDNFPGIEATEQVKRWLWDNHFAAVASDNMSFEFGPHGDLWLHEWILPMFGCPIGELFDLERLSTACQNHQRWTFFLTSAPLRASRTESLF

SEQ ID NO: 8336 - protein, 174 aa, Triticum aestivum
MAPAVMASSATTVAPFQGLKSTAGLPVSRRSSGSLGRVSNGGRIRCMQVWPIEGIKKFETLSYLPPLSTEALLKQVDYLIRSKWVPCLEFSKVGFVFREHNSSSGYYDGRYWTMWKLPMFGCTDATQVLNEVEEVKKEYPDAYVRVIGFDNLRQVQCVSFIAFRPPGCEESGKA

SEQ ID NO: 8337 - protein, 364 aa, Nicotiana tabacum
MGSTSQSQSKSLTHTEDEAFLFAMQLASASVLPMVLKSALELDLLELMAKAGPGAAISPSELAAQLSTQNPEAPVILDRMLRLLATYSVLNCTLRTLSDGSVERLYSLAPVCKFLTKNADGVSVAPLLLMNQDKVLMESWYHLKDAVLDGGIPFNKAYGMTAFEYHGTDPRFNKVFNRGMSDHSTMSMKKILEDYKGFEGLNSIVDVGGGTGATVNMIVSKHPSIKGINFDLPHVIGDAPAYPGVEHVGGDMFASVPKADAIFMKWICHDWSDEHCLKFLKNCYEALPANGKVIIAECILPEAPDTSLATKNTVHVDIVMLAHNPGGKERTEKEFEALAKGAGFTGFARLVALTTLGSWNSTNN

SEQ ID NO: 8338 - protein, 394 aa, Aeropyrum pernix K1
MSQQPECRVEGNYIIVPKGLVNVIVDETRISGVDPKGEATIYRGYTIEDIGEHASFYEAAHLILFGRLPCDEELKEIKSKIDKYRGQIPEKLFDAMKHVPVTHPMYYGIYGTALLGQYYAPEWRFDEDFLYDHALRLTAQLPVIFTTGWNLAHHGTFLRPDPSKDHAWDVLRMIVMREPSDIEARAFESTLVLYMDHGFNASTFTTRVIGSTLSDLYSAVAGGIAALKGPLHGGANEKAMEMFLDAMKKAEEKGVPLYDYIEEYIKEKLARKEKIMGFGHRIYKLHDPRTDVAAKFVAKLKDGEFWMKVLKKAEEVMWREKKIPANIDLYTAVLYYQLGIPIPMYTPIFAMGRVVGWSAHYIEQVLNNKLIRPTEKYVGPTGLKYQPIEERCRK

SEQ ID NO: 8339 - protein, 350 aa, Moorella thermoacetica ATCC 39073
MKALVLFGPNDVRLVEKPVPKPGPGEVLVRVAACGICGTDVKIITKGMPKMPPYGEFTFGHEWAGTIVALGETVDEFQVGDRVAIEAHKGCGRCENCIDGKYTACLNYGRLDKGHRAAGMTVDGGFAEYAVQHVNSVYKIPDNITFNEATYVTTAGCALYAIDKSGGYIAGDTVLVIGPGPIGLSVVQGARSLGAEKIILMGTREDRLVKGRELGATHTINIREVADPVAEVMAITGGKGCKRVFECAGNSQSFEYGIKAAKKGGVMVLVSFYKEPVMANLDYVVLNQISLLTVRGEGNQNCKRALSLMAQGKIDAKPIMTHAFPLEEFQKGLDYFVNRKDGAMKVVINP

SEQ ID NO: 8340 - protein, 295 aa, Glycine max
MVSHYYLASLLLLLLLNPHTTLGAQNLMLPYHNGALLKGTITVNLLWYGSFTPIQRSIILDFINSLSSTAGAPLPSVASWWKTTDKYRGGSTTIVLGKQILEQTYSLGNYLNGTQLVSLSSRFDHLNAINVVLTSSDVGVDGFCRSRCGTHGSITNGQKARIPYVWVGNSEAQCPGQCAWPFHQPAYGPQAPPLIAPNGDVGLDGMVINVATLLAGTVTNPFNEGFYQGPPTAPLEAVSACTGIFGSGAYPGYPGRVLVDKTTGASYNSYGAGNGRKYLLPAMWDPQTSACKTQV

SEQ ID NO: 8341 - protein, 418 aa, Triticum aestivum
  misc_feature (355)..(355): Xaa can be any naturally occurring amino acid
MIGGGGGGALRRVGKYEVGRTIGEGTFAKVKFAQNTETGESVAMKVLDRSSILKHKMVDQIKREISIMKLVRHPNVVRLHEVLASRKKIFIILEFITGGELFDKIIRHGRLSEADARKYFQQLIDGVDFCHSKGVYHRDLKPENLLLDSQGNLKISDFGLSAWPAQGAALLRTTCGTPNYVAPEVLSHKGYDGALADTWSCGVILYVLLAGYLPFDEVDLTTLYGKIESAEYSFPAVFPSGAKSLIRRILDPSPDTRIRIEEIRKDEWFKKDYEPVREVENEEVNLDDVNAAFDDPEEDNQHTFDDEAGPLTLNAFDLIILSQGLNLSALFDRRQDYGQLHNRFLSRKTSKCYIXSSMEVVAQSMGVKTHIRHYKMRVGGSKCEQDLAISQLCLKFLKLPHPPLWWELERSAGRFFRV

SEQ ID NO: 8342 - protein, 501 aa, Sphingomonas chungbukensis
MATQLKSTENDYGIKSEYGHYIGGEWIAGDSGKTIDLLNPSTGKVLTKIQAGNAKDIERAIAAAKAAFPKWSQSLPGERQEILIEIARRLKARQSHYATLETLNNGKPMRESMFFDMTQTIGQFELFAGAAYGLHGQTLDYPDAIGIVHREPLGVCAQIIPWNVPMLMMACKIAPALASGNTVVLKPAETVCLSVIEFFVEMADLLPPGVINVVTGYGADVGEALVTSPDVAKVAFTGSIATARRIIQYASANIIPQTLELGGKSAHIVCGDADIDAAVESATMSTVLNKGEVCLAGSRLFLHQSIQDEFLAKFKTALEGIRQGDPLDMATQLGAQASKMQFDKVESYLQLATEEGAEVLTGGTRADAANLAGGNFIKPTVFTNVKNTMRIAQEEIFRPVTTVISWNDQTHMMQQANATTYGLAGGVWTKDLARAHRIARQLETGTVWINRYYNLKANMPLGGYKQNGFGREFSHEVLNHYTQTKSVVVNLQEGRVGMFDQ

SEQ ID NO: 8343 - protein, 359 aa, Nostoc sp. PCC 7120
MSKSRRIGILTSGGDCSGLNAVIRAVVHCASGKGWEVFGIRQATLGLMARPPQVSKLEIDQVDPLLTSGGTMLGTTNKGDPFAFPMPDGSFCDRSSEIIAGYHQLDLDALIGIGGDGSLAILRRLAQQGAINLVGIPKTIDNDIGITEHAIGFDTAVNIATEALDRLHFTAASHSRVMILEVMGRDAGHIALAAGIAGGADVILIPEILYSMDDICYHIKHRQEEGKNYCLIIVSEAVRTQDGEILTLTNRLGQSRYGGIGEYLADQISDRIGAETRVTVLGHIQRGGIASPLDRLVASAFGVAAVNLIEAAKYDYMVAWQNRQVITVPIEEAIAQYKAVNPEDALVKTARGLGIYLGE

SEQ ID NO: 8344 - protein, 200 aa, Mesorhizobium loti
MGKYKDHREPRRHRHDDDAASFTERPSEPSYFQRPSIVTADPVDAEVVWFNTSKGFGFVKLPQGIQAYLHIRVLEAAGSRGVSEGTRLKVTTEESPRGGHQVAQVLEVGDQTARTQLHTRCAGESTAGTSAQLESEATVKWYNPEKGFGFIAPENGEKDIFVHATALTRSGLSMLMEGQKVFVQCGQGKKGLEVRSIRLA

SEQ ID NO: 8345 - protein, 267 aa, Pseudomonas fluorescens PfO-1
MSVPAFGLGTFRLQGQVVIDSVSTALELGYRVIDTAQIYENEADVGEAIAASGIARDKLFITSKIWIANFAKDRLIESLKASLQKLQTDYLDLTLIHWPSPEDQVPVEEFMGALLEAKRLGLTRQIGVSNFTIDLMKQAIAAVGAENIATNQIELHPYLQNRKVVEFAQSQGIQITSYMTLAYGEVLKDPLIVQIAERLQATPAQVTLAWAMQSGYAVIPSSTKRANLQGNLGAMALTLSDADMALIATLDRGHRLTSPKGIAPQWD

SEQ ID NO: 8346 - protein, 141 aa, Glycine max
MRGGLPSGGGWGSRVWGAPFFKGMAPGTFIGGTMVVCRLSKSKWDDGISSVTPAEEVFYAVSLLFSSVNNDLKRLEAQNQKILRFCDLAGIGYKEYLAHYTAHGDWVRHFGGKWQRFVEMKDKYDPKRLLSPGQDIFNLLL

SEQ ID NO: 8347 - protein, 478 aa, Brucella melitensis 16M
MDAVIIASSLPFAPSLRKPQCKGSQVPSEKQETPMAATFDTILKGATIVNHDGIGQRDIGIRNGRIAAIGSLAGNSAGEVIDCTGLHILPGVVDSQVHFREPGLEHKEDLETGSLAAVLGGVTAVFEMPNTKPLTTSAEMLEDKIRRGRHRMHCDFAFWVGGTRDNAKDVAELERLPGAAGIKVFMGSSTGDLLVEDDDGVRSILRNTRRRAAFHSEDEFRLKEREGLRVEGDPSSHPVWRDEIAALQCTQRLVRIARETGARIHVLHISTAEEIDFLKDYKDVATCEATPHHLTLSADDYKALGNLIQMNPPVRDKRHREGVWKGIDQGIVDVLGSDHAPHTLEEKQKSYPASPSGMTGVQTLVPIMLDHVNAGKLSLERFVDLSSHGPNRIFGMARKGRIAVGYDADLTIVDMKRRETITHEQAGSKAGWTPYHGKTVTGWPVGTFVRGIKVMWEAEIVNPHKGEPVEFLEALPRR

SEQ ID NO: 8348 - protein, 483 aa, Pseudomonas aeruginosa UCBPP-PA14
MQLKDAKLFRQQAYVDGAWVDADNGQTIKVNNPATGEIIGSVPKMGAAETRRAIEAADKALPAWRALTAKERANKLRRWFDLMIENQDDLARLMTIEQGKPLAEAKGEIAYAASFLEWFGEEAKRIYGDTIPGHQPDKRIIVIKQPIGVTAAITPWNFPSAMITRKAGPALAAGCTMVLKPASQTPYSALALAELAERAGIPKGVFSVVTGSAGEVGGELTSNPIVRKLTFTGSTEIGRQLMAECAQDIKKVSLELGGNAPFIVFDDADLDAAVEGALISKYRNNGQTCVCANRLYVQDGVYDAFVDKLKAAVAKLNIGNGLEAGVTTGPLIDAKAVTKVEEHIADAVSKGAKVVSGGKPHALGGTFFEPTILVDVPKNALVSKDETFGPLAPVFRFKDEAEVIAMSNDTEFGLASYFYARDLARVFRVAEQLEYGMVGINTGLISNEVAPFGGIKASGLGREGSKYGIEDYLEIKYLCLGGI

SEQ ID NO: 8349 - protein, 371 aa, Listeria monocytogenes EGD-e
MDYEKALAFIKSNSTLEQEEGTEVIFKQAQETARGNLDPFLLKDLKQHLGGTNDAIKEAPQEIQMPDFSNLEIATAAALQMRATMGSPNIDLSNGVTTEYRVVEGDYGDIPVRIYRHEEATKPVPAFIFYHGGGFVGGTPAVVENFCKGIAEKLPAVVINVDYHLAPEFPAPAAPKDCYRVLEWVVEQSNELGIDASKIGVSGDSAGGTLAAAVSYMDYEAETNYVGFQALLYPALTLVDEDNDKYQWDISKFGASEDTLPLVAPGIIGMNSSGELLRKAYVRDENPAAPIYSPLSAVDKSIYPPTLIASAEFDALRAFADVFAKELRASGVQTKAIVYQGMCHAFIDKYGIFPQAEDVADEIVQMMKEIF

SEQ ID NO: 8350 - protein, 136 aa, Triticum aestivum
MSEAVGTPESSGAKEQERFLPIANIGRIMRRGVPENGKIAKDAKESIQECVSEFISFITSEASDKCMKEKRKTINGDDLIWSMGTLGFEDYVEPLKLYLKLYREMEGDTSKGSISEQAAKKVGALNGQPGSSFNGM

SEQ ID NO: 8351 - protein, 439 aa, Methanosarcina mazei Go1
MVSDPDGGLNEKTEKNSEYNSQKASGQGTEKDIEPDDGTHASLYQESLAMHRRLGGVLEVASKVRLRTIHDLGVAYTPGVAEPCRKIRENRDLAYLYTLKKNTVAVVTDGSAVLGLGNIGPYAALPIMEGKAIIFKEFAGIDAFPICLGTQDTEEVIKAVKNMAPAFGGINLEDISAPRCFEIEARLREELEIPVLHDDQHGTAIVVFAGLLNALKIVKKDLAELKIVISGLGAAGVAILKFLVRAGANPAKILACDSQGIVYEGREKGMNTIKDEISRITNPERLKGELKEVFPGADLFIGVSVGGIVTGSMVRSMAKDAIVMAMANPVPEIMPEAAKRAGARIVATGRSDFPNQLNNCLSFPGIFKGALGTCARKITPEMEMAAAHALANVVTSGELSEDHIIPDPLDKHVVPAVAKAVASASLESCAARKRLEETF

SEQ ID NO: 8352 - protein, 479 aa, Chloroflexus aurantiacus
MYIHWFRRDLRLRDNTALMAAATAAGGAVVPVFIFDDAILRGRFASPARTQFLLDCLAALDAELRTFGLHLVVRRGDPLRTLFDVLRESGASGVTWNRDYTPYAVRRDTAIKQALREAGYEAHSFKDTVIFEMKEVATADGRPYTVYTPYAKRWRSRLAAEPVTVQDMPRLATIPLPVSEPLPHLTDLLPDAPATLPRFPAGEAVALEALERFVRGPLASYAQGRDLMAVAGTSRLSPYLRLGVLSPRQCVAAALAAPPGPGPESWIGELIWRDFYVQVLYHFPHALRGSFKPAYNRIDWPNDPVLFAAWQQGLTGYPIVDAAMRQLQREGWMHNRARMIVASFLTKDLLIDWRWGERHFMHLLIDGDPAANNGGWQWAAGTGTDAQPFFRIFNPVSQGQKFDPEGAYVRRYVPELVNVPTRYIHEPHKMSLAEQRKAGVLIGRDYPAPIVDHATQRTKALELYRAATRHNDSSAEQYA

SEQ ID NO: 8353 - protein, 301 aa, Neurospora crassa
MAFHKLVKNSAYYSRFQTKYKRRREGKTDYYARKRLITQAKNKYNAPKYRLVVRFTNRDIILQIVSSEITGDKVFASAYSHELKAYGIEHGLTNWAAAYATGLLLARRVLKKLGLDETFKGVEEADGEYKLTEAAETDDGERRPFKAFLDVGLARTSTGARVFGAMKGASDGGIFIPHSENRFPGYDMESEELDAETLKKYIFGGHVAEYMETLADDDEERYKSQFNRYIEDDLEADGLEDLYAEAHAAIREDPFKKAESEAPKKTKEEWKAESLKYKKSKLTREQRAAGVQERIAALRSE

SEQ ID NO: 8354 - protein, 224 aa, Bradyrhizobium japonicum USDA 110
MGSGVMGSSDGFESKKLGVPGQGTSPGRMTPGEHGSGRESGLSPFTGLGEASANLVEVHGVIKWFDASKGYGFIVPDNGWPDVLLHVTVLRRDGFQTAYEGARIVVECIQRAKGYQAFRVVSMDESTAIHPAQMLPPRTHVTVTPTSGLERAQVKWFNRLRGFGFLTCGEGTPDIFVHMETLRRFGMTELRPGQYVLVRFGPGSKGMMAAEIHPETGSPGPQSH

SEQ ID NO: 8355 - protein, 426 aa, Desulfovibrio desulfuricans G20
MSDHISGTLFVSGALLSGRTVDVTVSGGRIAAVSEHGAAPAPQHAETVEAAGKILFPSFIDCHVHLREPGFEYKEDIASGLAAAAHGGFGAVLPMANTSPVNDQGSVTELMLERARKAWPHGPRVHPVGAATKGLKGEELAPMGELAAAGCVAFSNDGLPVGGAEMFRRCMEYAADFGKIVIDHCEDPSLARGTHMNEGVTSGRLGVKGQSVVAESVQVARDILLAEYLGIPVHLAHISCRQSVELIAWAKQRGVRVTAETCPHYLLLDDLALEQYSTAAKVNPPLRTPDDVAAMRRAVADGTIDILVTDHAPHAAHEKDTPLDEAPNGISGLDTAVALTWRLVQEGLLTEADMVRLWCHAPGSLFRLPVNRFTAGDPADFFLFDPAHEWTVTPEAMHSKGKNTPFTGWKLTGKVTSHWMGGHRIA

SEQ ID NO: 8356 - protein, 429 aa, Buchnera aphidicola str. Bp (Baizongia pistaciae)
MQKNNLNFDKQHIWHPYASMIQPTPCILVKSAKGIILKLHNGKKLIDGMSSWWSTIHGYNHPRLNNALKNQINKMSHVMFGGITHYPAISLCKKLIEITPNSLTRIFLSDSGSVSIEIAIKMILQYWQSLGKNKVIFLTIKKSYHGDTFAAMSVCDPKNSFHQFYHNFLPINIFADNPKCSFDGLWNKKDIISFKKLIQKHKDVVAAVILEPIVQSVGGMKFYHPNYLKQVRFLCDLYKIPLILDEIATGFGRTGKFFAFEHSNIVPDVLCIGKAITGGTITLSATLTTDKIANVISNSASGCLMHGPTFMGNPLACAAAYENILILQENKWKIQVKNIETCLRTYLFPLKTHYEVYDVRVLGAIGVVECYHYINISMMQNYFVKNNVWIRPFRKLIYLVPAYIIDNASLKKLINVISNALNYENFFMK

SEQ ID NO: 8357 - protein, 280 aa, Listeria monocytogenes str. 4b F2365
MTLSFSDTYRLNNGIEMPRHGFGVYKLTDEARMRTALETAVDVGYRLFDTASFYHNEKELGDFFASSGLKRDEFFVTTKMWNTEQGYDETLRAFEKSQKKLQLDKIDLYLVHWPKQDTFFDTWRAVEKLYDEGLVRAIGVSNFEAHHLDRLRTSANVLPVVDQLETHPHFPNHLLHRYLEELHIVHQAWSPLGRGGVLQEQILIDLAEKYGKSPAQIVLRWHLQNNISIIPKSETPSRIRENAAIYDFELSEADMRQVERLNTGERVSHAPDVMYVRSEI

SEQ ID NO: 8358 - protein, 275 aa, Bacillus thuringiensis serovar konkukian str. 97-27
MHIPTTTLHNGVKMPLIGLGVYKAKEGDEVKQAVKTALEVGYRSIDTATVYENESGVGEAVRESGIPREDIFITTKVWNDDQGYEETLEAFEKSLKKLQMDYVDLYLIHWPIRGKYVDTYRALEKLYEEGKVRAIGVSNFHKHHLELLLPNCKIKPMVNQVELHPMLTQFELRNFCQGEQIQMEAWSPLMRGGEVFQHPIIQAIATKYEKTPAQVILRWDIQSGIVTIPKSVTPSRIQENFSIFDFSLTEEEMTEINTLNRNLHVGTNPDKYDTL

SEQ ID NO: 8359 - protein, 509 aa, Brassica rapa
MTSVNVKLLYHYVITNLFNLCFFPLTAIVAGKAYRFTIDDLHHLYYSYLQHNLITIASLFAFTVSGFGLYIARLPKPLYLVEYSCYLPPRHLKVSVSKIMDIFYQIKADTSSRNVACDDPSSLDFLRKIQERSGLGDETYSPEGLIHVPPRKSFAGSREETEKVIIGGIENLFENTKVKPKDIGILVVNSSKFNPTPSLSAMVVNTFKLRSNIKSFNLGGMGGSAGVIAIAIDLAKDLLHVHKNTYALVVSTEGITQGIYAEENRSMMFSNCLFRVGGAAILLSNKSGDRRRSKYELVHTVRTHTGADDKSFRCVQQGDDEDGKTGVCLSKDITNVAGTTLTKHIAICRPLILPLSEKFLFFATSVAMKLLKDKIKHYYVPDFKLAVDHFCIQPGGRAVIDELEKNLGLSPIDVEASRSTLHRFGNTSSSSIWYELAYIEPKERLKKGNKKGWQIALGLGFKGNSAVWVALNNVKASANSPWEHCIDRYPVKNDSDLSKSKHQVQNGRS

SEQ ID NO: 8360 - protein, 457 aa, Trichodesmium erythraeum IMS101
MIKLPGPKSPALTQILQWTAKPIKFMEKCAREYGDTFEVKLNYPIVFISHPKAIEEIFKANPKKFDCGSSNKLAQPLLGDYSLLLLDDIPHQRQRKLLMPPFHGKRMQAYGELICNVAQEVASKWEIGQVFSMREFTAEISLKVILQAVFGLYEGERYSKLEKLLGSLLESLSSPLKTSMLFFQFLQIDLGPWSPWGNFIKNREEIYELLCAEISERRQKLDPERSDILTMLLLARDEEGEGMSDIELRDELMTLLIAGHETTATSLSWAFYWIHHQPEIYQKLSRELETFGDDLNPMTVINLPYMNAVCSETLRIYPVVIIVSPRKTKLPITIMGQTYPAGTALTPCIYLTHHREDLYPEPKKFKPERFLERQYSSYEFLPFGGGNRRCIGAAFAMFEMKIVLATILRRYSLALAEKQEVKPLRRGLTLAPAGGVKMVMTGKLMQTEKKFPSVATV

SEQ ID NO: 8361 - protein, 503 aa, Gibberella zeae PH-1
MFSLLFLQFFEQHFIATAILLLLPIPLRAIETYLRRWRLAQAQGCQDAASKVPVKDPIVGFDFLYKVFFGKAPERYLDSTWQAFKEMGTTYIERRWSWQCVYTCDPHNLKHILASACEDFDLPEFRTSVIGHVFGQGIFVLSGHTWKHARAVLRQSFRKGNPTPFLETLERNFQAFSKHVPTDGSAFDLQPLFLAFAMDVSTEFLMGHSTNMLSDKADHTREQQFVDDYMICSEEIIQQMQLGPLHRLKFNFAANRAKKRVYEYLDIFIEESLNSPRQGSKVSFLTDMMAIAGDRKGLSDHILHILLASRDTTSSLLSNLFFFLSKNPRIYNKLRDQVLNVAGHEPPTASQLKELTYLKWCVNESLRLHPVIPTNARVAVRDTTIPRGGGADGTSPLFISKGTALFYNVYAMHRNKDVFGPEPEEFIPERWEDLRPGWGYLPFNGGARACIGQQYALLETHYVVARMAQTYTLLESRDDGDWMEFLDWFQWSIWTEDLMGANR

SEQ ID NO: 8362 - protein, 192 aa, Schizophyllum commune
MQTIKCVVVGDGAVGKTCLLISYTTNKFPSEYVPTVFDNYAVTVMIGEDPYTLGLFDTAGQEDYDRLRPLSYPQTDVFLVCFSVTSPASFENVKEKWFPEVRHHCPGVPCLIVGTQIDLRDDSQVIEKLARQKQRPVTSDQGERLARELGAVKYVECSALTQKGLKNVFDEAIVAALEPPVVKKKGPKCVIL

SEQ ID NO: 8363 - protein, 216 aa, Arabidopsis thaliana
MAYQIDQKMIHDQEPMAEIMPNVITAMSSLLQRVSETNDDLSRPFREHKRISAFNAVTKPSISIRSYMERIFKYADCSDSCYIVAYIYLDRFIQKQPLLPIDSSNVHRLIITSVLVSAKFMDDLCYNNAFYAKVGGITTEEMNLLELDFLFGIGFQLNVTISTYNDYCSSLQREMVMRTMYSPLLEPAFLVRSFHKNLLKNLYDEDHRNSQVTSAV

SEQ ID NO: 8364 - protein, 122 aa, Vibrio parahaemolyticus RIMD 2210633
MSITNEQILDAVAEMSVMQVVELIEAMEEKFGVSAAAAVVAGGAAAGAAVEEQTEFDVILESAGGNKVAVIKAVRGATGLGLKEAKALVDGAPAPLKEGVDKAEADALKAQLEEAGATVAVK

SEQ ID NO: 8365 - protein, 174 aa, Glycine max
MSDAPASPSHESGGEQSPRGSLSGAAREQDRYLPIANISRIMKKALPPNGKIAKDAKDTMQECVSEFISFITSEASEKCQKEKRKTINGDDLLWAMATLGFEDYIEPLKVYLARYREAEGDTKGSARSGDGSATPDQVGLAGQNSQLVHQGSLNYIGLQVQPQHLVMPSMQSHE

SEQ ID NO: 8366 - protein, 235 aa, uncultured bacterium
GISHGIDALVVIGGDGSLTGAHLFYQEYGIPAIGLPGTIDNDLSGTDSTIGFDTACNTAIEAIDKIRDTATSHDRLFFVEVMGRDAGFIAINAGIGSAAAAILIPENKTPIETLVEKLKTRTKAKKTSNIFIVAEGGKSGSAQEIADKVKKHLPYYDIKVTILGHLQRGGAPTSFDRLLSFQMGVAAIEGLMAGKYDVMAGMINNKIVYTPIVKAIVDDKTVDEEDLRVANILST

SEQ ID NO: 8367 - protein, 211 aa, Zea mays
MDPMDIVGKSKEDVSLPKSTMTKIIKEMLPPDVRVARDTQDLLVECCVEFINLLSSESNDVCSRDDKKTIAPEHVIRALQDLGFKEYVEEVYAAYEQHKLETLDSPKATKFTGIEMTEEEAVAEQQRMFAEARARMNNGAAKPKEPALEPQNQPQQPPQPQLQLHPTAQQPPQPQSQLHHPQSQQPLHPQLQPYTQAAPQQPLHPQLQPYT

SEQ ID NO: 8368 - protein, 298 aa, Clostridium tetani E88
MGYVICYNKLTSERKINMDINWFPGHMAKTRRELKENLKMVDAIIEIRDARIVKSSANPEIENICGNKPRIILLNKSDLGEEKVTNEWIKALSGENTKVIAINSLKDSGMKKIKNAIDDLLKEKTEKLKAKGLKNIVNRVMVVGIPNVGKSTFINRMAKSSIAKTGDRPGVTKSRQWIKTKIGVELMDTPGILWPKFEDEKVGLNLAFTGAIKDEIMDIETLALNLIERLSEDYGENLKERYKLDKLEEIPLDNMENIAKKRGAILGRGEIDYNRVAIMILDEFRGGKLGRISLEKPE

SEQ ID NO: 8369 - protein, 254 aa, Zea mays
  misc_feature (195)..(195): Xaa can be any naturally occurring amino acid
MSSLYDVSCFAAGLAGNVFALALFLSPVPTFKRVLKAKSTEQFDGLPYLLSLLNCCICLWYGLPWVSDGGRALVATVNCTGALFQLAYISLFIFYADSRTTRLKVAGLLVLVVFAFALIAHASIAFFDQPLRQLFVGSVSMASLVSMFASPLAVMGVVVRTECVEFMPFYLSLSTFLMSASFAVYGLLLRDFFIXSRMGSESSWEQCSWCCTRTTAGDGKAATRQHRCLPDHVAEFVSPIARAVLSVVLCSAIL

SEQ ID NO: 8370 - protein, 128 aa, Glycine max
  misc_feature (17)..(17): Xaa can be any naturally occurring amino acid
ASSMISSPPVTTINRAXAGMAATFTGLTSMAGSPTRNTNNDITYIASNSGRVHCMHVWPPDDKKNFETISYLPDLDDAQLAKEVKYLLRKGWIPCLEFELEHGFVFREHNKSPEYYDGHYCTMWKPPI

SEQ ID NO: 8371 - protein, 441 aa, Azoarcus sp. EbN1
MVHVNISPFKFWRDIERPMNGLHLIADLYRCGTTAAALTEREALETLCVTQCREAGLTPLGSYFYQFRDESGAAAGVTGTVVLAESHLAIHTWPESGGVTLDVYVCNFSRDNGDRARMVYRAVIDALRPAEIVGHEVVRGRLPEKGVAGPMPLPAVEGVIFEQLNDNAGYFTRGGKLIEKGRSRYQEYEVWETPQFGRLFRLDGCFMTSERDEFHYHENLIQVPCIAHPAPARALILGGGDGGSAEELLKQPAMAKIVIAELDEKVIEIAREHLQAVHRGALDDPRIELRIGDGFRYVMEEAPAAAERFDLIVLDLTDPVGPAEALYSEDFFRGCRALLAPGGAISLHIGSPAFQPERLRTLVARLRDVFAIVRPYFLYVPLYGTLWGFATASDTLDPAALSAAEVDRRLAERRIGALQHYNGAVHCAQFALPNHLRTLLG

SEQ ID NO: 8372 - protein, 449 aa, Glycine max
  misc_feature (128)..(128): Xaa can be any naturally occurring amino acid
MEHFNNDDLEYVVDEYYDVPDFAVEDTSSDIVPELTSDVDSDFEDEFPTSNAKTDTTASEARNGKDIQGIPWERLNYSRDKYRETRLKQYKNYQNFSRSRHDLRKECLEVQKGETFYDFFFNTRLVRXTLAGPNIMLRNLLWATSKHDVYFMQNYSVMHWSALLRRGKEVLNVAKPIIPTLKRPGFLAQPVSRVQISTMTVKENLMVAGGFQGELICKNLKHPGVLFCGKITTDDNAITNAVDVYSNPAGSLRVITANNDFQVRVFDAENFASLGCFKYDWSVNNTSVSPDGKLLAVLGDSTECLIADANTGKITGSLKGHLDYSFSSAWHPDGQILATGNQDKTCRLWDIRNLSQSMAVLKGRMGAIRALRFTSDGRFLAMAEPADFVHIFDSHSGYEQGQEIDLFGEIAGISFSPDTEALFVGIADRTYGSLLEFNRKRHYNYLDSF

SEQ ID NO: 8373 - protein, 180 aa, Zea mays
MASSMLSSAAVGTSPAQATMVAPFTGLKSSAAFPVTRKANNDITSITSNGGRVSCMQVWPPIGKKKFETLSYLPDLTDAELAKEVDYLLRNKWIPCVEFELEHGFVYREHGNSPGYCDGRYWTMWKLPLFGCTDSAQVLKEVEECKKEYPNAFIRIIGFDNTRQVQCISFVAYKPPSFTG

SEQ ID NO: 8374 - protein, 57 aa, Glycine max
MAGDGAATCIDILLAIILPPLGVFLKYGCQVEFWICLVLTLFGYIPGIIYAVYAITK

SEQ ID NO: 8375 - protein, 490 aa, Lotus corniculatus var. japonicus
VALMILRKNLKKPDSIPNIPPGPWKLPIIGSIPHLVGSPPHRKLRDLAKKYGPLMHLQLGEVIFIIVSSAEYAKEVMKTHDVTFASRPRSLFTDIVFYGSTDIGFSPYGDYWRQVRKICNVELLSMKRVQSLWPIREEEVKNLIQRIASEEGSVVNLSQAIDSLIFTITSRSAFGKRYMEQEEFISCVREVMKLAGGFNIADLFPSAKWLENLTRMRSKFEYLHQKMDRILETIIDDHKANSRTKEGQVEGGEEDLIDVLLKYENSSTDQDFHLTIRNIKAILFDIFIAGSETSATTINWTMAEMMKDPILLKKAQDEVREIFQRRGKVDETCIYELKYLKAFINEVLRLHPPGPLVFRECRQACEINGYHIPAKSTVLVNTFAIGTDSKYWAEPERFCPERFIDSSIDYKGTNFEHLPFGAGRRICPGINYGMANVELVLALLLYHFDWTLPKGIKNEDLDLTEEFGVTVSKKEDLCLIPSISHPLPST

SEQ ID NO: 8376 - protein, 502 aa, Zea mays
LQLGGDVSGGRLSVDASDIAEASRDFGGLSRAEPMAVFQPRAAGDVAGLVRAAFGSARGFRVSARGHGHSISGQAQAPGGVVVDMGHGAVARAPPVYSPALGRHYVDVWGGELWVDVLNWTLSHGGLAPRSWTDYLYLSVGGTLSNAGISGQAFHHGPQISNVYELDVVTGKGEVVTCSETENPDLFFGVLGGLGQFGIITRARIALERAPQRVRWIRALYSNFTEFTADQERLISLGSRRFDYVEGFVVAAEGLINNWRSSFFSPQNPVKLSSLKHHSGVLYCLEVTKNYDDATAGSVEQDVDALLGELNFIPGTVFTTDLPYVDFLDRVHKAELKLRAKGMWEVPHPWLNLFVPASRIADFDRGVFRGVLGGGTAGAGGPILIYPMNKHRWDPRSSVVTPDEDVFYLVAFLRSALPGAPESLEALARQNRRVLDFCAEAGIGAKQYLPNHKAPGEWAEHFGAARWERFARLKAQFDPRAILAAGQGIFRPPGSPPLVADS

SEQ ID NO: 8377 - protein, 442 aa, Coxiella burnetii RSA 493
MLENDMQRLDSQHVWHPCSQMKDYEQFKPLIIKKAYGSYIELSNGQKIIDAISSWWCKSLGHNHPKLKEALKQQLEKFEHVIFANTTNEIIVALSQQLAALLPGLNKVFYAGDGSCAVEIAMKMSLHSRIIQGNKKRKKFIALKNSYHGETVGALSVSDVGLYRAPYSTMLFEPYFIESIPYVLNTQAPEWNDCSAHWDTVERLFEPHAETATAILVEPIVQGASGMKIYSQDFLARLFQWAKNNHIHFIADEIMTGIGRTGKMLACEHAGIIPDFVCLSKGLTSGYLPFSAVLTSDEIYQLFYDDYQTGKAFLHSHTYSGNALAAAVALATLKVFSEEKICARAHKLGKFMLEKMTQVAQETGQLENVRGIGALVAADLIPQPGRLRLGYEVYQEAVKQGVLLRPIGNTLYWLPPLNIDFDLIEVLQKVTKNAIKILSLGF

SEQ ID NO: 8378 - protein, 499 aa, Glycyrrhiza echinata
MEILSLLSYSVFYLALFFIFNIVIRARKFKNLPPGPPSLPIIGNLHHLKRPLHRTFKGLSEKYGHVFSLWFGSRLVVVVSSASEFQQCFTKNDVVLANRPRFLSGKYIFYNYTTLGSTSYGEHWRNLRRITALDVLSNHRINSFSGIRRDETQRLITRLADDSSTNFAEMELSSRLYDMTFNNIMRMISGKRYYGEDCDTSDLQEASQFRDMVSELLQLSGANNKTDFMPLLRFLDFENLEKRLKDISGKTDAFLRGLIEEHRTKKERANTMIDHLLNLQDSQPEYYTDQIIKGLALAMLLAGTDSSAVTLEWSMSNLLNHPEVLKKVKDELDTHVGQDRLVDESDLPKLTYLKNVINETLRLYTPAPLLLPHSTSDECNIGGYKVPQDTIVLINAWAIHRDPELWTEATTFKPERFEKKGELEKLIAFGMGRRACPGEGLAIRAISMTLALLIQCFDWKLINGDKIDLAERDGFTLTKLVPLKAMCKSRPVINKVFKQ

SEQ ID NO: 8379 - protein, 272 aa, Shigella flexneri 2a str. 301
MKPENKLPVLDLISAEMKTVVNTLQPDLPSWPATGTIAEQRQYYTLERRFWNAGAPEMATRAYMVPTKYGQVETRLFCPQPDSPATLFYLHGGGFILGNLDTHDRIMRLLASYSQCTVIGINYTLSPEARFPQAIEEIVAACCYFHQQAEDYQINMSRIGFAGDSAGAMLALASALWLRDKQIDCGKIAGVLLWYGLYGLRDSVTRRLLGGVWDGLTQQDLQMYEEAYLSNDADRESPYYCLFNNDLTREVPPCFIAGAEFDPLLDDSRLLY

SEQ ID NO: 8380 - protein, 238 aa, Oryza sativa (japonica cultivar-group)
MGEEAPEEYELGGGEDERVMEWEAGLPGADELTPLSQPLVPAGLAAAFRIPPEPGRTLLDVHRASAATVSRLRRASSSSSSSFPAFASKGAGAGADEAESGGGANGGNGNTNNNSSKRARLVWTPQLHKRFVEVVAHLGMKNAVPKTIMQLMNVEGLTRENVASHLQKYRLYVKRMQGLSNEGPSPSDHIFASTPVPHASLHDQVPSPYHPHPHHHSYNNAAYAATVSSYHHYHHANH

SEQ ID NO: 8381 - protein, 497 aa, Pseudomonas aeruginosa UCBPP-PA14
MTTLTRADWEARAKDLKIEGRAFVNGEYSNAASGETFDCLSPVDGRFLAKVASCDLADAEQAVKVARNAFDSGAWSRLAPAKRKQAMIRFADLLLENAEELALLETLDMGKPISDSLHIDVASAANSLRWSAEAIDKIYDEVAATPHAELGLVTREPVGVVAAIVPWNFPLLMSCWKLGPALATGNSVILKPSEKSPLTAIRIAQLAVEAGIPKGVFNVLPGYGHTVGKALALHMDVDTLVFTGSTKIAKQLMVYAGESNMKRVWLEAGGKSPNIVFADAPDLKAAAEAAAGAIAFNQGEVCTAGSRLLVERSIKDKFLPLVIEALKGWKPGNPLDPETNVGALVDTQQMNTVLSYIEAGHNDGAKLVAGGKRTLEETGGTYVEPTIFDGVTNAMKIAREEIFGPVLSVIEFEDAEEAVRIANDTPYGLAAAVWTSNLSKAHLTAKALRAGSVWVNQYDGGDMTAPFGGFKQSGNGRDKSLHAFDKYTELKATWIKL

SEQ ID NO: 8382 - protein, 478 aa, Buchnera aphidicola str. Bp (Baizongia pistaciae)
MNVNLMWFRNDLRLSDNSALHFSCRNNASTVLALFIATPKQWERHCLAPKKKMLIYKNIVALKKKITELGIIFYYYESTDYLESTNYIIEFCKIHKVTSIFFNLEYEFYERQRDKIIKKKLKKNNIIINCFHDSVLITPGSIKNSYGKMYKKFSYFKYKCIKQLQLNIPSCFPKPQNKNLHDHYSLDFTIPIFHTYLEKFDANIFPIGEDIVYEKLKFFIKYAFNKYNFDQEIFELNSTSMLSAHLSIGVISPRQCVTLLFKEYPDIIHKLEECKWINELLWREFYQHLLYFYPNIGQNQSLYHWENRIKWDNNLYYLNLWKQGNTGYPIIDAGMRQLKQLGWISNRLRMITASFLVKNLLIDWRKGEEYFMSQLIDGDFASNNGNWQWIASVGTDSMPYFRIFNPMLQSKKFDINAKFIRKYIPELSNVSTYNIHNPCDNNKTNKIHSKYPQPIINYYHSKKKTLLVFKHAKCSNKL

SEQ ID NO: 8383 - protein, 400 aa, Aspergillus nidulans FGSC A4
MAPRTMKALNYVGPFNVKVQEVEMPCLEHPDDIIVKITSAAICGSDLHMYEGRTAAEAGITFGHENLGIVEELGDGVTLLKKGDRVVMPFNVADGRCRNCEDGKTAFCTGVNPGFAGGAYGYVAMGPYRGGQAQYLRVPYADFNALKLPPGTEHEADFILLADIFPTGWHGIEISGFQPGDSVAVFGAGPVGLMAAYSAQIRGASRVYVVDRVPERLRAAEKIGAVPIDFTAGDAVDQIIAANGGEMVDRSVDAVGYQAVSGTKDNATEVPNIVLENMIRVTRACGGLGIPGLYVPSDPGAGDTATAKGMISLSFGKLFEKGLTLGTGQCNVKAYNRQLRDLIIAGKARPSFVVSHEISLDEAEIAYDKFDKRIEGYTKVIIHPNGGFQDKRPPVVNSPL

SEQ ID NO: 8384 - protein, 487 aa, Eschscholzia californica
GTSTVALIAVIISSILYLLFGGSGHKNLPPGPKPWPIVGNLLQLGEKPHAQFAELAQTYGDIFTLKMGTETVVVASTSSAASEILKTHDRILSARYVFQSFRVKGHVENSIVWSDCTETWKNLRKVCRTELFTQKMIESQAHVREKKCEEMVEYLMKKQGEEVKIVEVIFGTLVNIFGNLIFSQNIFELGDPNSGSSEFKEYLWRMLELGNSTNPADYFPMLGKFDLFGQRKEVAECLKGIYAIWGAMLQERKLAKKVDGYKSKNDFVDVCLDSGLNDYQINALLMELFGAGTETSASTIEWAMTELTKNPKITAKIRSEIQTVVGERSVKESDFPNLPYLEATVKETLRLHPPTPLLLPRRALETCTILNYTIPKDCQIMVNAWGIGRDPKTWTDPLTFSPERFLNSSVDFRGNDFSLIPFGAGRRICPGLPIANQFIALLVATFVQNLDWCLPNGMSVDHLIVEEKFGLTLQKEPPLFIVPKSRV

SEQ ID NO: 8385 - protein, 364 aa, Zea mays
GRVGAEEAISLVEALAVQLTQREGELIYEKAEVKKLANFLKQATEDARKVAEEERALALAEIEKARAAIEKVEKAWHVHDFASSSREKAEIEELRKEVREARRIKMLHQPSKVMDMEFELQALRTLISEKTQLCNQLKKELAMIKRLEDDSSGLFELEGSNTLGSQLCIIPRVDGASNIANCPIQWYRVISGGTRELISGATKFMYAPEPFDVGRLLQAEIVLNADKIIVQTDGPVDNAAGLERYVDSLMKRTDIEFNVVVTQMNGKDYSSNSVHVFHIGKLRIKLRKGWSTKARESYSTTMKLCGSRGGGNAAARAVFWHPRKGSSYTLAFETDRDRNAAIMIARKFASNCNIALAGPGDQGT

SEQ ID NO: 8386 - protein, 411 aa, Chlamydomonas reinhardtii
MQIGFVSAESGQGRAKNVRNILLKNSVNIMLCAICWWAVGYAFAYGNSGGGFIGTSRFFSDGESFGSKPWFFTWTFCLSCVTIASGCLAERTHLFVYPVYTAVVSIAVHPVIAHWVWAPDSWLNSMTGSPCRFLDFAGGAVVHTVGGLTGLIGAMLCGPRLGRFEDGVGKDIPGHDVSSVSLGSLMLWFGWYGFNCGSTYIYMAQGGSEASAAVSRVALNMTLCASVAGMTSLVVSSIQTGTFDLAVCCNGLMAGLSASTSNVGFLTPWAACITGALAGLLYVGISRLLVRMGVDDPLDSSAIHCGSGILGVLVSGFLARPSYVMQMVGCNCGGVVYATNGGMQLGMQLLGLSCSMVWTAMWALLTFGILKKLQLLRVDQQTELAGIDNMEHGGPAYPEFLQRVQSTRPGY

SEQ ID NO: 8387 - protein, 170 aa, Triticum aestivum
MAAFLRSKCSSVGRTLMGSVGNNLYGGINSSAETVTRPSHCDAISQQIRTFIQMRTNLKVVDNSGAKRVMCIQSLRGKKGARLGDMIIGSVKEAQPRGKVKKGDVVYGVVVRAAMKKGRSDGSEVQFDDNAIVIVNNKGELIGTRVFGPVPHELRKKKHLKILALAEHIV

SEQ ID NO: 8388 - protein, 277 aa, Streptomyces coelicolor A3(2)
MSSKVPPIILNNGVEMPQLGFGVWQVPDDDAQTAVALALEAGYRSIDTAAIYGNEEGTGRAIAASGLAREDLFVTTKLWNSDQGYDSTLRAFDTSMAKLGLEYLDLYLIHWPMPAKERYVDTYKAFEKLLADGRVRAIGVSNFLPEHLERLTAETSVIPAVNQIELHPHLQQHAAREVHAEQGIATEAWSPLGSGKGILDIPAIVAIAQKHGRTPAQVVLRWHLQLGNVVIPKSVTPSRIKENIDVFGFSLDTEDLAAISALNEDRRLGSDPADVNS

SEQ ID NO: 8389 - protein, 159 aa, Triticum aestivum
MAGMVFGLENPMMTALQHLLDIPDGETGAPGGEKQGPTRAYVRDARAMAATPADVKELPGAYAFVVDMPGLGSGDIQVQVEDERVLVISGERRREEKEDTKYLRMERRMGKLMRKFVLPENADMEKISAVCRDGVLTVTVEKLPPPEPKKPKTIQVQVA

SEQ ID NO: 8390 - protein, 320 aa, Buchnera aphidicola str. Bp (Baizongia pistaciae)
MIKRIGVLTSGGDAPGMNAAIRGVVRTALSRNLEVFGIYDGYLGLYENRMILLDRYSVSDIINKGGTFLGSARFSNFFKKDIRSIAIKNMQQRNIDFLVVIGGDGSYVGAQKLTEMGFPCISIPGTIDNDVAGTDYTIGYFTALETVVEAIDRLRDTSSSHQRISIVEVMGRNCGDLTLSAAIAGGCEFIVLPEIEFTKEELVKEIKNGIKKGKKHAIVAITEYICNVEKLAKYIQRETCRETRATILGHIQRGGAPVVYDRILASRMGEYSVDILLQGFQGRCIGTINEKMVHHDISDALKNMKRPFKFDWLKTAKQLY

SEQ ID NO: 8391 - protein, 78 aa, Glycine max
  misc_feature (8)..(8): Xaa can be any naturally occurring amino acid
  misc_feature (42)..(42): Xaa can be any naturally occurring amino acid
  misc_feature (65)..(65): Xaa can be any naturally occurring amino acid
  misc_feature (74)..(74): Xaa can be any naturally occurring amino acid
FERFFPQXSARLSVPGGPSVACSTAKAVEWDAAWSNNLDPSXRAALGVHASAYGNQVKAVEPEKXIHTMEVSPXGVAI

SEQ ID NO: 8392 - protein, 340 aa, Methylococcus capsulatus str. Bath
MHKITLIPGDGIGPSIVDAAVKVIEATGVQVQWDTQSAGMAAVEKFGTPLPDATLDSIRANRICFKGPLTTPVGGGYRSVNVTLRQAFNLYANVRPAISFEGTDTAFSDVNLVTVRENTEGLYAGIEHFIKVDEEKIAAESIAVVTRKGSERIIRYAFDYARRARRKKVTLVHKANILKCTSGLFLEIGREIAKEYPDIEFDDRIVDACSMQMVMQPQRFDVLVTTNLFGDILSDLAAGLIGGLGLTAGANIGTDAALFEAVHGSAPDIADKGIANPTAMIMAGAMMLEHIGEPDAARRIERAVREVIEDGRSVTPDLAKDSPCGTAQMAEAIVERVRQA

SEQ ID NO: 8393 - protein, 284 aa, Gibberella zeae PH-1
MDTALTAASRLSLRNSTSIIPCIGFGSYKIRGETCAAAVLAALPAGYRHIDSAALYRNEVRVREAIEQSGVFREDLFLTTKVGSPRRKTEKTEAYEDVIEAVERIAGKDGYVDLLLMHVPGPSREHRHSLWEAMERAKREARARNIGVSNFRVRHLDEMKEYATEWPPSVNQIELHPWCQQKEVVKYCQDNEIIIEAYSPLATGARLEDPLVEGISTKHDKSHAQVLIRYSLQKGWVPLPKSSRPDRISENFNVFDFVLDEDDMETLDDLDKGSAGAIFKMNVG

SEQ ID NO: 8394 - protein, 654 aa, Zea mays
  misc_feature (165)..(165): Xaa can be any naturally occurring amino acid
  misc_feature (202)..(202): Xaa can be any naturally occurring amino acid
  misc_feature (307)..(307): Xaa can be any naturally occurring amino acid
  misc_feature (315)..(315): Xaa can be any naturally occurring amino acid
  misc_feature (329)..(329): Xaa can be any naturally occurring amino acid
  misc_feature (402)..(402): Xaa can be any naturally occurring amino acid
  misc_feature (525)..(525): Xaa can be any naturally occurring amino acid
  misc_feature (584)..(584): Xaa can be any naturally occurring amino acid
  misc_feature (635)..(635): Xaa can be any naturally occurring amino acid
MISARTAAASPASLWKRGGRSEGGGSCDGCRTYRNTLRRAAAAKVRALPSGAVEAVKMGSAAEVEQEEAEVAAAADGVVVEDHYGEDSATEELPIMPWAFSVASGYTLLRDPHHNKGLAFTEKERDAHHLRGLLPPAVVPQELQIKKIMHNLRQYQVPLQRYMAXMMDLQERNERLFYKLLIDNVEELLPVVYTPTVGEACXQKYGSIFRQPQGLYVSLRDKGKVLEVLRNWPHRNIQVICVTDGERILGLGDLGSQGMGIPVGKLALYTALGGVRPSACLPITIDVGTNNEKLLNDEFYIGLRQKXRATGEEYXMSLMEEFMAAVKQXIYGEKVLIQFEDFANHNAFNLLAKYSKSHLVFNDDIQGTASVVLCRFVSSTQRWLVGTLAEHTYLFLGAGEAXGTGIAELIALEISKQTSAPIEECRKKIWLVDSKGLIVDSRKNSVQSFKKPWAHEHEPLTTLYDAVQSIKPTVLIGTSGVGRTFTKEVVEAMASFNERPIIFSLSNPTSHSECTAEEAYNWTQXVVQYLASGSPFDPVEYDGKVFVPGQSNNAYIFPGFGLGLVISGAIRVHEDMLLAASEAXLAAQATQENFDKGSIFPPFTNIRKISARIAAAVAAKAYELGLATRLPPPRXDLVKYAQSCMYTPVYRNYR

SEQ ID NO: 8395 - protein, 189 aa, Triticum aestivum
  misc_feature (64)..(64): Xaa can be any naturally occurring amino acid
  misc_feature (72)..(72): Xaa can be any naturally occurring amino acid
  misc_feature (105)..(105): Xaa can be any naturally occurring amino acid
  misc_feature (144)..(144): Xaa can be any naturally occurring amino acid
  misc_feature (172)..(172): Xaa can be any naturally occurring amino acid
MAPTVMASSATSVAPFQGLKSTAGLPVSRRSNGASLGSVSNGGRIRCMQVWPIEGIKKFETLSXYLPPLSTXEALLKQVDYLIRSKWVPCLEFSKVGFIFREHNXSPGYYDGRYWTMWKLPMFGCTDATQVINEVEEVKKEYPXDAYVRIIGFDNMRQVQCVSFIAFKPPGXCEESGKALNSSLTTGHI

SEQ ID NO: 8396 - protein, 355 aa, Fusarium oxysporum f. sp. lycopersici
MSRSNPPNAAGSRKISFNVSEQYDIQDVVGEGAYGVVCSAIHKPSGQKVAIKKITPFDHSMFCLRTLREMKLLRYFNHENIISILDIQKPRNYESFNEVYLIQELMETDMHRVIRTQDLSDDHCQYFIYQTLRALKAMHSANVLHRDLKPSNLLLNANCDLKVCDFGLARSAASQEDNSGFMTEYVATRWYRAPEIMLTFKEYTKAIDVWSVGCILAEMLSGKPLFPGKDYHHQLTLILDVLGTPTMEDYYGIKSRRAREYIRSLPFKKKVPFRTLFPKTSDLALDLLEKLLAFNPVKRITVEEALKHPYLEPYHDPEDEPTAPPIPEEFFDFDKHKDNLSKEQLKQLIYQEIMR

SEQ ID NO: 8397 - protein, 214 aa, Bacillus subtilis subsp. subtilis str. 168
MQATVHESKQSIMQRILTVFVFTLLIATVGLFIGQFVPVALMLPLSILEVAMIILAFWMRRRKAVGYAFVYTFAFVSGITLFPIVSHYASIAGAYVVLEAFGSTFVIFAVLGTIGAKMKKDLSFLWSFLLVAVLALAVVGIFNIFSPLNSAAMMAYSVIGTIVFSLYILYDLNQIKHRHITEDLIPVMALSLYLDFINLFINLLRFFGILSSDD

SEQ ID NO: 8398 - protein, 165 aa, Leptospira interrogans serovar Copenhageni str. Fiocruz L1-130
MRFDMNDTLYDLTATLNNGKEQKLENYKGKVLLIVNTASECAFTPQYAGLQNLYSKYKTEGLEILGFPCDQFKHQEPGSDETIKNFCQKNYGVEFPIFKKIEVNGDNAHPVFRFLRNKASGFFGNSIKWNFTKFLVDKQGNVIKRYSPITTPENIEKEIQNLLKR

SEQ ID NO: 8399 - protein, 145 aa, Brassica napus
VFGALKGALDEGLDIPHSDKRFAGFNKENKQLDADIHRNYIYGGHVSNYMKMLNEDEPEKFQTHFSQYLKKGVDAETMEELYKKVHAAIRADPNPKKTEKPAPKAHKRYNLKKLTYEERKNKLIERVKALNGAAGGADDDEDDEE

SEQ ID NO: 8400 - protein, 252 aa, Zea mays
HASVYDAICQARRLIYIIGWSMFHTIHLVRDGHDDMALGDLLRRKSQEGVQVLLLVWDDPTSRRLLGIKMEGYMGTRDEETRRFFKHSSVQILLCPRSAGKRHSWVKQQETGTILTHHQKTVILDADAGNHRRKIVAFMGGLDLCGGRYDTPKHTLFRTLQTFHKEDYYNPNFAVEDARGPREPWHDLHSKIDGPEAYDVLKNFEERWLKASKRSAAKKLSKLSRSHNDSLLWINKIPDIIAIDDKIYSMTM

SEQ ID NO: 8401 - protein, 511 aa, Agrobacterium tumefaciens str. C58
MRREPIMHEPLTAAEYKAIASDLQFPANAFIDGAFRPAGSGKTFKTINPATGETLADISACDVSDVDYAVGKARAAFDDGRWRLLPPGERKAILLTFAKLLEQHRHELAVMESLDSGKPVSECQTVDIPDTIHTIRWHAELIDKLYDNTAPVGSNALALVVREPVGVVGCVLPWNFPLLMLAWKIGPALASGCSVIVKPAEETTLTTLRVAELAHEAGIPAGVFNVVPGGGKEVGEPIGMHMDVDMVAFTGSTPTGRRFLRYAADSNLKRIVLECGGKNPAVVLDDAEDLDLVAEQVVNGAFWNMGENCSASSRLIVHAKIKDELLQRIGAYMREWRMGDPLDPQNRVGALVSKAHFDKVHSFLEDVKAENLTIVHGGKTEKGIFIEPTVVDAVPPASRLFREEIFGPILSVTTFNTLAEAVALANDTNYGLAASVYTGSLRKAIKLSREIRAGVVTVNCFGEGDATTPFGGYKESGFGGRDKSIFAHDNYCELKTIWIDVSDRSVDETVR

SEQ ID NO: 8402 - protein, 1230 aa, Cryptococcus neoformans var. neoformans
MSSFTPAFRLHHTHSSSVSPTASNDVAPSSPTPNQPHQLAARSPLYATSPNCASKITKGSSLSSSTAHHGLKYVRPSTSPLLRSPKGESFSAYLGNWGSQELITFLNIHKCGQYLAIFQKNDINGKILLDLDMTALKSMGIGKISERVRLIGGIKDLRRCVADESIRAPFTQRSYPSERTLLPSLPSHSNVLLDKWDCSSSASRLGKRQITLRPPPLDLQGHMPPRLLSHASLGIATIDTHDIHTTNSKIEVYIQQNPPGQPQSMPTKRSDSLTLCAAPSRNVGRRSPSSRHFEGCKSQTDGLTTLNLTLDRQVPSSTMNNVTLREDCHLQREERLPLSHQVPHSRNAFASPHKTSLSGRCPLARGDTTSHQPSGPAIAEQDSPVNYRISNTVTNTKEISQGDLKQPFVMKSLESQSHLLAGVSDMSHDPVTDGFKPKGKASVPLTVMSSSDISAVNANPAALSLADLRRQLVKFINTEDDTIRTVNVMHVTSGVEILERALKKFGKFGTGIHGSPDVYGDEDGDGTLEIDGWEVYTESTPDESSKPLSEFNLLKTCTFHREGTAIQDKGLFLRKKQRMQKRKNIQDFFGETPPPSMSPTSPTLITGPHLSLVQGKSQPTSGSAFSSSSRLSTLTHKGRNRASMISVMSGLGVPIINTLPSPQGNGLRLTGSVHSHEKKSMYNFFGHRPPSELISNHLTDYFPSAKKSDVEKARHSLLRLSGGTVAYKKSGIYEGDSTPDHWSKPGDNQPPSLPPFEPSQDTLSDSLQAFASSTPVHLSRPKHTVALRRRRDSDSSSRSHTSMLMQTRRNRDHSDTTSLLTVDEITAEVENRRVSTIQRGDYIEETEDSSSIEGDTLPQDDESKGVLRAICSDSNKLVDSGKSYQGDSDIDQQHELEDEEEDKLDDDEEEEEEEEEEDNEQGKAFTSTGSKRIIKWIKGALIGAGSFGSVYLGMDAQSGLLMAVKQVELSAGSAKNEDRKRSMLSALEREIELLKELQHENIVQYLDSSVDANHLNIFLEYVPGGSVAALLNNYGAFEEALVRNFVRQILTGLNYLHMRGIVHRDIKGANILVDNKGGIKISDFGISKKVENSLITGLRTNRPSLQGSVFWMAPEVVKQTSYSPKADIWSVGCLVVEMLTGTHPWADLTQMQAIFRIGSLARPAPPSDISVQADEFLRKTFEIEHAKRPTAAQLLKHPFIGSPRVRTAASNFINGAIASETMEVQVVEES

SEQ ID NO: 8403 - protein, 488 aa, Eschscholzia californica
  misc_feature (192)..(192): Xaa can be any naturally occurring amino acid
MEVVTVALIAVIISSILYLLFGSSGHKNLPPGPKPWPIVGNLLQLGEKPHAQFAELAQTYGDIFTLKMGTETVVVASTSSAASEILKTHDRILSARYVFQSFRVKGHVENSIVWSDCTETWKNLRKVCRTELFTQKMIESQAHVREKKCEEMVEYLMKKQGEEVKIVEVIFGTLVNIFGNLIFSQNIFELGXPNSGSSEFKEYLWRMLELGNSTNPADYFPMLGKFDLFGQRKEVAECLKGIYAIWGAMLQERKLAKKVDGYQSKNDFVDVCLDSGLNDYQINALLMELFGAGTETSASTIEWAMTELTKNPKITAKLRSELQTVVGERSVKESDFPNLPYLEATVKETLRLHPPTPLLLPRRALETCTILNYTIPKDCQIMVNAWGIGRDPKTWIDPLTFSPERFLNSSVDFRGNDFSLIPFGAGRRICPGLPIANQFIALLVATFVQNLDWCLPNGMSVDHLIVEEKFGLTLQKEPPLFIVPKSRV

SEQ ID NO: 8404 - protein, 96 aa, Glycine max
MMMVHPRDQVGGETHKNLVEPNVAASKKARNCACMVSYSVLILALLTLSILLLPLVLPPLPPPPLLLLFVPVFILVVLFFLAFSPSTLPNMAVLTS

SEQ ID NO: 8405 - protein, 163 aa, Triticum aestivum
  misc_feature (54)..(54): Xaa can be any naturally occurring amino acid
  misc_feature (69)..(69): Xaa can be any naturally occurring amino acid
  misc_feature (94)..(94): Xaa can be any naturally occurring amino acid
  misc_feature (99)..(100): Xaa can be any naturally occurring amino acid
  misc_feature (102)..(102): Xaa can be any naturally occurring amino acid
  misc_feature (108)..(108): Xaa can be any naturally occurring amino acid
  misc_feature (113)..(113): Xaa can be any naturally occurring amino acid
  misc_feature (129)..(129): Xaa can be any naturally occurring amino acid
  misc_feature (131)..(132): Xaa can be any naturally occurring amino acid
  misc_feature (140)..(140): Xaa can be any naturally occurring amino acid
  misc_feature (142)..(142): Xaa can be any naturally occurring amino acid
  misc_feature (148)..(149): Xaa can be any naturally occurring amino acid
  misc_feature (151)..(151): Xaa can be any naturally occurring amino acid
  misc_feature (154)..(154): Xaa can be any naturally occurring amino acid
  misc_feature (157)..(157): Xaa can be any naturally occurring amino acid
MAPTVMASSATSVAPFQGLKSTAGLPVSRRSNGASLGSVSNGGRIRCMQVWPIXGIKKFETLSYLPPLXSTEALLKQVDYLIRSKWVPCLELTXLGYLXXEXNASPGXTKGRXGTMWKLPMFGCTDATXVXXEVEEVKKXYXPYVRIXXFXICXKVXCVSSSL

SEQ ID NO: 8406 - protein, 162 aa, Arabidopsis thaliana
MDPMDIVGKSKEDASLPKATMTKIIKEMLPADVRVARDAQDLLIECCVEFINLISSESNEVCNKEDKRTIAPEHVLKALQVLGFGEYVEEVYAAYEQHKYETMDSQRSVKMNSGAEMTEEEAAAEQQRMFAEARARMNGGVTVPQPEQLEEPQQQQQTSLQS

SEQ ID NO: 8407 - protein, 302 aa, Haloarcula marismortui ATCC 43049
MKRPQQSADMAPEQNGTTTVPTLGFGTYRTGGYKCYNAVKNALDCGYTHIDTAMAYENEAAVGRAIEQSSVDREDIFLTTKIKGYPEMVEYERLIEAAKGCLERLGTEYLDLLLVHWWNPLADMEETFNALNTLVDDGLVGQIGVSNFSIKELKQAMRLSDAPIATNQIEYHPYWGDEELVRFCQDNDVTVTAYSPLAEGRAVEDDVLRSIGDRYGKSAAQVSIRWLIQQENVVTIPKAATPKHIEANIDVFDFELTDRDMRRIRKLKPPFWYRENREGGSIYEARSVLGNFVPDSLYNRIA

SEQ ID NO: 8408 - protein, 512 aa, Sorghum bicolor
MDASLLLSVALAVVLIPLSLALLNRLRLGRLPPGPRPWPVLGNLRQIKPIRCRCFQEWAERYGPVISVWFGSGLTVVVSTSELAKEVLKENDQQLADRPRNRSTQRFSRNGQDLIWADYGPHYIKVRKLCNLELFTPKRLEALRPIREDEVTAMVESVYRAATAPGNEGKPMVVRNHLSMVAFNNITRLAFGKRFMNANGDIDEQGREFKTIVNNGIKIGASLSVAEFIWYLRWLCPLNEELYKTHNERRDRLTMKIIEEHAKSLKESGAKQHFVDALFTLKQQYDLSEDTVIGLLWDMITAGMDTTVISVEWAMAELVRNPRVQKKLQEELDRVVGRDRVMLETDFQNLPYLQAVVKESLRLHPPTPLMLPHKASTNVKIGGYDIPKGANVMVNVWAVARDPKVWSNPLEYRPERFLEENIDIKGSDFRVLPFGAGRRVCPGAQLGINLVASMIGHLLHHFEWSLPEGTRPEDVNMMESPGLVTFMGTPLQAVAKPRLEKEELYNRVPVEM

SEQ ID NO: 8409 - protein, 506 aa, Petroselinum crispum
MMDFVLLEKALLGLFIATIVAITISKLRGKKLKLPPGPIPVPVFGNWLQVGDDLNQRNLVDYAKKFGDLFMLRMGQRNLVVVSSPELAKDVLHTQGVEFGSRTRNVVFDIFTGKGQDMVFTVYSEHWRKMRRIMTVPFFTNKVVQQYRFGWEDEAARVVEDVKANPEAATNGIVLRNRLQLLMYNNMYRIMFDRRFESVDDPLFLKLKALNGERSRLAQSFEYHFGDFIPILRPFLRGYLKLCQEIKDKRLKLFKDYFVDERKKLESIKSVDNNSLKCAIDHIIEAQQKGEINEDNVLYIVENINVAAIETTLWSIEWGIAELVNNPEIQKKLRHELDTVLGAGVQICEPDVQKLPYLQAVIKETLRYRMAIPLLVPHMNLHDAKLAGYDIPAESKILVNAWWLANNPAHWNKPDEFRPERFLEEESKVEANGNDFKYIPFGVGRRSCPGIILALPILGIVIGRLVQNFELLPPPGQSKIDTAEKGGQFSLQILKHSTIVCKPRSL

SEQ ID NO: 8410 - protein, 210 aa, Triticum aestivum
MDEEEHEVYGQEIPVDGDMEGADVDMTAAGDDAAKELDEMKRRLKEMEEEAAALRDMQAKVAKEMQGGDANASTAEAKEQVDARSVYVGNVDYACTPEEVQQHFQACGTVNRVTILTDKFGQPKGFAYVEFLEQEAVQEALNLNESELHGRQIKVSPKRTNVPGMKQRPPRGFNPYHAYPYRSYGAPYFPPYGYGRVPRFRRPTRYRPYF

SEQ ID NO: 8411 - protein, 492 aa, Pseudomonas putida KT2440
MAVFASDSFGQLKVEKIMTAQWNHYINGEYVSPESEEYIHEFIPTTALPGDSIARGSAADVDKAVRAAAAAQPAWNARKPIERGRILLAIARLVRANAAAFCAKEAEETGKPLKMAAFEIEACAQYFEYYGGLATAIQGETINLGPSYHAYTTREPFGVVGVILPWNSPLNQAGRAIAPALVSGNTVVVKPSEFTSVTMLQFAELVVKEAGLPPGVLNVVTGTGKETGEPLVKHPLIRKVAFTGSVRAGREIGKLAADRIIPLSLELGGKSPNIVFEDADLDRAVAGSVFAFTVNTGQVCLAGTRCLVHESIFEKFSKKLAGAVEALQFSDGESFGLGPLTTKAQFEQVHRYNELAIQEGAHCLVGGEAPSDKTGWYVRPTVYTNVNNSMRIAREEIFGPVLVLIPFKDENEAVAIANDSDYGLAAGVWTTDLARAHRVSAQIEAGQVYVNEYPSGGVETPFGGFKQSGHGREKGIEALHHYTQTKTTIIRI

SEQ ID NO: 8412 - protein, 181 aa, Zea mays
  misc_feature (40)..(40): Xaa can be any naturally occurring amino acid
MASSMLSNAAVATTVVNRNAGAQASMVGLKSVAAFPLTKXKSTNDLSSLPTNGGRVQCMKVWPTQNMKRYETLSYLPPLTTDQLARQVDYLLNNKWVPCLEFETEHGFVYREHHNSPGYYDGRYWTMWKLPMFGCTDPAQVLNELEECKKEYPNAFIRIIGFDSNRQVQCVSFIAYKPEGY

SEQ ID NO: 8413 - protein, 505 aa, Populus kitakamiensis
MDLLLLEKTLLGSFVAVLVAILVSKLRGKRFKLPPGPLPVPVFGNWLQVGDDLNHRNLTDLAKKFGDIFLLRMGQRNLVVVSSPDLSKEVLHTQGVEFGSRTRNVVFDIFTGKGQDMVFTVYGEHWRKMRRIMTVPFFTNKVVQQYRYGWEEEAAQVVEDVKKNPEAATNGIVLRRRLQLMMYNNMYRIMFDRRFESEDDPLFNKLKALNGERSRLAQSFDYNYGDFIPILRPFLRGYLKICQEVKERRLQLFKDYFVDERKKLASTKNMSNEGLKCAIDHILDAQKKGEINEDNVLYIVENINVAAIETTLWSIEWGIAELVNHPEIQKKLRHELDTLLGPGHQITEPDTYKLPYLNAVVKETLRLRMAIPLLVPHMNLHDAKLGGFDIPAESKILVNAWWLANNPAHWKNPEEFRPERFLEEGAKVEANGNDFRYLPFGVGRRSCPGIILALPILGITLGRLVQNFELLPPPGQSKIDTSEKGGQFSLHILKHSTIVAKPRSF

SEQ ID NO: 8414 - protein, 189 aa, uncultured bacterium
MDIDFKKLAPWNWFKKEQEEQQSTASLPVQRNDLPVAGGPVSPILQLHREIDRLFDDAFRGFGFPTLAMPRWPSDWPGMLKPALDIQETDKQYKIALEVPGIEEKDIQITLDNDVLLVRGEKRQEQETKDGGFHRVERSYGSFQRALNLPADANQDTIKAAFKNGVLTITMDKREASTPKQGRSIPING

SEQ ID NO: 8415 - protein, 499 aa, Gibberella zeae PH-1
MANPFQRPFQLENESLFHCTSLINGDFVSAKEGKTFNVVDPGSGKTWASCPDCTASDVDSAVASSYETFKTYSKTTPRFRAQTLMKWHNLILAAREDLARILVHETGKTLVEARGEIDYALTFVWWFSGEADRAHGTSMSCAIPGRRAVTIKQPIGVAAALVPWNFPIALALRKAAAALAAGCTMVVKPSPETPLTCVSIAHLALEAGFPRGALNVVTTSLENTPTVAEALCLDARVKKVSFTGSTRVGKIIASFCAPNLKKTTFELGGNCPFIVFDDADVGQAVSQLMPLKWRHAGQACITSNRVFVHSSIYDTFVEKVVQETRGLKLGHGMEEGSTMGALTTPRGLDKAEELYQDAISKGAKTVLGTGKREEGQGYFMAPTILTEMEDDMLMTHEEIFAPVLGFYRFESEEEVVQRANDTPLGLASYIFTKNVDRLWRLFENLDAGMIGLNAGNSSSAEAPFGGIKDSGHGKESGKDVAIDEFLITKTATLTIDGHY

SEQ ID NO: 8416 - protein, 431 aa, Methylococcus capsulatus str. Bath
MSGPRVLIEGGRIVDPASGFDGTGVVCVADGVIVGVGSRPDGFEADHRIDAGGRIVCPGFIDLCARLREPGQEHKGTIVSEGAAAVAGGITTLCCPPDTTPVIDTPAVVKLVTERAEQAGKARVLPIGALTRSLNGKDLSEMHALKRAGCLALSNADRPLANLLVLRRALEYAASFDLVVVFRPEDPWLCSQGCVHEGAVGSRLGLPGIPETAETVAVAQALPLIEQTGVRAHFGQLSSGRAVEMVAEATARGVHVSADVAVHHLHLTESSVDGFDALCHSRPPFRTTADRDALLAAVADGRISAVCSDHQPHEPDAKLDVFPETEPGLSSLQTLLPLMYALVAEGRLPLSAAIARLTVGPAAILGLESGRLAPGAPADVCVFDPAAVWVPAEGGWVSAGRNTPFWERALTGRVTATLLGGRLVYPGETAS

SEQ ID NO: 8417 - protein, 241 aa, Glycine max
IRLEKKVSLELGGNAPCIVFDDADLDVAVKGTLAAKFRNSGQTCVCANRIIVQEGIYEKFANALRDTVQNMKVGDGFSEGVAQGPLINEAAVKKVESLIHDATSKGAKVILGGKRHSLGFTFYEPTVISDVNSDMRISREEAFGPVAPLLRFKTEEDAIRIANDTNAGLGSYIFTNSIQRSWRVAEALEYGLVGVNEGVISTEVAPFGGFKQSGLGREGSKYGMDEYLEIKYVCLGNMHKA

SEQ ID NO: 8418 - protein, 223 aa, Thermoplasma volcanium GSS1
MKIFLDTANISEIKEGIDLGLVDGVTTNPTLISKEAGGSKKYAEIIKEILKIVDGPVSVEVVSTKSDGMVEEARKIHALGDNAVVKIPMTDEGLKAIRKLSQENIETNCTLVFNPIQALLAAKSGATYVSPFVGRLDDIGQDGMQIIDEIKTIFNNYIIKTQILVASVRNPIHVLRAAIIGADVVTIPFSVLKLLIKHPKTDEGLTRFLEDWKKVSPDGKFII

SEQ ID NO: 8419 - protein, 285 aa, Xanthomonas campestris pv. campestris str. ATCC 33913
MSTNDNWYIEHFQPTGSAIGYRISGKLDEVQSPFQKIEIYQTTDWGKLMIIDGAVMLTSRDNFFYHEMISHPALFTHAAPKRVVIIGGGDCGTLREVLKHPGVESATQCDIDEQVTRMSEKYFPELCDSNDDARAELLFDDGVAYMANCPAGSVDIVIVDSTDPVGPAEGLFNKSFYESCFKALKDDGILVQQSESPLALLDLIKEMRTEMGKAGFQSFKTLPFPQPCYPTGWWSVTMASKQANADFAFRQADAQAKGFDTLYYTAHLHTGVLVAPPFVAKALGE

SEQ ID NO: 8420 - protein, 437 aa, Saccharomyces cerevisiae
MLEHQLTQEDLEFDKKHIWHPYTSITTPLKVYPITKAEGSYLYLDNGTKVVDGMASWWCVQQGYNNHRLNAAAISQINKMSHVMFGGITHKAGIDFCKKLLALLPDTLECALLADSGSISVDIAMKMALRYHHSLGNTTKKRFLTIKKGYHGDAFGAVSVCDPVNSRHNTYNGFLAENIFCKAPEVRFDCREKDVEKLVEELDVKPFAEIIDKHHSEISGVVMESIVQGAGGLRMYHPYFLKRVRALCNDFNILLILDEVAVGLGRTGMLFGFEHAGIVPDIVCLGKTLTAGYLTLSATVTTREIGDQISSGPEGCFMHGQTYMANPLACAVASENLSILMEGKWKSQVRQIEVQLKKELVPLLEHPIVADVRILGAIGVVEVTKRVNVEVLQEKFIKAGAWIRPFGNIIYILPPYIITSEELTVLTEAIRSVLDFI

SEQ ID NO: 8421 - protein, 437 aa, Saccharomyces cerevisiae
MCEHQLTQEDLEFDKKHIWHPYTSITTPLKVYPVTKAEGSYLYLDNGTKVVDGMASWWCVQQGYNNHRLNAAAISQINKMSHVMFGGITHKAGIDFCKKLLALLPDTLECALLADSGSISVDIAMKMALRYHHSLGNTTKKRFLTIKKGYHGDAFGAVSVCDPVNSRHNTYNGFLAENIFCKAPEVRFDCREKDVEKLVEELDVKPFAEIIDKHHSEISGVVMESIVQGAGGLRMYHPYFLKRVRALCNDFNILLILDEVAVGLGRTGMLFGFEHAGIVPDIVCLGKTLTAGYLTLSATVTTREIGDQISSGPEGCFMHGQTYMANPLACAVASENLSILMEGKWKSQVRQIEVQLKKELVPLLEHPIVADVRILGAIGVVEVTKRVNVEVLQEQFIKAGAWIRPFGNIIYILPPYIITSEELTVLTEAIRSVLDFI

SEQ ID NO: 8422 - protein, 391 aa, Corynebacterium crenatum
MSTLETWPQVIINTYGTPPVELVSGKGATVTDEQGNVYIDLLAGIAVNALGHAHPAIIEAVTNQIGQLGHVSNLFASRPVVEVAEELIKRFSLDDATLAAQTRVFFCNSGAEANEAAFKIARLTGRSRILAAVHGFHGRTMGSLALTGQPDKREAFLPMPSGVEFYPYGDTDYLRKMVETNPTDVAAIFLEPIQGETGVVPAPEGFLRAVRELCDEYGILMITDEVQTGVGRTGDFFAHQHDGVVPDVVTMAKGLGGGLPIGACLATGRAAELMTPGKHGTTFGGNPVACAAAKAVLSVVDDAFCAEVTRKGELFKELLAKVDGVVDVRGRGLMLGMVLERDVAKQAVLDGFKHGVILNAPADNIIRLTPPLVITDEEIADAVKAIAETIA

SEQ ID NO: 8423 - protein, 464 aa, Listeria innocua Clip11262
MLYSKENKESYLEPVFGSSAEDRDIPKYTLAKEPLEPRIAYRLVKDELLDEGSARQNLATFCQTYMEDEATKLMSETLEKNAIDKSEYPRTAELENRCVNIIADLWHAPKDQKFMGTSTIGSSEACMLGGMAMKFAWRKRAEKLGLDIYAQKPNLVISSGYQVCWEKFCVYWDIDMRVVPMDKDHMQLNTDQVLDYVDEYTIGVVGILGITYTGRYDDIYALNEKLEEYNSKTDYKVYIHVDAASGGFFTPFVEPDIIWDFRLKNVISINTSGHKYGLVYPGIGWVLWKDESYLPEELIFKVSYLGGEMPTMQINFSRSASHIIGQYYNFLRYGFEGYRTIHQKTSDVAQYLAHAVEQTGYFDIYNDGSHLPIVCYKLKDDANVKWTLYDLADRLQMRGWQVPAYPLPKNLENIIIQRYVCRADLGFNMAEEFIQDFQASIQELNNAHILFHDTQQSGVHGFTH

SEQ ID NO: 8424 - protein, 339 aa, Pseudomonas syringae pv. tomato str. DC3000
MKTFSKVMTGTLLALSIGSAFAAGDPAIEHNTQAFLDALNSGTGKPIEQLSPKDARAVLVGAQAGVKLTLPQADVSEKTITVDGKPISLNIVRPAGVKGTLPVFMFFHGGGWVLGDFQTHERLVRDLVAGSGAVAVFVNYTPSPEAHYPTAINQAYAATQWVAEHGKEINVDGKRLAVAGNSVGGNMATVVALMAKDKGTPALRYQVLLWPVTDASFDNGSYNQYAEGHFLTRNMMKWFWDNYTTDAAQRNEIYASPLRATTEQLKGLPPALIQTASADVLRDEGEAYARKLDQAGVPVTAVRYNGMIHDYGLLNVVSQVPAVRSAILQASQELKEHLK

SEQ ID NO: 8425 - protein, 492 aa, Agrobacterium tumefaciens str. C58
MNGGSRPMTSPLQHLQQSGRLKKFYIDGKWVLPSGSDKVAVINPATELEFAEIALGNDEDVALAVAAARGAFAGWARTGPADRSELLNRVHQLMQQRLELLAQALTMEMGAAINYARSVQVPLAAEHIKVARDNAASYSFLSQRGHTAILREPIGVCGLITPWNWPLYQITAKVGPALAAGCTVVLKPSELSPLSALLFAEIIEDAGFPPGVFNLVNGEGTIVGAGLSAHPDVDMISITGSTRAGILVAQAAAPTVKRVAQELGGKSPNIILADADMTRAVPLGVAAAFRNLGQSCSAPTRMIVPRSHQKHIEELAAAAALEIVVGDPLSEHTTHGPVANHAQFDRIQRMISIGMDEGAKLVVGGTGRPDGLDTGFYVRPTIFSDVDPKMQIAQQEIFGPVLSIISYDTLEEAIEIANDTVYGLGAHVQGTDLQTVRIVAEQIRSGQVHLNYPAWDPNAPFGGYKQSGNGREYGTEGMEEYLEIKSILGFYP

SEQ ID NO: 8426 - protein, 279 aa, Triticum aestivum
MATPTVEKPDGVEIREVWAENLEAEFAVIREIVDDYPYVAMDTEFPGVVCRPLGTFKSNADFNYATLKANVDMLKLIQLGLTFSDERGGLPALGPAGRPCVWQFNFRGFDPRTDVAAADSIDLLRRSGIDFARHAAEGADSRRFAELLMSSGVVLNAEIHWVTFHSGYDFGYLLKLLTGSNLPDTSSGFFDLIRIYFPVIYDIKHLMRFCNSLHGGLNKLAELLDVERVGICHQAGSDSLLTALSFNKLKESYFGGLTEKYAGVLYGLGTEGGETTSVH

SEQ ID NO: 8427 - protein, 244 aa, Zea mays
  misc_feature (13)..(13): Xaa can be any naturally occurring amino acid
  misc_feature (236)..(236): Xaa can be any naturally occurring amino acid
NGEPVAVKILDRXKVLRHKMAEQVMGSKTNVYIVLEYVTGGELFDTIANHGRMREGEARSYFQQLINAVDYCHSRGVYHRDLKPENLLLDSYGNLKVSDFGLSALSQQIKDDGLLHTTCGTPNYVAPEVLEDQGYDGAMADLWSCGVILFVLLAGYLPFEDSNLMTLYKKISNAEYTFPPWTSFPAKRLLTRILDPNPMTENSCDFRITIPEILEDEWVKKGYKRPEFVEEYDTPXDDVDAVFN

SEQ ID NO: 8428 - protein, 281 aa, Clostridium perfringens str. 13
MAINWFPGHMVKTKREIQNNLKLVDAVIEIRDARIPKSSKNPDIDTLCAGKPRVILLNKSDLTDPKVTKAWKDSLTNDETIVLEVNALKGEGLNAIKPALLKLLKEKHDRLKAKGLAKITTRAMVVGIPNVGKSTFINKMAKNNIAKTGDRPGVTKNKQWIKTKLGIELMDTPGVLWPKFEDEIVGLNLAFTGAIKDEIMDTEELALKLVERLQETNPEELMTRYKLTELHENPLDNLDAIARKRGAIMSGNQIDYNRIAGIILDEFRGGKIGKISLEKPE

SEQ ID NO: 8429 - protein, 326 aa, Coxiella burnetii RSA 493
MTEIKKLIVLTSGGDAPGMNAAIRAVVRTALHYQFEVYGATAGFAGLVNGQVVPLNSRAVANCIQRGGTILKTGRFENFRFKAVRDKAREFLKKLQIDAMIVLGGNGSFAGASKLYQEGGPQMIGIPCTIDNDIQGTDYCIGFDTACNTALQAIDKIRDTAFSHERNFLIEVMGRSSGFIAVNVGIAGGAEIIALPEFHVDIDTLTQKIKKQHGKKSASIIVAAEANQPGHSFEVAKQIKEKTGIEYRVCVLGHTQRGGTPTVKDRVLASLMGAQAIEALKKGLTEKMIAYQNGKIAVAPLPDPDNGTRYFADEALLRVNNIICAM

SEQ ID NO: 8430 - protein, 388 aa, Bdellovibrio bacteriovorus HD100
MAEYINPDYVPEPEKMNVKKGLDGVVMDTSSVSKVNPHTNSLIYRGYPVQDLAENCSFEEVAFLMYNGELPNAGQLAEFSKKERSYREISTTLLNVIKALPQKCHPMDSIRTAVSFLGAEDARIWDASPATNMDKAMMLLAKIPTMVAADYRFKKGLDFIPPKADLSIAENFFHMCFGKVPQKEVVKAFDVSLILYAEHSFNASTFTARVVTSTQSDIYSATVAGIGALKGPLHGGANEMVMHMMKEIADPAKAEQWMLDALAQKKKVMGFGHRVYRSGDSRVPTMKKYAQVMADVTGEQKWMQMYTALEKVMVDKKKIYPNLDFPAGPAYYMMGFEIDFFTPIFVMARTTGWSAHIMEQTADNRIIRPLSEYVGAEQRKVTPISERK

SEQ ID NO: 8431 - protein, 391 aa, Aspergillus nidulans FGSC A4
MGANAKAQSWLHKLEEQGMLCAFHEEGTGSLTNQTMPVNVDVDAMDPDFIKSLPITPHDMTSNQIHVHGQISEPKNRQLLLDVAREYKDRSWVDVYTRVAVLLCKKNINLISGRVLLQILPSYAYDRDKVLSHARLYAKEFESVEITKDRFCIKIPSTGPALSVCSTLEAEGIRTLGTAVFSLPQAIAASQAGCLYISPYFNEIRANFNLSLWPNVEDPATQHTMSARLMQMLEMYRKLYKETGKTQPLIKNANFISPKEALAQGEFGVDSATVSAEVLSQLANIPYDVSVRPSGIVDIPKPQYPEHQNSVSSTPKRLQHLATTDPLAAADWDGSIASTDVDYLKHNGAELEKAIKADPIASARISDALDVFLKVEGESRELIEGVMKELA

SEQ ID NO: 8432 - protein, 147 aa, Geobacter sulfurreducens PCA
MAIVKYSPFRDMMNMQEQMNRLLDLAWSKQGGEELREGAWQPPVDIFEDENAVIIKAELPGIDQKDIEVRIEDNTLTIRGERKHEEEVRKENYHRVERYYGSFQRSFSIPATIDQEKVRASSDKGVLTITLPKREEVKPKQITVEVT

SEQ ID NO: 8433 - protein, 505 aa, Populus tremuloides
MDLLLLEKTLLGSFVAILVAILVSKLRGKRFKLPPGPLPVPVFGNWLQVGDDLNHRNLTDLAKKFGDILLLRMGQRNLVVVSSPELSKEVLHTQGVEFGSRTRNVVFDIFTGKGQDMVFTVYGEHWRKMRRIMTVPFFTNKVVQQYRYGWEEEAAQVVEDVKKNPGAATHGIVLRRRLQLMMYNNMYRIMFDRRFESEEDPLFNKLKALNGERSRLAQSFDYNYGDFIPILRPFLRGYLKICQEVKERRLQLFKDYFVDERKKLASTKNMCNEGLKCAIDHILDAQKKGEINEDNVLYIVENINVAAIETTLWSIEWGIAELVNHPEIQKKLRHELDTLLGPGHQITEPDTYKLPYLNAVVKETLRLRMAIPLLVPHMNLHDAKLGGFDIPAESKILVNAWWLANNPAHWKNPEEFRPERFLEEEAKVEANGNDFRYLPFGVGRRSCPGIILALPILGITLGRLVQNFELLPPPGQSKIDTSEKGGQFSLHILKHSTIVAKPRSF

SEQ ID NO: 8434 - protein, 1563 aa, Aspergillus nidulans FGSC A4
MMDYGGHQYHQQQQPHPHPQSQQNAHLQQHHVQSPAIGAAAARQSANANANANANANAFASNSSLYRSQSQADMTGLSPSVRNMTTSSQSLLGLPAGTSYGSFSGQFQPTSTSNLLSRSSDSLGQLRSSYDSLQGVQRNMNPVTNYRHTSLNSQTLSPHAQGLSTSPQQSLDRMQQLQRQSPHTQSTSAPSNASPMLSHSQNQQYTQYQQSSPYQTQSAQYQQPVSQYQQPQKTQPTQYQQPQQYRQPQQAQYTPQTQSSPYLPQTQYPQYPSSQQPPYQQLQNYQQQQKSAQVPQSSQQSYPQQTQIPQTSQQNYQQASAQRAPQTSPVQQGYQQNSTSAQQAPQLSQQSYAPQAQKSAQGPQASPVKQSYQQPGQKPSHAGQQSYQHTAQSSAQQLPQSSQQSFLLSSAQVPQSSQQKGYQQASTQQVPQSSQPSYPQQVNKPAQLPQLSQQQSYLPGPTQVSQSSQQKSYQQAGQQGLQSSQQSYPQQAQTSAQAQSSPHVQQYQQHAQKSHHVLHPQAQQVQQNQKAARPSQPSQAQAKPSPLQSQQAQQVQVQANHTSASNAHPAQANPQPQRASQQVQAQQPAQSQKTSQQAQNQQTLPNQAYQQFYSQHAQQAQRSPYQTHMQNPQYPYTYQPQFAQQYMQSPQLRTSQATQQQYQSQQSQTSQSQSPQQSVMQKQPTTQLQQEQQPRSQAQAQPQKPPAQTNQLASKPPAKEPKKKKASKKEAKQKPAASQAVSQTASQPAPQARASQTAASQAPPQAKGSQVTAQSSASQPYASQTYGSQAPAYQFHAQASQPYAPQAHTQQNTFQTTTSQAHAAPTNSFQTNTSQSHGQAHSFQVPVSQPHASQMNTFQATPQANSLGAQGSQPTQIPSQPSTQPKVESLSQQSQPSQQVQPTTNGNGQASGTFITENPTQKKTKPGDPNHTPRKRGRPRKQPGEATKPRKPKRPRNPDGTVDLSAALPPNLAAIPGVGIPFSIAPNPPPAPPASTASSAPPAPVIGLDGNPIPQKRKRGRPRKSEADGTPRKPRPPRDPNRPKGTGRPRGRPRKVDVLARKKLEEEQAAAAAAAAHAADQNSQPGAGQPAATQAPPSQAQHGHMQAGHVQVKVNQTSQGQPSKGQGQIHQWQVNQANQSHVSQAQANQAPTNRAQVTHQTSQGQATQGQAQWQISQGKSGSGREQVGQGQFGQSVQAPSGQTNQYAQGTHPGHAHPSHGHPSQAPVQPQSQNQAARPQGQQQMQPQQHARHTHAQQAQPMQNQLRGSPMQSMQASPMQSMQASPLQNQIGQRQPVQRPPVQTSSQRPQSHLQAQVNAKPQMQVQPQKAQPQMQNHMQAKPVVHAQTTKTQGQTQQVQQAQQAQVQQAPAQGQPQKAQVQQLAQPLQMQRQAPSPMQTPAQRPHQPHLLGHGQSQLHHAQAQQGQIQGQAQTRSPTSQAQAQTHNLGKAHPHAQPTQQAHSSYPTHSTHSSHSTHSSHSAQSAQSASYPHSHPYQPQFQEQIPQLHMHSQLHHLNQQHPVYSQFSQRQQQPSMTLNPQTGQKRPSSVLDDDPRKRAYIMPHQL

SEQ ID NO: 8435 - protein, 432 aa, Ustilago maydis 521
MAIPETLQIASPSGKTLTVPTGLFINNKFVPSVDGETLETINPATGKSLGFVSAATASDVDIAVSSARTAFNTTWGRNSSPTQRASILFKLADLLEQHAVELSELESLDNGKPRWIAETMDIADTAGCFRYYAGLADKIEGKTIEQKEGEKLAFTKLEPLGVCGQIIPWNYPIGMLGWKVAPALAAGNCIVLKPAEQTPLSALRIAQLSVEAGLPEGVFNVVNGLGPIVGDAITGHMDVDKVAFTGSTAIGKRVMERAARSNLKKVTLELGGKSPVVVFDDADLDQAVNWAALGILFNQGQDCTAGSRLFVQEGIYDKFLPKLVAAFRAHTIGDPFSNSTFQGPQITQRHQQRILDYIESGKQQGATVEVGGGAWTDGQGEFANGFYVQPTIFSGCKKGMKIVDEEIFGPVLAVAKFKTEQEAQREYVHARR

SEQ ID NO: 8436 - protein, 306 aa, Aeropyrum pernix K1
MFLKWSWFLEWLTPDRATLKHIEDVIFQGRSRFQEIAVVRVSGEGKVLVLDGKTQSSESDEFMYHEALVHPAMILHGSPRKVLILGGGEGATLREVLKHRSVEKAVMVDIDETVVNVAREHLREWHRGAFDDPRAEVVIDDAWNYVASKAETGFDVVIADLVDPLEAGPATRLYSEEYYRMVKDVMNPGGVFVTQAVSISHLTEYHAIIRNTVARVFKHVESYGVYVPSFDSMWGFVVASDDKDPRILGDRGFFETRLSHQLQGAELRFLDYASMLHMLNIPKMYREAIAREKRYATLDNQVFLPA

SEQ ID NO: 8437 - protein, 317 aa, Pseudomonas putida KT2440
MQNWLELEISRREKATEAISVFELRHPNGEKLPAFTAGAHIDVKVRDGLVRQYSLSNDPVETDRYVIAVLNEPTSRGGSRAIHEQFLQGMKISVGEPRNHFPLLDADDHFVLVAGGIGVTPILAMARYLNRIGRSFEIHYCIRSRSTGAFLDVFQGPEFAGRVTLHVDDDPESTPLELARVLDKERARLYVCGPGGFMNWVLSTAEGCLSPERVHKESFSAEPIAAATDDGFEVEVASTGQVFFIPTERSITEVLEEAGVEVLVSCQQGICGSCITNVLEGEPDHRDSVLSESERKSGKVFTPCCSRSKSPRLVLDL

SEQ ID NO: 8438 - protein, 573 aa, Zea mays
PGLTGAPPRPPTCTGRPRSSPRTPSSRAPPTESRSHPQLRHRASPRPAWAHPCTGRAALLLLIPTDRKTPPLSSAASSQVSKLVKYIASAGSLQGGHSLSEPSARHYSSEPSLQATEENGFKGHSMLAPFTAGWQSTDVHPLVIERSEGSYVYDSNGKKYIDALAGLWCTALGGNEPRLVKAATEQLNKLPFYHSFWNRTTKPSLDLANDILSMFTAREMGKVFFTNSGSEANDSQVKLVWYYNNALGRPDKKKFIARSKSYHGSTLIAASLSGLPALHQKFDLPAPFVLHTDCPHYWRFRLPDETEEEFSTRLANNLENLVLKEGPETIAAFIAEPVMGAGGVILPPKTYFEKIQAVLKKYDILLIADEVITAFGRLGTMFGCDMYNIKPDLVSIAKALSSAYMPIGAILVSPEITDVIYSQSNKLGSFAHGFTYSGHPVSCAVAVETLKIYKERNIVEHVNKIAPRFQEGIKAFSGSPIVGEIRGLGLILGTEFVDNKSPNDPFPAEWGVGSIFGAECEKRGMLIRVAGDSIMLSPPLIMTPNEVEEIISKFGDALKATEERIVELKSRKN

SEQ ID NO: 8439 - protein, 136 aa, Pisum sativum
NTDITSNGERVKCMQVWPPIGKKKFETLSYLPPLTRDQLLKEVEYLLRKGWVPCLEFELLKGFVYGEHNKSPRYYDGRYWTMWKLPMFGTTDPAQVVKEVDEVVAAYPEAFVRVIGFNNVRQVQCISFIAHTPESY

SEQ ID NO: 8440 - protein, 323 aa, Aspergillus nidulans FGSC A4
MENYQKIEKIGEGTYGVVYKARELTHPNRIVALKKIRLEAEDEGVPSTAIREISLLKEMNDPNIVRLLNIVHADGHKLYLVFEFLDLDLKKYMEALPVSEGGRGRALPDGSTLSRNLGLGDAMVKKFMAQLIEGIRFCHSHRVLHRDLKPQNLLIDRDGNLKLADFGLARAFGVPLRTYTHEVVTLWYRSPEILLGGRQYSTGVDMWSCGAIFAEMCTRKPLFPGDSEIDEIFKIFRILGTPDETIWPGVTSFPDFKPTFPKWKREDIQNVVPGLEEDGLDLLEALLEYDPARRISAKQACMHPYFQHGSSYYSGRARRNGFH

SEQ ID NO: 8441 - protein, 58 aa, Zea mays
MSEGTANCVDILIAIILPTLGVFLMYRCGHQLWIWLLLSFLGYILGIIYAIYAIIKNS

SEQ ID NO: 8442 - protein, 495 aa, Zea mays
  misc_feature (218)..(218): Xaa can be any naturally occurring amino acid
MAPGSSSSRKAKALKASYRLVADNFLAVLAMVSVVAVLFAAWPISIEDLACRLHAVRPLHVLTAAILTAALAKLRRMSRPSDVYLVEYGCFWPKPCFRAPFATCLEHVRLLPYLVNEDDISWGWRLLQRSGIGEETCVPYAYHYLPPDRSFRASLDETELVIFSAVDDVFARTTAVTPADIGVVIVNCSIFTPTPVFTDMIVNRYKLRADVRSVNLSXGMGCSAALISIGLARNMLQVAPPGTHALIVSTEILSSQYYVGMDRSMLLPNCLFRMGAAAMILSNTAARGARFRLARVVRTVASARDAAYRCVFQVEDEESNTGIRLSKDLVPTAAQTLKSNIVAFGPLVLPASEKLLVALSILRRRLVQSSRGRVYRPDFRTAFEHFCIHAGGRGVIDEVQRGLGLSDEDVEASRMTLHRFGNTSSSSVVYELAYIEAKGSMRKGDRVWMISFGAGFDCSSVAWECIEPAADAAGPWADCIHRYPVQLPKLMEALD

SEQ ID NO: 8443 - protein, 244 aa, Triticum aestivum
  misc_feature (212)..(212): Xaa can be any naturally occurring amino acid
  misc_feature (221)..(221): Xaa can be any naturally occurring amino acid
MEGGGARNVSAAAAQTEGSGDDGSRKPLPPCCVKAQAAVAESEAKCHATVVSGWFTGTRSRSGKPSKAQYFNNPMWPGEAHSLKVEKILYQGKSPYQEVLVFESSTYGNVLVLDGIVQLTDKDECAYQEMVTHLALCSIPSPKNVLVVGGGDGGVLREIAKHDSVETIDICEIDQLVIDVCKDFFPRLYVGYKDPRVRLHVGDAVEFLRNSXEGKYDAIIXDSSDPIGPAQELVEKPFFQTIAR

SEQ ID NO: 8444 - protein, 143 aa, Brassica napus
MADTPSSPAGDGGESGGGSVREQDRYLPIANISRIMKKALPPNGKIGKDAKDTVQECVSEFISFITSEASDKCQKEKRKTVNGEDLLWAMATLGFEDYLEPLKVYLARYRELEGDNKGSGKSGDGSNRDAAAGGVPNEDMPSW

SEQ ID NO: 8445 - protein, 606 aa, Zea mays
  misc_feature (414)..(414): Xaa can be any naturally occurring amino acid
MATMKLGSKPEIFVLQDLTWRCTIELESDVVVEVGEMSFYLHKFPLLSRSGVLQRMISEYQAPADGGGMCTLQLDDIPGGAKAFELAAKFCYDVKIELNALNVVCLRCAAEYLRMTDDYAEGNLITQAECFLVDVLANWKDSIKALETCEGVLPTAEDLHLVSRCIRNGIRSGDTTSSAAAAAAAAGMDWWYEDVSFLSLPMFKRLIQAMEAKGMRDESIAGAIMFYAGRFLPGLKRNTSFSNALASYGADGSGGAGGGMSSRNITPRAASVSAPSEGDQRYFLEEIVALLPTKKGVASTKFLLGMLRTAMLLHASPLCRENLERRIGAQLEDASLDDLLVPNLGYHVETLYDIDCVQRILDYFMSSTDGIGTGYTSPALAEEGGGSLGIPQGATLRAPVDDGIYRAIDIYLKXAPVVPDYARPVDDGIYRAIDIYLKSHPWLSESERLPLRVVVQVLFFEQLRLRTSIAGWLIVWLPLRVVVQVLFFEQLRLRTSIAGWFFVSDNAAGGDGARPHAGGAIVPKGTAAIAGCPQADADSDVEGDAPDGKETITDVKARVSDLEKECKSMKQEIRRLGKPRRSWSLLTRKCGFGAKVQQAQTAMSGK

SEQ ID NO: 8446 - protein, 206 aa, Triticum aestivum
MGERVKGTVKWFNVTKGFGFISPEDGSEDLFVHQSAIKADGYRSLNENDVVEFEVITGDDGRTKAADVTAPGGGALAGGSRPGDGGGDRGGRGGGGYGGGGYGGGGGGGYGGGGGGYGSGGGSYGGGGGYGGGGGGGRYGGGGGGGRECYKCGEEGHISRDCPQGGGGGGGGYGGGGGRGGGGGGGGCFSCGESGHFSRECPNKTN

SEQ ID NO: 8447 - protein, 462 aa, Zea mays
MVSDGARGLLGAYELGRTLGEGNFGKVKQARHRGSGGQFAVKIMERARVLSQRADEQICREIATLKLLAHPNVVRLHEVAASKTKIYMVLELVNGGELLDRIAASEGKLPEQEARRLFQQLVDGVSYCHEKGVCHRDLKLENVLVDRKGNIKISDFGLSALPQHLGNDGLLHTTCGSPNYIAPEVLQNRGYDGSLSDIWSCGVILYVMLVGHLPFDDRNIVVLYQKIFKGDAQIPEWLSPGARNLLRRILEPDPAERIAMAEIKAHPWFQEHYVPVLPPYDDDDDHDSVKQIGAGSKTTHHINAFQLIGMASSLDLSGFFEEEDVSQRKIRFTSAQPPEDLFAEIERSATDMGFHVHRGHSKLRLTRNCDRSKNQKNPMSSSSSSFLVCTEVFELSPSLYVVELNKSHGDPALYRQLCQRICGDLGVLEMDQIFGTRPPVADDLAGLALALERRSATPLVAL

SEQ ID NO: 8448 - protein, 187 aa, Zea mays
  misc_feature (50)..(50): Xaa can be any naturally occurring amino acid
  misc_feature (121)..(121): Xaa can be any naturally occurring amino acid
MVEVVPIYTAGSKYPSSTCSPEDNSDLFYAALGGLGQFGIITRARIALEXDFESFTEDQEMLIMAENSFDYIEGFVIINRTGILNNWRASFKPQDPVQASHFQSDGRVLYCLELTKNFNSXTLEFLDRVHTSELKLRAQSLWEVPHPWLNLLIPRSSIRRFATEVFGRILVGFLSSAPSLSGHGGRV

SEQ ID NO: 8449 - protein, 329 aa, Deinococcus radiodurans
MAYPNPAGIKRVAVLTSGGDAPGMNAAIRAVVRTGAQQGIEVVGVRRGFSGLHRGEVQLLGPRDVANTIQRGGTILLTARSHTWRSPEGRAKGAAVLREWGVDGLVVIGGDGSFHGGYFLQEEHGIPVIGVPGTIDNDLYGTDHTIGYFTAVETALEAVDKLRDTGASHERIFVIEVMGRHAGHIALDVAVAGGAEEVFIPEDKKPIGDVVNIVKDSIAKGKRGSIIIVAEGYDGGAEAVAQAIHAGTGLETRVSILGHIQRGGTPVSSDRILASRLGEAAVYALMDGKKGVMVGRIGGGIAYTPLHETWEKRKDVSRDLYRCAKMLSI

SEQ ID NO: 8450 - protein, 413 aa, Listeria monocytogenes EGD-e
MEMDPNTDLSSVTRPRATPVLTTFQFDSGKVGHIWTTFSEDQIDLNFACPEVLYKMIDVLMFYLEEGAEYVRLDAVGFMWKVPGTSSIHLEETHEIVKLFRDLVDIAAPGTIIITETNVPHVDNISYFGNGEKEAHMVYQFPLPPLVLHAIHHGNAKFLRNWAKNLELPEGKRTFFNFLASHDGIGLNPVRGIIPEAEILALVNDLEEEGALVSYKQNPDGSKSPYEINVTYMDALSKQADTDDLRLARFLVAHAVLMSIPGVPAVYVQSILGSRNDYLGVEATSHNRSINRKKYDLAEITAELEQRGSLRKATYDALTKLISTRKAESLFHPEIPMEVLESTAELFVVKRSSDAESIILIHNLSEKEVSYSLDSGVYTNLYKGSTVTGSDSIKLSGYEFCWLKTKNYREEQK

SEQ ID NO: 8451 - protein, 140 aa, Listeria monocytogenes EGD-e
MTNLRKRLSRLYAEDVVDSLAARIEARVQQTQQRKLTRKDQWDEKDIVLITYGDQFKEESQKTLTTFKKMYDSYLKSAFEIVHFLPFYPYSSDDGFSVIDYKAVNPELGDWKDIKEMEKSARLMFDFVCNHMSAKSDWFK

SEQ ID NO: 8452 - protein, 170 aa, Triticum turgidum subsp. durum
MASSATSVAPFQGLKSTDGLPISRRSSSAGLSSVSNGGRIRCMQVWPIEGIKKFETLSYLPPLSTEALLKQVDYLIRSKWVPCLEFSKVGFVFREHNSSPGYYDGRYWTMWKLPMFGCTDATQVLNEVEEVKKEYPDAYVRVIGFDNLRQVQCVSFIAFRPPGCEESGKA

SEQ ID NO: 8453 - protein, 327 aa, Chlamydophila pneumoniae TW-183
MSNQFDQLKKLSTIVCDSGDPELVKASGSQDATTNPSLILKVAQEPKFQELLNEAVVWGIRQNGDDLQTLSFILDKIQVNFALEIIKNIPGRISLEIDARLSFNVEAMVQRAVFLSQLFEAMGGDKKRLLVKIPGTWEGIRAVEFLEAKGIACNVTLIFNLVQAIAAAKAKATLISPFVGRIYDWWIAAYGDEGYSIDADPGVASVSNIYAYYKKFGIPTQIMAASFRTKEQVLALAGCDLLTISPKLLDELKKSQHPVKKELDPAEAKKLDVQPIELTESFFRFLMNEDAMATEKLAEGIRIFAGDTQILETAITEFIKQIAAEGA

SEQ ID NO: 8454 - protein, 169 aa, Triticum aestivum
  misc_feature (9)..(9): Xaa can be any naturally occurring amino acid
MAPTVMASXDTSVAPFQGFKSTAGLPVSRRSNGASLGSVSNGGRIRCMQVWPIEGIKKFETLSYLPPLSTEALLKQVDYLIRSKWVPCLEFSKVGFIFREHNASPGYYDGRYWTMWKLPMFGCTDATQVINEVEEVKKEYPDAYVRIIGFDNMRQVQCVSFIAFKPPGC

SEQ ID NO: 8455 - protein, 439 aa, Escherichia coli O157:H7 EDL933
  misc_feature (92)..(92): Xaa can be any naturally occurring amino acid
MEHLHMKTRTQQIEELQKEWTQPRWEGITRPYSAEDVVKLRGSVNPECTLAQLGAAKMWRLLHGESKKGYINSLGALTGGQALQQAKAGIEXVYLSGWQVAADANLAASMYPDQSLYPANSVPAVVERINNTFRRADQIQWSAGIEPGDPRYVDYFLPIVADAEAGFGGVLNAFELMKAMIEAGAAAVHFEDQLASVKKCGHMGGKVLVPTQEAIQKLVAARLAADVTGVPTLLVARTDADAADLITSDCDPYDSEFITGERTSEGFFRTHAGIEQAISRGLAYAPYADLVWCETSTPDLELARRFAEAIHAKYPGKLLAYNCSPSFNWQKNLDDNTIASFQQQLSDMGYKFQFITLAGIHSMWFNMFDLANAYAQGEGMKHYVEKVQQPEFAAAKDGYTFVSHQQEVGTGYFDKVTTIIQGGTSSVTALTGSTEESQF

SEQ ID NO: 8456 - protein, 232 aa, Lilium longiflorum
MGRGKIEIKRIENTTNRQVTFCKRRNGLLKKAYELSVLCDAEVALIVFSSRGRVYEYSNNSIKQTIDRYKKACDSSNSNSLIQVNSQQYFQQESAKLRHQIQILTNANRHLVGEALSSLTVKELKQLENRLERGLTRIRSKKHELLFAEIEFSQKREVELQSDNMYLRAKIAENERTQAAIVQARAEFDALPTFDSRNFYQVNNMLEAPPHYHHQDQTALHLGYEAKDDSVP

SEQ ID NO: 8457 - protein, 265 aa, Glycine max
MVYVKAQKSKAYFKRYQVKFKRRREGKTDYRARIRLINQDKNKYNTPKYRFVVRFSNKDIVAQIISASIAGDIVLAAAYAHELPRYGLEVGLTNYAAAYCTGLLLARRVLKTLEMDEEYEGNVEATGEDYSVEPAESRRPFRALLDVGLIRTTTGNRVFGALKGALDGGLDIPHSDKRFAGFDKEKKELDAEVHRKYVFGGHVAAYMKILAEDEPEKYQSHFSEYIKRGIEADGIEALYKNVHAAIRADPTLKKSDKQTPKEHKR

SEQ ID NO: 8458 - protein, 282 aa, Staphylococcus aureus subsp. aureus COL
MNHIEISKDVKIPVLGFGVFQIPQEQTAEAVKEAIKAGYRHIDTAQSYLNETEVGQGIEASGIDRSELFITTKVWIENVNYEDTIKSIERSLQRLNLDYLDLVLIHQPYNDVYGSWRALEELKENGKIKAIGVSNFGVDRIVDLGIHNQIQPQVNQIEINPFHQQEEQVAALQQENVVVEAWAPFAEGKNQLFQNQLLQAIADKYNKSIAQVILRWLVERDIVVLAKSVNPERMAQNLDIFDFELTEEDKQQIATLEESNSQFFSHADPEMIKALTSRELDV

SEQ ID NO: 8459 - protein, 122 aa, Nymphaea alba
MIQPQTLLNVADNSGARKLMCIRIIGASNYRYAHIGDVIVAVIKEAVPNMPLERSEVIRAVIVRTCKELKRDNGMIIRYDDNAAVVIDQEGNPKGTRVFGSIARELRQLNFTKIVSLAPEVL

SEQ ID NO: 8460 - protein, 216 aa, Triticum aestivum
  misc_feature (114)..(114): Xaa can be any naturally occurring amino acid
  misc_feature (141)..(141): Xaa can be any naturally occurring amino acid
  misc_feature (146)..(146): Xaa can be any naturally occurring amino acid
MAPTVMASSATSVAPFQGLKSTAGLPVSRRSNGASLGSVSNGGRIRCMQVWPIEGIKKFETLSYLPPLSTEALLKQVDYLIRSKWVPCLEFSKVGFIFREHNASPGYYDGRYWXTMWKLPMFGCTDATQVINEVEESRRSXPDAYXRIIGFDNMRQVQCVSSMPQATGCKIRKAKQSSQGQLSAFNFATRHSLGSSNCFYCPRIVSHVMYTCLSNH

SEQ ID NO: 8461 - protein, 161 aa, Pseudomonas syringae pv. tomato str. DC3000
MSENLLNIPVTTIKGEQKTLADFAGKAVLVVNTASKCGFTPQYKGLEKLWQDYKDQGLVVLGFPCNQFGKQEPGDEGAISGFCELNYGVSFPLFKKVDVNGDQAHPLFVQLKEQAPGLLGTERIKWNFTKFLIGQDGKLVKRFAPLTKPEELTDEIEALLR

SEQ ID NO: 8462 - protein, 124 aa, Zea mays
  misc_feature (81)..(81): Xaa can be any naturally occurring amino acid
MAGCCVFLRWPSASPSRIGYRSLVDAAADDAAPPSTVTVVVGKERRAFAVDRLVLDSYPLRLLLETAARREERRAGGRRRXAIFVDVDAILFEHILWLACDARSVSQILHLDLKEIIDFYAQDA

SEQ ID NO: 8463 - protein, 450 aa, Arthrobacter nicotinovorans
MLATLASATSEDAVAALEAACAAQTSWARTAPRVRAEILRRAFDLVTARSEDFALLMTLEMGKPLAEARGEVAYGAEFLRWFSEETVRDYGRYLTTPEGKNKILVQHKPVGPCLLITPWNFPLAMATRKVAPAVAAGCTMVLKPAKLTPLTSQLFAQTMMEAGLPAGVLNVVSSSSASGISGPLLKDSRLRKVSFTGSTPVGKRLMSDASRHVLRTSMELGGNAPFVVFEDADLDKAVEGAMAAKMRNMGEACTAANRFLVQESVAQEFTRKFAAAMGALSTGRGTDPASQVGPLINNGARDDIHALVTAAVDAGAVAVTGGAPVDGPGYFYQPTVLADVPNNAAILGQEIFGPVAPVTTFTTEQDAIKLANASEYGLAAYLYSRDFNRLLRVAEQIEFGMVGFNAGIISNAAAPFGGVKQSGLGREGGSEGIAEYTTTQYIGIADPYEN

SEQ ID NO: 8464 - protein, 484 aa, Agrobacterium tumefaciens str. C58
MPNRSCPAMFGGRGGVSAVAFMGVRSVMNEVSKPMSNLAAIDAAHHLHPFSDMGKLNAAGTRIIERAEGVFIYDSTGKKYLDAFAGLWCVNIGYGRREIADVVQRQMNELPYYNAFFGTTTPPATLLAQKIASRAGPKMNHVFFTNSGSEATDTWFRMARVYWKALGHPTKTRVIARRNGYHGSTVAGASLGGMKWMHEQGNLPIEGIAHIGQPYWYAEGGDLSPAEFGLKVARELDAKIDELGEENVAAFVAEPIQGAGGVIVPPETYWPEIARICKARNILLVSDEVICGFGRLGSWFGYQHFGVEPDLAPVAKGLSSGYLPIGGVIVSDRVAEVMLSEVGDFNHGFTYSGHPVCAAAALENLRIIEDEGLVERVRDDIGPYFSEGWKSLADHELVGEAVNVGLMGGLQLTADKATRRRFAKPDDIGTAVRNHCLANGLVMRATGDRMLASPALTVSRSEVDEIIETLRQGLNHLRDTREHF

SEQ ID NO: 8465 - protein, 490 aa, Corynebacterium glutamicum ATCC 13032
MTINVSELLAKVPTGLLIGDSWVEASDGGTFDVENPATGETIATLASATSEDALAALDAACAVQAEWARMPARERSNILRRGFELVAERAEEFATLMTLEMGKPLAEARGEVTYGNEFLRWFSEEAVRLYGRYGTTPEGNLRMLTALKPVGPCLLITPWNFPLAMATRKVAPAIAAGCVMVLKPARLTPLTSQYFAQTMLDAGLPAGVLNVVSGASASAISNPIMEDDRLRKVSFTGSTPVGQQLLKKAADKVLRTSMELGGNAPFIVFEDADLDLAIEGAMGAKMRNIGEACTAANRFLVHESVADEFGRRFAARLEEQVLGNGLDEGVTVGPLVEEKARDSVASLVDAAVAEGATVLTGGKAGTGAGYFYEPTVLTGVSTDAAILNEEIFGPVAPIVTFQTEEEALRLANSTEYGLASYVFTQDTSRIFRVSDGLEFGLVGVNSGVISNAAAPFGGVKQSGMGREGGLEGIEEYTSVQYIGIRDPYAG

SEQ ID NO: 8466 - protein, 321 aa, Glycine max
  misc_feature (174)..(174): Xaa can be any naturally occurring amino acid
  misc_feature (221)..(221): Xaa can be any naturally occurring amino acid
  misc_feature (242)..(242): Xaa can be any naturally occurring amino acid
  misc_feature (260)..(260): Xaa can be any naturally occurring amino acid
  misc_feature (269)..(269): Xaa can be any naturally occurring amino acid
  misc_feature (273)..(273): Xaa can be any naturally occurring amino acid
  misc_feature (276)..(276): Xaa can be any naturally occurring amino acid
  misc_feature (291)..(292): Xaa can be any naturally occurring amino acid
  misc_feature (298)..(298): Xaa can be any naturally occurring amino acid
  misc_feature (300)..(300): Xaa can be any naturally occurring amino acid
  misc_feature (316)..(316): Xaa can be any naturally occurring amino acid
MARRSLPLLKHLLSRRIPARSVTYMHRPGDGSPRPVTLIPGDGIGPMVTGAVEQVMEAMHAPVYFEKFEVHGNMKAVPPEVLDSIRKNKVCLKGGLVTPMGGGVSSLNVQLRKELDLYASLVNCFNLPGLPTRHDNVDIVVIRENTEGEYSGLEHDVVPGVVESLKVITKFCSXRIAKYAFEYAYLNNRKKVTAVHKANIMKLADGLFLESYREVTTMYPXINYNEIIVDNYYIQLISKPKXFNIIITPNLYRNLITNTXTSITRSTRXIPKXNMXTNHAICKQSTSARNXXNDEVVXQXKSNPVALLLSCTMMLXHLPFP

SEQ ID NO: 8467 - protein, 266 aa, Aeropyrum pernix K1
MGDIHGDYTTFSTIVERSLQTLEGGGYMFLLGDYIDRGTPEGQVLTIYRLCRLTKEYPGRVVMLRGNHEPPEGLEPMPHDYPLALQTVYGSDGRRLYSLSRKLFDSLPHAILVEGALLMLHGGPPTINLETASRDPALYLGSDGDPEVIAEILWNDPAELDIIRAPNPRGVGSLWGPGVTVHMARSLNIKRIVRGHEPAMRGYKLNHGGSVVTLFSRLGAPYFNSQAAFLNCKLESIVTDDIKEFLNECIATVQPEHGEHTGFVAW

SEQ ID NO: 8468 - protein, 84 aa, Glycine max
MEYQRQRSHQSQGRSRWVPASYFSFESLLLLSCLTASLLILPLLLPPLPPPPFLLLLLPIAILLVLIISAFMPSNVRDITHTYM

SEQ ID NO: 8469 - protein, 1343 aa, Salmonella enterica subsp. enterica serovar Typhi Ty2
MSQEYTEDKDVTLTKLSSGRRLLEALLILIALFAVWLMAALLSFNPSDPSWSQTAWHEPIHNLGGAPGAWLADTLFFIFGVMAYTIPVIIVGGCWFAWRHQSTDDYIDYFAVSLRLIGVLALILTSCGLAAINADDIWYFASGGVIGSLLSTTLQPLLHSSGGTIMLLCIWAAGLTLFTGWSWVSIAEKLGGWLLNILTFASNRTRRDDTWVDDEEYDDEYDEETDGVQRESRRARILRGALARRKRLAEKFSNPRGRQTDAALFSGKRMDDDEDIQYSARGVAADPDDVLFSGNRATQSEYDEYDPLLNGHSVTEPVAAAAAATAVTQTWAASADPIMQTPPMPGAEPVVAQPTVEWQPVPGPQTGEPVIAPAPEGYQPHPQYAQPQEAQSAPWQQPVPVASAPQYAATPATAAEYDSLAPQETQPQWQAPDAEQHWQPEPIAAEPSHMPPPVIEQPVATEPEPGIEETRPARPPLYYFEEVEEKRAREREQLAAWYQPIPEPVKENVPVKPTVSVAPSIPPVEAVAAAASLDTGIKSGALAAGAAAAAPAFSLATGGAPRPQVKEGIGPQLPRPNRVRVPTRRELASYGIKLPSQRIAEEKAREAERNQYETGAQLTDEEIDAMHQDELARQFAQSQQHRYGETYQHDTQQAEDDDTAAEAELARQFAASQQQRYSGEQPAGAQPFSLDDLDFSPMKVLVDEGPHEPLFTPGVMPESTPVQQPVAPQPQYQQPVAPQPQYQQPQQPVASQPQYQQPQQPVAPQPQYQQPQQPVAPQPQYQQPQQPVAPQPQYQQPQQPVAPQPQYQQPQQPVAPQPQYQQPQQPTAPQDSLIHPLLMRNGDSRPLQRPTTPLPSLDLLTPPPSEVEPVDTFALEQMARLVEARLADFRIKADVVNYSPGPVITRFELNLAPGVKAARISNLSRDLARSLSTVAVRVVEVIPGKPYVGLELPNKKRQTVYLREVLDNAKFRENPSPLTVVLGKDIAGDPVVADLAKMPHLLVAGTTGSGKSVGVNAMILSMLYKAQPEDVRFIMIDPKMLELSVYEGIPHLLTEVVTDMKDAANALRWSVNEMERRYKLMSALGVRNLAGYNEKIAEAARMGRPIPDPYWKPGDSMDVQHPVLEKLPYIVVLVDEFADLMMTVGKKVEELIARLAQKARAAGIHLVLATQRPSVDVITGLIKANIPTRIAFTVSSKIDSRTILDQGGAESLLGMGDMLYSGPNSTMPVRVHGAFVRDQEVHAVVQDWKARGRPQYVDGITSDSESEGGGGGFDGGEELDALFDQAVNFVTQKRKASISGVQRQFRIGYNRAARIIEQMEAQGIVSAQGHNGNREVLAPPPFE

SEQ ID NO: 8470 - protein, 363 aa, Buchnera aphidicola
MKKNYRIAVLSGDGIGPEVMQEACKILNVLKKYFFLSLEIQKFNIGGIAIEREGVALPKTTLLGCENSDSILLGSVGGKKWDNLPVEQRPERAALLPLRKYFNLFSNLRPAKLYPELKCLSPLRSDIVKNGFDILCVRELTGGIYFGEPKGFVNKNNTKYAFDTEIYHEYEIIRIAHLAFKLARSKKKKVCSIDKSNVLRSSILWGKVVESVSKKYPDVHLSHLYIDNAAMQIIKDPNQFDVLLCSNLFGDIISDECATITGSIGMLPSASFNEKNFGLYEPAGGSAPDIEGKNIANPIAQILSLSMLVRYGMNLNQIADKIDKAVNNVLKKGYRTSDISHDNNFLKTDEMGDLIVDSLINGK

SEQ ID NO: 8471 - protein, 490 aa, Pseudomonas aeruginosa UCBPP-PA14
MARFEEQKLYIGGRYVEASSGATFETINPANGEVLAKVQRASREDVERAVQSAVEGQKVWAAMTAMQRSRILRRAVDILRERNDELAALETLDTGKPLAETRSVDIVTGADVLEYYAGLVPAIEGEQIPLRETSFVYTRREPLGVVAGIGAWNYPVQIALWKSAPALAAGNAMIFKPSEVTPLTTLKLAEIYTEAGVPDGVFNVLTGSGREVGQWLTEHPLIEKISFTGGTSTGKKVMASASSSSLKEVTMELGGKSPLIIFPDADLDRAADIAVMANFFSSGQVCTNGTRVFIHRSQQARFEAKVLERVQRIRLGDPQDENTNFGPLVSFPHMESVLGYIESGKAQKARLLCGGERVTDGAFGNGAYVAPTVFTDCSDDMTIVREEIFGPVMSILVYDDEDEAIRRANDTEYGLAAGVVTQDLARAHRAIHRLEAGICWINTWGESPAEMPVGGYKQSGVGRENGLTTLAHYTRIKSVQVELGDYASVF

SEQ ID NO: 8472 - protein, 329 aa, Methylococcus capsulatus str. Bath
MSKNLLDQLREVTVVVADTGDIEAIEKFKPRDATTNPSLITAAAQMPQYQDIVDDTLKGARQTLGPGASAAQVANRAFDRLAVSFGLKILQIIEGRVSTEVDARLSYDTEGTIEKAREIIKQYEAAGVSKERVLIKIAATWEGIEAAAVLEKEGIHCNLTLLFGLHQAIACAENGITLISPFVGRILDWYKKDTGRESYAPHEDPGVLSVTQIYNYYKKFGYKTEVMGASFRNIGEITELAGCDLLTIAPSLLAELQATEGELPRKLDPAKAKDYPIEKIHVNKYTFDKMHAENRMATEKLEEGIQGFTKALEQLEKLLADRLAHLEAA

SEQ ID NO: 8473 - protein, 506 aa, Exiguobacterium sp. 255-15
MIYEIPNTQGSKVQYKDRYENFINGKWTAPVGGEYFDNVTPITGKVLCQVARSGKEDVELALDAAHAAKDAWGKTSVAERSNILNKIANRMEENLEMLAYAETLENGKAVRETLNADLPLAIDHFRYFAGVIRAQEGSIGELDNDTVAYHFHEPLGVVGQIIPWNFPILMAVWKLAPALAAGNCVVLKPAEQTPASILLMTELIEDLLPPGVLNIVNGFGLEAGKPLASSKRIAKIAFTGETTTGRLIMQYASQNIIPVTLELGGKSPNIFFADIMDADDAFFDKAIEGLLMFALNQGEVCTCPSRALIEESIYEPFMERVLERVKAIKLGNPLDADVMMGAQASSEQMEKILSYLEIGKSEGAECLIGGERNHLDGDLADGYYIQPTIFKGNNKMRIFQEEIFGPVLSVTTFKTEEEALQIANDTLYGLGAGVWTRDMNRAYRFGRAIEAGRVWTNCYHQYPAHAAFGGYKMSGIGRENHKMMLNHYQRTKNLLVSYSPDKLGFF

SEQ ID NO: 8474 - protein, 80 aa, Triticum aestivum
MQITGVVKWFNETKGFGFITPDDGSKDVFVHFTAIQSHGFKTLAEGQRVEFEIQDGQKGPSAVNVKPLEVEEDKRISSKL

SEQ ID NO: 8475 - protein, 444 aa, Saccharomyces cerevisiae
MQSMNVQPRVLAVGGEQFFSQRQASEQHQQQNMGPQVYSPKVNRARMFPQGMPVNTINGSVNQEMNNAYLLKQKNEPLLTQQQQQQQQQQQQQQQQQQQQQQQQQQQPFNIGTPVSVASLPPGLNVLQQQQQQQQQQGVGLNRPLASQLPKHLTNQSMPPIFLPPPNYLFVRDVWKSNLYSEFAVIRQLVSQYNHVSISTEFVGTLARPIGTFRSKVDYHYQTMRANVDFLNPIQLGLSLSDANGNKPDNGPSTWQFNFEFDPKKEIMSTESLELLRKSGINFEKHENSGIDVFEFSQLLMDSGLMMDDSVTWITYHAAYDLGFLINILMNDSMPNNKEDFEWWVHQYMPNFYDLNLVYKIIQEFKNPQLQQSSQQQQQQQYSLTTLADELGLPRFSIFTTTGGQSLLMLLSFCQLSKLSMHKFPNGTDFAKYQGVIYGIDGDQ

SEQ ID NO: 8476 - protein, 433 aa, Saccharomyces cerevisiae
MQSMNVQPRVLAVGGEQFFSQRQASEQHQQQNMGPQVYSPKVNRARMFPQGMPVNTINGSVNQEMNNAYLLKQKNEPLLTQQQQQQQQQQQPFNIGTPVSVASLPPGLNVLQQQQQQQQQQQQQQQGVGLNRPLASQLPKHLTNQSMPPIFLPPPNYLFVRDVWKSNLYSEFAVIRQLVSQYNHVSISTEFVGTLARPIGTFRSKVDYHYQTMRANVDFLNPIQLGLSLSDANGNKPDNGPSTWQFNFEFDPKKEIMSTESLELLRKSGINFEKHENLGIDVFEFSQLLMDSGLMMDDSVTWITYHAAYDLGFLINILMNDSMPNNKEDFEWWVHQYMPNFYDLNLVYKIIQEFKNPQLQQSSQQQQQQQYSLTTLADELGLPRFSIFTTTGGQSLLMLLSFCQLSKLSMHMFPNGTDFAKYQGVIYGIDGDQ

SEQ ID NO: 8477 - protein, 506 aa, Azoarcus sp. EbN1
MLYELPGQPAAKVRFKSRYDNFIGGKWVAPVRGEYFDNVTPITGKPFCQVARSTEEDITLALDAAHAAADRWGRTSAADRANLLLKIADRLEGNLELLAYAETVDNGKAIRETLNADIPLTIDHFRYFAGCLRAQEGSISEIDEHTVAYHFHEPLGVVGQIIPWNFPILMAAWKLAPAIGAGNCVVLKPAESTPVSILVLVELIADLLPPGVLNVVNGFGREAGMPLATSKRIAKIAFTGSTATGRVIAQAAATNLIPATLELGGKSPNIFFSDIAAADDAFFDKAVEGMVLFAFNQGEVCTCPSRALIQESIYDRFMERVLARVRAIRQGSPLDTDCMMGAQASAEQMNKILSYMDVGREEGAQLLIGGERAHLGGELAEGFYVQPTLFRGHNKMRIFQEEIFGPVLAVTTFKDEAEALEIANDTPYGLGAGVWSRDGSVAYRMGRAIKAGRVWTNCYHAYPAHATFGGYKESGIGRETHKMMLDHYQQTKNLLVSYSPNALGFF

SEQ ID NO: 8478 - protein, 267 aa, Triticum aestivum
MASERNGDGGKERAGENGNGGGSGVSLEMPEIRYTKLFINGAFVDAVSGKTFETRDPRTGDVIASIAEGDKKDVDLAVKAAREAFDHGKWPRMPGSERGRIMMKYADLVEGHADELTLLESLDAGKPCTVTRAVDMATAVRSLRYFAGAADKIHGETLKMSRQFQGHTLREPMGVAGLIIPWNFPAIMFFSKVAPALAAGCTMVVKPAEQTPLSALYFAHLAKQAGVPDGVINVITGFGPTAGAAIASHMDVDMVSFTGSTAVGRLI

SEQ ID NO: 8479 - protein, 170 aa, Zea mays
MAPTVMMASSATAVAPFQGLKSAASLPVARRSTRSLGNVSNGGRIRCMQVWPAYGNKKFETLSYLPPLSTDDLLKQVDYLLRNGWIPCLEFSKLGFVYRENSTSPCYYDGRYWTMWKLPMFGCTDATQVYKELQEAIAAYPDAFHRVIGFDNVRQTQCVSFIAYKPPGSD

SEQ ID NO: 8480 - protein, 398 aa, Zea mays
  misc_feature (62)..(62): Xaa can be any naturally occurring amino acid
  misc_feature (181)..(181): Xaa can be any naturally occurring amino acid
  misc_feature (270)..(270): Xaa can be any naturally occurring amino acid
METGTIFTHHQKTMILDADAGNHRRKIVAFVGGHDLCGSRYDTPKHTLFRTLQTFHKEDYYXPNFAVEDARGPREPWHDLHSKIDGPEAYDVLKNFEERWLKASKRSAAKKLSKLSRSHNDSLLWINKIPDIISIDDEIYSNDDDPERWDMQIFRSIDSNSVKGFPKDPREATSKNLVCGXNVLIDMSVHTTYVNAIRGAQHFIYIENQYFLGSSFNWDSHRDVGANNLIPTEIALKIANKIYSNERFSAYIVVPMWPEGNPTGTLTQRXLYWQKMTMQIMYEIIYKAMKEVGLDGTYEPQDYLNFFCLGNREAEDTTCTSSGPFSTTWISNQDQARNNRRFMVYVHSKGMIVDDEYVIIGSANINQRSMEGTRDTEIAMAAYQPQHTLANMLSAPRG

SEQ ID NO: 8481 - protein, 294 aa, Glycine max
  misc_feature (160)..(161): Xaa can be any naturally occurring amino acid
MSEALEEVVPSMKGGCEEEGLNLEATELRLGLPGCESPEREGVFKSVVVSGAKRGFSDAIDGNWNGGGSEKDAAALFSPTSRGAVSVSVSAAKSLTLTATDCTNQPTALGASVLKETVPHSPKPLHENKPQISAPAAKAQVVGWPPIRSFRKNSMASQPXXNDAAADAKSKSGCLYVKVSMEGAPYLRKVDLNSFTTYKDLSLALEKMFSCFTLSQCGSYGVSSRENLSESRLMDLLHGSEYVLTYEDKDGDWMLVGDVPWEMFTESCKRLRIMKSSEAIGLAPRAMEKCKSRY

SEQ ID NO: 8482 - protein, 122 aa, Brassica napus
KLVDSYLAEAAIDGGLTLPELISLAEALPSHARTTEDGLYRAIDTYLKAHPQVMKQERKELCRLIDSRKLSPEAALHAAQNDRLPVRSIIRVLFTEQTKLSRHTDWSPSGSHYSEPGSGPQC

SEQ ID NO: 8483 - protein, 174 aa, Triticum aestivum
  misc_feature (39)..(39): Xaa can be any naturally occurring amino acid
  misc_feature (50)..(50): Xaa can be any naturally occurring amino acid
YTYIVHPWAPTVMASSATSVAPFQGLKSTAGLPVSRRSXGASLGSVSFCXRIRCMQVWGGEGIKKFETLSYLPPVSTEALLKQVDYLIRSKWVPCLEFSKVGFIFREHNASPGYYDGRYWTMWKLPMFGCTDATQVINEVEEVKKEYPDAFVRFIGFDNLRQVQGRRFLAFKPP

SEQ ID NO: 8484 - protein, 253 aa, Rumex acetosa
MEFSNELSRDMEDGSPQRKMGRGKIEIKRIENVTNRQVTFCKRRNGLLKKAYELSVLCDAEVALIVFSSRGRLYEYANHSVKATIERYKKTCSDSTGVTSVEEANAQQEAAKLRNQIRTLQNQTRNTSRNLMGEGLTSMNMKDLKNLETRLEKGISRVRAKKNELLFGEIEFMQKKEIELHNNNQFLRAKIAESERSQQSMNLMPGSSSGEQHYELMPQSQAGPFDSRNFFQVSDLQPDERYSCQNQTPLQLV

SEQ ID NO: 8485 - protein, 175 aa, Triticum aestivum
MAPTVMASSATSVAPFQGLKSTAGLPVSRRSNGASLGSVSNGGRIRCMQVWPIEGIKKFETLSYLPPLSTEALLKQVDYLIRSKWVPCLEFSKVGFIFREHNASPGYYDGRYWTMWKLPMFGCTDATQVINEVEEVKKEYPDAYVRIIGFDNMRQVQCVSFIAFKPPGCEESGHA

SEQ ID NO: 8486 - protein, 319 aa, Zea mays
  misc_feature (260)..(260): Xaa can be any naturally occurring amino acid
MRCPSLGPSSSAGRYLKPHQRPQGGIFAGPGFCSTRGRGVEAALPYQKADRGPRKEAGIRLCSATMSSLYDVSCFAAGLAGNVFALALFLSPVPTFKRVLKAKSTEQFDGLPYLLSLLNCCICLWYGLPWVSDGGRALVATVNCTGALFQLAYISLFIFYADSRTTRLKVAGLLVLVVFAFALIAHASIAFFDQPLRQLFVGSVSMASLVSMFASPLAVMGVVVRTECVEFMPFYLSLSTFLMSASFAVYGLLLRDFFIXSRMGSESSWEQCSWCCTRTTAGDGKAATRQHRCLPDHVAEFVSPIARAVLSVVLCSAIL

SEQ ID NO: 8487 - protein, 159 aa, Solanum tuberosum
MSDEEHQFESKADAGASKTYPQQAGTIRKSGYIVIKGRPCKVVEVSTSKTGKHGHAKCHFVAIDIFTGKKLEDIVPSSHNCDVPHVNRTDYQLIDISEDGFVSLLTDNGNTKDDLRLPTDDSLLSQIKDGFAEGKDLVVSVMSAMGEEQINALKDIGPK

SEQ ID NO: 8488 - protein, 321 aa, Pseudomonas aeruginosa UCBPP-PA14
MWRFVEHSRAFASDSPRLDAQRAAYARMCQAFAPPRPAGLRVLDSCLPAAPPVRVRRYRPDRPAPPGGWPALLYLHGGGWMLGGLDSHDFICADLAARLGLLVLAVDYRLAPEHPFPAALQDCLRAWQALSLGELDEALDGRRLLVAGDSAGGNLAAALCLALRDGGAPSPAAQILLYPLLSAAPSPSRIDCADAPLLGLGDVQACLDAYLPLAALHRQPLALPLEAADFTGLPPAFVAVAEFDPLRDDGERYGAALRAAGGEAGFYPGSGLVHGCLRGHGIDEVEALHEALRRAVQGFLAEDSGERQAGEESTAEHQPGE

SEQ ID NO: 8489 - protein, 159 aa, Solanum tuberosum
MSDEEHHFESKADAGASKTYPQQAGTIRKSGHIVIKNRPCKVVEVSTSKTGKHGHAKCHFVAIDIFTGKKLEDIVPSSHNCDVPHVNRTDYQLIDISEDGFVSLLTENGNTKDDLRLPTDDTLLAQVKDGFAEGKDLVLSVMSAMGEEQICGIKDIGPK

SEQ ID NO: 8490 - protein, 319 aa, Avena fatua
MASAKAMGQGEQDRFVLKSGHAIPAVGLGTWRAGSDTAHSVQTAITEAGYRHVDTAAQYGIEKEVDKGLKAAMEAGIDRKDLFVTSKIWRTNLAPERARPALENTLKDLQLDYIDLYLIHWPFRLKDGAHQPPEAGEVLEFDMEGVWKEMEKLVKDGLVKDIDVCNFTVTKLNRLLRSANIPPAVCQMEMHPGWKNDKIFEACKKHGIHVTAYSPLGSSEKNLVHDPVVEKVANKLNKTPGQVLIKWALQRGTSVIPKSSKDERIKENIQAFGWEIPEDDFQVLCSIKDEKRVLTGEELFVNKTHGPYKSASEVWDHEN

SEQ ID NO: 8491 - protein, 160 aa, Solanum tuberosum
MSDEEHHFESKADAGASKTYPQQAGTIRKSGYIVIKGRPCKVVEVSTSKTGKHGHAKCHFVAIDIFNGKKLEDIVPSSHNCDVPHVNRTDYQLIDISEDGFVSLLTENGNTKDDLRLPTDDALLNQVKGGFEEGKDLVLSVMSAMGEEQICAVKDIGTKS

SEQ ID NO: 8492 - protein, 282 aa, Mycobacterium bovis AF2122/97
MTGESGAAAAPSITLNDEHTMPVLGLGVAELSDDETERAVSAALEIGCRLIDTAYAYGNEAAVGRAIAASGVAREELFVTTKLATPDQGFTRSQEACRASLDRLGLDYVDLYLIHWPAPPVGKYVDAWGGMIQSRGEGHARSIGVSNFTAEHIENLIDLTFVTPAVNQIELHPLLNQDELRKANAQHTVVTQSYCPLALGRLLDNPTVTSIASEYVKTPAQVLLRWNLQLGNAVVVRSARPERIASNFDVFDFELAAEHMDALGGLNDGTRVREDPLTYAGT

SEQ ID NO: 8493 - protein, 459 aa, Mesorhizobium sp. BNC1
MHIDELRKAVRGAVTTRESAEYEAVRTGLLWNARKPDRFPEVVVKAMDAGDVQTAVKFAAANGMRVSARGGGHHFSTIALQDCVVIDLSAMNALEIDAVAGTARAQPAVTNGRLAAAAAEYGLAFPTGHCASVPLSGYLLGGGFGWNAGAWGIACHNVESVKVVLADGSLVTASEAENADIFWAARGAGPEFFGVVTEYRLRLHELPRAIRTSVWVYPIGEVDAVERWMSRTMRTVPRNVEFTAVLSSAPPPLAGKATKTVSAVATIFAYTEEEAQATLEKIAAGAPESALDIQLGMETPFEVLYLIMGQFFLEGRRYAADTNWSADPALQMAIMAEAIEAAPSAESFALGVVLPPPDGTMPDAAFSMVGPAFGCTYAIWQDDAQDQAALSWVRATSEKIAPISLGHYIGEADLDIAGRSHRSFSPEALERLRHLQRKYDQAGLFHRPEPDVEPLKRAG

SEQ ID NO: 8494 - protein, 429 aa, Xanthomonas campestris pv. campestris str. ATCC 33913
MSDLDQVTLNAGDTSVVLPVLKPTLGNDCVDISKLTKETGLFTYDSGFTATASCKSAITYIDGDNGVLLYRGYPIEQLAEKSSFLEVSYLLMNGELPTADEFKKFDHEVTHHTMMHESLKNFLGGFRHDAHPMAMLAGSVASLSAFYHDTLDLNDPEQRRQAAIRLIAKVPTLAAAAYRYSIGWPIRYPRNNLNYVDRFLHMMFEVPSEPLEINPVVAKALDLLFILHADHEQNASTSTVRLVGSTGANPYASVAAGITALWGPAHGGANEAVLKMLEEIGTADNVESAVAKAKDKNSSFRLMGFGHRVYKNFDPRAKIIREMTHKVLGELGVNDPLLEVALKLEEAALKDDYFVQRKLYPNVDFYSGLIYKALNIPVEMFTVMFAIARTAGWVSHWLEQQVDPEMKIGRPRQIYTGYDKRDYTDAGKR

SEQ ID NO: 8495 - protein, 482 aa, Acinetobacter sp. ADP1
MIQESLQYLLKHPDISFTAPTSGAVIEVNDAAKGTPLAWVKSHDRSGVEAAIQRSAQAQAKWKTQTALQRADVLWAWFHLINEHKENLAQILTAEQGKPLAEARGEIGYAASFIRWFAEQARRIDGEILPPTMAHQRLLVIKQAIGVTAAITPWNFPAAMITRKAAPAIAAGCSMLVKPAELTPLTAYALEVLALQAGLPQDILINISGDSVEVGKTLCESDVVRKLSFTGSTPVGRILMQQSAPSIKKLSLELGGNAPVLVFDDANLDQAVQGIMASKFRNSGQTCVCANRIYVQSGIYDALTTKLVDAVKALKVGDGREEGVTQGPLIDARAVAKVQSHIEDATSKGATLQTGGQLAAQGGTFFEPTVLSGVTQEMRVAKEETFGPLAALFRFETEEQAIAMANDTEFGLAAYLFTQSTARQWRVGEALEYGMVGVNTGAISNEVAPFGGVKQSGLGREGSQHGIEEYLEMKYLCVDLSE

SEQ ID NO: 8496 - protein, 332 aa, Gibberella zeae PH-1
MSFGRTVTLNSGWKIPQIGYGTWQAAPGEVGNGVYEALKAGYRHLDLAKIYQNQREVGEGIKKALSEVPGLKREDIFITGKLWNNKHRPEEVAGALDDTLEELGLEYIDLWLIHWPVAFKNGNQLFPLKEGDDGKTALDQEVTLSQTWEAVTKLPKEKVRSIGVSNFNKEMLEQIIKDTGVTPAMNQIERHPRLPQPELVKYLQEKGIFLTAYSAFGNNSWGEPLLINTPEVKAIAERLSKSKGKEVTPAQVILAWSTLDNHVVIPKSVTPARIRSNFEEVELDEEAVKELSKFGEKPQRFNIPKTYKPDWDINVFDDEKEKSATHQVVLKL

SEQ ID NO: 8497 - protein, 505 aa, Burkholderia cepacia R1808
MTRSDLPHEARPVVVWFRDDQRLADNPALTHALDTGHPVVCVYVHDAAPKHGRAMGGAQRWWLHESLSKLDDALAAHGGSLILLRGNEHEAITGFAAAIGAAMVVWNRRYAKAQTGTDASIKRDLIDRGIAVSTFNGHLLREPWTVTTREGLPFQVFSAYWRAARRDDFFPPVPLPAPSHIRFFPVPAHATPHVCTLRELELQPSAPDWAGGLRETWQCGEQAASDQLEAFLENSLSDYPTLRDFPAARATSRLSPYLRFGNISVRQVWYATLSAADAMRSARIVRGVDSKDGPLSKFLSEIGWREFSYHLLYHFAPLHQVNFRRQFDSMPWRDDAKSLRKWQTGRTGYPLVDAGMRELWHTGWMHNRVRMVAASFLSKHLLIDWRQGEAWFWDTLVDADEASNPASWQWVSGSGADAAPYFRIFNPVLQAQKFDPHGDYTRRWVPELAQLSADTVHAPWAASREQLQRASVTLGRSYPMPIVDHQCARARALESVKRLDSESHA

SEQ ID NO: 8498 - protein, 314 aa, Aspergillus parasiticus
METPFAAPWHQFVEDLGQTPCLPGKDLDSILAGWGQLAGTLATRYGFPPPDESVTTEDVQLDGLWLRCYTPPNATGQEPVGLYFHGGGWVMGGVKEEDGFCRVISRQCQMRLVSVEYRKAPQTRYPGALNDGVSAALWVLSRYENQPLVLMGTSAGGNLAFGTALRLIDQDMVDKVSGVVALAPITVHPDAVPEYLKEQYTAYEENAELTVNSRAAMQVFFDCYKAPVDDVYTSCLLHPRLLALPKVYIAELGLDTLRDDARLMKGALDTAKVPVMYDAYPGYPHCLFMFPFKSLGEHQRPFLGGVAKAVRWMS

SEQ ID NO: 8499 - protein, 193 aa, Brucella melitensis 16M
MADKSVSDDQFHSQHASEELGEFIEVSGHIKWFDVAKGYGFIVPDQPGLTDILLHVTSLRRDGFQTALEGARIVCEVRHGDRGLQCFRVLSMDASTAIHPAQMPPQCTHVTVTPSSGLERVIVKWFNRTKGFGFLTRGEGTEDIFIHMETLRRFGMMELRPGQVVLIRFGTGEKGLMAAEIHPDIGTAIPVSH

SEQ ID NO: 8500 - protein, 506 aa, Corynebacterium glutamicum ATCC 13032
MTVYANPGTEGSIVNYEKRYENYIGGKWVPPVEGQYLENISPVTGEVFCEVARGTAADVELALDAAHAAADAWGKTSVAERALILHRIADRMEEHLEEIAVAETWENGKAVRETLAADIPLAIDHFRYFAGAIRAQEDRSSQIDHNTVAYHFNEPIGVVGQIIPWNFPILMATWKLAPALAAGNAIVMKPAEQTPASILYLINIIGDLIPEGVLNIVNGLGGEAGAALSGSNRIGKIAFTGSTEVGKLINRAASDKIIPVTLELGGKSPSIFFSDVLSQDDAFAEKAVEGFAMFALNQGEVCTCPSRALVHESIADEFLELGVKRVQNIKLGNPLDTETMMGAQASQEQMDKISSYLKIGPEEGAQTLTGGKVNKVDGMENGYYIEPTVFRGTNDMRIFREEIFGPVLSVATFSDFDEAIRIANDTNYGLGAGVWSRDQNTIYRAGRAIQAGRVWVNQYHNYPAHSAFGGYKESGIGRENHLMMLNHYQQTKNLLVSYDPNPTGLF

SEQ ID NO: 8501 - protein, 1275 aa, Schizosaccharomyces pombe
MRGRGIDVNSSHYPHISRPRTSSDSQKMYTRAPVDYYYIQENPYFNNIDQDSISDKSLPSTNQSLHHSEEDTESDNDFSESIHPEFDIDVFYKVSNILYDESDLQDPEKRERLEWHSMLSSVLKGDVMQTEKRRLRLTEPDGHSGTYISEVWLGLQAWLHGRLNADQAEVIRKSREGVEPVLREVIDFQIQDEETTKPPLEQVTEILEKVEQCKQFYISSREMEENVPLSASKEFNYKLNALISWSNVMESIQVETLVLQKWVGNDEFDLTMRTPQFNYDGVENTSSFVERIFRQSGLQRTFEQRTLTTLNRIIHQAKQTISENAQAFEEMKLPTYEDKLLPLVRFPIKLLEEALRLRLAYAKKIKGPNFLIVDSMLDDFKIALSVAVRIKREYIKIASPSPGWSLPTNVDEDYDNVLLDSLKFYFKLLTLKLSSGNKNLYFKEIDFLENEWAFLNEHIYWINGGDIHMAGQFSYLSNSLLLNVHRYVESHLNGPTERTAASLTNWYSTLLKNTQIRFRKILRFSETLNSRFENASDFVISEGHLPDLVNRLSTTGHFLAYTANLERDGVFVIADHTLSENPEALKALLFSKDISNLETIQQNCSYVLILCPVHPIVWKGRIEKVDVPDFSVDLKTNRVRIIASNKREHLQAAKSVFQSISGDLVTLAVECRSSITRVYKEFIRLSKLCMRISSTVVDCVSAVREACSGVNCHDLIYHVFSFAAEFGQRILRFLSFDSYWQTKLKRKITSLAVEWISFICDECDLMDRKTFRWGVGALEFLMLMIRGNNILLIDDAMFLKIREKVGKSMAFLLTHFDVLGAKSKVAAKLQRESTEVSSSPRLTSFGDVEEEALSIQLLQKETMLRIDELEIERNNTLLERLAIGHVLDDSVFRNRDFIKLASSFSNITIRWQQGHFVRSGMFGDVYTGVNMETGDLLAVKEIKLQDSRTFRSTVDQIHNEMTVLERLNHPNVVTYYGVEVHREKVYIFMEFCQGGSLADLLAHGRIEDENVLKVYVVQLLEGLAYIHSQHILHRDIKPANILLDHRGMIKYSDFGSALYVSPPTDPEVRYEDIQPELQHLAGTPMYMAPEIILGTKKGDFGAMDIWSLGCVILEMMTGSTPWSEMDNEWAIMYHVAAMHTPSIPQNEKISSLARDFIEQCFERDPEQRPRAVDLLTHPWITDFRKKTIITMPPATITKKTSLSHTITEEKTAQLLAGRHVDSKAETDSLAASYKEESALPVASNVGLRQPNELRIDSINLPPAIVTPDTINYSVD

SEQ ID NO: 8502 - protein, 213 aa, Oryza sativa (japonica cultivar-group)
MARTAWRCALVILTGVLLCAAVETAVAAKRVSIPDDLRDVVDDEEDDDWRHWGAAAPPRDDGQPPDLAGMDPAALQAELLRRHAGPSFGFVKLRLGVRRSQEEVMGIATRWTNVLRTGSVAAKFVAVDFGTLMFTMDTGQDILESSDNWVTLFKVKEFILSQPEAYEFKIGNQAFRRPGDPPLDEVVEMLQKQKSTMLSQDPGSQQYKSKVEL

SEQ ID NO: 8503 - protein, 390 aa, Phlebia radiata
MAFNFAAILAFVSLAAVTSAAPSKTTCSNGVVVPDAVCCDFVPLASALQSEVLMGDCGEDAHELVRLIFHDAIAISQSMGPSAGGGADGSMLIFPTVEPAFFPNLGIADSVNNLIPFLSQFPTISAGDLVQFAGAVAISNCPGAPQLEFLAGRPNATAPAIDGLIPEPQDDVTKILARFKDAGNFSPAEVVALLASHSIARADHVDPTLDAAPFDSTPFDFDTQIFLEVLLKGVGFPGLANNTGEVSSPLPVTDGTDVGELRLQSDFALARDERTACAWQSFVNEQEAMATAFKNAVKKLAVLGHNRNDLVDCSAVVPVPKPATGTPATFPASTGPQDLELTCTTEPFPTLSTAPGAQQTLIPHCSDGTMTCNSVQFDGPATNFGGADDS

SEQ ID NO: 8504 - protein, 492 aa, Arabidopsis thaliana
MSDFSSSVKLKYVKLGYQYLINNFLTLLLIPVIATVAIELLRMGPEEILSVLNSLHFELLHILCSSFLIIFVSTVYFMSKPRTVYLVDYSCYKPPVTCRVPFSSFMEHSRLILKDNPKSVEFQMRILERSGLGEETCLPPAIHYIPPTPTMESARNEAQMVIFTAMEDLFKNTGLKPKDIDILIVNCSLFSPTPSLSAMIINKYKLRSNIKSYNLSGMGCSASLISVDVARDLLQVHPNSNAIIISTEIITPNYYKGNERAMLLPNCLFRMGGAAILLSNRRSDRWRAKYKLCHLVRTHRGADDKSYNCVMEQEDKNGNVGINLSKDLMTIAGEALKANITTIGPLVLPASEQLLSLSSLIGRKIFNPKWKPYIPDFKQAFEHFCIHAGGRAVIDELQKNLQLSGEHVEASRMTLHRFGNTSSSSLWYELSYIEAQGRMKRNDRVWQIAFGSGFKCNSAVWKCNRTIKTPTDGAWSDCIERYPVFIPEVVKL

SEQ ID NO: 8505 - protein, 211 aa, Nicotiana tabacum
MSYAYLFKYIIIGDTGVGKSCLLLQFTDKRFQPVHDLTIGVEFGARMITIDNKPIKLQIWDTAGQESFRSITRSYYRGAAGALLVYDITRRETFNHLASWLEDARQHANANMTIMLIGNKCDLAHRRAVSTEEGEQFAKENGLIFMEASAKTAQNVEEAFIRTASTIYKKIQDGVFDVSNESYGIKVGYGGIPGPSGGRDGAASQGGGCCS

SEQ ID NO: 8506 - protein, 181 aa, Helianthus annuus
MSLQQVPTTETTTRKNRNEGRKRFTDKQISFLEYMFETQSRPELRMKHQLAHKLGLHPRQVAIWFQNKRARSKSRQIEQEYNALKHNYETLASKSESLKKENQALLNQLEVLRNVAEKHQEKTSSSGSGEESDDRFTNSPDVMFGQEMNVPFCDGFAYFEEGNSLLEIEEQLPDPQKWWEF

SEQ ID NO: 8507 - protein, 403 aa, Cupriavidus necator
MLTQKTKDIVKATAPVLAEHGYDIIKCFYQRMFEAHPELKNVFNMAHQEQGQQQQALARAVYAYAENIEDPNSLMAVLKNIANKHASLGVKPEQYPIVGEHLLAAIKEVLGNAATDDIISAWAQAYGNLADVLMGMESELYERSAEQPGGWKGWRTFVIREKRPESDVITSFILEPADGGPVVNFEPGQYTSVAIDVPALGLQQIRQYSLSDMPNGRSYRISVKREGGGPQPPGYVSNLLHDHVNVGDQVKLAAPYGSFHIDVDAKTPIVLISGGVGLTPMVSMLKVALQAPPRQVVFVHGARNSAVHAMRDRLREAAKTYENLDLFVFYDQPLPEDVQGRDYDYPGLVDVKQIEKSILLPDADYYICGPIPFMRMQHDALKNLGIHEARIHYEVFGPDLFAE

SEQ ID NO: 8508 - protein, 442 aa, Candida albicans
MVNLLKKLHITKSHQSNHSNSDSNSLNSNTSMDNHQQQQQLQQYQQQFQQPQQQLYPGEQIVHPAAAQTGQNTTNVTAVSSSNITQSATSSLHSQQLQHVDVSKSAAEEAIRRSLLPERSTVSKGKYSLTDFSIMRTLGTGSFGRVHLVRSVHNGRYYAIKVLKKHQVVKMKQVEHTNDERRMLKLVEHPFLIRMWGTFQDSKNLFMVMDYIEGGELFSLLRKSQRFPNPVAKFYAAEVTLALEYLHSHDIIYRDLKPENILLDRNGHIKITDFGFAKEVSTVTWTLCGTPDYIAPEVITTKPYNKSVDWWSLGVLIFEMLAGYTPFYDSTPMKTYEKILAGKIHYPSFFQPDVIDLLTKLITADLTRRLGNLINGPADIRNHPWFSEVVWEKLLAKDIETPYEPPITAGVGDSSLFDHYPEEQLDYGSQGEDPYASYFLDF

SEQ ID NO: 8509 - protein, 1923 aa, Ustilago maydis 521
MADLPERQINSNFQGLVSTCVIFAVVGSISAITYESLRQLRRLPRTRFSKFWRKDADLRHSPGGVQDNPAHARHKHTCEDWEMGHFYLSRVFHASTPSPMLPRWPFAWVKLAISFTDEWYADHTGMDTVVYVRFLRACLFWVLLHCFTTAPILLSIHITFSRGTSTTDMQRASLSYLVNTPAPDCTEQDRSKCKLLPNEKGSSLLWVHLVLLWYISITWVLALWWIGKGSLTLRKAQIAKTRNNVIQAKTQARSAPPNSTLASATPLHHDPHTNLTAAHGITSDNSDGWRQRSLMVMNLPATMRDEASIRRYFEEFLRPDDDDTLSTYAHTDYAPQTASHNPDTQHTSVSDAHHPSSCDEHRAAPPTAYSTHSDGPDGPQPDLHPNRYLKSPIQTVVLVRKMNELASMLSRRQEVLTQLEAAHVKLAQEVLVTVGRRTLKMRKQERSKAKEASYPNDHRPSSSRSSFFFNRLLRSRRQSNHSVQAASASSSGTTTPSEALDPDLEKLGTAHSSAGKALEEELARRLARFSPTNRGLHAKQTQTIQGDDRSNQHEMGETVWEALNELPRELLDPFQPATRLSALFRGQTVPTIDYLLTKLNLLTALVTEMRSRPPTSYEPTSTAFVTFRDPRQARMVWRELKDQIVVKVRLAPEVKDLDWDRLMKTSFTVDVVRGFGVSIVTWGFTIFWVIIINAIVLGIFSVDKLKQIPGLGNFFDNNPKLTGFVTITLPPLLVSLASMSVPELIFQVSKRAQGFVTFSALYDMCLARYWKFVICNVVIFFSVGSTVIVTVLTKVGNTGSILSTVASAFPSAAPFFVSYLILQLALQSGFEHMGFMIALLQHLGARKATTPRTRAIKTLPRNFNRYYWLPLHINIMAIVFIFALLNPLVIPFALVYLALALVIFKKNFAYHYYRRFNEMEGVVYFTRLLRYSLDAIVVMQAVLLIFFSVLKKKPVYIGMSAVLIPLTVITKLIATRLWKSQCRALDDEEAEALCGIDSRPLWQKVQRNDMGPSTAEEGSDSRGPLDALASGRYPAIVPPPPTDSAFQRVWQRLHDSFNANGLDGQSYLATAHAKGKAPTGAVSLGAKGIARTPRYIVKETAKHAFHYRHAAKNSLGMKVLVESPRASRDRPSVDRRRPVSGLPPTSQLHVHVLRNSHEVAAATDPAAAADDDDDVDRADGEMPNHRSSNPQRSKSTSHGQKGDHVIHRRRGSSRSEDRPFLSGFDAISTHAPLPSEDDYDLSFEDGDAPFLEHDEQGHLLRQSSRRSKRTASRHHGTLRRKPSQLATVADEELPQSADSATSSTQPEGATSTDPLSQHAAVKTDQTWGKSSQRSHYEDYDDSLKGRELVRPHPPVRWDDTPNNTARYNNPFYNQEMDDFLWLPRNPLAPIDLFDTIEWYGPALVSSQGGGGIMGEWDDDQDDVNYDTEDEEKLVMHHDEIPFGGEAATLARSQDLMLAGDEEILLPDRLARHLEETQGVEQVVDPAASIPKSMMDDYKRALGRNRDRRGSTTSRSQHSVSRSSLFRRGSNLSSPSAQGFAGGASLLQVPSHGSFCSSDGSQAAASATQMRSSQRPGTGDSEPLASVDEGGVVVPRRSSSRDRRSRDARAGGGEEGGEAYEHVEQGGGGGGVAEQTTDLTPAKRREATLSGVKRNMSRRTYRRDASGALSRVSGISGETAQKTVTLQAALRAEALEEERRLTLKERLVASKIRKKRNVKRDGSGHLAGLEEMNADEEDDDEEEGATSRRAANRSKIMERYEAQHRRREAQASEFGQLTPRKEGGMRRDVSQGSQLGGEVSQSGLDRSASVASGFGARRLRSAALGVLSLTRSPRLGQDGPLTIVTSVPMQELRGGRPTTRGSSRMDAESQASASRQGVAAATASNEDQRPQMVEASSTEPVLRAEASRTSALEESVISGGQGGS

SEQ ID NO: 8510 - protein, 248 aa, Triticum aestivum
MKGGGDVEAGGDIEAGTAAPKGAPYAGTTESPELRWALIRKIYVVLCLQLLLTAAVAAVFVTVTAIPHFFVSSYAGLGLYIFILVFPFIVLCPLHIYRQKHPINLLLLGVFTVAISFSVGLTCAFTSGKVILQAGILTIVVVLSLTAYTFWAARRGKDFSFLGPFLFASLMILLVFAFIQIFFPLGKLSHMIYGTLAALIFSGYIVYDTGSIIKRYKYDEYVWAAVTLYLDIINLFLGLLTLFRACDN

SEQ ID NO: 8511 - protein, 98 aa, Triticum aestivum
RPIQVTILNKFVQKSRLVPAPEFPGYRRPTRPDISIISYVSLLTESGNTKDDLKLPTDDVLLGQIKTGFADGKDLILSVMSAMGEEQICAVKEIGGGK

SEQ ID NO: 8512 - protein, 220 aa, Zea mays
  misc_feature (122)..(122): Xaa can be any naturally occurring amino acid
  misc_feature (169)..(169): Xaa can be any naturally occurring amino acid
GRVGELRRTSSLLLCTSVSPADLARAMVAVDPDHPTGTEGRDPRGMSVLQQHVAFFDRDGDGVVYPWETFKGMRAIGCGFFTSLVLSFLINLVMSYPTQPGWLPSLLLSVHVKNIHKAKHGXSDSETYDTEGRFDPSKFDAIFSKYGRTHPDALTKDEMNSMLKANRNXYDFLGWIAAIGEWHLLYSVAKDKDGLLQREIVRGLFDASLFERLQDSKKSS

SEQ ID NO: 8513 - protein, 104 aa, Triticum aestivum
  misc_feature (9)..(9): Xaa can be any naturally occurring amino acid
  misc_feature (11)..(11): Xaa can be any naturally occurring amino acid
  misc_feature (14)..(14): Xaa can be any naturally occurring amino acid
  misc_feature (16)..(16): Xaa can be any naturally occurring amino acid
  misc_feature (23)..(25): Xaa can be any naturally occurring amino acid
  misc_feature (27)..(27): Xaa can be any naturally occurring amino acid
  misc_feature (30)..(30): Xaa can be any naturally occurring amino acid
  misc_feature (33)..(33): Xaa can be any naturally occurring amino acid
  misc_feature (37)..(37): Xaa can be any naturally occurring amino acid
  misc_feature (39)..(39): Xaa can be any naturally occurring amino acid
  misc_feature (63)..(63): Xaa can be any naturally occurring amino acid
  misc_feature (69)..(70): Xaa can be any naturally occurring amino acid
  misc_feature (88)..(88): Xaa can be any naturally occurring amino acid
  misc_feature (91)..(91): Xaa can be any naturally occurring amino acid
MAPTVMASXAXFVXPXQGLKSTXXXPXSRXSNXASLXSXSNGGRIRCMQVWPIEGIKKFETLXYLPPLXXRRPFLKHVDYLIRSKWPXCLXFIPGSFFPLPFLL

SEQ ID NO: 8514 - protein, 118 aa, Oryza sativa (japonica cultivar-group)
MAAVNCKVVVAVIVVAMVVAAPGASAAITCGQVGSAIAPCISYVTGRSGLTQGCCNGVKGLNNAARTTADRQAACRCLKSLAGSIKSLNLGTVAGVPGKCGVNVGFPISLSTDCNKVS

SEQ ID NO: 8515 - protein, 150 aa, Zea mays
  misc_feature (9)..(9): Xaa can be any naturally occurring amino acid
SGKDVDLAXYRGKVLLIVNVASQCGLTNSNYTHQAQLYEKYKNQGFEILAFPCNQFGGQEPGTNEEIAQFACTRFKADYPIFDKVDVNGNNAAPIYKFLKSSKGGLFGDSIKWNFSKFLVDKEGRVVDRYAPTTSPLSIEKDIKKLLGSS

SEQ ID NO: 8516 - protein, 480 aa, Lactobacillus acidophilus
MKLQNKAILITYPDSLGHNLKDLDHVMDRYFNKTIGGIHLLPFFPSNGDRGFSPTRYDVVEPKFGSWEDVEKLSQKYYLMFDFMINHLSKKSSYFEDFEAKHDKSKYSDLFLSWDKFWPKGRPTKEDIDLIYKRKDKAPYQNIKFEDGTHEKMWNTFGPDQMDLDVRTKTTQDFIKHNLQNLSKHGASLIRLDAFAYAIKKLDTNDFFVEPEIWNLLEKVNDYLKDTPTTILPEIHEHYTMPFKVAEHGYFIYDFALPMVLLYSLYSGNSTQLAAWLKKCPMKQFTTLDTHDGLGVVDAKDILTDDQISYTTNELYKIGANVKKKYSSAEYHNLDIYQINTTYYSALGNDDKKYFIARLLQIFAPGIPQIYYVGLLAGENDIQLLEKTKEGRDINRHYYDLDEIAEQVQRPVVKSLIKLLEFRNSVPAFDLEGSIKVETPSEHEIIVTRSNKAGTEVASTYVDFKNLDYQVKYNDQVFNF

SEQ ID NO: 8517 - protein, 156 aa, Brassica napus
  misc_feature (155)..(155): Xaa can be any naturally occurring amino acid
RFMIYVHTKMMIVDDEYIIIGSANINQRSMDGARDSEIAMGGYQPYHLSIRQPARGHIHGFRMSLWYEHLGMLDETFLDPSSQECVQKVNRIADKYWDLYSSESLEHDLPGHLLRYPIGIASQGDITELPGCECFPDTKARILGTKSDYLPPILXT

SEQ ID NO: 8518 - protein, 403 aa, Burkholderia cepacia R1808
MLTQKTKDIVKATAPVLAQHGYDIITCFYRKLSDAHPELRNAFNMAHQEQGQQQQALARAVYAYAENIEDPGSLAAVLKNIANKHASLGVRPEHYPIVGENLLAAIKETLGDAATDDIVSAWAQAYGNLADLLMGMESTLYERSSERLGGWTGWRTFVVREKRPESSVITSFVLEPADGEPVANFEPGQYVSVAMDVPELGLQQIRQYSLSDMPNGRTYRISVKRESGGDYPPGYVSCLLHDYVEVGQTLALAAPYGSFHIDVEAKTPIVLISGGVGLTPMISMLTRAIQDSHRQVVFVHGARNSGVHAMRDRLRETASTHANFKLVVFYDDPLPQDVEGVDYDLKGLVDVNAIKDALLLPDADYYICGPVPFMRLQHDALKQLGVPETRIHYEVFGPDLFAE

SEQ ID NO: 8519 - protein, 127 aa, Zea mays
EDLAEEVEPIRGPMGSDMEVTLACAGFSKPILTALEATRPGGKVSLVGMGPNEMPLPLTAAAAREVDLVGVFRYKATWPLCIDFLRRGKVEVNPFFPPRLGFSQREGEEPFEVSPRGRDAIKVMFTL

SEQ ID NO: 8520 - protein, 131 aa, Triticum aestivum
MSYYDRRGESSVLEAFTLSPLPYPVILILMMVTLLLGASWFFSYEEFMEEASEQFSWFLLGVPIALVLLIRWISSVDTFEGYFGFYPTESRWRGYPAAPSEGSSPWGVAMVVVLLLVLASFHSTFQDMWKA

SEQ ID NO: 8521 - protein, 347 aa, Coccidioides immitis
AEKIAKFPGTKGPDGKYTVTLIEGDGIGPEISQSVKDIFSAAKVPIKWEPVDVTPILKDGKTAIPDEAINSVKKNYVALKGPLATPVGKGHVSLNLTLRRTFNLFANVRPCRSIAGYKTPYDNVNAVLIRENTEGEYSGIEHVVVDGVVQSIKLITREASERVLRFAFQYAQEVGKPKVRAVHKATIMKMSDGLFLRTAKEISKEFPDIEFDAELLDNTCLRMVTDPAPYNDKVLVMPNLYGDILSDMCAGLIGGLGLTPSGNIGNECSIFEAVHGSAPDIAGRALANPTALLLSSIMMLRHMGLNDHAKKIETAIFETLAEGKTLTGDLGGKAKTHEYAGAIIKRL

SEQ ID NO: 8522 - protein, 467 aa, Zea mays
MSTTKVKRRVGKYELGRTIGEGTFAKVRFARDTVTGEAVAIKILDKEKVLKHKMVEQIKREISTMKLIKHPNVVRIYEVMGSKTKVYIVLEFATGGELFDTIVNHGRMREDEARRYFQQLINAVDYCHSRGVYHRDLKPENLLLDSYGNLKVSDFGLSALSQQIKDDGLLHTTCGTPNYVAPEVLEDQGYDGAMADLWSCGVILFVLLAGYLPFEESNLMTLYKKISNAEFTFPPWTSFPAKRLLTRILDPNPMTRITIPEILEDEWFKKGYKRPEFDEQYDTTLDDVDAVFNDSEEHHVTEKKEEEPVALNAFELISMSAGLNLGNLFDSEQEFKRETRFTSKCPPKEIVRKIEEAAKPLGFDVQKKNYKLRLEKVKAGRKGNINVATEILQVAPSLNTIFFCKAFCDTLLFILIQILQVAPSLHMVEVRKAKGDTLEFHKFYKNLSKTLKDVVWKSDDLQTQHAS

SEQ ID NO: 8523 - protein, 124 aa, Pinus resinosa
MAVSKKMVEAVFLVGLVVTMMNVWGGVSVEGAISCNQVVSAMTPCATYLLGNAATPAAACCPSIRGLDSQVKATPDRQAVCNCFKTQARSYGVKLGKAANLPGLCKVTDLNVPISPNVDCSKVH

SEQ ID NO: 8524 - protein, 472 aa, Wolbachia endosymbiont of Drosophila melanogaster
MSTLITVAYGDGIGPEIMEAVLSILREAEAEISIDIIEIGERVYSKEWSHGISPSGWESIERTKILLKSPTTTPQGKGNKSLNVALRKNLGLYANIRPCISYHHVIENKFDKFDIVVIRENEEDVYTGIEHRLTGDSYQCTKIITRSGSEKICRYAFEYAKKHNRKKVTCLTKDNIMKMTDGTFHAAFDRIAKEYPDIKAEHYIVDIGMARVATEPENFDVIVTENLYGDILSDIVAQTSGSVGLAGSSNIGNEYAMFEAVHGSAPDIAGKNIANPSGLLNAAVHMLIYIGQVGTAKLIYDAWLKTLEDGIHTADLYKEKRSKQKVGTKEFAEAVIDNLGKKPKTLSELIIGSDPNSKVDKIQDNYEQDYKIKKLVGSDITLAWSKPADFDQIVKLFETSNPQIIAIYSKGLAIWPGSSKSSSDQITCRFIANNEITNSDVNNLLIKFEEHNFDVVRMDKLYLYDGKEGFFS

SEQ ID NO: 8525 - protein, 321 aa, Agrobacterium tumefaciens str. C58
MTSKLEQLRAITTVVADTGDIEAVARLKPVDCTTNPTIVLKALGTPAFADAVKEAVAWGRKQGGQSDAVVAAVADRLAISVGAALAGLVPGRVSTEVDADLSFDTQASITKARHIIASYKERGIERERILIKLASTWEGIKAAEVLQSEGIDCNLTLLFSQAQAIACAEAKAFLISPFVGRILDWYKKSTGETYTAETDPGVVSVRSIYNYYKANGIGTVVMGASFRNVGEIEALAGCDRLTISPALLEELDKDNGKLERKLSPDNVKAEALQSLDEKAFRWAMNEDAMATEKLSEGIRLFAKDLVTLREMVRKELTAAAA

SEQ ID NO: 8526 - protein, 435 aa, Streptomyces clavuligerus
IYNRDELLSVLPAGPAPEGDAELVLRLLERYDLHAFRLVNGRFATVVRTGDRVLLATDHAGSVPLYTCVAPGEVRASTEAKALAAHRDPKGFPLADARRVAGLTGVYQVPAGAVMDIDLGSGTAVTHRTWTPGLSRRILPEGEAVAAVRAALEKAVAQRVTPGDTPLVVLSGGIDSSGVAACAHRAAGELDTVSMGTDTSNEFREARAVVDHLRTRHREITIPTTELLAQLPYAVWASESVDPDIIEYLLPLTALYRALDGPERRILTGYGADIPLGGMHREDRLPALDTVLAHDMATFDGLNEMSPVLSTLAGHWTTHPYWDREVLDLLVSLEAGLKRRHGRDKWVLRAAMADALPAETVNRPKLGVHEGSGTTSSFSRLLLDHGVAEDRVHEAKRQVVRELFDLTVGGGRHPSEVDTDDVVRSVADRTARGAA

SEQ ID NO: 8527 - protein, 175 aa, Triticum aestivum
MAPAVMASSATTVAPFQGLKSTAGLPVSRRSGSASLSSVSNGGRIRCMQVWPIEGIKKFETLSYLPPLSTEALLKQVDYLIRSKWVPCLEFSKVGFVFREHNSSPGYYDGRYWTMWKLPMFGCTDATQVLNEVEEVKKEYPDAYVRVIGFDNMRQVQCVSFIAFRPPGCEESGKA

SEQ ID NO: 8528 - protein, 168 aa, Zea mays
SLPSLYITQEEFQLALFKNQRKENLFANRIFDLFDVKKRGAIDFGDFVRALNVFHPNIPMDEKIDFSFKLYDMDSTGFIERKEVKQMLIALLGESEMRLSDDIIETILDKTFSDADANQDGKIDRTEWENFVTRNPSLMKIMTLPYLKDITTTFPSFVFNSEVDDLVT

SEQ ID NO: 8529 - protein, 369 aa, Candida albicans SC5314
MFRQVTKSAPVIRTTQRLFARSYIAGQFTGSKGSDGKYTVTLIEGDGIGPEISQAVKDIYAAADVPIHWEPVDVTPLLIDGKTTLPQPAVDSVNKNLVALKGPLATPVGKGHTSMNLTLRRTFNLFANVRPCKSIVGYETPYENVDTVLIRENTEGEYSGIEHTIVPGVVQSIKLITKPASEKVIRYAFEYAKSINKPHVLVVHKASIMKLSDGLFVNTAKEVAQEYPDVSLDFELLDNTSLRLTADPSQYKNVVMVMPNLYGDIMSDLSSGLIGGLGLTPSGNMGNKVSIFEAVHGSAPDIAGKGLANPTALLLSSCMMLRHMSLNSDADRIENAVLKTIASGPENRTGDLKGTATTTRFTEEVIKNL

SEQ ID NO: 8530 - protein, 482 aa, Pseudomonas fluorescens
MLDVPLLIGGQSCPARDGRTFERRNPVTGELVSRVAAATLEDADAAVAAAQQAFPAWAALAPNERRSRLLKAAEQLQARSGEFIEAAGETGAMANWYGFNVRLAANMLREAASMTTQVNGEVIPSDVPGSFAMALRQPCGVVLGIAPWNAPVILATRAIAMPLACGNTVVLKASELSPAVHRLIGQVLQDAGLGDGVVNVISNAPADAAQIVERLIANPAVRRVNFTGSTHVGRIVGELSARHLKPALLELGGKAPLLVLDDADLEAAVQAAAFGAYFNQGQICMSTERLIVDAKVADAFVAQLAAKVETLRAGDPADPESVLGSLVDASAGTRIKALIDDAVAKGARLVIGGQLEGSILQPTLLDGVDASMRLYREESFGPVAVVLRGEGEEALLQLANDSEFGLSAAIFSRDTGRALALAQRVESGICHINGPTVHDEAQMPFGGVKSSGYGSFGGKASIEHFTQLRWVTLQNGPRHYPI

SEQ ID NO: 8531 - protein, 415 aa, Pasteurella multocida subsp. multocida str. Pm70
MQSKVVIPQGEKIQLDAKGALIVPDHPIIPFIEGDGIGVDVTPAMRTVIDAAVEKAYGGKRKISWMEIYAGGKANEVYGENTWLPDETMTFIRDYHVAIKGPLMTPVGGGIRSLNVAMRQGLDLYNCLRPIRYYDGTPSPVKHPELVDMVIFRENSEDIYAGVEWVAGSAEANKVIAFLQQEMGVKKIRFTEDCGIGIKPVSKQGTQRLVRAALQYVIDNDRKSLTLVHKGNIMKFTEGAFKEWGYQVAQEFGAELLDGGPWMTLKNPKTGREIIIKDSIADAFLQEILLHPTEYDVIATLNLNGDYISDALAAQVGGIGISPGANIGAEAAIFEATHGTAPKIAGQDKGNPGSLILSGEMMLRHLGWLEAADLVVKAVSKTIADKTVTFDFAEMLEGAKLRSTSEFAQDIVANM

SEQ ID NO: 8532 - protein, 480 aa, Lactobacillus acidophilus
MPIENKVMLITYPDSLGKNLKELDEILSEDLKGAVGGIHLLPFFPSTGDRGFAPTGYTEVDPKFGDWSDIEKIGKKYYLMFDFMINHISRQSKFYKDFKQKKDKSKYADLFLSWDKFWPEGRPTRKDIDLIYKRKDRAPYQEITFTDGSKEKLWNTFGEEQIDMDVRKEVTQKFIKDTLRALIDHGADIIRLDAFAYAVKKLDTNDFFVEPEIWDLLKQVQDDISDKGAMILPEIHEHYSMPFKISKHGYYIYDFALPMVTLYSLYSGKSNRLADWLKKCPMKQFTTLDTHDGIGVVDARDILSPDEIKYTSNELYKVGANVKKKYSSAEYHNLDIYQINTTYYSALGNDDKKYFIARLIQMFAPGIPQVYYVGMLAGKNDIELLEKTKEGRNINRHYYGREEVAEETKRPLVAALLKLFNFRNNEAAFDLDGSIEITTPNENVIQITRMNKDKTRKARAVINLKNLTYQVTVNNEVINF

SEQ ID NO: 8533 - protein, 442 aa, Picrophilus torridus DSM 9790
MIDDESRTLEYNEKALKLSEFYKGKVGIVPKVPVRSLDDFSVWYTPGVAAVARKIAENRDLSFELTGRWNSVAILTDGTRVLGLGNIGPEAAMPVMEGKSLIFNYLGGVNAVPIPVRAASEDDFIRVAMALEPSFGGFNLEDIESPKCFSILEKLQKTLEIPAWHDDQLGTASITLAGVINALRVVNKKIDDVRVVFNGAGAANIAAAYLFNEAGFKMKNMVMIDSSGILEPERPDMDRLMLNNPLKYKLAIDTNEDRLKGNLMDAVNGADIIISASKSQPGIIRPEHIKLMNRDPIVFALANPLPEIWPRDAINAGARIVATGRSDFNNQINNSLVFPGVFRGILDARARKVNFKVMVSASYEIANAVKNPDENHIVPDMSNWELYPRVAAAVASKCSELGFARKAGDYNTFLKRATDIIEENRRLYDTLIEKNIIKIAMR

SEQ ID NO: 8534 - protein, 189 aa, Methylobacillus flagellatus KT
MDIDFKKLAPWNWFKKEQEEQQSTVSLPVQRNDLPVAGGPVSPILQLHREIDRLFDDAFRGFGFPTLAMPRWPSEWPGLLKPALDIQETDKQYKISLEVPGVEEKDIQITLDNDVLLVRGEKRQEQESKDGGFHRVERSYGSFQRALNLPADANQDTIKAAFKNGVLTITMEKREASTPKQGRSIPING

SEQ ID NO: 8535 - protein, 429 aa, Leptospira interrogans serovar Copenhageni str. Fiocruz L1-130
MAEVAILKIDGKEYELPIVIGTEKEKAIDISKLRQQTGYVTLDNGYLNTGACTSAVTFLDGELGILRYRGIPIEQLAENSTFTEVAYLLIYGKIPSDSELKKWNDELTMHTLIHEDLKRLYNGFPKDGHPMAIMSSMIGSLSTYYQDSYDPENAEHRHISMIRLLAKFPTIAAFAYKKSIGQPTIHPLNSLDYCANFMNMMFSVPSEDYKIDPEIVKALNLLLILHADHEQNCSTSTVRLVGSSLANLYGAISAGICALWGPRHGGANQEVLEMLQEIQASGLPVKKIVEKAKDKNDSFRLSGFGHRVYKNFDPRAKIIKKACDSVLKRLGVQDSLLDIAKELEETALHDPYFVERKLYPNVDFYSGIIYRALGIPVNMFTVMFAMGRLPGWIAQWKEMIESPDMKIGRPRQIYTGSTETSYKEAKKKA

SEQ ID NO: 8536 - protein, 295 aa, Triticum aestivum
  misc_feature (198)..(198): Xaa can be any naturally occurring amino acid
MAGLSMEHPWAFAFGLLGNIISFTSLLAPIPTFYRIFKSKSTEGFQSVPYVVALFSAMLWIFYALVKTGEGLLITINAAGCVIETIYIVMYLVYAPRKAKIFTAKIVLLLNIAGFGLIFLLTVFAFQGETRVISLGWICVGFSVCVFVAPLSIIGRVIKTKSVEYMPFSLSLTLTLSAIVWFLYGLLIKDKYVALPNXLGFTFGMIQMVLYMFYMNATPVVTSDVKEVKEAWKVPAEDQVVVINVGKADKSSCAEVRPVTEMASAVDVPRRCAAEAAAPRQQVMAVDFARSVEVV

SEQ ID NO: 8537 - protein, 216 aa, Triticum aestivum
MGCIQSTPKRRQHPAGYEDPVHLASQSPAFSVSEVEALFELFKSISGSVIDDGLINKEEFQLALFKNTRKENLFANRIFDLFDVKKRGVIDFGDFVRALNVFHPNFPVEEKIDFSFKLYDMDGTGFIERKEVKQMLIALLGESEMRLSDEIVETILDKTFSDADTNQDGKIDRTEWENFVSRNPSLLKIMTLSYLKDITTTFPSFVFHSEVDDIVT

SEQ ID NO: 8538 - protein, 134 aa, Brassica napus
MTMMINPDVDLIDRGGSVVVREVWAYNLVSEFHLISAVVEDFPYISMDTEFPGVIFKAEPAILRRGNPGYLYKLLKSNVDVLSLIQVGITLSDADGNLPDLGGGVDGSRFIWEFNFRDFDVDRDAHAEDSIELL

SEQ ID NO: 8539 - protein, 197 aa, Zea mays
MSASRFIKCVTVGDGAVGKTCLLISYTSNTFPTDYVPTVFDNFSANVVVNGATVNLGLWDTAGQEDYNRLRPLSYRGADVFILAFSLISKASYENVSKKWIPELKHYAPGVPIVLVGTKLDLRDDKQFFIDHPGAVPITTAQGEELKKLIEAPAYIECSSKSQENVKGVFDAAIRVVLQPPKQKKKKSKAQKACSIL

SEQ ID NO: 8540 - protein, 214 aa, Triticum aestivum
  misc_feature (125)..(125): Xaa can be any naturally occurring amino acid
  misc_feature (133)..(133): Xaa can be any naturally occurring amino acid
HQETCRKIKALHQYDCLRANKATSAWGLEVRVPFLDKEFINEAMSIDPEWKMIRPDLGRIEKWILRKAFDDEERPFLPKHILYRQKEQFSDGVGYSWIDGLKDHAASNVNEQFFYFKPPFMKKGXAVTRTFPXFFPQTISDLTGPGGPSVACSPAKAVEWDAQWSGNLDPSGRAALGVHLSAYEQEHLPATILTGTSKKPRMIEVAAPGVAIES

SEQ ID NO: 8541 - protein, 219 aa, Shewanella oneidensis MR-1
MTQQTLYSTSATTLEVNKLLKNTYLLLAMTLAFSALCAGLAMALNISPLMSLGLSIGGLVLLFVTLRKADSAAGIFWVFAFTGMEGASLGYMLNHYAGMTNGSELIMQAFGLTSVIFIALSAYAVTTKKDFSFMRGFLFAGLIVVIAAAIINIFVGNSVAFMAINAGLALLMTGFILFDTSRIVNGGETNYIRATISLYLDFLNLFIAILHLLGIGNDD

SEQ ID NO: 8542 - protein, 183 aa, Streptomyces avermitilis MA-4680
MTTTSRAQGATVWLAGLPSAGKTTIGRILAGRLRSQGHRVEVLDGDEIRRFLSAGLGFSRADRHTNAQRIGLVAEVLARNGVLAVVPVIAPYADSREAVRKRHEASGTPYLEVHVATPVEVCSERDVKGLYARQAAGRLKGLTGVDDPYEPPVDPALTLETQGQTPEESAGAVYAVLAARGLV

SEQ ID NO: 8543 - protein, 360 aa, Glycine max
MGESNVMTKTEDGACLSAMLLSTNLVYPAVLNAAIELNLFEIIAKATPAGSFMSSHEIASKLPTQHPDLPNRLDRMLRLLASYSVLTTSTRTTHHGATETVYGLSQVGQYFVPDGTRGYLASFTAFVCYPPLLQVWLNFKEAMVDADIDLFKKIHGVTMYQYMENDPKMNQIFNKSMANLCATEMSRILEIYTGFEGISTLVDVGGGNGQNLKMIISKYPLIKGINFDLPQVIENAPPLPGIEHVGGDMFARVPQGDAIILKAVYHNWSDEKCIEFLRNCHKALSPNGKVIVVEFILPEEPEPTEESQLVSTLDNLMFITVGGRERTQKQYETLCKLSGFSNFQVACRAFSSLGVMEFYK

SEQ ID NO: 8544 - protein, 162 aa, Cupriavidus necator
MRRRFGSLLSAVICGLALHAGAATLSDTELDARVHALSGQLRCLVCQNQTLADSNADLAVDLRRQIRERLRGGASDEAVKDYLVQRYGDFVLYKPPLRPLTWLLWFGPLLLVAGVTIAIIRARSRSVAAGLPLDAEAQRQLAALLDETSGQPASPPAEARQP

SEQ ID NO: 8545 - protein, 503 aa, Streptococcus pneumoniae
MFASKSERKVHYSIRKFSIGVASVAVASLVMGSVVHATENEGSTQAATSSNMANKSQTEQGEINIERDKAKTAVSEYKEKKVSEIYTKLERDRHKDTVDLVNKLQEIKNEYLNKIVESTSTIEIQGLITTSRSKLDEAVSKYKKAPSSSSSSGSSTKPETPQPETSKPEVKPEPETPKPEVKPEPETPKPEVKPEPETPKPEVKPELETPKPEVKPEPETPKPEVKPEPETPKPEVKPEPETPKPEVKPELETPKPEVKPELETPKPEVKPEPETPKPEVKPELETPKPEVKPEPETPKPEVKPELETPKPEVKPEPETPKPEVKPELETPKPEVKPEPETPKPEVKPEPETPKPEVKPEPETPKPEVKPEPETPKPEVKPEPETPKPEVKPEPETPKPEVKPEPETPKPEVKPEPETPKPEVKPDNSKPQADDKKPSTPNNLSKDKQSSNQASTNENKKQGPATNKPKKSLPSTGSISNLALEIAGLLTLAGATILAKKRMK

SEQ ID NO: 8546 - protein, 180 aa, Pisum sativum
MASMISSSAVTTVSRASTVQSAAVAPFGGLKSMTGFPVKKVNTDITSITSNGGRVKCMQVWPPIGKKKFETLSYLPPLTRDQLLKEVEYLLRKGWVPCLEFELEKGFVYREHNKSPGYYDGRYWTMWKLPMFGTTDASQVLKELDEVVAAYPQAFVRIIGFDNVRQVQCISFIAHTPESY

SEQ ID NO: 8547 - protein, 490 aa, Triticum aestivum
  misc_feature (423)..(423): Xaa can be any naturally occurring amino acid
MDPNSFKTGGLLLPTIERRCASPPSVIVIGGGISGIAAARVLSNSSFEVTVLESRDRIGGRVHTDYSFGCPIDMGASWLHGVSNENSLAPLISHLGLRLYHTSGDNSVLYDHDLESCSLFDKNGLAVPMETAAKVGVIFEKILKETVKLRDEQEHDMPLEQAISMVLERHPDLKLEGLDDRILQWCVCRLEAWFAADADEISLKNWDQEHVLTGGHGLMVDGYFPVIQALAQGLDIRLNQRVKKIARQQKGVTVTIEDGTQYSADACIITVPLGVLKANIIKFEPELPSWKSSAIADLGVGIENKVAMHFDKAFWPNVQVLGMVGPTPKTCGYFLNLHKATGHPVLVFMAAGRFAQDVEKLSDKEAVELVMCHLRKMIPDATEPTQYLVSRWGSDPNSLGSYSCDLVGKPSDVCQRFSAPVEXVLYFAREAASAEHSGAVHGAYSSGMDAAEECRRRLLMSKGVPDLIQVGAAACEEMADVVAPLQICRT

SEQ ID NO: 8548 - protein, 499 aa, Candida albicans SC5314
MFKKALPLVSKLTTPKGITYNQPLGLFINNEYVHPKQQKTFEVISPSTEEKITDVYEALEEDIDTAVEAAQAAYHNGWAQGPPEQRSKVLFKLADLIEENAELLAQIETWDNGKSLQNARGDVALTAAYFRSCGGWADKILGSQINTGNTHFNYTQRVPLVCGQIIPWNFPLLMASWKLGPVLATGSTTVLKTAESTPLSALYLSQLLVEAGMPKGVINIVSGFGATAGAAIAKHPKIEKVAFTGSTATGKIIMKLAAESNLKKVTLELGGKSPNIVFNDADLDKTIQNLIVSIFYNSGEVCCAGSRLLIQSGVYDQVVEKFKEAAESVKVGNPFDEDTFMGAQVSDVQLSKILKYVESGKSQGATVVTGGARADGKGYFVKPTIFADVKKDMDIVREEIFGPVVTLIKFDTVDEAVELANDSDYGLAAGIHSADVNKCIDVANRVKAGTVWVNTYNDFHPMVPFGGFSASGIGREMGEEVLHEYTQVRAVRMKINPPN

SEQ ID NO: 8549 - protein, 319 aa, Wigglesworthia glossinidia endosymbiont of Glossina brevipalpis
MNQLDYIKKFTNVVIDSGNIKYIKKYSPKDVTTNPSLILRESKSKHYYPLLMDAISYAKKKGGNLNSYIINANDKLLVNIGREILKIIDGRISIEIDVRLSFSYLDLIIRAKKIISLYNSYGIENNRILIKIAATWEGIQAAKFLEKSGINCNLTLIFSLVQAIACAESNVYLISPFVGRVNDWYIKNFKLNKNSKIDPGVKLVYKIFYFYQKYGYKTFVMGASFRNIDQIISIIGCDAITISPDFVNKLNNLKLKKIKNFIRVNLESKIKKNKLLEKEFRWKFNQNFMAVEKLSEGIRLFLRDQKKIDSFFLKKFKSG

SEQ ID NO: 8550 - protein, 356 aa, Gibberella zeae PH-1
MAETNPSCLLYGPGDARFEDRPFPQIEDPHDVIVKIAYTGVCGSDVHFWTEGGFARKVSQQQPLVMGHEASGIIYKVGPAVSQLKPGDRVAIEPGFPCKSCNYCKSGRYNLCRKMKFAADPPFTHGTLSRFFKIPEDFTYKVPHSISLEEAVLVEPLGVAVHGVRLADIRPGQNVIVQGAGTVGCLTAATAKAYGAKTVVITDINPEKLSFAKGVVECYTFQPRLYATPEQEAARLKQEAGFDLGADTVLECTGVEISAHTGILALAPGGVFVQIGLGKPIQSLPLHSMCEKEMTMKTCFRYGPGDFEIALELLESCKVSVSSFISSIVPFEKAPEAWVRTMKGEGIKNLIKGVED

SEQ ID NO: 8551 - protein, 126 aa, Corynebacterium diphtheriae NCTC 13129
MAKLTKDELIEAFKEMTLIELSEFVKEFEEVFEVTAAAPVAVAAAGAAPAAAEEEKTEFDVVLEDAGAKKIGVIKAVRELVSGLGLKEAKELVEGAPKAILEGANKDDAEAAKAKLEEAGAKVTLK

SEQ ID NO: 8552 - protein, 169 aa, Triticum aestivum
  misc_feature (9)..(9): Xaa can be any naturally occurring amino acid
MAPTVMASXATSVAPFQGLKSTAGLPVSRRSNGASLGSVSNGGRIRCMQVWPIEGIKKFETLSYLPPLSTEALLKQVDYLIRSKWVPCLEFSKVGFIFREHNASPGYYDGRYWTMCKLPMFGCTDATQVINEVEEVKKEYPDAYVRIIGFDNMRQVQCVSLIAYKPPGC

SEQ ID NO: 8553 - protein, 434 aa, Bradyrhizobium japonicum
MDAKASNKTATLTVGNKNYDLPIHSGSVGPDVIDIGKLYGQSGLFTYDPGFTSTASCQSKITYIDGDAGVLEYRGYPIEQLAENGDFLETCYLLLYGNLPTAAQKKDFDDRVIHHTMVHEQMARFFQGFRRDAHPMAVMVASVGALAAFYHDSTDINDPKQRMIASMRMIAKIPTLAAMAYKYTIGQPFVYPKNSLKFAENFLHMCFAVSCEEYKINPVLADALDKIFILHADHEQNASTSTVRIAGSSGANPFACIAAGIACLWGPAHGGANEAALAMLGEIGSVDKIPEFIAKVKDKNSEVRLMGFGHRVYKNYDPRAKIMQKMCHAVLKETGHGDDPMLKVALELEKIALSDQYFIDRKLYPNVDFYSGITLKAMGFPVSMFTVLFAVARTVGWISQWSEMIEDPQQKIGRPRQLYTGVTRRDYVAIKDRK

SEQ ID NO: 8554 - protein, 201 aa, Glycine max
  misc_feature (154)..(154): Xaa can be any naturally occurring amino acid
  misc_feature (194)..(194): Xaa can be any naturally occurring amino acid
MVLEATMICIDNSEWMRNGDYSPSRFQAQTDAVNLICGAKTQSNPENTVGVLTMAGKGVRVLVTPTSDLGKILACMHGLEIGGEMNLAAGIQVAQLALKHRQNKKQQQRIIVFAGGPVKHEKKMLEMIGRKLKKNSVALDVVNFGEEDEGKTEXLEALLSAVNNNDTSHIVHVPSGPNALSDVLISTPIFTGDXEGESGFA

SEQ ID NO: 8555 - protein, 136 aa, Triticum aestivum
  misc_feature (53)..(53): Xaa can be any naturally occurring amino acid
  misc_feature (86)..(86): Xaa can be any naturally occurring amino acid
  misc_feature (120)..(120): Xaa can be any naturally occurring amino acid
  misc_feature (123)..(123): Xaa can be any naturally occurring amino acid
MSDSEEHHFESKADAGASKTYPQQAGTVRKNGFIVIKNRPCKVVEVSTSKTGXKHGHAKCHFVAIDIFNGKKSEDIVPSSHNCDIXPHVNRYWITTDWIYQEDGLVTFLLQNGNTKDDLXLPXLDEPLVAKFKEGF

SEQ ID NO: 8556 - protein, 146 aa, Azotobacter vinelandii
MGRSAFGSLMEPFGRAGREMASMPAVDIVDQDKAILISAELPGMDEQNIELKVCNGNLMLKGEKREEREENSQGLYLSERSYGAFQRSFALPDSVDADNIEAHFDKGVLTITLPKRPEAQQSERAIEIRRGEAAAQQQDTTQATTH

SEQ ID NO: 8557 - protein, 407 aa, Zygosaccharomyces rouxii
MATHEEFIRTQVFGTVFEITNRYTDLNPVGMGAFGLVCSATDTLAGQPVAIKKIMKPFSTAVLAKRTYRELKLLKHLRHENLICLQDIFLSPLEDIYFVTELQGTDLHRLLQTRPLEKQFVQYFLYQILRGLKYVHSAGVIHRDLKPSNILINENCDLKICDFGLARIQDPQMTGYVSTRYYRAPEIMLTWQKYDVEVDIWSAGCIFSEMIEGKPLFPGKVHVHQFSIITDLLGSPPRDVIITICSEDTLKFVTSLPHRDPVPFQERFKAVEPDAVDLLGRMLVFDPKKRITAADALVHPYLAPYHDPTDEPIAEAQFDWDFNDADLPVDTWRVMMYSEILDFHKIGGSDGQIDTNAAFDDQVAAATAGPMLPLWLNSNININNSHPVNIQVQLLRHQQPRITVVYQ

SEQ ID NO: 8558 - protein, 317 aa, Triticum aestivum
LNKFVQKSRLVPVRNSRDIVDPRVREAGLPEGVLNIVSGFGPTAGAALASHMDVDKIAFTGSTDTGKVILELSARSNLKPVTLELGGKSPFIVMDDADIDQAVELAHFALFFNQGQCCCAGSRTFVHERVYDEFVEKSKARALKRVVGDPFRKGVEQGPQIDDEQFKKILRYIKSGVDSGATLVTGGDKLGDKGYYIQPTIFSDVQDGMKIAQEEIFGPVQSIFKFNDLNEVIKRANASQYGLAAGVFTNNLDTANTLTRALRAGTVWVNCFDIFDAAIPFGGYKMSGIGREKGIDSLKNYLQVKAVVTALKNPAWL

SEQ ID NO: 8559 - protein, 103 aa, Dechloromonas aromatica RCB
MDVKEEGDSYLVHAELPGVKKEDIHVVVDGNQVSISAETKQEKEVKEGDRVLRSERYFGKVSRSFLLEQDLDDTKATAKFNDGVLELTLPKRTASPNKKLNIE

SEQ ID NO: 8560 - protein, 312 aa, Triticum aestivum
  misc_feature (42)..(43): Xaa can be any naturally occurring amino acid
MERYKVIREIGDGTCGNVFRAYNIETNEIVAVKKMKRKFYHXXECISLREVKALQKLNHPNIVQLKEVTMENHELFFIFEHMDCNLYDVIRERSAPFSEEEIRTFMLQILQGLVYMHNNGYFHRDLKPENLLVTNGIVKIADFGLAREVCSSPPYTDYVSTRWYRAPEVLLQASAYTPSIDMWAIGAILAELFTLSPLFPGETETDQLYKICAVLGTPDHSLWPEGMNLPRSSSFQFFQIPPRNLWELIPNASLEALDLIKQLCSWDPRRRPTAEQALQHPFFNVRKWVPRPLQDASYPKMNEPRATPRLEL

SEQ ID NO: 8561 - protein, 457 aa, Ralstonia eutropha JMP134
MSETVATALKANFRGQLIQPGDAAYDQARTVYNGMIDKRPAIIARCVDVADVVAAVNAARDSGMLLAVRGGAHNGAGLGTCDGGLVIDLSPMKGVFVDGGRKTLRVGGGCTWGDVDHAASAYGLATPSGFISTTGVGGLTLGGGIGYLSRAYGLTIDNLLSAEVVLADGRIVTASNEENADLFWALRGGGGNFGVVTSFEFKAHPVATVYGGPMLWPMEQARELMAWWRDFILNAPQQINGWFGFVTVPPAPPFPEEVHLQKMCAVVWCYTGPLDEADTHFRTIREAMPPVVDFAGPIPWPVLQSLFDGLYPAGLQWYWKADFVSDLSDKAIDLHIKYAQQLPSMHSTMHLYPINGAAHRAGCDDTAFSYRDANFASVIVGVDPDPANNDRIVQWAKDYWLALHPYSAGGGYINMMMDEGNDNVKASYRDNYARLAQIKRKYDPANLFRVNQNIKPA

SEQ ID NO: 8562 - protein, 360 aa, Azotobacter vinelandii
MSKQILVLPGDGIGPEIMAEAVKVLQLANEKYQLGFVLGYDELGGAAVDKYGVPLADETLERARRRCHPARRRRRSEMGRHRPGHPPGARPAENPFATGPVRQPAPGVLYPQLAEASTLRPEVVAGLDILIVRELTGGIYFGAPRESRLLANGERMAYDTLPYSESEIRRIAKVGFDMARVRGKKLCSVDKANVLASSQLWRAVVEEVAKDYPDVVLSHMYVDNAAMQLVRAPKQFDVIVTDNMFGDILSDEASMLTGSIGMLPSASLDADNKGMYEPCHGSRRPDIAGKGIANPLATILSVSMMLRYSFGQVEAANAIEQAVSKVLDQGLRTGDIWSEGCRKVGTAEMGDAVVAALATL

SEQ ID NO: 8563 - protein, 157 aa, Coccidioides posadasii
FMHWPAAFAPGDDMFPKDSQGNSKTVDIDYVDTYKAMEKLVKSGKTKAIGISNFSKGEMERLLESCSIVPAVMQMELHPWLQQNDFVEWLKSKGIHVTQYSSLGNQNEVYSGRERYGRLIEDPALAAIGTKYGKTGAQVALAWGINKGHSVFVKSKT

SEQ ID NO: 8564 - protein, 186 aa, Emericella nidulans
MSSTSPSKEPEVEQEPHSGEEHEQMDKEQDNQTQGQGEFEVKEQDRWLPIANVARIMKLALPENAKIAKEAKECMQECVSEFISFITSEASEKCQQEKRKTVNGEDILFAMTSLGFENYAEALKIYLSKYRETQSARGEHQNRPPSSGYAGGDPSAELPAALQSCVPGVLQLEAPSPKPLIMQAAL

SEQ ID NO: 8565 - protein, 483 aa, Bacillus cereus ATCC 10987
MDKKATFVNVEKKAMYINGEWITLQEQIEVNNPATKEIFATVPKGGVTEAKQAVDAAHEAFKSWSKLTAADRAVKLKKWFTLIDENKEEIAAIMTREQGKPFAEALGEVNYANSFVEWYAEEGKRVYGEMIPASHPNKRILVMKQPVGVMAAITPWNFPAAMITRKVAPALAAGCTAVVKPASQTPLTALKLAELAHEADIPKGVINIVTGSAKAIADTWMEDGRVRKVSFTGSTEIGKELMASAAQTMKKVSLELGGHAPFIVMNDADLDKVVEAVIGSKFRNAGQTCICTNRVFVQEEVYEVFAEKFQKSVGQLKVGDGFGDGTTVGPLIDENAVSKVQEHIADAIQKGGTVLYGGQKVAELDGHFMQPTVIGLANDTMLCMNEETFGPVAPVAKFKTVEEVIERANNTPYGLAAYIFTKDISQAFQISEALEYGIIGLNDGLPSVAQAPFGGFKESGIGREGGHFGIEEYLEIKYISLGL

SEQ ID NO: 8566 - protein, 265 aa, Petunia x hybrida
MAQLRADDLSFIFGLLGNIVSFMVFLAPVPTFYKIYKRKSSEGYQAIPYMVALFSAGLLLYYAYLRKNAYLIVSINGFGCAIELTYISLFLFYAPRKSKIFTGWLMLLELGALGMVMPITYLLAEGSHRVMIVGWICAAINVAVFAAPLSIMRQVIKTKSVEFMPFTLSLFLTLCATMWFFYGFFKKDFYIAFPNILGFLFGIVQMLLYFVYKDSKRIDDEKSDPVREATKSKEGVEIIINIEDDNSDNALQSMEKDFSRLRTSK

SEQ ID NO: 8567 - protein, 258 aa, Triticum aestivum
SESRPRQPWRRPTPLVSAEYQEAVEKARQKLRARRAEKDCSPLMLRLAWHSAGTFDVSSKTGGPFGTMKKPAEQAHAANAGLDIAVRMLEPIKEEIPTISYADLYQLAGVVAVEVSGGPVIPFHPGREDKPQPPPEGRLPDATKGSDHLRQVFGKQMGLSDQDIVALSGGHTLGRCHKERSGFEGPWTRNPLKFDNSYFTELLSGDKEGLLQLPSDKTLLTDPVFRPLVEKYAADEKAFFEDYKEAHLRLSELGYAEA

SEQ ID NO: 8568 - protein, 140 aa, Bordetella bronchiseptica RB50
MRRAAVLLGLWLLLGAPAAADIAQRELRLAHSLRCLVCQNQTLAESNAPLAHDMRALIRQQLADGRSDEEVMQFFEDRYGDFVRYEPPFKPATWLLWLGPFALLLAGFVVLWRALARRPGAAPLTDAQRARAERFLDEES

SEQ ID NO: 8569 - protein, 418 aa, Allium porrum
MFGRAPKKSDNTKYYEVLGVSKNATPEDLKKAYRKAAIKNHPDKGGDPEKFKEIGQAYEVLNDPEKREIYDQYGEEGLKEGMGGGGGVHDPFDIFQSFFGGGGFGGGGSSRGRRQRRGEDVVHPLKVSLEDLYNGTSKKLSLSRNVLCTKCKGKGSKSGASMNCASCQGSGMKVSIRQLGPGMIQQMQHPCNECKGTGEMISDKDRCPQCKGEKVVQQKKVLEVHVEKGMQNGQKITFPGEADEAPDTVTGDIVFVLQQKEHPKFKRKGDDLFYEHSLSLTEALCGFQFVLTHLDNRQLLIKSNPGEVIKPDQFKGINDEGMPMYQRPFMRGKLYIHFSVDFPDSLTPDQCKALESVLPSRNASRLTDMEIDECEETTMHDVNIEEEMRRKQHQQAQEAYDEDDEGHGGAQRVQCAQQ

SEQ ID NO: 8570 - protein, 238 aa, Arabidopsis thaliana
MEGVGARLGRSSTRYGPATVFTGPVRKWKKKWVHVSPSSKKDNNNSSSGSAAAAASVVNGGSNSDGSNGSHLLLYKWAPLSQNGNGNEDGKSESNSPSEDTVATVAEDPPRRRFKYVPIAVLEEQKKEITEIEEDDKIEEDDKIDEDNKVEQEDKVDEDKTVEESSEKKAEVEVEEKPDINDVPMEDIQQVEEKIVQDDEEKVVRQDLNESTVDLGLNLNANDADAENDPKEDKPLEE

SEQ ID NO: 8571 - protein, 309 aa, Apium graveolens
MAITLNSGFKMPVLGLGVWRMDRNEIKNLLLSAINLGYRHFDCAADYKNELEVGEAFKEAFDTDLVKREDLFITTKLWNSDHGHVIEACKNSLKKLQLEYLDLYLIHFPMASKHSGIGTTRSILDDEGVWEVDATISLEATWHEMEKLVEMGLVRSIGISNYDVYLTRDILSYSKIKPAVNQIETHPYFQRDSLIKFCQKYGIAITAHTPLGGALANTERFGSVSCLDDPVLKKLSDKHNKSPAQIVLRWGVQRNTIVIPKSSKTKRLEENINIFDFELSKEDMELIKTMERNQRSNTPAKAWGIDVYA

SEQ ID NO: 8572 - protein, 326 aa, Glycine max
MEQSVLDDIINRLLEVRTRPGKQVQLSESEIRQLCVVSREIFLQQPNLLELEAPIKICGDVHGQYSDLLRLFEYGGLPPEANYLFLGDYVDRGKQSLETICLLLAYKIKYPENFFLLRGNHECASINRIYGFYDECKRRFNVRLWKTFTDCFNCLPVAARVDEKILCMHGGLSPDLNNLDQIRNLQRPTDVPDTGLLCDLLWSDPSRDVQGWGMNDRGVSFTFGADKVSEFLQKHDLDLICRAHQVVEDGYEFFANRQLVTIFSAPNYCGEFDNAGAMMSVDETLMCSFQILKPADKKAKLNFGSTTTAKPGNSPAGVKCFLGAKV

SEQ ID NO: 8573 - protein, 510 aa, Triticum aestivum
  misc_feature (156)..(156): Xaa can be any naturally occurring amino acid
MASFARQEHQFLAELGLAPRNPGSFACGAWGGSGPVVTTTNPSNNEVIAEVVEASMDDYEKGMSACFDAAKTWMAVPAPKRGEIVRQIGDALRAKLHHLGRLLSLEMGKILPEGIGEVQEIIDMCDYAVGLSRQLNGSIIPSERPNHMMMEVWNPXLGVVGVITAFNFPCAVLGWNACIALVCGNCVVWKGAPTTPLITIAMTKIVASVFEKNNLPSAIFTAFCGGAEIGQAIALDTRIPLVSFTGSTKVGQMVQQQVSARFGKCLLELSGNNAIIVMDDADIPLAVRSVLFAAVGTAGQRCTTCRRLLLHESIYQTFLDQLVEVYKQVRIGDPMEKGTLLGPLHTTASKESFLKGIQNIRSQGGKILLGGSAIESEGNFVQPTIVEISPAAPVVREELFGPVLYAMKFQTLKEAIEINNSVPQGLSSSIFTRKPDAIFKWIGPHGSDCGIVNVNIPTNGAEIGGAFGGEKATGGGREAGSDSWKQYMRRATCTINYGSELPLAQGINFG

SEQ ID NO: 8574 - protein, 589 aa, Zea mays
  misc_feature (559)..(559): Xaa can be any naturally occurring amino acid
  misc_feature (572)..(572): Xaa can be any naturally occurring amino acid
MCGILAVLGCSDCSQARRARILACSRRLKHRGPDWSGLYQHEGNFLAQQRLAIVSPLSGDQPLFNEDRTVVVVANGEIYNHKNVRKQFTGAHSFSTGSDCEVIIPLYEKYGENFVDMLDGVFAFVLYDTRDRTYVAARDAIGVNPLYIGWGSDGSVWMSSEMKALNEDCVRFEIFPPGHLYSSAGGGFRRWYTPHWFQEQVPRTPYQSLVLREAFEKAVIKRLMTDVPFGVLLSGGLDSSLVASVTKRHLVETDAAEKFGTELHSFVVGLEGSPDLKAAREVADYLGTTHHEFHFTVQDGIDAIEEVIYHDETYDVTTIRASTPMFLMARKIKSLGVKMVLSGEGSDELLGGYLYFHFAPNREELHRETCRKVKALHQYDCLRANKATSAWGLEVRVPFLDKEFVDVAMGMDPEWKMYDKNLGRIEKWVLRKAFDDEEHPYLPEHILYRQKEQFSDGVGYNWIDGLKSFTEQQVTDEMMNSAAQMFPYNTPVNKEAYYYRMIFERLFPQDSARETVPWGPSIACSTPAAIEWVEQWKASNDPSGRFISSHDSAATDRTXATSWRWPTAAGTXAANGTVNGNDVAVAIAV

SEQ ID NO: 8575 - protein, 467 aa, Listeria innocua Clip11262
MLYSENDKRKHESYRIPLFGSEEESTSIPKYVLKKEPMEPRIAYQLVKDQLMDEGNARQNLATFCQTYMEKEAEILMAETLEKNAIDKSEYPQTAELENRCVNILADLWNAPKEMSYLGTSTVGSSEACMLGGLAMKFRWRNNAEKRGLDIQAKRPNLIISSGYQVCWEKFCVYWDVDMRVVPMDKEHLSLDVEKVFELVDEYTIGIVGILGITYTGKFDDIALLDEKVEAYNEANEHQLVIHIDGASGAMFTPFVNPELPWDFRLKNVVSINTSGHKYGLVYPGVGWILWKDKEYLPKELIFEVSYLGGSMPTMAINFSRSASQIIGQYYNFLRYGFEGYREIHEKTKKTALYLSKTVEKSGYFEIINDGSNLPIVCYKLKDDLDVEWTLYDLADQLLMKGWQVPAYPLPADLSDTIIQRFVCRADLGYNVAEEFAADFADALHNLEHARVLYHDKERNDSYGFTH

SEQ ID NO: 8576 - protein, 431 aa, Exiguobacterium sp. 255-15
MKLEEMLVSVDTFYVLFATLLVFTMQIGFLLLETGMLRAKNAGHVAVKQLISFSVAALAFWAIGFGLTFGDGPGLIGTEGFFLHGGFSSLDWSNVTIDVKFLFQLSFVAVSLAIAWGGFAERAKLSVYLLFGTFFVAVIYPIIARSVWAGGFLGSLGMQDFAGSTVVHLQGGIAALVAALILKKRIGAEKTPLLGHNVIYSVVGAFILWLCWFGFNAGSTLTIADGFFSYVALTTLLATAAGALGALAISFWHRRVADIPSIINGVLAALVAITAACAFVEPWGAVVIGFLAGVITYATSILLARRVDDPLCAFSVHGVAGIWGTLATGFFASPRLVEITGIGQAGLFYGGGFTQLGVQALGVVFAVVVVSVLSYVFLKLLDVTIGLRITREDELRGLDVAEHGQASYDLPAPVSKESHPTYEEESTEKVN

SEQ ID NO: 8577 - protein, 430 aa, Lactobacillus plantarum WCFS1
MTTLIKNAQVWQAGQLQTTDILIAEGRIKAIGHQLHDQFGPADHVICADQHFVSPGFVDVHVHLRDPGQTAKETIATGTLAAAHGGFTTVGAMPNVDPVPDTPERVATMVARNQQEAHVHVAQYASITTGRTSEQLVDFAGIKAAGAFAVSNDGSGVQTAGTMFAAMQGAAKVGLPLAAHVEDDSLYHHGVMNAGPVADRLGLPGINNVSEAAQVARDVMLAEASGVHYHVCHVSTAESLRVIRNAKAAGINVTCEVSPHHLLLCDEDITMDNPMLKMNPPLRSAKDRAALVAGLLDGTIDMIATDHAPHTDAEKQGSMKTAAFGITGIETAFATLYTALVKTRLLTLGRLIELMSTRPAELFGLNTAGRLVVGAPADLTIIDLDHQYEIEAATMLSKGHNSPFIGWPVYGNVLMTLVDGKLAYGKETQA

SEQ ID NO: 8578 - protein, 121 aa, Oryza sativa (indica cultivar-group)
MAGARRTMALVALVAVVAAAVVAERASAAVSCGDVTSSIAPCLSYVMGRESSPSSSCCSGVRTLNGKASSSADRRTACSCLKNMASSFRNLNMGNAASIPSKCGVSVAFPISTSVDCSKIN

SEQ ID NO: 8579 - protein, 181 aa, Vibrio parahaemolyticus RIMD 2210633
MKGLLKLAAYLGFISMSSFVLASECPDILQGKQRMLNSTEEIELCEVFKGKTLLVVNTASQCGFTPQYEQLETLYQTYKDKNFAVIGFPSNDFRQDKGSEENTAKICYLDYGVTFPMMARSSVLGNDANPVFSEISTQAGVTPKWNFYKFLISKEGKVIATFPSSTSPTSTTLTNMIEQQL

SEQ ID NO: 8580 - protein, 348 aa, Pseudomonas putida
MLAIRKTKAGPGGLSVDDVAAPKEAHSTDVLVKVEAAGICGTDLLIYKWGEFAKRMKLPTILGHEVSGVIEQVGSDVKGLRPGMRVSLESHLPCGTCYTCRRGWAHVCPNTRYPGVDFDGGFASFVVVPESVCWPVPCGIPPLQAAMMEPFGLAVHASLEGSGVSGLNVLVSGCGPIGLMNIAAAKALGASKVIATDIHPLRLTAAAKMGADECINATEESVYKTVRSLLGERGVDVAIDYSGQAAALKELIQSITHGGELRLMGVPSHDILLNLEEWLFKGLIVRGLHGRRLFETWERSTSLLVTGRVDLSSLVSHRLPLSAAEDAFEMALNGQSLKILFEPNGTCI

SEQ ID NO: 8581 - protein, 120 aa, Oceanobacillus iheyensis HTE831
MTNEEMISAIKEMSVLELNDLVKAIEEEFGVTAAAPVAAAGAAGGAVEEEKTEFDVVLTSAGASKIKVVKAVREITGLGLKDAKDLVDNAPKPIKEGVSKEEAEEVQGKLEEAGASVEVK

SEQ ID NO: 8582 - protein, 426 aa, Novosphingobium aromaticivorans DSM 12444
MSDPQWYSTGRDHVWLPYTQMKTARPPLPVASAEGVKLRLADGRELVDGISSWWATVHGYRHPHIEEAIRRQLETLPHVMLGGLAHEQAYTLARRLAGMLPGDLDHVFFSDSGSVAVEVAMKMAAQFWLNQGHRRVKFLCFRGGYHGDTFATMSVCDPDEGMHSLFRGALLEQVVVDLPRDAEGEAALGALIEQHRGELAGIVVEPLVQGAGGMVFHDPFTLQALRRLADEHELLLIFDEIFVGLGRLGDAMFACQIAGVQPDIVTLSKALTGGNLPLAATIASGRIYDAFLSDDPMHALMHGPTYMGNALGCAAANASLDLFESEPRLEQAQAIGRGLEQALEVLRGLPGVRDVRVRGAIGVIQLDRTAPADRLSAACIDRGVWLRPFRDILYTTPPLVTGEEDLARITSAMVEAVTEWSRETHV

SEQ ID NO: 8583 - protein, 484 aa, Agrobacterium tumefaciens
MIKLKNAALLRDACLVNGRWLKAADGKTIAVENPANSMIIGHVPSLSADEVKAAVESAGKAFSEWSRRSAKDRAAILRRWFDLMVANADDLGALMTAEQGKPFAEAKGEALYAASFVEWFAEEAKRVYGDTIPSPTTDKRITILKQPIGVCAAITPWNFPAAMITRKAAPALAAGCAMIVKPAEQTPLTALALGVLAEEAGVPAGVFQVVTGAARDIGKVFTESDTVRKISFTGSTEVGRLLMAQSAPTIKKLSLELGGNAPFIVFDDADLDAAVEGAIVSKYRNAGQTCVCSNRIYVQDGVYDAFAEKLVKRVESLSVGEGTEPVVLIGPLIDQEAVPKVEDHVADALGKGAKIVIGGKRHALGGTFYEPTVLTGATQAMKVAREETFGPVAPLFRFGTEDEAVAMANDTEFGLAAYFYTENVRRTWRVAEALEYGMVGHNTGLISNEVAPFGGVKQSDLGREGSHYGIDEYLEIKYLCSAIG

SEQ ID NO: 8584 - protein, 455 aa, Arabidopsis thaliana
MSFTIPRLFLFTLFFCSVFFVCLLMAEDSNSSESIIVNVTGDDNKSALFGKYDLGKLLGSGAFAKVYQAEDLQNGGESVAIKVVQKKRLKDGLTAHVKREISVMRRLRHPHIVLLSEVLATKTKIYFVMELAKGGELFSRVTSNRFTESLSRKYFRQLISAVRYCHARGVFHRDLKPENLLLDENRDLKVSDFGLSAMKEQIHPDGMLHTLCGTPAYVAPELLLKKGYDGSKADIWSCGVVLFLLNAGYLPFRDPNIMGLYRKIHKAQYKLPDWTSSDLRKLLRRLLEPNPELRITVEEILKDPWFNHGVDPSEIIGIQADDYDLEENGKILNAFDLISSASSSNLSGLFGNFVTPDHCDQFVSDESTAVIMRKVEEVAKQLNLRIAKKKERAIKLEGPHGVANVVVKVRRLTNELVMVEMKNKQRDVGLVWADALRQKLRRLINQPVYKVPDKP

SEQ ID NO: 8585 - protein, 153 aa, Glycine max
MPLVLAKSDSIQIREVWNDNLEEEFALIREIVDDYPYIAMDTEFPGIVLRPVGNFKNSYDYHYQTLKDNVDMLKLIQLGLTFSDEHGNLPTCGDESGTCCIWQFNFREFNVNEDVFANDSIELLRQSGIDFKRNNENGIDAHRFGELLMSSGI

SEQ ID NO: 8586 - protein, 248 aa, Zea mays
KNYPTVSAEYSEAVEKARRKLRALIAEKSCAPLMLRLAWHSAGTFDVSSRTGGPFGTMKCPAELAHGANAGLDIAVRLLEPIKEEFPTLSYADFYQLAGVVAVEVTGGPEIPFHPGREDKPQPPPEGRLPDATKGSDHLRQVFGKQMGLSDQDIVALSGGHTLGRCHKERSGFEGAWTTNPLVFDNSYFKELLSGDKEGLLQLPSDKALLSDPVFRPLVEKYAADEKAFFDDYKEAHLKLSELGYADA

SEQ ID NO: 8587 - protein, 294 aa, Saccharomyces cerevisiae
TTPLVHVASVEKGRSYEDFQKVYNAIALKLREDDEYDNYIGYGPVLVRLAWHTSGTWDKHDNTGGSYGGTYRFKKEFNDPSNAGLQNGFKFLEPIHKEFPWISSGDLFSLGGVTAVQEMQGPKIPWRCGRVDTPEDTTPDNGRLPDADKDADYVRTFFQRLNMNDREVVALMGAHTLGKTHLKNSGYEGPWTANNNVFDNSFYLNLLNEDWKLEKNDANNEQWDSKSGYMMLPTDYSLIQDPKYLSIVKEYANDQDKFFKDFSKAFEKLLENGITFPKDAPSPFIFKTLEEQGL

SEQ ID NO: 8588 - protein, 503 aa, Streptococcus pneumoniae
MFASKSERKVHYSIRKFSIGVASVAVASLVMGSVVHATENEGSTQAATFSNMANKSQTEQGEINIERDKAKTAVSEYKEKKVSEIYTKLERDRHKDTVDLVNKLQEIKNEYLNKIVESTSKIEIQGLITTSRSKLDEAVSKYKKAPSSSSSSGSSTKPETPQPETSKPEVKPEPETPKPEVKPEPETPKPEVKPEPETPKPEVKPELETPKPEVKPEPETPKPEVKPEPETPKPEVKPEPETPKPEVKPELETPKPEVKPELETPKPEVKPEPETPKPEVKPELETPKPEVKPEPETPKPEVKPELETPKPEVKPEPETPKPEVKPELETPKPEVKPEPETPKPEVKPEPETPKPEVKPEPETPKPEVKPEPETPKPEVKPEPETPKPEVKPEPETPKPEVKPEPETPKPEVKPEPETPKPEVKPDNSKPQADDKKPSTPNNLSKDKQSSNQASTNENKKQGPATNKPKKSLPSTGSISNLALEIAGLLTLAGATILAKKRMK

SEQ ID NO: 8589 - protein, 500 aa, Streptococcus pneumoniae
MFASKSERKVHYSIRKFSIGVASVAVASLVMGSVVHATENEGSTQAATSSNMANKSQTEQGEINIERDKAKTAVSEYKEKKVSEIYTKLERDRHKDTVDLVNKLQEIKNEYLNKIVESTSTIEIQGLITTSRSKLDEAVSKYKKAPSSSSSSGSSTKPEPETSKPEVKPEPETPKPEVKPEPGTPKPEVKPEPETPKPEVKPELETPKPEVKPEPETPKPEVKPEPETPKPEVKPEPETPKPEVKPELETPKPEVKPELETPKPEVKPEPETPKPEVKPELETPKPEVKPEPETPKPEVKPELETPKPEVKPEPETPKPEVKPELETPKPEVKPEPETPKPEVKPEPETPKPEVKPEPETPKPEVKPEPETPKPEVKPEPETPKPEVKPEPETPKPEVKPEPETPKPEVKPEPETPKPEVKPDNSKPQADDKKPSTPNNLSKDKQSSNQASTNENKKQGPATNKPKKSLPSTGSISNLALEIAGLLTLAGATILAKKRMK

SEQ ID NO: 8590 - protein, 141 aa, Triticum aestivum
  misc_feature (71)..(71): Xaa can be any naturally occurring amino acid
  misc_feature (76)..(76): Xaa can be any naturally occurring amino acid
  misc_feature (79)..(79): Xaa can be any naturally occurring amino acid
  misc_feature (89)..(89): Xaa can be any naturally occurring amino acid
  misc_feature (94)..(95): Xaa can be any naturally occurring amino acid
  misc_feature (100)..(100): Xaa can be any naturally occurring amino acid
  misc_feature (109)..(109): Xaa can be any naturally occurring amino acid
  misc_feature (126)..(126): Xaa can be any naturally occurring amino acid
  misc_feature (131)..(131): Xaa can be any naturally occurring amino acid
  misc_feature (133)..(134): Xaa can be any naturally occurring amino acid
  misc_feature (136)..(136): Xaa can be any naturally occurring amino acid
MAPAVMASSATTVAPFQGLKSTAGLPVSRRSSGSLGSVSNGGRIRCMQVWPIEGIKNSKTLSYLPPLSTEXLLKQXDYXIRSKWVPCLXSTRLXXLPFSXNIPPGYYDXPYWTIWKLLCSGCTDAXTSVNXVXXVXKDYPE

SEQ ID NO: 8591 - protein, 506 aa, Candida tropicalis
MIEQVLHYWYYVLPAFIIHWIVSAIHTNSLRRKLGAKPFTHTQLDGFYGFKFGRDFLKAKRIGRQVDLINSRFPDDIDTFSSYTFGNHVIFTRDPENIKALLATQFNDFSLGGRIKFFKPLLGYGIFTLDGEGWKHSRAMLRPQFAREQLPMSPSLEPHFNVKAYPQEQRWVFDIQELFFRFTVDSATEFLFGESVNSLKSASIGCDEETELEERKKFAEAFNKAQEYISTRVALQQLYWFVNNSEFKECNEIVHKFTNYYVQKALDATPEELEKQSGYVFLYELVKQTRDPNVLRDHHSISLLAGRDTTAGLLSFAVFELARNPHIWAKLREDVESQFGLGEESRIEEITFESLKRCEYLKAVMNETLRLHPSVPRNARFALKDTTLPRGGGPDGKDPILVRKMSCSIFISGTQIDPKHYGKDAKLFRPERWFESSTRNLGWAYLPFNGGPRICLGQQFALTEAGYILVRLAQSFDTLELKPDTEYLTKISHLTMCLFGAFVKMD

SEQ ID NO: 8592 - protein, 358 aa, Campylobacter jejuni subsp. jejuni NCTC 11168
MKTYKVAVLAGDGIGPLVMKEALKILTFIAQKYNFSFEFNEAKIGGASIDAYGVALSDETLKLCEQSDAILFGSVGGPKWDNLPIDQRPERASLLPLRKHFNLFANLRPCKIYESLTHASPLKNEIIQKGVDILCVRELTGGIYFGKQDLGKESAYDTEIYTKKEIERIARIAFESARIRKKKVHLIDKANVLASSILWREVVANVAKDYQDINLEYMYVDNAAMQIVKNPSIFDVMLCSNLFGDILSDELAAINGSLGLLSSASLNDKGFGLYEPAGGSAPDIAHLNIANPIAQILSAALMLKYSFKEEQAAQDIENAISLALAQGKMTKDLNAKSYLNTDEMGDCILEILKENDNG

SEQ ID NO: 8593 - protein, 475 aa, Ralstonia eutropha JMP134
MYQDLALYIDGEFIKGGDRKEQDVLNPATQEVLGKLPHASRADLDRALAAAQRAFESWKKTSPLERSKILRRVGELARERAKDIGRNITLDQGKPLAEAVGEVLVCAEHADWHAEECRRIYGRVIPPRQPNVRQIVVREPIGVCAAFTPWNFPFNQAIRKIVSAVGAGCTLILKGPEDSPSAVVALAQLFHDAGLPPGVLNIVWGVPSEVSTYLIESPIVRKISFTGSVPVGKQLAALAGAHMKRVTMELGGHSPVLVFDDADIEPAAEMLARFKLRNAGQVCVSPTRFYVQEKAYDKFLARFTEVIGSIKVGNGLEDGTQMGPLAHERRVFSMEQFLDDANQRGGKVVAGGSRIGDKGYFFAPTVVTDLPDDAKLMVDEPFGPVAPVTRFKDTAEVLRRANSLPFGLASYVFTNSLKTATEVSNGLEAGMVNINHFGMALAETPFGGIKDSGIGSEGGQETFDGYLVTKFITQV

SEQ ID NO: 8594 - protein, 63 aa, Zea mays
  misc_feature (55)..(55): Xaa can be any naturally occurring amino acid
RKKKGGKKSLGRILEGVSKWVGILIAIILPPVGGFFKEGGGPEFWICFFFPFLGXIPGIIFPI

SEQ ID NO: 8595 - protein, 104 aa, Glycine max
  misc_feature (63)..(63): Xaa can be any naturally occurring amino acid
MGKGGMSIDEHGEGKEENMAAWLVGMNTLKIQPFKLPTLGPHDVRVRMKAVGICGSDVHYLKXKEPMVIGHECAGIIEEVGSQVKSLVPGDRVAIEPGISCWHC

SEQ ID NO: 8596 - protein, 69 aa, Zea mays
  misc_feature (38)..(38): Xaa can be any naturally occurring amino acid
KSKTSDGTCTCIDIVLAIMLPPVARMFKACCLVEFWIXLMLTLFGYLPGIIYARWAITKLSVGALALNA

SEQ ID NO: 8597 - protein, 507 aa, Glycine max
QNSDDGWFRGRLRFSKKKTMKQRYGLRRRVSSQCSNGSLDEVDNMPEPALSDRSFANPTFQAGTIEEAWFDSAAVFDSDCDDDYQSVNDDVISLNGTETNCGVSTDQMHKPGELSKRHSAHISESVRNSDAEFFDIDATNSQCKRSGRVNEANEPVFLDEFSSVDAGSKWDDGDLHNCGILPCNCLSCLSSTDQRSLCFSPPNSTRKKDLMKHSFKGSGNATLFSSKTILQRPLAGSQVPFCPIEKKMLDCWSRIDPRTFKVRGPNYLKAKKKEFASNHAAYYPFGVDVFLSPQKIDHIARFVELPVMSSSGKLPPILVVNVQIPIYPATLFQGETNGEGVSFVLYFKLSDSYSKDLPLNFQENIRRLMDDEVEKVKSFRGDTIVPFRERLKILGRVVNPQDLHLSAAERKLMQTYNEKPLLSRPQHEFYSGENYYEIDLDMHRFSYISRKGFDMFLDRLKICILDVGLTIQGNKAEELPEQVLCCIRLNSIDYMNYQQLGITEEPL

SEQ ID NO: 8598 - protein, 579 aa, Zea mays
  misc_feature (437)..(437): Xaa can be any naturally occurring amino acid
  misc_feature (481)..(481): Xaa can be any naturally occurring amino acid
GYLEAGRALVDLLKFKSQEGVRVCLLVWDDKTSHDKFFIKTGGVMATHDEETRKFFKHSSVICVLSPRYASNKLSIFKQQVVGTLFTHHQKCVLVDTQARGNKRKITAFIGGLDLCDGRYDTPEHRLFKDLDTVFQNDYHNPTFSAGAKGPRQPWHDLHCRIDGPAAYDVLTNFEQRWRKATKWRDRFRRVSHWKDDALIKLERISWILIPSPNVPNNHPSLWVSKEEDHENWHVQVFRSIDSGSLKGFPSDCKAASKLNLVCRKNLVIDKSIHTAYVRAIRSAQHFIYIENQYFLGSSYAWPSYVNSGADNLVPIELALKIASKIKAGERFAVYVVIPMWPEGVPTAASVQEILFFQAQTMEMMYKIIADELKATDNKDMHPEDYLNFFCLGNREEPPSNGSPESEKSTDKSAAALASKYRRFMIYVSRKRDDCGXMNMSFWVQQTSTRDPWLVLEILRSQWVHTSLIMHGLQRMDILTXQVYGYRTSLWAEHLGTVDDRFKDPSSLECVRFVNQIAVENWQRFTAEEMSTLQGHLLKYPVKVEADGKISPLSDQECFPDVGGKILGAPTSLPDSLTM

SEQ ID NO: 8599 - protein, 353 aa, Glycine max
MATYSWSTEIFSFLVLTLLSTSSHTMVAGARNLLESTLSKPEVPTLPKPHELPPLPEIPELPKFESPKIPALPKPELPKVPELSKPDMSKVPELPKVPERLKVPEISKILELSKPELPKGPELLKPELPSVPNIPKVPELPKPELPEVPKLPKPELPKVPELPKPELPKVPEIPELPNLELPKVTQLPKSKLPKVPEIPKVPEFPKPELPKVPELSKPELPKAPEIPKVPEFPKPELPKVPELSKPELPKAPEIPKVPEFPKPELPKVPELPKPELPKIPEIPKVPEFPKPELPKVPEVPKPELSKVPKLPKSELPKVPEIPELPKSELPKIPEIPKVPEFPKVPKAFSTTNP

SEQ ID NO: 8600 - protein, 291 aa, Spirulina platensis
MQDSESKTPGASPLVGADNAPLTGGEAEGGDAWTVEQAIAALNHQEPNRRYYAAWWLGRFRVCDAIAVDALIMALDDESDRTKDGGYPLRRNAARALGKLGDRRAVTPLVKCLDCQDFYVREAAAQALEGLGDSSCVSALRGLLVGGVEDTAPIAGKPHLKQPYDAVIEAIGTLGATEALTDIEPFINHPIARIQYAALRAMYQLTGDPVYGDRLIAALRGEDLQLRRSALMDLGAIGYLQAAEPIANTLAENSLKLIALQGILEHHLSQIGEKCLSEEAVKIMKLMDSLL

SEQ ID NO: 8601 - protein, 917 aa, Zea mays
MVRRKKSKQACSKGLNQRLKEDRISQFYESLLCQILNYLPTKDVVKTSVLSTRWRSLWLLVPSLELDSRDFSDFNTFVSFCDRYFDSNRVLCINKLKLTISENEEDGFYLKSWIDAAAKRKIQHLDVQFLPQFHKIHFNLYKCEALVSLRLFEVSLDKGRIFSFPCMKTMHLEDNVYPNEATFKELISCCPVLEDLTVIIYGMDRKVFQIEGRYDAKFVSFPCMKTMHLEDNMYPNESTFKKLISCCPVLEDLTVIIYGMDRKVFRVHSQSLKRFSLKRVSSFLHEVALSGVVIDAPLLCSLRINDNVSKSFIVNNLGSNDKLDLSILFGLWHFDETSVTSMRSSIDRFLPGILSVMEMTIHSPAFMLMYRYLALIPLPHLPKFSYMSRLSVTLGVSDLQFLPTFLESCPNLKSLIMESNSNSKRMLLNGNYHINFSSVPKCLLSSLEFVDIKSSILVYVARMKLVKYFLENSTTLKKLTLRLALRLQYCSAKDEIVKKLRKFPRISKTCQDLVTTRVLSTRWRSLWLWLPCLELNSLYFPDFNAFVSFGDKFFDSNRVSCINKFKLYIYGYDVGVDDPSYLTSWIDAAVKCKIQHLHVQCLPAKYIYEMPLSLYICETLVYLKLCRVMLDDAEFVSLPCLKTIHLEYVWFPNEANLERFVSCCPVLEELKIYGCGNENAITLRLLSRSLKKLSINILKSMCDFHSEVVIDAPLLSYLKINDNVSERYIVNNLESNAKLDISLPFGLLDFDEASVSSRTDSIHSFLRGILKVSDMTIWVDTFKLICKYSELESLPRFGYMSRLHVTLCIYDLKWLPTFLESCPNLKSLILVCVGDNDEMLSEEMIQFGSSLVPECLLSSLEFVDIRIPFRGHLEVMKLVRYFLENSAILKKLSLDHDIFKKLFTIPRRSTKCQVVFI

SEQ ID NO: 8602 - protein, 154 aa, Triticum aestivum
  misc_feature (58)..(58): Xaa can be any naturally occurring amino acid
  misc_feature (80)..(80): Xaa can be any naturally occurring amino acid
  misc_feature (108)..(108): Xaa can be any naturally occurring amino acid
  misc_feature (115)..(115): Xaa can be any naturally occurring amino acid
  misc_feature (121)..(122): Xaa can be any naturally occurring amino acid
  misc_feature (125)..(125): Xaa can be any naturally occurring amino acid
MAPTVMASSATSVAPFQGLKSTAGLPVSRRSNGASLGSVSNGGRIRCMQVWPIEGIKXFETLSYLPPLSTEASSSRSDYXIRSKWVPCLRFNKVGSSPVEHNHLLGYXNGRIGHXELPIFXXNDXQSDNEVEEVKKDTLPYFRSGTNASRHQTL

SEQ ID NO: 8603 - protein, 417 aa, Saccharomyces cerevisiae
MRALAYFGKGNIRFTNHLKEPHIVAPDELVIDIEWCGICGTDLHEYTDGPIFFPEDGHTHEISHNPLPQAMGHEMAGTVLEVGPGVKNLKVGDKVVVEPTGTCRDRYRWPLSPNVDKEWCAACKKGYYNICSYLGLCGAGVQSGGFAERVVMNESHCYKVPDFVPLDVAALIQPLAVCWHAIRVCEFKAGSTALIIGAGPIGLGTILALNAAGCKDIVVSEPAKVRRELAEKMGARVYDPTAHAAKESIDYLRSIADGGDGFDYTFDCSGLEVTLNAAIQCLTFRGTAVNLAMWGHHKIQFSPMDITLHERKYTGSMCYTHHDFEAVIEALEEGRIDIDRARHMITGRVNIEDGLDGAIMKLINEKESTIKIILTPNNHGELNREADNEKKEISELSSRKDQERLRESINEAKLRHT

SEQ ID NO: 8604 - protein, 316 aa, Pasteurella multocida subsp. multocida str. Pm70
MTQLDSLRSMTVVVADTGDIEAIKQYQPQDATTNPSLILSASALPQYAPLIDDAIAYAKTKSDCPRQQLVDAEDKLAVNIGLEILKIIPGRISTEVDARLSYDTQATIEKARKLIKLYNEAGIENHRILIKIASTWQGIRAAEVLEKEGINCNLTLLFSEAQARACAEAGVYLISPFVGRILDWHKANTGRQDYPAAEDPGVISVTQIYNYYKQHNYKTVVMGASFRNVDEIIELAGCDRLTISPTLLSHLQAREGELVRKLAFSGELKDRPQPLTESEFYWQHNSDPMAVAKLAEGICKFAEDQEKLEKMLLERL

SEQ ID NO: 8605 - protein, 465 aa, Rubrobacter xylanophilus DSM 9941
MDQRYTPGPDLRELDGSFRGELIRPGEAAYEDARRVFNGMIDRRPALIARCTGVADVVAAVIFARASGLEVAVRGGGHSVSGYGTCDGGLVIDLSPMKGVWVNPGERRARAQAGLTWGEFDRETQLFGLAVTGGRVSGTGISGLTLGGGSGWLERRLGFTVDNLLSVEMVTAEGGLVRATEEENEELFWGVRGGGGNFGIATSFEFALHPVGPLVLGGMLLYPAEQAPGLLRFYREFMRGAPDELGGGCAFLTAPPEPFIPEHVRGTKLIAVIVCYAGGVEEGEAAIQPLKKHLPPAMDMVRPMPYTELQTLLDAANPPGMQHYWKAGFLDELPDEAIDVLVEHAGRMASPLTVLALFPMGGAISRVGEDETPLGPRGAAYNYHALAQWAEPSEAGRHVGWAGELEAALRPWTGERTYLNFIGDEGEERVRTGYGPEKYRRLAGLKKRYDPDNLFHLNQNIRPGA

SEQ ID NO: 8606 - protein, 419 aa, Haloferax volcanii
MSYDQIEVPDDGEKITVDEETGELSVPDNPIIPIIHGDGIGTDVGPAAQKVLDAAAEATGRSVSWMRVYAGSSARDKYDENLPEDTVSAIRNHRVAIKGPLTTPVGAGFRSLNVALRKKLDLYANVRPTYHLDGVPSPVKNPSAMDMVTFRENTEDVYAGIEWEAGTDEVQKVKEFVEEEMGADGVIHDGPVGIGIKPITEFGTKRLVREAIEYALENDRPSVTLVHKGNIMKFTEGAFRDWGYELAEEEFGDVTITEDELWEEYDGKRPEDKVVVKDRIADNMLQQLLTRTANYDVIATMNLNGDYMSDAAGAQIGGLGIAPGANFGEGLCLAEPVHGSAPKYAGKDKVNPTAMILSGRLMFEYMGWKDAGKLIRDTVEKTISDGDVTYDLERQIEGGNKLATSEYADKVVENIKELA

SEQ ID NO: 8607 - protein, 254 aa, Gibberella zeae
PGVGFGTFANEGAKGETYKAVIAALKTGYRHLDCAWFYLNEGEVGQAVRDFLAEDNGVKREDLFICTKVWNHLHEPEEVKWSFENSLKNFGLDYIDLFLVHWPIAAEKGDDYQPKIGPDGKYVIKKDLTENPEPTWRAMEEIYASGKARAIGVSNWTIDGLKQLMAFAKVKPAVNQIEIHPFLPNEDLVKFCLENDILPAAYSPLGSQNQVPTTGETVRSNKTLNEVADRSGNTLAQVLIAWGLRRGTLFCPRA

SEQ ID NO: 8608 - protein, 493 aa, Picrophilus torridus DSM 9790
MKIYIDGEWRDSSSGETIKKYNPSTGEVLDTFPAATRNDVDAAIDSAEDAFKRWSDMTSMERSKILYKALELISKDKDQLTDLLIKENGKVKREAMDETEGVIDQLQYYTEFERKLTGDIVEGTSNKRKIFQYKVPYGIVIAITPWNFPAAMVIRKLAPALLTGNTVILKPSSDTPLTAEWLVKKFVDAGIPKGVLNLITGKGSEIGDYIVEHKKVSLITMTGSTSTGQRIMEKASKNMAKLILELGGKAPFMVWKDANIERALKSLVWAKYLNVGQSCIAAERLYIHEDIYDEFMKKFIEVSKRIKLGDPESSDMGPLINKSAVETTEKYVDIARSSGYKILLGGKKPELSGKYKNGYFYEPTIIENVPQDSPLFQEEIFGPVIGAESVSSVDELYEKANDSKYGLASYLFTEDPELIFEASEKIRFGELYVNMPGPEASQGYHTGFRLTGQAGEGSKYGISEYLKLKNVYVDYSRGNLSISTVNDDLFKNL

SEQ ID NO: 8609 - protein, 126 aa, Zea mays
  misc_feature (81)..(81): Xaa can be any naturally occurring amino acid
EALVAAGTALPARHSWARSVPVGLDAPTAPKDAHAPDVEIREVWASNLHEEFEVIRDIDDAYTYVGMDTEFPVYVEQPIAXYRFTCDRIYAGLHGNANVLKLIQLGLTFSNEACTLPPCGTLGQCC

SEQ ID NO: 8610 - protein, 123 aa, Astragalus membranaceus
RLVEADATKGSDHLRDVFGKGMGLSDQDIVALSGGHTIGAAHKERSGFGGPWTSNPLIFDNSYFKELLSGEKEGLLQLPSDKALLTDPVFRPLVEKYAADEDAFFADYAVAHQKLSELGFAEA

SEQ ID NO: 8611 - protein, 418 aa, Triticum aestivum
  misc_feature (291)..(291): Xaa can be any naturally occurring amino acid
MAMDESPQLFLCPISMELMEDPVTVSTGVTYDRRSIERWFFKYGKTTCPATMQRVASLDLTPNHTLKRVIASWQDRASTSSSPSSPAGAFKPMARERLPSVLAGIEGTPFKVTALKGLRLCMAGDQAARDDFVACDGIQVLGRVMAQALAESGAGGDFSAFRTCEEAAAVLATLPLSDEESVDLVLRPECMRPMVALVQRGSADARLHAMSILAKVSEASGARNWTEDVDVDDMVKSLLDLLSDGASSKLSSRALDVLIDVTARSRSRGGARRGKGVVEVGAVRVLVELLXEADRHVTERALLLLKRLCKCPEGRLAFAEHGLAVAAVVRTVLRVSGLATRLAVNVLWLVSCAARPTERVLDDMVASGGVAKLLALLQADSSPSTKEKVARMLRVHGAFWRQYPCIPADLKDYLKFLK

SEQ ID NO: 8612 - protein, 249 aa, Oryza sativa (japonica cultivar-group)
MDGEEDSEWMMMDVGGKGGKGGGGGGAADRKKRFSEEQIKSLESMFATQTKLEPRQKLQLARELGLQPRQVAIWFQNKRARWKSKQLEREYSALRDDYDALLCSYESLKKEKLALIKQLEKLAEMLQEPRGKYGDNAGDDARSGGVAGMKKEEFVGAGGAATLYSSAEGGGTTTTTTAKLMPHFGSDDVDAGLFLRPSSQHHPPPPHAGAGFTSSEPAADHQSFNFHSSWPSSTEQTCSSTPWWEFESE

SEQ ID NO: 8613 - protein, 314 aa, Zea mays
MSATGRAPCGLPRIGLGTAVQGPRPDPVRAAVLRAIQLGYRHFDTAAHYATEAPIGEAAAEAVRTGLVASREDLFVTSKVWCADAHRDRVLPALRRTLSNLQMEYVDLYMVHWPVTMKAGRFTAPFTPEDFEPFDMRAVWEAMEECHRLGLAKAIGVCNFSCKKLETLLSFATIPPVVNQVEINPVWQQRKLREFCRAKGIQLCAYSPLGAKGTHWGSDSVMDSGVLHEIAKSKGKTVAQVCLRWVYEQGDCLIVKSFDEGRMKENLDIVDWELSEEERQRISKIPQRKINQGRRYVSEHGPYKSFEELWDGEI

SEQ ID NO: 8614 - protein, 509 aa, Pisum sativum
MDGSAGPGGGNVNAFLRNYKMGKTLGIGSFGKVKIAEHVLTGHKVAIKILNRRKIKNMEMEEKVRREIQILRLFMHHHIIRLYEVVETPTDIYVVMEYVKSGELFDYIVEKGRLQEDEARSFFQQIISGVEYCHRNMVVHRDLKPENVLLDSKWSVKIADFGLSNIMRDGHFLKTSCGSPNYAAPEVISGKLYAGPEVDVWSCGVILYALLCGTLPFDDENIPNLFKKIKGGIYTLPSHLSPGARDLIPRLLVVDPMKRITIPEIRQHQWFQLRLPRYLAVPPPDTLQQAKKIDEEILQEVVNRGFDRDQLVESLSNRVQNEGTVTYYLLLDNRYRVSTGYLGAEFQETMDPGLNRINSGEVVSPAGGHHFLGYQGVGMRQQFPAERKWALGLQSRAQPREIMVEVLKALQGLNVCWKKIGHYNMKCRWVVGIPGHQGGMVNNSVLNNNFLGNVGIIESEAVPKSSVVKFELQLYKTQEKYLLDLQRVEGPQFLFLDLCAAFLAQLRVL

SEQ ID NO: 8615 - protein, 111 aa, Leptospira interrogans serovar Copenhageni str. Fiocruz L1-130
MCIKVLGGSKKRYASVGDEIIVAVKDAQPAFGLKDSTGKKVHNKAVQRAVVVRTTKEIRRPDGSYIRFDDNACAIIDDKGNPKGTRIFGPVARELRDKKYAKIISLAPEVL

SEQ ID NO: 8616 - protein, 230 aa, Enterococcus faecium
DTAAAYKNEEGVGKALKNASVNREELFITTKLWNDDHKRPREALLDSLKKLQLDYIDLYLMHWPVPAIDHYVEAWKGMIELQKEGLIKSIGVCNFQIHHLQRLIDETGVTPVINQIELHPLMQQRQLHAWNATHKIQTESWSPLAQGGKGVFDQKVIRDLADKYGKTPAQIVIRWHLDSGLVVIPKSVTPSRIAENFDVWDFRLDKDELGEIAKLDQGKRLGPDPDQFGG

SEQ ID NO: 8617 - protein, 161 aa, Arabidopsis thaliana
MADSDNDSGGHKDGGNASTREQDRFLPIANVSRIMKKALPANAKISKDAKETVQECVSEFISFITGEASDKCQREKRKTINGDDLLWAMTTLGFEDYVEPLKVYLQKYREVEGEKTTTAGRQGDKEGGGGGGGAGSGSGGAPMYGGGMVTTMGHQFSHHFS

SEQ ID NO: 8618 - protein, 106 aa, Glycine max
FGSRQSLHPSLLVCIISGSSEGKDRSMSTTATTTSEEVSSNEWKVIHMSEQEEDLIRRMYKLVGDKWNLIAGRIPGRKAEEIERFWIMRHGDAFSVKRNGSKTQDS

SEQ ID NO: 8619 - protein, 86 aa, Zea mays
PNPRKVLIIGGGDGGVLREVVKHPSVESVVQCEIDEDVIQVSKKFLPGMAIGYSSSKLTLHVGDGFEFMKQNQDAFDVIITDSSDP

SEQ ID NO: 8620 - protein, 162 aa, Triticum aestivum
  misc_feature (23)..(23): Xaa can be any naturally occurring amino acid
  misc_feature (80)..(80): Xaa can be any naturally occurring amino acid
  misc_feature (84)..(84): Xaa can be any naturally occurring amino acid
  misc_feature (88)..(88): Xaa can be any naturally occurring amino acid
  misc_feature (93)..(93): Xaa can be any naturally occurring amino acid
  misc_feature (96)..(96): Xaa can be any naturally occurring amino acid
  misc_feature (100)..(100): Xaa can be any naturally occurring amino acid
  misc_feature (103)..(105): Xaa can be any naturally occurring amino acid
  misc_feature (116)..(116): Xaa can be any naturally occurring amino acid
  misc_feature (126)..(126): Xaa can be any naturally occurring amino acid
  misc_feature (131)..(131): Xaa can be any naturally occurring amino acid
  misc_feature (134)..(134): Xaa can be any naturally occurring amino acid
  misc_feature (139)..(139): Xaa can be any naturally occurring amino acid
  misc_feature (146)..(146): Xaa can be any naturally occurring amino acid
  misc_feature (151)..(152): Xaa can be any naturally occurring amino acid
MAPAVMASSATTVAPFQGLKSTXAGLPVSRRSSGSLGSVSNGGRIRCMQVWPIEGIKKFETLSYLPPLSTEALLKQVDYXIRSXKWVXCLEFXKVXGFVXREXXXSPGLYNGRYWXQCWKLPIFGXPTPTXVLXNKVEXVKKGVPXPNVRXXGFKTPRGTTP

SEQ ID NO: 8621 - protein, 349 aa, Rickettsia honei
ISMVSAEADCFTYDPGFMSTASCQSTITYIDGDKGILRHRGYDIKDLAEKSDFLEVAYLLIYGELPSGEQYNNFTKQVAHHSLVNERLHYLFQTFCSSSHPMAIMLAAVGSLSAFYPDLLNFKEADYELTAIRMIAKIPTIAAMSYKYSIGQPFIYPDNALDFTENFLHMMFATPCTKYTVNPIIKNALNKIFILHADHEQNAFTSTVRIAGSSGANPFACISTGIASLWGPAHGGANESVISMLKEIGSSEYIPKYIAKAKDKNDPFRLMGFGHRVYKNYDPRAAVLKETCKEVLKELGQLDNNPLSQIAIELEAIALKDEYFIERELYPNVDFYSGIIYKAMGIPSQ

SEQ ID NO: 8622 - protein, 124 aa, Wolinella succinogenes
MAITKEELLDYIGGLSVLELSELVKAFEEKFGVSAAPTVVAGAGAGVAAAAVEEKTEFDVILLDGGEKKINVIKVVRELTGLGLKEAKDAVEKTPTTIKEGANKDDAAAMKAKLEEAGAKVEIK

SEQ ID NO: 8623 - protein, 478 aa, Vitreoscilla sp. C1
MYKKSTIRIFATTSHKMNIDKEINMTNTTLNATANHLHPFSDNQQLKEKGVRVITKADGIYIYDDAGNKIIDGMAGLWCVNIGYGRKELADIARDQMNELAYYNTFFKTSHPAVINLSAKLASIAPAGFNHVFYTGSGSESVDSMIRMVRHYWDSVGKPSKKTLIGRWNGYHGSTIGGVSMGGMKGMHKQGGFPIEGIVHIEQPWFYGLHEEGETAEQFGIRAANWLEEKILEIGADNVAAFVGEPIQGAGGVIIPPSTYWPRIQEICQKYDILLVADEVICGFGRTGEWFGHETFGFQPDIFTTAKGLSSGYLPIGAVFVGDKVVEGILKGGDFNHGFTYAGHPVAAAVALKNVEILDDEGIIKNVHDKTGPYMQAKWREMLSQFKYVDDVRGVGLIQGFTLVKNKATREMFPNEGETGTMLRDIFFSNNLIMRACGDHIVASPPLTITKEEIDLMLATAEKCLQEFETAMDSKLGA

SEQ ID NO: 8624 - protein, 403 aa, Photorhabdus luminescens subsp. laumondii TTO1
MTSKILARSINEFFEVQQLSDQTILKPNRKIKMKILDEGLMQTAICRSNIGRIDEKELKLEYRGHNVRDLANNYSFSDVVYLLITGKLNSEGSEEFLDMLHNNYLSALKHIEKLTPVIFDTTPTDFLTIAVLSSQGKWLSDCSVKTKDERLIITASILAAIAAAIAIYAQKYAISEPVFKTFFGTKHRFFASFLATCFGQQCDDVAEEMLNKFLILHAEHGLNCSTATVRAVASSGADPFNAVAAGICAFSGPLHGGASGAVGLMIDDIHDNSKNISTFIDELVERKQRLMGFGHRIYKQPDPRASYMSDILIKQKAKFDVISSYVNISQELASEVSKRPYFSQRGLYPNPDLFNGLLLRRAGFKSHMNTALLCFSRAAGWLAHYYDSIDSKAPILRPQELYL

SEQ ID NO: 8625 - protein, 468 aa, Zea mays
  misc_feature (66)..(66): Xaa can be any naturally occurring amino acid
  misc_feature (138)..(138): Xaa can be any naturally occurring amino acid
  misc_feature (171)..(171): Xaa can be any naturally occurring amino acid
  misc_feature (195)..(195): Xaa can be any naturally occurring amino acid
  misc_feature (254)..(254): Xaa can be any naturally occurring amino acid
  misc_feature (290)..(290): Xaa can be any naturally occurring amino acid
MARSGREADPGEEERKLVLGKYELGRLLGQGTFAKVYYARDLSAGAGTGHSCSVAIKVIDKARLRXRQGMVEQLRREISIMRMVRHPNVVGIREVLASRSRVFVVMEYARGGELFAKVARGRLDEDHARRYFQQLVAXPVGFCHRRGVAHRDLKPENLLLDEAGRLKVTDXFGLAALPEQLRHDGLLHTQCGTPXAYVAPEVLRKRGYDGARADLWSCGVVLYVLLCGFLPFQHDNYVKLYQKIFKADYQVPPXWVSGDARRLIARLLVVDPAKRASIAEIMCTPWFRKXFVPPVLSPPVTPKKQQLDEGAALFDNDDDDNSNSNHSGATSPRSCNAFQLISSMSSGFDLSGLFESEQKTATVFTARAPAATVVEKLESVARALGFEVTRGKGWKVRMEAKAEGTNGRLAATAEVLEVAVDVTVVEFVHDAGDALDFNKFCAVDVRPGLTEIVWAWQGDSPAAAVGTA

SEQ ID NO: 8626 - protein, 450 aa, Corynebacterium efficiens YS-314
MTVHDYPETGALAPAAPGTLLITDVRVYGEGEPTNVLIRDGVIDSLDAPTSGEYDHTIDGGGGVLLPGFVDMHVHLREPGREDTETIATGSAAAAKGGFTAVFTMANTTPVMDQPLIAEGVWFKGQNVGLCDVHPVGSITKGLEGRELTEFGMMARSEARVRMFSDDGKCVDDPQVMRRALEYAKGMDVLIAQHCEDHRMTEGASAHEGENAARLGLRGWPRVAEESIVVRDAILARDYGNRVHICHASTEGTIELLRWAKGQGIPITAEVTPHHLILTDERLKTYDGVNRVNPPLREERDTLALREALLDGTIDVVATDHAPHGSEDKCCEFENAKPGMLGLETSLSIIADTFVASGLADWRFVAKVMSERPAEITRLPGHGRPIAVGEPANLTIVDPGRTWTARGEEFASKASNTPYEGMEFGAKVSHTILRGHVTCENGNATIAYNA

SEQ ID NO: 8627 - protein, 255 aa, Glycine max
  misc_feature (149)..(149): Xaa can be any naturally occurring amino acid
MVFGDWVKRARVEAINWILKTRATLGFRFETAYLSVTYFDRFLSRRSIDSEKSWAIRLLSIACLSLAAKMEECNVPGLSEFKLDDYSFEGKVIQRVELLVLSTLEWEMGIITPFDFLSYFITKFCKESPPSPIFYKTMQLIFTTMKALXSPCAEVNLMDHKPSVIAVAATLVAMDQQLTRDAVELKMSSIPQHRLLESKDVFEYYNLIQRLYEENTKSDTHTPIEMTESSRVTSSAAMTKRRRLTFSDDEGSSHG

SEQ ID NO: 8628 - protein, 364 aa, Acinetobacter sp. ADP1
MAGNTALCTVGRSGNDLHYRGYDILDLAVGSQFEEVAHLLVHGKLPNQAELKAYKAKLKALRGLPAALKTALEQLPPSAHPMDVMRTGVSVLGCLTPEHEDHNEAGAKDIADKLMASLGSMLLYWYHFSNNGRRIEVETDDDSIAAHFLHLLHGEKPSEEWIQAMHTSLILYAEHEFNASTFTSRVVAGTGSDMYSAITGGIGALRGPKHGGANEVAFVIQQRYDNADEAEADIRSRVEKKEVVIGFGHPVYTVSDPRNEVIKKVAYDLAQSQQNTKMYLIAERLEAVMKEVKNMFPNLDWFSAVSYHLMGVPTAMFTPLFVIARTAGWSAHVIEQRQDGKIIRPSANYTGPENLEFKPLAERG

SEQ ID NO: 8629 - protein, 456 aa, Arabidopsis thaliana
MENKPSVLTERYEVGRLLGQGTFAKVYSGRSNHTNESVAIKMIDKDKVMRVGLSQQIKREISVMRIAKHPNVVELYEVMATKSRIYFVIEYCKGGELFNKVAKGKLKEDVAWKYFYQLISAVDFCHSRGVYHRDIKPENLLLDDNDNLKVSDFGLSALADCKRQDGLLHTTCGTPAYVAPEVINRKGYEGTKADIWSCGVVLFVLLAGYLPFHDTNLMEMYRKIGKADFKCPSWFAPEVKRLLCKMLDPNHETRITIAKIKESSWFRKGLHLKQKKMEKMEKQQVREATNPMEAGGSGQNENGENHEPPRLATLNAFDIIALSTGFGLAGLFGDVYDKRESRFASQKPASEIISKLVEVAKCLKLKIRKQGAGLFKLERVKEGKNGILTMDAEIFQVTPTFHLVEVKKCNGDTMEYQKLVEEDLRPALADIVWVWQGEKEKEEQLLQDEQGEQEPS

SEQ ID NO: 8630 - protein, 318 aa, Arachis hypogaea
VMHRDLKPESFLFANKKENSPLKAIDFGLSVFFKPGEKFSEIVGSPYYMAPEVLKRNYGPEIDIWSAGVILYILLCGVPPFWAESEQGGAQAILRGLIDFKREPWPSISESAKSLVKQMLEPDPKLRLTAKQVLEHPWIQMLRRAPNIPLGDAVKSRLKQFSMMNRFQKKALRVIADFLSNEEVEDIKDIFQKMDTDNDGIVSIEELKAEFQNFGSQLAESEIQMLLEAVNTNGKGTLDYGEFVAVSLHLKRMANDEHLRKAFSYFDKDGNGYIEPDELRNALMEDGTDDCADVANDIFQEVDTDKDGRISYEEFVAM

SEQ ID NO: 8631 - protein, 247 aa, Zea mays
  misc_feature (8)..(8): Xaa can be any naturally occurring amino acid
  misc_feature (168)..(168): Xaa can be any naturally occurring amino acid
  misc_feature (181)..(181): Xaa can be any naturally occurring amino acid
  misc_feature (224)..(224): Xaa can be any naturally occurring amino acid
RGLESLRXQVAGKYKDEIEESVSMVDILAVQLSKRENELLQQKTEVTRIATSLKLASEDARRIVDEERTNARTEIENARAAVLRVQKVLKEKENSSQRIGKQDVDELREKVQEARRVKMLHCPSKAMDIKSEIHVLRDQYAEISSSSTHLLKELELHQSFKENGVPSXELEGLESLGSMAXVVVKNDVALSNSSVQWFRIQPEGPKKEIISGATKLVYAPETHXVGRYLQAEVNLGGQTSVAKTAGP

SEQ ID NO: 8632 - protein, 137 aa, Triticum aestivum
QVEQFSKGVLSASPRSLLCTNLSPSFNWDAAGLNDNDMGSYIANLGKLGFVWQFITLGGLHANALASATFAKSFKESGMYGYVSQVQRKEREHGVDVLQHQKWSGANYVDELMKMVTGGVSSTAAMGKGVTEDQFKH

SEQ ID NO: 8633 - protein, 509 aa, Bradyrhizobium japonicum USDA 110
MNIPSKPASIDVETHGNFIDGREVEAGNGAMLDVRNPATGDVIARIPNSTAEDIDRAMKSARAAFEGKAWGGMDTRARARLVNKLADAFEANLDSLYRLETLNNGRPVNETRAQLSRLPDFFRYFAGVALARRDSVIPVEGAYLNYTLRTPIGIVANCTPFNHPLMILCKSLAVVLATGCVTVVKPSEYTPLTTLKLAQIFTEAGLPPGVFNIVLGHGQSAGKMLAEHGDIDKLVLTGGTEAGRIAGSAAARVFAHQTMELGGKTPVMVFDDFDVDRAVNYAAFGAFIGAGQTCVCASRHIVQASIYDEFVEKLQAKTRTIRVGDPFDASTQMGPVISARQRDRVLTYAGYGHEDGARLVTGGVAAKVPGHDNGYFVEPTVFADVTSDMRIFQEEVFGPFTSVTPFKDEADALRLANDSPFGLAAAIRTRDVARAHRVAASVKAGIVWINDHHRLDPASPWGGVDDSGIGRECGTESFNDHFNTKSVMVATHEQPFDWYRDTANQKRLN

SEQ ID NO: 8634 - protein, 187 aa, Capsicum annuum
MASSVMSTATVATGANAAQASMIASFNGLKSAASFPVTRKQDLDITSIASNGGRVECMLVWPPINKKKYETLSYLPDLSDEQLLKEIEYLLQKGWVPCLEFETEHGFVYREHHRSPGYYDGRYWTMWKLPMFGCTDATQVLNEVQEAKKAYPQAWIRIIGFDNVRQVQCISFIAYKPEATKFSMFNV

SEQ ID NO: 8635 - protein, 456 aa, Bilophila wadsworthia
MTYDKAELVALDKKYVWHHLTQHKNFEPAIYVKGEGMRITDIDGKTYLDAVSGGVWTVNVGYGRKEIVDAVAKQMMEMCYFANGIGNVPTIKFSEKLISKMPGMSRVYLSNSGSEANEKAFKIVRQIGQLKHGGKKTGILYRARDYHGTTIGTLSACGQFERKVQYGPFAPGFYEFPDCDVYRSKFGDCADLGVKMAKQLEEVILTVGPDELGAVIVEPMTAGGGILVPPAGYYETIREICDKYELLLIIDEVVCGLGRTGKWFGYQHFNVQPDIVTMAKGVASGYAPISCTVTTEKVFQDFVNDPADTDAYFRDISTFGGCTSGPAAALANIEIIERENLLENCTKMGDRLLEGLKGLMAKHPIIGDVRGKGLFAGIEIVKDRATKEPIAEAVANAMVGAAKQAGVLIGKTSRSFREFNNTLTLCPALIATEADIDEIVAGIDKAFTTVEQKFGL

SEQ ID NO: 8636 - protein, 286 aa, Glycine max
  misc_feature (149)..(149): Xaa can be any naturally occurring amino acid
MASLSCSANDLAPLFNDTAAANYLCAQFDSISRKLAETTYAVDNTYLLFSAYLVFAMQLGFAMLCAGSVRAKNTMNIMLTNVLDAAAGGLSYYLFGFAFAFGGPSNGFIGRHFFGLRDYPMGSSPSGDYSFFLYQWAFAIAAAGITSGXSIAERTQFVAYLIYSSFLTGFVYPIVSHWFWSSDGWASATRSHGNVLFGSGVIDFAGSGVVHMVGGIAVLWGALIEGPRIGRFDRSGRSVALRGHSASLVVLGSFLLWFGWYGFNPGSFLTIAKGYGSGGYYGQWSA

SEQ ID NO: 8637 - protein, 506 aa, Azotobacter vinelandii
MRYAHPGSEGAIVSYKVRYGNYIGGQFVPPVKGQYFTNSSPVTGEEFAEFPRSTAEDIEKALDAAHAAAGAWGRTSVQERAAVLLKIADRIEQNLEVLAVTETWDNGKPVRETLNADVPLSADHFRYYAGCIRAQEGSAGEINENTVAYHFHEPLGVVGQIIPWNFPLLMAAWKLAPALAAGNCIVLKPAEQTPLSITVLVELIGDLLPPGVLNIVQGFGREAGEALATSKRIAKIAFTGSTPVGAHILKCAAENIIPSTVELGGKSPNIFFEDIMQAEPAFIEKAAEGLVLAFFNQGEVCTCPSRALIQESIYDDFMKVVMKKVGQIKRGHPLDTDTMVGAQASSQQFEKILSYLEIARSEGAEVLTGGAAERLEGSLASGYYIQPTLLKGHNKMRVFQEEIFGPVVGVTTFKDEAEALAIANDTEFGLGAGLWTRDINRAYRMGRGIQAGRVWTNCYHLYPAHAAFGGYKKSGVGRETHKMMLDHYQQTKNLLVSYDINPLGFF

SEQ ID NO: 8638 - protein, 433 aa, Oryza sativa (indica cultivar-group)
KMLEEFVSHGLLEYSKHGMKVEGATTSLLSPYLHFGEVSVRKVYQLVRMQQIKWENEGTSEAEESIHFFMRSIGLREYSRYLCFNFPFTHEKSLLGNLKHYPWKVDEERFKSWRQGMTGYPLVDAGMRELWATGWTHNRIRVIISSFAVKFLLIPWTWGMKYFWDVLLDADLESDILGWQYISGSLPDGHELSRLDNPEVQGQKYDPDGVYVRTWIPELARMPTEWIHHPWDAPSCILEVAGVELGFNYPKPIVDLHIARECLDDSISTMWQLDTAEKLAELDGEVVEDNLSNIKTFDIPKVVLRETSPCALPIDQRVPHASSKDHNLKSKVLKASNRSSICVDMIRSSKMEATSSVANSPVSRKRSFCETAFHVPSYSSSAEVHSHIQDHGGSLVGPSRYLLQEAGRNCVDEVEDSSTADSGSSISRQRKAA

SEQ ID NO: 8639 - protein, 415 aa, Streptomyces coelicolor A3(2)
MRRIVYLGGLTPRGVPERTLSPHLRSRAEVGPILVRDVLHYLAGAATMPDDIDRAFDVGGPDVPTYREMMRRHATVSGLRRRIIVPAPVLTPGLSSHWVGLVTPVPASIARPLTESLRHEVVCQEHDIARYVPDAPGRPLPFDVALTLALRRVREAQVATRWSSASVPGAPSDPLPTDPDWAGGSLYEDERHLPVDASPEALWKVVEGIGGDNGWYSFPPAWAVRGWLDRFVGGVGLRRGRRDAQRLHPARPVAWRGGRRRGHRRLAGRTGYPVVDAAMRQLRHQGWMHNRARLLVASFLTKTLYVDWRIGARHFLDLLVDGDVVNNQLNWQWAAGTGTDTRPHRVLNPLVQARRFDPDGVYVRRWVPELRSVEGGKVHEPWRLAAAERGELDYPDPLVELADGLARFKHARGRD

SEQ ID NO: 8640 - protein, 281 aa, Zea mays
MPMYSKSELIHVPPPPCSRPRYVMAPPLVFTSIGASMNAAVRDVWASNFDEELSNLSAVLPRYPCVCLDTEFPGAVHDSDMPRYMRGPRESYELVGIALSGPAGRFPIAWQFNIRGFDPALHPHAPASIAMLREQGMDFAMLNEFGIDPEDFAAGFRRSGLACGRLTWTAFSGSYDFGYLAKALTGGQPLPDTLDGFLALVRRLFGHSVFDVKHLARCCAMRGGLEQVATALGVKRAAGRAHCAGSDSLLTTDVLLLMMHRFFRNVEDSRCRNHRRPYLVS

SEQ ID NO: 8641 - protein, 219 aa, Brassica napus
  misc_feature (54)..(54): Xaa can be any naturally occurring amino acid
  misc_feature (132)..(132): Xaa can be any naturally occurring amino acid
  misc_feature (137)..(137): Xaa can be any naturally occurring amino acid
  misc_feature (188)..(188): Xaa can be any naturally occurring amino acid
  misc_feature (192)..(193): Xaa can be any naturally occurring amino acid
  misc_feature (199)..(199): Xaa can be any naturally occurring amino acid
  misc_feature (205)..(205): Xaa can be any naturally occurring amino acid
QGTEAELDGQYEPQDYLNFFCLGTREASDETVSKYSSRNQPKKIAKPNAAQVQXLKSRRFMIYVHSKGMVVDDEFVLIGSANINKRSLEGTRDTEIAMGGYQLHYSWAKKGSRPRGQIYGYRMSLWAEHLGXLEQGXEEPENMECVRRVRHLSELNWRQYAAEEVTVMTSHLLKYPVQVDRTGKVSSXPGPXXLPDVGXKIIGHXLWAGTKPRHLEVTL

SEQ ID NO: 8642 - protein, 460 aa, Glycine max
MEQKGSVLMQRYELGRLLGQGTFAKVYHARNIITGMSVAIKIIDKEKILKVGMIDQIKREISVMRLIRHPHVVELYEVMASKTKIYFVMEHAKGGELFNKVVKGRLKVDVARKYFQQLISAVDYCHSRGVCHRDLKPENLLLDENENLKVSDFGLSALAESKCQDGLLHTTCGTPAYVAPEVINRKGYDGIKADIWSCGVILYVLLAGHLPFQDTNLMEMYRKIGRGEFKFPKWFAPDVRRFLSRILDPNPKARISMAKIMESSWFKKGLEKPAITVTENEELAPLDADGIFEACENDGPIAEPKQEQAKPCNLNAFDIISYSTGFDLSGLFEDTNLKKETRFMSKKPASIIVLKLEEICKRLCLKVKKKDGGLLKLEGSKEGRKGTLGVDAEIFEITPHFHMVELKKSNGDTMEYQKLFKQDIRPALKDIVWTWQGEKPQQEQEQHEVVQEEHQPSHTA

SEQ ID NO: 8643 - protein, 465 aa, Methanococcus maripaludis S2
MFIDGKWIIREDIDVFDPYTLENIEKITALDREETKNAIEVTEKHKEIMKNLSPSKRYKILMKVAEHLSSKKDFFAKTISIDVGKPIKQSKIEVDRTLTALKLSAFYAKELRGETINSENGLIFTKKEPLGVIGAITPFNFPLNLATHKIGPAIATGNSVVLHPSSKAPIVAIYLTKIIEHVLKQMDIPRGVFNLATGNGEIVGDEISKNDNVNMVSFTGSVEVGESISKNAKMKKVTLELGGNNPMIVLKDSDIKLAAKSAVKSKFLNAGQVCISVGQVLVEEEVVETFTKYVIEETKKLILGNPLDKNTDIGPLISPESALRIENLIKQSVSEGGELLIGGNRQNSLISPAVINIDEENILSKIETFGPILPILTVKDSEEAVNIANNSKYGLQAGLFTNNINNAMKIADELEYGGIMINSSPTFRKDNMPFGGVKKSGLGREGIKYTVEEMSETKTVVIHNI

SEQ ID NO: 8644 - protein, 1748 aa, Schizosaccharomyces pombe
MSYPNQMNGSMYGYGANNGVQPGFDSYGMPINQGGMNYQQQTYPYQQPYQPDGYAGNTMLPFQQSQPATQFNNGFGYASQPTGSVADYGQQQQQMYGYNGMMPQTMNNTGFMQPQQTGAIPGFAPQPTGFVQPQPTGFMSQQPASFMQPQRTGGAGFIQPQRTGAMPAYQPQMNNFMQPQKTGGFAPQATGFMQTQPFGAAPSFAPQPTGFVQPQQTGVVMPPQPTGYLQAQPTGPFASFVQPQQTASFMPAAQPLKPQKTGQIHNSKAMDTRLSFVSAADQAKFEQLFKSAVGREEAMSSEIGKAILVRSKLPTVQLSKIWRLSDTTRSGRLLFPQFVLAMYLCNLGLTGKPIPDKVPDGILNEVNAMVDAISFSLDENYAKPTQPIPQAAAQQMAAQMFGGFQQAAGIPSQITGFQPQAMMPQRTGMQPQMTGFQQPMIPQRTGMQPQMTGFQQPMMPQRTGLQPQMTGFQQPMVPQRTGMQPQMTGFQQPMMPQRTGLQPQMTGFQQPMVPQRTGMQPMMPGLQQPMAPQRTGMQPMMPQRTGMQPQMTGFQQPMAPQRTGMQPMMPQRTGMQPQMPGMQQPMAPQRTGMQPMMPQRTGMQQPMAPQRTGMQPMMPQRTGMQPQMPGMQQPMAPQRTGMQPMMPQRTGMQPQMPGMQQPMAPQRTGMQPMAPQRTGMQPMMPQRTGMQPQMPGMQQPMAPQRTGMQPMMPQRTGMQPQMPGMQQPMAPQRTGMQPMAPQRTGMQPQMTGGPMLPQRTGGMAPQPTGMPGQWGFINTPLSNLPGIEALGQQMMPNAPSGGLNNTFQQKKDIPWAISKEEKRIYDQIFDAWDKERKGTLGGNAVLEIFGQSKLTRTELEHIWNLCDHGDKGSLDRDEFAVALHLIYRKLNGNEVPAVLPPELIPPSTRNFTESLNQVKNLIKNDTSNRKPFGAENQSKLKKNSFYDNPSETTEKDATLYRHNDSDASAYVSSARRRDFKEEKIESAPPIINDIDSEIASLKKRIHEKSLVVNALEDKKLAATPANDVQNDSLIYRIKSVQDEINRLSTSNKSPEVASMNVRLEELSTRVSKMLSDINEVDHTIASLSLKLFQAEDTKNSYDQTSPEATQERNRTISSKLAEMEKQKNESKAALEQMKNYVTNIENNIRAKLLPSAANDDAWLSQNVVDESVTRVVKELPVPAPAAPQTLNPPSVSTVQQSKPIESNTHTPEVKATSESPSASSNLEDRAARIKAEAQRRMNERLAALGIKPRQKGTPSPAPVNSATSTPVAAPTAQQIQPGKQASAVSSNVPAVSASISTPPAVVPTVQHPQPTKQIPTAAVKDPSTTSTSFNTAPIPQQAPLENQFSKMSLEPPVRPAVPTSPKPQIPDSSNVHAPPPPVQPMNAMPSHNAVNARPSAPERRDSFGSVSSGSNVSSIEDETSTMPLKASQPTNPGAPSNHAPQVVPPAPMHAVAPVQPKAPGMVTNAPAPSSAPAPPAPVSQLPPAVPNVPVPSMIPSVAQQPPSSVAPATAPSSTLPPSQSSFAHVPSPAPPAPQHPSAAALSSAPADNSMPHRSSPYAPQEPVQKPQAINNIAPATNLGTSQSFSPRMGPVNNSGSPLAMNAAGQPSLAVPAVPSAPSNHFNPFAKMQPPAPSPLQPSGHDSDNWSQHGDEEEEDSEDDIRSSKDAAALAAKLFGGMAPAHPVSTPPVRPQSAAPPQMSAPTPPPPPMSVPPPPSAPPMPAGPPSAPPPPLPASSAPSVPNPGD

SEQ ID NO: 8645 - protein, 157 aa, Triticum aestivum
  misc_feature (40)..(40): Xaa can be any naturally occurring amino acid
  misc_feature (123)..(123): Xaa can be any naturally occurring amino acid
  misc_feature (130)..(130): Xaa can be any naturally occurring amino acid
  misc_feature (135)..(135): Xaa can be any naturally occurring amino acid
  misc_feature (139)..(139): Xaa can be any naturally occurring amino acid
  misc_feature (142)..(142): Xaa can be any naturally occurring amino acid
  misc_feature (144)..(144): Xaa can be any naturally occurring amino acid
  misc_feature (151)..(151): Xaa can be any naturally occurring amino acid
MAPTVMASSATSVAPFQGLKSTAGLPVSRRSNGASSAASXNGGRIRCMQVWPIEGIKKFETLSYLPPLSTEALLKQVDYLIRSKWVPCLEFSKVGFIFREHNASPGYYDGRYLTMWKLPMFRXTDAKKVXNEVEXVKKXYPXAXVRIIRFXKWARMR

SEQ ID NO: 8646 - protein, 511 aa, Alcaligenes faecalis
MGEEMKTESKKPDSARSELAMKYFQAEYGHFINGEWVGGSSSEKIAMINPANLEVLSYIQSGNAEDVNRAVEAATQAFPKWSRSTPSERQAALYEMARRLRARANDYAAMLSLDNGKPIMEALHIDIPATIGQFELFAGAAFGLHGQTIDATQGVAIIHREPLGVVAQIIPWNVPLVMMATKIAPALAAGNTIVLKPAESVCLAVMEFIREMADLLPPGVLNVITGYGPNVGEALVTHPNVRKVAFTGSRPTAQKLMQYASVNVIPQTLELGGKSANIICADADMDAAAESAAMSIVVNKGEICFAATRHFVHESVMDAFVEKVQNILRKIRVGDPMIPSTQMGPQASRMQFDKVLGYLDIGRNEGATTAMGGKRATVSGFEQGYFIEPTLFTDVRNKMRIAQEEIFGPVGVVIPWKDEAQVIREANDTEFGLAAGLWTKNITQAHRMAREIEAGTVWVNRYFNMIPNVPFGGYKQSGFGREFSLDVLSHYTQLKSVIVSLQEGPIGLFDH

SEQ ID NO: 8647 - protein, 75 aa, Zea mays
MTTAAAGRRQARRHQADGHGSAKVPLWKDPLSPSKWKEEHFVLASLSMWGVIFYGGYKLFSGKKEAKTEAASPQA

SEQ ID NO: 8648 - protein, 310 aa, Bacillus megaterium
MPLDPHIQIFLNQYNEMPRPSLEDVTPPQLREMEKMSLTPSKEAVKKVYNEEIELNERTLTLRVYEPEGTGPFPALVYYHGGGWVLGSLDTHDSICRSYANETNCIVVSVDYRLAPESKFPAAVNDAYDALDWISAHASQLNIDSNKIAVGGDSAGGNLAAVVSILAKQRQGPSIVHQLLIYPSVGFKNQHPASMKENAEGYLLSKDLMDWFRLQYLNNKEEEQHPYNAPVLLEDLSSLPSATIITAQYDPLRDSGKDYADALKNHGVPVTYENYETMIHGFLGFHEFVPLAQQAINKSAAQLRQVFDSI

SEQ ID NO: 8649 - protein, 372 aa, Hemerocallis hybrid cultivar
STEIFSPVRIRSLAAVRQEEVKLMITGILASTSTDNSVKVNMKVVFSELMFNVIMKIIAGKRYFGVNTDSEVEEGQKFRVVFDEMFSTLEVASPQDFLPFLKWFGFKRMENRLTKLAKELDQLFQKLIEERRSERGKVQSTVIDVLLSLQETDREQYSDKLIKGMILSLIAAGTHTTAGTMEWAMSLLLNHPEALLKVRDEIDKKVGQDRLIDHSDLQNLSYLNNAIKESLRLFPTAPLLLAHESSAECTVGGFTIPSNTILFANAYALHRDPKVWTDPVSFKPERFENNGQQGSRIYVPFGLGRRSCPGEGLATQVVGLALGTLIQCFEWDRNGEEKVDMTDGSGLAMHMEKPLEAMCKPRQSIVDVINRL

SEQ ID NO: 8650 - protein, 363 aa, Escherichia coli O157:H7
MSKNYHIAVLPGDGIGPEVMTQALKVLDAVRNRFAMRITTSHYDVGGAAIDNHGQPLPPATVEGCEQADAVLFGSVGGPKWEHLPPDQQPERGALLPLRKHFKLFSNLRPAKLYQGLEAFCPLRADIAANGFDILCVRELTGGIYFGQPKGREGSGQYEKAFDTEVYHRFEIERIARIAFESARKRRHKVTSIDKANVLQSSILWREIVNEIATEYPDIELAHMYIDNATMQLIKDPSQFDVLLCSNLFGDILSDECAMITGSMGMLPSASLNEQGFGLYEPAGGSAPDIAGKNIANPIAQILSLALLLRYSLDADDAASAIERAINRALEEGIRTGDLARGAAAVSTDEMGDIIARYVAEGV

SEQ ID NO: 8651 - protein, 301 aa, Acinetobacter sp. ADP1
MYIMWKQYLTEAVLKTTIRAPSRFSLPPATLRVALNQMCRVFPLNKEVSIRPIRLAGIRAEEIKPQSSSTQLIFHIHGGAFFLGSLNTHRALMTELAARTQMQVLHVDYPLAPEAGFPDALDALYDIYQTLLDQGVLPKDIILSGDSCGANLALALALRLKDDPEQLPSGLILMSPFLDLTLSSESLRLNKKHDALLCIEALEAGIDYYLGDSMPKDDPRVSPIFDNLRGLPPTMIQVGSKEILLDDAKRFRDKAKEADVKVEFKLYTGMWHNFQMFSAWFDEAKQAISDLAVFAHQLDRD

SEQ ID NO: 8652 - protein, 369 aa, Burkholderia cepacia R1808
MALSGVTAGNTALCTVGRTGNDLHYRGYDILDVAESCDFEEIAHLLVHGTLPNLTELAAYKTKLRALRGLPNALKAALEQIPASAHPMDVMRTGVSVLGTVLPEKDDHNLPGARDIADRLMASLGSMLLYWYHFSHNGKRIETETDDDSIGGHFLHLLHGKAPSKSWVEAMHTSLILYAEHEFNASTFTGRVIAGTGSDIYSAITGAIGALRGPKHGGANEVAYDIQSRYDSPDEAELDIRRRVENKEVVIGFGHPVYTISDPRNKVIKGVAHKLSKEAGDLKLYNIAERLESVMWDAKKMFPNLDWFSAVSYHLMGVPTAMFTPLFVISRTSGWSAHIIEQRIDNKIIRPSANYTGPEDLQFVPIDKR

SEQ ID NO: 8653 - protein, 348 aa, Tropheryma whipplei TW08/27
MEDLYGILGVDHDASVDEIRRAYRRLARELHPDINPDSADRFKAVTHAYNILSDPEQRQRYDRHVSGGFSSDFNLSDLFQSFFDTSAEFQRGSDLLVNIDIDLKTAIYGGSQVVKIDSLVVCDVCNGTRSEPGYKAEVCFDCNGSGVVRGEVRTTLGNLITQNTCSKCRGNGERIDHPCRRCYGNGSRSAPRDITINIPPGVETGMRIKIPNMGNAGGAMPGDLYVDCKVKEHPYFLRDGQDLYCRLDISLVDALLGTKVKIDSLDGELAVVIPALSQNRDVIRIANKGAVTLRGGKGDLCIVLNVLLMQKLDPEHRALLKKIMPNPPKPKLAKRTSGFFSWLKNKFT

SEQ ID NO: 8654 - protein, 489 aa, Bacillus cereus G9241
MPQDRKEEVQNDTYEEKEIMPDNPQYLPRRVQMELPPEFSINPLFARKGESVVPRFNMPDEGMLPETAYQIVHDEITLDGNARLNLAMFVSTWMEPTAERLYAKSFDKNMIDKDEYPQTAEIEERCVRILANLWHSPSPLTTMGVSTTGSSEACMLGGLALKRRWQNARKREGKSVDRPNIVFSSAVQVVWEKFANYWEVEPRYVKVSPEHSLLDPQGVIAAVDENTIGVVPILGETYTGRYEPVAAIAKALDDLQERTGLDIPMHVDAASGGFIAPFLQPDLVWDFQLPRVKSINVSGHKYGLVYPGLGWIIWREADDLPEDLIFRVSYLGGNMPTFALNFSRPGAQVLLQYYNYLRLGKRGYYDVQRASQKVALFLSKAIQKMEPFELLSNGSDIPVFAWRLKNGHTSNWNLYDLSRQLRVFGWQVPAYPLPPDLEAVTIMRVVVRNGFSVDLAHLFLRNLKQAVAFLDSLDGPMPHDTKCDNGFHH

SEQ ID NO: 8655 - protein, 594 aa, Triticum aestivum
  misc_feature (530)..(530): Xaa can be any naturally occurring amino acid
MESTMKEIRGGGAPCVLDMDDAATVGGGVEDTYGEDRATEEQLVTPWTVSVASGYNLLRDPRYNKGLAFTEKERETHYLRGLLPPTVISQELQERKIMHNIRQYQLPLQRYMAMMDLQEGNERLFYKLLIDNVEELLPIVYTPTVGEACQKYGSIFSRPQGLYISLKEKGKILEVLKNWPERSIQVIVVTDGERILGLGDLGCQGMGIPVGKLSLYTALGGVRPSACLPITLDVGTNNEELLNDEFYIGLRQRRAIGQEYADFLHEFMAAVKQNYGEKVLIQFEDFANHNAFDLLARYGTTHLVFNDDIQGTASVVLAGLVAALKLVGGTLAEHTYLFLGAGEAGTGIAELIALEMSRQTKTPIDECRKKIWLVDSKGLIVSARKESLQHFKKPWAHEHEHVGNLLDAVNAIKPTVLIGTSGKGQTFTQEVVEAISSFNEMPIILALSNPTSQAECTAEQAYTWSKGRAVFATGSPFDPVQYNGKIYVPGQANNAYIFPGFGLGVVMSGAIRVHDDMLLAASEALAQQVXTQENFDKGLIYPPFSNIRKICAHIAANVAAKAYELGLASRRPRPKDLVKYAESCMYSPIYRNYR

SEQ ID NO: 8656 - protein, 272 aa, Zea mays
  misc_feature (216)..(216): Xaa can be any naturally occurring amino acid
VDPRVREHQPNGPVTPVDMVVDFYKFDYEFGEPPRVTSLHNTVPVATFNDFCDDVYFVADQRGYEAVVYYLAGQYLKTDDKSGKIVDPRLQLNKVVREIKYSPGGVTVKTESDLIQFKPKLPTWKVRAIYQFDMAVYTKILLKFPRKFWPEGKGREFFLYASSRRSYYGVWQEFEKQYPDANVLLVTVTDEESRRIEQQSDEQTKAEIMQLLRMLXQLRATVRTVYTFGEHTSEHYNGYVHGAYLSGIDSAEILINCAQKKMCKYHVQGKYD

SEQ ID NO: 8657 - protein, 170 aa, Triticum aestivum
  misc_feature (69)..(69): Xaa can be any naturally occurring amino acid
  misc_feature (78)..(78): Xaa can be any naturally occurring amino acid
  misc_feature (90)..(90): Xaa can be any naturally occurring amino acid
  misc_feature (101)..(101): Xaa can be any naturally occurring amino acid
  misc_feature (122)..(122): Xaa can be any naturally occurring amino acid
  misc_feature (128)..(128): Xaa can be any naturally occurring amino acid
MAPTVMASSATSVAPFQGLKSTAGLPVSRRSNGASLGSVSNGGRIRCMQVWPIEGIKKFETLSYLPPLXTEALLKQVXYLIRSKWVPCLXEFKQVGFIFRXEHNAPPGYYDGRYWDMWKLPXFGCTDXTQVINEVEESRRIPDAYSASSVRHIASACVAHASTTGSRSEG

SEQ ID NO: 8658 - protein, 83 aa, Triticum aestivum
  misc_feature (42)..(42): Xaa can be any naturally occurring amino acid
MAPTGMGVSATFVAPFQGLKSTVGLPVSRRSNGASLGSVSNXGGRIRCMQVWPIEGIKKFETLSYLPPLSTEGFLKQVDYLIR

SEQ ID NO: 8659 - protein, 368 aa, Malus x domestica
MGKGGQSCNGVVRDAKPVEQENMAAWLVDVNTIKILPFKLPAIGPNDVRIRIKAVGICGSDIHYLKTMKCGDFQVKDPMVIGHECAGIVDKVGSEVKHLVPGDRVAVEPGISCAHCQQCKGGRYNLCPDMKFFATPPVHGSLANQIVHPADLCFKLPENVSLEEGAMCEPLSVGVHACRRANVGPETTVLIVGAGPIGLVSVLAARAFGAPRIVIVDMDDRRLAMAKSLGADGTVKVSTKMEDLDDEVAKIKEAMGSEVDVTFDCVGFNKTMSTGLNATRPGGKVCLVGMGHGVMTVPLTPAAAREVDVVGVFRYKNTWPLCLEFLRSGKIDVKPLITHRFGFTEKEVEEAFATSARGGNAIKVMFTL

SEQ ID NO: 8660 - protein, 217 aa, Sinorhizobium meliloti
MKFFVDTADVKDIRELNDLGLLDGVTTNPSLILKAGRDIVEVTKEICSIVEGPVSAEVTATEYSAMMKEAAALSKIADNICIKLPLTLDGLKACKALTSDGHQTNVTLCFSANQALLAAKAGATFVSPFIGRLDDIAVDGMDLIREIRQIFDNYGYETEILAASVRTVNHVKEAALIGADVVTAPPATLKALVKHPLTDKGLEMFLADWAKTGQKIA

SEQ ID NO: 8661 - protein, 470 aa, Leuconostoc mesenteroides subsp. mesenteroides ATCC 8293
MVSVMWFRRDLRLEDNIALFNALRHSNEILCVFHINPEQVTEKSTVNQSAFFASVLYFKNKLKKQGINLNIMYGDINDCFASLKQKLPDWHDIFFNFDERGFGRNRDQKSVAFFEDKLKVKAHPYIDYNLHGATEVKKDSGAGYKVFTPYFKRWIRQEKPAPVSYVIDKRIKSARLLFPENEQLLETFIDDRFSFIKKDLGSETAKKVLNRFINESLDQYDEERDFPANDSTSHLSRYLRTGEISIRTVWRAIDQSPDSDGKSTFMKELCWRDFYNMIYVMYPNQNVESVNKDFRHVDWINNEQQFEAWRTGQTGFPIVDAAMRQLNATGWMHNRLRMIVASFLTKDLLIDWRWGEAYFHNKLLDYDAASNIGGWQWAASTGTDSVPYFRIFNPTLQSKKFDSNGLFIKKYVPELKNVDNKMIHEPGKLSESEQTRFNVRIGQNYPFPIVDHSYARKRAISIYESSKDVN

SEQ ID NO: 8662 - protein, 277 aa, Thermoanaerobacter tengcongensis MB4
MIQWYPGHMAKAKKEIISNLKLVDVVYEIVDARIPRSSRNPDFDEITKRKKKIMLLNKEDLADERITDLWIKHFKEKGIEAVKVNAITGKGFKELEEKTKEVCKDILEAKVKKGLTPRLRGMILGIPNVGKSTFINTLIGRKKAKTGDKPGVTKSLHWIRTPYLDLLDTPGVLWPKFEDKTTGFMLAITGAIKDEILEMEEVALFLVSILKNRYPDYLINRYKLDKIWEEEIKIIEDIGKKRGCLVSGGEVDFVKASTVLLEDFRKGNLGRISLEEP

SEQ ID NO: 8663 - protein, 277 aa, Staphylococcus aureus subsp. aureus Mu50
MEVKTFYNGNTMPQIGLGTFRVENDENCMESVKYAIEQGYRSIDTAKVYGNEEQVGAGIRAGLESTGIAREDLFITSKLYFEDFGRENVAAAYEASLSRLGLKYLDLYLVHWPGTNEAVMVDTWKGMEDLYKNNKAKNIGVSNFEPEHLEALLAQVSIKPVINQVEYHPYLTQHKLKLYLAAQHIVMESWSPLMNAQILNDETIKDIAQELGKSPAQVVLRWNVQHGVVIIPKSVTPNRISENFQIFDFELSDEQMTRIDGLNQDKRIGPDPKTFEG

SEQ ID NO: 8664 - protein, 327 aa, Triticum aestivum
MASTTAAVPEVALRSGGARPMPAIGMGTATFPVVPETTVKAVLEAVEVGYRHFDTAAMYATERPLGEALAEAVRRGLLASREEVFVTSKLWCTQCHPHLVLPSLRESLQNLQMEYVDLYLIHWPISLKPGPTVFPVKREDAVPFDFEGVWRAMEECHRLGLAKAIGVSNFTTSHLDKLLAAATVPPAVNQVEMNPVWQQRKLREYCAEKGIHVAAYSPLGGQNWSGDGNAVLDSEVLAEIAKARGKTVAQVALRWIYEQGVTPIVKSFSKERLKENLGIFDWGLTDDDLRKIGQIPQKKIVRAETVLFSAEGEFTSADLADMEIVEE

SEQ ID NO: 8665 - protein, 118 aa, Brassica napus
MEFVRFPIVSILDDMREVPEEHNEKSRISPSRAYMRDAKAMAATPADVIEHPSSYVFVVDMPGIRGEDIRVQVENENVLVVSGERQRENKENEGVKYVRMERRMGKFMRKFQLPENAD

SEQ ID NO: 8666 - protein, 181 aa, Zea mays
MASSMLSSAAVVTSPAQATMVAPFTGLKSSASFPVTRKANNDITSITSNGGRVSCMKVWPPIGKKKFETLSYLPDLTDVELAKEVDYLLRNKWIPCVEFELEHGFVYREHGNTPGYYDGRYWTMWKLPLFGCTDSAQVLKEVEECKKEYPGAFIRIIGFDNTRQVQCISFIAYKPPSFTDA

SEQ ID NO: 8667 - protein, 461 aa, Mycobacterium bovis AF2122/97
MTATLTKTLGSLDDFRGTLCVPGDPDYPRVRAIWNGQVAREPALIATCHDACDVRTVLRRPVDAGMVTAVRGGGHNVAGTALCDGGVVIDLSAMRAVSLDPATGRVRVQGGATLADLDHATVPFARVAPAGIVTTTGVGGLTLGGGVGWTTRRFGLSCDNLVAVRLVTAAGDYLSVDDERDPELMWGLRGGGGNFGIVTEFEFATHPFGPVAVAGFVVYRLDDGPAVLRGYRQFAAAAPEEVTTIVVLRHAPPAPWIPVDQRGKPVVMIGAVHTGSIQTGIEALRPVKSLARPVADTVWPTPFLAHQAVLDASNPAGHRYYWKSDYLAELNDEAIDLLVEQTAQLSSPDSLIGIFQLGGAAARGGERSCFPSRHARFMVNYATHWTEAREDDLHRQWTRDAIEALAPYGLGTAYVNFTADDAPMHVETLYSTTEFSRLVTLKNRLDPDNVFRNNHNIRPSA

SEQ ID NO: 8668 - protein, 341 aa, Rubrobacter xylanophilus DSM 9941
MKAFVKTGSRPGEAGVAELPAPRPGPGEVLLRVAACGVCGSDVHAFRSDPGFEWISTPVTLGHEFAGTVEALGPGVERVAPGDRVVAVAIQGCGRCELCLAGLTQLCPDRVAVGLSRDGGMAEYAVMPEGHLVSVPEGLDLTLAALCEPLSVAVRAVDARAGIAPEGKVVVSGPGPIGILCAMVARLRGADVLLTGIGQDAEVRLPAAERAGIRAANLSEASLEEHLRDAFGRPPDVWIESSGSVRALESALESVRAGGTVVVVGIYAERLNLFPTDAVRRELSLLFSYSCNLADYRTALELLASGDLDLGPLISTHRLEEAPDALEAVAAGRTVKAVLVP

SEQ ID NO: 8669 - protein, 380 aa, Exiguobacterium sp. 255-15
MSALLPTYLRHDIELVAGNGSFVQDKAGKNYLDFVMGIAVCNTGHRHPHVEQALQEQLQKLWHTSNLFMSSKQERVAAMLTENSHLSHVFFCNSGTEANEGAFKLIRKWTQKKEILTFSQSFHGRTFAMMGATGQDKIKAGFGEMVPDFKHLTFNDFDSLEMITNQTAAVWLEVIQGEGGVIVAENAWLEALMEKARQYDVKVVIDEVQTGIGRTGSRFAFEQTPLKPDIITVAKGLGSGFPVGAIITTPEATAVFTPGTHGSTFGGNPLAMAAAEATLDVLLNEQQMKQVQQKGLYLMQQLKQLPETMVVDVRGRGLMIGIEFHEPVSSLITALQQAGMLVVSAGPNVIRLLPSLCVTEQELDLAVGKIKTVCQQEVMM

SEQ ID NO: 8670 - protein, 335 aa, Nicotiana tabacum
MVHEKQVIEEVSGWLRVFEDGSVDRTWTGPPEVKFMAEPVPPHDYFIDGVAVKDVVADEKSGSRLRIYLPERNDNSANKLPVILHFHGGGFCVSHADWFMYYTVYTRLARAAKAIIVSVFLPLAPEHRLPAACDAGFAALLWLRDLSRQQGHEPWLNDYADFNRVFLIGDSSGGNIVHQVAVKAGEENLSPMRLAGAIPIHPGFVRSYRSKSELEQEQTPFLTLDMVDKFLGLALPVGSNKDHQITCPMGEAAPAVEELKLPPYLYCVAEKDLIKDTEMEFYEAMKKGEKDVELFINNGVGHSFYLNKIAVRMDPVTGSETEKLCEAVAEFINKH

SEQ ID NO: 8671 - protein, 137 aa, Brassica napus
PSPVMFQEDHDVWNVQLFRSIDGGAAAGFPESPEVAAEAGLVSGKDNVIDRSIQDAYIHAIRRAKDFIYIENQYFLGSSFAWAADGITPEDINALHLIPKELSLKIVDKIEKGERFRVYVVVPMWPEGIPESASVQA

SEQ ID NO: 8672 - protein, 279 aa, Streptococcus pyogenes MGAS8232
MVTTVKMTSGYEIPVLGFGTYQAADGEEAYQSTLAAIKAGYRHIDTAAIYKNEESVGRAIKDSGVLREDLFITTKLWNDAHSYEGAKDALAASLDHLGLDYVDLYLIHWPNPKALRNTWKEANAQAWQYMEEAVEAGLIKSIGVSNFMVHHLEALQETAKITPAINQIRLAPGCYQKEVVDYCKANEILLEAWSPLGQGEIFDNETMQQLANKYDKTVAQVALAWSLAEGFIPLPKSVHDERIKENMAIFDVSLTQEDKKTIRYLSGMSAIPNPDTTSF

SEQ ID NO: 8673 - protein, 169 aa, Stigmatella aurantiaca
MADLSVRRGTGSTPQRTREWDPFQQMQELMNWDPFELANHPWFANRQGPPAFVPAFEVRETKEAYIFKADLPGVDEKDIEVTLTGDRVSVSGKREREKREESERFYAYERSFGSFSRAFTLPEGVDGDNVRADLKNGVLTLTLPKRPEVQPKRIQVASSGTEQKEHIKA

SEQ ID NO: 8674 - protein, 117 aa, Prunus persica
MAYSAMTKLALVVALCMVVSVPIAQAITCGQVSSSLAPCIPYVRGGGAVPPACCNGIRNVNNLARTTPDRQAACNCLKQLSASVPGVNPNNAAALPGKCGVSIPYKISASTNCATVK

SEQ ID NO: 8675 - protein, 342 aa, Triticum aestivum
  misc_feature (294)..(294): Xaa can be any naturally occurring amino acid
MKTLLILTILAMAITISTANMQVDPSGQVQWPQQQLVPQPQQPLSQQPQQAFPQPQQTFPHQPQQQVPQPQQPQQPFLQPQQAFPQQPQQPFPQTQQPQQPFPQQPQQPFPQQPQQPFPQTQQPQQPFPQQPQQPFPQTQQPQQPFPQFQQPHQPFHQPQQQFPQPQQPQQSFPQQQRPFIQPYPQQRLNPCKNILLQQCKPASLVSSLWSIIWPQSDCQVMQQQCCQELAQIPQQLQCAAIHSVVHSIIVQQQQQQQQQQQQQQQQGMHILLPLSQQQQLGQGTLVQGQGIIXQPQQLAQLEAIRSLVLQTLPTMCNVYVPPECSIIRAPFASIVAGIGGQ

SEQ ID NO: 8676 - protein, 175 aa, Glycine max
  misc_feature (101)..(101): Xaa can be any naturally occurring amino acid
  misc_feature (114)..(114): Xaa can be any naturally occurring amino acid
ASSMISSPDATTVNRAGAGMVAPFTGLKSMAGFPTKKTNNDITSIASSGGRVQCMQVWPPDGKKRLETLSYLPHLDDAQLAQEVQYLLRKGCIPCLEFESXHGFAYREHNTSPXYYDGRYWTMCKLPMFGCTDASHVWNELQEANTAYANGFIRIIGFDNARQVHSISCIGYKPP

SEQ ID NO: 8677 - protein, 350 aa, Schizosaccharomyces pombe
MDESLAKDAVFVASSKPSDLTTEVVGPDFNKYDERKKAGGPGITVEELVESYGKIGFQATNLHDAVTIINEMRNWRDPNPPEEKSDRATIFLGYTSNLISSGVREVLRYLVQHKCVDVIVTTAGGVEEDIIKCLGPTYVGDFHLDGKNLRAKGLNRIGNLIVPNDNYCRFEEWIFPILNKMVEEQETLGTHWTPSSFIRRLGKEINDESSVLYWAYKNNIPIYSPALTDGSIGDMLYFHTYKATPRPLVLDIVADIRNMNTHAVRANKSGIIILGGGVVKHHICNANLMRNGAEWSVYINSANEFDGSDAGARPDEAVSWGKIRGDAKKVKVYGEVSLLFPLIVAATFAK

SEQ ID NO: 8678 - protein, 500 aa, Psychrobacter sp. 273-4
MTDSTDLKHMDNAEQTQTAYINGSYLAVDKALSTFDSINPVTGEVLSTIQQTTTEQINDAVIAAQKGQKVWAAMTAIERSRILLNAVAILRERNDELAVLETKDTGKAISETKYVDIVTGADVIEYYAGLAPMIEGRQIPLRDTSFVYTRQEPLGVIAGIGAWNYPIQIAMWKAAPALAAGNAMIFKPSEVTPLSALKLAEIFTEAGLPEGVFNVVQGNYEVGEALTQHPDIAKVSFTGGVPTGKKVMSSAATSSLKDVTLELGGKSPLIIFDDADIDTAADIAMMANFYSTGQVCTNGTRVFIPKALQAKFEQAIQTRVKRIKLGDPMDDSITMGPLVSFPHMDRVLGYIEQGKASGARLLCGGARVTTGSLADGAYVAATVFTDCTDDMSIVREEIFGPVMSILTYETEEEVIRRANDTEYGLAAGVVTADLNRAHRVIAQIEAGICWLNTWGESAAQMPVGGYKHSGIGRENGIQTLEHYTQTKSIQVELGAFESVF

SEQ ID NO: 8679 - protein, 487 aa, Zea mays
  misc_feature (448)..(448): Xaa can be any naturally occurring amino acid
  misc_feature (476)..(476): Xaa can be any naturally occurring amino acid
LKDKYSLGRRLGQGQFGTTHLCVERATGKELACKSILKRKLGSDDDVEDVRREIQIMHHLAGHPSVVGIRGAYEDAVAVHLVMELCGGGELFDRIVRRGHYTERKAAELARVIVGVVEACHSMGVMHRDLKPENFLFADHSEEAALKTIDFGLSIFFRPGQIFTDVVGSPYYVAPEVLKKRYGPEADVWSAGVIIYILLCGVPPFWAENEQGIFEEVLHGRLDFESEPWPSISDGAKDLVRRMLVRDPRKRLTAHEVLRHPWVQVGGVAPDRPLDSAVLSRMKQFSAMNKLKKMALRVIAENLSEDEIAGLREMFKMIDADNSGQITFEELKVGLEKVGANLQESEIYALMQAADVDNNGTIDYGEFIAATLHLNKVEREDHLFAAFQYFDKDGSGYITADELQVACEEFGLGDVQLEDLIGEVDQDNDGRIDYNEFVAMMQKPTVGXSRRRPTCRTASVSGSGRRSGWPRPLCLXLPCCLRVGVDD

SEQ ID NO: 8680 - protein, 130 aa, Triticum aestivum
MDRADPARGRLAVLSSHLLAGVLAVVDSRTGKRYEVKVSEDGTVRATDFKKITTGKDDKGLKTYDPGYLNTAPVRSSICYIDGDEGILRYRGYPIEEVAESSSFVEVAYLLMYGNLPTQSQLAGWESAIS

SEQ ID NO: 8681 - protein, 252 aa, Triticum aestivum
  misc_feature (78)..(78): Xaa can be any naturally occurring amino acid
MMGYQKGVDIEAGTSGGGTGTAAPTRGLYPGMTESPELRWALIRKIYVILSLQLLLTAVVAAVVVKVRAIPHFFVSSXPGLGLYIFLIIFPFIVLCPLYFYRQKHPVNLLLLGVFTVAISFAVGMTCAFTSGKVILEAAILTTVVVFSLTAYTFWAAKRGQDFSFLGPFLFASLIMLLVFGFIQILFPMGKLSHMIYGALAALIFSGYIVYDTDNIIKRYTYDEYVWAAVSLYLDVINLFLALLTLFRAGDS

SEQ ID NO: 8682 - protein, 255 aa, Triticum aestivum
VGREGAMEQGEEDGDWMMEPAAGKKGGAMIDRKKRFSEEQIKSLESMFATQTKLEPRQKLQLARELGLQPRQVAIWFQNKRARWKSKQLERQYAALRDDYDALLSSYDQLKKDKQALLNQLEKLAEMLREPGGAKCGDNAGAAARDDERLAVAGMSMKDEFVDAGGASKLYSASEGCGGSGKLSLFGEEDDDAGLFLRPSLQLPTAHDGGFTASGPAEYQQQSPSSFPFHSSWPSSAAEQTCSSSQWWEFESPSE

SEQ ID NO: 8683 - protein, 250 aa, Zea mays
MVKAYPTVNEDYLKAVDKAKRKLRGLIAEKNCAPLMLRLAWHSAGTFDVATKTWGPFGTMKNPAEQAHGANAGLEIAIRLLEPIKEQFPILSYADFYQLAGVVAVEVTGGPDVPFHPGRQDKPEAPPEGRLPDATQGSDHLRQVFSTQMGLSDQDIVALSGGHTLGRCHKDRSGFEGAWTSNPLIFDNSYFKELLSGEKEGLLQLPSDKALLSDPSFRPLVDKYAADEDAFFADYAEAHLKLSELGFAEA

SEQ ID NO: 8684 - protein, 477 aa, Rubrobacter xylanophilus DSM 9941
MRKTFVLAAASALLTLALPALGLAQEEAPPGNRELSLALDTVWVLVAAVLVLFMQAGFAMLEVGFSRMKNVGSVVAKILANLAIAAVLFWAVGFAVAFGTGNALFGTQGWFLAVPEGAVDEVYAGLAWTQVPLSAKFLFQVAFCAVSLAIVWGTMLERTKFAVYLVFAVVFAGIIYPMVGHWVWGGGWLTELGMQDFAGSTVVHLSGAMAALAGTLLLGPRLGKYDDEGRPVTIPGHNMPLAVLGVLILWIGWYGFNPGSTMAATPQIADIALTTTLAAACGVLGAMAMSYLYRRHVDVGMAGNGAIAALVAITAPCAFVAPWASAIIGFVAGVIMYATLLFVDRIGVDDPLGAIAAHGMGGVWGTLSAGLFTTPELAAVGRPGLLYGGGLYQLGVQALGILAAGGFVFLASLLVFAALKATIGLRVKPEQELNGLDVSEHGVYGYAGFPEHLIATDHPVNGNGGGAPRNAPAEGAA

SEQ ID NO: 8685 - protein, 208 aa, Triticum aestivum
LSLSPQPQPFPSQQPYLQLQPFPQPQLPYPQPQLPYPQPQLPYPQPQPFRPQQLYPQSQPQYSQPQQPISQQQQQQQQQQQKQQQQIPQQQQIPQQPQQIPQQQQIPQQPQQFPQQQFPQQQFPQQQFPQQEFPQQQQFPQQQITQQPQQLPQQQQMPQQPQQFPQQQQFPQQQSPQQQQLSQQQFPQQQQLPQKQFPQPQLIPQQQQ

SEQ ID NO: 8686 - protein, 212 aa, Triticum aestivum
  misc_feature (134)..(134): Xaa can be any naturally occurring amino acid
  misc_feature (148)..(148): Xaa can be any naturally occurring amino acid
  misc_feature (158)..(158): Xaa can be any naturally occurring amino acid
MAPTVMASSATSVAPFQGLKSTAGLPVSRRSNGASLGSVSNGGRIRCMQVWPIEGIKKFETLSYLPPLSTEALLKQVDYLIRSKWVPCLEFSKVGFIFREHNASPGYYDGRYWDNVESLPMFRVEPTPHKVINXVEEVKKEYPDAYVXRIIGFDNMRXVQCVSFIAFKPPGCEGVRQRAKTATHDRPYIKCHLQVLQLLTLLLGFSFLHLIS

SEQ ID NO: 8687 - protein, 416 aa, Escherichia coli
MESKVVVPAQGKKITLQNGKLNVPENPIIPYIEGDGIGVDVTPAMLKVVDAAVEKAYKGERKISWMEIYTGEKSTQVYGQDVWLPAETLDLIREYRVAIKGPLTTPVGGGIRSLNVALRQELDLYICLRPVRYYQGTPSPVKHPELTDMVIFRENSEDIYAGIEWKADSADAEKVIKFLREEMGVKKIRFPEHCGIGIKPCSEEGTKRLVRAAIEYAIANDRDSVTLVHMGNIMKFTEGAFKDWGYQLAREEFGGELIDGGPWLKVKNPNTGKEIVIKDVIADAFLQQILLRPAEYDVIACMNLNGDYISDALAAQVGGIGIAPGANIGDECALFEATHGTAPKYAGQDKVNPGSIILSAEMMLRHMGWTEAADLIVKGMEGAINAKTVTYDFERLMDGAKLLKCSEFGDAIIENM

SEQ ID NO: 8688 - protein, 131 aa, Triticum aestivum
  misc_feature (61)..(61): Xaa can be any naturally occurring amino acid
MAPAVMASSATTVAPFQGLKSTTGLPISRPSGSAGLSNVSNGGRIRCMQVWPIEGIKKFEXTLSYLPPLSKEALLKQVDYLIRSKWVPALSSAKVWASVFRGATTSPRVLTNGRITNVGNFPKVRGTGRQP

SEQ ID NO: 8689 - protein, 243 aa, Lactobacillus gasseri
MKEGELMNNFSQEPERRTIVDVTGLNRFLSRMYGMMTIAVLVSALSAYLTMTVFRTQVMTLFASNPAMTWILLLVPLALTFGISFRATRNPVASFVMLMIMAIVYGVEFSLIAGAYTGRSIASAFVASSTVFITMAVIGTTTKKNLNNLGSYASAALIGLIVAMLINMFLRNPMVSYIFSFIAVIIFTILTAWDAQRMKQIYENYGGQVSVDGLAVAGALALYLDFVNLFLQFLQIFGFSDRN

SEQ ID NO: 8690 - protein, 485 aa, Achromobacter xylosoxidans
MKEIKHFINGAFVGSASGKLFDNVSPANGQVIGRVHEAGRAEVDAAVKAARAALKGPWGKMTVAERAEILHRVADGITARFDEFLEAECLDTGKPKSLASHIDIPRGAANFKVFADLLKNVANETFEMATPDGAGALNYGVRRPKGVIGVISPWNLPLLLMTWKVGPALACGNCVVVKPSEETPLTATLLGEVMQAAGVPAGVYNVVHGFGGDSAGAFLTEHPDVDAYTFTGETGTGETIMRAAAKGVRQVSLELGGKNAGIVFADCDMDKAIEGTLRSAFANCGQVCLGTERVYVERPIFDAFVARLKAGAEALKIGEPNDPEANFGPLISHKHREKVLSYYQQAVDDGATVVTGGGVPEMPAHLAGGAWVQPTIWTGLADDSAVVTEEIFGPCCHIRPFDSEEEAIELANSLPYGLASAIWTENASRAHRVAGQIEAGIVWVNSWFLRDLRTAFGGSKQSGIGREGGVHSLEFYTELKNICVK

SEQ ID NO: 8691 - protein, 263 aa, Triticum aestivum
AAARAGTHAGANAIHDECRKRKLKVSVVAVPKTIDNDIPLMDKTFGFDTAVEEAQRAINSAYIEARSAYHGIGLVKLMGRSSGFIAMHASLSSGQVDVCLIPEVSFALDGEYGVLQHLEQLIKNKGFCVVCVAEAAGQELLQNSGATDASGNTILSDIGVHMQQKIKTHFKGIGVHADIKYIDPTYMVRACRANASDAILCTVLGQNAVHGAFAGFSGITSCICNTHYVYLPVTQVITAPKRVNHKGRMWHRCLTSTGQPDFR

SEQ ID NO: 8692 - protein, 371 aa, Ralstonia metallidurans CH34
MSMTFQMNAGAVRRFAKAMRFGAWLQSITERMTPAPFRLVQIGSAYWQSKALYVAAKLDLATVLGTATLTASALASRVGANEDALGRLMRLLAAMGIFEETAPMVFRNNKLSRCLVSDDPQSVRAMILMHNSETMSRPWFEQLEAGIRSGTPPFQLSHGEDLFDYLDHHADFDQLFSEAMNSVEALAGDGFATDLDWARFDRIIDVGGSRGTKSLAILRRHPRLTALIVDRPQVIEEAQRYWAEHHADGLERLQFQAADLFESLPAAGPKDVYLYSAVLHGFDDPTCVQALLRLREAIGNSGARAAILEIVVPEKGADISSASFDMQMFVGSRGRERTLTEWKAIIQAGGLTLEEVVRLRSLGSILVLRAG

SEQ ID NO: 8693 - protein, 444 aa, Arabidopsis thaliana
MAAETSIRKLPSLSGLRHRRNPLEDNPYFHPSNGFYITPSDVILAQVAYDHSAHSQSRVAYHRAGPRREIMYEPSAVKAAIVTCGGLCPGMNTVIRELVVGLWELYGVREIYGIPAGYRGFYSMKAVKLDPKAVHDWHKKGGTVLATSRGGFHLQKIVDAIHLNGYNQVYIIGGDGTMRGAVEIFKEISLRKLEVGITVIPKTVDNDVGIIDRSFGFQTAVEMAQEAISAAHVEAESAVNGIGLVKLMGRSTGHIALHATLSSRDVDCCLIPEMDFYLEGKGGLFEFLEKRLKERGHAVLVVAEGAGQEMIPRNESQKQERDESGNAVFLDVGVWFKSVLKAWWEREHPDELFTVKYIDPTYMIRAVPANATDNLYCTLLAHSAIHGVMAGYTGFVPGPINGNYAYIPLEEVAQTKNQVNTRDHKWAWVRSVTNQPDFETNVKG

SEQ ID NO: 8694 - protein, 389 aa, Escherichia coli K12
MSDTTILQNSTHVIKPKKSVALSGVPAGNTALCTVGKSGNDLHYRGYDILDLAKHCEFEEVAHLLIHGKLPTRDELAAYKTKLKALRGLPANVRTVLEALPAASHPMDVMRTGVSALGCTLPEKEGHTVSGARDIADKLLASLSSILLYWYHYSHNGERIQPETDDDSIGGHFLHLLHGEKPSQSWEKAMHISLVLYAEHEFNASTFTSRVIAGTGSDMYSAIIGAIGALRGPKHGGANEVSLEIQQRYETPDEAEADIRKRVENKEVVIGFGHPVYTIADPRHQVIKRVAKQLSQEGGSLKMYNIADRLETVMWESKKMFPNLDWFSAVSYNMMGVPTEMFTPLFVIARVTGWAAHIIEQRQDNKIIRPSANYVGPEDRPFVALDKRQ

SEQ ID NO: 8695 - protein, 168 aa, Brassica rapa
FRCVQQGDDENGKTGVSLSKDITDVAGRTVKKHIATLGPLILPLSEKLLFFVTFMGKKLFKDKIKHYYVPDFKLAIDHFCIHAGGRAVIDVLEKNLALAPIDVEASRSTLHRFGNTSSSSIWYELAYIEAKGRMKKGNKVWQIALGSGFKCNSAVWVALNNVKASTNS

SEQ ID NO: 8696 - protein, 339 aa, Populus balsamifera subsp. trichocarpa x Populus deltoides
MPTKEQVGALSKELRDRALVHDYVFKAIDALPVTAHPMTQFATGVMALQVQSEFQKAYEKGIHKSKYWEPTYEDSLSLIARVPIVASYIYRRIYKDGKVIPMNDSLVIGGNFSHMLGFDSPEMQELMRLYVTNHSDHEGGNVSAHTGHLVASALSDPYLSFAAALNGLAGPLHGLANQEVLLWIKSVVEECGENITTEQLKDYVWKTLNSGKVVPGFGHGVLRKTVPRYTCQREFALKHLPDDPLFQLVSKLYEVVPPVLTQLGKVKNPWPNVDAHSGVLLNYYGLTEARYYTVLFGVSRSIGICSQLIWDRALGLPLERPKSVTMELLENHCKKAPAN

SEQ ID NO: 8697 - protein, 168 aa, Brassica oleracea
FRCVQQGDDENGKTGVSLSKDITDVAGRTVKKHIATLGPLILPLSEKLLFSVTFMGKKLFKDKIKHYYVPDFKLAIDHFCIHAGGKAVIDVLEKNLGLAPIDVEASRSTLHRFGNTSSSSIWYELAYIEAKGRMKKGNKVWQIALGSGFKCNSAVWVALNNVKASTNS

SEQ ID NO: 8698 - protein, 442 aa, Sinorhizobium meliloti
MSNRLNTTPNDLSAFWMPFTANRQFKKEPRLFVGAKDMYYTTHDGRTVLDGTAGLWCVNAGHCRPKITEAIREQAGELDYAPAFQLGHPKAFELANRLVDIAPEGMNHVLYTNSGSESVDTALKVALAYHRAKGNGSRFRLIGRERGYHGVNFGGISVGGIVANRKMFGTLLTGVDHLPHTHLPAKNAFSRGEPEHGADLAAELERIVTLHDASTVAAVIVEPVAGSTGVLIPPKGYLQKLREICTKHGILLIFDEVITGYGRLGTPFAAQYFDVKPDIITTAKGLTNGVIPMGAVFVTSEIHDAFMTGPEHLIEFFHGYTYSGNPIASAAALGTLDTYREEGLLTRAAELAPYWEEALHSLKDCPHVIDIRNIGLIGAVELEPIAGEPTKRAFSAFLKAYEKGLLIRTTGDIIALSPPLIIEKRQIDELFDKLRDVLKNNI

SEQ ID NO: 8699 - protein, 160 aa, Thermobifida fusca
MKIYQSELRTLEGEPFRLPQTQLLLIVNVASKCGLTPQYSGLERLQEAYAYRGFSVIGVPCNQFGGQEPGDAQEIRLFCATTYGISFPILEKMEVNGPNRHPLYVELTKARDSQGLAGDVQWNFEKFLVAPGGRVLYRFRPQVEPEDPEIIRAIEENLPN

SEQ ID NO: 8700 - protein, 152 aa, Zea mays
MCRGLPTPAPAPALQFQSQDCSRQQRGTTQAPPGRASESVRACMAAERKAASRPAACGRMRGAEGAKPRGRQAKAARAPPGQGYFTAGLAALFLCLTTLLVFLPLVLPPLPPPPLLLLLVPVGLMAVLLALALVPSDGRAAAAAVASSSCVC

SEQ ID NO: 8701 - protein, 112 aa, Glycine max
MLKILMALLLLSLSFQAYGQFEEWCIADEQTPDDELQRAMEWACGKGGADCSKIQVNQPCYLPNTLKDHASYAFNNYYQRFKNKGGSCYFNSAAITTDLDPSHGSCKYEFVP

SEQ ID NO: 8702 - protein, 286 aa, Populus tomentosa
MALPVVDTEYLKEIEKARRDLRALIAYKNCAPIMLRLAWHDAGTYDKNTKTGGANGSIRNEEECSHGSNNGLKIAIDFCEEVKVKHPKITYADLYQLAGVVAVEVTGGPTIDFVPGRRDSNTCPKEGRLPNAKLGSPHLRDIFYRMGLSDKDIVALSGGHTLGRAHPERSGFDGPWTQEPLKFDNSYFVELLKGQTEGLLKLPTDNALLDDPDFRPYVELYGKDEEAFFRDYAASHKKLSELGFTPRSSVVKVKDSTVLAQSAVGVAVAAAVVILGYLYEVRKKMN

SEQ ID NO: 8703 - protein, 233 aa, Zea mays
SDSDHCHSARYYLKDAVLDGGIPFNKAYGMTAFEYHGTDSRFNRVFNEGMKNHSVIITKKLLDFYTGFEGVSTLVDVGGGVGATLHAITSRHPHISGVNFDLPHVISEAPPFPGVRHVGGDMFASVPAGDAILMKWILHDWSDAHCATLLKNCYDALPENGKVIVVECVLPVNTEATPKAQGVFHVDMIMLAHNPGGKERYEREFRELAKGAGFSGFKATYIYANAWAIEFIK

SEQ ID NO: 8704 - protein, 467 aa, Methanococcus maripaludis S2
MKSENYSKNDLEKWDKEYVWHPFTQMKEYREGKPLLIESGEGIYLIDVDGKKYMDAVSSIWCNFFGHSEKRIADAISKQALNIGHSTQLGCGNVPSAILAKRYVDFSPEQFKKVFFSEDGAEAIEIAVKMAFEYCKLKGFTNKTKFVSVKEGYHGDTVGAMSVGGSELFHGCFEPLLFEGYHASAPYCYRCKYCNFKNTDERNKQGCEMKCLKEMEDLIRTNKDEIFCVILEAGVMGSAGMIPYPKGYIEGVAKICKKLNIILILDEIATFGRLGRAFYSDMDELKELEKPDILCLGKGITGGYLPLALTLATDEIYNAFLGSFDECKQLFHGHTYAGNQIICASAIETLNILEETNICEEIRPNIKLLHENLDKLKEFPCVGDIRKSGYMIGIELVKDKETKEPYEYSYKAGYKVAGRLLEKGIYIRPIGNTLIFVLPLIIKPEEIKLLTEKIYESISELLDEKVL

SEQ ID NO: 8705 - protein, 465 aa, Arabidopsis thaliana
MSFLWDIMPIDKHLSTVPETEGCQQRIETRICALPDDLLLQILPHVPTKEAVATSILSKQWRYVWLMLPKLEFKDEGSESVGWFIKKSLQLHKAPKLDCLIVELGPHCPIDVDVRKWVENAVNRDVKDLDFTLLWSAAPTSFPKSLYTCDTLVCLTLSNQILVDVSSPASLPSLLDLSLHYVVYKDDGSLVRLLSSSPVLKRLSVHSHEDDNLKTFTVKVSSLESLNYDENWLKDEVEDNEVDEVVDNEVEVDDLNGSLVIDSPALKELHLSEVWDYCLIENMSFLDEAFISNVPYPDEKFLRSLSSVKHLFLLFSKSMVACCNAIKFSWLIEFYFFPISLVDWLMPLMFLLQNSPKLKTPTIDNDFECLSLSWNQPSSIPGCLLSHLETFRWRGYGGREDAKKLLMTYILANSKCLKTVEISLLATCNLEETQKELKSMPRISQSSQLLISTKKLWRINERTYL

SEQ ID NO: 8706 - protein, 162 aa, Oryza sativa (japonica cultivar-group)
MVKANVNELHPIQVGLAIRTDDGGGELVVFEFNLCGFDINNPANLRDPASIAHLRGRGVDFGRLPHARIELHRLRSLLLGSGLLQTRPSWATFTGAYHIGYLMKILTGAEVPSGLDAFTAMATATLGEGVYDVKRLAAEVNTASRFSLREIATWLGVVPAVA

SEQ ID NO: 8707 - protein, 490 aa, Glycine max; identical to SEQ ID NO: 233

SEQ ID NO: 8708 - protein, 513 aa, Glycine max
  misc_feature (432)..(432): Xaa can be any naturally occurring amino acid
MIAYLEHFVHGNDTESMPNDDVSALDGAFHFGATAAAGKDFGGMKSVKPRAVIRPALAGDVERAVKEAARTTYLTVAARGNGHSINGQAMAEKGLVLDMRAMEDHFTLLSLDDGSLYVDVSGGALWEDVLKRCVSEFRLAPRSWTDYLGLTVGGTLSNAGVSGQAFRYGPQTANVTELEVVSGKGETLVCSESQNSELFFATLGGLGQFGIITRARVPVQQAPDMVRWIRVVYTEFGDFTRDAEWLVTLREGDGFDYVEGFVFVNSDDPCNGWTTVPVGPNQYFDPVRIPSTAGPVLYCLELALHYRNQDHPSAVDMEVDRLLGRLRFVEGLKFSVDVTYMEFLLRVKRVEEDAKANGIWDAPHPWLNMFVSKSNIAEFDREVFKKILKHGVGGPILVYPLLRSKWDSRHSVVVPDSNIFYIIALLRFIPPXPKGPPTELLVEQNHEIIQLCYNRGFDFKLYLPPYQSKENWMRHYGDKWSRFVERKANFDPLAILAPGQKIFSRIPQPLSIT

SEQ ID NO: 8709 - protein, 475 aa, Oryza sativa (japonica cultivar-group)
MNAAAAAPAPTMNFAAIHSVWHDNFDAESAQLLAVAPRAVHVAVSVQYPGCAVAQAGTSGRKKYGSLTAEKRYDMVKANIDELHPIQVGLAIRANDDDGDSGELVVFEFNLRGFDINNPADLRDPASIAHLRGRGVDFGRLPCAGVEPHRLRLLLLGSGLLQAWPSWATFTGAYHVGYLMKILTGAELPSGLDAFTTMATGTLGEGVYDVKRLAAEVNTACGFSLREIAACIGVVPVAAQHGMVASAGAVSTLQCFKALRERLGQLQGRVRHPTLRRAARPPRRAYINVQYPGCPVPGGEPRPFEQLTAEQRYGVLKANVDALRAIQVGLAIRTGDGGGEAFVFESNLNGFDVGNLDLPRQRDARSIAHLRCEPAASTSPEAAARRRRLATFAVGYHVAYAVKLLTGRDRAPGQLDGFTRLVASIFVRRVYDVKRIAREHEPVHVGALTSLAERLGVFIVYLYDIYIRLGMGCHA

SEQ ID NO: 8710 - protein, 157 aa, Schizosaccharomyces pombe
MAEEEHVDFEGGEAGASLTFPMQCSALRKNGHVVIKGRPCKIVDMSTSKTGKHGHAKVHIVALDIFNGRKYEDMSPSTHNMDVPVVKRDEYQLVNIDDGYLNLMTTDGTTKDDVRLPEGELGNEIEEGFEEGKDLIITVVSAMGEEIALACRDAPSA

SEQ ID NO: 8711 - protein, 262 aa, Bacillus anthracis str. A2012
LVRLGVFKVEEGPELVEAVKSAIKAGYRSIDTAAIYGNEKAVGEGIRAGIEATGISREDLFITSKVWNADQGYEETIAAYEESLKKLELDYLDLYLVHWPVEGKYKDTWRALETLYKEKRVRAIGVSNFQVHHLQDVMKDAEIKPMINQVEYHPRLTQKEVQAFCKEQGIQMEAWSPLMQGQLLDNETLQEIAEKHGKTTAQVILRWDLQNGVITIPKSTKEHRIIANADVFNFELTKEDMEKIDALNQNHRVGPDPDNFDF

SEQ ID NO: 8712 - protein, 375 aa, Pseudomonas syringae pv. syringae B728a
MAEAKVLSGAGLRGQVAGQTALSTVGMAGAGLTYRGYDVRDLAAEARFEEVAYLLLYGELPNQAELSAYMDKLKRLRDLPQALKEVLERIPADTHPMDVMRTGASMLGTLEPERSFDQQRDSTGRLLAAFPAIMCYWYRFSHDGRRIDCTSAEDSIGGHFLHLLLDKAPSELHRKVMDVSLILYAEHEFNASTFTARVCASTLSDLYSCVTAAIGTLRGPLHGGANEAAMEMIQRFASAEEATKGTLGMLERKEKIMGFGHAIYKESDPRNEVIKGWSKKLADEVGDTVLFPVSEAIDKVMWEQKKLFPNADFYHASAYHFMGIPTKLFTPIFVCSRLTGWAAHVFEQRANNRIIRPSAEYIGVEQRAFVPLEQR

SEQ ID NO: 8713 - protein, 1372 aa, Cercospora zeae-maydis
MPTSNGGRTSPASLRSHHVRYASDSNIALRSTIMEQPEGPPELETYDSSGTNSSGNDGDEYAGTQESHSDSDGISSRHFVPGSGQAYAQDEVTPLTNVSTYGWSQPGSSNVSRTTTRGSVGSALPGTPAYEGTGTAMTNGTRRPANTRKESSNIYAPNRGPGSSMRYALNTGTRPRNGFTHMRRRNPNDEYRAQEKAYVQRIRQDGPDNDFQTEPRTPSLDYSFGSEDDEESPTNANYADHDPAEVDTLLYYGQEDLEPSVEELNIPANRERLEWHAMLANVLTGDVVKQEKKRLIGGPEQQGENTLKTEVWIGVRAKTCGRSIAAQKRLVEDGRSKVKQTIESIVAFEIKGEAEVGQSPMQQVQDVVKKIEKIEGLYPPRQAFRAAHPPAASSAYEHTCDAVIAWNNTTELIGTELGILQSWVGNMELDFTTARVRPEGEQHNELFDDSSFIDRILKEDGLKSLQGDKNLLNGVNTVIHKAKATLIANAEAFSDRHLPPYIEELLTLINFPSRLIQEIIRMRLSYAKKMKDAAQQGVMTAEQMILQFQILLQLAVKIKEQYLLIGQPEPGWDLPPCIDDNFDSVVLDALKFYFKMLNWKLMANKNTFKEAEILEQEWDFSNELGRHLDGGDVEVAEQFSSLTSKSMGRLAAPFEKELQRPADEVAGTAEMDKRYKSILDSVRVRQRKIFRFSRILSQRFENATEYNINIDNELYEDFLLALRLSGHFLVETNAESSVPTPGENEKAGGKVYILASPVLKERPKDIQSMLGTCYHAEDSPEDPSNPYVLILRPELPLVWEGDRMDASHSGKETLKVPQTLDLKTGRLRLVADGSLQRLQNANMAFTTATGNFDLTILVEQRANLCRESTKNWQRFAKLHTSSPTHSWTRSPLFALRSKPREGKAKAKNSTHPELLCFCYGIWSAFCHSHGRTTAGGQSHKLTKLALDWVSFICDDCVASDRKTFRWAVVALEFAMVMTRGQNILSISDEEYALLRSKVAGCRSLLISHFDIMGARGTVAAQAEKQRMDAMVGKLRLDIGKLKDDDESSRIVRAQWLDELEKLDQARKDREAERQALGRVLEDSNDADRALTHLSASAGNVHLRWQQGQFVGGGTFGSVYAAINLDSGHLMAVKEIRLQDPKMIPTVVSQIRDEMGVLQVLDHPNVVQYYGIEPHRDKVYIFMEYCSGGSLAGLLEHGRIEDETVVQVYALQLLEGLGYLHEASVVHRDIKPDNILLDHNGVIKFVDFGAAKVIAKQGKTMVADGPTGNGRQRSVQGTPMYMSPEVIKGGKHTGRLGAADIWSLGCVISEMATGSRPWANMDNDFAIMYNIANGNSPQMPTRDQMSDVGLDFLQAMLRTRPCEACVRCGASAT

SEQ ID NO: 8714 - protein, 207 aa, Neurospora crassa
MPCGLGGSKTVQRKLVLLGDGACGKTSLLNVFTRGYFPTVYEPTVFENYVHDIFVDNVHIELSLWDTAGQEEFDRLRSLSYDDTDLIMLCYSVDSKDSLENVESKWQGEIAENCPGVKIVLVALKCDLREATEDEEDGGANEDGAQREKKPMISYDQGLEVARRIKALRYLECSAMRNRGVNEAFTEAARVALSVKKDREESKCVVM

SEQ ID NO: 8715 - protein, 363 aa, Geobacter metallireducens GS-15
MKRKIGILTGGGDCPGLNAVIRGVVKSAIIGRGWEVVGIEDGFDGLLYDRTPRPLGLEDVRGILPRGGTILGTSNRGNPFSYPIEVNGKTVLTDVSDRVVERVKDLGIDAIVAVGGDGSLKIALELMKRGVPVVGVPKTIDNDLMETDVTFGYNTALETATDALDKLHSTAESHHRIMIMEVMGRYAGWIALESGISGGADVILIPEIPFELKAVCNAIEGRRRRGSKFSIVVAAEGAFPRGGTRVVQKKADETMAIERLGGIGNFVAHELTSCLDMDIRVTVLGHLQRGGSPSTFDRCLGSRFGIGAVELIEREQYGEMICLKGRAIRSVPIEKAVRKLKLVDPRGQMVTAAKELGINVGRE

SEQ ID NO: 8716 - protein, 281 aa, Corynebacterium glutamicum ATCC 13032
MNIHLCCCSRLCGRMVATSQFIDDSEAAQAVRAAIVAGYRNIDTALAYGNERGVGEGIRTAGVPREELFISTKLAAEIKDYDGAVAAIDESLAKIGLDYVDLMLIHSPQPWSDFRGGDYSEGNREAWRALEDAYKAGKIRSIGVSNFLEADLENILDSATVAPHVNQLLVHVGNTPSELISFCDSKGILVEAYSPIAHGEMLKNQQVKAIADKYNVSIPQLCIRYTIQLGTVSLPKTANPDHMSSNAQIDFEISEEDMAALQEVTARDYGEHSGFPVYSGK

SEQ ID NO: 8717 - protein, 115 aa, Hordeum vulgare subsp. vulgare
MARAAATQLVLVAMVAAMLLVATDAAISCGQVSSALSPCISYARGNGAKPPVACCSGVKRLAGAAQSTADKQAACKCIKSAAGGLNAGKAAGIPSMCGVSVPYAISASVDCSKIR

SEQ ID NO: 8718 - protein, 344 aa, Zea mays
  misc_feature (298)..(298): Xaa can be any naturally occurring amino acid
MVLESTMICIDNSEWMRNGDYSPSRFQAQADAVNLICGAKTQSNPENTVGVMTMAGKGVRVLVTPTSDLGKILACMHGLEVGAEANLAAAIQVAQLALKHRQNKRQQQRIIVFIGSPVTYDKKVLETIGKKLKKNNVALDVVDFGETDDEKPEKLEALIAAVNSSDSSHIVHVPPGDHALSDVLISTPIFTGEEGGSGFAASAAAAAATGATGYDFGVDPNVDPELALALRLSMEEERARQEAIAKKAAEDNKDQPSSSTDAIMAEAELTLNAPADVDADLLKDDDDAQLLQQALAMXMDEGASGAAAVADAAMAEAAADDQDLALALQMSGQDAEAAGQSDMS

SEQ ID NO: 8719 - protein, 170 aa, Oryza sativa
MAAFLRSKCSSVGRTLMGGLGNNLFGAVNSSVETVSRPSHCDPIFQQIRTFIQMRTNLKVVDNSGAKRVMCIQSLRGKKGARLGDTIIGSVKEAQPRGKVKKGDVVYGVVVRAAMKRGRNDGSEIQFDDNAIVLVNNKGELIGTRVFGPVPHELRKKKHLKILALAEHIV

SEQ ID NO: 8720 - protein, 196 aa, Arabidopsis thaliana
MATALASKLSKGRSLLGGLCNAFSGLMNSSSNGMMNGSILSQQQHRTFIQMGTILKCVDNSCAKEVMCIQSLRGKKGARLGDIIVGSVKEANPIVQKKVKKDAVPKGKVKKGMVVYGVVVRAAMPKGRADGSQVKFDDNAIVVVGIKEKKGQNNSHGSKRKMEYNQPTGTRVFGPVPHEMRLRKQLKILSLAQHIV

SEQ ID NO: 8721 - protein, 309 aa, Candida albicans SC5314
MTSHTHPVKLSRTFKTKSGDELSIGTGTGTKWKKDSKLDEINQELVDQILLAIKLGYRHIDTAEVYNTQAEVGEAIKQSGIPREQLWITTKYNPGWNDIKASSASPQESIDKALKQLGTDYIDLYLIHQPFFTEENTHGYSLIDTWKVLIEAKKQGKIREIGVSNFAIKHLEALKEVSEPEFYPVVNQIESHPFLQDQSKNITKYSQENNILVEAFSPLTPASRLDANPLTEYLEELSKKYNKSLGQLLLRYTLQRGILPITTSAKENRIKESLDVFDFELTKEEFDKITEIGNANPHRVFFHEAFKDL

SEQ ID NO: 8722 - protein, 172 aa, Butyrivibrio fibrisolvens
MESLTTRIKLNNGTAIPMFGYGTYKIKDQNEAYNSVRLALKNGYRHIDTAAFYENEKFVANAIKDFMEESQTKREDIFVTSKAWKTELGYDKTLAAFEKTMNEMQMDYLDLYLVHWPASYAFDDDWENTNRQTWKAMTEIYKSGRVKAIGVSNFLTHHLDTIIDMEVTPAVD

SEQ ID NO: 8723 - protein, 404 aa, Zea mays
MVLEATMICIDNSEWMRNGDYAPSRFQAQADAVNLICGAKTQWVQSNPENTVGVMTMAGKGVRVLVTPTSDLGKILACMHGLEVGAEANLAAAIQVAQLALKHRQNKRQQQRIIAFIGSPVKYDKKILETIGKKLKKNNVALDIVDFGESDDEKPEKLEALIAAVNSSDSSHIVHVPPGENALSDVLLSTPIFTGEEGGSGFAASAAAAVATGASGFEFGVDPNVDPELALALRLSMEEERARQEAIAKKAAEDTSNTENINASSSNSDSVMAEAELASNAAAGDKQEQPKDDDDLLQQALAMSMEGGASGSAAVTDSAMAEAGAVDPDLALALQMSVQDANMSSDADMSKVFEDRTFVSSILNSLPGVDPNDPSVKDLLASLHSQGEQEKKEDKSDKTEDEKN

SEQ ID NO: 8724 - protein, 494 aa, Bacillus cereus G9241
MSQLAVNLHEKVEKFLQGTKKLYVNGFFIESASGKTFNTPNPATGETLAVVSEAGREDIHKAVVAARMAFDEGPWSRMSTAERSRLMYKLADLMEEHKEELAQLETLDNGKPIRETMAADIPLAIEHMRYYAGWATKIVGQTIPVSGDYFNYTRHEAVGVVGQIIPWNFPLLMAMWKMGAALATGCTIVLKPAEQTPLSALYLAELIEEAGFPKGVINIVPGFGESAGQALVNHPLVDKIAFTGSTPVGKQIMRQASETLKRVTLELGGKSPNIILPDADLSRAIPGALSGVMFNQGQVCSAGSRLFVPKKMYDNVMADLVLYSKKLNQGAGLSPETTIGPLVSEEQQKRVMGYIEKGIEEGAEVLCGGSNPFDQGYFVSPTVFADVNDEMTIAKEEIFGPVISAIPFNDIDEVIERANKSQFGLAAGVWTENVKTAHYVASKVRAGTVWVNCYNVFDAASPFGGFKQSGLGREMGSYALNNYTEVKSVWLNLN

SEQ ID NO: 8725 - protein, 192 aa, Zea mays
  misc_feature (92)..(92): Xaa can be any naturally occurring amino acid
HEPTTNPMPPHRAGGAAGGGDTSAFFAATLVLWAVSVGFEIGVRGRRELAPVAAGFAFFQAANTAVRGSVSRDPLFVNTAVSLLHSSLTSVXLHSIFLHVRKVRRMVGFRDFDRTVVKLEWVLNWTTFVTARVICHILITYKLVADAHKFGKGIELPLALLGMAGMNLLNIFLGLDLLKAFTRERNQQNHQD

SEQ ID NO: 8726 - protein, 89 aa, Glycine max
  misc_feature (4)..(4): Xaa can be any naturally occurring amino acid
  misc_feature (14)..(14): Xaa can be any naturally occurring amino acid
  misc_feature (21)..(21): Xaa can be any naturally occurring amino acid
  misc_feature (26)..(26): Xaa can be any naturally occurring amino acid
  misc_feature (28)..(29): Xaa can be any naturally occurring amino acid
  misc_feature (33)..(33): Xaa can be any naturally occurring amino acid
  misc_feature (41)..(41): Xaa can be any naturally occurring amino acid
  misc_feature (46)..(46): Xaa can be any naturally occurring amino acid
  misc_feature (57)..(58): Xaa can be any naturally occurring amino acid
  misc_feature (63)..(63): Xaa can be any naturally occurring amino acid
  misc_feature (66)..(67): Xaa can be any naturally occurring amino acid
  misc_feature (71)..(71): Xaa can be any naturally occurring amino acid
  misc_feature (78)..(78): Xaa can be any naturally occurring amino acid
  misc_feature (80)..(80): Xaa can be any naturally occurring amino acid
ASSXISSPTVTTVXNRADAGXVATIXGXXSMAXFPTRKTNXDITSXASNGGRLQCMXXWPPVXGKXXFETXSYLPDLXDXQLAKEVEYL

SEQ ID NO: 8727 - protein, 341 aa, Mesorhizobium loti MAFF303099
MKAARLYGPGDLRVEDVAPPGIPDPGWVKLRVDAAGICGSDLHNFRTGQWISRSPSTAGHELTGTVTALGEGVDTVAVGDRVVADSRFWCEECVQCRAGRRHLCASLGFVGEVCDGGFAEQVVLPARLLHVVDAALDERVAAMAEPLAVALHAVRRLPKTAGSVLVVGCGPIGGLAALLLSRSFAGTVLVADRNQARCARVARVTGATIVDLDRDAIAAATGYAPLLAAVEATGSIAAFNQLLGVLDSGSAVAMVGIFHGRLDIDPNLLVEREIALLGCHAFADELPDAVRMLGELSEPLLALIDREIGLDDIPAAYERLLAGQSDGLKTIIRMRQPVEPA

SEQ ID NO: 8728 - protein, 174 aa, Zea mays
  misc_feature (127)..(127): Xaa can be any naturally occurring amino acid
MAEAPASPGGGGGSHESGSPRGGGGGGSVREQDRFLPIANISRIMKKAIPANGKIAKDAKETVQECVSEFISFITSEASDKCQREKRKTINGDDLLWAMATLGFEDYIEPLKVYLQKYREMEGDSKXTAKSSDGSIKKDALGHVGASSSAAQGGAYNQGMGYMQPQYHNGDISN

SEQ ID NO: 8729 - protein, 440 aa, Triticum aestivum
  misc_feature (134)..(134): Xaa can be any naturally occurring amino acid
MSTTKVKRRVGKYELGRTIGEGTFAKVRFARNTETGDPVAIKILDKEKLLKHKMVEQIKREIATMKLIKHPNVVRIHEVMGSKTKIYIVLEYVTGGELFDTIVNHGRMREDEARRYFQQLINAVDYCHSRGGVXTRDLKPENLLLDSCGNLKVSDFGLSALSQQLKDDGLLHTTCGTPNYVAPEVLEDQGYDGAMADLWSCGVILFVLLAGYLPFEDSNLMALYKKISDAEFTFPPWTSFPAKRLLTRILDPNPMTRITVQEMLEDEWFKKGYKRAEFDEKYDTTLDDVDAVFNDSEEHHVTEKKEEEPVALNAFELISMSAGLNLGNLFDSEQEFKRETRFTSKSSPKEILRKIEEAAKPLGFDIQKKNYKLRLEKVKAGRKGNLNVATEILRVGPSLHMVEVRKAKGDTLEFHKFYKNLSNTLKDVVWKSDDLQIQPS

SEQ ID NO: 8730 - protein, 371 aa, Methylobacillus flagellatus KT
MLSAHPELKNLFNMGNQANGIQQQSLAAAVFAYAANIDNPAALAPVVKRIVHKHAAVGIKPEHYPIVGQYLIGAIKQVLGEAATDELLAAWGEAYWSLANLLIEEEKSLYASTASTAGALMTLKVARKVFESEHIVSFYLQHPDGRKPGDFLPGQYISVEMQFEQNKRRQLRQYSLSDSSTAPWWRISVKREQEAEKPEGLLSNWLHDEVKVGDLIHATPAFGDFVLDPVISDQPLLLISAGIGITPMLSMLNSVRDLAPQRPVFFAHAARSPAWQSHSLDLQEARYRMTNLQTALFYESLEGAHGSIGGVYQGRMDITDLWPAVLHHADIYLCGPLGFMQAQREQLLQAGVAASHIKREVFGPDLLDHLL

SEQ ID NO: 8731 - protein, 450 aa, Zea mays
  misc_feature (22)..(22): Xaa can be any naturally occurring amino acid
MVGGGGGGPLRRVGKYEVGRTXEGTFAKVKFAQNTETGESVAMKVLDRSSILKNKMAEQIKREISIMKLVRHPNVVRLHEVLASRKKIFIILEFITGGELFDKIIRHGRLSEADARRYFQQLIDGVDFCHKKGVYHRDLKPENLLLDSQGNLKISDFGLSAWPAQGSFLLRTTCGTPNYVAPEVLSHKGYNGALADTWSCGVILYVLLAGYLPFDEVDLTTLYGKIESAEYSFPAWFSGGAKSLIRRILDPNPETRIRIEEIRSDEWFQKNYEPIKEIENEEVNLDDVNAAFDDPEDDNEDAFEDETGPLTLNAFDLIILSQGLNLAALFDRRQDCDKLQNRFLSRNPAKVILSSMEVVAQSMGFKTHIRNYKMRVEGLNADKTSHLSVMVEVFEVAPSIFMVELQRAAGDTSEYNTFVNNYCGKLDDIIWKFPTEKGKSRIPRLSKSHS

SEQ ID NO: 8732 - protein, 570 aa, Zea mays
  misc_feature (120)..(120): Xaa can be any naturally occurring amino acid
  misc_feature (137)..(137): Xaa can be any naturally occurring amino acid
  misc_feature (201)..(201): Xaa can be any naturally occurring amino acid
  misc_feature (238)..(238): Xaa can be any naturally occurring amino acid
  misc_feature (326)..(326): Xaa can be any naturally occurring amino acid
  misc_feature (333)..(333): Xaa can be any naturally occurring amino acid
  misc_feature (343)..(343): Xaa can be any naturally occurring amino acid
  misc_feature (365)..(365): Xaa can be any naturally occurring amino acid
  misc_feature (394)..(394): Xaa can be any naturally occurring amino acid
  misc_feature (492)..(492): Xaa can be any naturally occurring amino acid
  misc_feature (507)..(507): Xaa can be any naturally occurring amino acid
  misc_feature (534)..(534): Xaa can be any naturally occurring amino acid
SRPAGKQKKNEQIHRIARRQSVQATTSALHPVWASASRLVSLHLRGCCSRLPPTNSIPRHGSRRPRSGFSLPCSPPTSVVQGPRRRRGWRGRRYPRRRPGPAPARLAVVDGRTEKRHEVXCSEDGTVRATDFKKITXTGKDDKGLKIYDPGYLNTAPVRSSICYIDGDEGILRYRGYPIEELAESSSFVEVAYLLMYGNLXPTQSQLAGWEFAISQHSAVPQGLLDIIQSMPHDAHPXMGVLASAMSTLSVFHPDANPALQGQDLYKSKQVRDKQIVRVLGKAPTIAAAAYLRLAGRPPVLPLNTLSYSENFLYMLDSLGGGILFXLNPRLAXRTLDILFITXHLKHEMNCSTAAVRHLASSGVXDVFTALSGGVGALYGPLHGGANEAVLKMXNEIGSMENIPDSMVGVKTRKRKISGLGHRVYKNYDPRAKVIRKLADEVFSIVGRDPLIEVAIALEKAALSDEYFIKRKLYPNVDFYSGLIYRAMGIPXNFFPVLFAIPRMGGXLAHWKESLDDPDTKIIRPQQVYTGFWXRHYTPVRERVLSSQSEELGQVATSNATRRRRAGSAL

SEQ ID NO: 8733 - protein, 239 aa, Triticum aestivum
MASLGLPGPSSYHDLCCYGAGIAGNIFAFVLFISPLPTFRRIVRNGSTEQFSATPYIYSLLNCLVCMWYALPFVSYGVVLVATVNTIGAAFQLAYTAVFIAYADAKKRLKVSVLLAGVFCVFGLIVYVSMALFDHKPRRTFVGYLSVASLIFMFASPLSIINLVIRTKSVEYMPFYLSLSMSLMSMSFFAYGALLDDFFIYVPNGIGTVLGVMQLLLYAYYSRKGSRDEARRPLLVTHT

SEQ ID NO: 8734 - protein, 469 aa, Bacillus cereus G9241
MYINGEWITLQEQIEVNNPATKEIFATVPKGGVTEAKQAVDAAHEAFKSWSKLTAADRAVKLKKWFTLIDENKEEIAAIMTREQGKPFAEALGEVNYANSFVEWYAEEGKRVYGEMIPASHPNKRILVMKQPVGVMAAITPWNFPAAMITRKVAPALAAGCTAVVKPASQTPLTALKLAELAHEADIPKGVINIVTGSAKAIADKWMEDGRVRKVSFTGSTEIGKELMASAAQTMKKVSLELGGHAPFIVMNDADLDKAVEAVIGSKFRNAGQTCICTNRVFVQEEVYEAFVEKFQKAVGQLKVGDGFGDGTTVGPLIDENAVSKVQEHIEDAIQKGGTVLYGGQKVAELDGHFIQPTVIGLANDTMLCMNEETFGPVAPVAKFKTVDEVIERANHTPYGLAAYIFTKDISQAFQISEALEYGIIGLNDGLPSVAQAPFGGFKESGIGREGGHFGIEEYLEIKYISLGL

SEQ ID NO: 8735 - protein, 112 aa, Glycine max
  misc_feature (95)..(95): Xaa can be any naturally occurring amino acid
MDVADIASPSGQQEQGHRTVSSEPPKRPAGRTKFHETRHPLYRGVRRRGRVGQWVCEVRVPGIKGSRLWLGTFNTAEMAARAHDAAVLALSGRAXCLNFADSAWRMLPVLAA

SEQ ID NO: 8736 - protein, 343 aa, Triticum aestivum
  misc_feature (134)..(134): Xaa can be any naturally occurring amino acid
  misc_feature (252)..(252): Xaa can be any naturally occurring amino acid
YAAAVVAAVGRVCDRKGVQHPVICSESGRALVSHHSVLIFEAFSATAPASNMMDPATAYLLDELTDDCRSDYRNLMASAVRGDFDTCGLYADQLKRRCAEQFKEGVLGLEHLAAVDGLCEIVARGMGAAEGPRXVHINLSVFTSLPDMWAIEQLFPIIPIQRLQERPAVDGVLSDLTCDSDGKVDQFIGGRSSLPLHELPAHGTRGYYLGMFLGGAYQEALGGLHNLFGGPSVVRVSQSDGPHCFAVTRAAXGPSCADVLRAMQHEPEVMFEVLKQRTADDGATTAALARAFGSMPYLSFDAEEASAMSGAESSGMSSDSEGSAAGAAEDDDEEWEFMRGLTV

SEQ ID NO: 8737 - protein, 216 aa, Schedonorus arundinaceus
MDAAVAASLSLQSGEQEYRTVWSEPPKPRSGRTKFQETRHPVYRGVRRRGRAGQWVCEMRVHGTKGSRLWLGTFDTAEMAARAHDAAALALSGRDACLNFADSAWRMQPVLPAGAGSVCFGGAQEVKDAVAAAVEAFQEEEHHVESTAETAKDEESALSMSSDLSEHDDERWIDGMDAGSYYASLAQGMLVEPPDAGAWREDGEHGGVETSLWSYL

SEQ ID NO: 8738 - protein, 288 aa, Lactobacillus plantarum WCFS1
MTKTPTITLNDGRAIPAIGFGTFQIPDDGSTYQAVKEALVIGYRHIDTAVAYFNEDEVGQAIKDSGIPRDQIWVTSKLWLQDYGFDAASRAIDRSLTKLRLDYIDLYLIHQPYGDVPGAWQAMEAAQKAGKLKSIGVSNMTPTLWQKFVPQFETIPAVNQVEFNPYFQQQPLRQLLAAQDVKLEAWAPLGQGNQALFKEPIIQQLAIKYHKDAGQIILRFEHQEGVIVFPKSVHSARIKSNRDIFDFELTSTEMAQLRALDTGKGHHDPDAPGVSEQLLHAFDVHADD

SEQ ID NO: 8739 - protein, 137 aa, Zea mays
  misc_feature (93)..(93): Xaa can be any naturally occurring amino acid
MTMESPTTAAGGELESYFSLGLTVSHSQKDNAEFPKVLLLLSAYLDKTVQQNEELLDSSKIKESTTIFHGQRVPELSIKLYAERIFKYAKCSXSCFVLALIYMERYLQQPNIYMTSFSVHRLLITSVVVAAKFIDDA

SEQ ID NO: 8740 - protein, 288 aa, Lactobacillus plantarum WCFS1
MMVPTTKLNNGVVMPQLGFGVFQVPDLNECEAAVTAALKAGYRLIDTATAYQNETAVGRAIQKSGLRRDELFVTSKLWVSEFTYERAKQGIDASLQRLGVDYLDLYLLHQPYGDVMGAWRALEEAYHAGKIRAIGVSNFYADQLKNLELTMSVQPAVNQIEVNPWYQQADEVRFNQDEHVRVEAWAPFAEGKHAIFSNPSIQTIAQAHGKTTGQVILRWLLQRGITVIPKSVHPERMAENIAVFDFELTAAEMSAMAELDQGVSQFFDHRDPVTIEQIFGASLRQLHE

SEQ ID NO: 8741 - protein, 166 aa, Zea mays
  misc_feature (44)..(44): Xaa can be any naturally occurring amino acid
  misc_feature (69)..(69): Xaa can be any naturally occurring amino acid
  misc_feature (73)..(73): Xaa can be any naturally occurring amino acid
  misc_feature (81)..(83): Xaa can be any naturally occurring amino acid
  misc_feature (100)..(100): Xaa can be any naturally occurring amino acid
  misc_feature (119)..(119): Xaa can be any naturally occurring amino acid
  misc_feature (136)..(136): Xaa can be any naturally occurring amino acid
  misc_feature (154)..(154): Xaa can be any naturally occurring amino acid
MDRADPARGRLAVLSSHLRGAGAEEATDLERSSISAPAPGPRAXALGVVNGRTVKRHDVKVSEDGTVRXTDFXDDTSWKDXXXLKNYDAGYLSTGPGRSXICYIDGDEGILRYRGYPIXEWLKAGRFGWVDYLLRXGTLPTQNQWEGLGICISXHAAGPQRNGGNK

SEQ ID NO: 8742 - protein, 298 aa, Dechloromonas aromatica RCB
MTQARKKAGETLAVADVVVEVLDARLPQASSNPMIHELRVFRQRPCLKLLNKADLADPEATKAWLAFFDAQPNVKAVAISCKKASDVARIPGLAQKLAPHRNDAVKPLRLMIMGIPNVGKSTLMNALVKKKVAAVGDQPAVTKSQQRIDISNRLTLYDTPGMLWPKIDHPIDGLMLAASHAVGVNAYIDEEVGTWLAEFLLEHYSALLKARYGFATEGMDAVGVIEAIGKKRGCVIKGRGGEIDMERAAAILILDYRSGALGRISLETPELRASRQAELKAAGRLKENPDLATDEGND

SEQ ID NO: 8743 - protein, 173 aa, Arabidopsis thaliana
MAAAFASRLTRGGRSLLGGLNNGGSMNSSNGMMNESILSQQQQRRTFIQMGTVLKVVDNSGAKKVMCIQALKGKKGARLGDTIVASVKEAMPNGKVKKGAVVYGVVVRAAMQRGRVDGSEVRFDDNAVVLVDSKDKNTKTDRQPIGTRVFGPVPHELRKKKHLKILALAQHVA

SEQ ID NO: 8744 - protein, 444 aa, Bacillus subtilis subsp. subtilis str. 168
MSSYLIKPELSSAYPVVSYAKGSYVYDQTGKKYLDGSSGAVTCNIGHGVRDVTEKLKEQLDQVSFAYRSQFTSEPAEQLAALLAQELPGDVNWSFFVNSGSEAIETAMKIAIQYWQEKKQTQKSIFLSRWSSYHGITLGALSLSGFYERRYRFTHLIERYPAISAPHIYRLNHETEEDFVQTAADELDTMIKRIGSQFIAGFVAEPIIGAAGAAITPPPGYYERLSEVCRTHDVLFIADEVMTGLGRTGRMLATEHWDTVPDIAVLGKGLGAGYAPIAAAVVSDSIIETIKQGSGVIMSGHTYSAHPYSAKAALEVLRYVLKHGLIKQSEKKGAVLKKKLDEAASQSGIIGEVRGKGLLLGIEFVADQKTKKVFPPEQAITQLIVSEAKKRGLIVYPSKAGIDSGEGDAVIIAPPFTISDGEMEELISIFSETVAAVEKNLKKD

SEQ ID NO: 8745 - protein, 160 aa, Triticum aestivum
MSDSEEHQFESKADAGASKTYPQQAGTIRKNGYIVIKNRPCKVVEVSTSKTGKHGHAKCHFVAIDIFTGKKLEDIVPSSHNCDVPHVNRTEYQLIDISEDGFVSLLTDNGNTKDDLKLPTDETLLGQIKDGFAEGKDLVVSVMSAMGEEQINALKDIGPK

SEQ ID NO: 8746 - protein, 339 aa, Methanococcus maripaludis S2
MRNTPKICVINGDGIGNEVVPETVRVLNELGDFEFIHAHAGYECFKRCGDAIPENTIEIAKESDCILFGSVTTPKPTELKNKSYRSPILTLRKELDLYANIRPTYNFDNLDFVIIRENTEGLYVKKEYYDEKNEVAIAERIISKFGSSRIVKFAFDYAVQNNRKKVSCIHKANVLRVTDGLFLEVFEEMSKHYEKLGIKSDDYLIDATAMYLIRNPQMFDVLVTTNLFGDILSDEAAGLIGGLGMSPSANIGDKNGLFEPVHGSAPDIAGKGISNPIATILSAAMMLDHLKMNKEAEYIRKAVKKTVECKYLTPDLGGNLKTFEVTEKIIESIRSQMIQ

SEQ ID NO: 8747 - protein, 373 aa, Candida maltosa
MSVKTKTITILPGDHVGTEIVNEAIKVLEAIEAATPYQKIHFDFKHHLIGGAAIDATGVPLPDDALESAKKSDAVLLGAVGGPKWGTGAVRPEQGLLKIRKELNLYANIRPCNFASDSLLELSPLRPEVVKGTNLIIVRELVGGIYFGDREEQEESEDKQTAWDTEKYTVDEVTRITRMAAFMALQHNPPLPIWSLDKANVLASSRLWRRTVDKVISEEFPTLSVQHQLIDSAAMILIQNPTKLNGIIITSNMFGDIISDEASVIPGSLGLLPSASLASLPDTNTAFGLYEPCHGSAPDLPANKVNPIATILSAASMLRLSLDCVKEAEALEEAVKQVLDKGIRTADLRGTSSATEVGDAIVEAVTKILKEKA

SEQ ID NO: 8748 - protein, 143 aa, Brassica napus
TPFRSSEELKLGSPPMDTEGKLPGNFPKGGQGLKKNIFLPLEWSTVPQGPKSLAWVVEALNPPDLRGPFVPGTVWLVVTIPPALKGLPEGFFGTNNQVVVFREGITDHKIPEWLGLLMLSNGHGFQLKLFVLNDKPNLGHTGT

SEQ ID NO: 8749 - protein, 220 aa, Retama raetam
MGKSYPTVSGDYQKAVEKAKKKLRGFIAEKSCAPLILRLAWHSAGTFDVKTKTGGPFGTIKNPAELAHGANNGLDIAVRLLEPIKEQFPILSYADFYQLGGVVAVEITGGPEVPFHPGREDKPEPPPEGRLPDATKGSDHLRDVFGKAMGLSDQDIVALSGGHTIGAAHKERSGFEGPWTSNPLIFDNSYFTELLSGEKEGLLKLPSDTALLSDPVFALC

SEQ ID NO: 8750 - protein, 330 aa, Triticum aestivum
  misc_feature (208)..(208): Xaa can be any naturally occurring amino acid
  misc_feature (241)..(241): Xaa can be any naturally occurring amino acid
  misc_feature (292)..(292): Xaa can be any naturally occurring amino acid
  misc_feature (305)..(305): Xaa can be any naturally occurring amino acid
MGSLDAGAAMEKIRAAGLLRTRGLIGGQWVDAYDGKTIEVQNPATGEVLANVACMGNRETADAITSANTTFYTWSKLTASERSKALRKWHDLLMSHKEELALLMTLEQGKPMKEALGEVNYGASFIEFFAEEAKRVYGDIIPPTLADRRLLVLKQPIGVVGAITPWNFPLAMITRKVGPALACGCTVVVKPSEFTPLTALAAADLALXAGIPAGALNVVMGNAPEIGDELMQSTQVRKIAXTGSTAVGKKLMAGSANTVKKVSLELGGNAPCIVFDDADIDVARKGSLAAQXRTGEQTFVCSTRXLVQKGILQKIRKVFWQSVVQNLKFG

SEQ ID NO: 8751 - protein, 157 aa, Glycine max
MEPMDIVGKSKEDASLPKATMTKIIKEMLPPDVRVARDAQDLLIECCVEFINLVSSESNEVCNREDKRTIAPEHVLKALQVLGFGEYVEEVYAAYEQHKLETMQDSLRGGGKWSNGAEMTEEEALAEQQRMFAEARARMNGGAIASKQPDADQSLDS

SEQ ID NO: 8752 - protein, 92 aa, Glycine max
  misc_feature (38)..(38): Xaa can be any naturally occurring amino acid
MSLSSIARRLCCSRQSSTSRLSVVLARLHSTEAAKDTXAKRYKYPEVYDPYGPMPPASEKVVGLADRIAALPPEEIKQIAPALLLRLNQPAP

SEQ ID NO: 8753 - protein, 319 aa, Ralstonia solanacearum
MTQLDQLKQFTTVVADTGDFQAMRAYAPHDATTNPSLILKAVQKAEYRPLLEQAVRDARSDSVEDIIDAVLVAFGCEILSIIPGRVSTEVDARLSFDTAATVAKARHLIALYEARGVPRERVLIKIASTWEGIRAADQLRAEGIRCNMTLLFSLIQAVACAEAGVQLISPFVGRIYDWYKKDAGAAWDPIAQGGANDPGVQSVVRIYNYYKRFGYTTEVMGASFRNTSQIIELAGCDLLTISPELLAQLQQSDAPVERKLSPEHAHATNLVRLPADEAAFRWHMNADAMATEKLAEGIRLFAADAVKLEGLIGPLRAAA

SEQ ID NO: 8754 - protein, 294 aa, Saccharomyces cerevisiae
TTPLVHVASVEKGRSYEDFQKVYNAIALKLREDDEYDNYIGYGPVLVRLAWHTSGTWDKHDNTGGSYGGTYRFKKEFNDPSNAGLQNGFKFLEPIHKEFPWISSGDLFSLGGVTAVQEMQGPKIPWRCGRVDTPEDTTPDNGRLPDADKDADYVRTFFQRLNMNDREVVALMGAHALGKTHLKNSGYEGPWGAANNVFTNEFYLNLLNEDWKLEKNDANNEQWDSKSGYMMLPTDYSLIQDPKYLSIVKEYANDQDKFFKDFSKAFEKLLEDGITFPKDAPSPFIFKTLEEQGL

SEQ ID NO: 8755 - protein, 105 aa, Zea mays
AVDKAQPNPRLCFLLRAALHLHWLLLVTSKNNKALQMSVQDANMSSDTDMSKVFEDRTFVSSILNSLPGVDPNDPSVKDLLASLHSQGEQEKKEDTSDKTEDEKN

SEQ ID NO: 8756 - protein, 121 aa, Glycine max
  misc_feature (6)..(6): Xaa can be any naturally occurring amino acid
  misc_feature (75)..(75): Xaa can be any naturally occurring amino acid
  misc_feature (106)..(106): Xaa can be any naturally occurring amino acid
  misc_feature (117)..(117): Xaa can be any naturally occurring amino acid
KPIDIXGKAKEDASLPKATITKIIKEILPPNIHITRDTQDLLIKYYIKFINLISSESNKVYNKEEKRTITPKHIXRTVKILKFSEYIREGDTAYEQHKVKTMQHSXKDAEKNNRPEXTEEE

SEQ ID NO: 8757 - protein, 323 aa, Aspergillus nidulans FGSC A4
MADQDVDLDSIIDRLLEVRGSRPGKQVQLLESEIRYLCTKAREIFISQPILLELEAPIKICGDIHGQYYDLLRLFEYGGFPPEANYLFLGDYVDRGKQSLETICLLLAYKIKYPENFFVLRGNHECASINRIYGFYDECKRRYNIKLWKTFTDCFNCLPIAAIIDEKIFTMHGGLSPDLNSMEQIRRVMRPTDIPDCGLLCDLLWSDPDKDITGWSENDRGVSFTFGPDVVSRFLQKHDMDLICRAHQVVEDGYEFFSKRQLVTLFSAPNYCGEFDNAGAMMSVDESLLCSFQILKPAEKKQKYVYGAMSSGRPITPPRKQKK

SEQ ID NO: 8758 - protein, 216 aa, Daucus carota
MAAPPARPRADYDYLIKLLLIGDSGVGKSCLLLRFSDGSFTTSFITTIGIDFKIRTIEMDGKRIKLQIWDTAGQERFRTITTAYYRGAMGILLVYDVTDESSFNNIRNWIRNIEQHASDNVNKILVGNKADMDESKRAVPTSKGQALADEYGIKFFEASAKTNMNVEEVFFSIAKDIKQRLAETDSKTEPQTIKINQQEQGAGTSAASQKSACCGS

SEQ ID NO: 8759 - protein, 168 aa, Avena clauda
VMASSATSVAPFQGLKSTAGLPVSRRSASSLGSVSNGGRIRCMQVWPTEGIKKFETLSYLPPLSEEALLKQIDFLIRSKWVPCLEFSKVGFIFREHGSTPGYYDGRYWTMWKLPMFGCTDASQVIKEVEEVKKEYPDAYVRIIGFDNIRQVQCVSFIAFKPPGCEESG

SEQ ID NO: 8760 - protein, 459 aa, Mesorhizobium loti MAFF303099
MLNQSNELNAWDRDHFFHPSTHMGTHARGESPTRIMAGGEGVTVWDNNGRKSIDAFAGLYCVNVGYGRQKIADAIATQAKNLAYYHAYVGHGTEASITLAKMIIDRAPKGMSRVYFGLSGSDANETNIKLIWYYNNVLGRPEKKKIISRWRGYHGSGVMTGSLTGLDLFHNAFDLPRAPVLHTEAPYYFRRTDRSMSEEQFSQHCADKLEEMILAEGPETIAAFIGEPILGTGGIVPPPAGYWEKIQAVLKKYDVLLVADEVVTGFGRLGTMFGSDHYGIKPDLITIAKGLTSAYAPLSGVIVADRVWQVLVQGSDKLGSLGHGWTYSAHPICVAAGVANLELIDEMDLVTNAGETGAYFRAELAKAVGGHKNVGEVRGDGMLAAVEFVADKDDRVFFDASQKIGPQVATALAASGVIGRAMPQGDILGFAPPLCLTREQADIVVSKTADAVKSVFANL

SEQ ID NO: 8761 - protein, 362 aa, Zygosaccharomyces bailii
MSKNIVVLPGDHVGQEIAQEAIKVLEAISEVSPKAKFNFQHHLIGGSAIDATGSPLPDEALAAAKKADAVLLGAVGGPKWGTGAVRPEQGLLKIRKELQLYANLRPCNFASESLLELSPLKPQHARGTDFIVVRELVGGIYFGQRKEDDGDGVAWDSERYTKPEVQRITRMAAFLALQHNPPLPIWSLDKANVLASSRLWRKTVEETIKNEFPQLTVKHQLIDSAAMILIKNPTQLNGIIITSNMFEDIISDEASVIPGSLGLLPSASLASLPDTNEAFGLYEPCHGSAPDLPKGKVNPVAMILSAAMMLKLSLNMAKEGEALETAVKQVLDSGVRTGDLGGSNSTSEVGDAIAKAVKQILA

SEQ ID NO: 8762 - protein, 168 aa, Avena clauda
VMASSATSVAPFQGLKSTAGLPVSRRSASSLGSVSNGGRIRCMQVWPIEGIKKFETLSYLPPLSEEALLKQIDFLIRSKWVPCLEFSKVGFIFREHGSTPGYYDGRYWTMWKLPMFGCTDASQVIKEVEEVKKEYPDAYVRIIGFDNIRQVQCVSFIAFKPPGCEESG

SEQ ID NO: 8763 - protein, 497 aa, Mesorhizobium loti MAFF303099
MSAHFARSHRHEALDRLADRRLLRELAYVDGHWTASEAAESFEVTDPATGSTVAFVAALDARQTTQAIDAAALAFPAWRSLLPQERSRILRKWFELIITAKDDLALLMTLEQGKPLQESLGEIDYAASFVEWYAEEAKRLNAESVTSHLANAEMMVRREPLGVVGIVTPWNFPSAMLTRKAAAALAAGCTIVAHPSSETPLSALALAELGERAGLPAGVFNIVTGKAATIVGRMCEDTRVRAMSFTGSTEIGRLIAAQSAPTMKRLVMELGGHAPLIVFADADLDKAVSIAIDAKFATSGQDCLAANRIYVQRPIHDRFCAAFAKRIEALRTGNGLDDMTDIGPLLHERAVQKVEEQVADALAHGARCLAGGKRHQAGPLFYQPTLLADVSDAALIMREETFGPVAAVTPFDSEDEVIARANATEYGLVAYVVTDNGARQQRMGRALDYGMVAINRVKITGAPIPFGGVKQSGIGREGSRHGLEAFTDLKYLCLDVA

SEQ ID NO: 8764 - protein, 121 aa, Prunus persica
VEACKNSLKKLQLDYLDLYLVHYPLATKHSGVGTTASLLDENKVLDIDVTVSLETTWHDMEKTVSLGLVRSIGLSNYELFLTRDCLSYAKIKPQVSQFETHPYFQRESLVRFCKKHGVVPM

SEQ ID NO: 8765 - protein, 44 aa, Triticum aestivum
MDTAVSTLTALAIFASTVEHAAYRSVHGYRVVGRKRGGWVRWER

SEQ ID NO: 8766 - protein, 243 aa, Aegilops tauschii
MKTLLILTILAMAITIGTANMQVDPSSQVQWPQQQPVPQPHQPFSQQPQQTFPQPQQTFPHQPQQQFPQPQQPQQQFLQPQQPFPQQPQQPYPQQPQQPFPQTQQPQQLFPQSQQPQQQFSQPQQQFPQPQQPQQSFPQQQPPFIQPSLQQQVNPCKNFLLQQCKPVSLVSSLWSMIWPQSDCQVMRQQCCQQLAQIPQQLQCAAIHTVIHSIIMQQEQQEQQQGMHILLPLYQQQQVGQGTL

SEQ ID NO: 8767 - protein, 168 aa, Avena maroccana
VMASSATSVAPFQGLKSTAGLPVSRRSNAGLGSVSNGGRIRCMQVWPIEGIKKFETLSYLPPLSEEALLKQIDFLIRSKWVPCLEFSKVGFIFREHGSTPGYYDGRYWTMWKLPMFGCTDASQVIKEVEEVKKEYPDAYVRIIGFDNIRQVQCVSFIAFKPPGCEESG

SEQ ID NO: 8768 - protein, 243 aa, Aegilops tauschii
MKTLLILTILAMAITIGTANMQVDPSGQVQWPQQQPVPQPHQPFSQQPQQTFPQPQQTFPHQPQQQFPQPQQPQQQFLQPQQPFPQQQQQPYPQQPQQPFPQTQQPQQLFPQSQQPQQQFPQPQQQFPQAQQPQQSFPQQQPPFIQPSLQQQVNPCKNFLLQQCKPVSLVSSLWSMIWPQSDCQVMRQQCCQQLAQIPQQLQCAAIHTVIHSIIMQQEQQEQQQGMPILLPLYQQQQVGQGTL

SEQ ID NO: 8769 - protein, 207 aa, Daucus carota
MERADQQARGFQGYRKIHQQQQLPASGTASTGTDNNPAAGDQDCLVREQDRFMPIANVIRLMRKSIPSHAKISDDAKELVQESVSEFISFVTSEANYRCQKEQRKTITAEDVLWAMSSLGFDDYVEPLTFYLDRFREADGGERSALRGEPLVRRSGEHGAPGIPPTFAPGYYMGPHNALLGAVTMGSFVNDVHNAGPSGAGVNTLDP

SEQ ID NO: 8770 - protein, 199 aa, Aegilops tauschii
PQPHQPFSQQPQQTFPQPQQTFPHQPQQQFPQPQQPQQQFLQPQQPQQPYPQEPQQPFPQTQQPQQLFPQSQQPQQQFPQPQQQFPQPQQPQQSFPQQQPPFIQPSLQQQVNPCKNFLLQQCKPVSLVSSLWSMIWPQSDCQVMRQQCCQQLAQIPQQLQCAAIHTVIHSIIMQQEQQQGMHILLPLYQQQQVGQGTLV

SEQ ID NO: 8771 - protein, 200 aa, Triticum aestivum
DIMEQEVGVLLSRLRYIQSTLFHTHVTYLEFLDRVHSSELKLRAQGLWEVPHPWLNLLIPRSTIHRFATEVFGNILKDSNNGPILLYPVNRSKWDNRTSVVIPEEEIFYLVGFLSSAPSASGHGSVDHAVSLNDKILDFCDKAGVGMKQYLAPYTTQQQWKAHFGARWETFERRKHMYDPLAILAPGQRIFAKASLPMSS

SEQ ID NO: 8772 - protein, 304 aa, Glycine max
  misc_feature (211)..(211): Xaa can be any naturally occurring amino acid
MALNYNIALAFSTVLTLLLLPLPTLGELVQEQPLVLKYHNGQLLKGRITVNLIWYGTFTPIQRSIIVDFINSLSSAPNAPLPSTATWWKTTEKYKGGGSSALVVGKQFLHSAYSLGKNLKGKDVLALASKFNELKSITVVLTAKDVAVEGFCMSRCGTHGSTRNVKNAARTAYIWVGNSETQCPGQCAWPFHQPIYGPQTPPLVAPNGDVXGVDGMVINLATLLAGTVTNPFNNGYFQGPPTAPLEAVSACTGVFGSGSYPGYPGRVLVDKATGASYNAHGANGRRYLVPAMWDPQTSTCKTLV

SEQ ID NO: 8773 - protein, 222 aa, Zea mays
  misc_feature (103)..(103): Xaa can be any naturally occurring amino acid
MDWAYYGSGYSTPASGGGGGDEDAYMTVSSAPPKRRAGRTKFKETRHPVYKGVRSRNPGRWVCEVREPHGRQRIWLGTFETAEMAARAHDVAALALRGRAACXNFADWARKLRVRAQGAGHDEIRRAAVEAAELFRPQPGERNVGGSEAAAEAAAAAPCAMGSGDLGGGEFPYYPVDDGLEFEMRGYLDMAQGMLIDPPQPAAGQSAWIEDEYECEVSLWSY

SEQ ID NO: 8774 - protein, 476 aa, Lycopersicon esculentum
FYNFSKKLQGMAKTNGFMGHDMLAPFTAAWMIDMGPLVIDKAEGSYVYDVNGKKYLDSLSGLWCSVLGGSEPRLIEAANKQLNKLAFYHSFWNRTTKPSLDLAKELINMFTANKMGKVFFTSSGSEANDTQVKLVWYYNNAIGRPNKKKIISRKNAYHGSTYMTAGLSGLPSLHLKFDLPPPYILHTDCPHYWNYHLPGETEEEYSTRLANNLENLILKEGPETVAAFIAEPVMGGAGVIIPPATYFEKIQAVLKKYDILFIADEVICGFGRLGTMFGCDKYNIKPDLVSIAKALSGGYIPIGAVLVSEEISKVIMSQSNQLGVFCHGFTYSGHPVACAVALEALKIYKEKNITEVVNKLSPKFQEGLKAFIDSPIIGEIRGTGLVLSTEFVDNKSPNDPFPPEWGVGTYFGSQCQKHGMLVSFSGDHVNMAPPFTLSLEELDEMISIYGKALKDTEKKKKKKKKKKKKKKKKKKK

SEQ ID NO: 8775 - protein, 166 aa, Burkholderia cepacia R1808
MWLTGVSGAGKSTLASLLKLQLDALGHRTYLLDGDTLREGLNRDLGFSDADRRENIRRTAEVARLMTDAGFIVIAALISPFADARAQARARFAPGTFVEVFVDVALEVAEARDPKGLYVLARRGTIQQFTGIGSPYEQPESPEVHVRTAEASPDACVAEIMRQLPL

SEQ ID NO: 8776 - protein, 401 aa, Triticum aestivum
MVLESTMICIDNSEWMRNGDYSPSRFQAQADAVNLICGAKTQSNPENTVGVMTMAGKGVRVLVTPTSDLGKILACMHGLEVGAEANLAAAIQVAQLALKHRQNKRQQQRIIVFIGSPVTYDKKVLETIGKKLKKNNVALDVVDFGETDDEKPEKLEALIAAVNSSDSSHIVHVPPGDHALSDVLISTPIFTGEEGGSGFAASAAAAAATGATGYDFGVDPNVDPELALALRLSMEEERARQEAIAKKAAEDNKDQASSSTDAIMAEAELTLNAPADVDADLLKDDDDAQLLQQALAMSMDEGASGAAAVADAAMAEAAADDQDLALALQMSVQDAEVAGQSDMSKVFEDRSFVTSILNSLPGVDPNDPSVKDLLASLHGQGEQEEKKDKEDKPDKPEDGKN

SEQ ID NO: 8777 - protein, 378 aa, Sulfolobus tokodaii str. 7
MSVEVSRGLENVIIKTTGLTYIDGINGILRYRGYDINDLVNYASYEELIHLMLYGELPNRQQLNQIKGIINESFEVPEQVISTIFSMPRNCDAIGMMETAFGILASIYDPKWNRATNKELAVQIIAKTATITANIYRAKEGLKPKIPEPSESYAESFLAATFGKKPTQEEIKAMDASLILYTDHEVPASTTAALVASSTLSDMYSCIVAALAALKGPLHGGAAEEAFKQFVEIGSVENADKWFEEKIIKGKSRLMGFGHRVYKTYDPRAKIFKTLAKSFAEKNENVKKYYEIAERIEKLGVDTFGSKHIYPNTDFYSGIVFYALGFPIYMFTSLFALSRVLGWLAHIIEYVEEQHRLIRPRALYIGPEKREFKPIELR

SEQ ID NO: 8778 - protein, 140 aa, Zea mays
  misc_feature (37)..(37): Xaa can be any naturally occurring amino acid
  misc_feature (64)..(64): Xaa can be any naturally occurring amino acid
  misc_feature (80)..(80): Xaa can be any naturally occurring amino acid
SLPKESDASARRTRRGSGTSLSGRPPRTCGSDFSYRXLVESRHQRVAECRSRLARLILEQALHXVAGGLLLLLTMTNVAXENLLVELSMDAGFLAMELIQLRRMRTMSELLRFYTSLTSIAVCIHHVTCIMRSRVVTCRI

SEQ ID NO: 8779 - protein, 286 aa, Leuconostoc mesenteroides subsp. mesenteroides ATCC 8293
MSLVDTYKLTNGIEIPIIGFGTWQSANGTEAYQSVRWALEAGYRHIDTAAVYGNEDSVGRAIKDSGIPRDELFVTTKLWNDAHTYERAIQALDTSLSKLGLDYVDLYLIHWPNPAALQKQGKDAWIDANADTWRALEDEYKIGKTTAIGVSNFQIEHLEALAKTQTIAPMVNQNFLNPSDNQQELVDYDKDHGMLNEAYSPLGTGKLVDLPQVVSLSEKYNKSVPQILIRWSLDKGFLPLPKSTHETYIKANADVFDFALTSAEIESLDSLTGVGGFHTDASSADF

SEQ ID NO: 8780 - protein, 196 aa, Triticum aestivum
MEGGDARNGLTGTSQTTGSGVESPAKPLPPCCVKARAAAPESEAKCHATVVSGWFTETRSRCGKASKLQYYNNPMWPGETHSLKVDKILYQGKSPYQEVLIFESLTYGKVLVLDGIVQLTDKDECAYQEMITHLPLCSIPSPKKVLVIGGGDGGVLREIARHGSVESIDICEIDQLVIDVCKDFFPDLSVGFEDPR

SEQ ID NO: 8781 - protein, 130 aa, Glycine max
MAYGRSRASSVLDGFTLNPLPYPVLLILSLIFIFLGVSWYFSYEEVVETAEQQLGWLLFCTPVVLILIVRWLSSMENPYWFFSASLPGERRGRTHQGLSEGSSPWGVAALILVLLIMVQYQSNFLDSWFV

SEQ ID NO: 8782 - protein, 497 aa, Geobacillus thermoleovorans
MTMISAQTTEADLWIDGEWRPAASGERFDVIDPATGEVTARVANAGEDDVDAAVAIAEEAFSVRRWLAISPLERGRILRRIAELIRQHHCELAQLMTRENGMPINLALFIEIPLADCFDFFASLVVKPQGEVLPFSVAGSAPDYMAWTMKEPIGVAGLITPWNFPLLMPTWKIAPALAAGCTMVVKPAPETPLTALKLAEICHEAGVPEGVINVLPGLDEAGKALVRHPRVPKIAFTGETETGRHILQAAAPHIKRVTLELGGKSPNIIFADADLEQAAKSALFGVFYNSGQVCQAGSRILVERTVYEPFVERLAERAKKLKVGPGTNPRSDLGPVISREQYEKVLRYIEIGKQEGARLAAGGRALDGGGGGYFIEPTVFADVSPSMRIACEEIFGPVAAVIPFADEEEAVRIANGTMYGLAAAVWTNDIKRALRLARRVKSGTVWLNTYQVLSPTVPFGGYKQSGLGRELGMQALDAYLETKTVICDLNDRPMTLF

SEQ ID NO: 8783 - protein, 48 aa, Zea mays
IAIILAIILPPLGVFLKFGCGVGFWICLILTFLGYFPGLIYAAWAITK

SEQ ID NO: 8784 - protein, 129 aa, Brassica napus
EVGLDNGKVYKHGKCWEDICYAVSEAHHMIYIVGWSVFHKVRLVREPTRKLPRGGDLTLGELLKYKSEEGVRVLLLVWDDKTSHDKFGISTPGVMGTHDEETRKFFKHSSVICVLSPRYASSKLGLFKT

SEQ ID NO: 8785 - protein, 142 aa, Thermotoga maritima
MLLGRREDIFRPFRELQREIDRLFDDFFRTEVRPAPDMDVFETDDEVVIEVEIPGIDRKDVQITVEENILKISGEKKLEREQKGKNYYYVERSAGKFERAIRLPDYVDVEKIKAEYKNGVLTIRVPKKEERKKKVIEVEVQE

SEQ ID NO: 8786 - protein, 141 aa, Brassica napus
MGEAVEIMFGNGFPEIHKDTSPIQTLLSNQQDCHWYEETIDDDLKWSFALNSVLHTGTSEYQEIALLDTKHFGKVLVIDGKMQSAERDEFIYHECLIHPALLFHPNPKTVFIMGGGEGSAAREILKHKTIEKVVMCDIDQE

SEQ ID NO: 8787 - protein, 159 aa, Zea mays
MADLFQEVFNPTNMDGAMKSMTSTGAGNYGRIMQMEKYWHVEFFSIAESTVIQVVLLVAVGDLKGTTVQIMSRSLEGKLTVCSCMFQEKGNDATISNASADGTMDESRTRRTIIFSPKICNNVDLLVGNIIHIFPPWKEVKIQEEHVIICTYFSHHHRT

SEQ ID NO: 8788 - protein, 203 aa, Glycine max
  misc_feature (146)..(146): Xaa can be any naturally occurring amino acid
  misc_feature (154)..(154): Xaa can be any naturally occurring amino acid
  misc_feature (172)..(172): Xaa can be any naturally occurring amino acid
MLTAGEYSNHSRPLQPETSLAELNLPRVLCVLSSMLEKLVARNEKLVDILSQQLDGLNCGSVRLGNSLNTFHGVRAPSISIPKYLERIYKYTNCSPSCFVVGYVYIDRLTHRHPDSLVTSLNVHRLLVTSVMVASKMLDDEHYNNXIYARVGGXVSNAELNKLELELLFPVXIFRVMVSSRVFESYCFHLEKEVGCQWHGHED

SEQ ID NO: 8789 - protein, 484 aa, Erwinia carotovora subsp. atroseptica SCRI1043
MSGNHLQDHELFKTGYFVAGKWQQGAATFEVVNPATGESIARVAKAGKKETQAAIDAAHAAFPAWKRKTAKERSEILYRWYELILENKRYLAELMTAEQGKPVQEAEGEVVYAANFIQWFAEQGKRVNGEIIPPAKPGSKIYATREPVGVVVAITPWNFPLAMLTRKLGPALAAGCTGVIKPANNTPLSAFALLALAQQAGVPDGVLNGVAGDTQAISDTVMASDKVRKISFTGSTAVGKTLVRNAADTMKKVSMELGGNAPYIVFDDADIQAAVKGAIANRFRNAGQVCVSANRFYIQDGVYDEFVSLLAEEVKKLKVGNGMDDGVVLGPLIDEAAVEKVEKHVNDAVEKGGKALVGGKRHKLGHSFFEPTVIVDANEAMLLAQEETFGPVAPCFRFKTEEEVIQRANNTPFGLAAYFYSQNLQRVFRVAEALESGMIGINECAVSTELAPFGGVKESGLGREGSVLGLDEFLEVKTWHVGGL

SEQ ID NO: 8790 - protein, 281 aa, Zea mays
  misc_feature (103)..(103): Xaa can be any naturally occurring amino acid
  misc_feature (128)..(128): Xaa can be any naturally occurring amino acid
MEAMPRPSVAPSLQLQARPCPRWPRRKHCPPSSVASRRVACSASAADADVVDLFDAAKLTVDKFVTSGMVVGLGSGPASALAIQYLATRLRRGSLAGITAVTXPRSVLSASEADKAGIRANSYQEGTXIDFAFTDAEAIEEGTLAAVIGRRKTESGEPSFMAEKAMAKSAHKLAFITGNDKYVTTGVEGSIPVLIKKVWRRPSFGTAGPLGGDHPLVTKEGHHVLDVIFTTPIQDLGQVAEKLDKVDGVVDHGIICSNQPYAVIASKGEVQVLDEKSSVIQ

SEQ ID NO: 8791 - protein, 290 aa, Triticum aestivum
NKFVQKSRLVPVRNSRDIVDPRVRTGSTKVGQMVQQQVSARFGKCLLELSGNNAIIVMDDADIPLAVRSVLFAAVGTAGQRCTTCRRLLLHESIYQTFLDQLVEVYKQVRIGDPMEKGTLLGPLHTTASKESFLKGIQNIRSQGGKILLGGSAIESEGNFVQPTIVEISPAAPVVREELFGPVLYAMKFQTLKEAIEINNSVPQGLSSSIFTRKPDAIFKWIGPHGSDCGIVNVNIPTNGAEIGGAFGGEKATGGGREAGSDSWKQYMRRATCTINYGSELPLAQGINFG

SEQ ID NO: 8792 - protein, 166 aa, Triticum aestivum
RIMKKALPANAKISKDAKETVQECVSEFISFITGEASDKCPHENRPRVRPRVLLWAMTTLGFEDYVDPLKHYLHKFREIEGERAAATSTSTSTTPDMPRNNNNNATGYADAPGGMMMMGQPMYGSPPPPQQQQQHQHQIAMGGRAGFPYLGGGGGSSSSSGFGRKE

SEQ ID NO: 8793 - protein, 163 aa, Triticum aestivum
VPDCWGIQQLFPMMPVSRLHERPTNMATLIDLTCDSDGKVEKFIRGAQTLPLHPLDPKLGGYYVGVLLSGAYQEALSSKHNLFGGPSIVRVDESGGIVTADLGATTEELISTMRYDVNQDILDVIHERAEEHGVWKMVGEIVKAGLTTMPYLIEYQVPLPGTA

SEQ ID NO: 8794 - protein, 474 aa, Shigella flexneri 2a str. 301
MQHKLLINGERVSGEGEKQPVYNPATGDVLLEIAEVSAEQVDAAVRAADAAFAEWGQTTPKARAECLLKLADVIEENGQVFAELESRNCGKPLHSAFNDEIPAIVDVFRFFAGAARCLNGLAAGEYLEGHTSMIRRDPLGVVASIAPWNYPLMMAAWKLAPALAAGNCVVLKPSEITPLTALKLAELAKDIFPAGVINILFGRGKTVGDPLTGHPKVRMVSLTGSIATGEHIISHTASSIKRTHMELGGKAPVIVFDDADIEAVVEGVRTFGYYNAGQDCTAACRIYAQKGIYDTLVEKLGAAVATLKSGAPDDESTELGPLSSLAHLERVSKAVEEAKATGHIKVITGGEKRKGNGYYYAPTLLAGALQDDAIVQKEVFGPVVSVTPFDNEEQVVNWANDSQYGLASSVWTKDVGRAHRVSARLQYGCTWVNTHFMLVSEMPHGGQKLSGYGKDMSLYGLEDYTVVRHVMVKH

SEQ ID NO: 8795 - protein, 126 aa, Nostoc punctiforme PCC 73102
MYEIMFQNHPEVKEQFSMAAQADGSQPARLATAVYSYANQIDNLPALKSMVEKIAHRHVQTHVTPEQYPIVGESLLQAMKDVLGEAATEEVMAAWTEAYQALSEVFIHREHDIYVGEDKKAQLLHS

SEQ ID NO: 8796 - protein, 319 aa, Aspergillus nidulans FGSC A4
MSPPTVKLNSGYDMPLVGFGLWKVNNDTCADQVYEAIKAGYRLFDGACDYGNEVEAGQGVARAIKEGIVKRSDLFIVSKLWNSFHDGERVEPIARKQLSDWGIDYFDLYIVHFPVSLKYVDPEVRYPPGWENAEGKVELGKATIQETWTAMESLVDKGLARSIGISNFSAQLLLDLLRYARIRPATLQIEHHPYLTQERLVTFAQREGIAVTAYSSFGPLSFLELSVKQAEGAPPLFEHPVIKDIAEKHGKTPAQVLLRWATQRGIAVIPKSNNPARLLQNLDVVGFDLEDGELKAISDLDKGLRFNDPPNYGLPITIF

SEQ ID NO: 8797 - protein, 490 aa, Oryza sativa (japonica cultivar-group)
MEKLLEEFPIDFPGRMKMIQDNATNEEDKTYMVATSKADYVLRIALQMVNSKSKRNSNPLLPQDSSTPVNLQRQHRVAGHNNGLVIMQPHHKQASDGMVMTKDGHMLDQGSSINTRNGSIDRISNLPNELLYAIMSTLPALELVYTGMLSTRWRHLWTSSAYLNIDVNQFGRHRGQKFCNFVNRMLRQRGSSLLDALRLHSADTRDAGSWITYAIKRSSKVVEFSEDIDCEPFKLDYGVVDFTSICLKFLVLNNVCIDANVFYPINSSCPALENLELRDCSLEVPEISSGSLLHLDIDNCCLFEDLLISSSSLMSLCIKNPQHRAPMIMTLPCLEVAIVILDEFFHSTDDLADMDEGEEQDGEEINHGIVSGLTKARSIELIAPLREDKFEMEIWTSPMFDNLISLTLGEWCMSNEFSPLLHFLWYSPLLEDLTLKLNMEVCEYCLQEPPTAPPLVKEFTADYLKKITIYFWLGDERGAKNYKVMKRMEH

SEQ ID NO: 8798 - protein, 204 aa, Aegilops tauschii
PQPHQPFSQQPQQTFPQPQQTFPHQPQQQFPQPQQPQQQFLQPQQPFPQQPQQPYPQEPQQPFPQTQQPQQLFPQSQQPQQQFPQPQQQFPQPQQPQQSFPQQQPPFIQPSLQQQVNPCKNFLLQQCKPVSLVSSLWSMIWPQSDCQVMRQQCCQQLAQIPQQLQCAAIHTVIHSIIMQQEQQQGMHILLPLYQQQQVGQGTLV

SEQ ID NO: 8799 - protein, 121 aa, Pediococcus pentosaceus ATCC 25745
MALDKDQFIEDLKGASITDLNDLVKAIEDEFGVSAAAPVAAAGAAGGAAEAKTSFNVELTSGGSAKIKVIKAVREITGAGLKDAKDMVDNAPSVIKEDVSEDEANELKAKLEEAGATVEVK

SEQ ID NO: 8800 - protein, 116 aa, Brassica napus
MEQCLRKRDVVREDRISSLPEPLILQILSLLPTKLVIATSVLSKRWRSVWKKVPILQFESKGNIQKFSENVSMSLLSHKSPVLETLHLKVNDRCEDVYIGIWAGIAVTRHVRELEL

SEQ ID NO: 8801 - protein, 448 aa, Burkholderia cepacia R18194
MSTPATDDWVARSLRAVWHPCTQMKHHERLPLIPVARGAGLWLYDRDGRRYFDAISSWWVNLFGHANPDINAALKDQLDTLEHAMLAGCTHEPAIELAERLHTLTARTLGHAFFASDGASAVEIALKMSFHAWRNRGRANKQEFVCVANSYHGETIGALGVTDVALFKDAYDPLIRHAHVVASPDARGALAGETAADVAGRALADVRRLFVERGDRIAALIVEPLVQCAAGMAMHDPSYVRGLRALCDEFGVHLIADEIAVGCGRTGTFFACEQAGVWPDFMCLSKGISGGYLPLSLVLTRDDVFNAFYDDDTTRGFLHSHSYTGNPLACRAAVATLDLFERDDVIAANARKSATLRAALAPLDAHPQVRHLRERGTLFAFDVALDGDGARGFSRRFFERALERELLLRPIGTTVYLMPPYVMSDDDIAWLAQSTRDTLDATLEDITR

SEQ ID NO: 8802 - protein, 206 aa, Aegilops tauschii
PQPHQPFSQQPQQTFPQPQQAFPHQPQQQFPQPQQPQQQFLQPQQPFPQQPQQPYPQQPQQPFPQTQQPQQLFPQSQQPQQQFPQPQQQFLQAQQPQQSFPQQQPPFIQPSLQQQVNPCKNFLLQQCKPVSLVSSLWSMIWPQSDCQVMRQQCCQQLAQIPQQLQCAAIHTVIHSIIMQQEQQEQQQGMPILLPLYQQQQVGQGTL

SEQ ID NO: 8803 - protein, 106 aa, Triticum aestivum
MSGVWVFKNGVVRLVENPGSERTSTVRRKALLHTPSGQVVSSYATLEAKLTALGWERYYEDPALYQFHKRGCLALISLPRDFNHFSSVHMYDVVIKNRESFRVVDA

SEQ ID NO: 8804 - protein, 268 aa, Burkholderia cepacia R1808
MSKIPAFGLGTFRLQGQVVIDSVRNGLELGYRAIDTAQIYGNEAEVGAAIAASGVRREDLFVTTKIWVDNYAPDKLAASLEDSLRKLRTDYVDLTLIHWPAPDNGVSVDAFMTALADAKSKGLTREIGVSNFNIALTKEAIAAVGSDAIATNQIELSPYLQNRKLVEFLQSERIHVTSYMTLAYGKVLGDPVLDAIARRHRATPAQVALAWALQLGYSVIPSSTKREHLASNLLAQTLRLTDEDLAQIATLERNGREVDPAGLAPQWD

SEQ ID NO: 8805 - protein, 203 aa, Aegilops tauschii
PQPHQPFSQQPQQTFPQPQQTFPHQPQQQFPQPQQPQQQFLQPQQPFPQQPQQPYPQEPQQPFPQTQQPQQLFPQSQQPQQQFPQPQQQFPQPQQPQQSFPQQQPPFIQPSLQQQVNPCKNFLLQQCKPVSLVSSLWSMIWPQSDCQVMRQQCCQQLAQIPQQLQCAAIHTVIHSIIMQQEQQQGMHILLPLYQQQQVGQGTL

SEQ ID NO: 8806 - protein, 230 aa, Zea mays
  misc_feature (205)..(205): Xaa can be any naturally occurring amino acid
MLRSSFRLLYMTRTNLLVRASPSSLSRLPSKFTSAKPLVSSHHQIPLSTTGAKLSRSEHSMAASSEPKSIYDFTVKDAKGNDVDLSTYKGKVLLIVNVASQCGLTNSNYTELAQLYQKYKDHGFEILAFPCNQFGNQEPGSNEEIVQFACTRFKAEYPIFDKVDVNGDSAAPIYKFLKSSKGGLFGDGIKWNFAKFLVDKDGNVXDRYAPTTSPLSIEKDLKKLFGSYCR

SEQ ID NO: 8807 - protein, 508 aa, Phleum pratense
SSCEVALSYYPTPLAKEDFLRCLVKEIPPRLLYAKSSPAYPSVLGQTIRNSRWSSPDNVKPIYIVTPTNASHIQSAVVCGRRHGVRIRVRSGGHDYEGLSYRSLQPEEFAVVDLSKMRAVWVDGKARTAWVDSGAQLGELYYAIHKASPVLAFPAGVCPTIGVGGNFAGGGFGMLLRKYGIAAENVIDVKLVDANGTLHDKKSMGDDHFWAVRGGGGESFGIVVAWKVRLLPVPPTVTVFKIPKKASEGAVDIINRWQVVAPQLPDDLMIRVIAQGPTATFEAMYLGTCQTLTPMMSSKFPELGMNASHCNEMSWIQSIPFVHLGHRDNIEDDLLNRNNTFKPFAEYKSDYVYEPFPKEVWEQIFSTWLLKPGAGIMIFDPYGATISATPEWATPFPHRKGVLFNIQYVNYWFAPGAGAAPLSWSKEIYNYMEPYVSKNPRQAYANYRDIDLGRNEVVNDVSTFSSGLVWGQKYFKGNFQRLAITKGKVDPTDYFRNEQSIPPLIQKY

SEQ ID NO: 8808 - protein, 389 aa, Salmonella typhimurium
MTDTTILQNNTHVIKPKKSVALSGVPAGNTALCTVGKSGNDLHYRGYDILDLAEHCEFEEVAHLLIHGKLPTRDELNAYKSKLKALRGLPANVRTVLEALPAASHPMDVMRTGVSALGCTLPEKEGHTVSGARDIADKLLASLNSILLYWYHYSHNGERIQPETDDDSIGGHFLHLLHGEKPTQSWEKAMHISLVLYAEHEFNASTFTSRVIAGTGSDVYSAIIGAIGALRGPKHGGANEVSLEIQQRYETPDEAEADIRKRVENKEVVIGFGHPVYTIADPRHQVIKRVAKQLSEEGGSLKMYHIADRLETVMWETKKMFPNLDWFSAVSYNMMGVPTEMFTPLFVIARVTGWAAHIIEQRQDNKIIRPSANYTGPEDRPFVSIDDRC

SEQ ID NO: 8809 - protein, 508 aa, Phleum pratense
SSCQVAFSYFPPPAAKEDFLGCLVKEIPPRLLYAKSSPAYPSVLGQTIRNSRWSSPDNVKPLYIITPTNVSHIQSAVVCGRRHSVRIRVRSGGHDYEGLSYRSLQPETFAVVDLNKMRAVWVDGKARTAWVDSGAQLGELYYAIYKASPTLAFPAGVCPTIGVGGNFAGGGFGMLLRKYGIAAENVIDVKLVDANGKLHDKKSMGDDHFWAVRGGGGESFGIVVAWQVKLLPVPPTVTIFKISKTVSEGAVDIINKWQVVAPQLPADLMIRIIAQGPKATFEAMYLGTCKTLTPLMSSKFPELGMNPSHCNEMSWIQSIPFVHLGHRDALEDDLLNRNNSFKPFAEYKSDYVYQPFPKTVWEQILNTWLVKPGAGIMIFDPYGATISATPESATPFPHRKGVLFNIQYVNYWFAPGAAAAPLSWSKDIYNYMEPYVSKNPRQAYANYRDIDLGRNEVVNDVSTYASGKVWGQKYFKGNFERLAITKGKVDPTDYFRNEQSIPPLIKKY

SEQ ID NO: 8810 - protein, 201 aa, Aegilops tauschii
PHQPFSQQPQQTFPQPQQTFPHQPQQQFPQPQQPQQQFLQPQQPFPQQPQQPYPQQPQQPFPQTQQPQQLFPQSQQPQQQFSQPQQQFPQPQQPQQSFPQQQPPFIQPSLQQQVNPCKNFLLQQCKPVSLVSSLWSMIWPQSDCQVMRQQCCQQLAQIPQQLQCAAIHTVIHSIIMQQEQQEQQQGMHILLPLYQQQQVGQ

SEQ ID NO: 8811 - protein, 455 aa, Arabidopsis thaliana
MKNSERFSAAKPLMEQGGKSSRKPGFMSEDRISELPEVLLLQILSSLPTKLVISTSVLSKRWLSLWKMVQRLEFESSRNIYDFAENVTRSLLSHKAPVLESLHLKVGDQFDGVYVGVWATIAFTRHVREFVLDLSSYHGPRVRFPTSLFCFDTLETLKLDYVYIYVPCPVSMKSLRTLHLLSVVYKGDESGHNLFASCPNLEHLVLRRGFFFDAVVNFIIDAPSLKTLLLSDPFSARESSRGYVIKAPSLKYLGIESVEGFEYFLIENVTELVEANIRNVSKIVNENILGSLKSAKRLSLDLSPLKITYPTEVMYHQLVYLEMHTHKVEWWNLLTHMLDSSPKLQVLKLIDRETRHENLEFDKKYKDQGKWNQPKYVPECLETFMWRNCNWGREEEKEVATYILRNARQLKKATFSTDPIEAKRLCKLAKRRKMREELDGVVMTSNSCHLVFEFE

SEQ ID NO: 8812 - protein, 348 aa, Agrobacterium tumefaciens str. C58
MQTRVARLYSREDIRVETQDVAPPGPGEVLLAMAAGGICGSDLHYYQDGGFGPVRVREPIICGHEASGHIAALGAGVSGLAIGQLVAVNPSQPCGHCQFCLKGQPIHCLDMRFMGSAMRLPHEQGMFRDRLVVPAKQCATFSDATSPAEAACTEPLAVCLHAVAQAGDLAGAKVLVTGAGPIGLLTIAAARQAGAGIIVATDLTDAALERAPAMGADRTINVAKDADALLPYQDNKGYFDVIFDCSAAGPALRSAFACVRPRGTIVQVGVTGDVTIPLNALVGKEIVWRGSQRFHDEFAIAAGLISSRKIDVRPIISHSFPLGDAKAAFEQAGDRSAACKVQLTFSAD

SEQ ID NO: 8813 - protein, 129 aa, Triticum aestivum
  misc_feature (22)..(22): Xaa can be any naturally occurring amino acid
  misc_feature (92)..(92): Xaa can be any naturally occurring amino acid
  misc_feature (115)..(115): Xaa can be any naturally occurring amino acid
MAPTVMAFTATTISLLGGLKAXAGLPFSLLSNGSLFRVSNGGRIRCMQVWPIEGIKKFETLSYLPPLSTEALLKQVDYLIRSKWVPCLEFRXVSFIFREHNNSPGYYYGRYWTMXNLPMFGCTYSIQVL

SEQ ID NO: 8814 - protein, 75 aa, Brassica napus
MPSKCEILCEILIAILLPPLGVCLTRGCCTVEFLACLILTILGYVPGIIYALYVIVFQNQEEYFDEARRPLYYSA

SEQ ID NO: 8815 - protein, 503 aa, Erwinia sp. Ejp 556
MLIFFIIHFKRITRKAMIGAMLSHGATDAGFPLILVFDKAVMMKNVSSAVAVSRNPATGEVFARYPFATIAEVDSALALTNGAFQYWRHSAMSDRVQLLRNVAGALRQQARELAEMMTSEMGKPVDQGLAEVEKSARLCEWYAEQGPAFLQREPTLVEGNKAFVDYLPLGPVLSVMPWNFPVWQVLRGAVPILLAGNSYLLKPAPNVMGCALLLQQILSRVGVPEGLFAVVNADNDGVAQAINDRRIAAVTVTGSVRAGAAIAALSGAAIKKCVLELGGSDAFIVLADADIDAAVKGAIAGRFMNNGQLCISAKRIIVEAPVFDAFRDKFVSAVKEMKIGDPRESGTWIGPMARYDLRDELDSQVQATLKEGATLLLGGHVLPGEGNYYAPTVLSDVKPGMTSFAQELFGPVASLIQADNAEHAVVMANDSEFGLGGSLWSRDLAVAQKLASRIETGGVFINSPSFSDPRVPIGGVKKSGFGRELSHFGLREFTNTQTVWMEE

SEQ ID NO: 8816 - protein, 431 aa, Thermoanaerobacter tengcongensis MB4
MRIVIKNGIVIDGFGGEEKADILINYGIIKGIDKNIDVSDAIVIDAEGKYVLPGFVDMHTHLRQPGFEEKETIRTGTESAAAGGFTTVACMPNTNPPIDSEVVVEYVKAVAQREGVVKVLPIGAMTKGMKGEEITEMAKLKKAGVVALSDDGFPIMSAGIMKRVMTYGKMYDLLMITHCEDKTLSGEGVMNSGIIATMLGLKGIPREAEEVMLARNIILAKATGAKLHIAHVSTKGSVELIRRAKEEGVSITAEVTPHHLTRTDEAVYNYDTNTKVFPPLRTREDVEALIEGLKDGTIDAIATDHAPHTKDDKKVPYDMAPFGISGLETAFSVINTFLIQTGIITMKALVNYMSMNPARILGISNGIRVGATADIVIVNPHEEYTVDKEKFKSKGKNTPYHGMKLKGVVEYTIVEGQIRYQKNKKFEKVEI

SEQ ID NO: 8817 - protein, 482 aa, Salmonella typhimurium LT2
MQLNDSTLFRQQAFIDGDWRDARGGDVIPVSNPANGKPLGNVPKMGAEETRDAINAANRALPAWRALTAKERANILRRWFNLMMEHQDDLARLMTLEQGKPLAEAKGEISYAASFIEWFAEEGKRIYGDTIPGHQADKRLLVIKQPIGVTAAITPWNFPSAMITRKAGPALAAGCTMVLKPASQTPFSALALAELAQRAGIPAGVFNVVTGSAGDIGGELTSNPLVRKLSFTGSTEIGRQLMEQCAKDIKKVSLELGGNAPFIVFDDADLDKAVEGALASKFRNAGQTCVCANRLYVQDGVYDRFAEKLNQAVNKLAVGDGLQADVAIGPLIDEKAVAKVQEHIADALEKGARVITGGEAHKLGGNFFQPTILADVPDNAKVAKEETFGPLAPLFRFSDEADVIRQANDTEFGLAAYFYARDLSRVFRVGEALEYGIVGINTGIISNEVAPFGGIKASGLGREGSKYGIEDYLEIKYMCIGL

SEQ ID NO: 8818 - protein, 172 aa, Arabidopsis thaliana
MAAAFASRLTRGGRSLLGGLNNGGSMNSSNGMMNESILSQQQRRTFIQMGTVLKVVDNSGAKKVMCIQALKGKKGARLGDTIVASVKEAMPNGKVKKGAVVYGVVVRAAMQRGRVDGSEVRFDDNAVVLVDSKDKNTKTDRQPIGTRVFGPVPHELRKKKHLKILALAQHVA

SEQ ID NO: 8819 - protein, 48 aa, Triticum aestivum
  misc_feature (17)..(17): Xaa can be any naturally occurring amino acid
  misc_feature (36)..(36): Xaa can be any naturally occurring amino acid
  misc_feature (40)..(40): Xaa can be any naturally occurring amino acid
DDLKLPTDDVLLGQIKXGFADGKDLILSVMSAMGEXQICXVKEIGGGK

SEQ ID NO: 8820 - protein, 428 aa, Chloroflexus aurantiacus
MTRNTLTVTDNRTGKTYEIPIENNTIRATDLRQIKVSEDDFGLMSYDPAYLNTASCKSSITYIDGDKGILEYRGYPIEQLAEQSSYLEVAYLLLYGELPSKERLAWWEYRISRHLFLHNSLVELIQAFRYDAHPMGILISSVAAMSTLYPEAKNIHDPAVREKQIWRIIGQIPTIAAFAYRHRIGRPFNLPDSSLSYTANLLYMMDYMNQREYEVNPVLAKALDVLFILHADHEQNCSTSVMRSVGSSHADPYNALAAAAAALYGPLHGGANEAVLRMLQQIGHPKNVPAFIERVKKGEMRLMGFGHRVYKNYDPRAKIIRKIAHEVFAATAANPLLDVAMELERTALEDEYFISRKLYPNVDFYSGLIYQALRFPIEYFPFLFAIPRASGWLAQWIEMLEDPEQKITRPRQVYVGPQRRDYVPIDQR

SEQ ID NO: 8821 - protein, 341 aa, Sporothrix schenckii
MDNYQKLEKVGEGTYGVVYKARDLTAGGRIVALKKIRLEAEDEGVPSTAIREISLLKEMRDPNIVRLYNIVHAEGHKLYLVFEFLDLDLKKYMDSLPVSDGGRGKALPEGTGTRLHTLGLGDDIIKKFMSQLCAGIRYCHSHRILHRDLKPQNLLINKEGNLKLADFGLARAFGVPLRTYTHEVVTLWYRAPEILLGGHQYSTGVDMWSVGCIFAEMAMRKPLFPGDSEIDEIFKIFRLLGTPTEDVWPGVTTYPDFKASFPRWVQDTETPICPTLDPMGQELLELMLVYDPASRLSAKQACNHPYFDDLEKALPGTAAAAARQHTTTAAAGGAYNGSGYH

SEQ ID NO: 8822 - protein, 278 aa, Oryza sativa (japonica cultivar-group)
MPPPPHRGGGGGRDTSAFFAATLVLWAVSVGFEIGARGRRELAPVAAGFAFFQAASAAVRAAVSRDPLFVNTAVSLLHSSLTSASVIFVLVNRWHNKDLKNMFEHEELFGGSWVGAYSALCFSCGYFAYDQLDMLRYRLYSGRIPGILMHHLILLICFTLALYRNVTINYLILTLVCELHSVFLHIRKLRRMAGFRDYNRKIVKLEWVLNWTTFVSARVACHILITYKLIIDAHKFDSGIELPLALFGMAGMNLLNIFLGLDLLKAYTLERNQQTHQD

SEQ ID NO: 8823 - protein, 207 aa, Aegilops tauschii
PQPHQPFSQQPQQTFPQPQQAFPHQPQQQFPQPQQPQQQFLQPQQPFPQQPQQPYPQQPQQPFPQTQQPQQLFPQSQQPQQQFPQPQQQFLQAQQPQQSFPQQQPPFIQPSLQQQVNPCKNFLLQQCKPVSLVSSLWSMIWPQSDCQVMRQQCCQQLAQIPQQLQCAAIHTVIHSIIMQQEQQEQQQGMPILLPLYQQQQVGQGTLV

SEQ ID NO: 8824 - protein, 380 aa, Caulobacter crescentus CB15
MSSRLSPRLSPGTRRDDTDLECVRTTKKQGKTMASDAAQKTILKLILSLPSPILRAMSGGGVVYKGGRTLDPRFQFFANAAKKLPPMTSLSPAEAVAGSAKGLAAVQGPLETGVRTESLSVEGPNGSIPCRAYRPPQTDAKAPLIVYAHMGGGVIGDLETCHAFCSILSRICSTTVISVDYRLAPDHKFPAGLEDVLAAYRWARDNTARFGAAPVPPAIGGDSMGGNFSAIIAQEMKRTGEPQPTLQILIYPAVDVASETASMTTYADAYPLTRATMDWFMGHYIGADADPADPRLSPDKTADLTGLAPAVVATAGFDPLVDQGEGYAKRLQAAGVPVSYRCYDSLAHGFTAFTGAIPAADDACREIAWLVREAFEKRTL

SEQ ID NO: 8825 - protein, 425 aa, Bacillus cereus ATCC 14579
MKNERIEKLQESWELDERWEGITRPYSAEDVIRLRGSIDIEHTLARRGAEKLWTSLHTEDYINALGALTGNQAMQQVKAGLKAIYLSGWQVAADANLSGHMYPDQSLYPANSVPAVVKRINQTLQRADQIQHMEGSDDTDYFVPIVADAEAGFGGQLNVFELMKGMIEAGASGVHFEDQLSSEKKCGHLGGKVLLPTQTAVRNLISARLAADVMGVPTIIVARTDADAADLITSDIDPVDKAFITGERTPEGFYRTNAGLDQAIARGLAYAPYADLVWCETSEPNLEDAKRFADAIHKEHPGKLLAYNCSPSFNWKQKLDEKAIASFQKEIASYGYKFQFVTLAGFHSLNYGMFELARGYKERGMAAYSELQQAEFAAEKHGYSATRHQREVGTGYFDEVAQVITGGTSSTTALKGSTEEAQFTK

SEQ ID NO: 8826 - protein, 207 aa, Aegilops tauschii
PQPHQPFSQQPQQTFPQPQQTFPHQPQQQFPQPQQPQQQFLQPQQPFPQQPQQPYPQQPQQPFPQTQQPQQLFPQSQQPQQQFSQPQQQFPQPQQPQQSFPQQQPPFIQPSLQQQVNPCKNFLLQQCKPVSLVSSLWSMIWPQSDCQVMRQQCCQQLAQIPQQLQCAAIHTVIHSIIMQQEQQEQQQGMHILLPLYQQQQVGQGTLV

SEQ ID NO: 8827 - protein, 485 aa, Bacillus halodurans C-125
MEAIYTRQFLAGEWIEGASTQTITNYNPYTGEKIHEIKGASLDDLDQAYRAAKNAQKEWEQTLPAQKQEVLEKAAALLAERKDEVIERLVNEAGSSIIKASIEWGATLQTIKVAATFPLRMEGKILPSNIPGKENRIYRSAKGVIGVISPFNFPLVLAMRSVAPALATGNAVVLKCSSDAPITSGLLIAELFEEAGLPKGVLNVVVGKAAEIGDAFVTHPIPKLISFTGSTEVGRHIAQLAARELKETALELGGNNVMIVLDDADIEKAAEKAAVGKFLHQGQICMALNRIIVDASIYDSFVEVFKEKVSQLQTGNPAEPATLIGPLINYKQIGRIQQLVKESVAQGAVKVLEGHVQGNLMSPTILSEVTNDMPVAKEEIFGPIAPIIKAKDEAEAIAIANDSPYGLSGSIFTGSLHRGVQVAKQIDTGMIHVNDQPVNEEAHISFGGEKDSGIGRFGGEWVLDKFTTVKWISIQEKERVYPFWG

SEQ ID NO: 8828 - protein, 156 aa, Triticum aestivum
  misc_feature (76)..(76): Xaa can be any naturally occurring amino acid
  misc_feature (113)..(113): Xaa can be any naturally occurring amino acid
  misc_feature (122)..(122): Xaa can be any naturally occurring amino acid
  misc_feature (126)..(126): Xaa can be any naturally occurring amino acid
  misc_feature (128)..(128): Xaa can be any naturally occurring amino acid
  misc_feature (134)..(134): Xaa can be any naturally occurring amino acid
  misc_feature (136)..(138): Xaa can be any naturally occurring amino acid
TSVAPFQGLKSTAGLPVSRRSNGASLGSVSNGGRIRCMQVWPIEGIKKFETLSYLPPLSTEALLKQVDYLIRSKWXCLASSQQVGFIFREHNASPGYYDGRYWTMWKLPMFGXTDATQVINXVEEXKXEYPDAXVXXXGKFREMVKILHGVARSGG

SEQ ID NO: 8829 - protein, 1046 aa, Oryza sativa (japonica cultivar-group)
MEGGNHGGGGYPYPPPQQYPYPYGQYPYQYPPPQQQPPPPSAYLSPSRSFHGYPSAPPPQPQPQPYAHHSAPLQPYPPPPQHHAYPPPQPHPPSPYVYDPYHAPAAAYPSYPSPNPSPSISPSSSFHHHPEPPSPSPSAPSYPSIADGLANMHVSDRHDYPPPPSPAAVPAASSPSVLPPSASFPGGGSSHGGGGMQMVPYGPPAGGSQHGGMQMVAYGSPAGGSQHGSVRPSLKVVLLHGTLDVWVYDARNLPNKDLFSKRVGDLLGPRLIGAVGSKMSSANMTSDPYVTIQVSYATVARTYVVPNNENPVWTQNFLVPVGHDAAEVEFVVKDNDVFGAQLIGTVSIPAEKLLFGERINGIYDVLESNGKPCAQGAVLRLSIQYIPVAQLKMYHHGVIAGPDSLGVPNTYFPMRRGNRVTLYQDAHVPDGCLPDFCLDHGMRYQHGQCWRDIYDAICQARRLIYIVGWSVFHTIHLIREGVEKMPSLGELLKMKSQEGVRVLLLVWDDPTSRSILGIKTDGFMGTRDEETRRFFKHSSVQVLLCPRSAGKRHSWVKQQETGTIFTHHQKTVILDADAGNHKRKIIAFVGGLDLCGGRYDTPSHPLFRSLQTVHKEDYYNPNFATVDARGPREPWHDLHSKIDGPAAYDVLQNFQERWLKASKRHGIKKLGKSYDDALLSIERIPDFISINDAIYFSDNDPETWHVQVFRSIDSNSAKGFPKDPREATRKNLVCGKNVLIDMSIHTAYVNAIRGAQHFIYIENQYFIGSSFNWDSNKDIGANNLIPIEIALKIANKIKAKERFSAYIVIPMWPEGNPTGAPTQRILYWQHKTMQMMYETIYRALKEEGLDDLYEPQDYLNFFCLGNREVADSPSTSNSTSTPQEQARKHRRFMVYVHSKGMIVDDEYVIIGSANINQRSMEGIRDTEIAMGAYQPQYTWASKVSAPRGQIYGYRMSLWAEHIGVVEEGFNYPETMECMRRVRQIGEQNWERFVDNEVTEMRGHLMKYPVSVDRKGKVKPLPGCTSFPDMGGNICGSFRAIQENLTI

SEQ ID NO: 8830 - protein, 325 aa, Triticum aestivum
  misc_feature (135)..(135): Xaa can be any naturally occurring amino acid
MEAETAAKRARESEGAAAADGAGEQAGISAVIPGWFSEISPMWPGEAHSLKVEKVLFQGKSDYQNVLVFQSSTYGKVLVLDGVIQVTERDECAYQEMITHLPLCSIKDPKKVLVIGGGDGGVLREVSRHSSVEQXIDICEIDKMVVDVSKQFFPRLALGFEDPRVSLHIGDGVAFLKNAPEGTYDAVIVDSSDPVGPAQELFEKPFFESVSRALRPGGVVCTQAESIWLHMHIIEDIVTNCRQVFKGSVNYAWTTVPTYPSGVIGFMLCSTEGPSVDFQHPVFSIEEDEYSTKSKGPLKFYNSEFHTASFCLPSFARRVIEAKAN

SEQ ID NO: 8831 - protein, 140 aa, Triticum aestivum
  misc_feature (125)..(125): Xaa can be any naturally occurring amino acid
MAPTVMASSATSVAPFQGLKSTAGLPVSRRSNGASLGSVSNGGRIRCMQVWPIEGIKKFETLSYLPPLSTEALLKQVDYLIRSKWVPCLEFSKVGFIFREHNASPGYYDGRYWTMWKLPMFGCNXPTQVINEVEESRRIT

SEQ ID NO: 8832 - protein, 495 aa, Oryza sativa (japonica cultivar-group)
MATAGALALVAICSYLAVTSNKQKRRRRPPVVGTVFHQLYNVRRIHDYHTALSREHTTFRMLVPAGGDQIYTCDPAVVEHILKTNFANYGKGPFNHGNAKDLFGDGIFAIDGEKWKQQRKIASYDFSTRALRDFSCAVFKRNAAKLAGIVSNHAASNQSMDFQGLMLRATMDSIFTIAFGTDLNTLDGSGEGSRFAAAFDDASEFTMLRYISPLWKLARLLNVGVEAMLKERIKVVDEFVYRLIRARSDELSNSHDSGSRQDILSRFLQATTSDSVVDYKYLRDIILNIVIAGKDTTAGALAWFLYMVCKHPEVQEKICHEAMVATSAGDTASVDEFLQSLTDQALNNMHYLHAALTETLRLYPSVPMENKQCFSDDVLPNGFNVSKGDIVFFIPYAMGRMESLWGKDAEYFRPERWLDENGVFQQESPFKFTAFQAGPRICLGKEFAYRQMKIFAAVLLRFFVLKLRDEKEIVSYRTTLTLAIDQGLHLTATAR

SEQ ID NO: 8833 - protein, 231 aa, Aegilops searsii
SLPQQPFSQQPQQTFPQPLQTFPHQPQQQFPQPQQPQQQFLQPQQPFHQQPQQPYPQQPQQPFPQTQQPQQLFPQSQQPQQPYPQQPQQPFPQTQQPQQQFPQSQQPQQPFPQPQQPQQSFPQQQPPFIQPSLQQQLNPCKNLLLQQCRPVSLVSSLWSMIWPQSDCQVMRQQCCQQLAQIPQQLQCAAIHSVVHSIIMQQEQQQQQQQQQQQQGLRIPLPLYQQQQVGQG

SEQ ID NO: 8834 - protein, 206 aa, Zea mays
MAGDEEDHLADAPRVVGALSALLERVVERNDAVADELAAGTESAAPPSAFRATARPGISVRSYMARIARFAGCSPACYVVAYVYLDRLLRRARSAPAVDSYSVHRLLITAVLAAVKFMDDICYNNAYFAKVGGISLVEMNYLEVDFLFGVGFDLNVAPETFGDYCAVLRSELLCAEAAPAPLRLQHCCLSEDDAGAGCSAQQQLAA

SEQ ID NO: 8835 - protein, 215 aa, Heliobacillus mobilis
MRFFLDSANIDEIREANALGVISGVTTNPSLIAKEGRNFRQVVEEIVAIVDGPISAEVISTDAEGMVAEARELAQIHKNIVIKIPMCAEGLKATSRLSREKIRTNVTLIFSANQGLLAANAGATFVSPFVGRLDDVGHDGLDVIREMVEIFDIHGLATEIIAASVRHPLHVTAAARAGAPIATIPYKVLMQMVKHPLTDKGIEQFLKDWETVKNK

SEQ ID NO: 8836 - protein, 314 aa, Arabidopsis thaliana; identical to SEQ ID NO: 243

SEQ ID NO: 8837 - protein, 88 aa, Zea mays
MRRRPTAGPSLQRAPLARLISRRGLAGAADGHGSAKAPLRKDPLSPIKWEEEHFGLASLSMWGVICYGGYKLFSGKKEAKTDAGSPQA

SEQ ID NO: 8838 - protein, 231 aa, Zea mays
SDHCHSARYYLKDAVLDGGIPFNKAYGMTAFEYHGTDARFNRVFNEGMKNHSVIITKKLLDFYTGFEGVSTLVDVGGGVGATLHAITSRHPHISGVNFDLPHVISEAPPFPGVRHVGGDMFASVPAGDAILMKWILHDWSDAHCATLLKNCYDALPENGKVIVVECVLPVNTEATPKAQGVFHVDMIMLAHNPGGKERYEREFRELAKGAGFSGFKATYIYANAWAIEFIK

SEQ ID NO: 8839 - protein, 382 aa, Aspergillus oryzae
MATATVLEKANIGVYTNTNHDLWVAESKPTLEEVKSGESLKPGEVTVQVRSTGICGSDVHFWHAGCIGPMIVTGDHILGHESAGEVIAVASDVTHLKPGDRVAVEPNIPCHACEPCLTGRYNGCEKVLFLSTPPVDGLLRRYVNHPAVWCHKIGDMSYEDGALLEPLSVSLAAIERSGLRLGDPVLVTGAGPIGLITLLSARAAGATPIVITDIDEGRLAFAKSLVPDVITYKVQTNLSAEDNAAGIIDAFNDGQGSAPDALKPKLALECTGVESSVASAIWSVKFGGKVFVIGVGKNEMKIPFMRLSTQEIDLQYQYRYCNTWPRAIRLVRNGVISLKKLVTHRFLLEDALKAFETAADPKTGAIKVQIMSNEEDVKGASA

SEQ ID NO: 8840 - protein, 379 aa, Arabidopsis thaliana
MDNINGLPDDLLVKILSFVPTYVAVSTCVLSKRWEFLWMWLPNLEFVSPWDSRPGIVDFINKKLPIHRAPVIERLCIHINSNPHIKPEYIKRWIEIAVSHYVRELQIDYHSKTKITLQLEAESYFIDGKYLQQLISGCPVLEDLSLRFCCNDNLREFTVIIPSLQSLSLFLFGNSNLNRYKIDTPSLKYLKLEDWNDPEHYSWTNMPKLREAYVDVESSNHLKTLIGSITSVKHLTICCLEDYLYGDGFIFNHLEHLKLCMCPFDSSNLLGQLLKGSPNLQVLDIFEMKRNDIVCWNQPSSVLECLLSSLKILNWSAYFGRPQDRDIAVYILKNACHLKTATFLTDKRINDVRRLKMIKELRLSPRASSTCQLVFGEDF

SEQ ID NO: 8841 - protein, 91 aa, Brassica napus
MRVHNHRLRFEVTPKPTMSLPGISFITARSVAVILFLCLFLLILPPFLPPLPPPPSTLLLLPLLLMILLIFLAFSPSNDPSLTVEVEPLDP

SEQ ID NO: 8842 - protein, 126 aa, Cyanophora paradoxa
MSSKTDEILEQLKGLTLIEAADLVKAIEEAFGVDASAPVGGGMVMMAPAAGGGADAAEEKSAFDLVLEEVPADKKIAVLKVVRSLTNLGLKEAKDLVEATPKVVKEGASKDELKQLKKNLKQLEQK

SEQ ID NO: 8843 - protein, 139 aa, Saccharomyces cerevisiae
MSEITLGKYLFERLKQVNVNTVFGLPGDFNLSLLDKIYEVEGMRWAGNANELNAAYAADGYARIKGMSCIITTFGVGELSALNGIAGSYAEHVGVLHVVGVPSISAQAKQLLLHHTLGNGDFTVFHRMSANISETTAMI

SEQ ID NO: 8844 - protein, 256 aa, Glycine max
  misc_feature (208)..(208): Xaa can be any naturally occurring amino acid
  misc_feature (230)..(230): Xaa can be any naturally occurring amino acid
  misc_feature (235)..(235): Xaa can be any naturally occurring amino acid
  misc_feature (237)..(238): Xaa can be any naturally occurring amino acid
  misc_feature (250)..(250): Xaa can be any naturally occurring amino acid
FLRYACVVREKVRVVKTMASQLLRRTFGSRILANPRAFSFSSAASTPIRATLFPGDGIGPEIAESVKQIFQAADVPIEWEEHYVGTEIDPRTQSFLTWESLESVRQNGVGLKGPMATPIGKGHRSLNLTLRKELNLYANVRPCYSLPGYKTRYDNVNLITIRENTEGEYSGLEHQVVRGVVESLKIITRQASLRVAEYAFLYAKAHGXREKVSGIHKANIMQKTDGFFLXWCREXAXXYPEKPYEEVSLXQCCMML

SEQ ID NO: 8845 - protein, 344 aa, Triticum aestivum
  misc_feature (222)..(222): Xaa can be any naturally occurring amino acid
  misc_feature (232)..(232): Xaa can be any naturally occurring amino acid
  misc_feature (266)..(266): Xaa can be any naturally occurring amino acid
  misc_feature (273)..(273): Xaa can be any naturally occurring amino acid
  misc_feature (276)..(276): Xaa can be any naturally occurring amino acid
  misc_feature (281)..(281): Xaa can be any naturally occurring amino acid
  misc_feature (285)..(285): Xaa can be any naturally occurring amino acid
  misc_feature (292)..(292): Xaa can be any naturally occurring amino acid
  misc_feature (301)..(301): Xaa can be any naturally occurring amino acid
  misc_feature (316)..(316): Xaa can be any naturally occurring amino acid
  misc_feature (318)..(318): Xaa can be any naturally occurring amino acid
  misc_feature (321)..(321): Xaa can be any naturally occurring amino acid
  misc_feature (325)..(325): Xaa can be any naturally occurring amino acid
  misc_feature (328)..(329): Xaa can be any naturally occurring amino acid
MGKGGKGEAAAAVAGEGENMAAWLVAKNTLKIMPFKLPPLGPYDVRVRMKAVGICGSDVHYLKEMRIAHFVVKEPMVIGHECAGIIEEVGDGVKHLAVGDRVALEPGISCWRCRHCKGGRYNLCDDMKFFATPPYHGSLADQIVHPGDLCFKLPDNVSLEEGAMCEPLSVGVHACRRADVGAEKSVLIMGAGPIGLVTMLSARAFGAPRIVIADVDDHRLSXAKSLGADAVXKVSGNTEDLAGEIERIQAAMGGDIDVSLDCAGFXKTISTAXEAXRPGGXVCLXGMGHNEXTVPLTSAAXRKFDVVGIFRYKDTXPXCLXSLRXGKXXVKRLSKGPFGVRLSR

SEQ ID NO: 8846 - protein, 1347 aa, Escherichia coli CFT073
MSQEYTEDKEVTLTKLSSGRRLLEALLILIVLFAVWLMAALLSFNPSDPSWSQTAWHEPIHNLGGMPGAWLADTLFFIFGVMAYTIPVIIVGGCWFAWRHQSSDEYIDYFAVSLRIIGVLALILTSCGLAAINADDIWYFASGGVIGSLLSTTLQPLLHSSGGTIALLCVWAAGLTLFTGWSWVTIAEKLGGWILNILTFASNRTRRDDTWVDEDEYEDDEEYEDENHGKQHESRRARILRGALARRKRLAEKFINPMGRQTDAALFSGKRMDDEEEITYTARGVAADPDDVLFSGNRATQPEYDEYDPLLNGAPITEPVAVAAAATTATQSWAAPVEPVTQTPPVASVDVPPTQPTVAWQPVPGPQTGEPVIAPAPEGYPHQSQYAQPAVQYNEPLQQPVQPQQPYYAPAAEQPVQQPYYAPAAEQPVQQPYYAPAPEQPVAGNAWQAEEQQSTFAPQSTYQTEQTYQQPAAQEPLYQQPQPVEQQPVVEPEPVVEETKPTRPPLYYFEEVEEKRAREREQLAAWYQPIPEPVKEPEPIKSSLKAPSVAAVPPVEAAAAVSPLASGVKKATLATGAAATVAAPVFSLANSGGPRPQVKEGIGPQLPRPKRIRVPTRRELASYGIKLPSQRAAEEKAREAQRNQYDSGDQYNDDEIDAMQQDELARQFAQTQQQRYGEQYQHDVPVNTEDADAAAEAELARQFAQTQQQRYSGEQPAGANPFSLDDFEFSPMKALLDDGPHEPLFTPIVEPVQQPQQPVAPQQQYQQPQQPVAPQPQYQQPQQPVAPQPQYQQPQYQQPQQPVAPQQQYQQPQQPVTQQPQYQQPQQPVVPQPQDTLLHPLLMRNGDSRPLHKPTTPLPSLDLLTPPPSEVEPVDTFALEQMARLVEARLADFRIKADVVNYSPGPVITRFELNLAPGVKAARISNLSRDLARSLSTVAVRVVEVIPGKPYVGLELPNKKRQTVYLREVLDNAKFRDNPSPLTVVLGKDIAGEPVVADLAKMPHLLVAGTTGSGKSVGVNAMILSMLYKAQPEDVRFIMIDPKMLELSVYEGIPHLLTEVVTDMKDAANALRWCVNEMERRYKLMSALGVRNLAGYNEKIAEADRMMRPIPDPYWKPGDSMDAQHPVLKKEPYIVVLVDEFADLMMTVGKKVEELIARLAQKARAAGIHLVLATQRPSVDVITGLIKANIPTRIAFTVSSKIDSRTILDQAGAESLLGMGDMLYSGPNSTLPVRVHGAFVRDQEVHAVVQDWKARGRPQYVDGITSDSESEGGVGGFDGAEELDPLFDQAVQFVTEKRKASISGVQRQFRIGYNRAARIIEQMEAQGIVSEQGHNGNREVLAPPPFD

SEQ ID NO: 8847 - protein, 479 aa, Shigella flexneri 2a str. 301
MSVPVQHPMYIDGQFVTWRGDAWIDVVNPATEAVISRIPDGQAEDARKAIDAAERAQPEWEALPAIERASWLCKISAGIRERASEISALIVEEGGKIQQLAEVEVAFTADYIDYMAEWARRYEGEIIQSDRPGENILLFKRALGVTTGILPWNFPFFLIARKMAPALLTGNTIVIKPSEFTPNNAIAFAKIVDEIGLPRGVFNLVLGRGETVGQELAGNPKVAMVSMTGSVSAGEKIMATAAKNITKVCLELGGKAPAIVMDDADLELAVKAIVDSRVINSGQVCNCAERVYVQKGIYDQFVNLLGEALQAVQFGNPAERNDIAMGPLINAAALERVEQKVARAVEEGARVALGGKAVEGKGYYYPPTLLLDVRQEMSIMHEETFGPVLPVVAFDTLEDAISMANDSDYGLTSSIYTQNLNVAMKAIKGLKFGETYINRENFEAMQGFHAGWRKSGIGGADGKHGLHEYLQTQVVYLQS

SEQ ID NO: 8848 - protein, 426 aa, Escherichia coli
ADTKAKLTLNGDTAVELDVLKGTLGQDVIDIRTLGSKGVFTFDPGFTSTASCESKITFIDGDEGILLHRGFPIDQLATDSNYLEVCYILLNGEKPTQEQYDEFKTTVTRHTMIHEQITRLFHAFRRDSHPMAVMCGITGALAAFYHDSLDVNNPRHREIAAFRLLSKMPTMAAMCYKYSIGQPFVYPRNDLSYAGNFLNMMFSTPCEPYEVNPILERAMDRILILHADHEQNASTSTVRTAGSSGANPFACIAAGIASLWGPAHGGANEAALKMLEEISSVKHIPEFFRRAKDKNDSFRLMGFGHRVYKNYDPRATVMRETCHEVLKELGTKDDLLEVAMELENIALNDPYFIEKKLYPNVDFYSGIILKAMGIPSSMFTVIFAMARTVGWIAHWSEMHSDGMKIARPRQLYTGYEKRDFKSDIKR

SEQ ID NO: 8849 - protein, 363 aa, Buchnera aphidicola
MKKKFRIAVLPGDGIGPEIMREAYKILNILEKNFSLPLEIREFSVGGIAIDREGIALPEETLRGCENSDAILFGSVGGKKWDYLPIESRPERASLLPLRKHFNLFSNLRPAKLYSDLKNLSPLRSNIVRNGFDILCVRELTGGIYFGKPKGRSKNENGEYSFDTEIYYDFEIKRIAHLAFELASSRRCKVCSIDKSNVLASSILWREIVEEVSKNYPNIILSHLYIDNACMQIIKNPSQFDVLLCSNIFGDIISDECAMITGSIGMLPSASLNSKKFGLYEPAGGSAPDIEGKNIANPIAQILSLSMLIRHSMNLNEIADKIDSSVYRALKAGYRTLDISDGKNYIKTNEMGDIIAKFLINGK

SEQ ID NO: 8850 - protein, 367 aa, Aspergillus nidulans FGSC A4
MAADIPKTMKALLYDKPEVHKIAEIPVPTLRENDVLVGVKSRRSQYAWLTQLVIQIKVKACGVCGTDLHIHEGEFIAQFPLVPGHETVGVVAAVGPKVKGFEIGDRVVADNSELCGECFYCRRGDELFCENFQAHGVTMNGGFAEYCAYPAGRVFKIQNLSDVDATLLEPASCAAHGLDKIAPKMGSRVLLFGAGPTGLILAQLLRLNGGCHVVVCAPEGLKMELAKSLGAGDEYIGLSRQDPSAQFNKLKADNPYGFDIVVEATGNVKILEDSINYVRRGGKLVVYGVYANKDRVSWPPSKIFGDEIQIIGSFSEVYKFPAAIDYLDSGKVKVSGIVNKVYKIEQWEECLQSMRNKSAIKAAIVFE

SEQ ID NO: 8851 - protein, 252 aa, Listeria monocytogenes str. 4b H7858
MNAATRAVVRKAIYEGLEVYGINYGFLGLVNGDIRKLELGSVGDLLHRGGTFLYSARYPEFATEEGQLKGIEQLKKHQIDGLVVIGGDGSYHGAEALTKRGFPTIGIPGTIDNDISGTDFTIGFDTALNTVLDALDKIRDTATSHERTFIIEVMGRDAGDIALWSGLAGGAEAIIVPEESFNMDDVVDRLNKGRERGKKHSIIVVAEGVMSGNEFAKQLAEYGDYHARVTVLGHVQRGGSPTAFDRVLASRL

SEQ ID NO: 8852 - protein, 88 aa, Glycine max
MRIEDDAVKKAMIVDAGTRHISHNVRSTEIESQHIEDCQAVMRILLRKFMGDEVQSGKCAKGICKKPAVEFGELVLCRSNFDIHTAAL

SEQ ID NO: 8853 - protein, 255 aa, Phanerochaete chrysosporium
MAQSREDSVYLAKLAEQAERYEEMVENMKRVASSDQELTVEERNLLSAAYKNVIGARRASWRIVSSIEQKEESKGNEAQVAMIKGYREKIESELAKICEDILDVLEKHLIPSAASGESKVFYHKMMGDYHRYLAEFATGDKRKESADKSLEAYKAASDVAVTELPPTHPIRLGLALNFSVFYYEILNSPDRACHLAKQAFDDAIAELDTLSEESYKDSTLIMQLPRDNLTLWTSDMQDSDKPADEKPSDEADNES

SEQ ID NO: 8854 - protein, 356 aa, Saccharomyces cerevisiae
MTDLTTQEAIVLERPGKITLTNVSIPKISDPNEVIIQIKATGICGSDIHYYTHGRIANYVVESPMVLGHESSGIVALIGENVKTLKVGDRVALEPGIPDRFSPEMKEGRYNLDPNLKFAATPPFDGTLTKYYKTMKDFVYKLPDDVSFEEGALIEPLSVAIHANKLAKIKFGARCVVFGAGPIGLLAGKVASVFGAADVVFVDLLENKLETARQFGATHIVNSGDLPHGVTVDSVIKKAIGKKGADVVFECSGAEPCVRAGIEVCKAGGTIVQVGMGQEEIQFPISIIPTKELTFQGCFRYCQGDYSDSIELVSSRKLSLKPFITHRYSFKDAVEAFEETSHHPLNNIKTIIEGPE

SEQ ID NO: 8855 - protein, 140 aa, Brassica napus
  misc_feature (133)..(133): Xaa can be any naturally occurring amino acid
MTMINSLRRMARSSQVTLQSRYAASSSSGSRIFTTEASPQKQTIVGSKGHDMLAPFTAGWQSADLHPLIIAKSEGSYVYDDHGKKYLDSLAGLWCTALGGNEPRLVSAAVEQLKTLPFYHSFWNRTTKPSLDXAKDLLDM

SEQ ID NO: 8856 - protein, 420 aa, Chloroflexus aurantiacus
MTHPTIRIGVLTSGGDAPGMNAAVRAVVRTGISRGCEVFAIYEGYQGLIEGGKLIRRMDWSSVGGIIQRGGTIIGTARSAAFRTREGRRRAAANLLAHGIDRLVVIGGDGSLTGADLFRREWPELLAELVAAGEFSSEQAAAHPNLLIAGIVGSIDNDFCGTDMTIGADTALHRITEAIDAISSTAASHQRTFVIEVMGRNCGYLALMGAIAGGADWAFIPEMPPQMDDWEQHMCDVLRIGREQGRRDSIVVVAEGACDRDGKPITASYVKKILEERLGEDTRVTILGHVQRGGAPSAFDRWMSSLLGATAVEELLEADPNAEPKLIGLRENRVVRLPLMTCVRDTHQVAEAIAQRDYERALAMRGNSLVEAYRTLGTLIQSQHSDPRPITARASLRKSCNSGGPAPENEYAVRAAGGSA

SEQ ID NO: 8857 - protein, 487 aa, Burkholderia cepacia R1808
MSTENLALKDPSLLRQQAYINGEWQSAANGESFEVRNPATGGLLGTVPAMGAAETRQAIDAANAAWPAWRKKTAKERAAILRKWHDLMMENADDLALILTTEQGKSLAEAKGEIGYAASFLEWFAEEGKRVYGDTIPTPASDKRIVVTKEAIGVCAAITPWNFPAAMITRKVGPALAAGCPIVVKPAEATPFSALAMAVLAERAGVPAGVFSVVTGDPKAIGGELTSNPIVRKLSFTGSTPVGRLLMSQCAATVKKVSLELGGNAPFIVFDDADLDAAVQGAIASKYRNSGQTCVCTNRFYVHEAVYDAFAQKLAAAVGQLKVGRGTEPGVTQGPLINEAAVLKVEAHIEDALAKGATVVTGGKRHALGHGFFEPTVLTGVTPAMKVAKEETFGPLAPLFKFGSDDEVIRLANDTEFGLAAYFYSRDIGRVWKVAEALEYGMVGVNTGLISNEVAPFGGVKQSGLGREGSHYGIDDYVVIKYLCLAV

SEQ ID NO: 8858 - protein, 229 aa, Aegilops searsii
SLPQQPFSQQPQQTFPQPLQTFPHQPQQQFPQPQQPQQQFLQPQQPFHQQPQQPYPQQPQQPFPQTQQPQQLFPQSQQPQQPYPQQPQQPFPQTQQPQQQFPQSQQPQQPFPQPQQPQQSFPQQQPPFIQPSLQQQLNPCKNLLLQQCRPVSLVSSLWSMIWPQSDCQVMRQQCCQQLAQIPQQLQCAAIHSVVHSIIMQQEQQQQQQQQQQGLRIPLPLYQQQQVGQG

SEQ ID NO: 8859 - protein, 314 aa, Vibrio parahaemolyticus RIMD 2210633
MVNNSIQWFPGHMHKARKEIEEAIPQVDVIIEVLDARIPFSSENPMISKIRGEKPVVKVLNKRDLADPELTQLWIDHLEKEQNVKAMAITTSEPQEVHKIMELCRKLAPHREEVGKNIRTMIMGIPNVGKSTIINTLAGRTIAVTGNQPAVTRRQQRINLQNGIVLSDTPGILWPKVENPHSGFRLAATGAVKDTAMEYDEVAFYTVEYLAAHYPERLKERYQIEELPESDIEIMEEIGRRRGALRAGGRVDLHKVSEILLHELRQGTLGQITLELPEMITQELIEVEIETARKEEEKAKRKEERRKRYLRNKR

SEQ ID NO: 8860 - protein, 234 aa, Aegilops sharonensis
LPQQPFSQQPQQTFPQPQQTFPHQPQQQFPQPQQPQQQFLQPQQPFPQQPQQPYPQQPQQPFPQTQQPQQLFPQSQQPQQPYPQQPQQPFPQTQQPQQQFPQSQQPQQPFPQPQQPQQSFPRQQPPFIQPSLQQQLNPCKNLLLQQCRPVSLVSSLWSMIWPQSDCQVMRQQCCQQLAQIPQQLQCAAIHSVVHSIIMQQEQQQQQQQQQQQQQQQRQQQGLRIPLPLYQQQQV

SEQ ID NO: 8861 - protein, 411 aa, Rickettsia sp. A-167
DSEFAELKIRGKIFKLPILKASIGEDVIDISRVSAEADCFTYDPGFMSTASCQSTITYIDGDKGILRHRGYDIKDLAEKSDFLEVAYLLIYGELPSGEQYNNFTKQVAHHSLVNERLHYLFQTFCSSSHPMAIMLAAVGSLSAFYPDLLNFKEADYELTAIRMIAKIPTIAAMSYKYSIGQPFIYPDNPLDFTENFLHMMFATPCTKYTVNPIIKNALNKIFILHADHEQNASTSTVRIAGSSGANPFACISTGIASLWGPAHGGANEAVINMLKEIGSSEYIPKYIAKAKDKNDPFRLMGFGHRVYKNYDPRAAVLKETCKEVLKALGQLDNNPLLQIAIELEAIALKDEYFIERKLYPNVDFYSGIIYKAMGIPSQMFTVLFAIARTVGWMAQWKEMHEDPEQKISRPR

SEQ ID NO: 8862 - protein, 474 aa, Pseudomonas aeruginosa
MQTKLLINGALVAGEGESHAVYNPSQGNVLVRITEASGAQVHAAVQSADAAFDAWSQTPPKDRAALLLKLAERIDAQAHVFARLEADNCGKPFNAVLLDELPAVSDVFRFFAGAVRCLQGSAAGEYVAGHTSMIRRDAVGVVASIAPWNYPLLMAAWKLGPALAGGNTVVLKPSEHTPLSTLKLGELLAEIFPAGVVNIVHGRGASVGEPLTSHAQVRMVSLTGSVRTGSRIIEGTAESVKRMHMELGGKAPVLIFDDADIDAAVEGIRAFGFYNAGQDCTAACRLYVQKGVYQEFVRKLGEAVSSIRCGLPDDPATEMGPLITKEHLERVEGFVNRARELPHIEVVTGGKRAEGAGFFFEPTVLAGATQEDEVMRREIFGPVVTVSSFEDEAQALAWANDSDYGLASSVWTADVGRAHRLAARLQYGCTWVNTHFMLVSEMPHGGVKLSGYGKDLSMYGLEDYTVVRHVMFKH

SEQ ID NO: 8863 - protein, 431 aa, Glycine max
MEASPPPSPSPSPRTTILAKYQLTRFLGRGNFAKVYQARSLLDGATVAVKAIDKSKTVDAAMEPRIVREIDAMRRLHHHPNILKIHEVLATKTKIYLIVDFAGGGELFSKLTRRGRLPEPLARRYFAQLVSALRFCHRHGVAHRDLKPQNLLLDAAGNLKVSDFGLSALPEHLHDGLLHTACGTPAFTAPEILRRVGYDGSKADAWSCGVILYNLLAGHLPFDDSNIPAMCRRISRRDYQFPAWISKSARSLIYQLLDPNPITRISLEKVCDNNKWFKNNSMVEVKESVWESDLYNKCCDGGYKSGMNAFDIISMSSGLDLRGLFETTSEKGRRREKRFTSDKKVETVEAKVKEVGEKLGFRIEIGKNGAIGLGKGKVGVVVEVFEIVADLLLVAVKVVDGGLEFEELHWDDWRIGLQDLVLSWHDVGLEL

SEQ ID NO: 8864 - protein, 427 aa, Bacillus halodurans C-125
MSGWQETAEKLEMSWSNDVRWQGVERPYSGEEVVKLRGSLKIEYTLAKTGAEKLWKLLHEEDYVNALGAMTGGQAIQQVKAGLKAIYLSGWQVAADANLAGHMYPDQSLYPANSVPSVVKRINQALQRADQIQHLEGEGEVDYFAPIVADAEAGFGGQLNVFELMKAMIEAGASGVHFEDQLASEKKCGHLGGKVLIPTQTAIRNLVSARLAADVMGVPTILVARTDADAADLITSDIDPADQRFITGERTPEGFYRTNAGIEQAIARGLAYAPYADLIWCETSKPSLEEAKQFADAIHEKFPGKLLAYNCSPSFNWEANLDRATIETFQQELGKMGYKFQFVTLAGFHALNHSMFELAYGYKQRGMGAYSELQQAEFASEVKGYTATRHQREVGTGYFDQVAQTITGGTSSTTALTGSTEEAQFQK

SEQ ID NO: 8865 - protein, 411 aa, Israeli tick typhus rickettsia
DSEFAELKIRGKIFKLPILKASIGEDVIDISRVSAEADCFTYDPGFMSTASCQSTITYIDGDKGILRYRGYDIKDLAEKSDFLEVAYLLIYGELPSGEQYNNFTKQVAHHSLVNERLHYLFQTFCSSSHPMAIMLAAVGSLSAFYPDLLNFKEADYELTAIRMIAKIPTIAAMSYKYSIGQPFIYPDNSLDFTENFLHMMFATPCTKYTVNPIIKNALNKIFILHADHEQNASTSTVRIAGSSGANPFACISTGIASLWGPAHGGANEAVINMLKEIGSSEYIPKYIAKAKDKNDPFRLMGFGHRVYKNYDPRAAVLKETCKEVLKALGQLDNNPLLQIAIELEAIALKDEYFIERKLYPNVDFYSGIIYKAMGIPSQMFTVLFVIARIVGWMAQWKEMHEDPEQKISRPR

SEQ ID NO: 8866 - protein, 294 aa, Staphylococcus aureus subsp. aureus MSSA476
MVIQWYPGHMAKAKREVSEQLKKVDVVFELVDARIPYSSRNPMIDEVINQKPRVVILNKKDMSNLNEMSKWEQFFIDKGYYPVSVDAKHGKNLKKVEAAAIKATAEKFEREKAKGLKPRAIRAMIVGIPNVGKSTLINKLAKRSIAQTGNKPGVTKQQQWIKVGNALQLLDTPGILWPKFEDEEVGKKLSLTGAIKDSIVHLDEVAIYGLNFLIQHDLARLKSHYNIEVPEDAEIIAWFDAIGKKRGLIRRGNEIDYEAVIELIIYDIRNAKIGNYCFDIFKDMTEELANDANN

SEQ ID NO: 8867 - protein, 411 aa, Rickettsia akari
DSEFAELKIRGKIFQLPILKASIGEDVIDISRVSAEVNCFTYDPGFMSTASCKSTITYIDGDKGILRHRGYNIKDLAEKSDFLEVAYLLIYGELPSIEQYNNFTKQVAHHSLVNERLHYLFQTFCSSSHPMAIMLAAIGSLSAFYPDLLNFKEADYELTAIRMIAKIPTIAAMSYKYSIGQPFVYPDNSLDFTENFLHMMFATPCTKYKVNPIIKNALNKIFILHADHEQNASTSTVRIAGSSGANAFACISTGIASLWGPAHGGANEAVINMLKEIGSSENIPKYIAKAKDKSDPFRLMGFGHRVYKNYDPRASVLKETCKEVLKELGQLENNPLLQIAIELEAIALKDEYFIERKLYPNVDFYSGIIYKAMGIPSQMFTVLFAIARTVGWMAQWKEMHEDPGQKISRPR

SEQ ID NO: 8868 - protein, 411 aa, Rickettsia australis
DSEFAELKIRGKIFKLPILKASIGEDVIDISRVSAEADCFTYDPGFMSTASCQSTITYIDGDKGILRHRGYNIKDLAEKSDFLEVAYLLIYGELPTIEQYNNFTTQVAHHSLVNERLHYLFQAFCSSSHPMAIMLAAVGSLSAFYPDLLNFKEADYELTAIRMIAKIPTIAAMSYKYSIGQPFIYPDNSLDFTENFLHMMFATPCTKYKVNPIIKNALNKIFILHADHEQNASTSTVRIAGSSGANAFACISTGIASLWGPAHGGANEAVINMLKEIGSSENIPKFIAKAKDKNDPFRLMGFGHRVYKNYDPRAAVLKETCKAVLKELGQLENNPLLQIAIELEAIALKDEYFIERKLYPNVDFYSGIIYKAMGIPSQMFTVLFAIARTVGWMAQWKEMHEDPEQKISRPR

SEQ ID NO: 8869 - protein, 176 aa, Hevea brasiliensis
MASQSEPKSVYDFTVKDARGNDVDLSTYKGKVLLIVNVASQCGLTNSNYTELTQLYQKYKDQGLEILAFPCNQFGSQEPGTNEQIVEFACTRFKAEYPIFDKVDVNGNNAAPLYKFLKSSKGGIFGDNIKWNFSKFLVDKDGNVVDRYAPTTVPSQHREGCEETAGDCMSAQGRPN

SEQ ID NO: 8870 - protein, 423 aa, Bacillus subtilis
  misc_feature (118)..(118): Xaa can be any naturally occurring amino acid
MAQGEKITVSNGVLNVPNNPIIPFIEGDGTGPDIWNAASKVLEAAVEKAYKGEKKITWKEVYAGEKAYNKTGEWLPAETLDVIREYFIAIKGPLTTPVGGGIRSLNVALRQELDLFVXLRPVRYFTGVPSPVKRPEDTDMVIFRENTEDIYAGIEYAKGSEEVQKLISFLQNELNVNKIRFPETSGIGIKPVSEEGTSRLVRAAIDYAIEHGRKSVTLVHKGNIMKFTEGAFKNWGYELAEKEYGDKVFTWAQYDRIAEEQGKDAANKAQSEAEAAGKIIIKDSIADIFLQQILTRPNEFDVVATMNLNGDYISDALAAQVGGIGIAPGANINYETGHAIFEATHGTAPKYAGLDKVNPSSVILSGVLLLEHLGWNEAADLVIKSMEKTIASKVVTYDFARLMDGATEVKCSEFGEELIKNMD

SEQ ID NO: 8871 - protein, 189 aa, Triticum aestivum
  misc_feature (69)..(69): Xaa can be any naturally occurring amino acid
  misc_feature (115)..(115): Xaa can be any naturally occurring amino acid
  misc_feature (151)..(151): Xaa can be any naturally occurring amino acid
MAPTVMASSATSVAPFQGLKSTAGLPVSRRSNGASLGSVSNGGRIRCMQVWPIEGIKKFETLSYLPPLXSTEALLKQVDYLIRSKWVPCLEFSKVGFIFREHNASPGYYDGRYWXTMWKLPMFGVQPNATQVINEGGRRSKKEYPDAYVRXIIGFDNMRHVQCVRFIAFKPPGCKIRQGLNSSLTTGHI

SEQ ID NO: 8872 - protein, 156 aa, Glycine max
  misc_feature (52)..(52): Xaa can be any naturally occurring amino acid
  misc_feature (142)..(142): Xaa can be any naturally occurring amino acid
ANLKISCSAVTAVHRANASMIAPFTGLKSMAGCPLAKTANHITSIASNGGRXHCMHVWPPLVKMKFETISYLPDHDDAQLAKEIEYLLTIGWIPYFEFELEHGIAYREHDMSPRYYQRRYWYTLTCQFLTALIATTVSYELXQARTEYSIGYIRII

SEQ ID NO: 8873 - protein, 113 aa, Zea mays
RHERRGTKARDNRCVNESIAMASRLVAAAASSSSLSSASPLARLISRRGLAGAADGHGSAKVPLWKDPLSPSKWKEEHFVLASLSMWGVIFYGGYKLFSGKKEAKTEAASPQA

SEQ ID NO: 8874 - protein, 126 aa, Schizosaccharomyces pombe
MIGLKGILKVIDNSGATLAECIRVVRAGKFASLGDEVVVVVKKARSGSSVTAANKVKRGDIHHAIIVRTKSPVRRPDGRYVRFDDNACVLVNKECEPLGTRILSVVANELRTKHHTKIASLAPRTI

SEQ ID NO: 8875 - protein, 316 aa, Erwinia carotovora subsp. atroseptica SCRI1043
MNQLEALKQFTVVVADSGDIDSIRQFSPQDATTNPSLILKAATLPQYQPLFDDAIAYANLQGGSPETRLINASDRLAVNIGAEVLKSIPGRISTEVDARLSFDRGMCVAKARKLIGMYQEKDIPRSRILIKLAATWEGIRAAEELEKEGINCNLTLLFSFAQARACAEAGVFLISPFVGRIYDWYQEKQPTSDYQAESDPGVISVRDIYDYYKRHRYQTVIMGASFRKVEQILALAGCDRLTISPALLEQLKNSSDPVERQLTPSTEAFHPPSPLSEAEFRWEHHQDAMAVDKLAEGIRLFAADQQKLEALLAAKL

SEQ ID NO: 8876 - protein, 224 aa, Gossypium hirsutum
MAFVSEEEKTEDYLFKIVLVGDSAVGKSNLLARFARNEFYPNSKSTIGVEFQTQKLDINGKEVKAQIWDTAGQERFRAVTSAYYRGAVGALLVYDISRRQTFDSIGRWLNELQTHSDMNVVTILVGNKSDLRDAREVSTAEGKALAEAQGLFFMETSALDSSNVAAAFQTVVKEIYNILSRKVMMSHELKKQDAPLDGKTVVLQGDENQERATESPKSGGCCSS

SEQ ID NO: 8877 - protein, 191 aa, Triticum aestivum
  misc_feature (92)..(92): Xaa can be any naturally occurring amino acid
  misc_feature (122)..(122): Xaa can be any naturally occurring amino acid
  misc_feature (141)..(141): Xaa can be any naturally occurring amino acid
  misc_feature (151)..(151): Xaa can be any naturally occurring amino acid
  misc_feature (166)..(166): Xaa can be any naturally occurring amino acid
  misc_feature (174)..(174): Xaa can be any naturally occurring amino acid
MAPTVMASSATSVAPFQGLKSTAGLPVSRRSNGASLGSVSNGGRIRCMQVWPIEGIKKFETLSYLPPLSTEALLKQVDYLIRSKWVPCLEFXSKVGFIFREHNASPWGTTMAGYWDNVEAAXVSGWHRRQRKVINEVGGRXKKEYPDAYVXRIIRFDNMRQVQCVXSFIPFKPXPGCEESGKAKQLITRAI

SEQ ID NO: 8878 - protein, 285 aa, Aspergillus nidulans FGSC A4
MARNLSLKSTQKLLSGYEIPILGYGPNKRGGKRHRRGTQARIQTRTTLPARLFDRMADDNEKEVTAAIAKAGLSRSQVFLTTKIPPRANGYEAAKKSIEDSLKQANTEYFDLILIHAPYGGKEGRLGTWKALVEAQKAGKTRSIGVSNFGVHHLEELQMYISSGGGGQIDVGQYELHPWLARPDIVDWLRKHGAVVQAYCPIVRNQRGDEPVLKELGKKYGKSAAQVLIRWSLQKGFVPLPKSVTPSRIKENAEVFDFELTEEDMAKLETGKYEPCAWDPTVEKD

SEQ ID NO: 8879 - protein, 362 aa, Mesorhizobium loti MAFF303099
MANGLDDVVAAETVLSDVDGLGGRLTIRGHSLAELAGRWSFPQVVRLLLDGFFEDLAGDAELAAQLGEARVDVFERLQPSLPLLAPLDIYSAMRAGMALLPDGETLADALRLIAAPAVLTPALLRLQRGEQPVAPDGKAAHAADMLRMLRGSVPSPALAKALDTYLVTVCDHGLNASTFATRVVASTLAGLTSSVLAGLGALKGPLHGGAPGPVIEMLDAIEAHGDAAGWLRNEIAQGRRIMGFGHRIYRVRDPRADVLKAVVRQLGGEGETGRRLAFAEEVEKTALEVLRIAKPQRSLQTNVEFYTALVLEAAGFPPQAFSNVFAAGRVAGWIAHAREQQTTGRLIRPQSRYVGPVPDLVA

SEQ ID NO: 8880 - protein, 486 aa, Pseudomonas putida
MRQIENFIAGEFVAAASGKRFDKRSPVDNRIICSISEAGRSEVDAAVSAARSALHGEWGSLSTDQRIELLLCVANEITRRFDDFVEAEMSDTGQPEHVMKHVFIPRGAANFKVFADVIKSVASESFKMDTPDGRGALNYSIRRPKGVIGVVCPWNAPFMLMTWKVGPALACGNTVVVKPSEESAQTAALLGEVMNAVGIPKGVYNVVHGFGPDSAGEFVTRHPQVDAITFTGETRTGTAIMKAASEGMRDVSFELGGKNAGIVFADADFEAAVESFSRSVFLNTGQVCLGTERVYVERPIFERFVQALKVKAEAVKYGRPDDHQANYGPLISQEHKQKVLSYYRKAVEEGATLVTGGGVPQMPGELAEGAWVQPTIWTGLPETAAVVQEEIFGPCCHISPFDSEDEVVEKANATDYGLSTTIWTSNLARAHRMAGRIDVGITWINSWFLRDLRTPFGGSKQSGIGREGGVHSLEFYTETRNVCVKL

SEQ ID NO: 8881 - protein, 540 aa, Glycine max
MQVMASRILSTLHYVCSSSASATKRCLGLYSHWQRSISGIAASVVADVEPSIAPVQIDQSQLLIDGKFVDAASGKTFPTFDPRTGDVIANVAEGDAEDVNRAVHAARKAFDEGPWPKMTAYERSRIILRFADLLEKHNDEVAAIETWDSGKTYEQAANVEIPMVVRLFRYYAGWADKIHGLTVPADGPYHVQTLHEPIGVAGQIVPWNFPLLIFSWKVAPALACGNTVVMKTAEQTPLSALYVSKLFLEAGLPPGVLNVISGFGPTAGAALCSHMDVDKLAFTGSTSTGKRVLELSAHSNLKPVTLELGGKSPFIVCKDADVDAAVEASHFALFFNQGQCCCAGSRTFVHESIYGEFVEKAKARALKRVVGDPFKNGVEQGPQIDSVQFEKIMKYIRSGVESGAQLESGGQRIGSKGYYIQPTVFSNVQDNMLIAKDEIFGPVQSILKFKDLEEVIRRANATSYGLAAGVFTKNMDTANTLMRALQAGTVWINCYDVFDAAIPFGGYKMSGQGRVRGIYSLRSYLQVKAVVTALKNPAWL

SEQ ID NO: 8882 - protein, 379 aa, Mesorhizobium loti MAFF303099
MSEWLSREEALERLRVRPQTLYAYVSRGRIGMRPDRADPRRSQYRADDIAALATRRARGRSPSAIAESAIAWGEPSIATAISTVWHGHLIYRGRDAAVLSDNATLEETAAVLWGLPEPIRFEAPAPDAPRQPGRASAFAQLALLAGQARPSLGRSAASLCADAARAIGVLAGALGAEAGPDPVHRRLARGWSVDDAGADAIRRALVLLADHELNASTFAARVAASTGASPAACLLAGLATLSGPRHGGAGEAVMQLAEDAARHGADAAIRRWLGHDRPLPAFGHPLYPDGDPRTTALSAAIPVDETLQQLEKAAIAMTGARPNIDFALAALTRGLGLPRDAPFQLFALGRSVGWAAHMVEQIVSGSIIRPRGRYEGLLP

SEQ ID NO: 8883 - protein, 493 aa, Neurospora crassa
MAATFTLDDVRKHNSKDDVWMVIHNKVYNVTTYLEDHPGGSIILREVAGTDATEQFVEIGHSVEATDILEELYVGDLAEEEHAEEVEIFRPTYEKVAMEAAVKVEKATVSKVKKNVRRTIAMSSVIASVGAVGLAKGWWTGPEWALAAVTTAQKPINQLADFIRSKFAQNGSSSKLFWWGVGIATVVELSLTTAATTWALSKFEAQKEFTHFPRSRPAKKERKVAILKIPTNSTSGPAVKPPVKVMDPADWRKFKLVRKVLVSPNVYHLVFALPHPTDVLGLPTGQHVALRALIDGKSVSRSYTPVSNNSDLGRVELLIKVYDQGLMTKHLERMEIGDQIEMRGPKGAMQYVPNSYAKEIGMIAGGTGITPMYQLIRAICEDESDKTKISLLYANNTEADILLREELDGFVKAFPDKLSVQYVLGQADENWTGLRGFVTADMIKDFLPPAADTTKMLLCGPPPMVAAMSKNLVSLGFTAPGTLSKATDQVFLF

SEQ ID NO: 8884 - protein, 255 aa, Aegilops speltoides
HQPFSQQPQQTVPQPQQTFPHQPQQQFPQPQQPQQQFLQPQQPFPQQPQQPYPQQPQQPFPQTQQPQQLFPQSQQPQQPYPQQPQQPYPQQPQQPFPQTQQPQQLFPQSQQPQQPYPQQPQQPFPQTQQPQQQFPQYQQPQQQFPQPQQPQQSFPQQQPSFVQPSLQQQLNPCKNFLLQQCRPVSLVSSLWSMIWPQSDCQVMRQQCCQQLAQIPQRLQCAAIHSVVHSIIMQQQQQEQQQGMRIQLPLYQQQQV

SEQ ID NO: 8885 - protein, 489 aa, Candida albicans SC5314
MSRTKSTKVLIIGAGVSGLKAAETILSKSFLTGDDVLVVEAQNRIGGRLKTTDTSQSKLGINYDLGASWFHDSLNNIVLNHMINDGLLDDEKDVYFDDKDLKTFSSTGEVPIVDKKLNRVLEDIEKYIQLYFNRNLGVPDLSLRDIVAQYFEKYNRLITEEQREYCGRMMRYLEFWFGISWDRISGKYAVTTHQGRNLLNKKGYGYLVESLAKRIPESSLLLEEPVNKIIRNNKDAGKRVLVETINGLQIFCDYLIVTVPQSILSLEESSPYSIKWEPKLPQRLVESINSIHFGALGKVIFEFDRIFWDNSKDRFQIIADHTDGDLSRELTELPKPFTYPLFAVNFGRVHNGKASLVILTQAPLTNYLETHPDQAWQYYQPMLQKLSINDEPIPDPINTIVTDWTTNPYIRGSYSTMYTNDDPSDLIISLSGDFEDLGISEPYIKFAGEHTTSEGTGCVHGAYMSGIYAADCILENIFRNDVTGYTIIG

SEQ ID NO: 8886 - protein, 192 aa, Glycine max
  misc_feature (39)..(39): Xaa can be any naturally occurring amino acid
TLQVLLVGGGDGGILREISRHSSVEHIDICEIDKMVIDXIAFTNSVPEGTYDVIIVDAFQPMGPIAEVLADNCFLESVAKALRPGGVLSAPADSLWHKNFVVADTIANCKKIFKGSVNYAWTTVPTYASGVIGFMLCSTEGPPVNFKHPTNKLNPEQNGVAKGPPKFYNPEIHAAAFCLPSFVDKVVDPKRY

SEQ ID NO: 8887 - protein, 315 aa, Rubrivivax gelatinosus PM1
MEVTVAGRETAAEGVASFELRRADGGPLPGFDAGAHIDVELPNGMVRQYSLCNDPAERGHYRIGVLLEAAGRGGSRSAHAQLLPGSRLRISAPRNHFALVPARHTLLLAGGIGVTPILSMAEQLARADASFELHYCSRSPARTAFVPRLRAAAFAAQVHFHFDDGDAAQRFDARAVLAQAGDTTHLYVCGPKGFMDHVILTARALGWSEGNIHYEYFAGAAVDSSADRGFEVQIAGSGQVVPVAPGQSVVQALAAHGIDVPVSCEQGVCGTCVMRVVQGEPEHRDMYFSAAEHAANHCFTPCCSRSKSARLVIDF

SEQ ID NO: 8888 - protein, 181 aa, Arabidopsis thaliana
MASSMFSSTAVVTSPAQATMVAPFTGLKSSASFPVTRKANNDITSITSNGGRVSCMKVWPPIGKKKFETLSYLPDLSDVELAKEVDYLLRNKWIPCVEFELEHGFVYREHGNTPGYYDGRYWTMWKLPLFGCTDSAQVLKEVEECKKEYPGAFIRIIGFDNTRQVQCISFIAYKPPSFTEA

SEQ ID NO: 8889 - protein, 256 aa, Aegilops speltoides
HQPFSQQPQQTVPQPQQTFPHQQQQQQFPQPQQPQQQFLQPQQPFPQQPQQPYPQQPQQPFPQTQQPQQLFPQSQQPQQPYPQQPQQPYPQQPQQPFPQTQQPQQLFPQSQQPQQPYPQQPQQPFPQTQQPQQQFPQYQQPQQQFPQPQQPQQSFPQQQPSFVQPSLQQQLNPCKNFLLQQCRPVSLVSSLWSMIWPQSDCQVMRQQCCQQLAQIPQRLQCAAIHSVMHSIIMQQQQQEQQQGMRIQLPLYQQQQV

SEQ ID NO: 8890 - protein, 468 aa, Ralstonia metallidurans CH34
MTHPVLDSGGGDTSLAARSQRAVWHPCTRLRPDASANEPPLAIVRGEGPWLIDAGDKRYFDAISSWWVNLFGHANPAINAAIGEQLQTLEHVMLAGCTHAPAVELAERLTALTGGALGNAFYASDGASAVEIALKMSFHYWRNTGLTAKREFICLRHGYHGETVGALAVTDVEIFRDAYDPLTRRAHVVMSPDARQAARSESAADVATRALAELEALLRERAGQIAALIVEPLVQGAAGMAMYDPSYLEGARALCDRYRVHLIADEIAVGCGRTGTFFAWEQARGGDAVPAHAWPDFLCLSKGITGGYLPLSLVLSRPEIQRAFVADDIARSFLHSHSYTGNPLACRAALATLDLFESEDVLARNRERAQWLGTAMAGIAADPRVSHVRQRGMIWAADIDPQAAGANFAGRFHLAARERGVLARPIGHTLYVMPPYVFDAELANWLGEQLLDTLQAVLDPAEEARHAA

SEQ ID NO: 8891 - protein, 411 aa, Rickettsia africae
DSEFAELKIRGKIFKLPILKASIGEDVIDISRVSAEADCFTYDPGFMSTASCQSTITYIDGDKGILRHRGYDIKDLAEKSDFLEVAYLLIYGELPSGEQYNNFTKQVAHHSLVNERLHYLFQTFCSSSHPMAIMLAAVGSLSAFYPDLLNFKEADYELTAIRMIAKIPTIAAMSYKYSIGQPFIYPDNPLDFTENFLHMMFATPCTKYTVNPIIKNALNKIFILHADHEQNASTSTVRIAGSSGANPFACISTGIASLWGPAHGGANEAVINMLKEIGSSEYIPKYIAKAKDKNDPFRLMGFGHRVYKNYDPRAAVLKETCKEVLKELGQLDNNPLLQIAIELEAIALKDEYFIERKLYPNVDFYSGIIYKAMGIPSQMFTVLFVIARTVGWMAQWKEMHEDPEQKISRPR

SEQ ID NO: 8892 - protein, 118 aa, Glycine max
YLSLRSYLLYFRVYLSPESSQYSSRGGQVSALSPTGGQVSALSPTLYEPVNRSCVVDAISDSSAPKHAIQAFHLLSTSREAQAVVASLACDPNVWNAVMENPAVSSFFQSQQSVADLG

SEQ ID NO: 8893 - protein, 468 aa, Methanosarcina barkeri str. fusaro
MISKKVNLETLDESKKYRVGAYSARYIPQVKEKGIPKYEFPEEGMSPRAAYQLVHDEQSLDGNPFLNLASFVNTWMEPEADKLVMENINKNIIDIFEYPQTDKVIQSNIVNMLGRLFNGHHTKFMGTATAGSSEAIMLGLLAHKWSWKNSGRGTGKPNIIFGNDAHVCWDKFAKYFDVEARKIPIDKDERKISAAAVSEQIDENTICVGCVLGTTFTGEIDPVKDINDLLLRYKKEKGWDIPIHIDAASGGFILPFTEPDFEWDFRLESVKSINVSGHKYGLTYPGLGWLIFRDENDLPEDLIFHVNYLGEMEDSYTLNFSGGSAMVVAQYYNILRFGRAGYTRIMKNILEVSQDLAEKVDRLGRFEMLNKGERLPIIAFKQKEETDYSLQQLSYKLRERGWIIPAYCLPENAADIEIMRIVVRENFTSDMAAILVNDIENACQFFENGRKSETKKPCPPDDGMVHIC

SEQ ID NO: 8894 - protein, 412 aa, Rickettsia bellii
NTEFAELKIRDKIFKLPILKASIGQDVIDISKVYSEADCFTYDPGFMSTASCRSTITYIDGDQGILRHRGYDIKDLAEKSDFLEVAYLLIYGELPNNKQYNDFTKKVAHHALVNERLHYLFQTFCSSSHPMAIMLAAVGSLSAFYPDLLNFFKEADYELTAIRMIAKIPTIAAMSYKYSIGQPFVYPDNSLDFTENFLHMMFATPCEKYKVNPVIKNALNKIFILHADHEQNASTSTVRIAGSSGANPFACVSTGIASLWGPAHGGANEAVINMLKEIGSVENIPKYIAKAKDKNDNFRLMGFGHRVYKNYDPRAAVLKETCKEVLKELGQLDNNPLLQIAIELEAIALKDEYFIERKLYPNVDFYSGIIYKAMGIPPQMFTVLFATARTVGWMAQWKEMHEDPEQKISRPR

SEQ ID NO: 8895 - protein, 411 aa, Rickettsia canadensis
DSEFVELKIRGKIFKLPILKASIGEDVIDISRVSSEADCFTYDPGFMSTASCRSTITYIDGDKGILRYRGYDIKDLADKSDFLEVAYLLIYGELPSSEQYNNFTKKVAVHSLVNERLHYLFQTFCSSSHPMAIMLAAVGSLSAFYPDLLNFKEADYELTAIRMIAKIPTMAAMSYKYSIGQPFIYPDNSLDFTENFLHMMFATPCMKYEVNPVIKNALNKIFILHADHEQNASTSTVRIAGSSGANPFACISTGIASLWGPAHGGANEAVINMLKEIGSSENIPKYIAKAKDKDDPFRLMGFGHRVYKNYDPRAAVLKETCNEVLKELGQLENNPLLQIAIELEAIALKDEYFIERKLYPNVDFYSGIIYKAMGIPSQMFTVLFAIARTVGWMAQWKEMHEDPEQKISRPR

SEQ ID NO: 8896 - protein, 252 aa, Prunus emarginata
AHYKYEADVGNAIAEAIRSGLVKREELFITSKASNHGHVVEACKDSLKKLQLDYLDLYLVHYPLATKHSGVGTTASLLDKNKVLDIDVTVSLESTWHDMEKTVSLGLVRSIGLSNYELFLTRDCLSYAKIKPQVNQFETHPYFQRASLVKFCWKHGVCPMAHTPLGGATANVKSFGSISPLDDPVLQGLAKKYKKSVAQIALRWNIDRNTPVIPKSSKIQRLKENLEVLTFKLEKEDIELINSIDKKSRTTL

SEQ ID NO: 8897 - protein, 411 aa, Rickettsia conorii
DSEFAELKIRGKIFKLPILKASIGEDVIDISRVSAEADCFTYDPGFMSTASCQSTITYIDGDKGILRHRGYDIKDLAEKSDFLEVAYLLIYGELPSGEQYNNFTKQVAHHSLVNERLHYLFQTFCSSSHPMAIMLAAVGSLSAFYPDLLNFKEADYELTAIRMIAKIPTIAAMSYKYSIGQPFIYPDNSLDFTENFLHMMFATPCTKYTVNPIIKNALNKIFILHADHEQNASTSTVRIAGSSGANPFACISTGIASLWGPAHGGANEAVINMIKEIGSSEYIPKYIAKAKDKNDPFRLMGFGHRVYKNYDPRAAVLKETCKEVLKELGQLDNNPFLQIAIELEAIALKDEYFIERKLYPNVDFYSGIIYKAMGIPSQMFTVLFAIARTVGWMAQWKEMHEDPEQKISRPR

SEQ ID NO: 8898 - protein, 252 aa, Prunus emarginata
AHYKSEADVGNAIAEAIRSGLVKREELFITSKASNHGHVVEACKNSLEKLQLDYLDLYLVHYPLATKHSGVGTTASLLDENKVLDIDVTVSLESTWHDMEKTVSLGLVRSIGLSNYELFLTRDCLSYAKIKPQVSQFETHPYFQRESLVRFCKKHGVTPMAHTPLGGATANVKSFGSISPLEDPVLLGLAKKYKKSVAQIALRWNIERDTPVIPKSSKVERLKENLEVLNFKLEKEDIELINTIDKKSRTTL

SEQ ID NO: 8899 - protein, 117 aa, Oryza sativa (japonica cultivar-group)
MARAGHNKYVARVMVVALLLAARAPVTCGQVVSTWAPCIMYADGEGVAPTGGCCDGVRTLNSAAATTADRQTTCACLKQQTKAMGRLRPDHVAGIPSKCGVNIPYAISPSTDCSRVH

SEQ ID NO: 8900 - protein, 250 aa, Triticum aestivum
  misc_feature (141)..(141): Xaa can be any naturally occurring amino acid
MYFRPPPKGPEWGGDAEAGQAARPLYPMMLESPQLRWAFVRKVYTILSIQMLLTIAVASVVVFVRPVALFFVSSPAGFGLYIFLIILPFIVLCPLYYYYQRHPVNLLLLALFTVAISFAVGLTCAFTKGEVILESAILTAXLVVEPDRRTPFWAASRGHDFSFLGPFLFAAVMILMVFALIQAFFPLGRISLMVYGGLAALVFCGYIIYDTDNLIKRYSYDEYVWAAVALYLDVINLFLSLLTLFRASDS

SEQ ID NO: 8901 - protein, 375 aa, Glycine max
  misc_feature (61)..(61): Xaa can be any naturally occurring amino acid
  misc_feature (314)..(314): Xaa can be any naturally occurring amino acid
SFYPSQEIIDMCDYCVGLSRQLNGSIIPSERPDHMMFEVWNPLGIVGVITAFNFPCAVLGXGAPTTPLITIAVTKLVAEVLERNKLPGAIFTSFCGGADIGQAIAKDTRIPLVSFTGSSKVGLMVQQTVNERFGKCLLELSGNNAIIVMDDADIKLAVRSILFAAVGTAGQRCTTCRRLFLHESIYADVLDQLIGVYNQVKIGNPLEKGTLVGPLHTPTSVENFQKGISVIKSQGGKILTGGSVLESAGNFVQPTIVEISPDAPVVKEELFGPVLYVMKFQTLEEAIALNNSVPQGLSSSIFTQRPGTIFKWKXQKGISVIPTNGAEIGGAFGGEKATGGGREAGSDSWKQYMRRSTCTINYGSELPLAQGINFG

SEQ ID NO: 8902 - protein, 426 aa, Rubrobacter xylanophilus DSM 9941
MEPGDRSGGRYLTAREAAEELGVSVRTLYAYVSRGLVRSEAAGGGRRGRRYRAEDVRRLRERKEHRRDPARAAEGALDWGMPVLESGISLIADGRLYYRGRDAVALSGERSLEQVAQLIWTGSMAPGDRAAVPGLFRAAARSVAGCPRLPLGGARPVLDELGLALQAAASRDPAAYDLRPAAVVRTGARILRLLVGAATGEQDAGETAARALQRRWVPRDEGAAEILDRALVLCADHELNVSSFTARCVASAGATPYAAVVAGLAALGGVRHGGGTERVEAFLAEVEAAGDPREVVASRLRRGEAVPGFGHRLYPEGDPRAAALLAALAEGYPGSEALGLAEGAAEAAGALVGERPNVDFALAVLARVLGLPPGGALALFALGRAVGWVGHAIEQYASGAPIRPRARYVGEPPPRPESGPSPARSG

SEQ ID NO: 8903 - protein, 224 aa, Gossypium hirsutum
MAFVSEEEKTEDYLFKIVLDGDSAVGKSNLLARFARNEFYPDSKSTIGVELQTQKLDINGKEVKAQIWDTAGQERFRAVTSAYYRGAVGALLVYDISRRQTFDSIGRWLNELQTHSDMNVVTILVGNKSDLRDAREVSTAEGKALAEAQGLFFMETSALDSSNVAAAFQTVVKEIYNILSRKVMMSHELKKQDAPLDGKTVVLQGDENQERATESPKSGGCCSS

SEQ ID NO: 8904 - protein, 428 aa, Nostoc punctiforme PCC 73102
MHLLWFRRDLRLTDNEIVTSSSGNDARVLPFFIIDPWFYTWADVGTARVRFLFESLEKLNSNLQKLSSRLYLFEGNSTGIVQELTRQLTERGYKPKLFFNRDVQVEYGINRDKTIVDFYKQLNLDYHIGLNNFLQSAEQRDEWVNEYYTYQRQSQYKTPAIINTPQITLNLPQLTFEELKQKYHRFWAVEKVYFPGGETQAQAQLDSFLKKRYYGYHWKLSRPMLSQLGATSHLSPHLTFGTISTRTVYQSTKALAEQLKTQPKAEFSLKAFRDRLRWHDSFTQRLYFHPEIAYTNRYREFDKLYTPETLSGAKQELYQAWQQGMTGFPLVDASMRQLQTMGWMNFRMRAMCATFLTINCGVSWHHGAKHYMNYLVDGDLAIDNWQWQMQAGVTNPLSDTFRIYNPSKNIAEKDPLGVNIAKLSPGAR

SEQ ID NO: 8905 - protein, 338 aa, Ralstonia solanacearum
MYSAHDVRVENVPDATIVEPTDAIVRVTQACICGSDLWPYRAMEPSETGQSMGHEAIGVVEAIGSGVNKIKVGDVVIMPFAYSDGRCEFCHEGLQTACVHGGFFGYGGFNGAQAEALRIPQADGTLYALPGGVDSALMASLLTLSDVMGTGHHAARVARVRPGTSAAVIGDGAVGLCGVIAAKRLGAERIILMGRHPDRIALAQAFGATDIVSERGEEAIERVRALTGGHGVHSVLECVGTDQSMQTAANIARPGGAVGRVGVPHYNAIPADTTFFKNVIVGGGPAPVRAYIDDLLPDVLDGKIQPGRVFDRVIGLDEVPDGYRAMDERQAIKVMINL

SEQ ID NO: 8906 - protein, 479 aa, Rubrobacter xylanophilus DSM 9941
METGVKSLKNFIGGRFVEPASGELYDVVNPSTGEVFARAPMSGEEDVDRAFGAAAKAFEEWRESTPSERQRALLRIADRIEERAEELVRAECENTGKPYALTLEDEIPPMADQIRFFAGAARCLEGKSAGEYMRGMTSYIRREPVGVCAQVTPWNYPMMMAVWKFAPAVAAGNTVVLKPSDTTPVSTLLLAEIAAEFLPEGVFNVVCGDRDTGRLLVRHEVPQMVAITGSVRAGMEVAEAAAKDLKRVHLELGGKAPVIVFDDADPEAAAEAIAEAGYFNAGQDCTAATRVLAAPGVHDDFVAALTERARSTRTGPPDDEEAYYGPLNNENQLRRVSGIIERLPDHAEVVAGGGRVGERGYFYAPTVVSGLRQDDEASQTEIFGPVITVQPFSDEDEAVRWANGVRYGLASSVWTRDHGRAMRVSRRLDFGCVWINTHIPLVAEMPHGGFKHSGYGKDLSMYGLEDYTRIKHVMSNIEA

SEQ ID NO: 8907 - protein, 302 aa, Malus xiaojinensis
MSSGTCSTVEPAGAGEIMLFGVRLVVDSMRKSVSLNNLSQYEHPQEAASNNGNNGTAAGKDDAAPGYASENDVVHNSGGNRERERKRGVPWTEEEHKLFLLGLQKAGKGDWRGISRNFVKTRTPTQVASHAQKYYLRRSNLNRRRRRSSLFDITTDTVAPTPMDEEQVQHQDNISQSQLHPLPPPPPSEPRDAGGFSMVPNFARTVGPAVLPVHIENPMENLALRQANPENSTSAKLVHPVALHSAPHATAISDLNLNSTTDASTLTLNLSLSMDSREPSSRHSAFETMQGFSNGDSMISVA

SEQ ID NO: 8908 - protein, 1142 aa, Ralstonia eutropha JMP134
MSEVEKKGFCTLCRSRCGTVNVVDGETLVAVRPDGDHPTGKAMCLKGKAAPELVHSADRILYPMRRTHPKGADDPGWVRISWDEALDEIAARLLHARATRGAESVAFAVTTPSGTALSDSIDWIERFVRLYGSPNICYATEICNWHKDFAHAFTFGCGMPTADYRNAGLILLWGHNPTNTWLSQAEAIGAGRAGGARLIVVDPRQTALAEDADQWLRVKPGSDAALAMALANLMIEANAFDIDFVRRWTNGPLLVRQDNGAFLRGGDIGLADTDALLVWDARQRMAVPAGKGVDDAQHIALRGTFAIPRIGGGERKSLLCQPAFDLYAAECARYTVERAAALTWIPEGDIRHAASLIGAAGRIAYHAWSGVGQHENATQTERAIACLYALTGSFDRRGGNRVYSKPPFNAVSRFDLLSPDQAHKALGLDARPLGPPAQGWVTAPDLYRAITHHAPYAVTSLIAFGTNTLLSQPDVANAEQALRELELYVHCDLFENPSARHADILLPVNTPWEREGLRIGFEVSADAEQFVQLRQRMVAPLGESRSDNDIVFALAARIGLDEAFFGGSLEAGWNHMLAPTGLTVAALRDAPEGIRVLVEDVEMKYAAGTDGQPFNTPTGLVELYSERLLRHGYPPLPGLPESAWNDAGQTSASFPYLMTSAKNGYYCHSQQRGVASLRRKALLPQLDISSDIAAARNIRTGDPVRVSTPAGSARFTARVQPGLHPAVVVGEYGWWQGCDPMGQQPTAVLGTDSANFNALIDATRQDPVSGSSPLRCCHCNVERDATLDIRRRRWEGYRPFRIVGLRKEATDVTAVDLEPADGGRLPDYLPGQHVTIRLCVDTGQQEVVRSYSLTGPAVVADRRRYAIAVRHARARLASGEVVSGVASSFINTRLAIGDTIELRAPAGTFVMPTRTARPLVLLAGGIGITPFINLLESLVGQQDPPRMLLLYANQNGTTHAFRDPLRELEALIPALKVINFYDAPADGDILGSDFQVHGRVTAAAVPDALLASRPLVYMCGPDAMMTAFAAGLAARGVPRFDIQKEVFRSPTVRRIEASQAFQVQFRRSDITLSWRSEHGPLLGFAEALGIRLPSGCRVGQCESCAVRIVSGTVHHLHGEAPDDPGVCLACQAVPASDLVIDA

SEQ ID NO: 8909 - protein, 586 aa, Triticum aestivum
  misc_feature (514)..(514): Xaa can be any naturally occurring amino acid
MAGRSGEEADAAMAGVATGGVEDAYGEDRATEDQPVTPWAVCIASGHSLLRDPRHNKGLSFTEKERDAHYLRGLLPPVVLSQELQEKRLLQNVRQLDVPLQRYMFLMDLQERNERLFYKLMIDNVEELLPVVYTPTVGEACQKYGSIFRRSQGLYISLKDKGRVLEVLRNWPEKSIQVIVVTDGERILGLGDLGCQGMGIPVGKLALYTALGGVRPSACLPITIDVGTNNEELLNDEFYIGLRQKRATGQEYTELLDEFMVAVKQNYGQKVLVQFEDFANHNAFTLLEKYKATHLVFNDDIQGTAAVVLAGLMAGLKFAGGTLADHTFLFFGAGEAGTGIAELVALEISMQSKTSQEEARKNIWLVDSKGLIVSSRKDSIQPFKKLYAHEHEPVKDLLSAIKDIKPTALIGSAGVGQSFTKEVIEAMSSINKRPIILALSNPTSKSECTAEQAYSWSQGRAIFGSGSPFDPVKYNDKLFVPAQANNAYIFPGFGLGVVTSGAIRVKDDMVLAAXAEALAEQVMAEHFDKGLIYPPFSSIRKISTNIAARVAAKAYDLGLASHLPRPKDLVKYAESCMYSPIYRSYR

SEQ ID NO: 8910 - protein, 491 aa, Thalictrum flavum subsp. glaucum
MEVLSAAMVSLFFIFLFIFFILCDSRNKDLPPGPRPSPIVGNLLQLGEKPHAEFAKLAEKYGELFTLKLGSQTVVVASSPAAAAEILKTRDKILSGRYVFQSFRVYEHVLNSIVWSECNENWKLLRKVCRTELFSPKMIESQAYIREAKALDMVRFLRKKENQEVKIVEVVFNTLVNIFGNLIFSKDVFDLEDPTGGSAELKEHLWKLLDMGNSTNPADYFPIMGKFDLFGQRREVAKVLKQIYDVWGVMLKERRSITGHRENDFANVLLNAGLDDQKINALLMELFGAGTETTASTIEWAITELTNNLRVISKLRAELINVVGHKTVKESNIPHLPYLQAIVKETLRLHPPTPLLLPRRALETCKVMNYTIPKECQIMVNAWAIGRDPKTWDDPLTFKPERFMNSTVDYKGNDFELIPFGGGRRICPGLPLASQFLSLIVATLVQNFDWSFPQGMTPNEVPMDEKFGLPLQKDPPLLIVLKARTSMKLQD

SEQ ID NO: 8911 - protein, 483 aa, Aspergillus nidulans FGSC A4
MASGTLPPFPTKLFINNQVENTPHPSTLLPADRMIINLVERDAERLAILESLPTGKPVTPTIHFDIAHMLEVWRYYAGWTDKISGESYPESNGVYKIVRHEPLGVCAGIASWNATFMYIGWKIAPAVAAGNCFIFKPSEKSPFGTLALGALFAEAGFPAGVVQILNGGAETGAALARHMDIAKISFTGSLGGGKAVQEAATKSNLKKVTLELGGKSPAVVFADAELERALGGVCGFLFNSGQVCVATSRVLVQKPIFEKFTQGLKSAFEQTSSTLGADPLDKNVSYGPIVDKAQFDKIMSYIAIGKQTATLLTGGERKGDKGFFIKPTIFVNPEPESPIVKEEIFGPVMVVQTFETEEEAIALANATVYGLAASVYTSNIDRALRVSSALECGGVAVNSPFLPQVNTAFGGIKASGKGRELGLYGLLEYTEAKSVHITCCVNRGGWNDLGTQPDQLQTAGSVMNCLRQEAETIWIDEAYRTST

SEQ ID NO: 8912 - protein, 328 aa, Bacillus cereus G9241
MVERLYGHHFHLQDEYFGGSAIDLNGQPLPQRTLAACLASDAVLLGAVGGPRWDSAKERPEKGLLALRKGLGVFANVRPVTVESATAHLSPLKKADEIDFVVVRELTGGIYFSYPKERTDEVATDTLTYHRHEIERIVSYAFQLASKRKKKVTSIDKANVLESSKLWRTVTEEVALRYSDVELEHILVDAAAMELIRNPGRFDVIVTENLFGDILSDEASVLAGSLGMLPSASHAEKGPSLYEPIHGSAPDIAGKNKANPIAMMRSVAMMLGQSFGLTREGCAIEEAISAVLKSGKCTADIGGTETTTSFTKAVMQEMEEQALVGRGR

SEQ ID NO: 8913 - protein, 335 aa, Bacillus cereus ATCC 14579
MCGITGWVDYKRSLEGERDVVTKMAETLAKRGPDDNKVWIKGNVAFGHKRLIVVDPEGGKQPMTCLKDETNYAICYNGELYNTEDIRKELLRRGYRFKGHSDTEVLLASYIEWKEECVDHLNGIYAFAVWDEQKEQVFIARDRLGVKPLFYKYDSGRLLFGSELKAILSHPDVKAEVTLEGLSEIFGLGPSRTPGHGIYAGIKELRPGHAMTFSKNGLCIWRYWNVESKKHEDSFEETVEKTRFLLQDAITRQLVSDVPLCTFLSGGVDSSAITAIAAKEYERSGKGQLHTYSIDYEDNDKYFKANAFQPNSDAPFINLMTETFQTNPSSLRHFE

SEQ ID NO: 8914 - protein, 481 aa, Pseudomonas aeruginosa PAO1
MNGLPMNLIWFRCDLRTTDNSALLAAADGRPCLALYLLSPAQWREHDDAPCKVDFWLRNLGELQRQLAALNIPLLVRDCGHWRQAPEVIGRLCRELGVGAVHVNQEYGVNEERRDQAVGQRLREQGVAFHSHLDQLFFAPGSVLTRTGGYFQVFSQFRKVCHERLYQALPGVRPRPQPQPPHALASDPLPDAVPAFPRPADSLRRLWPAGEEVAQERLRDFADQHLADYHERRDFPALPGTSQLSPYLAAGVLSPRQCLDAALVANRGEFSGGQQGAATWINELLWREFYKHILVGYPRVSRHRPFREETEALRWRQAPAELEAWQQGRTGIPIIDAAMRQLLATGWMHNRLRMVVAMFLSKNLLIDWREGERWFMRHLIDGDLAANNGGWQWSASTGTDAVPYFRLFNPLSQSERFDPRGEFIRHWLPELAGLERKAIHDPSSLGLFAGVDYPRPMVDLKASRERALAAFRNLPPRDGRA

SEQ ID NO: 8915 - protein, 176 aa, Zea mays
  misc_feature (105)..(105): Xaa can be any naturally occurring amino acid
  misc_feature (116)..(116): Xaa can be any naturally occurring amino acid
MHASGAISYRKEKNKKDTAVAPFQGLKSTASLPIARRSSRSLGNVSNGGRIRCMQVWPAYGNKKFETLSYLPPLSTDDLLKQVDYLLRNGWIPCLEFSKVGFVYXENSTSPCYYDXPYWAMWKLPMFGCNDATQVYKELQEAIKSYPDAFHRVIGFDNIKQTQCVSFIAYKPPGSD

SEQ ID NO: 8916 - protein, 509 aa, Zea mays
MIANGLRKSSAASSQVSKLVKYIASAGSLQGGHSLSEPSARHYSSEPSLQATEENGFKGHSMLAPFTAGWQSTDVHPLVIERSEGSYVYDSNGKKYIDALAGLWCTALGGNEPRLVKAATEQLNKLPFYHSFWNRTTKPSLDLANDILSMFTAREMGKVFFTNSGSESNDSQVKLVWYYNNALGRPDKKKFIARSKSYHGSTLIAASLSGLPALHQKFDLPAPFVLHTDCPHYWRFRLPDETEEEFSTRLANNLENLVLKEGPETIAAFIAEPVMGAGGVILPPKTYFEKIQAVLKKYDILLIADEVITAFGRLGTMFGCDMYNIKPDLVSIAKALSSAYMPIGAILVSPEITDVIYSQSNKLGSFAHGFTYSGHPVSCAVAVETLKIYKERNIVEHVNKIAPRFQEGIKAFSGSPIVGEIRGLGLILGTEFVDNKSPNDPFPAEWGVGSIFGAECEKRGMLIRVAGDSIMLSPPLIMTPNEVEEIISKFGDALKATEERIGELKSRKN

SEQ ID NO: 8917 - protein, 456 aa, Arabidopsis thaliana
MISPTMEQGESLRIRVVMGKDRISELPDGLLLKILSSLPTNIVVATSVLSKQWRSLWKLVPNLEFDSDDYESEHYTFSEIVCKSFLSHKAPVLESFRLKFVNFNPVDIGLWVGIAFSRHLRELVLDFYPAELGKGVTFTFPSSLCTCNTLETLKLVLCILVDIPSPVLMKSLRTLHLEFVRYKDESSVRNLLSGCPGLEELRLYRGDDSDIKVFTIEVPSLQRLTIHDNNDGPEFWGYVINAPFLKYLLIEELRCPEFCLNAPELVEANIAEVTSITIEKFLGSFTSVSRLLLNLSPLKITYPTGSMFYQLVSLEMYTREAEWWNLLTLMLENSPKLQVLKLTDRSQNFHKDGLVSGKWNEPKDVPECLLSQLETFVWRRFDWGREEEKEIATYILKNGRRLKKATFSTNPIESEELNKLKERRKVLNGLDGVVRASNSCQLVFKFDPSYLGSDSP

SEQ ID NO: 8918 - protein, 289 aa, Fusobacterium nucleatum subsp. nucleatum ATCC 25586
MSMTQINWYPGHMKKTKDLIEENLKLIDVVLEIVDARIPLSSKNPNIASLSKNKKRIIVLNKSDLVSKQELDKWKKYFKEQDFADEVVEMSAETGYNVKKLYEAIEFVSKERKEKLLKKGLKKVSTRIIVLGIPNVGKSRLINRIVGKNSAAVGNKPGFTRGKQWVRIKEGIELLDTPGILWPKFESKTVGINLAITGAIRDEILPLEDVACSLLRKMLEQGRWESLKERYKLLEEDRDDKVLENILSKIALRMAMLNKGGELNVLQAAYTLLRDYRVAKLGKFGLDEI

SEQ ID NO: 8919 - protein, 323 aa, Deinococcus radiodurans R1
MVRPDFFLLGEPMPVDPNLYQLLLQLSQAPEPAGLEELRAGVIANAARSPKRPVTIGEVRDLSVAGAEGSLPARLYHPAGQAPASGWPLTVFFHGGGFVVYDLDTHDALCRELCATSGAAVLSVAYRLAPEARFPAPVDDALASVVWAAAHAAELGADAGRLAVAGDSAGANLATVTALRSRDEGGPALRAQLLIYPAADFEHPERYPSRQENGRGYFLTDERMRFFGQMYLARPEDAAHPHASPLNAESLAGLPPALVLTAEFDPLRDEGALRRSSQGRWRNAEYRPGPGMIHGYANMTAFSPVAAQLIDEAGVWLGEQLRG

SEQ ID NO: 8920 - protein, 231 aa, Triticum aestivum
  misc_feature (179)..(179): Xaa can be any naturally occurring amino acid
  misc_feature (191)..(191): Xaa can be any naturally occurring amino acid
  misc_feature (211)..(211): Xaa can be any naturally occurring amino acid
  misc_feature (217)..(217): Xaa can be any naturally occurring amino acid
MKTLLILTILAMAITIGTANIQVDPSGQVQWLQQQLVPQLQQPLSQQPQQTFPQPQQTFPHQPQQPVPQPQQPQQPVPQPQQPQQPFPQQPQQPFPQPPQPPLPQTQQPQQPFPQQPQQPFPQTQQPQQPFPQQPQQPFPQTQQPQQPFPQQPQQPFPQTQQPQQPFPQLQQPQQPFPXPQQQLPQPQQPXQSFPQQQRAFIQPSLQQQLXNPCRNXPTMPNLNWGILLGQ

SEQ ID NO: 8921 - protein, 525 aa, Triticum aestivum
  misc_feature (519)..(519): Xaa can be any naturally occurring amino acid
MAAIKPPPPDRPPQAARLPSPSSSSSAVAAAKRGATGSRGLLMGRYELGRVLGKGTFAKVYHARHVQTGESVAIKVLDREKAVRSGLVSHIKREIAVLRCVRHPNIVHLFEVMATKTKIYFVMELVRGGELFSRVSKGRLKEDIARRYFQHLISAVGFCHTRGVFHRDLKPENLLVDEAGNLKVSDFGLSAVAEPFQPEGLLHTFCGTPAYVAPEVLARRGYEGAKADIWSCGVILFVLMAGYLPFHDQNLMAMYRKVYKGEFRCPRWFSKDLTSLIMRFLDTNPSTRITLPEVMESRWFKKGFRPVKFYIEDDQLYNVIDAENDMLDLGLPDPLPQPLLPPPSSPSPQEVDGDDSGSESDASVVSCPATSSFEERHRLRGPLPRPASLNAFDIISFSRGFNLSGLFEEKGDEVRFISSEPMSGIITKLEEIANVKSFAVRKKDWRVSLEGTREGVKGPLTICAEIFELTPSLVVVEVKKKAGDKEEYDDFCNKELKPGMQHLVHQMAPVPITPTISEXAERPSR

SEQ ID NO: 8922 - protein, 370 aa, Triticum aestivum
  misc_feature (124)..(124): Xaa can be any naturally occurring amino acid
  misc_feature (143)..(143): Xaa can be any naturally occurring amino acid
MEKTNIVACRNPTSRDASDDEEATWSHAWGLISGFAVSITLKTAIELGIIDALTNAAGRALTVDELAAQLPAPDKAGSAASVDRLLRLLAAFDVVRCSTETGPDCEAVRKYTPAPVCRWLTSNXSMTHRLRDQIDHSNFVCYXTGHDAGAAVVCPAPTPFERAHRAPLCVYLGKNPRLSGVFNQAMFHMSVTVISKMVERFDGFDGVEVLVDVGGGTGAALEMITARHKHIKGINFDLPYVITQAPSLPGVENIAGNMFENVPTGDAIFLKWILHLQNDDECIKILKNCHRALPANGKVIVVEIVLPTTTEATREAQNMFLLDVIMFNNQQGGKERTEQDFLKMARSSGFDGAFRSTYIFGNFWALEFTK

SEQ ID NO: 8923 - protein, 250 aa, Thermoplasma acidophilum
MDIDERPLEEPQPGWVTVRVNYAGICGSELSAFVGQNELRKPPSIMGHEFTGKVVKVGSSSDSNLLGKNVAVNPLVTCGKCRYCKTGNRQLCPERKLIGVDYPGGFEEYVNVPSYSCYEITEKPEGSLAEPLATAFRAINHAKPEMDDRALVIGAGTIGLLSAKLLELYGTVERVVTDINDYRLEHALHWGATRTINNKKEKSIPKDFDIVIDAVGTQETRTMAINSIARGGRVVFVGLHEPNAEMPVNL

SEQ ID NO: 8924 - protein, 411 aa, Rickettsia prowazekii
NLEFAELKIRGKLFKLPILKASIGKDVIDISRVSAEADYFTYDPGFMSTASCQSTITYIDGDKGILWYRGYDIKDLAEKSDFLEVAYLMIYGELPSSDQYCNFTKKVAHHSLVNERLHYLFQTFCSSSHPMAIMLAAVGSLSAFYPDLLNFNETDYELTAIRMIAKIPTIAAMSYKYSIGQPFIYPDNSLDFTENFLHMMFATPCTKYKVNPIIKNALNKIFILHADHEQNASTSTVRIAGSSGANPFACISTGIASLWGPAHGGANEAVINMLKEIGSSENIPKYVAKAKDKNDPFRLMGFGHRVYKSYDPRAAVLKETCKEVLNELGQLDNNPLLQIAIELEALALKDEYFIERKLYPNVDFYSGIIYKAMGIPSQMFTVLFAIARTVGWMAQWKEMHEDPEQKISRPR

SEQ ID NO: 8925 - protein, 210 aa, Triticum aestivum
  misc_feature (89)..(89): Xaa can be any naturally occurring amino acid
MDEEGDEVYGPEIPVDGDMEAADVDMTAAGDDAAKELDEMKRRLKEMEEEAAALRDMQAKVAKEMQGGDANASTAEAKEQVDARSVYVXHVDYACTPEEVQQHFQACGTVNRVTILTDKFGQPKGFAYVEFLEQEAVQEALNLNESELHGRQIKVSPKRTNVPGMKQRPPRGFNPYHAYPYRSYGAPYFPPYGYGRVPRFRRPTRYRPYF

SEQ ID NO: 8926 - protein, 489 aa, Streptomyces galilaeus
MDRADRRYQDLVTRGFNGRFRGRPDVVYVVHTADQVVDAVNQAVAAGRRIAVRSGGHCFEGFVDDPAVRAVIDMSQMRQVFYDSGKRAFAVEPGATLGETYRALYLDWGVTIPAGVCPQVGVGGHVLGGGYGPLSRRDGVVADHLYAVEVVVVDASGQARKVVATSAADDPNRELWWAHTGGGGGNFGIVTRYWFRTPGATGTDPSALLPKAPTSTLRHIVTWDWSALTEEAFTRIIDNHGAWHQRNSAAGTPYASMHSVFYLNSRAAGQILLDIQTDGGLDGAETLLNDFVAAVNEGTGVEPAVQRTTEPWLRATLANKFDTGGFDRTKSKGAYLRKPWTAAQAATLYRHLSADSQVWGEVSLYSYGGKVNSVPETATATAQRDSIIKVWMSATWMDPAHDDANLAWIREIYREIFATTGGVPVPDDRTEGTFINYPDVDLADPRWNTSGVPWYTLYYKGNYPRLQRVKARWDPRDVFRHALSVRPPG

SEQ ID NO: 8927 - protein, 430 aa, Amycolatopsis mediterranei
MTVQKAPSQLLAAKLQIPPIPYSHAAGSWVYASDGTRYLDGASGIVNVNIGHAHPTVVAALRDQVGICTYASPGTFAPDLMEQLAAAAARAVHRPDDRVMFTPTGTHATESAIALARLVQRARGEEGRHKILTSTLGYHGNSAFVLALSGHRSRRPHEDDSFGLAPAFNPPYPGQHLGCPFDACRVECVRAVRDAIVAAGPESVAAVLMEPVNGTTGGGYVPPAGYLRALREVCDEFGVLVIHDEVLTGLGRCGLPLASHHTPGSAADIVTLSKGLGAGYVPLAATMLSPDLAEDIMTSGKWLPLMGTMSATPLQGRAGLAVLSVLEELGALDRDEVRGAALGRLVADAVRGRQVVTDVRGLGYFYGIELAPGTLGDVMRITRSRGLLLYPYVGFRPDRTGEGLLVAPRSTRPTAISASSARRWARHWTS

SEQ ID NO: 8928 - protein, 280 aa, Lactococcus lactis subsp. lactis Il1403
MIEQEKYTLNDGHLIPKIGLGTFQIRGYEGVEQILTAIQSGYRLLDTSTNYDSEGAVGEAIRRSGIPRSNFFVTTKLPGKYHHFEDALKMIEESLLRTGLSYFDLYLIHWPLPKRDNYVEAWKALIAAKKRGLVRSIGVSNFEEDHLDKIIQETGVIPAINQNEIHPYWPQEKLLKINKKYGILTEAWSPLGRGSKELEESLIQNIAQKYGKDTGQIILRWQVERGIIPIVKATSPEHQRRNIDIFDFSLSSEEINKITALKQENGRVDNQDPNEYEEFV

SEQ ID NO: 8929 - protein, 322 aa, Gibberella zeae PH-1
MSSYADSWLKFEEGIGGVRPVLRGTAEEMRTQYNGLGSALASLSSPVSDTQVKVTEGDVSGIKYRIYKPQGETKNFPIGVFYHSGGFVVGNLDAEDSFCRTVALRAGITIVNVDYRLSPEHKAPTHVEDAVALYEWAYHNAESISGDPSKMFTIGTSAGGGLALSTARKIVLGQTTLPMDAIKGVVALCPLTLHYENIPAEHQPQHLSYQEHGENIPIVDKLSLSQMLANTGIRPDDKDYFPILDHSCLKLFPPTYVVTCGQDALRDDGNILSNALSSAGVPTKTNHYESMPHCFWIVPTLPETKEFLDALTGGIQWIKSRF

SEQ ID NO: 8930 - protein, 411 aa, Rickettsia rhipicephali
DSEFAELKIRGKIFKLPILKASIGEDVIDISRVSAEADCFTYDPGFMSTASCQSTITYIDGDKGILRHRGYDIKDLAEKSDFLEVAYLLIYGELPSGEQYNNFTKQVAHHSLVNERLHYLFQTFCSSSHPMAIMLAAVGSLSAFYPDLLNFKEADYELTAIRMIAKIPTIAAMSYKYSIGQPFIYPDNSLDFTENFLHMMFATPCTKYKVNPIIKNALNKIFILHADHEQNASTSTVRIAGSSGANPFACISTGIASLWGPAHGGANEVVINMLKEIGSSEYIPKYIAKAKDKNDPFRLMGFGHRIYKNYDPRAAVLKETCKEVLKELGQLDNNPLLQIAIELEAIALKDEYFIERKLYPNVDFYSGIIYKAMGIPSQMFTVLFAIARTVGWMAQWKEMHEDPEQKISRPR

SEQ ID NO: 8931 - protein, 122 aa, Staphylococcus aureus subsp. aureus COL
MANHEQIIEAIKEMSVLELNDLVKAIEEEFGVTAAAPVAVAGAAGGADAAAEKTEFDVELTSAGSSKIKVVKAVKEATGLGLKDAKELVDGAPKVIKEALPKEEAEKLKEQLEEVGATVELK

SEQ ID NO: 8932 - protein, 475 aa, Synechococcus elongatus PCC 7942
MYEKIQPPSEGSKIRFEAGKPIVPDNPIIPFIRGDGTGVDIWPATERVLDAAVAKAYGGQRKITWFKVYAGDEACDLYGTYQYLPEDTLTAIREYGVAIKGPLTTPIGGGIRSLNVALRQIFDLYACVRPCRYYTGTPSPHRTPEQLDVVVYRENTEDIYLGIEWKQGDPTGDRLIKLLNEDFIPNSPSLGKKQIRLDSGIGIKPISKTGSQRLIRRAIEHALRLEGRKRHVTLVHKGNIMKFTEGAFRDWGYELATTEFRTDCVTERESWILANQESKPDLSLEDNARLIEPGYDAMTPEKQAAVVAEVKAVLDSIGATHGNGQWKSKVLVDDRIADSIFQQIQTRPGEYSVLATMNLNGDYISDAAAAVVGGLGMAPGANIGDEAAIFEATHGTAPKHAGLDRINPGSVILSGVMMLEYLGWQEAADLITKGISQAIANREVTYDLARLMEPAVDQPLKCSEFAEAIVKHFDD

SEQ ID NO: 8933 - protein, 167 aa, Magnetospirillum magnetotacticum MS-1
MAPSSFDRQMVSQANVSATVKWFNASKGFGFVAPSDGSPDAFLHISALERAGLTQVAEGATLVVDLGAGQRGPQVVMVHEVDSTTATPRAPRREERGPTETVEGVVKFFSAEKGFGFVACDEGGKDVFVHVKALERSGIKTLESGQRVRVTTTLGLKGPQADTVAII

SEQ ID NO: 8934 - protein, 354 aa, Nicotiana tabacum
MAADNIYDFVASNLLCTETKSLCFDDVDSLTISQQNIETKSKDLSFNNGIRSEPLIDLPSLSEECLSFMVQREMEFLPKDDYVERLRSGDLDLSVRKEALDWILKAHMHYGFGELSFCLSINYLDRFLSLYELPRSKTWTVQLLAVACLSLAAKMEEINVPLTVDLQVGDPKFVFEGKTIQRMELLVLSTLKWRMQAYTPYTFIDYFMRKMNGDQIPSRPLISGSMQLILSIIRSIDFLEFRSSEIAASVAMSVSGEIQAKDIDKAMPCFFIHLDKGRVQKCVELIQDLTTATITTAAAASLVPQSPIGVLEAAACLSYKSGDERTVGSCTTSSHTKRRKLDTSSLEHGTSEKL

SEQ ID NO: 8935 - protein, 99 aa, Brassica napus
  misc_feature (29)..(29): Xaa can be any naturally occurring amino acid
  misc_feature (48)..(48): Xaa can be any naturally occurring amino acid
  misc_feature (93)..(93): Xaa can be any naturally occurring amino acid
RVRELRCFQAVTCYQAVINNLEDAHELIXTAISTALKKTRPAKITTTXKLAGNPKAKFNPQPGPLSRVPKVSKLMGLDTAVEARAEFLSKAVXPVLVGG

SEQ ID NO: 8936 - protein, 77 aa, Glycine max
MGFWTLLEGFLLFANASAILNEDRFLARRGWTLAEMTGPQRNSLKGQVIGLIYACQFLRLPLILFNVITIIVKLFSG

SEQ ID NO: 8937 - protein, 439 aa, Nostoc punctiforme PCC 73102
MSSPQILLIRRACIVLPNGEMMIGDVLTRDRQIVEVAPEISQTAVVTEIDAEGLTLLPGVIDPQVHFREPGLEHKEDLFTASCACAKGGVTSFLEMPNTRPLTTTQQALDDKLERASQKSLVNYGFFIGATAENLPDLLLAKPTPGIKIFMGSMHGQLLVDGETTLETIFAKGDRLIAVHAEDQARINQRRQEFANIHDPAVHSQIQDNQAALLATQLVLKLSQKYHRRLHILHMSTAEEADLLRQEKPSWVTAEVTPQHLVLNTSAYEKIGTLAQMNPPLRSPHDNEVLWQALRDGVIDFIATDHAPHTLEEKAQEYPNSPSGMPGVETSLALMLTAAMEGKCTVSQVVNWMSKNVAVAYGIPNKGVIAPGYDADLVLVDLNTYRPVRREELLTKCHWSPFEGWNLTGWATTTIVGGEIVYDKGQVNTQVRGQALTFL

SEQ ID NO: 8938 - protein, 316 aa, Escherichia coli
TDKLTSLRQYTTVVADTGDIAAMKLYQPQDATTNPSLILNAAQIPEYRKLIDDAVAWAKQQSNDRAQQIVDATDKLAVNIGLEILKLVPGRISTEVDARLSYDTEASIAKAKRLIKLYNDAGISNDRILIKLASTWQGIRAAEQLEKEGINCNLTLLFSFAQARACAEAGVFLISPFVGRILDWYKANTDKKEYAPAEDPGVVSVSEIYQYYKEHGYETVVMGASFRNIGEILELAGCDRLTIAPALLKELAESEGAIERKLSYTGEVKARPARITESEFLWQHNQDPMAVDKLAEGIRKFAIDQEKLEKMIGDLL

SEQ ID NO: 8939 - protein, 100 aa, Glycine max
  misc_feature (13)..(13): Xaa can be any naturally occurring amino acid
  misc_feature (81)..(81): Xaa can be any naturally occurring amino acid
MASSTISDPAVTXVNHAQADIVTTFTDLKSKTALPTRNTNNDITSIGSNTGRVHFMQAYPAHNKNNTDTVSYLAHLYDAQXSKDEEYLIMNGWMNCLQFK

SEQ ID NO: 8940 - protein, 140 aa, Glycine max
  misc_feature (45)..(45): Xaa can be any naturally occurring amino acid
  misc_feature (78)..(78): Xaa can be any naturally occurring amino acid
  misc_feature (106)..(106): Xaa can be any naturally occurring amino acid
  misc_feature (132)..(132): Xaa can be any naturally occurring amino acid
LSTATRAGMVAPFTGLKTMAGFPTSKTNNDITPRASNGGRVSFFXERTPDGKNEVDTLRHLPDDDDAQLAKEPATVLXKGWIPWLEFEKEDGFVYREHKRAPGYYXGRYWTMSDTETFGRTDRSPVLKRLSXGNTGYPQA

SEQ ID NO: 8941 - protein, 288 aa, Oryza sativa (japonica cultivar-group)
MAAAAAACVESPDEGVEIREVWAGNLEAEIAAIRDEVDRYPYVAMDTEFPGIVCRPVGNFRTTDEFNYANLEANVNMLKLIQLGLTLSDEGGDLPRRGTGGRRCIWQFNFRGFDPRTDPSNADSIQMLRTCGIDFDRFAAEGADPIRFAELLMSSGVVLNADVQWITFHSGYDFGYLLRLLTGRNLPDNMPAFFDLIRIYFPVLYDIKHLMRFCSNLHGGLSRLGELLDVKRVGTCHQAGSDSLLTLGCYNKIKEVYFKGSTEKHAGVLYGLVIEDGVNRPPPTQPNE

SEQ ID NO: 8942 - protein, 355 aa, Thalictrum flavum subsp. glaucum
MALQEGVNYLSGLGLSRLICLPMALRAAIELNVFEIIFQAGPEAQLSPAEIVAKIPTKNPNAAIALDRILRMLGASSILSVTTMKDGRVYGLTEESRCLVADKNGVSVVPMLLFTSDKAVVESFYNIKDVVLEEGVIPFDRTHGMDFFAYAGKEQSVNKSFNQAMGAGSTIAFDEVFKVYKGFHDLKELVNVGGGIGTSLSNIIFKYPHIKGINFELPHVIADAPNYPGVEHIAGNMFEGVPNAQNILLKWVLHDWDDERSIKILQNCWKALPEGGTVIVVEFVLPQILGNNAESFNALTPDLLMMTLNPGGKERTTTEFDGLAKAAGFAETKFFPISQGLHVMEFHKATAGVAS

SEQ ID NO: 8943 - protein, 312 aa, Aspergillus nidulans FGSC A4
MSKPGDYNAVRRDIAAQLKKPGYDDGSAGPVFVRLAWHSSGTYDAASDTGGSNGAGMRYEAEGGDPANAGLQHGRAFLEPVKEKHPWITYSDLWTLAGVVAIEEMGGPKIPWLPGRTDFVDDSKVPPRGRLPDGAQGADHLRFIFYRMGFNDQEIVALAGGHNLGRCHADRSGFQGPWVNNPTRFSNQFFKLLLNMEWKPKTLENGVSQFVYIDPEAEDHEEPLMMLPTDVALRDDPAFRPWVERYAKDKDLFFDHFSKAFAKLIELGIQRDASGKVTNTDNVKGGYHSAPKKSDEPTGPPRPHTAQRAAKL

SEQ ID NO: 8944 - protein, 1251 aa, Aspergillus nidulans FGSC A4
MTVWLMWQEERAVESLVTCDAARVGGKERRDLQPKNGLRKEKLIAETVLSAMTEQDNSYRPRSPDLSTFQPAIPSPVYQFGNPLAHRTSYDASPFFTPHYQQPPVASARALQQYIPPYPDHSFDADMARRSSRLSRAVEVAPAPAPEMKYEEPKYEEPLYQEPVKPEQPSEPVEHPKLDPAAGIEVKTKFPVARIKRIMQADEDVGKVAQVTPIAVSKALELFMISLVTKAAKEAKDRNSKRVTASHLKQAVAKDEVLDFLADIIAKVPDQPTGRKHEDDGSDQNEQPKRKRGGRRPKDDNRDGAHILRRCGGGMACIFDVNRALILGTLISLQAINLAFYLHYLLNFPQLCTEKVRTWVLTLNPFRSQGHHAAYSEYFHSPSYLLFSSRLLLVLLPARKYHAVATAKMDFWSRIIGGSRSLSKSPRATSPTERLTTFKRTCNTLQQIWRSSNSTAAEQAAIVHARHCIERLNSVLSDESRGPAPHPCLAYAASSQIFVTVTKLALSSYDEAMLRSATVLFNTLIDSEVDGVVDNRLFARALVDLVRRADKKSADIEGRLVELLFGVANNIRLQPNILPAWFAPRTDDEEQSTGSVEFAGTMRTDDFPLFYLLVEWVHHAGRAGDFARTGLLYLIETASRSKDLERWLIESDLATLMATGLGALYSQLGSLGSCLDVEPVVPHVISHSDHAQQETALPPALGSSMDSFMAYLLFWQDTIDHCKSAEVVATLLDHFQVLFLEQLLYPSLLESSDVEGGSTAAVLTYLYRILASVDQEDLVQRILHFLLASPSGVDVQAPEKKKDMSASRRKSLDVLAAFSQEAARPSPTLFNLRDLVLLGLQSPNRQTVLATLRLLTVILQRYSSFSIFLIRTNPTQPAKQRTVGALNAEVGHLLTMATSIMEEPTLDQSFDNYLKDASWILESRLATPPPDNCSETLPCEIRQEDPIVRELLGCLETFFTNTVIVNLALTEVLMSIASSHLMALDGWLLVDPAKYHYVQSDGGSSNDKSEDILDQVHRMYQEPTWSPADTPALTAALRRLVDKVQEWRKQVEDFDILIAARRDLLHEDDVRTNQAEQNLGTPAPRSTERYSSNTPRTPPLGFDQGTPRGRRDLRNLTSPQRSIVGSPLREVTVNKTHSPPPRDASEARSAAEELRKRLAAPFLPESKVSTFNDRTDNSAQEPSPADQEVAVTDEEERKPKAETASLGHVLTNVVILYEFLLEISAAVQARGAIFEEAGFHGVGSSLPVDDS

SEQ ID NO: 8945 - protein, 150 aa, Brassica napus
MERSLLQWRLLPLLALIASFLSVFFASRSYEKETQCSLLPHDHYWISSKRILTPDGLISGSVEVNGGVIVSVVKEEDWYKEQRSRVKVTDYGEAVIMPGLVDVHAHLDDPGRSEWEGFPSGTKAAAAGGITTLIDMPLNSDPSTVSPETL

SEQ ID NO: 8946 - protein, 333 aa, Glycine max
  misc_feature (53)..(53): Xaa can be any naturally occurring amino acid
MEVVSDEEAFLFGMELAGASAVSMVLKSALELGILETIAKAGPGAYLSPSHIXYNILTYSLHQLPHGKAERHYGLHPKAKYLVNNEGGVSVAAYFLMEHDKVLKDMWFHLTDSVKEGGHPFSNAYGMTAFEFHDTNPRFNKLFNKGLSDISSITMKKILETYNGFEGVGSVVDVGGGTGAIINMVASKYPTTKCVNFDLPHVIKEAPAYTGVEHISGDMFVSVPKGDVIFMKWVCHDWNDEQCLKLLKNCYDSLPDDTGKVILAEGISPETPDSNLAARCEFQMDVIMLCHSPNGKEKTEKEYKALAKGAGFHGFRIASCVLNTHVMEFLKKA

SEQ ID NO: 8947 - protein, 147 aa, Thermotoga maritima MSB8
MLLGRREDIFRPFRELQREIDRLFDDFFRTEVRPAKEFFAPDMDVYETDDEVVIEVEIPGIDRKDVKITVEENILKISGEKKLEREQKGKNYYYVERSAGKFERAIRLPDYVDVEKIKAEYKNGVLTIRVPKKEERKKKVIEVEVQE

SEQ ID NO: 8948 - protein, 481 aa, Mesorhizobium loti MAFF303099
MDIGLLIDGDKRDASGAAAYERLDPFTGKLATRAAAASVADANAAVEAAAAAFATWSKTGPGERRALLSRAADVMASKVGEFTKLMMEETGATAPWAGFNVMLAANMLREAAAMTTQISGEIIPSDKPGTLAMAIRQPAGVCLGIAPWNAPVILGTRAIAMPIASGNTVVLKASEMCPGTHRLIGQVLVEAGLPKGVINVVTNDPKDAAAIVEALVAHPSVKRVNFTGSTKVGRIIAELAGRHLKPALLELGGKAPLLVLDDAAIDAAVNAATFGAFMHQGQICMSTERLIVDERIADEFVSKLAARASQLPAGDPRGHVVLGSLISSQAADKMEELIADAVAKGAKLVAGGKRTGTVVEATLLDHVTPAMRVYAEESFGPVKPVIRVKDEDEAVRVANDTEYGLSSAVFSRDIKRAMAVAARIEAGICHINGPTVGDEAQMPFGGVKGSGYGRFGGKASIAEFTDLRWVTIEDPGQHYPF

SEQ ID NO: 8949 - protein, 473 aa, Schizosaccharomyces pombe
MTNTRLASTRRLASSLLSQASLRSRQLNPLFTSSYSTRSSSLKDRLAELIPEKQAEIKKFRAEHGQDVIGEVTINQMYGGARGVRSLIWEGSVLDPNEGIRFRGYTIPECQKLLPSSPNGKQPLPESLFWLLVTGEIPTLSQVQALSADWAARSQLPKFVEELIDRCPPTLHPMAQFSLAVTALEHDSAFAKAYERGMNKHDYWKYEYEDCMDLIAKTVPIAGRIYRNLYRDGVVAPIQMDKDHSYNFANVLGFANNEEFVELMRLYLTIHADHEGGNVSAHTGHLVGSALSSPFLSMAASLNGLAGPLHGLANQEVLNFLITMKKEIGDDLSEETIKSYLWKLLNSGRVVPGYGHAVLRKTDPRYTAQREFALEHLPKDPMFQLVSRLYEIVPGVLTEHGKTKNPYPNVDSHSGVLLQYYGLKEQSFYTVLFGVSRTLGVASQLIWDRALGLPIERPKSFSTEALKKMVETK

SEQ ID NO: 8950 - protein, 324 aa, Haloferax volcanii
MTEEIVVIPGDGIGAEVIPAAVDVLKAVGDFEFVEADAGDHVKEETGEALPQETYDLAAEADATLFGAAGETAADVILPLRTAVDSFVNVRPAKAYPGVDALRPETDLVFLRENTEGVYSGHEDRLSEDLSTLTRVVTTSASERLAEYACDYVGGEGGSFQVAHKANVMRETDGRFRDAAVAVADERGVETEEVLMDAFATRVCLDPTQFDTIVCPNLAGDVLSDLAAGLVGGLGLLPSANIGPDAALFEPVHGSAPDIAGEGIANPAATILSAAMLLDYLDHEAEADRVRSAVEGVLADGPRTPDLGGDASTEDVTAAILDRL

SEQ ID NO: 8951 - protein, 474 aa, Bacillus cereus G9241
MKKHLYINGDWKSVNTYKPLYAPYSEETLAEIAQGTEEDVKEAVTAAKNAMKEMNTLSAYDRATILEKVAQKMDERREEFAEIIAKEAAKPIRAARGEVDRTVQTYKFAAEEAKRIYGETLPLDAAPGADGRIAYTIRKPIGVIGAITPFNFPLNLVAHKVGPAIAAGNTVVLKPADQTPLSSYALVELFEEAGLPKGALNIISGPGSTVGEAIVTNDDVASITFTGSPKVGIGIKAKAGLKRVTLELGSNAAVIIDKDVELTDELIERVKWGAFVNNGQVCISVQRVFVHEERMDEFLSKLQKAMETLVVGDPLIEETDVSALISKKDVDRIDNWVQEAVKEGANVLYGGNKRDERIFEPTVLTNVPKHVSVQCQEVFGPLMTVNTFKEFDEAIEQANHSRYGLQAGVFTNNLFKAMRAIDELEVGGVMINDIPTFRVDHMPYGGVKESGTGREGIKYAIEEMTEMKLVCIKK

SEQ ID NO: 8952 - protein, 303 aa, Physcomitrella patens
MDQYEKVEKIGEGTYGVVYKARDRLTNETIALKKIRLEQEDEGVPSTAIREISLLKEMHHGNIVRLQDVVHSEKRLYLVFEYLDLDLKKHMDTCPDLAKDPRLIKTFLYQILRGIAYCHAHRVLHRDLKPQNLLIDRRTNALKLADFGLARAFGIPVRTFTHEVVTLWYRAPEILLGSRHYSTPVDVWSVGCIFAEMVNQRPLFPGDSEIDELFKIFRTLGTPNEEVWPGVTSLPDFKTAFPKWPPKPLSSVVPSLEPAGIDLLEVCDLSTPASEFCVVLFFFIISTFSLIVRLKQCMQSYAS

SEQ ID NO: 8953 - protein, 430 aa, Mycobacterium tuberculosis H37Rv
MSVLIRGVRPYGEGERVDVLVDDGQIAQIGPDLAIPDTADVIDATGHVLLPGFVDLHTHLREPGREYAEDIETGSAAAALGGYTAVFAMANTNPVADSPVVTDHVWHRGQQVGLVDVHPVGAVTVGLAGAELTEMGMMNAGAAQVRMFSDDGVCVHDPLIMRRALEYATGLGVLIAQHAEEPRLTVGAVAHEGPMAARLGLAGWPRAAEESIVARDALLARDAGARVHICHASAAGTVEILKWAKDQGISITAEVTPHHLLLDDARLASYDGVNRVNPPLREASDAVALRQALADGIIDCVATDHAPHAEHEKCVEFAAARPGMLGLQTALSVVVQTMVAPGLLSWRDIARVMSENPACIARLPDQGRPLEVGEPANLTVVDPDATWTVTGADLASRSANTPFESMSLPATVTATLLRGKVTARDGKIRA

SEQ ID NO: 8954 - protein, 506 aa, Pseudomonas aeruginosa PAO1
MIYAAPGTPGAVVTFKPRYGNYIGGEFVPPVKGQYFTNTSPVNGQPIAEFPRSTAEDIDKALDAAHAAAEAWGRTSVQERSNILLKIADRIEQNLELLAVTETWDNGKAVRETLNADIPLAADHFRYFAGCIRAQEGSAAEINDSTVAYHIHEPLGVVGQIIPWNFPLLMAAWKLAPALAAGNCVVLKPAEQTPLGICVLLELIGDLLPPGVLNVVQGFGREAGEALATSKRIAKIAFTGSTPVGSHILKCAAENIIPSTVELGGKSPNIYFEDIMQAEPAFIEKAAEGLVLAFFNQGEVCTCPSRALVQESIYPAFMEEVLKKVRAIKRGDPLDTETMVGAQASQQQYEKILSYLDIAQQEGAELLAGGSVEKLEGNLASGYYIQPTLLKGHNGMRVFQEEIFGPVVGVTTFKDEAEALAIANDTEYGLGAGLWTRDINRAYRMGRGIKAGRVWTNCYHLYPAHAAFGGYKKSGVGRETHKMMLDHYQQTKNLLVSYDINPLGFF

SEQ ID NO: 8955 - protein, 475 aa, Staphylococcus aureus subsp. aureus MRSA252
MRDYTKQYINGEWVESNSNETIEVINPATEEVIGKVAKGNKADVDKAVEAADNVYLEFRHTSVKERQALLDKIVKEYENRKDDIVQAITDELGAPLSLSERVHYQMGLNHFVAARDALDNYEFEERRGDDLVVKEAIGVSGLITPWNFPTNQTSLKLAAAFAAGSPVVLKPSEETPFAAVILAEIFDKVGVPKGVFNLVNGDGAGVGNPLSEHPKVRMMSFTGSGPTGSKIMEKAAKDFKKVSLELGGKSPYIVLDDVDIKEAAKATTGKVVNNTGQVCTAGTRVLVPNKIKDAFLAELKEQFSQVRVGNPREDGTQVGPIISKKQFDQVQNYINKGIEEGAELFYGGPGKPEGLEKGYFARPTIFINVDNQMTIAQEEIFGPVMSVITYNDLDEAIQIANDTKYGLAGYVIGKDKETLHKVARSIEAGTVEINEAGRKPDLPFGGYKQSGLGREWGDYGIEEFLEVKSIAGYFK

SEQ ID NO: 8956 - protein, 250 aa, Zea mays
  misc_feature (185)..(185): Xaa can be any naturally occurring amino acid
MAKNYPTVSAEYSEAVEKARRKLRALIAEKSCAPLMLRLAWHSAGTFDVSSRTGGPFGTMKCPAELAHGANAGLDIAVRLLEPIKEEFPTLSYADFYQLAGVVAVEVTGGPEIPFHPGREDKPQPPPEGRLPDATKGSDHLRQVFGKQMGLSDQDIVALSGGHTLGRCHKERSGFEGAWTTNPLXFDNSYFKELLNGDKEGLFQLPSDKALLSDPVFRPLVEKYAADEKAFFYDYKKAPLKLSELGYADA

SEQ ID NO: 8957 - protein, 491 aa, Candida albicans SC5314
MAPKLNNPNLFQNKPFINGQWYDSKSTSTFKVYDPATQELIIELPDQTPEEIDEAIAITHKAFQTYQRTPVYERAKWLRRMYELMIENLQDLATLITWENGKCLADALGEIKYAASYFEWFSEECKRNYGHTIQPSNQNNKVITYKQPVGPVGLLCPFNFPSAMGARKAAPALAAGCTCILKPDGQTPLSSLALAYLAQQAGFPDGCFNVVLTSVTNTPMCGLKFCQSPKLKKISFTGSTNVGKLLMQQSSSTLKKLSMELGGNAPIIVFNDCNLDLAVDQSITSKFRSLGQTCVCANRIYVEKGVYDEFCNKFVEKVNQFKIGNGFEPGVTHGCLINTKAIEKVEDHVQDAVEKGAKLIVEGGRLPQLGENFYSPSVVKDVTQDMKVVKEETFGPLAAIIPFDSKEQVLQWCNDTPYGLASYIFSENLNTVWYMSEFLENGMVSVNTGLFTDAALPFGGVKESGFGREGSLYGMDDYTVIKSITLGNVYN

SEQ ID NO: 8958 - protein, 325 aa, Scutellaria baicalensis
MACMATSFRPIFSIAALVLLLTLVPSEAQLSATFYDSTCPNAVSTIRTSIRQAVSAERRMAASLIRLHFHDCFVQGCDASILLDETSTIQSEKTAGPNAGSVRGFQVIDAAKTAVERLCPGVVSCADILTLAARDASVAVGGPSWTVRLGRRDSTTANRAQANTDLPGPTSTLTQLITRFDAKGLNAREMVALSGAHTLGQSQCGNFRARIYSNGSDIEANFASTRRRQCPQDGSGDSNLAPLDLVTPNSFDNNYYRNLVARRGLLQSDQVLLSGGETDAIVTSYSSNPATFASDFANAMIKMGEIQPLQLGQNGIIRRTCGAVN

SEQ ID NO: 8959 - protein, 193 aa, Magnaporthe grisea 70-15
MAEIRRKLVIVGDGACGKTCLLIVFSKGTFPEVYVPTVFENYVADVEVDGKHVELALWDTAGQEDYDRLRPLSYPDSHVILICFAIDSPDSLDNVQEKWISEVLHFCSGLPIILVGCKKDLRYDQKTIEELRKTSQKPVSPEDGEEIKKKIGAYKYLECSAKTNEGVREVFEHATRAALLSRHKTKKKKCLIL

SEQ ID NO: 8960 - protein, 277 aa, Staphylococcus aureus subsp. aureus COL
MEVKTFYNGNTMPQIGLGTFRVENDENCMESVKYAIEQGYRSIDTAKVYGNEEQVGAGIRAGLESTGIAREDLFITSKLYFEDFGRENVAAAYEASLSRLGLKYLDLYLVHWPGTNEAVMVDTWKGMEDLYKNNNVKNIGVSNFEPEHLEALLAQVSIKPVINQVEYHPYLTQHKLKLYLAAQRIVMESWSPLMNAQILNDETIKDIAQELGKSPAQVVLRWNVQHAVVTIPKSVTPNRISENFQIFDFELSDEQMTRIDGLNQDKRIGPDPKKFEG

SEQ ID NO: 8961 - protein, 278 aa, Zea mays
MTLYLQLVSTSLHAGSPRLALLHLRRSCEFNPRVSMSSYSPPPPPPRDQSMDTEAPNAPITRERRLNPDLQEQLPKPYLARALEAVDPSHPQGTKGRDPRGMSVLQQHAAFFDRNGDGVIYPWETFQGLRAIGCGLTVSFAFSILINLFLSYPTQPGWLPSPLLSIRIDNIHKGKHGSDSETYDTEGRFDPSKFDAIFSKYGRTHPNAITRDELSSMLQGNRNTYDFLGWLAAAGEWLLLYSLAKDKDGLLQRETVRGLFDGSLFERLEDDNNKKKSS

SEQ ID NO: 8962 - protein, 165 aa, Aloe vera
SGYSLLRDPHHNKGLAFTDKERDAHYLRGLLPPVCISQELQEKKLMRSLRQYQVPLQRYMAMMDLQERNERLFYKLLIDNVEELLPVVYTPTVGEACQKYGCIFKRPQGLYISLKEKGKILEVLKNWPERSIQAIVVTDGERILGLGDLGSQGMGIPVGKLSLYT

SEQ ID NO: 8963 - protein, 138 aa, Triticum aestivum
  misc_feature (125)..(125): Xaa can be any naturally occurring amino acid
GTFVAPFQGLKSTAVLPISRRSSSAGLSSVSNGGRIRCMQVSPIEGIKKFETLSYLPPLSTEALLKQDDYLIRSKWVPCLEFSMVGFVFREHNSSPGYYDGRYWTMWKLPMFGCTDAIQVLNEVXEVKMEYPDSYVRL

SEQ ID NO: 8964 - protein, 129 aa, Treponema denticola ATCC 35405
MAALTNEQIIEAIGEKTILELSELIKAMEEKFGVTAAAPVAVVAGGAAGGGAAEEEKTEFTVTLKGLSDPGKKIGVIKEVRNVIPGLGLKEAKELVEGAPKVLKEDVSKEEAAKIKEAITAAGGEVEIA

SEQ ID NO: 8965 - protein, 375 aa, Pseudomonas aeruginosa UCBPP-PA14
MDTPIERAPLAPDLSQARYAVDLTGLVPAEVAAGLPPLPPNHFYFYPPDPLLEGDGAITAIEDSDPFDQYVYRLRRVLYQGRTRWQNVLIADTYNYDRVLMLDGAIQSAESDESLYHELLVQPAMLAHDEPRDVLIIGGGEGATLREVLSHASVRRAVMVDLDRELVELCREHLFQWHQGAFDDPRCELLAEDGRAYLERDPSLYDVVIIDVVDMLDNGPAQALYTRQFYELLHSRLRPGGVVAVQGLEFSHSDDKPHAALARTLRSVFSQVHSYRATVPSFLSSWGFLLASDWLDANHWQAEDIDRRIERKLGPLWLDHLDGDYLKACFVMDRETRFLLAQPGPVLEDGVPFVAPPDIEEIEFGPAQLPALART

SEQ ID NO: 8966 - protein, 338 aa, Pirellula sp. 1
MLIMPVDPTPVLQYINGFRFSKVMFAAVELGVFDSLEQQKRSAEDLAIELQCDPAAVSRLLNGLVGMELLSRDGEQYKNTGLASELLTSTSPNRMTGYIKFSNDVSWKLWSHFENAIREGSHRWKDAYGWDQPIFSSFFADDAAMREFLMGMHGYGVISSPKVVRAVDLSQFNHLVDLGGATGHLPMAACEAYESLTATVFDLPGVIPLTKEIVAQSSVSDRIDVVAGDFFDDELPQADLMSLGRILHDWSDEKIDRLLSKIYDRLPEGGGLLLAEILIQDDRGGPDWGQMQDLNMLVCTEGRERTLAEYEAILRRAGFREVTGQVTGAPVDAVLAIK

SEQ ID NO: 8967 - protein, 208 aa, Oryza sativa (japonica cultivar-group)
MGEYCDWRRSEAIKRQDREATNPSAIRGRRRRRRRRRRGDREMESAMFGLETPLMTALQHLLDIPDGEGGAAGKQGATGGPTRAYVRDARAMAATPADVKDLPGAYAFVVDMPGLKSSDIKVQVEEERLLVISGERRRGGGEEEKEESCKYLRMERRMGKFMRKFVLPDNADVDKISAVCQDGVLTVTVEKLPPPEPKKPKTIEVKVA

SEQ ID NO: 8968 - protein, 389 aa, Glycine max
GAECIDPDCTWVEQWVHRAGPREKIYYKPEEVKAAIVTCGGLCPGLNDVIRQIVITLEIYGVKNIVGIPFGYRGFSDKELTEVPLSRKVVQNIHLSGGSLLGVSRGGPGVSDIANSLEKRGINMLFVLGGNGTHAGANAIHHECRKRRLKVSVIGVPKTIDNDILLMDKTFGFDTAVEEAQRAINSAYIEAHSAYHGIGVVKLMGRSSGFIAMQASLSSGQVDICLIPEVPFNLHGPHGVLSHLKYLLETKGSAVVCVAEGAGQNLLQKTNATDASGNVVFGDIGVYIQQETKKYFKEIGVHADVKYIDPTYMIRAIRANASDGILCTVLGQNAVHGAFAGYSGITVGLCNTHYAYFPIPEVISHPRLVDPNSRMWHRCLTSTGQPDFI

SEQ ID NO: 8969 - protein, 448 aa, Xylella fastidiosa Ann-1
MREHPDTLPLVPIVRGEGVWLVGHDGRRYLDAVSSWWTNLFGHADPRISAAIAAQARTLEHVMLAGFSHEPAVRLAEALLRLAPRQDGREPLSKVFYADNGSAGVEVALKMAFHYFRNRGEEQRTRFIALHNGYHGETIGALAVGDIPLYRRVYAPLLTEVLFAPSPDAYLAEPGQSAAEYALQAAEALEALFKRYSGQICALILEPLLQCAGGMRMHHPVYLHRVRELCDAHGALLICDEIATGFGRTGTLFACEQACSAISTDTDDKQLGIMPDLLCLSKGLTGGVLPLAAVLTTQQLYEEFLDDSRERAFLHSHSYTGNPLACIAALTTLDIFENDCIIERNQVTAARMTQLAASLSGHPHVADVRQTGMVVAFELTRDGNKRTPFPPQARLGLHVYRAALARGVILRPLGDVVYWMPPYCVDEEQLHLLAETTRVAIDEAIACV

SEQ ID NO: 8970 - protein, 404 aa, Emericella nidulans
MASQVQPGQKPKVQPCRYKTGKTLGAGLYSVVKECVHIDTGQYYAAKVINKRLMVGREHMVRNEIAILKQVSTGHQNILTLVDYFETMNNLYLVTDLALGGELFDRICRKGSYYESDAADLVRAILSAVAYLHDHGIVHRDLKPENLLFRTPEDNADLLIADFGLSRIMDEEQLHVLTTTCGTPGYMAPEIFDKSGHGKPVDIWAIGLITYFMLCGYTPFDRETNLEEVQAIATANFSFTPVEYWRGVSQEARDFIKRCLTVNPKKRMTAHQALQHPWINPPYDTTDDLGSGEDLLPNIKKNFNARRTLHKAIDTVRAINKLRENGGLMMDGIMSVDPKPEHVNGSEVVEDRTTPRERENEDAMEIDSRSNARGQTEQQIREQERKVKETVAGLWSRTAPRSER

SEQ ID NO: 8971 - protein, 1025 aa, Chloroflexus aurantiacus
MSVSDVASAPVIPLETILHTRRHLAILGEPGAGKSTTLQFIGLSYALATAQQPVERLSITRPAVPVYLRLPVSASTITQQTVREAMVAEVRDRLQCSAAEAEAVLRSWQEWPGVIILLDGLDEVPVALRVQVRERIKTLMRSGIGRVIITSRPSVLLHLGGLDEYTLKPFEHFDRDVLPYLKGWLRVLKPDLQAQVVDNVAQDVMTKLRASPALRSLIGNPLLLRLIVQYFVTTGDIAWNRADLYRQWVTEAWARARWRGAAATEEPHYLIALHTLAWHLHAGRDNTETALQTVLRTSGLAADDRAAADLLHRLQAQTGLLLRLSTGQDGLAHVRYVFAHQTLREYLVALRLQQAWQRGKHRTWRFLQPRLHLPEWREPLALLVGLLTESEAQHLLRQILHAKSSEERLLCRDLLLTANLAVESGYIHSVWESLAPKLARALRREHLSKETAAVLARVGKPAVPMLAQALNDPSVEVRRAVVQALGLVGDAAVPVLAQALNDAQPEVRWAAVASLVAVGNAAVDTLVQALGDDDAEVRRVIGQALLEIGDAAMPALVKALADKRANVREAAARALGESGYAAAVSALVQSLRDENPWVRQAVAEALGAIGDAAAVVALAQALNDENVWVRQATARALGRIGGAAAMLPLTVALNDENPWVRQAVAEALGTIGDAAAVLPLTRALSDEHAWVRRSAARALGQIGDGAAVPALAKALSDGDVQVRQQVVEALGCIGDSAAAAALVKALGDTNAEVRWTTMKAFEQIGSRNVATLLRAISDGKWQFPWQDAQAWKIGNQAIEAIGSVFNGGDTGKRMIATLALGETGNSAALPALERALRDTDLWVRRAALEALAKIGDQAVIVPALERALRDTDQWVRQTAAEMLVKIDDTAAVLPALERALRDADQWVRRTAAEALGKIGDASAVEALQRALADTESMGAAGRSRGARKDRRCVGGGGAAKGIGRYRSMGAAGRSGGARKDWRCVGSGGAAKGIGRYRSMGAAGRSRGVGEDRRCKSGSITDTVTE

SEQ ID NO: 8972 - protein, 436 aa, Bacillus cereus G9241
MRDYLIKPLVGQPYPMISHGKGVYLYDQNGNKYFDGSSGAITAGIGHGVKEIADVIKKQAEEIAFVYRSQFTSEPAEKLAKKLSDLSVGDLNWSFFVNSGTEANETAMKIAIQHFQERGIQGKHKILSRWMSYHGITMGALSMSGHPLRRQRFVSILEDYPTIPAPYCFRCPVQKVYPTCQLACATELERSIERIGAEHIAAFIAEPIIGAAGGAVVPPKEYYKVIKDICSHYDILFIADEVMTGLGRTGAWFAMEHWGVEPDIMTLGKGLGAGYTPMAATVVSDRVMEPILRGSRSVMSGHTLSANPLSAATALAVIEYMEKHNLPEKTAEKGEYLIKGLQKVQQQSTIIADVRGKGLLIGVELQPFTKASELISVAAKNGLLLYQAVSGQAGKEDSALLVAPPMTTTYSELDELLSIFAKSVEEMMQKGGHSIA

SEQ ID NO: 8973 - protein, 453 aa, Rhodospirillum rubrum
MAQSYDLILKGGTAVLPGRTMRADIAVCGGKVVRVGFLDAGSARQTIDCAGLHVLPGVIDTQVHFREPGLEHKEDLESGTRAAVLGGVTGVFEMPNTAPATDSPEALEEKLTRAQGRTWCDHAFFLGASAANAAALGGWERRDGCAGVKIFMGSSTGSLLVDQDEAIARVLAGGFRRVAVHCEDEARLKERKALVADGASVALHPEWRDVETALAATRRLLALARQAGRKVHVLHVTTAEEMALLQDNRDIASVEVTPQHLTLAAPDCYEGLGTFAQMNPPIREARHREALWRALEQGVVDIIGSDHAPHTLKEKSLPYPKSPSGMPGVQTLVPVMLDHVNTGKLSLERFVDLTSAGPARVYDIAGKGRIAAGYDADFTVVDMNAERTITNEWIASKCGWTPFHGLSVRGWPVMTIIRGAIVMRDGALQGRPLGAPVRFHPLPPLTKESAVLR

SEQ ID NO: 8974 - protein, 103 aa, Oryza sativa (japonica cultivar-group)
MEQGKQQHQPPPPSQPQPQQEKRGSRDDDMHKTTGDVMTHSFGEGYSTRSDEEGFGGVYGQNDPVFNPGTEVHPSHPEYDTSQGSEVKEKEKARHHKDDKHAT

SEQ ID NO: 8975 - protein, 426 aa, Phalaenopsis sp. SM9108
MAFSVGLTRFIVSSHPKTAKEILSSPAFADRPIKESAYELLFNRAMGFAPFGDYWRNLRRISSTYLFSPRRVSSFEKQRSEIGEGMVRDMKRMMERNGVVEVRRMLHYGSLNNIMLTVFGKKFDFAKDEGLELELILKEGYELLGIFNWGDHLPLLGWLDLQGVRRRCRTLVAKVNVFVKKIIDEHKRRANGVGIDEGEGEDFVDVLLGLEEKDRLSESDMVAVLWEMIFRGTDTVAILLEWTLARMVLHPDIQSKAQVEIDSVVDSSRPVLDSDIQRLPYLQSIVKETLRMHPPGPLLSWARLAIHDVPVDGHMIPAGTTAMVNMWAITHDECNWAEPNKFNPDRFIDEDVNILGSDLRLAPFGSGKRVCPGKTMALAAVHLWLAQLLKSFKLLPSRNGVDLSECLKMSLEMKNPLVCVAVPRFE

SEQ ID NO: 8976 - protein, 463 aa, Arabidopsis thaliana
MRSDHYFSLRSPTEDFVGGYPSDEEWHGYINNNDRVLLKVISYSSPTSAGAECLDHDCSWVEQWIHRAGPREKIYFRPEEVKAAIITCGGLCPGLNDVIRHIVITLEIYGVKNIVGIPFGYRGFSDKDLTEMPLSRKVVQNIHLSGGSLLGVSRGGPSVSEIVDSMEERGINMLFVLGGNGTHAGANAIHNECRKRKIKVAVVGVPKTIDNDILHMDKTFGFDTAVEEAQRAINSAYIEAHSAYHGIGVVKLMGRNSGFIAMQASLASGQVDICLIPEVLLCYYFKFQNMIDELALRDPMHLKVPFNLHGPNGVLKHLKYLIETKGSAVICVAEGAGQNFLEKTNAKDASGNAVLGDFGVYIQQETKKYFKEISTPIDVKYIDPTYMIRAVRANASDGILCTVLGQNAVHGAFAGYSGITVGIINTHYAYLPITEVIAYPKSVDPNSRMWHRCLTSTGQPDFI

SEQ ID NO: 8977 - protein, 478 aa, Caulobacter crescentus CB15
MTDTLRHYIGGERVAADAPAESLNPSNTNDVVAKVPMGGQAEVDAAVDAARKAFPAWADASPEVRSDLLDKVGSTIIARSADIGRLLAREEGKTLAEGIGETVRAGRIFKYFAGEALRRHGQNLESTRPGVEIQTYRQAVGVYGLITPWNFPIAIPAWKAAPALAFGNTVVIKPAGPTPATANVLADIMAECGAPAGVFNMLFGRGSMGDALIKHKDVDGVSFTGSQGVGAQVAAAAVARQARVQLEMGGKNPLIVLDDADLERAVAIALDGSFFATGQRCTASSRLIVQDGIHDKFVALLAEKVAALRVGDALDPNTQIGPAVSEDQMETSYRYIDIAASEGGRVVTGGDRIKLDNPGWYVRPTLIADTQAGMRINNEEVFGPVASTIRVKSYEEALEIANGVEFGLSAGIATTSLKHARHFQRYARAGMTMVNLATAGVDYHVPFGGTKSSSYGAREQGFAAVEFFTQTKTSYSWS

SEQ ID NO: 8978 - protein, 319 aa, Mycobacterium tuberculosis H37Rv
MTEPTVARPDIDPVLKMLLDTFPVTFTAADGVEVARARLRQLKTPPELLPELRIEERTVGYDGLTDIPVRVYWPPVVRDNLPVVVYYHGGGWSLGGLDTHDPVARAHAVGAQAIVVSVDYRLAPEHPYPAGIDDSWAALRWVGENAAELGGDPSRIAVAGDSAGGNISAVMAQLARDVGGPPLVFQLLWYPTTMADLSLPSFTENADAPILDRDVIDAFLAWYVPGLDISDHTMLPTTLAPGNADLSGLPPAFIGTAEHDPLRDDGACYAELLTAAGVSVELSNEPTMVHGYVNFALVVPAAAEATGRGLAALKRALHA

SEQ ID NO: 8979 - protein, 320 aa, Mycobacterium tuberculosis H37Rv
MPSLDNTADEKPAIDPILLKVLDAVPFRLSIDDGIEAVRQRLRDLPRQPVHPELRVVDLAIDGPAGPIGTRIYWPPTCPDQAEAPVVLYFHGGGFVMGDLDTHDGTCRQHAVGADAIVVSVDYRLAPEHPYPAAIEDAWAATRWVAEHGRQVGADLGRIAVAGDSAGGTIAAVIAQRARDMGGPPIVFQLLWYPSTLWDQSLPSLAENADAPILDVKAIAAFSRWYAGEIDLHNPPAPMAPGRAENLADLPPAYIAVAGYDPLRDDGIRYGELLAAAGVPVEVHNAQTLVHGYVGYAGVVPAATEATNRGLVALRVVLHG

SEQ ID NO: 8980 - protein, 462 aa, Glycine max
  misc_feature (308)..(308): Xaa can be any naturally occurring amino acid
MESKPHVLMHRYELGRLLGQGTFGKVYYARSTITNHSVAIKVIDKDKVMKTGQAEQIKREISVMRLARHPNIIQLFEVLANKNKIYFVIECAKGGELFNKVAKGKLKEDVAHKYFKQLINAVDYCHSRGVYHRDIKPENILLDENGNLKVSDFGLSALVDSKRQDGLLHTPCGTPAYVAPEVIKRKGYDGTKADIWSCGIVLFVLLAGYLPFHDPNLIEMYRKISKAELKCPNWFPPEVCELLGMMLNPNPETRIPISTIRENSWFKKGQNIKNKRPVVENNTVSSSSTVLLDQNDCDGLAAEANGEXVVPLSINAFDIISRSVGFDLSRFFDESFKIKEARFSSRLPANVIISKLEDIAKQLRMKIKKKAAGLLKLESLNEGRKGVLSIDAEIFEVIPCFHMVEVKKSNGDTLEYQKILKEDIRPSLHDIVWVWQSDQQLQSQQSEQHQHTDDQQQQQPQS

SEQ ID NO: 8981 - protein, 386 aa, Rickettsia aeschlimannii
DSEFAELKIRGKIFKLPILKASIGEDVIDISRVSAEADCFTYDPGFMSTASCQSTITYIDGDKGILRHRGYDIKDLAEKSDFLEVAYLLIYGELPNGEQYNNFTKQVAHHSLVNERLHYLFQTFCSSSHPMAIMLAAVGSLSAFYPDLLNFKEADYELTAIRMIAKIPTIAAMSYKYSIGQPFIYPDNSLDFTENFLHMMFATPCTKYKVNPIIKNALNKIFILHADHEQNASTSTVRIAGSSGANPFACISTGIASLWGPAHGGANEVVINMLKEIGSSEYIPKYIAKAKDKNDPFRLMGFGHRVYKNYDPRAAVLKETCKEVLKELGQLDNNPLLQIAIELEAIALKDEYFIERKLYPNVDFYSGIIYKAMGIPSQMFTVLFAI

SEQ ID NO: 8982 - protein, 182 aa, Brassica napus
  misc_feature (112)..(112): Xaa can be any naturally occurring amino acid
MAYSMLSSAAVVTSPAQATMVAPFTGLKSSSAFPVTRKANNDITSIVSNGGRVSCMKVWPPVGKKKFETLSYLPDLTEVELGKEVDYLLRNKWIPCVEFELEHGFVYREHGXSTPGYYDGRYWTMWKLPLFGCTDSAQVLKEVQECKTEYPNAFIRIIGFDNNRQVQCISFIAYKPPSFTGA

SEQ ID NO: 8983 - protein, 484 aa, Arabidopsis thaliana
MKHSGGNQACYVLGQKTPSIRDLYSLGHKLGQGQFGTTYMCKEISTGREYACKSITKRKLISKEDVEDVRREIQIMHHLAGYKNIVTIKGAYEDPLYVHIVMELCSGGELFDRIIQRGHYSERKAAELIKIIVGVVEACHSLGVMHRDLKPENFLLVNKDDDFSLKAIDFGLSVFFKPGQIFEDVVGSPYYVAPEVLLKHYGPEADVWTAGVILYILVSGVPPFWAETQQGIFDAVLKGHIDFDSDPWPLISDSAKNLIRGMLCSRPSERLTAHQVLRHPWICENGVAPDRALDPAVLSRLKQFSAMNKLKQMALRVIAESLSEEEIAGLKEMFKAMDTDNSGAITFDELKAGLRRYGSTLKDTEIRDLMEAADIDKSGTIDYGEFIAATIHLNKLEREEHLLSAFRYFDKDGSGYITIDELQHACAEQGMSDVFLEDVIKEVDQDNDGRIDYGEFVAMMQKGIVGRTMRKSINMSIRNNAVSQ

SEQ ID NO: 8984 - protein, 471 aa, Pseudomonas syringae pv. tomato str. DC3000
MSGQARGLNEKETVCMSDKSVNLLKSAIDGCVLTPRDPEYGDARLIYNRMHDSMPAAIVYPEHVADIRTSALMAAKEGVSFAMRGGGHHIAGFSTCDGGIVLDFKKWKNITLDVTTGILAVQPGVRLAEIDEFLVSRNLVIPTGTVSDTGLIGLTLGGGIGWLVGLYGLTCDCLVGADVVLADGRLVKAEDSEHGDLLWALKGGSGGFGVITELRYRPLPLPATYCGSGSVSLADTEACLSRLVFFLETQCPGELTVAPNFSRAVSGDVVMNIDYCYSGTAIRWIDTLQALIPEATWEAVTRWDFRDWQRNFDAKFLPPMRGYWKSSYTPSWGLDFSLLGTLMQNAPEGNCSILIEHLHGRFCDSDDAHSAFPLREARFGVLFSARWLSESEDADYIAWVKNGIFSVDPQGRSLSYSNYTSADDVGAAKSFSKLSRARLFSIKSVYDPDHFFKGNHGSLLFAGSGEVHRVQ

SEQ ID NO: 8985 - protein, 480 aa, Burkholderia fungorum LB400
MSQFANYIDGQWVDGASVSRNVNPSNLDDVIGEFAQADAEQTQRAIRAARNAFAQWSLSTPQQRFDLLDQAGSTILARKAELGRLLAREEGKTLPEAIGEVGRAGQIFKFFAGEALRIGGEIVPSVRPGMTVEVTREPLGVIGLITPWNFPIAIPAWKIAPALAYGNTVVVKPADLVPASTWELVRIIAEAGAPAGVINLVMGQGAVVGEALVSSPQVDAVSFTGSVATGRAIGAKCFASGKKFQLEMGGKNPMVVLDDADLDVAVEACINGGFYSTGQRCTASSRFIVTEGIHDRFIDAMKARMQALKVGDALADGTHIGPVVDDKQLQQDERYIAIAREEGGTIFGGERIERDTRGYFLAPALITDTTPDMRINREEVFGPVASVIKVKDYNEALAVANDTEFGLSAGICTTSLKYSSHFRRHVQAGMVMVNTATAGVDYHVPFGGRKGSSYGPREQGSYAREFYTTVKTAYVSPGAV

SEQ ID NO: 8986 - protein, 338 aa, Brassica napus
  misc_feature (65)..(65): Xaa can be any naturally occurring amino acid
  misc_feature (124)..(124): Xaa can be any naturally occurring amino acid
  misc_feature (141)..(141): Xaa can be any naturally occurring amino acid
MDAKEASPTDLKQPSEAADNAAAAASMETENGDQTKEPDCVSSLIPGWFSEMSPMWPGEAHWLKXEKVLFQGYFDYQDFFVLRVCSTMVRVFGNCMEYSNSSSQTNSALSREMIPHLPLCSFPXPYMTVLVIRGGRVEGVXRGVGQMATSAPFCARYPNPKKVLVIGGGDGGVAIGFEDPRVNLVIGDGVAFLKNAAEGSYDAVSPDSSDPIGPAKELFEKPFFQSVARALRPGGVVCTQAESLWLHMDIIEDIVSNCREIFKGSVNYAWTSVPTYPSGVIGFMLCSTEGPDVDFKHPVNPIDDSKSSGPLKFYNAEIHSAAFCLPSFAKKVIESKTN

SEQ ID NO: 8987 - protein, 213 aa, Ammopiptanthus mongolicus
MGCFNSKVRRQFPGQEDPVILASQTAFTVSEVEALFELFKSISSSVIDDGLISKEEFQLAIFKNRKKENIFANRIFDLFDVKKKGVIDFDDFVRSLNVFHPNAPLEDKIDFSFKLYDLDNTGFIERQEVKQMLIALLCESEMKLADEVIETILDKTFLDADLNQDGKIDIVEWQNFVSKNPSLLKIMTLPYLRDITTSFPSFVFNSNVDEVAA

SEQ ID NO: 8988 - protein, 181 aa, Zea mays
  misc_feature (167)..(167): Xaa can be any naturally occurring amino acid
MGDAPETFATTAPLAPVTSERKVRSDLEEKLPKPYLARALVAPDTEHPNGTEGHDSKGMSVMQQHGAFFDQNGDGIVYPWETYAGFRDLGFNPISSVFWSLIINLAFSYVTLPSWLPSPLLPVYIDYIHEAEHGSDSSTYDTEGRYVPFYLENIFSKYALTAANKLXFKEMWNLTEVNECH

SEQ ID NO: 8989 - protein, 508 aa, Oryza sativa (japonica cultivar-group)
MAATPPSSQHRRPLSSSASAASLAGKPRGGGLLLGRYELGRLLGHGTFAKVYQARSADSGEPVAIKVLDKEKAMRHGLVPHIKREIAILRRVRHPNIVRLFEVMATKSKIYFVMELVRGGELFGRVAKGRLKEDTARRYFQQLVSAVGFCHARGVFHRDLKPENLLVDEHGDLKVSDFGLSAVADQFHPDGLLHTFCGTPSYVAPEVLARRGYDGAKADIWSCGIILFVLMAGYLPFHDQNLMAMYRKIYRGEFRCPRWFSKDLSSLLNRILDTNPETRITVKEVMESRWFQKGFRPVRFYVEDDQVHSLADGDNDMPELEPSEPPPPPPFPPPPPQQDDDGEESGWESDSSVASCPATLSSEERRQRPLGSLTRPASLNAFDIISFSKGFDLSGLFEERGSEVRFISAEPMQTIITKLEEIAKVKSFFVRRKDWRVSIEGTREGLKGPLTIGAEIFELTPSLVVVEVKKKAGDKEEYDDFCNRELKPGMQHLVHHMGSVPNIPSDTE

SEQ ID NO: 8990 - protein, 157 aa, Triticum aestivum
MAGMVFGLDAPMMAALQHLLDIPDGEAEPPPEKQGPTRAYVRDARAMAATPADVKELPGAYAFVVDMPGLGSGDIKVQVEDERVLVISGERRREEKEDAKYLRMERRMGKLMRKFVLPENADMEKISPCRDGVLTVTVDKLPPPEPKKPKTIQVQVA

SEQ ID NO: 8991 - protein, 339 aa, Microscilla sp. PRE1
MKAAFYKEKGKFELGEGKVVVPGPGEVRLDVAYCGVCGTDVHIFHGVMDKRVNPPQTIGHEASAVVAEVGEGVTNVKVGYKVAVRPLRFGEPHPFDKGHAHVGKNLKFIGIDSEGAFQNSWTVPAYTLHQLPDGLSLEHGAFIEPLAVACHDVKIGRVKSGENTLVIGGGPIGTLIAYVLKEKGANVIVSEVNEARLKMLSELGFQTINPLKENLVDRISELTEEKMIDCAFEVSGSAPGVKTMTEVVNVRGRIVMVAIHGGEPKPVDLFKFFWSEIELLGARLYEEDDYEEAIRIAASGNIPFSKLITSKNTLDNIQQIFEEIDQNPAGMKYLIDCQA

SEQ ID NO: 8992 - protein, 495 aa, Pirellula sp. 1
MSVATQHTLLPEVQSFLDQSPLASFVGGKHYPSEQGNVLATIDPGSGDQLAEIHDLNAAEIDRAVEIANEAFPAWAGLSQQERSSILLKLADAVESHKAIIAQIEALDAGKIEAQAAGDVQNFVDTMRYFVGLSDKVEKRTKLDVPGHDAYTVKQPWGACAFIFPWNFPFLLIGWGISPALAAGNTVVIKPAEDTSLSAIYLAQLAKEVGVPDGVINVVTGRGATAGAALTNNAEIKRMSFTGSPEVGRLVGESCGRNLVPVKLELGGKGAAVVFDDVDVKATAQALVGAITFHTGQVCCDATRWLIHENIYDEFVAECKQLMEKVRIGHPLDPNSDMGPVVNPKQRERVLGYQEKGTAGGAQCLCGGGPATVDGLNGNYVKPTLLAGSLDNVAAREEIFGPVAYLAKFSDEADAIAKANDTDYGLANSVWTTDVERANRVAESMIAGNSWINAHNVFAHGVPYGGVKKSGMGGGVLSPETLMDYYRSTSVVRPL

SEQ ID NO: 8993 - protein, 204 aa, Pseudomonas aeruginosa UCBPP-PA14
MLKIVLLVTGVAALLLSFIPSLRTEATPFLQHPDAIYLAILGLINLLFAPVLQSSHPTRPLQAGAAALLVLGVVLQALILLAPLPTIADQPAIVLPLLSLVLATALQLAGSLKPGKPVSRSASAPTALGGSQDSGNRETGTVKWFNTSKGFGFISRDSGEDIFVHFRAIRGEGHRILIEGQRVEFSVVQRDKGLQAEDVIASRR

SEQ ID NO: 8994 - protein, 199 aa, Leptospirillum ferrooxidans
SGVMKKIRFPKTASIGIKPVSEEGTKRLVRAAIRFALANNRKSVTLVHKGNIMKFTEGYFRKWGYEVAKEEFGDKTVSWDDCGGNAPAGKLLIKDEIADAFLQKILLRANEYDVIATLNLNGDYLSDALAAQVGGIGIAPGANINYETGAAVFEATHGTAPKYANHDKVNPGAVILSGEMMFRYMGWNEVADLILKGLR

SEQ ID NO: 8995 - protein, 486 aa, Microscilla sp. PRE1
MIMSTVKNYKLYIDGEWIDATTGESQEILSPTDETVVGTVQMGVEADAQIALEAAERAQKQWKKVPARKRADLLRTFAAEIKANKNQLAELLVREQGKLLAVAKMEVEVTASFIEYACDGARSIEGDIIPSDNPAEHIMIHKIPRGVVVAITAWNFPLALAGRKLGPALVAGNSVVLKPTQETPIATLELGNIANKVGLPKGLINILTGQGSVLGNALVANPITKMVSMTGSTPAGQQIFRTAAENLIHVQLELGGKAPCIVFDDADLEQAVEGAFHSRFDNCGQVCTSNERLYVHESIYNEFMERFMEKVKGLKLGNPMDAATTIGPKVNAKEVAHMEHLVTKSVEEGATVAIGGKKPQGKAFEKGHWFEPTILTDVKQNMTIVHEESFGPILPVIKFSEFNEVIGYANDCEYGLAAMVFTNDMNKIMRLNDELEFGEIYINRGHGEQHQGFHNGYKLSGTGGEDSKYGFEQYMEKKTFYIKYKA

SEQ ID NO: 8996 - protein, 304 aa, Chlamydomonas reinhardtii
MDIAQVDEIIERLLDVRNGRPGKQVQLAENEIRLLCLTAKEIFMSQPNLLELEAPIKICGDIHGQYSDLLRLFEYGGFPPEANYLFLGDYVDRGKQSLETICLLLSFKIKYPENFFLLRGNHECASINRIYGFYDECKRRYNIRLWRTFTDCFNCLPVAALIDEKILCMHGGLSPELKSLEQIKRITRPTDVPDSGLLCDLLWADPDKDIQGWGENDRGVSYTFGPDCVTEFLQKHDLDLVCRAHQVVEEGYEFFAKRQLVTIFSAPNYCGEFENAGAMMSVDETLMCSFQILKPAETKAKGRR

SEQ ID NO: 8997 - protein, 491 aa, Burkholderia cepacia R18194
MADWQDKAASLKIEGRAFIDGASRDAHGGKTFDCVSPIDGRVLAKVADCGEADVNAAVAAARRAFDAGVWAGLNPRARKAVLLRWAALMREHLDELSLLETLDAGKPIGDTTTVDVPGAAYCVEWFAEAIDKVGGEVAPADHHLVGLVTREPVGVVAAVVPWNFPILMAAWKFGPALAAGNSVVLKPSEKSPLTAIRVAQLAYEAGIPAGVFNVVPGAGEPGKLLALHRDVDCIAFTGSTAVGKLIMQYAAQSNLKRAWLELGGKSPNIVLADCPDLDRAAQTAAGAIFYNMGEMCTAGSRLLVHRDIKDAFIEKLVAAARAYVPGNPLDPSVSMGAIVDGIQLERVLGYIEAGRSEGKLVTGGARVKEETGGFYVEPTVFEVKPDAKIAREEIFGPVLSVIVFDDVDEAVRIANDTEYGLAAAVWTSNLTTAHDVSRRLRAGTVWVNCYDEGGDMNFPFGGYKQSGNGRDKSLHALEKYTELKSTLIRLR

SEQ ID NO: 8998 - protein, 498 aa, Gluconobacter oxydans
MNVVSKTVSLPLKPREFGFFIDGEWRAGKDFFDRSSPAHDVPVTRIPRCTREDLDEAVAAARRAFENGSWAGLAAADRAAVLLKAAGLLRERRDDIAYWEVLENGKPISQAKGEIDHCIACFEMAAGAARMLHGDTFNNLGEGLFGMVLREPIGVVGLITPWNFPFMILCERAPFILASGCTLVVKPAEVTSATTLLLAEILADAGLPKGVFNVVTGTGRTVGQAMTEHQDIDMLSFTGSTGVGKSCIHAAADSNLKKLGLELGGKNPIVVFADSNLEDAADAVAFGISFNTGQCCVSSSRLIVERSVAEKFERLVVPKMEKIRVGDPFDPETQIGAITTEAQNKTILDYIAKGKAEGAKLLCGGGIVDFGKGQYIQPTLFTDVKPSMGIARDEIFGPVLASFHFDTVDEAIAIANDTVYGLAASVWSKDIDKALAVTRRVRAGRFWVNTIMSGGPETPLGGFKQSGWGREAGLYGVEEYTQIKSVHIETGKRSHWIS

SEQ ID NO: 8999 - protein, 317 aa, Burkholderia cepacia R18194
MTTALDQLKQYTTVVADTGDFQQLAQYQPQDATTNPSLILKAVQKDAYKPILEKTVRDHRNESTDFIIDRLLIAFGTEILKLIPGRVSTEVDARLSFDTPRSIDKGRELIKLYEAAGIGRERILIKLASTWEGIRAAEVLQKEGIKCNMTLLFSLVQAAACAEAGAQLISPFVGRIYDWYKKQAGAEWNEEKDGGANDPGVQSVRRIYTYYKTFGYNTEVMGASFRTTSQITELAGCDLLTISPDLLQKLQDSNDTVTRKLSPDALQDKPAARVAIDEAAFRFQLNDDAMATEKLAEGIRVFAADAVKLEKLIDSLR

SEQ ID NO: 9000 - protein, 435 aa, Thermotoga maritima MSB8
MRKRVFSLLLVLAFLSVGFAQDGVTDVGWSLDMVWILISAALVFFMQAGFAMVESGFTRAKNTVNVLMKNLMDFAIGSVVFFIFGYWIMFGKHPLTFDPSTKEGLWDFAMWMFQMAFAGTAATIVSGAMAERTKFPAYLAYTGFITGIIYSVVGRWIWGGGWLAQKGFIDFAGSTVVHSVGGWAAMIGASLLGPRFGKYDSQGNPKPIPGHNIPLAALGTFILWFGWFGFNGGSTLAGTNGAIGMIILNTNLAAATGALAAMVTVWAKYGKPDASMTMNGALAGLVAITAPCAVVSPVSSLIIGAIGGVIVVFAVEFFDKVLKIDDPVGAISVHGVNGAWGTLAVGLFAESKYALASGMGDVNGLFFGGGVHQLGVQFLGVVSVFAWTVVTSFLVFWFIKKTIGLRVDRDIELKGLDIEEHGMEGYADFEIFTTR

SEQ ID NO: 9001 - protein, 480 aa, Burkholderia cepacia R18194
MTYRNESAWIQPAAPSATAAAPRATQARTTAEYRALDAAHHIHPFSDMGALNRAGSRVIVKADGVYLWDSDGNKVIDGMAGLWCVNVGYGRKELADAAYRQIQELPFYNTFFKTTHPPVIELSAMLAEVTPKGFNHFFYCNSGSEGNDTVLRLVHQYWRVQGQPQKKFVISRKNGYHGSTIAGGTLGGMGYMHEQMPSKVENIVHIDQPYFFGEAAAGETPEAFGLARAQQLEAKILELGAENVAAFIGEPFQGAGGVIFPPSTYWPEIQRICRKYDILLVADEVIGGFGRTGEWFAHQHFGFEPDLITMAKGLTSGYVPMGAVGIHERVARPIIDNGEFNHGLTYSGHPVAAAVAVANLKLLRDEGIVERVKNDTGPYFQALMRETFARHPIVGEVHGHGLVASLQLAESPAERRRFANGGDVGTICRDFCFNGNLIMRATGDRMLLSPPLVISRPEIDELVSKAKKAVDATAQQLGIS

SEQ ID NO: 9002 - protein, 349 aa, Bacillus cereus
MKALLWHNQRDVRVEEVPEPTVKPGAVKIKVKWCGICGTDLHEYLAGPIFIPTEEHPLTHVKAPVILGHEFSGEVVEIGEGVTSHKVGDRVVVEPIYSCGKCEACKHGHYNVCEQLVFHGLGGEGGGFSEYTVVPEDMVHHIPDEMTYEQGALVEPAAVAVHAVRQSKLKEGEAVAVFGCGPIGLLVIQAAKAAGATPVIAVELSKERQELAKLAGADYVLNPATQDVLAEIRNLTNGLGVNVSFEVTGVEVVLRQAIESTSFEGQTVIVSVWEKDATITPNNLVLKEKEVVGILGYRHIFPAVIKLISSGQIQAEKLITKKITVDQVVEEGFEALVKDKTQVKISCFT

SEQ ID NO: 9003 - protein, 1147 aa, Saccharomyces cerevisiae
MPNPNTADYLVNPNFRTSKGGSLSPTPEAFNDTRVAAPATLRMMGKQSGPRNDQQQAPLMPPADIKQGKEQAAQRQNDASRPNGAVELRQFHRRSLGDWEFLETVGAGSMGKVKLVKHRQTKEICVIKIVNRASKAYLHKQHSLPSPKNESEILERQKRLEKEIARDKRTVREASLGQILYHPHICRLFEMCTMSNHFYMLFEYVSGGQLLDYIIQHGSLKEHHARKFARGIASALQYLHANNIVHRDLKIENIMISSSGEIKIIDFGLSNIFDYRKQLHTFCGSLYFAAPELLKAQPYTGPEVDIWSFGIVLYVLVCGKVPFDDENSSILHEKIKKGKVDYPSHLSIEVISLLTRMIVVDPLRRATLKNVVEHPWMNRGYDFKAPSYVPNRVPLTPEMIDSQVLKEMYRLEFIDDIEDTRRSLIRLVTEKEYIQLSQEYWDKLSNAKGLSSSLNNNYLNSTAQQTLIQNHITSNPSQSGYNEPDSNFEDPTLAYHPLLSIYHLVSEMVARKLAKLQRRQALALQAQAQQRQQQQQVALGTKVALNNNSPDIMTKMRSPQKEVVPNPGIFQVPAIGTSGTSNNTNTSNKPPLHVMVPPKLTIPEQAHTSPTSRKSSDIHTELNGVLKSTPVPVSGEYQQRSASPVVGEHQEKNTIGGIFRRISQSGQSQHPTRQQEPLPEREPPTYMSKSNEISIKVPKSHSRTISDYIPSARRYPSYVPNSVDVKQKPAKNTTIAPPIRSVSQKQNSDLPALPQNAELIVQKQRQKLLQENLDKLQINDNDNNNVNAVVDGINNDNSDHYLSVPKGRKLHPSARAKSVGHARRESLKFTRPPIPAALPPSDMTNDNGFLGEANKERYNPVSSNFSTVPEDSTTYSNDTNNRLTSVYSQELTEKQILEEASKAPPGSMPSIDYPKSMFLKGFFSVQTTSSKPLPIVRHNIISVLTRMNIDFKEVKGGFICVQQRPSIETAAVPVITTTGVGLDSGKAMDLQNSLDSQLSSSYHSTASSASRNSSIKRQGSYKRGQNNIPLTPLATNTHQRNSSIPMSPNYGNQSNGTSGELSSMSLDYVQQQDDILTTSRAQNINNVNGQTEQTNTSGIKERPPIKFEIHIVKVRIVGLAGVHFKKVSGNTWLYKELASYILKELNL

SEQ ID NO: 9004 - protein, 503 aa, Acinetobacter sp. M-1
MHYVDPNQSGSKIHFKDQYENFIGGQWVAPVKGVYFDNISPVDGKSFTRIPRSSAEDIELALDAAHKAKKEWNKSSPTTRSNLLLKIADRMEANLEMLAVAETWDNGKPVRETLAADIPLAIDHFRYFAGCIRAQEGGISEIDEDTIAYHFHEPLGVVGQIIPWNFPILMAAWKLAPALAAGNCVVIKPAEQTPVGILLVAELIQDLLPAGVLNIVNGYGAEVGRPLATSPRIAKIAFTGSTQVGQLIMQYATENIIPVTLELGGKSPNVFFADVMDHDDDFLDKTLEGFAMFALNQGEVCTCPSRALIQESIADQFMEKAIERVKRIKLGHPLDTDTMVGAQASLEQQEKILRCIDTGRQEGAEVLLGGHGRQEVGNGYYIEPTIFKGHNNMQVFQEEIFGPVLSVTTFKDFDEAIQIANDTMYGLGAGVWSRSTHTAYRAGRAIEAGRVWTNCYHIYPAHAAFGGYKKSGVGRENHKMMLDHYQQTKNLLVSYSTKAMGFF

SEQ ID NO: 9005 - protein, 126 aa, Glycine max
MVLEATMICIDNSEWMRNGDYSPSRFQAQTDAVNLICGAKTQSNPENTVGVLTMAGKGVRVLVTPTSDLGKILACMHGLEIGGEMNLAAGIQVAQLALKHRQNKKQQQRIIVFAGGPVKHEKKMLE

SEQ ID NO: 9006 - protein, 346 aa, Bifidobacterium longum DJO10A
MKAVVLEEQGVINVREVPDVKDPGPGELRIAPHTVGVCGSDLHYYTHGRVGKYVVEQPMILGHEAAGTVLEVGPGVTDFKPGDRVALEPGIPDMTSRASRLGMYNVDPAVRFFATPPIDGCLCEEVIHPAAFTYHLPDSMSFGEGALLEPTAVGMWAATKARIKPGDVCVVTGSGTVGMLTASAALAGGASKVLVSDVSSIKLGIIGQIPGVIPVDLTTEDLVERVREETAGWGADVAFECSGAPKAYETFWKLIAPGGCAVLVGIPVNPVPIDVTELQATEVRIENIFRYANVYQKAIDLVDSGRLNLKPFITDTFAMKDAKAAFDRMDEGRPGDIKLQITVNRD

SEQ ID NO: 9007 - protein, 439 aa, Arabidopsis thaliana
MAEAKIEEIGCEDRISVLPEDLLVVILDLLPTKDVVATMILSKRWLSIWTMVRTLEYTDDMDDESKKSVWWFLNKSLQLHKAPVIDSLCMELGPQCPTTDDVDIGKWVAKAVDCLVMTLTIKLLWSAGPTSLPKSLYSCTSLSELTLSDQILVNVPSSAYLPSLTELELICVVYKDEDSLVSFLSSCPVLEFLFVLRKIDDNVKTFTVKVPSLLELTYKNLCSDVVDNTDRCLVVNAPAVNTCQITDYSLESFSIEDMPCLQDATIDVDEAYHPDDKFLTSFSSVLSLRMHLSDAMVMRCTTINFSRLIKLSIYPYGPDMLETLLRLLGNAPKLKEFLVDYPSLIASQKFVYNPEDLPWSWKQPSHVPECLSSQLEIFEWRDYGDRIIEEEFLTYVLANSKRLKTATISLRLNLEDPELIIEEIKDLPRVSTTSHLLFK

SEQ ID NO: 9008 - protein, 191 aa, Zea mays
  misc_feature (174)..(174): Xaa can be any naturally occurring amino acid
  misc_feature (177)..(177): Xaa can be any naturally occurring amino acid
MESTGKILMERYEVGRLLGKGTFGKVHYAKNLESNESVAIKMMDKDKVLKAGLSEQIRREITTMRLVAHKNIVELHEVMATRNNIYFVMEYVKGGELFDKIGKSGKLTEAAAHKYFQQLIGAVDYCHSRGVYHRDLKPENLLLDENENLKVSDFWTECTFRIKGADGLLHTHCXTPXAYVAPEVISKTGYD

SEQ ID NO: 9009 - protein, 200 aa, Aspergillus fumigatus
MAEIRRKLVIVGDGACGKTCLLIVFSKGTFPEVYVPTVFENYVADVEVDGKHVELALWDTAGQEDYDRLRPLSYPDSHVILICFAIDSPDSLDNVQEKWISEVLHFCQGLPIILVGCKKDLRHDPKTIEELHKTSQKPVTPEQIIDIFVQGEEVRKKIGAYKYLECSARTNEGVREVFEAATRAALLTKTHKKKGKCTIL

SEQ ID NO: 9010 - protein, 455 aa, Glycine max
MFNFVPVGEACQKYGSIFMHPQGLYISLKEKGKIREVLRNWPEKNIQVIVVTDGERILGLGDLGCQGMGIPVGKLSLYTALGGVRPSACLPITIDVGTNNEKLLNDELYIGLKQRRATGQEYAELMHEFMTAVKQTYGEKVLIQFEDFANHNAFNLLEKYRSTHLVFNDDIQGTASVVLAGLVASLKLVGGNLADHRFLFLGAGEAGTGIAELIALETSKQTNAPLEEVRKNIWLVDSKGLIVSSRKDSLQHFKKPWAHEHEPVKNLLDAVNKIKPTVLIGTSGQGRTFTKEVIEAMASINKRPIILSLSNPTSQSECTAEEAYKWSQGRAIFASGSPFPPVEYEGKVFVPGQANNAYIFPGFGLGLIMSGTIRVHDDLLLAASEALAAQVSQENFDKGLIYPPFTNIRKISAHIAANVAAKAYELGLATRLPQPKDLVKFAESCMYTPAYRSYR

SEQ ID NO: 9011 - protein, 253 aa, Triticum aestivum
  misc_feature (158)..(158): Xaa can be any naturally occurring amino acid
MAPTVMASSATSVAPFQGLKSTAGLPVSRRSNGASLGSVSNGGRIRCMQVWPIEGIKKFETLSYLPPLSTEALLKQVDYLIRSKWVPCLEFSKVGFIFREHNASPGYYDGRYWTMWKLPMFGCTDATQVINEVEEVKKEYPDAYVRIIGFDNMRQVQXVSFIAFKPPGCEEVRQGPKQAHSRTGHILKVPLQLSTLTIAFGVFLSPFIFLNLGLMGPLFHPNIGEASYFMLGGFVYSPDIIIQYTLGKKKKKN

SEQ ID NO: 9012 - protein, 197 aa, Aspergillus fumigatus
MELCGRQKVVQRKMVLLGDGACGKTSALNVFTRGFFPTVYEPTVFENYVHDIFVDNVHMELSLWDTAGQEEFDRLRALSYEDTHVIMLCFSVDSPDSFENVATKWIDEIRENCPGVKLVLTALKCDLRKDDELNDNPNAITFEQGLAKAKEIGAVKYLECSAVQNRGIRETFYEAAKVALDVKPAGSSGSKGQCIIL

SEQ ID NO: 9013 - protein, 198 aa, Aspergillus fumigatus
MASGPATQSLKCVVTGDGAVGKTCLLISYTTNAFPGEYIPTVFDNYTASVMVDGRPISLGLWDTAGQEDYDRLRPLSYPQTDVFLICFSIVSPPSFDNVKAKWYPEIEHHAPNVPIILVGTKLDLRDDPATAESLRQKKMDLSRTRHWPSPKEIRAHKYLECSALRQRNFKSVFDEAIRAVLNPGPAAKPKSKKCTIL

SEQ ID NO: 9014 - protein, 162 aa, Triticum aestivum
MAGMVFGLENPMMTALQHLLDIPDGEAGGAGPAAGEKQGPTRAYVRDARAMAATPADVKELPGAYAFVVDMPGLGSGDIKVQVEDERVLVISGERRREEKEDAKYLRMERRMGKLMRKYVLPENADMEKISAVCRDGVLTVTVEKLPPPEPKKPKTIQVQVA

SEQ ID NO: 9015 - protein, 375 aa, Pisum sativum
MGSNRTIVWFRRDLRIEDNPALAAAARDGSVFPVFIWCPKEEGQFYPGRVSRWWLKQSLAHLDQSLKSLGAKLVLIKTDSTLNALLECVNAIQATKVVFNHLYDPVSLVRDHNIKEKLVELGISVKSYNGDLLYEPWELYDEKGHAFTTFDPFWERCLHKQMEPVSLIPPWQLIPAKGKVERCSIEDLGLENELEKPSNALLGRAWSPGWGNANKALTEFMDKQLLNYSKNRQKVGGDSTSLLSPYLHFGELSVRKVFQMARVKQISWGNEGNSVGKESVTLFLRAIGLREYSRYLCFNFPFTHERALLGHLSFFPWNADPSNFKTWRQGRTGYPLVDAGMRELWATGWMHNRIRVIVSSFAVKMLLLPWKWGMK

SEQ ID NO: 9016 - protein, 491 aa, Treponema denticola ATCC 35405
MNSITELFPSDFTDDEKALAKTHFLKKLSVLTHSFYGGKLQTVPKCGLYGFNWFNVWYTPGVSAISTTIRDDNETSFALSNKGNLVAVVSDSTRVLGDGDCTPPGGLGVMEGKCMLMKYLGGVDSYPLCIDSIVRVDEEGKRGVKAGKHDPDKIIDFVRMLEPSVGAVNLEDIQQPDCFKVLDTLREVCEIPVWHDDAQGTACITLAGLLNAIKLAGKKMEDCKIVLLGAGASNTTIARLILADGGKPENMIICDSRGALHSGRKDIEEDKRYYRKWELCLQTNPKKIETFDEAMKGADVLIALSTPGPNTVTKEQVASMNKKAIVFTCANPIPEIWPHEAKAAGAFIVGTGRGDFPNQINNSVCFPGILKGALLVRAKKISDGMAIRCSHSIADYSEKKGINPDNIVVTMQDEDVFAVEAADVAMQAIKEGLARVTMTWDEAYKKAKKDIEESRSLTKMLMEKNFIKEPPQEFYEKALEYAIEQIKKNRK

SEQ ID NO: 9017 - protein, 193 aa, Zea mays
MHVPDEDMLSPLGALRLDGHFSFHDVSAMARDFGNQCSFLPAAVLHPGSVSDIAATVRHVFSLGEGSPLTVAARGHGHSLMGQSQAAQGIVVRMESLRGARLQVHDGFVDAPGGELWINVLRETLKHGLAPKSWTDYLHLTVGGTLSNAGVSGQAFRHGPQDNSDLFYAALGGLGQFGIITRARIALEPAPEM

SEQ ID NO: 9018 - protein, 481 aa, Glycine max
MLDSATPHDKITTAASGFVLEDVPHLSAYIPHLQTYPDPLQDNPSYSVVAQYYVNVDDTIAQQIVVHKNSPRGTHFRRAGPAQKVYFDSEEVHACIVTCGGLCPGLNTVIREIVCGLYHMYGVHKVLGIQGGYPGFYSRNTVPLTPKVVNDIHKRGGSILGTSYGGHDTSKIVDSIQDRGINQVYILGGYGTQYEAAMIFEEVRRRGLKVAVVGIPKTIDNDIPVIDKSIGFDTAVEEAQRAINSAHVEAESAENGIGVVKLMGRYSGFIAMYATLASRDVDCCLIPESPFYLEGPGGLLEFIEKRLKEQGHMVIVIAEGAGQELLSGNPSIVNKPDASADKLFPDVGLWLSQKIKDHFEKRQKMAINLKYIDPTYMIRAIPSNASDNVYCTLLAQSAVHGAMAGYTGFTVGPVNGRNCYIPFHLINEGEKRVVITDRMWARLLSSTHQPCFLNPKEITGEREERTENQTTDGQNHSEIAD

SEQ ID NO: 9019 - protein, 223 aa, Glycine max
METGGFHGYRKLPNTTSGLKLSVSDMNMNMRQQQVASSDQNCSNHSAAGEENECTVREQDRFMPIANVIRIMRKILPPHAKISDDAKETIQECVSEYISFITGEANERCQREQRKTITAEDVLWAMSKLGFDDYIEPLTMYLHRYRELEGDRTSMRGEPLGKRTVEYATLATAFVPPPFHHHNGYFGAAMPMGTYVRETPPNAASSHHHHGISNAHEPNARSI

SEQ ID NO: 9020 - protein, 352 aa, Ralstonia eutropha JMP134
MQNTSGLAPRDAGADTDHPELTPDRLLQLGMGFWASKTMLSAVELGVFTRLAAGPLGAAELISALGLHRRSALDFLDALVALKLLEREQGKYRNTPDTALFLDAAKPSYVGDLLEMANTRLYPFWGSLTEALRTGQPQNEAKRGGNLFEAVYHDEHALRRFLRAMTGVSLGAAKAMAQKFPWQNYSTFIDIGTAQGALPVQIALAHPHLRGGGFDLPAVGPVFEEYVVSHGLQERLRFQPGDFFKDPCPTADVLVMGHILHDWDLGQKLELLKKCHAALPDEGCLIVYDAVIDDERRQNAFGLLMSLNMLIETPGGFDYTGAQCCAWMKEAGFTQVRVEPLAGPDSMVIGIR

SEQ ID NO: 9021 - protein, 508 aa, Lycopersicon peruvianum
MNPFDKKQEPDTDSKTPFLTEMDSEFAAFSPISLPFADPSSPFINFGSFATPLSQHPVGEGEREGEGEGGEIEQPAEGGLGVPQPMECLHGIQIPPFLSKTFDLVEDPLLDTIISWGTNGESFVVWDPVEFSRLVLPRNFKHSNFSSFVRQLNTYGFRKIDADRWEFANEGFSRGKRHLLKNIQRRRSQQGGSSSGSSAEAGKGTMDEIEKLRNEKSLMMQEVVELQQQQHGTVQLMESVNEKLQAAEQRQKQMVSFLAKVLQNPTFLARVRQMKEQGEITSPRTMRKFVKHQSHGPDGVGSSSMEGQIVKFRSDFQDLAGCFDSPDFNPVVDQQLPETGLGAEAMPFEGGPVADGLTVAHELLNCSDREIRGASFFNSGGSQFKGKNVASPQIEVMPEYFASFPEEMGKEKNISGFSAPAIGSMVKDEELWGMGFEASAGMPSTGPELWDSLSSYVPDFGVSSGLSDLWDIDPLQVAGSSGVDKWPADGSPFGQSESHANQPKNDSF

SEQ ID NO: 9022 - protein, 484 aa, Ralstonia eutropha JMP134
MKQFRNFINGEFVATNKTFENRAPVDNRVIGRVHEAGQAEVDAAVAAARAALHGDWGRMPVARRVELLHAVADEINRRFDDFLEAELADTGKPRSLAAHIDIPRGAANFKVFADIVKNAPTESFEMTTPDGGTAISYALRAPLGVVAVVCPWNLPLLLMTWKVGPALACGNTVIVKPSEETPATATLLGEVMEKVGVPKGVYNVLHGFGPGSAGEFLTRHPGVNGITFTGETRTGEAIMAAAAKGVRPVSFELGGKNAGIVFADADFDKAVAGIARSAFENCGQVCLGTERVYVQRPIFDRFVQALKEKAESLRIGPSDAPGVGLGPLISAEHKAKVMSYYDVARSEGATVVTGGGAPSMPPELAEGHWVQPTIWTGLPESARVIREEIFGPCCHIAPFDTEEEAIALANATDYGLATTVWTQDLGTAHRMARAIDVGLCWINSWFLRDLRTAFGGAKASGIGREGGVHSLEFYTELRNVMVKL

SEQ ID NO: 9023 - protein, 482 aa, Salmonella enterica subsp. enterica serovar Typhi Ty2
MQLNDSTLFRQQAFIDGDWRDARGGDVIPVSNPANGKPLGNVPKMGAEETRDAINAANRALPAWRALTAKERANILRRWFNLMMEHQDDLARLMTLEQGKPLAEAKGEISYAASFIEWFAEEGKRIYGDTIPGHQTDKRLLVIKQPIGVTAAITPWNFPSAMITRKAGPALAAGCTMVLKPASQTPFSALALAELAQRAGILAGVFNVVTGSAGDIGGELTSNPLVRKLSFTGSTEIGRQLMEQCAKDIKKVSLELGGNAPFIVFDDADLDKAVEGALASKFRNAGQTCVCANRLYVQDGVYDRFAEKLNQAVNKLAVGDGLQADVAIGPLIDEKAVAKVQEHIADALEKGARVITGGEAHKLGGNFFQPTILADVPDNAKVAKEETFGPLAPLFRFSDEADVIRQANDTEFGLAAYFYARDLSRVFRVGEALEYGIVGINTGIISNEVAPFGGIKASGLGREGSKYGIEDYLEIKYMCIGL

SEQ ID NO: 9024 - protein, 45 aa, Streptococcus thermophilus
TKGFGFITSEDGQDLFAHFSSIQSDGFKSLDEDQKVEFDVEVGQR

SEQ ID NO: 9025 - protein, 295 aa, Methanosarcina thermophila
MTVDELVREYAGCAFGAGRLAKAVDIYYEMLASEKTTKFFGLAGAMTPAGMRNIIADLIRDGYIDVLVTTGANMVHDTVEALGLHHYKGSDCTNDIQLRHECIDRIYDVYLPDQHFTDLEEFLQGVYAGLPQEKLSIRQVLTEIGKNLDDDSSILKTAAEMGVPVYCPALQDSVIGLQAWLYKEGNPLHVDAFADMHEFMEICFETESAGAMLLGGGVPKNYILQSMLVTPRSFDYAIQLTMDHPETGGLSGATLDEAQSWGKVGENAKSVTVYADSTITLPLIVSAVRTRLSKR

SEQ ID NO: 9026 - protein, 181 aa, Brassica napus
MAYSMLSSAAVVTSPAQATMVAPFTGLKSSSAFPVTRKANNDITSIVSNGGRVNSMQVWPPVGKKKFETLSYLPDLTEVELGKEVDYLLRNKWIPCVEFELEHGFVYREHGSTPGYYDGRYWTMWKLPLFGCTDSAQVLKEVQECKTEYPNAFIRIIGFDNNRQVQCISFIAYKPPSFTGA

SEQ ID NO: 9027 - protein, 485 aa, Aeropyrum pernix K1
MFKTFVAGNWVLTSNLAVVRSPIDGSIIAKVSRLDAAAIEEGVDVVYRLGRRRIRDVPGEKRLNILSRIADLLEKNAGDFEEVLTVNAGKTRKQAAGEVEASIDRLRKAALDLRKLQGEYVPGDWDRHTLESEGIVRREPYGVVLAIIPFNYPLFDTVNKFVYSTIPGNAFIVKPPSADPLPVIMFARLAIEAGFPPESLMIATLRGSEAEKLVADRRISVISLTGSSETGVKVMRSAGIKQLIMELGGGDPAIVLADADLKSAASKIATGITSYSGQRCDAIKLVLVEEPVYNEMKKLLVEELSKIKVGDPRNDSTTMGPLIDKEAVDAMVEAIEEAVSRGAKLLYGGERIGDTYITPALVEVEDKNVLRELKLYKDEVFAPVAVITSFSTLDEAIELANGRRYGLDAAIFGESMARIRKLIRFLEVGAIYINEYPRHGIGYYPFGGRKDSGIGREGIGYSIEYVTALKTIVYNYRGRGIWEYL

SEQ ID NO: 9028 - protein, 340 aa, Erwinia carotovora subsp. atroseptica SCRI1043
MKSIVIQQPNSLVIEERSIPQPAAGEVRVKVKLAGICGSDSHIYRGHNPFAKYPRVIGHEFFGVIEAVGDGVDAARLGERVSVDPVVSCGHCYPCSIGKPNVCTSLVVLGVHRDGGFSEYAAVSAKNAHVIPDEIPDEFAVMVEPFTISANVTAQVKPTEQDIALIYGAGPMGLTSVQVLKGVFKVKEVIVVDRIPERLEMALRSGADRVINNASLSLKDELETLNIKPTLIIDAACHPSILQEAITIASPAARIAIMGFSSEPCQISQQGITSKEISIFSSRLNANKFPIVIEWLKEKRIDPAKLITHRFDYQQVVQAIEVFEKDQKRCCKVLLTFNEA

SEQ ID NO: 9029 - protein, 495 aa, Triticum aestivum
  misc_feature (464)..(464): Xaa can be any naturally occurring amino acid
MVLSHAASAGSSDDSVHSTFASRYVRASLPKFRMPENSIPKEAAYQIINDELMLDGNPRLNLASFVTTWMEPECNKLMMDSINKNYVDMDEYPVTTELQNRYVNMIAHLFNAPLGETETAVGVGTVGSSEAIMLAGLAFKRRWQNKMKAAGKPCDKPNIVTGANVQVCWEKFARYFEVELKEVKLSEGYYVMDPEKAVEMVDENTICVAAILGSTLNGEFEDVKMLNDLLVKKNEETGWDTPIHVDAASGGFIAPFLYPELEWDFRLPLVKSINVSGHKYGLVYAGIGWCIWRSKEDLPDELIFHINYLGADQPTFTLNFSKGSSQVIAQYYQLIRLGFEGYRNIMDNCQENAMVLKEGLERTGRFNIVSKDQGVPLVAFSLKDSSRHDEFEISEFLRRFGWIVPAYTMPPDAQHVTVLRVVIREDFSRTFAERLVIDIEKVLHELDALPSRSSGARPAAPQRXTVSEKDLARQREVVSVWKRAVAARKKTQGVC

SEQ ID NO: 9030 - protein, 593 aa, Zea mays
  misc_feature (141)..(141): Xaa can be any naturally occurring amino acid
  misc_feature (186)..(186): Xaa can be any naturally occurring amino acid
  misc_feature (214)..(214): Xaa can be any naturally occurring amino acid
  misc_feature (564)..(564): Xaa can be any naturally occurring amino acid
  misc_feature (577)..(577): Xaa can be any naturally occurring amino acid
MCGILAVLGCSDWSQAKRARILACSRRLKHRGPDWSGLYQHEGNFLAQQRLAVVSPLSGDQPLFNEDRTVVVVANGEIYNHKNVRKQFTGTHNFSTGSDCEVIIPLYEKYGENFVDMLDGVFAFVLYDTRDRTYVAARDAXIGVNPLYIGWGSDGSVWIASEMKALNEDCVRFEIFPPGHLYSSRXGGFPGGWYTPHWVPGAGAPGRPYQPLVXLERAFEKAVIKRLMTDVPVRGPPSPGGLDSSLVASVTKRHLVETEAAEKFGTELHSFVVGLEGSPDLKAAREVADYLGTIHHEFHFTVQDGIDAIEEVIYHDETYDVTTIRASTPMFLMARKIKSLGVKMVLSGEGSDELLGGYLYFHFAPNKEEFHRETCRKVKALHQYDCLRANKATSAWGLEVRVPFLDKEFINVAMGMDPEWKMYDKNLGRIEKWVMRKAFDDDEHPYLPKHILYRQKEQFSDGVGYNWIDGLKSFTEQQVTDEMMNNAAQMFPYNTPVNKEAYYYRMIFERLFPQDSARETVPWGPSIACSTPAAIEWVEQWKASNDPSGRFISSHDSAATDHTXAVSRRWPTAAATXANGTVNGKDVAVAIAV

SEQ ID NO: 9031 - protein, 395 aa, Thermotoga maritima MSB8
MRAVRLHAKWDPRPEFKLGPKDIEGKLTWLGSKVWRYPEVRVEEVPEPRIEKPTEIIIKVKACGICGSDVHMAQTDEEGYILYPGLTGFPVTLGHEFSGVVVEAGPEAINRRTNKRFEIGEPVCAEEMLWCGHCRPCAEGFPNHCENLNELGFNVDGAFAEYVKVDAKYAWSLRELEGVYEGDRLFLAGSLVEPTSVAYNAVIVRGGGIRPGDNVVILGGGPIGLAAVAILKHAGASKVILSEPSEVRRNLAKELGADHVIDPTKENFVEAVLDYTNGLGAKLFLEATGVPQLVWPQIEEVIWRARGINATVAIVARADAKIPLTGEVFQVRRAQIVGSQGHSGHGTFPRVISLMASGMDMTKIISKTVSMEEIPEYIKRLQTDKSLVKVTMLNE

SEQ ID NO: 9032 - protein, 522 aa, Glycine max
  misc_feature (33)..(33): Xaa can be any naturally occurring amino acid
  misc_feature (62)..(62): Xaa can be any naturally occurring amino acid
  misc_feature (89)..(89): Xaa can be any naturally occurring amino acid
  misc_feature (98)..(98): Xaa can be any naturally occurring amino acid
  misc_feature (173)..(173): Xaa can be any naturally occurring amino acid
  misc_feature (216)..(216): Xaa can be any naturally occurring amino acid
  misc_feature (228)..(228): Xaa can be any naturally occurring amino acid
VNNIQGLYNRFVFFIQRDGNSNRFYVTNENLYXRVLNGNFKVIHRIIYISTIGFLYDNYLGXDRVTAGMYFSAKEKGEKMEMIYSYGVXHVDKIVLTXSNRILGYVDLKVWYIGISTVEHEKYVAADIINLQKILPNMFVVVIIQRKLLDDPLYQRVQHRMADSEKDKISLDXFMVAVHVLWSKAIMSFEGLQKMCAIKTQIRYRARFCMFKDDIXGTAGVELAGLLXTVRSQGQLLSDFLEQKIIVVGAGSAGLGVLSMDGQAVSEMSGRSGTDANSQFFLIDKDGLVTTERSNLDLAAVAFAKNPRDLVVFLEGASIIEVVKKVNPHVLLGFSGSGGVFNTEVLKPMRESVSTYPAIFAMSSPPINAECSAIEAFSHAGENIVFASGSPFENVDLGNGEVGHVNQANNMYLFPGIGLGTLLSGARHITDGMLRAAAECLASYMTEDDVRKGILYPSIDCIRDVTAEVGAAVVCAAVAEKQAEGHGDVGFKELENMSKEETVEYVRGNMWYPEYCPLVHEK

SEQ ID NO: 9033 - protein, 496 aa, Triticum aestivum
  misc_feature (135)..(135): Xaa can be any naturally occurring amino acid
MKPCRAIALALVVAAQCAALATAAGPRVIIVGAGMSGISAGKRLSEAGITDLVILEATDRIGGRIHKTKFAGVNVEMGANWVEGVNGDEMNPIWTMANGTGGLNLRTFRSDFDHLASNTYKQDGGLYDEKVVENXIERMDEVEESGSKLSGTLHHSGQQDMSVSRPLQRLNDHMPSGPARPVDMVVDYYQHDFEFAEPPRVTSLQNTQPLPTFSNFGDDVYFVADQRGYESVVYHVAGQYLRTDRKSGAVADPRLKPNTVVREISYFPSGVMVRTEDNKVYRADYVVVSASLGVLQTDLIRFKPQLPSWKIVSIYQFDMAVYTKVFLKFPKRFWPEGEGKEFFLYASGRRGYFPVWQQFEQQYPGSNVLLVTVTDDESRRIEQQSDNQTMAEAVAVLRKMFPKEDVPDATEILVPRWWSNRFFKGSFSNWPIGVNRYEYDLIRAPVGRVYFTGEHTSEKYNGYVHGAYLAGIDSADILINCAKKKMCKYDVKGKHD

SEQ ID NO: 9034 - protein, 133 aa, Deinococcus radiodurans R1
MCRVSIVGGGGPYLASRSTPAENLKGHAGKRATAACGLLLVRARRFEMATGRVKWFNAEKGFGFIETEGSADVFAHYSAINSSGFRKLNEGDEVEFEIEPGQNGKGPQAKNIVVTKAAPAPAYGDRPRRDDRW

SEQ ID NO: 9035 - protein, 473 aa, Crocosphaera watsonii WH 8501
MTIETMTTLNSSAQLINNPEAAVTALKNSEDEGVRYYAAWWLGKNRILKAIPLLCECLKDERDRTTLGGYPLRRQAARSLGMLKDSQAVTPLIEALDCSDLRLQEAVILALKNIGDRSAIPALINLLNPEIKDKPTEALIEALTAFKVWEVQDHIEPFLQDSSERVKCAAAQYFYALTLKPRYLEMLFQTLGHENRFLRYAAAMDLAALGRFEIAPAIIKAQIPNNIKLATIKRILEALLQNKTEREVKRQEQANFLFPALDELLLDAIQGNIPRSNTVETNQKIEKMKMLVDQQSITSQQVPKSLILELIEAVKSPYPNVKAAAIQGLVELAPLSADVIIEVFDTDEDQDLRAGLTQALMYIGDLRTVSLLEKVIGFDISDHCQGKIRRVAARGLGKIGRQTKNQEVIAQVIEKLKWALLEPTDWALRYSAVVSLEEIGNSDGILALQAASESESDFIVQTRIERALTAIGW

SEQ ID NO: 9036 - protein, 1001 aa, Gibberella zeae PH-1
MDGSAHLSGRNIDTGHELLNLLQSPFSGQLQAASLYSALATSLPVTIGIAIFFSILRPYHQAIYAPKLKHADEKHVPPPIGKAPWSWITTLWRTNEDMLLPLIGMDATVFLRFVRMCRNMFLTLCVTGIGILLPINVSRFKNYEGPKQTSWVISITPLTVYAPAIWSQVVIAWCFNFIVIGFLWFNYRKVHQLRRRYFESEDYQKSLHSRTLMVFDIPKKGCSDEGIARIIDQIAPNSSFARTAVARNVKELPALIEQHDHAVRKLEKILAKYLKDPNNVPTARPMCKPSKKDRSYGTYPRGQKVDAIEYYTQRIRDLEVQIKQVRATVDKRGSMPYGFASYADIAEAHGIAYACRKKKPVGATVKLAPRPNDIIWENMPLYSSTRGRRRWVNNMWITLLTLFWIVPNLGIAIFLVNLENLGKVWPAFQTELAAHPKVWGAIQGVLSPAIMSLTYLVLPMIFRRLSVKAGDQTKTGRERHVLAKLYFFFVFNNLFIFSIFSTVWSFVFSVVQDATGAKKEDAWESIKKQKIASGLFETLCNNSLFWVTYLLQRQLGAAIDLAQAWPLIQAFFLKKFSSPTPRELIELTAPPPFEYASYYNYFLYYATVTMCLAGIQPLVLPATALYFVIDSWLKKYLLLYRFVTKTESGGMFWRVIFNRFIFATILSNLVVMLTCWAHGNFGTHIEFWCVVPLPFIMLIFKIYCNRAFNDKITYYSIQDVTKSPENGVDPKENRMRSERLANRFGHPALYRPLITPMVHAKAQNLLPAIYKGRLTDGREVDSGDMMTGGKPGKAANNVPGFEFVNDTQMDFEYYKNRAEFAENHGGGEIYGRPGEIGRPGTPGSMDGSDFSRPGTPVGRSASPAAFPGGAAQQQRLMSLASNVSGDTSYSSYRPGANTGFTQQMTLGQEPPPARGRSPLYAQNNGSSSSLGLIQNAAAPAYSSNLNTPGRMTPAQSPGPSVGAMGGGPQGYSGLAQHEGGEQSYDYFRGSNRPRRNPGEGW

SEQ ID NO: 9037 - protein, 493 aa, Oryza sativa (japonica cultivar-group)
MDDRRTILMDRYEIGRQLGQGNFAKVYYARNLTSGQAVAIKMIDKEKVTRVGLMVQIKREISIMRLVKHPNILQLFEVMASKSKIYFVLEYAKGGELFKKISKGKFSEDVARRYFHQLISGIDYCHSRGVYHRDLKPENLLLDENESLKVSDFGLSALSESKRHDGLLHTTCGTPAYVAPEVLSRRGYDGAKADIWSCGVILFVLVSGYLPFHDTNLIEMYRKIAKAEYKCPRSFSAELKDLLYKILDPDPSTRISIPKIKRSAWYRKSSDVNALKSKHETGDKVYKGEATTSDTTECSIFEGNRASSRDKVYTNGEATTSDSPECSNSDGKQASLSLPNLNAFDIISLSTGFDLSNLFEERYGRREERFTTRQPAAAIFAKLNELARRFKLKIKKKENGVLRLVAPKEGIKGLLELDAEVFELAPSFHLVEFKKSNGDTIEYQKLMKEDIRPALKDIVWAWQGGQHQQPEQSMQGMQGEQQPSRLPSQQPQG

SEQ ID NO: 9038 - protein, 350 aa, Escherichia coli O157:H7
MRFLLGVLMLMISGSALATIDVLQFKDEAQEQQFRQLTEELRCPKCQNNSIADSNSMIATDLRQKVYELMQEGKSKKEIVDYMVARYGNFVTYDPPLTPLTVLLWVLPVVAIGIGGWVIYARSRRRVRVVPEAFPEQSVPEGKRAGYVVYLPGIVVALIVAGVSYYQTGNYQQVKIWQQATAQAPALLDRALDPKADPLNEEEMSRLALGMRTQLQKNPGDIEGWIMLGRVGMALGNASIATDAYATAYRLDPKNSDATLGYAEALTRSSDPNDNRLGGELLRQLVRTDHSNIRVLSMYAFNAFEQQRFGEAVAAWEMMLKLLPANDTRRAVIERSIAQAMQHLSPQESK

SEQ ID NO: 9039 - protein, 339 aa, Sinorhizobium meliloti 1021
MRAIVLHAPGDIRLETRPKPVAGPGEVLLRVASVGVCGSDLPRMLVKGAWKMPLITGHEFSGHIHALGENVEGWEIGELTAIAPLMPCNQCIECKTGNFSRCRDYDYFGSRRDGAYAEFVAVPVENLIKTPQHVDPRAIAMTDPASIALHAIWKAGGITAGQTGAVVGCGPIGLFAIQWMRIMGTSRVIAVDVTEEKLALARQAGADLCILSADFADNKERADLVIEAVGIDSTINAAVMLAAPGGHVTFIGIPVPDVKLSNATFQRFLRQEVSLHGSWNSFGAPFPGPQWTTTVQKFATGELKWEFMISHDLDLAELPGIFQRFAAKDLHFSKVLFRP

SEQ ID NO: 9040 - protein, 507 aa, Solenostemon scutellarioides
MTSLLAHPLLPPPRRRPLPPLLPPPVSHPAGPRPGRWWRNLYDVKPVRFRCFAEWAQLFGPTFSVWFGSTLNVIVSSSELAKEVLKEKDGQLADPPRSRSAVKLSRDGKDLIWADYGPHYVKVRKVCTVVLFSPKRLELLRPIREDEITVMVESIYQDSAASGKSVVIKKYLASMAFHNITRLVFGKRFVNSEGEVDKQGQEFKAIAINGLKLGASLAVSEHIPWLRWMFPLDEDAFTQHGVRMERLTREIMQEHTLARQKTGGAKQHFFDALLTLKDEYDLSEDTIIALLWDMIAAGMDTPAISVEWAMAELVRNPRVQEKVQEELDRVIGHERIMTELDIPNLPYLQCVVKESLRLHPPTPVMLPHRSNADVKIGGYDIPKGSNVHVNVWAIARDPKSWKVPLEFRPERFLEEDVDIKGHDFRLLRFGAGRRVCPGAQLGIDLATSMIGHLLHHFRWTPPTGVRAEDIDMGENPGTVTYMRTPVEAVPTPRLPANLYKRVAVVDI

SEQ ID NO: 9041 - protein, 196 aa, Vigna radiata
MSTARFIKCVTVGDGAVGKTCMLISYTSNTFPTDYVPTVFDNFSANVTVDGSTVNLGLWDTAGQEDYNRLRPLSYRGADVFLLCYSLISKASYENISKKWIPELRHYAPNVPIVLVGTKLDLRDDKQFLIDHPGGTRITTAQGEELKKMIGAVTYIECSSKTQQNVKTVFDAAIKVALRPPKPKKKPRKKRTCFFL

SEQ ID NO: 9042 - protein, 355 aa, Methanosarcina acetivorans C2A
MSKNICFIDGLEGVLKYREVDINELVKLPYDAVSYLLIRGRLPGEQELAEYSARLHAERRINKEVIDVIRMCNFNIDAMAALRTVISFISQFDPDLNDSSPEGNMRKAIRLIAIVPTIVATYYRMANGKEPLPPDPSLSHGANFLYMIKGSKPDPLDAEVMEKDFILSAEHELNASTFSSRVTASTMSDLYSAVVSGLCTLKGPLHGGARAEVMTMLDEVASPENAEKFVLEKISQREKIMGFGHRVYKTYDPRGVIFKQLSKKLAESKGDMHWYTTAEAVENVVVRELVEKRGKPIYPNVDFYSGVIYKYMEIPPQLATSIFAIGRVSGWIAHCFDQYERKKIIRPRAFMLDEC

SEQ ID NO: 9043 - protein, 212 aa, Nicotiana tabacum
MAVEICVKAAVGAPNVLGDCPFSQRALLTLEEKKVPYKMHLINVSDKPKWFLEVNPEGKVPVIKFDEKWIPDSDVIVGLLEEKYPNPSLSSPPEFASVGSKIFPSFVSFRKSKDASDGTEQALLDELKALEEHLKAHGPYVNGANICSVDLSLAPKLYHLEVALGHFKKWSVPESLSHVRKYMKLLFERESFQKTKAAKEYVIAGWAPKVNP

SEQ ID NO: 9044 - protein, 259 aa, Zea mays
  misc_feature (103)..(103): Xaa can be any naturally occurring amino acid
  misc_feature (134)..(134): Xaa can be any naturally occurring amino acid
WARKNRGGGGSGGERPVRGATESPALWCSRSRVRFTCDRIYFFFWHVNVVGDLFCFTFSNEAGTLPPCGTGGQCCIWQFNFRGFNPDTDPYSPDSIDLLRRSXIDFDLFAVEGVDSTRFAELMMSSGIVLNEEXQRVTFHGCHELGYLLRLLSGREMPYTLDGVLKLTMSFFPVLYDVKHLMKFCGPGLYGGLSRLGKLLKVERVGTGHQAGSDCLLTLQCFMKLKQLYLKESVKLYDGLLFGLIPGEVEIKTAPPPIG

SEQ ID NO: 9045 - protein, 330 aa, Brassica napus
  misc_feature (30)..(30): Xaa can be any naturally occurring amino acid
MDATREASVTDLKRPREEDDNNNTAAVASXETKEPACFSSVIPGWFSEMSPMWPGEAHSLKVEKVLFQGKSDYQDVIVFQSATYGKVLVLDGVIQLTERDECAYQEMITHLPLCSIPNPKKVLVIGGGDGGVLREVARHSSVEQIDMCEIDKMVVDVSKQFFPNVAIGFEDPRVNLVIGDGVAFLKNAAGGSYDAARPDSSDPIGPAKELFEKPFFQSVARALRPGGVVCTQAESLWLHMDIIEDIVSNCREIFKGSGDYAWTSVPTYPSRVIGFMLCPPQAPDVDFKHPVNPIHHTKSSGPFKFYNAQIHSAAFCLPSFAKKVIESKTN

SEQ ID NO: 9046 - protein, 505 aa, Zinnia elegans
MDLLLVEKTLLALFAAIIASIFISKLRGKRFKLPPGPVPVPIFGNWLQVGDDLNHRNLTDLAKKFGEIFLLRMGQRNLVVVSSPNLAKEVLHTQGVEFGSRTRNVVFDIFTGKGQDMVFTVYGEHWRKMRRIMTVPFFTNKVVQQYRTGWEAEAAAVVDDVKKNPKAATEGVVIRKRLQLMMYNNMFRIMFDRRFESEDDPLFVKLKMLNGERSRLAQSFEYNYGDFIPILRPFLKGYLKLCKEVKEKRFQLFKDYFVDERKKLGSTKSMDNNQLKCAIDHILDAKDKGEINEDNVLYIVENINVAAIETTLWSIEWAIAELVNHPEIQAKLRHELVSQLGPGVQVTEPDLHKLPYLQAVIKETLRLRMAIPLLVPHMNLHDAKLGGYDIPAESKILVNAWWLANNPDQWKKPEEFRPERFLEEESKVEANGNDFRYLPFGVGRRSCPGIILALPILGITIGRLVQNFELLPPPGQDKVDTTEKGGQFSLHILKHSTIVAKPRVL

SEQ ID NO: 9047 - protein, 416 aa, Shigella flexneri 2a str. 301
MESKVVVPAQGKKITLQNGKLNVPENPIIPYIEGDGIGVDVTPAMLKVVDAAVEKAYKGERKISWMEIYTGEKSTQVYGQDVWLPAETLDLIREYRVAIKGPLTTPVGGGIRSLNVALRQELDLYICLRPVRYYQGTPSPVKHPELTDMVIFRENSEDIYAGIEWKADSADAEKVIKFLREEMGVKKIRFPEHCGIGIKPCSEEGTKRLVRAAIEYAIANDRDSVTLVHKGNIMKFTEGAFKDWGYQLAREEFGGELIDGGPWLKVKNPNTGKEIVIKDVIADAFLQQILLRPAEYDVIACMNLNGDYISDALAAQVGGIGIAPGANIGDECALFEATHGTAPKYAGQDKVNPGSIILSAEMMLRHMGWTEAADLIVKGMEGAINAKTVTYDFERLMEGAKLLKCSEFGDAIIKNM

SEQ ID NO: 9048 - protein, 350 aa, Haloarcula marismortui ATCC 43049
MLQRAEPQDFERVLSSMCTVPHPSAREAAERFLATNPGDPGTYETIAGLEREAVEYLGDITGLSDPAGYVASGGTEANLQAIRIARNRADTDDPNVVAPVHAHFSFTKAADVLGVELRTAPAADYRVNMAAMAELVDEDTVCVVGVAGSTEYGYVDPIPAIADLAETVDALCHVDAAWGGFYLPFTDHDWHFGHADIDTMTIDPHKVGQAAVPAGGLLARDRTLLDELAVETPYLESTDQLTLTGTRSGAGVASAVAAMESLWPAGYRQQYETSMANADWLADQLSARGHDVVGPELPLVAADLSMPMTDELRDRGWRVSKTGAGEMRVVCMPHVTRSMLRSFVADLDWY

SEQ ID NO: 9049 - protein, 488 aa, Psychrobacter sp. 273-4
MLKTTLNLSNPDLIKQQCLIKDGWYAANDEATIEVSNPFNGDVIGTVPSLTTADVNDAVTYSHEAQITWAAKTPQERAQLLQKWADLIDANKEDLAIIMTAEQGKPLAESRGEIGYANSFIRWFAEEGKRVYGDVIPATNSQLRYVVLKQPVGVCAAITPWNFPAAMITRKAAPALAAGCTIIIKPATETPFSALALGALAEQAGIPAGVIQVVTGKSSTIGDILTGDARIHKLSFTGSTEVGRTLMAQCAPTIKKLSLELGGNAPFIVFDDADLEKAADGLIASKYRNAGQTCVCANRVYVQDSIKDEFLGIFIKKVAELKVGNGMEEGVNVGPLINEKALQKVQALLKDALDKGATLIAGGSTNNASALAYNPTVITDISADMDIASEEIFGPIAPVFTFSSEEEVIRAANDTIYGLAAYFYSSDYARAWRVTEGLEYGMVGHNTGMLSTEVAPFGGVKQSGFGREGSKYGIEEYVVTKYWCSDVS

SEQ ID NO: 9050 - protein, 378 aa, Nostoc punctiforme PCC 73102
MMVCEYKPGLEGIPAAQSSISYVDGQKGILEYRGIRIEELAEKSTFLETAYLLIWGELPSKEELEGFEHEVRYHRRIKYRIRDMMKCFPESGHPMDALQASAAALGLFYSLRDLHNPAYIRDSVVRLIATIPTMVAAFQLMRKGNDPVRPRDDLDYSSNFLYMLDEKEPDPLMARIFDICLILQVEHTMNASTFSARVTASTLTDPYAVVASAVGTLGGPLHGGANEEVIQMLEKIGSVENVRPYIEHCLETKSKIMGFGHRVYKVKDPRAIILQGLAEKLFEKFGYDKFYDIAQEMERVVGEKLGSKGIYPNIDFYSGLVYRKMGIPTDLFTPIFAIARVAGWLAHWKEQLAENRIFRPTQVYNGLHEVTYTPIDQR

SEQ ID NO: 9051 - protein, 441 aa, Glycine max
NVTRSTDEKQLLDWHLANLEYANAGCLSNLSAAYCRSDDPYEMSGDHCFLAGGNMGLIKALCEGVPVFYGKTVNTIRYGNEGVEVIAGEHVFQADIALCTVPLGVLKKKAISFEPELPARKLEAIERMGFGLLNKVAMVFPHVFWGEDRDTFGCLNEHSHQRGEFFLFYCYHTVSGGPALIALVAGEAAQAFESTDASILLHRVLTVLKGIFHPKGIIVPDPIQPTRPRWGSDPLSYGSYSHVSVNSSGADYDILAENVGNRLFFAGEATSRQYPATMHGAFLSGLREASHIYRSARIQNNPRKCMPKNIVSNDILGDLFKWPDLEFGKFAFIFYPSPENLQSTGLLQVTIGDAEEIYEELFSSYPNAAKWPLQLYTIISREQAQQLQKVEGGNESLLSFFTAARRLQLGGPNALLTAGNTLIASIAHSRKGRWRNRVITC

SEQ ID NO: 9052 - protein, 180 aa, Glycine max
MSGRVSGKVKWFNDQKGFGFITPDDGSEELFVHQSQIKSDGFRSLAEGESVEFAIESESDGRAKAVDVTGPDGASVQGTRRGGDGGRSYGGGRGGGYGGGGRGGGGGACYNCGESGHLARDCSQGGGGDRYGGGGGGGGRYGGGGGGRYGGGGGGGGGGGSCYSCGESGHFARDCPSSAR

SEQ ID NO: 9053 - protein, 1113 aa, Oryza sativa (japonica cultivar-group)
GLITKSRKGLDPAVARYARGFGPEEVQDLHEGASLVEVLYTDHQVRKVKPHVLLGLSGVGGIFNEEVLKAMKESDSPRPAIFAMSNPTTKAECTPEDVFKYVGDNAVFASGSPFSNVTLGNGRQGYANQANNMYLFPGIGLGALLSGARHITDGMLQSAAECLASYITDDEIRKGILFPSISSIRHITARVGAAVVRAAVDEDLAEGRCDVDARDLKSMTECWNNSSKKPPAKSAYLRWKKTVGVLPSLLPEVGMEFNTVDEAWMFWVSYGGQKGFEVRKRYSNKRKSDGKVRSCRYVCANEGHRKEDKRDHLTKCPRAETRTDCQVRMGVVLDQEKGNYKVADLVLEHNHILQLPETSHLMVSQRKISELQGFEIETADDAGIGPKAAHQLASIQVGGSLNLNCTLRDHKNYLRGKRQREMVYGQAGSMLMHFQDKIAENPSFQYALQMDSEEQIANIFWVDAKMLTDYAYFGDVVSFDTTFGTNKESRPFGVFVGFNQFRETMVFGAVLLYDETYESFKWLFETFLKAHNGKQPKTIYTDQDSAMGKAIKKVFLESWHGLCTFHIMQNAVKHVAELEDEESSNSPKQTAEDNEEERSILADFSACMFEYEDEETFEQAFSTIRAKASKQSWLDSIYKVKEKWAECYMKDVFTLACTTALEGNNCYLVAIGSLDENCTFEKEYKVVGDPLEQTSTCGCGMFSRTGILCAHALKVLDLMNIKSLPSQYVLKRWTRGAHSGTVQDNHGRSIIENPRLNEMLRYKDMTRKFLNLALRAASHPGSTLLVNNALDILSKQVEEEINGFTDTIALGPTDITPPSDLVSTARLKKKEVETKTSKRKKNWLDKLHKSTKNGSNKGGKRKKKGSKEQKTAKTGGKKKGKEASVHDNPAGQNIYPSTSLPMEEMSEPYMAINTFSQLLTQWSLVLVNRLLVSAGCGTCRDCSFGTLDEQLDLLGKSKVDWLSGVEATGGAELDGRWPEQASGAKRRWPEQGQGATAPRCRGVTGGERGGGWSSGEWRRAPGRWRRDEAERTPTARWSTHLKKRVSPEQKKGGGKSKKKMTWTDVLVPSPSPSSSSTATTNCSRLQRRLGRCAEQHKQGGGGGQDRDPHARPL

SEQ ID NO: 9054 - protein, 506 aa, Glycine max
  misc_feature (71)..(71): Xaa can be any naturally occurring amino acid
MLSQKQGEDAIITNLNHTDSEDGRRFSSSDTEQDHSMFNIKILLHLGGSVWDAWFSCASNQVAQVLLTLPXSFAQLGMVSGILLQIFYGLIGSWTAYLVSVLYIEYRTRKEKENVSFKNHVIQWFEVLDGLLGRYWKAVGLAFNCTFLLFGSVIQLIACASNIYYINDKLYKRTWTYIFGACCAFTVFIPSFHNYRIWSFLGLGMTTYTAWYLAIAAILHGQVENVTHSGPTKLILYFTGATNILYTFGGHAVTVEIMHAMWQPRKFKSIYFLATLYVFTLTIPSAVAVYWSFGDQLLDHSNAFSLLPKNVFRDAAVILMLIHQFITFGFACTPLYFVWEKVIGMHDTKSIWLRALARFPVVLPIWFLAIIFPFFGPINSAVGSLLVSFTVYIIPALAHMLTYRNASARQNAAEKPPFFMPSWTAMYVFNAFIIGWVLVVGFGLGGWASMINLINQIDTFGLFAKCYQCPEPPPPAGAPPPLTHPVVEGGVDLVEPWAPPNLLKII

SEQ ID NO: 9055 - protein, 521 aa, Zea mays
HASVQIKVEDMDAYAPKDLLVVTTGSQGEPRAALNLASYGGSHALKLSKEDVLLYSAKVIPGNETRVMKMMNRLTDLGPKIIMGKDSGLHTSGHAYREELEEVLRIVKPQHFLPVHGELLFLKEHESLGRSTGIRHTTVIKNGEMLGVSHLRNRRVLSNGFVSLGKEDLQLMYSDGDKAFGTSTDLCIDERLRIASDGIIFVSMEIFRPQKEHGLAQSGLKGKFKITTRCLWLDNGRLLDALYKAAHAALSSCPVNCPLSHMERMVAEILRKMVRKYSGKRPDVIAVAMENTTASFSEHLDAKSSGNFGPSSATSHLSRSPAMSLEGSYKTHPDNPEVDAEETLPEAARTTPDDATTSSNGEAFFSSDLHQPKTLEHFWESFKSPTTVKIARIVNGGKKQNLGKIGIMGKDSSIQSAPAPAKSSKKNKWKPEEIKSLIQMRGEMNERFQSVKGRMVLWEEISDNMLKQGISRTPAQCKSLWTSLVQKYEESKKDAESMKTWPYFSAMDRILSQQGEMATKG

SEQ ID NO: 9056 - protein, 123 aa, Triticum aestivum
MAGVSRSMVAPLLVLNLVMYIVVIGLASWNLNHFINGTTNYAGVAGNGATFYFLLFAILAGVVGAASKLAGVHHVRTWRGDSLATSASSALVAWAITALAFGLACKEIHVGGHRGWRLRVLEV

SEQ ID NO: 9057 - protein, 427 aa, Haemophilus somnus 129PT
MSKLTAKLTLSDGREFDLNVQQGTLGYDAVDVQPLVKNKLFTFDPGFMSTASCVSEITYIDGDNGILLHRGYPIADLAKNADYLEVAHLLLFGERPNKEEYANFIKLVKNHTLVHEQISRFFHGFRRDSHPMAIMCGVSGALAAFYHDSLDINDIEHRELTAIRLLAKMPTLAAMCYKYSIGQPFMFPLNKLSYAGNFLYMMFATPCEPYEVNPVLEKAMDRIFILHADHEQNASTSTVRTAASSGANPFACIAAGIASLWGPAHGGANEACINMLEEIGSVDRIPEYIARAKDKNDPFRLMGFGHRVYKNYDPRAKVMRQTCHEVLKELNIQTPLFDVAMELERIALNDPYFIDHKLYPNVDFYSGIILKAIGIPTSMFTVIFALARTVGWIAHWKEMFKPGNMKIVRPRQLYKGHTERNFDAIEK

SEQ ID NO: 9058 - protein, 143 aa, Brassica napus
  misc_feature (34)..(34): Xaa can be any naturally occurring amino acid
  misc_feature (93)..(93): Xaa can be any naturally occurring amino acid
  misc_feature (120)..(120): Xaa can be any naturally occurring amino acid
PAQDQLAAPLTGSKRSAGFPDTRKSNTDSYFHVXASRDARSSCMNEWAPHGKKKIETLSYVPDLTDHQSTKQDDYLLHLTGGTPCVEYEMQHXFVGPERGNTPGYYDARYWTMGKLSLIXCTDSAQMLKEVLECKTEYPNAFI

SEQ ID NO: 9059 - protein, 214 aa, Listeria monocytogenes str. 4b F2365
MRFFIDTANVEEIKKANRMGFIAGVTTNPSLVAKEGRDFNEVIQEITSIVDGPISGEVVSLEADEMIAEGRVIAKIHPNMVVKIPMTGEGLAAVKVLTEEGIKTNVTLVFSATQALLAARAGATYVSPFLGRLDDIGDDGLVLIRDIADIFEIYGIPTEIISASVRHPIHVIECAKAGADIATVPFKVFEQMLKHPLTDSGIDKFLADWEAAKK

SEQ ID NO: 9060 - protein, 138 aa, Triticum aestivum
MRVPQMTRVIHDSGEGMQKEFALDMVSSDVNFPKGHFPDYRIGPNNQIIDPEETHEVVPLKEIVEKETTQLLEQRKRLSVRDLREKFEKGLTGASKLSEEAKRREAASLDRQVLLKKLRDVLDTLKGRVAGRNRDDAD

SEQ ID NO: 9061 - protein, 203 aa, Methylococcus capsulatus str. Bath
MNTHIVWHQSTVTRGQRERQNGHKSFILWFTGLSGAGKSTLAHRVEQLLFEQGCRTYVFDGDNVRHGLCSDLGFSAEDRCENIRRIGEMSKLFVDAGVIALTAFISPFRRDRDLVRALVEPGDFVEIFCDAPLEVCEQRDVKGLYRKARAGEIPEFTGISSPYEKPLAPEITVRTGEDGLDECAGQILGYLEKNGKINLKTTR

SEQ ID NO: 9062 - protein, 240 aa, Zea mays
PTRPPTRPDPRVRPRVRPRVRVDHAVELAHFALFFNQGQCCCAGSRTFVHERVYDEFVEKAKARALKRVVGDPFRKGVEQGPQIDDEQFKKILRYIRYGVDGGATLVTGGDRLGDKGFYIQPTIFSDVQDGMKIAQEEIFGPVQSILKFKDLNEVIKRANASQYGLAAGVFTNSLDTANTLTRALRAGTVWVNCFDVFDAAIPFGGYKMSGMGREKGVDSLKNYLQVKAVVTPIKNAAWL

SEQ ID NO: 9063 - protein, 473 aa, Magnaporthe grisea 70-15
MASAMRLSSAFRATARAPAFTARRTAFNGMRCYSAKTQTLKERFAELLPEKIEEIKSLRKEHGSKVIDKVTLDQVYGGARGIKCLVWEGSVLDSEEGIRFRGKTIPECQELLPKAPGGKEPLPEGLFWLLLTGEVPSEAQVRALSAEWAARSDLPKFVEELIDRCPNDLHPMAQFSMAITALEQTSSFAKAYAKGINKKEYWGYTFEDSMDLIAKLPTIAARIYQNVFKGGKVAPVQKDKDYSFNFANQLGFGNNSDFVELLRLYLTIHTDHEGGNVSAHTTHLVGSALSSPFLSLAAGMNGLAGPLHGLANQEVLNWLTEMKKSVGDDLSDKSITDYLWSTLNSGRVVPGYGHAVLRKTDPRYTAQRVFAQEKMPNDPMFKLVSQVYKIAPGVLTEHGKTKNPFPNVDAHSGVLLQYYGLTEANYYTVLFGVSRAIGVLPQLIIDRAVGAPIERPKSFSTEKWIEIAKKTAA

SEQ ID NO: 9064 - protein, 350 aa, Caulobacter crescentus CB15
MATLLLLPGDGIGPEVCAQVRRVAAALTPDLKVDEALYGGASYDTHGTPLTDEVREQALASDAVLMGAVGGPKWADAPRHLRPEAGLLNLRKAMDVFANLRPAYCFEALAGASSLKPELVSGLDIMFVRELVGGVYFGQPRGIEDLADGQKKGFDTQVYTTSEIERVGRVAFELARGRTNKVHSAEKSNVMESGLLWKQVITELHAREYPDVQLEHILADNCAMQLVRAPKQFDVIVTDNLFGDILSDAAAMLTGSLGMLPSAALGAPGKPGLYEPIHGSAPDIAGKGLANPLAAILSFEMALRWSLKQTEAADALLAAVKAALDNGARTRDLGGSLTTTQMGDAVLAAL

SEQ ID NO: 9065 - protein, 489 aa, Mycobacterium tuberculosis H37Rv
MALWGDGISALLIDGKLSDGRAGTFPTVNPATEEVLGVAADADAEDMGRAIEAARRAFDSTDWSRNTELRVRCVRQLRDAMQQHVEELRELTISEVGAPRMLTASAQLEGPVGDLSFAADTAESYPWKQDLGEASPLGIATRRTLAREAVGVVGAITPWNFPHQINLAKLGPALAAGNTVVLKPAPDTPWCAAALGEIIVEHTDFPPGVVNIVTSSSHALGALLAKDPRVDMISFTGSTATGRAVMADAAATIKKVFLELGGKSAFVVLDDADLAAASAVSAFSACMHAGQGCAITTRLVVPRARYEEAVAIAAATMSSIRPGDPNDPGTVCGPLISARQRDRVQGYLDLAVAEGGRFACGGARPADREVGFYIEPTVIAGLTNDARVAREEIFGPVLTVIAHDGDDDAVRIANDSPYGLSGTVYGADPQRAARIASRLRVGTVNVNGGVWYCADAPFGGYKQSGIGREMGLLGFEEYLEAKLIATAAN

SEQ ID NO: 9066 - protein, 174 aa, Triticum aestivum
MAPAVMASSATTVAPFQGLKSTAGLPVSRRSSGSLGSVSNGGRIRCMQVWPIEGIKKFETLSYLPPLSTEALLKQVDYLIRSKWVPCLEFSKVGFVFREHNSSPGYYDGRYWTMWKLPMFGCTDATQVLNEVEEVKKEYPDAYVRVIGFDNLRQVQCVSFIAFRPPGCEESGKA

SEQ ID NO: 9067 - protein, 372 aa, Glycine max
MANLPNSKLYGKEKMKGEQELEDEESFSRAMLLCSSVVVSMALQSATELGVFDVLQEAGAKLSAKEIASKLSCDNNPEADSMLDRLLALLASHSILNCSLILDHQNLGTFQRLYTITPVARFFARNSDGVSLGPLMALLQDKIFLHSWSELKDSIREGGIPFNRVYGTHAFEYPRLDARFNQVFNTAMINHTTIVMKKVLECYKGFENIKMLVDVGGGLGININLITSKYPHIQGINFDLPHVLEHAPSYPGVEHVGGDMFENVPKGDAIFMKWILHDWSDEYCLKLLKNCYDAIPDDGKVIVVEAVLPIIPETSNAAWKAVSQTDVLMMTQNPGGKERSDQEFMDLATAAGFSGIRYECYVRTFWIMEFFK

SEQ ID NO: 9068 - protein, 181 aa, Brassica napus
MASVMLSSATMTSSLAHSTMVAPFIGLKSSAAFPMTCKANTEITSITSNGGRVNCMKVWPPVGKKKFETLSYLPDLTDVEIAKEVDYLIRNKWTPCIEFELEHGFVYREHGNIPGYYDGRYWTMWKLPLFGCTDSTQVLKEVKKCKQEYPNAFIRIIGFDNNRQAQCISFIAYKPPSFTDV

SEQ ID NO: 9069 - protein, 411 aa, Rickettsia heilongjiangensis
DSEFAELKIRGKIFKLPILKASIGEDVIDISRVSAEADCFTYDPGFMSTASCQSTITYIDGDKGILRHRGYDIKDLAEKSDFLEVAYLLIYGELPSGEQYNNFTKQVAHHSLVNERLHYLFQTFCSSSHPMAIMLAAVGSLSAFYPDLLNFKEADYELTAIRMIAKIPTIAAMSYKYSIGQPFIYPDNSLDFTENFLHMMFATPYTKYTVNPIIKNALNKIFILHADHEQNASTSTVRIAGSSGANPFACISTGIASLWGPAHGGANEAVINMLKEIGSSEYIPKYIAKAKDKNDPFRLMGFGHRVYKNYDPRAAVLKETCKEVLKELGQLDNNPLLQIAIELEAIALKDEYFIERKLYPNVDFYSGIIYKAMGIPSQMFTVLFAIARTVGWMAQWKEMHEDPEQKISRPR

SEQ ID NO: 9070 - protein, 158 aa, Brucella melitensis 16M
MKKNNLFRALLISATFALQATAAFAVNPDEVLSDPKLEKRAREISAELRCMVCQNESIDDSNAELARDLRILVRERLTKGDTDGQVIDFVVDRYGEFVLLKPRFNAQTALLWGFPVIILLIGGGALLVAFRRRRAAGTAPQPLSESEKAELSRLLDGK

SEQ ID NO: 9071 - protein, 324 aa, Methanococcoides burtonii DSM 6242
MVKVKDLKWKQNMTVSELVDSYEFIGFQSVELQRASDVIVKMKKDSAKVFLTFTSNMVTSGLRGFFAQLIDLGVADVIVTTVGGLEEDIMKATGEDFQIGSFHTDDVELHEQGINRVGNLLIKTESYMNFESLVDKILKELYEKQNRWAVSDMLREIGLMLDDESSILYQAAKNNVPIFCPAITDGAFGFHLYLFQQEHPDFIVDVVKDFGNILFASSHDDRKGVIALGGSISKHHAILSTLLNGGAEYAVYMTTAHRTSGSMSGANTNEAKSWGKVKDESDVATVIGDVSITFPLAMIRALDELAADGLLKGLQENRTTGVVK

SEQ ID NO: 9072 - protein, 466 aa, Lactococcus lactis subsp. lactis Il1403
MLYGKENRDEAEFLEPIFGSESEQVDLPKYKLAQQSIEPRVAYQLVQDEMLDEGNARLNLATFCQTYMEPEAVKLMSQTLEKNAIDKSEYPRTTEIENRCVNMIADLWNASEKEKFMGTSTIGSSEACMLGGMAMKFSWRKRAEKLGLDINAKKPNLVISSGYQVCWEKFCIYWDIEMREVPMDKEHMSINLDKVMDYVDEYTIGVVGIMGITYTGRYDDIKALDNLIEEYNKQTDYKVYIHVDAASGGLYAPFVEPELEWDFRLKNVISINTSGHKYGLVYPGVGWVLWRDKKYLPEELIFKVSYLGGELPTMAINFSHSASQLIGQYYNFVRYGFDGYKAIHERTHKVAMFLAKEIEKTGMFEIMNDGSQLPIVCYKLKEDSNRGWNLYDLADRLLMKGWQVPAYPLPKNLENEIIQRLVIRADFGMNMAFNYVQDMQEAIEALNKAHILYHEEPENKTYGFTH

SEQ ID NO: 9073 - protein, 493 aa, Thermoplasma acidophilum
MDTKLYIDGQWVNSSSGKTVDKYSPVTGQVIGRFEAATRDDVDRAIDAAEDAFWAWNDLGSVERSKIIYRAKELIEKNRAELENIIMEENGKPVKEAKEEVDGVIDQIQYYAEWARKLNGEVVEGTSSHRKIFQYKVPYGIVVALTPWNFPAGMVARKLAPALLTGNTVVLKPSSDTPGSAEWIVRKFVEAGVPKGVLNFITGRGSEIGDYIVEHKKVNLITMTGSTATGQRIMQKASANMAKLILELGGKAPFMVWKDADMDNALKTLLWAKYWNAGQSCIAAERLYVHEDIYDTFMSRFVELSRKLALGDPKNADMGPLINKGALQATSEIVEEAKESGAKILFGGSQPSLSGPYRNGYFFLPTIIGNADQKSKIFQEEIFAPVIGARKISSVEEMYDLANDSKYGLASYLFTKDPNIIFEASERIRFGELYVNMPGPEASQGYHTGFRMTGQAGEGSKYGISEYLKLKNIYVDYSGKPLHINTVRDDLFQ

SEQ ID NO: 9074 - protein, 282 aa, Lactococcus lactis subsp. lactis Il1403
MVIQWFPGHMSKARRQVQENLKYVDFVIELVDARLPISSRNPMLGQIIGDKPRIIALNKADLADSNAVAQWIEFFDEQGFVTLAINSKEEYTAKRLTVAAKKLMADKVAHDKERGIAHTTLRTMIIGIPNAGKSTLMNRLAGKKVAVTGNRPGVTKGQQWIRTNKELELLDTPGILWPKFEDQLVGLKLALTGAIKDDLLPMDEVTIFGLNYFLKNYRTVTMKRYRMTEEDLELEIPDLIMELTARFGFRDDYDRFYNMFVKDVRDGKLGLFCLDEVGVDGL

SEQ ID NO: 9075 - protein, 225 aa, Desulfitobacterium hafniense DCB-2
MRPARRRRNQFNPFATPPGVPPHGAFGMTHPVLAALGLKDNESGTYLGHGEWSKTADAGVLEPVNPTDGEVLARVQASSQADYEIILARAQAAFAVWRTTPAPRRGEAIRLCSDALRKHKDALGSLVALEMGKSKPEGDGEVQEMIDIGDFAVGLSRQLYGLTMHSERPGHRMYEQWHPLGIVGIISAFNFPVAVWAWNSFIAAICGDISIWKPSPKTRCRRSRR

SEQ ID NO: 9076 - protein, 214 aa, Glycine max
LALHYRNADHPSRVDTDVDGLLGRLRFIQGLKFQVDVTYMEFLLRVKRVEEHAKGNGTWDAPHPWLNLFVSKSHIVDFDREVFKKILKDGVDGPILVYPLLRNKWDSRHSVVVPDSDMFYIVALLRFTPPPPKGPAAELLVAQNNEIIEFCTSRSLDFKLYFPHYQSREDWIKHFGNQWARFAERKANFDPMAILAPGQKIFSRTSQPQPPSIT

SEQ ID NO: 9077 - protein, 431 aa, Ralstonia eutropha JMP134
MNREQQIQALQKDWDTNPRWKGIKRNFTAEDVVRLRGSVQVEHTLARRGSEKLWNLLHTEPFVNSLGALTGNQAMQQVKAGLKAIYLSGWQVAGDANLAGEMYPDQSLYPANSVPQVVKRINNTFQRADQIQWSEGSGDTDFFAPIVADAEAGFGGVLNAFELMKSMIEAGAAGVHFEDQLASVKKCGHMGGKVLVPTREAVAKLTAARLAADVSGVPTLVIARTDAEAADLLTSDVDDNDKPFCTGERTVEGFYRVRNGLEQSISRALAYAEVADLVWCETGKPDLEFAKKFAEAVHAKFPGKMLAYNCSPSFNWKKNLDDATIARFQRELGAMGYKFQFITLAGFHSLNYSMFNLAYGYARNQMSAFVELQEAEFKAAEKGFTAVKHQREVGTGYFDAVTQAIEGGQSSTTALKGSTEDEQFFEDKKVA

SEQ ID NO: 9078 - protein, 425 aa, Ralstonia solanacearum
MKLHIKGGRLIDPANGIDAQQDLYLAAGKVVGVGRAPADFHANKTIDATGLVVCPGLIDLSARLREPGYEYKATLESEMAAAMAGGVTSLVCPPDTDPVLDEPGLVEMLKFRARNLNQAHVYPLGALTVGLKGLVLTEMAELTEAGCVGFSQADAPMTDTLVLMRALQYAQTFGFTVWLRPEDPFLGKGGVAASGPLASRLGLAGVPVMAETVRLHTIFELIRSTGARVHLCRLSSAAGLELVRRAKAEGLPVTCDVNVHHISLTDVDIGYFNSQMRFMPPLRAGRDRDGIVRALADGTIDAICSDHTPVDDDEKLLPFAEASPGATGLETLLPLTLRWAAEHKVDLPRALARITSEPARVLGLQAGSLEEGAMADVCVFDPDATWKVEPRSLRSQGKNSPYLGFELAGRVRATLVAGHLAYDGH

SEQ ID NO: 9079 - protein, 446 aa, Glycine max
SVIGYCEKTTEGERYKILRELGDGSCGHVYKARDMRTYEIVAVKRLKRKFCFWEEYTNLREVMILRKMNHPNIIKLKEVVRENNELFFIFEYMDCNLYQLIKEREKPFSEEEIRCFMRQVLQGLSHMHKKGFFHRDLKPENMLVTNDVLKIADFGLAREVSSMPPYTQYVSTRWYRAPEVLLRAPCYTPAVDMWAVGAILAELFTLTPIFPGESEIDQLYKIYGILGMPDSTAFTIGASNSQLLDIVAHEVVPPVKLSNIIPNASLEAIDLITQLLHWDPSRRPDADQSLQHPFFHVDAWVPCPPSDPLELKLSSKRAKPNLELKLQDFGPDPDDCFLGLTLGVKPSVSNSDVVQNVSQGVRENVLFCSDFNDHSDQSVFWTLLSPDQNGIHNSAETSLSLSFSPVQHPPIGVPQSVGFSFQPLQPNILTSPFLALSSPFQRGHCL

SEQ ID NO: 9080 - protein, 347 aa, Psophocarpus tetragonolobus
GGELFDRIVQKGHYSERQAATLIKTIVEVVEACHSLGVMHRDLKPENFLFDTLHEDAKLKATDFGLSVFYKPGESFCDVVGSPYYVAPEVLRKLYGPESDVWSAGVILYILLSGVPPFWAETEPGIFRQILLGKIDFQSEPWHSISDSAKDLIRRMLDQNPKTRLTAHEVLRHPWIVDDNLAPDKPLDSAVLSRLKQFSAMNKLKKMALRVIAERLSEEEIGGLKELFKMIDTDNSGTITFDELKDGLKRVGSELMESEIKDLMDAADIDKSGTIDYGEFIAATVHLNKLEREENLVSAFSYFDKDGSGYITLDEIQQACKDFGLDDVHIDDMIKEIDQDNDGQIDY

SEQ ID NO: 9081 - protein, 504 aa, Bifidobacterium adolescentis
  misc_feature (356)..(356): Xaa can be any naturally occurring amino acid
MKNKVQLITYADRLGDGTIKSMTDILRTRFDGVYDGVHILPFFTPFDGADAGFDPIDHTKVDERLGSWDDVAELSKTHNIMVDAIVNHMSWESKQFQDVLAKGEESEYYPMFLTMSSVFPNGATEEDLAGIYRPRPGLPFTHYKFAGKTRLVWVSFTPQQVDIDTDSDKGWEYLMSIFDQMAASHVSYIRLDAVGYGAKEAGTSCFMTPKTFKLISRLREEGVKRGLEILIEVHSYYKKQVEIASKVDRVYDFALPPLLLHALSTGHVEPVAHWTDIRPNNAVTVLDTHDGIGVIDIGSDQLDRSLKGLVPDEDVDNLVNTIHANTHGESQAATGAAASNLDLYQVNSTYYSALGXNDQHYIAARAVQFFLPGVPQVYYVGALAGKNDMELLRKTNNGRDINRHYYSTAEIDENLKRPVVKALNALAKFRNELDAFDGTFSYTTDDDTSISFTWRGETSQATLTFEPKRGLGVDNTTPVAMLEWEDSAGDHRSDDLIANPPVVA

SEQ ID NO: 9082 - protein, 205 aa, Shewanella oneidensis MR-1
MSNIVWHQHSVDQAARARLKGQNPVLLWFTGLSGAGKSTLAGALERALFEAGFHTYLLDGDNVRHGLCKDLGFSVADRDENLRRVGEVAKLMVDAGLVVLSAFISPTREERDSIRARFPEGQFIEVHVSTPLSVCELRDPKGLYVKARKGEIAHFTGISSPYEAPLSAELTIDTSKGDLASQVHALIDYLTAIDVISSNRLASLA

SEQ ID NO: 9083 - protein, 454 aa, Streptomyces avermitilis MA-4680
MTKRDVAALFGNRFLTEPAPSQTFPEEGMTATDTMRLLDEDLVMEGDPQRNLATFVTTWMEPEAQRIIAENLHRNFIDHAEYPISAEIEQRCVRMLADLFHAPGKTTGCRTQGSSEAIMLGALSLKWKWRERRQAANLPADRPNLVFGGDVHVVWEKFCRYFDVEPRIVPLAEDKYTIGPEDVEPHIDENTIGVVAVVGTTFTGHKDDVVGIDKLLRDVRKERDLDIPIHVDGASGGFVWPFLYPDSKWDFRLEQVRSINVSGHKYGLVYPGIGWLVFREESDLAKDLVFYENYLGKTDATFTLNFSTGASMVLAQYYNFVRLGRQGYTYVMETMQKNAHALADNLRSSGRFEVIGSDLEQLPLVAFRLAGEHAYDESDIAWQLSAERGWMVPAYTLPPNAERVKILRALVKETLSREQIERLTQDIADACATLDHKGGTTEVERAQIKRGTGY

SEQ ID NO: 9084 - protein, 346 aa, Escherichia coli
MKSVVNDTDGIVRVAESVIPEIKHQDEVRVKIASSGLCGSDLPRIFKNGAHYYPITLGHEFSGYIDAVGSGVDDLHPGDAVACVPLLPCFTCPECLYGFYSQCAKYDFIGSRRDGGFAEYIVVKRKNVFALPTDMPIEDGAFIEPITVGLHAFHLAQGCENKNVIIIGAGTIGLLAIQCAVALGAKSVTAIDISSEKLALAKSFGAMQTFNSLEMSAPQMQGVLRDVRFNQLILETAGVPQTVELAVEIAGPHAQLALVGTLHQDLHLTSTTFGKILRKELTVIGSWMNYSSPWPGQEWETASRLLTERKLSLEPLIAHRGSFESFTQVVRDIARNAMPGKVLLIP

SEQ ID NO: 9085 - protein, 268 aa, Methanosarcina thermophila
MVSKKVSRKVAAKEELLLLLPEIDRIFDSEPAVLRIDTEPVMIVGDIHGNLQALEYVIEKREEMNYKNFLFLGDYVDRGPQGTEALIRLFRMKLEDPDHIFLLRGNHETVDMNIYYGFFAEIGFDEEFLFRVSQTYDKMPIAAVLSGHTFCVHGGINGIGSINDIRKEKAFPYLWNDPSNHPGLTASRRGSTVKEFGPDIVDGFLKTNHLKRIVRGHTALDKGYRWWFDGKLLSLFSCPDYVGLGNAAAFALFEKEEIKLFVFGDQQE

SEQ ID NO: 9086 - protein, 503 aa, Ralstonia eutropha JMP134
MGQRVPAHVRHGLYTQVMSMFSLKDPGLLRQQAYVDGQWRAAESGKTLDVINPANNEPLGTIPACDAADTRAAIEAANRALPAWSALTTHQRAAVLRKWRELMVAHADDLALIMTLEQGKPLAEARGEILYGASFVEWFAEEGIRAYGETIPATHASRRIIARKVPVGVCAAITPWNFPNAMITRKLAPALAAGCAVVVKPSELTPYSALALAELGERAGIPAGVLNIVTGMPQGIGGELTANPIVRKLTFTGSTQVGKLLLRQCADTVKRVSMELGGNAPVIVFDDADLEQAVAGVMASKFRNSGQTCVCANRIYVQAGIYDRFSARLSEEVRKLKVGAGTEDGVSIGPLINDAALRKVVRHVEDAVAHGAKVIVGGASLSRGQQYFEPTVVTGATDGMLIASEETFGPVAALFPFESETEIIRRANDTPYGLAAYLFSTDVNRVFRVSEALEYGMVGANTGVISSAVAPFGGVKESGLGREGSHHGIDEFLEVQTLHLEIV

SEQ ID NO: 9087 - protein, 490 aa, Pseudomonas putida KT2440
MARFGTQKLYIDGAYVDAGSDATFEAINPATGEVLAHVQRATEADVEKAVESAERGQKVWAAMTAMQRSRILRRAVDILRERNDELAMLETLDTGKSYSETRYVDIVTGADVLEYYAGLVPAIEGEQIPLRESSFVYTRREPLGVTVGIGAWNYPIQIALWKSAPALAAGNAMIFKPSEVTSLTTLKLAEIYTEAGLPNGVFNVLTGSGREVGTWLTEHPRIEKVSFTGGTTTGKKVMASASSSSLKEVTMELGGKSPLIICADADLDKAADIAMMANFYSSGQVCTNGTRVFIPAEMKAAFEAKIAERVARIRVGNPEDENTNFGPLVSFQHMESVLGYIAKGKEEGARVLCGGERLTAGDFAKGAFVAPTVFTDCTDDMTIVKEEIFGPVMSILTYETEEEVIRRANDTDYGLAAGVCTNDITRAHRIIHKLEAGICWINAWGESPAEMPVGGYKQSGVGRENGVSSLAQYTRIKSVQVELGGYNSVF

SEQ ID NO: 9088 - protein, 497 aa, Pseudomonas putida KT2440
MYTLEFWQQRASDLYLPAHALIDGKPVNAQDGATFAAINPATNNVLAQVAACGHAEVDLAVASARRAFEQGPWPRMAPGERKKVLLRLAELIMAHREELALLDSLNMGKPVMDAYNIDVPGSAHVFAWYGEALDKLYDQVAPTAANALATITREALGVVAAVVPWNFPLDMAAWKLAPALAAGNSVVLKPAEQSPFSALRLAQLALEAGVPEGVLNVVPGLGEQAGQALGLHPDVDCLVFTGSTQVGKYFMQYSAQSNLKQVWLECGGKSPNLVFDNCQDLDLAAEKAAFGIFFNQGEVCSANSRLYVQRAIHDEFIERLQAKARQWLPGNPLDPASRAGAIVDAGQTGRIEAAIVRAGQEGARLVCGGRRLTIEGSDNYIEPTIFAGVEGRMSLAREEVFGPVLAVSAFDTEEEAVRLANDSIYGLVASVWSDDFNQVHRVARALKAGTVSVNTVDALDVTVPFGGGKQSGFGRDLSLHSFDKYSQLKTTWYQLRG

SEQ ID NO: 9089 - protein, 491 aa, Zea mays
  misc_feature (14)..(14): Xaa can be any naturally occurring amino acid
  misc_feature (151)..(151): Xaa can be any naturally occurring amino acid
MTRVIHDSGDDMQXEALDLVSSDVNFPKGHFPDYRIGPNNQIIDPEETHEAVPLKEIVAKETAQLLEQHKRLSVRDLKEKFEKGLSGASKLSEEAKRREAASLDRQVLLKKLRDVLDTLKGRVAGRNRDDAEEAISLVEALAVQLTQREGXELIYEKAEVKKLANFLKQATEDARKVAEEERALALAEIEKARAAIEKVEKAWHVHDFASSSREKAEIEELRKEVREARRIKMLHQPSKVMDMEFELQALRTLISEKTQLCNQLKKELAMIKRLEDDSSGLFELEGSNTLGSQLCIIPRVDGASNITNCPIQWYRVISGGTRELISGATKFMYAPEPFDVGRLLQAEIVLNADKIIVQTDGPVDNAAGLERYVDSLMKRTDIEFNVVVTQMNGKDYSSNSVHVFHIGKLRIKLRKGWSTKARESYSTTMKLCGSRGGGNAAARAVFWHPRKGSSYTLAFETDRDRNAAIMIARKFASNCNIALAGPGDQGT

SEQ ID NO: 9090 - protein, 468 aa, Zea mays
  misc_feature (160)..(160): Xaa can be any naturally occurring amino acid
  misc_feature (352)..(352): Xaa can be any naturally occurring amino acid
MARGREGEVRTLVLGKYELGRMLGQGSFAKVYYARDLRDGQSVAIKVIDKARLRQTDGMVEQLRREISVMRMVRHPNVVGIREVLASRQRVFVVMEYARGGELFAKVARGRLTEDAARKYFQQLVAAVAFCHSRGVAHRDLKPENLLLDEEGRLKVTDFXLAALPEQLRHDGLLHTQCGTPVCWRARAHIPTIYETSRRSPGPPRKTMCCARQVPLNRQEGEAGGEERKLVLGKYELGRLLGQGTFAKVYYARRLIARLLVVDPAKRASIPEVMCTPWFRKGFVPPALSVSPPMTPKKRLDGDDCGGALFDSGGGGGGDDDDSSSNSGATSPRSCNAFQLISSMSSGLDLSXLFENEQKAATVFTARAPAATVVEKLESAARALGFETTRGKGWKVRMEAKAGGTNGRLAVTAEVLEVAVDVAVVEFAHDAGDALDFNKFCAVDVRPGLAEIVWAWQGDSPAAVVGTA

SEQ ID NO: 9091 - protein, 497 aa, symbiont bacterium of Paederus fuscipes
MTTPTRADWEIRAKDLNIEGRAFVNGEYRNAASGETFDCLSPVDGRFLAKVASCDQADAEQAVKAARAAFDSGVWSRLAPAKRKRTMIRFADLLLKNAEELALLETLDMGKPISDSLHIDVSSAANSIYWNAEAIDKIYDEVAATPHEELGLVTREPVGVVTAIVPWNFPLLMACWKLGPALATGNSVILKPSEKSPLTAIRIACLATDAGIPTGVFNVLPGYGHTVGKALALHMDVDTLVFTGSTRIAKQLMIYAGESNMKRIWLEAGGKSPNIVFADAPDLKAAAEAAASAIAFNQGEVCTAGSRLLVERSIKDRFLPLVVEALKGWKPSNPLDPDTNVGALVDTQQLHTVLSYIEAGHKDGARLMVGGKRILEETGGVYVEPTLFDGVDNAMKIAREEIFGPVLSVITFENAEEAVRIANNTQYGLAAAVWTSDLSKAHLTAKALRAGSVWINQYDGGDMTAPFGGFKQSGNGRDKSLHAFDKYTELKATWIKL

SEQ ID NO: 9092 - protein, 205 aa, Vibrio parahaemolyticus RIMD 2210633
MTAETPVKDENIVWHQHTVDKQFRAELKKQKPAVLWFTGLSGAGKSTVAGALENRLAELGYHTYLLDGDNVRHGLCSDLGFSEQDRRENIRRIGELAKLMADAGLIVLSAFISPHRAERQLVRDLLPEGEFIEVFVNASLEVCEGRDPKGLYKKARAGEIPNFTGIDSEYQAPINPEIDLPAGEKSVEELVELCLNELKQRRVIS

SEQ ID NO: 9093 - protein, 342 aa, Photorhabdus luminescens subsp. laumondii TTO1
MKALVLEKAGQISIQDWETPEILGENDVEIKIHSVGICGSDVHYYQYGRIGPFIVEKPMILGHEASGVITAVGKNVTHLKIGDRVCMEPGIPNLQSPQSRAGIYNLDPEVRFWATPPIDGCLRERVIHPAAFTFKLPDNVSFAEGAMVEPLAIGMQAATKAEIKPGDIALVIGAGTIGIVTALAALAGGCSDVIICDVFDEKLEIAKQYPGLHPVNSKVLTEKVNALTEGNGVNILFECSGAKPVIATISEHIAPGGIAVLVGMPIDPAPFDVVSAQAKEITFKTIFRYANMYPRTIRLLSSGKLKVTPLLSATYKFKDSVQAYERAAEGRPTDIKIMLEME

SEQ ID NO: 9094 - protein, 248 aa, Orobanche cernua var. cumana
GCDASILLDDGPTIESEKSAGPNVDSVRGFDVIEAAKSAVEGICPGVVSCADILALAARDASVAVGGPTWTVKLGRRDSTTANRTQANTDLPSPFANLQTLVSAFANKGLSQTDMAALSGSHTLGQAQCFLFRARIYSNGTDIDPTFASNLTSQCPQSGGDSNLAPLDLVTPNFFDNNYFKNLIQRRGLLQSDQVLFSGGSTNTTVSRYSANPRMFAADFASAMIRMSEIQPLLGSSGIIRRICSATN

SEQ ID NO: 9095 - protein, 206 aa, Arabidopsis thaliana
METVGRPRGRPRGSKNKPKAPIFVTIDPPMSPYILEVPSGNDVVEALNRFCRGKAIGFCVLSGSGSVADVTLRQPSPAAPGSTITFHGKFDLLSVSATFLPPLPPTSLSPPVSNFFTVSLAGPQGKVIGGFVAGPLVAAGTVYFVATSFKNPSYHRLPATEEEQRNSAEGEEEGQSPPVSGGGGESMYVGGSDVIWDPNAKAPSPY

SEQ ID NO: 9096 - protein, 204 aa, Pichia pastoris
MASRGTSRQQYDLTMKLLLVGDSGVGKSCLLLRFVDDSFNPSFITTIGIDFKIRTVEINGKKVKLQIWDTAGQERFRTITTAYYRGAMGIILVYDVTDERSFNSVHNWYQTLNQHANEDAQLFLVGNKCDDEESRQVTKEQGEQLASELGVPFLEASAKSNKNVDAIFLELAKRFEEKMRNTQQGPGSAGIDVNSSNDTKSSCC

SEQ ID NO: 9097 - protein, 391 aa, Thermoplasma acidophilum
MEKTANIDKGLENVNIKWTKLTYIDGNNGILKYGGYNVNDLIENGAKEDEIQYLFLYGELPNRLDLELFQSKVQKGYELPDFVKDIIFELPRESDAVAMQMAAFSALATSTYNFKWNADLDRDQAAKAIGLMSAVTANVYRHIMGKGPVDLEPSDSFAESFLRSTLDRTPSEDEIDAMNAALILYTDHEVPASTTAGLVAVSTLSDMYSGIAAALAALKGPLHGGAAEASIMQFQEIGDPDNVDAWFRDNIVNGNKRLMGFGHRVYKTYDPRARIFRRYAEKLSANDPEAKKMFDIATRLEKIGIDTFGSKKIYPNTDYFSGIVYLALGYPLRNNIYTSFFALSRVTGWISHFMEYVENQHRLIRPRAVYVGPEDLQFVKIDERRGPIITS

SEQ ID NO: 9098 - protein, 207 aa, Escherichia coli
LRPVRYYQGTPSPVKHPELTDMVIFRENSEDIYAGIEWKADSADAEKVIKFLREEMGVKKIRFPEHCGIGIKPCSEEGTKRLVRAAIEYAIANDRDSVTLVHKGNIMKFTEGAFKDWGYQLAREEFGGELIDGGPWLKVKNPNTGKEIVIKDVIADAFLQQILLRPAEYDVIACMNLNGDYISDALAAQVGGIGIAPGANIGDECAL

SEQ ID NO: 9099 - protein, 457 aa, Lactococcus lactis subsp. lactis Il1403
MYTVGDYLLDRLHELGIEEIFGVPGDYNLQFLDQIISRKDMKWVGNANELNASYMADGYARTKKAAAFLTTFGVGELSAVNGLAGSYAENLPVVEIVGSPTSKVQNEGKFVHHTLADGDFKHFMKMHEPVTAARTLLTAENATVEIDRVLSALLKERKPVYINLPVDVAAAKAEKPSLPLKKENPTSNTSDQEILNKIQESLKNAKKPIVITGHEIISFGLEKTVTQFISKTKLPITTLNFGKSSVDETLPSFLGIYNGKLSEPNLKEFVESADFILMLGVKLTDSSTGAFTHHLNENKMISLNINEGKIFNERIQNFDFESLISSLLDLSGIEYKGKYIDKKQEDFVPSNALLSQDRLWQAVENLTQSNETIVAEQGTSFFGASSIFLKPKSHFIGQPLWGSIGYTFPAALGSQIADKESRHLLFIGDGSLQLTVQERKLQVQVSQPSSSHMNSYS

SEQ ID NO: 9100 - protein, 502 aa, Prochlorococcus marinus subsp. marinus str. CCMP1375
MTTALQSPPRRRIARLQEVSLLEGPMLLLRSIRGFRSNQSLIWLATVPLALLGLGVFGFAARAGVGLSDLSGAQAASFLADNLWLFIATILVIFMNAGFAMVEAGMCRQKNAVNILAKNLFVFALAVTAYWFIGYSIMYGGTPIIGGVIFSNGFFFNPDPSDALSCAAGLGADGCSQLVPAVDFLFQAAFAGTAATIVSGLVAERVKFGEFVVFSLVLTAFIYPIAGSWQWNGAGWLSQLGFIDFAGSSIVHSVGGWAGLVGAMLLGPRIGKFVDGKPQAMPGHNMAIATLGALILWIGWYGFNPGSELAMDEYVAYVAVTTTLAAAGGAIAATLLSTLTSGKPDLTMIINGILAGLVSITAGCGNMTLSGSWLAGFVGGLIVVFAVSALDSAGIDDPVGAFSVHGVCGVWGTVVIGLWGVDGMDPGAAGIGLFNGGGLNTLLIQALGAGAYAIWTVVTCWLAWTVIGGFFGGIRVSEEEEIQGLDIGEHGMEAYPDFASSN

SEQ ID NO: 9101 - protein, 430 aa, Staphylococcus xylosus
GVKDGNIAAIGQDLGEAEQVIDAQNQIVSPGMVDAHVHITEPGGGYRDSWEGYVTGTRAAAKGGVTSFIEMPLNQVPATTEQASIQAKFDAGKGELSVDVASYGGLVPYNLNGGIQELDEAGVVAYKAFLATCGDRSIEGDFENVDDYSLYEGMKQIAKTGKLLSIHAENATITDRLGEIAKANGETTLSAYVDSRPVFTEVEPIRKIILFAKETGCRVHIVHVACEEGVDEIIKAQQEGVDISCETCTHYLYFYKEELDDIGPVVKCSPPIREKSRLEGMWKRVLNGDIGFVTSDHSPCTPDLKDTDNAFEAWGGIAGLQNNVDILFDEGVQKRNMSLNKFADIIATAPAKRFGLEAKGSIAVGKDADFVLIKPNAPYTLAAEDLAYRNKMSPYIGREIGAQVTQTILRGEEIYNQETGISEKRIGQFI

SEQ ID NO: 9102 - protein, 317 aa, Haemophilus influenzae R2866
MTTQLDSLRNMTVVVADTGDIDAIKKYQPQDATTNPSLILSASALPQYAPLIDEAVAYAKAQSNDKAQQLIDAEDKLAVNIGLEILKIVPGRISTEVDARLSYDTQATVEKARKLIALYNAAGISNDRILIKIASTWQGIRAAEILEKEGINCNLTLLFSEAQARACAEAGVYLISPFVGRILDWYKANSDKKEYAPAEDPGVISVTKIYNYYKEYGYNTVVMGASFRNVGEITELAGCDRLTIAPALLKELQENSTALVRKLEYKGEVKAKPQPLTEAEFYWQHNGDAMAVEKLAEGIRKFAIDQEKLETMLSAKL

SEQ ID NO: 9103 - protein, 491 aa, Pseudomonas sp.
MKQYRNFVDGKWVESSKTFQDVTPIDGSVVAVVHEADRDLVDAAVKAGHRALEGEWGRTTAAQRVDWLRRIANEMERRQQDFLDAEMADTGKPLSMAATIDIPRGIANFRNFADILATAPVDSHRLDLPDGAYALNYAARKPLGVVGVISPWNLPLLLLTWKVAPALACGNAVVVKPSEDTPGTATLLAEVMEAVGIPPGVFNLVHGFGPNSAGEFISQHPDISAITFTGESKTGSTIMRAAAEGVKPVSFELGGKNAAVIFADCDFEKMLDGMMRALFLNSGQVCLCSERVYVERPIFDRFCVALAERIKALKVDWPHETDTQMGPLISSKHRDKVLSYFELARQEGATFLAGGGVPRFGDERDNGAWVEPTVIAGLSDDARVVREEIFGPICHVTPFDSESEVIRRANDTRYGLAATIWTTNLSRAHRVSELMRVGISWVNTWFLRDLRTPFGGAGLSGIGREGGMHSLNFYSELTNVCVRIDKESPDV

SEQ ID NO: 9104 - protein, 156 aa, Triticum aestivum
  misc_feature (58)..(58): Xaa can be any naturally occurring amino acid
  misc_feature (72)..(72): Xaa can be any naturally occurring amino acid
  misc_feature (76)..(76): Xaa can be any naturally occurring amino acid
  misc_feature (80)..(80): Xaa can be any naturally occurring amino acid
  misc_feature (100)..(100): Xaa can be any naturally occurring amino acid
  misc_feature (113)..(113): Xaa can be any naturally occurring amino acid
  misc_feature (126)..(126): Xaa can be any naturally occurring amino acid
  misc_feature (128)..(128): Xaa can be any naturally occurring amino acid
  misc_feature (131)..(131): Xaa can be any naturally occurring amino acid
  misc_feature (133)..(133): Xaa can be any naturally occurring amino acid
  misc_feature (137)..(137): Xaa can be any naturally occurring amino acid
  misc_feature (142)..(142): Xaa can be any naturally occurring amino acid
MAPTVMASSATSVAPFQGLKSTAGLPVSRRSNGASLGSVSNGGRIRCMQVWPIEGIKXFETLSYLPPLSTEXLLKXVDYXIRSKWVPCLEFNKVGFIFRXHKHLLGYYDGRYXWTMWKLPKFRCNXAXQVXNXVEEXKKDYXTLFPINRIKSSGHG

SEQ ID NO: 9105 - protein, 69 aa, Triticum aestivum
MPALTGQVKWFNESKGFGFITPDDGSKDVFVHFSAIVDAGFKTLAEGQRVEFRIESGAKGPSAANVKAI

SEQ ID NO: 9106 - protein, 182 aa, Glycine max
LALPLSISNSLSEIRMASQSNTKSVHDFTVKDARGNNVNLADYKGKVLLIVNVASQCGLTNSNYTELNQLYEKYKGKGLEILAFPCNQFGAQEPGTNEEIVEFACTRFKAEFPIFDKVDVNGDNAAPLYKFLKSSKGGLFGDSIKWNFSKFLVDKDGNVVDRYAPTTSPLSIEKDIKKLLDA

SEQ ID NO: 9107 - protein, 168 aa, Zea mays
MAASSTATSVHDFIVKDASGKDVDLSTYKGKVLLIVNVASQCGLTNSNYTELAQLYEKYKDQGFEILAFPCNQFGGQEPGTNEEIVQFACTRFKAEYPIFDKVDVNGNNAAPIYKFLKSSKGGLFGDSIKWNFSKFLVDKEGRVVDRYAPTTSPLSIEKDIKKLLGSS

SEQ ID NO: 9108 - protein, 457 aa, Candida albicans SC5314
MARLTRKRTIEKELNGSSRVTRTLSMESISSLFKRNKKRKHNDGNDSSVNSSDNENINITDDEEQDHIDTKPNHKKRKIKTKAEEEFEANEKKLDEELPIDLRKYRPRGFRFNLPPEDRPIRIYADGVFDLFHLGHMKQLEQAKKSFPNVELVCGIPSDIETHKRKGLTVLTDEQRCETLMHCKWVDEVIPNAPWCVTPEFLQEHKIDYVAHDDLPYASSDSDDIYKPIKEQGKFLTTQRTEGISTSDIITKIIRDYDKYLMRNFSRGATRKELNVSWLKMNELEFKKHINDFRTYWMKNKTNINNVSRDLYFEIREFMRGKKFDFQKFIEDGNSQNSSNHGSDEESTNSSKVSSPLSDFASKYIGNRNKDLNRKGILNNFKGWINRDDHSEQETEEEIKPIVIKPIRRSRRLSGGSSTSSVPSTPVKRTASSASTTPKRKSPLKKSSSVKNTPKTK

SEQ ID NO: 9109 - protein, 93 aa, Glycine max
  misc_feature (11)..(11): Xaa can be any naturally occurring amino acid
  misc_feature (51)..(51): Xaa can be any naturally occurring amino acid
  misc_feature (68)..(68): Xaa can be any naturally occurring amino acid
MFFSMISPPAXTTVNRAGSGMFAPFTGLKSMAGFPTRKTNNDITSIASNCXRVQFMQVLPPFGKKKFXLLSYLPDLYDAQLSYDVLIPSYLCM

SEQ ID NO: 9110 - protein, 281 aa, Oryza sativa (japonica cultivar-group)
MPPPLEARDYIGLAASPASSSSSCCASTPVAEVVGAHLALRLGLPGSESPARAEAEAVVVDAALTLGPAPPPRGGAKRGFVDSLDRSEGRRAAATAGDDERGVREEEEEEKGLGEAAAGAPRAAKAQVVGWPPVRSYRKNTLAASATKTKGEDQGKSEVGCCYVKVSMDGAPYLRKVDLKTYSSYEDLSLALEKMFSCFITGRSSSHKTSKRDRLTDGSRADALKDQEYVLTYEDKDADWMLVGDLPWDLFTTSCRKLRIMRGSDAAGMAPRSLEQTGQNK

SEQ ID NO: 9111 - protein, 508 aa, Triticum aestivum
  misc_feature (120)..(120): Xaa can be any naturally occurring amino acid
MMIARGCLLRSKAESIVKHVASGGSWHGLHSFSEASARGFSSEPSLQAHSTEEIGFKGHGMLAPFTAGWQSTDVHPLVIDRSEGAYVYDINGKKYIDALAGLWCTALGGSEPRLVKAATXQLNKLPFYHSFWNRTTKPSLDLANDVLSMFTAREMGKVFFANSGSEANDSQVKLVWYYNNAMGRPDKKKFIARSKSYHGSTLISASLSGLPALHQKFDLPAPFVLHTDCPHYWRFHLPDETEEEFSTRLANNLENLILKEGPETIAAFIAEPVMGAGGVILPPKTYFEKIQAVLKKYDVLLIADEVITAFGRLGTMFGCDMYNIQPDLVSIAKALSSAYMPIAAILVSPEIADVVHSQSSKLGSFAHGFTYSGHPVACAVAIEALKIYKERNITEHVNTIATRFQEGIKAFSGSPIIGEIRGLGLILGTEFADNKSPNDPFPAEWGVGSIFGAECEKRGMLIRVAGDNIMLSPPLIMTPDEVEEIVSKYGGALKATEERIEELKSAKR

SEQ ID NO: 9112 - protein, 159 aa, Arabidopsis thaliana
MDLGRFPIISILEDMLEVPEDHNNEKTRNNPSRVYMRDAKAMAATPADVIEHPNAYAFVVDMPGIKGDEIKVQVENDNVLVVSGERQRENKENEGVKYVRMERRMGKFMRKFQLPENADLDKISAVCHDGVLKVTVQNFLLRNQRNQRQFKFKLLEFVL

SEQ ID NO: 9113 - protein, 341 aa, Amycolatopsis mediterranei
MRVGVLTGGGDCPGLNAVIRAVVRKGIEVHGWDFVGFRNGWNGPLTGDSRPLGLNDVEDILTRGGTILRSSRTNPYKVEGGVDKIKQVLADQGVDALIAIGGEDTLGVAKRLTDDGIGVVGVPKTIDNDLGATDYTFGFDTAVSIATEAIDRLHTTAESHHRALVVEVMGRHAGWIALHSGLAGGASVILVPERHFNVDQVVSWVERRFEKEFAPIIVVAEGALPEGGEEKLLTGEKDAFGHVRLGGIGTWLADEIAHRTGKESRAVVLGHVQRGGTPTAYDRVLATRFGLNAVDAVADGDFGVMVALKGTDIVRVKLSEATAELKTVPVERYQEAEVFFG

SEQ ID NO: 9114 - protein, 233 aa, Zea mays
MCGILAVLGCGDESQGKRVHVLELSRRLKHRGPDWSGLHQVADNYLCHQRLAIIDPASGDQPLYNEDKSIAVAVNGEVYNHEELRARLSGHRFRTGSDCEVIAHLYEEYGESFIDMLDGVFSFVLLDARDNSFIAARDAIGVTPLYIGWGIDGSVWISSEMKGLNDDCEHFEIFPPGNLYSSKEKSFKRWYNPPWFSEVIPSVPYDPLRLRSAFEKAVIKRLMTDVPFGVSLS

SEQ ID NO: 9115 - protein, 210 aa, Schizosaccharomyces pombe
MASNTAPKNVVTINQKLVLLGDSAVGKSSLVLRFVKDQFDDYRESTIGAAFLTQTLPIDENTSVKLEIWDTAGQERYKSLAPMYYRNANCAIVVYDITQASLEKAKSWIKELQRQAPEGIVIALAGNKLDLAQERRAVEKADAEAYAAEANLLFFETSAKTAENVNELFTAIAKKLPLEDKLNQARGAVNRGVNLSEARPAAQPSGSCSC

SEQ ID NO: 9116 - protein, 462 aa, Poncirus trifoliata
MDSNYTVIPKNSFLELQVYDNDQNPPSRINSHVKIQTFDEEHDADSKNFVDHVDNNQDDEHDDYPLISAKSNEGSGVAGAVFNLTTTVIGAGIMALPAAMKVLGLAVGFVLIIFMGILSEVSVELLVRFSVLCKATSYGEVVQYALGRPAKILSEICIILNNAGVLVVYLIIVGDVMSGSLHHTGVFDQWLGKGMWDHRKLLILIVLVVFLAPLCALDRIESLSMSSAASVALAVVFVVVCFFIAFIKLVEGKLDPPRMSPDFGSKKAILDLLVVIPIMTNAYVCHFNVQPIYNELEGRTPQKMNHVGRLTTILCIVVYSSTAISGYLLFGKDTESDVLTNFDKDLGIGYSTALNYIVRGSAPLLESRKRSLALTGVLLVLIYFGSTMIPSIWTAFKFTGATTAVSLGFIFPPLVALRLRKEGPGLSLWEKFLSGLMLVLAIVVSFVGVMGNIYSLESKSDD

SEQ ID NO: 9117 - protein, 275 aa, Bacteroides fragilis
IDKVGDPFPEETYRVCKNADAVLFSAVGDPKFDNDPTAKVRPEQGLLAMRKKLGLFANIRPFQTFKCLVHKSPLRAELVEGADFLCIRELTGGMYFGEKYQDNDKAYDTNMYTRPEIERILKVGFEYAMKRRKHLTVVDKANVLASSRLWRQIAQEMAPQYPEVTTDYMFVDNAAMKMIQEPKFFSVMVTENTFGDILTDEGSVISGSMGLLPSASTGESTPVFEPIHGSWPQAKGLNIANPLAQILSVAMLFEYFDCKAEGALIRKAVDASLDA

SEQ ID NO: 9118 - protein, 429 aa, Arabidopsis thaliana
MESLPQPQNQSSPATTPAKILLGKYELGRRLGSGSFAKVHLARSIESDELVAVKIIEKKKTIESGMEPRIIREIDAMRRLRHHPNILKIHEVMATKSKIYLVMELASGGELFSKVLRRGRLPESTARRYFQQLASALRFSHQDGVAHRDVKPQNLLLDEQGNLKVSDFGLSALPEHLQNGLLHTACGTPAYTAPEVISRRGYDGAKADAWSCGVILFVLLVGDVPFDDSNIAAMYRKIHRRDYRFPSWISKQAKSIIYQMLDPNPVTRMSIETVMKTNWFKKSLETSEFHRNVFDSEVEMKSSVNSITAFDLISLSSGLDLSGLFEAKKKKERRFTAKVSGVEVEEKAKMIGEKLGYVVKKKMMKKEGEVKVVGLGRGRTVIVVEAVELTVDVVVVEVKVVEGEEDDSRWSDLITELEDIVLSWHNDIM

SEQ ID NO: 9119 - protein, 294 aa, Saccharomyces cerevisiae
TTPLVHVASVEKGRSYEDFQKVYNAIALKLREDDEYDNYIGYGPVLVRLAWHTSGTWDKHDNTGGSYGGTYRFKKEFNDPSNAGLQNGFKFLEPIHKEFPWISSGDLFSLGGVTAVQEMQGPKIPWRCGRVDTPEDTTPDNGRLPDADKDADYVRTFFQRLNMNDREVVALMGAHTLGKTHLKNSGYEGPWTANPNVFDNSFYLNLLNEDWKLEKNDANNEQWDSKSGYMMLPTDYSLIQDPKYLSIVKEYANDQDKFFKDFSKAFEKLLENGITFPKDAPSPFIFKTLEEQGL

SEQ ID NO: 9120 - protein, 181 aa, Brassica napus
  misc_feature (9)..(9): Xaa can be any naturally occurring amino acid
  misc_feature (12)..(12): Xaa can be any naturally occurring amino acid
  misc_feature (23)..(23): Xaa can be any naturally occurring amino acid
  misc_feature (37)..(37): Xaa can be any naturally occurring amino acid
  misc_feature (54)..(54): Xaa can be any naturally occurring amino acid
MAYSMLSSXAVXTSPAQATMVAXFTGLKSSSAFPVTXKANNDITSIVSNGGRVXCMKVWPPVGKKKFETLSYLPDLTEVELGKEVDYLLRNKWIPCVEFELEHGFVYREHGSTPGYYDGRYWTMWKLPLFGCTDSAQVLKEVQECKTEYPNAFIRIIGFDNNRQVQCISFIAYKPPSFTGA

SEQ ID NO: 9121 - protein, 235 aa, Glycine max
MSLFGAYSICEVGKDAAGVAGNIFAFGLFVSPIPTFRRIIRNGSTEMFSGLPYIYSLLNCMICLWYGTPLISPDNLLVTTVNSIGAAFQLVYIILFLMYAEKARKVRMVGLLLAVLGIFVIILVGSLQIDDSAMRRMFVGFLSCASLISMFASPLFIIKLVIRTKSIEFMPFYLSLSTFLMSFSFFLYGLLSDDAFIYVPNGIGTVLGIIQLVLYFYYKGSSSEECREPLIVSYE

SEQ ID NO: 9122 - protein, 196 aa, Pseudomonas aeruginosa PAO1
MNPREHGKRSIDNETRSALKRQRPAVIWLTGLSGAGKSTIASALELALFEQKKHTFLLDGDDLRLGLCRNLGYSDEDRTENIRRIAEVAKILLEAGLIVIVATISPFSRDRRLSRELIGIEHFIEVFVDTPLSECERRDPKGLYRKARSGKIENFTGIDSIYETPAQPNITIDTLSEDPDLAVKRIISYLETNQPA

SEQ ID NO: 9123 - protein, 275 aa, Bacteroides ovatus
IDKVGDPFPEATYQVCKDADAVLFSAVGDPKFDNDPTAKVRPEQGLLAMRKKLGLFANIRPVQTFKCLIHKSPLRAELVENADFICIRELTGGMYFGEKYQDNDKAYDTNYYTRPEIERILKVAFEYAMKRREHLTVVDKANVLASSRLWRQIAQEMAPNYPEVTTDYMFVDNAAMKMIQEPAFFDVMVTENTFGDILTDEGSVISGSMGLLPSASTGESTPVFEPITGSWPQAKGLNIANPLAQILSVAMLFEYFDCKEEGALIRKAVDASLDE

SEQ ID NO: 9124 - protein, 340 aa, Solanum tuberosum
MEVISTHTNGSTITITTNGHHNNGKSDHRNGGTIHDNGNKLLLGNSNSIKPGWFSEFSALWPGEAFSVKIEKLLFQGKSDYQDVMLFESATYGKVLTLDGAIQHTENGGFPYTEMIVHLPLGSIPTPKKVLIIGGGIGFTLFEVLRYSTIEKIDIVEIDDVVVDVSRKFFPYLAANFNDPRVTLVLGDGAAFVKAAQAGYYDAIIVDSSDPIGPAKDLFERPFFEAVAKALRPGGVICTQAESIWLHMHIIKQIIANCRLVFKGSVNYAWTTVPTYPTGVIGYMLCSTEGPEVDFKNPVNPIDKDTTHVKSKLEPLKFYNTDIHKAAFILPSFARSLIES

SEQ ID NO: 9125 - protein, 104 aa, Triticum aestivum
  misc_feature (95)..(95): Xaa can be any naturally occurring amino acid
MSELTHPTIKDGWFREISDMWPGQAMTLKVKNIIHHEKSKYQDVLIFESTDYGTVLVLDNVIQCTERDEFAYQEMITHLANELTPKIPKKVLVIXGGGDGGVPP

SEQ ID NO: 9126 - protein, 275 aa, Bacteroides ovatus
IDKVRDPFPEATYQVCKEADAVLFSAVGDPKFDNDPTAKVRPEQGLLAMRKKLGLFANIRPVQTFKCLIHKSPLRAELVENADFICIRELTGGMYFGEKYQDNDKAYDTNYYTRPEIERILKMAFEYAMKRRKHLTVVDKANVLASSRLWRQIAQEMAPNYPEVTTDYMFVDNAAMKMIQEPAFFDVMVTENTFGDILTDEGSVISGSMGLLPSASTGESTPVFEPIHGSWPQAKGLNIANPLAQILSVAMLFEYFDLKEEGALIRKAVDVALDE

SEQ ID NO: 9127 - protein, 464 aa, Yersinia pseudotuberculosis
IPAATQTSLSQLKLASQLDGEVRLASHPAFDEWYLTSVWNGRGPTRRPAGIVRAATEADVIRTIVFAKERGMEVSVRGSGHNYVGCFLRVDTLMLDISGLKGLDIDSRHKRAIVESGVSSGQLCHALAAKGLAFPTGHVKEVGISGFLLGGGLGINCSQWGGMSVFNVQALDIVTADGRLRHVSETQEPDLFWAARGAGPCSFFVVTRFYLSCYSLPRVITNSLYTLPFTYLHDLLARLEDASPPTNLQVMVSVSPPTSGDTPAVLLNILAFTDSPQEAQALCESFETRLELPLTALAINQPSNFETIYEQFSSMVVSKRFYADNILTDNTQELVSILSRYLSDAPSRGALTTIFWRGVTTYPQAAFSAHGKFFVSTYAQWDDAKDDSVNKYWLKRMYDELQEIARSRYINEYDLETRVGETSKCFAAENWERLQRLRLEYDPDGVFVDVQQLEEHGDQPGANN

SEQ ID NO: 9128 - protein, 305 aa, Thermoplasma volcanium GSS1
MPIDPQVRKYLDAMSKVSVPELNKTPIEDLRKIFDTPASGAPKVKISVVEDMILDTDAAKLPARLYDDSNSDSLVLYFHGGGFVFGSIETHDSLCRRIAKYSGSKVISVGYRLGPENKFPVAQIDAFNSYLYVLKRSEELGVDSDKIALMGDSAGGNLAAVASLMARDKGIKLPRLQVLVYPSTGPDMTSKSYLEYSSIYLTKELLNWFSSQYLNSIEDALNPYFSPILADLSGLPEAIVVTDEYDPLLEQGETYSATLRDSGVPVTSIRVNGMIHGFLSNFHLFRAADVSLMMISGAIHTILES

SEQ ID NO: 9129 - protein, 502 aa, Agastache rugosa
MDLFLLEKTLLGLFAAIVVAAVVSKLRGKKFKLPPGPIPVPIFGNWLQVGDDLNHRNLTDYAKKFGDIFLLRMGQRNLVVVSSPELAKDVLHTQGVEFGSRTRNVVFDIFTGKGQDMVFTVYGEHWRKMRRIMTVPFFTNKVVQQYRHGWEAEVAAVVEDVKKNPDSATTGIVLRRRLQLMMYNNMYRIMFDRRFESENDPLFVKLRALNGERSRLAQSFEYNYGDFIPILRPLLKGYLRICKEVKDRRLQLFKDYFVDERKKLASTKPMDNDGLKCAIDHILDAQQKGEISEDNVLYIVENINVAAIETTLWSIEWGIAELVNNPEVQRKVREEMDRVLGVGVPVTEPDTHKLPYLQAVIKETLRLRMAIPLLVPHMNLHDAKLGGFDIPAESKVLVNAWWLANNPEQWKKPEEFRPERFLEEESKVEANGNDFRYLPFGVGRRSCPGIILALPILGITLGRLVQNFELLPPPGKSKIDTTEKGGQFSLHILNHSTIVMKP

SEQ ID NO: 9130 - protein, 477 aa, Sinorhizobium meliloti 1021
MTLHQNLIAGEWVGGDGVANINPSNTDDVVGEYARASAEDAKAAIAAAKAAFPAWSRSGILERHAILKKTADEILARKDELGRLLSREEGKTLAEGIGETVRAGQIFEFFAGETLRLAGEVVPSVRPGIGVEITREPAGVVGIITPWNFPIAIPAWKLAPALCYGNTIVFKPAELVPGCSWAIVDILHRAGLPKGVLNLVMGKGSVVGQAMLDSPDVQAITFTGSTATGKRVAVASVEHNRKYQLEMGGKNPFVVLDDADLSVAVEAAVNSAFFSTGQRCTASSRIIVTEGIHDRFVAAMGERIKGLVVDDALKPGTHIGPVVDQSQLNQDTDYIAIGKQEGAKLAFGGEVISRDTPGFYLQPALFTEATNEMRISREEIFGPVAAVIRVKDYDEALAVANDTPFGLSSGIATTSLKHATHFKRNAEAGMVMVNLPTAGVDFHVPFGGRKASSYGPREQGKYAAEFYTNVKTAYTLA

SEQ ID NO: 9131 - protein, 506 aa, Yersinia pseudotuberculosis
MRYAHPGTPEALVSFKATYGNYIGGEFVEPLGGQYFMNTSPVNGSDIAQFPRSDARDIDAALDAAHRAADAWGKTSVQHRSNLLLQMADRIEANLEYLAVAESWDNGKPIRETLNADLPLAVDHFRYFAGCLRAQEGGVAEIDEKTVAYHFHEPLGVVGQIIPWNFPLLMAAWKLAPALAAGNCVVLKPAEQTPLGITLLLELVGDLFPAGVLNVVQGYGREAGEALASSKRIAKIAFTGSTPVGRHIMACAAENIIPCTVELGGKSPNIYFADVMEAEPEFIEKAIEGLVLGFFNQGEVCTCPSRALIHESIYAPFMARVMAKVANIRRGDPLDTETMIGAQASRQQFDKILSYIDIARKEGGEILTGGARATMTPALDAGFYIQPTLIKGDNLMRCFQEEIFGPVIGVTTFKDEAEALAIANQTQFGLGAGIWTRDTHLAYRMGRGIKAGRVWTNCYHVYPAHAAFGGYKQSGVGRETHKMALNQYQQTKNLLVSYDTAPLGLF

SEQ ID NO: 9132 - protein, 328 aa, Escherichia coli
MDKKQVTDLRSELLDSRFGAKSISTIAESKRFPLHEMRDDVAFQIINDELYLDGNARQNLATFCQTWDDENVHKLMDLSINKNWIDKEEYPQSAAIDLRCVNMVADLWHAPAPKNGQAVGTNTIGSSEACMLGGMAMKWRWRKRMEAAGKPTDKPNLVCGPVQICWHKFARYWDVELREIPMRPGQLFMDPKRMIEACDENTIGVVPTFGVTYTGNYEFPQPLHDALDKFQADTGIDIDMHIDAASGGFLAPFVAPDIVWDFRLPRVKSISASGHKFGLAPLGCGWVIWRDEEALPQELVFNVDYLGGQIGTFAINFSAGGSGNCTVL

SEQ ID NO: 9133 - protein, 355 aa, Verticillium dahliae
MSRSNAPNPSGSRKISFNVSEQYDIQDVVGEGAYGPPSSAIHKPSGQKVAIKKITPFDHSMFCLRTLREMKLLRYFNHENIISILDIQKPRGYDTFNEVYLIQELMETDMHRVIRTQDLSDDHCQYFIYQTLRALKAMHSANVLHRDLKPSNLLLNANCDLKVCDFGLARSAASQEDNSGFMTEYVATRWYRAPEIMLTFKEYTKAIDVWSVGCILAEMLSGKPLFPGKDYHHQLTLILDVLGTPTMEDYYGIKSRRAREYIRSLPFKKKVPFRTLFPKTSDLALDLLEKLLAFNPVKRITVEEALKHPYLEPYHDPDDEPTAPPIPEEFFDFDKHKDTLSKEQLKQLIYQEIMR

SEQ ID NO: 9134 - protein, 206 aa, Escherichia coli O157:H7
MAIPAFGLGTFRLKDDVVISSVKTALELGYRAIDTAQIYDNEAAVGLAIAESGVPRHELYITTKIWIENLSKDKLIPSLKESLQKLRTDYVDLTLIHWPSPNDEVSVEEFMQALLEAKKEGLTREIGISNFTIPLMEKAIAAVGAENIATNQIELSPYLQNRKVVAWAKQHGIHITSYMTLAYGKALKDEVIARIAAKHNATPAQV

SEQ ID NO: 9135 - protein, 375 aa, Pseudomonas fluorescens PfO-1
MAEAKVLSGAGLRGQVAGQTALSTVGQAGAGLTYRGYDVRELAADAQFEEVAYLLLYGELPTKAQLADYQGKLSKLRDLPQALKEVLERIPADAHPMDVMRTGCSFLGNIEPEKDFSEQRDKTDRLLAAFPAIMCYWYRFSHDGKRINCVSDEPSIGGHFLHLLHDKKPSELHVKVMNVSLILYAEHEFNASTFTARVCASTLSDLYSCVTAAIGSLRGPLHGGANEAAMEMIERFSSPEEAVKGTLGMLERKDKIMGFGHAIYKDSDPRNEVIKGWSKKLADEVGDKVLFAVSEAIDKTMWEQKKLFPNADFYHASAYHFMGIPTKLFTPIFVCSRLTGWAAHVFEQRANNRIIRPSAEYTGVEQRKFVPIEQR

SEQ ID NO: 9136 - protein, 455 aa, Nostoc punctiforme PCC 73102
MAIATINPATGETLKTFEALNDTEILAKLDLANQAFEKYRQTDFSERSQWLQKAADILEQDKAEFAKLMTLEMGKPFKAAIAEVEKCAVVCRYYAEHAPSFLADVSVKTDASQSFVRYQPMGAILAVMPWNFPFWQVFRFAAPALMAGNVGLLKHASNVPQCALAIEDIIRRAGFPEGAFQTLLIGAAKVADLMADDRVKAATLTGSEPAGISLAVAAGKQIKKTVLELGGSDPFIVLESADLETAVVTATTARMLNNGQSCIAAKRFIVAEAIADKFEKLLLEKFEALKVGDPMQSDTDLGPLATPGILQDLDQQVQAATKIGGKVLTGGHPLSDRPGNFYPPTIIIDIPPDTPIAKEEFFGPVALLFRVPDIDAAIKLANDSPFGLGASAWTKNDQECDRLIEEIEAGAVFINSMVKSDPRLPFGGTKRSGYGRELSIQGIHEFVNVKTVWVK

SEQ ID NO: 9137 - protein, 293 aa, Nostoc punctiforme PCC 73102
MAITQNYRLNVIQWYPGHIAKAEKKLKEQLKRVDVVFEVRDARIPLATHHPQIGEWVEGKTRVLILNRVDMITPQMRSLWIDWFKRQGEVPYFTNAQHGKGIAEVARAAQAAGVELNQRRSDRGMLPRPVRAVVIGFPNVGKSALINRLLGRRVVESAARPGVTRQLRWVRISEHLELLDAPGVIPLRLEDQDAALKLAICDDIGEASYDNQLVAAALVDLFNYLEAVTTDLLPKKPLQSRYQLDSTSDTGDTYLHALAEHRYKGDVERAARQLLTDFRKGLLGEMSLELPPN

SEQ ID NO: 9138 - protein, 373 aa, Arabidopsis thaliana
MGYLFQETLSSNPKTPIVVDDDNELGLMAVRLANAAAFPMVLKAALELGVFDTLYAAASRTDSFLSPYEIASKLPTTPRNPEAPVLLDRMLRLLASYSMVKCGKALSGKGERVYRAEPICRFFLKDNIQDIGSLASQVIVNFDSVFLNTWAQLKDVVLEGGDAFGRAHGGMKLFDYMGTDERFSKLFNQTGFTIAVVKKALEVYEGFKGVKVLVDVGGGVGNTLGVVTSKYPNIKGINFDLTCALAQAPSYPGVEHVAGDMFVDVPTGDAMILKRILHDWTDEDCVKILKNCWKSLPENGKVVVIELVTPDEAENGDINANIAFDMDMLMFTQCSGGKERSRAEFEALAAASGFTHCKFVCQAYHCWIIEFCK

SEQ ID NO: 9139 - protein, 107 aa, Glycine max
  misc_feature (92)..(92): Xaa can be any naturally occurring amino acid
MASSMISSPAVITVDRACAGMVAPFTGLKSMAGFPTRKTSNDITSIAINRGKVHCMHVLPPIGNKMFETLSYLPYLDDAQLAKEVEYLLMKXWIPCLEFELEHRFAY

SEQ ID NO: 9140 - protein, 301 aa, Arabidopsis thaliana
MAMEDQSAARSIGKVSWFSDGKGYGFITPDDGGEELFVHQSSIVSDGFRSLTLGESVEYEIALGSDGKTKAIEVTAPGGGSLNKKENSSRGSGGNCFNCGEVGHMAKDCDGGSGGKSFGGGGGRRSGGEGECYMCGDVGHFARDCRQSGGGNSGGGGGGGRPCYSCGEVGHLAKDCRGGSGGNRYGGGGGRGSGGDGCYMCGGVGHFARDCRQNGGGNVGGGGSTCYTCGGVGHIAKVCTSKIPSGGGGGGRACYECGGTGHLARDCDRRGSGSSGGGGGSNKCFICGKEGHFARECTSVA

SEQ ID NO: 9141 - protein, 160 aa, Dechloromonas aromatica RCB
MSQTLYDFSAQRLNGEPQDFEAYRGKVLLIVNTASECGFTPQYTGLEELYWMFKDRGFVVLGFPCNQFGGQEPGDAEAIGQFCQTRFDVTFPLFAKVDVNGDSAHPLYTWLKHEAAGVLGTEAIKWNFTKFLIDREGKVVHRYAPATRPDELVEAVEAQL

SEQ ID NO: 9142 - protein, 422 aa, Pseudomonas putida KT2440
MSDLKTAALEYHAQPRPGKLSVELSKPTATARDLALAYSPGVAEPVREIGRDPELAYKYTGKGNLVAVISDGTAILGLGDLGPLASKPVMEGKGVLFKRFAGIDVFDIEVESESPQAFIDTVRRISITFGGINLEDIKAPECFEIERTLIEQCDIPVFHDDQHGTAIVTAAGMINALEIAGKKLEEAKIVCLGAGAAAISCMKLLVSMGAKVENIFMIDRSGVIHAGRDDLNQYKAQFAHATDKRTLADALDGADVFVGLSGPNLLSPEGLKSMAANPIVFACSNPDPEISPELAHATRNDVIMATGRSDYPNQVNNVLGFPFIFRGALDVRAKRINEEMKIAAAIALKDLAKLPVPKEVCEAYGVEGLEFGREYIIPKPLDARLITVVSDAVAKAAIESGVATLPYPKHYPLTSVDEVFNG

SEQ ID NO: 9143 - protein, 459 aa, Arthrobacter nicotinovorans
MVSSKLATPLSIQGEVIYPDDSGFDAIANIWDGRHLQRPSLIARCLSAGDVAKSVRYACDNGLEISVRSGGHNPNGYATNDGGIVLDLRLMNSIHIDTAGSRARIGGGVISGDLVKEAAKFGLAAVTGMHPKVGFCGLALNGGVGFLTPKYGLASDNILGATLVTATGDVIYCSDDERPELFWAVRGAGPNFGVVTEVEVQLYELPRKMLAGFITWAPSVSELAGLLTSLLDALNEMADHIYPSVFVGVDENRAPSVTVCVGHLGGLDIAERDIARLRGLGRTVSDSIAVRSYDEVVALNAEVGSFEDGMSNLWIDREIAMPNARFAEAIAGNLDKFVSEPASGGSVKLEIEGMPFGNPKRTPARHRDAMGVLALAEWSGAAPGSEKYPELARELDAALLRAGVTTSGFGLLNNNSEVTAEMVAEVYKPEVYCRLAAVKREYDPENRFRHNYNIDPEGS

SEQ ID NO: 9144 - protein, 448 aa, Streptomyces coelicolor A3(2)
MAPAITLAAETELSAANTGFMLICSALVMLMTPALAFFYGGMVRVKSTLNMLMMSFISLGIVTVLWVLYGFSMAFGTDSGSVVGWNSDWVGLSDIGLTELWDGYTIPVFVFLVFQLMFAVLTPALISGALADRVKFTAWALFIALWATIVYFPVAHWVWGAGGWAFELGVIDFAGGTAVHINAGAAALGVILVIGKRVGFKKDPMRPHSLPLVMLGAGLLWFGWFGFNAGSWLGNDDGVGALMFVNTQVATGAAVLGWLAYEKIRHGAFTTLGAASGAVSGLVAITPAGGAVSPLGAIAVGLVAGVVCAMAVGLKYRFGYDDSLDVVGVHLVGGILGSLLIGFFASGKGQSDVEGLFYGGGLDQFWKQCAGVFGVLAYSLVVSAVLAFLLDKTIGMRVSEDVEVAGIDQAEHAETAYDFSGAGGGAARTTATPAASTAGSAPSKKVDA

SEQ ID NO: 9145 - protein, 167 aa, Citrus sinensis
MASQSKTSVHDFSVKDAKGQDVDLSIYKGKLLLIVNVASQCGLTNSNYTELSQLYDKYKNQGLEILAFPCNQFGAQEPGDNEQIQEFACTRFKAEFPIFDKVDVNGDNAAPLYKHLKSSKGGLFGDSIKWNFSKFLVDKEGNVVERYAPTTSPLSIEKDIKKLLETA

SEQ ID NO: 9146 - protein, 503 aa, Arabidopsis thaliana
MAITVPRRQLFIGGQWTEPVLRKTLPVVNPATEDIIGYIPAATSEDVELAVEAARKAFTRNNGKDWARATGAVRAKYLRAIAAKVIERKSELANLEAIDCGKPLDEAAWDMDDVAGCFEYYADLAEGLDAKQKTPLSLPMDTFKGYILKEPIGVVGMITPWNYPLLMAVWKVAPSLAAGCTAILKPSELASLTCLELADICREVGLPPGVLNILTGLGTEAGAPLASHPHVDKIVFTGSTTTGSSIMTSAAKLVKPVSLELGGKSPIIVFDDVDIDKAVEWTMFGCFWTNGQICSATSRLLVHERIADEFLDKLVKWTKNIKISDPFEEGCRLGPVVSKGQYERVLKFVSNARNEGATVLCGGVRPEHLKKGYFVEPAIVSNVTTSMEIWREEVFGPALCVKTFSTEDEAIQLANDSQYGLAGAVLSNDLERCDRVSKAFQAGIVWVNCSQPCFCQAPWGGTKRSGFGRELGEWGLENYLSVKQVTQYISDEPWGWYKPPSKL

SEQ ID NO: 9147 - protein, 275 aa, Bacteroides caccae
IDEVGDPFPEETYQACKNADAVLFSAVGDPKFDNDPTAKVRPEQGLLAMRKKLGLFANIRPVQTFKVLIHKSPLRAELVENADFICIRELTGGMYFGEKYQDNDKAYDTNYYTRPEIERILKVAFEYAMKRRKHLTVVDKANVLASSRLWRQIAQEMAPQYPEVTTDYMFVDNAAMKMIQEPAFFDVMVTENTFGDILTDEGSVISGSMGLLPSASTGESTPVFEPIHGSWPQAKGLNIANPLAQILSVAMLFEYFDLKEEGALIRKAVDASLDE

SEQ ID NO: 9148 - protein, 275 aa, Bacteroides distasonis
IDKVGDPFPEETYRICKDADAVLFSAVGDPKFDNDPTAKVRPEQGLLAMRKKLGLFANIRPVQTFKCLLHKSPLRAELVDGADFLCIRELTGGMYFGEKYQDNDKAYDTNMYTRPEIERILKVGFEYAMKRNKHLTVVDKANVLASSRLWRQIAQEMAPSYPEVTTDYMYVDNAAMRMIQEPKFFDVMVTENTFGDILTDEGSCISGSMGLLPSASTGESTPVFEPIHGSWPQAKGLNIANPLAQILSVAMLFEYFDLKEEGALIREAVDASLDA

SEQ ID NO: 9149 - protein, 275 aa, Bacteroides eggerthii
IDKVGDPFPEATYQACKNADAVLFSGVGDPKFDNDPTAKVRPEQGLLAMRKKLGLFANIRPVQTFKCLLHKSPLRAELVDGADFLCIRELTGGMYFGEKYQDNDKAYDTNMYTRPEIERILKVGFEYAMKRNKHLTVVDKANVLASSRLWRQIAREMAPDYPEVTTDYMYVANAAMRMIQEPKFFDVMVTENTFGDILTDEGSCISGSMGLLPSASTGESTPVFEPIHGSWPQAKGLNIANPLAQILSVAMLFEYFGLKEEGALVREAVDASLDA

SEQ ID NO: 9150 - protein, 505 aa, Pseudomonas syringae pv. tomato str. DC3000
MHDLLTADEYAAIAQSISFPSNAFINGAYKPAISGATFSTINPATGEFLSDLAACRAEDVDDAVSKAKKAFDDGRWRLLAPGERKSVLLKFARLLEDNRHELAVLESLDSGKPVRECQLVDVPDTIHTLRWHAELIDKLYDHTAPVGNDALTLVVREPIGVVGCVLPWNFPLLMLAWKIGPALAAGCSVIVKPAEQTSLTTLRVAELAFEAGVPAGVLNIITGTGKDVGEPIGLHKDIDMVSFTGSTVTGRRFLHYSADSNLKRVVLECGGKNPAVVMEDAEDLDLVAEQVVNGAFWNMGENCSATSRLLVHASVKDELLERMGAYIREWKMGDPLDPQTRVGALVSSDHFAKVKSYLDYANADKLDIVYGGDTQEGAFVQLTVVDGVERDSRLFQEEIFGPILSVTTFNSISEAIALANDTVYGLAASVYTGSLRKAIKLSREIRAGIVTVNCFGEGDASTPFGGFKESGFGGRDKSVFAHDQYTEIKTIWIDVSDRSVDETVK

SEQ ID NO: 9151 - protein, 291 aa, Neurospora crassa
MSEIAHPTIQDGWFREISNMWPGQAMTLKVEKVLHHEKSLYQDVLIFKSTDHGNVLVLDNVIQCTERDEFSYQEMITHLAMNSHPNPKKVLVIGGGDGGVLREVVKHDCVEEAILCDIDEAVIRLSKQFLPHMSAGFEHPKVKVHVGDGFKFLEDFKNTFDVIITDSSDPEGPAESLFQKPYFQLLHDALREGGVITTQAENQWLHLPLITKLKKDCKEVFPVAEYAYTTIPTYPSGQIGFMVCSKDPNANVKVPLRSWSQEEEEKLCRYYNSEIHKASFILPTFAKKALE

SEQ ID NO: 9152 - protein, 275 aa, Bacteroides stercoris
IDKVGDPFPEATYQACKNADAVLFSAVGDPKFDNDPTAKVRPEQGLLAMRKKLGLFANIRPVQTFKCLLHKSPLRAELVDGADFICIRELTGGMYFGEKYQDNDKAYDTNMYTRPEIERILKVGFRYAMKRNKHLTVVDKANVLASSRLWRQIAQEMAPDYPEVTTDYMYVDNAAMRMIQEPKFFDVMVTENTFGDILTDEGSCISGSMGLLPSASTGESTPVFEPIHGSWPQAKGLNIANPLAQILSVAMLFEYFDLKEEGALIRKAVDASLDA

SEQ ID NO: 9153 - protein, 224 aa, Glycine max
  misc_feature (24)..(24): Xaa can be any naturally occurring amino acid
  misc_feature (41)..(41): Xaa can be any naturally occurring amino acid
SVPNIPKVPELPKREWPEFAKSAXGDRSEIPEVPKPELPKXPGVPELPNLELPKVTQLPKSKLPKVPEIPKGPEFPKPELPKVPELSKPELPKAPEIPNVPEFPKPELPKVPELSKPELPKAPEIPKVPEFPKPELPKVPELPKPELPKIPEIPKVPEFPKPELPKVPEVPKPELSKVPKLPKSELPKVPEIPELPKSELPKIPEIPKVPEFPKVPKAFSTTNP

SEQ ID NO: 9154 - protein, 467 aa, Synechocystis sp. PCC 6803
MVHKKIDLNQLSEAESLLTPTYAARGLANSVSKYEMPETEMLPAIAYNLIHDELGLDGNSRLNLATFVTTWMEPEARQLMADTFDKNMIDKDEYPQTAEIELRCVNILSRLWNAPASAEATGCSTIGSSEAAMLGGMAMKWKWRQRRQAAGKPGDRPNLVMGINVQVCWEKFCRYWEVEPRFVPMEGDRYHISPEEAVKLIDENTIGVIGILGSTFDGSYEPIEALNDALETLNQRTGWQVPLHIDAASGGFIAPFLDPDLRWDFRLPWVKSINTSGHKYGLVYPGVGWIIWRDKEELPEELIFHCNYLGGDLPNFALNFSRPGNQVVAQYYNFLRLGKEGYRKIQQTCRDTALYLSGKIAQLGPFELLTDGGDIPVFAWRLKDEVLANTCYTLYDMADKLRERGWLVPAYRMPKNREDLVVQRIVVKEGFSRDMADLLLADMERAIAYFASQPDHKPKQEGSHFSH

SEQ ID NO: 9155 - protein, 496 aa, Magnetospirillum magnetotacticum MS-1
MPLTPELDPFKLAKALSGKHLIGGKFVPAKGGKTFPVDNPATGEEIGTAAFGTKADVDAAVANAKAAQKEWAKQSARARGKLVAECGRVLSAHVEELGRLVALETGKALRTESRVEAGVLADMFVFFGGLGSELKGETIPFNPDMLTVTVREPVGVVGCIIPWNVPLLLMAMKAAAALVAGNAVVVKSAEEAPLTVLRVAEIMNTVLPPGLFNMLSGFGPECGAPLVEHPDVKKVTFTGSVETGRIVYKAAAEKLIPVTLELGGKSPMIVCADADMDQAVAGALAGMRFTRQGQSCTASSRLFVHESIHDEFVARVKAKVDAMVMGDPLDEKTDIGTIVSDGQLERVKSYIKLGEETKGATKHVCSAMPTDPKLAKGRFVQPVIFTGMKNSDRLCQEEIFGPVCAVIKWTDYEDVLAQANDSEYGLAASIWTRDFKVAMDATRRLEAGFVQVNQNLVVQPMLSYGGVKTSGIGKEASLESMLEHFTHKKTIIFNMK

SEQ ID NO: 9156 - protein, 217 aa, Triticum aestivum
PELRWAFVRKIYVILAVQLAMTAAVSGFVVKVPAVSNFFVSSNAGIALYIFLIILPFIVLCPLHYYHQKHPVNLLLLGLFTVAISFAVGMTCAFTSGKIILEAAILTAVVVISLTAYTFWAAKRGHDFNFLGPFLFAAIMVLMVFSLIQIFFPLGKVSVMIYGGLASLIFCGYIIYDTDNIIKRYTYDEYIWAAVSLYLDVINLFLSLLQLLRAADS

SEQ ID NO: 9157 - protein, 117 aa, Prunus dulcis
MAYSAMTKLALVVALCMVVSVPIAQAITCGQVSSNLAPCIPYVRGGGAVPPACCNGIRNVNNLARTTPDRQAACNCLKQLSASVPGVNPNNAAALPGKCGVNIPYQISPSTNCANVK

SEQ ID NO: 9158 - protein, 441 aa, Lactococcus lactis subsp. lactis Il1403
MNLLSKEEKMIKNSQIPSEFYKKYNVKKGLRDINGKGVLAGLTNISAIHSFDKEGNQIPGILEYRAYNIKDIINDLRKENRFGFEEMTYLLLFGELPTANELQEFQNLLASRRTLPEFFIRETILTNPSSDVMNSMSRCILALASYDEKVSDISIENVLEQSFGLIADFPLLAIYSYQSYVHYFKKESLYIHYPDPKMTTAENILRMLRPDCHYTEVEAKVLDIALILHMEHGGGNNSTFTTHVVTSSGTDTYATIAAALSSLKGPKHGGANIKAAKMLENIKENISNYEDDAEIEKYLHKILNKEVFDKQGLIYGIGHAIYSLSDPRFEVFKSYVETLVKEKGLEEEFKLYEKVARLAPKVISENRKIYKTICPNVDFYSGFVYRILEIPQELFTPLFAIARIVGWLAHRIEELINMNKIIRPAYESVLESKNYIKLGER

SEQ ID NO: 9159 - protein, 418 aa, Burkholderia fungorum LB400
MPYQHIKVPTGGDKITVNPDFSLNVSDQPIIPYIEGDGTGIDITPVMIKVVDAAVEKAYAGKRKIHWMEIYAGEKSTKVYGPDVWLPEETLQVLKEYVVSIKGPLTTPVGGGIRSLNVALRQELDLYVCLRPVQYFKGVPSPVREPEKTNMVIFRENSEDIYAGIEWPAESEQAKKIIRFLREEMGVKKIRFPETSGIGIKPVSREGTERLVRKAIQYAIDHDRRSVTLVHKGNIMKFTEGAFRDYGYALAQKEFAAELIDGGPWMKIKNPKTGGDVVLKDVIADAFLQQILLRPAEYDVIATLNLNGDYVSDALAAQVGGIGIAPGANMSDSVAMFEATHGTAPKYAGKDYVNPGSEILSAEMMLRHLGWTEAADLIIKSMEKSILQKRVTYDFARLMEGATQVSCSGFGQVLIENL

SEQ ID NO: 9160 - protein, 412 aa, Lactococcus lactis subsp. lactis Il1403
MKIEMKNGKLVVPDYPAIGYIRGDGVGEDIFPQAQKVFDAAVLKIYGQKKKIEWQKLLAGGEAFETCGEYLPKETLAHINENLIAIKGPLMTPVGESFRSINVTLRQKMDLYACVRPVEYFKGIKSPVKAPEKVDMTIFRENTEDIYAGIEFASETNESHNLLKFLEKELNVHSIRFPKTSALGIKPVSPEGSKRLVNAAFEYALKMNKKRVTFVHKGNIMKFTEGGFRNWAYEVAREYPTFTKLEYDEIKNERGSLQAENEKKAALKSGKIYVDDVIADNFLQQIILNPENFEVIATLNLNGDYISDALAAQVGGIGIAPGANINYKSGHAIFEATHGTAPDIAGKNIANPSSLILSGVMMFEYLGWQEVAELIKIALSFSFRNGNLTADLGGKLSTSKFSDVLIDFIKTY

SEQ ID NO: 9161 - protein, 279 aa, Bacillus thuringiensis serovar konkukian str. 97-27
MKNLQSKAVLNNGVEMPWFGLGVFKVEEGPELVEAIKTAIKAGYRSIDTAAIYGNEKAVGEGIRAGIEATGISREDLFITSKVWNADQGYETTIAAYEESLKKLGLDYLDLYLVHWPSEGKYKDTWRALETLYKEKRVRAIGVSNFQIHHLQDVMKDAEIKPMINQVEYHPRLTQKELQAFCKEQGIQMEAWSPLMQGQLLDNETLQEIAEKHGKTTAQVILRWDLQNGVITIPKSTKEHRIIANADVFNFELTKEDMEKIDALNQNHRVGPDPDNFDF

SEQ ID NO: 9162 - protein, 131 aa, Desulfitobacterium hafniense DCB-2
MSNRLEQLRQLSAVVADTGDIDAIARFRPLDATTNPSLLLKAAGLPAYAPLIDAAVAQATGADRQARVADAGLRLAVAIGGEILKLIPGRVSTEVDARLSFDTQATLAQARRIVALYAEAGIGRERLLIKM

SEQ ID NO: 9163 - protein, 332 aa, Streptomyces carzinostaticus subsp. neocarzinostaticus
MGKRAAHIGLRALADLATPMAVRVAATLRVADHIAAGHRTAAEIASAAGAHADSLDRLLRHLVAVGLFTRDGQGVYGLTEFGEQLRDDHAAGKRKWLDMNSAVGRGDLGFVELAHSIRTGQPAYPVRYGTSFWEDLGSDPVLSASFDTLMSHHLELDYTGIAAKYDWAALGHVVDVGGGSGGLLSALLTAHEDLSGTVLDLQGPASAAHRRFLDTGLSGRAQVVVGSFFDPLPAGAGGYVLSAVLHDWDDLSAVAILRRCAEAAGSGGVVLVIEAVAGDEHAGTGMDLRMLTYFGGKERSLAELGELAAQAGLAVRAAHPISYVSIVEMTAL

SEQ ID NO: 9164 - protein, 606 aa, Zea mays
MDTHIGSVNGAASNQTVGCPASAPGCPMASTPAQPAATLSAGEASLGRHLARRLVQVGVNDVFAVPGDFNLTLLDHLIAEPGLRLVGCCNELNAGYAADGYARARGVGACAVTFTVGGLSVLNAIAGAYSENLPVICIAGGPNSNDYGTNRILHHTIGLPDFSQELRCFQTVTCHQAVVNNLDDAHEQIDTAIATALRESKPVYLSISCNLPGLPHPTFSRDPVPFFLTPRTSNKMGLEAAVEATVEFLNKAVKPVLVAGPKLRVAKAGKAFVDMVDASGYAYAVMPSAKGLVPETHPHFIGTYWGAVSTAFCAEIVESADAYLFAGPIFNDYSSVGYSFLLKKEKAIIVQPERVIVGNGPAFGCVMMKEFLSELAKRVNKNTTAYENYKRIFVPEGQPLESEPNEPLRVNVLFKHVQKMLTGDSAVIAETGDSWFNCQKLKLPEGCGYEFQMQYGSIGWSVGALLGYAQGANHKRVIAFIGDGSFQVTAQDVSTMLRCEQNSIIFLINNGGYTIEVEIHDGPYNVIKNWNYTGFVDAIHNGLGKCWTSKVKSEEELTAAIETALGEKKDCLCFIEVIAHKDDTSKELLEWGSRVSAANSRPPNPQ

SEQ ID NO: 9165 - protein, 321 aa, Papaver somniferum
MESNGVPMITLSSGIRMPALGMGTAETMVKGTEREKLAFLKAIEVGYRHFDTAAAYQTEECLGEAIAEALQLGLIKSRDELFITSKLWCADAHADLVLPALQNSLRNLKLDYLDLYLIHHPVSLKPGKFVNEIPKDHILPMDYKSVWAAMEECQTLGFTRAIGVCNFSCKRLQELMETANSPPVVNQVEMSPTLHQKNLREYCKANNIMITAHSVLGAVGAAWGTNAVMHSKVLHQIAVARGKSVAQVSMRWVYQQGASLVVKSFNEARMKENLKIFDWELTAEDMEKISEIPQSRTSSAAFLLSPTGPFKTEEEFWDEKD

SEQ ID NO: 9166 - protein, 194 aa, Saccharomyces cerevisiae [sequence omitted]

SEQ ID NO: 9167 - protein, 321 aa, Papaver somniferum
MESNGVPMITLSSGIRMPALGMGTVETMEKGTEREKLAFLNAIEVGYRHFDTAAAYQSEECLGEAIAEALQLGLIKSRDELFITSKLWCADAHADLVLPALQNSLRNLKLEYLDLYLIHHPVSLKPGKLVNEIPKDHILPMDYKSVWAAMEECQTLGFTRAIGVSNFSCKKLQELMATAKIPPVVNQVEMSPTLHQKNLREYCKANNIMITAHSVLGAIGAPWGSNAVMDSKVLHQIAVARGKSVAQVSMRWVYQQGASLVVKSFNEARMKENLKIFDSELTAEDMEKISEIPQSRTSSADFLLSPTGPFKTEEEFWDEKD

SEQ ID NO: 9168 - protein, 407 aa, Streptomyces avermitilis MA-4680
MAAEIVNPRSDSSTDQEGGAEPLDSFDPAFALHRGGKMAVQATVPIRDRDDLSLAYTPGVAKVCTAIAEQPELVHDYTWKSSVVAVVTDGTAVLGLGDIGPEASLPVMEGKAILFKQFGGVDAVPIALGTTDADEIVETVVRLAPSFGGVNLEDISAPRCFEIERKLQERLDIPVFHDDQHGTAVVTLAALRNAAKLTGRTLGELRAVISGAGAAGVAIAKFLLAAGLGDVAVADRKGVVSKDRDDLTPVKRELAEITNKAGLSGSLESALAGADVFIGVSGGTVPEPAVASMAEGAFVFAMANPNPEVHPEIAHKYASVVATGRSDFPNQINNVLAFPGIFAGALQVRASRITEGMKIAAADALADVVGDDLAADYVIPSPFDERVAPAVTAAVAAAARAEGVARR

SEQ ID NO: 9169 - protein, 321 aa, Papaver somniferum
MESNGVPMITLSSGIRMPALGMGTAETMVKGTEREKLAFLKAIEVGYRHFDTAAAYQSEECLGEAIAEALQLGLIKSRDELFITSKLWCADAHADLVLPALQNSLRNLKLDYLDLYLIHHPVSLKPGKFVNEIPKDHILPMDYKSVWAAMEECQTLGFTRAIGVCNFSCKKLQELMAAAKIPPVVNQVEMSPTLHQKNLREYCKANNIMITAHSVLGAICAPWGSNAVMDSKVLHQIAVARGKSVAQVSMRWVYQQGASLVVKSFNEGRMKENLKIFDWELTAENMEKISEIPQSRTSSADFLLSPTGPFKTEEEFWDEKD

SEQ ID NO: 9170 - protein, 517 aa, Zea mays
  misc_feature (47)..(47): Xaa can be any naturally occurring amino acid
  misc_feature (198)..(198): Xaa can be any naturally occurring amino acid
  misc_feature (207)..(207): Xaa can be any naturally occurring amino acid
  misc_feature (238)..(239): Xaa can be any naturally occurring amino acid
  misc_feature (246)..(246): Xaa can be any naturally occurring amino acid
  misc_feature (271)..(271): Xaa can be any naturally occurring amino acid
  misc_feature (275)..(276): Xaa can be any naturally occurring amino acid
  misc_feature (278)..(278): Xaa can be any naturally occurring amino acid
  misc_feature (290)..(292): Xaa can be any naturally occurring amino acid
  misc_feature (299)..(299): Xaa can be any naturally occurring amino acid
MVSESNRGGADRTTAAGEERGQLLFDVPEIRFTKLFINGSFVDAVSXRTFETRDPRTGGVIASVAEADKEDVDLAVRAARAAFDHGEWPRMSGSERGRIMARLADLVEERADELAALESLDAGKHPAVTRAVDVGNAAGSLRYFAGAADKIHGETLKMPGQFQGHTLREPLGVAGVIIPWNFPSTMFAVKVAPALAAXGCALVVKPXEQTPLSALYLAQLAKQAGVPDGVINVVPGFXXTAGAALXSHMDVDMVSFTGSTEVGRLIMKASXESNXXPXYLELGGKSPLIXXXDADLDMXVELAVGASFFNKGEACVAASRVYVQERVYDRFEERLPERMRSWVVGDPFSDPSADQGPQVDKAQYERVLSYIDHGKREGATLLTGGRPCGPEGKGYYIEPTVFTNVKEDMIIAKEEIFGPVMCLMKFKTVEEAIARANDTRYGLGAGVVTRDLDVANRVVRSVRAGVVWVNCYFAMGSDCPFGGRKMSGFGKDEGMHALDKYLAVKSVVTPLRASPWI

SEQ ID NO: 9171 - protein, 121 aa, Brassica napus
  misc_feature (88)..(88): Xaa can be any naturally occurring amino acid
GDHQLIFGVTNPNLKGRSLSSFLAKGMVVGKNGPPLQAIEDQGLTFVRLRTFWDAVGEALNRMNLIENEKSQGGNEGLTHARFENCLXNKQGRDLAAKLGGADLFWDWDLPRTRKGFYRFQ

SEQ ID NO: 9172 - protein, 449 aa, Glycine max
  misc_feature (54)..(54): Xaa can be any naturally occurring amino acid
  misc_feature (204)..(204): Xaa can be any naturally occurring amino acid
MEQKGGVLMQRYELGRLLGQGTFAKVYHARNIITGMSVAIKIIDKDKILKVGMXMRLIRHPHVVELYEVMASKTKIYFVMEHAKGGELFNKVVKGKLKEDDARKYFQQLISAVDYCHSRGVCHRDLKPENLLLDENGNLKVTDFGLSALAESKCQDGLLHTTCGTPAYVAPEVINRKGYDGIKADIWSCGVILYVLLAGHLPFXMTPRGEFKFPNWFAPDVRRLLSKILDPNPKTRISMAKIMESSWFKKGLEKPTITQNEDEELAPLDADGVFGACENGDPIEPAKNSKPCNNLNAFDIISYSSGFDLSGLFEETDRKKEERFTSDKPASIIISKLEEICRRLRLKVKKKDGGLFKLEGSKEGRKGPLGIDAEIFEITPVFHLVELKKSSGDTLEYQKLLKQEVRPALKDIVWNWQGEQPQPLQHGVVQKEEQPSYPGISEVVPQSTA

SEQ ID NO: 9173 - protein, 205 aa, Listeria monocytogenes str. 4b H7858
MVVGLGTGSTVYYTIEKLGEMVNNGLHITGVATSEETSKQAQNLGIPLKSLNDVAEIDITIDGADEIDTDFQGIKGGGGALLREKMVASASLKNIWVVSEEKLVRNLGKFPLPIEVIPFGWKQIERTLEKEHVQTILRRQSSGEIYVTNNGNYILDIVNQTFRDAEMWQEKLAQIPGIVEHGLFLHYVDIIVCAKANGEIELIKK

SEQ ID NO: 9174 - protein, 121 aa, Arabidopsis thaliana
MGCLISPVMKLRRLSSADSRRFAYRNLAENMEDPVIRVVVGKEKKEFMVEPYVLEEYPFRVLIGSAKDRAKNRLNRTGRVVWLDHVDSILFEHLLWLLRNDASTFSDLDVLEIIEFYAQDC

SEQ ID NO: 9175 - protein, 319 aa, Glycyrrhiza echinata
MAAAAAAAIEIPTKVLPNSTCELRVPVIGMGSAPDFTCKKDTKEAIIEAIKQGYRHFDTAAAYGSETALGEALKEARDLGLVTREELFVTSKLWVTENHPHLVIPALRKSLETLQLEYLDLYLIHWPLSSQPGKFSFPIQVEDLLPFDVKGVWESMEECLKLGLTKAIGVSNFSVKKLQNLLSVATIRPAVNQVEMNLAWQQKKLREFCTANGIVLTAFSPLRKGASRGPNEVMENDMLKGIAEAHGKSIAQVSLRWLYEQGVTFVAKSYDKERMNQNLQIFDWELTTEDHQKIDQIKQNRLIPGPTKPQLNDLWDDEL

SEQ ID NO: 9176 - protein, 175 aa, Triticum aestivum
  misc_feature (8)..(8): Xaa can be any naturally occurring amino acid
MAPAVMAXSSATTVAPFQGLKSTAGLPVGRRSSGSLGSVSNGGRIRCMQVWPIEGIKKFETLSYLPPLSTEALLKQVDYLIRSKWVPCLEFSKVGFVFREHNSSPGYYDGRYWTMWKLPMFGCTDATQVLNEVEEVKKEYPDAYVRVIGFDNLRQVQCVSFIAFRPPGCEESGKA

SEQ ID NO: 9177 - protein, 159 aa, Tamarix androssowii
MSDEEHHFESKADAGASKTFPQQAGTIRKNGHIVIKNRPCKVVEVSTSKTGKHGHAKCHFVGIDIFTGKKLEDIVPSSHNCDVPHVTRTDYQLIDISEDGFVSLLTETGGTKDDLRLPSDETLLTQIKDGFAEGKDLIVSVMCAMGEEQICALKDIGPK

SEQ ID NO: 9178 - protein, 275 aa, Bacteroides thetaiotaomicron
IDKVGDPFPEETYEVCKNADAVLFSAVGDPKFDNDPTAKVRPEQGLLAMRKKLGLFANIRPVQTFKCLIHKSPLRAELVENADFICIRELTGGMYFGEKYQDNDKAYDTNYYTRPEIERILKVAFEYAMKRRKHLTVVDKANVLASSRLWRQIAQEMAPNYPEVTTDYMFVDNAAMKMIQEPAFFDVMVTENTFGDILTDEGSVISGSMGLLPSASTGESTPVFEPIHGSWPQAKGLNIANPLAQILSVAMLFEYFDCKEEGALIRKAVDASLDE

SEQ ID NO: 9179 - protein, 489 aa, Chloroflexus aurantiacus
MIGGEFVPAQSGKTFERRNPADTRDVVGIFADSDERDVHAAVEAAKAAFPQWSKVPAPKRGEILLRAAELLQARKEQYSRDLTREMGKPLFEAGGDIVEAIGMAQYAGSEGRRMHGVTTPSELPNKFQMSIRQPIGVVGLITPWNFPMAIASWKMLPAIVCGNTVVIKPGEDASVSTYNLVQCLMEAGLPPGVVNIVTGYGPRAGQPLVEHPDVPVISFTGSTETGRLVYELGARRIKRVSLEMGGKNPLIVMPDADLDLALDGVLWAAFGTTGQRCTATSRLIVHRAVAKELVERIVARAQSLRVGNGLDPATEMGPLVNEKQLQRVLNYIDIGKQEGATLLCGGYRLTGGDYDYGYFIAPTVFTNVTSQMRIAREEIFGPVLSVIEVDSLDEAVAIANDVAYGLSSAIYTRDINAAFRAMQALQAGIVYINAPTIGAEIHLPFGGVKATGNGHREAGPTMLDVFSEWKSVYIDYSGALQRAQIDNAD

SEQ ID NO: 9180 - protein, 492 aa, Methanosarcina mazei Go1
MIREYKLLIGGKSVDSSTGETFDDINPATLENLATLQVAGIEDVDRAVEAAEAGFRVWSEVPAPGRAEVLFRAARIMQERKEGLARLMTEEMGKVLPETRGDVQEAIDITIYAAGEGRRMFGETTTSELRDKFCMTVLRPVGVVGMITPWNFPIAIPSWKIMPALIAGNAIVFKPASDTPLLTIKLVEILMEAGLPPGVINIVPGPGGSTGKAIVQHPRIRAISFTGSLDTGKWIMEECAKSMKRVSLELGGKNPVIVMDDANLELALEGVVWGAFGTTGQRCTATSRLILHEKIKDEFIKRLLAKTKSLRVGNGLLPETDVGPVINKAQLEKIEKYVRIGKEEGAAILVGGNRIDPGLPGYFFEPTIFTDVSPEMRIAQEEIFGPVLSIITVSDFDEAIEVANNIKYGLSSAIYTENVRTAFRAIEKLEAGITYVNAPTIGAEVHLPFGGIKGTGNGFREAGTEAIKEFTEVKAVYIDYSGRLQKAQIDTE

SEQ ID NO: 9181 - protein, 303 aa, Brassica napus
MVFVNGGKKQAYFGRCETTEERRRDGKTDYRARIRLINQDKNKYNTPKYRFVVRFTNKDIVAQIVSATITGDIVLASAYAHELPRYGLKAGLTNYAAAYCTGLLLARRVLQMLEMDAEYEGNAEATGEDYSVEPTDTRRPFRALLDVGLVMTTTGNRVFGALKGALDGGLDIPHSDKRFAGFNKEGKNLDAEIHRKYIYGGHVADYMKLLMEDEPEKYQSHFSNYLKKDLAPENMEEMYKNVHAAIRADPSIKKSDKEALKEHKRYNPKKLTYDERKASLIQRVKALNSAIGGDDGDEDEDDE

SEQ ID NO: 9182 - protein, 275 aa, Bacteroides uniformis
IDKVGDPFPEATYEACKNADAVLFSAVGDPKFDNDPTAKVRPEQGLLAMRKKLGLFANIRPVQTFKVLLHKSPLRAELVDGADFLCIRELTGGMYFGEKYQDNDKAYDTNMYTRPEIERILKVGFEYAMKRSKHLTVVDKANVLASSRLWRQIAQEMAPQYPEVTTDYMFVDNAAMKMIQEPKFFDVMVTENTFGDILTDEGSCISGSMGLLPSASTGESTPVFEPIHGSWPQAKGLNIANPLAQILSVAMLFEYFDLKEEGGVIRKAVDASLDA

SEQ ID NO: 9183 - protein, 484 aa, Dechloromonas aromatica RCB
MNLQNTELLRSTNLIGGIWARADDGAQLAVINPATGEKLADVPLCGATETRRAIDAANAAWPAWRALTARRRSQLLQAWFSLIIKNADDLAQLVTAECGKPLQEAKGEVIYGASFVEWFAEEGKRTYGESIPSPAANTRLLVIKQPIGVCAAITPWNFPLAMITRKVAPALAAGCPVVVKPAEATPLTALALAVLAEQAGFPAGVFNVVTGKPAEIGGELCANPIVRKLSFTGSTGVGRLLMAQCAPTIKKLSLELGGNAPFIVFDDADVNAAVDGAIAAKYRNTGQTCVCANRFLIQAGIYDEFAAKFAEKASALKVGAGIEADVAQGPLINAAGLSKVEAHVADAVGKGARVLCGGARHERGGNFFQPTVLADVTTAMMVAREETFGPVAPLFRFETEEQAIAMANDTEFGLAAYFFTRNVGRCWRVGEALEYGMVGINTGMISNEVSPFGGIKQSGLGREGSKYGIEDYLEIKYLCFDVNT

SEQ ID NO: 9184 - protein, 275 aa, Bacteroides vulgatus
IDKVGDPFPEATFQACKNADAVLFSAVGDPKFDNDPTAKVRPEQGLLAMRKKLGLFANIRPVQTFKCLVHKSPLRAELVENADFICIRELTGGMYFGEKYQDNDKAYDTNMYTRPEIERILKVAFEYAMKRRKHLTVVDKANVLASSRLWRQIAQEMAPQYPEVTTDYMFVDNAAMKMLQDPCFFDVMVTENTFGDILTDEGSVISGSMGLLPSASTGESTPVFEPIHGSWPQAKGLNIANPLAQILSVAMLFEYFDLKEEGTLIRKAVDASLDE

SEQ ID NO: 9185 - protein, 162 aa, Triticum aestivum
  misc_feature (29)..(30): Xaa can be any naturally occurring amino acid
  misc_feature (33)..(33): Xaa can be any naturally occurring amino acid
  misc_feature (36)..(36): Xaa can be any naturally occurring amino acid
  misc_feature (38)..(38): Xaa can be any naturally occurring amino acid
  misc_feature (47)..(47): Xaa can be any naturally occurring amino acid
  misc_feature (51)..(53): Xaa can be any naturally occurring amino acid
  misc_feature (56)..(56): Xaa can be any naturally occurring amino acid
  misc_feature (58)..(60): Xaa can be any naturally occurring amino acid
  misc_feature (62)..(63): Xaa can be any naturally occurring amino acid
  misc_feature (65)..(66): Xaa can be any naturally occurring amino acid
  misc_feature (68)..(68): Xaa can be any naturally occurring amino acid
  misc_feature (70)..(70): Xaa can be any naturally occurring amino acid
  misc_feature (72)..(72): Xaa can be any naturally occurring amino acid
  misc_feature (74)..(74): Xaa can be any naturally occurring amino acid
  misc_feature (76)..(78): Xaa can be any naturally occurring amino acid
  misc_feature (80)..(81): Xaa can be any naturally occurring amino acid
  misc_feature (83)..(84): Xaa can be any naturally occurring amino acid
  misc_feature (88)..(88): Xaa can be any naturally occurring amino acid
  misc_feature (97)..(97): Xaa can be any naturally occurring amino acid
  misc_feature (99)..(99): Xaa can be any naturally occurring amino acid
  misc_feature (101)..(101): Xaa can be any naturally occurring amino acid
  misc_feature (106)..(107): Xaa can be any naturally occurring amino acid
  misc_feature (112)..(112): Xaa can be any naturally occurring amino acid
  misc_feature (116)..(116): Xaa can be any naturally occurring amino acid
  misc_feature (118)..(120): Xaa can be any naturally occurring amino acid
  misc_feature (130)..(131): Xaa can be any naturally occurring amino acid
  misc_feature (137)..(139): Xaa can be any naturally occurring amino acid
  misc_feature (141)..(141): Xaa can be any naturally occurring amino acid
  misc_feature (143)..(143): Xaa can be any naturally occurring amino acid
  misc_feature (145)..(145): Xaa can be any naturally occurring amino acid
  misc_feature (147)..(148): Xaa can be any naturally occurring amino acid
  misc_feature (152)..(152): Xaa can be any naturally occurring amino acid
  misc_feature (156)..(158): Xaa can be any naturally occurring amino acid
WIPRAAGIRHQTLASSHTPAYRIHPGTDXXHTXENXLXSKDDSGPAXTYPXXXGAXRXXXHXXIXXHXCXVXEXCXXXTXXHXXAMCXFVAIDIFNXKXLXDIVPXXHNCDXPHVXRXXXHLIDITDDGXXSLLTEXXXTXDXLXLXXDDAXLGQXXXGCAD

SEQ ID NO: 9186 - protein, 275 aa, Bacteroides vulgatus
IDKVGDPFPEATFQACKNADAVLFSAVGDPKFDNDPTAKVRPEQGLLAMRKKLGLFANIRPVQTFKCLVHKSPLRAELVENADFICIRELTGGMYFGEKYQDNDKAYDTNMYTRPEIERILKVAFEYAMKRRKHLTVVDKANVLASSRLWRQIAQEMAPQYPEVTTDYMFVDNAAMKMLQDPCFFDVMVTENTFGDILTDEGSVISGSMGLLPSASTGESTPVFEPIHGSWPQAKGLNIANPLAQILSVAMLFEYFDLKEEGTLIREAVDASLDE

SEQ ID NO: 9187 - protein, 367 aa, Glycine max
  misc_feature (235)..(235): Xaa can be any naturally occurring amino acid
QDTPHSPSRFVLQQLFTSIPTASTTELDAVSAFSEIVPDTVVFDDFEKFPPTAATVSSSLLLGICGLPDTIFRNAVEMALADSECYGLENPNARLSCFVNKAFANIGSDMAKLVPGRVSTEVDARLAYDTHAIIRKVHDLLKLYNDSNVPPKRLLFKIPSTWQGIEAARLLESEGIQTHLTFVYSFAQAAAAAQAGASVIQIFVGRIRDWARNHSGDTEIESAQLRGEDPGLALXNRDIHFSDPTYNYIHKYGHKSKLMAAAVRNKQDLFSLLGVDYIIAPLKVLQSLKESIASPDEKYSFVRRLSAQSAAKYTFSDEELVKWDEDSLTKAMGPAAVQLLAAGLDGHADQAKRVEELFEKIWPPPNV

SEQ ID NO: 9188 - protein, 452 aa, Brucella suis 1330
MNPADEKPYAVISAGSAADIDLAVAAARRAFPAWSETPAEERIAYIRRIAEIYESRLDEMAKTISMEMGAPIKLARESQAAAGLSHTKAFIAACENFEVEEVLSPKYPNQTAVHEPIGVCGLITPWNWPMNQITLKVIPAIAVGCTVVLKPSEIAPMSAMLFAEFVDQAGLPKGVFNLVNGEGPVVGEALSQHPEVDMMSFTGSTRAGTAVSRAAAATVKRVSLELGGKSPNIVFADSDLEKAISRSLAHCFENTSQSCNAPTRMLVERSVYDKAVELAKKAAESTKVGDPAQEGDHIGPLSSSIQFEKVQALIQKGIDEGARLVAGGTGRPEGFTEGDYVKPTVFADVNNNMTIAREEIFGPVLAMIPFDTEEEAIAIANDTPYGLAAYIQTGSPERAKRVARKLRAGMIQINGTSRAPGSPFGGYKQSGNGREGGKWGLEDFMEVKLISG

SEQ ID NO: 9189 - protein, 380 aa, Gloeobacter violaceus PCC 7421
MSGEYVPGLEGVPATRSNISFVDGKAGVLEYRGIPIDQLAESSTFLETAFLLIFDHLPTKDELLSFEVEILGHRRVKYRIRDMIKSFPESGRPMVALQSCIAALGLFYPLQNESKEKYAYDSTIRLLAKMPTMVATFHQMRLGNDPIPPRDDLGHAANFLYMLTGKEPDPRAARIFDVCLMLHAEHTVNASTFSALVTASTLADPYTVITSAAGTLSGPLHGGANEEVIRMLKEIGTIERVRPYLENRLARKEKIMGVGHRVYKVKDPRATILQNLAQELFDRFGHSRLYDIAVEVERVCDELLGQKGIYPNVDFYSGLVYEKMGIPADMFTPVFAISRVAGWLAHWHEQLADNRIFRPTQVYTGSHNVEFTPLSLRSYA

SEQ ID NO: 9190 - protein, 320 aa, Triticum aestivum
SNSHSSQEGAAFARAFDDANEQVLYRFFDPLWKAKRLLNVLSEAAMKRSVRTINDFVYAVIDKKIEQMGRDGHEFAKKQDILSRFLLEREKDPGCFDNKYLRDIILNFVIAGRDTSAGTLSWFLYVLCRDQRIQDKIAREVREATTAGRRDVGGLQELTACLTEDAISSMPYLHAALTETLRLYPAVPIDVKYCFSDDTLPDGHAVRKGDMVNYQPYPMGRMKFLWGDDAEEFRPDRWLDGDGVFVPESPYKFTAFQAGPRICLGKEFAYRQMKIFAAALLCLFRFEMWERDSTVGYRPMLTLKMDGPLRVRASPRRASG

SEQ ID NO: 9191 - protein, 266 aa, Burkholderia fungorum LB400
MPPPKPPPKPPPLPPPAPAPAPAPPLEPPQPQPPLLPPPLLPPPLLPPPLLPPPLLPPPLLPPPLLPPPLLPPPLLPPPLLPPPLLPPPLLPPPLLPPPLLPPPLLPPPLLPPPLLPPPLLPPPLLPPPLLPPPLLPLPLPLPFPLPPPLAPALPLPEPAAPAAPPAPLLPEPAAPLLPLPPPRGAHPLTLALLQSCGRNTSAASSAAVGSPAAMPVLDVPVVELPAAAPSSCASCAAPCTALAGSAASASTIHCGITSVEAGYAT

SEQ ID NO: 9192 - protein, 76 aa, Zea mays
NDVIRRDANMSSDTDMSKVFEDRTFVSSILNSFPGVDPNDPSVKDLLASLPSQKEEEKKEDKSDKTEDEKNCFKLE

SEQ ID NO: 9193 - protein, 102 aa, Triticum aestivum
MEQPKQQQPQVPAQDAAAGDKNKRRDDMHKTTGDVMSHSFGEGYSTRSDEEGFGGVYGGNDPVEHPGTEIHPSHPEYDTSQGSEVKEKEKARHLKDEKHATA

SEQ ID NO: 9194 - protein, 250 aa, Brassica juncea
MTKSYPTVSEDYQKAIEKCKRKLRGLIAEKNCAPIMVRLAWHSAGTFDCASKTGGPFGTMRFDAEQGHGANSGIHIALRLLDPIREQFPAISFADFHQLAGVVAVEVTGGPEIPFHPGREDKPQPPPEGRLPDATKGCDHLRQVFTKQMGLSDKDIVALSGAHTLGRCHKDRSGFEGAWTSNPLIFDNSYFKELLTGEKEGLLQLVSDKALLDDPVFRPLVEKYAADEEAFFADYAEAHLKLSELGFADA

SEQ ID NO: 9195 - protein, 213 aa, Magnaporthe grisea 70-15
MADVEKKEEPVATEQHENDTGAGDDGDDEKISLKTFPQTGRADAACTQQEISAMKKRVAEMEEEAAKLREMQASLDSQSQELSTESRDDVDSRSIFVGNVDYSASPEEIQAHFQSCGSINRVTILLDKFTGQPKGFAYVEFTEPSLVAQALVLNESVFKGRNIKVSPKRTNYPGMSRGRGRGRGRGGFGRGGFPPRGGYRGGYRGRGRGFTPY

SEQ ID NO: 9196 - protein, 321 aa, Papaver somniferum
MESNGVPMITLSSGIRMPALGMGTAETMVKGTEREKLAFLKAIEVGYRHFDTAAAYQSEECLGEAIAEALQLGLIKSRDELFITSKLWCADAHADLVLPALQNSLRNLKLEYLDLYLIHHPVSLKPGKFVNEIPKDHILPMDYKSVWAAMEECQTLGFTRAIGVSNFSCKKLQELMAAAKIPPVVNQVEMSPTLHQKNLREYCKANNIMITAHSVLGAIGAPWGSNAVMDSKVLHQIAVARGKSVAQVSMRWVYQQGASLVVKSFNEGRMKENLKIFDWELTAEDMEKISEIPQSRTSSAAFLLSPTGPFKTEEEFWDEKD

SEQ ID NO: 9197 - protein, 231 aa, Zea mays
MCPTKKGMTGEPSSPCSSASASTLPEHHQTVWTSPPKRPAGRTKFRETRHPVFRGVRRRGSAGRWVCEVRVPGRRGCRLWLGTFDTAEAAARAHDAAMLALAGAAACCLNFADSAWLLAVPASCASLAEVRHAVADAVEDFLRHQVVPEDDALAATPSSPSSEDGNTSDGGESSSDSSPPTGASPFEFDVFNDMSWDLHYASLAQGLLVEPPSAVTAFMDEGFADVPLWSY

SEQ ID NO: 9198 - protein, 250 aa, Brassica juncea
MTKSYPTVSEDYQKAIEKCKRKLRGLIAEKNCAPIMVRLAWHSAGTFDCASKTGGPFGTMRFDAEQGHGANSGIHIALRLLDPIREQFPTISFADFHQLAGVVAVEVTGGPEIPFHPGREDKPQPPPEGRLPDATKGCDHLRQVFTKQMGLSDKDIVALSGAHTLGRCHKDRSGFEGAWTSNPLIFDNSYFKELLTGEKEGLLQLVSDKALLDDPVFRPLVEKYAADEEAFFADYAEAHLKLSELGFADA

SEQ ID NO: 9199 - protein, 54 aa, Glycine max
MGSETFLEVILAILLPPVGVFLRYGCGVELWIDLVLTILGYIPGIIYAIYVLIG

SEQ ID NO: 9200 - protein, 182 aa, Burkholderia pseudomallei
MQYQHIKVPEGGDKITVNKDFSLYVSDQPIIPYIEGDGTGFDITPVMIKVVDAAVEKAYGGKKKIHWMEIYAGEKATKVYGPDVWGPEETLQVLKEYVVSIKGPLTTPVGGGIRSLNVALRQELDLYVCLRPIQYFKGVPSPVREPEKTNMVIFRENSEDIYAGIEWAAESEQAKKVIKFLQ

SEQ ID NO: 9201 - protein, 175 aa, Triticum aestivum
  misc_feature (72)..(72): Xaa can be any naturally occurring amino acid
MAPTVMASSATSVAPFQGLKSTAGLPVSRRSSSAGLSSVSNGGRIRCMQVWPIEGIKKFETLSYLPPLSTEXLLKQVDYLIRSKWVPCLEFSKVGFVFREHNSSPGYYDGRYWTMWKLPMFGCTDATQVLNEVEEVKKEYPDAYVRVIGFDNLRQVQCVSFIAFRPPGCEESGKA

SEQ ID NO: 9202 - protein, 500 aa, Brucella melitensis 16M
MPYCPIALHKETTMKAQPKASHFIGGAFVEDKAGKPLPVIYPATGEEIASLYSATPGIIEAAYAAALKAQGEWAALKPVERGRILRRTAEILREKNRKLSKLETLDTGKALQETLVADAASAADALEFFGGIISGFNGEFVELGGSFAYTRREALGICVGIGAWNYPIQIAAWKSAPALAMGNAFIFKPSENTPLSALALAEAYKEAGLPDGLFNVVQGYGDVGAALVNHRLTAKVSLTGSVPTGRRIMAQAGEQLKHVTMELGGKSPLIVFDDADLESAIGGAMLGNFYSTGQVCSNGTRVFVHKNIRERFIERLVERTRKIRIGDPFDEATQMGPLISAAQRDKVLSYIKKGKAEGATLACGGGVPKLQGFDKGFFIEPTVFADVTDTMTIAREEIFGPVMSVLEFSDEDEVIARANDSEFGLAAGVFTADLSRGHHVIGQIKAGTCWINAYNLTPVEVPFGGYKQSGIGRENGIAALAHYSQIKTVYVEMGKVDSPY

SEQ ID NO: 9203 - protein, 470 aa, Brassica napus
MERGIARLAVLSAHLEVSDQVILPAIEPWCTSGASELHGSLKGSLTIVDERTGKKYQVPVAEDGTVKSIDLKKITMGKDDKGVKLYDPGYLNTAPVRSSISYIDGDEGILRYRGYPIEELAESSTFLEVAYLLIYGNLPSKSQLADWELAISQHSAVPQGLLDMIQSMPQDAYPTGAFVSAMSALSLFHPDANPAHMGQDVYKSAQVRDKQIFRILGQASTIAAAAFLRTAGKPHVLPLSNLSYTENLLYMLNSMGNRFYKPNPRLARVMDTIFILHCEHEMNCSTAAARHLSSSGVDVYTAIGGATGAINGPLHGGAVEAVPKMLSEIGSVENIPEFIECVKNKKRKLYGFGHRIYRNYDPRAKFLKKLADEVFSIVGKDPLVEVAVALEKTALSNEYFVRRKLYPNVDFYSGLVYRAMGVPSHFTRVSRLAGYLSHWRESLDDPDTKIMRPQQAYNGVWLRHYEPVRE

SEQ ID NO: 9204 - protein, 321 aa, Papaver somniferum
MEIGGVPVVTLSSGRGMPILGMGTAENNLQGSERVKLAILKAIEVGYRHFDTAFVYQTEGSLGEAVAEALQNGLIKSRDELFITSKLWCADAYPDHVLPALQNSLRNLKLEYLDLYLIHWPVSLKPGKFVHPIPKDEIFPIDYKSVWAAMEKCQMLGLTKSIGVSNFSCKKLHYLMATANIPPAVNQVEMNPIWQQQKLRDYCKTNNIMVTAYSPLGAKGTMWGSSGVMDSEVLNQISQVRGKSVAQVSLRWVYEQGASLLVKSFNEERMKENLKIFDWELSPEDLKNISELPQRRVSTGDPFVSINGPFKSVEELWDDEV

SEQ ID NO: 9205 - protein, 458 aa, Streptomyces carzinostaticus subsp. neocarzinostaticus
MPSGTFKDQARAVGPAGSRLVTGILSRSGPFSRLGLPLLRGTLSTRDSDLTAAARDFGNRIHLRPVAVLHPADAEDVATIVRFGRENGFAVVPRGAACSVDGQAQTSDGIVVDLSSLSAVGEPAPSLVRVDGGARWRAVLEATLPCGRVPLVVPDHLGLSVGGTLSVGGIGGTSHRYGSVADNVLELEVVTASGDLLTCSPVRRPELFDAVRGSLGRYGIITGATLALTGARSSARTYRLVYHDCAAFLADQQRLVHERRFEHVEGHAHRSGTSGWLFVLEAMQSFDTPHEPDDTALLEGLTHHHVDTIETVSYRDFLGRVAPLEARQRALGSWQHHPHPRCNVLLPGLEAEALITRTLAGLTEEDIGPGGSVLLYPIPTARLAAPHVPKARDALTVVFGLQRTAPPDQPELLDRMVRDNLALRAAARKAGGADYAYAATHCEAPDAYESFGRTPQSR

SEQ ID NO: 9206 - protein, 159 aa, Zea mays
MTWAATLDYGRKTKNEDIRPGPLRPANIIRNKFPTYKNGSNGIVIKLADGPEVPPLKEVVAKETEELLDRRQRFSVRELAMKFEKGLNTATLLSKEVKWRQVALLERDILLKNLKSVLESLRGQVTGKTKDEIEESISMVEILAGQLSQREAELIQQKT

SEQ ID NO: 9207 - protein, 204 aa, Hypocrea jecorina
MSDSPQSPPKDVDQGAQSPDEEGQMNDNQEPHSAGGTGYEFEGVKEQDRWLPIANVARIMKNALPDNAKIAKEAKECMQECVSEFISFITSEASEKCQQEKRKTVNGEDILFAMTSLGFENYAEALKVYLSKYREQQNQSNRDRVLENNTWGNAMIPGEKTEPGTTNPEYAPPEGANPPESGAEPNYMYTSHAGHNGAGAGENY

SEQ ID NO: 9208 - protein, 308 aa, Corynebacterium glutamicum ATCC 13032
MPKASRIVVMLLHPDAQFYIDTLPTLSAEEQVSFGKDAPVSEADATHVATDQDIAGVPVRVYTPLSGAGDLPCLVYFHGGGWSGGTLNMIDATVHSLVVGLPIIAISVDYRLAPAHPFPAAIDDAFAVVSAVLDGVSGLSIDTSRVAIGGDSAGGNIAAVTAQQLRERAVGSTPVLAHQVLIFPVTDVSTTSTPSYLTFGKDCYLTKDAMERYIEQYADGHDRTDPRLSPLLASDLSDLPPTTIVYGECDVLAHEVRAYGQALLEAGNSVTMTEFKGQIHAFINLGGISSDARAARRLIRAELEAALC

SEQ ID NO: 9209 - protein, 215 aa, Zea mays
  misc_feature (27)..(27): Xaa can be any naturally occurring amino acid
  misc_feature (51)..(51): Xaa can be any naturally occurring amino acid
MAAVEVCVKAAAGNPDTLGDCPFSQRXVLLTLEEKKVPYEVKLVDLGNKPXWFLNISPEGKVPVFNGGDGKCIADSDVIIQVIEEKFPTPSLVTPPEYASVGSKIFPAFVKFLKSKDASDGSEKALLDELQALDDHLKAHGPYINGENVSATDLSLGPKLFHLQIALEHFKGWKIPENLTNVHAYTKALFSRESFVKTKPSEEHVIAGWAPKVNA

SEQ ID NO: 9210 - protein, 275 aa, Bacteroides uniformis
IDKVGDPFPEATYEACKNADAVLFSAVGDPKFDNDPTAKVRPEQGLLAMRKKLGLFANIRPVQTFKCLLHKSPLRAELVDGADFLCIRELTGGMYFGEKYQDNDKAYDTNMYTRPEIERILKVGFEYAMKRSKHLTVVDKANVLASSRLWRQIAQEMAPQYPEVTTDYMFVDNAAMKMIQEPKFFDVMVTENTFGDILTDEGSCISGSMGLLPSASTGESTPVFEPIHGSWPQAKGLNIANPLAQILSVAMLFEYFDLKEEGALIRKAVDASLDA

SEQ ID NO: 9211 - protein, 275 aa, Bacteroides uniformis
IDKVGDPFPEATYEACKNADAVLFSAVGDPKFDNDPTAKVRPEQGLLAMRKKLGLFANTCPVQTFKCLLHKSPLRAELVDGADFLCIRELTGGMYFGEKYQDNDKAYDTNMYTRPEIERILKVGFEYAMKRSKHLTVVDKANVLASSRLWRQIAQEMAPQYPEVTTDYMFVDNAAMKMIQEPKFFDVMVTENTFGDILTDEGSVISGSMGLLPSASTGESTPVFEPIHGSWPQAKGLNIANPLAQILSVAMLFEYFDLKEEGGVIRKAVDASLDA

SEQ ID NO: 9212 - protein, 148 aa, uncultured soil bacterium
MALVPWTPMHNFAALQGQMNQLLNQFFRGGNGEEAPWGVSAWMPPVDLYETPDEFILSADLPGLTKDDIHLEVHDRTLTLRGERKPAAGMTEAHYQRRERAYGSFQRAFTLPTPVDTDKVQASMKDGILDLHLPKHEAAKPRRIAVQS

SEQ ID NO: 9213 - protein, 436 aa, Magnetospirillum magnetotacticum MS-1
MAARNSSGLVAYVNARLLDPATGLDTRGALLTNGETIADVGPGLFQGGVPSGMEVVDCQGLCLAPGLVDMRVQLREPGEEHKETLKSAGEAAVAGGVTSMVCLPNTNPVIDEVATVEFVARRARKIGLAKVYPYAAATKRVEGKELAEMGMLAEAGALGFTDGIRAIRNAQVMRRALTYAATFGLLIVQHPEEPSLAEGGMMNEGELATRMGLSGIPVAAEAIMLERDMRLVEITGGRYHAAHIATREGVEIIRKAKAKGLSVTCDTAPPYFALNELAVKDYRTFAKLSPPLRSEPDRLAVVEGLRDGTIDAVASDHSPQDQDSKRVPFAVAEFGGVGLETLLAVTLDLAHNGHMSLIEALKLVTCAPASILNLAAGRLKVGAAADLVLFDPDRGWKVNAKTFHSKSKNSPFDDRPVQGMVMRTIVDGRTVYTHDA

SEQ ID NO: 9214 - protein, 216 aa, Sanguinaria canadensis
IENTTNRQVTFCKRRNGLLKKAYELSVLCDAEVALIVFSNRGRLYEYANNSVKSTIERYKKTCQDPSNSGCAVEANTQFYQQEASKLRQQIGFLQNSNRNLTGEALSSMTVKELKQLETRLEKGISRIRSKKNELLFSEIEYMQKREIDLQNDNMYLRAKIAENERAQQHMNLMPGNEYDVMTSSAYDSRNFLQVNLLESTNHHYSRQEQTALQLG

SEQ ID NO: 9215 - protein, 286 aa, Selenomonas ruminantium
MEIWFSQMDTENVKTSVRVDRQLFSRQSEYQRINVFESREFGRMIVLDGEIIFSEADEFIYNEMVVHVPMAVHPCVKNVLIIGGGDGGVAKVLTQYPEIEAIDVVEPDEMFIEVSREFFPETARGFDDDRVKITNMDGLRFLRRCRDKYDLIINDSTDPFGHTEGLFTREFYGNCYRALHDDGIMVYQHGSPFYDEDEAAFRAMHRKAYQSFPVSRVYQASIPTCPAGIWMFGFASKKYHPLKDFDAQRWNERQLETWYYTTHLHKGAFMLPKYVEDILSEEEMKK

SEQ ID NO: 9216 - protein, 506 aa, Glycine max
  misc_feature (61)..(61): Xaa can be any naturally occurring amino acid
  misc_feature (251)..(251): Xaa can be any naturally occurring amino acid
MVLSKTTSESDVSVHSTFASRYVRTSLPRFKMPEESIPKEAAYQIINDELMLDGNPRLNLXASFVTTWMEPECDKLIMAAINKNYVDMDEYPVTTELQNRCVNMIAHLFNAPLEETEAAVGVGTVGSSEAIMLAGLAFKRKWQNRRKQEGKPFDKPNIVTGANVQVCWEKFARYFEVELKEVKLRDDYYVMDPEKAVELVDENTICVAAILGSTLNGEFEDVKRLNDLLIEKNKITGWDTPIHVDAASGGXFIAPFLYPELEWDFRLPLVKSINVSGHKYGLVYAGIGWVIWRSKEDLPEELIFHINYLGADQPTFTLNFSKGSSQVIAQYYQLIRLGFEGYRNVMENCRDNMLVLKEGLEKTGRFSIVSKDNGVPLVAFTLKKDHTHFDEFQISDFLRRFGWIVPAYTMPPDAQHVTVLRVVIREDFSRTLAERLVADVEKVLHELDSLPARVISSTSVTVTAEENGKVVVAKKSAMETQREITAIWKKFVLERKKNNDKMNGVC

SEQ ID NO: 9217 - protein, 89 aa, Glycine max
  misc_feature (83)..(83): Xaa can be any naturally occurring amino acid
TMIAAPAVTTVHHAGAGMAAPFTGQKSMVGFPTRKTNNGISCIGYNCLRLQCLQVWTPVVKSEVETLSYLPHLVDAQMAKEVXYLIRNG

SEQ ID NO: 9218 - protein, 390 aa, Magnaporthe grisea 70-15
MSYAPASPDLSSFYSGSADSHNAGHHHHHHHSSSSGFGFPVQVSSSNPRSRPLSPPHGLTLPGGPTSSVTTNYQANRVGEVHFSLHSNQQHHHHLHTPYHEHPYSLHTPISPQPNPSQAVHAQNHLHYIHSPFQTQKNIQSLQIVPPSNHNINTSQPGPSPIGLQYIPPYSAQQYKSEPDDAFCFSSVQEIPQRDLFPQQPHRRSYSQPHSDATRIKPEVKSEEQYGVHSPQNIRIKSETQPSYPLPEAMPPRRSAAAAQPSVIASPVKTRFPTARIKRIMQADEEVGKVAQQTPIAVGKALEMFMVALVSKSHDVAKDKGAKRVTAQHLKQVIESDDQWDFLREIVGRISETEEKAGRAGGRAKAESSSDEEVPEPKKKGRGGRKKKVT

SEQ ID NO: 9219 - protein, 458 aa, Streptomyces cattleya
MAGFLLRCRPEGAVPQHLGAGTGLATEVTRDGADVLVVHGDPLTPGGQAPIHAPLDELIAWTVRAYSRFCAVLVRDDRAVLWSDNGATCPLHYARGADDTLLVATSAGALLPLLGTAPVLGEGDRAVLPGGRFAGVTAVPAGTAVTLAVAGFDTEPLLTRRYHRLPARPTETDPERAVTAVRDALTHAVGRLATGLTEAGVMLSGGVDSSSVAALAAREVTSLSTYTVGTPFGDEFAQAAWFAERLGSKHHELVFEPEQLTALLPEMIRSLETWDLLTLQIAAPACFLLGHIATGARQVMLSGYGADLIFAGLGGTGTETRIERSVAAQTAATAVSNEFNPAYADARDVVVRYPYWTREVMSTALGIRGRLKVRPDTAKWVLRSAVTGILPDEVAWRPKRGIHEGTAMSRMFAAALGSDDRHTQARRLYEMATEVFRDTAAGTDELEGSDEGLAGVAS

SEQ ID NO: 9220 - protein, 147 aa, Fritillaria agrestis
TMLSSVATAARAAPAQASMVAPFVGLKSTSSFPVTQKPATGLSTLPSNGGRVQCMKVWPIVGLKKFETLSYLPTLSVESLLKQIEYLIRNGWVPCLEFSLEGFVSRDNNKSPGYYDGRYWTMWKLPMFGCTDAAQVVKEAAECKKEY

SEQ ID NO: 9221 - protein, 147 aa, Fritillaria agrestis
TMLSSVATAARAAPAQASMVAPFVGLKSASAFPVTQKPATGLSTLPSNGGRVQCMKVWPIVGLKKFETLSYLPTLSVESLLKQIEYLIRNGWVPCLEFSLEGFVSRDNNKSPGYYDGRYWTMWKLPMFGCTDAAQVVKEAAECKKEY

SEQ ID NO: 9222 - protein, 329 aa, Methanothermobacter thermautotrophicus str. Delta H
MKSMKIAVIPGDGIGVEVMEAALHILNTLDLDLEFIHADAGDACLKRTGTALPEETLEAVGEARATLFGAAGESAADVIVRLRREFDLFANLRPVKSLPGVPCLYPDLDFVIVRENTEDLYVGDEEYTPEGAVAKRIITRTASRRISQFAFQYAQKEGMQKVTAVHKANVLKKTDGIFRDEFYKVASEYPQMEATDYYVDATAMYLITQPQEFQTIVTTNLFGDILSDEAAGLIGGLGLAPSANIGEKNALFEPVHGSAPQIAGKNIANPTAMILTTTLMLKHLNKKQEAQKIEKALQKTLAEGLVTPDLGGKLGTMEMAAEIARHLED

SEQ ID NO: 9223 - protein, 513 aa, Glycine max
MSKTTTSSEQTARNRLATLAAHLLPSDATSAAAILHPHRLSAPTGDLPPANLKGTLTVVDERTGKKYQIEVTPDGTVRASDFKKISSGKNDKGLKLYDPGYLNTAPVISRISYIDGDAGILRYRGYPIEDLAEKSTFTEVSYLILYGNLPSESQLAEWEFALSQHSAVPQGVLDMIESMPHDAHPMGMLVNAMSALSVFHPDANPALKGLDIYNSKQVRDKQIARVIGKITTIAAAINLRLAGRPPVLPSNKLSYTENFLYMLDSFGNRSYKPNPRLTRALDIIFVLHAEHEMNCSTSAVRHLSSSGVDVYTAIAGAVGALYGPLHGGANEAVLKMLSEIGTVENIPAFIEGVKARKRKLSGFGHRVYKNYDPRAKVLRKLTEEVFSIVGRDPLIEIAVALEKIALSDEYFIKRKLYPNVDFYSGLIYRAMGFQPEFFTVLFAIPRMAGYLAHWRESLDDPDTKIMRPQQVYVGEWLRHYAPINQRTASSNTDKLGQLAVSNASKRRLAGSGA

SEQ ID NO: 9224 - protein, 450 aa, Streptomyces carzinostaticus subsp. neocarzinostaticus
MNGRRPVSPPLRALPGLLRKLAVDRLGMMRDAAALDDAVLVSMGPKKLFVFNRPDYAKHVLADNAANYRKGIGLIESRKMLGDGLLTSEGELWREQRRTVQPAFRPARVAAQADAVAEETMNLRDLLMRRGADGPVDVLQEVTGFTLGVLGRTVLNTDLGGYGGIAHAFEAVQDQAMFDMVTQNMVPTWAPLATQRRFRRARRELIRTVDELVADRSARMTDGEEADDAFSLMIAAARRQTDPRTGQGRLRDELVTLLLAGHETTASTLAWTLLLLARHPHMRDLVREEARGVLADGRAPDAGDLRKLTYTTQVVQEAMRLYPPVWILPRVARQSDEVGPYSVSAGADVLICPYTLHRHPDLWERPEQFDPGRFDPARVADRPRYAYIPFGAGPRFCVGSNLGMMEAVFVTALLTRDLVLEVVPGDERTPEPMMSLRMRGGLPMTVRPVR

SEQ ID NO: 9225 - protein, 98 aa, Glycine max
  misc_feature (58)..(58): Xaa can be any naturally occurring amino acid
MAGAWVFKNGVVRLAENPAGEAVDGSRGGRRKVLVHTASNEGITSYAELEPKLNLLGXERYYDYPVLVQFSQRSTVHLIFLPKNFNKLMPMRMYDIGA

SEQ ID NO: 9226 - protein, 452 aa, Staphylococcus aureus subsp. aureus Mu50
MNYTQQLKQKDSEYVWHPFTQMGVYSKEEAIIIEKGKGSYLYDTNGNKYLDGYASLWVNVHGHNNKYLNKVIKKQLNKIAHSTLLGSSNIPSIELAEKLIEITPSNLRKVFYSDTGSASVEIAIKMAYQYWKNIDREKYAKKNKFITLNHGYHGDTIGAVSVGGIKTFHKIFKDLIFENIQVESPSFYRSNYDTENEIMTAILTNIEQILIERNDEIAGFILEPLIQGATGLFVHPKGFLKEVEKLCKKYDVLLICDEVAVGFGRTGKMFACNHEDVQPDIMCLGKAITGGYLPLAATLTSQKIYNTFLSDSHGVNTFFHGHTYTGNQIVCTVALENIRLYEKRKLLSHIETTSSTLEKQLHALKRHRNVGDVRGRGLMFGVELVTDKDSKTPLEIEKVERIVRKCKENGLMIRNLENVITFVPVLSMSNKEVKTMVRIFKKAVHNILDRKC

SEQ ID NO: 9227 - protein, 302 aa, Emericella nidulans
MTRTHPSSFQQLEKLGEGTYATVYKGRNCQTGEMVALKEIHLDSEEGTPSTAIREISLMKELHHDNILSLYDVVHTENKLMLVFEYMDQDLKKYMDTHGNHGQLEPAIVKSFAFQLLRGIAFCHDNRILHRDLKPQNLLINSKGQLKLADFGLARAFGIPVNTFSNEVVTLWYRAPDVLLGSRTYNTTIDIWSIGCIIAEMFTGRALFPGTTNEDQLQKIFRVMGTPSERTWPGVSQFPEYKSDFPVYPPQDLRQVVPRIDPYGLDLLRCMLRLQPDLRISAVDALRHPWFNDVPGAQPVPV

SEQ ID NO: 9228 - protein, 357 aa, Nicotiana tabacum
MKKGSLAPNLKLSLPPPDEVNLSKFLTESGTFKDGDLLVNRDGVRIVSQSEVEAPSVIQPSDNQLCLADFEAVKVIGKGNGGIVRLVQHKWTGQFFALKAIQMNIEESMRKHIAQELRINQSSQVPYVVISYQSFFDNGAISIILEYMDGGSLADFLKKVKTIPERYLAAICKQVLKGLWYLHHEKHIIHRDLKPSNLLINHIGDVKITDFGVSAVLASTSGLANTFVGTYNYMSPERILGGAYGYRSDIWSLGLVLLECATGVFPYSPPQADEGWVNVYELMETIVDQPAPSAPPDQFSPQFCSFISACVQKDQKDRLSANELMRHPFITMYDDLDIDLGSYFTSAGPPLATLTEL

SEQ ID NO: 9229 - protein, 466 aa, Burkholderia fungorum LB400
MSKTSLIAADRKHLIHPVINYRAHEARGATVLESGQGAYLRDIDGNELLDAFSGLWCVNVGYGQQSIVEAATRQMTKLPYATTYFHFSSEPAIELADKLVALAPASLQHVYFTLGGSDAVDSAIRFITHYFNATGRPSKKQMIALERGYHGSSSVGAGLTALPAFHRNFDLPLPHQHHLPSPYAYRQTHGDDAQALIAASVAALEAKVAALGTDNVAAFFCEPIQGSGGVIVPPVGWLKAMRDACRRLDILFVADEVITGFGRTGPLFACEAEQVEPDLMTVAKGLTSGYAPMGAVLMSDEIYQGIAGDARDTAIVGHGQTYSAHPVSAAIGLEVLRLYQEGGLLANGQAQAPRFAAGLDALLGHPLVGDSRHRGLLGALELVADKDSRARFDPALKLPDRIAAAAYRNRLVFRAFGDSILGFAPALCFGEAEFEQMFGRLKRTLDEVLDETEVRAALRTAGRAAA

SEQ ID NO: 9230 - protein, 372 aa, Candida albicans SC5314
MKKSTGPTQTRQVVFNISQNFKVLKILGEGAYGIVALAVHLPTETKVAIKKIEPFERPLFCLRTLREIKLLTKFKNHDNIVRLYDVQKPMNYDSFNEVYLIQEYMPSDLHNIIHTHLLSDQHVQYFIYQILKGLKMIHSARVIHRDLKPSNILVNEKCDLKICDFGLARLDTKHYNFDEAPRISMLTEYVATRWYRAPEIMLSASNYSTAIDLWSVGCILAELLTYRALFPGSDYINQLKLIFEVLGTPTDEDLQIIKSERAQKFIRSLPTKVKIDLSEFINNHPYRNIKHRGRDQVNPLAIDLLEKLLVFDPAKRITVQEALEHPYLNSYHEQLDEPVTSPIPIEEFDFDIDKKNLDTNDLKKQIFEIVMS

SEQ ID NO: 9231 - protein, 147 aa, Fritillaria agrestis
TMLSSVATAARTAPAQASMVAPFVGLKSTSAFPVTQKPATGLSTLPSNGGRVQCMKVWPIVGLKKFETLSYLPTLSVESLLKQIEYLIRNGWVPCLEFSLEGFVSRDNNKSPGYYDGRYWTMLKLPMFGCTDAAQVVKEAAECKKEY

SEQ ID NO: 9232 - protein, 378 aa, Arabidopsis thaliana
  misc_feature (328)..(328): Xaa can be any naturally occurring amino acid
MANHLQVPLTKPDRVKEEQEVEEEARLLARRLANAAALPMVLKAALELGVIDTITTVGGGDLWLSPSEIALRLPTKPCNLEAPVLLDRMLRFLVSHSVLKCRTVIEENGQTGKVERVYAAEPVCKYLLNKSDDVSGSFASLFMLDLSDVFIKTWTHLKDVILAGRDAFSSAHGMKLFEYIQADERFGKVFNRAMLESSTMVTEKVLKFYEGFKDVKTLVDVGGGLGNTLGLITSKYPHLIGINFDLAPVLANAHSYPGVNHVAGDMFIKIPKGDAIFMKWILHDWTDEQCVAILKNCWKSLEENGKLIIVEMVTPVEAKSGDICSNIXFGMDMTMLTQCSGGKERSLYEFENLAYASGFSRCAIVCAVYPFSVIEIYK

SEQ ID NO: 9233 - protein, 147 aa, Fritillaria agrestis
TMLSSVATAARTAPAQASMVAPFVGLKSTSAFPVTQKPATGLSTLPSNGGRVQCMKVWPIVGLKKFETLSYLPTLSVESLLKQIEYLIRNGWVPCLEFSLEGFVSRDNNKSPGYYDGRYWTMWKLPMFGCTDAAQVVKEAAECKKEY

SEQ ID NO: 9234 - protein, 492 aa, Arabidopsis thaliana
MSDFSSSVKLKYVKLGYQYLINNFLTLLLIPVIATVAIELLRMGPEEILSVLNSLHFELLHILCSSFLIIFVSTVYFMSKPRTVYLVDYSCYKPPVTCRVPFSSFMEHSRLILKDNPKSVEFQMRILERSGLGEETCLPPAIHYIPPTPTMESARNEAQMVIFTAMEDLFKNTGLKPKDIDILIVNCSLFSPTPSLSAMIINKYKLRSNIKSYNLSGMGCSASLISVDVARNLLQVHPNSNAIIISTEIITPNYYKGNERAMLLPNCLFRMGGAAILLSNRRSDRWRAKYKLCHLVRTHRGADDKSYNCVMEQEDKNGNVGINLSKDLMTIAGEALKANITTIGPLVLPASEQLLFLSSLIGRKIFNPKWKPYIPDFKQAFEHFCIHAGGRAVIDELQKNLQLSGEHVEASRMTLHRFGNTSSSSLWYELSYIEAQGRMKRNDRVWQIAFGSGFKCNSAVWKCNRTIKTPTDGAWSDCIERYPVFIPEVVKL

SEQ ID NO: 9235 - protein, 147 aa, Fritillaria agrestis
TMLSSVATAARAAPAQASMVAPFVGLKSTSSFPVTQKPATGLSTLPSNGGRVQCMKVWPIVGLKKFETLSYLPTLSVETLLKQIEYLIRNGWVPCLEFSLEGFVSRDNNKSPGYYDGRYWTMWKLPMFGCTDAAQVVKEAAECKKEY

SEQ ID NO: 9236 - protein, 181 aa, Brassica napus
MAYSMLSSAAVVTSPAQATMVAPFTGLKSSSAFPVTRKANNDITSIVSNGGRVSCMQVWPPIGKKKFETLSYLPDLTEVELGKEVDYLLRNKWIPCVEFELEHGFVYREHGSTPGYYDARYWTMWKLPLFGCTDSAQVLKEVQECKTEYPNAFIRIIGFDNNRQVQCISFIAYKPPSFTGA

SEQ ID NO: 9237 - protein, 360 aa, Triticum aestivum
MGSTAADMAASADEEACMYALQLVSSSILPMTLKNAIELGLLETLVAAGGKLLTPAEVAAKLPSTANPAAADMVDRMLRLLASYNVVSCTMEEGKDGRLSRRYRAAPVCKFLTPNEDGVSMAALALMNQDKVLMESWYYLKDAVLDGGIPFNKAYGMSAFEYHGTDPRFNRVFNEGMKNHSIIITKKLLEVYKGFEGLGTIVDVGGGVGATVGAITAAYPAIKGINFDLPHVISEAQPFPGVTHVGGDMFQKVPSGDAILMKWILHDWSDEHCATLLKNCYDALPAHGKVVLVECILPVNPEATPKAQGVFHVDMIMLAHNPGGRERYEREFEALAKGAGFKAIKTTYIYANAFAIEFTK

SEQ ID NO: 9238 - protein, 234 aa, Methanosarcina mazei Go1
MTERNTSTDSPEKRAAGIAAAGLVSSGMVVGLGTGSTVAYTIKELGRRVKEEGLDILGVVTSYQSEMLAIDAGIRLTTLSQDPELDIAIDGADQIDSNLYTIKGGGAAHTREKIVSVSAKRFVVVADDSKTSTQLDKPVPVEVLPFAKEPAVNRIRKLGGEPRLRSAVKKDGPVITDNGNFVLDVEFGVIKDPEALALQLSAVPGVVEHGIFSNVDELYIGKKDGSVKIISRQK

SEQ ID NO: 9239 - protein, 490 aa, Oryza sativa (japonica cultivar-group)
MALKSPVDFAGSITSGQKDPCCFGVPGCNPRCVRYNKKSRTCRLVTRAISVDRPQLDFSNSDWKKQFQEDFDRRFSLPHLKDVIDVEPRPTTFSLKSRTPLENVNGSMQGSWNGYVNDDDRALLKVIKFASPTSAGADCIDPDCSWVEQWVHRAGPRKQIYFEPQYVKAGIVTCGGLCPGLNDVIRQIVLTLEKYGVKNIVGIQHGFRGFFEDHLAEVPARRLDMLFVLGGNGTHAGANLIHEECRKRKLKVSIVGVPKTIDNDILLMDKTFGFDTAVEAAQRAINSAYIEAHSAFHGIGLVKLMGRSSGFITMHASLSSGQVDICLIPEVPFTLDGPNGVLQHLEHLIETKGFALICVAEGAGQEHLQQSNATDASGNMILGDIGVHLHQKIKAHFKEIGVHSDVKYIDPTYMVRAVRANASDAILCTVLGQNAVHGAFAGFSGITTGICNTHNVYLPISEVIKSTRFVDPNSRMWHRCLTSTGQPDFH

SEQ ID NO: 9240 - protein, 147 aa, Fritillaria agrestis
TMLSSVATAARAAPAQASMVAPFVGLKSTFAFPVTQKPATGLSTLPSNGGRVQCMKVWPIVGLKKFETLSYLPTLSVESLLKQIEYLIRNGWVPCLEFSLEGFVSRDNNKSPGYYDGRYWTMWKLPMFGCTDAAQVVKEAAECKKEY

SEQ ID NO: 9241 - protein, 429 aa, Mesorhizobium sp. BNC1
MTDFYTLVPSAPASRFDGIERTYSAEDVRRLRGSVTIRHTLAEQGANQLWKLLHEENFVNALGALSGNQAMQMVRAGLKAIYLSGWQVAADANTASAMYPDQSLYPANAGPELARRINRTLQRADQIEVAEGKGLSVETWFAPIVADAEAGFGGPLNAFEIMKAYIEAGAAGVHFEDQLASEKKCGHLGGKVLIPTAAHIRNLTAARLAADIMGVPSLIVCRTDAEAAKLITSDIDERDQPFVDYEAGRTVEGFYQVKNGLEPCIARAVAYAPYSDLIWCETSKPDLEQARKFAEGVHKHHPGKMLAYNCSPSFNWKKNLDDATIAKFQRELGAMGYKFQFITLAGFHQLNYGMFELARGYRDRQMAAYAELQEAEFAAEARGYTATKHQREVGTGYFDAVSLAITGGQSSTTAMHGSTEHDQFTQAAE

SEQ ID NO: 9242 - protein, 448 aa, Thermoplasma volcanium GSS1
MIMENEERTEKYNEDALRYSEYYKGKIQTMSKVPVRSLDDFSIWYTPGVAAVSRKIATDHDLSFELTGRWNTIAILTDGTRVLGLGNIGPEAAMPVMEGKALIFNYLGGVNAIPVPIRVSSREEFVSVAKSLEPSFGGINLEDIESPKCFFLLETLQKEMNIPVWHDDQLGTASITLAGIINSIRIVGKKIEEVKVVFNGAGAANIAAAYLFKAAGFKKENIILVDSKGVLQPERQDMDSLMLNNPWKYQLAIETNGERVKGDLKEALKGADILISAAKSGPDTVDAKLVKEMNNDPIVFVLANPIPEMWPEEAKENGAKIVATGRSDFPNQINNSLVFPGVFRGVLDARAKGVNFDVMVAASYEIANFVEEPTAEKIVPTMEEWELYPRLASAVATKTVELGLARKIDSKEGFYKRARDIIENNRNIYRKMMDLGLIRMMPNGERKY

SEQ ID NO: 9243 - protein, 435 aa, Arabidopsis thaliana
MPEIEIAAGSGDNNDALFGKYELGKLLGCGAFAKVFHARDRRTGQSVAVKILNKKKLLTNPALANNIKREISIMRRLSHPNIVKLHEVMATKSKIFFAMEFVKGGELFNKISKHGRLSEDLSRRYFQQLISAVGYCHARGVYHRDLKPENLLIDENGNLKVSDFGLSALTDQIRPDGLLHTLCGTPAYVAPEILSKKGYEGAKVDVWSCGIVLFVLVAGYLPFNDPNVMNMYKKIYKGEYRFPRWMSPDLKRFVSRLLDINPETRITIDEILKDPWFVRGGFKQIKFHDDEIEDQKVESSLEAVKSLNAFDLISYSSGLDLSGLFAGCSNSSGESERFLSEKSPEMLAEEVEGFAREENLRMKKKKEEEYGFEMEGQNGKFGIGICISRLNDLLVVVEARRRGGDGDCYKEMWNGKLRVQLIRVCDQTSSTNAAI

SEQ ID NO: 9244 - protein, 381 aa, Clostridium perfringens str. 13
MTKDELLKQRELAHGLISINPNFDINNREQLSQIYTPGVSTICKEVEHHHNMVKTLTSVGNSIAVITDGTAVLGLGNIGTLAGYPIVEAKALVYKDLAGVNAIPLCVDQIGCNELIKTIKSISPSFSGIHLEDIKAPECFYIEEELKKTLNIPVYHDDQHGTAIAVLGALYNGAKVVNKDFLKLKVLILGAGASGIATAKLLLKAGIEDIILVDKNGALVNGDETLNAPQKEMAKITNKEFKKGTLKEVIKGRDVFIGLSEGNLVTKEMVESMNEDPIIFALANPTPEIKPEIAKEAGARVIATGGPSYPNQINNILVFPGLFKGLLEAKATDVTCDVMIAVGKKLASLVENPTAEKIIPGVFDGDIVKSVSETVVKNIEN

SEQ ID NO: 9245 - protein, 619 aa, Zea mays
MSSISRNLRRSLAPDRLRRLSQHPREYVTSECHRPVVLHKRGPDILHDPWFNRGTAFSMTERDRLGLRGLLPPNVVSSQQQIDRFMLDLKRLQRYARDGPSDTYPLAKWRILNRLHDRNETMYYKVLIDNIEEYAPIVYTPTVGLVCQNYSGLFRRPRGMYFSAEDRGEMMSMVYNWPADQVDMIVVTDGSRILGLGDLGVHGIGIAIGKLDLYVAAAGINPQRVLPVMIDVGTNNEKLLKDPLYLGLQEHRLEGDEYVSVIDEFMEAVFTRWPNVIVQFEDFQSKWAFRLLQRYRKTYRMFNDDVQGTAGVAIAGLLGAVRAQGRPMIDFPKQRIVVAGAGSAGIGVVNAASRTMARMLGNNDVAFESARSQFWIVDAHGLITEDREDIDPDARPFARRKSELGHQGLSEGASLVEVVKKVKPDVILGLSAVGGLFSKEVLEALKDSSSSRPAIFAMSNPTKNAECTPGEAFSILGEKVIFASGSPFHDVDLGDGKIGHSNQGNNMYLFPGIGLGTLLSGARVISDGMLQAAAERLASYMKEEEVLEGIIYPPISRIRDITKEVAAAVVREAVAEDLAEGYRDMDARELARLSEEETNEYVKTNMWSPVYPTIIYKKD

SEQ ID NO: 9246 - protein, 496 aa, Mentha x gracilis
MELDLLSAIIILVATYIVSLLINQWRKSKSQQNLPPSPPKLPVIGHLHFLWGGLPQHVFRSIAQKYGPVAHVQLGEVYSVVLSSAEAAKQAMKVLDPNFADRFDGIGSRTMWYDKDDIIFSPYNDHWRQMRRICVTELLSPKNVRSFGYIRQEEIERLIRLLGSSGGAPVDVTEEVSKMSCVVVCRAAFGSVLKDQGSLAELVKESLALASGFELADLYPSSWLLNLLSLNKYRLQRMRRRLDHILDGFLEEHREKKSGEFGGEDIVDVLFRMQKGSDIKIPITSNCIKGFIFDTFSAGAETSSTTISWALSELMRNPAKMAKVQAEVREALKGKTVVDLSEVQELKYLRSVLKETLRLHPPFPLIPRQSREECEVNGYTIPAKTRIFINVWAIGRDPQYWEDPDTFRPERFDEVSRDFMGNDFEFIPFGAGRRICPGLHFGLANVEIPLAQLLYHFDWKLPQGMTDADLDMTETPGLSGPKKKNVCLVPTLYKSP

SEQ ID NO: 9247 - protein, 494 aa, Mentha x gracilis
MELNLLLVIIILVATYTVSLLNKQWRKPKSQQKQPPKLPVIGHLHLLWGGLPPQHLLRSIAREYGPVAHVQLGEVYSVVLSSAEAAKQAMKVLDPNFADRFDSVGSRIMWYDNDDIIFSPYNDHWHQMRKICVSELLSPKNVRSFGFIRQEEIERLIRVMKQSEGAPVDVTEEVSKMSCFVVCRAAFGSVLKDQGSLAELVKESLAMASGFELKDLYPSSWLLNLLSFNNYRLKRMRRRLDHVLDGFLEEHRVKKNGEFGGEDIVDVLFRMQKDSNIKIPITSNGIKGFIFNTFSAGAEASSTTISWALSELMRNPAKMAKVQAEVREALKGKTSVDLSEMQELKYMRSVVKETLRLHPPFPLIPRQSREECEINGFYIPARTRILINAWSIGRDPLYWEDPDTFRPERFDEVSRDFMGNDFEFIPFGAGQRICPGLHFGLANVEIPLAQLLYHFDWKLPQGMTDADLYVAGTPGLSGPRKKNVFLVPTIHKSR

SEQ ID NO: 9248 - protein, 303 aa, Triticum aestivum
  misc_feature (221)..(221): Xaa can be any naturally occurring amino acid
MKTLLILTILAMATTIATANMQVDPSGQVQWPQQQPFPQPQQPFCQQPQRTIPQPHQTFHHQPQQTFPQPQQTYPHQPQQQFPQTQQPQQPFPQPQQTFPQQPQLPFPQQPQQPFPQPQQPQQPFPQSQQPQQPFPQPQQQFPQPQQPQQSFPQQQQPAIQSFLQQQMNPCKNFLLQQCNHVSLVSSLVSIILPRSDCQVMQQQCCQQLAQIPQQLQCAAXIHSVAHSIIMQQEQQQGVPILRPLFQLAQGLGIIQPQQPAQLEGIRSLVLKTLPTMCNVYVPPDCSTINVPYANIDAGIGGQ

SEQ ID NO: 9249 - protein, 192 aa, Aspergillus nidulans FGSC A4
MVVATIKCVVVGDGAVGKTCLLISYTTNKFPSEYVPTVFDNYAVTVMIGDEPYTLGLFDTAGQEDYDRLRPLSYPQTDVFLVCFSVTSPASFENVREKWFPEVHHHCPGVPCLIVGTQVDLRDDPAVRDKLARQKMQPIRKEDGDRMAKDLGAVKYVECSALTQYKLKDVFDEAIVAALEPAPKKRSRCVLL

SEQ ID NO: 9250 - protein, 202 aa, Hypocrea jecorina
MNPEYDYLFKLLLIGDSGVGKSCLLLRFADDTYTESYISTIGVDFKIRTIELDGKTVKLQIWDTAGQERFRTITSSYYRGAHGICVVYDVTDMDSFNNVKQWLQEIDRYATEGVNKLLVGNKSDMSDKKVVEYTVAKEFADSLGIPFLETSAKNASNVEQAFLTMARQIKERMGTTTANNTKPSVHVGQGQGVGNSSSSSCC

SEQ ID NO: 9251 - protein, 346 aa, Triticum aestivum
MLGVGEMNHRLEANGHGKPVAMAKQEQLQQRGDHEETLWYEEEIHDDLKICYALNSVLHRGKSKYQEIALVDTKCFGKALIIDGKMQSADADEFIYHESLIHPPLLFHPNPETVFIMGGGEGSAAREALKQKTVQRVVMCDIDEEVVHFCRTHLSVNWDAFASDKLCLVINDARAELEKMREEKFDVIVGDLADPMEGGPCYQLYTRSFYEQVLKPRLHDGGIFVTQAGPAGVLTHKEVFSSIYNTLRHVFKHVKAYTAHVPSLADTWGWVMASDHPFTLTAQQINERITDRIDGELSYLDGETLISSTTLNKTVFHSLLNERHVYTEDDARFVHGHGTGRAAMLN

SEQ ID NO: 9252 - protein, 497 aa, Spinacia oleracea
MAFPIPARQLFIDGEWREPIKKNRIPVINPSTEEIIGDIPAATAEDVEVAVVAARRAFRRNNWSATSGAHRATYLRAIAAKITEKKDHFVKLETIDSGKPFDEAVLDIDDVASCFEYFAGQAEALDGKQKAPVTLPMERFKSHVLRQPLGVVGLISPWNYPLLMATWKIAPALAAGCTAVLKPSELASVTCLEFGEVCNEVGLPPGVLNILTGLGPDAGAPLVSHPDVDKIAFTGSSATGSKVMASAAQLVKPVTLELGGKSPIVVFEDVDIDKVVEWTIFGCFWTNGQICSATSRLLVHESIAAEFVDKLVKWTKNIKISDPFEEGCRLGPVISKGQYDKIMKFISTAKSEGATILYGGSRPEHLKKGYYIEPTIVTDISTSMQIWKEEVFGPVLCVKTFSSEDEAIALANDTEYGLAAAVFFNDLERCERITKALEVGAVWVNCSQPCFVQAPWGGIKRSGFGRELGEWGIQNYLNIKQVTQDISDEPWGWYKSP

SEQ ID NO: 9253 - protein, 204 aa, Berberis gilgiana
KRRNGLLKKAYELSVLCDAEVALIVFSARGRLYEYANNSVKTTIERYKKACSDSTNTGSVSEANAQFYQQEATRMRQQIGNLQNANRHLLGQDLSSVSVKDLKQMETRLEKGISRIRSKKNELLFAEIEYMQKREIDLQNDNMYLRAKIAENERAQQQMNLMPGNEYETITSAPYDSRNFLQVNLLPESNNQYSRSDQTALQLG

SEQ ID NO: 9254 - protein, 202 aa, Akebia quinata
RRNGLLKKAYELSVLCDAEVALVVFSNRGRLYEYANNSVKTTIERYKKACIDSSNSGSVSEANAQFYQQESLKLRQQIGNLQNLNRHLMGEALGSMSIKELKQLETRIEKGISRIRSKKNELLFAEIEYMQKREIDLQNDNMYLRAKIAENERAGQHMSLMPGNEYEVMSSAPFDSRNFLQVNLLEPNNHYSHTDQIALQLG

SEQ ID NO: 9255 - protein, 309 aa, Glycine max
MISPQTRHSFGSLLLLFLVLLQKRFQMGLLEENPNHSKTILIREVWASNLESEFQLIRQVIDDYPFISMDTEFPGVVFRPHTVDPTKPYLPPSVHYRFLKSNVDALNLIQIGLTLSDSNGNLPHLGTANRFIWEFNFRDFDVERDAHAPDSIDLLRRQGIDFRRNAAEGVDSYLFAELVMSSGLVCNDSVSWVTFHSAYDFGYLVKILTRRSLPSGLEEFLNMLRAFFGNNVYDIKHMMRFCDTLHGGLDRLARTLNVDRAVGKCHQAGSDSLLTWHAFQKMRDIYFVTDGPQKHAGVLFGLELTCSTS

SEQ ID NO: 9256 - protein, 496 aa, Magnaporthe grisea 70-15
MSLVTELKTPVTGAYQQPTGVFINNEWVEGVDKKTFETINPSTEEVICSVSEATEKDVDIAVKAARKAFEGEWKQTAPGQRSKLLTNLAELVEKNLDLLAAVESLDNGKSLAMAKGDVGAVAGCLRYYGGWADKIEGKTIDIAPDMFHYTRSEPIGVCGQIIPWNFPLLMLAWKLGPALATGNTIVLKTAEQTPLSALVFANLIKEAGFPAGVVNIISGFGKVAGAAISAHMDIDKVAFTGSTVVGRTIMKAAASSNLKKVTLELGGKSPNIIFNDADIEAAVSWVNFGIYYNHGQCCCAGSRIYVQEGVYDKFVAAFKERAEKNKVGDPFKEDTFQGPQVSELQFNRIMEYIKSGKEEGATVETGGERHGDKGYFIQPTIFSNVRPEMKIMKEEIFGPVVAMAKFKTEEEVIALANDTNYGLAAAVHTKDLNTSIRVSNALKAGTVWVNCYNMLHHQLPFGGFKESGIGRELGEAALANYTQNKSVAIRLGGPIF

SEQ ID NO: 9257 - protein, 504 aa, Aspergillus nidulans FGSC A4
MAQPVQLTAPNGVSYSQPTGLFINNEFVPAASGKTLTTVNPYDESIIATVSSAGPKDVDRAVAAARQAFASEWRGLTPSERGLLLLRLADLCDRDKEILATIDAWDNGKPYEQALGEDIAEVIAVFRYYGGWADKIHGSTIDTGDAKFAYTRHEPLGVCGQIIPWNYPVMMAAWKLGPALACGNTVVLKAAEQTPLSVLYLATLIKEAGFPAGVVNLLNGEGASAGAAIAGHPGVDKIAFTGSTNTGRVIMKAAAGNLKAITLETGGKSPLLVFDDANIDQAVKWSHVGIMSNMGQICTATSRIYVQETIYDTFVEKFKQYTIENSKVGSQFDPSVTHGPQISKAQRDRILSYVQSAKSEGAQLVLGDEPVSEKGYFVPPTIFKNTTREMSAVREEIFGPFVVIQSFSTQQDAINKANDTEYGLGAAVFTENITRAHRVAAAIQAGMVWINSSQDSHFAIPFGGYKQSGIGRELGEYALAAYTQVKAVHGKFSLPLEFNLGTWL

SEQ ID NO: 9258 - protein, 364 aa, Aspergillus oryzae
MSSYNIVVFGGDHCGPEVTAEAIKVLRAVEKNRDVTFNLQDHLLGGASIDATGSPLTDEALNAAKNADAVLLGAIGGPKWGTGAVRPEQGILKLRKEMGTFGNLRPCNFAAPSLVESSPLRADVCRGVNFNIIRELTGGIYFGERKEDDGSGYAMDTEPYSRAEIERIIRLAAHLALQHDPPLPVWSLDKANVLATSRLWRKVVTEVMAKEFPQLKIEHQLIDSAAMIMVKNPRQLNGIVVTSNLFGDIISDEASVIPGSLGLLPSASLSGIPDGNSKVNGIYEPIHGSAPDIAGKGIVNPVAAILSVAMMMQYSFGLFAEARAIEQAVSNVIESGVRTGDIGGKATTAEVGDAVAAELEKLLK

SEQ ID NO: 9259 - protein, 337 aa, Thermoproteus tenax
MKIGVLTGGGDAPGLNIAVYTFVKLAERKHEVYAIYHGWRGLLNKEVKRVSSRDLLDFAFSGGTYIRTSRTNPFKDEERARLLESNVKELGLDVVVAIGGDDTLGAAGEAQRRGILDAVGIPKTIDNDVYGTDYTIGFDSAVNAAIEATESFKTTLISHERIGVVEVMGREAGWIALFTGLSTMADAVLIPERPASWDSVAKRVKEAYNERRWALVVVSEGIKEYGGPKDEYGHSRLGGVGNELAEYIERSTGIEARAVVLGHTIRGVPPTAFDRILAVRYATAAYEAVENGRYGVMVAYSNGDIAYVPIVDVVGKNRLVSGYWMRLYETYWPDLAG

SEQ ID NO: 9260 - protein, 372 aa, Ustilago maydis
MPSLASRSGPPAASSSDPKTSSSSTEKVAKSVGSASPLRSSPNRPYALSDFEVVETLGTGTFGRVLLVRLKDRDVADRSAYFALKVLAKTDVIKLKQVSHINSERCILTKVDHPFLVNMIASFQDSKNCYMLMEYVVGGEIFSYLRRAGHFSADVARFYISTIVLAIEYLHSNKVVYRDLKPENLLIDSNGYTKITDFGFAKEVEDRTWTLCGTPEYLAPEIIQCSGHGSAVDWWSLGILLFEMLAGYPPFYDPNPILIYEKILAGNLVFPEEIDPLSRDLISSLLTADRSRRLGNLRGGANDVKNHPWFHGVDWKALQEGRILPPIVPYLGRPGDTSNFSKYEPARPSAMPGLYGADSGHHDLYADLFPDF

SEQ ID NO: 9261 - protein, 353 aa, Gibberella zeae PH-1
MSSNLSFVLNKPGDVSFEERPKPSLASPHDVLVAVNYTGICGSDVHYWVHGSIGKFVVEDPMVLGHESAGTVVEVGDKVKTLKAGDRVALEPGYPCRRCQNCLAGKYNLCPDMVFAATPPYHGTLTGFWSAPADFCFKLPDNVSLQEGALIEPLAVAVHIVKQARVKPGDSVVVMGAGPVGLLCAAVAKAYGASKIVSVDIVQSKLDFAKDFASTHVYASQRIAPEENAKNICDLAGLPDGADVVIDASGAEPSIQASIHVLKNGGSYVQGGMGKADITFPIMAFCIKEATASGSFRYGAGDYPLAVELVATGKVDVKKLITGIVDFKQAEEAFKKVKEGEAIKVLIKGPNEQ

SEQ ID NO: 9262 - protein, 407 aa, Vibrio harveyi
MDIILGVVMFTLIVLALVLVILFAKSKLVPTGDITISVNDDPSLAIVTQPGGKLLSALAGAGVFVSSACGGGGSCGQCRRKIKSGGGDILPTELDHITKGEAREGERLACQVAMKTDMDIELPEEIFGVKKWECTVISNDNKATFIKELKLQIPDGESVPFRAGGYIQIEAPAHHVKYADYDIPEEYREDWEKFNLFRYESKVNEETIRAYSMANYPEEHGIIMLNVRIATPPPNNPDVAPGIMSSFIWSLKEGDKCTISGPFGEFFAKDTDAEMVFVGGGAGMAPMRSHIFDQLKRLHSKRKMSFWYGARSKREMFYVEDFDGLAADNDNFVWHCALSDPLPEDNWDGYTGFIHNVLYENYLRDHEAPEDCEYYMCGPPMMNAAVIGMLKDLGVEDENILLDDFGG

SEQ ID NO: 9263 - protein, 198 aa, Triticum aestivum
  misc_feature (17)..(17): Xaa can be any naturally occurring amino acid
  misc_feature (70)..(70): Xaa can be any naturally occurring amino acid
  misc_feature (168)..(168): Xaa can be any naturally occurring amino acid
  misc_feature (191)..(192): Xaa can be any naturally occurring amino acid
SNTDHQTLSLKLKHPTXSSHSSLSSSTKLDCSLPSTPALAMDMGMDLSGSSPSSSVSSSPEHASGRASPXKRPAGRTKFRETRHPVYRGVRRTGNAGRWVCEVRVPGKRGARLWLGTYLTAEAAARANDAAMLALGGRSARCLNFADSAWLLAVPSALSDLADVRRAXLQAVADFQRREAANGLIARTVAXXTPSSAH

SEQ ID NO: 9264 - protein, 414 aa, Arabidopsis thaliana
MATHSSRSENKDAGEEDELRRRNPYEVLGIPSNSTDQEIKSAYRRMALRYHPDKNPDDPVAAEMFKEVTFAYEVLSDPENRRLYDTTGSEAVGPENEDLELDLSSLGAVNTIFAALFNKLGVQIKTTVSANLLGEALNGTVTTLPLMVGQVVSRKVEKQSAHFYSVTLTEEEAQDGLICKVHSSAKNKFKLLYFDQVENGGLSLALQEDSRKTGKLSTAGLYFFGFPVYRFDHRVNSRALSRDPETGFFKRLDAFQPFEITELKAGSHVFAVYGDNFFKSVSYTLEIFSSAPFGNEKESLRSTEAQIVSKRTELLKFEAEYHEVFAQFTEMASKCTGEVQEIDELLKRRNEICAAYTIFPPTKQGSSKSRSWSKKKSSLLMEPREEGEVAVREEGGVKKKKWYNIQLRQDKKKN

SEQ ID NO: 9265 - protein, 107 aa, Erysimum cheiri
LGLWDTAGQEDYSRLRPLSYRGADIFVLAFSLISKASYENVLKKWMPELRRFAPNVPIVLVGTKLDLRDDKGYLADHTNVITSNQGEELRKQIGAAAYIECSSKTQQ

SEQ ID NO: 9266 - protein, 497 aa, Mentha x gracilis
MELQISSAIIILVATFVASLLIKQWRKSESQQNLPPGPPKLPLVGHLHLLWGKLPQHAMADMAKKYGPVTHVQLGEVFSVVLSSREATKEAMKLLDPACADRFESIGTRIMWYDNDDIIFSPYSDHWRQMRKICVSELLSARNVRSFGFIRQDEMSRLLRHLQSSAGETVDMTERIATLTCSIICRAAFGAIINDHEELVELVKDSLSMASGFELADLFPSSKLLNLLCWNKSKLWRMRRRVDTILEAIVEEHKLKKSGEFGGEDIIDVLFRMQKDSQIKVPITTNAIKAFIFDTFSAGTETSSTTTLWVMAELMRNPAVMAKAQAEVRAALKGKTSVDVDDVQELKYMKSVVKETMRMHPPIPLIPRSCREECEVNGYKIPNKARIMINVWSMGRNPLYWEKPETFWPERFDQVSRDFMGSDFEFIPFGAGRRICPGLNFGLANVEVPLAQLLYHFDWKLAEGMKPSDMDMSEAEGLTGIRKNNLLLVPTPYNPSS

SEQ ID NO: 9267 - protein, 506 aa, Brassica napus
MTSVNVKLLYHYVITNLFNLCFFPLTAIVAGKAYRLTIDDLHHLYYSYLQHNLITIAPLFAFTVFGSVLYIATRPKPVYLVEYSCYLPPTHCRSSISKVMDIFYQVRKADPSRNGTCDDSSWLDFLRKIQERSGLGDETHGPEGLLQVPPRKTFAAAREETEQVIIGALENLFKNTNVNPKDIGILVVNSSMFNPTPSLSAMVVNTFKLRSNVRSFNLGGMGCSAGVIAIDLAKDLLHVHKNTYALVVSTENITYNIYAGDNRSMMVSNCLFRVGGAAILLSNKPGDRRRSKYELVHTVRTHTGADDKSFRCVQQGDDENGKIGVSLSKDITDVAGRTVKKNIATLGPLILPLSEKLLFFVTFMGKKLFKDKIKHYYVPDFKLAIDHFCIHAGGRAVIDVLEKNLALAPIDVEASRSTLHRFGNTSSSSIWYELAYIEAKGRMKKGNKVWQIALGSGFKCNSAVWVALNNVKASTNSPWEHCIDRYPVKIDSDSGKSETRVQNGRS

SEQ ID NO: 9268 - protein, 510 aa, Ralstonia solanacearum GMI1000
MNRGNALLVLAVFVVASCGLAYELIAGALASYLLGDSILQFSSIIGAYLFAMGIGSWVSRYVADDALLARFVDLELLVGLFGGVSAAALFLLFALESAPFRLVLYALVTVIGVLVGMEIPLVMRMLHRRQAKFSDLVSRVLTFDYLGALAVSLLFPLVLAPRLGLVRTGFLFGLCNTAIAVWTLWHFRAELGLSARLRGAMAWRAGMVGAALLAGFAASDRLTHWSERALFGDEIIHAISSPYQRLVVTRWKDDLRLYINGNLQFSSRDEYRYHEALVLPALESVRGARRVLVLGGGDGLALRQILKYPQVEHVTLVDLDPRMTSLFSHAEALVALNQHAFSDPRVTVVNADAGQWLQTAADMFDVAIVDFPDPSNFSIGKLYSVPFYRLLSRHVADTGLVVIQATSPYFAPRSYWCVDATLKEAGYRTWPYHALVPSFGEWGFILAAPGRADFRPPTTYRVPTRFLDADTTHQMFSFAPDMPRPQVEPNRLNNQSLVRYFEEDWHGVLR

SEQ ID NO: 9269 - protein, 262 aa, Fritillaria cirrhosa
MSSAESREENVYLAKLAEQAERYEEMVEFMEKVAKTVETEELTVEERNLLSVAYKNVIGARRASWRIMSSIEQKEESKGNDQNVKLIKGYRHKVEEELAKICNDILTVIDKHLIPSSGSGEATVFYYKMKGDYYRYLAEFKNEHERKEAADQSMKAYQAASNTANTDLPSTHPIRLGLALNFSVFYYEIMNSPERACHLAKQAFDEAIAELDTLSEESYKDSTLIMQLLRDNLTLWTSDLPEDGGDEGFKGEEAKAAGDDEH

SEQ ID NO: 9270 - protein, 369 aa, Candida albicans SC5314
MFRQVTKSAPVIRTTQRLFARSYIAGQFTGSKGSDGKYTVTLIEGDGIGPEISQAVKDIYAAADVPIHWEPVDVTPLLIDGKTTLPQPAVDSVNKNLVALKGPLATPVGKGHTSMNLTLRRTFNLFANVRPCKSIVGYETPYENVDTVLIRENTEGEYSGIEHTIVPGVVQSIKLITKPASEKVIRYAFEYAKSINKPHVLVVHKASIMKLSDGLFVNTAKEVAQEYPDVSLDFELLDNTSLRLTADPSQYKNVVMVMPNLYGDIMSDLSSGLIGGLGLTPSGNMGNKVSIFEAVHGSAPDIAGKGLANPTALLLSSCMMLRHMSLNSDADRIENAVLKTIASGPDNRTGDLKGTATTTRFTEEVIKNL

SEQ ID NO: 9271 - protein, 465 aa, Streptococcus pneumoniae
MFKSNHERRMRYSIRKFSVGVASVAVASLFMGSVVHATEKEGSTQAATSFNRGNGSQAEQRGELDLERDKAMKAVSEYVGKMVRDAYVKSDRKRHKNTVALVNQLGNIKNRYLNEIVHSTSKSQLQELMMKSQSEVDEAVSKFEKDSFSSSSSGSSTKPETPQPENPEHQKPTTPSPDTKPSPQPEGKKPSVPDINQEKEKAKLAVVTYMSKILDDIQNIICRKKNIVRLLALIKELDELKKQALSEIDNVNTKVEIENTVHKIFADMDAVVTKFKKGLTQDTPKEPGNKKPSAPKTGMQPSPQPEVKPQPEKPKPEVKPQLEKPKPEVKPQPEKPKPEVNPQPEKPKPEVKPQPEKPKPEVKPQPEKPKPEVKPQPEKPKPEVKPQPEKPKPDSKPQADDKKPSTTNNLSKDKQPSNQASTNEKATNKPKKSLPSTGSISNLALEIAGLLTLAGATILAKKRMK

SEQ ID NO: 9272 - protein, 181 aa, Solanum tuberosum
MASSIVSSAAVATRSNVAQASMVAPFTGLKSAASFPVTKKNNNVDITSLASNGGRVRCMQVWPPINMKKYETLSYLPDLSDEQLLKEVEYLLKNGWVPCLEFETEHGFVYRENHKSPGYYDGRYWTMWKLPMFGCTDATQVLAEVQEAKKAYPQAWIRIIGFDNVRQVQCISFIAYKPEGY

SEQ ID NO: 9273 - protein, 516 aa, Glycine max
MDYLLLLPLIITIVWINIHVFISSFKPLKSSKNPPGPRPFPIIGNILELGNQPHQALAKLSQIYGPIMSLKLGKTTTIVISSPQVAKEVLQKHDQIFANRTVPDTLRALDHHILSVAWMPPLPQWRTLRRVCATKVFSSQQLDSTQVFRQRKVQDLMDYVKERCEKGEALDIGEASFTTVLNSISNTFFSMDLAYYTSDKSQEFKDIVWGIMEEAGRPNVVDFFPIFRLLDPQGVRRRMNGYFGKLIAFFDGLIEERLRLRASENESKACNDVLDTVLELMLEENSQVTRPHVLHLFLDLFVAGIDTTSSTIEWAMAELLRNPEKLEIVRKELQQVLAKGEQLEESHISNLAYLQAVVKETFRLHPPIPMLVPHKSEVDVELCGFMVPKSAQILVNVWATGRDSSIWTNPNQFTPERFLESDIDFKGQDFELIPFGAGRRICPGLPLASRTVHIVLASLLYNYNWKLTDGQKPEDMDMSEKYGITLHKAQPLLVIPIQAYYQGRLHACNQILNKLS

SEQ ID NO: 9274 - protein, 204 aa, Helleborus orientalis
KRRNGLLKKAYELSVLCDAEVALIVFSTRGRLYEYSNNSVKKTIERYKKASTDSSGSGSVSEVNAQYYQQEASKLRNQIATLQNSNRNLLGEQLSNLNIRELKQIEKKIETGINKIQSKKNELLFAEIEYMQKREADLQNDNMYLRAKISENERTQQHMSLMPGTNDYEVISSGAFDSRNFLQVNLLGSNDTYSRSDQTALQLG

SEQ ID NO: 9275 - protein, 216 aa, Helleborus orientalis
IENTTNRQVTFCKHRNGLLKKAYELSVLCDAEVALIVFSSRGRLYEYSNNSVKKTIERYKKASTDSSNSGSASEANAQYYQQEAAKLRNQIAALQNSNRNLLGEQLSNLSIRELKQIEKKIETGINKIRSKKNELLFAEIEYMQKREVDLQNDNMFLRAKISENERTQQHMSLMPGTNNYEVISSGPFDSRNFLQVNLLESNNNYSRSDQTALQLG

SEQ ID NO: 9276 - protein, 214 aa, Aquilegia alpina
IENTTNRQVTFCKRRNGLLKKAYELSVLCEAEVALIVFSNRGRLYEYANNSVRKTIDRYKKTCGEGSSTLTVSEANLLFYQQESSKMKQQIEILQNSNRHLMGEALSCLSIKELKQLESRLEKGISRIRSKKNEMLLAEIEFMQKREIELHNDNIYLREQITANERAQQHMNSLPGNVYEAITSAPYNSRDFLQVNLRESKPNQYCDSTALQLC

SEQ ID NO: 9277 - protein, 375 aa, Pseudomonas aeruginosa PAO1
MAEAKVLSGAGLRGQVAGQTALSTVGQEGAGLTYRGYDVRDLAAAAIFEEVAYLLLYGELPNKQQLDAYLKKLQGQRDLPQALKEVLERIPKDAHPMDVMRTGASVLGTLEPELSFDQQRDVADRLLAAFPAIMTYWYRFTHEGQRIDCNSDEPTIGGHFLALLHGKKPSELHVKVMNVSLILYAEHEFNASTFTARVCASTLSDLYSCVTGAIGSLRGPLHGGANEAAMELIERFSSPQEATAELLKMLERKDKIMGFGHAIYKDSDPRNEVIKGWSKQLADEVGDKVLFAVSEAIDKTMWEQKKLFPNADFYHASAYHFMGIPTKLFTPIFVCSRTSGWTAHVFEQRANNRIIRPSAEYTGVEQRAFVPLEQR

SEQ ID NO: 9278 - protein, 203 aa, Aquilegia alpina
KRRNGLLKKAYELSVLCEAEVALIVFSSRGRLYEYSNNSVKKTIERYKKASTDSNNSGSVSEANAQFYQQEATKLRNQIASLQNHNRNLLGESLSNLNIRELKQIEKKIEGGISKIRAKKNELLFAEIEYMQKRELDLQTDNKYLRAMIAANERAPEHMNLMPANEYHALSSAPFDSRNFMPANLLDHNNNYSRSDQTTLQLG

SEQ ID NO: 9279 - protein, 203 aa, Pyrococcus furiosus DSM 3638
MAHGPRYRVPFRRRREGKTNYRKRLKLLKSGKPRLVVRKSLNHHIAQIIVYDPKGDRTLVSAHTRELIRDFGWKGHCGNTPSAYLLGLLIGYKAKQAGIEEAILDIGLHPPVRGSSVFAVLKGAVDAGLNVPHSPEIFPDEYRIRGEHIAEYAKMLKEQDEEKFRRQFGGYLVKGLDPEKLPEHFEEVKARIIEKFEGEGARE

SEQ ID NO: 9280 - protein, 203 aa, Clematis integrifolia
KRRNGLLKKAYELSVLCDAEVALIVFSNRGRLYEYANNSVRKTIDRYKKTCSDPQTALTVSEANTMFYQQETTKMKQQIEILQNSNRHLMGEALSCLSIKELKQLESRLEKGLGRIRSKKNEMLLSEIEYMQKREIDLHNDNLYLRAKISDNEKAQHNMNVLPGNVYEAMTSAPYDARNFLQVNLPDTKEHPYCSGSTALQLC

SEQ ID NO: 9281 - protein, 75 aa, Brassica napus
  misc_feature (3)..(3): Xaa can be any naturally occurring amino acid
  misc_feature (13)..(13): Xaa can be any naturally occurring amino acid
  misc_feature (23)..(23): Xaa can be any naturally occurring amino acid
  misc_feature (25)..(25): Xaa can be any naturally occurring amino acid
  misc_feature (33)..(33): Xaa can be any naturally occurring amino acid
  misc_feature (38)..(38): Xaa can be any naturally occurring amino acid
  misc_feature (43)..(43): Xaa can be any naturally occurring amino acid
  misc_feature (56)..(57): Xaa can be any naturally occurring amino acid
  misc_feature (71)..(72): Xaa can be any naturally occurring amino acid
  misc_feature (74)..(74): Xaa can be any naturally occurring amino acid
MAXSMLSSAAVVXSPAQATMVAXFXGLKSSAAXPVTRXANNDXTSITSNGGRVSCXXVWPPVGKKKFETLXXLXD

SEQ ID NO: 9282 - protein, 384 aa, Senecio vulgaris
MHNNSSNSRELIKKWPRSNKEAIDSARSNVFKESESLEGTCAKIGGYDFNNGIDHSKLLKSMVSTGFQASNLGDAMIITNQMLDWRLSHDEVPENCSEEERKNRESVKCKIFLGFTSNLISSGVRETICYLTQHRMVDVLVTTTGGIEEDFIKCLASTYKGEFSLPGADLRSKGLNRIGNLIVPNDNYIKFEDWIIPIFDQMLIEQKTQNVLWTPSKMIARLGKEINNETSYLYWAYKNNIPVFCPSITDGSVGDMLYFHSVSNPGAGLVVDIVQDVIAMDNEAVHASPQKTGIIILGGGLPKHHICNANMMRNGADFAVFINTAQEYDGSDSGARPDEAVSWGKISSTGKAVEVHCDATIAFPLLVAETFAVKKEKASKVNGF

SEQ ID NO: 9283 - protein, 376 aa, Hordeum vulgare subsp. vulgare
MDKISAPFFSGTSPAAASVAGVDEDDRLCFQAQELMFAYNISMVLRAAIQLGLLDALSAAGGKALTPNELVENVETSSNKAEAAAAVDRILRYLSCFNVVTCSSEAAGPDGTLVRRYTTGPLCRWLTKDRGDGTLSPFAVFVVDPDHLFPWHHIAEAVTAGGPSAFERTQKWPYYEYMGKNQRLGTLFDNAMAQHSVILVTKMLERFKGFDGVQRLVDVGGGTGSTLGMITSKYKHMTGINYDLPHVIAQGLPLPGVEHVAGDMYESIPTGDAVLLQWITLMLNDDEFVKILSNCHNALPKDGKVIVVDGILPENPDSSLTARDAFTLDIIMFVLFKGAKQRTEKEFARLAKQAGFTGGIKKTYIFFNFYALEFTK

SEQ ID NO: 9284 - protein, 189 aa, Brassica napus
  misc_feature (160)..(160): Xaa can be any naturally occurring amino acid
MAFAGTTQKCMACDKTVYLVDKLTADNRVYHKACFRCHHCKGTLKLSNYNSFEGVLYCRPHFDQNFKRTGSLEKSFEGTPKIGKPDRPLEGERPAGTKVSNMFGGTREKCVGCDKTVYPIEKVSVNGTLYHKSCFKCTHGGCTISPSNYIAHEGKLYCKXHHIQLIKEKGNLSQLEGGDNAAKDKVDAA

SEQ ID NO: 9285 - protein, 201 aa, Thermosynechococcus elongatus BP-1
MSNPRENIIWHQATVTRARREQLNGHKSCVLWFTGLSGAGKSTLAHAVEERLHQLGYRTFVLDGDNVRHGLCSDLGFTESDRKENIRRIGEVAKLMMEAGLIVMTAFISPFRADREAVRNRMPHGDFLEIYCQASLEVCEARDVKGLYKRARAGEIKNYTGIDSPYEPPLKPELIVNTECLTLEESVGAVLRMLQERGVVQ

SEQ ID NO: 9286 - protein, 549 aa, Zea mays
MARRAASSLVSRCLLARAPAGAPPAAPSAPRRTVPADGMHRLLPGVLQRFSTAAAVEEPITPSVHVNYTKLLINGNFVDSASGKTFPTLDPRTGEVIAHVAEGDAEDINRAVAAARKAFDEGPWPKMTAYERFRILLRFADLIEKHNDELAALETWDNGKPYEQAAQIEVPMVARLMRYYAGWADKIHGLIVPADGPHHVQILHEPIGVAGQIIPWNFPLLMFAWKVGPALACGNTLVLKTAEQTPLSALYISKLLHEAGLPEGVVNVVSGFGPTAGAALASHMDVDKIAFTGSTDTGKIILELAAKSNLKTVTLELGGKSPFIIMDDADVDHAVELAHFALFFNQGQCCCAGSRTFVHERVYDEFVEKAKARALKRVVGDPFRKGVEQGPQIDDEQFKKILRYIRYGVDGGATLVTGGDRLGDKGFYIQPTIFSDVQDGMKIAQEEIFGPVQSILKFKDLNEVIKRANASQYGLAAGVFTNSLDTANTLTRALRAGTVWVNCFDVFDAAIPFGGYKMSGMGREKGVDSLKNYLQVKAVVTPIKNAAWL

SEQ ID NO: 9287 - protein, 461 aa, Methylococcus capsulatus str. Bath
MIPARGECLFLPLGGTGEIGMNLTLYGHDGAWIAVDMGITFGGDDFPDHAVMMPDPAFIAARRERLAGIVLTHGHEDHVGALPYLWKRLRCPVYATPFTAALARTKLARAGIDDAPLVEISPGERFRIGPFAVEYIVMTHSIPEPNTLLIGTPVGAVLHTGDWKLDDRPVVGRGYDHSRLSALRREPLLAMVCDSTNAMVPGRTGFEGDLYEPLLALGAEAAGRIVVTAFASNIARLVTLARVARSLGRRFGVVGPAMEHMVAVARATGHWPDDLPELVEARHIGHLPRSEVFAACTGSQGEPRSALALLAQDLHRDLSLDAGDTVVFSSRVIPGNERAVARIHQRLRETGVHLVTDADARVHVSGHPAQEDLRQLYEWVQPPAVIPVHGTPRHLAANAELAAACHVPHACVVQNGDICRLSRAGIQKLDGIETGRLFVQPDGRLAPVPKDILREMRTKVH

SEQ ID NO: 9288 - protein, 179 aa, Glycine max
  misc_feature (59)..(59): Xaa can be any naturally occurring amino acid
MASSMISSPAVTTVNRAGAGMVAPFTGLKSMAGFPTRKTNNDITSIASNGGRVQCMQAXWHPVGKKKFETLSYLPDLDDAQLAKEVEYLLRKGWIPCLEFELEHGFVYREHNRSPGYYDGRYWTMWKLPMFGCTDASQVLKELQEAKTAYPNGFIRIIGFDNVRQVQCISFIAYKPPGF

SEQ ID NO: 9289 - protein, 390 aa, Enterococcus faecalis V583
MLEEVLAIHQKNIGVLSLEATEAVLNHHDLAKMYTPGVAELSLMIAQNHELAREWTISGKLIAVITDGSAVLGLGNMGTQAGLPIVEGKALLYKNLAGVDAIPLALEQKSVDEMVQTIENLQNSFAGIHLEDISAPKCFEIEEKLQQRLNIPVYHDDQEGTAIVVLAGLINAAKIKGKPLNELRVVINGVGASGVATAKLCIQAGITHLTLVDRQGVLREEDPTLNPYQRALLRQVIKPSVENKDLATAVVNQDVFLGLSEADVLTPALIKSMNQDPIIFALANPKPEIEPALAQANGVRLLATGSSKYPNQVNNILVFPGLFKGLLAAKGRKVDVGLQMTVARSLAAMISEPTVEKFIPNVFDGGVVDTVFNAVLDYIKQEKTTAEEGT

SEQ ID NO: 9290 - protein, 387 aa, Ceriporiopsis subvermispora
MAFTSLLALVALAAITRAAPTTICPDGTRVSNHVCCDFIPLAQALQSTLYMGDCGEDAHETIRLTFHDAIAISQSQGPSAGGGADGSMLIFPTVEPFFHANAGIDDSVNNLIPFLDKFPTITAGDLIQFAGTVALSNCPGAPQLEFLAGRPNATAPAVDGLIPEPQDNVTHILERFADAGGFTPFEVVSLLASHTVARADKVDLTIDAAPFDSTPFTFDTQIFLEVLLKGVGFPGTDNNTGEVESPLPLGNNKQGGNETGEMRLQSDFALARDDRTACFWQGFVNEQEYMMSSFKAAMSKLAILGHNRNDLIDCSEVVPTPKPPVGKPASFPATTGPQDLQLTCKSERFPSLTIDHGAQETLIPHCSNGGQDCPTVQFTGPAGEDDS

SEQ ID NO: 9291 - protein, 152 aa, Triticum aestivum
GEEPFLQTIARALTPAGVLSNLAESMWLHTHLIQDMLSICREVFKGGVHYAWASVPTYPSGVIGFLLCAKDGPPVDFLTPVNPIEKIEGATKDGREMRFYNSEIHRAAFILPTFVKRELEAYSTSTEKEKPEKPTAKPVKMKVMRDSAITAS

SEQ ID NO: 9292 - protein, 614 aa, Triticum aestivum
  misc_feature (505)..(505): Xaa can be any naturally occurring amino acid
NVVLQFTVIVRNIPRGPSHSTSERVDEFFRRNHPDHYLGQQAVYNANRYAKLVKQKERLQNWLDYYQLKFERHPEKRPTGRTGCFGFCGRQVDQIDYYRARISELDKRIASERHRVLNDPKAVMPVSFVTFDSRWGAAVCAQTQQSKNPTQWLTNWAPEPRDVYWQNLAIPFFSLSIRKFLISIAVFALVFFYMIPIAFVQSLANLEGIERVAPFLRPVIEVKVVKSFLQGFLPGLALKLFLYILPTVLMIMSKVEGYVSLSSLERRTASKYYYFMLVNVFLGSIIAGTAFEQLDSFFHDPPSQIPRTIGVAVPMKATFFMTYIMVDGWAGIANEILRVKPLVIYHLKNMFIVKTERDRERAMDPRSISLGENLPSLQLYFLLGLVYAVVTPILLPFIIVFFAFAYLVYRHQIINVYNQEYESAAAFWPQVHSRIIASLLISHVTLFGLMSTMKAAYSTPLLIFLPLLTIWFHKYCKSRFEPAFRKYPLEEAMEKDRMEHASEPXLNLKTYLANAYLHPIFQMFEQEDQKEEATIEVRIDKSEHQQQQQQQHVRSSHSQYEEETSAQTHYHHEERTSSQYQYQYQHQYQYQHEETHMRSEQSPPHFVYHPGVEH

SEQ ID NO: 9293 - protein, 182 aa, Zea mays
VLIDMSVHTAYVNAIRGAQHFIYIENQYFLGSSFNWDSHRDVGEHKNLLLPYDHLKFPKFRTLKYSTLQSCATLCGEKIGSLRLPTKMTMQMMYEIIYKALKEVGLDGTYEPQDYLNFFCLGNREAEDTTCTSSGPFSASNPQKCPKLKERSMEGTRDTEIAMAAYQPQHTWANMLSAPRGQ

SEQ ID NO: 9294 - protein, 364 aa, Brassica napus
MGSTAETQITPVQVTDDEAALFAMQLASASVLPMVLKSALDLDLLEIMAKNSSPMSPSEIASKLQTKNPEAPVMLDRILRLLTSYSILTCSNRTIPGGDSVERIYGLGPVCKYLTKNEDGVSIAALCLMNQDKVLMESWYHLKDAVLDGGIPFNKAYGMSAFEYHGKDLRFNTVFNNGMSNHSTITMKKILETYKGFEGLTSLVDVGGGIGATLKMIVSKYPDLKGINFDLPHVIEEATSHPGIDHVGGDMFVSVPKGDAIFMKWICHDWSDEHCVKFLKNCYEALPEDGKVILAECILPETPDSSLSTKQVVHVDCIMLAHNPGGKERTEKEFEALAKGSGFKGINVACNAFGVYVIELLKKM

SEQ ID NO: 9295 - protein, 194 aa, Colletotrichum trifolii
MVVATIKCVVVGDGAVGKTCLLISYTTNKFPSEYVPTVFDNYAVTVMIGDEPYTLGLFDTAGQEDYDRLRPLSYPQTDVFLVCFSVTSPASFENVREKWFPEVHHHCPGVPCLIVGTQVDLREDPSVREKLSKQKMSPVRKEDGERMAKDLGAVKYVECSALTQYKLKDVFDEAIVAALEPPAPKKKSHKCLVL

SEQ ID NO: 9296 - protein, 115 aa, Glycine max
MAAFLRSKCSSVGRTLMGSVGNNLNGGINSSAETVTRPSHCDAISQQIRTFIQMRTNLKVVDNSGAKRVMCIQSLRGKKGARLGDMIIGSVKEAQPRGKVKKGDVVYGVVVRVRY

SEQ ID NO: 9297 - protein, 203 aa, Clematis integrifolia
KRRNGLLKKAYELSVLCDAEVALIVFSSRGRLYEYSNNSVRKTIERYKKASSDTSNTGSVSEANAQFYQNEAGKLRNQIASLQNNNKNLLGESLSNLSIRELKQLEKKIEGGITKIRSKKNELLFAEIEYMQKREIDLQNDNLYLRAKIADNERTQQQMNLMPGNEYEVISSAPFDSRNFLPVNLLEPNNSYSHCDQTTLQLG

SEQ ID NO: 9298 - protein, 499 aa, Candida albicans SC5314
MFKKALPLVSKLTTPKGITYNQPLGLFINNEYVHPKQQKTFEVISPSTEEKITDVYEALEEDIDTAVAAAQAAYHNGWAQGPPEQRSKVLFKLADLIEENAELLAQIETWDNGKSLQNARGDVALTAAYFRSCGGWADKILGSQINTGNTHFNYTQRVPLVCGQIIPWNFPLLMASWKLGPVLATGSTTVLKTAESTPLSALYLSQLLVEAGMPKGVINIVSGFGATAGAAIAKHPKIEKVAFTGSTATGKIIMKLAAESNLKKVTLELGGKSPNIVFNDADLDKTIQNLIVSIFYNSGEVCCAGSRLLIQSGVYDQVVEKFKEAAESVKVGNPFDEDTFMGAQVSDVQLSKILKYVESGKSQGATVVTGGARADGKGYFVKPTIFADVKKDMDIVREEIFGPVVTLIKFDTVDEAVELANDSDYGLAAGIHSADVNKCIDVANRVKAGTVWVNTYNDFHPMVPFGGFSASGIGREMGEEVLHEYTQVRAVRMKINPPN

SEQ ID NO: 9299 - protein, 137 aa, Brassica napus
GRVGDPDAGSNQGSGIAGAVFNLTTSIIGAGIMALPATMKVLGLALGLLLIVLIAVLSEISVELLVRFSSLYKSRSYGEVVQFALGKPARVLSEVCIVVNNGGFLVVYLIIMGDVMSGSLHHVGGLDQWLGNGFWDH

SEQ ID NO: 9300 - protein, 216 aa, Ranunculus ficaria
IENTTNRQVTFCKRRNGLLKKAYELSVLCEAEVALIVFSNRGRLYEYSNNSVKKTIERYKKHSTDSSNTGSVSEANAQFYQQEANKLRNQIATLQNSNKNLLGESLSNLSVRELKAIEKKIEGGIAKIRSKKNELLFAEIEYMQKREIDLQNDNMFLRAKIAENERTQQQHMSLMPVNDYEVISSAPYDSRNFLPVNLLDSNHNYSRNDQTTLQLG

SEQ ID NO: 9301 - protein, 133 aa, Triticum aestivum
  misc_feature (34)..(34): Xaa can be any naturally occurring amino acid
  misc_feature (70)..(70): Xaa can be any naturally occurring amino acid
  misc_feature (91)..(91): Xaa can be any naturally occurring amino acid
  misc_feature (100)..(101): Xaa can be any naturally occurring amino acid
  misc_feature (103)..(104): Xaa can be any naturally occurring amino acid
MAPAVMASSATTVAPFQGLKSTAGLPVGRRSSGXLSSVSNGGRIRCMQVWPIEGIKKFETLSYLPPLSTXALLKQVDYLIRSKWVPCLEFXAKVGFVLRXXHXXSPGYNERGEYWDNVESWMRHLTPIHATER

SEQ ID NO: 9302 - protein, 203 aa, Ranunculus ficaria
KRRNGLLKKAYELSVLCEAEVALIVFSNRGRLYEYANNSVRKTIDRYKKQCSDASTALTVSEANSLFYQQESSKMKQQIDILQNSNRHLMGEALSCLSIKELKQLESRLEKGLSRIRSKKNEMLLAEIEYVQKREIDLHNDNVYLRQKISENERAQQHMNSLPGNAYEAMTSAPYDARNFLQVNLSDNKDNHYGSSSTALQLC

SEQ ID NO: 9303 - protein, 200 aa, Saxifraga careyana
KRRNGLLKKAYELSVLCDAEVALIVFSTRGRLYEYANNNIRSTIERYKKANSDSLNTGDVVETNTQFYQHESVKLRQQIQMLQNSNRNIMGESLSSLTLKELKQLENRLERGITRIRSKKHEMLLAEIEYMQKREIDLENESIYLRAKIGEAESIEQANVAAANDLHAIQAYVAHNFFQPSLLDAEPSFGYPNKKSPRLG

SEQ ID NO: 9304 - protein, 506 aa, Zea mays
MAPPQTIPRRGLFIGGAWREPCLGRRLPVVNPATEATIGDIPAGTAEDVEIAVAAARDAFSRDGGRHWSRAPGAVRANFLRAIAAKIKDRKSELALLETLDSGKPLDEASGDMDDVAACFEYYADLAEALDGKQQSPISLPMENFKSYVLKEPIGVVGLITPWNYPLLMATWKVAPALAAGCTTILKPSELASVSCLELGAICMEIGLPPGVLNIITGLGPEAGAPLSSHSHVDKVAFTGSTETGKRIMISAAQMVKPVSLELGGKSPLIVFDDIGDIDKAVEWTMFGIFANAGQVCSATSRLLLHEKIAKKFLDRLVAWAKNIKVSDPLEEGCRLGSVISEGQYEKIKKFISTARSEGATILYGGGRPQHLRRGFFLEPTIITDVSTSMQIWQEEVFGPVICVKEFRTESEAVELANDTHYGLAGAVISNDQERCERISKALHSGIIWINCSQPCFVQAPWGGNKRSGFGRELGEWGLDNYLTVKQVTKYCSDEPWGWYQPPSKL

SEQ ID NO: 9305 - protein, 212 aa, Saxifraga careyana
KRRNGLLKKAYELSVLCDAEVALIVFSTRGRLYEYSNNSVKQTIERYKKACSGPSNSGSVSEANAQSYQQEASKLHAQINNLQNTNRQMLGEALGSLSPRDLKNLENKVEKGISKIRSKKNELLFSEIEYMKKREIDLHNENQYIRAKIAETERAQQQMSLMPPGGGSTNYDQQLNMHPQQFDSRDFFQVNALQPNNHHYSRQHDQISLQLV

SEQ ID NO: 9306 - protein, 253 aa, Aspergillus flavus
MGHEDAVYLAKLAEQAERYEMVENMKVVASADVELTVEERNLLSVVYKNVIGARRASWRIVTSIEQKEESKGNESQVTLIKEYRQKIESELAKICDDILEGLDKHLIPSGQSGESKGFYHKIGDYHRYLAEFAIGDRRKGAADASLEAYKAATEVAQTDLTPTHPIRLGLALNFSVFYYEILNSPGQACHLAKLAFDDAIAELDTLSEESYKDSTLIMQLLRDNLLDTLSEESYKDSTLIMQLLRDNHPLDLV

SEQ ID NO: 9307 - protein, 493 aa, Mesorhizobium sp. BNC1
MSTSARNRFPGVSFDPKALRSNLFIGGAWKEGATGNRIPVYDPSTGTVIAEVADAEVEDVMGAIDAAHEALPGWAATPPRHRSEVLRRCFELMIENRDMLAELISLENGKTLADAQGEVAYAAEFFRWFAEETVRLNGELYKAPSGANRILVQHQPIGVSVLVTPWNFPAAMATRKIGPALAAGCTVILKPATETPLTAYALAALCAEAGVPDGVVNVYTSSRSGKTVSAMLHDPRVRKLSFTGSTEVGRILLREAADKVISCSMELGGNAPFIVFDDADLSAALDGAMVAKMRNGGEACTAANRFYVQSGIADAFAKGLAERMKALAIGKGYETGSQCGPLINKDAVERISGLVEEAQSRGARVLAGGKALNREGYYFPPTVIDNVDPASAIMSEEIFGPVAPIIRFDSEDEVLSAANGTEYGLMAYVYTQDLSKGLRVSEKIESGMVGLNRGLVSDPAAPFGGVKQSGLGREGSHHGILEFTETKYIATNW

SEQ ID NO: 9308 - protein, 296 aa, Yersinia pestis CO92
MSQKELWYETLHANFGQYFSVENVLFREKTEHQDLVIFENPELGRVMALDGVVQTTERDEFIYHEMMTHVPLLAHGQAKKVLIIGGGDGAMLREVSRHKNIEQITMVEIDAGVVEFCRQYLPNHSAGAYDDPRFKLVIDDGVNFVNQTTEKFDVIISDCTDPIGPGESLFTSVFYEGCARSLNEGGIFVAQNGVCFLQQDEAVNSHNKLSHYFSDVSFYQAAIPTYYGGIMTFAWATQNPALRQLDLATLQNRFAQAGLACRYYNPAIHVGSFALPQYLLDALTTIPKVIGVDSSE

SEQ ID NO: 9309 - protein, 436 aa, Bradyrhizobium japonicum USDA 110
MMLMLTDRRPILLANARVVDPSRDFDGPGDVLIADGIIRETRRGIGAAGVPEGTDVVNCAGKIVAPGLIDMKAFVGEPGFSHRETFASASQAAATGGITTIICQPDTEPVIDNSATVDFVMRRARDTAIVNIQPMAALTKGMRGEEMTEFGLLKAAGAIAFSDGDRSVTNAQVMRRALTYARDFDALIVHHTEDPDLVGEGVMNEGEFASRLGLMGIPNAAEAVMLERDMRLVALTGGRYHAASLSCIDSLDILKRARDAGLAVSASVSINHLALNENDIGPYRSFLKLSPPLRTEDDRRALVAAVASGLIDVIMSDHNPQDVEVKRLPFAEAAPGAVGLETMLPAGLRLMHNGELDLKTLIQAMSTRPAEILGLPGGTLRAGSPADVIVIDPDVPWVVDPAELKSPCKNTPFDEARFTGRVVRTIVGGRTVFEHV

SEQ ID NO: 9310 - protein, 173 aa, Triticum aestivum
  misc_feature (79)..(79): Xaa can be any naturally occurring amino acid
MAPTVMASSATSVVPFQGLKSTAGLPVSRRSNGASLGSVRNGGRIRCMQVWPIEGIKRWETLSYLPPIRTEALLRQVDXLIRSKWVPCLEFSKVGFIFREHNASPGYYDGRYWTMWKLPMCGCTDPTQVINEVEEVKKEYPDAYVRIIGFDKLRQVQSVSFIAFKPPGCKESG

SEQ ID NO: 9311 - protein, 410 aa, Zea mays
  misc_feature (84)..(84): Xaa can be any naturally occurring amino acid
  misc_feature (372)..(372): Xaa can be any naturally occurring amino acid
  misc_feature (396)..(396): Xaa can be any naturally occurring amino acid
  misc_feature (400)..(400): Xaa can be any naturally occurring amino acid
MSAAATKVKRRVGKYELGRTIGEGTFAKVRFAKNTETGEPVAVKILDKEKVLRHKMAEQIKREISTMKLIKHPNVVRIYEVMGXSKTKVYIVLEYVTGGELFDTIANQGRMREGEARSYFQQLINAVDYCHSRGVYHRDLKPENLLLDSYGNLNVSDFGLSALSQQIKDDGLLHTTCGTPNYVAPEVLEDQGYDGAMADLWSCGVILFVLLAGYLPFEDSNLMTLYKKISNAEYTFPPWTSFPAKRLLTRILDPNPMTENSCDFRITIPEILEDEWFKKGYKRPEFDEKYDTPLDDVDAVFNDSEEHHVTEKKEEEPVALNAFELISRSAGLNLGNLFDSEQEFKRETRFTSKCPPKEIIRKIEEAAKPLGXGVQKKNYKLRLEKDKAGEERDNLXVCYXRILQVAPSLH

SEQ ID NO: 9312 - protein, 183 aa, Escherichia coli O157:H7 EDL933
MQDSILTTVVKDIDGEVTTLEKYAGNVLLIVNVASKCGLTPQYEQLENIQKAWADRGFVVLGFPCNQFLEQEPGSDEEIKTYCTTTWGVTFPMFSKIEVNGEGRHPLYQKLISAAPTAVAPEESGFYARMVSKGRAPLYPDDILWNFEKFLVGRDGLVIQRFSPDMTPEDPIVMESIKLALAK

SEQ ID NO: 9313 - protein, 507 aa, Glycine max
  misc_feature (192)..(193): Xaa can be any naturally occurring amino acid
MDLFLSCMVLFVLTLATLGAHWIWVVSSSRAGSKLPPGPFPLPIIGNLLALGKKPHQSLAKLAETHGPIMTLKFGQVTTIVVSSADMAKEVLLTHDHSLSSNRVIPQAVQVHNHHNHSITFLPVSPLWRDLRKICIANLFSNKTLDASQDLRRSKLHQLLHDIHRSSLAGEAVDVGKAVFNTSMNLLSNTFXXSLDLVHSSSSAAAVDFKDLVLKIMEESGKPNLADFFPVLKFMDPQGIKTRTTVYAGKIIDTFRALIHQRLKLRENNHGHDTNNDMLNTLLNCQEMDQTKIEHLALTLFVAGTDTITSTVEWAMAELLQNEKAMSKAKQELEETIGRGKAVEESDIGRLPYLQAVIKETFRLHPAVPFLIPRKANADVEISGGYTIPKDAQVFVNVWAIGRNSSIWKNNANVFSPERFLMDSEDIDVKGHSFELTPFGAGRRICLGLPLAMRMLYLVLGSLINCFNWKLVEDDDVMNMEDSFGITLAKAQPVILIPEKVHGVIVS

SEQ ID NO: 9314 - protein, 501 aa, Amaranthus hypochondriacus
MAIRVPSRQLFIDGEWREPIKKNRIPIINPSTEEIIGDIPAATAEDVELAVAAARRALKRNKGEDWASASGAHRAKYLRAIAAKITEKKDYFAKLEAMDCGKPLDEAARDIDDVAGCFEYYADQAEALDAKQKAPIALPMDTFKCHVLKQPIGVVGLISPWNYPLLMATWKVAPALAAGCSAVLKPSELASVTCLELAEVCREVGLPPGVLNILTGLGPEAGGPLACHPDVDKVAFTGSTATGSKVMSSAAQLVKPVTLELGGKSPIVIFEDVDLDKAAEWTAFGCFWTNGQICSATSRLLVHESIAAEFLDRLVKWCKNIKISDPFEEGCRLGPVVSKSQYEKVLKFISTAKSEGATILCGGSRPEHLKKGYYVEPTIISDVSTSMQIWREEVFGPVLCQKTFGSEDEAIELANDTQYGLGAAVLSKDLDRCERITKALEVGAVWVNCSQPCFTQAPWGGTKRSGFGRELGEWGIENYLNIKQVTRDTSTDEPWGWYKSP

SEQ ID NO: 9315 - protein, 312 aa, Magnaporthe grisea
MADKDFTLNTGAKIPAFGLGTWQGDKGVIKEAVLTAIKSGYRLIDGAYVYGNEEEVGQGIREAISSGIVKREDLFVVSKCWATYTTRCELGLDQSLKLLGLDYVDLYLVHWPILMNPEGNDEKFPKHADGSRDIIHTHNHVDTWKLMEKLPATGKTKAVGVSNYSKAWLEQLLPHATTVPAVNQVENHPQLPQQELVDFCKEKGIHIMAYSPLGSTGGPLLTAEPVVKIAEKHSISPAAVLLGYQIARGITVIPKSVNPDRIKANAQLKDLDAEDMKLLNDYSEQLAKDGKLNRYVFPPFGTDFGFPDKVGQ

SEQ ID NO: 9316 - protein, 399 aa, Clostridium perfringens str. 13
MNLLIKNVNLIDESNNFFGDIYIEKGVIKELGTELNKECETLDGKGLVLMPAFIDTHAHFRDPGFEYKEDIESGSKAAVRGGYTTVTLMPNTKPVCSSKEILDYVVNKGKEVGLVDLYQTVSITKNLSGEEINHLREFEGNPNVKAITDDGKGVSDSKIMMEAMKIAKENNWIVMSHAESPEFSRVDMRLAENMMTWRDITLAKFVDCRLHMSHVSTKEAMKYIIEGKNDGVKVTCEITPHHLALNNKISNYRVNPPIREEEDVNFLIKAIKMNYVDCIGTDHAPHSKEDKEKGAPGMIGIEQAFSICYTKLVKENHISLNKLSQLMSGNAAKLLNINKGKLQPGFLGDLVLIDLNKKRIFKEEDIVSRSKNTPFNGMEFYGDVVVTIKNGKIVYNGEF

SEQ ID NO: 9317 - protein, 166 aa, Triticum aestivum
  misc_feature (127)..(127): Xaa can be any naturally occurring amino acid
  misc_feature (145)..(145): Xaa can be any naturally occurring amino acid
  misc_feature (156)..(156): Xaa can be any naturally occurring amino acid
  misc_feature (161)..(161): Xaa can be any naturally occurring amino acid
KTKIYFVLEHVKGGELFNKIQRGRLKEDAARKYFQQLICAVDFCHSRGVYHRDLKPENLLLDENSNLKVSDFGLSALAECHRQDGLLHTTCGTPAYVAPEVINRKGYDGAKADIWSCGVILFVLLAXGYLPFHDKNLMDMLGKIXKADFKCPSWVXTDVRXALQRI

SEQ ID NO: 9318 - protein, 202 aa, Lycopersicon esculentum
MSNEYDYLFKLLLIGDSSVGKSCLLLRFADDSYVDSYISTIGVDFKIRTVEQDGKTIKLQIWDTAGQERFRTITSSYYRGAHGIIIVYDVTEMESFNNVKQWLNEIDRYANESVCKLLVGNKCDLVENKVVDTQMGKALADELGIPFLETSAKDSINVEQAFLTMAGEIKKKMGNQPAGAKRTGSTVQIKGQPIEQKGNCCG

SEQ ID NO: 9319 - protein, 447 aa, Oryza sativa (japonica cultivar-group)
MAATKSKAAKKGAPLLGKYELGRLLGRGTFAKVYHARSLAPGADPVAVKVLDKPDLAAAGAGMATRVLREVAAMRRLRHPNVLRLHEVLATRSKVYLVMELAPGGDLLSRLASLPSRRLPEHAAQRVFLQLVSALIYCHARGVSHRDVKPQNVLLDAHGNLKVSDFGLAALPDSLRDDGRLHTACGTPAFAAPEVLRRKAYDGAKADAWSCGVILFVLLAGHLPFDDSNIADMCRKAHRREYALPRWVSQPARRLVSRLLDPNPATRLAVAELATHPWFKRSLSLDSQLGSLLGGQPERELAFQAPPPLNAFDIISMSPGLDLSGLFGESKRRREKRFVTTASPERTVERLGQAGAKLGYFMVGKKGVERLPLGGLSGLVAMSMEMSEVSPSMMLVELRLEGGDDGDGDGGAEEFGWEELRAELGDDVVMAWHGCDGGKKDKEGILL

SEQ ID NO: 9320 - protein, 130 aa, Glycine max
MEGVGARLGRSSTRYGPATVFTGPVRKWKKKWIHVSPSSASSNSNANNHASNASHLLLYKWTPLTQSQNTTNNANANGNAKDAPPEPPAEPPRRKFKYVPVALLEEPKNEAAENEGTEKVDEESKPIDVD

SEQ ID NO: 9321 - protein, 490 aa, Glycine max
MTKISPEVEIRMPMEAFPPVSADVSFISNSFPKYKLDADNQVLEEPVEDNQGPSLKDVIEQEASNLSDQHKRISVRDLASKFDKNLAAAAKLSNEAKLREVASLEGHVLLKKLRDALESLRGRFAGRNKEDVEKAISMVEALAVKLTQNEGELIQEKFEVKKLVNFLKQASEDAKKLVNQEKSFACAEIESARAVVLRIGEALEEQEKASQASKPQDVDGLVEEVQEARRIKLLHQPSKVMAMEYELRALRDQIREKSIFSIKLQKELTMSKRDEENKSRLYMLDGSEALGSYLRVQPCSAEVPQVSKCSFQWYRLSSEGSWREVISGANKSIYAPDPSDVGRILQVDIVSNGKKLTLTTNPIQTVSGLGSHVETLLRKSNTDFNVVISQMNGKDHSSHSTHSFNVGRMRIKLCRGWITKAREIYSPSMQLCGVRSDIANAAKALFWQARKGLSFVLTFESERDRNAAIMVARKYALDCNVVLAGPDDLV

SEQ ID NO: 9322 - protein, 211 aa, Zea mays
  misc_feature (36)..(36): Xaa can be any naturally occurring amino acid
  misc_feature (111)..(111): Xaa can be any naturally occurring amino acid
LTEQALSDYPGGGRNEGKGSPATTNPMPPHRCRRGXGGGDTSAFFAATLVLWAVSVGFEIGVRGRRELAPVAAGFAFFQAANAAVRGSVSRDPLFVNTAVSLLHSSLTSVXLHSIFLHVRKVRRMVGFRDFDRTVVKLEWVLNWTTFVTARVICHILITYKLISDAHKFGKGIELPLALLGMAGMNLLNIFLGLDLLKAFTRERNQQSHQD

SEQ ID NO: 9323 - protein, 368 aa, Brassica napus
MEEDRVLSSVHSTVFKESESLEGKCDKIEGYDFNQGVNYPKLLRSMLTTGFQASNLGDVIDVVNQMLEWRLSDETIAPEDCSEEEKDPAYRESVKCKIFLGFTSNLVSSGVRETIRYLVQHHMVDVIVTTTGGVEEDLIKCLAPTFKGDFSLPGAYLRSKGLNRIGNLLVPNDNYCKFEDWIIPIFDQMLKEQKEESVLWTPSKLLARLGKEINNESSYLYWAYKMNIPVFCRGLTDGSLGDMLYFHSFRTSGLVIDVVQDIRAMNGEAVHATPRKTGMIILGGGLPKHHICNANMMRNGADYAVFINTGQEFDGSDSGARPDEAVSWGKIRGSAKTVKVYCDATIAFPLLVAETFASKREQSCEHKT

SEQ ID NO: 9324 - protein, 78 aa, Zea mays
HVDYACTPEEVQQHFQACGTVNRVTILTDKFGQPKGFAYVEFLEQEGVQEALNLNESELHGRQIKVAPKRTNVPGMKQ

SEQ ID NO: 9325 - protein, 294 aa, Saccharomyces cerevisiae
TTPLVHVASVEKGRSYEDFQKVYNAIALKLREDDEYDNYIGYGPVLVRLAWYTSGTWDKHDNTGGSYGGTYRFKKEFNDPSNAGLQNGFKFLEPIHKEFPWISSGDLFSLGGVTAVQEMQGPKIPWRCGRVDTPEDTTPDNGRLPDADKDADYVRTFFQRLNMNDREVVALMGAHALGKTHLKNSGYEGPWGAANNVFTNEFYLNLLNEDWKLEKNDANNEQWDSKSGYMMLPTDYSLIQDPKYLSIVKEYANDQDKFFKDFSKAFEKLLENGITFPKDAPSPFIFKTLEEQGL

SEQ ID NO: 9326 - protein, 91 aa, Triticum aestivum
  misc_feature (58)..(59): Xaa can be any naturally occurring amino acid
  misc_feature (82)..(82): Xaa can be any naturally occurring amino acid
MSDTDEHHFKSKGDFCAYKTYPQQAGAIRKGGHIVIKARPCKVVEVTTSKTGKQWHAXXYFVAIDIFNGKKLEDLDSSYNNXNVPHGDRQD

SEQ ID NO: 9327 - protein, 320 aa, Burkholderia cepacia R1808
MPLNPKIAQVLDMIERAKRPSYHHQTPQQARAAYEKSAPILDVAPAPMHSVDACVVPTRDGRTIGARLYLPVAPSLAEPLPALVYYHGGGFTVGSVDTHDALCRMFARDAQCAVLSVDYRLAPEHKFPTAVHDAEDALRWLHREAAAFGIDAARLAVGGDSAGGTLATVCAVLARDAGIHLALQLLIYPGVTGHQATESHARLANGYLLTQDTIQWFFSQYVREPADRDDWRFAPLDGTRGAPSSFAGVAPAWIATAEYDPLSDEGAAYAQKLRAAGNTVALVCYPGMIHEFFKMGGYIPEVRAAHADATAALRAAFDGV

SEQ ID NO: 9328 - protein, 246 aa, Glycine max
MTSASELFHTRRHRLGRNALDLGLDTELHAADSLRQLRLRHYYLRRHHPERASDRIDGRYRRSFVSESVDSEENVRSSLRGSSSERLPVGVVLARARLLQRLRGEPLSTNRQYDRDSFGEDPESESSNEDPSGASLVTELTSQMARSQFLQELSTKPPGLTQEALDCLHQEVFSSNASEIGLDSRVLQDCSICLESFTDGDELIRLPCGHKFHSVCLDPWIRCCGDCPYCRRCIVVNTHSSLNEDE

SEQ ID NO: 9329 - protein, 300 aa, Pneumocystis carinii
MEQYQRLEKIGEGTYGVVYKAKDLESGTIVALKKIRLEAEDEGVPSTAIREISLLKEMHNDNVVRLLNIIHQESRLYLVFEFLDLDLKKYMNSIPKDMMLGAEMIKKFMSQLVSGVKYCHSHRILHRDLKPQNLLIDREGNLKLADFGLARAFGVPLRGYTHEVVTLWYRAPEVLLGGRQYATALDIWSIGCIFAEMATKKPLFPGDSEIDEIFRIFRILGTPDENSWPGITSYPDFKATFPKWSPKNLGELITELDSDGIDLLQKCLRYYPAERISAKKALDHPYFDDFINLNRSNVVL

SEQ ID NO: 9330 - protein, 233 aa, Allium sp. AL-2003
VQLKRMENKINRQVTFSKRRNGLLKKAHEISVLCDAEVALIVFSAKGKLYEYSTDSSMEKILERYERYCFAEKSSTMSDIDSQEDWSLEYHKLKAKVESLNNRQRHLMGEQLESLSLREIGQLEQQLENSLKTVRTRKSQELLSSISELQDKEKTLRDENKALENELMKRARAKAILEQQARWKHHNHKQQDNLHNPNINIGNYQTRNNEGGVEPATDVQVRVVRNLLPHWML

SEQ ID NO: 9331 - protein, 208 aa, Magnaporthe grisea 70-15
MATNITWHDGLTRRERNQLRGQRGFTIWFTGLSASGKSTVATALEQHLLHLGLAAYRLDGDNVRFGLNKDLGFSEKDRNENIRRIAEVAKLFADSSVVALTSFISPYRADRQTARELHAQAAQKGDEPLEFVEVYVDIPIEVAEQRDPKGLYKKARAGEIKEFTGISAPYEAPENPEITIKTHENSVEECVAQIVKWLQDKGLVKATP

SEQ ID NO: 9332 - protein, 300 aa, Pneumocystis carinii
MEQYQRLEKIGEGTYGVVYKAKDLESGTIVALKKIRLEAEDEGVPSTAIREISLLKEMHNDNVVRLLNIIHQESRLYLVFEFLDLDLKKYMNSIPKDMMLGAEMIKKFMSQLVSGVKYCHSHRILHRDLKPQNLLIDREGNLKLADFGLARAFGVPLRGYTHEVVTLWYRAPEVLLGGRQYATALDIWSIGCIFAEMATKKPLFPGDSEIDEIFRIFRILGTPDENSWPGITSYPDFKATFPKWSPKNLGELITELDSDGIDLLQKCLRYYPAERISAKKALDHPYFDDFININRSNVVL

SEQ ID NO: 9333 - protein, 418 aa, Glycine max
SARARAEFGSSFAKVYHARHLKTGKSVAMKVVGKEKVVKVGMMEQIKREISAMNMVKHPNIVQLHEVMASKSKIYIAMELVRGGELFNKIARGRLREEMARLYFQQLISAVDFCHSRGVYHRDLKPENLLLDDDGNLKVTDFGLSTFSEHLRHDGLLHTTCGTPAYVAPEVIGKRGYDGAKADIWSCGVILYVLLAGFLPFQDDNLVALYKKIYRGDFKCPPWFSSEARRLITKLLDPNPNTRITISKIMDSSWFKKPVPKNLMGKKREELDLEEKIKQHEQEVSTTMNAFHIISLSEGFDLSPLFEEKKREEKELRFATTRPASSVISRLEDLAKAVKFDVKKSETKVRLQGQEKGRKGKLAIAADLYAVTPSFLVVEVKKDNGDTLEYNQFCSKELRPALKDIVWRTSPAENPTLA

SEQ ID NO: 9334 - protein, 440 aa, Arabidopsis thaliana
MSPAIKAPLLPNQEPSSSSSENHGSFAGAVFNISTSIVGAGIMAIPAAFKVLGVIPSLSIIVIIAWLSNVSAGFLMKSSLAGESTTYAGVMKESFGKSGAVAVTVVTMVVTFGSMIIFSIIIGDVISGNEKDGIIHLGLLQEWFGSHWWNTRFFGLLFIFVFLFLPLVLCRRVERLAFSSAISFLLALLFVVISSVLAIIALVQGKTKPPRLFPELNDGGLSFFSLFTASPVIVTAFTFHFNVHPVAFELKDPLNVLSATRISVILCATIYSATGLFCYLLFGDSTMTDVLMNFDQSTSSSVGSLLNDIVRLSYAIHLMLVFPLLNFSLRANLDELLFPMKLSLVEDNKRFFALTFPLLISCFLGAIAIPDIWYFFQFLGSTSTVSIAFIFPAAIVLRNVNGFSTLREKIVASVMLVLAVATSIIAISTNIYTFTATEET

SEQ ID NO: 9335 - protein, 236 aa, Escherichia coli K12
MGYRSIDTAAAYKNEEGVGKALKNASVNREELFITTKLWNDDHKRPREALLDSLKKLQLDYIDLYLMHWPVPAIDHYVEAWKGMIELQKEGLIKSIGVCNFQIHHLQRLIDETGVTPVINQIELHPLMQQRQLHAWNATHKIQTESWSPLAQGGKGVFDQKVIRDLADKYGKTPAQIVIRWHLDSGLVVIPKSVTPSRIAENFDVWDFRLDKDELGEIAKLDQGKRLGPDPDQFGG

SEQ ID NO: 9336 - protein, 437 aa, Leptospira interrogans serovar Copenhageni str. Fiocruz L1-130
MKFYRRKVEFEKHGKNRMREKSLQYHALHPKGKIEVVPTKPTEDSYDLSLAYSPGVAYPCLEIKDSPELVYEYTNKGNLVGIITNGTAILGLGDIGALAGKPVMEGKAVLFKKFAGIDVFDIEINTKDPDEFIRAVKLLEPTFGGINLEDIKAPESFYIEEQLIEKMNIPVFHDDQHGTAIITVAGLLNSFKLTGKNPDDVKVVICGAGAAGIAIAELIQHIGIKKEQIFLVDTKGVIHHNRNDLNDSKKKYIQKTDSTTLRDVMKGSDIFIGVSVENMVDEDMVRSMSKNPVIFALANPDPEIPYRVAKAVRSDLIMGTGRSDNPNQVNNVLGFPFIFRGALDVRARHITLEMKLAAARSLAELARLEVPEVVSKAYGGEKFTFGPEYLIPKPFDKRVLFHVAPAVAEAAVASGSARIPYLGREKYLGFLEGIIKS

SEQ ID NO: 9337 - protein, 444 aa, Arabidopsis thaliana
MVRRQEEEKKAEKGMRLGKYELGRTLGEGNFGKVKFAKDTVSGHSFAVKIIDKSRIADLNFSLQIKREIRTLKMLKHPHIVRLHEVLASKTKINMVMELVTGGELFDRIVSNGKLTETDGRKMFQQLIDGISYCHSKGVFHRDLKLENVLLDAKGHIKITDFGLSALPQHFRDDGLLHNTCGSPNYVAPEVLANRGYDGAASDIWSCGVILYVILTGCLPFDDRNLAVLYQKICKGDPPIPRWLSPGARTMIKRMLDPNPVTRITVVGIKASEWFKLEYIPSIPDDDDEEEVDTDDDAFSIQELGSEEGKGSDSPTIINAFQLIGMSSFLDLSGFFEQENVSERRIRFTSNSSAKDLLEKIETAVTEMGFSVQKKHAKLRVNQEERTQKGQVGLSVTAEVFEIKPSLNVVELRKSYGDSCLYRQLYERLLKDVGTSSPEQEIVT

SEQ ID NO: 9338 - protein, 145 aa, Alvinella pompejana epibiont 7G3
MLVKRYEPFNEIRRSFDLVNQIINSVDKNVESDNALVDFIPNINTREDSNAYYIEVELAGVKKEDVDIKIDENILSISGEKRFKDNLKAEDYYKIESKYGTFARSFTLPERVDVSKIEAKSEDGIIEIKIPKLTIEKESKKITIK

SEQ ID NO: 9339 - protein, 442 aa, Triticum aestivum
MAIAVSGHWTRLRTLGCGASGAVVSLAADGASGELFAVKSVRAADAAQLSREQGILSGLSSPHVVACIGGGGARDGSYHLFLEFAPGGSLADEAARNGGRLEERAVRAHATDVLRGLAYIHGKSLVHGDVKSRNVVIGADGRAKIADFGCARALGEARPIGGTPAFMAPEVARGEEQGPAADVWALGCTVVEMATGRAPWGEMDNVLAAVHRIGYTDAVPEVPTWLSAEAKSFLAMCFARDARERCTAAELLEHPFVALQAGEAKARWVSPKSTLDAAFWESETDEEEEEVSESPCERIKSLSCSVLPDWDSDEGWIDVLGEQCEEACDSPAATKGPADVSSRAPSKVLGSPAAPAEDAAVVGTLSSDELDAEDEPFGDDIILAADPLVDRQIQVCWSSDRYVLSSSLVPCNNRIDAIEKFRFPQKKKKKKKKKKKKKKKKK

SEQ ID NO: 9340 - protein, 197 aa, Brassica napus
MSASRFAKCVTVGDGAVGKTCLLISYTSNTFPTDYVPTVFDNFSANVVVNGATVNLGLWDTAGQEDYNRLRPLSYRGADVFILAFSLISKASYENVSKKWIPELKHYAPGVPIILVGSKLDLRDDKQFFVDHPGAVPITTAQGEELRKLIDAPTYIECSSKSQENVKAVFDAAIRVVLQPPKQKKKKSKTQKACSIQ

SEQ ID NO: 9341 - protein, 291 aa, Zea mays
  misc_feature (83)..(83): Xaa can be any naturally occurring amino acid
MALSIYTPTSSSLVPPSIQEVRLTSRPPKPATFSLRRPHLAARAAAGNAPTSPVREVVTELDAVAGFSEIVPDTVVFDDFERXPSSCLTLYFFLSCCPIRFGGRVAHCAIVNNHRFAPTAATVSSSLLLGITGLPDTKFKSAIDTALADGECNALEKAEDRMSCYLTKALANVGAELAHQVPGRVSTEIDARLAYDTQGIIHRVHELLNLYNQHDVSTDRLLFKIPATWQGIEASRLLESEGIQTHLTFVYSFAQAAAAAQAGASVVQMFVGRLRDWAKHHSGDPEIDEAL

SEQ ID NO: 9342 - protein, 277 aa, Brassica napus
  misc_feature (72)..(72): Xaa can be any naturally occurring amino acid
  misc_feature (108)..(108): Xaa can be any naturally occurring amino acid
MSLFLKDDSIQIREVWSDNLQEEMDLIREVVDDFPYVAMDTEFPGIVVRPVGTFKSNADYHYETLKLNVNIXLNIIQLGLTFSNEQGNLPHPAAPTGKYCIWQFNSRXFVLDSDFFPVDSIDLPKQSGIDFAKTTPQGIESSRFPELLMSSGIVLNGNVHWVTFHSGYDFGYLLKLLTCKNLPDSQTSFFELINVYFPTVYDIKHLMKFCNSLHGGLNKLAELLEVERVGICHQPGLDSLLTSCTFRKLKENFFVGPLQKYAGVLYGLGVENGQVAL

SEQ ID NO: 9343 - protein, 326 aa, Glycine max
LEGTGEVLNCSAENNGDLFHGVLGGLGQFGIITRARIVLEPAPTMVKWIRVLYSDFTAFTRDQERLISAEKTFDYIEGFVIINRTGLLNNWRLSFNPRDPVQASHFKSDGRTLFCLEMAKYLNVEEIDAANQEVEEHLSRLSYIPSTLFSTEVTFVDFLDRVHISEVKLRSKGLWDVPHPWLNLLIPKSQILNFAQVVFGNILSETSNGPVLIYPVNKSKWDNRTSVVIPEEDIFYLVAFLTSAVPSSNGTDGLEHILSQNKRILEFCERAQLGVKQYLPHYNTQQEWRAHFGPQWETFLLRKSVYDPLAILAPGQRIFQKAITFS

SEQ ID NO: 9344 - protein, 281 aa, Corynebacterium glutamicum ATCC 13032
MDQKNKLSKSEGIPLVTLNDGKTIPQLGFGVFKVDPDEAERVVTEALEVGYRHIDTAAIYGNEEGVGRAIAKSGIPREELFITTKLWNDRHLDVEAAFEESLQKLGLDYVDLYLVHWPAPKNDNYVAAWKGLEKLGDRARSIGVCNFLPEHLEKLLAEATTVPAINQIELHPALQQRDAVEASLAAGITVESWGPLGQGRFDLGAEEPIAAAAKNHGKTPAQVVIRWHLQNGFVVFPKTVTKSRMVENIDVFDFELSDEEMAAITALERNDRGGSHPNDLN

SEQ ID NO: 9345 - protein, 394 aa, Alvinella pompejana epibiont 7G3
MNLEELDKQFVLQTYARDYTNFVRGENATLFSEDGRDFIDFASGIGVSSVGHGNRRLSDAVCEQVRNIIHISNLQVIEPQVKLAQKICELSGYDGAIFFANSGAEANEGAIKVARKYGEVNFDKKRYKVITLEHSFHGRTISTLKATGQKSFHTPSFSPYPDGFLYVKSIEDIYGSIDDETVAVLIELVQGEGGVEPFSIGEVQNLAKFLRENGILLIVDEVQTGVFRTGEMLASNIYQIEPDIITLAKGLGGGVPIGAILTKHRDILKAGEHGSTFGGNYLSTRAGLEVLSILNGLYESGELKETISYFEERLKGIRERFSNLFSQDVGVGLMRGLRAEEADIPSKVVKSSMDSGLIVLKAGRNTVRFLPPLTISKSEIDKGFERFEKAISSI

SEQ ID NO: 9346 - protein, 349 aa, Zea mays
MGDAAASTSAPTTPTSILICLEDGSDLLADADDGAGTDLVVARDERLLVVDQDEEYVALLLSKESASGGGGPVEEMEDWMKAARSGCVRWIIKTTAMFRFGGKTAYVAVNYLDRFLAQRRVNREHAWGLQLLMVACMSLATKLEEHHAPRLSELPLDACEFAFDRASVLRMELLVLGTLEWRMVAVTPFPYISCFAARFRQDERRAVLVRAVECVFAAIRAMSSVEYQPSTIAVASILVARGRETPAGNLDALKAILGSSFPQLDTGHVYSCYSAMIREDDKSPTQSTSTSTGVASSGVSVAAHAGGSGSPSPPGASVSVGANNAAGTAPPATTDNRNKRRRLRSPQRQ

SEQ ID NO: 9347 - protein, 146 aa, Triticum aestivum
  misc_feature (69)..(69): Xaa can be any naturally occurring amino acid
  misc_feature (94)..(94): Xaa can be any naturally occurring amino acid
  misc_feature (137)..(137): Xaa can be any naturally occurring amino acid
MAPTVMASSATSVAPFQGLKSTAGLPVSRRSNGASLGSVSNGGRIRCMQVWPIEGIKKFETLSYLPPLXTEALLKQVDYLIRSKWVPCLEFSKXGFIFREHNASPGYYHGRYWTMWKLPMFRCTHPTQVINEVEEVXKEYPDPYCH

SEQ ID NO: 9348 - protein, 319 aa, Fragaria x ananassa
MAKVPSVTLSSCGDDIQTMPVIGMGTSSYPRADPETAKAAILEAIRAGYRHFDTAAAYGSEKDLGEAIAEALRLQLIKSRDELFITTKLWASFAEKDLVLPSIKASLSNLQVEYIDMYIIHWPFKLGKEVRTMPVERDLVQPLDIKSVWEAMEECKKLGLARGIGVSNFTSSMLEELLSFAEIPPAVNQLEMNPAWQLKKLRDFCKAKGIHVTAYSPLGAARTKWGDDRVLGSDIIEEIAQAKGKSTAQISLRWVYEQGVSIVTKSYNKERMRQNLDIFDFCLTEEELEKMSHLPQRKGVTFASILGPHDIVLKVDEEL

SEQ ID NO: 9349 - protein, 116 aa, Glycine max
  misc_feature (27)..(27): Xaa can be any naturally occurring amino acid
  misc_feature (35)..(35): Xaa can be any naturally occurring amino acid
  misc_feature (52)..(52): Xaa can be any naturally occurring amino acid
  misc_feature (66)..(66): Xaa can be any naturally occurring amino acid
  misc_feature (90)..(90): Xaa can be any naturally occurring amino acid
  misc_feature (106)..(106): Xaa can be any naturally occurring amino acid
LNECLLYSRYETCLSTDDAGPIAEKLXLTNLFWDXDLPRTREGFYTFKGSLXASHVIRRAFAPHAXVIWMETGRPNVIDCTQLSEGDMSXLPEMMLTYNLSTFFNXDAFVMSDEQM

SEQ ID NO: 9350 - protein, 135 aa, Zea mays
AINDTLLSHFQQIRTFIQTRTNLKVVDYSGAKRVMCIQSLRGKKGARLGYMIIRSVKEAQPRGKVKKGDVVYGVVVRVAMKKGRSDDSEVQFDDNEVVLVNKKGELIGIRVFGPVPHELRKKKHLKILALAEHIV

SEQ ID NO: 9351 - protein, 503 aa, Ralstonia eutropha JMP134
MEQSKAGTLIGAFAEFFPGATEIGSYVGGRLVAGTGQEIQLFDPATGEKSLSYRDAGPEIAQQACIAARDAQKTWWGLTHAARGRILYAVAAKVREHNEPLAVLESMSQGKPIRDSRREVEMVAEMFEFYAGWADKFYGHVIPVPTTHLNYTRREPYGTILHIAPWNIPILSFGWQVAPTVAVGNAVLLKPSELTPFTSLAVASLAEQAGVPVGLINVLAGYGHTTAQAAIADDVVKKVVFVGSPATGIRIAEAAAKRVIPCILELGGKSANIVFDDANLDLAAIGAQAAVFSGAGQSCTAGSRLLIQRKVYEQVVDKVAEGARKLRLGHPLEASTEIGPINNRNQYEHIKRMIARGVEEGAQLAAGTTSFGDGGYFVPPTLFAGVSNQMDIARMEVFGPVISAIPFETEEEAIAIANDNEFGLAGAVWTNDVARAHRVAAQVDAGTFWINGYRAIHVGSPFGGYKNSGYGRTSGIEALYEYTQTKSVWVQTASASVTAIGRA

SEQ ID NO: 9352 - protein, 149 aa, Candida albicans SC5314
MSEYSGSNSEDLSLPKATVQKIINEILPKDIGIAKEAREAITECSIEFIMMLSTQSNDIAEKEAKKTIASDHVVKALEELDFKIYLDIINKILDEHKELLKGKEKRNNKFQNSGLTEEELLRQQEELFKKSRARLQNQSGSLTAKPEPN

SEQ ID NO: 9353 - protein, 91 aa, Triticum aestivum
  misc_feature (9)..(9): Xaa can be any naturally occurring amino acid
  misc_feature (37)..(38): Xaa can be any naturally occurring amino acid
  misc_feature (71)..(71): Xaa can be any naturally occurring amino acid
  misc_feature (73)..(73): Xaa can be any naturally occurring amino acid
  misc_feature (86)..(86): Xaa can be any naturally occurring amino acid
  misc_feature (90)..(90): Xaa can be any naturally occurring amino acid
MAPTVMASXATSVAPFQGLKSTAGLPVSRRSNGASLXXVSNGGRIRCMQVWPIEGIKKFETLPYLPPLSTXAXLKQVDYLIRSKWXPCLXF

SEQ ID NO: 9354 - protein, 474 aa, Pseudomonas putida KT2440
MQTQMLINGQLVAGQGPAWTVLNPALGTALAQINEATEAQVDSAVRAADQAFDSWSQTSPKERSQALLALADAIEAHGDELARLESQNCGKPLSAALNDEIPAIADVFRFFAGAARCLGGSAAGEYLPGHTSMIRRDPLGVVASIAPWNYPLMMLAWKIAPALAAGNTVVIKPSELTPLTALRLGELAQDLLPPGVLNILFGRGQTVGNPLITHPKVRMVSLTGSIPTGAHIISATADSVKRMHMELGGKAPVLVFDDADIDAAIDGIRTFGFYNAGQDCTAACRLYVQDGIYERFVERLGKAVASLKPGLQESEETELGPLISAQHRDKVAGLVQRAIAQPHIRLVTGGKPIAGDGFFFEPTVLADALQDDEIVRNEVFGPVVSVTRFTDEAQALEWANDSNYGLASSVWTRDTGRAHRLAARLQYGCTWVNTHFMLVSEMPHGGQKHSGYGKDMSMYGLEDYTCVRHVMIKH

SEQ ID NO: 9355 - protein, 164 aa, Glycine max
HMHVNDAVDYLKSACEGKYDAIIVDSSDPVGPAQELVEKPFFDTIARALRPGGVLCNMAESMWLHTHLIQDMISICRETFKGSVCYAWASVPTYPSGVIGFLLCATEGPPVDFVNPINPIEKLEGANEHKRELRFYNSEMHSAAFALPAFLKREVSVLRDLSLQ

SEQ ID NO: 9356 - protein, 378 aa, Phanerochaete chrysosporium
MAFKSLIAFVALAAAVRAAPTAVCPDGTRVSHAACCAFIPLAQDLQETIFQNECGEDAHEVIRLTFHDAIAISRLQGPKAGGGADGSMLLFPTVEPNFSANNGIDDSVNNLIPFMQKHNTISAADLVQFAGAVALSNCPGAPRLEFLAGRPNKTIAAVDGLIPEPQDSVTKILQRFEDAGGFTPFEVVSLLASHSVARADKVDQTIDAAPFDSTPFTFDTQVFLEVLLKGVGFPGSANNTGEVASPLPLGSGSDTGEMRLQSDFALAHDPRTACIWQGFVNEQAFMAASFRAAMSKLAVLGHNRNSLIDCSDVVPVPKPATGQPAMFPASTGPQDLELSCPSERFPTLTTQPGASQSLIAHCPDGSMSCPGVQFNGPA

SEQ ID NO: 9357 - protein, 351 aa, Gordonia sp. TY-5
MKALVFHGPGQKAWEDVPDPKLSEPTDVIVKMDTTTICGTDLHILKGDVPAVTPGRILGHEGVGTITEVGDAVTTLAVGDQVILSCISSCGKCSFCKQGVYSHCLGSEGTSGIGWIFGHLIDGTQAEYVRVPYAENSVHKLPSAVSPEQGTLLSDILPTGHEIGVRHGAVKPGDVVAVIGTGPVGLAAIATAGLYGPSRVIAVDIDANRVEQARRFGATDGVVSTSSGWREEILAMTDGLGVDVAIEAVGIPDTFQMCLDIVRPAGHVANVGVHGKPVELPIQDLWISNIVMSMGLVNTNTLGTLLKLVAQRRIDPEPFISHRFGLGEIIDAYDVFSRAAETKALKVIMSA

SEQ ID NO: 9358 - protein, 166 aa, Bordetella bronchiseptica RB50
MNTMYDFSAPTITGAERALADFRGQVALVVNVASRCGFTPQYSGLEELYRSYRNEGFVVLGFPCNQFGRQEPDDEAAIAQFCETQYAISFPLFAKIDVNGAHAHPLYRWLKARKPGLLGTRAIKWNFTKFLVGRDGLPLRRYAPAHTPESLRHDIARACAAPGPTP

SEQ ID NO: 9359 - protein, 389 aa, Triticum aestivum
  misc_feature (126)..(126): Xaa can be any naturally occurring amino acid
  misc_feature (140)..(140): Xaa can be any naturally occurring amino acid
  misc_feature (165)..(165): Xaa can be any naturally occurring amino acid
  misc_feature (175)..(175): Xaa can be any naturally occurring amino acid
  misc_feature (185)..(185): Xaa can be any naturally occurring amino acid
  misc_feature (211)..(211): Xaa can be any naturally occurring amino acid
  misc_feature (228)..(228): Xaa can be any naturally occurring amino acid
  misc_feature (240)..(240): Xaa can be any naturally occurring amino acid
SVLYDHDLESCSLFDKNGLAVPMETAAKVGVIFEKILKETVKLRDEQEHDMPLEQAISMVLERHPDLKLEGLDDRILQWCVCRLEAWFAADADEISLKNWDQEHVLTGGHGLMVDGYLPVIQALAXGLDIRLNQRVKNIXRQRRGVPVTLEGWHPITRADAGIIXTVPLGVLKAXNIIKFEPEAXHSWKSSPIRRTLVSGIANKVPMHFDXAFWPNVQVLGMVGPTAXTCGYFLNLHSAXGHPVLVFMAAGRFAQDVEKLSDKEAVELVMCHLRKMIPDATEPNKYLVSRWGSDPNSLGSYSCDLVGKPSDVCERFSAPVESVLYFAGEAASAEHSGAVHGAYSSGMEAAEECRRRLLMSKGVPDLVQVAGAACEEMADVVAPLQICRT

SEQ ID NO: 9360 - protein, 456 aa, Streptococcus pyogenes SSI-1
MAYQTIYPYTNEVLHTFDNMTDQDLADVLERAHLLYKKWRKEDHLEERKAQLHQVANILRRDRDKYAEIMTKDMGKLFTEAQGEVDLCADIADYYADKADEFLMSMPLETDSGQAYYLKQSTGVILAIEPWNFPYYQIMRVFAPNFIVGNPMVLKHASICPRSAQSFEELVLEAGAEAGSITNLFISYDQVSQVIADKRVVGVCLTGSERGGASIAEEAGKNLKKTTLELGGDDAFIILDDADWDQLEKVLYFSRLYNAGQVCTSSKRFIVLDKDYDRFKELLTKVFKTAKWGDPMDPETTLAPLSSDQAKEDVLAQIKLALDNGAELVYGGEAIDHPGHFVMPTIIAGLTKDNPIYYQEIFGPVGEIYKVSSEEEAIEVANDSNYGLGGTIFSSNQEHAKAVAAKIETGMSFINSGWTSLPELPFGGIKHSGYGRELSELGFTSFVNEHLIYYSE

SEQ ID NO: 9361 - protein, 507 aa, Gordonia sp. TY-5
MTVYAKPGTEGSVMSFESRYDNWIGGQWTPPVKGQYFENPSPVDGKTFCEVARSTAEDIDLALDAAHKAAPQWGKTSVAERSLVLLRIADRLEENLEKIAVAETWDNGKAVRETLAADIPLAVDHFRYFAGALRAQEGSISEVDEDTVAYHFHEPLGVVGQIIPWNFPILMAVWKLAPALAAGNAVVLKPAEQTPASILYVMSLIADLLPAGVINIVNGFGVEAGKPLASSNRIRKIAFTGETTTGRLIMQYASENLIPVTLELGGKSPNIFFNDVMSADDGFLDRALEGFSMFALNQGEVCTCPSRALIQEDIYDDFIGKAVDRVSKIKQGNPLDTDTMMGAQASNDQFEKISSYLAIGKEEGAKVLIGGEPADLGGDLSGGYYIKPTVFDGHNKMRIFQEEIFGPVLAVTTFKDYADAIHIANDTLYGLGAGVWSRDGATAYRAGREIQAGRVWTNTYHDYPAHAAFGGYKQSGIGRETHLMMLEHYQQTKNLLVGYAQSAKGFF

SEQ ID NO: 9362 - protein, 581 aa, Glycine max
  misc_feature (481)..(481): Xaa can be any naturally occurring amino acid
  misc_feature (514)..(514): Xaa can be any naturally occurring amino acid
MCGILAVLGCSDSSQAKRVRVLELSRRLKHRGPDWSGLHQYGDNYLAHQRLAIVDPASGDQPLFNEDKTVVVTVNGEIYNHEELRKQLPNHTFRTGSDCDVIAHLYEEHGENFVDMLDGIFSFALLDTRDNSFIVARDAIGVTSLYIGWGLDGSVWISSELKGLNDDCEHFESFPPGHLYSSKERAFRRWYNPPWFSEAIPSAPYDPLALRHAFEKAVVKRLMTDVPFGVLLSGGLDSSLVAAVTARYLAGTNAAKQWGTKLHSFCVGLEGAPDLKAAKEVADYIGTVHHEFHYTVQDGIDAIEDVIYHIETYDVTTIRASIPMFLMSRKIKSLGVKWVISGEGSDEIFGGYLYFHKAPNKDEFHQETCRKIKALHKYDCLRANKSTFAWGLEARVPFLDKDFIRVAMNIDPEYKMIKKEEGRIEKWVLRRAFDDEEHPYLPKHILYRQKEQFSDGVGYGWIDGLKAHAEKHVTDRMMLNXAANIFPFNTPTTKEAYYYRMIFERFFPQNSARXLSVPGGPSVACSTAKAVEWDAAWSNNLDPSGRAALGVHASAYGNQVKAVEPEKIIPKMEVSPLGVAI

SEQ ID NO: 9363 - protein, 170 aa, Zea mays
MYPYTFRAAASSSSSTALGFALGRIGGTTRSGGVAAPGLVVPAAGVARGRSVSSTPAGSAPVPGDQGVGMDQPKQQQQPKVPPRDAAGGENKRDDMHKHTRDVMTHSFGEGYSTRSDEEGFGGVYGGNDPVEHPGAEIHPSHSEYDTSQGSEVKEKEKARHLKDEKHATA

SEQ ID NO: 9364 - protein, 426 aa, Leptospira interrogans serovar Copenhageni str. Fiocruz L1-130
MSEFIEIKVGEKSYQFPLISGTDGKKGIDIRELHQKTGLISYDPGFFNTAYAVSRISRRDPNSGELNYRGYDIADLVQHSTFVETSYLLIYGKLPTEQQLKDFSLKLSKHSLIHEDMINLFDGFPGKGHPLAVLSVMVTSLSSYYPEEYEESLDKGIDHSARLLAKIRTIAAFSYKKIVGQPFVYPLDKHPYCTNFLYMLFSIPSKDYIPTEDIDRILNQLWILYADHEQNVSNTTVQVIGSTQANLFASISSAINALWGSREGGRQVAAVGLIEDILKSRKSVPEYFEKFKGDSEKLFGNGFGHKAYEAKSRRAIIASKLFHDFYKKNPIGPIAEVALKIEEYMQNDEYYINQNLYPNLEFYSAVIFNSLGIPKELFTAMQVIGKLPGWLAHWREQRVSGNYSKARPKQIYSGEMGRKYIPLSER

SEQ ID NO: 9365 - protein, 251 aa, Brassica oleracea var. italica
MGRGRVEMKRIENKINRQVTFSKRRAGLLKKAHEISILCDAEVSLIVFSHKGKLFEYSSESCMEKVLEHYERYSYAEKQLKVPDSHVNAQTNWSVEYSRLKAKIELLERNQRHYLGEDLESISIKELQNLEQQLDTSLKHIRSRKNQLMHESLNHLQRKEKEILEENSMLAKQIRERESILRTHQNQSEQQNRSHHVAPQPQPQLNPYMASSPFLNMGGMYQGEYPTAVRRNRLDLTLEPIYNCNLGYFAA

SEQ ID NO: 9366 - protein, 437 aa, Brucella melitensis 16M
MDMKGKTMSDKTASFTLDGKTFDLPVRKGTVGPDVVDIGPLYKNSHAFTYDPGFTSTASCESKITYIDGDEGVLLYRGYPIDQLAEHGDFLETCYLLLYGELPTATQKADFDYRVTRHTMLHEQMTKFFTGFRRDAHPMAVMVGCLGAMSAFYHDSTDITDPHQRMVASIRLIAKVPTLAAMAYKYHIGQPFVYPKNDLDFASNFLHMCFTVPCEEYKVNPVLARAMDRIFILHADHEQNASTSTVRLAGSSGANPFACIAAGVACLWGPAHGGANEAALNMLSEIGSVDRIPEYIARAKDKNDPFRLMGFGHRVYKNYDPRAKIMQKTCHEVLGELGIKDDPLLDVAMELERIALTDEYFIEKKLYPNIDFYSGITLKALGFPTEMFTVLFALARTVGWVAQWKEMIEDPQQKIGRPRQLYTGATERDYVPLAKRK

SEQ ID NO: 9367 - protein, 217 aa, Chelidonium majus
  misc_feature (211)..(211): Xaa can be any naturally occurring amino acid
VKKAHEISVLCDAEVGLIVFSTKGKLFEFSSESSMDNILERYERQCFVEEELKATHPESEGNWSLEHTKLKARIEILQKNQRHFMGEDLDPLSLKELQNLEHQLDIALKHVRSRKNQLLYASIAELRKKEKALHEQNILLGKKIKQKEEQIAQWSAQQNDAQNSSSFLTQAPQNSQSFLTQALPSLTLRTGYYQTARVVVCEEDGARSNMXMPPWML

SEQ ID NO: 9368 - protein, 404 aa, Brassica rapa
MGICMSVQVKAESPSNTGASPKYMSSEANDTQSMGSKCSSVSVRTSPRTEGEILQSPNLKCFSFAELKAATRNFRLDSVLGEGGFGCVFKGWIDEESLTASKPGTGMVIAVKRLNIEGWQGHQEWLAEVNYLGRLSHPNLVKLIGYCLEDEHHLLVYEFMPCGSLENHLFRRGSYFEPLSWNIRLKIALGCAKGLAFLHSAETQVIYRDFKTSNILLDSNYNAKLSDFGLAKDGPTGDNSHVSTRVIGTYGYVDPGYLLNGHLTTKSDVYSYGVVLLEMLSGRKVVDNNRPPREQKLVDWAKPLLANKKKVSRVIDNRIRDQISVKEAHKVATQVFRCLDVDKNQRPNMNEIVFHLENIQASREEGGNKTEKRMRRRRDSFAQQTGVGGIATAYPRPSASPLFV

SEQ ID NO: 9369 - protein, 111 aa, Rubrivivax gelatinosus PM1
MSVMELNELVKAIEEKFGVSAAAMAAPAAGGGGGAAAAVEEKTEFNVVLLEAGANKVSVIKAVRELTGLGLKEAKDLVDGAPKNVKEAVAKADAEAAVKKLVEAGAKAELK

SEQ ID NO: 9370 - protein, 115 aa, Hordeum vulgare subsp. vulgare
MARAAATQLVLVAMVAAMLIVATDAAISCGQVSSALSPCISYARGNGAKPPVACCSGVKRLAGAAQSTADKQAACKCIKSAAGGLNAGKAAGIPSMCGVSVPYAISASVDCSKIR

SEQ ID NO: 9371 - protein, 197 aa, Brassica napus
MSASRFVKCVTVGDGAVGKTCLLISYTSNTFPTDYVPTVFDNFSANVVVNGATVNLGLWDTAGQEDYNRLRPLSYRGADVFILAFSLISKASYENVSKKWIPELKHYAPGVPIILVGSKLDLRDDKQFFVDHPGAVAITTAQGEELRKLIDAPTYIECSSKSQENVKAVFDAAIRVVLQPPKQKKKKSKAQKACSIQ

SEQ ID NO: 9372 - protein, 251 aa, Brassica napus
  misc_feature (7)..(7): Xaa can be any naturally occurring amino acid
GTASVVXAALIGALRFVGGSLANHRFLFLGAGEAGTGIAELIALEISKKCQIPLEEARKNIWLVDSKGLIVSSRKESIQHFKKPWAHDHKPIKELVDAVKAIKPTVLIGTSGVGQTFTQEVVETMAELNEKPIILSLSNPTSQSECTAEQAYTWSKGRAIFASGSPFAPVEYEGKTFVPGQANNAYIFPGFGLGLIMSGTIRVPDDMLLPASHAFPPHPTDPPYEKGMIFPPFRNIRKISARIAAKVAAKA

SEQ ID NO: 9373 - protein, 188 aa, Eucalyptus camaldulensis
MAFAGTTQKCMACEKTVYLVDKLTADNRIYHKACFRCHHCKGTLKLGNYNSFEGVLYCRPHFDQLFKRTGSLEKSFEGTPKIAKPEKPVDGERPAATKASSMFGGTRDKCVGCKSTVYPTEKVTVNGTPYHKSCFKCTHGGCVISPSNYVAHEGKLYCRHHHTQLIKEKGNLSQLEGDHERETMAPES

SEQ ID NO: 9374 - protein, 229 aa, Corylopsis sinensis
VQLKRMENKINRQVTFSKRRAGLLKKANEISVLCDAEVGLIVFSTKGKLYDMERIFDRYERYSYAERQLVVTNHESQGSWTIEHAKLKARMEVLQRNQRHFMGENLDSVSLKELQNLEHQLDNALKHIRSRKNLLMQESISELQRKDKSLQEENNSLSKKIKEKENALAHRAQWEQQNQGLNSFPILLSQPPQSLNIGTYQTGCSEGEEGTPFQQRPNTLLPHWMVSHL

SEQ ID NO: 9375 - protein, 365 aa, Populus kitakamiensis
MGSTGETQMTPTQVSDEEAHLFAMQLASASVLPMILKTAIELDLLEIMAKAGPGAFLSTSEIASHLPTKNPDAPVMLDRILRLLASYSILTCSLKDLPDGKVERLYGLAPVCKFLTKNEDGVSVSPLCLMNQDKVLMESWYYLKDAILEGGIPFNKAYGMTAFEYHGTDPRFNKVFNKGMSDHSTITMKKILETYKGFEGLTSLVDVGGGTGAVVNTIVSKYPSIKGINFDLPHVIEDAPSYPGVEHVGGDMFVSVPNADAVFMKWICHDWSDAHCLKFLKNCYDALPENGKVILVECILPVAPDTSLATKGVVHVDVIMLAHNPGGKERTEKEFEGLANGAGFQGFEVMCCAFNTHVIEFRKKA

SEQ ID NO: 9376 - protein, 364 aa, Populus kitakamiensis
MGSTGETQMSPAQILDEEANFAMQLISSSVLPMVLKTAIELDLLEIMAKAGPGALLSPSDIASHLPTKNPDAPVMLDRILRLLASYSILICSLRDLPDGKVERLYGLASVCKFLTKNEDGVSVSPLCLMNQDKVLMESWYHLKDAILEGGIPFNKAYGMTAFEYHGTDPRFNKVFNKGMSDHSKMAMKKILESYKGFEGLASLVDVGGGTGAVVSTIVSKYPSIKGINFDLPHVIADAPAFPGVENVGGDMFVSVPKADAVFMKWICHDWSDEHCLRLLKNCYDALPENGKVILVECILPVAPDTSLATKGVMHVDAIMLAHNPGGKERTDKEFEGLARGAGFKGFEVMCCAFNTHVIEFRKQA

SEQ ID NO: 9377 - protein, 222 aa, Brassica rapa subsp. pekinensis
MAAPPARARADYDYLIKLLLIGDSGVGKSCLLLRFSDGSFTTSFITTIGIDFKIRTIELDGKRIKLQIWDTAGQERFRTITTAYYRGAMGILLVYDVTDESSFNNIRNWIRNIEQHASDNVNKILVGNKADMDESKRAVPTAKGQALADEYGIKFFETSAKTNLNVEEVFFSIGRDIKQRLSDTDSRAEPATIRISQTDQELDCAGHTEVCMLWKLKTNYIN

SEQ ID NO: 9378 - protein, 1102 aa, Schizosaccharomyces pombe
MPQSQVATASPSQNAQPNHGMGSKVLSSDPNASLPPQTAYYASPLHANSVSLPPSHLPRSTLHPLLSQQQQPAQQSPSLGPAQQNIQQPPSVSIASQPHYAEAIVPIQQVLQPQQYRQLPPNMVAATNAPQQHPQLQRMMPILSSNQPIQQLPLPNQASPYIPVPLQQQQQSQPQQQPQQQQHQQPQQPQPPQQPLQQQQQQRQLHSGIQQPVSTIVSQNGTYYSIPAVNHPMAGQPIAIAPVPAPNQAALPPIPPQALPANGTPNTLASPVTLPAANSAVQNAQPVPMTSSPAMAVVPQNKTAATSTLAAQQGANVLPPNAPESVRHLISLNEETWIQIGRLAELFDDQDKALSAYESALRQNPYSIPAMLQIATILRNREQFPLAIEYYQTILDCDPKQGEIWSALGHCYLMQDDLSRAYSAYRQALYHLKDPKDPKLWYGIGILYDRYGSHEHAEEAFMQCLRMDPNFEKVNEIYFRLGIIYKQQHKFAQSLELFRHILDNPPKPLTVLDIYFQIGHVYEQRKEYKLAKEAYERVLAETPNHAKVLQQLGWLCHQQSSSFTNQDLAIQYLTKSLEADDTDAQSWYLIGRCYVAQQKYNKAYEAYQQAVYRDGRNPTFWCSIGVLYYQINQYQDALDAYSRAIRLNPYISEVWYDLGTLYESCHNQISDALDAYQRAAELDPTNPHIKARLQLLRGPNNEQHKIVNAPPSNVPNVQTAKYINQPGVPYSNVPVAQLSGNWQPPHLPQAQLPSATGQSGVVQQPYQTQPSVTNNNVATQPVIASTVPVQTAAPSSQTAVPQTIHQSNAFTPRGKHASGSRNSISSTKSPQHKLSDQPRSRNNSISNVSHRERSNSVSSKSRETRTSASNESDPKKSTQRDSSKKLENSTVVSGSPSSSSKSDAAKSIKPQKPEPALKPVEGTADPKSTKRNHQETEKTADTDVSSTEPVKRQKTADVNDDVGEEEVKQSVSEQVDSAQLTSEPKSESLPKSPEEKSDDTSNDVTTENTNDINGDSNMDNVATVDKSTDAVDTSTATVAATTTTAEEELPQKESQERSSPSPENQDSTPLAPKSVSPKQAARTLDIDENYDDDEGEKETVSV

SEQ ID NO: 9379 - protein, 287 aa, Salmonella enterica subsp. enterica serovar Typhi Ty2
MKSIVIEKPNTLTIETRALLQPASGEVRIKVKLAGICGSDSHIYRGHNPFAKYPRVIGHEFFGVIDAVGDNVNRDRIGERVSVDPVISCGHCYPCSVGKPNVCTSLVVLGVHRDGGFSEYAVAPARNAHRIPDNIADHHAVMVEPFTIAANVTGQVNPTEQDVALIYGAGPMGLTTVQALKGVYQVKTVIVVDRIEESPAARIVLMGFSSDPCEIVQQGITGKELAIYSSRLNANKFPVVIDWLNKGLIDPDKLITHTFDYQHVTDAIELFEKDQRQCCKVLLTFAK

SEQ ID NO: 9380 - protein, 425 aa, Streptococcus pyogenes
MLTSKHHNLNKLVWRYGLTSAAAVLLAFGGGASSVKAEVSTAAMTKEERQQEIEKIKEDIKKEYPKASEEKFWESSFWGRRYFNEQEYLKSLQSFTEQRLQDIVNLIEKGATKGDKGDAGPKGERGPAGPQGPVGPKGEAGKVGAQGPKGDPGAPGKDGAKGEKGDKGDTGERGEKGDIGATGAQGPQGEKGETGAQGPAGPQGEAGKPGEQGPAGPQGEAGKPGEKAPEKSPEGEAGQPGEKAPEKSPEVTPTPETPEQPGEKAPEKSPEVTPTPETPEQPGEKAPEKSPEVTPTPETPEQPGEKAPEKSPEVTPTPEMPEQPGEKAPEKSPEVTPTPEMPEQPGEKAPEKSKEVTPAPEKPADKEANQTPERRNGNMAKTPVANNHRRLPATGEQANPFFTAAAVAVMTTAGVLAVTKRKENN

SEQ ID NO: 9381 - protein, 155 aa, Ipomoea nil
MDLRLMGFDHPLFHHIMDYAGDDKSSNSSAPSRTFMLDAKAMAATPADVKEYPNSYVFIIDMPGLKSGDIKVQVDGDNVLSISGERKREAEEKEGAKYVRMERRVGKLMRKFVLPENANKEKITAVCQDGVLTVTVENVPPPEPKKPRTIEVKIG

SEQ ID NO: 9382 - protein, 482 aa, Triticum aestivum
  misc_feature (210)..(210): Xaa can be any naturally occurring amino acid
  misc_feature (417)..(417): Xaa can be any naturally occurring amino acid
  misc_feature (438)..(438): Xaa can be any naturally occurring amino acid
MASPFSAPSLIMEEEGRFEAEVAEVGAWWNTERFRLTKRPYTARDVVLLRGTLRQSYASGEMAKKLWRTLKAHQAGGTASRTFGALDPVQVTMMAKHLDTIYVSGWQCSSTHTSTNEPGPDLADYPYDTVPNKVEHLFFAQQYHDRKQQEARMSLPRAERAHAPFVDFLKPIIADGDTGFGGATATVKLCKLFVERGAAGVHLEDQVVGXTKKCGHMAGKVLVAVSEHVNRLVAARLQFDIMGVETVLVARTDAVAATLIQTNIDARDHQFILGATNPRLKNRSLTAMLSDAMSAGKNGRELQAIEDEWTATAQLKTFSECVKDAIARLNSTDLDKQRKLQEWSKATSYDKCVSHEQARDIAASLGVGSVFWDWDLPRTREGFYRFQGSVASAVVRGRAFAPHADVLWMETSSPNIXECTAFAEGVRAAFPEAVLDPXLSPSFNWDASGMTDADMAGFIPHVAKLGVSLEFINGPGFEPAWS

SEQ ID NO: 9383 - protein, 431 aa, Picrophilus torridus DSM 9790
MNLFIFRRDLRLYDNTALLKSLNNETATIFIMDPAQVKNNEYRSEKALNFMISSLYDLMTDIEGNHGKLAVFHGDPVDVLKRLVNRENINEIYINRDYTPFSIKRDERIKEFSIKNNIKFNALDDYFLSDPELRTGSGSFFKNFTAFYNRAMEINVKKPVYEIKKSNLIPIDGDDMELKYNNYGRKTAIEKMHNFIKNDYSLRDFPELNMTSFLSADIKFGNISIREAYHYIKDPEFRRQLYWRDFYLYIAYHFPYVFGSNFNRKYNIKWENKEKYIDAWKNGLTGYPIVDAAMRSLNETGYINNRLRMIVSSFLVKDLHVDWRIGEKYFAQKLIDYDPASNNGNWQWVASTGVNSRGMYRIINPWIQQKKFDPECKFIKRYVNELSDLEPEIIHNLYKIRLNNYPAPLVDHKTAVMEFRKLINQTPTYLS

SEQ ID NO: 9384 - protein, 384 aa, Ralstonia eutropha JMP134
MSEAQAIATPKPKKSVALSGVTAGNTALCTVGRTGNDLHYRGYDILDVADACEFEEIAHLLVHGKLPNKAELAAYKTKLKSLRGLPANVKAALECVPASAHPMDVMRTGVSVLGTVLPEKDDHNTPGARDIADQLMASLGSMLLYWYHYSHNGRRIEVETDDDTIGAHFLHLLHGKKPSALWERAMHTSLILYAEHEFNASTFTGRVIAGTGSDMHSAICGAIGALRGPKHGGANEVAFEIQKRYDTPDEAQADITRRVENKEVVIGFGHPVYTVADPRNQVIKETARNLSKDAGSMKMFDIAERLETVMWDIKKMFPNLDWFSAVSYHMMGVPTAMFTPLFVIARTSGWAAHIIEQRIDNKIIRPSANYTGPENLTFVPIEKR

SEQ ID NO: 9385 - protein, 365 aa, Rosa chinensis
MGSTGETQMTPTQVSDEEANLFAMQLASASVLPMVLKAAIELDLLEIMAKAGPGAFLSPNDLASQLPTKNPEAPVMLDRMLRLLASYSILTYSLRTLPDGKVERLYGLGPVCKFLTKNEDGVSIAALCLMNQDKVLVESWYHLKDAVLDGGIPFNKAYGMTAFDYHGTDPRFNKVFNKGMADHSTITMKKILETYKGFEGLTSIVDVGGGTGAVVNMIVSKYPSIKGINFDLPHVIEDAPQYPGVQHVGGDMFVSVPKGDAIFMKWICHDWSDEHCLKFLKNCYAALPDNGKVILGECILPVAPDTSLATKGVVHIDVVMLAHNPGGKERTEQEFEALAKGSGFQGIRVACNAFNTYVIEFLKKI

SEQ ID NO: 9386 - protein, 236 aa, Heuchera americana
VQLRRMENKINRQVTFSKRRGGLVKKAHEISVLCDVEVALIVFSNKGKLFEYSTDSCMEKILERYERYSYAERRLVATGSESQENWSLEYTKLKAKIELLQRSQRQFMGEDLDLLSLRELQNLEQQLDTALKHIRSRKNQLMNQSISDLQKKEKAIQEQNNLLAKKIKEKEKAMSQQAEWEQQNNGASTSNFLNPQPLPCLNISSTYQGGAQPEAMRRNELDLTLEPIYSCHLGCF

SEQ ID NO: 9387 - protein, 366 aa, Bacillus cereus ATCC 14579
MPKHRKQSKIKIYRITSYKKDKRSELDSDKFELEQQDKHDIQDKQDKQDEQNKQDKQVQSENVTIVPTDSHSLDVWDEISLKEIQAGEHTSLFEEKSNYQNINLVQVNDVRLYLDKQLQFSSVDEQIYHEALVHPIMAKVIDPKRVLILGGGDGLALREVLKYETVLHVDLVDLDEAMINMARNVPEIVSLNKNAFFDNRVNVHVCDAKEFLNSPSSLYDVIIIDFPDPATELLSTLYTSELFARIATFLTEDGAFVCQSNSPADAPLVYWSIGNTIEHAGLTVKSYHTIVPSFGTDWGFHLATNSAHVLDQIEQLYVVPTPRTLPALLFPLFQFKEEHLEQRNLALLNSESNLILHQCYKQEMKF

SEQ ID NO: 9388 - protein, 348 aa, Rosa hybrid cultivar
NQKWSNGEHSNELLHAQAHIWNHIFSFINSMSLKSAIQLGIPDIINKYGYPMTLSELTSALPIHPTKSHSVYRLMRILVHSGFFAKKKLSKTDEEGYTLTDASQLLLKDHPLSLTPYLTAMLDPVLTNPWNYLSTWFQNDDPTPFDTAHGMTFWDYGNHQPSIAHLFNDAMASDARLVTSVIIDDCKGVFEGLESLVDVGGGTGTMAKAIADAFPHIECTVLDLPHVVADLQGSKNLKYTGGDMFEAVPPADTVLLKWILHDWNDQECIKILKRSRVAITSKDKKGKVIIIDMMMENQKGDEESIETQLFFDMLMMALVGGKERNEKEWAKLFTDAGFSDYKITPILG

SEQ ID NO: 9389 - protein, 354 aa, Zinnia elegans
MGSNQDDQAFLFAMQLASASVLPMVLKTAIELDLLETIAKAGPHGSVSSSELVAQLPKVNNPEAPVMIDRICSLLASYSVLTCTLKETADGCAERFYGLAPVCKFLIKNDAGVSLAPLLLMNQDKVLMESWYYLKDPVLDGGIPFNKAYGMSAFEYHGKDQRFNKVFNSGMFNHSTMTMKKIVELYNGFSGLKTLVDVGGGTGASLNMITSKHKSLKGINFDLPHVIADATTYQGIEHVGGDMFESVPKGDAIFMKWILHDWSDAHCLQVLKNCYKSLPENGKVIVAECILPEAPDTTPATQNVIHIDVIMLAHNPGGKERTEKEFEALAKGAGFKGFNKAACALNTWVMEFCK

SEQ ID NO: 9390 - protein, 477 aa, Azotobacter vinelandii
MSSSVPVHRNYIDGAFVESAAHLEVFNPANGALLSRVPAASAEEVERALAAARAAQKDWARKPAIERAGHLRRIAAKIRADAGRIARTITLEQGKIASLAEVEVNFTADYLDYMAEWARRLEGEIIASDRPGENIFLFRKPLGVVAGILPWNFPFFLIARKMAPALLTGNTIVVKPSEETPNNCFEFARLVAETDLPRGVFNVVCGAGQVGGALSSHPGVDLISFTGSVETGARIMAAAAPNLTKLNLELGGKAPAIVLADADLELAVKAIRDSRIINSGQVCNCAERVYVQRQVAEPFIERIAAAMAATRYGDPLAEPEVEMGPLINRLGLEKIDAKVRTALAQGATLVTGGAIAERPGHHYQPTVLTGCRADTRIMREEIFGPVLPIQIVDDLDEAIALANDCEYGLTSSVFTRDLNKAMHALRELDFGETYINREHFEAMQGFHAGVRKSGIGGADGKHGLYEYTHTHVVYLQS

SEQ ID NO: 9391 - protein, 361 aa, Glycine max
  misc_feature (68)..(68): Xaa can be any naturally occurring amino acid
  misc_feature (199)..(199): Xaa can be any naturally occurring amino acid
WRSVKPLALIRPSAAADVARVVKHAAASSSRTVAARGNGHSINGQAMAEQGLVLDMRAIQDPFEILSXDGSLYVDVSGGALWEDVLKRCVSEFRLAPRSWTDYLGLTVGGTLSNAGVSGQAFRYGPQTANVTELEVVSGKGETLVCSESQNSELFFATLGGLGQFGIITRARVPVQQAPDMVRWIRVVYTEFGDFTRDXEWLVTLREGDGFDYVEGFVFVNSDDPCNGWTTVPVGPNQYFDPVRIPSTAGPVLYCLELALHYRNQDHPSAVDMEVDRLLGRLRFVEGLKFSVDVTYMEFLLRVKRVEEDAKANGIWDAPHPWLNMFVSKSNIAEFDREVFKKILKHGVGGPILVYPLLRSK

SEQ ID NO: 9392 - protein, 348 aa, Rosa hybrid cultivar
NQKWSNGEHSNELLHAQAHIWNHIFSFINSMSLKSAIQLGIPDIINKHGYPMTLSELSSALPIHPTKSHSVYRLMRILVHSGFFAKKKLSKIDEEGYTLTDASQLLLKDHPLSLTPFLTAMLDPVLTKPWNYLSTWFQNDDPTPFDTTHGMTFWDYGNHQPNIAHLFNDAMASDARLVTSVIIDDCKGVFEGLESLVDVGGGTGTVAKAIADAFPHIECTVLDLPHVVGDLQGSKNLKYTGGDMFEAVPPADTVLLKWILHDWNDEECIKILKRSRVAITSKDKKGKVIIIDMMMENQKGDEESIETQLFLDMLMMALVGGKERNEKEWAKLFTDAGFSDYKITPILG

SEQ ID NO: 9393 - protein, 176 aa, Arabidopsis thaliana
MAESQTGGGGGGSHESGGDQSPRSLNVREQDRFLPIANISRIMKRGLPLNGKIAKDAKETMQECVSEFISFVTSEASDKCQREKRKTINGDDLLWAMATLGFEDYIDPLKVYLMRYREMEGDTKGSGKGGESSAKRDGQPSQVSQFSQVPQQGSFSQGPYGNSQGSNMMVQMPGTE

SEQ ID NO: 9394 - protein, 178 aa, Glycine tomentella
MASSMISSPAVTTVNRAGAGTVAPFTGLKSMAGFPTRKTNNDIASIASNGGRVQCMQVWPTTGKKKFETLSYLPDLDDAQLAKEVEYLLRKGWIPCLEFELEHGFVYRENHRSPGYYDGRYWTMWKLPVFGCTDASQVLKELQEAKTAYPNGFIRIIGFDNVRQVQCISFIAYKPPSF

SEQ ID NO: 9395 - protein, 178 aa, Glycine tabacina
MASSMISSPAVTTVNRAGAGTVAPFTGLKSMAGFPTRKTNNDIASIASNGGRVQCMQVWPTTGKKKFETLSYLPDLDDAQLAKEVEYLLRKGWIPCLEFELEHGFVYREHHRSPGYYDGRYWTMWKLPMFGCTDASQVLKELQEAKTAYPNAFIRIIGFDNVRQVQCISFIAYKPPSF

SEQ ID NO: 9396 - protein, 593 aa, Zea mays
GLPTPLPSASASASASASASSGGDSSLGSSTSDDQLDLGVYRLSETSSTLLGRTVAIESRKQSQVPAEGTIFTNNQAVEHTRLSETSVSPRKEFRPQNLDLANDRTTYCRGRRSTEIVFSTQVPTSPPSSRGHHYQNSPVPSRTFGQCPASPTSWQHDSRSSSSPQPLPLPPGSPCLPSSSLQWKKGKLLGSGTFGQVYMGFNSEGGQMCAIKEVKVISDDSNSKESLRQLNQEIVLLSQLSHPNIVQYYGSDLCNETLSVYLEYVSGGSIHKLLQEYGPFGEAVLRNYTAQILSGLAYLHGRNTVHRDIKGANILVDPNGDIKLADFGMAKHISAYTSIKSFKGSPYWMAPEVIMNSNGYSLSVDIWSLGCTILEMATAKPPWSQYEGVAAIFKIGNSKDIPDIPNNLSSEAKGFLKLCLQRDPAARPTAAQLMDHPFVKDQATVRSSRSSITRDMFPNSTDGKNSRVKIETSSYRSLSPLRDPDILGRNLPGPTSPIPSTSSRRIAALNTSNVRMNMSLPVSPCSSPLRQYRQSNRSCLRSPPHPAYSAGAANYNPINNALYPTRPSSGLTDPWLEISQVKTQTFDSPRRL

SEQ ID NO: 9397 - protein, 209 aa, Triticum aestivum
  misc_feature (115)..(115): Xaa can be any naturally occurring amino acid
  misc_feature (129)..(129): Xaa can be any naturally occurring amino acid
  misc_feature (138)..(138): Xaa can be any naturally occurring amino acid
MAAVPPPPPKLPTTRLLLSSEPGRSPPQPPTPPPSTRTGNLAMAAASSATSVHDFTVKDASGKDVDLSVYKGKVLLIVNVASQCGLTNSNYTELSQLYPKYKDQGFEILAFPCNXFGGQEPGTNDEIVXFACTRFKAXPIFDKVDVNGSNVSPLYKFLKSSKGGLFGDSIKWNFSKFLVDKEGHVVDRYAPTTSPLSMEKDIKKLLGSS

SEQ ID NO: 9398 - protein, 495 aa, Chromobacterium violaceum ATCC 12472
MARSHAEWKQLAAELKIEGRAFINGEYRDAAEGKRFDCVNPANGAKLAEIAHCGEAEVEAAVKAARRAFESGVWSELAPLKRAAVLKRFAALIREHADELSLLETLDVGKPIGDTTAVDVPASAYCVEWFAEAIDKVGGEVVPVDPKLVGLVTREPIGVVAAVVPWNFPILMASWKFGPALAAGNAVIVKPSEKSPLTAIRIAALAKQAGIPDGIFQVLPGAGDVGRLLALHMDVDCVAFTGSTNVGKLIAGYAAQSNLKRAWLELGGKSPNIILPDCPDLARAARAAASGIFYNMGEVCTAGSRVLVHKDIKERFLEEFKKAAAGFFPGDPLDPATSMGAIVDDIQYRKVLNYIDKGLSEGANLLLGGKAVHTDKGLFIEPTAFDCPSDDLTICREEIFGPVLSVITFSELDDAIRIANDTSYGLAAAVWTSNVSTAHQVSRRLRAGTVWVNCYDEGGDMNFPFGGYKQSGNGRDKSLHALEKYTELKSTLIKL

SEQ ID NO: 9399 - protein, 401 aa, Chlorobium tepidum TLS
MKKIGILTSGGDCGGLNAVIKGAALMALNKGLELYVIPNGYAGLYNLLNQDRLVRLDEARLDQFQASFAGSEAGHSRVKIKAISNPDKYNRIKVGMKKFDLDALIISGGDDSGSVMIDLNHNGIQCIHCPKTMDLDLQTYSVGGDSTINRIAQFVEDLKTTGRTHNRVLVTEVFGRYAGHTAFRSGVAAEADCILIPEIPVDWDVVYEHIVERFTRRIRQSDVHSGTYTIVVAEGMKNADGTDIVDESAGIDAFGHKKLAGAGKYVCQEIKKRFKTDPRMPQFMKDTGMFVEGIYEIPEVREVHPGHLVRAGHSSAYDINFGFEAGAAAVLLLLEGKTGVTISKVKGRKIEYIEASKAIEQRYVDLDQVAMYESIGTCFGRTPAAYEPILREVDGVYERIY

SEQ ID NO: 9400 - protein, 502 aa, Leymus chinensis
SAIPRRGLFIGGGWREPTLGRRIPVINPATEDTIGDIPAATVEDVELAVAAARSAFLLDGGSRWSRASGATRAKYLNAIAAKIKEKISYLALLETVDSGKPKDEAVADMDDVAACFEYYAGLAEALDGKQHAPISLPMEEFKTYVLKEPIGVVGLITPWNYPLLMATWKVAPALAAGCTAVLKPSELASLTCLELGAICEEIGLPSGVLNIITGLGADAGAPIASHPHVDKIAFTGSTATSKTIMTAAAQMVKPVSLELGGKSPLVIFDDVADIDKAVEWAMFGCFFNGGQVCSATSRLLLREKIAERFLDRLVEWAKNIKISDPLEEGCRLGSVVSKGQYEKIKKFISTARSEGATILHGGDRPKHLGKGFFIEPTIITDVSTSMQIWREEVFGPVICVKVFKTESEAIELANDTHYGLAGGVISDDLERCERIAKVIHSGIVWINCSQPTLVQAPWGGNKQSGFGRELGEWGLENYLSVKQVTRYCKDELYGWYQRPSKL

SEQ ID NO: 9401 - protein, 455 aa, Gibberella zeae PH-1
MDDLHLAPEPHLMHRSLLTRPEAVSSASGVYLNLSSGRKILDGCAGAAVAIIGHGSTEVQDAVVAQASQVSYVHTLTYTTSSAEELADHLLENEPFGLTRAYLVCSGSEAMDSAMKLARQYHVENGQPERTRFVSRRQAYHGNTVGAMSVGSHLARRAPYEGAILLDNVSHVSAAYEYRTKKDGETEEEYSKRLVDELEAEFLSVGPEKIMAFIAETVGGATAGCITPPAGYFSGVSKVCKKYGILLILDEIMCGVGRCGTFFAFEQDGDVQPDMVTIGKGLGGGYMPIAATLVHKGIIETLKKGTASFNHGHTYQAHPVSCAAALAIQKIIRRDNLVSRCATLGERLHKSLVETFKDAEFVGNIRGRGLFWGIEFVQDKKTKMPFDSKIRFGVKVQERAFELGLAVYPGMGTADGLVGDHVIVSPPLTITEEEMDVLVGLLKRAYDDVASKYGV

SEQ ID NO: 9402 - protein, 502 aa, Leymus chinensis
MASPAIPQRQLFIDGEWRAPALGRRLPVINPTTEASIGEIPSGTSEDVDAAVAAARAALKRNRGRDWSRAPGAVRAKYLRAIAAKMIERKADLARLEALDCGKPLDEAAWDMDDVAGCFEFFAGHAEALDKRQNAAVSLPENFKCHLKKEPIGVVSLITPWNYPLLMATWKVAPALAAGCTAVLKPSELASVTCLELADVCKEVGLPPGVLNVVTGLGPEAGAPLSSHPDVDKVAFTGSYATGQKIMVAAAPTVKAVTLELGGKSPIVVFDDVDIDKAVEWTLFGCFWTNGQICSATSRLLIHKNIAKEFVDRMVAWSKNIKVSDPLEEGCRLGPVVSEGQYEKIKKFISNAKSEGATILTGGVRPKHMEKGFFIEPTIITDINTSMEIWREEVFGPVLCVKEFSTEEEAIELANDTHYGLAGAVISGDRERCQRLAEEIDAGCIWVNCSQPCFCQAPWGGNKRSGFGRELGEGGIDNYLSIKQVTEYTSDAPWGWYKAPAN

SEQ ID NO: 9403 - protein, 388 aa, Streptococcus pyogenes SSI-1
MKNQLGQLALEQAKTFGGKLEVQPKVDITNKHDLSIAYTPGVAGVSSAIAKDKTLAYDLTTKKNTVAVISDGTAVLGLGDIGPEAAMPVMEGKAALFKAFAGVDAIPIVLDTKDTEEIISIVKALAPTFGGINLEDISAPRCFEIEQRLIKECHIPVFHDDQHGTAIVVLAAIFNSLKLLQKSLDEVSIVVNGGGSAGLSITRKLLAAGATKVTVVDKFGIINEQEADQLAPHHLDIAKVTNREFKSGTLEDALEGADIFIGVSAPGVLKAEWISKMAARPVIFAMANPIPEIYPDEALEAGAYIVGTGRSDFPNQINNVLAFPGIFRGALDARAKTITVEMQIAAAKGIASLVPGDALSTTNIIPDAFKEGVAEIVAKSVRSVVLKS

SEQ ID NO: 9404 - protein, 391 aa, Streptococcus thermophilus
MAERILMTNGKLKVTDNPIIPFIEGDGVGRDIWKNAQAIFDKAVEAAYEGQRRIEWQEFLAGKKAFDKTGEWLPQETLEAIRESLVAIKGPLETPVGGGIRSLNVALRQELDLYACVRPVRYFEGVASPLKEPEKTDITIFRENTEDIYAGIEWEAGTVDVERVIAFFQTEMNVDKIRFPKSSSIGIKPISIEGSKRLIRSAIDYALKNNLKKVTLVHKGNIQKFTEGGFRKWGYEVAEEEYKEEMLAGRLEVNDIIADNFLQQILLNPEKFDVVALTNLNGDYASDALAAQVGGIGISPGANINYQTGHAIFEATHGTAPDIADQDRANPCSILLSGCMLLEYIGWSEAAELIISAIEKNFKSGIFTVDLAFGKRAYSTSGFSNQILSII

SEQ ID NO: 9405 - protein, 200 aa, Glycine max
MSGRVSGKVKWFNDQKGFGFISPDDGSDDLFVHQSQIKSDGFRSLAEGESVEFAIESESDGRAKAVDVTGPDGASVQGTRRGGDGGRSYGGGRGGGGGGYGGGGGYGGGGGYGGGGGYGGGGRGGGGGACYNCGESGHLARDCSGGGGGDRYGGGGGGRYGGGGGGRYGGGGGGGGGGGGSCYSCGESGHFARDCPSSAR

SEQ ID NO: 9406 - protein, 349 aa, Streptococcus pyogenes SSI-1
MKAATYLSTGNLQLIDKPKPVIIKPTDAIVQLVKTTICGTDLHILGGDVPACKEGTILGHEGIGIVKEVGDAVTNFKIGDKVIISCVTSCHTCYYCKRGLSSHCEDGGWILGHLINGTQAEYVHIPHADGSLYHAPDTIDDEALVMLSDILPTSYEIGVLPSHVKPGDNVCIVGAGPVGLAALLTVQFFSPANIIMVDLSQNRLEAAKTFGATHTICSGSSEEVKTIIDDITNGRGVDISMECVGYPATFDICQKIISVGGHIANVGVHGKPVDFNLDELWIKNITLNTGLVNANTTEMLLNVLKTGKIDATRLITHHFKLSEVEKAYETFKHAGANNALKVIIDNDIS

SEQ ID NO: 9407 - protein, 310 aa, Malus x domestica
MSTVTLSSGYEMPVIGLGLWRLEKDELKEVILNAIKIGYRHFDCAAHYKSEADVGEALAEAFKTGLVKREELFITTKIWNSDHGHVVEACKNSLEKLQIDYLDLYLVHYPMPTKHNAIGKTASLLGEDKVLDIDVTISLQQTWEGMEKTVSLGLVRSIGLSNYELFLTRDCLAYSKIKPAVSQFETHPYFQRDSLVKFCMKHGVLPTAHTPLGGAAANKDMFGSVSPLDDPVLNDVAKKYGKSVAQICLRWGIQRKTAVIPKSSKIQRLKENLEVLEFQLSDEDMQLIYSIDRKYRTSLPSKTWGLDVYA

SEQ ID NO: 9408 - protein, 206 aa, Triticum aestivum
MGERVKGTVKWFNVTKGFGFISPDDGGEDLFVHQSSIKSDGYRSLNENDAVEFEIITGDDGRTKANDVTAPGGGALSGGSRPVEGGGDRGGRGGYGGGGGGYGGGGGGYGGGGGGYGGGGGGYRGGGYGGGGGGGRGCYKCGEEGHISRDCPPGGGGGYRGGGYGRGGRGGGGPECYQCGEEGHISRDWPQGGGGRRWLLKPWAAL

SEQ ID NO: 9409 - protein, 219 aa, Oryza sativa (japonica cultivar-group)
MPDSDNDSGGPSNYAGGELSSPREQDRFLPIANVSRIMKKALPANAKISKDAKETVQECVSEFISFITGEASDKCQREKRKTINGDDLLWAMTTLGFEDYVDPLKHYLHKFREIEGERAAASTTGAGTSAASTTPPQQQHTANAAGGYAGYAAPGAGPGGMMMMMGQPMYGSPPPPPQQQQQQHHHMAMGGRGGFGHHPGGGGGGSSSSSGHGRQNRGA

SEQ ID NO: 9410 - protein, 283 aa, Methanosarcina barkeri str. fusaro
MSNRLSKRNLNRGELMVSGKVSRKIAAKEELLLILPKIDRVLESEPAVLRIDAEPIMIIGDIHGDLQALEFIIEKRQEINCKNILFLGDYVDRGPQGVEVLTRVFRLKLEEPEHIFLLRGNHETVDMNLYYGFFEEIGFDQGFLLRTSRTYDKMPIAAVLSEHTFCVHGGINGTGSIDDIRKEEAFAFPYLWNDPSKHPGLTASTRGSTVKEFGPDIVDGFLQTNNLKRIIRGHTALENGYRWWFDGKLLSLFSCPDYVGLGNAAAFALFEKEEIKLFVFGKQ

SEQ ID NO: 9411 - protein, 439 aa, Nostoc sp. PCC 7120
MSSPQSLLIRGARIILPNGEFLVGDVLTRDRHIVEVGTEIVNTTPATEIDAKGLTLLPGVIDPQVHFREPGLEHKEDLFTASCACAKGGVTSFLEMPNTRPLTTTQQALDDKLQRAASKCLVNYGFFIGATGDNTPELLAAHPTPGIKIFMGSMHGQLLVDQEAALESIFAQGQRLIAVHAEDQARINQRRQEFAGIQDPAIHSQIQDNQAALLATQLALKLSKKYQRRLHILHMSTADEAELLRQDKPSWVTAEVTPQHLVMNTGDYQRIGTLAQMNPPLRSPHDNEVLWQALRDGVIDFIATDHAPHTLEEKAQPYPNSPSGMPGVETSLAVMLTAAMEGKCTIAQVANWMSKAVAVAYGIPNKGAIAPGYDADLVLVDLNTYRPVLREETLTKCHWSPFEGWNLTGWADTTIVGGQIVYHKGKLNTEVRGQALSFV

SEQ ID NO: 9412 - protein, 345 aa, Micromonospora echinospora
MQRQRPPSRAGGDMDRLQSALALYEEAMGYTYAAALRAAAAVGVADHLVDGPRTPAELAAATGTDADALRRVLRLLAVRDVVRESDGRFALTDKGAALRSDSPVPARAGILMFTDTMFWTMSHRVASALGPERPAFADIFGSSLDAYFDGDAEVEALYYEGMETVSAAEHLILARAGDFPATGTVADVGGGRGGFLLTVLREHPGLQGVLLDRAEVVARHRLDAPDVAGRWKVVEGDFLREVPHADVHVLKRILHNWGDEDSVRILTNCRRVMPAHGRVLVIDAVVPEGNDAHQSKEMDFMMLAARTGQERTAAELEPLFTAAGLRLDRVVGTSSVMSIAVGVPA

SEQ ID NO: 9413 - protein, 316 aa, Rhodococcus sp. YK2
MADSRTVRVYQKTWQAEGVVGVTLIDPNGAELPAWEPGAHISLHLRDGLVREYSLCSDPDDRRAWSVAVLRDPKSRGGSTYVHDELPVGALIEVSGPRNAFSLESDASRYVLVAGGIGITPILAMTRDLDKRGRNWSLIYTGRSRSTMAFLNELEAHPRDRVTVHADDEAGTVADIAALLADVDSETLVYCCGPEPLLEACRSALVDPSRLRLERFKAPTVDVEQGPQESFDVVVVSTGQRITVDANTSVLDALQSGGVDVESSCTEGICGTCEIGVVKGDIDHRDFVLTPAEQAGGTTMIACVSRCRSAELVLDL

SEQ ID NO: 9414 - protein, 403 aa, Psychrobacter sp. 273-4
MSHMINTDATILNHLPQSFQNTLPSAVADKIANLEAGSEMWLLPPLVDLCARLREPGQQQHGTLESEGRAARGNGFLHVVIPPDTNPILENGSLLKGLRERALDDGGIYLHVLGALTAGLEGERPSNIAGLKKGGCIAVSNARRPFRNDLVLLRTLEYAATFGMKVFFYPDEPSLSGDGVAHEGYIASYHGLQGIPWIAETVALSTQLLMVEETAIAAHFSQLSCKSSIELMRWAKDKGLPVTCDVAMHQLYLTDDNLEGFNAQAYVLPPLRSNTDQQAIRRGLKDGTIDAICSHHEPLNSTAKKAPFAESTPGISNFDTFMALACQLVKDEVLTLAQLVDKICLNPAKIAGISEQYENIGGAVLVDPNLEWQVTSESMLSNGKNTPFFNQKLQGRVVETFFG

SEQ ID NO: 9415 - protein, 373 aa, Rickettsia sp.
RVSAEADCFTYDPGFMSTASCQSTITYIDGDQGILRHRGYDIKDLAEKSDFLDVAYLLIYGELPSGEQYNNFTKQVAHHSLVNERLHYLFQTFCSSSHPMAIMLAAVGSLSAFYPDLLNFKEADYELTAIRMIAKIPTIAAMSYKYSIGQPFIYPDNSLDFTENFLHMMFATPCTKYKVNPIIKNALNKIFILHADHEQNASTSTVRIAGSSGANPFACISTGIASLWGPAHGGANEAVINMLKEIGSSEYIPKYIAKAKDKNDPFRLMGFGHRVYKNYDPRAAVLKETCKEVLKELGQLDNNPLLQIAIELEAIALKDEYFIERKLYPNVDFYSGIIYKAMGIPSQMFTVLFAIARTVGWMAQWKEMYEDPE

SEQ ID NO: 9416 - protein, 459 aa, Chromobacterium violaceum ATCC 12472
MQKQRTTSQWRELDAAHHLHPFTDTASLNQAGARVMTRGEGVYLWDSEGNKIIDGMAGLWCVNVGYGRKDFAEAARRQMEELPFYNTFFKTTHPAVVELSSLLAEVTPAGFDRVFYTNSGSESVDTMIRMVRRYWDVQGKPEKKTLIGRWNGYHGSTIGGASLGGMKYMHEQGDLPIPGMAHIEQPWWYKHGKDMTPDEFGVVAARWLEEKILEIGADKVAAFVGEPIQGAGGVIVPPATYWPEIERICRKYDVLLVADEVICGFGRTGEWFGHQHFGFQPDLFTAAKGLSSGYLPIGAVFVGKRVAEGLIAGGDFNHGFTYSGHPVCAAVAHANVAALRDEGIVQRVKDDIGPYMQKRWRETFSRFEHVDDVRGVGMVQAFTLVKNKAKRELFPDFGEIGTLCRDIFFRNNLIMRACGDHIVSAPPLVMTRAEVDEMLAVAERCLEEFEQTLKARGLA

SEQ ID NO: 9417 - protein, 541 aa, Glycine max
  misc_feature (519)..(519): Xaa can be any naturally occurring amino acid
MDISVSFSKTRPPPFSPSLCRQLSLRPNAPQLLRFSRNNGTFRRKPPPTISRPNKLAVTAIQISNLSENEDDFVLEDVPHLTDFLPNLPSYPNPLQKSQGYSIVKKTFVSPEDVVAENVVIQKGSPRGVHFRRTGPREKVYFKPEEVRACIVTCGGLCPGINTVIREIVCGLNNMYNVEDILGIEGGYKGFYSKNTMMLTPKVVNHIHKCGGTFLRTSRGGHDTHKIVDNIEDRGINQVYIIGGDGTHKGAALIYEEVKKRGLQVAVAGIPKTIDNDIAVIDKSFGFDTAVEEAQRAINAAHVEVESVENGVGIVKLMGRYSGFIAMYATLASRDVDCCLIPESPFYLEGRGGLFEFIEQRLKENGHLVIVVAEGARQEYIAAEVHAADKKDASGNKLLLDIGPWLSDKIKDHFSMSRKMAVNMKYIDPTYMIRAIPSNASDNIYCTLLAHGAVHGAMAGYTGFTVGPVNSKHAYIPIARVTEKQNKVKLTDRMWARLLASTNQPSFVASDQERVEKEXNEYINNMNIASLSRFKCLMGID

SEQ ID NO: 9418 - protein, 217 aa, Zea mays
  misc_feature (13)..(13): Xaa can be any naturally occurring amino acid
NGEPVAVKILDRXKVLRHKMAEQVMGSKTNVYIVLEYVTGGELFDTIANHGRMREGEARSYFQQLINAVDYCHSRGVYHRDLKPENLLLDSYGNLKVSDFGLSALSQQIKDDGLLHTTCGTPNYVAPEVLEDQGYDGAMADLWSCGVILFVLLAGYLPFEDSNLMTLYKKISNAEYTFPPWTSFPAKRLLTRILDPNPMTVCKSTKAARNKILPKTM

SEQ ID NO: 9419 - protein, 368 aa, Pichia ohmeri
MSTKTITVVPGDHVGTEICDEAIKVLKAIEKVSPVKFEFKHHLIGGAAIDATGVPLPDETLEAAKSSDAVLLGAVGGPKWGTGAVRPEQGLLKIRKELNLYANLRPCNFVSDSLLELSPLKSEIVKGTNFTVVRELVGGIYFGERQEQEESSDGQSAWDTEKYSVEEVTRITRMAAFMALQHNPPLPIWSLDKANVLALSRLWRKTVDHVMSTEFPQLKVQHQLIDSAAMILVKSPSQLNGVIITSNMFGDIISDEASVIPGSLGLLPSASLASLPDTNSAFGLYEPCHGSAPDLPANKVNPVATILSVAMMLRLSLDCLKEAEALEKAVGQVLDAGIRTADLRGSSSTKEVGDAVAAAVEKILAEGK

SEQ ID NO: 9420 - protein, 462 aa, Salmonella enterica subsp. enterica serovar Typhi Ty2
MTMMTATQALSVNPATGQTLAAMPWANAQEIEHALSLAASGFKKWKMTSVAQRAQTLRDIGQALRAHAEEMAQCITREMGKPIKQARAEVTKSAALCDWYAEHGPAMLNPEPTLVENQQAVIEYRPLGVILAIMPWNFPLWQVLRGAVPILLAGNSYLLKHAPNVTGCAQMIARILTEAGTPAGVYGWVNANNEGVSQMINDPRIAAVTVTGSVRAGAAIGAQAGAALKKCVLELGGSDPFIVLNDADLELAVKAAVAGRYQNTGQVCAAAKRFIVEEGIAQAFNDRFVAAAAALKMGDPLVEENDLGPMARFDLRDELHQQVQASVAEGARLLLGGEKIAGEGNYYAATVLADVTPDMTAFRQELFGPVAAITVAKDAEHALALANDSEFGLSATIFTADDTLAAEMAARLECGGVFINGYSASDARVAFGGVKKSGFGRELSHFGLHEFCNVQTVWKNRV

SEQ ID NO: 9421 - protein, 189 aa, Gossypium hirsutum
MSFIGTQQKCKACEKTVYPVELLSADGVPYHKSCSKCSHCKGTLKLANYSSMEGVLYCKPHFEQLFKETGNFNKDFQLSAKAAEKLTPEMTRSPSKAASMFSGTVEKCATCGKTAYPLEKVTVEGQSYLKSCFKCSHGGCSLSPSNYAALEGILYCKHHFSQLFKEKGSYNHLIKSASIKRAAASVPEA

SEQ ID NO: 9422 - protein, 257 aa, Triticum aestivum
  misc_feature (155)..(155): Xaa can be any naturally occurring amino acid
QVCTKKQAGTGPESRGYRRPTRPKLRRTHTQAHSIQGSRRSRFEKPAWASAEEEDLPATDMPRVVGVLSALLERVTERNDAATGPGALEPASGSAFRAMTKPGISVRAYMARIARFAGCSPACFVVGYIYLDRLLRRRRALAVDSYSVHRLLITXVLSAVKFMDDICYNNAYFAKVGGISLPEMNYLEVDFLFGVGFDLNVSPETFGHYCAILQSEMLCLELGPEVPSSGLPASPRSRRRMHCCLSEDDGTSRHHQQ

SEQ ID NO: 9423 - protein, 175 aa, Triticum aestivum
GGRVVWGPLFPSLGEVFGQGGVFALGEIGLWRVPHPWLNVLVPRSRIADFDSAVFKGILQGTDIAGPLVVYPLNKSKWDDGMSAVTPAEEVFYAVSLLFSSVANDLKRLEAQNQKILRFCDLAGIGYKEYLAHYTAHGDWVRHFGGKWQRFVEMKDKYDPKRLLSPGQDIFNLLL

SEQ ID NO: 9424 - protein, 500 aa, Oryza sativa (japonica cultivar-group)
MDVNQLWLLWATLAVSLLYYISNRRRRVGGRRRCPPGPMPLPLVGNLLNLRGHLPPALARLARTYGPVMMLKMGLTTTVVISSGDAAREAFTKHDRHLAARTVLDVTRSLDFADRSMIWLPSSDTVWKTLRGVTAASIFSPRGLAALRGVRESKVRDLVGYFRGRAGEVVDVRHAVYGCMLSLVSSAFFSVDVVDLSAESENEFRQSMTFLMEVVSKTNVSDFFPFLRPLDLQGWRRLTERYLGRVTCFLDDVIDRRFAADASANRHGDFLDSLLDLVSTGKIVRENVTTILLDVFIAGSDTITATVEWAMAELLRNPSEMAKVRAEMDGALGGKKTVDEPDIARLPYLQAVVKEAMRLHPAAPLLLPHRAVEDGVEVGGYCVPKGSMVIFNVWAIMRDPAAWERPEEFMPERFIRRGDDDEVDFWGKTFEFIPFGSGRRVCAGLPMAERVVPFMLASLLRAFEWRLPDGVSAEELDMRHRFTIANFRAIPLKAVPVVVS

SEQ ID NO: 9425 - protein, 171 aa, Zea mays
  misc_feature (99)..(99): Xaa can be any naturally occurring amino acid
  misc_feature (107)..(107): Xaa can be any naturally occurring amino acid
MAAFLRSKCSPVGRTLMGSLGNSLFGAANSSVGAITRPSHCDAISQQIRTFIQMRTNLKVVDNSGAKRVMCIQSLRGKKGARLGDMIIGSVKEAQPRGXKVKKGDVXYGVVFRAAMKKGRSDGSEVQFDDNAVVLVNKKGELIGTRVFGPVPHELRKKKHLKILALAEHIV

SEQ ID NO: 9426 - protein, 468 aa, Azotobacter vinelandii
MRQLIWLRSDLRVRDNRALGAAMGAGPTLALYLLSPAQWRTHDDAPCKVDFRLRNLAELSHGLASLGVPLLIRRVDTWDEAPALLTRLCHEQNIVRVHVNDEYGVHESRRDAAVERALQAQGVGLQRHLDQLLLAPDSLRTRSGGSFRLFAQFRRACHWRLAVSLPAVGGLPMAQPPLNVVGNAVPAALEGFATPPESLRRLWPAGEIAAQRRLHEFVENRLAAYAEARDFPAEPGTSRLSPYLAAGVLSPRQCLHAVLRTGGFDRPEASAWFDELLWREFYKHILAGHPRVSMGRALRTETEALPWRDAPQELAAWQQGRTGFPLIDAAMRQLLATGWMHNRLRMVVAMFLSKNLLIDWRHGERWFMHHLIDGDLAANNGGWQWCASTGTDAVPYFRLFNPLAQSRRFDPEGRFIRQWLPELASLDNRDIHAPAGALRPAGYPPPIVDLPSSRERALAAFKALRRRG

SEQ ID NO: 9427 - protein, 232 aa, Glycine max
ITRPPTRPPTRASTRPVNGDGGRDVNLGDSNYSFGEAEALSDEMEEESRYVAEILRIRDVLLNPEDESEAVLFDSLRRLQLMELTVDCLKATEIGKAVNPLRKHGSKDIRQLSRTLIDGWKEMVDEWVKATTTTAITGSEEGTPDSVNPSVVDDDEEEGLPSPPLDEGAFFVTQAGSMELSQFFDGMDDDGNPRPTGPFSKNRENGRKPVFDSHVVEKRKSQASHDTAIIDR

SEQ ID NO: 9428 - protein, 206 aa, Michelia figo
  misc_feature (107)..(107): Xaa can be any naturally occurring amino acid
  misc_feature (204)..(204): Xaa can be any naturally occurring amino acid
VQLKRMENKINRQVTFSKRRNGLLKKAYELSVLCDAEVALIIFSSRGKLYEFGSAGTNKTLERYQRCCYTPQDVVVSDRETQGWYQEVSKLKAKYESLQRSQRHLLXEDLGPLSVKELQHLERQLEVALSQARQRKTQIMIEQMEELRKKERQLGDINKQLKIKLEAEGQGPFRCIQGSWESGAMVGNNTFSMNAPQAAPLDAXSP

SEQ ID NO: 9429 - protein, 239 aa, Phytolacca americana
  misc_feature (235)..(236): Xaa can be any naturally occurring amino acid
VQLRRMENKINRQVTFSKRRSGLVKKAHEISVLCDAELALIIFSPRGKLFEYSTDSSMEKILERYERYFYAERQLASNDPNTEVNWTFDFAKLKAKLELLQRNHRHYLGQDLDSLNIKDLQSLEQQLDNALKHIRTRKNQLMHESISELHKKEKAMQEQNNMLVKKIKEREKAMAEAQGMQWQRQQNEPPEASNFLLPPPLTSWNTAGDAYHGQIAGEVKRNDLDLTLEPVYSCXXGCF

SEQ ID NO: 9430 - protein, 570 aa, Zea mays
MAGGGVEDVYGEDRATEEQLITPWAFSVASGYTLLRDPRHNKGLAFSEAERDAHYLRGLLPPALASQELQEKKLMQNLRRYEQPLHRYIAMMDLQERNERLFYKLLIDNVEELLPVVYTPTVGEACQKYGSIYRRPQGLYISLRDKGKILEVLKNWPERSIQVIVVTDGERILGLGDLGCQGMGIPVGKLSLYTALGGVRPSACLPITIDVGTNNEALLKDEFYIGLRQRRATGEEYHELLEEFMTAVKQNYGEKVLTQFEDFANHNAFDLLEKYRESHLVFNDDIQGTASVVLAGLLAALKVVGGTLADHTYLFLGAGEAGTGIAELIALEMSKHTGSPIEECRPKIWLMDSKGLIVASRKDSLQAFKKPWAHEHEPVATLLEAVQSLKPTVLIGTSGKGGTFTKEVVEAMASQNEKPVIFALSNPTSHSECTAEQAYTWTKGRAVFASGSPFDSVELDGKVLVPGQSNNAYIFPGFGLGVVISGAIRVRDDMLLAASEALAEQVTEEHFAKGLIFPPFTNIRAISARIAAKVAAKAYELGLASRLPRPDDLVKYAESCMYTPIYRSYR

SEQ ID NO: 9431 - protein, 166 aa, Triticum aestivum
DLGRIEKWVLRKAFDDEEQPFLPKHILYRQKEQFSDGVGYSWIDGLKAHAESNVTDKMMSNAKFIYPHNTPTTKEAYCYRMIFERFFPQNSAILTVPGGPSVACSTAKAVEWDAQWSGNLDPSGRAALGVHLSAYEQEHLPATIMAGTSKKPRMIEVAAPGVAIES

SEQ ID NO: 9432 - protein, 186 aa, Glycine max
GIPWERLNYSRDKYRETRLKQYKNYQNFSRSRHDLRKECFEVQKGETFYDFFFNTRLVKSTIVHFQLRNLLWATSKHDVYFMQNYSVMHWSALLRRGKEVLNVAKPIIPTLKRPGFLAQPVSRVQISTMTVKENLMVAGGFQGELICKNLKHPGVLFCGKITTDDNAITNAVDVYRNPAGSEGNPA

SEQ ID NO: 9433 - protein, 531 aa, Zea mays
MEAVGVTPAPVAAPEKKKLLDLKDPFPAAANGGAKASPAAKWAMKKKLVGGDAGYVLEDVPHLTDYMPQLPTYPNPLQDNPAYSVVKQYFVNPDDTVTQKIVVHKTSARGTHFRRAGPRQRVYFQSDEVNAAIVTCGGLCPGLNTVIRELVCGLYDMYGVSSVVGIEGGYKGFYSKNTVALTPKSVNDIHKRGGTVLGTSRGGHDTAKIVDCLQDRGINQVYIIGGDGTQKGASVIYEEVRRRGLKCSVVGVPKTIDNDIAVIDKSFGFDTAVEEAQRAINAAHVEAESAENGIGVVKLMGRNSGFIAMYATLASRDVDCCLIPESPFYLEGKGGLLEFVERRLKDNGHMVIVVAEGAGQDLIARSMNFVDTQDASGNKLLLDVGLWLSQKIKDHFKKKPSFPITLKYIDPTYMIRAVRSNASDNVYCTLLAHSALHGAMAGYTGFTVAPVNGRHAYIPFYRITEKQNKVVITDRMWARVLCSTNQPCFLSHEDVENMKHDDDEHHHMHNTQLLEGGSSPVSKCNGSAAAV

SEQ ID NO: 9434 - protein, 245 aa, Nicotiana tabacum
MGRGRVQLKRIENKINRQVTFSKRRSGLLKKAHEISVLCDAEVGLIVFSTKGKLFEYSTDSCMERILERYERYSYAERQLTATDHETPGSWTLEHAKLKARFEVLQRNQRHYAGEDLDSLSMKELQNLEHQVDSALKHIRSRKNQLMHESISELQKKDKALQEQNNKLSKQVKEREKELAQQTQWEQQSHDHLNSSTFVLSQPLSSLHLGEAYSTAGDNGEVEGSSRQQQQNTVMPPWMLRHLNN

SEQ ID NO: 9435 - protein, 138 aa, Triticum aestivum
  misc_feature (112)..(112): Xaa can be any naturally occurring amino acid
MAPTVMASSATSVAPFQGLKSTAGLPVSRRSNGASLGSVSNGGRIRCMQVWPIEGIKKVPRTLSYFANRSSNGRALPQSKVELPDPASKVGCPWPSEFKQRLGSILPVEHNXPLGYYDGPVLGMLELPISGCTDARST

SEQ ID NO: 9436 - protein, 119 aa, Oryza sativa (japonica cultivar-group)
MAGCCVFLRWPSASPSRIGYRSLDDGDDGPSPAAVTTTVVVGKERRVFSVDQLVLDTYPFRLLLETAVRKEESKAALFVDVDAILFEHILWLAGHHDRSSSSLLHLDLKEIIDFYSQDA

SEQ ID NO: 9437 - protein, 206 aa, Buchnera aphidicola str. APS (Acyrthosiphon pisum)
MNNNFQNNIFWQKHSITRLKREKKNGHKSIVLWFTGLSGSGKSTIANFLEEILFKNGINSYLLDGDNIRSGLCSDLSFSLADRNENIRRIGEVVKMMLHAGLIILVSVISPYRNQREMVRQMLGKKNFLEVFIDTPIEICESRDPKKLYKQARTGQISDFTGIQCTYETPNTPDVLLKGTDSLKNNSKKLIKILYNHNIISFINID

SEQ ID NO: 9438 - protein, 289 aa, Arabidopsis thaliana
MAISQAVLATVFGILGNIISFFVCLAPIPTFVRIYKRKSSEGYQSIPYVISLFSAMLWMYYAMIKKDAMMLITINSFAFVVQIVYISLFFFYAPKKEKTLTVKFVLFVDVLGFGAIFVLTYFIIHANKRVQVLGYICMVFALSVFVAPLGIIRKVIKTKSAEFMPFGLSFFLTLSAVMWFFYGLLLKDMNIALPNVLGFIFGVLQMILFLIYKKPGTKVLEPPGIKLQDISEHVVDVVRLSTMVCNSQMRTLVPQDSADMEATIDIDEKIKGDIEKNKDEKEVFLISKN

SEQ ID NO: 9439 - protein, 191 aa, Escherichia coli O157:H7 EDL933
MQKVKLNNGIEMPLLGFGVFQMTDAAECERAVIDAINTGYRLIDTAASYQNEPQVGNALKQSGIARNELFVTTKLWLQDTSYEGAKAQFERSLNRLQLDYVDLYLIHQPYGDVHGAWRAMEELQQAGKIRAIGVSNFHPDRLADLIAFNNVVPAVNQVEVNPFNQQLHAVPWMQSRGIQPEAWAPFAVTGR

SEQ ID NO: 9440 - protein, 359 aa, Schizosaccharomyces pombe
RMRVAIIHVGAPAGGMNSATRAAVRYCLNRGHTPLAIDNGFSGFLRHDSIHELSWIDVDEWCIRGGSEIGTNRDTPDLDMGFTAFKFQQHKIDALIIIGGFEAFTALSQLESARVNYPSFRIPMAIIPATISNNVPGTEFSLGCDTCLNAVMEYCDTIKQSASASRRRVFVCEVQGGRSGYIATVGGLITGASAIYTPEDGISLDMLRKDIDHLKATFALEAGRNRAGQLILRNECASKVYNTKVIGNIISEEVISASPLVPLFPSRPTRCNPTPMDRARAARLAMRAIRFFETCRANDLGNDPSSAVVIGIRGTGVSFSSVADVENNETEIEMRRPKNAWWRDMHNLVNILAGKTFAD

SEQ ID NO: 9441 - protein, 328 aa, Bacillus cereus ATCC 10987
MTIPAGTSASVGIVGLTLGGGIGMLSRLFGLTCDQLIEVEMVQACGKFGAKIIRASEHENHNLFWACRGGGGGNFGIITSLTFRVHPIKNVSIFSITWEWKDFIAAFQAWQNWAPYVDERLTSSIELFTKQQNKIEAQGEFVGSPSELHSLLSPLLETGTPSLFIDEVPYIKAVEFFNSGNIPENFKRSGSYVYKPIPLKGIQIMQYFLSHAPNKDASIWHQSLVGAVENIPPTETAYFHRKAIIAQEYITSWKCDDEENRNIRWVKDLREILDPYTLGDYVNWPDIDIKNWQTSYYGPNFQRLRKVKTIYDPCNVFRFQQSIPPFHT

SEQ ID NO: 9442 - protein, 174 aa, Triticum aestivum
  misc_feature (53)..(53): Xaa can be any naturally occurring amino acid
  misc_feature (96)..(96): Xaa can be any naturally occurring amino acid
  misc_feature (113)..(113): Xaa can be any naturally occurring amino acid
  misc_feature (146)..(146): Xaa can be any naturally occurring amino acid
  misc_feature (156)..(156): Xaa can be any naturally occurring amino acid
MSDTDEHHFESKADSGASKTYPQQAGAIRKGGHIVIKARPCKVVEVSTSKTGXKHGHAKCHFVAIDIFNGKKLEDIVPSSHNCDVPHVDRQDYQAXFDITDDGYVSLLTESGXTLKDDPESFPLMMFCLGQFKDWDFADGKDLILXVMSAMGERKXCAVKETGGGKVSSCAVAG

SEQ ID NO: 9443 - protein, 486 aa, Ralstonia eutropha JMP134
MTNRTIELKHPRQLYIDGVWVEPSTGGVFDVLDCSTEQVVATVARAESADMQRAVAAARKAFDDGPWPRMTPLERAGFLEKIAVRLEALNDEFARIWSLETGIVYKVAQPRIGLFISGAFRQYAAMASTFPFTQPCQSVTGNDAYRVYEPVGVVAEIIPWNGPAGLLAYKTAPALLAGCTLVIKSPPEAPCSGYLFAQVCEEVGLPPGVVNVITAERDVSEALVRSPEVDKITFTGSTAAGRRIASIAGDRVARVTLELGGKSPAVILDDYDVETAAATLGNSYFSYNTGQICHSLTRIIVPRAKHDAMVEALSAIAREIVLGDPLAATTTSGPLANARQRDTVERFVAMGVAEGAVLATGGKRPPHLARGFFFEPTVFGNVDNRSSIAQQEIFGPVLSVIPADDEASAIRMANDTPFGLNAAVFTNDRDRALAVARQIRAGTVGHNGPRTDFSIGFGGFKQSGIGREGGVEGLTAFMESKTIVLS

SEQ ID NO: 9444 - protein, 268 aa, Acinetobacter sp. ADP1
MMIVPKFGLGTFRLNDQIVIDSVKTALDVGYRAIDTAQIYDNEAQVGQAIQESGIARDQLFLTTKIWVDHLNSEQLIPSLKQSLQKLRTDAVNLTLIHWPAPQKGIDIAAVMQLLLQAKQQGLTEHIGISNFNIAQTKTAIESIGQSHIATNQIELSPYLQNRTLVDFLKAQQIDVTSYMTLAYGKVLHDPVLQDIASEHQASTAQIALAWALQSGYAVIPSSTKREHLISNLKAQEIQLSQQDMQLIAALERNGREVDPAELAPEWD

SEQ ID NO: 9445 - protein, 275 aa, uncultured bacterium
  misc_feature (32)..(32): Xaa can be any naturally occurring amino acid
  misc_feature (197)..(197): Xaa can be any naturally occurring amino acid
  misc_feature (237)..(237): Xaa can be any naturally occurring amino acid
  misc_feature (241)..(241): Xaa can be any naturally occurring amino acid
MSAEQPRLILNSGQSMPQLGLGAYKVNQDIAXQLVQHALEIGYRRIDTAALYDNEAEVGAAVRKSGLAREEVFVTSKIWNDRHGYHEAKEAIQESIDRLNIDYVDMMLIHWPCPKQDKFVETWHAFEEVLETGLVKGIGVSNFNQPHLEKLLQHSNITPAINQVELHPQLAQNGLREFNERHGIRTEAWAPLGRARXMQHPLLVEIABSLGKSVAQVIIRWHLQIGNLVIPKSSNPXRLAXNFDVFDFELSHHNMSIIATLNTETRIATNPDDMN

SEQ ID NO: 9446 - protein, 160 aa, Hevea brasiliensis
MSDEEHHFESKADAGASKTYPQQAGTIRKNGYIVIKNRPCKVVEVSTSKTGKHGHAKCHFVGIDIFNAKKLEDIVPSSHNCDVPHVNRTDYQLIDISEDGFVSLLTENGNTKDDLRLPTDENLLSQIKDGFAEGKDLVVTVMSAMGEEQICALKDIGPKN

SEQ ID NO: 9447 - protein, 153 aa, Mesorhizobium sp. BNC1
MIFRAFLLVLCLLGFSGIAVAVQPDEILVDPALEARARQLSAELRCMVCQNQSIDDSDAELARDLRVLVRERLKAGDTNEEVLNYIVSRYGEFVLLKPRFNARNAILWAAPVLILVGGSALAFSVLRRRGNTVPAPLSTEEEAALRDILKDES

SEQ ID NO: 9448 - protein, 129 aa, Glycine max
MSTKKIVLKSSDNESFEVDEAVARESQTLAHMVEDDCTDNGIPLPNVTGKILAKVIEYCKKHVDAAAAKTEAAADGGASSDDDLKAWDAEFMKIDQATLFELILAANYLNIKNLLDLTCQTVADMIKGK

SEQ ID NO: 9449 - protein, 258 aa, Zea mays
  misc_feature (167)..(167): Xaa can be any naturally occurring amino acid
  misc_feature (223)..(223): Xaa can be any naturally occurring amino acid
MAGAGAGGWKKRVGRYEVGRTIGRGTFAKVKFAVDADTGAAFAIKVLDKETIFTHRMLHQIKREISIMKIVRHPNIVRLNEVLAGRTKIYIVLELVTGGELFDRIVRHGKLRENEARKYFQQLIDAIDYCHSKGVYHRDLKPQNLLLDSRGNLKLSDFGLSTLSQNXLVHTTCGTPNYVAPEVLSSNGYDGCAADIWSCGVILYVLMAGYLPFEENDLPHLYXKGAKSLIQRILDPNPRTPIVCVKLSTRTSSYISLY

SEQ ID NO: 9450 - protein, 273 aa, uncultured bacterium
MASPLVTLNDGRLMPQLGLGVYKVNQDIAVQLVQTAIEIGYRRVDTAALYDNEAEVGAAIRKSGLDREEIFVTSKIWNDRHGYHEAKDAIQESVDRLNIGYVDMMLIHWPCPKQDKFVETWHAFEEVLETGLVKSIGVSNFHQHHLEKLLAAANVVPAINQVELHPQLAQNSLRHFNKQHNIKTEAWAPLGRAKFLENPLLVEIAESLGKSVAQVIIRWHLQLQNLVIPKSSNPDRLAENFDVFDFELSQHQMGIIATLNTETRIATNPDDMN

SEQ ID NO: 9451 - protein, 423 aa, Bradyrhizobium japonicum USDA 110
MSDKPQHIVIVGAGAAGLMAGRELARAGKKVTVLEARDRCGGRIHPLPAAEFGYPADGGAEFVHGDAPVTRALLREAGLSLQEIEGTLWRFDGAHFSREDRHDPHEAELHAVLGNLKDDLTVADFLRRHFAGPEYDGLRYSIERMVEGYDAADPERASTLALREEWMDGGLHTQARINGGYGALIDFLAAECRRHGAAVRLGCVVSAIEDEGGAVVVRGAGGEVHRCDRVILTVPLPLLREIALPASVRAKAAAADDIGFGNVVKILLRFARPWWRERNPDLADMTFLLSDRTIPVWWTRHPEQHPVLTGWFGGPRTAELQDLDPQALIEAGLGSLATIFGLSREDVARDLVAAAATNWGQDPFARGAYSWATPRTRAAQAMLARADGAVLFSGEALYRGRDMGTVEAALASGLETAGMILRG

SEQ ID NO: 9452 - protein, 180 aa, Brassica napus
MSYGQDTGVERRKGSVKWFDTQKGFGFITPDDGGDDLFVHQSSIRSEGFRSLAAEEPVEFQVENDNNGRPKAIEVSGPDGAPVQGSSGGGSSGGRGGFGGGGRGGGRGFGGGRGGGRGGSDCYKCGEPGHIARDCSEGGGGYGGGGGGGGHGGGGGGGGGSCYSCGESGHFARDCTSGGR

SEQ ID NO: 9453 - protein, 360 aa, Emericella nidulans
MAAARTLRIGLIPGDGIGREVIPAGRRILEALPASLNLKFNFVDLDAGYDCFKRTGTALPDKTVEVLKKECDGALFGAVSSPSTKVAGYSSPIVALRKKLDLFANVRPVKTTAGTSAGKPIDLVIVRENTEDLYVKEESTEETPNGKVARAIKQISERASSRIATIAGEIALRRQNIRDGAAASGLRTKPMVTITHKSNVLSQTDGLFRETARAALAAQKFSSVEVEEQIVDSMVYKLFRQPEYYDVIVAPNLYGDILSDGAAALVGSLGLVPSANVGDNFAIGEPCHGSAPDIEGKNIANPIATLRSVALMLEFLGEEQAAAKIYAAVDGNLDEGKYLSPDMGGKATTTEVLEDVLKRL

SEQ ID NO: 9454 - protein, 275 aa, uncultured bacterium
MSAEQPRLILNSGQSMPQLGLGAYKVNQDITVQLVQHALEIGYRRIDTAAIYDNEAEVGAAVRKSGLAREEVFVTSKIWNDRHGYHEAKEAIQESIDRLNIDYVDMMLIHWPCPKQDKFVETWHAFEEVLETGLVKGIGVSNFNQPHLEKLLQHSNITPAINQVELHPQLAQNGLRELNERHGIRTEAWAPLGRARFMQHPLLIEIAESLGKSVAQVIIRWHLQIGNLVIPKSSNPDRLAENFDVFDFELSHHNMSIIATLNTETRIATNPDDMN

SEQ ID NO: 9455 - protein, 234 aa, Pachysandra terminalis
  misc_feature (204)..(204): Xaa can be any naturally occurring amino acid
  misc_feature (207)..(207): Xaa can be any naturally occurring amino acid
  misc_feature (211)..(211): Xaa can be any naturally occurring amino acid
VQLRRMENKINRQVTFSKRRTGLLKKAHEISVLCDAEVALIVFSTKGKLSQYSSNSSMETILDRYERYSYAERKLMAGDHLDSQGSWPLEYTKLKSKIEVLQRNQRHFMGEELDSLSLKELQYMEHQLDTSLKHIRSRKNQLMNDSIYDLQKKEKALQEQNSTLIKKLKEKEKAPAHQACWEQQGQNLPSFLLSQPLPSLNIGXNYXLARXSRDEEEGAQSHARTNPIMPPWML

SEQ ID NO: 9456 - protein, 425 aa, Arabidopsis thaliana
MRQMPEHPNIVTLKETYEDDKAVHLVMELCEGGELFDRIVARGHYTERAAASVIKTIIEVVQMCHKHGVMHRDLKPENFLFANKKETASLKAIDFGLSVFFKPGERFNEIVGSPYYMAPEVLRRSYGQEIDIWSAGVILYILLCGVPPFWAETEHGVAKAILKSVIDFKRDPWPKVSDNAKDLIKKMLHPDPRRRLTAQQVLDHPWIQNGKNASNVSLGETVRARLKQFSVMNKLKKRALRVIAEHLSVEETSCIKERFQVMDTSNRGKITITELGIGLQKLGIVVPQDDIQILMDAGDVDKDGYLDVNEFVAISVHIRKLGNDEHLKKAFTFFDKNKSGYIEIEELRDALADDVDTTSEEVVEAIILDVDTNKDGKISYDEFATMMKTGTDWRKASRQYSRDLFKCLSLKLMQDGSLQSNGDTK

SEQ ID NO: 9457 - protein, 356 aa, Micromonospora echinospora
MELTTTAARPGLRHRMQQLIYGFFTAQTLHVAVRLRIPDLLADGARDVGDLASATGADAPSLRRLLRALVFLEVLDEPAPGTFALTEQGEVLRADVTGSMRELVLLLSGPESWAAWGQLEHSVRTGEVAWEHVHGRSCFDHLMADPQRQAAFNAAMAEGSRAFVPTLLSAYDFGDLRTVVDVGGGSGALLAGVLAAHPHLRGTVFDTPDGVADAARTVAEQGVADRCGVETGDFFVSVPPGADAYVLKSVLHDWDDEQCVEVLRTVRRAVRPDSRVILVESLMPTTVTTAPSVAQVVMNDLNMMVCHGGRERTVAEFRELLRVAGFRLESVTPCPAPSVVGILEAAPAPATGPDGS

SEQ ID NO: 9458 - protein, 238 aa, Peperomia caperata
  misc_feature (207)..(207): Xaa can be any naturally occurring amino acid
  misc_feature (238)..(238): Xaa can be any naturally occurring amino acid
VQLKRMENKINRQVTFSKRRTGLLKKAHEISVLCDAEVALIVFSTKGKLYEYATNSSSMPGILDRYERHSFTDKEFFIKEGEPPEGAWTLEYAKLKARYELLQKNYRHYLGEDLGSLSGKELQQLEGQLDASLKNVRSRRTQALFHTISDLQKKEKSLLEQNSVMIKKLQDLEKAEKAQQSQLEMQNHERTQNQPPLILLPPPALSXGSFRQENGPSVEGEAAPRVAQKNSLLPPWMX

SEQ ID NO: 9459 - protein, 402 aa, Burkholderia cepacia R1808
MTDITADQMARVKATAPVLAVHGATITKHFYQRMFTRHPELKNLFNQTHQKTGSQPETLAKAVYAYAANIDNLGALGGAVSHIAHKHASLNIRPEHYPIVGENLLASIVEVLGDAVDAQTLEAWRVAYGQLAQILIGAEADLYAGAAWSGFRPFKVARKVRESDEITSFYLTPADGGAAPTFEPGQYVTVKRFVGDLGVDQPRQYSLSDAPHGKWLRISVKRESGQAEAVPAGKVSTLMHDGVEEGAIVEVTAPMGEFSLKRGVDTPVVLISGGVGLTPMVSMASTLVAEGSKRDVRFVHACRSGAVHAFRDWLNDTVREHANFKRTVLYELVGPNDRAGVDHDLEGRLTPERVQQYALVPDADYYICGPIAFMKAQRDALVALGVAPERINTEIFGSGALE

SEQ ID NO: 9460 - protein, 360 aa, Papaver somniferum
MGSIRNVDEDIQACRYAMELASASVPVMVLKTAIELDILEIIKKPGPGTQISVSEIVSQIQNLKNPDAPVMLDRMLRLLASYNILTCSLKDGGNDDKVERLYGLAPVCKFLTKNEAGCSMSALLLMNQDKVLMESWYHLKDAILDGGIPFNKAYGVHAFEYHGKDLRFNKVFNKGMSDHTTITMNKILETYKGFEGLNSIVDVGGGVGATVSMIISKYPTIQGINFDLPHVIQDAPSFPGIKHVGGDMFASVPNADAIFMKWILHDWSDEHSVKILKNCYDALPKNGKVIIVECIIPEVSDSSVAGHGVFHLDNIMLAHNPGGKERSLKQFENLAKDTGFTDFQVVCSAYDTYVMEFYKN

SEQ ID NO: 9461 - protein, 358 aa, Arthrobacter sp. BP2
MKRCSAMHAFAVLPDDATIHDLEFSTPRPEGRQVLLKVMRAGVCHTDTHLREGGYDLGSRGHMSMKDRGIQYPMVLGHEVVGVVEQVGADVASVSAGDVRLIYPWIGCGTCRQCREGHDNRCAAGQNLGVARHGGYAEYIIVPDEKYLVDIEGLDPSWAATLACSGLTAHSAVDKVLPLEPDEPVVIFGAGGLGLTAIAILRARGHRNICAVDVAERNLALARDMGATSTVLSGAGSGAADIQRAAGGPASAVVDFVNNGATATAAFDALAKAGTMVQVGLFGGEVTLPTAMLALRMIRIEGSFVGALSQLQDLVRIAKAGELPTIPVSERTLSAAEVSRALDDLTAGGIAGRIVLTA

SEQ ID NO: 9462 - protein, 226 aa, Triticum aestivum
ADLGDGLADDDAGKLLLMYSAGDDNDVEEEDEEGYLDHLVSKESSFCSADPSPSMASEDWFQCARRDTVRWILETRGHFGFSHRTAYVAIAYFDRFSLRRCVDRSVMPWAARLLAIACVSLAAKMDECQAPALSEFRADDDYDFSCDSIGRMEMLVLSTLDWRMGAVTPFDYLPCLSSRVRRFNGAGRGGGGRAHRRQPPPSSSPPPKVGYLTTTSIHGPCSASIN

SEQ ID NO: 9463 - protein, 452 aa, Triticum aestivum
  misc_feature (267)..(267): Xaa can be any naturally occurring amino acid
  misc_feature (284)..(284): Xaa can be any naturally occurring amino acid
MGEQKGNILMGKYEMGKMLGQGTFAKVYHARNIETSQSVAIKVTDKEKVLKGGLTDQIKREISVMKLVKHPNIVQMYEVMATKTKIYFVLEHVKGGELFNKVQRGRLKEDAARKYFQQLICAVDFCHSRGVYHRDLKPENLLLDENSNLKVSDFGLSTISECRRLDGLLHTSCGTPAYVAPEVINRKGYDGAKADIWSCGVILFVLLAGYLPFQDKNLMNMYKKIGKAEFKCPSWFSSDIRRLLLRILDPNPCARISIGKRCDSRWXHKGHFANLDMYNLQARXTVPAADMTATSDALSCSNSATEGKEQEAKKLTNLNAFDIISLSTGLDLSGMFEDNDKKRESKFTSTNSASTIVSKIEDIAKCMRLKLVKKDGGMMRMESFKPGRKGVMSIDAEIFEVTPDFHLVELKKTNGDTMEYQKVLNQEMRPALKDIVWAWQGEQQPQPQQQPC

SEQ ID NO: 9464 - protein, 211 aa, Pinus taeda
MEKIMVLVCIMSFTILGLSSAKEINHAAAVSLATAPAAAATPAAPAPSPASLNLSGILDKAGQFNTFLSLLKSTQVGMQLQSQLNNSQQGITIFAPSDAAFAALKPGALNSITDQDKIALLQYHALPSYYTFSQFQTVSNPVRTMASGNGGPFAAPTPEPGAPVSSPAVSPSGASGSGASTSSACGSMAALAKGLYLVFLAAGALVLVISS

SEQ ID NO: 9465 - protein, 485 aa, Agrobacterium tumefaciens str. C58
MTSPLQHLQQSGRLKKFYIDGKWVLPSGSDKVAVINPATELEFAEIALGNDEDVALAVAAARGAFAGWARTGPADRSELLNRVHQLMQQRLELLAQALTMEMGAAINYARSVQVPLAAEHIKVARDNAASYSFLSQRGHTAILREPIGVCGLITPWNWPLYQITAKVGPALAAGCTVVLKPSELSPLSALLFAEIIEDAGFPPGVFNLVNGEGTIVGAGLSAHPDVDMISITGSTRAGILVAQAAAPTVKRVAQELGGKSPNIILADADMTRAVPLGVAAAFRNLGQSCSAPTRMIVPRSHQKHIEELAAAAALEIVVGDPLSEHTTHGPVANHAQFDRIQRMISIGMDEGAKLVVGGTGRPDGLDTGFYVRPTIFSDVDPKMQIAQQEIFGPVLSIISYDTLEEAIEIANDTVYGLGAHVQGTDLQTVRIVAEQIRSGQVHLNYPAWDPNAPFGGYKQSGNGREYGTEGMEEYLEIKSILGFYP

SEQ ID NO: 9466 - protein, 474 aa, Emericella nidulans
MASTLRLSTSALRSSTLAGKPVVQSVAFNGLRCYSTGKTKSLKETFADKLPGELEKVKKLRKEHGNKVIGELTLDQAYGGARGVKCLVWEGSVLDSEEGIRFRGLTIPECQKLLPKAPGGEEPLPEGLFWLLLTGEVPSEQQVRDLSAEWAARSDLPKFIEELIDRVPSTLHPMAQFSLAVTALEHESAFAKATAKGINKKEYWHYTFEDSMDLIAKLPTIAAKIYRNVFKDGKVAPIQKDKDYSYNLANQLGFADNKDFVELMRLYLTIHSDHEGGNVSAHTTHLVGSALSSPMLSLAAGLNGLAGPLHGLANQEVLNWLTEMKKVVGNDLSDQSIKDYLWSTLNAGRVVPGYGHAVLRKTDPRYTSQREFALRKLPDDPMFKLVSQVYKIAPGVLTEHGKTKNPYPNVDAHSGVLLQYYGLTEANYYTVLFGVSRALGVLPQLIIDRAFGAPIERPKSFSTEAYAKLVGAKL

SEQ ID NO: 9467 - protein, 188 aa, Triticum aestivum
  misc_feature (80)..(80): Xaa can be any naturally occurring amino acid
  misc_feature (86)..(86): Xaa can be any naturally occurring amino acid
  misc_feature (101)..(101): Xaa can be any naturally occurring amino acid
  misc_feature (109)..(109): Xaa can be any naturally occurring amino acid
  misc_feature (132)..(134): Xaa can be any naturally occurring amino acid
  misc_feature (138)..(138): Xaa can be any naturally occurring amino acid
  misc_feature (140)..(140): Xaa can be any naturally occurring amino acid
  misc_feature (144)..(144): Xaa can be any naturally occurring amino acid
  misc_feature (151)..(151): Xaa can be any naturally occurring amino acid
  misc_feature (157)..(157): Xaa can be any naturally occurring amino acid
  misc_feature (161)..(161): Xaa can be any naturally occurring amino acid
  misc_feature (164)..(164): Xaa can be any naturally occurring amino acid
  misc_feature (168)..(168): Xaa can be any naturally occurring amino acid
  misc_feature (172)..(172): Xaa can be any naturally occurring amino acid
  misc_feature (175)..(175): Xaa can be any naturally occurring amino acid
MAPTVMASSATSVAPFQGLKSTAGLPVSRRSNGASLGSVSNGGRIRCMQVWPIEGIKKFETLSYLPPLSTEALLKQVDYXIRSKWXVPCLQFNKVGFILRXEHNASPGXYYDGRYWTMWKLLCSGCNDPHKXXXKVEXVXKDYXYPYVRIXRFNNMXQVHXSTXRLKXTGCXDPXKAKHKGILNAFNL

SEQ ID NO: 9468 - protein, 468 aa, Glycine max
  misc_feature (61)..(61): Xaa can be any naturally occurring amino acid
CLILCIGVLLQTYPNPLQDNPAYSVVKQYFVHVDDSVPQKVVVHKDGARGVHFRRAGPRQXDEVQAAIVTCGGLCPGLNTVIRELVCGLHHMYGVKKVLGINGGYRGFYARNTITLTPKSVNDIHKRGGTVLGTSRGGHDTKKIVDSIQDRGINQVYIIGGDGTQKGASAIFEEVRKRGLKVSVVGIPKTIDNDIPVIDKSFGFDTAVEEAQRAINAAHVEAESVENGIGVVKLMGRNSGFIAMYATLASRDVDCCLIPESPFYLEGPGGLYEYIEKRLKENGHMVIVIAEGAGQELVSESVQSMSKQDASGNKLFQDVGLWISQKIRDHFAAQKTLPITLKYIDPTYMIRAIPSNASDNVYCTLLAQSAVHGAMAGYTGYTSGLVNGRQTYIPFYRITERQNHVVITDRMWARLLSSTNQPSFLDAKGDNEEKEEEEALNQLPDGHCAKDTSLASKEINSSIYPTAC

SEQ ID NO: 9469 - protein, 280 aa, Methanococcus maripaludis S2
MKFDAWYTEPQTENLSLSTKLKDILYVGQSEYQEIQVLDTYEFGRVLILENTYQTTERDEFIYHELISHPALFTHGNPKKVLVIGGGDGGSVREVLKHKSVEKIDFVELDGQVVEVAKKFLPTLSCEIDNEKVNTIITDGIKYVAETSEKYDVILVDCPDPVGPAAGLFEKEFYNNLYKCLNDDGIMVQQTESPLLHEKLINKIKGHLKDAGFSTIRPLVCSIPTYPSGFWSFTLASKKNDPLNSDVSEIENKLKDMTTKYYDQDVHKGVFLATPRYLKE

SEQ ID NO: 9470 - protein, 160 aa, Hevea brasiliensis
MSDEEHHFESKADAGASKTYPQQAGTIRKNGYIVIKNRPCKVVEVPTSKTGKHGHAKCHFVGIDIFNAKKLEDIVPSSHNCDVPHVNRTDYQLIDISEDGFVSLLTENGNTKDDLRLPTDENLLSQIKDGFAEGKDLVVTVMSAMGEEQICALKDIGPKN

SEQ ID NO: 9471 - protein, 160 aa, Hevea brasiliensis
MSDEEHHFESKADAGASKTYPQQAGTIRKNGYIVIKNRPCKVVEVSTSKTGKHGHAKCHFVGIDIFTAKKLEDIVPSSHNCDAPHVNRTDYQLIDISEDGFVSLLTESGNTKDDLRLPTDENLLSQIKDGFAEGKDLVVTVMSAMGEEQICALKDIGPKN

SEQ ID NO: 9472 - protein, 495 aa, Gibberella zeae PH-1
MSTVKITGIGGRQISVHTGLFINNEFVPAQDNATVKTENPFNGKVLADISAAQASDVDKAVAAAEKAFNGTWKLTQPTVRRDLMNRLADLIERDNEELASLESVDAGILFRESSGMFVPQAVETLRYYAGWADKVDGQSLHIPQGISYSRRVPIGVCAAIVPWNAPLMITMWKLAAALATGNVLIIKTPEASPLYGQKLGQLIVEAGFPPGVVSILCGLGIVAGSALSAHPAIRKLSFTGSPGVGRQILAASAKTNLKKISLELGGKGPSIVFDDADFENALQWTAAGITVNNGQICAAGSRIYVHADIYDKFVKAFSERTKDSVAGDPLLQETTKGPVINAGQKKRVMEYIKIGQDEKVKVLHGADDSKLPTEGHFVPNTAFVDVDPQATVIREEIFGPVACIAKFSTEEEVVRLANDSSYGLGSAVFTKDINKAIRVSEELESGQVTINMWGVVNANVSFGGFKESGFGRDCGKEAIDDWTQAKYISVMVPKL

SEQ ID NO: 9473 - protein, 132 aa, Hevea brasiliensis
MSDEEHHFESKADAGASKTYPQQAGTIRKNGYIVIKNRPCKVVEVSTSKTGKHGHAKCHFVGIDIFTAKKLEDIVPSSHNCDAPHVNRTDYQLIDISEDGFVSLLTESGNTKDNLRLPTDENLLSQIKDGFA

SEQ ID NO: 9474 - protein, 273 aa, uncultured bacterium
MASPLVTLNDGRLMPQLGLGVYKVNQDIAVQLVQTAIEIGYRRVDTAALYDNEAEVGAAIRKSGLEREEIFVTSKIWNDRHGYHEAKEAIQESVDRLNIGYVDMMLIHWPCPKQDKFVETWHAFEEVLETGLVKSIGVSNFHQHHLEKLLAAATVVPAINQVELHPQLAQNSLRHFNKQHNIKTEAWAPLGRAKFLENPLLVEIAESLGKSVAQVIIRWHLQLQNLVIPKSSNPDRLAENFDVFDFELSQHQMGIIATLNTETRIATNPDDMN

SEQ ID NO: 9475 - protein, 501 aa, Glycine max
MGSAAKYELPFKLNNPDLLHNESFVHGKWVKSKSGKTFEVADPGTGKTWIDCPTNDASDVDEAVKSSHECFLEYKKISPRQRAQMLYKWDALIKENREDIATILVYETGKPRAEAYGEIDYSTGFTWWFAGEAERIQGSVFTPALPNRRIFTIKQPLGVAAALVPWNFPIAMILRKAGAALAAGCTMIVKPSPETPITVLALAYLADKAGFPKGALNVLTTDLDKTPELSEALCRHPLVNKVTFTGSTRVGKLVAKICSDNLKKVTLELGGNCPVLIFDDANIEQAMSQVFALKFRHAGQACITANRIYVQSGIFDKFLERWNAEAQKIVVGHGSDEKTTMGPVTTPRAVDKALSLVEDARKKGAKIHTGGNKVEKNGGYFFEPTVITGVTPDMDIAKEEVFSPISTFIKFETEDEVVKAANDTSMGLASYLFTKNVDRMWRLFENLEAGMIGLNTGNSSAAESPFGGIKQSGYGKESGKDVAVNEYMITKTGTFTLEDQS

SEQ ID NO: 9476 - protein, 159 aa, Hevea brasiliensis
MSDEEHHFESKADAGASKTYPQQAGTIRKNGYIVIKNRPCKVVEVSTSKTGKHGHAKCHFVGIDIFNAKKLEDIVPSSHNCDVPHVTRTDYQLIDISEDGFVSLLTENGNTKDDLRLPTDENLLSQIKDGFAEGKDLVVTVMSSMGEEQICALKDIGPK

SEQ ID NO: 9477 - protein, 493 aa, Arabidopsis thaliana
MVLSKTVSESDVSIHSTFASRYVRNSLPRFEMPENSIPKEAAYQIINDELMLDGNPRLNLASFVTTWMEPECDKLMMESINKNYVDMDEYPVTTELQNRCVNMIARLFNAPLGDGEAAVGVGTVGSSEAIMLAGLAFKRQWQNKRKAQGLPYDKPNIVTGANVQVCWEKFARYFEVELKEVNLREDYYVMDPVKAVEMVDENTICVAAILGSTLTGEFEDVKLLNDLLVEKNKQTGWDTPIHVDAASGGFIAPFLYPELEWDFRLPLVKSINVSGHKYGLVYAGIGWVVWRTKTDLPDELIFHINYLGADQPTFTLNFSKGSSQVIAQYYQLIRLGFEGYRNVMDNCRENMMVLRQGLEKTGRFKIVSKENGVPLVAFSLKDSSRHNEFEVAHTLRRFGWIVPAYTMPADAQHVTVLRVVIREDFSRTLAERLVADFEKVLHELDTLPARVHAKMANGKVNGVKKTPEETQREVTAYWKKLLETKKTNKNTIC

SEQ ID NO: 9478 - protein, 159 aa, Hevea brasiliensis
MSDEEHHFESKADAGASKTYPQQAGTIRKNGYIVIKNRPCKVVDVSTSKTGKHGHAKCHFVGIDIFNAKKLEDIVPSSHNCDVPHVTRTDYQLIDISEDGFVSLLTENGNTKDDLRLPTDENLLSQIKDGFAEGKDLVVTVMSSMGEEQICALKDIGPK

SEQ ID NO: 9479 - protein, 263 aa, Burkholderia cepacia R1808
MTVADVEIPGYAQDIALRLYRRADKTGLPVVLYFHGGGFVRGTLDDADFAARFLAERLPALVVSVDYSLAPAFPFPAAPEDAYRAAVWAATRARAFGGNPKKIGVAGHDAGGQLANCLAFIARDRGEVPIAAQALFGPMLDPSMTRIGDADRLSSDITARECAACYRAYLPQAAQRMHPYAAPLESVRLAGLPPTLIVTAQNDVLHVEAEKYAGCLISSGVLTQVIRYPDVTHAALATHAAALEEAVRFFQCRFQARQPNRSE

SEQ ID NO: 9480 - protein, 428 aa, Zea mays
  misc_feature (244)..(244): Xaa can be any naturally occurring amino acid
  misc_feature (394)..(394): Xaa can be any naturally occurring amino acid
MSTTKVKRRVGKYELGRTIGEGTFAKVRFARDTVTGEAVAIKILDKEKVLKHKMVEQIKREISTMKLIKHPNVVRIYEVMGSKTKIYIVLEFATGGELFDTIVNHGRMREDEARRYFQQLINAVDYCHSRGVYHRDLKPENLLLDSYGNLKVSDFGLSALSQQIKDDGLLHTTCGTPNYVAPEVLEDQGYDGAMADLWSCGVILFVLLAGYLPFEDSNLMTLYKKISNAEFTFPPWTSFPAKRXITIPEILEDEWFKKGYKRPEFDEQYDTTLDDVDAVFNDSEEHHVTEKKEEEPVALNAFELISMSAGLNLGNLFDSEQEFKRETRFTSKCPPKEIVRKIEEAAKPLGFDVQKKNYKLRLEKVKAGRKGNLNVATEILQVAPSLHMVEVRKXKGDTLEFHKFYKNLSKTLKDVVWKSDDLQTQHAS

SEQ ID NO: 9481 - protein, 445 aa, Pseudomonas aeruginosa PAO1
MQSLLIRNARMVNEGQVREGDLLVRHGRIERIAGCLENCGASREIDAAGRYLLPGMIDDQVHFREPGYPQKGSIASESRAAVAGGITSFMDMPNTRPATLSLEALAEKKRLAAAHSVANYGFHFGVSRDNLDTVAALDPREVAAVKVFMGASTGDMLVDDLPTLERLFASVPTLLLSHCEDTPRIEANLARWRQRFGERIPAAAHPRIRDAEACYRSTALAVELAQRHGTLLHVLHLSTARELALFEDKPLCQKRITAEVCVHHLLFDDSDYARLGHLLKCNPAIKSREDRDALRRALAGNRLDVIGTDHAPHAWAEKQQAYPQAPAGLPLVQHALPALLELVREGWLSLATLVAKTSHRVAELFAIADRGFLREGYWADLVLVSELEHPALASAMPLLSRCNWTPFRHRAFHHRIDTTIVSGQLAWHAGRLSDDCQGLPLRFSR

SEQ ID NO: 9482 - protein, 412 aa, Neurospora crassa
MATTIKASVLHGARDLSVESRPLPTLSPTDVLISIKSTGLCGSDLHYYTHFRNGDIQVHEPLTLGHESSGIITAIGSPSVSSEYGLNVGDRVALEVGQPCEACELCCPPGTGPIGNYSGGHGEESGGKGGESTTTTSRYNICRAMRFRSSAKGWPQFPHAQGTLQEVVAHPAKWCHKLPESVDYTLGALAEPLAVAMHAAGRAGIPSCVPHSSSSMTSSRGAARVKVLVFGAGAVGLLCAAVCKSITKGDAIVVIADIQADRVKFAVENGFADAAVVVPISDKRPETIEEKLEYAKSVAERVKGAELVKGLGGQATAPGGKIMIIGMGNPIQTLPISAASLKEVDLLGVFRYANAYPKVIELLARGDPHLPDLSKLVTQRYSGLESIPMAFDMAARVKDNEGNLVLKVMIDM

SEQ ID NO: 9483 - protein, 186 aa, Glycine max
  misc_feature (131)..(131): Xaa can be any naturally occurring amino acid
KTLSEAVVEAIERQNNIGEEEKRRKLNEWMHHSSYERCLSNEEGREIAEKLGVRNLFWDWDLPRTREGFYRFKGSVTASVVRGCAFSPHADVIWMETAIPNVVECTEFCEGVKSKHPQMMLGYNLSTSFNXYASGLSDEHMKDLIPLIAEVGVCVQSHTVEGLTSTALSSTTISMALAMEGILADS

SEQ ID NO: 9484 - protein, 478 aa, Arthrobacter sp. BP2
MVPAAGLDYYVIHHRGEPPMGVYTTIDPATGDATAQYPEISDAELDTLIKNSAAAYRSWRTTTLEQRRAVLTRTAEIHREQAEELAKLLTLEMGKPIAQARGEVELVASIYQHYADNLEEYLADESLTFRGSGTAVVRTEPIGPLVGVMPWNYPYYQVARFAAPNIALGNTIILKHARNCPQSALAIERVLTEAGLPAGVYANAFISSAQVAAAVADRRVQGVSLTGSEKAGAAVGEVAGRNLKKCVLELGGSDPFIVLDDADIDAAAAAAVIGRLSNGGQACTASKRFIVADSVYEEFLQKFLDAMASWQTGDPTDSGTKLGPLASAAGVEELDELVQDAVSHGAKLLLGGERPDGPGAYYPATVLAGVTPAMRAFTEELFGPVAVVYRVGSLQEAIDLANNSPFGLSSSVFTSDARNAERLAEELEVGMVWINSTSKSSPDLPFGGVKGSGFGRELAGYGFNEFANKKLVRNPGAR

SEQ ID NO: 9485 - protein, 320 aa, Neurospora crassa
MATKTFKLNTGANIPALGLANPSPPPPSIGTWQGESTQVKDAVVAALKSGYRLIDTAYCYGNEEHVGAGLKEAFDQGIVKREDVFVVTKLWATYTSRAEEGLEKSLRNLGLEYVDLFLVHWPLLMNPEGNDDRFPKLPNGERDILRDYSHVQIWKNMEKLVGSGRTKAIGVSNYSKRYLEELLPHAKIVPAVNQIENHPQLPQQEIVDFCKEKGIHIMAYSPFGSTGSPVTSAEPVIKIAEKHGVKPTTVLLSYHLYRGSTVLPKSTNPERIEANAKLIELDAEDQKLLNDYSEGLVKEGKVQRYVYPPFGVDFGFPDKS

SEQ ID NO: 9486 - protein, 431 aa, Corynebacterium efficiens
MSNVGTPRTAQEIQQDWDTNPRWNGITRDYTAEQVAELQGSVVEEHTLAKRGAEILWDAVSAEGDDYINALGALTGNQAVQQVRAGLKAVYLSGWQVAGDANLAGHTYPDQSLYPANSVPNVVRRINNALLRADEIARVEGDTSVDNWLVPIVADGEAGFGGALNVYELQKGMITAGAAGTHWEDQLASEKKCGHLGGKVLIPTQQHIRTLNSARLAADVANTPTVVIARTDAEAATLITSDVDERDRPFITGERTAEGYYHVKPGLEPCIARAKSYAPYADMIWMETGTPDLELAKKFAEGVRSEFPDQLLSYNCSPSFNWSAHLEADEIAKFQKELGAMGFKFQFITLAGFHSLNYGMFDLAYGYAREGMPAFVDLQNREFKAAEERGFTAVKHQREVGAGYFDTIATTVDPNSSTTALKGSTEECQFH

SEQ ID NO: 9487 - protein, 316 aa, Cenibacterium arsenoxidans
MSIQWYPGHMNAARKKAAEAMEKVDMIIEVLDARVPQASCNPMIEELRTFRQRPCLKILNKSDLADPAATQQWLDFYNKQKNVHAVALSCKKPSDVAKIPALSMKIAPHRGTALKPLRIMIMGIPNVGKSTLMNALLKKRVAKVGDEPAVTKMQQRLYLGNNIVLTDTPGMMWPKIAYPSDGLMLAASHAIGSNALIEEEVATFLADIILARYPALVAARYGMKTEGIDGVSVIEGVAVRRGLRIKGGELDLEKAAHIFLQDYRTGLLGRISLETPESRVELLTTFQPPPSLSDVADESAEDAPEENRDDAFSHRR

SEQ ID NO: 9488 - protein, 505 aa, Agrobacterium tumefaciens str. C58
MHEPLTAAEYKAIASDLQFPANAFIDGAFRPAGSGKTFKTINPATGETLADISACDVSDVDYAVGKARAAFDDGRWRLLPPGERKAILLTFAKLLEQHRHELAVMESLDSGKPVSECQTVDIPDTIHTIRWHAELIDKLYDNTAPVGSNALALVVREPVGVVGCVLPWNFPLLMLAWKIGPALASGCSVIVKPAEETTLTTLRVAELAHEAGIPAGVFNVVPGGGKEVGEPIGMHMDVDMVAFTGSTPTGRRFLRYAADSNLKRIVLECGGKNPAVVLDDAEDLDLVAEQVVNGAFWNMGENCSASSRLIVHAKIKDELLQRIGAYMREWRMGDPLDPQNRVGALVSKAHFDKVHSFLEDVKAENLTIVHGGKTEKGIFIEPTVVDAVPPASRLFREEIFGPILSVTTFNTLAEAVALANDTNYGLAASVYTGSLRKAIKLSREIRAGVVTVNCFGEGDATTPFGGYKESGFGGRDKSIFAHDNYCELKTIWIDVSDRSVDETVR

SEQ ID NO: 9489 - protein, 175 aa, Triticum aestivum
  misc_feature (42)..(42): Xaa can be any naturally occurring amino acid
MAPAVMASSATTVAPFQGLKSTASLPVSRRSSGSLGRVSNGXGRIRCMQVWPIEGIKKFETLSYLPPLSTEALLKQVDYLIRSKWVPCLEFSKVGFVFREHNSSPGYYDGRYWTMWKLPMFGCTDATQVLNEVEEVKKEYPDAYVRVIGFDNLRQVQCVSFIAFRPPGCEESGKA

SEQ ID NO: 9490 - protein, 143 aa, Wolinella succinogenes
MFLTRFDPLRDLKEIERRFLTPFGEGGEGGAKSNLRGFAPVVNTREEEKGYFIEVDLPGVQKEDIHIDVKENTLSITGERKLKEEVKEENYYKVESFFGKFQRSFTLPENVDSDAITAQSKDGVLEIFIPKTAPKDAKRIAIS

SEQ ID NO: 9491 - protein, 225 aa, Zea mays
  misc_feature (129)..(129): Xaa can be any naturally occurring amino acid
MCARSMAPRRPCTTAIALPWLALFLCPHLAGGGAVRFFLASSLDLRPITGGFALFSMAAASSATSVHDFTVKDASGKDVDLSTYKGKVLLIVNVASQCGLTNSNYTELSQLYEKYKDQGFEILAFPCNXQFGGQEPGTNEEIVQFACTRFKAEYPIFDKVDVNGDNTAPIYKFLKSSKGSLFGDNIKWNFSKFLVDKEGHVVERYAPTTSPLSIEKDIKKLLGSS

SEQ ID NO: 9492 - protein, 382 aa, Chromobacterium violaceum ATCC 12472
MTEVVLTGKPKKSVALSGVAAGNTALCTVGRSGNDLHYRGYDILDLAGHCEFEEVAHLLVHGKLPNKAELAGYKKKLKSLRGLPASVKAALEALPAAAHPMDVMRSGVSALGCALPEKDDHNLAGARDIADRLMASMGSMLLYWYHYSHNGKRIEVETDDDSIGGHFLHLLHGVKPSYEWVRAMHTSLNLYAEHEFNASTFTARVIAGTGSDMHSAITGAIGALRGPKHGGANEVAFEIQQRYENPDEAEADIRARVERKEVVIGFGHPVYTISDPRNKVIKEVARELSRSNSDMKMFDIAERLESVMWDVKKMFPNLDWFSAVSYHAMGVPTAMFTPLFVISRTSGWAAHVIEQRQDGKIIRPSANYIGPEDQAFVPLEKR

SEQ ID NO: 9493 - protein, 218 aa, Oryza sativa (indica cultivar-group)
MEVEEAAYRTVWSEPPKRPAGRTKFRETRHPVYRGVRRRGGRPGAAGRWVCEVRVPGARGSRLWLGTFATAEAAARAHDAAALALRGRAACLNFADSAWRMPPVPASAALAGARGVRDAVAVAVEAFQRQSAAPSSPAETFADDGDEEEDNKDVLPVAAAEVFDAGAFELDDGFRFGGMDAGSYYASLAQGLLVEPPAAGAWWEDGELAGSDMPLWSY

SEQ ID NO: 9494 - protein, 343 aa, Vibrio cholerae O1 biovar eltor str. N16961
MKIKALSKLKPEQGIWMNEVDMPELGHNDLLIKIKKTAICGTDVHIYNWDEWSQKTIPVPMVVGHEYVGEVVGIGQEVRGFQIGDRVSGEGHITCGHCRNCRGGRTHLCRNTIGVGVNRTGCFSEYLVIPAFNAFKIPDGISDDLASIFDPFGNAVHTALSFDLVGEDVLITGAGPIGIMAAAVAKHVGARHVVITDVNEYRLDLARKMGVTRAVNVAEQNLEDVMKELGMTEGFDVGLEMSGVPSAFSAMLKTMNHGGRIALLGIPPSSMAIDWNQVIFKGLVIKGIYGREMFETWYKMASLIQSGLDISPIITHHFKVDDFQKGFDIMRSGASGKVILDWQ

SEQ ID NO: 9495 - protein, 424 aa, Acinetobacter sp. ADP1
MSEATGKKAVLKLDGKEIELPIYSGTLGPDVIDVKDVLAAGHFTFDPGFMATASCESKITFIDGNEGVLLHRGYPIDQLATQADYLETCYLLLNGELPTPEQKQEFDAKVRNHTMVHDQVSRFFNGFRRDAHPMAIMVGVVGALSAFYHNQLNIEDVNHREITAIRLIAKIPTLAAWSYKYTVGQPFIYPRNDLGYAENFLHMMFATPADRDYKVNPILAKAMDRIFTLHADHEQNASTSTVRLAGSTGANPYACIAAGISALWGPAHGGANEAVLKMLDEIGTVENVAGFMEKVKTKEVKLMGFGHRVYKNFDPRAKVMKETCDEVLAALGINDPQLELAMELERIALSDEYFIKRNLYPNVDFYSGIILKAIGIPTEMFTVIFALARTVGWISHWLEMHSAPYKIGRPRQLYTGETKRDIKR

SEQ ID NO: 9496 - protein, 397 aa, Xylella fastidiosa 9a5c
MSASFSPHTITLIKSTVPLLAEHGTTIIEAMYHRLFEDPQIEALFNQANQKNGTQIHALAGAILAYARNIDNPGVLASAIERIAQKHVGYAIHPEHYPHVATALLGAIKKVLGDVATSEVLEAWGEAYWFIANLLKDREAVIREGIMTKNGGWIHWRRFVISKRIPESETITSFMLHPEDGGPVVPHQAGQYLTFRFDAAGMPGMKRNYSISCGPNSDHYRITVKREHGTGASAFLHDQAKVGTIIECTPPVGDFFLPSVIERPIVLLSGGVGLTPMVSMMEQIAEAHPDAQVWYVHGTQNRETHAMDAHIRALVSRHKHMKATTFYTQRREADDAEAGFITIDWLRANTPFQKADFYLCGPRPFLRTFVRDLIGAGVPAVQVHYEFFGPMDEEMAA

SEQ ID NO: 9497 - protein, 158 aa, Hevea brasiliensis
SDEEHHFESKADAGASKTYPQQAGTIRKNGYIVIKNRPCKVVEVSTSKTGKHGHAKCHFVGIDIFNGKKLEDIVPSSHNCDVPHVTRTDYQLIDISEDGFVSLLTENGNTKDDLRLPTDENLLTQIKDGFAEGKDLVVTVMSSMGEEQICALKDIGPK

SEQ ID NO: 9498 - protein, 440 aa, Triticum aestivum
MEDAAEGKTNVLQGRYELGRVLGHGNFGRVHAARDLRTGRGVAVKVVAKDKVERAGMVEQIKREIAVMKMVSHPNIVELHEVLATRTKIYLALELVRGGELFARISRAGRLREDVARRYFRQLISAVDFCHGRGVYHRDLKPENLLLDEAGNLKVADFGLSALAGHARPDGLLHTACGTPAYVAPEVLGGNGYDGAKADIWSCGVILYVLLVGALPFQDENLMSMYRKMQRGGFLCPSWVSKDARKLIGRLLDPNPSSRITIASLVESPWFKKTSPIPSPLLEPVPPAAARGNGEDKDEPPEALNAFHLISLSAGFDLSPLFDQEPATGRGTRGGVMRFATREPASGVISRLEGLATGGAMRVTKSGARGGRLEGAERGRKGRLGVAAEFFSVAPSVLVVDVKKDGGDTMEYRSFCSDELRPALKDIVWAAAAAAAAFPR

SEQ ID NO: 9499 - protein, 373 aa, Bacteroides thetaiotaomicron VPI-5482
MKLFDVYPLYDINIVKGQGCKVWDENGTEYLDLYGGHAVISIGHAHPHYVEMISNQVATLGFYSNSVINKLQQQVAERLGKISGYEDYSLFLINSGAEANENALKLASFYNGRTKVISFSKAFHGRTSLAVEATNNPTIIAPINNNGHVTYLPLNDIEAMKQELAKGDVCAVIIEGIQGVGGIKIPTTEFMQELRKVCTETGTILILDEIQSGYGRSGKFFAHQYNHIQPDIITVAKGIGNGFPMAGVLISPMFKPVYGQLGTTFGGNHLACSAALAVMDVIEQDNLVENAKAVGDYLLEELKKFPQIKEVRGRGLMIGLEFEEPIKELRSRLIYDEHVFTGASGTNVLRLLPPLCLSMEEADEFLARFKRVL

SEQ ID NO: 9500 - protein, 526 aa, Zea mays
  misc_feature (242)..(242): Xaa can be any naturally occurring amino acid
  misc_feature (246)..(246): Xaa can be any naturally occurring amino acid
MKPPSSLVHYFKLLVLLALARLTMHVPDEDVLLSLGALRLDGHFSFHDVSAMARDFGNQCSFLPAAVLHPGSVSDIAAIVRHVFSLGEGSPLTVAARGHGHSLMGQSQAAQGIVVRMESLRGPRLQVNDAGVSPPSVDAPGGELWINVLRETLKHGLAPKSWTDYLHLTVGGTLSNAGVSGQAFRHGPQVSNVNQLEIVTGRGDVVTCSPDDNADLFYAALGGLGQFGIITRARIALEPAPXMVRXWIRVLYRLVESFTEDQEMLIMAENSFDYVEGFVIINRTGVLNNWRASFKPQDPVEASHFQSDGRVLYCLELTKNFNSDDTDTMEQEVTVLLSRLRFIQSTLFHTDVTYLEFLDRVHTSELKLRAQSLWEVPHPWLNLLIPRSSIRRFATEVFGRILKDSNNGPILLYPVNKSKWDNKTSVVIPDEEIFYLVGFLSSAPSLSGHGSIAHAMSLNSQIVEFCEEADIGMKQYLAHYTTQEQWKTHFGARWETFERRKHRYDPLAILAPGQRIFPKASLPLSL

SEQ ID NO: 9501 - protein, 204 aa, Oryza sativa (japonica cultivar-group)
MADEEHEVYGQEIPLDGEDVDMGAPGDEAAKMQELDEMKRRLKEMEEEANALREMQTKVAKEMQGLDPNASSSESKEEMDARSVYVGNVDYACTPEEVQQHFNSCGTVNRVTILTDKFGQPKGFAYVEFLEVEAVQEAVKLNESELHGRQIKVAPKRTNVPGMKQPRGGRGFGGHPYMRPYGAPFYNPYGYGYPRFRRPRRPYF

SEQ ID NO: 9502 - protein, 502 aa, Exiguobacterium sp. 255-15
MSTVHEKTIEMKRSVYHLVINGEQVEGTSGETFKTYNPATGEVIAEVAKASKADADRAVQAARDAFDHGKWKMWPVGRRSQVLNKIAGIMRSRFNELVELEILDTGKSLAAAQGQITQAIEDFEFYAGAIVGHRGSVNNVPGQFHNYTEKEPVGVCAQIIPWNYPLMMAAWKVAPAIAVGCSVVVKPATLTPLTAIILGEICLEAGVPAGVVNVIPGSGREIGNHLVEHPNVNKVAFTGSTPVGKDIMGRASESLKRVTLELGGKSPNLVFEDADITAAVDGSLFGIFYNSGQSCEARSRLYIHEDIYDTFMEQFVAKTKQLVLGNPFDKGTHVGAIIDQQQLDVIDGYVQSAKADGATILTGGQVEKVAGFEEGFWYAPTIIADVTHDMKAVQEEIFGPVVVVMKFKDEKEAVRLANDTEFGLGSAIWTKDGARATRIANQIKAGIVMINCPFSAFPGTPFGGYKQSGFGRELCIETLDLYTETKSILSYYGSRPLNPFGL

SEQ ID NO: 9503 - protein, 76 aa, Zea mays
CLYVALQMSVQDANMSSDTDMSKVFEDRTFVSSILNSLPGVDPNDPSVKDLLASLHSQGEQEKKEDTSDKTEDDKN

SEQ ID NO: 9504 - protein, 115 aa, Hordeum vulgare subsp. vulgare
MARTAATKLALVALVAAMLLVAADAAITCGQVSSALGPCAAYAKGSGTSPSAGCCSGVKRLAGLARSTADKQATCRCLKSVAGAYNAGRAAGIPSRCGVSVPYTISASVDCSKIH

SEQ ID NO: 9505 - protein, 474 aa, Erwinia carotovora subsp. atroseptica SCRI1043
MHDKLLIEGKLIAGNGEALAVFNPATGEQIAAIPQADLHQIDAAVLAAESAFAHWGQTTPKTRATLLLKIADAIEENAEVFAKLESLNCGKPYHAVLNDEVPAVADVFRFFAGAARCLSGSAAGEYLEGHTSMIRRDPVGVVASIAPWNYPLMMASWKLAPALAAGNCVVLKPAEQTPLTTFYLAHLLADILPAGVVNIVFGRGADIGDALTGHEKVNMVSLTGSIATGAHILAHTAASVKRTHMELGGKAPVIVFDDADIDQVVDGIRSFGFYNAGQDCTAACRLYVQRAVYDEVVEALGKAVATLKIGDPRDETTELGPLITEPQLERVMGFVERAKALPHITVVTGGERVKGTGFYFQPTVLAGAKQDDEIVQKEVFGPVISITSFDDEAQVIGWANASNYGLASSVWTRDIGRAHRLAACLQYGCTWVNTHFMLVSEMPHGGQKLSGYGKDMSMYGLEDYTIVRHIMIRH

SEQ ID NO: 9506 - protein, 115 aa, Hordeum vulgare subsp. vulgare
MARSAATQLVLVAMVAAMLLVAADAAISCGQVSSALRPCISYASGNGGILPPACCSGVKRLAGAAQSTADKQAACKCIKSAAGGLNAGKAAGIPSMCGVSVPYAISASVDCSKIR

SEQ ID NO: 9507 - protein, 379 aa, Antarctic bacterium DS2-3R
MTEPTIHKGLAGVTADVTAISKVNSDTNSLLYRGYPVQELAAKCSFEQVAYLLWNSELPNDSELKAFVNFERSHRKLDENVKGAIDLLSTACHPMDVARTAVSVLGANHARAQDSSPEANLEKAMSLLATFPSVVAYDQRRRRGEELIEPREDLDYSANFLWMTFGEEAAPEVVEAFNVSMILYAEHSFNASTFTARVITSTLADLHSAVTGAIGALKGPLHGGANEAVMHTFEEIGIRKDESLDEAATRSKAWMVDALAQKKKVMGFGHRVYKNGDSRVPTMKSALDAMIKHYDRPEMLGLYNGLEAAMEEAKQIKPNLDYPAGPTYNLMGFDTEMFTPLFIAARITGWTAHIMEQVADNALIRPLSEYNGPEQRQVP

SEQ ID NO: 9508 - protein, 119 aa, Bartonella chomelii
NEACLKMLQEIGSIEKIPEFIARAKDKNDPFRLMGFGHRVYKNYDPRAKLMQKTCHEVLKELNIKDDPLLDIAMELEKIALSDEYFIEKKLYPNVDFYSGITLKALGFPTEMFTVLFAL

SEQ ID NO: 9509 - protein, 352 aa, Rhodococcus sp. Phi2
MRVFAVQPEDTTIHDLQVPTPSPEGREVLLRVVRAGVCHTDTHLRAGGYDLGSRGMMSMKERGIEYPMVLGHEVVGVVEKVGDGVESVQVGDIRLIYPWIGCGECRQCRAGHDNRCAAGKNLGVARHGGYAENILVPDEKYLVDIDGLDPSWAATLACSGLTAYSAVDKALPLEPDEPVVVFGAGGLGLTAIAILRSRGHRNICAVDVAERNLALARDMGASSTVLSGTGSGADDIRGAAGGPAGAVIDFVNNGATATTAFEVLAKAGIMIQVGLFGGEVTLPTALLALRMIRIEGSFVGTLVQMQDLVRLAQRGELPHIPVVERSLSAAAVSQALDDLTAGGVAGRIVLTA

SEQ ID NO: 9510 - protein, 405 aa, Pisum sativum
PVYISIGCNLPAIPHPTFSRDPVPFSLAPKLSNQMGLEAAVEAAAEFLNKAVKPVLVGGPKLRVAKASDAFVELADASGYALAVMPSAKGMVPEHHPHFIGTYWGAVSTAFCAEIVESADAYLFAGPIFNDYSSVGYSLLLKKEKAIIVMPDRVVIANGPAFGCVLMNDFLKALAKRLKHNNVAYENYHRIFVPDGTPLKSASKEPLRVNVMFQHIQKMLSSETAVIAETGDSWFNCQKLKLPEGCGYEFQMQYGSIGWSVGATLGYAQAVPEKRVIACIGDGSFQVTAQDVSTMLRCGQKTIIFLINNGGYTIEVEIHDGPYNVIKNWNYTGLVDAIHNGEGKCWTTKVFCEEELVEAIAKATGPKKDSLCFIEVIVHKDDTSKELLEWGSRVSAANSRPPNPQ

SEQ ID NO: 9511 - protein, 204 aa, Zea mays
  misc_feature (92)..(92): Xaa can be any naturally occurring amino acid
  misc_feature (193)..(193): Xaa can be any naturally occurring amino acid
MEDEEHEVYGQEIPVDGEDVDMAAGDDATKLQELDDMKRRLKEMEEEAAALREMQAKVAKEMQGVDPNATTSENKEEMDSRSVFIGNVDYAXCTPEEVQQHFNSCGTVNRVTILTDKFGQPKGFAYVEFVEVEAVQEAIKLNESELHGRQLKVAPKRTNVPGMKQPRGRGFNPYHGHPYMRPYGYSPYGYGEXPRFRRPRRPYF

SEQ ID NO: 9512 - protein, 459 aa, Rhodococcus sp. Phi2
MGVYTTTDPATGEEVAQYPEISDAQLDELIGRSAAAYRSWRTTPLEQRRAVLSRAAEIHREQADELAALLTLEMGKPITQAKGEVALVASIYQYYADHAEEFMADEPLDIAGSGTAVVRTEAIGPLVGVMPWNYPYYQVARFAAPNIALGNTIILKHARNCPQSALAIERVLTEAGLPDGVYLNAFISSAQVAAAIADPRVQGVSLTGSEKAGSAVGEVAGRHMKKCVLELGGSDPFIVLGDADVDAAAAAAVVGRLGNGGQACTASKRFLVEEPVYDEFVRKFLDGMISWQPSDPTSPETKLGPLSSRSAVDELDELVQDAVSRGAQVLTGGDPRDEKGAYYPPTVLVGVTPDMRAYYEELFGPVAVVHRVGSLDEAIEAANDSPFGLSSSVFTSDPQKADRVAEELETGMVWINSTSKSSPDLPFGGVKRSGVGRELARFGFDEFANKKLVRKPGKK

SEQ ID NO: 9513 - protein, 510 aa, Zea mays
  misc_feature (233)..(233): Xaa can be any naturally occurring amino acid
  misc_feature (246)..(246): Xaa can be any naturally occurring amino acid
MGAFAKEEHQFLAELGLAQRNPGAFACGAWGGSGPTVTSTSPTNNQVIAEVVEASVHDYEEGMRACFDAAKTWMAIPAPKRGEIVRQIGDALRAKLHHLGRLVSLEMGKILPEGIGEVQEIIDMCDYAVGLSRQLNGSIIPSERPNHMMMEVWNPLGVVGVITAFNFPCAVLGWNACIALVCGNCVVWKGAPTTPLITIAMTKIVASVLEKNNLPGAIFTSFCGGTEIGQAIXLDIRIPLVSFTGXSTRAGLMVQQQVSARFGKCLLELSGNNAIIVMDDVDIQLAVRSVLFAAVGTAGQRCTTCRRLILHENIYQTFLDQLVEVYKQVRIGDPLEKGTLLGPLHTPASKENFLKGIQTIKSQGGKILFGGSAIESEGNFVQPTIVEITPSAPVVKEELFGPVLYVMKFQTLKEAIEINNSVPQGLSSSIFTKRPDIIFKWLGPHGSDCGIVNVNIPTNGAEIGGAFGGEKATGGGREAGSDSWKQYMRRATCTINYGSELPLAQGINFG

SEQ ID NO: 9514 - protein, 186 aa, Triticum aestivum
  misc_feature (85)..(85): Xaa can be any naturally occurring amino acid
  misc_feature (145)..(145): Xaa can be any naturally occurring amino acid
  misc_feature (170)..(170): Xaa can be any naturally occurring amino acid
MAPAVMASSATTVAPFQGLKSTAGLPVSRRSSGSLGRVSNGGRIRCMQVWPIEGIKKFETLSYLPPLSTEALLKQVDYLIRSKWXVPCLEFSKVGFRLPVKHNSSPRVLRRSILGQCGSCLCSGCTDATQVLNEVEGGQEGYPDXFRVIGFDNLRQVQCVSFIAFRPQVXRSPGKAKLQVETMAYV

SEQ ID NO: 9515 - protein, 193 aa, Oryza sativa (japonica cultivar-group)
MSLSTIARRLCCSRPTSGGRLSAVWAHLYSTEAAKDTGAKKYKYPEVYDPYGPMSPPSQKVVDLADRIAALPPEEIKQIAPALLLRLNQPPPQAISGQGFSFSPQGGGGAAGAAKAEEKKAEKTVFDVKLEKFDAAAKIKIIKEIRTFTDLGLKEAKELVEKAPVILKQSLTKEEAEAIIEKIKVAGGVAVME

SEQ ID NO: 9516 - protein, 481 aa, Bacteroides thetaiotaomicron VPI-5482
MEDLNFRKGDAKTDVFGSDRMLQPSPVERIPDGPTTPEVAYQMVKDETFAQTQPRLNLATFVTTYMDDYATKLMNEAININYIDETEYPRIAVMNGKCINIVANLWNSPEKDTWKTGALAIGSSEACMLGGVAAWLRWRKKRQAQGKPFDKPNFVISTGFQVVWEKFAQLWQIEMREVPLTLEKTTLDPEEALKMCDENTICVVPIQGVTWTGLNDDVEALDKALDAYNAKTGYDIPIHVDAASGGFILPFLYPDTKWDFRLKWVLSISVSGHKFGLVYPGLGWVCWKGKEYLPEEMSFSVNYLGANITQVGLNFSRPAAQILGQYYQFIRLGFQGYKEVQYNSLQIAKYIHGEIAKMAPFVNYSENVVNPLFIWYLKPEYAKSAKWTLYDLQDKLSQHGWMVPAYTLPSKLEDYVVMRVVVRQGFSRDMADMLLGDIKNAIAELEKLDFPTPTRMAQEKNLPVEAKMFNHGGRRHKTVKK

SEQ ID NO: 9517 - protein, 106 aa, Capsicum annuum
MLTDFVRGVDCPHAEAVTCGQIQVGVVNCLPYLQNRGPLGRCCGVIKDLLKLCKTPHERRKSCKCVKTAANTIKGIDFGKAAGLSGVCGVKIPFEISPSVDCSKVK

SEQ ID NO: 9518 - protein, 114 aa, Capsicum annuum
MDMFGKIACFVLLCMVVVAPSAEALSCSQVTSGLAPCLPYLQGRGPLGGCCSGVKDLLAAAKTPADRKTACTCMKSTANSIKGIDAGKAASIPATCGVNIPYKISPSTDCTKVE

SEQ ID NO: 9519 - protein, 256 aa, Triticum aestivum
VGREGAMEQGEEDGDWMMEPAAGKKGGVMIDRKKRFSEEQIKSLESMFATQTKLEPRQKLQLARELGLQPRQVAIWFQNKRARWKSKQLERQYAALRDDYDALLSSYDQLKKDKQALLNQLEKLAEMLREPGGAKCGDNAGAAARDDVRLAVAVMRMMGEFGEAGGASKACAAAKGYAGRDGRGLSGKDALVGDDDDGACLLLPTSLDGPTAHSGGFAADGDGPESLPSSRRRPYPAPLEAVPSVRGREYKCQQLS

SEQ ID NO: 9520 - protein, 484 aa, Synechococcus elongatus PCC 6301
MAAPILFWHRRDLRLSDNIGLAAARAQSAQLIGLFCLDPQILQSADMAPARVAYLQGCLQELQQRYQQAGSRLLLLQGDPQHLIPQLAQQLQAEAVYWNQDIEPYGRDRDGQVAAALKTAGIRAVQLWDQLLHSPDQILSGSGNPYSVYGPFWKNWQAQPKPTPVATPTELVDLSPEQLTAIAPLLLSELPTLKQLGFDWDGGFPVEPGETAAIARLQEFCDRAIADYDPQRNFPAEAGTSGLSPALKFGAIGIRQAWRAASAAHALSRSDEARNSIRVWQQELAWREFYQHALYHFPSLADGPYRSLWQQFPWENREALFTAWTQAQTGYPIVDAAMRQLTETGWMHNRCWMIVASFLTKDLIIDWRRGEQFFMQHLVDGDLAANNGGWQWSASSGMDPKPLRIFNPASQAKKFDATATYIKRWLPELRHVHPKDLISGEITPIGRRGYPAPIVNHNLRQKQFKALYNQLKAAIAEPEAEPDS

SEQ ID NO: 9521 - protein, 114 aa, Capsicum annuum
MEMVGKIACVVLLCMVVVAPHAEALTCGQVQSRMTPCLPYLTGSGPLGRCCGGVKGLLGAAKTPADRKTVCSCLKSAAGSIGGINVRKAAGLPNMCGVNIPYQISPSTDCTKVQ

SEQ ID NO: 9522 - protein, 125 aa, Thermoanaerobacter tengcongensis MB4
MSKEEILQAIKNMTVLELAELVKALEEEFGVSAAAPVAVAAAPAAGAPAAAPAEEKTEFDVILQEVGSDKIKVIKVVREITGLGLKEAKDLVDSVPKPIKEGVSKEEANQIKAKFEEVGAKVEIK

SEQ ID NO: 9523 - protein, 441 aa, Chlorobium tepidum TLS
MKSFLSKSGAIAAGLLLAAATFSPPIQAATPTPDAVNAFAIDNFFLFICAVLVLFMQAGFALVETGLNSAKNAVNILFKNLMDMAIGGIIYYFVGYGLMYPGEAFSGGFFGFGGPGISTAMPEIAGGTLYPAVDFLFQVAFAATAATIVSGAVAGRMQFRAYLIYSAVISAVVYPISGFWLWGGGWLKALGFHDFAGSLLVHALGGFAGLAGAIVLGPRIGRFNEDGTPNAMPGHNLALSTLGVFILLIGWYGFNPGSQLAIVGGDNTAAVMKIAVNTTLAACAGAVVAMIFAWGLFKKPDLTMALNGMLAGLVAITANCDVVSYNASLIIGAVGGILVVLGIMLLDKLRIDDPVGAWPVHGLNGIWGGVAAWIFGGQPMVAQLVGSLVVPFWGFVTMMVLFLILKAMGILRVHKDEEMKGLDISEHEEEAYYGFDIYTTQ

SEQ ID NO: 9524 - protein, 309 aa, Bartonella henselae
DGNEGILLYRGYPIDQLAEKGDFLESCYLLLYGELPTKQEKIDFDRCIMQHTMVHEQFARFFHGFRRDSHPMAVMIACLGAMSAFYHDSIDITDPQQRMIASIRLISKVPTLAAMAYKYSIGQAFVYPRNDLSYAANFLRMCFSVPCEEYKINPVLTRAMDRIFTLHADHEQNASTSTVRLAGSSGANPFACIAAGVACLWGPAHGGANEACLKMLQEIGSVERIPEFIARAKDKNDSFRLMGFGHRVYKNYDPRAKIMQQTCHEVLKELNIQNDPLLDIAITLENIALNDEYFIEKKLYPNVDFYSGI

SEQ ID NO: 9525 - protein, 631 aa, Zea mays
  misc_feature (179)..(179): Xaa can be any naturally occurring amino acid
  misc_feature (191)..(191): Xaa can be any naturally occurring amino acid
MASVKLGSKPDAFKRQGQAWFCTTGLPSDVTVEVGDMSFHLHKFPLLSKSAFLERSIEENSDQEECIIKLNDIPGGAKSFELVARFCYGVKIELSPANVVYLRCASEHLEMTEEVAEENLIAQSEMFLNQVVLRNWKDSLAALETCDDLLPHAEDLQIVNRCIESLASKATSNPNLFGXWPIREHGMMQSXPGGSVLWNGISTGARPRNFNSDWWYGDASSLSFPMYKRLISTMESRGIRPEIIAGSLTYYAKKYLPGLRRHSHSMGTMPLTATLSEVEQKNLLEEIDRLLPLHRGIASTKVLLGLLRTAMILKASPTCISNWEKRIGMQLDQATLEDLLLPNFSYTMETLYNVECVHRILDHFLAMDQANGGESPCLDDVMASPSLTPITSVAKLIDGYLAEIAPDINLKPPKFQALASAIPEYARPLDDGLYRAIDIYLKAHSWLSEAEREQFCRLLDCQKLSLEACTHAAQNERLPLRVVVQVLFFEQLQLRTSIAGCLLVSDNLEGSRPLRSGIATSGEAGGWATAVRENQVLKVGMDNMRTRLAELEKECSSMRQEIEKLGGRAGKGGGGGWASRVVPRRLGLKVRSQMCSAQEGSVSEQHRSMSAKLDKLQAKVSKQKKQLAADA

SEQ ID NO: 9526 - protein, 484 aa, Bordetella parapertussis 12822
MENLGYPARLELYVAGQWRGVEGRRTQVVVNPSTQQPLGELPLASAEDIDDALAAADQAFGDWARTTAWERADILQRAAALIEARRDRLAVVLTLENGKPLADSHGELDRVVETILWCAEEGKRTYGRVLPARAQRLSQSSLKRPVGPVAAFVPWNFPAALAARKLAAAMAAGCTVVLKPAEETPAICIELVRAFVDAGTPAGVVNLLYGVPAQVSERLIASPIIRKVSFTGSVAVGRLLASMAAGHLKPATMELGGHAPVVVFDDVDADRVAKMCVGFKYRNAGQVCLSPSRFYVHERIADRFAESFVRHAGLLRVGDGMEEGVQMGPLNNVLRLQAAERLVEQAVGAGASLALGGRRIGQRGYFYPPTVLEGVPDAADILAEEPFCPVAPIMRFGSMDEVIGRANHPSLGLAAYAFTNRMATSAEFAERIEAGWIGINNFVPALADAPIGGMKDSGLGYEGGPEGLDAYLHARFVSQLNVEV

SEQ ID NO: 9527 - protein, 58 aa, Glycine max
MSALFNFHSFLTVILLGICACTYFKMQFPAILDQKTGFRGFFWKAARIGASVLCLTAV

SEQ ID NO: 9528 - protein, 474 aa, Burkholderia cepacia R18194
MRTSQQSYIDGQWLDPADSRSIDVIDPSTARPYAQLRIGGTADVDRAVGAAKQAFDTYSRWPVDERVALLRRVLEIYQHRYEEVAQTISQGMGAPIAFARAAQAAVGTAHLEQTIRALQSFRFSTQTDSLLVSHEPIGVCALITPWNWPINQIVCKVAPALAAGCTMVLKPSEIAPFSAILFAEILDEAGVPPGVFNLVHGYGHEVGDALSRHPDVDMVSFTGSTRAGVEVAKAAADTVKRVHQELGSKSPNLILPDADIEDAVTRGVRSCFSNSGQSCNAPTRMLVHVDHLALAEQAARREAERTVVGDPRSTETGIGPVVSRTQFDRIQHFIRLGIEEGAMLVAGGPGRPDGLGDGFYVRPTVFSNVTPDMTIAREEIFGPVLAIMTYRTEDEAVALANDSVYGLAAYVQTKDPERARKVAARLRVGNVHINYPPWNPAAPFGGYKRSGNGREYAEFGLVEYLETKGTTGYA

SEQ ID NO: 9529 - protein, 465 aa, Burkholderia cepacia R18194
MNAVDVNLDADLQAIGKRHLLMHFTHADAYRDHALTVFDRGEGCWLVDRNGKRYFDGLAGLYCVQVGYSHGAEIGDAIREQMVRLPFATNWGVGHEPAIKLAHKLAALAPEGLNRVFFTSSGSESNESAIKLVRQYHQSRGEPQRRKFIARRVAYHGTSFGALALNGMTNFRKHFEPLMSGVRHVGNTKRYGRPVGETEAQFTRHLLDEIESLIVQEGPDTVAALVVEPLQNAGGSLTPPAGYAAGLRDICDRHGVLLVADEVICGFGRLGEYFGSARYGLKPDIITFAKGIASGYVPLGGVIASDTVVDTVLNGPQQMFLHGATYGGHPVACTAALANLAIMEREGVLENVRSNEAVFRQTLDGLLELPCVGDVRGDGYHYSLELVTDKAARRWAAGVSAQAFVSTLLAPAIFDAGLLCRAGVDHEGTPIVQFSPPLVMSRDEIVWFVAKIRDILVDTYARATR

SEQ ID NO: 9530 - protein, 144 aa, Gibberella zeae PH-1
MDCITAFNDLKLNKKYKFIVYKLSDDYKEIVIDKASESRDWEDFRETLVNATAKSRTGAVGKGPRYAVYDFEYNLASGDGIRNKITFIAWSPDDAGIQPKMIYASSKEALKRSLTGIATELQANDTDDIEYDSILKTVSKGLAA

SEQ ID NO: 9531 - protein, 240 aa, Papaver somniferum
VQLRRMENKINRQVTFSKRRSGLLRPCAEMSVLCDAEVALIVFSTKGKLFEYSTDSGMDRILERYERYSYAERELVTTEIDQGNWSLEYSKLKSKIEILQKNQRHFMGEDLQSMSLKELQNLEQQLDVALKQIRSRKNQLMYESISELQKKEKALQEQNNKLGKQLKEKEKEVAAQQQQASQFSQGQSSPSFLLSQSLPSLNIGSGSYQARGGDNGNEEGNRTQTTRTNTATLMPPWMLN

SEQ ID NO: 9532 - protein, 348 aa, Corynebacterium sp. ST-10
MKAIQYTRIGAEPELTEIPKPEPGPGEVLLEVTAAGVCHSDDFIMSLPEEQYTYGLPLTLGHEGAGKVAAVGEGVEGLDIGTNVVVYGPWGCGNCWHCSQGLENYCSRAQELGINPPGLGAPGALAEFMIVDSPRHLVPIGDLDPVKTVPLTDAGLTPYHAIKRSLPKLRGGSYAVVIGTGGLGHVAIQLLRHLSAATVIALDVSADKLELATKVGAHEVVLSDKDAAENVRKITGSQGAALVLDFVGYQPTIDTAMAVAGVGSDVTIVGIGDGQAHAKVGFFQSPYEASVTVPYWGARNELIELIDLAHAGIFDISVETFSLDNGAEAYRRLAAGTLSGRAVVVPGL

SEQ ID NO: 9533 - protein, 487 aa, Rubrivivax gelatinosus PM1
MREPNEADDAAVARARAADAAPLRSVAALPGPRGWPLIGNLLQFDLPRLHRQFEDWADRHGPTYRLRLGRREVLVISDAETIAALLRDRPDTWRRMRPIEAVIREAGGHGVFSAEGDDWRRQRRLVMSAFDPGHLKRFYPSLQRVTERLMASWREAARRGEAIDLQASLMRYTVDVTTGLAFGVDLNTIDAPHPLQEHLDKLFPMLFRRVNLPFPYWHYLRLPIDREYDRHLRRVHEAVRGFVQAARQRLQDEPTRRERPTDLLEAMLAARDADGSALTEEEVAGNVLTVLLAGEDTTANTLGWAIWLLHEHPDDWQALVAEVDAALGDARLPPSFDAARGLASIEASVGEAMRLKPVAPLLFMEANRETALAGFRLPPGAVVFCLMRRAALDARLAEDVADFRPGRWQDGADRAVQKASMPFGAGPRLCPGRYLALLEMKMVLGMLARNFELLEVGPEGGGAPGERMAFTMFPVGLKMRLAERARR

SEQ ID NO: 9534 - protein, 228 aa, Arabidopsis thaliana
MAESQTGGGGGGSHESGGDQSPRSLNVREQDRFLPIANISRIMKRGLPLNGKIAKDAKETMQECVSEFISFVTSEASDKCQREKRKTINGDDLLWAMATLGFEDYIDPLKVYLMRYREMEGDTKGSGKGGESSAKRDGQPSQVSQFSQVPQQGSFSQGPYGNSQSLRFGNSIEHLEVLMSSTRTLFITIFRDSTMPVVSENLSDPLSIDMDCEAIYHHFIGLLILSCK

SEQ ID NO: 9535 - protein, 274 aa, Mycoplasma gallisepticum
MNHSKINWFPGHMKKTLDDINKIKKHIDLVIQVLDARAINLTSNPDLLEIFKQKKIINVALKSDLADLSYQYDPETIVTNIRDHQFSNFLLNKLHQILSDKIKRLQAKGLVTPHFNIMVIGLPNIGKSSLINKLIKKNHNKVENKAGVTKRQTFVKLNKNFTLYDTPGVLYKRIDDFILGAKLSLLNVINLEVIPMQEVLSFAYSYLNQHYHNQLLEWAKQEIIPEQFHEFIEQYAHKKGFLNKNNAIDLNATYMNFYQDISLAKIAKVNYEKN

SEQ ID NO: 9536 - protein, 500 aa, Agaricus bisporus
MPSIFTHQWDTPVYKGSTSINTGLFINGEFVDGVKNTTIDVVNPANGKLITKISEATEADIDIAVEAAHKAFETTWGLNCSGSKRGDMLYKLAQLMEKNIDDLSAIEALDNGKTFLWAKSVDLSLSISTIKHYAGWADKNFGQVIETDEKKLTYSRHEPIGVVGQIIPWNFPLLMLAWKIGPALATGNCIVLKPSEFTPLSALRMCALIQEAGFPPGVVNVVTGYGSTTGQAISSHMKIDKVAFTGSTLVGRKVMEAAAKSNLKNVTLELGGKSPVVIFDDADLEQSVNWTAHGLFWNHGQACCAGTRIFVQEGIYDKFLQKFTDKIKEIKLGDPFGLGIDQGPQVSQIQYDRIMSYIESGRAEGATVHVGGERHGNEGYFIQPTIFTDTTPDMKIVKEEIFGPVGAVIKFKDGKEVIKQANDSNYGLAAAVFSQDINKAIETAHAFKAGTAWVNCANTIDAGVPFGGYKQSGIGRELGEYALHNYTNVKAVHVNLNWKM

SEQ ID NO: 9537 - protein, 1786 aa, Neurospora crassa
MYQNGQRDPPRPFAVPPPPPPMSPPQVGSGVAGINSVMNIPPPPPRYPGAPGTVGGSLLPPPPGPPPGNPGFPPSAIAPPSALGAAPWHGAWGRPYNGQTAFNLPPPPPGGNGGLQAYNPLLHAQAAAAAAAAAASASNTPGPPATSITIPPPPPPSEQMSATYIPSAGDTYGEGVGIPGLGLPEELGGPGNWTGAEQQRLGGTSMEDAHRLHAAPTADRGLSTTSNTPNSSSAIPPELAAQWPLDRVLMWLQANSFSQDWVNTFKVLNLHGAQFLELGSGHGGRGNFGMMHQQVYPQLAHECQMSKTGWDQTKEREEGKRMRRMIRGIVTGRSVDPSKVAASGGAQGGAGGAGGGGHARRESVSASVPPSAGPDSADSPNVEFSKSHLFVQEEQVQSGPKAPGPGFAGRRFSQSRATTMPLLTSTMSSGEPNHRSMMRNLDIDSARRHSPSTSNVSESGDLNAGTFRTVGRERQDSPIGGSPNPSSALFPSNAGNTILSSSPHRSGSRFGHRSRNSSDSVSSNAAQYGSGIPADAAAMFKNGSLADMIKNSFNSNNPDRRNGQDGGRPLGVVETGDRSAGTDPPNSAKGPKSFLSFLSRNKRKEDGTSPDELDSPTSPATGFKAHSLGSRAGHVSETSLDQRPGSSISTHEHSVGFQSGHSRKKSVVSTRVYLLATLDHWNYRMLDVTDIDSAHDLRQLVCINLGLPDSEGAAIYVTELGKFDHEEPLDDMKLLTNKRLRADAIGTLKLFVKPGGLTSSPYPGPGTQSGQPSSYVPRDAPPMDEETFNRLNGQRQRSSSSPPTSRQNTISSKDRDEKMPVPEPVEHKAEPPRKHAIKETSPIGETTPFGIVGRKVDFDQPRLSPFEDKRPDHLFPVRKAPAPPGDPSATLKKVNSLSKKTGQGFRPSTAHATQHHHHNAIDHGYHQRRVSTDIRENMTSERQTRRPAAIRGTAEVPSPSGGIGSLLINIGGHLGGIGHPVAGGARALSPNRVASAPVGHGGEMSEQQRDAKLRYQAARAPSPSLSPNARRRPSESHISQQQYQQNHRPPSSQQHHPHLQHQAQPQPQPQPQQQQQQQQQQQQQQQYQPRQQQTQQPQQQQQAQQPQQQQQAPAQHEESKRKSHGPDVDFSDNDVRFTPPPESESLNASSNHQDYADDQDDSDDSDDGLFAVPISKNKTAETSKTKDNSGGSDEGLGKRPSLKVATDRSKKNLSVAFTTPQASPRMASFTDETEHASVPASSGHGHRQSAPVPSGSSKEWEQDETECKIGRRKSFIEKDVWANRPPTDALINNLEDFFPNLDVDQPVLEEGGDTEVEVDAPSPIAEVDESQFQTRPQPMAETMAQSNTAVASSSNNNAPMLPPLNRVSSAFNESDTLGSDESTLKALESRPPSMVSGSVRRSRGLGRMKSIREVARGAHEAHKRYTQTSMQTNVATPAVPNATTNLMRRKSTKMFNANIVQIEPRRGSILSTIPQETLPTQDNINTLPKRQTTFRWFKGQLIGKGTFGRVYLGMNATTGEFLAVKEVEVNPKAAQGDKKKMQELVAALDQEIDTMQHLDHVNIVQYLGCERKETSISIFLEYISGGSIGSCLRKHGKFEEPVVASLTRQTLSGLAYLHREGILHRDLKADNILLDLDGTCKISDFGISKKTDNIYGNDKTNSMQGSVFWMAPEVIRSQGEGYSAKVDIWSLGCVVLEMFAGRRPWSKDEAVGAIYKIANGEAPPIPDDIREEITPIAIAFMLDCFTVDPTDRPTADVLLSQHPFCELDPNYSFMDTELYAKIRGTY

SEQ ID NO: 9538 - protein, 373 aa, Nicotiana tabacum
MAIEHNEQQELSQSFLLDALYCEEEEEKWGDLVDDETIITPLSSEVTTTTTTTTKPNSLLPLLLLEQDLFWEDEELLSLFSKEKETHCWFNSFQDDSLLCSARVDSVEWILKVNGYYGFSALTAVLAINYFDRFLTSLHYQKDKPWMIQLAAVTCLSLAAKVEETQVPLLLDFQVEDAKYVFEAKTIQRMELLVLSSLKWRMNPVTPLSFLDHIIRRLGLRNNIHWEFLRRCENLLLSIMADCRFVRYMPSVLATAIMLHVIHQVEPCNSVDYQNQLLGVLKINKEKVNNCFELISEVCSKPISHKRKYENPSHSPSGVIDPIYSSESSNDSWDLESTSSYFPVFKKSRVQEQQMKLASSISRVFVEAVGSPH

SEQ ID NO: 9539 - protein, 336 aa, uncultured gamma proteobacterium eBACHOT4E07
MIRNFLINILFSIPVWLIELVYKFNKDVKRGFIFDSQSRMLFALMPKLDLHKIEDDDIPKIRNLINEKRKNLRLSNKTKKNVITKDHFIDQENNLKLREYIPYKTDNDNVILYFHGGGYVLNSIDTHNLTVSYFSEKLRTRIFSLAYGLSPENKYPHAMNQALSAIDWLVKNGHHIKNISLCGDSAGAHLAASVAHSLSNDQKENVHSQFLIYPMCDPSCASESIELFKDNYLLTKESMKWFWQKFKNNDEDNLKDTFNLLLFNPNKDFPKTIIVTAGFDPLSDEAEKYAFLIHQSGNYVKQLHYPSLFHGFAAMTRLKSANKAVNDFLLEYKKIL

SEQ ID NO: 9540 - protein, 367 aa, Nicotiana tabacum
MVFPLDTQLLNPIFDVLYCEEDRFLDDDDLGEWSSTLEQVGNNVKKTLPLLECDMFWEDDQLVTLLTKEKESHLGFDCLISDGDGFLVEVRKEALDWMLRVIAHYGFTAMTAVLAVNYFDRFVSGLCFQKDKPWMSQLAAVACLSIAAKVEETQVPLLLDLQVADSRFVFEAKTIQRMELLVLSTLKWKMNPVTPLSFIDHIMRRFGFMTNLHLDFLRRCERLILGIITDSRLLHYPPSVIATAVVYFVINEIEPCNAMEYQNQLMTVLKVKQDSFEECHDLILELMGTSGYNICQSLKRKHQSVPGSPSGVIDAYFSCDSSNDSWSVASSISSSPEPQYKRIKTQDQTMTLAPLSSVSVVVGSSPR

SEQ ID NO: 9541 - protein, 231 aa, Zea mays
  misc_feature (188)..(188): Xaa can be any naturally occurring amino acid
MATSELPSESDAFTFPCGDDGTTSPALSPPVVISVLASILERHIALNERAMAAASGLDQSAPGDDDDNSDPAAAAARKRARAFDGGTVLDMSLHAFLERFSRYAHVSPQVYVVAYAYLDRLRRSAGVRVVRANAQRLLTTAILVASKFVEDRNYRNSYFAAVGGLAAAELSALELDFLFLMQFRLNVXAGVFRSYCRHLEREVSHGGWYRVDRPLVCAGEARAQHRQAAAV

SEQ ID NO: 9542 - protein, 164 aa, Zea mays
MADDGGSHEGSGGGGGVRERDRFLPIANISRIMKKAVPANGKIAKDAKETLQECVSEFISFVTSEASDKCQKEKRKTINGDDLLWAMATLGFEEYVEPLKIYLQKYKEMEGDSKLSTKAGEGSVKKDAISPHGGTSSSSNQLVQHGVYNQGMGYMQPQYHNGET

SEQ ID NO: 9543 - protein, 570 aa, Zea mays
MAGGGVEDVYGEDRATEEQLITPWAFSVASGYTLLRDPRHNKGLAFSEAERDAHYLRGLLPPALASQELQEKKLMQNLRRYEQPLHRYIAMMDLQERNERLFYKLLIDNVEELLPVVYTPTVGEACQKYGSIYRRPQGLYISLRDKGKILEVLKNWPERSIQVIVVTDGERILGLGDLGCQGMGIPVGKLSLYTALGGVRPSACLPITIDVGTNNEALLNDDFYIGLRQRRATGEEYHELVEEFMAAVKQNYGEKVLTQFEDFANHNAFDLLEKYRESHLVFNDDIQGTASVVLAGLLAALKVVGGTLADHTYLFLGAGEAGTGIAELIALEMSKHTGSPIEECRPKIWLMDSRGLIVASRKESLQAFKKPWAHEHGAVETLLEAVRSLKPTVLIGTSGKGGTFTKDVVEAMASQNERPVVFALSNPTSHSECTAEQAYTWTEGRAVFASGSPFPAVELDGRALVPGQSNNAYIFPGFGLGVVISGAIRVRDDMLLAASEALAEQVTEAHYAKGLIFPPFTNIRAISARIAAKVAAKAYELGLASRLPRPDDLVSYAESCMYTPTYRSYR

SEQ ID NO: 9544 - protein, 99 aa, Glycine max
MVRWDNRMSASIPDEDIFYTVGFLHSSGFDNWKAYDAQNKEILQFCNDSGIKVKQYLPHYRTQEDWTNHFGPKWRTFVERKHQFDPKMILSPGQRIFNN

SEQ ID NO: 9545 - protein, 207 aa, Triticum aestivum
DCSPLMLRLAWHSAGTFDVSSKTGARRHAGLDIAVRMLEPIKEEIPTISYADLYQLAGVVAVEVSGGPVIPFHPGREDKPQPPPEGRLPDATKGSDHLRQVFGKQMGLSDQDIVALSGGHTLGRCHKERSGFEGPWTRNPLKFDNSYFTELLSGDKEGLLQLPSDKTLLTDPVFRPLVEKYAADEKAFFEDYKEAHLRLSELGYAEA

SEQ ID NO: 9546 - protein, 249 aa, Pisum sativum
GKSYPTVSPDYQKAIEKAKRKLRGFIAEKKCAPLILRLAWHSAGTFDSKTKTGGPFGTIKHQAELAHGANNGLDIAVRLLEPIKEQFPIVSYADFYQLAGVVAVEITGGPEVPFHPGREDKPEPPPEGRLPDATKGSDHLRDVFGKAMGLSDQDIVALSGGHTIGAAHKERSGFEGPWTSNPLIFDNSYFTELLTGEKDGLLQLPSDKALLTDSVFRPLVEKYAADEDVFFADYAEAHLKLSELGFAEA

SEQ ID NO: 9547 - protein, 174 aa, Glycine max
MSDAPASPSHESGGEQSPRGSLSGAAREQDRYLPIANISRIMKKALPPNGKIAKDAKDTMQECVSEFISFITSEASEKCQKEKRKTINGDDLLWAMATLGFEDYIEPLKVYLARYREAEGDTKGSARSGDGSARPDQVGLAGQNAQLVHQGSLNYIGLQVQPQHLVMPSMQSHE

SEQ ID NO: 9548 - protein, 191 aa, Blumeria graminis
MSLRCVVVGDGAVGKTCLLISYTTNKFPSEYVPTVFDNYAVTVMIGDEPYTLGLFDTAGQEDYDRLRPLSYPQTDVFLVCFSVTSPASFENVREKWFPEVHHHCPGVPCLIVGTQTDLRDDLSVREKLNKQKMQPVKREDGERMAKDLGAVRYVECSALTQYKLKDVFDEAIVAALEPPAPKKKHRNCLIL

SEQ ID NO: 9549 - protein, 416 aa, Ehrlichia canis
MVKEAVLELDGQKVKLPVLCDTNGNKVIDITSLYKGTGILTYDPGFMSTAACESKITFIDGNKGILCYRGYNIADLVNNNKSFIEIVYLLFYGSFPSVDNLKDFMLQISQEYMPPEMVCDVIKSFSQDSHPMTILMACFSALASYYHDQAVDKDGLKHPKLAVAKVASIIAMIYRYTTNQDFIEPNHGLSYSENFIHMMFDISSYKFTQVVAKALDVIFTLHADHEQNASTATVRLAGSSGADLFACLVAGIATLWGPAHGGANEAVINMLMAIEKPSNVKQFIQKVKDGNKSTRLMGFGHRVYKNYDPRAKIICEICKEVLNDLGVNDPLLEIALELENIALQDSYFIERSLYPNVDFYSGIILKAIGIPVRMFTTLFALARTSGWSAQWYEMVADKNYKICRPRQLYTGHIAKI

SEQ ID NO: 9550 - protein, 161 aa, Xanthomonas axonopodis pv. citri str. 306
MSDISTFAFTDLEGRTQSMRDYAGNVLLVVNVASKCGFTPQYAGLQALWQRYRERGLVVIGFPCDQFGHQEPGDAAQIRQFCSLDYAVDFPLAAKIDVNGNGAHPLWQWLKHEQRGVLGSEAIKWNFTKFLIGRDGRVLERYAPTTKPEALATEIERALDA

SEQ ID NO: 9551 - protein, 344 aa, Mesorhizobium loti MAFF303099
MTETLATDDDREELDLLLRGFQVSRMLRLIADLGVADKIPTDGQVTVKDIAAACAVLPEPMLRVLRALAAFRIFEVTADGSVAHTPRSRLLRTDTLNSLHHAARFWTGPGSWGAWNKLDVAMTGGTPHEAAWSTGRFAYLKQHPDEARLFDAMMANFPDNRHAAVAAAYDFSGASLIADIGGGNGAALRQILARFSTPRGLVFDREDVITAVTSNDLMQGRITVQGGSFFDQVPCGADIYMLIRVLHDWPDEDCLRILRACRAAMGPQARLLLGEQILEPDPARGRATGYLIDVQMMTMFGDARARSEAEFRGLFDQSGFSLRQVIPTASPVSIIEAAPIAGPF

SEQ ID NO: 9552 - protein, 406 aa, Magnaporthe grisea 70-15
MSFSGMLNRLHGQPESYDKKSKYRFGKTLGAGTYGIVREAEGQTGKVAIKIILKKNVKGNERMVYDELEMLQRLQHPHIVRFVDWFESRDKYYIVTELATGGELFDRICEQGKFTEKDASQTIKQVLGAVDYLHSKNVVHRDLKPENLLYLSKAPDSDLVLADFGIAKMLDSRDEVLTTMAGSFGYAAPEVMMKKGHGKPVDMWSMGVITYTLLCGYSPFRSEGLQDLIEECSNAQVTFHDRYWRDVSEDAKNFIRSLLQANPDDRATSGQALRHPWLSGENATDHNLLPEIKSFMAKARLRRGIEMVKLANRIQTLKLQEEDPDNTDMPDDAVEAADDSQGNAGSSGGSGLFKPGEKKTMSKAVKGAIFREVVLAKVREMKTQEETLKVAEEVEKEARRKSFTGS

SEQ ID NO: 9553 - protein, 312 aa, Azotobacter vinelandii
MGVCGSDVHYYTHGRIGHFIVDQPMVLGHEAAGTVIEVGSNVTHLAKGDRVCMEPGIPNPRSKASRLGLYNVDPSVVFWATPPVHGCLTPEVVHPAAFAYKLPDHVSFAEGALVEPFAIGMQAAVKARIKPGDVAVVIGAGTIGMMTALAALAGGASQVLVSDLMVEKLAIAQRYEGITAVNVREQSLQDKVAEATGGWGADVVFEASGSARAYGDALAAVCPGGALVLVGMPVEPVLFDVVAAQAKEIRIETVFRYANVYERAVNLIASGKVDLKPLISATFPFERGVEAFERAASAQPGDVKVQITFGDA

SEQ ID NO: 9554 - protein, 197 aa, Bacillus cereus G9241
MDTNITWHTASVSKDERRVKNGHHSFVIWFTGLSASGKSTVANAVARKLFEKNIGNYVLDGDNIRHGLNKDLGFSESDRMENIRRIGEVAKLFVDQGTVVLTAFISPFRVDRKQVRDLLAADEFIEVFVKCPIEECEKRDPKGLYKKARKGDIKDFTGIDSPYEEPEKAELIVQTHKYSIEECAEQIVKYLQERSFI

SEQ ID NO: 9555 - protein, 493 aa, Bordetella parapertussis 12822
MSLSVGNAALLPGRNLIGSEWREAALGARFAVADPATGKVIAHVPDSGARDAGAAVTAAHQAFADWRRTPAKVRAQIIKRWNALLHENAEDLARLISSEQGKPLAEARGEVSYAASYVEWFAEEATRADGDLIPSPAQGRRMFALREPVGVVAAITPWNFPAAMIARKIAPALAAGCTVVCKPAEDTPLTSLALTALAQQAGVPPGVLNIVTASRGRAAEVADAWLDDPRVRKITFTGSTPVGKHLARRSADTLKRVSLELGGNAPFIVFDDADLDAAVEGLMVSKFRNGGQTCVCPNRIFVQAGVHDAFVRKLAARVEGLVVGPASDPASQIGPMINARAVEKIEHHVADALERGARLAVGGKRIHSARCAGDHYYAPTVLTGVDETMACFREETFGPVAPITVFASEADVVAAANATAFGLAAYFYSTDVRRIWRLADALETGIVGVNEGALAAEAAPFGGVKDSGYGREGSRHGLAEYMQIKYVCQGQLD

SEQ ID NO: 9556 - protein, 407 aa, Haemophilus somnus 2336
MEITLGIAMFTVIVLALAVLILFAKSKLVNSGDITIEINDDPGKAINLPAGGKLLGALANKGIFVSSACGGGGSCGQCIVKVTEGGGDILPTELSHISKREAKEGYRLSCQVNVKNSMKIELPEEVFGVKKWECTVISNDNKATFIKELKLQIPEGEEVPFRAGGYIQIEAEPHTVHYKDFDIPKEYHEDWDKFDLWRYTSKVDEHIIRAYSMASYPEEKGIIMLNVRIATPPPRNPDVPPGQMSSYIWSLKEGDKVTISGPFGEFFAKETDNEMVFIGGGAGMAPMRSHIFDQLKRLKSKRKMSFWYGARSKREMFYVEDFDMLQAENDNFVWHVALSDPLPEDDWDGYTGFIHNVLYENYLKNHEAPEDCEYYMCGPPVMNAAVIKMLKDLGVEDENILLDDFGG

SEQ ID NO: 9557 - protein, 1200 aa, Magnaporthe grisea 70-15
MDGGVKRRLRNSAGSGRDILSMGAKDSIQLGDPLPASTPPRPSRGASNKSSNPSPSTRSRRQAIRSSPTAQPEPAHLPPASTSAPSALVSVRSVSIASTEDASEIIVKTGAAETTSSEESMVSTPLGTDSPPSMEDPLPTLKPSLSAMVEDDGPSYSRCISELSDQSELSSVPSSLSSKATTPIDLDRPEPPVPPVALAPEAPEVPETSKPLEPSPEPISQEAQPPSETVRPVESIQPPPLKPSPRPSKFRIKYGQNKKYDLRPRTSIPTDVSTQEYAIQCIAAAESSRLNPYALHPDEYLMLRDHISQAQITTYLNLRNGILRLWVRNPTFVLTREEAIGCAKDSRWFDVASVCFDWLVREGYINFGCCEVRPLRSKPGASGTPTKQKTIVVIGAGLSGLGCARQLQGLFAQYARRFRERGELLPKVVVLEGRSRIGGRVYSRPFRTAPPARGDGPPRRYTAEMGGMIITGFDRGNPINILIRGQLGLGCHALRSDLNLVNIYDTNGKPFDPDRDMLIDKLYNHCIERVAEYKWKLPLPKWLEGKRELIDEGKDSWAEVHKTISYVEETAAAQPQAPSVAEQNIAPRVDLVPVSSDRATGRVHLEPGTPAAHKAAHTVKLLGWNLKKGVDDDADIDIGPAVNAPDATFGSVLDETIMQFKDIVDLNSQDMRMFNWHVANLEYSNATNVHQLSLRGWDIDMGNEWEGKHTMVVGGYQSLALGLAQIPSSLDIKYKKVVKTIRRKSSDEDSLPADEQPGYKIELEDGSNIDADYVVNTIPLGVLKHGDITFDPPLPSWKADAIERLGFGVLNKVVLVYDQPFWEEDKDIFGVLRAPQSRSSLHPKDYSSDRGRFFQWFNVTNTSGMPTLLALMAGDAAFDTENTPNDDLVAEATEVLRSIFGKSVPQPRESIITRWASDRFARGSYSSAGPNMQLEDYDLMSRSIDRLYFAGEHTSATHPATVHGAYMSGLRAAAEVLNDMLGPIEVQTPLIVPKETGTTSTLLKRKSTTDQVRDPQKEAEEAWQAQLWEHQWSLLGEHPLQPAKVATKAHLLFSKANTEAARQKCLEGRRPGKGPPTAHEVRAMAGKMWNAASEEQRRPFIEQVATLKEVYVKAMAEWTKKSNEWNKQALEIAADFEKKNPKPTAHTNAVVGPSSVGEDVKASRPAAGSPAVEEEAGRQAKKLAVDKAGVKEDGDIEMTG

SEQ ID NO: 9558 - protein, 413 aa, Trichoderma atroviride
MADLQGRKVFKVFNQDFVVDERYTVTKELGQGAYGIVCAAVNGQTNEGVAIKKVTNVFSKKILAKRALREIKLLQHFRGHRNITCLYDMDIPRPDNFNETYLYEELMECDLAAIIRSGQPLTDAHFQSFIYQILCGLKYIHSANVLHRDLKPGNLLVNADCELKICDFGLARGFSVDPEENAGYMTEYVATRWYRAPEIMLSFQSYTKAMDVWSVGCILAELLGGRPFFKGRDYVDQLNQILHILGTPNEETLRRIGSPRAQEYVRNLPFMPKKPFPALFPDANPDALDLLDKMLAFDPSQRISVEQALEHPYLHIWHDASDEPDCPTTFNFDFEVVEDVGDMRKMILDEVLRFRQLVRTAPASGNQAAAQQIQVPMPQAGGQWTAEDPRPQEYMGHANGLEQDLAAGMDIRR

SEQ ID NO: 9559 - protein, 277 aa, Brassica oleracea
MNTFPASTEMVGSENESPVTTVVGGDYYPMLAASCPKKPAGRKKFQETRHPIYRGVRLRKSGKWVCEVREPNKKSRIWLGTFKTAEMAARAHDVAALALRGRGACLNYADSAWRLRIPETTCHKDIQKAAAEAALAFEAEKSDVTMEETMAVASQAEVNDTTTDHGMNMEEATAVASQAEVNDTTTDHGVDMEETMVEAVFTEEQSEGFNMAEESTVEAAVVTDELSKGFYMDEEWTYEMPTLLADMAAGMLLPPPSVQWGHNDDLEGDADMNLWSY

SEQ ID NO: 9560 - protein, 477 aa, Sinorhizobium meliloti
MLDKRKFYIDGKWVEPATQNDLLVLNPATEKPIAVISLGTAVDVDRAVAAAKKAFASYSRTSVEERLALLEKLLAIYKRRYDEMADTITAELGAPRTMSHEQQADVGVGHLQGFIDALKRLKLREKLPNGDTLLREPIGVCGLITPWNWPVNQIALKVVPALATGCTCVLKPSEFTPLNAMLYAEMIEEAGFPAGVFNLVNGDGIHAGAALSKHKDIDMMSFTGSTRAGIAVSKDAADTVKRVTLELGGKSPNIVFADADIEERVTASILECFNNSGQSCDAPTRMLVERSAYDEVVEIARRVGMEARVGDPTKVGSHIGPLVSHIQFERVQALIEAGVAEGATLLAGGPGKPEGFETGYFVQPTIFADVDNSMRIAREEVFGPVLSIIPFDTEEEAIAIANDTNYGLAAYVQTRDRERAERVASRLRAGMVHINGGPHRYGSPFGGYKQSGNGREGGMFGLEDFLEVKTVHLPDAA

SEQ ID NO: 9561 - protein, 316 aa, Oryza sativa (japonica cultivar-group)
MDPVLLDDIIRRLIEVKNLKPGKNAQLSESEIKQLCATSKEIFLNQPNLLELEAPIKICGDVHGQYSDLLRLFDYGGYPPQSNYLFLGDYVDRGKQSLETICLLLAYKIKYPENFFLLRGNHECASVNRIYGFYDECKRRFSVKLWKTFTDCFNCLPVAALIDEKILCMHGGLSPELNKLDQILNLNRPTDVPDTGLLCDLLWSDPSNDAQGWAMNDRGVSYTFGPDKVSEFLEKHDLDLICRAHQVVEDGYEFFANRQLVTIFSAPNYCGEFDNAGAMMSVDDTLMCSFQILKPARKMLGGSTNSKSGFKSLRGW

SEQ ID NO: 9562 - protein, 250 aa, Brassica oleracea
MNSVSTFSELLGSENESPVGGDYCPMLAASCPKKPAGRKKFRETRHPIYRGVRLRKSGKWVCEVREPNKKSRIWLGTFKTAEIAARAHDVAALALRGRGACLNFADSAWRLRIPETTCAKDIQKAAAEAALAFEAEKSDTTTNDHGMNMASQAEVNDTTDHGLDMEETMVEAVFTEEQRDGFYMAEETTVEGVVPEEQMSKGFYMDEEWMFGMPTLLADMAAGMLLPPPSVQWGHNDDFEGDADMNLWNY

SEQ ID NO: 9563 - protein, 117 aa, Retama raetam
MASIKVACVVLICMVMVGAAPIAQAITCGQVVSNLTPCITYLQRGGAVPGQCCNGVKTLVSSAQTTADKQTACNCLKSTAATIPNINFGNAGSLPGKCGVNLPYKISPSTNCASIKF

SEQ ID NO: 9564 - protein, 278 aa, Glycine max
MGVFSEDPNPNPNPIVIREVWASNLESEFELIRELIDRYPFISMDTEFPGVIFRPHVDPTKPFNHRNRPSDHYRLLKSNVDALNLIQVGLTLTDAAGNLPDLAGNRSIWEFNFRDFDVARDAYAPDSIDLLRRQGIDFARNTADGVDSTCFAELMMSSGLVCNDAVSWVTFHSAYDFGYLVKILTRRNLPTRLEEFLKTVKVFFGDNVYDVKHMMRFCDTLYGGLDRVARTLNVERAVGKCHQAGSDSLLTWHAFQKIVDIYFVKDEHRKHAGVLYGL

SEQ ID NO: 9565 - protein, 513 aa, Zea mays
MGNCCPGSSSSAEPAPPQPPDPSGSSRPVASPASVSPTAAPAPARPPAPIGPVLGRPMEDVRATYAVGKELGRGQFGVTSLCTHKATGHRFACKTISKRKLSTKEDVEDVRREVQIMYHLSGQPGVVELKGAYEDKGSVHLVMELCAGGELFDRIIARGHYTERAAASLLRTIVEIVHTCHSMGVIHRDLKPENFLLLSKDEDAPLKATDFGLSVFRDIVGSAYYIAPEVLKRSYGPEADIWSVGVIVYILLSGVPPFWAESEHGIFNAILRGQVDFTSDPWPRISQGAKDLVRKMLNPDPKQRISAYDVLNHPWIKEDGEAPDTPLDNAVLGRLKQFRAMNQFKKAALRVIAGCLSEEEIRGLKEMFKSMDSDSSGTITVDELRRGLANKGTKLSEAEVQQLMEAADADGNGTIDYEEFITATMHMNRMDRDEHLYTAFQYFDKDNSGYITMEELEQALREKGLLDGRDIKEIVAEVDADNDGRINYTEFAAMMRKGDPEPSNPKKRRDIVL

SEQ ID NO: 9566 - protein, 211 aa, Pinus taeda
MEKIMVLVCIMSFTILGLSSAQEINHAAAVSLATAPAAAATPAAPAPSPASLNLSGILDKAGQFNTFLSLLKSTQVGMQLQSQLNNSQQGITIFAPSDAAFAALKPGALNSITDQDKIALLQYHALPSYYTFSQFQTVSNPVRTMASGNGGPFAAPTPEPGAPVSSPAVSPSGASGSGASTSSACGSMAALAKGLYLVFLAAGALVLVISS

SEQ ID NO: 9567 - protein, 291 aa, Pyrobaculum aerophilum str. IM2
MSKVPGPIVLMEPLSGKTSLIIKINAIHVSKRSKYQGILIVDTDDYGRTLVLDDYIQSSYYDEIYYHESLVHPAVTTHPRPSDVLILGGGEGATLREVLKHNTVKRAVMVDIDGDVVELSKKYLPQMHQGAFDDPRSEVRIEDGFVYVENALKRGEKFDVVIMDLTDPYSSDIAKQLYTPEFFGKVKRLLREDGIVVTQAGNSFYFPEAYDYVLQGVKGNFPIIAEYSVWIPSFGYAVNFVLGSLKHDPHSLSAEEVDKRLSERGVRAEFYSGKTHIALMNMPVIKKILRV

SEQ ID NO: 9568 - protein, 275 aa, Erwinia carotovora subsp. atroseptica SCRI1043
MTQPKVKLADGNIMPQLGLGVWRASSEDTVIAVNEALSIGYRAIDTAAIYKNEEAVGQALSSANLPREEVFITTKLWNGDHTDPQKALEESLRKLRLDYIDLYLIHWPLPQQNTFVDAWRGLIKLQEQGLAKSIGVSNFHIHHLQRLKEETGVLPVIDQVELHPLLQQKQLHAWNATHHIQTESWSPLAQGGEGVFDHPIIRKLAMKYGKTPAQIVIRWHLDSGLVVIPKSVTPARIKENFEVFDFRLDKDELSEITKLDCGKRLGSDPDEPRND

SEQ ID NO: 9569 - protein, 176 aa, Fagus sylvatica
KLELHRGGGRSRTSGSPGLQEFGTRSELSKICDGILGLLETHLIPSASSAESKVFYLKMKGDYHRYLAEFKTGAERKEAAESTLLAYKSAQDIALADLPPTHPIRLGLALNFSVFYYEILNSPDRACNLAKQAFDEAISELDTLGEESYKDSTLIMQLLRDNLTLWTSDITDDAGD

SEQ ID NO: 9570 - protein, 130 aa, Glycine max
  misc_feature (93)..(93): Xaa can be any naturally occurring amino acid
  misc_feature (102)..(102): Xaa can be any naturally occurring amino acid
IADADATIDYRAGALVHTSFTGLKAMAGFPTMRTNNDITSIASNRGRVQCMQDWPPFGKKMSVTLSYLPDLDDAQLAKEVQYLLMNGWILWLXEFGAEHGFXYRERNRSPGIYHGRYWTMCTLTMTGCTD

SEQ ID NO: 9571 - protein, 446 aa, Oryza sativa (japonica cultivar-group)
MRMGKYEMGRALGEGHFGKVKLARHADTGAAFAIKILDRQRILAMKIDEQIKREIATLKLLKHPNVVRLHEVSASKTKIYMVLEYVNGGELFDKIALKGKLSEKEGRKLFQQLMDAVSYCHEKGVYHRDLKPENVLVDAKGNIKVSDFGLSALPQNQRKDGLLHTTCGSPNYIAPEIQVLLNRGYDGSLSDIWSCGVILYVMLTGNLPFDDQNTVVLYQKILKGDARIPKWLSPGAQDILRKILDPNPITRLDITGIRAHEWFRQDYTPAMPFDDDDDNNISDGNLHMTENQDIETSPAISQINAFQLIGMSSCLDLSGFFEKEDVSERKIRFVSNYSPTSLFEKIESTVTEKGFQVQKNSGKLKVIQVCKEPANPRGHGNLLISAEVFEINESLYVVELKRSSGDCSLYRQLCASLSEDLGICKRQQLLKKDSMRQDLCRYNSSF

SEQ ID NO: 9572 - protein, 505 aa, Oryza sativa (japonica cultivar-group)
MGHELWVLWATLAVSLLCYLYLTSHRLGSRRRRWPPGPRPLPLLGNLLDLRGGNLHHTLARLARAHGAPVMRLQLGLSPAVVISSPGAAREAFTAHDRRLAARAVPDANHALGFCDRSMIWLPSADPMWRTLRGVVAAHAFSPRALAAARAVHERKVRDLVAYLRGRAGREVDVKDAVYGGVLNLVSSALFSADVVDVGGESAQGFRELVEELIESIAKPNVSDLFPFLRRFDLQGWRRWTSGHLAKIYKVLDDIIDRRSAEDDAAMDKRGDFLDVLLELMSTGKIAREYLTNILFDVFTAGSDTMSLTVVWAMAELLRNPGVMAKARAEIDAALGGREAVEEADVARMPYVQAVLKEAMRLHPVAPVMLPRKAAEDGVEIGGFEVPRGCAVIFNTWAIMRDPAAWERPDEFVPERFVGRSRATEEMDFRGKDFGFLPFGSGRRLCPGVPMAERVLPLIMASLLHAFEWRLPDGMSAEQLDVSEKFTTANVLAVPLKAVPVVIAC

SEQ ID NO: 9573 - protein, 303 aa, Cicer arietinum
GVALAGLLGTVRSQGRPLSDFVNQKIVVAGAGSAGLGVLKMAINAVAKISGCSETAAKSQFFLIDKNGLVTTERNNLDPAAAPFAQNPRDIDGLTEGASIVEVVKKVKPHVLLGLSGVGGIFNEEVLKAMRESVSTKPAIFAMSNPTMNAECTAIDAFNHAGEHIVFASGSPFENVDFGNGNVGHVNQANNMYLFPGIGLGTLLSGAHLITDGMLQAAAECLASYMSEEDILKGILYPSVDSIRDVTAEVGAAVLRAAVEEDLAEGQGDVGPRELAHMSKEETVEYVRRNMWFPVYSPLVHEK

SEQ ID NO: 9574 - protein, 320 aa, Glycine max
MEAKKIPEVILNSGKKMPVIGLGTASIPLPSHEALTSILIDAFEVGYRHFDTASLYESEESLGKAVAKALELGLINSREELFITSKLWSTDAHPDLVVPALKTSLQKLGLEYVDLYLIHWPVRLKPEAKGYHNILKENVLPSFDMKGIWEAMEECYRLGLAKSIGVSNFGIKKLSQLLENATIPPAVNQVEMSPAWQQGKLKEFCKQKGIHVSAWSPLGAYKSAQGTNAVMESPILKEIACERQKSMAQIALRWIYEQGAIAIVKSFNKERMKQNLDIFDWELSQEESQKFSQIPQRRMYRGITFVSENGPYKTLEELWD

SEQ ID NO: 9575 - protein, 421 aa, Bacillus sp. KSM-K16
MAAEKIQTQNGVLNVPNEPIVPFIEGDGTGPDIWAAASRVLDAAVEKAYNGERKIHWKEILAGEKAYNETGEWLPAETLDAVREYLIAIKGPLTTPIGGGIRSLNVALRQELDLFTCLRPVRYFTGVPSPVKRPEDTDMVIFRENTEDIYAGIEFKEGSDEVKKLIAFLQDELGATNIRFPETSGIGVKPVSKEGTERLVRSAIQYALDEGRKSVTLVHKGNIMKFTEGAFKNWGYELAEREFGDKVFTWAEYDKIVEESGREAADKAQSEAEAAGKIIVKDAIADIFLQQILTRPKEFDVVATMNLNGDYISDALAAQVGGIGIAPGANINYDTGHAIFEATHGTAPKYAGLDKVNPSSVLLSGELLLRHLGWTEAADLIMASMDKTIASKVVTYDFARLMDGATEVSCSGFADELIKNL

SEQ ID NO: 9576 - protein, 234 aa, Arabidopsis thaliana
MERGGFHGYRKLSVNNTTPSPPGLAANFLMAEGSMRPPEFNQPNKTSNGGEEECTVREQDRFMPIANVIRIMRRILPAHAKISDDSKETIQECVSEYISFITGEANERCQREQRKTITAEDVLWAMSKLGFDDYIEPLTLYLHRYRELEGERGVSCSAGSVSMTNGLVVKRPNGTMTEYGAYGPVPGIHMAQYHYRHQNGFVFSGNEPNSKMSGSSSGASGARVEVFPTQQHKY

SEQ ID NO: 9577 - protein, 273 aa, Thermoplasma acidophilum
MKLIENWFSERYSDNLQLSFRVSDQLLSIKTDYQRIDLFDTYDFGKLLAIDGTVQLTERDEFIYHELITMVPYHLTPRPPENALIIGGGDGGAARRLIDLGLKHIVNVEIDDQVVEVSKRFFPSLSSAFNDSHVKLLIQDGIKYVKNTSEKFDLIIIDSTDPEGPAEGLFSKDFYNDTRKIMNEGAVIVSQSGSPFYQPKAIKLAYSGMREVFSDVRVYTGFIPTYPSGFWSFTVASPWTMKPRPVNMSGKYFNADVMEGSFRLPQFVKELIT

SEQ ID NO: 9578 - protein, 333 aa, Thermoplasma acidophilum
MRSMGSRCEGECRKLKSAKQYTGMDRKELLSRPVRDLSITADTRLGDLMDQFSSIGGFTAAKIHEAYEIIKDMFSEDNTTFLSFPADIISTGLRGLINEVVKRKLVDVIITTSGTLDHDIARTYRNYYCGSFSYSDIELRDLGINRLGNVLVPDESYGEIIEEKVMESLEKLYAKKKEWATVDLIHEVGLDINSESSIIYNAAKNNIPVFVPGITDGSFGSQLWSFYEQHHDFKINLLEDEHRLSDIIFDAKKTGAIMIGGGISKHHTIWWNQFRDGLDYAVYVTTAQEYDGSLSGAKLEEAISWKKVRPDARYVNVYGDATVIMPVLLAPFL

SEQ ID NO: 9579 - protein, 501 aa, Catharanthus roseus
MALASIEKVATGLICFILLIFSLKRIGHPRDWALVGILSVWFPSLGHIYEKLAKSLAKNDKTFVLKGSFLSKQDVIFTCDPANMHHVMSTNFSNYPKGPENRNVFDVYGEMLFTADHEKWKSHRKVTNAYFHDQRFNGFSQKVNKEVIEKELFPFLDHAAEEALVFDLQDVFQRLMLDSSSILTTGQNHRSLRVGLPYDETLEAINIANYQIFVRHILPAKIWKFQKWLGIMGEKKIKKAWRILDDISVEYMNRRKKEISSTISSQEDMDVVKFSEEDHVVLKSVDASDNLLRDTVKGILLAGTDTTATVLSWFFWLILKNPRVEQKIREEIELYLKQKNGEHGLYTNPEELNELMYLHAAIYETMRLYPAAPFTSRKSIQADVFPTGHQVNPNTTIVMAYYAVGRMKSIWGEDCLEFKPERWLSDKGKLIPVQTNKFLAFGTGPRICPGKELGLNRVKAVAAAIIPKYSFKIMRNKPVMPAACATLYLKDGLIVRVNKII

SEQ ID NO: 9580 - protein, 503 aa, Ralstonia metallidurans CH34
MTAAYTASQTIAGDCTVSLPSALYRNYVDGRFEEAANLFPNLSPVDGSIVGHVCEADASQVDRAVQAARAAMEGPWGNTSAAERARVLHAVADGIERRFDEFVAAEVADTGRTEQQARALDIRRGVLNFRTFADLASQAGGDYFDMRTAEGDVFSYTVRKPHGVVGIISPWNLPMLLMTWKVAPALACGNAVVVKPSEETPGSATLLAEVMHEAGVPAGVFNLVHGFGGGSAGEFLSRHPGIDALTFTGESRTGSTIMKAVADGVKEISFELGGKNAAVVFADCDFDKAVAGVMRSSFTNTGQVCLCSERVYVERPIFERFVAAMKARAEALRIGYPTVEGVEMGSLISRNHRDKVLSYYALAREEGATVVTGGGVPHFGDARDNGAYVQPTIWTGLPDSARCIQEEIFGPVCHIAPFDTDAEVVKRVNDSRYGLAASVWTRDLARAHRVTRQFDVGIVWVNTWFLRDLRTPFGGTRLSGIGREGGRHSLDFYSSLTTICVNP

SEQ ID NO: 9581 - protein, 447 aa, Nostoc sp. PCC 7120
MSKPKNNSPVVNVIQDQSVISSVITDFGSLIKGNTLGIIRPHNLEELSSALRFAKQQNLRLKARGKGYTQGGQSVAQDAFTLDLTRLNHVSKVDTVAQAIATEAGATWQDIVTTTVKYGMLPCVLPLNLEQTVGGLLSTGGIGSTSKTYGPVVANVIDLHIITGNGEYIQCSRTQTPELYHAVLGGLGGCGVIASATLALRKTKKYIRTFHLLYDSLKPWMDDHIFLGRNHQIEHLEGFCWTSAKGIRHTTSGKKFFAHWLYGLQVGIEYDEVAPSASDVLHDLNYWRLFHTEDEETVSHVFRYQPRFEVMRTSGAWNQAHPWIECFISAEALAEVLPEILDMLPLSLGDGHRAIMVAPDNLPNLFMMPPAKNILCFAILPMAVPVEDTKTFDVLEKVNQLLLRAGGKRYLSGWLGKSNFDWRQHYGTSYKTWETMKQQYDPSHVLS

SEQ ID NO: 9582 - protein, 448 aa, Saccharomyces cerevisiae
MVASIRSGVLTLLHTACGAGILAMPYAFKPFGLIPGVIMIVLCGACAMQSLFIQARVAKYVPQGRASFSALTRLINPNLGIVFDLAIAIKCFGVGVSYMIVVGDLMPQIMSVWTRNAWLLNRNVQISLIMLFFVAPLSFLKKLNSLRYASMVAISSVAYLCVLVLLHYVAPSDEILRLKGRISYLLPPQSHDLNVLNTLPIFVFAYTCHHNMFSIINEQRSSRFEHVMKIPLIAISLALILYIAIGCAGYLTFGDNIIGNIIMLYPQAVSSTIGRIAIVLLVMLAFPLQCHPARASIHQILQHFAEENVSISATSADEPTVATESSPLIRDSSLDLNEVIEEESIYQPKETPLRGKSFIVITCSILVASYLVAISVSSLARVLAIVGATGSTSISFILPGLFGYKLIGTEHKTAVPLTTKIFKYTGLLLFIWGLIIMITCLTAALKLN

SEQ ID NO: 9583 - protein, 396 aa, Photorhabdus luminescens subsp. laumondii TTO1
MLDNQTIATVKSTIPLLSATGPKLTAHFYERMFKHNPELKNIFNMSHQLNGDQREALFNAICAYAANIDNLKVLLPAVEKIAHKHASLNIQPEHYQIVGTHLLATLNEMFQPGNEILDAWGKAYGVLADIFINREEQIYHSGELTDGGWRGLRPFRINRKEVKSEVICSFEFAPQDGGKVMDYKPGQYLSIYLQDDSFANREIRQYSLTAAPNGSSYRIAIKREPQGIVSNHMHDKMQEGDTVWLTAPRGDFFLDIKPETPVTLISAGVGLTPMMSMLYHLHQQNHNSPINWLHAAEHGGHHAFSHEVAAIAQAMPNFAGTIWYREPRDEDQQGIHYQHKGFMDLTVLNEALKTEGMHFYFCGPVAFMQYVAKQLLDMGIDKQFIHYECFGPHKVI

SEQ ID NO: 9584 - protein, 170 aa, Triticum aestivum
MAAFLRSKCSSVGRAMMGSLGNNLYGGASSSIETVARPSRSDAVCQQIRTFIQMRTNLKVVDNSGAKRVMCIQSLRGKKGARLGDMIIGSVKEAQPRGKVKKGDVVYGVVVRAAMKKGRSDGSEVQFDDNAIVIVNNKGELIGTRVFGPVPHELRKKKHLKILALAEHIV

SEQ ID NO: 9585 - protein, 192 aa, Triticum aestivum
  misc_feature (157)..(157): Xaa can be any naturally occurring amino acid
  misc_feature (176)..(176): Xaa can be any naturally occurring amino acid
PFLDKEFINVAMSMDPEWKMYDKNLGRIEKWVMRKAFDDEENPYLPKHILYRQKEQFSDGVGYNWIDGLKAFTEQQVTDEMMSNAAQTFPYNTPVNKEAYYYRMIFERLFPQDSARETVPWGPSIACSTPAAIEWVEQWKASNDPSGRFISSHDSAXTTPAAVSWRWWPTAATAPXNGTVNGGNDVAVAIAV

SEQ ID NO: 9586 - protein, 446 aa, Chromobacterium violaceum ATCC 12472
MNHPLTTRSEFDHLDLRAHWMPFSANRNFQRDPRLIVSGEGNYLTDADGRRIFDSLSGLWCCGAGHSRKEIAEAAYRQLSTLDYSPGFQFGHPLSFRLAERVAAMAPGALNHVFFTNSGSECADTAVKMARAYWRLKGQASKTKLIGRARGYHGVNIAGTSLGGMNGNRKLFGPLMDADHLPHTLLPANAFSRGLPEQGAELADDLLRLIELHDASNIAAVIVEPMAGSAGVIVPPQGYLQRLREICTQHGILLIFDEVITGFGRTGSLFGADHFGVTPDIMNLAKQLTNGAVPMGAVVASSEIYDAFMAQATPEYAVEFAHGYTYSAHPVACAAALAALDVLEQENLVARAAELAPHFERGIHGLKGLPHVIDIRNCGLAGAVQIAPSGGDAIVRPYEAAMALWRKGFYVRYGGDALQFGPPFTATPQELDSLFDAVGETLAKLA

SEQ ID NO: 9587 - protein, 387 aa, Debaryomyces hansenii
MVSDGEFTRTQIFGTVFEITNRYTDLNPVGMGAFGLVCSAIDKLTGQNVAVKKIMKPFLTSVLAKRTYRELKLLKHLRHENLITLDDIFLSPLEDIYFVTELQGTDLHRLLTSRPLEKQFIQYFTYQILRGLKYVHSAGVIHRDLKPSNILINENCDLKICDFGLARIQDPQMTGYVSTRYYRAPEIMLTWQKYDTEVDLWSVGCILSEMIEGKPLFPGKDHVHQFSIITELLGSPPPDVIETICSENTLRFVQSLPHRDPIPFSERFAQCTHVEPEAIDLLAKMLIFDPKKRISALDALSHPYMEPYHDPTDEPVCEVKFDWSFNDADLPVDTWRVMMYSEILDFHQIIGAGANGTTQEQMAQIQQEGIQAPSSQYQQTNQEQKVE

SEQ ID NO: 9588 - protein, 394 aa, Thermoanaerobacter tengcongensis MB4
MDLKKEALKLHRENKGKIEVVSKVPVKNEEDLSLAYTPYVAEPCKEIEKDKDLVYEYTVKGHMVAVVTDGSAVLGLGNIGPYAALPVMEGKAVLFKEFGGIDAIPICLATQDVDEIIRTVLNIAPTFGGINLEDISAPRCFEIEKRLDEMLDIPVFHDDQHGTAIVTFAALVNALKIVKKSLYEIVAVVNGAGAAGVAISKFLVNAGVKDVIVCDRSGIIYEGRKDLDSSKQKIAKITNKKKIKGTLKEALEGADVFIGVSGPNLLTKEMVKKMAKKPIVFALANPVPEIHPEEAKEAGAYVVGTGRSDFPNQVNNVLAFPGVFKGALRVRATTINERMKLAAAYAIANTISEEELSSEYILPKPFDKRVAENVAYAVAKEAINTGVSRITKFD

SEQ ID NO: 9589 - protein, 260 aa, Zea mays
MAISLTLCPVTHTQAAVRPRPSDGSWNTRFRGPHHRMQVVQVGSKCAAECACPAASARLGSASLVQRTEQPPSLYITRAPRSSAALPFFIPGLVVANLSAGLPSAADDRRDHQLAVRNPERACAGGSSERLILIPCPKKRTASSMDRRPPARRRPGDPHRRGAAMHGAVEQQKQHRGRRPPQGTVPPPPPAGYFTAELLLAFVFVAVSLAFLPLVLPPLSPPPFLLLLVPVGLLAVLLALAFVPLDAHSHLVVVGSGSSR

SEQ ID NO: 9590 - protein, 282 aa, Triticum turgidum subsp. durum
MQVDPSGQVQWPQQQPFPQPQQPFCEQPQRTIPQPHQTFHHQPQQTFPQPEQTYPHQPQQQFPQTQQPQQPFPQPQQTFPQQPQLPFPQQPQQPFPQPQQPQQPFPQSQQPQQPFPQPQQQFPQPQQPQQSFPQQQQPAIQSFLQQQMNPCKNFLLQQCNHVSLVSSLVSIILPRSDCQVMQQQCCQQLAQIPQQLQCAAIHSVAHSIIMQQEQQQGVPILRPLFQLAQGLGIIQPQQPAQLEGIRSLVLKTLPTMCNVYVPPDCSTINVPYANIDAGIGGQ

SEQ ID NO: 9591 - protein, 371 aa, Bacillus sp. KSM-K16
MTTTRGLEGIVATQSSVSSIIDDELTYHGYGIDDLAENASFEEVVYLLWNGELPTKEELESFSRALAEQAGVPDEIFEQMKAYPIDSVHPMAALRTSVSMLGLFDDEAESVEEEKNYRKAIKLQAKIPTIVAGFERIRSGKEPIAPNKELSFAANFLYMLTGENPDAISVKAFNKALVLHADHELNASTFTARVCVATLSDMYSGITAAIGALKGPLHGGANEGVMKMLLEIEEFERVEPYIQKALDNKEKIMGFGHRVYKNGDPRAKHLREMSKQLTDVIKESKWYDMSLRIEELVTTQKGLLPNVDFYSATVYHSLGIKHDLFTPIFAISRTSGWIAHILEQYANNRLIRPRAEYVGPNKRSYKPVESR

SEQ ID NO: 9592 - protein, 113 aa, Zea mays subsp. parviglumis
MGRTACCAKEGVKRGAWTSKEDDALAAYVKAHGEGKWREVPQKAGLRRCGKSCRLRWLNYLRPNIRRGNISYDEEDLIIRLHRLLGNRWSLIAGRLPGRTDNEIKNYWNSTLV

SEQ ID NO: 9593 - protein, 212 aa, Oryza sativa (indica cultivar-group)
SSSSSSISHGFRPSIIRARSGAMDGEEDSEWMMMDVGGKGGKGGGGGGAADRKKRFSEEQIKSLESMFATQTKLEPRQKLQLARELGLQPRQVAIWFQNKRARWKSKQLEREYSALRDDYDALLCSYESLKKEKLALIKQLEKLAEMLQEPRGKYGDNAGDDARSGGVAGMKKEEFVGAGGAATLYSSAEGGGTSSTEQTCSSTPWWEFESE

SEQ ID NO: 9594 - protein, 319 aa, Bacillus sp. KSM-K16
MKRIGVLTSGGDSPGMNAAIRAVVRKAIFHGLEVYGISYGYQGLINGDIKKMELGSVGDIIHRGGTMLYTARCEEFKTLEGQQKGIEQLKKFGIEGLVVIGGDGSYRGAQQLTKHGFPTIGVPGTIDNDIPGTDFTIGFDTALNTVIDAIDKIRDTATSHDRTYVIEVMGRHAGDLALWAGLADGAETIVIPEAEHNMEQILATIKRGQERGKKHSIIVVAEGVGSGIEFGDRISKEMNMETRVTVLGHIQRGGSPTGADRVLASRLGAKAVDLLLEGKAGMTVGIQKNELVYHPIDEILDRPHTIDQEMYKLSQELSI

SEQ ID NO: 9595 - protein, 484 aa, Xanthomonas axonopodis pv. citri str. 306
MLRSLIVCCRVRMSYAIVWFRRDLRLEDNPALRAALDAGHHPIPLYIDAPHEEGEWTPGAASRTWRHRSLAALDGALRALGSGLVIRVGNSAQVLDEVIAQTGAVAVYWNRKYEPATQPRDAQIKRDLRERGIEVQSCNCALLFEPWQLSTQQGGPYKVFTPFWRNALTQLQLPAAIGAPRSLPPLPASLKTDALDTLQLVPGLQWDQGFWEHWQPGEAGAHEMLEIFIDGALSGYRENRDRPDRVGTSQLSPHLHFGEIAPWRIANTLETHRTARNGAEIDAYIRQLGWRDFAYHLLHHFPDTTNQNLNPRFAGFDWATVDPVALQAWQRGRTGIPIVDAGMRQLWHTGWMHNRVRMIVASFLCKHLRIHWIEGARWFWDTLVDADLANNTLGWQWVAGTGADAAPYFRVFNPVTQAEKFDPQAAYITRWVPELGKLAVKERFAPWLHPLSLARLAPEYPRTPIIGLAEGRDAALAAYAKTRG

SEQ ID NO: 9596 - protein, 284 aa, Triticum aestivum
  misc_feature (177)..(177): Xaa can be any naturally occurring amino acid
  misc_feature (189)..(189): Xaa can be any naturally occurring amino acid
  misc_feature (203)..(203): Xaa can be any naturally occurring amino acid
  misc_feature (233)..(233): Xaa can be any naturally occurring amino acid
  misc_feature (235)..(235): Xaa can be any naturally occurring amino acid
MAAAAAGATRRAASSLASRCLLSRPAASPAAVPSALRRADGARGLLPGLLQRFGTAAAAEEPISPSVQVGETQLLINGKFVDAASGKTFPTLDPRTGEVIARVSEGDAEDVDRAVVAARKAFDEGPWPKMTAYERSRILLRFADLIEKHNDEIAALETWDNGEPYEQAAHIEVPMLXARLMRYYAGWTXDKIHGLIVRADGPXHVQVLHEPIGVVGQIIPWNFPLLMYGWKGXPXLLACGNTIGLKTVEATPLSAPNVSKLWDGGGLPRGGPQKRIWVWGPMGG

SEQ ID NO: 9597 - protein, 228 aa, Schizosaccharomyces pombe
DRCGLLLERHAKIATDGQKPFLKKDSDFKEVPSGDIDLETAISLIKPTVLLGCSGQPGKFTEKAIREMSKHVKHPIIFPISNPTTLMEAKPVQIDEWSNGKALMATGSPLPPLTRNGKEYVISQCNNALLYPALGVACVLSRCKLLSDGMLKAASDALATVPRSLFVADEALLPDLDNAREISRHIVFAVLKQAISEGMSTVDLPKDDAKLKEWIIEREWNPEYRNFV

SEQ ID NO: 9598 - protein, 410 aa, Bacillus sp. KSM-K16
MPTTREEALHMHRINQGKLESKAKVPVKDARDLSLAYSPGVAEPCKEIFEDVETVYEYTMKGNMVAVVSNGTAVLGLGNIGPEASLPVMEGKAVLFKSFAGVDAFPICLRSNDVDEIVNTVKLLEPTFGGVNLEDIAAPDCFVIEERLKKETNIPIFHDDQHGTAIVTLAGLINALKISGKKLSEIKVVANGAGAAGIAIIKLMLRMGVRNIIMCDTKGAIYEGRPYGMNAVKEAVAKRTNMNKEEGKLEDVIKGADVFIGVSVEGAVTKEMVESMNDNPIIFAMANPVPEIMPEDAKAAGASVIGTGRSDFPNQVNNVLAFPGIFRGALDARATHINEEMKVAAVYAIANLVSEEELSVDYVIPAPFDSRVAPAVAAAVAKKAMETGVARVKVDPEEVAEKTRKLAIID

SEQ ID NO: 9599 - protein, 230 aa, Erwinia carotovora subsp. atroseptica SCRI1043
MLNAQLTLISHPLCPFVQRAAIVLLEKNVSFERIDVDLAAKPDWFLALSPMDKVPLLKVELADNSDAILFESAAICEYLNETQAGASLYSSDALSRAQQRAWVEFGVAALSDAWQFLNAKELAVANDKKAAFRDKLQRLESTLEQGPYFSGSAFSMVDAMFAPVFRYFDLLSPDVSQPIFDNLPRVSAWRASLANRPSVLAAVRDDYADRFKQHLVKQQVILSDSMCKTT

SEQ ID NO: 9600 - protein, 489 aa, Halobacterium sp. NRC-1
MSDLDFGDVDWNVQYIDGEYVPPGDRGTLEVDDPSTRELFTEIPAGTTDDVDAAYEAAADAQTEWADTPPQERARIVAAASEILASHRDEVVDLLATESGTTYTKGAAEFEASVGITDEAASFPTRMNGDHKQSVVEGKENIVVREPQGVVGIISPWNFPLNLSIRAVAPAVAAGNSVVLKPASNTPVTGGLLIAKVFEAAGLPEGVFNVVTGKGSEIGDRIAGHPHADVISFTGSTAIGRQVAATAGENLALPAMELGGNNVHIVTEDADLDDAVDSGVFGSFLHSGQICISINRHVVHEDVYDEYVERLTERAAALPTGTAHDADTVVGPIIDESQRDQILDYIERTVDAGATLETGGDHDGLVVEPTVLSDATNDMAAACNEHFGPVAPVIPFSDDDEAVEIANSTEYGLSGSVHAGDTGRARDIADRIDTGMIHINDQPVNQEPHLPFGGYKNSGLGRYNGEYVLNEFTQEKWVSIQRETRDYPF

SEQ ID NO: 9601 - protein, 233 aa, Rhodobacter sphaeroides 2.4.1
MMNSLSNSLAAADIAHSLHPYTNARAHERNGPLIITRGQGVHVYDSEGREYIEGLAGLWSVAVGFSEPRLAEAAARQMAELPYYHTFAGKAHEPQIRLAEKLVEMTPEALTRVFFTNSGSEANDTVVKLVWFMNNALGRPQKKKFLSRIKGYHGITIASGSLTGLPVNHRASICPPSRSCIWAARTTGASAPRARARPSSAPASCARPRRRSSPRGPRPSPPSSASRSWARAG

SEQ ID NO: 9602 - protein, 57 aa, Zea mays
MKEGTANCIDILIAIILPPLGVFLKFGCKVEFWLCLLLTFLAYLPGIIYAIYVITKD

SEQ ID NO: 9603 - protein, 90 aa, Glycine max
MASFARGAASLTRIGLSTSKTPLQLIHRRGLADHHGPPKVACWKDPMSPSKWKEEHFVIVSLTGWGLLIYGGYKLATGGKGKKEEELAKA

SEQ ID NO: 9604 - protein, 508 aa, Bifidobacterium longum
MKNKVQLITYADRLGDGTLSSMADILRTRFDGVYDGVHILPFFTPFDGADAGFDPIDHTKVDERLGSWDDVAELSKTHNIMVDAIVNHMSWESKQFQDVLEKGEESEYYPMFLTMSSVFPNGATEEDLAGIYRPRPGLPFTHYKFAGKTRLVWVSFTPQQVDIDTDSDKGWEYLMSIFDQMAASHVSYIRLDAVGYGAKEAGTSCFMTPKTFKLISRLREEGVKRGLEILIEVHSYYKKQVEIASKVDRVYDFALPPLLLHSLFTGHVEPVAHWTEIRPNNAVTVLDTHDGIGVIDIGSDQLDRSLKGLVPDEDVDNLVNTIHANTHGESQAATGAAASNLDLYQVNSTYYSALGCNDQHYLAARAVQFFLPGVPQVYYVGALAGRNDMELLRRTNNGRDINRHYYSTAEIDENLERPVVKALNALAKFRNELPAFDGEFSYEVDGDTSITFRWTAADGTSTAALTFEPGRGLGTDNATPVASLAWSDAAGDHETRDLLANPPIADID

SEQ ID NO: 9605 - protein, 273 aa, Glycine max
MSILPKGDSVQIREVWNDNLEEEFALIREIVDEYNYVAMDTEFPGVVLRPVGNFKNINDYNYQTLKDNVDMLKLIQLGLTFSDENGNLPTCGTESTCIWQFNFREFNISEDIFASDSIELLRQCGIDFKKNSEKGIDVNRFGELLMSSGIVLNDAVHWVTFHSGYDFGYLLKLLTCRSLPETQAGFFDLIKMYFPMVYDIKHLMKFCNSLHGGLNKLAELLEVERVGVCHQAGSDSLLTSCTFRKLRDAFFSGSTEKYAGVLYGLGVESGQTN

SEQ ID NO: 9606 - protein, 188 aa, Zea mays
  misc_feature (82)..(82): Xaa can be any naturally occurring amino acid
  misc_feature (104)..(104): Xaa can be any naturally occurring amino acid
  misc_feature (118)..(118): Xaa can be any naturally occurring amino acid
  misc_feature (132)..(132): Xaa can be any naturally occurring amino acid
  misc_feature (149)..(149): Xaa can be any naturally occurring amino acid
MASSMLSSAAVVTSPAQATMVAPFTGLKSSAAFPVTRKANNDITSIASNGGRVSCMKVWPPVGKKKFETLSYLPDLTEVELXKEVDYLLRNKWIPCVEFELEQXDFVYREHGSTPGYXIDGRYWTMWKLPLXFGCTDSAPRGLKEVQEXKTEYPNAFIRDSSIEQTGPGSKGASFSSPTNHKGFPGGV

SEQ ID NO: 9607 - protein, 362 aa, Zea mays
  misc_feature (31)..(31): Xaa can be any naturally occurring amino acid
MGSTAADVAAVVDEEACMYAMQLASSSILPXKNAIELGLLEVLQKEAGGGKAALAPEEVVARMPAAPSDPAAAAPLVDRMLRLLASYDVVRCQMEDRDGRYERRYSAAPVCKWLTPNEDGVSMAALALMNQDKVLMESWYYLKDAVLDGGIPFNKAYGMTAFEYHGTDARFNRVFNEGMKNHSVIITKKLLDFYTGFEGVSTLVDVGGGVGATLHAITSRHPHISGVNFDLPHVISEAPPFPGVRHVGGDMFASVPAGDAILMKWILHDWSDAHCATLLKNCYDALPENGKVIVVECVLPVNTEATPKAQGVFHVDMIMLAHNPGGKERYEREFRELAKGAGFSGFKATYIYANAWAIEFIK

SEQ ID NO: 9608 - protein, 412 aa, Zea mays
INTGRVTFLRSIGLREYSRYLTFNHPCSHEKPLLSHLRFFPWVVNEVYFKVWRQGRTGYPLVDAGMRELWATGCPRARIRVVVSSFFVKVLQLPWRWGMKYFWDTLLDADLESDALGWQYISGSLPDGRELDRIDNPQFEGYKFDPHGEYVRRWLPELARLPTEWIHHPWDAPESVLQAAGVELGSNYPRPIVELDAANSRLQDALSEMWELEAASRAAMENGMEEGLGDSTDERPIDFPQELRMEVDRQPVQPAIHAQGVTGRRREDQMVPSMTSSFIRAETELTADFGHTSEDSRPEVPSNIHHLQARPEREETVDGGTGNAVRVHGNHHQQNLQNNIHRVLGIAPSISEASSSWTGRDGGVVPVWSPPAASGNSDPYAADEADISSRGYLDRHPQSHTMMNWSQLSQSL

SEQ ID NO: 9609 - protein, 355 aa, Azoarcus evansii
MIPEFIDTWQMTEPGKLQKTRVPMPELGPGDVVVKIAGCGVCHTDLSYFYMGVPTVQKPPLSLGHEISGTVIGGEASMIGKEVIVPAVIPCGECELCNTGRGNRCLSQKMPGNSMGIYGGYSSHIVAQSKYLCVVENRGGTPLEHLAVVADAVTTPYQAAVRADLKKDDLVIVIGAAGGVGSFMVQTAKGMGAKAVIGIDINEEKLVMMKDFGADFVINPKDKSAKDIKELFKGFCKERGLPSNYGWKIFEVTGSKPGQELALSLLSFTGKLVIVGYGTAETTYMLSKLMAFDAEIIGTWGCPPDPYAAVRDMCLDGRIKLGPFVETRPMSQIEQVFDEAHHGKLKRPVILTPDF

SEQ ID NO: 9610 - protein, 115 aa, Triticum aestivum
  misc_feature (5)..(5): Xaa can be any naturally occurring amino acid
  misc_feature (7)..(7): Xaa can be any naturally occurring amino acid
  misc_feature (16)..(16): Xaa can be any naturally occurring amino acid
  misc_feature (27)..(28): Xaa can be any naturally occurring amino acid
  misc_feature (45)..(45): Xaa can be any naturally occurring amino acid
  misc_feature (56)..(56): Xaa can be any naturally occurring amino acid
  misc_feature (66)..(67): Xaa can be any naturally occurring amino acid
  misc_feature (70)..(70): Xaa can be any naturally occurring amino acid
  misc_feature (73)..(73): Xaa can be any naturally occurring amino acid
  misc_feature (83)..(83): Xaa can be any naturally occurring amino acid
  misc_feature (87)..(87): Xaa can be any naturally occurring amino acid
MAAQXGXMRLVSHPIXAHDGRLPRQYXXDGQGAKKDMSPPLEWYXLPDGARSLALXVQDIDPTQLXXTHXVVXNIPPATKGSXRGLXRRGGLQLRRQEGSTGHRLGPPHDHLPYK

SEQ ID NO: 9611 - protein, 300 aa, Erwinia carotovora subsp. atroseptica SCRI1043
MSLSQEFQNFIAQLRANPVPFEQLTDIGELRGAFNALGSDLPPLLDVLFRQVDAAGVPAEWVDPAGSDPSRVIFYLHGGGYVAGDPIIYRNFVTALCRASDCRALIVDYRLAPESPFPAALEDAQRSYAWLLTQGISADQIVIIGDSAGGGLALSTLVSLRDSCQPLPGAAVLLSPWTDLTLESESHLTKVKDDPIITHKFLDQSRQRYIGTGASDTDALVSPLHADLTGLPPLLVLVGTAEVLLDDSTALAHKAREAGVDVDLIEGDGMIHTWPFFIDSFPEAEKAVQSIGTFIHSRIR

SEQ ID NO: 9612 - protein, 335 aa, Naumovia castellii
MSEPAQKKQKTTGSSLEQLKASGTVVVADTGDFASIAKFTPQDSTTNPSLILAAAKQPAYAKLIDVAVSYGKKNGKTTDEKVELAVDRLLVEFGKEILKIVPGRVSTEVDARLSFDKEATIAKALEIIKLYEDLGISRERVLIKIASTWEGIQAARELESKHKIHCNLTLLFSFSQAVACAEAKVTLISPFVGRIMDWYKAKTGETYNGRNDPGVLSVHKIYNYYKKHGYKTIVMGASFRNVDEIKNLAGVDYLTISPNLLDELLNSNDHVPRVLDVATAKKEGAEKISYIDDEATFRFSLNEDAMGTEKLAEGIRKFSADIVTLFDMIEKKVTA

SEQ ID NO: 9613 - protein, 279 aa, Pediococcus pentosaceus ATCC 25745
MINSLNDRIMLNNGTAIPGLGLGVFQIPDADTAQVVANGIKNGYRLIDTAQIYGNEAGTGAGIKAGLTATGLKRADLFVTSKVWNDHLSYDETIAAFESSLKKLGLDYLDLYLIHWPGDNAFQDAWRALETLYKQGKIKAIGVSNFQIHHLQALAEFAEITPVINQIETHPQLSQLEMREYAAKHDIKVQAWSPLMQGKILDNAVLAKIAQKYNKSVAQIVLRWDVQQNILLVVKSVRAERMLSNAQIFDFELAPEDMDQINALNENLRVGPNPDEFDF

SEQ ID NO: 9614 - protein, 346 aa, Sinorhizobium meliloti
MAKALVLEKKGQLSLRDIPVRRDLSPTDVLIGIRTVGVCGSDVHYYTHGKIGPFVVNEPMILGHEAAGVVLEVGSQVRHLKKGDRVCMEPGIPDLSSRSSKLGIYNVDPSVRFWATPPVHGCLTPEVVHPAAFTYRLPDHVSFAEGAMVEPFAIGVQAALRAGIRPGDVGAVMGAGPIGMMTALAALAGGCSKVYVADLAQPKLDVIGAYEGIETINVRQQAVSEALAGATGGWGADVVFECSGAAPAILALPSLARPGGTVVLVGMPVEPVPFDIVGMQAKELRIETVFRYANVYDRAIELIASGKVDLKPLISATIPFDESIAAFDRAVEARPTDVKIQIEMPA

SEQ ID NO: 9615 - protein, 425 aa, Burkholderia cepacia R1808
MKIHIKGGTVVDPAAGTERQADVFVADGKIAALGTAPAGFNADNTIDASGLIVAPGLVDLCARLREPGYEHKATLASEMAAAVAGGVTTLVCPPDTDPVLDEPGLVEMLKFRARNLKQANVHPLGALTVGLKGEVITEMVALTESGCVGFTHANVPVRDTQVLLRALQYASTYGYTTWLRPQDAFIGRGGVAASGALASRLGLSGVPVAAETIALHTIFELMRVTGARVHLARLSSAAGLALVRAAKAEGLPVTCDVSANHLHLIDVDIGYFDSQFRLDPPLRGERDREAIRAALADGTIDAICSDHTPVDDDEKLLPFAEATPGATGLELLLSLTVKWADETNTPLAQALRRITAAPADVLQLPAGRLAEGGAADLCVFDPRAHWRVEPRALKSQGHNSPFLGYELPACVRATLVAGHVAFERH

SEQ ID NO: 9616 - protein, 377 aa, Thermus aquaticus
MEVARGLEGVLFTETRMCFIDGEAGRLYYYGIPIQELAEKSTFEETTYLLLHGRLPQRGELEAFKKDLAARRALPSHLLESFRRYPASAHPMSFLRTAVSELGMLDPTEGDISREALYQKGLDLIAKFATIVAANKRLKEGKEPLPPREDLSHAANFLYMANGVEPSPEQERLMDAALILHAEHGFNASTFTAIAAFSTETDLYSAITAAVASLKGPRHGGANEAVMKMIQEIGAPERAREWVREKLSKKERIMGMGHRVYKAFDPRAGVLEKLARRVAEKHGHSPEYQILKIVEEEAGKVLNPRGIYPNVDFYSGVVYSDLGFGLEFFTPIFAVARISGWVGHILEYKEQDNRLLRPDAKYIGELDRPYVPLEARG

SEQ ID NO: 9617 - protein, 47 aa, Glycine max
QGSNEMFGGELCFHKAPTNEEFPQQTCRQITALHKYDCLPANISTNA

SEQ ID NO: 9618 - protein, 115 aa, Hordeum vulgare
MARAAASQLVLVALVAAMLLVATDAAISCGQVSSALSPCISYARGNGAKPPAACCSGVKRLAGAAQSTADKQAACKCIKSAAGGLNSGKAAGIPSMCGVSVPYAISASVDCSKIR

SEQ ID NO: 9619 - protein, 115 aa, Hordeum vulgare
MARSAATQLVLVAMVTAMLLIAADAAISCGQVSSALSPCISYARGKGAKPPAACCSGVRSLAGAARSTADKQAACRCIKRAAGALNAGKAAGIPNKCGVRVPYAISASVDCSKIR

SEQ ID NO: 9620 - protein, 432 aa, Tropheryma whipplei TW08/27
MSKIKLVTAIPGPESERLHRIRQATVARGVSSTFPIYIKESHGSILIDEDGNHLIDMGCGIGVTTLGHSHPAVVDAARAQINSVWHTLFSITPYESYVEVCKLLAKNTPGDFPKKSLLLNSGAEAVENAVKISRAYTGRPTVAVLDRSFHGRTNLTSSMTYRGSLYSSDFGPTASNIVSAPNSYPLHDRLSGKEAAARTISYLETRVAARNIACLFYEPIQGEGGVIVPADGFLPALQDWCRENDIVFVADEIQSGFGRTGCFFASETDGLEPDIVCSAKGIANGLPLSAVTGRSDIVDAARPGTLGGTFTGNHVSCAAALEVFEQYKDNAPLDSASRLGDILKELLLNLQSKHPQIAEVRGRGAMFGAEFSGNHAGEMVSRVITRAAELGVIFLSSGVEGNVVRFLPNVFMDKETIEEAIGVLDSAISSVV

SEQ ID NO: 9621 - protein, 617 aa, Triticum aestivum
  misc_feature (103)..(103): Xaa can be any naturally occurring amino acid
  misc_feature (131)..(131): Xaa can be any naturally occurring amino acid
  misc_feature (147)..(147): Xaa can be any naturally occurring amino acid
  misc_feature (173)..(173): Xaa can be any naturally occurring amino acid
  misc_feature (180)..(180): Xaa can be any naturally occurring amino acid
MWRHAAARRSAQIRRLLSTSAPSSGAGSAVRGPCIVHKRGTDILHDPWYNKDTAFPLTERDRLGLRGLLPPRVMSFEQQYERFINSYHSLEHDSPGDPDSAVXLAKGRGRTRLDDRNETWYSRALIDNFMXLHDLIPFFYSRLQRQXCSRKHTRNRRIRHIQFVMSSRILCYXAELLYLXSISADTAATSTGYIVASFVYVDRFIKHCLDVYVAAAGINPQKVLPIMLDVGTNNEELLEDKLYLGLRQPRLEGEEYLAVVDEFMEAVHARWPKAIVQFEDFQMKWAFETLQRYRSRFCMFNDDVQGTAGVALAGLLGAVRAQGRPLADFTKQKIVVVGAGSAGIGVLNMAKHAMLRMPGTHKIGELGEGHNQFWVLDKDGLITKSRKDLDPAVARFARGYGPEEVEDLHEGASLVEVVKKVKPHVLLGLSGVGGIFNEEVLKAMKESDSPCPAIFAMSNPTTKAECTPEDVFKHVGENAVFASGSPFSNVTLSNGRKGYANQANNMYLFPGIGLGALLSGARHISDGMLHAAAECLASYITDDAIRKGILFPSISSIRHITARVGAAVARAAVDEDLAEGCPDLDPRDLRSMSESDTVDYVARKMWYPVYSPLVNDK

SEQ ID NO: 9622 - protein, 241 aa, Triticum aestivum
MKTLLILTIIAVALTTTTANIQVDPSGQVQWPQQQQPFPQPQQPFSQQPQQIFPQPQQTFPHQPQQAFPQPQQTFPHQPQQQFPQPQQPQQPFPQQPQQQFPQPQQPQQPFPQQPQQQFPQPQQPQQPFPQPQQPQLPFPQQPQQPFPQPQQPQQPFPQLQQPQQPLPQPQQPQQPFPQQQQPLIQPYLQQQMNPCKNYLLQQCNPVSLVSSLVSMILPRSDCKVMRQQCCQQLARIPQQL

SEQ ID NO: 9623 - protein, 460 aa, Schizosaccharomyces pombe
TGALLHHTLGDGDFRTFMDMFKKVSAYSIMIDNGNDAAEKIDEALSICYKKARPVYIGIPSDAGYFKASSSNLGKRLKLEEDTNDPAVEQEVINHISEMVVNAKKPVILIDACAVRHRVVPEVHELIKLTHFPTYVTPMGKSAIDETSQFFDGVYVGSISDPEVKDRIESTDLLLSIGALKSDFNTGSFSYHLSQKNAVEFHSDHMRIRYALYPNVAMKYILRKLLKVLDASMCHSKAAPTIGYNIKPKHAEGYSSNEITHCWFWPKFSEFLKPRDVLITETGTANFGVLDCRFPKDVTAISQVLWGSIGYSVGAMFGAVLAVHDSKEPDRRTILVVGDGSLQLTITEISTCIRHNLKPIIFIINNDGYTIERLIHGLHASYNEINTKWGYQQIPKFFGAAENHFRTYCVKTPTDVEKLFSDKEFANADVIQVVELVMPMLDAPRVLVEQAKLTSKINKQ

SEQ ID NO: 9624 - protein, 422 aa, Halobacterium sp. NRC-1
MRVIRDAVLADGRVRDIRLDGERIDAVGTALDGELFVDANADYRVLPGMIDAHVHFRQPGFEHKETWASGSRSAAAGGVTTVVDQPNTAPPTVTGDAVDEKAAHAAADSVVDWGVNGGVTGEWDPASLFDRSLFALGEVFLADSTGDMGIDAALFRDACQRAASEDVVVTVHAEDADRFDTAAKSRSDADAWSAYRTPEAEAAAVERAVEVGTEAGATIHIAHTSTPEGVDAAAAGGATCEATPHHLFLSRDDLDDLGTFGRMNPPLRSDPRREALFERLADGRIDVVATDHAPHTRAEKAADIWDAPSGVPGVETALPLLLGAAHRGELSYERVRDVTAANPADVFGLERKGHIAAGRDADLVLVDPDDAREIHGDDLHSNCEWTPFEGHVGVFPAMTLVRGTTVWDGDTVSAFDGRNVRQ

SEQ ID NO: 9625 - protein, 448 aa, Zea mays
MSHYHSADFEEMEDEYDMNEPVDDMEGEDEYQELVIRDSDAEDEDDADQLHKLSDTSAADARSGKDIQGIPWETIEVTRETYRQARLEQYKNYENIPNSGVAAMMACKSTEKGRTYYEFRRNTRSVKSTISHFQLRNLVWATSKHDVYLLLHYSVLHWSALNGVDTEIMDVHGHVAPSEKHPGSLLEGFLHTQISTMAVKDNLLVAGGFQGELICKHLDREGISFCCRTTYDDNAITNALEIFNTSSGALHFIASNNDCGVREYDMERYQLFKHFRFDWPVNHTSLSPDGKLVIIVGDDTDALLIDSNSGKTIHSMKGHLDFSFASAWSPDGLTFATGNQDKTCRIWDARNLTESVHVLRGNVGAIRSIRFTSDGHFLSMAEAADFVHIFDIKSDYNKRQELDFFGEVSGMSFSPDTDTLYVGISDRTYGSLLQFGRLYNYSYLDSLL

SEQ ID NO: 9626 - protein, 496 aa, Lesquerella fendleri
MTSLNIKLLYHYILTNLFNLCLFPLTAFLAGKASHLTKSDLLMFLSHLQDNLITVIVLFTFTIFCLVLYIVTKPKQIYLVDYSCYLPPDHLKVSISSVMDIFYELRKVDPLCEVGCDDSSLEFMRKVLERSGLGDETYVPLGLHQVPPQKTFAAIKDETEQVIKGALENLFENTKVNPREIGILVINSSMFNPTPSLSAMVINTFKLRSNIKSFNLGGMGCSAGVIAIDLAKDLLHVHKNTYALVISTENITITAYAGENRSMNVSNCLFRIGGAAILLSNKPRDKRRSKYKLAHTVRTHTGADDMSYRCVQQEEDEMGKVGVRLSKDITTVAGTAVKKNISTLGPLILPLSEKLLYFVSFIAKKLLKEKIKNYYVPDLKLAINHFCIHAGGRGVLDVLEKNLRLSPIDVEASRSTLHRFGNTSSSSIWYELAYIEAKGRMKKGDKAWQIALGSGFKCNSAVWVALRNVKASANSPWEHCIDRYPVPDTCVENGKS

SEQ ID NO: 9627 - protein, 316 aa, Shigella flexneri 2a str. 2457T
MNELDGIKQFTTVVADSCDIESIRHYHPQDATTNPSLLLKAAGLSQYEHLIDDAIAWGKKNGKTQEQQVVAACDKLAVNFGAEILKIVPGCVSTEVDARLSFDKEKSIEKARHLVDLYQQQGVEKSRILIKLASTWEGIRAAEELEKEGINCNLTLLFSFTQARACAEAGVFLISPFVGRIYDWYQARKPMDPYVVEEDPGVKSVRNIYDYYKQHHYETIVMGASFRRTEQILALTGCDRLTIAPNLLKELQEKVSPVVRKLIPPSQTFPRPAPMSEAEFRWEHNQDAMAVEKLSEGIRLFAVDQRKLEDLLAAKL

SEQ ID NO: 9628 - protein, 1862 aa, Oryza sativa (japonica cultivar-group)
MPDIRSAPGRGKSDEDERRPIGSLFKLKRKRRAPGSAEAKGDSNPSVESEAPDGVVPGEMDDTLAIIKRKLRKPKKGKEGGDAVVVGSGAEGELLVEEEDVQGGVNVGDGVAEDKSNLEGVKVEVDEVIGGELKDSGGLGLEDSLSTLFKRSGRKSRQVSVKEEEGVEVAGSHGEEILEKGSGLVSDRVAKGTKRRRRRTKEEMKNAAAKSESAMAHEGSPNRKVGTSLPRKAKAEAKVKISNSNRRSKKSDEKPKASDDVLCHRSLGETIEQDAETRTVLDDGSRNSSDGASHRIEVSACLSNQPCLKPCSGELAEEVSLSAANAATDGVSNEHTYSETLLKERNDDAGCSHGKPPTLAIKSIPGKKPIEMPKKPVRQKDQLLSTDVDNKCVVGSGDTKDVNIENQPAFGIPESHVTGKGLHPHKMATSVKELDVVDVVAPTDFEDMENASKSKRVTRSSRKRKHGDMAYEGDIDWETLMQEQGLFSNLSAALVDYPLKSKDKIKISEVLDNGDGSGVAAVRAGLKAKAVTPIEKIKFKDILKRRGGLQEYLECRNMILSRWCKDVKHILDLAECGVSDVCLDDESPRQTLIRDVYLFLDQNGYINAGIASDKVKTDHESPPEDVEVSKLNESHERKSVSIQDCIVTEAVQDKKAVVKQTDCVLTEASNEESSSAAIHCDAQDLLPPLKSEELIFKEKNQGVLTEVEGGSLHQAEAADIEHSENKHEASDRVESGGYGKKIIVVGAGPAGLTAARHLQRQGFSVTVLEARNRIGGRVYTDRVSLSVPVDLGASIITGVEADIATERRADPSSLICSQLGLELTVLNSACPLYDVVTGDKVPDDLDTDLESEYNGLLDEMAQLFAQNGESAVGLSLEDGLEYALRKNRVTRSEQDDQLRNVSSAGAVDISESASTEKEIAHCGKEDKTDVLSPLERRVMNWHFAHLEYGCAAMLKSVSLPYWNQDDVYGGFGGAHCMIKGGYDTVLESLAKGLDVQLNHVVTEVLYGSEELGASGNSRKFVKISTSNGNEFVGDAVLITVPLGCLKAQTIKFSPSLPDWKLSSIDRLGFGLLNKIVLEFPEVFWDDNVDYFGATAEQTDLRGQCFMFWNLKKTVGVPVLIALLVGKAAIDGQSISSDDHVKNAIVVLRKLFKDASVPDPVASVVTNWGLDPFSRGAYSYVAVGASGRDYDILGRPVSDCLFFAGEATCKEHPDTVGGAILSGLREAVRIIDLVHSGKDYVAEVEALQTYQMQSDSERNEVKDMSNKLDACELSTALCKTSSDASYPLFSKETLLQEMFFSAKTTSGRLHLAKELLKLPPDVLKSFAGSKDGLSTLNSWILDSLGKNATQLLRHCVRLLLLVSTDLLAVRLSGIGRTVKEKVCVHTSRDIRAIARQLVSVWVEVFRKEKASNGGLKLLRRMPSTESSKPRSKDLLSGKPIVRAPNQVSFNPKVASKNARSAGNHSPHTAIKKPENKAAKLEAMTATRSDGSSLRSQKQQHALEPKVDNGLAMSEEEAAAFAAAEAARAAAIAAAQAYASVEAEINAPRELPKIPSFHTFAMRDHYLDESDTRKKVLSDNLVRLECISEIDSRNDKAKNPSVDHANCADVDSSKMTGDNCTQRSYSNENACLINIRDHSTDSGAVDSRFTRAWVDTDTIFIDGVKDPLAIERWQQQAMEADKEFYSRIRIPDEEDSSSQKQTCRSSASQVAESKPASDGQSRGVEHLRQGLINFISTVLMPLYRNKKVDREGYKGIMRKAVTKIIETCTEGEKMMTVHEFLDSKRKNKVRLLSSTCKSHDVHFGIQQVSVRSIGVIKFLDLRIGADTSGLSIHDSCAKPNDYPKFPTAWQGTDYPNSMARISLI

SEQ ID NO: 9629 - protein, 209 aa, Arabidopsis thaliana
MSQLGVETSQAQPETPQSTTFLDLLRLQMDGLDRSRRRKRTLKERLGFKRIGCCGPTWGLRLTSNTGEDDDEPFENRLVSGSDHVTGPLNQGMNLATALAAERNYRTEETEASGSLTPLKVSLMRLLEETAERVVVEENETERVTASASSTVRGVNNDSVCCVCMGRKKGAAFIPCGHTFCRVCSREVWLNRGSCPLCNRPIIEILDIY

SEQ ID NO: 9630 - protein, 178 aa, Glycine max
  misc_feature (53)..(53): Xaa can be any naturally occurring amino acid
  misc_feature (101)..(101): Xaa can be any naturally occurring amino acid
  misc_feature (125)..(125): Xaa can be any naturally occurring amino acid
MASSTISSPTVTTVNRAGAGMDAPFTGLKAMAGFLTTKTNNDITSIASTGGRXHCMQVWPPPGNKNIETLSYLPHLDDAQLAKEGQHLLKKGWIPCLELQXEHSCRYREHNRSPRYYDGRYCTMXNLPMFGCTDAYHALNELRDADTAYPNGFIRIIRCNIVEQVQCINFIAYKPPDF

SEQ ID NO: 9631 - protein, 446 aa, Arabidopsis thaliana
MTKKMRRVGKYEVGRTIGEGTFAKVKFARNTDTGDNVAIKIMAKSTILKNRMVDQIKREISIMKIVRHPNIVRLYEVLASPSKIYIVLEFVTGGELFDRIVHKGRLEESESRKYFQQLVDAVAHCHCKGVYHRDLKPENLLLDTNGNLKVSDFGLSALPQEGVELLRTTCGTPNYVAPEVLSGQGYDGSAADIWSCGVILFVILAGYLPFSETDLPGLYRKINAAEFSCPPWFSAEVKFLIHRILDPNPKTRIQIQGIKKDPWFRLNYVPIRAREEEEVNLDDIRAVFDGIEGSYVAENVERNDEGPLMMNAFEMITLSQGLNLSALFDRRQDFVKRQTRFVSRREPSEIIANIEAVANSMGFKSHTRNFKTRLEGLSSIKAGQLAVVIEIYEVAPSLFMVDVRKAAGETLEYHKFYKKLCSKLENIIWRATEGIPKSEILRTITF

SEQ ID NO: 9632 - protein, 259 aa, Zea mays
MASKSTMRSLVLIMGLLLLSCSGMSSAARLLEEMAPKEEYPHPEVPELPKPELPPHPTVPELPKPDELPPHPVVPELPKPEVPVHPAVPELPKPEIPPHSTVPELPKPEVPELPKPEVPEHPAVPELPKPELPPHPTVPELPKPEVPELPKPEVPEHPAVPELPKPELPPHPTVPELPKPEVPELPKPEVPEHPAVPELPHPDVPEHPASVPELPKPEVPEHPTVPELPKHELPPLPEPELPLPPKAESHYPEPGMAKP

SEQ ID NO: 9633 - protein, 355 aa, Fusarium solani
MSRSNPPNPTGSRKISFNVSEQYDIQDVVGEGAYGVVCSAIHKPSGQKVAIKKITPFDHSMFCLRTLREMKLLRYFNHENIISILDIQKPRNYESFNEVYLIQELMETDMHRAIRTQDLSDDHCQYFIYQTLRALKAMHSANVLHRDLKPSNLLLNANCDLKVCDFGLARSAASQEDNSGFMTEYVATRWYRAPEIMLTFKEYTKAIDVWSVGCILAEMLSGKPLFPGKDYHHQLTLILDVLGTPTMEDYYGIKSRRAREYIRSLPFKKKVPFRTLFPKTSDLALDLLEKLLAFNPVKRITVEEALKHPYLEPYHDPEDEPTAPPIPEEFFDFDKHKDNLSKEQLKQLIYQEIMR

SEQ ID NO: 9634 - protein, 434 aa, Yersinia pestis KIM
MTRILQSINKIALKERLMESKVVVPAEGKKITVDAQGKLVVPHNPIIPFIEGDGIGVDVTPAMINVVDAAVKKAYNGERKISWMEIYTGEKSTHVYGKDVWLPEETLDLIRDYRVAIKGPLTTPVGGGIRSLNVALRQQLDLYVCLRPVRYYEGTPSPVKHPELTNMVIFRENAEDIYAGIEWKAGSPEAEKVIKFLREEMGVKKIRFPEQCGIGVKPCSEEGTKRLVRAAIEYAITNDRESVTLVHKGNIMKFTEGAFKDWGYQLAREEFGGELIDGGPWVKIKNPNNGKEIIVKDVIADAFLQQILLRPAEYDVIACMNLNGDYISDALAAQVGGIGIAPGANIGDDCALFEATHGTAPKYAGQDKVNPGSIILSAEMMLRHMGWFEAADLIIKGTEGAIQAKTVTYDFERLMEGAKLLKCSEFGDAIIKHM

SEQ ID NO: 9635 - protein, 402 aa, Pseudomonas fluorescens PfO-1
MENLQSAVDTLVHSSNTLFILIGAVMVLAMHAGFAFLEVGTVRQKNQVNALSKILSDFAVSTLAYFFIGYWLSYGVTFLHPAAVLSADHGYGLVKFFFLLTFAAAIPAIISGGIAERARFVPQLCATALIVAFIYPFFEGMIWNGNYGLQAWLTAQFGAPFHDFAGSVVVHAMGGWLALAAVLLLGPRTGRYRDGKLVAFAPSSIPFLALGSWILIVGWFGFNVMSAQTLQGVSGLVAVNSLMAMVGGTVAALIVGRNDPGFLHNGPLAGLVAVCAGSDLMHPVGALVNGAIAGALFVWCFTAAQVKWRIDDVLGVWPLHGLCGVWGGIACGIFGSTTLGGLGGVSLISQLIGTALGVAVALIGGFAVYGSIKALHGLRLSQEQEYYGADLSLHKIGAVSQD

SEQ ID NO: 9636 - protein, 492 aa, uncultured bacterium 560
MIKMPDGKLFIGGEWETGTGKEIVSIFPADGSINCSLYGASKNDVLRAVKLAKSAQSQPSWRSLKPHERARYLYAIADGIEANIDRISQIQTRDTGKTLRETAILASSASGTFRYFGALLESSDDLLTAQRNDSLTMSVYEPLGLVSAITPWNSPIASDAQKIAPALAAGNAVLLKPSSWSPLVSLELAKLVESSGLPKGLFSVLPGSGEEVGNLLVEHPDISKVTFTGSTKTGRSLAIKAAKKLMPISLELGGKSPVIVFKDSDIDIAIAGVMFGIFSSTGQSCIAGSRLFVQKDIYNEFVERLVKATKKLKVGSPYNLDTQVSTMIHPQHRDSVAAYVDLARNEGAKILCGGKSPSGAEYKKGAYYLPTIITQVDNSAQICREEVFGPVLVVMPFDDEADVIEQANENEYGLACGIWTSDFPKAWRVGRAINAGTVWVNTYKQFSISTPFGGEKNSGMGREKGRNGIRAFMSQKSLYFDLTGNSHPWAET

SEQ ID NO: 9637 - protein, 118 aa, Brassica napus
MIRKTPNLQNDIINIQERYSNNPVMDAGGGRNNRKNVNFRRPPAMTSENSKHELRRTFSSQKRLMIPANYFSLESLVILVGLTASLLILPLVLPPLPPPPFMLLLIPIGIMVLLIFLA

SEQ ID NO: 9638 - protein, 365 aa, Zea mays
GGPIGYLEAGLCPTVGVGGHFSGGGFGMLLRKYGLAIDNVVDAVLVDARGRLLSKNTMGSDVFWAIRGGGGESFGVVLSWQVRLVPVPATVAVFNVPVPASQGAVDVVTRWQQVAPALPDDLFIRVVVQQQTANFESLFLGTCDALLPVMGSRFPELGLNRSSCKEMTWIQSVPYIYLGSGSTVEDLLNRTTSASVFSGGYKATSDYVRQAIPRDVWANIFSRLAQPNAGLMILDPYGAQISTVPESATPFPHRAGVLYNIQYMNFWPMAGGGDGAVQTKWVRDLYAFMAPYVSSNPREAYFNYRDLDLGENVVVGNVSSYQAGMVWGHKYFKDNYQRLAVAKSQIDPDDYFRNEQSIPPLANSN

SEQ ID NO: 9639 - protein, 305 aa, Lactobacillus gasseri
  misc_feature (289)..(305): Xaa can be any naturally occurring amino acid
MKRIGILTSGGDAPGMNAAIRAVTRTALANGIEVCGIRYGYAGLVAGDIFQMTSETVADKINRGGTFLYSARFPEFKEEEVQLKGIEQLKKHGIDALVVIGGDGSYHGALKLTRHGYNAVGLPGSIDNDIPYTDFTIGFDTACNTAMEAIDKIRDTATSHQRVFVVNVMGRDCGDIAMHVGVATGADAIVIPEEPYDIKEIAENLKQGFANGKKHGIVVLAEGVMDANKFKDELLKYGDFDARANILGHMQRGGSPTTRDRVLASEMGAYAVKLLLEGKGGLAVGIENXXXXXXXXXXXXXXXXX

SEQ ID NO: 9640 - protein, 436 aa, Bordetella parapertussis 12822
MNLSDKKATLSFSDGSAPIEFPVYKGTVGPDVIDIRKLYGQTGMFTFDPGFMSTAACASGITYIDGDKGELLYRGYPIEQLAVNCDFLDICYLILNGELPNGGQKQDFDSQVTHHTMVNEQLHFFLRGFRRDAHPMAVLTGLVGALSAFYHDSTDITNPHHRHVSAIRLIAKMPTLVAMAYKYSQGQPFIYPQNDLSYTGNFLRMMFATPCEEYKVNDVVERALDRIFILHADHEQNASTSTVRLCGSSGTNPFAAIAAGVACLWGPAHGGANEACLQMLEELQANGGVAKVGEFMEKVKDKNSGVRLMGFGHRVYKNYDPRAKLMQETCKEVLVALGLENDPLFKLAMELERIALEDDYFVQRKLYPNVDFYSGIVQRAIGIPTSLFTAIFALARTVGWIAQWNEMLSDPDYKIGRPRQLFTGSVTRDVPGMDKR

SEQ ID NO: 9641 - protein, 339 aa, Naumovia castellii
MVGPKTKKQKVANAGGSTSLDLLKKTGTTVVADTGDFATIDKYKPQDATTNPSLILAASKKEDYSSLVDNAVAYGKENGETIDEQVECAIDKLLVEFGTEILKIVPGKVSTEVDARLSFDKDATIKKALQLIHLYEKAGISKDRVYIKVASTWEGIQAAKVLEQEHGITTNLTLLFSFTQAVACAEAGVSLISPFVARITDYYKAQTGKDYSPEDDPGIHSVKKIYNYYKKHGYHTIIMAASLRTTGQVKQLAGIDNLTLSPKVLDELVASTDEVPKLLDPKKAAKQGDEKISFLDDEPKFRYSLNDDAMATEKLADGIRKFAADAITLSNAIKEKLQK

SEQ ID NO: 9642 - protein, 1040 aa, Cryptococcus neoformans var. grubii
MSRVPSGSQQPQYTQQPLYHPSSVHSQSASVQQTHQQYHPHAGQPMAFQGDPHAYSYDRQSQINTWQANPGAAGSMEYHSAVAGSSRGADPYQPYSQPHRSSPSQPVTAGRTQPASAQQYTPWAPVQASATTTPSSRGGGVKLEDLMSNDSRADGKSQPLSSIPLSVSASFDTRSQFSAGPQGASTEKEKDKERDKATQQQGPSEFIKKLYKMLEEEQAQYGSSRAKKGEKGKRGSVGWGANGTSFVVWDMNDFTTKILPQTFRHSNFSSFVRQLNKYGFSKIKHVDAGTGSIKENIWEFQHPNFQAGGKSDLESIKRKPVAPKKTNNQEGDENSPRYVGLSNEDQSRMHLMEDRINILEDALAKSRSEADEARMREMAMMGLVRDMIGHIAASESEAIGSPAATTGHSPRVLHLLKSLDNLARAYPPEMYHSNIARQPTTMPYTPAQPQSHQSFLNAAYNPAFSGSSVGGAAQAQASPHTDGTGSRGSLSGPSTGEIKPPASSSRLRAASNAGVVPPGSVNASVPVASQPSGNPPAGPVAHVEDPAEDVIEIPNQMQDMYGGESVSIAPLFVETPAWLTEGTTIPLTMYRKQSDGQALKAVYQAFAAGGKLPAGEGQDEDGNAIASGSSTSAAEIMAGSSQMGLQQSYDAGPSTSTGIPLPMDGSPSSESSSRKGKGKKSRGTSLKEQRESKLKPHWAQTPRILVVEDDIVYRTLSKKFLQKFGCETETVENAQGAVDKMNGTKYDLVLMDIFFGPNMDGRKATSLIRQFNNYTPIISMTSNAQPQDVDSYYQSGMNDILAKPFTKNHLFTILDKHLVHLRHAQLYERLIPLGVGVPPLSDQHVQEALAVSAATLQNTNGQLQLENGQTAEAQNEQQDSNGELELGIRNPLAGSGWSDEAYQLVLAQFLQTGVMPDITTISAVSSSPNPNGFDGTIGTSIVFGESSGFSRKRSIEAINDDNWDGQAQTPASAQAQVQAQTQNTIMQGDQQQGMSLQMPTNVGMGMDVNMGNMPESGMMNQDMSNDSDGRETKRARGMAG

SEQ ID NO: 9643 - protein, 367 aa, Aeromicrobium erythreum
MTEKQTTHRPLSDRVARRVVRTLGRLPQPLKRAIAGKPISIDGQTLDVEAQVGVRLLNLAVGETFETLPVEEGRRQIDGEAWVFGYEHPVHDVRDLVLPGPGGDLPARIYRPAGLPALSAGLVYFHGGGWVLGNLGSADSVCRYLADTAGITVVSVDYRLAPEHPFPAGVDDAVAAFRHVVAHASELGIDPSAVAVGGESAGGNLTAVASLVSTLEARTDPSVPVPAFQLMFMPVTDLTTKHRSYELFSDGFFLSDAQMDWYKAHYLTDPAQAHDPRVSPLLAPDLEGQPPAHVVVAGFDVLRDEGEAYATRLLEAGVPTTLTRQEGIVHGLVNATGVGTVARRVLDEAAGQLRKRLVPLASGETVR

SEQ ID NO: 9644 - protein, 428 aa, Arabidopsis thaliana
MTNTLCLSLITLITLFISLTPTLIKSDEGIDVFLPISLNLTVLTDPFSISAASHDFGNITDENPGAVLCPSSTTEVARLLRFANGGFSYNKGSTSPASTFKVAARGQGHSLRGQASAPGGVVVNMTCLAMAAKPAAVVISADGTYADVAAGTMWVDVLKAAVDRGVSPVTWTDYLYLSVGGTLSNAGIGGQTFRHGPQISNVHELDVITGKGEMMTCSPKLNPELFYGVLGGLGQFGIITRARIALDHAPTRVKWSRILYSDFSAFKRDQERLISMTNDLGVDFLEGQLMMSNGFVDTSFFPLSDQTRVASLVNDHRIIYVLEVAKYYDRTTLPIIDQVIDTLSRTLGFAPGFMFVQDVPYFDFLNRVRNEEDKLRSLGLWEVPHPWLNIFVPGSRIQDFHDGVINGLLLNQTSTSGVTLFYPTNRNK

SEQ ID NO: 9645 - protein, 439 aa, Chlorobium tepidum TLS
MSTLFLNARLLNPAENLDTVGSIKIGDDGLIEAVATGGESIPAKAEDNVIDLAGKVLAPGLFDMHCHFREPGQEYKETLETGSAAAVAGGFTGVALMPNTRPVIDSPLGVAYIRHHSAGLPIDLEVIGAMTVESRGEALAPYGKYASYSVKAVSDDGTAIQSSQIMRLAIEYAANFDLLLIQHAEDKHLTAGGIMNDGAVSAMLGLKGIPEVAEPIMIARDLQLIAWLKKHKLNGAVAEPRYHVAHISTAESVALVRKAKAAGLKVTCEVTPHHFTLTEHDLSSSIEKGNFIMKPPLASVENRDALIEGLRDGTIDAIATDHAPHAKHEKECPPDQAAFGIIGLETSLGLTITELVDKGVITLSQAIELLSTNPRRIMGLETILFRAGRKANLTIIDPDCEWIVSESDFGSKSRNTPFMGRKLKGRALGIYHNSKLIMR

SEQ ID NO: 9646 - protein, 129 aa, Streptococcus agalactiae
LETNTPETPDTPKIPELPQAPDTPQAPDTPHVPEAPHVPESPKAPEAPRVPESPKTPESPKAPEAPRVPESPKTPEAPHVPESPKTPEAPKIPEPPKTPDVPKLPDVPKLPDAPKLPDGLNKVGQAVFT

SEQ ID NO: 9647 - protein, 228 aa, Chloroflexus aurantiacus
MAAAAAVALVRPGMVIGLGFGSTAAYATRMIAERLHQGDLNDIVGVPCAEGTAQLARELGIPLTTLDEVAAVDLTIDGADEVDPQLSLIKGGGGALLREKMVAQASRRVAIIVDDSKLSPALGTRFALPLEVVDFGWRATARWLEAQGGTVQLRLRADGQPFRTDQGNLILDWKCGPLNDPAALAAQLSARAGIVEHGLFIGLATDLFVAGPDGVQHVTTSDCGTIAW

SEQ ID NO: 9648 - protein, 75 aa, Glycine max
  misc_feature (34)..(34): Xaa can be any naturally occurring amino acid
  misc_feature (47)..(47): Xaa can be any naturally occurring amino acid
  misc_feature (60)..(60): Xaa can be any naturally occurring amino acid
SISWPGDTTVNRAGAGMDAPFTGLKSMAGLPTRXTYNDITSIGCNCXRVQCMQVWPPIGXKKYETLSYLPDLDDA

SEQ ID NO: 9649 - protein, 670 aa, Triticum aestivum
RRGIPGDPDQQGVKDSYFPLRHGGKVTLYQDAHVNEGDLPDVQLERGKKFEHNQCWEDICHAILEAHHMIYIVGWSIYDKVKLVREPSSSRALPEGGELTLGELLKFKSQEGVRVCLLVWDDKTSHDKLFIKTGGVMGTHDEETRKFFKHSSVICVLSPRYASSKLSIFKQQVVGTLFTHHQKCVLVDTQASGNKRKVTAFVGGLDLCDGRYDTPQHRLFKDLDTVFENDFHNPTFSAGAKGPRQPWHDLHCKIDGPAAYDVLKNFEQRWRKASKFRDRFRKVSRWKDDALIKLERISWILSPSPNVPNDHVSLRVSKEEDPENWHVQVFRSIDSGSLKGFPSDCKEASKQNLVCRKNLIIDKSIHTAYVRAIRSAQHFIYIENQYFLGSSYEWPSYVNSGADNLIPMELALKIATKIRAGERFAVYIVIPMWPEGVPTSASVQEILFFQAQTMEMMYGVIARELKAMNIEDAHLQDYLNFYCLGNREEPSTDGSPESDKSTDKSAAGLARKHRRFMIYVHAKGMIVDDEYVILGSANINQRSLAGSRDTEIAMGAYQPHHAWSSKKGHPHGQVYGYRNSLWAEHLGMVDDHFKEPSSLDCVRLVNQIAEENWERFASEEMKTLQGHLLRYPVKVEPDGKIVPLPDQECFPDVGGKICGAPTSLPDSLTM

SEQ ID NO: 9650 - protein, 263 aa, Magnaporthe grisea 70-15
MQPLSNEQVQKLSNYDTLAQADDAQPAIVTSIPEVPITEARKPWQPEDEDRLPRPGVGRANIAATYDQPEGTTEGDYAAKHSDQTVLQQHLEFFDRDRDGIIWPRDTFIGFYRLGFGAVLSFLSIFVIHSNFSYATGDSWIPDPMFRINLSNIHKDKHGSASGAYDAEGRFVPQRFEDLFAKHAQGRDYMTARDVVNLLKGQRMIADPVGWFHAFIEWTATYYMLWPEDGRMKKEDVRGVFDGSIFYTIAARREEKMDEAKRR

SEQ ID NO: 9651 - protein, 400 aa, Bordetella parapertussis 12822
MSTSQKKPTVQQKKPAAQPAEKAAFKPKKSVALSGVVAGNTALCTVGRTGNDLHYRGYDILDFAGSAEFEEIAHLLVHGKLPNKAELKAYKEKLRALRGLPAQLQNVLECLPASSHPMDVMRTAVSVLGCVLPEKDDHNTPGARDIADRLMANLGSALLYWYHYSHNGRVIDVQTDDDSIGGHFLHLLHGAKPSDEWVRAMHTSLILYAEHEFNASTFTGRVIAGTGSDMYSSITGAIGALRGPKHGGANEVAFEVQKRYETPDEAEADTRQRVENKEVIIGFGHPVYTVSDPRNKVIKDVAKKLSRKAGSTKMFDIAERLETVMWDIKKMFPNLDWFSAVSYHMMGVPTAMFTPLFVIARTAGWSAHIIEQRIDNKIIRPTANYVGPEDQTYVPISKRA

SEQ ID NO: 9652 - protein, 430 aa, Deinococcus radiodurans R1
MVGRPAGVGVEWASMSKHIKVPEQGEKITMQNGKLTVPNRPIIPFVEGDGTGPDIWAASVRVFDAAVEKAYGSERKLEWMEVYAGEKSLEVYGANEWLPQETLTAFRDYLFGIKGPLTTPVGTGIRSINVALRQELDLYACVRPVQYFNGVPSPVKRPEDIDMVIFRENTEDIYAGIEWKAGTDEAEKVRGFLMREMNVTKIRFPDTSSFGVKPVSKEGTERLVRAAIEYAIENGRKSVSLVHKGNIMKFTEGGFRDWGYELAKREFGAVEIDGGPWCQLPNGIVIKDVIADNFLQQILLRPTEYDVIATLNLNGDYISDALAAQVGGIGIAPGANINYVTGHAIFEATHGTAPKYAGKNVINPSSVILSGEMMLRYMGWTEAADLILKGLDATIQQRVVTYDFARGMDDATEVKTSEFADKIIENMRNA

SEQ ID NO: 9653 - protein, 474 aa, Pseudomonas aeruginosa UCBPP-PA14
MQTKLLINGALVAGESESHAVYNPSQGNVLVRITEASGAQVHAAVQSADAAFDAWSQTPPKDRAALLLKLAERIDAQAHVFARLEADNCGKPFNAVLLDELPAVSDVFRFFAGAVRCLQGSAAGEYVAGHTSMIRRDAVGVVASIAPWNYPLLMAAWKLGPALAGGNTVVLKPSEHTPLSTLKLGELLAEIFPAGVVNIVHGRGASVGEPLTSHAQVRMVSLTGSVRTGSRIIEGTAESVKRMHMELGGKAPVLIFDDADIDAAVEGIRAFGFYNAGQDCTAACRLYVQKGVYQEFVRKLGEAVSSIRCGLPDDPATEMGPLITKEHLERVEGFVNRARELPHIEVVTGGKRAEGAGFFFEPTVLAGATQEDEVVRREIFGPVVTVSSFEDEAQALAWANDSDYGLASSVWTADVGRAHRLAARLQYGCTWVNTHFMLVSEMPHGGVKLSGYGKDLSMYGLEDYTVVRHVMFKH

SEQ ID NO: 9654 - protein, 435 aa, Saccharomyces cerevisiae
MTTNEEFIRTQIFGTVFEITNRYNDLNPVGMGAFGLVCSATDTLTSQPVAIKKIMKPFSTAVLAKRTYRELKLLKHLRHENLICLQDIFLSPLEDIYFVTELQGTDLHRLLQTRPLEKQFVQYFLYQILRGLKYVHSAGVIHRDLKPSNILINENCDLKICDFGLARIQDPQMTGYVSTRYYRAPEIMLTWQKYDVEVDIWSAGCIFAEMIEGKPLFPGKDHVHQFSIITDLLGSPPKDVINTICSENTLKFVTSLPHRDPIPFSERFKTVEPDAVDLLEKMLVFDPKKRITAADALAHPYSAPYHDPTDEPVADAKFDWHFNDADLPVDTWRVMMYSEILDFHKIGGSDGQIDISATFDDQVAAATAAAAQAQAQAQAQVQLNMAAHSHNGAGTTGNDHSDIAGGNKVSDHVAANDTITDYGNQAIQYANEFQQ

SEQ ID NO: 9655 - protein, 269 aa, Populus alba x Populus tremula
MRPQSVILALSLIFFFLHCTKTLCQSPAAAPAMAPPKTPVKAPPADSSQAPSAQVATSPGPVDINKILQKAGHFTVFARLMQATTEDTELNKELNNTNNGITILAPTDSAFSTLKAGFLNSLSDEDKTELVKFHVLPAFISTSQFQTVSNPVRTQAGTGPRVTLNVTTTGNFVNISSGLTNASISGTVYTDSQLAIYQLDKGLFPLEVFSPKPPAPGPEPALGKPRKAAPEAESPIAPKEIFGAPALLFLLNNPLLFAVSWAFGAIKYS

SEQ ID NO: 9656 - protein, 499 aa, Azotobacter vinelandii
MQASNDTRSNYAPDSSYGLFIDNQWVAGENGETITILNPANGKTLTGIPNATAVDVDRAVQAAQRAFEAWRSTTPIERANALLKIADLLEADAERFAALESLDVGKPIRESSSVDIPLAIDHFRYFAGVIRSHSDEAVMLDEQTLSIVLSEPLGVVGQVIPWNFPLLMAAWKIAPAIAIGNTVVIKPSELTPVSILELAKIFAQVLPAGVVNIVTGTGASAGQALLDHPDVRKLAFTGSTSVGHRVADAAAKKLIPATLELGGKSANIVFPDANWDKAVEGAALAILWNQGQVCESGARLFVHESIYERFLDEVKQKFEAVRVGDPLHPDTMMGAQVSKTQMERILGYVDIAKQEGAKVLLGGGRLTGADYDAGFFIQPTILVDVRNDMRVAYEEIFGPVLCVIPFKDEADVIAMANDSEYGLAGAVWTQDINRALRVARAVETGRMWVNTYHEIPAHAPFGGYKKSGLGRETHKSILEAYSQKKNIYVSLNEAPLGLF

SEQ ID NO: 9657 - protein, 302 aa, Triticum aestivum
MKTLLILTILAMATTIATANMQVDPSGQVQWPQQQPFPQPQQPFCQQPQQTIPQPHQTFHHQPQQTFPQPQQTYPHQPQQQFPQTQQPQQPFPQPQQTFPQQPQLPFPQQPQQPFPQPQQPQQPFPQSQQPQQPFPQPQQQFPQPQQPQQSFPQQQQPAIQSFLQQQMNPCKNFLLQQCNHVSLVSSLVSIILPRSDCQVMQQQCCQQLAQIPQQLQCAAIHSVAHSIIMQQEQQQGVPILRPLFQLAQGLGIIQPQQPAQLEGIRSLVLKTLPTMCNVYVPPDCSTINIPYANIDAGIGGQ

SEQ ID NO: 9658 - protein, 278 aa, Corynebacterium sp.
MTVPSIVLNDGNSIPQLGYGVYKVPPADTQRAVEEALEVGYRHIDTAAIYGNEEGVGAAIAASGIARDDLFITTKLWNDRHDGDEPAAAIAESLAKLALDQVDLYLVHWPTPAADNYVHAWEKMIELRAAGLTRSIGVSNHLVPHLERIVAATGVVPAVNQIELHPAYQQREITDWAAAHDVKIESWGPLGQGKYDLFGAEPVTAAAAAHGKTPAQAVLRWHLQKGFVVFPGSVRREHLEENLDVFDFDLTDTEIAAIDAMDPGDGSGRVSGHPDEVD

SEQ ID NO: 9659 - protein, 180 aa, Triticum aestivum
  misc_feature (54)..(54): Xaa can be any naturally occurring amino acid
  misc_feature (73)..(73): Xaa can be any naturally occurring amino acid
  misc_feature (92)..(92): Xaa can be any naturally occurring amino acid
  misc_feature (96)..(96): Xaa can be any naturally occurring amino acid
  misc_feature (108)..(108): Xaa can be any naturally occurring amino acid
  misc_feature (116)..(116): Xaa can be any naturally occurring amino acid
  misc_feature (120)..(120): Xaa can be any naturally occurring amino acid
  misc_feature (126)..(126): Xaa can be any naturally occurring amino acid
  misc_feature (129)..(129): Xaa can be any naturally occurring amino acid
  misc_feature (137)..(137): Xaa can be any naturally occurring amino acid
  misc_feature (143)..(143): Xaa can be any naturally occurring amino acid
  misc_feature (150)..(150): Xaa can be any naturally occurring amino acid
MAPTVMASSATSVAPFQGLKSTAGLPVSRRSNGASLGSVSNGGRIRCMQVWPIXEGIKNSETLSYLPPLSTEXLLKQVDYLDPSKWVPCLRXSKVXSSSVEHNASPGXYYDGRYWXTMWXLPISGXTDXTQVINEVXKRSRRXPDAYSAXRFDNMRKCMRNSSPTTGSRIRKANSHHTGN

SEQ ID NO: 9660 - protein, 503 aa, Glycine max
  misc_feature (320)..(320): Xaa can be any naturally occurring amino acid
MVLSKTASETDVSVHSTFASRYVRTSLPRFKMAEESIPKEAAYQIIHDELMLDGNPRLNLASFVTTWMEPECDKLIMAAINKNYVDMDEYPVTTELQNRCVNMIAHLFNAPLEESETAVGVGTVGSSEAIMLAGLAFKRRWQNRRKLEGKPYDNPNIVTGANVQVCWEKFARYFEVELKEVKLRDGYYVMDPEKAVEMVDENTICVAAILGSTLNGEFEDVKLLNDLLVEKNKETGWDTPIHVDAASGGFIAPFLYPELEWDFRLPLVKSINVSGHKYGLVYAGIGWVIWRSKEDLPEELIFHINYLGADQPTFTLNFSXGSSQVIAQYYQLIRLGYEGYKMVMENCNDNMAVLKEGLEKTGRFEIISKDIGVPLVAFTLKDHTHFNEFQISDMLRRYGWIVPAYTMPPDAQHVTVLRVVIREDFSRTLAERLVIDVTKVVHELDLLPARVISTNTIMVTGEAGEENDEKVLFAKKSEIETQREITKAWKKFVMDRKKMNGVC

SEQ ID NO: 9661 - protein, 388 aa, Streptococcus pyogenes M1 GAS
MKNQLGQLALEQAKTFGGKLEVQPKVDIKTKHDLSIAYTPGVASVSSAIAKDKTLAYDLTTKKNTVAVISDGTAVLGLGDIGPEAAMPVMEGKAALFKAFAGVDAIPIVLDTKDTEEIISIVKALAPTFGGINLEDISAPRCFEIEQRLIKECHIPVFHDDQHGTAIVVLAAIFNSLKLLKKSLDEVSIVVNGGGSAGLSITRKLLAAGATKVTVVDKFGIINEQEAAQLAPHHLDIAKVTNREFKSGTLEDALEGADIFIGVSAPGVLKAEWISKMAARPVIFAMANPIPEIYPDEALEAGAYIVGTGRSDFPNQINNVLAFPGIFRGALDARAKTITVEMQIAAAKGIASLVPDDALSTTNIIPDAFKEGVAEIVAKSVRSVVLKS

SEQ ID NO: 9662 - protein, 135 aa, Zea mays
  misc_feature (31)..(31): Xaa can be any naturally occurring amino acid
PHPCARNASTLLLSPYMHFGELSVRKVFHQXNDSNHAGEESCTLFLCSIGLREYSRYLTFNHPCSHEKPLLSHLRFFPWVVNEVYFKVWRQGRTNYPLVDAGMRELRATGWVHDRIRVVVSSFFVKVLQGESCRV

SEQ ID NO: 9663 - protein, 165 aa, Streptococcus agalactiae
LETNTPETPDTPKIPELPQAPDTPQAPDTPHVPESPKAPEAPRVPESPKTPEAPHVPESPKAPEAPRVPESPKTPEAPHVPESPKAPEAPRVPESPKAPEAPRVPESPKTPEAPHVPESPKTPEAPKIPEPPKTPDVPKLPDVPKLPDAPKLPDGLNKVGQAVFT

SEQ ID NO: 9664 - protein, 197 aa, Nicotiana tabacum
MSAPRFIKCVTVGDGAVGKTCLLISYTSNTFPMDYVPTVFDNFSANVVVNGSTVNLGLWDTAGQEDYNRLRPLSYRGADVFILAFSLISKASYENVSKKWIPELKHYAPGVPIVLVGTKLDLRDDKQFFIDHPGAVPITTAQGEELRKTIGAPAYIECSSKTQQNVKAVFDAAIKVVLQPPKTKKKKGKSQKSCSIL

SEQ ID NO: 9665 - protein, 386 aa, Aspergillus nidulans FGSC A4
MATATVLEKPNIGVFTNPKHDLWVAESKPTLEEVKSGESLKPGEVTIEVRSTGICGSDVHFWHAGCIGPMIVTGDHILGHESAGDVIAVAPDVTSLKVGDRVAIEPNVICNACEPCLTGRYNGCEKVAFLSTPPVDGLLRRYVNHPAVWCHKIGDMSYEDGALLEPLSVSLAAVERSGLRLGDPCLITGAGPIGLITLLSARAAGATPLVITDIDEGRLKFAKELVPEVRTYKVEIGFSAEETAEGIINAFNDGQGAGPDALRPRIALECTGVESSVASAIWSVKFGGKVFVIGVGKNEMKIPFMRLSTQEIDLQYQYRYCNTWPRAIRLVKNGVINLQKLVTHRYALEDALKAFETAANPKTGAIKVQIMSSTADVEAASAGQKN

SEQ ID NO: 9666 - protein, 320 aa, Erwinia carotovora subsp. atroseptica SCRI1043
MIRRIGVLTSGGDAPGMNAAIRGVVRAALSEGLEIYGIYDGYQGLYEDRMEQLDRYSVSDVINRGGTFLGSARFPQFRDEAVRQVCVENMQRRGLDALVVIGGDGSYMGAKRLTEMGFPCIGLPGTIDNDVAGTDYTIGYFTALETVLEAIDRLRDTSSSHQRISIVEVMGRHCGDLTLAAAIAGGCEFIVLPEVPFSPEDLVSEIKAGIEKGKKHAIVAITELVCDVDELAKYIEKETGRETRSTVLGHIQRGGSPVAYDRILASRMGAYSIELLQQGYGGRCVGIQNEKMVHHDIVDAIENMKRPFKGDWLETAKKLF

SEQ ID NO: 9667 - protein, 129 aa, Streptococcus agalactiae
LETNTPETPDTPKIPELPQAPDTPQAPDTPHVPESPKAPEAPRVPESPKTPEAPHVPESPKAPEAPRVPESPKTPEAPHVPESPKTPEAPKIPEPPKTPDVPKLPDVPKLPDAPKLPDGLNKVGQAVFT

SEQ ID NO: 9668 - protein, 459 aa, Amycolatopsis methanolica
MTLHLDDLRVRLLGECRYDSPFAEVLSTKRTSPHYVAEGDRVLLEDTVAMLAEHSLPSVQAPSFEAAGPRRKIYFDPARVTAGIVTCGGLCPGLNNVIRGLVQELSVHYRVKRIVGFRNGPGLTAAHRDDTVELTPEVVRDIHNLGGTILGSSRGGQDADEMVETLALHGVDVMFVIGGDGGMRAATFLSGAIRARGLDIAVIGVPKTIDNDLPFTDQSFGFQSAFARATDFISAVSVEAAASPNGVGIVKLMGRHSGFIAAYAALAANSADVVLIPEVPFALDGDDGLLAHVERLVRAKGFAVVVVAEGAGQDLFDAHGLPQLNGRGTDASGNVKLGNIGELLRTSIEAHLTAAGLAPTMRYIDPSYAIRSIPANAYDSVYCLRLAHAAVHAAMAGRTEAAVARWRRRFVHVPFSLMTRRRNQVDPDGDLWMSVLETTCQPAEFGAVAARERISSGFC

SEQ ID NO: 9669 - protein, 372 aa, Bacillus cereus G9241
MKAEEKFSPGLDGVVAAETKISFLDTVKGEIVIQGYDLIELSKTKEYLDIVHLLLEEHLPNEDEKATLERKLKEEYAVPEGVFNVLKALPKETHPMDGLRTGVSALAGYDNDIENRSLEVNKSRGYKLLSKVPNIVANSYHILNNEEPIEPLKELSYSANFFYMLTGKKPTELEEKIFDRSLVLYSEHEMPNSTFTARVIASTQSDLYGALTGAVASLKGSLHGGANEAVMYMLLEAGNVEKFEELLQKKLYNKEKIMGFGHRVYMKKMDPRALMMKEALKQLCDVKGDYTLYEMCEAGEKIMEKEKGIYPNLDYYAAPVYWMLGIPIQLYTPIFFSSRTVGLCAHVIEQHTNNRLFRPRVNYIGERHVLSQ

SEQ ID NO: 9670 - protein, 365 aa, Saccharomyces exiguus
MAQTTKHIVVLPGDHVGQEITEEAIKVLNAISSVRPNVNFDFQHHLIGGAAIDATGVPLPDEALEASKKADAVLLGAVGGPKWGTGSVRPEQGLLKIRKELQLYANLRPCNFASDSLLDLSPLKPEIVKGTDICIVRELVGGIYFGERKEDEGDGVAWDSEKYSVSEVQRITRMAGFLALQHNPPLPVWSLDKANVLASSRLWRKTVEETIKNEFPTLTVQHQLIDSAAMILVKNPTHLNGVVIANNMFGDIISDEASVIPGSLGLLPSASLASLPDTNTAFGLYEPCHGSAPDLPKGKVNPVATILSVAMMLKLSLNMTEEGIAVEKAVKQVLDSGVRTADLRGSNSTSEVGDAIAKAVKEILA

SEQ ID NO: 9671 - protein, 319 aa, Escherichia coli K12
MKPENKLPVLDLISAEMKTVVNTLQPDLPPWPATGTIAEQRQYYTLERRFWNAGAPEMATRAYMVPTKYGQVETRLFCPQPDSPATLFYLHGGGFILGNLDTHDRIMRLLASYSQCTVIGIDYTLSPEARFPQAIEEIVAACCYFHQQAEDYQINMSRIGFAGDSAGAMLALASALWLRDKQIDCGKVAGVLLWYGLYGLRDSVTRRLLGGVWDGLTQQDLQMYEEAYLSNDADRESPYYCLFNNDLTREVPPCFIAGAEFDPLLDDSRLLYQTLAAHQQPCEFKLYPGTLHAFLHYSRMMKTADEALRDGAQFFTAQL

SEQ ID NO: 9672 - protein, 183 aa, Triticum aestivum
  misc_feature (92)..(92): Xaa can be any naturally occurring amino acid
MSDEAASPPGGGGGGGGGGSDDGGGGGGFGGVREQDRFLPIANISRIMKKAIPANGKIAKDAKETVQECVSEFISFITSEASDKCQREKRKXTINGDDLLWAMATLGFEEYIEPLKVYLQKYRETEGDSKLAGKSGDVSVKKDALGPHGGASGTSAQGMGQQVAYNPGMVYMQPQYHNGDMSN

SEQ ID NO: 9673 - protein, 202 aa, Saccharomyces bayanus
MATNITWHPNLTYDERKELRKQDGCTVWLTGLSASGKSTIACALEQLLLQKNLSAYRLDGDNIRFGLNKDLGFSEQDRNENIRRISEVSKLFADSCAVSITSFISPYRVDRDRARDLHKEAGLKFIEIFVDVPLEVAEQRDPKGLYKKAREGVIKEFTGISAPYEAPKAPELHLRTDQKTVEECAAIIYEYLVNEKIIRKHL

SEQ ID NO: 9674 - protein, 268 aa, Populus alba x Populus tremula
MGQQSLSLLFSLILFFLHCTKTLGQSPAAAPVMPPPTTPVKAPPTAPSQAPSAQVATSPGPVDVIKILQKAGHFTVFVRLMQATTEDTELNKELNKTNNGITIFAPSDNAFSSLKAGFLNALSDEDKTELVKFHVLPAFISSSQFQTVSNPVRTQAGTGPRVTLNVTTTGNFVNITTGLTNASISGTVYTDSQLAIYQIDKVLFPLDIFTPKPPAPAPAPELGKPRKAAPGVESPTAPKDTSDALTPLILHNNALLLAVSCMVAAIFS

SEQ ID NO: 9675 - protein, 812 aa, Zea mays
MAQILLHGTLHATIFEAESLSNPHRATGGAPKFIRKLVEGIEDTVGIGKGTTKIYATVDLEKARVGRTRMVSNEPVNPRWYESFHIYCAHMAADVVFTVKIDNPIGASLIGRAYLPVEDILGGDEIDKWLEICDEKREPIGDSKIHVKLQYFDVGKDRNWARGVRSTKYPGVPYTFFSQRQGCKVTLYQDAHVPDNFVPRIPLADGKNYEPHRCWEDIFDAISKAQHLIYITGWSVYTEITLVRDTSRPKPGGDVTLGELLKRKASEGVRVLMLVWDDRTSVGLLKKDGLMATHDEETANYFHGTDVNCVLCPRNPDDSGSFVQDLQISTMFTHHQKIVVVDHELPNEGSQQRRIVSFVGGIDLCDGRYDTQYHSLFRTLDTVHHDDFHQPNFEGGSIKKGGPREPWHDIHSRLEGPIAWDVLYNFEQRWRKQGGKDLLVRLRDLSDIIIPPSPVMFPEDRDTWNVQLFRSIDGGAAFGFPETPDEAARAGLVSGKDQIIDRSIQDAYINAIRRAKNFIYIENQYFLGSSYDWKPEGIKPEDIDCLHLIPKELSLKIVSKIEAGERFTVYVVVPMWPEGVPESASVQAILDWQRRTMDMMYTDITQALEANGIQANPKDYLTFFCLGNREVKQEGEYQPEEHPEPGTDYIRAQEARRFMIYVHAKMMIVDDEYIIIGSANINQRSMDGARDSEIAMGAYQPYHLATRQPARGQIHGFRMSLWYEHLGMLDDVFQRPESVECVQKVNKIAEKYWDLYSSDDLEQDLPGHLLSYPIGVTADGTVTELPGMENFPDTRARVLGNKSDYLPPILTT

SEQ ID NO: 9676 - protein, 445 aa, Triticum aestivum
MAAAGGKGGPRRTTRVGPYELGKTVGEGSFAKVKIAKDTRNAATCAIKVLDRNHVLRHKMVEQIKREIATMKLIRHPNVVQLHEVMASKSKIYMVLEFVEGGELFDKIVNSGKLGEDEARRYFHQLINAVDYCHSRGVYHRDLKPENLLLDSYGALKVSDFGLSAFSPQTKEDGLLHTACGTPNYVAPEVLADKGYDGMAADVWSCGIILFVLMAGYLPFDDPNLMTLYKLITRANVSCPPWFSTGARNLIKRILDPNPHTRITISQILEDEWFKKDYKPPHSEHNEDVSLEDVDAAFDSSEEHLVAERREKPESMNAFALISRSEGFNLGNLFEKEMMGMVKRETSFASQRTPQEIMSKIEEACGPLGFNVRKQNYKMKLKGDKTGRKGHLSVATEVFEVAPTLHMVELRKTGGDTLEFHSFYKNFSSELKDIVWKTESNTIAK

SEQ ID NO: 9677 - protein, 132 aa, Methanocaldococcus jannaschii DSM 2661
MPGTKQVNVGSLKVGQYVMIDGVPCEIVDISVSKPGKHGGAKARVVGIGIFEKVKKEFVAPTSSKVEVPIIDRRKGQVLAIMGDMVQIMDLQTYETLELPIPEGIEGLEPGGEVEYIEAVGQYKITRVIGGK

SEQ ID NO: 9678 - protein, 262 aa, Populus alba x Populus tremula
MEFSMIIVLCSTLLFSCTPLAYAQKVASPPAPTPTPSPAPAPSPPYVNLTDLLSVAGPFQNFLNYLESTKVIDTFQNQANNTDEGITIFVPKDDAFKNLKKPSLSNLTQDQLKQLILFHALPHYYSLSDFKNLSQVSPVSTFAGAGRYALNFTDTSGTVQLDSGWSKTKVSSSVHSTDPVAVYQVDKVLLPEAIFGTDIPPTPAPAPAPDTSPAADSPTSDDSAGAGSAPGKSTPNSSYRINGVGIWSQLVLAIAGVLVLFL

SEQ ID NO: 9679 - protein, 349 aa, Streptococcus pyogenes M1 GAS
MKAATYLSTGNLQLIDKPKPVIIKPTDAIVQLVKTTICGTDLHILGGDVPACKEGTILGHEGIGIVKEVGDAVTNFKIGDKVIISCVTSCHTCYYCKRGLSSHCQDGGWILGHLINGTQAEYVHIPHADGSLYHAPDTIDDEALVMLSDILPTSYEIGVLPSHVKPGDNVCIVGAGPVGLAALLTVQFFSPANIIMVDLSQNRLEAAKTFGATHTICSGSSEEVKAIIDDITNGRGVDISMECVGYPATFDICQKIISVGGHIANVGVHGKPVDFNLDELWIKNITLNTGLVNANTTEMLLNVLKTGKIDATRLITHHFKLSEVEKAYETFKHAGANNALKVIIDNDIS

SEQ ID NO: 9680 - protein, 373 aa, Arabidopsis thaliana
MWLPKLKYGHRDSSECKRLECFLDKNLPLHRAPVIESFRLYLIDSKCTPENIKMWVVIAVSHCLRELEVIYSSYPEKPNILPSNLYTCKSLVILELCGEIRLDVPRMAFLPSLKTLQLHSVRYLNEDSLHRLLSNCPVLEDLLVDLLLSDSMEKLTVVVPSLQILSLFIPHSYEIDGIVIETPSLKYFKLIDHNSKSHYCLVKNMPNLIEADIDVELHSIKSLIGSITSVKRLSICSQAMYDGGFVFNQLKHLKLCRCKGHSSDLLVRLLKDSSNLQALDLSEMDYHENHDILYWHQPSTVPECMLLSLQTLNLSAYRGTPEERDLAVYFLKNAVHLKTTTIKSCVFDDERFDMLKELALSSRASTTCQLVFD

SEQ ID NO: 9681 - protein, 452 aa, Zea mays
  misc_feature (136)..(136): Xaa can be any naturally occurring amino acid
  misc_feature (152)..(152): Xaa can be any naturally occurring amino acid
  misc_feature (164)..(164): Xaa can be any naturally occurring amino acid
MGEGEAEVKGGVLQGRYELGRVLGHGNFGRVHAARDLRTGRAVAVKVLDKDKMLRTGMMEQIKREIAVMKRVSHPNIVELHEVMATRSKIYLALELVRGGELFARIVRAGRVKEDVARRYFRQLIHAVDFCHARGXVYHRDLKLENLLLDDXGTLKVVDFGLSXWADHARSDGLLHTLCGTPGYVAPEVFRNKGYDGAKADIWSCGVILYVLLAGSLPFPDDNVAAMFRKMSRGDYRCPPWLSTEARRLIPKLLDPDPDTRITIAQLVETPWFNKPSVSRSVRAAAAASGATEPPAEPASSAKDGGDKDEPPETMNAFHLISLSAGFDLSPLFDVEGGPARGPREGGMRFATREPASGVVSRLEEVAARGGGRMRVTKSGARGVRLEGAERGGRKGRLAVAADIFCVAPSVLVVDVKKDGGDSLEYRSFCSEELRPALKDIVWAADPQPAVV

SEQ ID NO: 9682 - protein, 472 aa, Zea mays
ATVGPRVIVVGAGMSGISAAKRLSEAGITDLLILEATDHIGGRMHKTNFAGINVELGANWVEGVNGGKMNPIWPIVNSTLKLRNFRSDFDYLAQNVYKEDGGVYDEDYVQKRIELADSVEEMGEKLSATLHASGRDDMSILAMQRLNEHQPNGPATPVDMVVDYYKFDYEFAEPPRVTSLQNTVPLATFSDFGDDVYFVADQRGYEAVVYYLAGQYLKTDDKSGKIVDPRLQLNKVVREIKYSPGGVTVKTEDNSVYSADYVMVSASLGVLQSDLIQFKPKLPTWKVRAIYQFDMAVYTKIFLKFPRKFWPEGKGREFFLYASSRRGYYGVWQEFEKQYPDANVLLVTVTDEESRRIEQQSDEQTKAEIMQVLRKMFPGKDVPDATDILVPRWWSDRFYKGTFSNWPVGVNRYEYDQLRAPVGRVYFTGEHTSEHYNGYVHGAYLSGIDSAEILINCAQKKMCKYHVQGKYD

SEQ ID NO: 9683 - protein, 387 aa, Zea mays
  misc_feature (237)..(237): Xaa can be any naturally occurring amino acid
  misc_feature (269)..(269): Xaa can be any naturally occurring amino acid
  misc_feature (288)..(288): Xaa can be any naturally occurring amino acid
IKREISTLKLIKLPNVVQLHEVMASRTKIYMVLEFVDGGELFDKIVNSGRLGEDEARIYFHQLINAVDYCHSRGVYHRDLKPENLLLDSHGTLKVSDFGLSAFAPQTKEDGLLHTACGTPNYVAPEVLADKGYNGMAADVWSCGIILFVLMAGYLPFDDANLMRLYKLICHATFSCPPWFSSGAKKFIKRILDPNPDTRITIAEILEDEWFKKDYKPPRFEQGEGVSLDDIDAAFKXSEDRLVAEKREKPGCMNAFALISRSQGFNLGXNLFEKEMMGMVKRETFFTXQCTAQEIMTKIEDACGPLGFNVRKQNYKMKLKGDKSGRKGHLSVATEVFEVAPSLHMVELRKTGGDTLEFHSFYKNFSSELKDIVWKAESDANNKQTNK

SEQ ID NO: 9684 - protein, 161 aa, Pseudomonas fluorescens PfO-1
MSDNLLNIPCTTIKGEQKTLADFAGKAVLVVNTASKCGFTPQYKGLEELWQTYKDQGLVVLGFPCNQFGKQEPGNEGAISEFCELNYGVSFPLFKKIEVNGTGAHPLFVQLKKRAPGVLGSQGIKWNFTKFLIGKDGQLVKRFAPATKPQDLSREIEALLK

SEQ ID NO: 9685 - protein, 475 aa, Staphylococcus aureus subsp. aureus COL
MRDYTKQYINGEWVESNSNETIEVINPATEEVIGKVAKGNKADVDKAVEAADDVYLEFRHTSVKERQALLDKIVKEYENRKDDIVQAITDELGAPLSLSERVHYQMGLNHFVAARDALDNYEFEERRGDDLVVKEAIGVSGLITPWNFPTNQTSLKLAAAFAAGSPVVLKPSEETPFAAVILAEIFDKVGVPKGVFNLVNGDGAGVGNPLSEHPKVRMMSFTGSGPTGSKIMEKAAKDFKKVSLELGGKSPYIVLDDVDIKEAAKATTGKVVNNTGQVCTAGTRVLVPNKIKDAFLAELKEQFSQVRVGNPREDGTQVGPIISKKQFDQVQNYINKGIEEGAELFYGGPGKPEGLEKGYFARPTIFINVDNQMTIAQEEIFGPVMSVITYNDLDEAIQIANDTKYGLAGYVIGKDKETLHKVARSIEAGTVEINEAGRKPDLPFGGYKQSGLGREWGDYGIEEFLEVKSIAGYFK

SEQ ID NO: 9686 - protein, 356 aa, Triticum aestivum
  misc_feature (60)..(60): Xaa can be any naturally occurring amino acid
  misc_feature (117)..(117): Xaa can be any naturally occurring amino acid
  misc_feature (159)..(159): Xaa can be any naturally occurring amino acid
  misc_feature (291)..(291): Xaa can be any naturally occurring amino acid
MKTLLILTILAMAITIGTANIQVDPSGQVQWPQQQLVPQPQQPLSQQPQQAFPQPQQTFXPHQPQQQVPQPQQPQQPFLQPQQPFPQQPQQPFPQTQQPQQPFPQQPQQPFPQTQQXQQPFPQQPQQPFPQTQQPQQPFPQQPQQPFPQPQQPQQPFPXLQQPQQPFPQPQQQFPQPQQPQRSFPQQQRPSFQPSLQQRLNPCKNILLQQCKPASLVSSLWSIIWPQSDCQVMRQQCCQQLAQIPQQLQCAAIHSVVHSIIMQQQEQEQEQEQEQEQQQQQGMRIFFPLSXQQQVGQGTLFQGQGIIQPQQPAQFGGDQVIGVGKTLPSICNVYVPPECSIIRAPFASIVAGIGGQ

SEQ ID NO: 9687 - protein, 135 aa, Streptococcus agalactiae
LETNTPETPDTPKIPELPQAPDTPQAPDTPHVPESPKAPEAPRVPESPKTPEAPHVPESPKAPEAPRVPESPKTPEAPHVPESPKTPEAPKIPEPPKTPDVPKLPDVPKLPDVPKLPDAPKLPDGLNKVGQAVFT

SEQ ID NO: 9688 - protein, 471 aa, Oryza sativa (japonica cultivar-group)
MAAAAPPTGKKRRFERSSSQEPPGSGGLDLISGLPDAILGEIISLLPTKYGARTQLVSRRWRPLWRSAPLNLDVYDLSGQERKRVALASKILAEHPGPARRFSLHCFRLRGRHAKLDGWLRSRALADLRELSFSYEVEREAQAQAYPLPPSALRFAPTLVVLYLSSCGFPDEMPPTLHFPRLKQLTLCSVAISEDAIHGVLSRCPALESLLLQGNFGVRRLRINSASLRSFGFYSKSWGFSSASWNGFAGAELQEVVIEDAPCLERLLPLCPNDGVAAIRVIAAPKLEIMGPLSDGISQLHLGTTIFQEMTAVSLTTSMRSVKVLVLDSDGPNLDAVVDFLSCFPCLERLYIASQPFKVIKNTRRYDPLNPIECIQFHLKKVVIRNYGGRRSDVDFAKFFVLNAKALREMELAGLNNCNQKWLANQHRRLQLEKKASQNAQFTFKTTHTSDFSMNKHTHDLSISDPFDRSL

SEQ ID NO: 9689 - protein, 355 aa, Oryza sativa
MRGKKPHKELKLSVPAQETPVDKFLTASGTFKDGELRLNQRGLQLISEETADEPQSTNLKVEDVQLSMDDLEMIQVIGKGSGGIVQLVRHKWVGTLYALKGIQMNIQEAVRKQIVQELKINQATQNAHIVLCHQSFYHNGVIYLVLEYMDRGSLADIIKQVKTILEPYLAVLCKQVLEGLLYLHHERHVIHRDIKPSNLLVNRKGEVKITDFGVSAVLASSMGQRDTFVGTYNYMAPERISGSSYDYKSDIWSLGLVILECAIGRFPYIPSEGEGWLSFYELLEAIVDQPPPSAPADQFSPEFCAFISSCIQKDPAERMSASELLNHPFIKKFEDKDLDLRILVESLEPPMNISE

SEQ ID NO: 9690 - protein, 141 aa, Streptococcus agalactiae
LETNTPETPDTPKIPELPQAPDTPQAPDTPHVPESPKAPEAPRVPESPKTPEAPHVPESPKAPEAPRVPESPKTPEAPHVPESPKTPEAPKIPEPPKTPDVPKLPDVPKLPDVPKLPDVPKLPDAPKLPDGLNKVGQAVFT

SEQ ID NO: 9691 - protein, 245 aa, Arabidopsis thaliana
MENEREKLIYLAKLGCQAGRYDDVMKSMRKVCELDIELSEEERDLLTTGYKNVMEAKRVSLRVISSIEKMEDSKGNDQNVKLIKGQQEMVKYEFFNVCNDILSLIDSHLIPSTTTNVESIVLFNRVKGDYFRYMAEFGSDAERKENADNSLDAYKVAMEMAENSLVPTNMVRLGLALNFSIFNYEIHKSIESACKLVKKAYDEAITELDGLDKNICEESMYIIEMLKFNLSTWTSGDGNGNKTDG

SEQ ID NO: 9692 - protein, 145 aa, Sesbania rostrata
EIATIPPAVNQVEMNPSWQQGNLREFCKQKGIHVSAWSPLGAYKIFWGSGAVMENQILQDIATAKGKTIAQVALRWVYQQGSSAMAKSFNKERMKQNLEIFDFELSEEELEKIKQIPQRRQYTGDMWLSENGSCKTLEELWDGDV

SEQ ID NO: 9693 - protein, 443 aa, Ralstonia solanacearum
MDRSHKERVMSREPEVKALQQEWDTNPRWKGIKRGYTAQDVVRLRGSLQIEHTLARRGAEKLWTLMNSEPFVNALGALTGNQAMQQVKAGLKAIYLSGWQVAGDANSNGEMYPDQSLYSVDSVPKVVKRINNTFQRADQIQWSEGKDDVDFFAPIVADAEAGFGGVLNAFELMKAMIEAGAAGVHFEDQLAAVKKCGHMGGKVLVPTREAVSKLVAARLAADVMGVPTVLIARTDAEAADLLTADVDDNDRPFCTGERTVEGFYRTKPGLQQAIARGLAYADYADLVWCETGKPDLEYAKKFAEAIHAKFPGKMLAYNCSPSFNWKKNLDDATIAKFQKELGAMGYKFQFITLAGFHALNYSMFNLAHGYARNQMSAFVELQEAEFAAAEKGFTAVKHQREVGTGYFDAVTQTIERDASTTALKGSTEDEQFFEEKAHAKKVA

SEQ ID NO: 9694 - protein, 290 aa, Pyrobaculum aerophilum str. IM2
MEIKMAEAGDVALRKYGTAMPQEALRLADAADVIFKGPIGESAYDVTSLIRMRYTLYANIRPVKNLPGVPAVREIDCVFVRENVEDVYVGAEYKVGDVAIALKVITEKGTRRVARMARKYAEMRRRRVTIVHKANVLRVVDGFFRDIALEELKGLEVDQMYVDAAAMELVRNPKRFDVVLTMNQYGDILTDLAAQVAGGIGLAPSGNIGDAKAMFEPVHGAAFDIAGKGVANPIATILSAAMMFEWMGRGDVAEKIRGAVEKSIEAGVKTPDIGGDKSTIEVGKFIASIL

SEQ ID NO: 9695 - protein, 254 aa, Glycine max
MTMHRESWAFVFGVMGNIISFGVFLAPLPTFYQIYKKKSTEGFQSLPYVVALFSAMLWIYYAFVKRETALLLITINTFGIVVESIYLSIFLIYAPRKPRLTTIKLLLLLNVFGFGAMLLSTLYLSKGAKRLAIIGWICLVFNISVFAAPLFIIRRVIKTRSVEYMPFTLSMFLTINAVMWFFYGLLLRDYYVALPNTLGFVFGIIQMVMYLMYRNATPVALEEPVKAQELNGHIIDVVKIGTMEPNHGGAVGKV

SEQ ID NO: 9696 - protein, 506 aa, Caulobacter crescentus CB15
MTKPEFIESLSRPPFKARYDNFIGGQWVAPADGRYFDNSSPIHGRKICEIARSQAIDIERALDAAHAAKAGWARTSAADRSRILLRIADRMEENLAALATAETWDNGKPIRETLAADIPLAIDHFRYFAGCLRSQEGSISEIDHDTIAYHFHEPLGVVGQIIPWNFPLLMACWKLAPALAAGNCVVLKPAEQTPASIMVWAEMIGDLLPAGVLNIVNGFGLEAGKPLASSPRIAKIAFTGETSTGRLIMQYAAQNLIPVTLELGGKSPNIFFDDVAREDDDYLDKALEGFTMFALNQGEVCTCPSRALVQESIYEKFMERALKRVNAVVQGSPLDPATMIGAQASEEQLNKILGYMDIGRNEGAKLLAGGQRKILPGQLADGYYVEPTVFEGHNKMRIFQEEIFGPVLAVTTFKTEEEALEIANDTAFGLGAGVWSRDANRCYRFGRGIEAGRVWTNCYHAYPAHAAFGGYKQSGVGRETHKMMLDHYQQTKNMLVSYSPKALGFF

SEQ ID NO: 9697 - protein, 161 aa, Escherichia coli
MKNKSGNSYYREAVDIHSSLELSFILHKYHLRVDEKKSRNVFSAIRDELILDGDSRQNLATFCQTWIDDEIRELLNLSIDRNMIYKDEYPQMAEPEGRCVRMLSDSWSFPDSRHTLGCSTIGSSEAAMLGRLALKWQWCKKREVQGKSTEPDLRSCANMLA

SEQ ID NO: 9698 - protein, 188 aa, Chloroflexus aurantiacus
MFVSTIPTTRSGLVVWFTGLSGAGKTTLARALATLLQEAGYPVEQLDGDVVREHLSKGLGFSREDRDTNIRRIGFVANLLAKHGVIVLVSAISPYRETRAEVLAAAPRKLEVFVEAPLDVLIQRDVKGLYAKALRGEIAQFTGISDPYEPPLHPDVHLRTDLMSLPECLDHLLAALERLDIVVKVSHQ

SEQ ID NO: 9699 - protein, 303 aa, Zea mays
  misc_feature (106)..(106): Xaa can be any naturally occurring amino acid
  misc_feature (118)..(118): Xaa can be any naturally occurring amino acid
  misc_feature (169)..(169): Xaa can be any naturally occurring amino acid
FAGLGSDRFLDPPSGRASTDFIIHSPAKPICFVCRSIRRSCEFNPRVSMSSYSPPPPLPPRDQSMDTEAPNAPITRERRLNPDLQEQLPKPYLARALEAVDPSHPXGTQRGRDPRGMXSVLQQHAAFFDRNGDGVIYPWETFQGDRWCSFLSGLRAIGCGLTVSFACCXLINLFLSYPTQPGWLPSPLLSIRIDNIHKGKHGSDSETYDTEGRFDPSKFDAIFSKYGRTHPNALTKDELSSMLQGNRNTYDFLGWLAAAGEWLLLYSLAKDKDGLLQRETVRGLFDGSLFERLEDDNNKKKSS

SEQ ID NO: 9700 - protein, 183 aa, Halobacterium sp. NRC-1
MATGPRYKVPMRRRREVRTDYHQRLRLLKSGKPRLVARKSNKHVTAQLVTTGPDGDETVASAHSSDLDAYGWAAPTGNLPAAYLTGLLAGQRAVDAGVEEAVLDIGLNTATPGSKVFAIQEGAIDAGLDVPHNDSVLADWSRTRGEHIAEYAESLDEPLYSGDFDATALPAHFDETREAIMED

SEQ ID NO: 9701 - protein, 161 aa, Oryza sativa
MSDSEEHHFESKADAGASKTYPQQAGTIRKTGHIVIKNRPCKVVEVSTSKTGKHGHAKCHFVAIDIFNGKKLEDIVPSSHNCDVPHVNRTDYQLIDISEDGFVSLLTESGGTKDDLRLPSDEALLTQIKDGFAEGKDLIVTVMSAMGEEQICALKDIGPKN

SEQ ID NO: 9702 - protein, 279 aa, Pyrobaculum aerophilum str. IM2
MASVDDIVDLLARVRERSRGLLINLEGKYTAVGDLHGDLATLELVLKEWEGPYLFLGDYVDRGDKGLEVVTTVFQLYLEGKAAVLRGNHESPIMNIEGGFLDELCEKLGRKCGYVYKEFEKTFATLPLAAVVNRKIVALHGGIPLREDMTPATLAELEKIEGDLTAPQNPLAFQTLWNDPCPCDKYSPSPRGPGIWLFGRDVTREFHKLHNTAVVIRGHTYVPQGCAVHHGGGVVTVFSSSAGPYQKTKPKVALVKNGVEVYDAATKNSAKCPEDVDVF

SEQ ID NO: 9703 - protein, 240 aa, Populus alba x Populus tremula
MVPKFLFSASFVLFFLLHCPPALAQSPAAAPAPPGPINVTKVLEKGGQFSVFIRLLKATQEDVTLNGQLNNTNNAITIFAPSDSAFSSLKSGTLNSLSDQEKAELVQFHIIPQFLSSSLFQTVSNPLTTQAGSGGRLELNVTTTGNSVNITTGLTNTSVSGTIYTDNQLAVYQVDKVLLPLDIFTPKPPTPAPAPEKPKKRSKAAASPESPADTSGAVSFTVLNNVVFFGVCMVAAIYSL

SEQ ID NO: 9704 - protein, 199 aa, Triticum aestivum
KLVGGSLSEHSYLFLGAGEAGTGIAELIALEISRQTKAPIEECRKKIWLVDSKGLIVSSRKETLQHFKKPWAHEHEPVGNLLDAVKTIKPTVLIGTSGKGQTFTQEVVEAISSFNERPVIFALSNPTSQSECTAEQAYTWSKGRAVFASGSPFDPVEYDGKIYVPGQANNAYIFPGFGLGVVMSGAIRVHDDMLLAASE

SEQ ID NO: 9705 - protein, 337 aa, Magnaporthe grisea 70-15
MSPSTESNPVPPYPLHPSVASRINPEYAAFYNAHIADKQQVHLQPIAASRSSGVLIPGAGPLLPVGSTQDYTIPRTASSGPDVRVRVFTPPGARPASGWPGCVYFHGGGWVLGTIDTENVVCSNLCARGGAVVVTVDYRLAPEDPFPAAVDDCWEAVRWVVARGPELLGLDLGRLATGGSSAGGNLAAVMCQRAAVVADHPPFRLQLLSVPVADNTATAETTPSWRENEHTPALPAPKMLWYRRHYLPRESDWAHPEASPLLWDGDWSRLPRAVIVCGELDVLRDEGVAFGDRLNKAGVRADVHVLEGQPHPFLAMDGVLEDGRRAITYFCEALKEL

SEQ ID NO: 9706 - protein, 175 aa, Triticum aestivum
  misc_feature (90)..(90): Xaa can be any naturally occurring amino acid
MGPTVMASSVTSVAPFQGFKSTAGLPVSRRSNGASLGSVSNGGRIRCMQVWPIKGIKKFEILSYLPPVSTEALLKQVDYLIRSKWVPCLXFSKVGFIFREHNASPGYYDGRYWTMWKLPMFGCTDATQVINEVEEVKKEYPDAYVRIIGFDNMRQVQCVRFIAFKPPGCKESGKA

SEQ ID NO: 9707 - protein, 125 aa, Glycine max
ACSMISSPSVTTVNRACAGMFAPFTGLNSIAGFPIMNTNTDITSIASNGGRVQCMQVWPPVCKKKCETLSYLPDLDDAQSAYEVQHHLMNGWITCLECQLEHCFVYRVHYMSPVYYDGLYWTIWN

SEQ ID NO: 9708 - protein, 286 aa, Zea mays
MAALPPAAEDPDAVEIREVWASNLEEEFAVIRAVVDVYPYVAMDTEFPGFVVTPSAEYRFTCDRNYAALEGNVNVLKLIQLGLTLSNGAGALPPCGTGGRRCIWQFNFRGFDPHTDPSSSDSIDLLRRSGIDFDLFAAEGVDSTRFAELMMSSGVVLNDDVQWVTFHSGHDFGYLLKLLTGREMPNTLDEFLKLTKTFFPVMYDIKHLMKFCGGGLYGGLSKLGELLKIERVGISHQAGSDSLLTLQCFMKLKQLYLKESVKLYDGVLFGLIPGEVEIKPVAPPIE

SEQ ID NO: 9709 - protein, 127 aa, Thermobifida fusca
MPTGKVKWYDAGKGFGFLTKDDGGEVFLHASALPPGTTTLRPGQRVEFGIVEGRKGTQALQVRLLDTPPSVAKALRKKPDEMVVIIEDLIKLLDNVSNTYRRNKYPDRREATKIAKVLRALADDIEL

SEQ ID NO: 9710 - protein, 163 aa, Agrobacterium tumefaciens str. C58
MSVSFKNPAHLLPRRVFAFLAIWLSFYPSSLRRCAVQRNLTLRPFQPTYFAIDICLTTRASASFQTLTTIFSFKFDPSPHCLQCKYNCQRKEIVMATGTVKWFNATKGYGFIQPDDGSQDVFVHISAVERAGLTALNDGQKLSYELMQDRRSGKMSAGELVAS

SEQ ID NO: 9711 - protein, 336 aa, Thermoplasma acidophilum
MKAALLEKLNQPLSIVDREIPEPGENEVVIKQDYAGLCYRDILSATGFFPRIQLPIIPGHEIGGTVVKTGSEVRNFHVGDHVASLIYIPCGKCEYCRSGNENLCPYKKSIGEEVQGGFREYVNVPEISLISAPKEVDTRYLPIASCVTGMIYHALFKLAKVKEGQRVLITGAGGGVGSNAVQMAKAFGATVIAETTSESKKEMLEKIGADYIVDGNGKFNEDVKKIGGADIVLECVGIHTFERSLRSLNNGGKMIVIGNIKPDPVNLPLGLIILKGNTIRGSISSTRKDVSDALKMVAENRIKPVIGSEVSIDRINEAMEMMKNKQTEGRVLIKFS

SEQ ID NO: 9712 - protein, 306 aa, Triticum aestivum
VRKATSGRSNPSGRRRGEGGTSRLACGRVRLSARHAETARAPMPPPRRAGAGDTSAFFAATLVLWAVSVGFEIGARGRRELAAVAAGFAFFQAANTAVRAAVSRDPLFVNTAVSLLHSSLTSASVIFVLLCQWRTKGLENMFQHEELVGSSWIGAYSALCFSCGYFAYDQLDTLRYRLYSGWIPGILMLHLFLLICFTLALYRNETINYLILTLLKLRRMAGFRDFNRKLVKLEWVLNWTTFVTARVICHILITYRLITDAHKFDKGIELPLALSGMAGMNVLNVSLGLDLFKAFARERNQQTHQD

SEQ ID NO: 9713 - protein, 257 aa, Triticum aestivum
MSSGVGGNRRRRGRRWAQVDPGVHITAHGLAQGGNDLKRIRFSREMFNKWQAQRWWAENYDKVMELYNVQRFNHQSVPLPTTPKSEDESSKEDSPVTPPLDKERVPRSLQRPTSGGGAMGYSSSDSLEHHSNHYCNGLHPHHGHQCYDSVGLASTPKLSSISGAKTETSSMDASMRTSSSPEEVDRSGELSVSISNASDQEREWVEEDQPGVYITIRALPGGIRELRRVRFSREKFSEMHARLWWEENRARIHEQYL

SEQ ID NO: 9714 - protein, 47 aa, Zea mays
YEEYGEEFVNMLDGMFSFVLLDTRDKSFIAARDAIGICPLYMGWGLD

SEQ ID NO: 9715 - protein, 70 aa, Glycine max
  misc_feature (25)..(26): Xaa can be any naturally occurring amino acid
MHAATGEVVNCSAENNGDLFHSVLXXLGQFGIITRARIVLEPAPAMVKWIRVLYSDFTAFTRDQERLNRR

SEQ ID NO: 9716 - protein, 122 aa, Rickettsia conorii str. Malish 7
MIQMQSILEVADNSGAKKVMCIKVLGGSHHMVAKLGDVIVVSVKDAIPGGKVKKGDVYKGVIVRTKTGVVRPDGSTIKFDQNALVLLNKQDEPIGTRVFGPVTRELRAKKYVRIMSLAEEVL

SEQ ID NO: 9717 - protein, 423 aa, Aspergillus oryzae
MADLRGRKIFKVFNQDFIVDERYNVTKELGQGAYGIVCAATNIQTGEGVAIKKVTNVFSKKILAKRALREIKLLQHFRGHRNITCLYDMDIPRPDNFNETYLYEELMECDLAAIIRSGQPLTDAHFQSFIYQILCGLKYIHSANVLHRDLKPGNLLVNADCELKICDFGLARGFSIDPEENAGYMTEYVATRWYRAPEIMLSFQSYTKAIDVWSVGCILAELLGGRPFFKGRDYVDQLNQILHYLGTPNEETLSRIGSPRAQEYVRNLPFMPKIPFQRLFPSANPDALDLLDRMLAFDPSSRISVEEALEHPYLHIWHDASDEPTCPTTFDFHFEVVDDVQEMRRMIYEEVVRFRAAVRQQSQAQAAAAAQQQQIAQQTNVPIPENQQGVWKQEEPKPQEALAAGGGVHNDLESSLQRGMDVQ

SEQ ID NO: 9718 - protein, 475 aa, Oryza sativa (japonica cultivar-group)
MEAAAAAAKKRRFGRSTGKGSLGSDGLDHISCLPEAILGEIISLLPTKDAARTQAVSRRWRPLWRSTPLNLDVDSLSTQERKRTMFVSRILASHPGPARRLSLPFFRLRDRYAKLDGWLRSPALADLQELDFSYDIEDEEALYPLPPSALRFAPTLRVVELRTCHFPNGMAPALHFPRLARLTLYRVTISEDTLHGLLSRCSALESLLLVGNFGIRRLRINSPFLRSLGFSASSWEGYRDANFQEVVIEDAPCLERLMPLYPNHGPATIRVIAAPKLEVLGVLSDGISQLHLGTTFFQKMIAVNLTTSIRTVKVLVLDSNGPNLDVVVDFLKCFPCLERLYVVSRPHKVIKNIRSYDPLHPIECMELHLRKVVIRYYEGKRPDVDFAKFFVLNAKVLREMDFCSPSNRNLKWQDNQHRRLSLENKASQVAQFTFKTTSRTRNELTRNRHTHELSMSDPFDFSSCLCSSCRFFFQL

SEQ ID NO: 9719 - protein, 332 aa, Saccharomyces kluyveri
ELHVVESVLLPKDMHPNLQLAIGLASMNKSSLFSAMYQEGTIGKGDYWEFVYEDALNLISALPLLTGKIYSNIVNDGEPLGQFNPDRDWSYNIASLLGMTFRDSVNKQHMTADQCEDFTNLVRLYCGIHVDHEGGNVSAHTTHLVGSALSDPYLSYSSGIMGLAGPLHGLAAQEVVRFLVEMNSEIESPENEKQVEEYLWKILKSNRVIPGYGHAVLRKPDPRFEAMLRFVEDRQQEFAQDKNVQLMKKMSQVAPKVLAKHGKTKNPFPNVDSASGILFHHYGIQELLFFTVIFGCSRSIGPLTQLVWDRALGLPIERPKSVDLNTIRSLCK

SEQ ID NO: 9720 - protein, 373 aa, Oryza sativa (japonica cultivar-group)
MVGGGALRRVGKYEVGRTIGEGTFAKVKFAQNTESGESVAMKVVDRSSILKHKMADQIKREISIMKLVRHPNVVLASRKKIFIILEFITGGELFDKIIRHGRLNEADARRYFQQLIDGVDFCHSKGVYHRDLKPENLLLDSQGNLKISDFGLSAWPAQGGALLRTTCGTPNYVAPEVLSHKGYDGALADTWSCGVILYVLLAGYLPFDEVDLTTLYGKIESAEYSFPAWFPNGAKSLIHRILDPNPDKRIRIEEIRNDEWFKKNYEPTREIESEEVNLDDVNAAFDDPEEDADHTLDDEAGPLTLNAFDLIILSQGLNLAALFDRRQDYDKLQNRFLSRKPAKVIMSSMEVVAQSMGYKTHIRNYKTYRHEDL

SEQ ID NO: 9721 - protein, 404 aa, Prochlorococcus marinus str. MIT 9313
MPRSCRDAVGQEQVGEIRHDRSGISFRPGLEGVPVTQSAICDIDGLQGRLAYRGYPIAELSAHSSFLETTYLLIWGDLPSPQQLRDFEAEVQMHRRVSFRVRDMMKCFPASGHPMDALQSSAASLGLFYSRRAIDDPKYVYNAVVRLIAKIPTMVAAFKLIRKGQDPIQPRDDLAYSANFLYMLTEREPDPLAARVLDRCLILHAEHSLNASTFSARVTASTLTDPYAVVASAVGTLAGPLHGGANEDVLAMLEEIGSPEHAGDYLDEAIASKRKVMGFGHREYRVKDPRAVILQGLAEELFARFGTDEMYDVAKALEQAAATRLGPKGIYPNVDFYSGLVYRKLGIPRDLFTPVFAISRVAGWLAHWREQLGANRIFRPSQIYTGPQNRTWIPSDERFSSTGA

SEQ ID NO: 9722 - protein, 341 aa, Mycobacterium avium subsp. paratuberculosis str. k10
MRTVVVDGPRSIRVDTRPDPVLPGPDGAIVEVSAAGICGSDLHFYEADFPMPDPIALGHEAIGTVVEAGPQVRNVKVGDQVMVSSVAGCGSCAGCATRDPVLCHSGFQIFGGGVLGGAQADLLAVPAADFQLLKIPEGISTEQALLLTDNLATGWAAAQRADIPFGGTVAVIGLGAVGLCALRSALFQGAATVFAVDQVDGRLARAARWGATPVKAPALEAILAATGGRGADAVIDAVATDASLTEALNAVRPGGTVSVVGVHDMNPFPLNALGCLIRSITLRMTTAPVQRTWPELIPLLQSGRLDVDGIFTTTMPLDEAAIGYATAGSRSGDDVKILLKP

SEQ ID NO: 9723 - protein, 295 aa, Triticum aestivum
  misc_feature (193)..(193): Xaa can be any naturally occurring amino acid
  misc_feature (202)..(202): Xaa can be any naturally occurring amino acid
  misc_feature (207)..(207): Xaa can be any naturally occurring amino acid
  misc_feature (218)..(218): Xaa can be any naturally occurring amino acid
  misc_feature (228)..(228): Xaa can be any naturally occurring amino acid
  misc_feature (237)..(237): Xaa can be any naturally occurring amino acid
YRRPTRPEIGQAIALDTRIPLVSFTGSTKVGQMVQQQVSARFGKCLLELSGNNAIIVMDDADIPLAVRSVLFAAVGTAGQRCTTCRRLLLHESIYQTFLDQLVEVYKQVRIGDPMEKGTLLGPLHTTTSKESFLKGIQTIKSQGGKILLGGSAIESEGNFVQPTIVEISPDVPVVREELFGPVLYAMKFLTLXKEAIEINNXSVPQXLSSSIFTRKPXDAIFKWIGPXHGSDCGYSXIVNIPTNGAEIGGAFGGEKATGGGREAGSDSWKQYMRRATCTINYGSELPLAQGINFG

SEQ ID NO: 9724 - protein, 191 aa, Saccharomyces kluyveri
IENSPTNGSNHSPLSEPQIAYIVRETCRGLKFLHDKHIIHRDIKSDNVLLDRSARVKITDFGFCAKLTDKRSKRATMVGTPYWMAPEVVKQREYDEKVDVWSLGIMTIEMLEGEPPYLNEDPLKALYLIATNGTPKLKHPELLSLEIKRFLSVCLCVDVRYRASTEELLHHSFFDMSCEPKDLTTLLEWKK

SEQ ID NO: 9725 - protein, 313 aa, Glycine max
  misc_feature (105)..(105): Xaa can be any naturally occurring amino acid
  misc_feature (123)..(123): Xaa can be any naturally occurring amino acid
  misc_feature (157)..(157): Xaa can be any naturally occurring amino acid
  misc_feature (225)..(225): Xaa can be any naturally occurring amino acid
VVPYFASNSKALWFAKYGTTHLVFNDDIQGTASVVLAGVVAALKLIGGTLADHTFLFLGAGEAGTGIAELIALEMSKQTKTPIEETRKKIWLVDSKGLIVGSRKXSLQHFKQPWAHEHEPVGXLLEAVKVIKPTVLIGSSGVGKTFTKEVIEAVTSXNKKPLVLALSNPTSQSECTAEEAYQWSEGRAIFASGSPFDPVEYKGKVYYSGQANNAYIFPGFGLGLXVISGAIRVHDDMLLAASEALAKLVSDENYEKGLIYPPFSNIREISANIAASVAGKAYELGLATRLPRPQNLVKYAESCMYSPVYRNYR

SEQ ID NO: 9726 - protein, 130 aa, Thermotoga maritima MSB8
MKMTIDEIIEAIEKLTVSELAELVKKLEDKFGVTAAAPVAVAAAPVAGAAAGAAQEEKTEFDVVLKSFGQNKIQVIKVVREITGLGLKEAKDLVEKAGSPDAVIKSGVSKEEAEEIKKKLEEAGAEVELK

SEQ ID NO: 9727 - protein, 274 aa, Bacillus sp. KSM-K16
MKMVTLNNGVNMPQLGFGVWQVPDEEATPAVAKALEVGYTSIDTAMIYKNEAGVGKAIKESGIDREKLFITTKVWNADQGYEQTLKAFDASLERLGLDYIDLYLIHWPTPHYDQYIETYKALEKLYNDGRVRAIGVCNFDIDHLERLLDECDITPVLNQVECHPYFAQNELKDFCAKHNIYVEAWSPLDQGGEVLTDEVVEKIAKAHNKTTAQVVLRWHLQNNTIVIPKSVTPSRIEENFDVFDFELSDEEMDAINRLDRNQRRGAKPSEMNTR

SEQ ID NO: 9728 - protein, 176 aa, Glycine max
MAETRRSTGTVKWFNAHKGFGFITPQDGTDDLFVHFTSIRSDGYRSLSDGQSVEFLLDYGDDGRTMAVDVTSAVRSRLPGGFRGGGGGRGRGGGRYGGGEGRGRGFGRRGGGPECYNCGRIGHLARDCYHGQGGGGGDDGRNRRRGGGGGGGGGCFNCGEEGHFARECPNVGKGNE

SEQ ID NO: 9729 - protein, 282 aa, Staphylococcus aureus subsp. aureus MRSA252
MNHIEISKDVKIPVLGFGVFQIPQEQTAEAVKEAIKAGYRHIDTAQSYLNETEVGQGIEASGIDRSELFITTKVWIENVNYEDTIKSIERSLQRLNLDYIDLVLIHQPYNDVYGSWRALEELKETGKIKAIGVSNFGVDRIVDLGIHNQIQPQVNQIEINPFHQQEEQVAALQQENVVVEAWAPFAEGKNQLFQNQLLQAIADKYNKSIAQVILRWLVERDIVVLAKSVNPERMAQNLDIFDFELTEEDKQQIATLEESNSQFFSHADPEMIKALTSRELDV

SEQ ID NO: 9730 - protein, 497 aa, Aspergillus nidulans FGSC A4
MSDLFTTIETPVIKYEQPLGLFINNEFVKGVEGKTFQVINPSNEKVITSVHEATEKDVDVAVAAARAAFEGPWRQVTPSERGILINKLADLMERDIDTLAAIESLDNGKAFTMAKVDLANSIGCLRYYAGWADKIHGQTIDTNPETLTYTRHEPVGVCGQIIPWNFPLLMWSWKIGPAVAAGNTVVLKTAEQTPLSALYAAKLIKEAGFPAGVINVISGFGRTAGAAISSHMDIDKVAFTGSTLVGRTILQAAAKSNLKKVTLELGGKSPNIVFDDADIDNAISWANFGIFFNHGQCCCAGSRILVQEGIYDKFVARFKERAQKNKVGNPFEQDTFQGPQVSQLQFDRIMEYINHGKKAGATVATGGDRHGNEGYFIQPTVFTDVTSDMKIAQEEIFGPVVTIQKFKDEAEAIKIGNSTDYGLAAAVHTKNVNTAIRVSNALKAGTVWINNYNMISYQAPFGGFKQSGLGRELGSYALENYTQIKTVHYRLGDALFA

SEQ ID NO: 9731 - protein, 163 aa, Kineococcus radiotolerans SRS30216
MTSPLDVPLTALTGGPLDPAQLTGRAVLVVNVASRCGSTPQYAGLQELQEEYGERGFTVLGVPCDQFGGQEPGTEEEIAEYCSATWGTTFPMTAKVEVNGPGRHPLYGALTATPDADGTAGDVAWNFEKFLVSPAGEVVARFRTRTTPQDPALRAAIEARLPA

SEQ ID NO: 9732 - protein, 278 aa, Arabidopsis thaliana
MSGEVWRWNKQAEMNSIRDCLKHCNSIAIDTEFPGCLKETPMDASDEIRYRDMKFNVDNTHLIQLGLTLFGKGITKTWEINLSDFNESKSLKNDKSIAFLKNNGLDLDKIREEGIGIEEFFMEFSQILNEKHGKMRWVTFQGSYDKAYLLKGLTRKPLPETSKEFDETVQQLLGRFVYDVKKMAGLCSGLSSRFGLQRIADVLQMRRVGKAHHAGSDSELTARVFTKLIFDLVNSRKESTGRRADDQQYQLEQQQHQQQLMMTRCYIPIPVQGRNYVL

SEQ ID NO: 9733 - protein, 372 aa, Oryza sativa (japonica cultivar-group)
MDDPMLNAVKEEESHGDGGGLEVVAGEDGAAAVAAGVAPRPMEGLHDAGPPPFLTKTYDMVDDAGTDAAVSWSATSNSFVVWDPHAFATVLLPRFFKHNNFSSFVRQLNTYGFRKVDPDRWEFANENFLRGQRHLLKNIKRRKPPSHTASNQQSLGPYLEVGHFGYDAEIDRLKRDKQLLMAEVVKLRQEQQNTKANLKAMEDRLQGTEQRQQQMMAFLARVMKNPEFLKQLMSQNEMRKELQDAISKKRRRRIDQGPEVDDVGTSSSIEQESPALFDPQESVEFLIDGIPSDLENSAMDAGGLVEPQDFDVGASEQQQIGPQGELNDNFWEELLNEGLVGEENDNPVVEDDMNVLSEKMGYLNSNGPTAGE

SEQ ID NO: 9734 - protein, 437 aa, Glycine max
MTVTTEFAAATNDEEVPSGVVLFGKYELRRLLGAGAFAKVYHATSVDDTRQSVAVKAVSKNKVLNGGFAANVEREISIMRRLHHPNIINLFEVLATKTKIYFVMEFAAGGELFHEVAGKVRLTEETARFYFRQLISAVKHCHSRGVFHRDLKLDNLLLDENGNLKVSDFGLSAVTGQIRPDWLLHTVCGTPTYVAPEILAKRGYDGAKVDLWSCGVVLFALIAGYLPFNDYNPSVLYRKIYRGQFRFPRWISHDLRFLLSRLLDTNPKTRITVDEIYKDTWFNADGEYRFNRVLVKESECEKQLGRTGFKSLNAFDLISFSTGLDMSGLFEDPTGSNSVERVVSTVVPEKIMERVEAMTEEGRVVVRREKNGGGAKLEGQDGNLIGIVVVYQLTDELVVVEMKRSEKGGGFGGQFWKDKLRPLLLELASELEEPVSR

SEQ ID NO: 9735 - protein, 358 aa, Oryza sativa (japonica cultivar-group)
MDPAAAGIVKEEMLESQQQQRQEDGGAAPRPMEGLHEVGPPPFLTKTYDLVEDPATDGVVSWSRAGNSFVVWDPHVFADLLLPRLFKHNNFSSFVRQLNTYGFRKVDPDRWEFANEGFLRGQRHLLKTIKRRKPPSNAPPSQQQSLTSCLEVGEFGFEEEIDRLKRDKNILITEVVKLRQEQQATKDHVKAMEDRLRAAEQKQVQMMGFLARAMRNPEFFQQLAQQKEKRKELEDAISKKRRRPIDNVPFYDPGETSQTEQLDSPYLFDSGVLNELSEPGIPELENLAVNIQDLGKGKVDEERQNQTNGQAELGDDFWAELLVEDFTGKEEQSELDGKIDGIDELAQQLGYLSSTSPK

SEQ ID NO: 9736 - protein, 379 aa, Oryza sativa (japonica cultivar-group)
MEKMMPGMVKEEWPPSSPEEGEAPRPMEGLHEVGPPPFLTKTFDLVADPATDGVVSWGRAGSSFVVWDPHVFAAVFLPRFFKHNNFSSFVRQLNTYFLVRTNYLNKRSHFYSLRFQGFRKIDPDRWEFANDGFLRGQRHLLKMIKRRRPLSYLPGSQQALGTCLEVGQFGLDEEIDRLKRDKNILLAEVVKLRHKQQSTKANMRAMEERLQHAEQKQVQMMGFLARAMQNPDFFHQLIHQQDKMKGLEDTFSKKRTRSIDIVPFLNPGEVSQGDQLESTLLFDPRPFAELNDEPAKSELENLALNIQGLGKGKQDVNRTRNQPRNQASNETELTDDFWEELLNEGARDDAGIPGMERRRPRYVDALAQKLGYLSNSSQK

SEQ ID NO: 9737 - protein, 368 aa, Thermobifida fusca
MSDFKPGLEGVVAFETEIAEPDKEGGALRYRGVDIEQLVGHVTFGRVWGLLVDNSFNPGLPFADPIDLPVSTGDVRVDVQSALATLAPRWGFKPLLDIDEAEARDNVARAASAALSIIAQSARGDQPKVPQSRVDEGKTIVERFMIQLRGEPDPLHVKAVDAYWTSAAEHGMNASTFTARVIASTGADVAAALSGAVGAMSGPLHGGAPARVLHMLDETERLGDARKYVTQALDRGERLMGFGHRVYRAEDPRARVLRRTAKELNAPRFEVASALEKAALEELQARKPDRVLATNVEYWAAVVLDFAQIPASMFTSMFTCARTAGWSAHILEQKRTGRLVRPSARYVGPAVRDIKSVEGADEALAQGI

SEQ ID NO: 9738 - protein, 152 aa, Zea mays
ATRPGHPVLVYMPAGRLARDIEKTSDEAAAQFAFSQLKKILPNAAEPINYLVSRWGSDENTLGSYTFDGVNKPRDLYEKLRIPVDNLFFAGEATSVKYTGTVHGAFSTGVMAAEECKMRVLERFRELDMLEMCHPAMGDDSPVSVPLLISRL

SEQ ID NO: 9739 - protein, 443 aa, Gloeobacter violaceus PCC 7421
MVLMGSLLLRDMRMVLDDGSLYVGDLLCRDGLIAAVDRTVNAPADRVIDGGGRVLLPGVIDPQVHFREPGKEYKEDLQTGSWACARGGVTSFLEMPNTSPPTTTVERLEDKLARAASKCVVNYGFFVGATADNIEQLQQAAGLSCGVKIFMGASTGDLLVDDPVALERIFKEVPRLIAVHAEDEARIRERTRLFAGRSDPHVHSQLRDNECARLATAQALELSRRYRRRLHILHLSAAEELELLRADKPAWVTAEVIPQHLFLSTAAYDTIGMRAKQNPPLRSEADREAMWAGLRSGLIDFVATDHAPHLLSEKDRDYAEAPAGMPGVETSLPLMLTALARGEVNFEQIVRWMSRGAAKAYGIPNKGSLRPGFDADLVLVDLERYEPVRAERMASKCGWSPFEGWSLTGWPVLTVVGGRVAFEAGEVQTDTRGNALNFRPLEF

SEQ ID NO: 9740 - protein, 432 aa, Arabidopsis thaliana
MVIKGMRVGKYELGRTLGEGNSAKVKFAIDTLTGESFAIKIIEKSCITRLNVSFQIKREIRTLKVLKHPNIVRLHEVLASKTKIYMVLECVTGGDLFDRIVSKGKLSETQGRKMFQQLIDGVSYCHNKGVFHRDLKLENVLLDAKGHIKITDFGLSALSQHYREDGLLHTTCGSPNYVAPEVLANEGYDGAASDIWSCGVILYVILTGCLPFDDANLAVICRKIFKGDPPIPRWISLGAKTMIKRMLDPNPVTRVTIAGIKAHDWFKHDYTPSNYDDDDDVYLIQEDVFMMKEYEEEKSPDSPTIINAFQLIGMSSFLDLSGFFETEKLSERQIRFTSNSLAKDLLENIETIFTEMGFCLQKKHAKLKAIKEESTQKRQCGLSVTAEVFEISPSLNVVELRKSHGDSSLYKQLYERLLNELGSSSQVQELLA

SEQ ID NO: 9741 - protein, 439 aa, Anabaena variabilis ATCC 29413
MSSPQSLLIRGARILLPNGEFLLGDVLIRDRHIIEVGTEIVNTTPATEIDAKGLTLLPGVIDPQVHFREPGLEHKEDLFTASCACAKGGVTSFLEMPNTRPLTTSQQALDDKLQRAASKCLVNYGFFIGATGENTPELLAANPTPGIKIFMGSMHGQLLVDQDAVLESIFAQGQRLIAVHAEDQARINQRRQEFAGIQDPAIHSQIQDNQAALLATQLALKLSKKYQRRLHILHMSTADEAELLRQDKPIWVTAEVTPQHLVLNTGDYERIGTLAQMNPPLRSPHDNEVLWQALRDGVIDFIATDHAPHTLEEKAQPYPNSPSGMPGVETSLAVMLTAAMEGKCTIAQVANWMSKAVAVAYGIPNKGAIAPGYDADLVLVDLNTYRPVLREELLTKCRWSPFEGWNLTGWADTTIVGGQIVYHKGKLNTEARGQALSFV

SEQ ID NO: 9742 - protein, 339 aa, Oenococcus oeni PSU-1
MKQVQVTAVGENSFVDVDQPQVGRQDVLIKIKANGICGSDTFYTSIGGIPPRQGHTPLGHEAAGIVADIGSDVDDVSIGDHVVINPMSAEDGIIGNGGAQGALSDYVNLINAKANRNFRIIPKNIPWEVAALNEPMAVAQHAVNRSKAKADSKVAVFGAGPIGLGAIISLKALGVKNVVAIDIIPERLQKALDVGADSIIDSGKEDVLEQLIKFHGQGLEKVPSGNKRSATDIYIDAAGASIVPKTVFKIAQYRAVYTIVAVHKKEVPVNFGDLLDRELDIRLSVGYPTEIFQVTDNIIKYPELYAKIISNVFPFSDALKALKTAATPGAADKVVVSFD

SEQ ID NO: 9743 - protein, 303 aa, Acinetobacter lwoffii
MKFGTVWKYYFTESLLKATIRTPSQLNLAPNALRPVLDQLCRLFPQNPTVQIRPIRLAGVRGEEIKAQASATQLIFHIHGGAFFLGSLNTHRALMTDLAARTQMQVIHVDYPLAPEHPYPEAIDAIFDVYQALLVQGIKPKDIIISGDSCGANLALALCLRLKQQPELMPSGLILMSPYLDLTLTSESLRFNQKHDALLSIEALQAGIKHYLTDDIQPGDPRVSPLFDDLDGLPPTLVQVGSKEILLDDSKRFREKAEQADVKVHFKLYTGMWHNFQMFNAWFPEAKQALADIAEFAHSLDLD

SEQ ID NO: 9744 - protein, 477 aa, Populus tomentosa
MLSQKQAEEAIVPNYSETDQHEGKEEETEENHSLFSIKSALWHGGSVWDAWFSCASNQVAQVLLTLPYSFSRLGMLSGILFQIFYGIVGSWTAYLISVLYIEYRSRKGKENVNFKNHVIQWFEVLDGLLGPYWKAVGLAFNCTFLLFGSVIQLIACASNIYYINDHMDKRTWTYVFGACCATTVFIPSFHNYRIWSFLGLGMTTYTAWYMAIAALIHGQKGVVTHSAPTKLVLYFTGATNILYTFGGHADTVEIMHAMWKPQKFKYIYLMATLYVFTLTIPSATAVYWAFGDDLLNHSNAFALLPKNGFRDAAVILMLIHQFITFGFACTPLYFVWEKVIGMHDTKSICLRALARLPVVIPIWFLAIIFPFFGPINSAVGALLVSFTVYIIPSLAHMLTYRKSSARQNAAEKPPFFLPSWTAMYVVNTFVVVWVLVVGFGFGGWASMTNFVRQVDTFGLFAKCYQCKPAGAAPPRPH

SEQ ID NO: 9745 - protein, 203 aa, Arabidopsis thaliana
MSGDNGGGERRKGSVKWFDTQKGFGFITPDDGGDDLFVHQSSIRSEGFRSLAAEEAVEFEVEIDNNNRPKAIDVSGPDGAPVQGNSGGGSSGGRGGFGGGRGGGRGSGGGYGGGGGGYGGRGGGGRGGSDCYKCGEPGHMARDCSEGGGGYGGGGGGYGGGGGYGGGGGGYGGGGRGGGGGGGSCYSCGESGHFARDCTSGGR

SEQ ID NO: 9746 - protein, 70 aa, Brassica napus
MSALFNFHSFLTVVLLVICTCTYLKMQFPAILEQKTGFRGFFWKAARIGERLSPWMSVGCFMMGVSIIFF

SEQ ID NO: 9747 - protein, 461 aa, Oryza sativa (japonica cultivar-group)
MVNGEAEAECTRASLLGRYEIGRTLGEGNFGKVKYARHLATGAHFAIKILDRNKILSLRFDDQIRREIGTLKLLKHPNVVRLHEVAASKTKIYMVLEYVNGGELFDKIAVKGKLSEHEGRRLFQQLIDAVSYCHDKGVYHRDLKPENVLVDRRGNIKISDFGLSALPQHLGNDGLLHTTCGSPNYIAPEVLQNRGYDGSLSDIWSCGVILYVMLVGYLPFDDRNLVVLYQKIFKGDTQIPKWLSPSARDLLRRILEPNPMKRINIAGIKEHEWFQKDYTPVVPYDDDDDNYLDSVLPIKEQIDEAKQEKPTHINAFQLIGMASALDLSGFFEEEDASQRKIRFTSTHSPKDLFDKIENVVTEMGFQVQRGNSKLKVMKNGRGSKNLRNPSSFLVCTEVVELGPSLYVVELKKSHGDPILYRQLCERLSDELGVCKTEQIQRTESLEDDLESFDSGSSLPGF

SEQ ID NO: 9748 - protein, 323 aa, Arabidopsis thaliana
MGEEVQMSDYDVSGDGDRVSEWEMGLPSDEDLASLSYSLIPPNLAMAFSITPERSRTIQDVNRASETTLSSLRGGSSGPNTSSSNNNVEEEDRVGSSSPGSDSKKQKTSNGDGDDGGGVDPDSAMAAEEGDSGTEDLSGKTLKRPRLVWTPQLHKRFVDVVAHLGIKNAVPKTIMQLMNVEGLTRENVASHLQKYRLYLKRMQGLTNEGPSASDKLFSSTPVPPQSFQDIGGGGGSSGNVGVPIPGAYGTQQMMQMPVYAHHMGMQGYHHQNHNHDPYHQNHRHHHGAGGNGAFESNPYMMQQNKFGSMASYPSVGGGSANEN

SEQ ID NO: 9749 - protein, 166 aa, Oryza sativa (japonica cultivar-group)
MESAMFGLETPLMTALQHLLDIPDGEGGAAGKQGATGGPTRAYVRDARAMAATPADVKDLPGAYAFVVDMPGLKSSDIKVQVEEERLLVISGERRRGGGEEEKEESCKYLRMERRMGKFMRKFVLPDNADVDKISAVCQDGVLTVTVEKLPPPEPKKPKTIEVKVA

SEQ ID NO: 9750 - protein, 425 aa, Pediococcus pentosaceus ATCC 25745
MKVLLKNARVIKSHQVQKTDVLVENDRITQIQPEINVEAEQIIDVKNQLLMPGLVDIHVHFRDPGQTDKEDVVSGSAAAVKGGFTTVLTMPNVDPVPDTPEKMTAMVKHNQTAGSLHIGQYGSITKKRTSEELVDFKALKEAGAVAFSNDGNGIQTAETMYQAMLQIKEVGLPLAAHVEDESLMQHGVMNQGTVAEKLGLPGISELAETAQLARDLEIARNTGAHYHVCHVSKARSVELIRRAQRDGVHVTAEVAPHHLFLDETMISMDNPMMKMNPPLRTLEDRQALLGGLLDGTIGMIATDHAPHTVKDKAGSMKTASFGITGLETAFPLLYTKLVKPGLCTVEQLVEWMSIQPAEIFNLKAAGQLEVGDVADLTVMNVEDEYEIKEADFASKGINSPFIGQKVYGQTQLTMVAGKIVYQREG

SEQ ID NO: 9751 - protein, 354 aa, Bacillus thuringiensis serovar konkukian str. 97-27
MEKRIVCLAGDGVGPEVMESAKGVLHMVERLYGHHFHLQDEHFGGVAIDLTGQPLPQRTLAACLASDAVLLGAVGGPRWDGAKERPEKGLLALRKGLGVFANVRPVTVESATAHLSPLKKADEIDFVVVRELTGGIYFSYPKKRTDEVATDTLTYHRHEIERIVSYAFQLASKRKKKVTSIDKANVLESSKLWRTVTEEVALRYPDVELEHILVDAAAMELIRNPGRFDVIVTENLFGDILSDEASVLAGSLGMLPSASHAEKGPSLYEPIHGSAPDIAGKNKANPIAMMRSVAMMLGQSFGLTREGCAIEEAISAVLKSGKCTADIGGAETTTSFTKAVMQEMEEQALVGRGR

SEQ ID NO: 9752 - protein, 199 aa, Triticum aestivum
  misc_feature (135)..(135): Xaa can be any naturally occurring amino acid
MKTFLIFVLLAMAMKIATAARELNPSNKELQSPQQSFSYQQQPFPQQPYPQQPYPSQQPYPSQQPFPTPQQQFPEQSQQPFTQPQQPTPVQPQQPFPQQPQQPQQPFPQPQQPFPWQPQQPFPQTQQSFPLQPQXKPFPQQPQQPFPQPQLPFPQQSEQIIAQQLQQPFPLQPQQPFPQQPQQPFPQPQQPIPVQPQQS

SEQ ID NO: 9753 - protein, 453 aa, Zea mays
MEKKPTILMNRYELGRTLGQGTFAKVYHGRNLASGESVAIKVIDKEKVMRVGMIDQIKREISVMRLVRHPNVVQLHEVMASKSKIYFAMEYVRGGELFARVARGRLKEDAARRYFHQLVGAVDFCHSRGVYHRDLKPENLLVDEHGNLKVSDFGLSALRECQKQDGLLHTTCGTPAYVAPEIINKKGYDGAKADIWSCGVILFVLLAGYLPFHDANLVEMYRKISRADVKYPQWFSPELRRLMPKLLEPNPNNRITIEKLVEHPWFKKGYRPAVMLAQPHGSSSLKDVQVAFSNADHKDSSSKVEQPADSSLKPASLNAFDIISHSRGFDLSSLFEVDQEQKASNSRFMTQKPASAIVSKLEQIAETERFMVKKQDGLVKLQGSKQGRKGQLAIDAEIFEVTPAFHVVEVKKSAGDTLEYEMFCSKGLRPSLSDICWSSRSEENMAPSVVQPS

SEQ ID NO: 9754 - protein, 453 aa, Escherichia coli K12
MSFDLIIKNGTVILENEARVVDIAVKGGKIAAIGQDLGDAKEVMDASGLVVSPGMVDAHTHISEPGRSHWEGYETGTRAAAKGGITTMIEMPLNQLPATVDRASIELKFDAAKGKLTIDAAQLGGLVSYNIDRLHELDEVGVVGFKCFVATCGDRGIDNDFRDVNDWQFFKGAQKLGELGQPVLVHCENALICDELGEEAKREGRVTAHDYVASRPVFTEVEAIRRVLYLAKVAGCRLHVCHVSSPEGVEEVTRARQEGQDVTCESCPHYFVLDTDQFEEIGTLAKCSPPIRDLENQKGMWEKLFNGEIDCLVSDHSPCPPEMKAGNIMKAWGGIAGLQSCMDVMFDEAVQKRGMSLPMFGKLMATNAADIFGLQQKGRIAPGKDADFVFIQPNSSYVLTNDDLEYRHKVSPYVGRTIGARITKTILRGDVIYDIEQGFPVAPKGQFILKHQQ

SEQ ID NO: 9755 - protein, 462 aa, Halobacterium sp. NRC-1
MHLYWHQRDLRVPDNRGLHAATDGDTVVPVYVFDDTVLSQVGRPKRAFLAAGVRALRAAYRERGSDLLVREGDAESVLPALADEFDADTVFHAAHYDAARRNRRTRVADALAAAGVDTAGHVDHTLVDPATLDDAYPSHSQFYDDWQQAPKPDPVPAPDADALADVHDDHTLSVPAPEPPLPDAGHAAATDRLAAFLDDGIASYNDTRDDLAAAVDAPASAVSRLSPYLAAGNIGVREVWAAVADAYDDATGNAARNIGKYRYELSWREQNYHLLYHTPRLQTENYVSFDAPIAWQNSDDHFEAWTRGETGYPLVDAGMRQLRAEGYVHNRPRQVVASFLTKHLLVDWRRGERHFADRLVDYDPANNAANWQWTASTGTDTVAVRIFDPVSQMAKYDSDAAFVTEYVPELRGVDPETIVDWPTLRHSQRERLAPDYHHPIVDRDHAYERAQRVFEAALDGDA

SEQ ID NO: 9756 - protein, 491 aa, Synechococcus elongatus PCC 7942
MPRGVAPAFAGRKPKGWAWASTAVPDFQGGFKRLINRFQGSKLWLACVPLAATIAVFWGVAANAQGSADPVPSAQFLVNNLWLMVATVLVIFMNAGFAMVETGLCRQKNAVNVLAKNLIVFTLAATAYWFIGYSLMYGSPVVDGFLYFGKGGPLGFFFDPTVSAETIKNDGLISSLDFLFQAAFAGTAATIVSGSVAERIKFVDFIIFSLILTAVIYPIAGSWQWNVGSGWLNKAGFIDFAGSTVVHSVGGWAALIGAITLGPRMGKFQDGPPGALTGHNLAIATLGALILWIGWYGFNGGSVLAFNTAVPYVAVTTTLGGAAGGISATITSWSTSGKPDLSMVINGILAGLVGVTAGCDGFGMGGSFIVGLIAGVLVVFSVYTFENLKIDDPVGACSVHLVCGIWGTLAVGLFNLEKGLFYGGGFGQLGSQILGIISYGVWTVVASVIIWNILKALLGLRVSLKKSYKAWILANTGWKPTLALPRMHLTP

SEQ ID NO: 9757 - protein, 491 aa, Methylococcus capsulatus str. Bath
MSHELRLDQPGLLRTRCLIDGQWVDADHSKTFSVTDPATGRALADVPAMGAAETMRAIAAAEHAWTGWRGKTAKERAAVLRRWYELILSHTEDLARILTAEQGKPLTEARNEIGYAAGFVEWFAEEAGRAYGETIPSPVPDKRLLVIRQPIGVCAAITPWNFPAAMITRKIAPALAAGCTVVVKPAEQTPLTALALADLAVQAGFPPGVINVVTGDPEAIGGELTSNPLIRKLSFTGSTEVGRLLMAQCAATVKKISLELGGNAPFIVFEDADLDAAVEGALLSKYRNTGQTCVCTNRFLIQDSIYDAFAERLAAKVRRLEVGNGLDEGVVQGPLIDEQALAKVERHIADALDRGARVLAGGGRHPLGGRFFQPTVLVDVTPEMLCTREETFGPVAPLLRFGSEEEALAIANATEYGLAAYFYTRDLARAFRVGEALEYGMVGINTGMLSYDVAPFGGVKQSGIGREGSHHGMDEYLELKYLCLGGMAPSA

SEQ ID NO: 9758 - protein, 156 aa, Arabidopsis thaliana
MDLEFGRFPIFSILEDMLEAPEEQTEKTRNNPSRAYMRDAKAMAATPADVIEHPDAYVFAVDMPGIKGDEIQVQIENENVLVVSGKRQRDNKENEGVKFVRMERRMGKFMRKFQLPDNADLEKISAACNDGVLKVTIPKLPPPEPKKPKTIQVQVA

SEQ ID NO: 9759 - protein, 221 aa, Triticum aestivum
  misc_feature (80)..(80): Xaa can be any naturally occurring amino acid
  misc_feature (132)..(132): Xaa can be any naturally occurring amino acid
HASGEIDCASLLIQAKLEANQQSSVGVVLIGGSQVQILCTLTSDSVKANSFLFGVKCSGELHFTQAIQIGALSLKHRSNXTQKQRMVCFIGSTVVEDVETLKILAKKLKKNAVAVDVICFGDTSEEQIAKLXAFVATLQTEDNSHCVVIRPGENISDKVINSPIIGGQAGNAPGIGGNIEEDDPELAAAIRMSLEESQRAAPPQVAQPAPAQSISQAQPSR

SEQ ID NO: 9760 - protein, 414 aa, Bacillus anthracis str. Ames 0581
MSLLRDEALKMHKEKQGKIGVYSKVKVQNSTDLSLAYSPGVAEPCLEIYKDESKVYDYTMKGNLVGVISDGTAVLGLGNIGPKAAMPVMEGKALLFKSFAEIDAFPICLNTNNPDKIVEVVKLLEPNFGGINLEDIAAPQCFEIEERLRKSCDIPVFHDDQHGTAIVTIAGLINALKLTNKKIEDVQIVVNGAGAAGIAIVKLLLHMHVKNVILCDTKGIIYEQRPIGMNALKEEIARITNIEQKRGTLAEALIDADVFIGVSAADVVDEDMIRSMNHNPIIFALANPTPEIMPNKAKIAGALVVGTGRSDFPNQVNNVLAFPGVFRGALDVQAKEINEEMKLAAVYAIAELISEEELHVNYVIPNPFDPRVVPHVAYAVARAAVETGVSRKNISMSEIKNNLFRLTKEVNILK

SEQ ID NO: 9761 - protein, 132 aa, Zea mays
  misc_feature (42)..(42): Xaa can be any naturally occurring amino acid
  misc_feature (48)..(48): Xaa can be any naturally occurring amino acid
  misc_feature (85)..(85): Xaa can be any naturally occurring amino acid
  misc_feature (100)..(100): Xaa can be any naturally occurring amino acid
  misc_feature (122)..(122): Xaa can be any naturally occurring amino acid
PVRKLEALIAAANIIYIFHILHTPPGENALFDVLLITPIFTXNKFKTXGPASAGAGSETGPSLFQLIFYPNLYPELALALQLSMXEERSRQQAIANKAAXDTFNTEHNNVPSSNSDSVMAEXEPASNAAAVD

SEQ ID NO: 9762 - protein, 304 aa, Triticum aestivum
  misc_feature (223)..(223): Xaa can be any naturally occurring amino acid
NRKKTVLVAKIFRGFPPRAGRLHPIRTRGFEGYRFTPCGEYVRRWLPELARLPTEWIHHPWDAPESVLQAAGIELGSNYPLPNCELDEAKSRLQDALSEMWELEAASRAEIENGMEEGLGDSSDEPPIAFPQELQHMEVDLDRATIHTPATAGRRRADQMVPSITSSLVRAETETELSAAFESEVTRPEVPSQVHFQPQTRMEVRDEGVSDGTAARYNGVQQXSSYTLHRHRVQGGIAPSTSEASSSWTGVVAAEVPVWSPPAASGHSDPYAADETDISSRSYLDRHPQQSHRLMNWNQLSQSS

SEQ ID NO: 9763 - protein, 475 aa, Azoarcus sp. EbN1
MTLVRDKLFIDGRWVAAQGGGFIDVIDPSDASVYARIPEGVPADAEAAIAAARGAFDSWSRTSPAERAQYLERIAAGFQARSDELADAIAHEVGMPLKMASRIQVGGPLWSWQHYAKLAREFEWEARVGNSLVVREPVGVVGAITPWNFPLNQITLKVAPALAAGCTVVLKPSEVAPINAFILAEIIEAAGLPAGVFNLVTGYGPVVGEVLASDPRVDMVSFTGSTHAGRRVAELAAATVKKVALELGGKSAAIVLDDADLAAAVKGTVSNCLLNSGQTCSAHTRMIVPRAKVDEAATLAAAAASSFKVGPALAEGSRLGPLVSQAQRDRVVGYIRRGLDEGARLACGGVDAAPAGAGFFVAPTVLVVEDPKATVAQEEIFGPVLVIVPHDGDEDAILLANDSIYGLAGSVWAGTDEHALAVARRIRTGQVDVNGAPWNPLAPFGGYRQSGLGRENGVYGLEEFLEYKAIQLRPR

SEQ ID NO: 9764 - protein, 504 aa, Azoarcus sp. EbN1
MNKLDPARYGLNLKGRYGNYIGGQWLPPVAGRHFDNITPITGKPLCEIPRSDEQDVELALDAAHKAKAAWGRTSAAERAGVLNRIADRMEANLETLAQVETWDNGKPIRETRAADIPLAIDHFRYFAACVRAQEGSLGEIDHTTVAYHFHEPLGVVGQIIPWNFPLLMAAWKLAPALAAGNCVVLKPAEQTPLSILVFAELVGDLLPPGVLNIVNGFGVEAGKPLASSKRIAKIAFTGETGTGRLIMGYASQNLIPVTLELGGKSPNIFFDDVAAQDDAFFDKAIEGFVMFALNQGEVCTCPSRALIHESIYERFIERALKRVAEIRQGNPLDPATMIGAQASREQMDKIQSYLAIGRDEGAELLAGGERAHLDGELEGGFYIQPTVFRGHNKMRIFQEEIFGPVVSVTTFKDRDEALAIANDTPFGLGAGVWTRNINTAFHMGRHIEAGRVWTNCYHAYPAHAAFGGYKQSGMGRETHKMMLDHYQQTKNLLVSYSEDKLGFF

SEQ ID NO: 9765 - protein, 485 aa, Arabidopsis thaliana
MSSPRSNKPKIVNGPGGYILQDVPHLIDYLPDLPTYPNPLQDNPAYSVVKQYFVHADDSVPEKVVVHKDGPRGVHFRRAGPRQKVYFESDEVHACIVTCGGLCPGLNTVIREVVSSLSYMYGVKRILGIDGGYRGFYAKNTIPLNSKVVNDIHKRGGTIIGTSRGGHDTNKIVDSIQDRGINQVYIIGGDGTQRGASVIFEEIRRRRLKVAVVGIPKTIDNDIPVIDKSFGFDTAVEEAQRAINAAHVEAESNENGIGFVKLMGRYSGYIAMYATLASRDVDCCLIPESPFYLEGEGGLFEFIERRLKDHGHMVIVLAEGAGQDLMCKSMESTPMDASGNKLLKDVGLWLSQSIKDHFKKNKMVMNLKYIDPTYMIRAVPSNASDNVYCTLLAQSAVHGAMAGYTGYTSGLVNGRQTYIPFYRITETQNNVVITDRMWARLLSSTNQPSFLGPKDTSEEKKELPETPLLDDGAVDIPPVTKEVTK

SEQ ID NO: 9766 - protein, 388 aa, Lactobacillus gasseri
MAQRDYYDVLGVDKNASESDINKAYRKLAKKYHPDLNHEPGAEEKYKEVNEAYEVLHDKQKKAQYDQFGQAGVNGQAGFGGQGYGGFGGQGGYSSQGFGDFGDIFGDIFGSAFGGGRSRVDPTAPQKGQDLDYTMTIDFMDAIKGKKTDITYTRSEVCPTCDGSGAEKGTHPITCDKCHGTGVMTVTRQTPLGVIQQQTTCDKCGGRGTIIKHPCQTCHGKGTIDKKQTLEVKVPAGIDNGQQIRLSGQGEAGKNGGPYGDLYIVFRVKPSKEFRRNGTTIYSEAPISFAQAALGDKIRVNTVHGPVDLTIPAGTQPNTNFKLRGQGVPKINGTGNGDQEVTVKVVIPKKINDKQKEALVDYVKAGGGNISPQEKNFFERLKDKLNGE

SEQ ID NO: 9767 - protein, 65 aa, Glycine max
  misc_feature (38)..(38): Xaa can be any naturally occurring amino acid
  misc_feature (43)..(43): Xaa can be any naturally occurring amino acid
QLAPMSCLCKGYLDALLIRNGFKDAEYISLALGGTNLXINTVXSVDHAEAVDLSFEMRTKLYFKP

SEQ ID NO: 9768 - protein, 217 aa, Caulobacter crescentus CB15
MQIFLDSTDTKVIADLASTGLIDGVTTNPTLIAKSGRPMLEVIAEICDIVPGPISAEVAATTADAMIAEGQKLAKIAPNVVVKIPLTRDGLIACAAFADEEIKTNVTLCFSPTQALLAAKAGATYISPFIGRLDDYGFDGMDLIRDIRAIYDNYGYETEILAASVRNAAHVKEAAIVGADVVTIPPAVFSDLYKHPLTDKGLEQFLKDWASTGQSIL

SEQ ID NO: 9769 - protein, 322 aa, Glycine max
MADAKAEAARQAPQSSQEEEEDWKEAEGDVEVADRSTSNGGGAGEGITDRPIRVYADGIYDLFHFGHARSLEQAKKSFPNAYLLVGCCNDELTHQYKGRTVMTEDERYESLRHCKWVDEVIPDAPWVVTEEFLNKHNIDFVAHDSLPYHDASGASNDVYEFVKKLGKFKETKRTEGISTSDIIMRIVKDYNEYVMRNLARGYSRNDLGVSYVKEKRLRVNMGLKTLRDKVKQHQEKVGEKWSTVAKLQEEWVENADRWVVGFLEKFEEGCHSMGTAIKERIQERLKEAQSRDFSLLQYDSDDFDDFEEEDDEVAKDAKYVKE

SEQ ID NO: 9770 - protein, 301 aa, Rubrivivax gelatinosus PM1
MLDAFKAQGLKSFEQMTVPESRETAMAFVGLEGDEEAVADVSNHRVPVKGGDIAVRIYRPAGNAPHPMLVYFHGGGFVFGNLDLVDKVARSLCNASNAAVVSVDYRKAPEHPYPTAPEDAYAGLVWARENAAKLGLDPARIAVAGDSAGGNLAAVVSQMARDRKGPKIAHQVLVYPVTDAAGDYPSRKENAEGYLLTQGAMNWFFGHYLTSPGLASDAYVSPIKGDLKGLPAATVITAGYDPLRDEGDAYAKALAKAGVAVDHVPNPTMIHGFFWMKGVIGHTQSIYDRVGRNLKAAFGTA

SEQ ID NO: 9771 - protein, 477 aa, Candida albicans SC5314
MPHKKVVIVGGGISGIKAAADLYKSGIKSTVILEAQPRLGGRLFTVESTQNKGTTYDYGASWFHDCLNNPLFDKAQQLENVKYYFDDGKSLYFNKFEGQIEKWRFETVLEEMMTYFQWVYKQDPDKLDISVKQLAQEYVDKYRNVLTKEQIELSLSAVRMWSELWHGESWDLLSGKYTFADDGHLGRNAFVKNGYSTVFINELKELPRAYRDSAIKLNAQVIKIDYTNKKKILVYLKDGRTYSCDYIIVTIPQTILKITNAKDENYVEWVPELPPNIQKVLPDVHFGSLGKVVLEFDDCFWPRDVDRFYGLTSNTPSQDTISVDAWDYPTILINYQAVNNVPSLVALTQNPLSKYIENLQPHEKQQRIWSIFKPLIAKICESKGIQDIPEPHSIYHTPWNNESLFRGSYGTSLVGTQDPSSVIKAFVDGYQDRIKFAGAETMDDTSNGCAHGGWFSGQREAKFIVQQEAKKKVDSKL

SEQ ID NO: 9772 - protein, 227 aa, Paulownia kawakamii
MAREKIQIKKIDNATARQVTFSKRRRGIFKKAEELSVLCDADVGLIIFSSTGKLFEYASSSMKEILGRHNLHSKNLDKLEQPSLELQLVEDSNYSRLSKEVAERSHQLRRMRGEELQGLSIEKLQHLKKSLESGLSRVIEKKGEKIMKGDQSTSRKGKQLMEENERLRQQVADISNDCKNNAASDSENIVYDEGQSSESVNACNSVGPPQDYDSSDTSLKLGLPYSG

SEQ ID NO: 9773 - protein, 232 aa, Zea mays
  misc_feature (194)..(194): Xaa can be any naturally occurring amino acid
  misc_feature (200)..(200): Xaa can be any naturally occurring amino acid
  misc_feature (202)..(202): Xaa can be any naturally occurring amino acid
  misc_feature (224)..(224): Xaa can be any naturally occurring amino acid
MESTLKGIRGSDAPCVLDLDDAATVAGGVEDTYGEDRATEEQLVTPWTVSVASGYNLLRDPRYNKGLAFTERERETHYLRGLLPPAIVSQELQERKIMNNIRQYQLPLQRYMALMDLQEGNERLFYKLLIDNVEELLPIVYTPTVGEACQKGKILEVLKNWPERSIQVIVVTDGERILGLGDLGCQGMGIPVGXLSLYTXLXGVRPSACLPITLDVGTNNEELXYGRIYIGL

SEQ ID NO: 9774 - protein, 349 aa, Pseudomonas aeruginosa PAO1
MPAEVAAGLPPLPPNHFYFYPPDPLLEGDGAITAIEDSDPFDQYVYRLRRVLYQGRTRWQNVLIADTYNYDRVLMLDGAIQSAESDESLYHELLVQPAMLAHDEPRDVLIIGGGEGATLREVLSHASVRRAVMVDLDRELVELCREHLFQWHQGAFDDPRCELLAEDGRAYLERDPSLYDVVIIDVVDMLDNGPAQALYTRQFYELLHSRLRPGGVVAVQGLEFSHSDDKPHAALARTLRSVFSQVHSYRATVPSFLSSWGFLLASDWLDTNHWQAEDIDRRIERKLGPLWLDHLDGDYLKACFVMDRETRFLLAQPGPVLEDGVPFVAPPDIEEIEFGPAQLPALART

SEQ ID NO: 9775 - protein, 327 aa, Chlamydophila caviae GPIC
MSSQFEQLKLLSVLVCDTGDPELVKTSGSQDATTNPSLILKVAQEPKYQELLTEAIAWGIRQNGDDIQTLTFVLDKIQVNFGLEILKCIPGRVSLEIDARLSFNTEAMIQRAIFLSELFAATGGDKKRLLVKIPGTWEGIRAVEVLEKQGIACNVTLIFNLIQAIAAAKANATLISPFVGRIYDWWIAAYGDEGYSIDADPGVASVSNIYTYYKKFDIPTQIMAASFRSKEQVLALAGCDLLTVSPKLLDELKKDQSPVAKKLDVAAAKKLDVQPVELTESVFRFLMNEDAMATEKLAEGIRIFSGDTQILEAAVTEFIKQIAAQDA

SEQ ID NO: 9776 - protein, 277 aa, Mycoplasma mobile 163K
MFQWFPGHMAKALRQIKEKEKFVDFFIIVLDSRAPISTYNKEFDKISPKKPRLFIINKIDYGDVKKYQKLERYFRTENSDVLFTNLKKQNTRSIIIKSVDKLLFKKTEYDKKRGLLNPFTVGMILGLPNTGKSTLINLLANKSKTKVANTPGVTRGQQLVITERFKLFDTPGILFPKIEYELDAIKIAMIGSIKWEIINQKELFFGSYKLLSEYYPEEIEKLGLQPSFDDNQIFISLEQIGKKHNFYLKDKQIDENRTIIFFNNYVKNLKNVTYDRL

SEQ ID NO: 9777 - protein, 427 aa, Oryza sativa (japonica cultivar-group)
MGNICGGSGKAHVSGDCRPPSSGTMTPKTSSSVTTSNSTTGKLSSVGSSFMASSGSGGTSSGFDDGVYPEGQILEAPNLRTFTFIELRTATKNFRPDSVLGEGGFGRVYKGWVDEKTMNPVKGGTGMVVAVKKLNSESMQGYEEWQSEINFLGRLSHPNLVKLLGYCFEDKELLLVYEFMAKGSLENHLFKKGCPPLSWELRLKIAIGAARGLAFLHASEKQVIYRDFKASNILLDANYNAKLSDFGLAKLGPTGSNSHITTRVMGTYGYAAPEYVATGHLYVKSDVYGFGVVMLEMMSGQRALDPNRPNGQLSLVDWAKPYLADRRKLARLMDPRFEGQYNSKQAVQAAQLTLNCLAGEPRSRPSMKEVLETLERIESMKSRARDARGSGSSRDHSHGRTTAHQRSSPRPDGRRGSRTNGHATKAR

SEQ ID NO: 9778 - protein, 358 aa, Neurospora crassa
MAASRTATRTLRALRTSTRPALTAAPRAAFRQGGRRLYSSEPAKSGGSNIWAWAIGAGALGAGGLWYLNQDGASATPKVFAPKFDDYQAVYNEIASRLEEKDDYDDGSYGPVLVRLAWHASGTYDKETGTGGSNGATMRFAPESDHGANAGLKAARDFLEPVKAKFPWITYSDLWILGGVCAIQEMLGPQIPYRPGRQDRDAAGCTPDGRLPDASQAQDHLRNIFYRMGFNDQEIVALSGAHALGRCHADRSGFDGPWTFSPTVLTNDYYKLLLDEKWQWKKWNGPKQYEDKKTKSLMMLPADMALIQDKKFKQWVEKYAADNELFFKDFSNVIVKLFELGVPFAENSERWVFKTVNA

SEQ ID NO: 9779 - protein, 472 aa, Trichodesmium erythraeum IMS101
MVLIGCQVALANGGSDDFVKVDNIWLLLAGALVFFMNAGFALLEAGFCRSDNSVNVLAKNLIVFCVAAIAFWMFGFGLMFGDSSYHLPCRGNFEQKNEKVQSYHGHFSPTMEYNEFEQKSQFILPPKNDTPLGYPSKGFSCLQRQFPKRSIASIFFFQLAFAGTAATIVSRAVAEKMKLWVFFCFSFILVGFLYPIVGHWVWSEYGWLKQGLNFIDFAGSTVVHTVGGTAALAVAILLKPRWSWLGYDPWEDLETDEGSEALSPQGQKESYDQRNLTSATLGCLILWLGWLGFNGGSTTELKEVGHIIITTIMSAATGGIIAILLSPLFSQRSSNNSEIGKLDLSSLINGILGGLVGITASAAYVDIPIAIFIGAVSGVVVVLTRKLLKWIKLEDPLGAIPVHLFCGCWGTIAVSFSLRGTIVYEKTYNFLERLEWQFSGWGVVFITTFLVSCIIWIFIGLTLYLFEKILRK

SEQ ID NO: 9780 - protein, 282 aa, Streptococcus pyogenes M1 GAS
MAMIQWFPGHMSKARRQVQENVKHVDFVTILVDARLPLSSQNPMLTKIVGDKPKLMILNKADLADATRTKEWKAYYESQGIKTLAINSKEQSTVKKVTEAAKELMADKIQRLRERGIQKETLRTMIIGIPNAGKSTLMNRLAGKKIAVVGNKPGVTKGQQWLKSNKELEILDTPGILWPKFEDELVGLKLALTGAIKDQLLPMDEVTIFGLNYFREYYPNRLTKRFKNIPLEEEAPEIIMTLTRQLGFKDDYDRFYTLFVKEVRDGKLGQYTLDQVGDMDAD

SEQ ID NO: 9781 - protein, 186 aa, Arabidopsis thaliana
MKLISLVRNVRSRQCQPEVIWSVQVRFLQQDSVSKAKPKKYKYPSVYDPYGPRPQPSSKIMELAERIAALSPEERKQIGPALNEHLRLPKQQMISSDGIGAKQDTGAGNVEEKKEKTAFDVKLEKFNASDKIKVIKEVRTFTSLGLKEAKELVEKVPAILKQGVTKEEANEIIAKIKAVGGIAVME

SEQ ID NO: 9782 - protein, 356 aa, Gaeumannomyces graminis
MSRAANPPSNSGSRKISFNVSEQYDIQDVVGEGAYGVVCSAIHKPSGQKVAIKKITPFDHSMFCLRTLREMKLLRYFNHENIISILDIQKPRSYETFNEVYLIQELMETDMHRVIRTQDLSDDHCQYFIYQTLRALKAMHSANVLHRDLKPSNLLLNANCDLKVCDFGLARSAASQEDNSGFMTEYVATRWYRAPEIMLTFKEYTKAIDVWSVGCILAEMLSGKPLFPGKDYHHQLTLILDVLGTPTMEDYYGIKSRRAREYIRSLPFKKKVPFRTLFPQDVGSRLDLLEKLLAFNPVKRITVEEALKHPYLEPYHDPDDEPTAPPIPEEFFDFDKHKDNLSKEQLKQFIYQEIMR

SEQ ID NO: 9783 - protein, 585 aa, Triticum aestivum
  misc_feature (211)..(211): Xaa can be any naturally occurring amino acid
MLRLNPGRLPSEVLGSGMRRLEAWFATDVDIISSTDWDQEHGLTGWPWADGEWLRPCYLTLSPGFSGIASARALSNASFKVTLLESRERLGGRVHTDYSFGCPIASGASWLHGVCNEISLAPLIRLLGLRLYRSSGDHSVLYDHDWETHALFAKDGRQIPQEITTKVGEIFEQILKETVKVRDEYANDMPLVQAISMVLDRNPHLKLEGLXQYEVLQWCICRLEAWFATDVDNISLKNWDQEHVLTGGHGLMVNGYDPVIKALSRDLDVHLNHRVTKIIQRYNKVIVCVEDGTSFVADAAIITVPLGVLKANIIKFEPELPDWKLSAISDLGVGLENKIALRFNTIFWPNVEVLGRVAQTSNACGYFLNLHKATGHPVLVCMVAGRFAYEMEKLSDEESVNFVMSQLRRMLPGATEPVQYLVSRWGTDPNSLGSYSCDLVGKPADLYERFCARVGNLFFAGEAACMDHSGSVHGAYWSGIDAAEDCRRRLSTQLGIADLFQVWCIAVGEEFLGGVAPLLGPSGSVHGGKTAPIDDAKDGLVPLPTYLLLTDGRTNLSTVISIVLFCLNRSLNLPPQLYNFAASDP

SEQ ID NO: 9784 - protein, 208 aa, Brassica napus
MEKMLRSSSLIPLFCLVLLLISNFHGSVETGKRRIEITDDLDDVEDSEEDESWKQWGSKAATPEFDPPPDFSNMGFDQIQEEMAKRTFASVVGFVKLRLGVKRTKDMVVDIAMKWTKVLRTGGLGVRFMAVDRSTVMFNMQNGKEVTELREFVLSQEEAYEVKIGKQEFRRPGDPPLDDVVEKLQAKQSKGGEDGDSNNKNDVTKDEL

SEQ ID NO: 9785 - protein, 190 aa, Magnaporthe grisea
MGKSQSKLSQEQLAELQKSTHFDKKELQQWYKGFLKDCPSGTLTKEEFQKIYRQFFPFGDPSSFADYVFNVFDSDKSGTIDFKEFIVALSVTSRGKMEDKLDWAFQLYDIDGDGKISYDEMLQIVEAIYKMVGSMVKLPEDEDTPEKRVRKIFRMMDKDENGSLDMQEFKEGSKRGETIVSALSLYDGLV

SEQ ID NO: 9786 - protein, 448 aa, Halobacterium sp. NRC-1
MEIEIATIGGYEEVGRQMTAVRAGDDIVIFDMGLNLSKVLVHDNVETEKMHSLDLIDMGAIPDDRVMSDLEGDVKAIVPTHGHLDHIGAISKLAHRYDAPIVGSPFTIELVKGEIESEQKFGVENDLVKMEAGGTMEIGDRCELEFVHVTHSIIDAINPVLHTPEGAVVYGLDKRMDHDPVLEDPIDMERFREIGREGEGVLCYIEDCTNAGKKGRTPSESTARRHLKDVLTSVADYDGGIVATTFSSHISRVSSLVEFAKEIGREPILLGRSMERYSGTAERMGRVNFPDDLGMFGHRKSVDRAFKRVMNEGKENFLPIVTGHQGEPQAMLTRMGRGETPYDIEDGDKIIFSASVIPEPTNKGQRYQSEQLLRMQGARIYDDIHVSGHLREEGHYQMLDALQPQHLIPAHQDMKGMAPYAKLAKSQGYKIGRDLHMTENGNTIQLVE

SEQ ID NO: 9787 - protein, 220 aa, Ehrlichia canis str. Jake
MKLFLDTVDIDFLKEFSITGLIDGVTTNPSLMSKSNLECQDLILKICSLIPGPVSIEVISTSYKDMIKEGLDISKIADNIVVKLPLTYDGLIACKVLSHEHNVKVNVTLCFSVPQAILSAKSGAYFISPFVGRIDDIGQSGMQLIKDIRDVYTSYNTFNTEILVASVRNITHVIEAAKIGADIVTIPPSIFKQMFTHPLTDKGLESFLQSWNASGKKIFS

SEQ ID NO: 9788 - protein, 183 aa, Glycine max
MAGVGRNMVAPLLVLNLIMYLIVIGFASWNLNHFINGLTNRPGVGGNGATFYFLVFAILAGVVGAASKLAGVHHVRTWRGDSLATSASSSLVAWAITALAFGLACKEIHIGGYRGWRLRVLEAFVIILAFTQLLYVLALHSGLFGNQLGGNHAGGYPAEHAYGAGGDPHNKGMGMGTGGVARV

SEQ ID NO: 9789 - protein, 314 aa, Vibrio vulnificus CMCP6
MVNNSIQWFPGHMHKAQKEIAEAIPQIDVIIEVLDARIPFSSENPLISKIRGEKPVVKVLNKRDLADPELTELWIEHLEKEQNVKAMAITTSQTQEVHKILELCRKLAPHREEVGKNIRTMIMGIPNVGKSTIINTLAGRAIAQTGNQPAVTRRQQRINLQNGIVLSDTPGILWPKVENPHSGFRLAATGAVKDTAMEYDEVAFYTVEYLAKHYPEKLKERYQIEELPETDVELMEEIGQRRGALRSGGRVDLHKASEILLHELRSGTLGQITLERPEMITEELVEVELEAARRAEEKAKNKEERRKRYLRNKR

SEQ ID NO: 9790 - protein, 141 aa, Brassica napus
PRVRIKEGPDTIGAFIAEPVMGAGGVIPPPATYFEKIQAVVKKYDILFIADEVICAFGRLGTMFGCDKYNIKPDLVSLAKALSSAYMPIGAILMSQEVADVIYSQSNKLGAFSHGFTYSGHPISCAVAIEALKIYKERNIP

SEQ ID NO: 9791 - protein, 461 aa, Aspergillus nidulans FGSC A4
MQIVWRGSADPAVYEEARVGRVFNNRRPDRYPIAVVKASCTADIVAAVKLAKERNCRVAVRSGGHSWAGWSVRDESILVDLGNYKYLGVDAERCIASASPSMTGKEINGRLIHEYGLMFPGGHCPDVGLGGFLLQGGMGWNCRGWGWACERVKAIDVVTAEGELLHCDESQNEELYWAARGSGPGFPGIVTRFHFEILPYPKHGFRSSGYVYPISKYHEAFSWVLAITPDFDRDTEITVVSMYPEGSEQICLFILLVTLKHTPSEAEAALAPAQQSRPPGAIEEWFCREDSLENQYTNQAKANPKGHRYCAENAYLQNEADVPSVLEEAFTTLPHRKAFALWYAMNPCSRRQLPDMALSMQSDHYFALYTVWEEEEDDARCMAWVKNVMKRVQRHSVGAYLGDSDFQERQTRYWAESNGRRLMDIRRRWDPTGRICGYLDHGDASGPRGPSLDISDRASMN

SEQ ID NO: 9792 - protein, 506 aa, Triticum aestivum
MAAPPAIPRRGLFIGGGWREPTLGRRIPVINPATEDTIGDIPAATAEDVELAVAAARSAFLLDGGSRWARASGATRAKYLNAIATKIKEKISYLALLETVDSGKPKDEAVADMDDVAACFEFYAGLAEALDGKQHAPISLPMEEFKTYVLKEPIGVVGLITPWNYPLLMATWKVAPALAAGCTAVLKPSELASLTCLELGAICEEVGLPSGVLNIITGLGPDAGAPIASHPHVDKIAFTGSTATGKTIMTAAAQMVKPVSLELGGKSPLVIFDDVADIDKAVEWAMFGCFFNSGQVCSATSRLLLHEKIAERFLDRLVEWAKNIKISDPLEEGCRLGSVISKGQYEKIKKFISTARSEGATILHGGDRPKHLGKGFFIEPTIITDVSTSMQIWREEVFGPVICVKVFKTESEAVELANDTHYGLAGGVISDDLERCERIAKVIHSGIVWINCSQPTLVQAPWGGNKRSGFGRELGEWGLENYLSVKQVTRYCKDELYGWYQRPSKL

SEQ ID NO: 9793 - protein, 276 aa, Bacillus halodurans C-125
MANNLQATTTLHNGVKMPWFGLGVFKVSEGDEVIQSVKDAIRAGYKSIDTAAVYGNEEGVGKAIAESGVPREELFITSKVWNADQGFDSTISAFNTSLKKLGLDYLDLYLVHWPVKGKYVETWKALEKLYQDGLVRAIGVSNFQVHHLKDVLEAGSIVPMVNQVEYHPHLTQTELHDFCKQNKIQLEAWSPLKQGQLLNDPTIVAIAEAHQKTPAQIILRWDLQNEVVTIPKSVKKDRIISNADIFDFQLTEEDMQKINELNKNERVGPDPDNFDF

SEQ ID NO: 9794 - protein, 108 aa, Hordeum vulgare subsp. vulgare
QEQARKNRRFMVYVHSKGMIVDDEYVIIGSANINQRSMEGTRDTEIAMGAYQRQYTWANKISAPRGQVYGYRMSLWAEHIGAIEEDFNHPESIECMRRVRHLGEHNWD

SEQ ID NO: 9795 - protein, 309 aa, Pseudomonas aeruginosa PAO1
MSPPQRLRAGLLRGCLRLLFRGLVRPPMPVALQRGVLRGLSLATLGAGGVVRERRSLAGVPCEWLRPRGVEARRRVLYLHGGAYLIGSPATHRAITTHLARRCAAEVCAVDYRRAPEHPFPAARDDALAVYLALLEAGHSPRRLLLAGDSAGGHLALSLALELKARGLPLPAGLLLFSPWTDLGCQRLHTPAAGDPLLSRAWLESAVRLLLPADAEPGSAALSPLHADLAGLPPLLVQVGEDELLRDDSLRLAQRAGEQGVAVRLQRYAGCWHVFQAHAGVLASADRALDEAAAFVVECSAEGDRCRTS

SEQ ID NO: 9796 - protein, 441 aa, Ralstonia eutropha JMP134
MTHVFHRNPRQTLPVAVAGSGVELVDSEGRRYLDASGGAAVSSLGHGHPRVIAAIKAQLDTIAYAHTSFFTTEVSETLAQTLAQAAPGDLEHVYFVSGGSEAVEAALKLARQYFVELGQGSRRHFIARRQSYHGNTLGALAIGGNAWRREPFLPLLVPAHHVSPCYAYRDQVAGETDAQYAQRLADELEAKIQELGAENVAAFVAETVVGATAGAVPPVGDYLKRIRAVCDKYGVLLILDEVMSGMGRTGYLFACEEDGVVPDIVTIAKGLGGGYQPIGAMISTRRIYDTIVAGSGFFQHGHTYIGHATACAAALAVQRTIAEDNLLANVRQRGEQLRARLRESLGNHPNLGDIRGRGLFVGVEFVADRDSKATLDPKLKTHARLKSTAMQHGLLVYPMGGTVDGVHGDHVLFAPPFICTAQDIDKIVERFTAAVAAVLPA

SEQ ID NO: 9797 - protein, 226 aa, Zea mays
MTTGEGAEAAAVPRVVSILSALLQRVAERNDAAAAAPPPAAAAGPPVLSAFQGLTKPAISIGGYLERIFRFAGCSPSCYVVAYIYLDRFLRRRPALAVDSFNVHRLLITSVLTAVKFVDDICYNNAYFARVGGISLVEMNYLEVDFLFGIAWDLNVTPAAFASYCAVLQSEMAYLDVAPAPVVEAPPRLHYCYGAAGTSDRPDDPAAVAAAAPACPRPSSQPQLTV

SEQ ID NO: 9798 - protein, 457 aa, Staphylococcus aureus subsp. aureus COL
MAIAVLLNRMFRMEHNPLFEYIYQQKEDIDACYFIIPEEDMSSASDLKAQFYRGTLQRFYQSLHAEKLTPYVMSYDDIISFCKENNISEVVTAGDIMSYHLEEYDILHQRSLFNEARIAVTLIRGNHYFKASKTMNQQGEPYNVFTSFYKKWRPYLRHRDVYHYDLKSFEDFVIASPDDLVFDDIAFGSSQIIEQNKWQHFLDQDIQNYESGRDYLPEVLTSQLSVALAYGLLDIIEIFNDLLARYDEDEANYEAFIRELIFREFYYVLMTQYPETSYQAFKPKYRQIKWSQNEADFNAWCEGQTGFPIIDAAIMELTQTGFMHNRMRMVVSQFLTKDLFIDWTWGEKFFRKHLIDYDAASNIHGWQWSASTGTDAVPYFRMFNPIRQSERFDAKALYIKTYLPIFNQIDAKYLHDTQRNESNLFEQGIELGSHYPRQMVDHQEKRTQVLATFKALD

SEQ ID NO: 9799 - protein, 441 aa, Lactococcus lactis subsp. lactis
MNLMNKEEKMIKNSQIPSEFYKKYNVKKGLRDINGKGVLAGLTNISAIHSFDKEGNQIPGVLEYRAYNIKDIVSDLRSKNRFGFEEMTYLLLFGELPSAKELQEFQILLASKRTLPEFFVRETILTNPSSDVMNSMSRCLLALASYDKKASDISIENVLEQSLALIADFPLLAIYSYQAYIHYFKKESLYIHFPDPELTTAENILRMLRPDCHYSDMEAKVLDIALILHMEHGGGNNSTFTTHVVTSSGTDTYATIAAALSSLKGPKHGGANIKAAKMLENIKENISDYNNDEEIKKYLHQILNKEVFDKQGLIYGIGHAIYSVSDPRFEVFKSYVESLAKEKGLEEEFKLYEKVAFLAPKVISENRKIYKTICPNVDFYSGFVYKILEIPQELFTPLFAIARIVGWLAHRMEELINMNKIIRPAYESILESKAYTRLEER

SEQ ID NO: 9800 - protein, 414 aa, Arabidopsis thaliana
MDRIIGLPDEVLVKILSFVPTKVAVSTSILSKRWEFLWMWLTKLKFGSKRYSESEFKRLQCFLDRNLPLHRAPVIESFRLVLSDSHFKPEDIRMWVVVAVSRYIRELKIYSSHYGEKQNILPSSLYTCKSLVILKLDGGVLLDVPRMVCLPSLKTLELKGVRYFKQGSLQRLLCNCPVLEDLFVLLLRCDDIGMFIVIVPSLQRLSLYLSPRCNLEGFVIVLDTPLEYFKLVDRNYDRHPYMIENMPKLTSAYVEVISADLKSLVESITSVKYLTIFSEVILLSLFVCMLCLVTLHVWDDNLLARLLKDSPKLQELVYVSDKDVSSFDKLLYLIYCTLFFIIQSDFLLDLRIMTILCFPGINLVLFLNAFVQSTKVHQSTKVHLDKILRKTTRQRYCGLHLEKRLSLKDCNNHM

SEQ ID NO: 9801 - protein, 588 aa, Zea mays
  misc_feature (196)..(196): Xaa can be any naturally occurring amino acid
  misc_feature (460)..(460): Xaa can be any naturally occurring amino acid
  misc_feature (487)..(487): Xaa can be any naturally occurring amino acid
  misc_feature (512)..(512): Xaa can be any naturally occurring amino acid
MASHIILPPDDADENHNHQTAAAAAAEEEEEERDELGRDDDDDEHGVPPALPPKAALPFSATCVRISRDSYPNLRALRNASSVSLADAAYVKISEGDFGYVLDDVPHFTDYLPDIPTYPNPLQDHPAYSTVKQYFVNEDDTVPQKVVVQKNSRRGVHFRRAGPRQRVYFGTDEVKACIVTCGGLCPGLNTVIRELXVCGLSHMYNVSSIFGIQNGYKGFYSSNYLPLTPKSVNDIHKRGGTVLGTSRGGHDTKKIVDNIQDRGINQVYIIGGDGTQKGAYEIFKEIRKRGLKVSVAGVPKTIDNDIAIIDKSFGFDTAVEEAQRAIDSAHVEACSAENGIGLVKLMGRYSGFIAMYATLASRDVDCCLIPESPFYLDGEGGLLQYVEKRLKENKHMVIVVAEGAGQDLIAKSLATSDQQDASGNKLLLDIGLWLTHKIKDYFKSKKMEMTIKYIDPTYMXRAIPSNASDNVYCTLLAHSAIHGAMAXGYSFTVGMVNGRHTYIPFYRVTSTXRNKVKVTDRMWARLLSSTNQPSFLSQKDIDEASEADRLANRPPLPTGASSRVVRSFDQSSSCSSNGRDLSALLVHR

SEQ ID NO: 9802 - protein, 155 aa, Nicotiana tabacum
MSSSKMIVLKSSDGETFEVEEAVALESQTIKHMIEDDCADTSIPLPNVTSKILAKVIEYCKRHVDATKTEDKASEDELKGFDSDFVKVDQATLFDLILAANYLNIKSLLDLTCQTVADMIKGKTPEEIRKTFNIKNDFTPEEEEEVRRENAWAFE

SEQ ID NO: 9803 - protein, 392 aa, Brassica napus
RPTRPVRGGELFNKVAKGRLKEDVARKYFQQLISAVTFCHARGVYHRDIKPENLLLDENGNLKVSDFGLSAVSDQIRQDGLFHTFCGTPAYVAPEVLARKGYDAGKVDIWSCGVVLFVLMAGYLPFHDRNVMAMYKKIYKGEFRCPSWFSPELTRLCSRLLETNPEKRFTFPQIMENSWFKKGFKHVKFYVEDDKLCNVVDDDDELETGSVESDRSSTVSESDVEFFKPARRVGGLPRPASLNAFDIYRFSQGFDLSGLFDDDGEGSRFVSGAPVSKIISKLEEIAKVVSFTVRKKDCRVSLEGSRQGVKGPLTIAAEIFELTPSLVVVEVKKKGGDRTEYEEFCNKELKPKLQTLTADEVDDPVAVSAVVDETASGVANSPPVCFLPSDTE

SEQ ID NO: 9804 - protein, 444 aa, Arabidopsis thaliana
MVRRQEEEKKAEKGMRLGKYELGRTLGEGNFGKVKFAKDTVSGHSFAVKIIDKSRIADLNFSLQIKREIRTLKMLKHPHIVRLHEVLASKTKINMVMELVTGGELFDRIVSNGKLTETDGRKMFQQLIDGISYCHSKGVFHRDLKLENVLLDAKGHIKITDFGLSALPQHFRDDGLLHTTCGSPNYVAPEVLANRGYDGAASDIWSCGVILYVILTGCLPFDDRNLAVLYQKICKGNPPIPRWLSPGARTMIKRMLDPNPVTRITVVGIKASEWFKLEYIPSIPDDDDEEEVDTDDDAFSIQELGSEEGKGSDSPTIINAFQLIGMSSFLDLSGFFEQENVSERRIRFTSNSSAKDLLEKIETAVTEMGFSVQKKHAKLRVKQEERNQKGQVGLSVTAEVFEIKPSLNVVELRKSYGDSCLYRQLYERLLKDVGTSSPEQEIVT

SEQ ID NO: 9805 - protein, 360 aa, Schedonorus arundinaceus
MGSTAADMAASADEDACMFALQLASSSVLPMTLKNAIELGLLEILVAAGGKSLTPTEVAAKLPSAANPEAPDMVDRILRLLASYNVVTCLVEEGKDGRLSRSYGAAPVCKFLTPNEDGVSMAALALMNQDKVLMESWYYLKDAVLDGGIPFNKAYGMSAFEYHGTDPRFNRVFNEGMKNHSIIITKKLLELYHGFEGLGSLVDVGGGVGATVAAIAAHYPTIKGVNFDLPHVISEAPQFPGVTHVGGDMFKEVPSGDAILMKWILHDWSDQHCATLLKNCYDALPAHGKVVLVECILPVNPEANPSSQGVFHVDMIMLAHNPGGRERYEREFQALARGAGFTGVKSTYIYANAWAIEFTK

SEQ ID NO: 9806 - protein, 360 aa, Schedonorus arundinaceus
MGSTAADMAASADEEACMFALQLASSSILPMTLKNAIELGLLEILVAAGGKSLTPTEVAAKLPSAANPEAPDMVDRMLRLLASYNVVTCLVEEGKDGRLSRSYGAAPVCKFLTPNEDGVSMAALALMNQDKVLMESWYYLKDAVLDGGIPFNKAYGMSAFEYHGTDPRFNRVFNEGMKNHSIIITKKLLELYHGFQGLGTLVDVGGGVGATVAAIAAHYPAIKGVNFDLPHVISEAPQFPGVTHVGGDMFKEVPSGDAILMKWILHDWSDQHCATLLKNCYDALPAHGKVVLVECILPVNPEAKPSSQGVFHVDMIMLAHNPGGRERYEREFEALARGAGFTGVKSTYIYANAWAIEFTK

SEQ ID NO: 9807 - protein, 506 aa, Burkholderia fungorum LB400
MNHAEMQFLTTEFPYKKQYANFIGGEWVKPVGGEYFDNVSPITGEAFTSIPRSREADVELALDAAHRAKTAWGKTSAADRANILNRIADRMEANLQRLAVAETIDNGKPLRETTAADIPLAIDHFRYFAGAVRAQEGSLSEIDHDTVAYHFHEPLGVVGQIIPWNFPILMAVWKLAPALAAGNCVVLKPAEQTPASILVLVELIQDLLPPGVLNVVNGFGLEAGKPLASSKRIAKIAFTGETTTGRLIMQYASQNIIPVTLELGGKSPNIFFADVMNEDDSFFDKALEGFAMFALNQGEVCTCPSRVLIDEKIYDRFMERALKRVAAITQGHPLDTKTMIGAQASQEQLEKILSYVDLGKQEGAECLIGGERNALGGELSKGYYVKPTVFRGNNKMRIFQEEIFGPVVSVTTFRNEEEALEIANDTLYGLGAGVWTRDGTRAYRFGRQIQAGRVWTNCYHAYPAHAAFGGYKQSGIGRENHKMMLDHYQQTKNLLVSYSDKPLGFF

SEQ ID NO: 9808 - protein, 419 aa, Pirellula sp. 1
MLSLPLMIAASASTVVILGVVMFTVVVIALVLLILAAKSQLVASGPVKIMINGQKEISVPAGGKLLGALADAGIFVSSACGGGGTCAQCKVKVSEGGGDLLATEAGHINKKEAAEGERLSCQVAVKTDMVVEVPPEAFDTQKWECTVKSNDNVATFIKEFVLQLPEGAEVDFRAGGYIQIECPPHEIHYKDFDIAEEYHPDWDQYNIWRYVSKVEEPVVRAYSMANYPGEKGIIMLNIRVASPPPRAPEGTPPGKMSSYIFSLKPGDKATISGPYGEFFIKDSDAEMVYIGGGAGMAPLRSHIFELFKRQKTDRKVSYWYGGRSLRELFYIEHFREIEKDFPNFKFNIALSEPQPEDNWDGYVGFIHQVLLDNYLSKHPAPEDIEYYICGPPMMNAAVFRMLDDLGVEPENIAYDDFGG

SEQ ID NO: 9809 - protein, 360 aa, Schedonorus arundinaceus
MGSTAADMAASADEEACMFALQLASSSILPMTLKNAIELGLLEILVAAGGKSLTPTEVAAKLPSAANPEAPDMVDRMLRLLASYNVVSCLVEEGKDGRLSRSYGAAPVCKFLTPNEDGVSMAALALMNQDKVLMESWYYLKDAVLDGGIPFNKAYGMSAFEYHGTDPRFNRVFNEGMKNHSIIITKKLLELYHGFQGLGTLVDVGGGVGATVAAITAHYPAIKGVNFDLPHVISEAPPFPGVTHVGGDMFKEVPSGDAILMKWILHDWSDQHCATLLKNCYDALPAHGKVVLVECILPVNPEAKPSSQGVFHVDMIMLAHNPGGRERYEREFEALARGAGFTGVKSTYIYANAWAIEFTK

SEQ ID NO: 9810 - protein, 142 aa, Zea mays
MALRKAFDKPVSLVTAVAVRHLAGTEAARRLGTKLHSFYVGLKGSPDLKAAREVAEYLGTLHHEFHFTDDIDAIEDVIYHTEAYDVTTIRASTPMFLMSHKIKSLGVKMVISGEGSDELFGGYLYFHKAPNKEELHRETCRK

SEQ ID NO: 9811 - protein, 485 aa, Pseudomonas fluorescens PfO-1
MAGAQTHMHTALLIDGELVAGQGFVEPILNPATGEVLTQIAEASTEQVEAAILAAHRAFAEWSRTTPQQRSNLLLEIANAVEKHADHLARLEALNCGKPLHLARQDDLTATIDVFRFFAGAVRCQTGQLSGEYVPGYTSMVRRDPIGVVASIAPWNYPIMMAAWKIAPALAAGNTLVFKPSEHTPLSILALAPALAEILPRGVINIVCGGGEGVGSHLVGHPKVRMVSLTGDIVTGQKILQAAAKTLKRTHLELGGKAPVIVCNDADLKAVVEGVRTYGYYNAGQDCTAACRIYAQAGIHDKLVAELGAAVSSLRFAGKRDADNEIGPLISTRQRDRVASFVERALGQPHIERVTGAAVHSGAGFFYQPTLLAGCKQSDEIVQREVFGPVVTVTRFDELAQAVDWANDSEYGLASSVWTQNLDKAMQVAARLQYGCTWINSHFMLASEMPHGGLKRSGYGKDLSSDSLQDYSVVRHIMARHGQHL

SEQ ID NO: 9812 - protein, 360 aa, Schedonorus arundinaceus
MGSSAADVAASADEEACMYALQLGSSSILPMTLKNTIELGLLETLMAAGGKSLTPTEVAAKLPCAANPEAPDMVDRMLRLLASYNVVSCLVEEGTDGRLSRRYGAAPVCKFLTPNEDGVSMAALALMNQDKVLMESWYYLKDAVLDGGIPFNKAYGMSAFEYHGTDPRFNRVFNEAMKNNSIIITKKLLELYDGFQGIGTLVDVGGSVGATVAAITAHYPAIEGINFDLPHVISEAPPFPGVTHVGGDMFKKVPSGDAILMKWILHDWSDQHCATLLKNCYDALPAHGKVVLVECILPVHPEAKPSSQGVFHVDMIMLAHNPGGRERYEREFEALAKGAGFAGFKSTYIYANAWAIEFTK

SEQ ID NO: 9813 - protein, 512 aa, Mycobacterium avium subsp. paratuberculosis str. k10
MLSKCSALSAVGAGHDGSPEDSPEERDQMTVQAVLDDIRKRPGTGDVIAVIDPATEEKITEFTDCGAEAVDEAAARAKASFESGVWSQLPGRERAKILWRIGDLIDEHAEEFAQLDSLNTGMPLLQAQLQMSTCSEFFRYYAGWCSKINGTAYDVKTDGIATDTFVNMHAYTLKEPYSVVGLIFPWNGPIFNANAKLAPALAAGCSLLVKPAEETPLSALLLDRLVHEAGVPEGVVNLLTGYGHTAGAAITAHPDVEKVAFTGSTEVGKEIVRASAGNLKKVTLELGGKSPVLIFDDADLDKAILMASLGIFVHSGQGCVCGSRIFVQRGVYDRVVEGIAMMANTFKLGAPSEEGCVSGPLISQKQLNRVMGFIDEGKNDGVEVVTGGYRLDRKGYFVHPTVLTNVDPGMRLYQQEIFGPVVAILPFDDEDEAVAMANDTTYGLAATAWTENLGRAHRIVKRLQAGSVQVNCQLVFDHDVPFGGYKQSGWGHEFGKEGLEIYLKTKSVWAQL

SEQ ID NO: 9814 - protein, 407 aa, Vibrio vulnificus CMCP6
MDIILGVVMFTLIVLALVLVILFAKSKLVPTGDITISINGDADKSIVTSPGGKLLSALAGAGVFVSSACGGGGSCGQCRVKVKSGGGDILPTELDHITKGEAREGERLACQVAVKTDMDIELPEEIFGVKKWECTVISNDNKATFIKELKLQIPDGESVPFRAGGYIQIEAPAHHVKYADFDVPEEYRGDWDKFNLFRYESIVKEDIIRAYSMANYPEEFGIIMLNVRIATPPPNNPDVAPGQMSSYIWSLKEGDKCTISGPFGEFFAKDTDAEMVFIGGGAGMAPMRSHIFDQLKRLKSKRKMSYWYGARSKREMFYVEDFDGLAAENDNFVWHCALSDPLPEDNWDGYTGFIHNVLYENYLRDHDAPEDCEYYMCGPPMMNAAVIGMLKNLGVEDENILLDDFGG

SEQ ID NO: 9815 - protein, 300 aa, Saccharomyces cerevisiae
MVNNSQHPYIKDGWFREINDKSFPGQAFTMTVDSILYEARSEFQDILIFRNKVYGTVLVLDGIVQCTEFDEFAYQEMITHIAMFAHSNPKRVLIIGGGDGGVLREVAKHSCVEDITMVEIDSSVIELSRKFLPTLSNGAFDDERLDLKLCDGFKFLQDIGASDVHKKFDVIITDSSDPEGPAEAFFQERYFELLKDALNPNGVVIMQSSENFWLNLKYLHDLKNTAKKVFPNTEYCYTMVPTYTSGQLGLIVCSNNANIPLNIPQRKISEQEQGKLKYYNPQIHSSAFVLPTWADKVINE

SEQ ID NO: 9816 - protein, 481 aa, Candida albicans SC5314
MLLHHTLGNGDFTVFHRMSTNICETTAFLDDLATACNEIDRCLRTAYTMQRPVYIALPSNMVDMKVPQAMLEKSIDLSLEPNNIQSQNEVIDRILGMVSKASNPIVLVDACASRHDCKKEVKQLVETTQFPVYVTPMGKGMIDEGGIGGEDLADASAFKNLASNLSSGTSVASRYGGVYIGSLSKPEVKEGIENSDLIFSCGALLSDFNTGSFSYSIGTKNVIEFHSDHAKIKSAIYSGIKMKELMQALNKKISSVLTNYVPKSVPKVKLVNAPTELSAPLTQAWFWTRVSSWFKEEDIIITESGTAAHGILEARFPNNVVGISQILWGSIGYSVGATLGASVAAKEVDPKKRVILFVGDGSLQLTMQEVSTMIKNGVHPYIFVVNNAGYTIEKLIHGLNAKYNNIQPWNHSQILSLFNAKDSQSAKISTVGEADDLFRNKYFGVNSKIRLIELMFSSLDAPKALVQQAKAAADVNRGTTD

SEQ ID NO: 9817 - protein, 498 aa, Bifidobacterium longum DJO10A
MSITLRNIKVWNTGEVIDLVVPGTAAAYFADTSAVADGADIDATGLTVAPGFEDPHVHFRDPGQTYKESMVSGCRASASGGYTNVLIMPNTLPALDGQTVSGPEATGAKEVLDAGFDNVIDFLQQYDTAHDVQLPVRYDLCVCASKDRAGHEASDVADWLKYVPGFEDDAKTPAMLTHPITAISDDGSAVTPEILDQVLENVKASDLYLIEHCEHHDTGAVNEGPVSRELGVPGIPEDTELKIVARDIEAARRTGVHVHFQHVSTAISFEAIRRAKAEGLPITCETAPHYLALSDEALLKYGTLAKMNPPLRSEADRKATIAAIADGTVDLLATDHAPHTLAEKELGFLEAPNGIIGLECAYGVCHKVLVDGGFISDERLIELMSVGPAELMGHVPTDVAALVEDYAEPAPTGDDPDGVIAGESDAQPQREGVNRLLDLSRVDDADNVDLVVLNTAEEWTVDPEQFHSKARNTPFGGWQVTGRPLATIIGSQLMFSRL

SEQ ID NO: 9818 - protein, 250 aa, Zantedeschia aethiopica
MGKSYPAVSEEYQKAVDKAKKKLRGLIAEKNCAPLMLRLAWHSAGTFDVCTKSGGPFGTMRLAEELGHGANNGLDIAIRLLEPIKEQFPILSYADFYQLAGVVAVEITGGPEIPLNPGREDKPVPPPEGRLPDATKGSDHLRQVFGQQMGLCDQDIVALSGGHTLGRAHRERSGFEGAWTSNPLIFDNSYFTELLTGEKEGLLQLPSDKALLSDPVFRPLVEKYAADEDAFFADYSEAHLKLSELGFPEC

SEQ ID NO: 9819 - protein, 117 aa, Nicotiana glauca
MAKVALLVVVCMAAVAVMLTPQADAAISCGQVVSSLTPCISYVTKGGAIPAPCCSGIKSLNNQATSTPDRQTACNCIKSAVGSISGINFGLASSLPGKCGVNLPYKISPSIDCSTVQ

SEQ ID NO: 9820 - protein, 116 aa, Zea mays
TCRLLIVVYGILWGFSAPGPGADPKVDYACTPEEVQQHFQACGTVNREGVQEALNLNESELHGRQIKVAPKRTNVPGMKQRPPRGLLDSAALCATDLTSEVRGRVMKFNAKPAHGH

SEQ ID NO: 9821 - protein, 465 aa, Chlamydomonas reinhardtii
MGSCLAKPAESAEQKKASSVPSPPPAPAPQPVQQAAAPAPKDSGDVKPGQQATPVPPPSPPPQPKPAPPAQPAPAPAAKVVEAIPAVADEKSPQGKQPRRSQEHDNGVKAEEIELVKQKSTEPQPSASATAAVATPKAIEPAMEPKVAAPSAPAAAPAPAQAPAAAPTPARPGSKLRTDVKLRDLYKLGKTLGTGGFSVVKLATDRGTGVEYACKIMALPPVGQEVGENENTREDIFKEIDLLCGMNHENVIFLKEYFEEGNKVYLITELLTGGELLEAVLKRGSYTEAEARLCFVQVLRGIEYLHSKNVVHRDLKLENLLLAKQDDISLVKIADFGLAKHAVNGMQTICGTPQYVAPEVIVGAKGHVYGPGVDMWSAGVVLYILLGGYPPFWSDSEPQLFDMIRKGKYSFGDPVWNKVSEGAKDLIRKLLVVDPTKRLSATEALQHQFILEGNFNPPSTPKGPR

SEQ ID NO: 9822 - protein, 1870 aa, Gibberella zeae PH-1
MKGSDSLRRANRPAANFDLPPVALAQAQQQTQVQAQAQAQSFQSQSQPQESITNTVTSTSPEITNASLHGQAQAKAQALTTARFRSSSRPSLQDLALVDGTSTSNNHDLPPAYALSSSSSSTGPSSFSYPPAHVHPRPSTANAAATTHTHTRPRPLGPSSSDIATAEQAQFLRIHPVSSTSSLRPRSSTTSASAVASASASTSPSHTPNSLLRQHTSPPSAVDNNSAHFVPRGGLPPAPSIMYQANQRHVSGTDPSRPYQVPPPPPPPMGGPNNGHMPNMMNLPPPPPLPRYNTAPGSNGLSLPPPPGPPPASALGQQPPWHGAFGRMYDSRSGFNIPPPPPSSQHQPYNPKLHAQIAAGQTVSIPPPPPPNEAMSATYIPQGDTYGEGVGIPAFGLEDPTLTVNSQTLRPVTTPQSGTDTNATTPMDEATRERLYAANNAQPRGTSNSSNPTPPGSIPPEIAAQWPLDTVLLWLAQNQFSKDWQETFRALNLHGAQFLELGSGHGGRGNFGMMHQQVYPRLAQECTNSRTGWDQPREREEGKRMRRLIRSIVTGRPADVSKVSTSHGRKESLNGGHGNNLPSAGTDPMDSPNTPLTAPGPGFSSRRFSQTRSTTLPNSISASNINSESNHRNILKHVDTDGARRHSPNVSESSEATFRAPAVHSASPTGSPGIPPALYTSTTTPTIAQSPSAIKAGHRSRSSMDSVASVAAIYGSGVPSDAASLLNRNMNLGDIVHGRSHDARSRHSPSDGGDRSAGGETPSSAKDSNRLLSFLSRKKKQTKDDGAYPSPEDMNGSPTSPHGSFRPVGLGVRGSNGSDTNIDLSGSTLGDDRNGSTLNMRWNKISPVRTYVLATMDYWNYRMCDITEAETATEIRQVICMHLGLGDYENSHIYLTEAGKFEHVDPLDDPSLITVRRAKGDPLGTLKFFVTPPGVAPISSLSVKAEVPIILSPSYLSPGTPVEDAQQMSRQRSSSSPPTSRSNTLTNEKNEDKIAREAKQYRAEIERKQQEYLAKRKQAAMKGSPSETLGPGIVGRNVDFDQPRESPYEDKRPEPLFPQRRPPAPPSDPSATLIKANSLSRKTGASMRASSSSLEGYPSKRYPENEMAEKTKKANKQAPPAPGIGAALAGMGRNLSAIGQSAKNGRASSPSRSSTHSIPGGKDTFSTVEPSQGRGSPSTTSSSKLTTGNVTWNKKNLGFIVPDYSPSDSSFLLSPSPTVDAKFNATVPRAMSPAEMSPNSSRSRTSFPPNQQSPTHRRASHGPEPEFEDTDVHFSKPAPAPPADDDSDDSDDGLFAIPIANQNKGKAAAANADANGHSKRPSLHVNTERSRKGLSVAFKSPKSFGSGMDSNEDSGRQNPTTPHSETWEPEEKDKESKLGRRKSFIEKDVWANRPPTDALINNLDDFFPNLDLDQPVLDEPGESGMPPSPIAESSETNIDQQAQNVAPPQPSYPQHVPPAIPPTRQPSLYNENDTLGSDESTLKALDQHRPTSVAQRSIRRSGGLGRMKSIREVARGAHEANKRTTSTNQGQAATTNIMRRKSTKMFNANIVQIRPDRRGSVVMPQIPQDTVPKRQTTFRWFKGQLIGKGTYGRVYLGMNATTGEFLAVKEVEVNPKAAGGDKNKMKELVAALDQEIDTMQHLDHINIVQYLGCERKETSISIFLEYISGGSIGSCLRKHGKFEESVVSSLTRQTLSGLAYLHREGILHRDLKADNILLDLDGTCKISDFGISKKTDNIYGNDKTNSMQGSVFWMAPEVIRSQGEGYSAKVDIWSLGCVVLEMFAGKRPWAKEEAVGAIYKIANGERPPIPEDIQDTLGPLAVAFMMDCFQVNPFDRPTADVLLSQHPFCEVDPHYQFYDTALYHRIKSFK

SEQ ID NO: 9823 - protein, 342 aa, Lycopersicon esculentum
MADECAAFMKGTELPVKRPREEEAETEMEAANNSNNGCEKEESSPYISSVLPGWFSEISPLWPGEAHSLKVEKILFQGKSDYQNVLVFQSSTYGKVLVLDGVIQLTERDECAYQEMITHLPLCSIPNPKKVLVIGGGDGGVLREVSRHSSVEQIDICEIDKMVVEVAKQFFPDVAVGYEDPRVNLHIGDGVAFLKNVPAGTYDAVIVDSSDPIGPAQELFEKPFFESIAKALRPGGVVSTQAESIWLHMHIIEEIVANCRQIFKGSVNYAWTTVPTYPSGMIGFMLCSTEGPAVDFKNPINPIDDESPAKSIEPLKFYNSEIHQASFCLPSFAKRVIETKGK

SEQ ID NO: 9824 - protein, 240 aa, Atriplex hortensis
MSYSYPPPLPSNTLNNFLSPKPVTMKTTGGPPKPTKLYRGVRQRHWGKWVAEIRLPKNRTRLWLGTFDTAEEAALAYDKAAYKLRGDFARLNFPNLRHEGSHIGGEFGEYKPLHSSVNAKLEAICESLAKQGNEKQGKSGKSKKKDVANNNNNTSSSSSSSCCTTATAAADAPQQQQRMPENGGDVKTESTSDSEVGSGGSSPLSDLTFGDNEEMGSENFLLESCPSHEIDWDAILSSES

SEQ ID NO: 9825 - protein, 331 aa, Brassica napus
MSNVTADPTADGPSTAVAVSNSTAIQTSPPTDRPVRVYADGIYDLFHFGHARSLEQAKKSFPNTYLLVGCCNDETTHKYKGRTVMTAEERYESLRHCKWVDEVIPDAPWVINQEFLDNHRIDYVAHDSLPYADTSGAGKDVYEFVKKVGRFKETMRTEGISTSDIIMRIVKDYNQYVMRNLDRGYSREDLGVSFVKEKRLRVNMRLKKLQERVKEQQEKVGEKIQTVKMLRNEWVENADRWVAGFLEIFEEGCHKMGTAIRDRIQERLIRQIPRNRLENGQDDDTDDQFYEEYFDHDMGSDEDEEERYYDEEEDVEEEKYKTVKPDAKDDK

SEQ ID NO: 9826 - protein, 110 aa, Glycine max
IQALEFKPIFLHLRKVRRMAGIRDAKSILVKLEWFLNWVTFFVARSVPHVLITAKLIKDAYKFEKGMELPLALLGMAGMNLLNIGLGIDLLKAFKRERKSQQGNLHHHRE

SEQ ID NO: 9827 - protein, 170 aa, Zea mays
  misc_feature (93)..(93): Xaa can be any naturally occurring amino acid
  misc_feature (118)..(118): Xaa can be any naturally occurring amino acid
MHRHVTSGRASGTDGSPFSYQMVVKSRHQRVAEGRSRLARLILGQALHLVAGGLLLWLSLSKGAAVNKFAVLSMAAAFLAIGVGELGRMRTMXLLLRLYSSSPSIAVAFSVTCIFRSXLFLKVMKQNTEAISSYEMLDAVRVALGIPLQMVVIATTTRLLQNMSPPKRAS

SEQ ID NO: 9828 - protein, 175 aa, Crocus sativus
MGKSSPTVSAEYLKAVEKCKRKLRGFIAEKNCAPLMLRIAWHSAGTFDCKSKTGGPFGTMRHKAELAHGANNGLDIAVRLLEPIKEQFPIISYADFYQLAGVVAVEITGGPDVPFHPGREDKPEPPVEGRLPDATKGCDHLRTVFGEQMGLSDKDIVALSGGHTLGRCHKDRSGF

SEQ ID NO: 9829 - protein, 344 aa, Arabidopsis thaliana
MLTCIACTKQLNTNNGGSTREEDEEHGVIGTPRTKQAIKSLTSQLKDMAVKASGAYKNCKPCSGTTNRNQNRNYADSDAASDSGRFHYSYQRAGTATSTPKIWGNEMESRLKGISSEEGTPTSMSGRTESIVFMEDDEVKEWVAQVEPGVLITFVSLPQGGNDLKRIRFSREMFNKWQAQKWWVENFEKVMELYNVQFNQQSVPLQTPPVSEDGGSQIQSVKDSPVTPPLERERPHRNIPGSSGFASTPKLSSISGTKTETSSTDGSARSSSVDRSEEVSVSNASDMESEWVEQDEPGIYITIRALPDGNRELRRVRFSRDKFGETHARLWWEQNRARIQQQYL

SEQ ID NO: 9830 - protein, 447 aa, Triticum aestivum
FLRRRDRIAERLFNALLARPSCHGCTASTGSVPPATPAVAEDKGSVRRVPEKESKVDSSSLGAPGGGALGGGISEDEDSDSEDDERLRRAAASNYGHNYDDDNDVEEEQDAAAPAEEDHHAEDDDPEAEELEALTNEIDEESQIVGEVLRIKELLLHKQDHSDATLFDSLRRLQLMQLSVSTLKATEIGRAVNGLRKHSSQQIRHLALALIQDWKILVDEWVSTTVAARAGGPPRHGAPPAPENGQGSPPPPPLHAGAFFAPETAALQPPEFFDEMDEDGNLRHNNDVSPWKQEGKQWQEACKPFNCVKTRTYSTCSLIPGSMRPMKAATQQKPIGEMKYKQTQEHFGVERKPTMGHVDKSRLRAQPSSGVRLESARPKTQDGLESNVRLEAAKRRLQERYQEAENAKKQRTIQVMELGDIPKPKSNTRQPMVKSRNNIRSRVLGRR

SEQ ID NO: 9831 - protein, 90 aa, Zea mays
MRCLILFPSSSSWSLAAGRSGGGLYDEEYVQKRMDRAYEVEELGANLTKKMHPSGRDDISVLAMQRLFNHQPNGPTTPVDMALDYFIYDY

SEQ ID NO: 9832 - protein, 368 aa, Clarkia breweri
MGSTGNAEIQIIPTHSSDEEANLFAMQLASAAVLPMALKAAIELDVLEIMAKSVPPSGYISPAEIAAQLPTTNPEAPVMLDRVLRLLASYSVVTYTLRELPSGKVERLYGLAPVCKFLTKNEDGVSLAPFLLTATDKVLLEPWFYLKDAILEGGIPFNKAYGMNEFDYHGTDHRFNKVFNKGMSSNSTITMKKILEMYNGFEGLTTIVDVGGGTGAVASMIVAKYPSINAINFDLPHVIQDAPAFSGVEHLGGDMFDGVPKGDAIFIKWICHDWSDEHCLKLLKNCYAALPDHGKVIVAEYILPPSPDPSIATKVVIHTDALMLAYNPGGKERTEKEFQALAMASGFRGFKVASCAFNTYVMEFLKTA

SEQ ID NO: 9833 - protein, 122 aa, Sorghum bicolor
TPSAAVVKEELFGPVLYVMKFQSLKEAIEINNSVPQGLSSSIFTKRPEIIFKWLGPHGSDCGIVNVNIPTNGAEIGGAFGGEKATGGGREAGSDSWKQYMRRATCTINYGSELPLAQGINFG

SEQ ID NO: 9834 - protein, 307 aa, Zea mays
MAFLNMEQQTWAFTFGILGNIVSLMVFLSPLPTFYRVYRNKSTEGFQSTPYVVTLFSCMLWILYALLKPGAELLVTINGVGCVVETVYLAMYLVYAPKAARVLAAKMLLGLNVAVFGLVALVTMLLSDAGLRVHVLGWICVSVSLSVFAAPLSIMRQVIRTKSVEFMPISLSFFLVLSAVVWFAYGALKKDVFVAFPNVLGFVFGLAQMALYMAYSRNRKPAAALVILPEQSKEEAAEGKASCGGAEVHPIDIAEVHDLQAVVVDVDVEPVTYAAASGMVDGSVGRPRAPEQLVIKPDMVTVIAAEA

SEQ ID NO: 9835 - protein, 583 aa, Zea mays
SRPAGPGLHADLLYEPWEVLDDDGFPFTMFAPFWNRCLCMPDPAAPLLPPKRINSGEFPGRPTRPGDLSRCPWDELIFEDESERGSNALLARAWSPGWQNADKALTAFLDGPLVDYSANHKKADSASTSLLSPYLHFGELSVRKVFHLVRMKQLMWSNDGDRAGEESCTLFLRAIGLREYSRYLTFNHPCSLEKPLLSHLRFFPWVVDEVHFKVWRQGRTGYPLVDAGMRELWATGWAHDRIRVVVSSFFVKVLQLPWRWGMKYFWDTLLDADLESDALGWQYISGSLPDGRELDRIDNPQFEGYKFDPHGEYVRRWLPELARLPTEWIHHPWDAPESVLQAAGVELGSNYPRPIVELDAANSRLQDALSEMWELEAASRAAMENGMEEGLGDSTDEPPIDFPQELRMEVDRQPAQPAIIHTPVVAGWRREDQRVPSMTSSLIRAETELTADFGNTSEDSRPEVPSNIHLQARPEREETVDGATGNAVRVNGNQQQQNLQNNMHRVLGIAPSISEASSSWTGRDGGVVPVWSPPAASVHSDPYTADEADISSRSYLDRHQQSNTMMNWSQLSQSLTTGWEVDN

SEQ ID NO: 9836 - protein, 264 aa, Solanum tuberosum
MCGGAIISDYEPAGNFYRKLSARDLWAELDPISDYWSSSSSSSTVENPYSAQSPVTHSVDKPKKSDSGKSNQLKKGNKTVKVEKEKSTGPRQRKNKYRGIRQRPWGKWAAEIRDPQKGVRVWLGTFNTAEDAARAYDEAAKRIRGNKAKLNFPAPSPPAKRQCTSTVAADPPPALLLESSNIISYNNSPLMNFGYDVQSQTPYYPMEMPVASDDYELKEQISNLESFLELEPADSSDQFSGIVDPDPLNVFLMEDFASTQHQFY

SEQ ID NO: 9837 - protein, 479 aa, Sinorhizobium meliloti 1021
MNDMCLTNLQSGITMVSAAAIEAFTARLRGRVLVATDAAYDEARTIWNGMIDRRPGLIVQCAGAADVVNAVRFAAENQLLVAVRGGGHNIAGNAVCDGGMVIDLTPMKSVRVDATTKTAWVEPGATLADLDMETQAFRLALPTGINSTTGIAGLTLGGGFGWITRKFGLTIDNLLSADVVTANGELVRASPTEHRDLFWAIRGGGGNFGVVTAFEFRLHELGPEVLSGLVIHPFAEAESVLQQYRQALENAPDELTCWVVMRQAPPLPFLPTEWHGKEVVVLAMCYCGDLEAGEKAMAGLRAIGNPIADVVSPHPFVGWQQAFDPLLAPGARNYWKSHDFMELSDQAIEILTESIRQLPGQECEIFIAHVGGAAGRVAPEETAFPQRNSHFVMNVHGRWRDPAMDQACIDWARHLFEAAKPHAAGTAYVNFMPEDEMDRVEAAYGANYGRLVEIKRHYDPLNLFRMNQNVRPIEERGAA

SEQ ID NO: 9838 - protein, 254 aa, Methanosarcina acetivorans C2A
MTSYKVLVRDVIKKADVLLEVIDARFPDETRNNEVEKEIIRLKKPFIIVINKCDLVSKDKLEKTKARLSRIAPTVFVSGKARFGTTMLRHQILASACIKGQDILVGTLGYPNVGKSSVINGVTGRHRASTSPVSGHTKGVQHVGAGSRIMFVDTPGVIPFDENDDYVQGLLGIKDATHLKDPIGVALKIIEKMLVENKTALEVFYNVTLETQDSYSGLELIGKQCNFLQKKGEVDEMRTAIRIINDWQTGLLLI

SEQ ID NO: 9839 - protein, 133 aa, Brassica napus
MEGDGVKGLACQKTMDGNASNGNGVEKTVPSCCLKAMSCLPEEDAKCHSTVVSGWFSEPPHLRSGKRGKAVYFNNPMWPGEAHSLKVEKVLFKDKSDYQEVLVFESATYGKVLVLDGILQLTEKDEFAYQEMI

SEQ ID NO: 9840 - protein, 175 aa, Azoarcus sp. EbN1
MRARSFRHLLPSAVSALLFTLILAVAAPPAFAADEAAPLVTDPQLEERVMDLSHKLRCLVCQNQSIAESNAPLALDLRNQVREQLAAGKSEEAVVDYLVARYGDFVLYLPPFKGITLLLWLGPALLLVAGAGWLGWRLRRRAEEVRSAPHLTRDERARARALLDGTSPSSEEPRS

SEQ ID NO: 9841 - protein, 508 aa, Glycine max
MDYHTTVLLLITFVSATIILIFIRRLFNQTSESEYAKLPPGPRPFPIIGNILELGTNPHIALTKFSKIYGPLMTFKLGRITTIVISSPQVAKEVLLENGQVLSSRTIPHSVHALDHHIYSTVWLPPSAQWRNLRRVCATKIFSPQLLDSTQILRQQKVKDLLDFVKERCKKGGVVDIGEVVFTTILNSISTTFFSMDLSDSTSEKSHEFMNIIRGIMEEIGRPNVADLFPILRPLDPQRVLARTTNYFKRLLKIIDEIIEERMPSRVSKSDHSKVCKDVLDSLLNDIEETGSLLSRNEMLHLFLDLLVAGVDTTSSTVEWIMAELLRNPDKLVKARKELSKAIGKDVTLEESQILKLPFLQAVVKEALRLHPPGPLLVPHKCDEMVNISGFNVPKNAQILVNVWAMGRDPTIWENPTIFMPERFLKCEIDFKGHDFKLIPFGAGKRICPGLPLAHRTMHLIVASLVHNFEWKLADGLIPEHMNMEEQYAITLKKVQPLRVQATPIKRD

SEQ ID NO: 9842 - protein, 126 aa, Zea mays
DARDIFASDSIELLRRSGIDLRLNAERGVDARRFAELLMSSGVVLNDSVYWVTFHAGYDFGLHGGLNKLAELLDVERVGESHQAGSDSLVTSCAFWKLKDSFFTGSTEKYAGVLYGLNAEIDVSAH

SEQ ID NO: 9843 - protein, 311 aa, Triticum aestivum
  misc_feature (146)..(146): Xaa can be any naturally occurring amino acid
  misc_feature (178)..(178): Xaa can be any naturally occurring amino acid
MKTLLILTILAMATTIATANMQVDPSSRVQWPQEQPPPQSQQPFSQQPQQIFPQPQQTFPHQPQQAFLQPQQTFPRRPQQQFPQPQQPQQPFPQPQQPQLPFPQQPQQPFPQPQQPQQPFPQSQQPQQPFPQPQQQFPQPQQPQQXHSPQQQQWMIQSFLQQQMNPCKNFPLAAMQPXCHWVSSLVSMILPRSDCKVMRQQCCQQLAQIPQQLQCAAIHGIVHSIIMQQEQQQQQQQQQQQQQQQGIQIMRPLFQLVQGQGIIQPQQPAQLEVIRSLVLGTLPTMCNVFVPPECSTTKAPFASIVADIGGQ

SEQ ID NO: 9844 - protein, 186 aa, Brassica napus
  misc_feature (42)..(42): Xaa can be any naturally occurring amino acid
LDPRVRTGAKLSRSEHSMGASSEPKSIYDFTVKDAKGNDVDXSTYKGKVLLIVNVASQCGLTNSNYTELAQLYQKYKDHGFEILAFPCNQFGNQEPGSNEEIVQFACTRFKAEYPIFDKVDVNGDSAAPIYKFLKSSKGGLFGDGIKWNFAKFLVDKDGNVVDRYAPTTSPLSIEKDLKKLLGVTA

SEQ ID NO: 9845 - protein, 361 aa, Caulobacter crescentus CB15
MSDGLEGVIAAQTVLSDVDGAHGRLVIRGYAVEDLAGRTRFEDAAHLLLDGFFDDAPSDLSSALGEARVGVFAEVAALDEGLARRDPVEALRALLARIPDGDDLKTALRLIAAPAVFTPAVLRVANGDAPIAPDPALSHAADILRMIRGVPATDAEAAALDAYLVTVCDHGLNASTFAARVVASTRAGLTSAVLAGLSALKGPLHGGAPGPVIDMLDAIGTPENARPWLERALARGDRLMGFGHRIYRVRDPRADALKAAVRRLSSASGGLPGRLAFAEAVERAALEILREHKPDRPLDTNVEFYTALLLEALGLPPSSFTCVFAMGRVAGWLAHAREQLAGGRLIRPQSVYVGPEVRVAA

SEQ ID NO: 9846 - protein, 475 aa, Bordetella pertussis Tohama I
MYEQLALYIDGEFLTGDGRRTQDVVNPATLEVLGQLPHASEADLDRALAAAQRAFETWKRTSPMERAAILRKVGQLSRDRAQEIGRNMTLDQGKPLAEAVGEVASCSEHADWHAEECRRIYGRVIPPRNPDVRQFVVREPIGVCAAFTPWNFPYNQAIRKIAAALGAGCTVVLKGPEDSPSAVMAIARMFHEAGLPKGCLNIVWGEPAKISDYLIRSPIVRKVSFTGSVPVGKQLAALAGAHMKRVTMELGGHSPVLVFDDADVDRAAEMLARFKVRNAGQVCVSPTRFYVQNGAYEQFLARFTEVLKNIKVGDGLEKGTDMGPLAHERRVPAMSTFVDDALKHGGKVVLGGDAPDRKGYFFSPTVVTELPDNAMLMTEEPFGPLAPVVRFTDTDEVLRRANSLPFGLSSYVFTNSLKTATKVSNALEAGMVNINHFGSALAETPFGGIKDSGIGSEGGLETFDGYLVTKYITHI

SEQ ID NO: 9847 - protein, 388 aa, Caulobacter crescentus CB15
MDAEQVLERLGIRPQTLYAYVSRGRIEAAAHPSDPRRSLYRASDVTALARKKARGRRVADVAAEAIAWGEPVLPSAITTVSGGKLWYRGEDAAGLADQGLTLENVARLLRGGHGAALKASSRPPPPATDSARSRMFLTLAERAGREPPARGRAPLALAMEAADLLDAIVDAATGQAGDGPAHQRFAHAWNLTADGADLVRRALVLMADHELNASTFAARVAASTGASLSAACLAGLSALSGPLHGGMAARVEALVEEADRRDAARAVSSRLEQGASLPGFDHPLYPGGDPRAAALLARFEPPEPLTALWQATRAATGLAPNIDFALVALARGLALPQDAPFILFATARSAGWTAHAIEQLQTGRLIRPRARYIGTVPSAAGYSPSSSS

SEQ ID NO: 9848 - protein, 398 aa, Pseudomonas putida
SGNRGVVYLGSGKVEVQKIDYPKMQDPRGKKIEHGVILKVVSTNICGSDQHMVRGRTTAQVGLVLGHEITGEVIEKGRDVENLQIGDLVSVPFNVACGRCRSCKEMHTGVCLTVNPARAGGAYGYVDMGDWTGGQAEYVLVPYADFNLLKLPDRDKAMEKIRDLTCLSDILPTGYHGAVTAGVGPGSTVYVAGAGPVGLAAAASARLLGAAVVIVGDLNPARLAHAKAQGFEIADLSLDTPLHEQIAALLGEPEVDCAVDAVGFEARGHGHEGAKHEAPATVLNSLMQVTRVAGKIGIPGLYVTEDPGAVDAAAKIGSLSIRFGLGWAKSHSFHTGQTPVMKYNRALMQAIMWDRINIAEVVGVQVISLDDAPRGYGEFDAGVPKKFVIDPHKTFSAA

SEQ ID NO: 9849 - protein, 159 aa, Triticum aestivum
  misc_feature (88)..(88): Xaa can be any naturally occurring amino acid
FSWADAWADAWDLWFPAGALVLRFRRRLKTAERVMGTVKRFNVTKGFGFIFVSPEDGSQDLFVHQAAIKADGYRSLNENDALEFEVIXTGDDGRTKASDVTAPGGGALAGGSRPGHRGGDRGGRGGYGGGGYGGGGGGGGCFSCGESGHFSRECPNKAH

SEQ ID NO: 9850 - protein, 389 aa, Euphorbia esula
MEDASATTTAPSDSLNNHQLPPTAGIENIPATLSHGGRFIQYNIFGNIFEVTAKYRPPIMPIGKGAYGIVCSALNSETGEHVAIKKIANAFDNKIDAKRTLREIKLLRHMDHENVVAIRDIMPPPQREVFNDVYIAYELMDTDLHQIIRSNQALSEEHCQYFLYQILRGLKYIHSANVLHRDLKPSNLLLNANCDLKICDFGLARVTSETDFMTEYVVTRWYRAPELLLNSSDYTAAIDVWSVGCIFMELMDRKPLFPGRDHVHQLRLLMELIGTPSEEELGFLNENAKRYIRQMSVFRRQSFTEKFPTVHPAAIDLVEKMLTFDPRQRITVEDALAHPYLTSLHDISDEPVCMTPFSFDFEQHALTEEQMKELIYREALAFNPEYQQQ

SEQ ID NO: 9851 - protein, 319 aa, Glycine max
QYVGPPPFMCPSGINDFPMTTIDHIKAGLPVLAKYKRPIVVHAEVQQDFENHLELNEDNLDPRAYLTYLNARPPSWEEAAIKQLVGVTKDTRKGGPLEGAHVHIVHLSDSSASLDLIKEAKSRGDSISVETCPHYLAFSSEEIPNGDTRFKCSPPIRDAYNREKLWGAVLEGHIDLLSSDHSPTVPELKLMEEGDFLKAWGGISSLQFNLPVTWSYGKKYGLTLEQLSLLWSKKPATLAGLESKGAIAVGNHADIVVWQPELEFDLDDDYPVFIKHSELSAYMGRRLSGKVLETFVRGNLVFKDGKHAPAPCGVQILAK

SEQ ID NO: 9852 - protein, 468 aa, Pseudomonas aeruginosa PAO1
MNARLHATSPLGDADLVRADQAHYMHGYHVFDDHRVNGSLNIAAGDGAYIYDTAGNRYLDAVGGMWCTNIGLGREEMARTVAEQTRLLAYSNPFCDMANPRAIELCRKLAELAPGDLDHVFLTTGGSTAVDTAIRLMHYYQNCRGKRAKKHVITRINAYHGSTFLGMSLGGKSADRPAEFDFLDERIHHLACPYYYRAPEGLGEAEFLDGLVDEFERKILELGADRVGAFISEPVFGSGGVIVPPAGYHRRMWELCQRYDVLYISDEVVTSFGRLGHFFASQAVFGVQPDIILTAKGLTSGYQPLGACIFSRRIWEVIAEPDKGRCFSHGFTYSGHPVACAAALKNIEIIEREGLLAHADEVGRYFEERLQSLRDLPIVGDVRGMRFMACVEFVADKASKALFPESLNIGEWVHLRAQKRGLLVRPIVHLNVMSPPLILTREQVDTVVRVLRESIEETVEDLVRAGHR

SEQ ID NO: 9853 - protein, 505 aa, Citrus x paradisi
MDLLLLEKTLLALFAAVVVAITVSKLRGKRFKLPPGPLPVPVFGNWLQVGDDLNHRNLSDLAKKYGDVLLLRMGQRNLVVVSSPDHAKEVLHTQGVEFGSRTRNVVFDIFTGKGQDMVFTVYGEHWRKMRRIMTVPFFTNKVVQQQRFNWEDEAARVVEDVKKDPEAATNGIVLRRRLQLMMYNNMYRIMFDRRFESQDDPLFNRLKALNGERSRLAQSFEYNYGDFIPILRPFLRGYLKICKEVKERRLQLFKDYFVEERKKLASTKSMSNESLKCAIDHILDAQTKGEINEDNVLYIVENINVAAIETTLWSIEWGIAELVNHPEIQKKLRNELDTVLGPGHQITEPDTHKLPYLQAVIKETLRLRMAIPLLVPHMNLHDAKLGGYDVPAESKILVNAWWLANNPAQWKKPEEFRPERFLEEESKVEANGNDFRYLPFGVGRRSCPGIILALPILGITIGRLVQNFELLPPPGQSKIDTAEKGGQFSLHILKHSTIVAKPRSF

SEQ ID NO: 9854 - protein, 469 aa, Bacillus anthracis str. Ames 0581
MFQKDFRLYDNPALFEAAQSGEVVPVYVHDETFSMGSASKWWLHHAIIDVKKQLEALGSTLIIRKGSTQEEILSLVEQLGITAVYWNICYDPDRLQSNQKMKMMLEHKGMICKEFNSHLLLEPWVIKKKDNTEYKVFTPFYNAFQKQVIHKPISKVQSIKGGNSLPVSLSVSELHLLPTIPWTSHMESIWEPTEEGAYKTWKEFFSSKLASYSEGRDFPNQNAHSMLAPYLSFGQISVKLIYHYLINKSTESQCSLFEKQVNSFIRQLIWREFSYYLLYHYPFTAYKPLNKSFEHFPWNNEEELLRVWQKGDTGYPFIDAGMRELWQTGFMHNRTRMAVASFLVKHLLIPWQEGAKWFMDTLLDADIANNTMGWQWVAGSGADASPYFRIFNPITQGEKFDKNGEYIRKWVPELKDMPNKYIHKPWEAPEHILQKANIQLGHTYPLPVVDHKAARERALCAYKSMKEFV

SEQ ID NO: 9855 - protein, 424 aa, Blastocladiella emersonii
TLIDKLMEKTKKVVGSSDKDAPAPASPSSPSTAAGAGSASSTASSTTTAAASGNLSIPSPLVAGSTTSSSISHAQKMATAAHTNSDYSPSPAATPSAPLDAVAERRRRKTTLADLELRQTLGTGSFGRVHLVRLRSTGKYYAMKVLKKAEVVKHKQVEHTLNEKGILEQIDHPFLVALHSSFQDSANLYMVMEYVTGGELFTYLRRSQRFSNNVAKFYAAEVVLAFEYLHSKDIIYRDLKPENLLLDAQGHVKITDFGFAKHVPDITWTLCGTPDYLAPEIIQSRGYGRAVDWYALGVLIFEMLAGYPPFYDEDHVRMYEKILQGKVKWPSHFDPAAKDLLKRLLTTDLTKRYGNLKGGSKDIKMHKWFAGLDWTKLFNKQIPPPYTPPNRGDGDTSNFDAYPEETEPYGKVQPDPYAQLFKDF

SEQ ID NO: 9856 - protein, 149 aa, Brassica napus
  misc_feature (11)..(11): Xaa can be any naturally occurring amino acid
  misc_feature (16)..(16): Xaa can be any naturally occurring amino acid
  misc_feature (35)..(35): Xaa can be any naturally occurring amino acid
  misc_feature (45)..(45): Xaa can be any naturally occurring amino acid
  misc_feature (47)..(47): Xaa can be any naturally occurring amino acid
  misc_feature (52)..(52): Xaa can be any naturally occurring amino acid
  misc_feature (60)..(60): Xaa can be any naturally occurring amino acid
  misc_feature (62)..(62): Xaa can be any naturally occurring amino acid
  misc_feature (65)..(65): Xaa can be any naturally occurring amino acid
  misc_feature (79)..(79): Xaa can be any naturally occurring amino acid
  misc_feature (89)..(89): Xaa can be any naturally occurring amino acid
  misc_feature (91)..(91): Xaa can be any naturally occurring amino acid
  misc_feature (93)..(93): Xaa can be any naturally occurring amino acid
  misc_feature (98)..(98): Xaa can be any naturally occurring amino acid
  misc_feature (102)..(102): Xaa can be any naturally occurring amino acid
  misc_feature (108)..(108): Xaa can be any naturally occurring amino acid
  misc_feature (115)..(116): Xaa can be any naturally occurring amino acid
  misc_feature (126)..(126): Xaa can be any naturally occurring amino acid
  misc_feature (130)..(130): Xaa can be any naturally occurring amino acid
MASSMLSSAAXGTSPXQATMVAPFTGLKTSAAFPXTRKANNDITXIXSNGGXVSCMKVWXPXGKXKFETLSYLPDLTEXVELGKEDDYXLXAXRGIPXVEFXLEHGFXVYREHEXXPRNYDGRYWXTMGXLPLVKLTLLGKGPKREKGP

SEQ ID NO: 9857 - protein, 235 aa, Glycine max
MGSTGETQITPTHVSDEEANLFAMQLASASVLPMVLKSALELDLLEIIAKAGPGVHLSPSDIASRLPTHNPDAPVMLDRILRLLACYNILSFSLRTLPHGKVERLYGLAPVAKYLVRNEDGVSIAALNLMNQDKILMESWYYLKDAVLEGGIPFNKAYGMTAFEYHGTDPRFNKVFNKGMADHSTITMKKILETYTGFEGLKSLVDVGGGTGAVVNMIVSKYPTIKGINFDLPHV

SEQ ID NO: 9858 - protein, 124 aa, Paracoccidioides brasiliensis
MTTPSKEKLTHALVLHAPRDLRLESRLTPAPKHGELQIAIRATGLCGSDLHYYNHGRNGDFIVQSPLCLGHESSGIITAIGPDVADTFHIGDRVALEVGLPCHSCPLCLQGRYNICRKLRFRSS

SEQ ID NO: 9859 - protein, 464 aa, Streptomyces maritimus
MQFPQLDPATLAAFSAAFRGELIWPSDADYDEARRIWNGTIDRRPALIARCTSTPDVVAAVSFARKSGLLVAVRGGGHSMAGHSVCDGGIVIDLSLMNSIKVSRRLRRARAQGGCLLGAFDTATQAHMLATPAGVVSHTGLGGLVLGGGFGWLSRKYGLSIDNLTSVEIVTADGGVLTASDTENPDLFWAVRGGGGNFGVVTAFEFDLHRVGPVRFASTYYSLDEGPQVIRAWRDHMATAPDELTWALYLRLAPPLPELPADMHGKPVICAMSCWIGDPHEGERQLESILHAGKPHGLTKATLPYRALQAYSFPGAVVPDRIYTKSGYLNELSDEATDTVLEHAADIASPFTQLELLYLGGAVARVPDDATAYPNRQSPFVTNLAAAWMDPTEDARHTAWAREGYRALAGHLSGGYVNFMNPGEADRTREAYGAAKFERLQGVKAKYDPTNLFRLNQNIPPSSP

SEQ ID NO: 9860 - protein, 197 aa, Lotus corniculatus var. japonicus
MSASRFIKCVTVGDGAVGKTCLLISYTSNTFPTDYVPTVFDNFSANVVVDGSTVNLGLWDTAGQEDYNRLRPLSYRGADVFILAFSLISKASYENIAKKWIPELRHYAPGVPIILVGTKLDLRDDKHFLADHPGAVPITTAQGEELRKLIGAPAYIECSSKTQQNVKAVFDAAIKVVLQPPKQKKKKREAQKSCSIL

SEQ ID NO: 9861 - protein, 244 aa, Triticum aestivum
MVRESMGEESEAFATTAPLAPVTGERKVRNDLEETLPKPYLARALVAPDTEHPNGSEGHDSKGMSVMQQHVAFFDQNGDGIVYPWETYAGFRDLGFNPISSVFWAIFINFAFSYVTLPSWLPSPLLPVYIDNIHKAKHGSDSSTYDTEGRYVPVNLENIFSKYALTAPNKITLKELWNLTEGNRMAIDPFGWLANKVEWLLVYLLAKDEEGFVSKEAVRGVFDASFFEYCAKKNKEKADSRKQD

SEQ ID NO: 9862 - protein, 337 aa, Haloarcula marismortui ATCC 43049
MSDHTDERETFHHDPIGHAEARAGMTVGELANSYGEAGIGASDIHEAVDIYSQMLDDDVTTFFGLAGAMVPTGMRAIVSELIRDGHIDVLVTTGANCTHDSIEAIGGKHHHGEVTPEGQTEREHDETLRDEGVDRIYNVYLPQEHFVLFENHLRDEVFSTLEDEGPVSIQRMTEELGRANSEVNEREDVPEDAGVLAAAYENDVPVYCPAFQDSVLGLQAWMYSQTSEFTIDALADMTQITDIAYEADSAGAMVVGGGVPKNYVLQTMLVSPDAYDYAVQLTMDPSNTGGLSGATLDEARSWGKLEKDARNVSVYADATITLPLVVAAARERHSTEA

SEQ ID NO: 9863 - protein, 153 aa, Brassica napus
ITKGEKKRMCKLMDCRKLSVEACMHAVQNDRLPLRVVVQVLFFEQVRASASSGSSTPDFPKGIRELRSCGTYGSSRSVPTVMEDEWDAVATEEEMRALKSEIAALKLQEESGRKSTDKAAVTAISRVKSLIMSRKMFGKKLQGKAVVGEKNYG

SEQ ID NO: 9864 - protein, 176 aa, Glycine max
  misc_feature (164)..(164): Xaa can be any naturally occurring amino acid
MAIHHETWAFVFGLLGNVISFMVFLAPLPTFYQIYKKKSSEGFQSLPYVVALFSSMLWIYYAFVKKDASLLLITINSFGCVIETIYLAIFLVYAPSKTRLWTIKLLLMLNVFGFGAMLLSTLYLTTGSKRLTVIGWICLVFNISVVAAPLCIMKRVIKTKSVEXMPFSLCFSLTIN

SEQ ID NO: 9865 - protein, 99 aa, Triticum aestivum
  misc_feature (90)..(90): Xaa can be any naturally occurring amino acid
  misc_feature (95)..(95): Xaa can be any naturally occurring amino acid
MAPTVMASSATSVAPFQGLKSTAGLPVSRRSNGASLGSVSNGGRIRCMQVWPIEGIKKFETLSYLPPLSTEALLKQVDYLIRSKWVPCLXFSKVXFIFR

SEQ ID NO: 9866 - protein, 145 aa, Triticum aestivum
  misc_feature (60)..(60): Xaa can be any naturally occurring amino acid
  misc_feature (94)..(94): Xaa can be any naturally occurring amino acid
  misc_feature (119)..(119): Xaa can be any naturally occurring amino acid
  misc_feature (125)..(125): Xaa can be any naturally occurring amino acid
  misc_feature (130)..(130): Xaa can be any naturally occurring amino acid
  misc_feature (144)..(144): Xaa can be any naturally occurring amino acid
MAPAVMASSATTVAPFQGLKSTAGLPVSRRSSGSLGSVSNGGRIRCMQVWPIEGIKKFEXTLSYLPPLSTEALLKQVDYLIRSKWVPCLEVQQXGFVFREAKQLPPGTTTVDNGTMWKXLPMFGXCNDPXKVLKQVEGRSKKEXP

SEQ ID NO: 9867 - protein, 306 aa, Fagus sylvatica
MPSHSDLDRQIEHLMECKPLPEAEVKTLCDQARAILVEEWNVQPVKCPVTVCGDIHGEFYDLIELFRIGGNAPDTNYLFMGDYVDRGYYPVETVTLLVALKVRYRDRITILRGNHESRQITQVYGFYDECLRKYGNANVWKFFTDLFDYLPLTALIESQIFCLHGGLSPSLDTLDNIRALDRIQEVPHEGPMCDLLWSDPDDRCGWGISPRGAGYTFGQDIAAQFNHTNGLTLISRAHQLVMEGFNWCQDKNVVTVFSAPNYCYRCGNMAAILEIGENMDQNFLQFDPAPRQIEPDTTRKTPDYFL

SEQ ID NO: 9868 - protein, 273 aa, Magnaporthe grisea 70-15
MWPGQAMTLKVEKVLHHERSKYQDVLIFQSTDYGKVLVLDNVIQCTERDEFSYQEMITHLAMNSHPNPKKVLVIGGGDGGVLREVVKHDCVEEAILCDIDEAVIRLSKEYLPNMSAGFNHPKVKVHVGDGFKFLADYQNTFDVIITDSSDPEGPAESLFQKPYFQLLFNALTEGGVITTQAENQWLHLPLITKLRKDCKEIFPVAEYAYTTIPTYPSGQIGFMVCSKDPKANLKEPLRSWTQEEELEKCRYYSSDIHKASFVLPNFARKALQD

SEQ ID NO: 9869 - protein, 320 aa, Hordeum vulgare
MASAKATMGQGEQDHFVLKSGHAMPAVGLGTWRAGSDTAHSVRTAITEAGYRHVDTAAEYGVEKEVGKGLKAAMEAGIDRKDLFVTSKIWCTNLAPERVRPALENTLKDLQLDYIDLYHIHWPFRLKDGAHMPPEAGEVLEFDMEGVWKEMENLVKDGLVKDIGVCNYTVTKLNRLLRSAKIPPAVCQMEMHPGWKNDKIFEACKKHGIHITAYSPLGSSEKNLAHDPVVEKVANKLNKTPGQVLIKWALQRGTSVIPKSSKDERIKENIQVFGWEIPEEDFKVLCSIKDEKRVLTGEELFVNKTHGPYRSARDVWDHEN

SEQ ID NO: 9870 - protein, 170 aa, Sinorhizobium meliloti
NQLPAVLWFTGLSGSGKSTIANELDRILHAQGKHTYLLDGDNVRHGLNRDLGFTEEDRVENIRRVAEVAKLMADAGLIVLVSFISPFRDERRMARELMEEGEFIEIFVDTPLDECARRDPKGLYEKALAGKIANFTGVSSCYEAPENPELHIRTVGHQPNDLALAIEGIP

SEQ ID NO: 9871 - protein, 273 aa, Methanosarcina mazei Go1
MIKKDYQGEFIVTSLRKARKKQELRLIMPEINGILESEPAVLRIDPELIMLIGDIHGNLDALEFIIAMRKKLGCKKILFLGDYVDRGTEGTEVLIELFRMKLEEPEDVFLLRGNHESADMNIYYGFFEEIDFDRDFLLEISRTYERLPVAALVSGHTFCVHGGINGTENIDTITKEGAFPYLWNDPSERPGLVTSSRGSTVREFGPDIVEGFLKVNSLKRIIRGHTALRTGYEWWFDGKLLSLFSCPDYVGLGNAAAFGMMRREEIKIITFES

SEQ ID NO: 9872 - protein, 464 aa, Methanocaldococcus jannaschii DSM 2661
MNKMNIDKNLLEKWDKEYIWHPYTQMKEYRESKNLIIERGEGNYLIDIYGNKYLDAVSSIWCNLFGHSRKEIIEAIKNQADKICHSTLLGCGNVPSILLAKKLVDITPKHLTKVFYSEDGAEAVEIAIKMAYQYYVLRGDKGRTKFISVKEGYHGDTVGAMSVGGSELFHGVFKPLLFKGYHANPPYCYRCKYHNFKDTDERNEKGCEMECLNEMISLIEKHAEEVFCVILEGGIMGSAGMIPYPDGYIEGVAKACKENDVIFILDEVATGFGRTGKMFFCDNEELKKLEKPDILCLGKGLTGGYLPLAATLTTDEIYNQFLGEFGESKQLYHGHTYTGNQLLCSAALATLEIFEKENVIENIQPKIKLFHKELRKLKELEHVGDVRGRGFMVGIELVKDKETKEPYPYGYKAGYRVAEKLLEKGIYMRPIGNVIILVPPLSITEKEIIYLCDALYEAIKEADL

SEQ ID NO: 9873 - protein, 373 aa, Arabidopsis thaliana
MGYLLEETLSSNSKTPIVIDDDNELGLMAVRLANAAAFPMVLKAALELGVFDTLYAEASRSDSFLSPSEIASKLPTTPRNPEAPVLLDRMLRLLASYSVVKCGKVSVGKGERVYRADPICRFFLKDNIQDIGSLASQVIVNFDSVFLNTWAQLKDVVLEGGDAFGRAHGGMKLFDYMGTDERFSKLFNQTGFTIAVVKKALEVYQGFKDVNVLVDVGGGVGNTLGVVTSKYPNIKGINFDLTCALAQAPSYPGVEHVAGDMFVDIPTGDAMILKRILHDWTDEDCVKILNNCWKSLPENGKVVVIELVTPDEAENGDINANIAFDMDMLMFTQCSGGKERSRAEFEALAAASGFTHCKFVCQAYHCWIIEFCK

SEQ ID NO: 9874 - protein, 183 aa, Glycine max
  misc_feature (42)..(42): Xaa can be any naturally occurring amino acid
MDLPFLDHYYQSPFFAFPLNIHSIVLGFASWCLNKFINGQTXHPSFGGNGATMFFLTFSILAAVLGIVSKLLGANHMRTWRSDSLASAGATSIVAWAVTALAFGLACKQINIGGHRGWGLRVVEAFIIILTLTQLLYLILIHAGLYSSRYGPGYRDTDYGNAHGVGGTTGDPMHKSAAAGTRV

SEQ ID NO: 9875 - protein, 493 aa, Prochlorococcus marinus
MQTNFLFMTTALQTPQRRSRSKLQDASLVNGPMLLLRSIRGFSSNRSMLWLATVPLALFGLGIFNLSAHAADLPELNAAFLANNLWLLIATILVIFMNAGFAMVEAGMCRSKNAVNILAKNLFVFALAVTSYWFIGYSLMYGGSVADGWLYFGGLFFDPTVTADMVTDAGLVPTVDFLFQSAFAGTAATIVSGLVAERVKFGEFVVFAIVLTAFIYPIAGSWKWNGGWLDSLGFVDFAGSSIVHSVGAWAGLVGAMLLGPRIGKYSDGKPQAMPGHNMAIATLGALILWIGWYGFNPGSQLAMDQWVPYVAVTTTLAAAAGAIGATIVSTLTSGKPDLTMIINGILAGLVSITAGCGDMTLAGAWFAGLVGGIIVVFSVAALDAAEIDDPVGAFSVHGVCGVWGTLVIGLWGTAVQGDGAGMGLFNGGGINLLLVQALGAAAYAIWTLVTCWIAWSIIGGLFGGIRVSEEEETQGLDISEHGMESYPDFASAK

SEQ ID NO: 9876 - protein, 242 aa, Porphyra yezoensis
MVSDLEKAVRADLQALIKEKNCHGIMVRVAWHDAGTYSKEDGTGGANGTQRFAPESGHGANAGLDIARNMCEDIKAKHPEISYADLYQLASVVAIEDAGGPVIPFRMGRKDADAPQCTPDGRLPDADKRMPHLRDIFYRMGFNDAEIVALSGAHTLGAAHKDRSGFDGPWTSNPNTFDNSYFKEIMKETPESGLLHLPSDKALLDEPECKALVETYASDQAKFFEDYAKAHQKLSELGAVWA

SEQ ID NO: 9877 - protein, 241 aa, Oryza sativa (japonica cultivar-group)
MAAAARHRGTVKWFNDTKGFGFISPDDGSEDLFVHQSSIKADGFRSLAEGEQVEFAISESEDGRTKAVDVTGPDGSFVKGGAGGGGGGGGGFGSRGGGGSGGGGRSYGGSWGGGRRSGGGGPGGGCFKCGESGHMARDCFNGGGVGVGGGGGGGGGAGGGCFKCGEMGHMARDCFNSGGGGGGGGGGGGGGACYNCGETGHLARDCYNGGGGGGGGRFGGGGDRSCYNCGEAGHIARDCHK

SEQ ID NO: 9878 - protein, 291 aa, Glycine max
  misc_feature (237)..(237): Xaa can be any naturally occurring amino acid
  misc_feature (243)..(243): Xaa can be any naturally occurring amino acid
MASVASSSSFSTRLLLHSHTPLVCRRRCRPNFLRMVTRSCLDDSSALLRAAQHTVDTYVKSGMVVGLGSGHASGMAIQHLGSQLRTGNLKDIVGIPMSVSSASEAAKAGIPLDTYQGSSQIDFAFDDADVIEEGTLVAIIGRRKLQGGESIIQEKSIINSANKCVFIIEENQYKGGLEGSIPVLIQSLNWMTIAEEIDDMFLGDAEVWRRPSIGQAGPLGGDFPVVTKEGHNILDVXFTSPIXNVAEVSKSLDKVDGVVDHGVVSKIPCTVVIASQTGLNILDKLTADIVG

SEQ ID NO: 9879 - protein, 217 aa, Shigella boydii
ELDLYICLRPVRYYQGTPSPVKHPELTDMVIFRENSEDIYAGIEWKADSADAEKVIKFLREEMGVKKIRFPEHCGIGIKPCSEEGTKRLVRAAIEYAIANDRDSVTLVHKGNIMKFTEGAFKDWGYQLAREEFGGELIDGGPWLKVKNPNTGKEIVIKDVIADAFLQQILLRPAEYDVIACMNLNGDYISDALAAQVGGIGIAPGANIGDECALFEA

SEQ ID NO: 9880 - protein, 213 aa, Shigella boydii
ELDLYICLRPVRYYQGTPSPVKHPELTDMVIFRENSEDIYAGIEWKADSADAEKVIKFLREEMGVKKIRFPEHCGIGIKPCSEEGTKRLVRAAIEYAIANDRDSVTLVHKGNIMKFTEGAFKDWGYQLAREEFGGELIDGGPWLKVKNPNTGKEIVIKDVIADAFLQQILLRPAEYDVIACMNLNGDYISDALAAQVGGIGIAPGANIGDECA

SEQ ID NO: 9881 - protein, 506 aa, Burkholderia fungorum LB400
MNHADMQFLDVEFPYARQYGNFIGGEWVPPVRGEYFDNVSPITGEPFTSIPRSTEEDIELALDAAHRARKAWADTAPALRANVLNRIADRMEQNLSRIAFSESIDNGKPIRETLAADIPLAIDHFRYFASCIRAQEGTLSEIDHDTVAYHFHEPLGVVGQIIPWNFPILMAVWKLAPALAAGNCVVLKPAEQTPASILVLIELIQDLLPPGVLNVVNGFGLEAGKPLASSKRIAKIAFTGETSTGRLIMQYASQNIIPVTLELGGKSPNIFFADVVDQDDGYFDKALEGFAMFALNQGEVCTCPSRVLIDEKIYDRFMERALKRVAAIAQGHPLDPRTMIGAQASQEQLEKILSYVDLGKQEGAECLIGGERNTLGGELSKGYYVKPTVFRGNNKMRIFQEEIFGPVVSVTTFRTEEEALEIANDSLYGLGAGVWTRDGTRAYRFGRQIQAGRVWTNCYHAYPAHAAFGGYKQSGIGRETHKMMLDHYQQTKNLLVSYSEQPLGFF

SEQ ID NO: 9882 - protein, 213 aa, Shigella boydii
LDLYICLRPVRYYQGTPSPVKHPELTDMVIFRENSEDIYAGIEWKADSADAEKVIKFLREEMGVKKIRFPEHCGIGIKPCSEEGTKRLVRAAIEYAIANDRDSVTLVHKGNIMKFTEGAFKDWGYQLAREEFGGELIDGGPWLKVKNPNTGKEIVIKDVIADAFLQQILLRPAEYDVIACMNLNGDYISDALAAQVGGIGIAPGANIGDECAL

SEQ ID NO: 9883 - protein, 372 aa, Candida albicans
MKKFTGPTQTRQVVFNISQNFKVLKILGEGAYGIVALAVHLPTETKVAIKKIEPFERPLFCLRTLREIKLLTKFKNHDNIVRLYDVQKPMNYDSFNEVYLIQGYMPSDLHNLIHTHLLSDQHVQYFIYQILKGLKMIHSARVIHRDLKPSNILVNEKCDLKICDFGLARLDTKHYNFDEAPRISMLTEYVATRWYRAPEIMLSASNYSTAIDLWSVGCILAELLTYRALFPGSDYINQLKLIFEVLGTPTDEDLQIIKSERAQKFIRSLPTKVKIDLSEFINNHPYRNIKHRGRDQVNPLAIDLLEKLLVFDPAKRITVQDALEHPYLNSYHEQLDEPVTSPIPIEEFDFDIDKKNLDTNDLKKQIFEIVMS

SEQ ID NO: 9884 - protein, 213 aa, Triticum aestivum
  misc_feature (37)..(37): Xaa can be any naturally occurring amino acid
  misc_feature (55)..(55): Xaa can be any naturally occurring amino acid
  misc_feature (113)..(113): Xaa can be any naturally occurring amino acid
  misc_feature (136)..(136): Xaa can be any naturally occurring amino acid
RVRPNAVRSLIGAHFCFCAFSRGYLASDQLDTLRYRXLYSGWIPGILLHHLLLLXCFTLALPRNVTINYLILTLLCEAPPRRRRPLISHFCGSVVTIPPLLPARLRSRPSPAXMHSIFLHVRKLRRMAGFRDFNKXLVKLEWVLNWTTFVTARVICHILITYKLITDAHKFDKGIELPLALSGMAGMNVLNVSLGLDLFKAFARERNQQTHQD

SEQ ID NO: 9885 - protein, 297 aa, Saccharomyces cerevisiae
MKTTTPLVHVASVEKGRSYEDFQKVYNAIALKLREDDEYDNYIGYGPVLVRLAWHISGTWDKHDNTGGSYGGTYRFKKEFNDPSNAGLQNGFKFLEPIHKEFPWISSGDLFSLGGVTAVQEMQGPKIPWRCGRVDTPEDTTPDNGRLPDADKDAGYVRTFFQRLNMNDREVVALMGAHALGKTHLKNSGYEGPWGAANNVFTNEFYLNLLNEDWKLEKNDANNEQWDSKSGYMMLPTDYSLIQDPKYLSIVKEYANDQDKFFKDFSKAFEKLLENGITFPKDAPSPFIFKTLEEQGL

SEQ ID NO: 9886 - protein, 312 aa, Zea mays
MYWAPETERAHWSPSAWESLTRSKKNPPPPFPIKSSTRVLLVPATRISPDFIILPRNKSLAKMTKNYPTVSEDYKKAVEKCRRKLRGLIAEKNCAPIMVRLAWHSAGTFDCQSRTGGPFGTMRFDAEQAHGANSGIHIALRLLDPIREQFPTISFADFHQLAGVVAVEVTGGPDIPFHPGREDKPQPPPEGRLPDATKGCDHLRDVFAKQMGLSDKDIVALSGAHTLGRCHKDRSGFEGAWTSNPLIFDNSYFKELLSGEKEGLLQLVSDKALLDDPVFRPLVEKYAADEDAFFADYAEAHMKLSELGFADA

SEQ ID NO: 9887 - protein, 158 aa, Salmonella enterica subsp. enterica serovar Typhi Ty2
MKLISNDLRDGDKLPHRHVFNGMGYDGDNISPHLAWDDVPMGTKSFVVTCYDPDAPTGSGWWHWVVVNLPADTRVLTQGFGSGLVAVPDGVIQTRTDFGKAGYGGAAPPKGETHRYIFTVHALDVERLDVDEDASGAMVGFNVHFHSLASASITAMFS

SEQ ID NO: 9888 - protein, 506 aa, Dechloromonas aromatica RCB
MLYASPGTAGAKIAYKAQYDNFIGGKWVAPVNGQYFDVVTPISGKPYTKAARSTAEDMELALDAAHAAFPTWGKTSAADRANVLLKIADRLEANLELLAYAETVDNGKAIRETLNADIPLAVDHFRYFAGCLRAQEGGISEIDENTMAYHIHEPLGVVGQIIPWNFPILMAAWKLAPAIGAGNCVVLKPAESTPISILILAELIADILPAGVLNIVNGYGREAGMPLATSKRIAKIAFTGSTSTGRVIAQAAANNLIPATLELGGKSPNVFFADIMDKDDSFLDKAVEGMVLFAFNQGEVCTCPSRALIQESIYEKFMERVLKRVAAIKQISPLDTDCMMGAQCSQEQMTKIQSYLELGKQEGAECLIGGERAHLGGDLEGGYYIQPTMFKGHNKMRIFQEEIFGPVLAVTTFKDEAEALAIANDTIYGLGAGVWSRNGNVAYRMGRAIQAGRVWTNCYHAYPAHAAFGGYKESGIGRETHKVMLDHYQQTKNLLVSYSETKLGFF

SEQ ID NO: 9889 - protein, 297 aa, Saccharomyces cerevisiae
MKTTTPLVHVASVEKGRSYEDFQKVYNAIALKLREDDEYDNYIGYGPVLVRLAWHISGTWDKHDNTGGSYGGTYRFKKEFNDPSNAGLQNGFKFLEPIHKEFPWISSGDLFSLGGVTAVQEMQGPKIPWRCGRVDTPEDTTPDNGRLPDADKDAGYVRTFFQRLNMNDREVVALMGAHALGKTHLKNSGYEGPWGAANNVFTNEFYLNLLNEDWKLEKNDANNEQWDSKSGYMMLPTEYSLIQDPKYLSIVKEYANDQDKFFKDFSKAFEKLLENGITFPKDAPSPFIFKTLEEQGL

SEQ ID NO: 9890 - protein, 151 aa, Coxiella burnetii RSA 493
MAKAVQKYPHSMLSHLQQDINRLFEPFGWATGGELWDAFSSEWSPHIDIKDEGQNYLICADIPGVDPKKIQVSMENNILTIKGERETEAKEKSEGYLRIERTKGAFLRQFTLPESVDAESIKAKSKHGVLEITIPKAQPPRTKKIEIEEQE

SEQ ID NO: 9891 - protein, 247 aa, Oryza sativa (japonica cultivar-group)
MGKHGKCDVEACYPGGAPGGGMYPYMIENAQLRWAFIRKVYVIVSVQLLVTVAVAGAVNLVEPIKTFFQARTPEVLVAYVIIIISPLIMMLPMIYFRNKHPINLFFLLLFTVCISFSVGLGCLSKNGTVIFQAAGMTAAIVIGLTCYTFWAAKRGYDFEFLGPFLFAATLVLFLYAIITIFLPMGRTGKLVYGCVAALIFSGFIIYDTDNLIKRYTYDEYVAAAITLYLDIINLFMALVTALQAADG

SEQ ID NO: 9892 - protein, 297 aa, Saccharomyces cerevisiae
MKTTTPLVHVASVEKGRSYEDFQKVYNAIALKLREDDEYDNYIGYGPVLVRLAWHISGTWDKHDNTGGSYGGTYRFKKEFNDPSNAGLQNGFKFLEPIHKEFPWISSGDLFSLGGVTAVQEMQGPKIPWRCGRVDTPEDTTPDNGRLPDADKDAGYVRTFFQRLNMNDREVVALMGAHALGKTHLKNSGYEGPWGAANNVFTNEFYLNLLNEDWKLEKNDANNEQWDSKSGYMMLPTAYSLIQDPKYLSIVKEYANDQDKFFKDFSKAFEKLLENGITFPKDAPSPFIFKTLEEQGL

SEQ ID NO: 9893 - protein, 164 aa, Triticum aestivum
  misc_feature (147)..(147): Xaa can be any naturally occurring amino acid
MAGMVFGLENPMMTALQHLLDIPDGEAGGAGAAGGEKQGPTRAYVRDARAMAATPADVKELPGAYAFVVDMPGLGSGDIKVQVEDERVLVISGERSREEEEDAKYLRMERRMGKLMRKFVLPENADMEKISAACRDGVLNRPTVREXLPARPKPKPKNNPRSKA

SEQ ID NO: 9894 - protein, 106 aa, Zea mays
MPSSPQTPPPPVGRTAAHGGRHKHDDDDPSTPRGFCAKYFSRESCLLLALVTVLLVVLPLVLPPLPAPPLALLLVPVAMLAVLLVLALMPAAAGGRNEAVDPASYL

SEQ ID NO: 9895 - protein, 472 aa, Coxiella burnetii RSA 493
MTTIFWFRQDLRLSDNPALVEAAKSADHLIPLYILDDQLKMLGDAQRWWLHHSLSSLQTALSKKGTSLILKKGDTKRVLLELIKKYKVEKIYWNRSYEPPYREIDTYLENRLPPLSVEIYHSTLLTEPQKIKNKSGGYYKIFTPFWKHINASLQPRKTLAAPKKFSQHRAIKSDNLETWNLLPKHPDWSQGFDQWKPGEKNAQIVLKKFIKENLKNYPAHRDRPDISSTSHLSPYLHFGEISIRQVWTAITQATIQDKNLQKAADVFLRQLIWREFAYYLLWHFPQMGRSNFRNQFDNFKWKKNKNWLRAWQKGLTGYPIVDAGMRELWCTGYMHNRVRMIVASFLVKDLMIDWREGEKWFWNTLLDADLANNALGWQWIAGCGPDAAPYFRIFNPILQSKKFDPDGTYIKRWIPELAKVPSKYIHYPADMPDNISESSKVNLGVDYPFPIVNHHKAKELALKAYKDSTYRL

SEQ ID NO: 9896 - protein, 167 aa, Neurospora crassa
MSSATTIYDFKPLDKKGSELPLSTYQGKVVLIVNVASKCGFTPQYAGLEKVYKEIKEKYPDDFEILAFPCNQFGGQEPGTEEEIQSFCQLNYGVSFPIMKKVEVNGDNADPLYEWMKNEKPGLMGLKRIKWNFEKFLIGKDGKVKGRWASTTKPESLKEAILKELGE

SEQ ID NO: 9897 - protein, 335 aa, Listeria monocytogenes str. 4b F2365
MDPFLLKDLKQHLGGTNDAIKEAPQEIQMPDFSNLEIATAAALQMRATMGSPNIDLSNGVTTEYRVVEGDYGDIPVRIYRHEEATKPVPAFIFYHGGGFVGGTPAVVENFCKGIAEKLPAVVINVDYHLAPEFPAPAAPKDCYRALEWVVEQSDELGIDASKIGVSGDSAGGTLAAAVSYMDYEAETNYVGFQALLYPALTLVDEDNDKYQWDISKFGASEETLPLVAPGIIGMNSSGELLRTAYVRDENPASPIYSPLSAVDKSIYPPTLIASAEFDALRAFADIFAKELRASGVQTKVIVYQGMCHAFIDKYGIFPQAEDVADEIVQMMKEIF

SEQ ID NO: 9898 - protein, 240 aa, Zea mays
EYLAPRSYGPPPAPPPHPCLSASGSPPPLSRPPRPQFDPNFAWHQAKPLPPCCVKARAAAPESEAKCHATVVSGWFTETRSRCGKASKLQYYNNPMWPGETHSLKVDKILYQGKSPYQEVLIFESLTYGKVLVLDGIVQLTDKDECAYQEMITHLPLCSIPSPKKVLVIGGGDGGVLREIARHGSVESIDICEIDQLVIDVCKDFFPDLSVGFEDPRVRLHVGDAVEFLRNSPEGTYDAI

SEQ ID NO: 9899 - protein, 189 aa, Pinus strobus
AWHSAGTYDVKSKTGGPFGTIKHPDELAHGANNGLDIAIRLLEPIKEQFPTISYADFYQLAGVVAVEITGGPDIPFHPGRPDKTEPPEEGRLPDATKGIDHLRDVFGHMGLSDKEIVALSGAHTLGRCHKERSGFEGAWTSNPLIFDNSYFKELLSGEKEGLLQLPSDKALLEDPIFRSYVEKYAADDD

SEQ ID NO: 9900 - protein, 452 aa, Triticum aestivum
MGEQKGNILMGKYEMGKMLGQGTFAKVYHARNIETSQSVAIKVTDKEKVLKGGLTDQIKREISVMKLVKHPNIVQMYEVMATKTKIYFVLEHVKGGELFNKVQRGRLKEDAARKYFQQLICAVDFCHSRGVYHRDLKPENLLLDENSNLKVSDFGLSTISECRRLDGLLHTSCGTPAYVAPEVINRKGYDGAKADIWSCGVILFVLLAGYLPFQDKNLMNMYKKIGKAEFKCPSWFSSDIRRLLLRILDPNPSTRISIERIMEHPWFRKGLDAKLLRYNLQAKDAVPAADMTATSDSLSCSNSATEGKEQEAKKLANLNAFDIISLSTGLDLSGMFEDNDKKRESKFTSTNSASTIVSKIEDIAKCMRLKLVKKDGGMLRMESFKAGRKGVMSIDAEIFEVTPDFHLVELKKTYGDTLEYQKVLNQEMRPALKDIVWAWQGEQQPQPQQQPC

SEQ ID NO: 9901 - protein, 506 aa, Pseudomonas putida KT2440
MIYAQPGTPGAVVSFKPRYGNFIGGEFVQPLAGQYFINSSPVNGQPIAEFPRSTAQDVERALDAAHAAAEAWGKTSVQDRARVLLKIADRIEQNLEVLAVTESWDNGKAIRETLNADVPLAADHFRYFAGCIRAQEGGVGEINEGTVAYHIHEPLGVVGQIIPWNFPLLMAAWKLAPALAAGNCVVLKPAEQTPLSITVFAELIADLLPAGVLNIVQGFGREAGEALATSKRIAKIAFTGSTPVGSHIMKCAAENIIPSTVELGGKSPNIFFEDIMQAEPAFIEKAAEGLVLAFFNQGEVCTCPSRALIQESIYEPFMAEVMKKIAKITRGNPLDTETMVGAQASEQQYDKILSYLEIAREEGAQLLTGGGAERLQGDLASGYYIQPTLLKGNNKMRVFQEEIFGPVVGVTTFKDEAEALAIANDSEFGLGAGLWTRDINRAYRMGRGIKAGRVWTNCYHLYPAHAAFGGYKKSGVGRETHKMMLDHYQQTKNLLVSYDINPLGFF

SEQ ID NO: 9902 - protein, 223 aa, Triticum aestivum
  misc_feature (26)..(26): Xaa can be any naturally occurring amino acid
RGRGRGLSVFSLLPDVWGIKWRFPMXPVSRLNEEPTRMSTLIDLTCDSDGKIDKFIGNAETLPLHPLDPERGGCYYLAVLLSGAYQEALSNKHNLFGGPSIVRVEKSTAAATGFQIATADLGPTTEELISTMRYNVRQDIVGVIQRRAIEIGVWGMVGEAVHTGLTTMPYLIMEDHAASSWKHQGGLDGKDESIVKMVFRQVSRLLCLPFMWSIPSKRIGSAA

SEQ ID NO: 9903 - protein, 294 aa, Magnaporthe grisea 70-15
MPLEAVMIVVDNSESSRNGDYTPTRFDAQADAVNVLFQHVTNGNPESSVGLMSMGGKDPEVLVTLTSDQGKILEGLHRTKKKVSGSSHLATAIQVASLALKHRQNTTQRTRIVAFVCSPVSDEQKALVQLAGKLKKNNVTVDFVLFGDLDDDTSKKLEAFNAKVKNNEGNSHLVVIPPSGNLLSDQLIATPIFGEGAGSSAAAGGGGGGGDFGDLEFDPATDPELALALRMSLEEENARKEKEAKKEAEQAKKQGLESVEEQDESAPLLDKSGGPSGSGSKDKKSDGGDKMDTS

SEQ ID NO: 9904 - protein, 501 aa, Zea mays
MASNGCNGNGNGKAAPAGVVVPEIKFTKLFINGEFVDAASGKTFDTRDPRTGDVLAHVAEADKADVDLAVKSARDAFEHGKWPRMSGYERGRIMSKLADLVEQHTEELAALDGADAGKLLLLGKIIDIPAATQMLRYYAGAADKIHGDVLRVSGRYQGYTLKEPIGVVGVIIPWNFPTMMFFLKVSPALAAGCTVVVKPAEQTPLSALYYAHLAKMAGVPDGVINVVPGFGPTAGAALASHMDVDSVAFTGSTEVGRLIMESAARSNLKTVSLELGGKSPLIIFDDADVDMAVNLSRLAVFFNKGEVCVAGSRVYVQEGIYDEFVKKAGVAVGARRHRVGDLLLRHRPGRAVRQVQDERLRPGPGAGSHGQVPAGQERHHRAPGLAMGPMEPHRSLLVQCTCVMRACSHSWTVDEVIEKANCTRYGLAAGIVTKSLDVANRVSRSVRAGTVWVNCYFAFDPDAPFGGYKMSGFGRDQGLAAMDKYLQVKSVITALPDSPWY

SEQ ID NO: 9905 - protein, 197 aa, Oryza sativa
MSTARFIKCVTVGDGAVGKTCMLISYTSNTFPTDYVPTVFDNFSANVVVDGNTVNLGLWDTAGQEDYNRLRPLSYRGADVFLLAFSLISKASYENIHKKWIPELRHYAPNVPIVLVGTKLDLREDKQFFLDHPGLAPISTAQGEELKRMIGAAAYIECSSKTQQNVKSVFDSAIKVVLCPPKPKKKNTRKQRSCWIL

SEQ ID NO: 9906 - protein, 208 aa, Escherichia albertii
LDLYICLRPVRYYQGTPSPVKHPELTDMVIFRENSEDIYAGIEWKADSADAEKVIKFLREEMGVKKIRFPEHCGIGIKPCSEEGTKRLVRAAIEYAIANDRDSVTLVHKGNIMKFTEGAFKDWGYQLAREEFGGELIDGGPWLKVKNPNTGKEIVIKDVIADAFLQQILLRPAEYDVIACMNLNGDYISDALAAQVGGIGIAPGANIG

SEQ ID NO: 9907 - protein, 367 aa, Desulfitobacterium hafniense DCB-2
MEIAQDPELVNTYTNRANCVAVVSNGTAVLGLGDIGARAAMPVMEGKSLLFKNFAGVDSFPICLDTKNIDKIVEVVKLLEPTFGGINLEDIKAPECFEIEEKLKAVYDGPVFHDDQHGTAVVTLAAMFNALKIVNKELKDVKIVTSGAGAAGMAIVKLLMDCGLQNVIMCDTKGTIYKGRAEGMNKYKEEIALRTNPAMVKGSLGEALKGADVFIGISVGNTVTQEMIRTMAKDAIVFAQANPVPEIMPEEAKEAGAAVIGTGRSDYPNQINNILSFPGIFRGTFDVEAREINGPMKIAAAEAIASIVSPEELSAEYIIPKAFDKRVAPAVAAAVAKAAMESGVAKRKVDPEQVALNLTSLLAQEGK

SEQ ID NO: 9908 - protein, 205 aa, Shigella boydii
LDLYICVRPVRYYQGTPSPVKHPELTDMVIFRENSEDIYAGIEWKADSADAEKVIKFLREEMGVKKIRFPEHCGIGIKPCSEEGTKRLVRAAIEYAIANDRDSVTLVHKGNIMKFTEGAFKDWGYQLAREEFGGELIDGGPWLKVKNPNTGKEIVIKDVIADAFLQQILLRPAEYDVIACMNLNGDYISDALAAQVGGIGIAPGA

SEQ ID NO: 9909 - protein, 236 aa, Brassica napus
  misc_feature (59)..(59): Xaa can be any naturally occurring amino acid
  misc_feature (132)..(132): Xaa can be any naturally occurring amino acid
  misc_feature (183)..(184): Xaa can be any naturally occurring amino acid
  misc_feature (199)..(199): Xaa can be any naturally occurring amino acid
  misc_feature (204)..(204): Xaa can be any naturally occurring amino acid
  misc_feature (209)..(210): Xaa can be any naturally occurring amino acid
  misc_feature (216)..(216): Xaa can be any naturally occurring amino acid
  misc_feature (219)..(219): Xaa can be any naturally occurring amino acid
  misc_feature (227)..(227): Xaa can be any naturally occurring amino acid
MKGEGNEMFPKLPQNHSLSSHFHLPATIAVDDSSIEVVRRPRGRPPGSKNKPKPQVYVXTRDTEPPMSPYILEVPSGNDVVEAINRFCRRKSIGENPSACAFSVALDSVANITLRQPSPAAPGSTITFHGKXFDLLSVSATFLPPPPRTSLSPPVANFFTVSLAGPQGQIIGGFVAGPLISAXXTVYVIAASFNNPSYXRFTGXREEHXXSISARXREXGDGQSPRXFGRRRAKKG

SEQ ID NO: 9910 - protein, 282 aa, Allium cepa
  misc_feature (179)..(179): Xaa can be any naturally occurring amino acid
MAAARRIGSTIFSRYATASPRSSQLCRAASRIQNFGSTAAAVEEQPITPPVKVEYTQLLINGKYVDSASGKTFPSLDPRTGEVIAHVSEGDAEDIDRAVAAARKAFDEGPWLKMTAYERSNILLRFADLIEKHNDHIAALETWDNGKPYEQAALVEIPMLVRLMRYYAGWTDKIHGLIXPADGPHHVQVLYEPIGVAGQIIPWNFPLLMFAWKVGPALATGNTVVLKTAEQTPLSALYVAKLFHEAGGPDGVLNVISGFGPTAGAALASHMDVDKLAFTGST

SEQ ID NO: 9911 - protein, 364 aa, Glycine max
  misc_feature (203)..(203): Xaa can be any naturally occurring amino acid
NSRVDPASVSRSNRKPLPSSSSSSSVATEAEQKEILETLVSNLPLEKSSKAATATRFLFGLLRTTNILNAAEACRDALEKKIGLQLEEATLDDLLVPSYSYLNETLYDVDCVERILSHFLEGMEARTATETTEDAAATRSPALMLVGKLIDGYLSEIASDANLKPEKFYNFAISLPDEARLFDDGLYRAVDVYLKAHPWVSEXDREKICGLLDCQKLTLEACSHAAQNERLPLRAVVRVLFFEQLQLRRAIAGKLGAAEEPSRHSAAMAEEEEVEDDNNTWQVTVRENQVLRLDMDSMRTRVHELERECSSMKRAIEKMDKMGPRGGGPWRASLALGRKFGCKFKTQVCDSHEPATREGRPHRR

SEQ ID NO: 9912 - protein, 207 aa, Shigella boydii
LDLYICLRPVRYYQGTPSPVKHPELTDMVIFRENSEDIYAGIEWKADSADAEKVIKFLREEMGVKKIRFPEHCGIGIKPCSEEGTKRLVRAAIEYAIANDRDSVTLVHKGNIMKFTEGAFKDWGYQLAREEFGGELIDGGPWLKVKNPNTGKEIVIKDVIADAFLQQILLRPAEYDVIACMNLNGDYISDALAAQVGGIGIAPGANI

SEQ ID NO: 9913 - protein, 230 aa, Allium cepa
KSPMIILDDADIDQAVELAHFALFFNQGQCCCACSPTFVHEKIYDEFVEKAKARAMRRVVGDPFKKGVEQGPQIDDEQFNKILRYIKLGVDGGASLVTGGERIGSKGYYIQPTIFSDVKDDMVIAKEEIFGPVQSILKFNDLNEVIRRANASRYGLAAGVFTSNIDKANTLTRALRVGTVWVNCFDVFDAAIPFGGYKMSGQGREKGIDSLKGYLQTKAVVTPLKNPAWL

SEQ ID NO: 9914 - protein, 177 aa, Triticum aestivum
QCPCDGCCPCPCRQNPHGCGQACSPQLNIDGAVKSAPVTCPPASGEAAAPKERRWELSDFDIGRPLGRGKFGNVYLAREKKTKFIVALKVLFKSQLQKANVEHQLRREIEIQSHLRHPNILRLYGYFYDASRVYLILEYAPRGELYKELQKFQRFDEKRSATYVYQLGEALKYCHAN

SEQ ID NO: 9915 - protein, 212 aa, Shigella boydii
LDLYICLRPVRYYQGTPSPVKHPELTDMVIFRENSEDIYAGIEWKADSADAEKVIKFLREEMGVKKIRFPEHCGIGIKPCSEEGTKRLVRAAIEYAIANDRDSVTLVHKGNIMKFTEGAFKDWGYQLAREEFGGELIDGGPWLKVKNPNTGKEIVIKDVIADAFLQQILLRPAEYDVIACMNLNGDYISDALAAQVGGIGIAPGANIGDECA

SEQ ID NO: 9916 - protein, 142 aa, Mycobacterium avium subsp. paratuberculosis str. k10
MNHGVDAYRSVPRPRPVWTQQVLGTAARPAVMPMDAWRDGDQFVVEFDLPGVNADSLDLDVERNVLTVRAERPDLDQNREMVSAERPRGVFSRQLFLGDNLDTDKIEANYHDGVLRLTIPVAEKAKPRRIEINHNHKTAINA

SEQ ID NO: 9917 - protein, 152 aa, Pisum sativum
MDLDSPLFNTLHHIMDLTDDTTEKNLNAPTRTYVRDAKAMAATPADVKEHPNSYVFMVDMPGVKSGDIKVQVEDENVLLISGERKREEEKEGVKYLKMERRIGKLMRKFVLPENANIEAISAISQDGVLTVTVNKLPPPEPKKPKTIQVKVA

SEQ ID NO: 9918 - protein, 185 aa, Burkholderia cepacia R18194
MLFEKGMDFEIRDVDLFNKPEDISVMNPYGQVPILVERDLILYESNIINEYIDERFPHPQLMPADPVQRARARLFLLNFEKELFVHVSTLENEKGKAAEKNHEKARLAIRDRLTQLAPIFVKNKYMLGEEFSMLDVAIAPLLWRLDHYGIELSKNAAPLMKYAERIFSRPAYIEALTPSEKVMRR

SEQ ID NO: 9919 - protein, 357 aa, Oryza sativa (japonica cultivar-group)
MNYRVVNPVKVESGPSTGVANGQPPRPMDGLADGGPPPFLTKTYDMVDDPTTDAVVSWSATNNSFVVWDPHLFGNVLLPRYFKHNNFSSFVRQLNTYGFRKVDPDKWEFANEGFLRGQKHLLKSIKRRKPPNSSPSQQSLGSFLEVGHFGYEGEIDQLKRDKHLLMAEVVKLRQEQQNTKSDLQAMEQKLQGTEQKQQHMMAFLSRVMHNPEFIRQLFSQSEMRKELEEFVSKKRRRRIDQGPELDSMGTGSSPEQVSQVMFEPHDPVDSLFNGVPSDLESSSVEANGGKAQQDVASSSSEHGKIKPSNGELNEDFWEDLLHEGGLDEDTRNPAIDDMNLLSQKMGYLNSSSTKSPQ

SEQ ID NO: 9920 - protein, 241 aa, Oryza sativa (japonica cultivar-group)
MFGKGHDLEAGGSSEPLYPGMVESPDLRWALIHKIYVILSVQLAMTAAVAAFVVKVRGVSEFFVSSNAGFALYIFLLFLPLIVLCPLRYYHQKHPVNLLLLGLFTVAISFAVGMTCAYTSGKVIFEAAALTAVVVISLTAYTFWAAKRGHDFNFLGPFLFSAVMVLILFSLIQIFFPLGKISEMIYGGLASLVFSGYIIYDTDNIIKRYTYDEYVWAAVSLYLDVINLFLALLRVLRAADN

SEQ ID NO: 9921 - protein, 131 aa, Triticum aestivum
  misc_feature (27)..(27): Xaa can be any naturally occurring amino acid
  misc_feature (39)..(39): Xaa can be any naturally occurring amino acid
  misc_feature (41)..(41): Xaa can be any naturally occurring amino acid
  misc_feature (47)..(47): Xaa can be any naturally occurring amino acid
  misc_feature (51)..(51): Xaa can be any naturally occurring amino acid
  misc_feature (55)..(55): Xaa can be any naturally occurring amino acid
  misc_feature (81)..(81): Xaa can be any naturally occurring amino acid
  misc_feature (89)..(89): Xaa can be any naturally occurring amino acid
YVHLRDIRFVFVECDYACIRRSAQHFXSCGTVNRVISLXDXFGQLKXFAYXEFVXAELFRNCQVEWSEFMVGQIKVALKRXNVPGLSSXRGRRFNPYGGHPYMRPYPPPFYNPYGGYGRAPRFRRPRRPFY

SEQ ID NO: 9922 - protein, 293 aa, Candida albicans SC5314
MKKALPEHAKLSKESKECIQECVSEFISFITSQAADRCLVEKRKTLNGEDILWAMYTLGFENYSETLKIYLAKYRQYEQEQLSLKPPRKKIRKRKTKSSLSQTQSKEQVDQDQDFQQIEQQYDDGEEEEEESENEEGDMSNIESNLILQNLPEYSDDYFDDEDEEEDRQQQREENSDNEPQQHHGDDSQPINLQPQLPSSAVPSLPTQQQQQFSDINPTTESNQQESFFTTQYYPNQTQYVNAAPLPTNPQPRQYQNQNQPNNYQNDQRQNDKQRIIPDLLNITNSYSEDEFI

SEQ ID NO: 9923 - protein, 493 aa, Methanosarcina mazei Go1
MCGIAGMFGTPDSNTKVKKMLAILGHRGPDACGIHTEGKLSIGNTLLKITGDMPQPLTGTGSLVLNGEIYNFRELAAEIGLKTDSDTELLFTLIERKVRKGIKPTNAVFSVLSKVNGDYALAYACGTELVLARDPSGVKPLYYFYEKSMVKPGLAFASEKKALAFTGREVKPFPQGGIMGFSTENGKIAEKFTEKSLKITQPEKRISAEKEAIIYLKAALEKAVELRLTPVSGIAFSGGIDSTFLAALAKRIDPYVSLYAVGLPDSHDIAQAEYAAEAIGMKRNLKTHFLSPEEIEAAVPEVIYATESTDPMKVAIGLPLHIVAKTAREEGKRVLLTGQGADELFGGYSRHEGFFEQGADVLDREIYSDLENISAINLERDDMVAMANSVELRVPFLDKEVIKTGLAISPELKVRKKEGVYIRKYILRKAAEGLLPPKILWKEKKAVQYGTGVQKTLDRLARDSGFSKKQGGHIEKYLSQIASEKGFDFINEM

SEQ ID NO: 9924 - protein, 201 aa, Salmonella enterica subsp. enterica serovar Typhi Ty2
MALHDENVVWHSHPVTVAAREQLHGHRGVVLWFTGLSGSGKSTVAGALEEALHQRGVSTYLLDGDNVRHGLCRDLGFSDADRQENIRRVGEVASLMADAGLIVLTAFISPHRAERQLVKERVGHDRFIEIYVNTPLAICEQRDPKGLYKKARAGELRNFTGIDAIYEAPDSPQVHLNGEQLVTNLVSQLLDLLRRRDIIRS

SEQ ID NO: 9925 - protein, 290 aa, Triticum aestivum
MGGLSMEHPWAFAFGLLGNVISFSSLLAPIPTFYRIFKSKSTEGFQSVPYVVALFSAMLWIFYALVKTGEGLLISINAAGCVIETVYIVMYLVYADRKAKIFTAKIVVLLNIAGFGLIFLLTLFAFHGETRVVSLGWICVGFSVCVFVAPLSIIGRVIKTKSVEYMPFTLSLTLTLSAIVWFLYGLLIKDKYVALPNILGFTFGVIQMVLYVFYMNKTPVASQVKEGKEAWKAPAEDHVVVINVGKADKSSCAEVRPVTEMAGAVDVPRRCAAEAAAAPGVDFARSVNVV

SEQ ID NO: 9926 - protein, 480 aa, Pseudomonas putida KT2440
MSHKTYNNYIDGQWCEGHATLGNYSPSDTGDLIGQYHQASAEQARQAIQAARAAQPLWAASGLESRQQVLMAIGDELIARKEELGELLSREEGKPLAEGIGEVNRSGQFFHYYAAEVLRQMGETAASVRPGVDIEVHREPVGVVGIITPWNFPMATAAWKIAPALAFGNAVVFKPANLVPASAWALTEIISRQGLPSGTFNLVMGSGADVGEALIQSAEIDALTFTGSLQTGRRVAVATAGNLVRCQLEMGSKNALVVMDDADLELAVECALNGAFFGTGQKCTASSRLIVCDGIHDRFVEALRLRMRQLKVGHALEAGVQIGPVADARQLEQNLAYLQLAQAEGATLIEGGERLQLACDGYYMRPALFINSRNDMRINREEVFGPIACVIRVRDFEEALATLNDTEYGLTAGIITQSLRHASHFKRRAQTGCVMVNLPTAGTDYHVPFGGRKASSFGPREQGQYARDFYTVVKTTYLRP

SEQ ID NO: 9927 - protein, 374 aa, Arabidopsis thaliana
MLTCIACTKQLNTNNGGSKKQEEDEEEEDRVIETPRSKQIKSLTSQIKDMAVKASGAYKSCKPCSGSSNQNKNRSYADSDVASNSGRFRYAYKRAGSGSSTPKILGKEMESRLKGFLSGEGTPESMSGRTESTVFMEEEDELKEWVAQVEPGVLITFVSLPEGGNDMKRIRFSREMFDKWQAQKWWAENFDKVMELYNVQQFNQQSVPLPTPPRSEDGSSRIQSTKNGPATPPLNKECSRGKGYASSGSLAHQPTTQTQSRHHDSSGLATTPKLSSISGTKTETSSVDESARSSFSREEEEADHSGEELSVSNASDIETEWVEQDEAGVYITIRALPDGTRELRRVRFSREKFGETNARLWWEQNRARIQQQYL

SEQ ID NO: 9928 - protein, 224 aa, Hypocrea jecorina
MGYYDDEGSYHSLKHGVAKTIDKLLPHHHHHHHHSDHHHHSDHHDHNNTTITEHVEVDVVRHDANHSRRAAPATESQPQTVSIPCHHIRLGDFLMLQGRPCQVIRISTSSATGQYRYLGVDLFTKQLHEESSFISNPAPSVVVQTMLGPVFKQYRVLDMADGYVTAMTETGDVKQGLKVIDQSNLWSRLQQAFESGRGSVRVLVLNDGGHELAVEMKVVHGSRL

SEQ ID NO: 9929 - protein, 248 aa, Solanum tuberosum
MENSVPRTVEEVFSDFKSRRAALIKALTTDVEKFYQQCDPEKENLCLYGLPNETWEVNLPVEEVPPELPEPALGINFARDGMQEKDWLSLVAVHSDSWLLSVAFYFGARFGFGKSERKRLFQMINDLPTVFEVVTGAAKQTRDPPHNNSNKSKSSGKPRQPESQLKAVKVSPPKMENDSGEEEEEEEDEQGATLCGACGDNYATDEFWICCDICERWFHGKCVKITPAKAEHIKQYKCPSCSSKRAKV

SEQ ID NO: 9930 - protein, 487 aa, Arabidopsis thaliana
MVITANDLSKWENFPKGLKVLLLLNGCDSDGDGSSAAETRSELESMDYIVTTFTDETEALSAVVKNPESFHIAIVEVNMSAESESFKFLEAAKDVLPTIMISTDHCITTTMKCIALGAVEFLQKPLSPEKLKNIWQHVVHKAFNDGGSNVSISLKPVKESVVSMLHLETDMTIEEKDPAPSTPQLKQDSRLLDGDCQENINFSMENVNSSTEKDNMEDHQDIGESKSVDTTNRKLDDDKVVVKEERGDSEKEEEGETGDLISEKTDSVDIHKKEDETKPINKSSGIKNVSGNKTSRKKVDWTPELHKKFVQAVEQLGVDQAIPSRILELMKVGTLTRHNVASHLQKFRQHRKNILPKDDHNHRWIQSRENHRPNQRNYNVFQQQHRPVMAYPVWGLPGVYPPGAIPPLWPPPLQSIGQPPPWHWKPPYPTVSGNAWGCPVGPPVTGSYITPSNTTAGGFQYPNGAETGFKIMPASQPVSVNNSLFSF

SEQ ID NO: 9931 - protein, 155 aa, Populus nigra
GASDTVRTYHVNLSLFTSIPDFWGIGQLFPIVPIHRLDQRPGARGILSDLTCDSDGKIDKFIGGESSLPLHEIEGGGAGGNGGKYYLGMFLGGAYEEALGGIHNLFGGPSVVRVSQSDGPHSFLVTQAVPGPSCGDVLRVMQHEPELMFETLKHR

SEQ ID NO: 9932 - protein, 367 aa, Bacillus subtilis subsp. subtilis str. 168
MKKITVNQDKKLAYIEAGAELGEVYRTLWQYGLTLPAGTIANVGLTGLTLGGGIGLLTRAAGLTCDSLVQLEMIVADEKEGADLITVSCSNHPDLFWASQGGGGGNFGIVTSMTFKAVPISQVSIFSITWGWDDFEEVYNTWQNWPPYTDDRLTSSIEFWPKEVNRIEALGQFVGPKTELKKLLKPLLKAGSPTSGMVKTTPFIEAVTFFNSPGGNQPQKMKRSGSFIEKPLSERAISTIKHFLEHAPNQNASVWQQALGGAAGRVAPDQTAFYYRDAIIAQEYLTNWTSPGEKRQNVRWIEGLRTSLSKETMGDYVNWPDIEIRNWPRTYYGENVERLRRVKTTYDPENVFRFEQSIPPLRRSLFF

SEQ ID NO: 9933 - protein, 152 aa, Triticum aestivum
  misc_feature (136)..(136): Xaa can be any naturally occurring amino acid
MAPTVMASSATSVAPFQGLKSTAGLPVSRRSNGASLGSVSNGGRIRCMQVWPIEGIKKFETLSYLPPLSTEALLKQVDYLIRSKWVPCLEFSKVGFIFREHNASPGYYDGRYWTMWKLPMFGCTDATQVINEVEEXKKEYLTVFRIIGSTTS

SEQ ID NO: 9934 - protein, 359 aa, Gloeobacter violaceus PCC 7421
MSPYRVTLIRGDGIGPEVTQAARIVLDATGIDFEWVVVDAGAEVMEKSGTPLPAPVIEAVRASDAAIKGPITTPAGSGIRSVNVALRRALDLYANLRPARTLPGVHSRYDNIDLVVVRENTEDLYSGIEFEKNSPQALEVIEMLMRLGGKKIFPRSGLAVKPISSEASERIARFAFEYARRHARRKVTAVHKANILKHTDGLFLEAARQVASEYPDVEFEDRIVDNLCMQLVQRPESYDVLVLPNLYGDIVSDLTAGLVGGLGVAPGANIGDRSAVFEAIHGSAPRYAGQNKVNPSALILSGALLLRHLGEQEAAVRVEQAVAAVIAEGRSVTYDLAPAGATPAGTRQMAEAIAQKVAG

SEQ ID NO: 9935 - protein, 205 aa, Shigella boydii
LYICLRPVRYYQGTPSPVKHPELTDMVIFRENSEDIYAGIEWKADSADAEKVIKFLREEMGVKKIRFPEHCGIGIKPCSEEGTKRLVRAAIEYAIANDRDSVTLVHKGNIMKFTEGAFKDWGYQLAREEFGGELIDGGPWLKVKNPNTGKEIVIKDVIADAFLQQILLRPAEYDVIACMNLNGDYISDALAAQVGGIGIAPGANI

SEQ ID NO: 9936 - protein, 211 aa, Shigella boydii
LYICLRPVRYYQGTPSPVKHPELTDMVIFRENSEDIYAGIEWKADSADAEKVIKFLREEMGVKKIRFPEHCGIGIKPCSEEGTKRLVRAAIEYAIANDRDSVTLVHKGNIMKFTEGAFKDWGYQLAREEFGGELIDGGPWLKVKNPNTGKEIVIKDVIADAFLQQILLRPAEYDVIACMNLNGDYISDALAAQVGGIGIAPGANIGDECAL

SEQ ID NO: 9937 - protein, 176 aa, Triticum aestivum
  misc_feature (132)..(132): Xaa can be any naturally occurring amino acid
  misc_feature (158)..(158): Xaa can be any naturally occurring amino acid
MAPTVMASSATSVGPFQGLKSTVGLPVSRRSNGASLGSVSNGGRIRCMHVWPIEGGGKVDTLSYLPPLRTEALLEQVDYLIRSKWVPCLEFSKVGFIFRDHNTSPGYYDGRYWTMWKLPMFGCTDATQVINXVEEVKKEYPDAYVRIIGFDNMRQVQXCVSFIAFKPPGCEESGKV

SEQ ID NO: 9938 - protein, 310 aa, Alicyclobacillus acidocaldarius
  misc_feature (53)..(53): Xaa can be any naturally occurring amino acid
  misc_feature (64)..(64): Xaa can be any naturally occurring amino acid
  misc_feature (210)..(211): Xaa can be any naturally occurring amino acid
MPLDPVIQQVLDQLNRMPAPDYKHLSAQQFRSQQSLFPPVKKEPVAEVREFDXDLPGRTLKVRXYRPEGVEPPYPALVYYHGGGWVVGDLETHDPVCRVLAKDGRAVVFSVDYRLAPEHKFPAAVEDAYDALQWIAERAADFHLDPARIAVGGDSAGGNLAAVTSILAKERGGPALAFQLLIYPSTGYDPAHPPASIEENAEGYLLTGGXXLWFRDQYLNSLEELTHPWFSPVLYPDLSGLPPAYIATAQYDPLRDVGKLYAEALNKAGVKVEIENFEDLIHGFAQFYSLSPGATKALVRIAEKLRDALA

SEQ ID NO: 9939 - protein, 206 aa, Escherichia albertii
LYICLRPVRYYQGTPSPVKHPELTDMVIFRENSEDIYAGIEWKADSADAEKVIKFLREEMGVKKIRFPEHCGIGIKPCSEEGTKRLVRAAIEYAIANDRDSVTLVHKGNIMKFTEGAFKDWGYQLAREEFGGELIDGGPWLKVKNPNTGKEIVIKDVIADAFLQQILLRPAEYDVIACMNLNGDYISDALAAQVGGIGIAPGANIG

SEQ ID NO: 9940 - protein, 317 aa, Pseudomonas aeruginosa UCBPP-PA14
MIEVIVGAIRLEAQDIHSFELFRADGAALPSFEPGAHIDLHLPNGLVRQYSLCGPAERPRHYRIAVLRCRDSRGGSATLHAELRVGQRLRIGEPRNLFPLSPEPGPRLLFAGGIGITPLLAMAERLARDGANFQLHYCAHSAERAAFVDYLDRCAFADRVHCHFDHGDSSRRADLRALLAASPRDAQLYLCGPAGFMQWIEESARELGWEASRLHREHFAAAPRDANADGTFEVQLASNGALIRVAAGQTVLAALREAGVDLPASCEQGICGTCLTRVLDGEPEHRDLYLSEEEQAANDCFTPCCSRSRSPRLVLDL

SEQ ID NO: 9941 - protein, 205 aa, Shigella boydii
YICLRPVRYYQGTPSPVKHPELTDMVIFRENSEDIYAGIEWKADSADAEKVIKFLREEMGVKKIRFPEHCGIGIKPCSEEGTKRLVRAAIEYAIANDRDSVTLVHKGNIMKFTEGAFKDWGYQLAREEFGGELIDGGPWLKVKNPNTGKEIVIKDVIADAFLQQILLRPAEYDVIACMNLNGDYISDALAAQVGGIGIAPGANIG

SEQ ID NO: 9942 - protein, 169 aa, Nicotiana tabacum
MASQSSKPQSIYDFTVKDAKGNDVDLSIYKGKVLIIVNVASQCGLTNSNYTDMTEIYKKYKDQGLEILAFPCNQFGGQEPGSIEEIQNMVCTRFKAEYPIFDKVDVNGDNAAPLYKFLKSSKGGFFGDSIKWNFSKFLVDKEGNVVDRYSPTTTPASMEKDIKKLLGVA

SEQ ID NO: 9943 - protein, 332 aa, Schizosaccharomyces pombe
MNSNFSYPALGVDGISSQISPIRDVWSTNLQQEMNLIMSLIERYPVVSMDTEFPGVVARPLGVFKSSDDYHYQTLRANVDSLKIIQIGLALSDEEGNAPVEACTWQFNFTFNLQDDMYAPESIELLTKSGIDFKKHQEVGIEPADFAELLIGSGLVLQEEVTWITFHSGYDFAYLLKAMTQIPLPAEYEEFYKILCIYFPKNYDIKYIMKSVLNNSKGLQDIADDLQIHRIGPQHQAGSDALLTARIFFEIRSRYFDGSIDSRMLNQLYGLGSTGSVLWHNNSSTPQIQFRDLPGAHPSPTPSNAGIPTTLTNTSSAPNFANSTFRFPPRVV

SEQ ID NO: 9944 - protein, 329 aa, Bdellovibrio bacteriovorus HD100
MAQFDKKIQKIGVYTSGGDAPGMNAAIRAVVRVGISQKLEVYGIHNGYVGMIENKIEPLQLRDMANIIQRGGTILKTGRSTEFMRPEGRARAAQNIKNLGLDALVCIGGDGSFRGAHALWEEHQIPVVGVPGTIDNDIFGSDKTIGFDTAVNTALEAIDRIRDTAASHDRLFIVEVMGRNSGFIASHVGLAGGAEEIFTPDANTTVEKAIDRINEAKSRGKTSSIIITAEGQKPGRAYDLADAIRKKSGMDAKVCILGHQQRGGSPTAADRILASRMGAAAVDALFKGYCDVMIGTEGERLIQVPLDLVYKNEKKNQLDLISLASVLAT

SEQ ID NO: 9945 - protein, 319 aa, Zea mays
PSPPLPLKLYCRRESAPPPADQTSAMTTLATDTAAWTREEDKAFENAVAASAAPPADGPPDDGWFTALVASVPARTAEEVRRHYEALVEDVAAIEAGRIPLPRYAGEESSAATPEGSGAAGPSTPKDGGGGSGHRREERKGGVGADAGKSCSKAEQERRKGVPWTEEEHRLFLLGLDKFGKGDWRSISRNFVISRTPTQVASHAQKYFIRLNSMNRDRRRSSIHDITSVTAGEVATAGAPITGGGPTAAGAMPMGPGGMKHHHPVPPMGMYGHAPMGHPVAGHMVAPAAVGTPVMFPPGHHSPYVLPVGYPAPPTKMHQ

SEQ ID NO: 9946 - protein, 272 aa, Brassica napus
  misc_feature (88)..(88): Xaa can be any naturally occurring amino acid
VDPRVRNWLGIGLERKMKSSLVTVNRMFAKIISTRREEISRGEGEQLMDALTYYIKAAPASDRLLKPSNDTFIRDVAFSLLLAGRDTXTSSVLTWFFWLLSKHPHVLTKIRQEINTKFDPTYLEKLVYLHAALYETMRLYPPVPFNHKSPLKSDVLPSGHKVKAESKIVICIYALGRMRSVWGEDALDFKPERWISESGELKHEPSYKFMAFNAGPRACLGKHLALQQMKIVAVELIQNYDFKFTEGHKIEAVPSIVLRIKHGLSVTVTKKM

SEQ ID NO: 9947 - protein, 160 aa, Brassica napus
MSTKKIVLKSSDGESFEVDEAVALESQTIAHMVEDDCVDNGIPLPNVTSKILAKVIEYCKKHVDAAASKTEAVDGGGSSDDDLKAWDAEFMKIDQATLFELILAANYLNIKNLLDLTCQTVADMIKGKTPEEIRTTFNIKNDFSPEEEEEVRRENQWAFE

SEQ ID NO: 9948 - protein, 298 aa, Solanum tuberosum
MCGGAILYDIIPRDRRLSSTDLWPSSADFWQTSSFSKPISTQNVPPKPKRAQLSRGSEQMKKRQRKNLYRGIRQRPWGKWAAEIRDPRKRVRVWLGTFNTAEAARAYDREARKIRGKKAKVNFPNEDDDHYYSHPEPPPLNIVYESYDTTSTYNQESNNCYPFHSIENTEPVMEFAIANKNSSGSAYNGIEDQNVEGEEQTVKNSNNRIVEEEEKTEDEVQILSDELMAYESLMKFYEIPYVDGQSVAATVNPAADTEVGGGSMELWSFDDVSRLQPSYNVSLIIVLFKLLHLFSLLN

SEQ ID NO: 9949 - protein, 282 aa, Glycine max
MGGGGAMRTVAKFATAGIRGVPSVRRASSQTAAASEVSPLQAAAWDDVDDWEVADGGEGTPRVVLGGVPSFQEATSATTELKHAIDKIYLSSNSSECDGCSLSGHVSVMSPSHSELENKSRVTEAILNPSESNRALQAFQLLSECPEAQSVVASIACDPNIWNAIVQNPALQDFFQSQQTADFEVEETHDQRLGNLPYSDSVYAFIDSLNVLQNVKFTVSEMLSRVPNYLQNMFGFLSGQTSSAVIDARGNTKANFIDPITMGGTFMGLAVLVVMVIMLKRA

SEQ ID NO: 9950 - protein, 158 aa, Neurospora crassa
MDEYSGYRYAYASEPWIVSGSGVSPPPSNDDLSLPKATVQKIVSEILPSSTGLSFAKEARDLLIDLCVEFISLVSSEANEISEKESKKTIACDHITQALERLGFADYVPAVLEAAAEHKEVQKGREKKANKFEQSGLSLEELERIQREQFADAAARHT

SEQ ID NO: 9951 - protein, 285 aa, Methylococcus capsulatus str. Bath
MCDAQDWFTESYPDNGSALSLKIRAKLHEEQTPFQRIEIYDTESFGKLMVIDGCTMVSDRDNFLYHEMMTHPVLYTHPAPKTVWIIGGGDCGSLREVLKHSEVEKAVQIDIDERVTRLAERYFPELCEANGDPRAELLFIDGIQWVKEAPDGCVDVIIVDSTDPVGPAEGLFNEAFFRQCHRCLRTDGILVQQSESPLFHLPLIASMHRIMRQAGFAQTRTLFFPQFIYPSGWWSATMAGKGDLNRFRADAAEAKLFPTRYYNADIHRAAFAVPEFFGDALRELV

SEQ ID NO: 9952 - protein, 317 aa, Magnaporthe grisea 70-15
MSSGRKIKLNSGHEIPQSNPNEVAKAVEHALRNGYRHIDGALVYGNEHEVGEGIRASGVPRSDIFLTSKLWNTFHHPDDVEAGIDLTLRDLGTHYVDLYLIHWPVSFAPRENPRELFPIDPATGATHVVDIPDADTWRAMERLVESGKARSIGVSNFTRGRLEKLLQTARIRPAVNQIEAHPYLQQRELLEWHRQQGIVVQAYSPTGNNIYGRPKPLDDPVVLEVAARVGRTPAQVLVQWAAQRGTVVLPKSVTPSRIDENFVDFELPADEVEKLNALERHARYNFPARLGVDIFGEATEEELKAAVQAFIEQRRQA

SEQ ID NO: 9953 - protein, 509 aa, Xanthomonas campestris pv. campestris str. ATCC 33913
MNALPSAKSLNTDPQSIFKPRYDNFIGGAWVAPQGGQYFDNTTPITGKVFTSIARSTAPDIEAALDAAHAAKEAWGKTSTTDRSNVLLKIADRIEQNLELLAYAETWDNGKPVRETLNADVPLCVDHFRYFAGAIRAQEGGISEIDSDTIAYHFHEPLGVVGQIIPWNFPLLMACWKLAPALAAGNCVVMKPAEQTPASILVLMEVIGDLLPPGVLNVVNGFGLEAGKPLASNPRIAKIAFTGETTTGRLIMQYASQNLIPVTLELGGKSPNIFFADVMAEDDDFLDKAVEGFVLFAFNQGEVCTCPSRALIQESIYDTFMEKALKRVAAIKQGNPLDPNTMVGAQASSEQLEKILSYIDIGKQEGAEILIGGERNMLDGELSDGFYVKPTVFKGHNKMRVFQEEIFGPVVSVTTFKDEAEALAIANDTLYGLGAGVWSRDASRLYRMGRAIQAGRVWTNCYHAYPAHAAFGGYKQSGIGRENHKMMLDHYQQTKNLLVSYSPKALGFF

SEQ ID NO: 9954 - protein, 654 aa, Zea mays
MAGPEKTVVWFRRDLRIQDNPALAAAAKGGSVLPIFIWCPSDYGQYYPGRCSRWWLKQSLTHLGKSLELLGCPLVLIRAEDSTLAALLECVRSISATRVVYNRLYDPISLVLDNKIKNELPAHGISVQSFNGDLLYEPWDVYDENGQAFTTFNKYWEKCMNLPIEISQYLAPTRLVAAPGLANVRCCSIDDLGLESSKDVESSNALLSRAWSPGWRNAENMLEEFVSYGLLEYSEHGMKVGGSTTSLLSPYLHFGELSVRMIYQLVKMRQVKWQNEGKSEAEESVRLFLRSIGFREYSRYLCFNYPFTHERSFLGNLKHYPWLLDEGRFKSWRQGMTGYPLVDAGMRELWATGWTHNRIRVIVSSFAVKFLQIPWIWGMKYFWDVLLDADLESDILGWQYISGSLPDGHELSRLDNPEVQGQKYDPDGEYVRTWIPELARMPTEWIHSPWAAPNSILQVAGVELGFNYPKPIVELHMARECLDDAISTMWQLDTAAKLAELDGEVVDDNLNNIRNFDIPKVVLNKKLSPSTSSMEHRVLSTNGKDEKSQPTEVKALYKQIIRDDMMNDSNMDDTCSTANLKVTRKRSSSDSAFNVPSCSSSLVMESRIHHNEPSSVLYSGYFQKTADRDGTSKVEDNDSEDSGTSISRPSKKAA

SEQ ID NO: 9955 - protein, 466 aa, Mycobacterium tuberculosis CDC1551
MSRTRVYAVPVPGSAQSAYACGVERLLASYRSIPATASIRLAKPTSNLFRARVKHDARGLDASGLTGVIGIDPEARTADVAGMCTYEDLIAATLHYGLSPLVVPQLRTITLGGAVTGLGIESASFRNGLPHESVLEMDILTGAGELLTVSPGQHSDLYRAFPNSYGTLGYSTRLRIQLEPVRPFVALRHIRFSSLTAMVAAMERIIDTGGLDGESVDYLDGVVFSADESYLCIGMQTSVPGPVSDYTGQDIYYRSIQHEAGIKEDRLTIHDYFWRWDTDWFWCSRSFGAQNPRLRRWWPRRYRRSSVYWRLMALDQRFGIADRFENSRGRPARERVVQDIEVPIERTCEFLEWFGENVPISPIWLCPLRLRDHAGWPLYPIRPDRSYVNIGFWSSVPVGATEGATNRKIENKVSALDGHKSLYSDSFYTREEFDELYGGETYNTVKKAYDPDSRLLDLYAKAVQRR

SEQ ID NO: 9956 - protein, 367 aa, Glycine max
  misc_feature (149)..(149): Xaa can be any naturally occurring amino acid
  misc_feature (157)..(157): Xaa can be any naturally occurring amino acid
  misc_feature (262)..(262): Xaa can be any naturally occurring amino acid
MGSTGETQITPTHVSDEEANLFAMQLASASVLPMILKSALELDLLEIIAKAAPGVHLSPTDISSQLPTQNPDAPVMLDRILRLWACYNILSFSLRTLPDGKVERLYGLAPVAKYLVKNEDGVSIAALNLMNQDKVLMESWYLFDRCSPXGGIPFNKXAYGMTAFEYHGTDPRFNKVFNKGMADHSTITMKKILETYTGFESLKSLVDVGGGTGAVINMIVSKHPTIKGINFDLPHVIEDAPSYPGVEHVGGDMFASVPKADXAIFMKWICHDWSDEHCLKFLKNCYEALPDNGKVIVAECILPVAPDSSLATKGVVHIDVIMLAHNPGGKERTEKEFEALAKGSGFQGFRVVCCAFNTNIMEFLKKI

SEQ ID NO: 9957 - protein, 202 aa, Shigella boydii
YICLRPVRYYQGTPSPVKHPELTDMVIFRENSEDIYAGIEWKADSADAEKVIKFLREEMGVKKIRFPEHCGIGIKPCSEEGTKRLVRAAIEYAIANDRDSVTLVHKGNIMKFTEGAFKDWGYQLAREEFGGELIDGGPWLKVKNPNTGKEIVIKDVIADAFLQQILLRPAEYDVIACMNLNGDYISDALAAQVGGIGIAPGA

SEQ ID NO: 9958 - protein, 449 aa, Gibberella zeae PH-1
MGNGNSTPLQDCLNAVCANQSNCVRYPGDPLFAWWSTPFNLEFPVVPAAVIRPQTVIQVAETVKCATNHGAKVQALSGGHSYGMNNKTWYASFGAGMNLGELDEHLHANGRRAIAHGTCPGVGTGGHLTVGGLGPISRQWGSALDHILEIEVVTADGTVQRASYTKNSGLFWALRGAGASFGIVTKFMVKTHPEPGRVIQYSYKFAFTSHDEMAKLYREWQAVVGDPNMDRRFSSLFIVQPFGALITGTFFGTRSQFMITRIPSRLPGTFRSNAWITDWAALLLHEAEAVGCALGSVPTAFYGKSLSLSEQDLLSDKAITDLFKYLEQKRSELAPVTIIFNSEGGAMMDIPADATAYPHRNSIIMYQSYGIGVGKVSAATRELLDGVHKRIQRSAPGARSTYAGYIDPWADRKAAQKLYWADNLPRLRELKKAWDPTDVFHNPQSVDPA

SEQ ID NO: 9959 - protein, 211 aa, Shigella boydii
YICLRPVRYYQGTPSPVKHPELTDMVIFRENSEDIYAGIEWKADSADAEKVIKFLREEMGVKKIRFPEHCGIGIKPCSEEGTKRLVRAAIEYAIANDRDSVTLVHKGNIMKFTEGAFKDWGYQLAREEFGGELIDGGPWLKVKNPNTGKEIVIKDVIADAFLQQILLRPAEYDVIACMNLNGDYISDALAAQVGGIGIAPGANIGDECALF

SEQ ID NO: 9960 - protein, 124 aa, Zea mays
  misc_feature (76)..(76): Xaa can be any naturally occurring amino acid
  misc_feature (85)..(85): Xaa can be any naturally occurring amino acid
MAGCCVFLRWPSASPSRIGYRSLVDAAADDAAPPSTVTVVVGKERRAFAVDRLVLDSYPLRLLLETAARREERRAXGGAGAIFVXDVDAILFEHILWLACDARSVSQILHLDLKEIIDFYAQDA

SEQ ID NO: 9961 - protein, 459 aa, Anabaena variabilis ATCC 29413
MLTQLPNPISVPSWWQLINWIADPIGFQKKYSQKYGDIFSMQLAGIGSFVILGEPQAIQEIFTQDSRFDIGRGNKLAEPLIGRTSLMLMDGDRHRRERKLLMPPFHGEKLQAYAQQICLITHQIASQWQIGQPFVARSAMQKLSLEVIIQIVFGLANGERYQQIKPLFTDWLNMTDSPLRSSMLFLKSLQQDWGNRSPWGQMKYQQRCIYDLLQAEIEEKRTKENERRGDVLSLMMAARDENGQAMTDEELKDELLTILFAGHETTATTIAWAFYQIFRNVNVREKLQQELDSLGENPNPMEIAQLPYLTAVCQETLRMYPVLPTLFPRITKSSINIAGYQLEPNTTLMASIYLIHYREDLYPHPQQFRPERFIERQYSPSEYIPFGGGSRRCLGYALALLEIKLVIATVLSNYQLALAEDKPIKVQRRGFTLAPEGGVRMIMTGKKSLRFEQSNKIFN

SEQ ID NO: 9962 - protein, 203 aa, Shigella boydii
ICLRPVRYYQGTPSPVKHPELTDMVIFRENSEDIYAGIEWKADSADAEKVIKFLREEMGVKKIRFPEHCGIGIKPCSEEGTKRLVRAAIEYAIANDRDSVTLVHKGNIMKFTEGAFKDWGYQLAREEFGGELIDGGPWLKVKNPNTGKEIVIKDVIADAFLQQILLRPAEYDVIACMNLNGDYISDALAAQVGGIGIAPGANI

SEQ ID NO: 9963 - protein, 200 aa, Escherichia albertii
RPVRYYQGTPSPVKHPELTDMVIFRENSEDIYAGIEWKADSADAEKVIKFLREEMGVKKIRFPEHCGIGIKPCSEEGTKRLVRAAIEYAIANDRDSVTLVHKGNIMKFTEGAFKDWGYQLAREEFGGELIDGGPWLKVKNPNTGKEIVIKDVIADAFLQQILLRPAEYDVIACMNLNGDYISDALAAQVGGIGIAPGANI

SEQ ID NO: 9964 - protein, 121 aa, Zea mays
MSGENDNGGAKRRGSVKWFAAEKGFGFITPEDGGEDLFVHQSSIRSEGYRSLAEGESVEFLVEVDNSSGRTKAIEVTGPDGAPVQGTSRGSAGGRGGFGGDGYGGRGGGRGSYGGRGGGGG

SEQ ID NO: 9965 - protein, 345 aa, Thermoplasma acidophilum DSM 1728
METVAVKLTGTKFFDTGLSTGTYFLFETAFASVTLALVSVVVLRKMKMSAFMLFSIIYFIFIWTIPAAWIWNPTGWLYKLGVRDFAGGLVVHVASGFAALAIMVRIWQEEKKMGLKESKKENLNLNSGWLTLSIILLWVGWFGFNPGSELAFTTETVIVVITTFLAAASAMVSTMLTKFLVSKQDPGLIYAVNGVLMGLIVITPLAGYVSPGSAIILGLISGPIFVSAESIFSKHKWYSDPIGVLPGHMVGGIFGLLMIAFFTQTPFADASGASNLPNGILFGGGIMALHQLGLEAMAVVVVGAFVFTVSYASVYAISLLLNGILRDSEYSPARPANRLAKDTGA

SEQ ID NO: 9966 - protein, 274 aa, Arabidopsis thaliana
MSLFLKDDSIQIREVWNDNLQEEMDLIRDVVDDFPYVAMDTEFPGIVVRPVGTFKSNADYHYETLKTNVNILKMIQLGLTFSNEQGNLPTCGTDKYCIWQFNFREFDLDSDIFALDSIELLKQSGIDLAKNTLDGIDSKRFAELLMSSGIVLNENVHWVTFHSGYDFGYLLKLLTCQNLPDSQTDFFKLINVYFPTVYDIKHLMKFCNSLHGGLNKLAELLEVERVGICHQAGSDSLLTSCTFRKLKENFFVGPLHKYSGVLYGLGVENGQVAI

SEQ ID NO: 9967 - protein, 360 aa, Arabidopsis thaliana
MNEIHQPLARRVWRSNVDEEMARMAECLKRFPLIAFDTEYPGIIFRTYFDSSSDECYRAMKGNVENTKLIQCGFTLFNAKGEIGGVWEINFSNFGDPSDTRNELSIEFLRRHGLDLQKIRDEGVDMFGYGFFPKLMTVFRSQKHVEFVTFQGAYDFAYFLSILNHGKLPETHGEFATEVVKVFGQVYDTKVMAGFCEGLGEHLGLSKLAQLLQITRVGRAHHAGSDSLMTALVFIKLKHVYEDSRFARGLIYGIGKSNLVAAPAPAPVPEPTLPLMCQQNVASYPVFHNGYVQNYEQPQLVSYDPSGAPWAFCNATGTYVQLTHLPASTFAYPSQTPSATVDYLGPVPNYYNNNACYVVE

SEQ ID NO: 9968 - protein, 506 aa, Zea mays
MKTSVVVAALAAVLFAAQSYASLAGASGPRVIIVGAGMSGISAGKTLWEAGVRDLLILEATGRVGGRMHKHNFGGINVEIGANWVEGLGGDQLNPIWPLVNSTLKLRNFYSDFDSVVGNVYKENGGGLYDEEYVQKRMDRAYEVEELGANLTKKMHPSGRDDISVLAMQRLFNHQPNGPTTPVDMALDYFIYDYEFAEPPRVTSLQNTQPTPTNADFGEDNYFVADQRGYESIIHSIGSSYLSTDGNGKLKDRRILLNKVVRQITYNKQGVVVKTEDGSSYRADYVVVSTSLGVLQTDLIQFKPQLPFWKIAAIYSFDMGVYTKIFLKFPERFWPVGEGKQFFMYASSRRGYYALWQSFEREYPGANVLLATVTDDESRRIERQSDDQTKAEVAEVLRDMFPAADVPGPDQIDVYVPRWWSDRFFKGSYSNWPVGVSRYEYDQLRAPVGRVYFTGEHTSERYNGYVHGAYLAGIDSANILINYIFKNEEYKVRGKYDVDDLIAQAR

SEQ ID NO: 9969 - protein, 167 aa, Ipomoea nil
MDLRNFGLSNFGLEPQLLSTIQDMLDFADDHDRAGRAPPEQPIRAYVRDAKAMAATPADVKEYPNSYVFIADMPGVKAAEIKVQVEDDNVLVVSGERTEREKDEKDGVKYLRMERRVGKFMRKFVLPENANVEAINAVYQDGVLQVTVEKLPPPEPKKPKTVEVKVA

SEQ ID NO: 9970 - protein, 205 aa, Shigella boydii
PVRYYQGTPSPVKHPELTDMVIFRENSEDIYAGIEWKADSADAEKVIKFLREEMGVKKIRFPEHCGIGIKPCSEEGTKRLVRAAIEYAIANDRDSVTLVHKGNIMKFTEGAFKDWGYQLAREEFGGELIDGGPWLKVKNPNTGKEIVIKDVIADAFLQQILLRPAEYDVIACMNLNGDYISDALAAQVGGIGIAPGANIGDECAL

SEQ ID NO: 9971 - protein, 427 aa, Coxiella burnetii RSA 493
MTELTGVSIVTYQHIKVPSQGEKITVNKAVLEVPDRPIIPFIEGDGIGIDIAPVMKNVVDAAVEKSYAGKRKIEWMEIYAGEKATKVYGKDNWLPDETLEAIKEYQVAIKGPLTTPVGGGIRSLNVALRQQLDLYVCLRPVRYFTGVPSPVKTPEKVNMVIFRENSEDIYAGIEWPAGSPEAVKLINFLQNEMGVKKIRFPETAGIGIKPVSKEGTSRLVRRAIQYAIDNDRDSVTLVHKGNIMKFTEGAFKDWGYEVAVKEFGAKPLDGGPWHVFENPKTGQKITIKDVIADAFLQQILLRPAEYSVIATLNLNGDYISDALAAEVGGIGIAPGANLSDTVGLFEATHGTAPKYAGQDKVNPGSLILSAEMMLRYLGWKEAADLVVQGIEGAIESKTVTYDFARLMTGAKEVSTSQFGKAIIKHIL

SEQ ID NO: 9972 - protein, 391 aa, Ralstonia eutropha JMP134
MLREHGLAITTHFYREMFAARPELTQLFNMGNQANGSQQQSLASAVFAYAANIDNANALAPVVERIVHKHAAVGLKPAHYPIVGRHLLGAISAVLGEAATPDLIAAWDEAYWLLAGELIAAEARLYQSTGMAAGERIAVRVDRREVQSDTVVALTLSAVDGQPLRDFRPGQYVSVEVTLDDGNRQQRQYSLSAERGLPTWQISVKREDGDHATPAGAVSNWLHANAQPGTELSVSAPFGDFAPRLDNHRPIVLLSAGIGITPMLSVLRTLAAQGSRREILFAHAARDGRHHAHRADVAWARERLPQLRTHISYEQPQAADVAGRDYDHAGTMPVAALLDAPDNRLFIDGDFHLCGPLGFMQAQRHALISAGVPVGHIHREVFGPDLLDDLL

SEQ ID NO: 9973 - protein, 252 aa, Arabidopsis thaliana
MALIREVVDDFPFVAMDTEFPGIVCRPVGTFKTNTEYHYETLKTNVNILKMIQLGLTFSDEKGNLPTCGTDNKYCIWQFNFREFDLESDIYATDSIELLRQSGIDFVKNNEFGIDSKRFAELLMSSGIVLNENVHWVTFHSGYDFGYLLKLLTCQNLPETQTGFFEMISVYFPRVYDIKHLMKFCNSLHGGLNKLAELLDVERVGICHQAGSDSLLTSCTFRKLQENFFIGSMEKYSGVLYGLGVENGQIVH

SEQ ID NO: 9974 - protein, 455 aa, Coxiella burnetii RSA 493
MPIRTTNPSTGEVIKTYQEMTDQQVEDIINDVHYDYEKWRSVGFKERGGKLRRIAERLRKNKTDYAKLIATEMGKPITAGEAEAEKCAWVCDYYADHAEALLKPRIVNTDWKKSYVTYQPSGVIFGIMPWNFPLWQVFRFAAPNLMAGHGCLLKHASISTGTALAIEKLIQSADLPDNIFRTLVINTEKASDVISHPKISAVTLTGSEGAGKAVGSAAGKALKKVVLELGGNDAYLILKDADLEKAAEACVESRLSNSGQSCIAAKRLIIVENVYDEFKALVIEKAQSYRMGDPLKKETELGPLARSDLRDTVHGQVRESIDKGALLETGGEIPESKGFYYPPTVLSGVRAGQPAFDDEVFGPVIALIRAKDEKHAIEIANNSKFGLGAAVFTNDNERGEKIAASELQAGTCVVNTFVKSDPRLPFGGVKHSGYGRELAAEGIRSFMNVKTVVVD

SEQ ID NO: 9975 - protein, 278 aa, Zea mays
MDSSSFLPAAGAENGSAAGGANNGGAAQQHAAPAIREQDRLMPIANVIRIMRRVLPAHAKISDDAKETIQECVSEYISFITGEANERCQREQRKTITAEDVLWAMSRLGFDDYVEPLGAYLHRYREFEGDARGVGLVPGAAPSRGGDHHPHSMSPAAMLKSRGPVSGAAMLPHHHHHHDMQMHAAMYGGTAVPPPAGPPHHGGFLMPHPQGSSHYLPYAYEPTYGGEHAMAAYYGGAAYAPGNGGSGDGSGSGGGGGSASHTPQGSGGLEHPHPFAYK

SEQ ID NO: 9976 - protein, 326 aa, Candida albicans SC5314
MKLATEIDFKLNNGKTIPALGLGTVASKDPKDVKDQVITAVKAGYRHIDTAWFYGTEKYIGEALQELFAEGIIKREDLFITTKFWPSYWANPEKSLDESLKDLQLDYVDLFLQHWPICLHGDENGLPKIPKDENGELIYDDDPTPNGTKYIDVYHKLEDILETTTKVRSIGVSNYSIPKLRQLLPKVKKHIPVCNQIEYHPQLPQQDLVDYCTKNNILISCYSPVGSYGAPVLKIPLVKQLAEKYQVTENEIADAYNILNGRVTLPRSSNLERIKTIIRLPHLTKEELDELYQVGVKDPQRYICDPWGYGIGFRWWKGDTLSKEFD

SEQ ID NO: 9977 - protein, 113 aa, Triticum aestivum
MAPTVMASSATSVAPFQGLKSTAGLPVSRRSNGASLGSVSNGGRIRCMQVWPIEGIKKFETLSYLPPLSTEALLKQVDYLDPLQSGLPLPLSSKVRFNPSVEAKMRPRVNRAA

SEQ ID NO: 9978 - protein, 148 aa, Brassica napus
  misc_feature (6)..(6): Xaa can be any naturally occurring amino acid
  misc_feature (12)..(12): Xaa can be any naturally occurring amino acid
  misc_feature (14)..(14): Xaa can be any naturally occurring amino acid
  misc_feature (17)..(20): Xaa can be any naturally occurring amino acid
  misc_feature (32)..(32): Xaa can be any naturally occurring amino acid
  misc_feature (37)..(37): Xaa can be any naturally occurring amino acid
  misc_feature (39)..(39): Xaa can be any naturally occurring amino acid
  misc_feature (42)..(42): Xaa can be any naturally occurring amino acid
  misc_feature (47)..(48): Xaa can be any naturally occurring amino acid
  misc_feature (53)..(56): Xaa can be any naturally occurring amino acid
  misc_feature (59)..(59): Xaa can be any naturally occurring amino acid
  misc_feature (68)..(68): Xaa can be any naturally occurring amino acid
  misc_feature (71)..(71): Xaa can be any naturally occurring amino acid
  misc_feature (73)..(73): Xaa can be any naturally occurring amino acid
  misc_feature (77)..(77): Xaa can be any naturally occurring amino acid
  misc_feature (99)..(99): Xaa can be any naturally occurring amino acid
  misc_feature (102)..(102): Xaa can be any naturally occurring amino acid
  misc_feature (105)..(105): Xaa can be any naturally occurring amino acid
  misc_feature (107)..(107): Xaa can be any naturally occurring amino acid
  misc_feature (109)..(109): Xaa can be any naturally occurring amino acid
  misc_feature (111)..(112): Xaa can be any naturally occurring amino acid
  misc_feature (114)..(114): Xaa can be any naturally occurring amino acid
  misc_feature (116)..(116): Xaa can be any naturally occurring amino acid
  misc_feature (119)..(119): Xaa can be any naturally occurring amino acid
  misc_feature (126)..(126): Xaa can be any naturally occurring amino acid
  misc_feature (128)..(128): Xaa can be any naturally occurring amino acid
  misc_feature (131)..(131): Xaa can be any naturally occurring amino acid
  misc_feature (139)..(139): Xaa can be any naturally occurring amino acid
  misc_feature (144)..(144): Xaa can be any naturally occurring amino acid
KREQVXASSMFXSXAVXXXXAQATMVAPFTGXLKSSXAXPVXRKANXXITSIXXXXGRXSCMKVWPPXGKXKXESLXYLPDLTEVELGKEVDYLLRNKXIPXVEXEXEXGXXYXEXGSXPGYYDGXYXTMXNLPLVGCXDSAQXLEGS

SEQ ID NO: 9979 - protein, 402 aa, Pseudomonas putida KT2440
MENMHSAMDSLVHGSNTLFILMGAILVLAMHAGFAFLEVGTVRHKNQVNALSKILSDFAISALVYFFIGYWIAYGVNFFQPATTLAVDHGYALVKCFFLLTFAAAIPAIISGGIAERARFVPQLCATALIVAFVYPFFEGVVWNGNLGLQAWLQARFGAPFHDFAGSVVVHAMGGWLALAAVLLLGARRGRYRDGRLVAFAPSSIPFLALGSWILIIGWFGFNVMSAQTLQGVSGLVAINSLMAMVGGTLSALLAGRNDPGFLHNGPLAGLVAICAGSDLMHPVGALATGLVAGALFVWTFTAAQNRWKIDDVLGVWPLHGLCGVWGGIACGVFGQVALGGMGGVSLVSQLLGSLMGVLVALAGGFAVYGAIRALHGLRLSHEQEFQGADLSLHRIGATSQD

SEQ ID NO: 9980 - protein, 187 aa, Triticum aestivum
SPPLPSPRAPPSPSSSSIPMQQRRGRPSGTDGSDFSYRMVVDSRYQRVADGRSRLARLMLVQTLHQVAGGALLLLSLSKGAEINKFAVLSLAAGLLAILLGEFGRRRTVAVFLRLYTSLSSIAIAFSVTCIIRSDLFVKITKQNTAAITSYEMFDVVRVALGVLLQLVVIATTTRLLQNMSPPKRTS

SEQ ID NO: 9981 - protein, 123 aa, Oryza sativa (japonica cultivar-group)
MIQPQTLLNVADNSGARKLMCIRVIGAASNQQYARIGDVIVAVIKDAVPQMPLERSQVIRAVIVRTCKEFKCEDGIIIRYDDNAAVIIDQKGNPKGTRVFGTIVEELRELNFTKLVSLAPEVL

SEQ ID NO: 9982 - protein, 230 aa, Helicobacter pylori J99
MALYDRANSRNAYAEDSVLHESELVSFVKTTYKFFAGSLLLATVGALLGLMNFQAVVQYKWVFFIAEIVAFFGLMFSKSKPGLNLFMLFAFTSLSGVTLVPLLGMVIAKAGLGAVWQALGMTTIVFGLMSVYALKTKNDLANMGKMLFIALIVVVVCSLINLFLGSPMFQVVIAGASAILFSLYIAYDTQNIVKGMYDSPIDAAVSLYLDFLNVFISILQIIGIFSDRDK

SEQ ID NO: 9983 - protein, 269 aa, Fischerella sp. Cohn [sequence omitted]

SEQ ID NO: 9984 - protein, 337 aa, Methanococcoides burtonii DSM 6242
MSKTAAVIEGDGVGPELVDAMVKVAEAVGTNVEFVKCEAGVQWWEKNGGATLIPDETWALLDEADACFKGPTTTPGGAGSPRSVAVSIRQKYNLYANVRPIKTFPNTNNPLGDVDFVCVREGTEGMYIGEEVKLTDDVYIAIRKITRPACKNIATYSFEEAKKRGYDTVVPIHKSNILKMTCGTFLEEVEKVAEGYPGIDVWEYHVDNIAQQLIKNPQLFNNKILLSTNLFMDVISEECSALIGSIGLIYSANIGDNFAMFEPAHGSAPKYAGLDKVNPVATILAGAWMLDYLGESDKFAQIFKATEDVISEGKHLTYDLGGKASLSEMTDAIISKL

SEQ ID NO: 9985 - protein, 526 aa, Glycine max
MESRTKSNPQLTRALCYANDGNQQGRSPSVIVIGGGMAGIAAARSLHDASLQVVLLESRERIGGRIHTDYSFGFPVDMGASWLHGVSNENPLASVIGRLGLPLYRTSGDNSILYDHDLESYGLFDMDGKQVPQELVAKVGEIFEAILQETDKIRQESSEDMSVLRGLSIVFDRKPELRLEGIAYKVLQWYLCRLEGWFAADTDAISLKGWDQEVLLPGGHGLMVRGYLPVVNSLAKGLDIRLGHRVTKVVRRYNGVKVTVENGKTFFADAAVIAVPLGVLKAKKILFEPKLPDWKEAAIADLGIGLENKIILHFENVFWPNVEFLGVVADTPYECSYFLNLHKATGRAVLVYMPSGQLAKDVEKMPDEAAVNFAFMQLKKIFPDASSPIQYLVSRWGSDINSLGSYSYDAVGKPHELYERLRVPVDNLFFAGEATSMSYPGSVHGAYSTGTMAAEDCRMRVLERYGEVDLFQPVMGEEGSMGSVCSASLLLCLIDLDMRNVQCINIQTFHFSIALSIFEQIKNEFC

SEQ ID NO: 9986 - protein, 386 aa, Triticum aestivum
  misc_feature (325)..(325): Xaa can be any naturally occurring amino acid
MEKNHTLVPVPSHTSPSLPPRSLARRGSGPRTQARNRLDSPTHPDRALELPAELAAMLSARTAAAASPAASLWKRGGGAGARGDGCTSCLEVRRRAAAVTVRAAQPKRVEAVAMESAAETAEAEKEVAAEKEVAAAGGGVEDKYGEDRATEELPVTPWAFSVASGYTLLRDPHHNKGLAFTERERDAHYLRGLLPPGVVSQDLQVKKIMHNLRQYKVPLQRYVAMMDLQERNERLFYKLLIDNVEELLPVVYTPTVGEACQKYGSIFRRPQGLYVSLRDKGKVIDVLRNWPERNIQVIVVTDGERILGLGDMGCQGMGIPVGKLXSYTALGGVRPTACLPITIDVGTNNEQLLNDEFYIGLRQRLATGEEYHELTEEFMVAVKQIY

SEQ ID NO: 9987 - protein, 177 aa, Magnaporthe grisea 70-15
MSVSCRYAAQCCSRQLRVSPSVRVSGVAVQRIARRHNSTEAASPKITTIVDQISQLTLLETAELVSSLKSRLNIPDLPVGGFAAAAPAAAPAAAEEADEPAPAAAAKTVFTLKLMSFDAGAKAKIIKEVKGLLGLSLVDSKKFVESAPKVMKESVPKEDAEKIIATMKELGAVVTME

SEQ ID NO: 9988 - protein, 405 aa, Bacillus thuringiensis serovar konkukian str. 97-27
MPKHRKQSKIKIYRITSYKKDKRSELDSDKFELEQQEVENKQGKHSKQDKQDKQDNLDKQDNLDKQDNLDKQDNLDKPDNLDKPDNLDKQDNLDKQVQSENVVIVPTDSHNLDIWDEISLKEIQAGEHTNLFAEQSNYQNINLLQVSDIRLYLDKQLQFSSIDEQIYHEALVHPIMSKVIDPKRVLILGGGDGLALREVLKYETVLHVDLVDLDGSMIDMARNVPELVSLNKNAFFDNRVNTHVCDAKEFLSSPSSLYDVIIIDFPDPATELLSTLYTSELFARIATFLTEDGAFVCQSNSPADAPLVYWSIGNTIEHAGLTVKSYHTIVPSFGTDWGFHIAANSADVLDQIEQLYVVPTPRTLPSLLFPLFQFKEEHLEQRNFALLNSESNLILHQCYKKEMEF

SEQ ID NO: 9989 - protein, 126 aa, Zea mays
MPVAASLMAIELEKDQLAWAEQQRQQNRRQTMVVCRKSAAAVAKGQQRQNASPPSPKPPPAGGLSAEAFLVLACVAVSLIVLPLVLPPLPPPPPLLLLVPVCLLLLLAALATFMPSDVRSMPSSNL

SEQ ID NO: 9990 - protein, 142 aa, Escherichia coli
RDLELARRFAQAIHAKYPGKLLAYNCSPSFNWQKNLDDKTIASFQQQLSDMGYKFQFITLAGIHSMWFNMFDLANAYAQGEGMKHYVEKVQQPEFAAAKDGYTFVSHQQEVGTGYFDKVTTIIQGGTSSVTALTGSTEESQF

SEQ ID NO: 9991 - protein, 198 aa, Shigella boydii
VRYYQGTPSPVKHPELTDMVIFRENSEDIYAGIEWKADSADAEKVIKFLREEMGVKKIRFPEHCGIGIKPCSEEGTKRLVRAAIEYAIANDRDSVTLVHKGNIMKFTEGAFKDWGYQLAREEFGGELIDGGPWLKVKNPNTGKEIVIKDVIADAFLQQILLRPAEYDVIACMNLNGDYISDALAAQVGGIGIAPGANI

SEQ ID NO: 9992 - protein, 169 aa, Zea mays
MGERVKGTVKWFNVTKGFGFISPDDGGEDLFVHQSSIKSDGYRSLNENDAVEFEIITGDDGRTKANDVTAPGGGALSGGSRPVEGGGDRGGRGGYGGGGGGYGGGGGGYGGGGGGYGGGGGGYGGGGYGGGGGGGRGCYKCGEEGHISRDCPQGGGGGYGGGEYGGRDR

SEQ ID NO: 9993 - protein, 201 aa, Shigella boydii
VRYYQGTPSPVKHPELTDMVIFRENSEDIYAGIEWKADSADAEKVIKFLREEMGVKKIRFPEHCGIGIKPCSEEGTKRLVRAAIEYAIANDRDSVTLVHKGNIMKFTEGAFKDWGYQLAREEFGGELIDGGPWLKVKNPNTGKEIVIKDVIADAFLQQILLRPAEYDVIACMNLNGDYISDALAAQVGGIGIAPGANIGDE

SEQ ID NO: 9994 - protein, 243 aa, Triticum aestivum
  misc_feature (27)..(27): Xaa can be any naturally occurring amino acid
SPLWALALMNQDKVLMESWNYLKDTVXLDGGIPFNKAYGMSAFEYPGTDPRFNHVFNEGMKNHSIIITKKLLESYKGFEGLNTLVDVGGGVGATVAAITAHYPTIKGINFDLPHVISEAPPFPGVTHVGGDMFQKVPSGDAILMKWILHDWSDEHCGTLLKNCYNALPPHGKVVLVECILPVNPEATPKAQGVFHVDMIMLAHNPGGRERYEREFEALAKGAGFATMKTTYIYANAWAIEFTK

SEQ ID NO: 9995 - protein, 511 aa, Physcomitrella patens
MAMDMARIEVEPLVEVHNNTNNLLVHCVLDALPDSSPCLKSSETSFEAVVVKEDEEGGRPLFGKPELHPASPSSDTAAAANGEFARCLNFVTEADCGDVGVQCFEDFGTLPDCGEAGISREEGGGRDGEQVELLESMSLDGSRNSENLELGELGELLQGSETLDSVPGNEVGEEEALLLAKAAKATGVVVSASDSGECSSVDRKENQQSPKSCKSAAPGKKKAKVDWTPELHRRFVHAVEQLGVEKAFPSRILELMGVQCLTRHNIASHLQKYRSHRRHLAAREAEAASWTHRRAYTQMPWSRSSRRDGLPYLVPLHTPHIQPRPSMVMAMQPQLQTQHTPVSTPLKVWGYPTVDHSSVHMWQQPAVATPSYWQAPDGSYWQHPATNYDAYSARACYPHPMRVSLGTTHAGSPMMAPGFPDESYYGEDVLAATMYLCNQSYDSELGRAAGVAACSKPPETHLSKEVLDAAIGEALANPWTPPPLGLKPPSMEGVIAELQRQGINTVPPSTC

SEQ ID NO: 9996 - protein, 205 aa, Shigella boydii
VRYYQGTPSPVKHPELTDMVIFRENSEDIYAGIEWKADSADAEKVIKFLREEMGVKKIRFPEHCGIGIKPCSEEGTKRLVRAAIEYAIANDRDSVTLVHKGNIMKFTEGAFKDWGYQLAREEFGGELIDGGPWLKVKNPNTGKEIVIKDVIADAFLQQILLRPAEYDVIACMNLNGDYISDALAAQVGGIGIAPGANIGDECALF

SEQ ID NO: 9997 - protein, 150 aa, Chlamydophila pneumoniae TW-183
MQLLSPAFAYGAPIPKKYTCQGAGISPPLTFVDVPGAAQSLALIVEDPDVPKEIRSDGLWIHWIVYNLSTTITNLAEGAEIFAVQGLNTSGKPVYEGPCPPDKQHRYFFTLFALDVVLPEEENVTRDQLYEAMEFHIIEQAELMGTYEKS

SEQ ID NO: 9998 - protein, 196 aa, Shigella boydii
VRYYQGTPSPVKHPELTDMVIFRENSEDIYAGIEWKADSADAEKVIKFLREEMGVKKIRFPEHCGIGIKPCSEEGTKRLVRAAIEYAIANDRDSVTLVHKGNIMKFTEGAFKDWGYQLAREEFGGELIDGGPWLKVKNPNTGKEIVIKDVIADAFLQQILLRPAEYDVIACMNLNGDYISDALAAQVGGIGIAPGA

SEQ ID NO: 9999 - protein, 181 aa, Lactuca sativa
MASISSSAIATVNRTTSTQASLAAPFTGLKSNVAFPVTKKANNDFSSLPSNGGRVQCMKVWPPIGLKKYETLSYLPPLSDEALSKEIDYLIRNKWIPCLEFELEHGFVYREHHHSPGYYDGRYWTMWKLPMFGCTDSAQVMKEVGECKKEYPNAFIRVIGFDNIRQVQCISFIVAKPPGVL

SEQ ID NO: 10000 - protein, 180 aa, Stellaria longipes
MASSIMSSAAVATRSNGAQASMVAPFTGLKSNASFPVSRKTNLDITSIASNGGRVRCMQVWPPINMKKYETLSYLPDLSSEQLLSEIEYLLKNGWVPCLEFETEHGFVYREHTSSPGYYDGRYWTMWKLPMFGCTDATQVAAEVQEAKKAYPDAHIRIIGFDNVRQVQCISFIAYKPEAF

SEQ ID NO: 10001 - protein, 159 aa, Zea mays
MASDRVLGTVKWFNGTKGFGFITPDDGSEDLFVHQSSIKSDGYRSLNDGDAVEYTVGSGNDGRAKALDVTAPGGGPLAGGERPDGGNGGGRGGYGGGDRGYGGGGDRGYGGGGDRGYGGGDRGYGGGGDRGYGGGGDRGYGGGGGYGGGYGGGGGGGGP

SEQ ID NO: 10002 - protein, 414 aa, Arabidopsis thaliana
MGLCWGSPSDSPPTTTPSSTGNISSVGTFKSSNNTTTTGTSRGSNISSNSGFSVASGEDAYPDGQILPIPNLRIFSLAELRASTRNFRSENVLGEGGFGKVFKGWLEDKTPGKQSNGTVIAVKKLNAESFQGFEEWQCEVNFLGRVSHPNLVKLLGYCLEGEELLLVYEYMQKGSLENHLFRKGSAVQPLSWEIRLKIAIGAAKGLAFLHASEKQVIYRDFKASNILLDGSYNAKISDFGLAKLGPSASQSHITTRVMGTHGYAAPEYVATGHLYVKSDVYGFGVVLAEILTGLHALDPTRPTGQHNLTEWIKPHLSERRKLRSIMDPRLEGKYPFKSAFRVAQLALKCLGPEPKNRPSMKEVVESLELIEAANEKPLERRTTRASPSIRQQQGHYRPQQLSSFRPRQNVSRAH

SEQ ID NO: 10003 - protein, 507 aa, Streptomyces avermitilis MA-4680
MAARAAGRRPCLTRTTPQEAIVPDLFIDGEWRAALDGRTREIRCPADGSLVGVVDEAGGKDTAEAIAAARRAFDEGPWPWLPAADRGDLLLRVADLLVRDRAKLARAESLDTGKRFVESEYDIDDIVNCFRYFGRLAAAESGRVIDTGSASTDSRVVYEPVGVCALITPWNYPLLQTAWKVAPALAAGNTFVLKPSELTPHTAIHLMRLLQEAELPPGVANLVLGAGPEAGAPLADHPDVDLVSFTGGLHTGRRLMAAAAGTVKKVALELGGKNPNIVFADADFDTAVDMALTAVFLHSGQVCSAGARLLVEDSLHDRFVDEVVRRAAEIRLGGPFDERAQTGALISAAHRAKVEAYVAKGLDEGAVLRCGGRRPEGLDEGFFYLPTVLDECTSGMSVIQDESFGPVLTVERFTGEAEAVRLANDTVYGLAGAVWTTDEAKAQRVVSRLRIGTVWINDYHPYVPQAEWGGYKQSGFGRELGPSGLAEYREAKHIWRNTDPSPQGWFA

SEQ ID NO: 10004 - protein, 168 aa, Zea mays
  misc_feature (49)..(49): Xaa can be any naturally occurring amino acid
  misc_feature (51)..(51): Xaa can be any naturally occurring amino acid
  misc_feature (73)..(73): Xaa can be any naturally occurring amino acid
  misc_feature (79)..(79): Xaa can be any naturally occurring amino acid
  misc_feature (92)..(92): Xaa can be any naturally occurring amino acid
  misc_feature (104)..(104): Xaa can be any naturally occurring amino acid
  misc_feature (127)..(127): Xaa can be any naturally occurring amino acid
  misc_feature (147)..(147): Xaa can be any naturally occurring amino acid
MDRADPARGRLAVLSSHLRGAGVEEASVLERSPVSAAAPGSRDGALAVXNXRTGKRHEVKVSEEGTVRATDFXEITTGXDDKGLKIYDPGYXLNTAPVRSSIWXIDEEEEFLRYRVYPTETLGESTXFVEGALPFYGRGNLPTQRSXWAGGNFAISQNFGGPQGTGGK

SEQ ID NO: 10005 - protein, 427 aa, Salmonella enterica subsp. enterica serovar Typhi Ty2
MADTKAKITLTGDTAIELDVLKGTLGQDVIDIRSLGSKGVFTFDPGFTSTASCESKITFIDGDEGILLHRGFPIDQLATDSNYLEVCYILLYGEKPTQEEYDEFRTTVTRHTMIHEQITRLFHAFRRDSHPMAVMCGITGALAAFYHDSLDVNNPRHREIAAFRLLSKMPTMAAMCYKYSIGQPFVYPRNDLSYAGNFLNMMFSTPCETYEVNPVLERAMDRILILHADHEQNASTSTVRTAGSSGANPFACIAAGIASLWGPAHGGANEAALKMLEEISSVKHIPEFVRRAKDKNDSFRLMGFGHRVYKNYDPRATVMRETCHEVLKELGTKDDLLEVAMGLEHIALNDPYFIEKKLYPNVDFYSGIILKAMGIPSSMFTVIFAMARTVGWIAHWNEMHTDGMKIARPRQLYTGYDKRDFKSALKR

SEQ ID NO: 10006 - protein, 195 aa, Zea mays
APAFCELSLPLTKEKGAAFSPSHPAMQRHVASGRPSGTDGSDFSYRMVVESRYQRVAEGRSRLARLILVQALHLVAGGLLLLLSLSKGAAVNKFAVLSMAAGFLAIVVGELGRMRTMAVLLRLYTSLSSIAVAFSVTCIIRSELFLKVMKQNTEAITSYEMLDAVRVALGILLQMVVIATTTRLLQNMSPPKRAS

SEQ ID NO: 10007 - protein, 78 aa, Triticum aestivum
SARGPIGVSRYEYDQLRAPVGRVYFTGEHTSERYNGYVHGAYLAGIDSANILINHIFKNEEYKVRGKYEPDDQIAKAK

SEQ ID NO: 10008 - protein, 165 aa, Triticum aestivum
  misc_feature (49)..(49): Xaa can be any naturally occurring amino acid
  misc_feature (63)..(63): Xaa can be any naturally occurring amino acid
  misc_feature (67)..(67): Xaa can be any naturally occurring amino acid
  misc_feature (78)..(79): Xaa can be any naturally occurring amino acid
  misc_feature (84)..(84): Xaa can be any naturally occurring amino acid
  misc_feature (86)..(86): Xaa can be any naturally occurring amino acid
  misc_feature (89)..(90): Xaa can be any naturally occurring amino acid
  misc_feature (94)..(94): Xaa can be any naturally occurring amino acid
  misc_feature (140)..(140): Xaa can be any naturally occurring amino acid
  misc_feature (142)..(142): Xaa can be any naturally occurring amino acid
  misc_feature (144)..(146): Xaa can be any naturally occurring amino acid
MAAFLRSKCSPVGRTLMGSLGNSLFGAANSSVGAITRPSHCDAISQQIXRTFIQMRTNLKVVXDNSXGAKPVRCIHSXXGKKGXRXGKXXNRFXKEAHPRGKVKKGDVVYGVVVRAAMKKGRSDGSESVRRQRVVLVNKXGXLXXXRVFGPSPQLRKKNTQDLAC

SEQ ID NO: 10009 - protein, 423 aa, uncultured bacterium
MAETITIIDDRTGKRVTVPIHDGVFASSALRELDPTLRMYDPAFLSTAACASSITYVDGDAGVMRYRGYPIEQLAAKSTFLEVAYLLLNGELPTKDQLDAWSFDVTHHTMVHENMRKTICHGFHYDAHPMGMFISAIAALGTFYVDAKDISNVKVLNKQILRLVAKVPTIAAMTYRFSSGLPFVLPNNSMGYAQNFLNMMYRIGDDYVVNPVLARALDVLFILHADHEQNCGTTAMRIVELTTHTDPYSATAAAAAALYGPLHGGANEAVVRMLAEIGDIKKVPAFIESVKRGDGRLIGFGHRVYKNFDPRATIIKKTAYDVFNVTGNNPLLDIALKMEEVALNDDYFVSRKLYPNVDFYSGLIYQALGFPVEMFTVLFAIPRTVGWLAHMSELLKDKEQKISRPRQWYIGVDEREYTPIANR

SEQ ID NO: 10010 - protein, 364 aa, Magnaporthe grisea 70-15
MQMASASRQILRAASRASTRTAFAPAASRGLAARTIAGRRFYSSSSEPAKASSSNLGWIAGALAAAAAGAGYWYTQNGGAATLTKPEFKDYQTVYNDIASRLEENPDYDDGSYGPVLVRLAWHASGTYDKETGTGGSNGATMRFSPEGGHGANAGLKAARDFLEPIKAKYPWITYSDLWILGGVCAIQEMLGPKIPYRPGRSDKDAAACTPDGRLPDAAQRQDHVRNIFYRMGFNDQEIVALAGAHALGRCHTDRSGFDGPWTFSPTVLTNDYFKLLLNEKWEYKKWDGPKQYVDSKTKSLMMLPADMCLIEDKKFKEWTKKYADDNDLFFKDFSAAVLKLFELGVPFAEGTENQRWIFKPTSE

SEQ ID NO: 10011 - protein, 313 aa, Gloeobacter violaceus PCC 7421
MEYRDYYEILGVPKSADEQQIKSTYRKLARQFHPDLNPGDKQAEEKFKTISEAYEVLSDPSKRSRYDQYGRYWQQAGRSGGTPAGGAAPAGAGVGGFEGFDFDFSRFGSFDEFIDSLMGNLRGSGGERAARANVRTTQRPGRSEDVEMSLELTLEEALNGTKKRVRTATGKVVEVNIPAGVHEGTKVRVAGEGSGRGDLFLVVKLKTHPFFAVDGDDLLCEVPLTPAEAALGTKVEVPTLTGRVRVTIPAGTSTGRTLRLAGRGLPRRGGGRGDQLVKIRIEVPTALSSEERDLYEKLSRTESFRPRARFDSQ

SEQ ID NO: 10012 - protein, 253 aa, Mesorhizobium sp. BNC1
MPILGLGTWQLTHETARTVRAAFDLGYRMVDTSGDYGTQSAIGEAIRASGLDRDDIYLVTKVEETEDAYNATQANLRELGLDYADLILIHRPPRHGAGEELWRALIRAREDGLTRDIGVSNYSIELIEELVDATGEIPVVNQVEWSPFGHDLELKHYADFNGIVIQAYSPLTRATRLDDAALCETAEKYGKTPAQVLIRWNLERGTVPIPKANLHSHMKENISVFDFTLEKSDLESLDSLNEHFSSLGRLPYV

SEQ ID NO: 10013 - protein, 447 aa, Triticum aestivum
  misc_feature (379)..(379): Xaa can be any naturally occurring amino acid
PKAPKLTEAMSLYDGGLAGVYPEEEDDRLADLAGDSDYDDDEYVQSISKASEDTSAMDVLKGKDIQGIPWERLTITRDGYRKSRLEGYTNFENIPNSGQLSEKVCTPVEKGQLYYEFAHNTRSVRPTIFHFQLRNLVWATTRHDVYLMSHMSVLHWSPLTSEKHEVIDLQGHVAPCVKHEGNFYEGFYRTHVSTLAVKNNLLVAGGFQGELICKFLDREGISYCSKSTHDDNGITNCLEIFEKPSGSVHFLASNNDCGLRDFDMEKFQMCNHFHFDWAVNHTSLSPDGKIIAVVGDNPDGVLVDASSGKVIHELSGHLDYSFASAWNPDGRTFATGNQDKTCRIWDARNLSKSVAVLGGNMGAIRSIRYTSDGKFLAMXAEAADFIHIFDVGSGYDRKQELDFFGEIAGISFSPDTEALFVSVHDRNYSSLLQYSRRRFYGYLDSAL

SEQ ID NO: 10014 - protein, 317 aa, Zea mays
  misc_feature (47)..(47): Xaa can be any naturally occurring amino acid
MDPALLDDVIRRLLEVKNLKPGKNAQLSESEIKQLCAAAKEIFLQQXPNLLELEAPIKICGDVHGQYSDLLRLFDYGGYPPQANYLFLGDYVDRGKQSLETICLLLAYKVKYPENFFLLRGNHECASVNRIYGFYDECKRRFSVKLWKTFTDCFNCLPVSALIDEKILCMHGGLSPELNKLEQILNLNRPTDVPDTGLLCDLLWSDPSNEATGWAINDRGVSFTFGPDKVSEFLEKHDLDLICRAHQVVEDGYEFFASRQLVTIFSAPNYCGEFDNAGAMMSVDDTLMCSFQILKPARKMMGGSTNNKSGFKSFRGW

SEQ ID NO: 10015 - protein, 303 aa, Triticum aestivum
  misc_feature (207)..(207): Xaa can be any naturally occurring amino acid
MNTFIIFVLLAMAMNKASASRQLSPRGKELHTPQEQFPQQTFPHQPQQQFPQPQQPQQPFPQQPQQQFPQPQQPQQPFPQQPQQQFPQPQQPQQPFPQPQQPQLPFPQQPQQPFPQPQQPQQPFPQLQQPQQPLPQPQQPQQPFPQQQQPLIQPYLQQQMNPCKNYLLQQCNPVSLVSSLVSMILPRSDCKVMRQQCCQQLAQIPQXQLQCAAIHGVVHSIIMQQEQQQQQQQQQGIQFMRHYFSRPRSRASSQPQTTSQLEVIKAMGLGNPSNKCNVFVQLMSTTKICNISPTLGAMMQRLL

SEQ ID NO: 10016 - protein, 361 aa, uncultured bacterium
MKHRIAVIAGDGIGQEVMPEGLRVLDAACRQFGLDLEFVSFDWAHCDYYLQHGQMMPDDWFAQLKDFDAIYFGAVGWPATVPDYISLWGSLLKFRREFDQYANVRPVRLMPGIPCPLAGKQVGDIDFYVIRENTEGEYSAVGGRMFEGTERETVIQESIFTRQGTDRILKFAFDLAQRRPKKHLTSATKSNGIAISMPYWDERVEAMAGHYPEVRWDKYHIDILTARFVLSPERFDVVVASNLFGDILSDLGPACTGTIGIAPSANLNPDRTFPSLFEPVHGSAPDIAGQGIANPVAMIWSGAMMLDFLGQGDSRYQAAHDAIMAAIEQVLVGGPRTPDMGGTASTVELGRAIAAALEGRD

SEQ ID NO: 10017 - protein, 325 aa, Triticum aestivum
KSFRVRNRFQAGPFEVEPIRVTHSIPDCCGLVLRCGDGTIFHTGDWKIDESPVDGRIFDREALEELSKEGVTLMMSDSTNILSPGRSTSESVVASSLLRHVSEAKGRRVITTQFASNIHRIGSIKAAADLTGRRLVFVGMSLRTYLEAAFRDGKAPLDPSTLVKAEDMDAYDPKNLLVVTTGSQAEPRAALNLASYGGSHALKLSKEDVLLYSAKVIPGNESRVMKMLNRLTDLGPKIVMGKDAGLHTSGHAYHDELEEVLQIVKPQHFLPVHGELLLLKEHELLGRSTGIKHTTGINGEMLGVSHLRNRKVLVNGFVSLGKQDF

SEQ ID NO: 10018 - protein, 321 aa, Burkholderia cepacia R1808
MSAPTLTVRVARKWQEARDICGFEFVADDGSPLPRFDAGAHIDVHLPGGLVRQYSLCNDPRHGDRYRIAVLRDADGRGGSRAIHDEVRQGDTLRIGMPRNQFPLARDASHHLLLAGGIGVTPMLSMAEQLSAAGESFDLHYCARSLERMAFVEQINTAAFRDRTRLHVDDGDAAQRFDLPAALDAAPAGTHLYVCGPRGFMDAVLDAARARGWPDARLHYEFFGGAVVASGAERAFQVRLASSGKVVDVPADCTVVAALAAHGIDVLTSCEQGVCGTCVTRVLEGEPDHRDSYLTEAEQAAGDQFMPCCSRARSDLLVLDL

SEQ ID NO: 10019 - protein, 491 aa, Escherichia coli
MMSRMAEQQLYIHGGYTSATSGRTFETINPANGNVLATVQAAGREDVDRAVKSAQQGQKIWASMTAMERSRILRRAVDILRERNDELAKLETLDTGKAYSETSTVDIVTGADVLEYYAGLIPALEGSQIPLRETSFVYTRREPLGVVAGIGAWNYPIQIALWKSAPALAAGNAMIFKPSEVTPLTALKLAEIYSEAGLPDGVFNVLPGVGAETGQYLTEHPGIAKVSFTGGVASGKKVMANSAASSLKEVTMELGGKSPLIVFDDADLDLAADIAMMANFFSSGQVCTNGTRVFVPAKCKAAFEQKILARVERIRAGDVFDPQTNFGPLVSFPHRDNVLRYIAKGKEEGARVLCGGDVLKGDGFDNGAWVAPTVFTDCSDDMTIVREEIFGPVMSILTYESEDEVIRRANDTDYGLAAGIVTADLNRAHRVIHQLEAGICWINTWGESPAEMPVGGYKHSGIGRENGVMTLQSYTQVKSIQVEMAKFQSIF

SEQ ID NO: 10020 - protein, 503 aa, Methanosarcina acetivorans C2A
MVLYSLFQGDFVVQEYKLHIGGESRDSATGETFDNINPATLENLATVQVAGSEDVDRAVEAAEEGFRVWSEVPAPRRAEVLFRTARILQERKEDLARLMTEEMGKVLPETRGDVQEAIDIAIYAAGEGRRMFGETTTSELKDKFCMTVLRPIGVVGMITPWNFPLAIPGWKIMPALIAGNAIVFKPASDTPLLAIKLVEILMEAGLPPGVVNLVTGPGGSTGKAIVQHPRIKAISFTGSLETGKWIMEECAKTMKRVSLELGGKNPVIIMDDADLELALEGVLWGAFGTTGQRCTATSRLILHEKIKDEFTARLLAKTKLLRVGNGLLPETDIGPIINKAQLEKIERYVRIGMEEGATLLLGGKAIDPGLPGYFFEPTVFTDVRPDMRIAQEEIFGPVLSIITVSGLEEAIEVANNTRYGLSSAIYTENVGKAFRAVKKIEAGITYVNAPTIGAEVHLPFGGVKGTGNGFREAGTEAIKEFTEIKAVYIDYSGRLQRAQIDME

SEQ ID NO: 10021 - protein, 373 aa, Candida maltosa
MSVKTKTITILPGDHVGTEIVNEAIKVLEAIEAATPYQKIHFDFKHHLIGGAAIDATGVPLPDDALESAKNSDAVLLGAVGGPKWGTGALRPEQGLLKIRKELNLYANIRPCNFASDSLLELSPLRPEVVKGTNLIIVRELVGGIYFGDREEQEESADKQTAWDTEKYTVDEVTRITRMAAFMALQHTPPLPIWSLDKANVLASSRLWRRTVDKVISEEFPTLSVQHQLIDSAAMILIQNPTKLNGIIITSNMFGDIISDEASVIQGSLGLLPSASLASLPDTNTAFGLYEPCHGSAPDLPANKVNPIATILSAASMLRLSLDCVKEAEALEEAVKQVLDKGIRTADLRGTSSTTEVGDAIVEAVTKILKEKA

SEQ ID NO: 10022 - protein, 487 aa, Ralstonia eutropha JMP134
MSPSPTLYRNYVDGRFVESAKGFPNISPVNGAVIGTVCEAGADLVDRAVRAARAALAGPWGRTTPAERARVLQAVADGIEKRFDAFVAAEVADTGRPEHQARTLDIRRGVQNFRTFAELAGQAGGECFEMRAADGDVFSYTVRKPHGVVAIISPWNLPMLLMTWKVAPALACGNAVVIKPSEETPGSATLLAEVMHEAGVPPGVFNLVHGFGGGSAGEFLSRHPDIDAITFTGESRTGSTIMKAVADGVKEVSFELGGKNAAVVFADCDFDQAVAGVTRSSFTNTGQVCLCSERVYVERPIFERFVAAMKARAEAMRIGYPDEDGVEMGSLISHGHRDKVLSYFALAREEGATVVAGGGVPQFGDARDNGAYVQPTIWTGLPDSARCVQEEVFGPVCHIAPFDSDDEVVARVNDSRYGLAASVWTRDLGRAHRVTRQFDVGIVWVNTWFLRDLRTPFGGTRLSGIGREGGRHSLDFYSSTTTICVNP

SEQ ID NO: 10023 - protein, 482 aa, Escherichia coli O157:H7 EDL933
MKLNDSNLFRQQALINGEWLDANNGEVIDVTNPANGDKLGSVPKMGADETRAAIDAANRALPVWRALTAKERANILRNWFNLMMEHQDDLARLMTLEQGKPLAEAKGEISYAASFIEWFAEEGKRIYGDTIPGHQADKRLIVIKQPIGVTAAITPWNFPAAMITRKAGPALAAGCTMVLKPASQTPFSALALAELAIRAGIPAGVFNVVTGSAGAVGNELTSNPLVRKLSFTGSTEIGRQLMEQCAKDIKKVSLELGGNAPFIVFDDADLDKAVEGALASKFRNAGQTCVCANRLYVQDGVYDRFAEKLQQAVSKLHIGDGLDKGVTIGPLIDEKAVAKVEEHIADALEKGARVVCGGKAHERGGNFFQPTILVDVPANAKVSKEETFGPLAPLFRFKDEADVIAQANDTEFGLAAYFYARDLSRVFRVGEALEYGIVGINTGIISNEVAPFGGIKASGLGREGSKYGIEDYLEIKYMCIGL

SEQ ID NO: 10024 - protein, 205 aa, Fucus distichus
MSRNDSPFDMQIKLLMIGDTGVGKTCLLLRYANDSFSQTFITTIGIDFKIKNIDLDSKRIKLQIWDTAGQERFRTITTSYFRGAQGILLVYDVTDKKSFNSIRNWVAQIQQHADVAVNKILIGNKCDMDEDREVSKEEGANLAAEYGIQFFETSAKNDINVEKGFITIAREVKDRLMADGPGGGGGHGRTVDINGQASKKKTGCC

SEQ ID NO: 10025 - protein, 356 aa, Zea mays
MAEPSPPKYGGAKRDGAYTAGARPYERRVDHGEGEHGDRAARLRPPHARSGGTTLGEAKSTVHRCLPLPVSSRRTSRGSQRRPSDPRRASSSPTEGRMAEPKAAAAARKTRVGPYEVGKTIGEGSFAKVKHARDSRTGAVRAIKVLDRNHVLRHRMVEQIKREISTMKLIKHPNVVQLHEVMASKTKIYMVLEFVDGGELFDKIVNSGRLGEDEARIYFHQLINAVDYCHSRGVYHRDLKPENLLLDSNGALKVSDFGLSAFAPQTNEDRLLHTACGTPNYVAPEVLADKGYDGMAADVWSCGIILFVLMAGYLPFDDANLMRLYKLICHATSLLCPSVIRPSRLPSPARCGTYVM

SEQ ID NO: 10026 - protein, 164 aa, Triticum aestivum
  misc_feature (129)..(129): Xaa can be any naturally occurring amino acid
  misc_feature (137)..(137): Xaa can be any naturally occurring amino acid
  misc_feature (143)..(143): Xaa can be any naturally occurring amino acid
DHVRLHPAAVDDWHKKGGTVLKTTRGGFDLGKIVDGIVARGYTQIYAIGGDGTMRGALAIFEEFKRRGLNISITGIPKTVDNDIGIIDRSFGFQTAVEVAQQAIDAAHVEAVSAVNGVGIVKLMGRSTXHIALHATXSSRDVXCCLIQSGFTWKQGGCSILYNG

SEQ ID NO: 10027 - protein, 140 aa, Zea mays
PIANISRIMKKAVPANGKIAKDAKETLQECVSEFISFVTSEASDKCQKEKRKTINGDDLLWAMATLGFEEYVEPLKIYLQKYKEMEGDSKLSTKAGEGSVKKDAISPHGGTSSSSNQLVQHGVYNQGMGYMQPQYHNGET

SEQ ID NO: 10028 - protein, 366 aa, Buchnera aphidicola str. Bp (Baizongia pistaciae)
MKRNYKIAVLPGDGIGPEIMREGYKILRILKSKLSLNIMTQEFDVGGVAIDKYGVALPKKTLQGCRDSHAILFGSIGGPKWEDLPSHLQPERGALLPLRKYFNLFSNLRLARIYSGLEKLSPLKSRISNLGCDILCVRELTGGIYFGDPKGSKVSKSLNCAFDTEVYYQFEIERIAHMAFDLALTRRCKVTSIDKANVLESSMFWRKIVNRISTQYSQVKLSHLYVDNAAMQIIKNPSQFDVLLCSNLFGDILSDECAAITGSIGLLPSASLNDKNFGLYEPAGGSAPDIKGKNIANPIALILSIGMMMRYSFKLYDVADLIDWAVNKTLKLGYRTQDISENNKFINTSSMGDIIAEILANRIHKI

SEQ ID NO: 10029 - protein, 162 aa, Corynebacterium efficiens YS-314
MEAMTSIHDIPVTLTDGTETTMADWAGHLVMVVNVASRCGLTPQYEGLQRLFEDYQDRGFFVIGVPCNQFMGQEPGTDAEICTFAQEKYDVTFPLLAKTDVNGENEHPLYTELKRFGEGGDIEWNFEKFLINADGETIARFGPRMDPEDDEVTSVIEDNLPV

SEQ ID NO: 10030 - protein, 131 aa, Magnaporthe grisea 70-15
MIQLKSMLNCIDNSGAALVECALIVGQKRHASIGDRIVVVVQEQRKNPNEGAAALAASNKVKRGDIRHAIVVRTKYKVQRKDGSVVRFDDNACVLINKAGDPVGSRVNGIVGMELRKAKWSKILSMAPMHI

SEQ ID NO: 10031 - protein, 164 aa, Brassica napus
MRAPISGLLSRSIGFLHRGRPLCAVAASPEARTKKLERIADDLLSLNRIELYDYSILFSHKLGLNRYGSGTVSSPAGDLPADASAAAETKTAEKTAFDVKLEKFESASKIKVIKEIRAFTELGLKEAKELVEKAPIVVKTGVTKEEAEKMMEKLKAVGATVALE

SEQ ID NO: 10032 - protein, 149 aa, Arabidopsis thaliana
MSSNKIVLSSSDGESFEVEEAVARKLKIVEHMIEDDCVVTEVPLQNVTGKILSIVVEYCKKHVVDEESDEFKTWDEEFMKKFDQPTVFQLLLAANYLNIKGLLDLSAQTVADRIKDKTPEEIREIFNIENDFTPEEEAAVRKENAWAFE

SEQ ID NO: 10033 - protein, 409 aa, Capsicum annuum
DSHYQGVYPVKCNQDRFVVEDIVKFGSPYRFGLEAGSKPELLLAMNCLSKGSADALLVCNGFKDTEYISLALIARKLLLNTVIVLEQEEELDLVIDISRKMAVRPVIGLRAKLRTKHSGHFGSTSGEKGKFGLTTTQILRVVKKLEGSGMLDCLQLLHFHIGSQIPTTELLADGVGEATQIYSELVRLGAGMKFIDIGGGLGIDYDGSKSSDSDVSVAYGIEEYASAVVQAVQFVCDRKGVKHPVICSESGRAIVSHHSIMIFEAVSASTTNVSPQLSSGGLQSLTETLNEDARADYRNLSAAAVRGEYDTCLLYSDQLKQRCVEQFKDGSLDIEQLAAVDSICDLVSKAIGVSDPVRAYHVNLSVFTSIPDFWAFGQLFPIVPIHRLDEKPTMRGILSDLTCDSEITS

SEQ ID NO: 10034 - protein, 175 aa, Triticum aestivum
MAPTVMASSATSVAPFQGLKSTAGLPVSRRSTNSGFGNVSNGGRIKCMQVWPIEGIKKFETLSYLPPLTVEDLLKQIEYLLRSKWVPCLEFSKVGFVYRENHRSPGYYDGRYWTMWKLPMFGCTDATQVLKELEEAKKAYPDAFVRIIGFDNVRQVQLISFIAYKPPGCEESGGN

SEQ ID NO: 10035 - protein, 487 aa, Brevibacterium linens
MSTSGEDLTLVWFRDDLRVADHEALTAARADGRVIAVWIRETRDEEGLGPRPLGGACRWWAHESLTVLHEELSDLGIPLLFAAGRAEKIIVQLASSLGVTAVRWTRRYASASRALDGQIKTVLNDQGFTVHSHTGALLVEPWTAAPQSSDHYKVFTPFWKAVAGRDVGDVLPKPQAQSPLSQTLLSRAHECPAVMELDGLGLLDGTETGAGEAAAASGPRWWQDTIAGHWSPGLRAAEDQLDDLSAIIDGYTTSKDVPSDAASTSRLSPRLRHGELSPRQLLQAARTTSSLTQDDRAAWIRQLYWREFSWHLTYHYPHIDSAPIRPEFHNFPYEDDDDALTHWRAGTTGYPLIDAGMAQLWQTGWMHNRVRMVTASFLTKNLLQHWWFGEQWFWDTLVDADEANNPVSWQWVAGSGADAAPYFRVFNPERQRERFDPDDAYIEDWLPYTPATAPPPLVDLRQSRQAALSAYDHMKNRSTTRDNPGES

SEQ ID NO: 10036 - protein, 501 aa, Mycobacterium tuberculosis
MSFVVTIPEALAAVATDLAGIGSTIGTANAAAAVPTTTVLAAAADEVSAAMAALFSGHAQAYQALSAQAALFHEQFVRALTAGAGSYAAAEAASAAPLEGVLDVINAPALALLGRPLIGNGANGAPGTGANGGDGGILIGNGGAGGSGAAGMPGGNGGAAGLFGNGGAGGAGGNVASGTAGFGGAGGAGGLLYGAGGAGGAGGRAGGGVGGIGGAGGAGGNGGLLFGAGGAGGVGGLAADAGDGGAGGDGGLFFGVGGAGGAGGTGTNVTGGAGGAGGNGGLLFGAGGVGGVGGDGVAFLGTAPGGPGGAGGAGGLFGVGGAGGAGGIGLVGNGGAGGSGGSALLWGDGGAGGAGGVGSTTGGAGGAGGNAGLLVGAGGAGGAGALGGGATGVGGAGGNGGTAGLLFGAGGAGGAGGFGFGGAGGAGGLGGKAGLIGDGGDGGAGGNGTGAKGGDGGAGGGAILVGNGGNGGNAGSGTPNGSAGTGGAGGLLGKNGMNGLP

SEQ ID NO: 10037 - protein, 120 aa, Bradyrhizobium japonicum USDA 110
MLELRTTITWGLLSKTCDRARQRIPFHFAQRLAAGSLIDLDEKVVFLFGANDVALGTVKWFNPTKGYGFVAPDDGGKDVFVHISAVEKAGYTSLVEGAKVGYELVTNRSGKQAAENLRLG

SEQ ID NO: 10038 - protein, 313 aa, Nicotiana tabacum
MATSHFILKLFLVISFCNVCFASRKLTALVQEPENQLLQYHKGALLFGKISVNLIWYGKFKPSQRAIVSDFITSLSSSTPSKTDPSVAKWWKTTEKYYHLANSKKSLSLYLGKQVLVENYSLGKSLTQKQIVQLASKGEQKDAINIVLTASDVAVDGFCVNRCGTHGSSKGAIIRGKTYKFAYIWVGNSETQCAGYCAWPFHQPIYGPQSPPLVAPNNDVGVDGMVINLASLLAGTATNPFGNGYYQGEADAPLEAASACPGVYAKGAYPGYAGDLLVDKTTGASYNAHGTNGRKYLLPALYDPSTSTCSTLV

SEQ ID NO: 10039 - protein, 147 aa, Zea mays
MPAAGGGHRYLRYAGRTGEVVTCSRTQSPELFFAVLGGLGQFGIITRARIPLQLAPPKVRWVRAFYDSFETFTKDQELLVSMPELVDYVEGFVVLNEQSLRSSSVAFPAQVDFSPDFASGAGSNNVHYYCIEFAVHDFQQQDSAADH

SEQ ID NO: 10040 - protein, 294 aa, Escherichia coli O157:H7 EDL933
MEGLTVEFSVLSNNLKMPMMGFGVFQVTDKNVCKQSVLNAIRTGYRLIDTAAVYGNEDAVGEAVREAISEGLCTREELFITSKLWVQDMLNQDTAAAGIEASLKKSGLEYFDLYLLHQAMRDYFSAWRALEDAYEEGKLKAIGVSNFYPHVLANFCETVRVKPMVNQVELHPYFAQPEALATMKYYNVQPEAWAPLGGGRHKPFENNLLQSIADAHQKSISQVILRWNIQRGVVVIPKSTHQQRIEENFAIWDFSLTEKEMAQISSLDLGYVGESVKHFNPEFVRGCLAVKIHD

SEQ ID NO: 10041 - protein, 436 aa, Nitrosomonas europaea ATCC 19718
MNDKKSAMRSHRVVWHPCTQMKHHEEFPPVLITRGEGVWLYDADGQRYLDTISSWWVNLFGHCNPRINAAIIDQLGRLEHTMLAGLTHEPVVELSERLSTITPGSLSHCFYASDGASANEIALKMSFHYWQQSGFPEKTQFINLQNGYHGETLGALSVTDVPIFRQVYAPLLRPAHPVLTPDWRFAEAGETPEAHALKAAAALESYLTQHHASTAALILEPLVQGAAGMGMYHPVYLQKAREICDTYRIHLITDEIAVGFGRTGTLFACEQAAITPDIMCLAKGLSGGYLPLSVVLTNDTIYRAFYSDQTSQAFLHSHSHSGNALACRAALATLDIIEQDNVIETNRHKTKFLNQCLQSVRTHPNVRHFRNCGMIWAFEVDNPRPDFTNRFAQMGLERQLLIRPMGNSVYIMPPYIINEEEMEFMAQAILNILNEI

SEQ ID NO: 10042 - protein, 338 aa, Leuconostoc pseudomesenteroides
MEALVLTGTKKLEVENIEQPEVKPNEVLIHTAFAGICGTDHALYAGLPGSADAVPPIVLGHENSGVVAEIGSDVTNVAVGDRVTIDPNIYCGQCKYCRTARPELCENLSAVGVTRNGGFEEYFTAPASVVYQIPDNVSLKSAAVVEPISCAVHGIQLLKVTPYQKALVIGDGFMGELFVQILQAYGIHQVDLAGIVPEKLAMNKEKFGVKNTYNTKDGDKIPEGTYDVVVEAVGLPQTQEAAIEASARGAQVLMFGVGGPDAKFQMNTYEVFQKQLTIQGSFINPNAFEDSLALLSSGKLDVESLMSHELDYQTVDDFVNGKLGVVSKAVVKVGGEEA

SEQ ID NO: 10043 - protein, 341 aa, Salmonella enterica subsp. enterica serovar Typhi Ty2
MKVKAVFINKPGEVETRWVDYPHKKENEVLIKVDAAGICGSDIGAFRGTNPLVTYPRIIGHEVTGIVLQEGTGMPDNIKKGDRVIVDPYIYCGHCYPCSVGRTNCCENLNVIGVHIDGAMQEVVTHPAHLIHKIPDNVPSEMAPLAEPLTIALHALHRANVKAGEYVAIIGAGAIGLMAALSARHYKATPILIDIVEERLRYAQKLGVPYVLNAADDQVIDAIKNITHGTMAQVVIEASGANSAIRNTLDLASFAGRISFTGWPKQETSLPTNLITYKELDLRGSRTSAGEFDEALRMLSTLEINPQDVVSKVVNLDEIPDAVKELDRYPERYLKINAVFH

SEQ ID NO: 10044 - protein, 320 aa, Mycobacterium tuberculosis CDC1551
  misc_feature (61)..(61): Xaa can be any naturally occurring amino acid
MPSLDNTADEKPAIDPILLKVLDAVPFRLSIDDGIEAVRQRLRDLPRQPVHPELRVVDLAXDGPAGPIGTRIYWPPTCPDQAEAPVVLYFHGGGFVMGDLDTHDGTCRQHAVGADAIVVSVDYRLAPEHPYPAAIEDAWAATRWVAEHGRQVGADLGRIAVAGDSAGGTIAAVIAQRARDMGGPPIVFQLLWYPSTLWDQSLPSLAENADAPILDVKAIAAFSRWYAGEIDLHNPPAPMAPGRAENLADLPPAYIAVAGYDPLRDDGIRYGELLAAAGVPVEVHNAQTLVHGYVGYAGVVPAATEATNRGLVALRVVLHG

SEQ ID NO: 10045 - protein, 271 aa, Oryza sativa (japonica cultivar-group)
MATLLLIACLPTRRPHLSLRQRSYKLAPRITMASSSSSSPPSSDPSLETVAPHAAVTGERKLNPNLQEQLPKPYLARALAAVDPSHPQGTRGRDARGMSVLQQHAAFFDRNGDGIIYPWETFQGLRAIGCGYPVSIAGAILINLVLSYPTQPGWMPSPLFSIHIKNIHKGKHGSDSEAYDTEGRFDPSKFDAIFSKYGRTHPNALTKDELNSMIKANRNMYDFIGWITSAGEWMLLYSVAKDKEGLLQRETVRGAFDGSLFERLQDSKKSA

SEQ ID NO: 10046 - protein, 131 aa, Glycine max
  misc_feature (59)..(59): Xaa can be any naturally occurring amino acid
  misc_feature (78)..(78): Xaa can be any naturally occurring amino acid
  misc_feature (90)..(90): Xaa can be any naturally occurring amino acid
  misc_feature (112)..(112): Xaa can be any naturally occurring amino acid
GFLAHLVRLFSVRQRGVRTWYSRASFSDALPSAAYDPIVMRDAIVLAVIERFMTDVPFXSLLCGGLYSSLAACITSRXYLSNTKAVLQWXAQSRAFLGGLVVSTICGSEELXDYLCTVRHESTLSVQDGTY

SEQ ID NO: 10047 - protein, 525 aa, Glycine max
MDSSSSSPNNNNHHKLGFQPARSRSRLAMASPANTSEPKIVTGTAGYILEDVPHFTDYIPNLPTYPNPLQDNPAYSVVKQYFVHVDDSVPQKVVVHKDGARGVHFRRAGPRQKVYFEADEVQAAIVTCGGLCPGLNTVIRELVCGLHHMYGVKKVLGINGGYRGFYARNTITLTPKSVNDIHKRGGTVLGTSRGGHDTKKIVDSIQDRGINQVYIIGGDGTQKGASAIFEEVRKRGLKVSVVGIPKTIDNDIPVIDKSFGFDTAVEEAQRAINAAHVEAESVENGIGVVKLMGRNSGFIAMYATLASRDVDCCLIPESPFYLEGPGGLYEYIEKRLKENGHMVIVIAEGAGQELVSESVQSMSKQDASGNKLFQDVGLWISQKIRDHFAAQKTLPITLKYIDPTYMIRAIPSNASDNVYCTLLAQSAVHGAMAGYTGYTSGLVNGRQTYIPFYRITERQNHVVITDRMWARLLSSTNQPSFLDAKGDNEEKEEEEALNQLPDGHCAKDTSLASKEINSSIYPTAC

SEQ ID NO: 10048 - protein, 130 aa, Zea mays
MNFQLAMYSESSTSETGKHGMKKIGTTHRRSTQAVNQSEERPTVGSTHSNRSTGLTKAAFLRLQVEIFEASKDDSREASPECSICLDGFYDGDELIRLRCGHRFHSTCLEPWARKCADCPYCRTNIRSRS

SEQ ID NO: 10049 - protein, 122 aa, Spirogyra maxima
MIQPQSYLNVADNSGARKLMCIRVLGSNNRKYANIGDMIIAVVKEAVPNMPLKRSEVIRAVIVRTRKGLKRDNGMILRFDDNAAVVINTEGNPRGTRVFGPVARELRELNFTKIVSLAPEVL

SEQ ID NO: 10050 - protein, 473 aa, Salmonella enterica subsp. enterica serovar Typhi Ty2
MPTHLVWFRRDLRLQDNLALAAACRDASARVLALYISTPAQWQAHDMAPRQAAFISAQLNALQTALAEKGIPLLFHEVADFNASIETVKNVCRQHDVSHLFYNYQYEFNERQRDAAVEKTLPSVICEGFDDSVILAPGAVMTGNHEMYKVFTPFKNAWLKRLKEDIPPCVPAPKIRVSGALSIPLTPVSLNYPQQAFDAALFPVEENAVIAQLRHFCSQGADEYASRRDFPAVDGTSRLSASLATGGLSPRQCLHRLLAEQPQALDGGPGSVWLNELIWREFYRHLMTWYPALCKHQPFIRWTKRVAWQENPHYFQAWQKGETGYPIVDAAMRQLNATGWMHNRLRMITASFLVKDLLIDWRLGERYFMSQLIDGDLAANNGGWQWAASTGTDAAPYFRIFNPTTQRERFDRDGEFIRQWLPALRDIPGKAIHEPWRWAEKAGVVLDYPRPIVEHKQARIATLSAYEAARKGA

SEQ ID NO: 10051 - protein, 158 aa, Zea mays
  misc_feature (67)..(67): Xaa can be any naturally occurring amino acid
MADDGGSHEGSGGGGGVREQDRFLPIANISRIMKKAVPANGKIAKDAKETLQECVSEFISFVTSERXKRKTINGDDLLWAMATLGFEEYVEPLKIYLQKYKEMEGDSKLSTKAGEGSVKKDAISPHGGTSSSSNQLVQHGVYNQGMGYMQPQYHNGET

SEQ ID NO: 10052 - protein, 238 aa, Aspergillus nidulans FGSC A4
MRAHPQSAVGLMSMGGKGPEVLSTFTTDFGGILAGLHRTKIHGTAHFTSSIQVAGLALKHRSEKSQRQRIIVFSCSPIAEDEKTLVKLAKKMKKNNVSIDVIAFGDLESDQTKKLEAFVENVKGGDGSNLAIIPPGPNLLSEELQASPILGGDGSGGAGGLGGGDGGDGGAFDLDAAAENDPELAFALRLSLEEEKNRQEKERREREAQQGKENLEGIPEEGSSSKKDNEDPDKMDTA

SEQ ID NO: 10053 - protein, 127 aa, Triticum aestivum
  misc_feature (39)..(39): Xaa can be any naturally occurring amino acid
RPVKRDSDEKSTRLDAEDKTCGVEVKEESGSDSDEDPQXGEELPAHAERRRRANKQHIASITLVDIAPYFHLPIREASRALKIGVSILKQKCRQYGIPRWPHRKIKSLHSLISDLEFVMDDTNGDVV

SEQ ID NO: 10054 - protein, 490 aa, Xanthomonas campestris pv. campestris str. ATCC 33913
MPRFPDQLLYIGGRYVPARGGHTFEVVNPATGEVLANVHNADADDLDAAVDSAKAGQRHWAALTVVERSRILLRAVALLRERNDALAELETLNTGKPLSETRSVDIVTGADVLEYYAGVAQALQGVQVPLREGSFFYTRHEPLGVVGAIGAWNYPIQIALWKAAPALAAGNAMIFKPSEVTPLTALKLAEIFTEAGLPDGVFNVLPGDGASVGHALTEHPEIEKISFTGGTATGRKVMASASSSSLKDVTMELGGKSPLIVCADADLDLAADIAMMANFYSSGQVCTNGTRVFVPRALRTAFEARLLARVQRIHIGDPLDERTTFGPMVSAAHMQRVLEHIEQGKAEGARLLFGGERLRDGALAQGCYVAPTIFSDCTDVMTIVREEIFGPVLSLLTYDDEDEAITRANATSYGLAAGVVTPDLSRAHRLIHRLEAGICWINTWGESPAPMPVGGYKQSGVGRENGLATLQAYTRTKSVQVELERYASVF

SEQ ID NO: 10055 - protein, 348 aa, Pichia stipitis
MSVPTTQKAVVFESNGGPLLYKDIPVPTPKPNEILINVKYSGVCHTDLHAWKGDWPLDTKLPLVGGHEGAGVVVGIGSNVTGWELGDYAGIKWLNGSCLNCEFCQHSDEPNCAKADLSGYTHDGSFQQYATADAVQAARLPKGTDLAQAAPILCAGITVYKALKTAQIQPGNWVCISGAGGGLGSLAIQYAKAMGFRVIAIDGGEEKGEFVKSLGAEAYVDFTVSKDIVKDIQTATDGGPHAAINVSVSEKAIAQSCQYVRSTGTVVLVGLPAGAKVVAPVFDAVVKSISIRGSYVGNRADSAEAIDFFTRGLIKCPIKVVGLSELPKVYELMEAGKVIGRYVVDTSK

SEQ ID NO: 10056 - protein, 458 aa, Rhodococcus rhodochrous
LQIVHQATADDVDEAVAAGRVAAADPAWRRMLPHERARYLHRIADAIEHEASRLALLQSYNTGKTLTETTALVGSAAGTFRYFAAVLETSDDDLTTQRGNYLTMSIHEPIGVIGAIAPWNSPIASDAQKIAPALAAGNAVVLKPAEWTPLVSMALARAIHDSGLPPGLLSVLPGKGSIVGDAIVQHPHVGKVTFTGGTRTGRAVAHAGAEKLMPVSLELGGKSPTIVLDDADIEAAVAGVMYGIFSSTGQSCIAGSRLFVDRSLYEAFMERLVERTRALRIGNGRDPRTQVGPLVHHTHRASVARYVDLARCEGGRVLCGGTAPDDPELADGAYYLPTVIDGLSNDAAVCQDEIFGPVLIALPFDGESDLLAQANDSVFGLASGIWTRDYRRAWRLARQLEAGTVWVNTYKRFSISTPFGGIKESGLGTEKGRAGIAAYSRQKSIYLGLDDEPDRWVD

SEQ ID NO: 10057 - protein, 352 aa, Haemophilus somnus 129PT
MSINFVKEGNIMSKYVRSVCLVEPKKVDIKTVLYPKKGECDVLIKVESIGICGSDIGAFRGTNPLVTYPRILGHEIVGTVIESGVGMPKNINIGDRVILEPYIYCGHCYPCSISRTNCCEALKVLGVHIDGAMQEIVRHPAHMLIKAPDIPIHELALAEPLTISLHAIRRTKVKAGEHVAIIGAGAIGLMAALVAKAYGATPILIDILDKRLDYAKSIGIPNIINPAKENDLEAIKSITNGRMAEVVIEASGANIAVQNTLKYTSFAGRIALTGWPKNETPLPTNLITFKELNIYGARTSKGEFEEALKLLESRKIEPKNIISKVITFDEIPHYIEELSENPDDYLKIIAVF

SEQ ID NO: 10058 - protein, 450 aa, Bacillus subtilis subsp. subtilis str. 168
MEMMGMENIQQNQGLKQKDEQFVWHAMKGAHQADSLIAQKAEGAWVTDTDGRRYLDAMSGLWCVNIGYGRKELAEAAYEQLKELPYYPLTQSHAPAIQLAEKLNEWLGGDYVIFFSNSGSEANETAFKIARQYHLQNGDHSRYKFISRYRAYHGNTLGALSATGQAQRKYKYEPLSQGFLHAAPPDIYRNPDDADTLESANEIDRIMTWELSETIAGVIMEPIITGGGILMPPDGYMKKVEDICRRHGALLICDEVICGFGRTGEPFGFMHYGVKPDIITMAKGITSAYLPLSATAVKRDIFEAYQGEAPYDRFRHVNTFGGSPAACALALKNLQIMEDEQLIQRSRDLGAKLLGELQALREHPAVGDVRGKGLLIGIELVKDKLTKEPADAAKVNQVVAACKEKGLIIGKNGDTVAGYNNVIHVAPPFCLTEEDLSFIVKTVKESFQTI

SEQ ID NO: 10059 - protein, 173 aa, Bradyrhizobium japonicum USDA 110
MATETKLPVTKSPTAPAVAGETWRPFQALRNEIDQIFDDFGNGFWNRPFRSLARLERDFSKSISAPAVDVAESDKAYEITAELPGLDEKNIDIKVANGGLTIKGEKREETEEKNKDYYVSERRYGTFERYFTLPESVNADKIEATFKNGVLKVVLPKTEEAQKPAKTINVKAA

SEQ ID NO: 10060 - protein, 452 aa, Staphylococcus aureus subsp. aureus COL
MNYTQQLKQKDSEYVWHPFTQMGVYSKEEAIIIEKGKGSYLYDTNGNKYLDGYASLWVNVHGHNNKYLNKVIKKQLNKIAHSTLLGSSNIPSIELAEKLIEITPSNLRKVFYSDTGSASVEIAIKMAYQYWKNIDREKYAKKNKFITLNHGYHGDTIGAVSVGGIKTFHKIFKDLIFENIQVESPSFYRSNYDTENEMMTAILTNIEQILIERNDEIAGFILEPLIQGATGLFVHPKGFLKEVEKLCKKYDVLLICDEVAVGFGRTGKMFACNHEDVQPDIMCLGKAITGGYLPLAATLTSKKIYNAFLSDSHGVNTFFHGHTYTGNQIVCTVALENIRLYEKRKLLSHIETTSSTLEKQLHALKRHRNVGDVRGRGLMFGVELVTDKDSKTPLEIEKVERIVRNCKENGLMIRNLENVITFVPVLSMSNKEVKTMVRIFKKAVHNILDRKC

SEQ ID NO: 10061 - protein, 377 aa, Lactococcus lactis subsp. lactis Il1403
MTNLFENYGRLPFSLIKGEDQYLFDDRGNKYLDFTSGIGVMNLGYSFEKGKVAVKAQLDSLSHLSNLYQNPLQEDVAEKLSQNHSYKAFFCNSGTEANEAALKLTHLIKKDQKILAFTDGFHGRTFGAMSATMQEKIQAGFSPLLPNFVASPFNDVVALEQILEKEKIGAIIFEIIQGEGGVLPISPDFVEALKSCQQKGILLIIDEIQTGIGRTGKLFAFEHFDFEPDIFTLAKALANGIPTGAMLAKNKYASYFSAGKHGSTFGGNPLAMASANEVLKEIDSDFLEKVTDKGIFFLKLLTEKLSVKATVKSIRGLGLMIGIQLTDEKKVPEVLALLRENGLLALSAGHDVIRLLPPLVMTKVELQKGAELLEKIL

SEQ ID NO: 10062 - protein, 382 aa, Thermosynechococcus elongatus BP-1
MVACEFSPGLDGIPVAQSAISYVDGQAGILEYRGVPIQELAEKSTFLETAFLLIWGYWPNREELAAFEHDITYHRRVKYRIRDMMKCFPESGHPMDALQASAGALGLFYSRRALEDPEYIRAAVIRLLAKIPTMVAAFQLIRKGNDPVMPCDELDYAANFLYMLNERRPDPFAARVFDICLILHAEHTMNASTFSARVTASTLTDPYAVVASAVGTLAGPLHGGANEDVINMLEEIGSVENVRPYVEKCIQNKIKIAGFGHRVYKVKDPRATILQKLAEQLFDKFGGDRYYDIALKLEEVVGEYLSYKGIYPNVDFYSGLVYRRLGIPSDLFTPVFAIARVAGWLAHWKEQLEANRIYRPTQVYTGAHNQPYVPMEERNHRP

SEQ ID NO: 10063 - protein, 142 aa, Glycine max
  misc_feature (32)..(32): Xaa can be any naturally occurring amino acid
  misc_feature (51)..(51): Xaa can be any naturally occurring amino acid
GYGSQHTNYDITSIASNGGRVQCMQVWPPGGXKKVETVSSLPDLDDAQLAXEVKYLLRKGWIPCLEFELKHGFVYREHNRSPGYYDGRYWTMCEAAMFGCTDASQVSQELQEPRLHTLRLDAFMRFRHVRRALCMSLIAYMP

SEQ ID NO: 10064 - protein, 133 aa, Brassica napus
MALEEQSAARSTGKVNWFNDSKGYGFITPDGGGEELFVHQSSIVSEGYRSLAIDDLVEFEITQGTDGKTKAVDVTAPGGAPLKKKETSSRGGGARRVGGGGGCYNCGEAGHLAKDCRDDGGERGGRSVLLQLW

SEQ ID NO: 10065 - protein, 373 aa, Arabidopsis thaliana
MGYLFEETLSSNPKTPIVVDDDNELGLMAVRLANAAAFPMVLKASLELGVFDTLYAEASRTDSFLSPSEIASKLPTTPRNPGAPVLLDRMLRLLASYSMVKCEKVSVGKEQRVYRAEPICRFFLKNNIQDIGSLASQVIVNFDSVFLNTWAQLKDVVLEGGDAFGRAHGGMKLFDYMGTDERFSKLFNQTGFTIAVVKKALEVYQGFKGVNVLVDVGGGVGNTLGVVTSKYPNIKGINFDLTCALAQAPTYPGVEHVAGDMFVDVPTGNAMILKRILHDWTDEDCVKILKNCWKSLPQNGKVVVIELVTPDEAENGDINANIAFDMDMLMFTQCSGGKERSRAEFEALAAASGFSHCQFVCQAYHCWIIEFCK

SEQ ID NO: 10066 - protein, 240 aa, Triticum aestivum
  misc_feature (30)..(30): Xaa can be any naturally occurring amino acid
  misc_feature (41)..(41): Xaa can be any naturally occurring amino acid
  misc_feature (75)..(75): Xaa can be any naturally occurring amino acid
MASLGLPGPSSYHDLCCYGAGIAGNIFAFXLFISPLPTFRXRIVRNGSTEQFSATPYIYSLLNCLVCMWYALPFXSYGVVLVATVNTIGAAFQLAYTAVFIAYADAKKRLKVSVLLAGVFCVFGLFVYVSMALFDHYLGRTFVGYLIVASLTFMFVSPLSIIDLVIRINSVEYMPFYFSLSMALMSMPFFAYGVLLDDFFIYVPNGIGTVLGVMQLLLYAYYSRKGSRDEARRPLLVTHT

SEQ ID NO: 10067 - protein, 352 aa, Nostoc sp. PCC 7120
MKAQVFRGVNQLSYEEIPLPILEPDEVLVQVQVVGLCQSDIKKIRYPLYEPPRIFGHETAGTIAAVGSQVQGWQVGQRVAVMHHIPCMRCAYCMNENFSMCDVYKNISTTAGFNASGGGFAEYVKVPGHIVENGGLIPIPDGISFEEASFVEPTNCCLKAVKKAQIAPGQTVLVTGAGPIGLMFVMLVKYFGAKAIATDLLPSRIEKALNVGAEAAFDARDPDLPAKVHALTNGLGVDVTLLAVPSEKAFFQALECTRKGGKILFFAEFPDELEIPINPNILYRREIDLMGSYSSSYRLQNLSADIVFNRRIDVQALISDRYPLKDLSAAVDQAIAPTPETYKILIYPKIGD

SEQ ID NO: 10068 - protein, 311 aa, Ralstonia eutropha JMP134
MALDEQARYILDMIASAGRPPLHTCTPEQARQSFDFRPLAGVPDAVAQIEEVTIPGPAGDIRVRIYTPDGEGPFPALVYCHGGGWVVGDLDTVDVPCRRLATRASCVVVSVDYRLAPEHRFPAATEDAYAAFQWLVSNARAQQVDATRIAVGGDSAGGNLAAAVALMARDRAAPQPCFQVLLYPVTDGTLDTPSYRENAEGYLLTRDSMVWFWNHYVGDADRTHPYASPLRADHHRGLPPAFVVTAEFDPLRDEGEAYARRLAEAGTPVECKRYDGTIHGFCWMPGVLDKGRQALDDTAAALAAAFQSDNR

SEQ ID NO: 10069 - protein, 177 aa, Burkholderia fungorum LB400
MLGLALLAAQGPHAFAEGAFALTSASFHAGGTVEAAQVFNQGDCKGGNRSPQLSWHDAPPGTRSFAVTMFDQDAPGRGWWHWAVAGIPATVVSLPENASSSGFLSKVGALEARNDFDTDGYGGPCPPAGKPHRYIITVYALSTADLRLAQGRPALMFDHEISTATLGSARMVVSYGR

SEQ ID NO: 10070 - protein, 394 aa, Methanosarcina acetivorans C2A
MKAVVYKGPRNVDVEEVKKPEIEKPTDVIIKVTSSGICGSDLHLYDGHGPDGLGTILGHEPMGVVEEVGDAVELVKPGDRVVIPFNVACGSCLNCIRGLTNMCLTMNPDAAIANYGYPGAGPYAGGQAEYLRVPYGDWACLKLPGEPGDEFEDDFVMLADIFPTAYYAAELAKVKTGKTVAVFGAGPVGLLAAYSSMLMGASEVYVVDKSDKRLKLAESIGAVPINFTDGDPVEMIMQIRQNNKNLMSSLRPGEEKVLGVDCAIDAVGYQALDRNNSEEFKPNQVLMDIARIIAPGGSIGVIGVYSPDPAGKDENEKQGYLTLPWAELWFKGVSIGTGPTPVKQMHGFLRNLIFNGKAKPSFIVSDRISIDEAPEAYKQFDKRDDVVKPIIKFH

SEQ ID NO: 10071 - protein, 483 aa, Rickettsia sibirica 246
MAEFTPITIAYGDGIGPEIMEAVLYILRKAEARIRLETIEVGEKLYKKHYTSGISEESWESIQRTGIILKAPITTPQGGGYKSLNVTIRKTLQLFANIRPAVSFHPFTRTLHPNLNLTIIRENEEDLYAGIEYRQTHNMYESMKLISHTGCEKIIRYAFEYAVKNNRKKVMCLSKDNIMKFSDGILHKVFNEIAKEYPQINNAHYIIDIGTARLATKPEIFDVIVTSNLYGDIISDLAAEISGSVGLAGSANIGQHYAMFEAVHGSAPDIAGKDIANPSGLLNAAIMMLVHIGQGDIATLIENAWKKTIEDGVHTADIYNEQSSSKKVGTKEFAAEVTKRLGQLPTKLPKADYPLIAEKQESNIDYKIDTKEVKKLVGTDIFVNMNVSAAHDIADKINKLDLGNFELKTISSKGLKLWPRDTRFETVSDHWCCRFMNKDGTEIKHLDITRLLEALSTANIDFIKVENLFEFDGVAGYSLAQGE

SEQ ID NO: 10072 - protein, 448 aa, Pseudomonas aeruginosa UCBPP-PA14
MNQPLNVAPPVSSELNLRAHWMPFSANRNFQKDPRIIVAAEGSWLTDDKGRKVYDSLSGLWTCGAGHSRKEIQEAVARQLGTLDYSPGFQYGHPLSFQLAEKIAGLLPGELNHVFFTGSGSECADTSIKMARAYWRLKGQPQKTKLIGRARGYHGVNVAGTSLGGIGGNRKMFGQLMDVDHLPHTLQPGMAFTRGMAQTGGVELANELLKLIELHDASNIAAVIVEPMSGSAGVLVPPVGYLQRLREICDQHNILLIFDEVITAFGRLGTYSGAEYFGVTPDLMNVAKQVTNGAVPMGAVIASSEIYDTFMNQALPEHAVEFSHGYTYSAHPVACAAGLAALDILARDNLVQQSAELAPHFEKVLHGLQGAKNVIDIRNCGLAGAIQIAPRDGDPTVRPFEAGMKLWQQGFYVRFGGDTLQFGPTFNARPEELDRLFDAVGEALNGIA

SEQ ID NO: 10073 - protein, 355 aa, Zea mays
MPLVGQIAKVLTQRCRSWMLFYGEDVSVKMRLLFYILPCLLLSMDFLTLHPAMLGMEVILQGWMTGKAKKLMSFMIKGMSNGTFPTLPQPRRVASYDPKLSLLAAMAKNYPTVSAEYSEAVEKARRKLRALIAEKSCAPLMLRLAWHSAGTFDVSSRTGGPFGTMKHQSELAHGANAGLDIAVRLLEPIKEEFPILSYADFYQLAGVVAVEVTGGPEIPFHPGREDKPQPPPEGRLPDATKGSDHLRQVFGKQMGLSDQDIVALSGGHTLGRCHKERSGFEGAWTTNPLVFDNSYFKELLSGDKEGLLQLPSDKALLSDPVFRPLVEKYAADEKAFFDDYKEAHLKLSELGFADA

SEQ ID NO: 10074 - protein, 486 aa, Triticum aestivum
LIPSPANPRFPGPSLPYALGAALPRPAQHRWLIDSWPPACGKVRRRRRPRGTRWTITTSRTARWTSTSTAGGDGSRSDGEGDDEYALLTRITDTSAAEARAGKDIQGIPWERLQITRQDYRKARLEQYKNYENFPQSGELMDKLCKQVESSSKYYEFQYNTRIVKPSILHFQLRNLLWATSKHDVYFMSNSTVGHWSSLSHKMTDVLDFSGHVAPAKKHPGCALEGFTGVQVSTLAVNEGLLVAGGFQGELVCKSLGERDVKFCTRTTLSDNAITNAMDIHRSTSGSLRITVSNNDSGVREFDMERFQLLNHFRFNWPVNHTSVSPDKKLLAVVGDDRDALLVDSRNGKVTSTLVGHLDYSFASAWHPDGVTFATGNQDKTCRVWDIRNPSTSLAVLRGNIGAIRCIRYSSDGRFLLFSEPADFVHVYSAAECYRKRQEIDFFGEISGISLSPDDESLFVGVCDRVYASLLNYRMVHANGYLDSYM

SEQ ID NO: 10075 - protein, 396 aa, Pseudomonas syringae pv. tomato str. DC3000
MSAQVLRKRICVLPGDGIGVEVMEAALPVIAALGLPFDLLHADIGWECWRREGETVPDDTWKVMASCDATLLGAITSKPLAEAEAELPLPLQGHSRRYVSPVIQLRQNLDLYANVRPVTDMTGENRFRFVVIRENTEGLYAGLDFGRIPDALVPLLEAREALGAAWQRAGQEDATVTLRLQTRSGLTRIFEYAFDYARNNNFSRVTFVDKPMVLRHSSAFARVIFEETAQRYPDITGAIENVDAVALWMVQRPERFGVIVAENMFGDILSDLGAGVMGGLGFAPSGNFGNSGAYFEPVHGSAPAHAGLTKANPSAMFLAIAMMLEHLGYPAQSDCITRAVSLVARSAVRTYDLGGSHTTCQVGEAIVQQCVELQGLLVDRRERSRSAQGERHVSAL

SEQ ID NO: 10076 - protein, 408 aa, Oryza sativa (japonica cultivar-group)
MEGGGAGSGMERWREMFRGADIYDVIRNAILIAGADSPRELLRRRQGIIEWLFAVAPVTVPVPAPLACGRVVDGAGNRLPPAAIPDGGGHHHDDNDGNFAAAEAQTSLIDQQILEALYDEIEEDTQVINEVLRIKDILINYKEQSVDTLFDGLRRLQLMRLSISVLKSTQIAEAVAPLNKHRSPVICKIARDLAKGWKGVAADWVGPSSANADTSPDISNPSTVEDDFGLPTPPMDVGAFFLPQSAAEQYVSETLINFLLLSIFFYCHYMKFLHKADDDDDESLIPNAKNDCGFGGYKMEIAKPVANMDENILRKGKDLSRQHGPPMRQANLQMKLAQHHAIAITEQRPIAVVRKPLPDHVSKLERQATILEGCKVGIGKRNNTDIADLRLEATKRKLNDAYQEAENS

SEQ ID NO: 10077 - protein, 248 aa, Schizosaccharomyces pombe
PKYRLVVRFSNRFVTCQIVSSRVNGDYVLAHAHSSELPRYGIKWGLANWTAAYATGLLVARRALAKVGLADKYEGVTEPEGEFELTEAIEDGPRPFKVFLDVGLKRTSTGSRVFGAMKGASDGGLFIPHSPNRFPGFDIETEELDDETLRKYIYGGHVAEYMEMLIDDDEERYQKQFSGLIADGIESDQLEDIYAEAYAKIREDPSFQKSGKDAAAFKAESLKYTQRKLTAEERKERFNAKVIEAGRA

SEQ ID NO: 10078 - protein, 220 aa, Spinacia oleracea
RNLLSVAYKNVVGARRASWRIISSIEQKEESRGNEDHVSVIRDYRSRIEKELSDNCDGILKLLDTKLVPAASSGDSKVFYLKMKGDYHRYLAEFKTGAQRKEAAESTLTAYKAAQDIANAELAPTHPIRLGLALNFSVFYYEILNSPDRACNLAKQAFVEAIAELDTLGEDSYKDSTLIMQLLRDNLTLWTSDMQDEAADEITEEAAKQQKAVNNNKIAY

SEQ ID NO: 10079 - protein, 177 aa, Silene latifolia subsp. alba
MASLMSNAAVVTASTAAQANMVAPFSGLKSTSAFPVSRKSNVDITSLATNGGRVNCMQVWPPRNLKKFETLSYLPTLSEESLLKEINYLLIKGWVPCLEFEVGPAHVYRENNKSPGYYDGRYWTMWKLPMFGCTDASQVAAEVVECKNAYPDAHVRIIGFDNKRQVQCISFIAYKPE

SEQ ID NO: 10080 - protein, 459 aa, Saccharomyces cerevisiae
MPSNVRSGVLTLLHTACGAGVLAMPFAFKPFGLMPGLITLTFCGICSLCGLLLQTRIAKYVPKSENASFAKLTQLINPSISVVFDFAIAVKCFGVGVSYLIIVGDLVPQIVQSIFYRNDDNMSGSQEHHMFLDRRLYITLIIVFVISPLCFKRSLNSLRYASMIAIVSVAYLSGLIIYHFVNRHQLERGQVYFMVPHGDSQSHSPLTTLPIFVFAYTCHHNMFSVINEQVDKSFKVIRRIPIFAIVLAYFLYIIIGGTGYMTFGENIVGNILTLYPNSISTTIGRLAMLLLVMLAFPLQCHPCRSSVKNIIIFIENFRKGKLYDNRASFIPLDNFNSEDPQEAPTQQNNEEPNLRSESLRHINIITLCILLFSYLLAISITSLAKVLAIVGATGSTSISFILPGLFGYKLIGSEFTGTNERVPTSIKIFKYLSLSLFIWGIAVMVASLSAIVFLGTSSH

SEQ ID NO: 10081 - protein, 286 aa, Brassica napus
MGEEVRMKDVSGDGERVMEWEKGLPSDEDLASLSYSLVPSNLAMAFSITPEKSRTIQDVNRASETTFSSLRGGSPGPNTSSSTNLGVAAAEEEEEEDRVGSSSPGSDSKKQKISEEEGDSGTELKRARLVWTPQLHKRFVDVVAHLGIKNAVPKTIMQLMNVQGLTRENVASHLQKYRLYLKRMQGFTSEGPSSSDKLFSSTPVPPQSFQDQGSASAGAPSMMQMPVYAHHMGMQGYHHQNHAHDPYHQNHHRGSGAPANPYMMQQNKFGSMASYPPVGGGSANEN

SEQ ID NO: 10082 - protein, 392 aa, Sulfolobus solfataricus
MGEKMIKLLKFYQDRGIKIIKGEGQYVWDEKNNKYLDMHAGHGVAFLGHRNKVIIDHLKKQMEEISTLSLAFDTPIREEMIKELDELKPEDLDNLFLLNSGSEAVELALKIARKITKRRKIVAFKNSFHGRSMGALSVTWNKKYREPFEPLIGPVEFLEYNNVDSLKSITEDTAAVIVEPVQGEGGVIPAKKEFVKSLREVTEKVNALLIIDEVQTGFGRTGKIWAYQHFDIKPDILTAGKAIGGGFPVSAVFLPNWISEKIEEGDHGSTYGGNPLAAAAVTAACKVAKSEKIAEQAQKKGELFMRILKEKLEDFKIVREIRGLGLMIGIDLKVNPSIAIKVLQDEKVLSLKAGLTTIRFLPPYLITQSDMEWASDATRKGISETESKRVAS

SEQ ID NO: 10083 - protein, 159 aa, Aspergillus nidulans FGSC A4
MADEAHEVTFESADAGASATYPMQCSALRKNGFVVIKNRPCKIVDMSTSKTGKHGHAKVHLVAIDIFTGKKYEDLSPSTHNMDVPNVSRKEYQLLDVTDDGFLSLMDDSGDTKDDVKVPEGEVGERINKMFKEEEKDCNVVILTSMGEQMCMEVKEAPK

SEQ ID NO: 10084 - protein, 184 aa, Zea mays
LKYFVDSVKKWGTRSATFHFHQGSKSVSVNYFVVILVTACELFLALGGFGCQGMGIPVGKLALYTALGGVRPSACLPITIDVGTNNEDLLKDEFYIGLKQRRATGQEYSEFLDEFMAAVRQNYGQKVLVQFEDFANHNAFTLLEKYRTNHLVFNDDIQGTAAVVLAGIIAALKSVGGTLADHTF

SEQ ID NO: 10085 - protein, 361 aa, Bacillus sp. KSM-K16
MEALNLYGAGDIRFEQSPKPTIMNDNEVIVRVETAGICGSDLSRYKKLGPYISGTTFGHECSGTIEEVGSNVSHLKEGMRVAVCPALPCGDCTQCRQGAFSRCPSLTVIGAVQPGAFAEYVKLPAENVLPLPNEIDADTAAFIEPAAVVAHGFYKTAIEPGADVAIIGCGSIGLLAIQWAKLFGARYVYAIDIDEQKLKVAKELGADQRVNPLDGPVHEQIHDLTAGEGVDVAIEAAGTPITSAQALALPKKGGEVVFLGIPYGDVTIERFYFEKIVRNELRVHGSWNGLSAPFPGKEWKTAIHSLQTGALQVNPLITHRLPLSDGPFVFKEMASGSPGYIKTLLYPGKTGQKERAINHLK

SEQ ID NO: 10086 - protein, 342 aa, Bacillus sp. KSM-K16
MKALVKTAPGFGHVELQNKPEPAPGEKQVKIKVKYAGICGSDIHTYEGHYKVAFPVTLGHEFAGEIVEVGPGVQSFKVGDRVTSETTFSICGQCPYCQTKDYNLCSERKGLGTQQDGGFAEYVLAREESLHLLPDNVDFRSAAMTEPLACTHHALAKTTINAGDLCVVIGPGPIGLLAAQAAKSKGAKVMITGLNHDKVRLEKARALGIDYVVNGEETDVGEVVNELTNGYGADVVLECSGAVKAANQGLKLLRKKGQYSQVGIFAASEIPFDLETIIQKEIHVIGSRSQKPADWEPSLMLLKTGNVNARALVTHEYELHQWEEAYQAIKSGEAIKVLLKPE

SEQ ID NO: 10087 - protein, 250 aa, Solanum commersonii
  misc_feature (231)..(231): Xaa can be any naturally occurring amino acid
MGRGRVQLKRIENKINRQVTFSKRRSGLLKKAHEISVLCDAEVGLIVFSTKGKLFEYATDSCMERLLERYERYSFAEKQLVPTDHTSPGSWTLENAKLKARLEVLQRNEKLYVGEDLESLNMKELQNLEHQLASALKHIRSRKNQLMHESISVLQKQDRALQEQNNQLSKKVKEREKEVEQQNQWDQQNHEINSSTFVLPQQLDSPHLGEASQNTNVVDNGEVEGGNSSQXQGAANNTVMPQWMVRHLNG

SEQ ID NO: 10088 - protein, 250 aa, Hevea brasiliensis
MTKNYPKVSEEYQKAIDKAKRKLRGFIAEKGCAPLMLRIAWHSAGTYDANTKTGGPFGTMRHAAEQAHAANNGLDIAVRLLEPIKQQFPILSYADFYQLAGVVAVEITGGPEIPFHPGREDKPEPPPEGRLPNATKGADHLREVFGKTMGLSDKDIVVLSGGHTLGRCHKERSGFDGPWTANPLIFDNSFFTELLAGQKEGLLQLPTDTVLVTDPVFRPYVEKYAADEDAFFADYAEAHVKLSELGFAEA

SEQ ID NO: 10089 - protein, 390 aa, Nicotiana tabacum
GKCWEDMFNAINQARRLIYITGWSVYHLVTLVRDNGKAEESMLGEILKRKSQEGVRVLLLIWDDPTSSKSILGYKSEGIMGTSDEETRRYFKHSSVHVLLCPRSAGKGHSWVKKQETGTIYTHHQKTVIVDVDAGNYQRKIIAFVGGLDLCKGRYDTPQHPIFKTLQNVHKDDYHQPNYTGPTTGCPREPWHDLHSRIEGPAAYDVLTNFEERWLKASKRHGLQKMKASQDDALLQLDRIPDILKIADVPCLGEDDADTWHVQIFRSIDSNSVKGFPKDPKEATNKNLVCGKNVLIDMSIHTAYVKAIRAAQHFIYIENQYFLGSSYNWNNYQDLGANNLIPMEIALKIANKIRANERFSVYIIVPMWPEGVPTSTATQRILFWQHNTMQ

SEQ ID NO: 10090 - protein, 347 aa, Escherichia coli O157:H7 EDL933
MKNSKAILQVPGTMKIISAEIPVPKEDEVLIKVEYVGICGSDVHGFESGPFIPPKDPNQEIGLGHECAGTVVAVGSRVRKFKPGDRVNIEPGVPCGHCRYCLEGKYNICPDVDFMATQPNYRGALTHYLCHPESFTYKLPDNMDTMEGTLVEPAAVGMHAAMLADVKPGKKIIILGAGCIGLMTLQACKCLGATEIAVVDVLEKRLAMAEQLGATVVINGAKEDTIARCQQFTEDMGADIVFETAGSAVTVKQAPYLVMRGGKIMIVGTVPGASAINFLKINREVTIQTVFRYANRYPVTIEAISSGRFDVKSMVTHIYDYRDVQQAFEESVNNKRDIIKGVIKISD

SEQ ID NO: 10091 - protein, 226 aa, Triticum aestivum
MATMAPSPALLPLLLLLPLLLLSVACTAGAAPAATATVPTIPSQPGKPNSNNKQKQGGAPLGPAVRALVQSTCNATTYYDLCVAALVADPASSTADLRGLCAIAVSAAAANASATASALANTTWAASGAPEPGSDGRAQQVPALLTRTCAGKYREAREALLEARESVGEEAYDYAFVHVGAAAEYPAVCRTMFRRKRVPYPVELARREEALEHLCTVVIDIITLLA

SEQ ID NO: 10092 - protein, 377 aa, Deinococcus radiodurans
MSNIAKGLEGVLFTESKLTFINGSEGILTHLGIPIQEWAEKSTFEELSLALLDAKLPTAEELAKFDAELKANRAIPDQLVGIIRDMPKGVHPMQALRTAVSYLGLLDPQAEDITPEARRAISTRMIAQFSTIIAAINRAQEGQDIVAPRADLTHAGNFLYMLTGNEPTPEQARLFDIALVLHADHGMNASTFTAIATSSTLSDMYSCMVSAIGALKGPLHGGANEAVMTMLDEIGTVDKAEAYITGKLDNKEKIMGVGHRVYKYFDPRSRVLRDYAEHVANKEGKSNYYQILEAIEKIIVDRMGAKGIYPNVDFYSGTVYSDLGIKKEYFTPIFALARISGWCASVIEYSQDNRLLRPDAEYTGARDQHYVDIKDRQ

SEQ ID NO: 10093 - protein, 158 aa, Oryza sativa
MASTALSSAFSLLSLPSSSSPAAAAAAAPRSFAVPSRARPRRAVAVVASTATDSPKVLELGDAIAGLTLEEARGLVDHLQERLGVSAAAADEAPAEKTEFDVVIEEVPSSARIASIKVVRALTNLALKEAKDLIEGLPKKVKEGVSKDEAEDAKKQLE

SEQ ID NO: 10094 - protein, 301 aa, Glycine max
  misc_feature (52)..(52): Xaa can be any naturally occurring amino acid
MERRRVMEHLKTYPAFPGWYADVSWPGEAHIYKMEKILFHGKSEFQELLVFXSSRHGKVAILDGCIQLTENDEFAYQEMLTHLALCSIPNPKKVLLVGGGDGGILREISRHSSVEHIDICEIDKMVIDAYKKFFPDIAVGYEDPRVHVHIRDGIAFTNSVPEGTYDVIIVDAFPAMGHSADVLADECFLESVAKALRPGGVFSAPADSLWHKNFVVADTIANCKKIFKGSVNYAWTTVPTYASGVIGFMLCSTEGPPVNFKHPINKLNPEKNGVAKGPTKFYNPEIHAAAFCLPSFVDKVD

SEQ ID NO: 10095 - protein, 490 aa, Escherichia coli O157:H7 EDL933
MSRMAEQQLYIHGGYTSATSGRTFETINPANGNVLATVQAAGREDVDRAVKSAQQGQKIWAAMTAMERSRILRRAVDILRERNDELAKLETLDTGKAYSETSTVDIVTGADVLEYYAGLIPSLEGSQIPLRETSFVYTRREPLGVVAGIGAWNYPIQIALWKSAPALAAGNAMIFKPSEVTPLTALKLAEIYSEAGLPDGVFNVLPGVGAETGQYLTEHPGIAKVSFTGGVASGKKVMANSAASSLKEVTMELGGKSPLIVFDDADLDLAADIAMMANFFSSGQVCTNGTRVFVPAKCNAAFEQKILARVERIRAGDVFDPQTNFGPLVSFPHRDNVLRYIAKGKEEGARVLCGGDVLKGDGLDNGAWVAPTVFTDCSDEMTIVREEIFGPVMSILTYESEDEVIRRANDTDYGLAAGIVTADLNRAHRVIHQLEAGICWINTWGESPAEMPVGGYKHSGIGRENGVMTLQSYTQVKSIQVEMAKFQSIF

SEQ ID NO: 10096 - protein, 172 aa, Glycine max
  misc_feature (53)..(53): Xaa can be any naturally occurring amino acid
  misc_feature (118)..(118): Xaa can be any naturally occurring amino acid
  misc_feature (143)..(143): Xaa can be any naturally occurring amino acid
AYSMISSPTVTNVNPACAGMVAPFTGLKSIAGFPTRKTNNDITSIATNGGRVXCMHVWPPVGKKKFETLSYLPDLDDAQLAKEVEYLLKNGWIPCLKFELEHGFVYREHNRSPGYYDXRYWTMWNLPMTCCTDAYDVFKELQXANTAIANSFIQIIRFDNLLSVQCMSFDRY

SEQ ID NO: 10097 - protein, 147 aa, Neurospora crassa
MSGANPKQNSEPNRSAFFFPFELFLLQDGEKKIEEKVFTGMSNTSDFKILKEDHTLGNLLAEHLKQAPHVLMAGYKIAHPNVPELFIRIQTDGSITPREALVGACKQLVAMYGQLGREFQKELALRQYADQGEQGGGVNGGANGGHY

SEQ ID NO: 10098 - protein, 287 aa, Arthrobacter keyseri
MTTETIDTTASETPRLRLLHGHSIPRLGLGTWPMLEDECEAAVRVAVQSGYRLVDTAFQYRNEEAVGRGIRTAGVPRSELFISSKFNKESHSIDGVQRAYDESLRKLGLDHLDMFMCHWPVPALGKYVDAWKGLVKLLEEGRVKAIGVSNFKPSHLKEIIDATGVVPDVNQIQLSPDIARTEPRAVHRLLGTVTEAWSPIGRSSGLRANPIIIEIAQRLNKSPAQILLRWHVQQDIVPIPQASDPLWLTENLSVFDFSLSATEMAAIRQLDKGEGAARDSDLPENGH

SEQ ID NO: 10099 - protein, 323 aa, Mycoplasma genitalium G-37
MDKIAILTSGGDASGMNATIAYLTKYAIAKQLEVFYVKNGYYGLYHNHFITSKELDLTDFFFMGGTVIGSSRFKQFQDPSLRKQAVLNLKKRGINNLVVIGGDGSYMGAKALSELGLNCFCLPGTIDNDVNSSEFTIGFWTALEAIRVNVEAIYHTTKSHNRLAIIEVMGRDCSDLTIFGGLATNASFVVTSKNSLDLNGFEKAVRKVLQFQNYCVVLVSENIYGKNGLPSLEMVKEHFENNAIKCNLVSLGHTQRGFSPNSIELFQISLMAKHTIDLVVNNANSQVIGMKNNQAVNYDFNTAFNLPKADRTKLLNQVNTAII

SEQ ID NO: 10100 - protein, 348 aa, Pyrococcus horikoshii OT3
MSEKMVAIMKTKPGYGAELVEVDVPKPGPGEVLIKVLATSICGTDLHIYEWNEWAQSRIKPPQIMGHEVAGEVVEIGPGVEGIEVGDYVSVETHIVCGKCYACRRGQYHVCQNTKIFGVDTDGVFAEYAVVPAQNIWKNPKSIPPEYATLQEPLGNAVDTVLAGPISGKSVLITGAGPLGLLGIAVAKASGAYPVIVSEPSDFRRELAKKVGADYVINPFEEDVVKEVMDITDGNGVDVFLEFSGAPKALEQGLQAVTPAGRVSLLGLYPGKVTIDFNNLIIFKALTIYGITGRHLWETWYTVSRLLQSGKLNLDPIITHKYKGFDKYEEAFELMRAGKTGKVVFMLK

SEQ ID NO: 10101 - protein, 416 aa, Escherichia coli
MESKVVVPAQGKKITLQNGKLNVPENPIIPYIEGDGIGVDVTPAMLKVVDAAVEKAYKGERKISWMEIYTGEKSTQVYGQDVWLPAETLDLIREYRVAIKGPLTTPVGGGIRSLNVALRQELDLYICLRPVRYYQGTPSPVKHPELTDMVIFRENSEDIFAGIEWKADSADAEKVIKFLREEMGVKKIRFPEHCGIGIKPCSEEGTKRLVRAAIEYAIANDRDSVTLVHKGNIMKFTEGAFKDWGYQLAREEFGGELIDGGPWLKVKNPNTGKEIVIKDVIADAFLQQILLRPAEYDVIACMNLNGDYISDALAAQVGGIGIAPGANIGDECALFEATHGTAPKYAGQDKVNPGSIILSAEMMLRHMGWTEAADLIVKGMEGAINAKTVTYDFERLMDGAKLLKCSEFGDAIIENM

SEQ ID NO: 10102 - protein, 282 aa, Streptococcus pyogenes SSI-1
MAMIQWFPGHMSKARRQVQENVKHVDFVTILVDARLPLSSQNPMLTKIVGDKPKLMILNKADLADATRTKEWKAYYESQGIKTLAINSKEQSTVKKVTEAAKELIADKIKRLRDRGIQKETLRTMIIGIPNAGKSTLMNRLAGKKIAVVGNKPGVTKGQQWLKSNKELEILDTPGILWPKFEDELVGLKLALTGAIKDQLLPMDEVTIFGLNYFKTHYPSRLTKRFKNIPLEEEAPEIIMTLTRQLGFKDDYDRFYSLFVKEVRDGKLGQYTLDQVGDMDAD

SEQ ID NO: 10103 - protein, 324 aa, Candida parapsilosis
MSTATASPAVKLNSGYEIPLVGFGCWKLTNDVASDQIYRAIKSGYRLFDGAEDYANEQEVGEGIKRAIKEGIVKREELFITSKLWNSFHDKKNVEVALMKTLSDLNLDYVDLFYIHFPIAQKPVPIEKKYPPGFYCGDGDKWSIEEVPLLDTWRALEKLVDQGLAKSIGISNFSAQLIYDLIRGCTIKPVALQIEHHPYLTQPKLVEYVQLHDIQITGYSSFGPQSFLEMDLKRALDTPVLLEEPTVKSIADKHGKSPAQVLLRYQTQRGIAVIPRSNSPDRMAQNLSVIDFELTQDDLQAIAELDCNLRFNEPWDFSNIPVFV

SEQ ID NO: 10104 - protein, 487 aa, Sinorhizobium meliloti
MRAQPKASHFIDGEYVEDAAGTVIESIYPATGEIIARLHAATPGIVEKAIAAAKRAQPEWAAMSPTARGRILKRAAELMRQLNRELSELETLDTGKPIQETIVADPTSGADSFEFFGGVAPAALNGDYIPLGGDFAYTKRVPLGVCVGIGAWNYPQQIACWKGAPALVAGNAMVFKPSENTPLGALKIAEILIEAGLPKGLFNVIQGDRATGPLLVNHPDVAKVSLTGSVPTGKKVAGAAAAELKHVTMELGGKSPLIVFDDADLESAIGGAMLGNFYSTGQVCSNGTRVFVQRKIKEPFLARLKERTEAIVIGDPLDEATQLGPMVSAAQRDKVFSYIGKGKAEGARLVTGGGIPNNVSGEGTYIQPTVFADDTDGMTIAREEIFGPVMCVLDFDDEVEVIARANATEFGLSAGVFTADLTRAHRVADRLEAGTLWINTYNLCPVEIPFGGSKQSGFGRENSVAALNHYTELKTVYVGMGPVEAPY

SEQ ID NO: 10105 - protein, 458 aa, Magnaporthe grisea 70-15
MPCTSNVRSTRNYSASSEPDLKTTLKSVIPAKRELLKKVKAHGSKVIGEVKVENTIGGMRGLKAMVWEGSVLDADEGIRFHGRTIKDCQRELPKGKTGTEMLPEAMFWLLLTGQVPSTNQVRVLSRQLAEQAQLPAFVNKMLDDFPRDLHPMTQFAIAVSALNHTSKFAKAYADGLNKADYWEPTFDDSISLLAKLPTIAAKIYHNSYKGGGALPAEVDLEQDWSYNFAAMLGKGGKGNENFQDLLRLYLALHGDHEGGNVSAHATHLVGSALSDPFLSYSAGLQGLAGPLHGLAAQEVLRWIIQMKEAIPATYSEKDVTDYLWSTLNSGRVVPGYGHAVLRKPDPRFQALMDYAASRPEIAKDPVFQLVQLNSQVAPEVLKKHGKTKNPYPNVDSSSGVLFHHYGFHETLYYTATFGVSRGLGPLAQLIWDRALGLPIERPKSINLEGILKIVGDKS

SEQ ID NO: 10106 - protein, 309 aa, Zea mays
MTSTTTTMSSLALALALLLLSGDIGGAARQLQELPKPDLPPLPKPEVPPRPDLPPLPKPEEQPPLPKPELPVPPQPLPIPPQPLPKPELPVPPEPLPVPPQPLPVPPQPLPKPEAELPVPPEPLPVPPQPLPVPPQPLPKPELPVPPEPLPVPPQPLPVPPQPLPKPDDMPVPPEPLPKPELPVPPQPLPNPELPVPPEPLPKPELPVPPQPLLKPELPVPPEPLAKPELPMPPQPLPKPELPVPPEPLPKPELPVPPEPLPKPELPVPPEPLPKPELPPPVLPGELPPKPEPEVVPPKAEIMPSLPKP

SEQ ID NO: 10107 - protein, 182 aa, Zea mays
  misc_feature (157)..(157): Xaa can be any naturally occurring amino acid
MTTGEGAEAAAVPRVVSILSALLQRVAERNDAAAAAPPPAAAAGPPVLSAFQGLTKPAISIGGYLERIFRFAGCSPSCYVVAYIYLDRFLRRRPALAVDSFNVHRLLITSVLTAVKFVDDICYNNAYFARVGGISLVEMNYLEVDFLFGIAFYLNVXPSGFAYYSAVLHIVKTVMFKQLGGG

SEQ ID NO: 10108 - protein, 455 aa, Secale cereale
MKTLLMLAILAMATTIATANMQVNPSGQVQCPQQQPFPQPQQSSPQQPQQPFPQQSQQPFPQQPQQSSPQPQQPYPQQPFPQQPQQPYPQQPQQPFPQQPQQPYPQQPQQQFPQQPQQPVPQQPLQQFPQQPQQPFPQQPLQQFPQQPQQPFPQQPQQPVPQQSQQPFPQTQQPQQPFPQPQQPQQLFPQTQQSSPQQPQQVTSQPQQPFPQAQPPQQSSPQSQQPYPQEPQQLFPQSQQPQQPFPQPQQPQQPFPQPQPQTQQSIPQPQQPFPQPQQPFPQSQEQFPQVHQPQQPSPQQQQPSIQLSLQQQLNPCKNVLLQQCSPVALVSSLRSKIFPQSECQVMQQQCCQQLAQIPQQLQCAAIHSVVHAIIMQQEQREGVQILLPQSHQQHVGQGALAQVQGIIQPQQLSQLEVVRSLVLQNLPTMCNVYVPRQCSTIQAPFASIVTGIVGH

SEQ ID NO: 10109 - protein, 181 aa, Hordeum vulgare
MAGVGRNMVAPLLVLNLIMYIIVIGFASWNLNHFINGITNRPGVGGNGATFYFLVFAILAGVVGAASKLAGVHHVRTWRGDSLATSASSSLVAWAITALAFGLACKEIHVGGYRGWRLRVLEAFVIILAFTQLLYVLALHSGLFGNQFGNNNGGYPAEHAYGAGVGDHHNKGMGTGGVARV

SEQ ID NO: 10110 - protein, 228 aa, Bacillus sp. KSM-K16
MDQLKRMAAEAAAEYVKDGMKIGLGSGSTVFEFVRVLGEKAKEGLNIQAVAASRKTEALAKACGIHIIDFPTMEKLEVAFDGADEIAPGLMLLKGGGGSLLREKLVAAAAKRLVVLADESKLVEELGAFKLPVEIIPFGWETTAMRIEALGGVASLRQTGKSPFVSDNHNWILDCDFGNIRDPYSLHEKVKKLVGVVETGLFLDMACEAIVASKNGIHHITKGDEFNV

SEQ ID NO: 10111 - protein, 475 aa, Mesorhizobium sp. BNC1
MFKNYIAGEWVEAEGTENINPSDTSDVVGVYSRATRENVLDAISAAKAAFASWSRSGPLQRHSVLRKAADEIMARKDELGSLLAREEGKTLPEAIGEVVRASQIFDFFAGESLRLSGEIIPSVRPGIGVEITREPVGVIGIITPWNFPIAIPAWKIAPAICYGNAIVFKPADLVPASSWAIVDILQRAGLPAGVLNLVMGKGSVVGQAILESPDVAAVTFTGSTQTGKHVAAASIEHNRRFQLEMGGKNPMVVLDDADLSIAVEAATNSAFFSTGQRCTASSRLIVTEGIHDRFVEAMTQRLSSLVVDNALKPGTHIGPVVDESQLQQDLDYIEVGQKEGARLHFGGRRLERETNGFYLEPALFTEASNDMRIAREEIFGPVAAVIRVKDYEEALAVSNDTPYGLSAGIATQSLKFATHFKQNAEAGMVMVNLPTAGVDFHVPFGGRKRSSYGPREQGRYAAEFFTTVKTSYSLA

SEQ ID NO: 10112 - protein, 494 aa, Arabidopsis thaliana
MVLTKTATNDESVCTMFGSRYVRTTLPKYEIGENSIPKDAAYQIIKDELMLDGNPRLNLASFVTTWMEPECDKLIMDSINKNYVDMDEYPVTTELQNRCVNIIARLFNAPLEESETAVGVGTVGSSEAIMLAGLAFKRKWQNKRKAEGKPYDKPNIVTGANVQVCWEKFARYFEVELKEVNLSEGYYVMDPDKAAEMVDENTICVAAILGSTLNGEFEDVKRLNDLLVKKNEETGWNTPIHVDAASGGFIAPFIYPELEWDFRLPLVKSINVSGHKYGLVYAGIGWVVWRAAEDLPEELIFHINYLGADQPTFTLNFSKGSSQIIAQYYQLIRLGFEGYKNVMENCIENMVVLKEGIEKTERFNIVSKDQGVPVVAFSLKDHSFHNEFEISEMLRRFGWIVPAYTMPADAQHITVLRVVIREDFSRTLAERLVADISKVLHELDTLPSKISKKMGIEGIAENVKEKKMEKEILMEVIVGWRKFVKERKKMNGVC

SEQ ID NO: 10113 - protein, 439 aa, Helicobacter pylori J99
MNFQENLAALDLEYLWHPCSQMQEHQNFPIIPIKKAQGIYLYDFNDNAYMDLISSWWVNLFGHNNAYISQQLKNQIDNLEHVLLASFSHKPIITLSQRLCQLTGMDKCFYADNGSSCIEIALKMSYHAHFLKNQTRRKKLFLSLSNSYHGETLGALSVGDVKLYKDTYTPLLLKNLITPVPKNDSEIENSLNALKRLLDKHGEEICAFIAEPLLQCAGNMHIYSAKYLKQAVLWCKQKNIHIIFDEIATGFGRTGSMFAYEQCGIKPDFLCLSKGISGGYLPLSALLTHNEIYNQFYAPYEENKAFLHSHSYTGNALACACANATLDIFEKENVIEKNKALSEFIFSALQNALKPLIERQVVSDLRHLGMVFAFEVFLQTKERLSLAVFKKALKKGLLLRPLNNTIYLMPPYIITHEEIKKAIAGLVEAIDELKKAENK

SEQ ID NO: 10114 - protein, 157 aa, Oceanobacillus iheyensis HTE831
MSIYEYQVEKSNGEEISLSQYQDNVLLIVNTATKCGFANQFEGLEELHQKYQDEGLRVLGFPSNQFNEQEPVDDENMEEACKVNFGVTFPLFKKIDVKGPNAAPLFKYLTEEQKGLLGSNVKWNFTKFLVDRNGNVVKRFAPKDKPAKIEDDIKALL

SEQ ID NO: 10115 - protein, 380 aa, Zygosaccharomyces rouxii
MATHEEFIRTQVFGTVFEITNRYTDLNPVGMGAFGLVCSATDTLAGQPVAIKKIMKPFSTAVLAKRTYRELKLLKHLRHENLICLQDIFLSPLEDIYFVTELQGTDLHRLLQTRPLEKQFVQYFLYQILRGLKYVHSAGVIHRDLKPSNILINENCDLKICDFGLARIQDPQMTGYVSTRYYRAPEIMLTWQKYDVEVDIWSAGCIFSEMIEGKPLFPGKDHVHQFSIITDLLGSPPRDVINTICSENTLKFVTSLPHRDPVPFQERFKTVEPDAVDLLERMLVFDPKKRITAADALVHPYLAPYHDPTDEPTAEAQFDWDFNDADLPVDTWRVMMYSEILDFHKIGGGDGQIDTNAAFDDQVAAATAAPMAQHTNQTNQ

SEQ ID NO: 10116 - protein, 197 aa, Glycine max
MSASRFIKCVTVGDGAVGKTCLLISYTSNTFPTDYVPTVFDNFSANVVVDGSTVNLGLWDTAGQEDYNRLRPLSYRGADVFILAFSLISKASYENIAKKWIPELRHYAPGVPIILVGTKLDLREDKQFFIDHPGAVPITTTQGEELRKLIGAPAYIECSSKTQQNVKAVFDAAIKVVLQPPKQKKKKRKAQKACSIL

SEQ ID NO: 10117 - protein, 438 aa, Corynebacterium glutamicum ATCC 13032
MQAKEEEKRAFDNDRAHVFHSWSAQDKISPKVWAAAEGSTLYDFDGNAFIDMGSQLVSANLGHNNPRLVEAIQRQAARLTNINPAFGNDVRSDVAAKIVSMARGEFSHVFFTNGGADAIEHSIRMARLHTGRNKILSAYRSYHGATGSAMMLTGEHRRLGNPTTDPDIYHFWAPFLHHSSFFATTQEEECERALKHLEDVIAFEGAGMIAAIVLEPVVGSSGIILPPAGYLNGVRELCNKHGILFIADEVMVGFGRTGKLFAYEHAGDDFQPDMITFAKGVNAGYAPLGGIVMTQSIRDTFGSEAYSGGLTYSGHPLAVAPAKAALEIYAEGEIIPRVARLGAELIEPRLRELAEENVAIADVRGIGFFWAVEFNADATAMAAGAAEFKERGVWPMISGNRFHIAPPLTTTDDELVALLDAVEAAAQAVELTFAGALF

SEQ ID NO: 10118 - protein, 169 aa, Aspergillus nidulans FGSC A4
MASASTAGSYSNPLKKFKLVFLGEQSGAHTLSLHSQTGARFLMLYYNRTVRLQLWDTAGQERFRSLIPSYIRDSSVAVVVYDISNAKSFQNTRKWIDDVRGERGNDVIIVLVGNKTDLSDKREVTTAQGEEEAKKNGLMFIETSAKVGHNVKQLFRRIAQALPDLNDND

SEQ ID NO: 10119 - protein, 219 aa, Oryza sativa (japonica cultivar-group)
MEWAYYGSGYSSSGTPSPVGGDGDEDSYMTVSSAPPKRRAGRTKFKETRHPVYKGVRSRNPGRWVCEVREPHGKQRIWLGTFETAEMAARAQDVAAMALRGRAACLNFADSPRRLRVPPLGAGHEEIRRAAVEAAELFRPAPGQHNAAAEAAAAVAAQATAASAELFADFPCYPMDGLEFEMQGYLDMAQGMLIEPPPLAGQSTWAEEDYDCEVNLWSY

SEQ ID NO: 10120 - protein, 152 aa, Nicotiana tabacum
AWHSAGTYDVCSKTGGPFGTMRLKAEQGHGANNGIDIAIRLLEPIKEQFPILSYGDFYQLAGVVAVEVTGGPDVPFHPGREDKTEPPVEGRLPDATKGSDHLRDVFVKQMGLSDKDIVALSGGHTLGRCHKERSGFEGPWTTNPLIFDNSYF

SEQ ID NO: 10121 - protein, 125 aa, Candidatus Liberibacter africanus
MSNIESIVEKLSSLTLLQAAELSKRLEEEWGVSAAAPVAVVASAAGESAAAVAEKTEFEVFLEGFDAKKKISVIKEVRAITELGLKEAKDFVESAPKSLKTGVSKDEAEELKKKLEAAGATIILR

SEQ ID NO: 10122 - protein, 113 aa, Arabidopsis lyrata
STGKRSEREEDTDPQGSRGISDDEDGDNSRKKLRLSKDQSVILEETFKDHSTLNPKQKQALAKQLGLRARQVEVWFQNRRARTKLKQTEVDCEFLRRCCENLTEENRRLQKEV

SEQ ID NO: 10123 - protein, 161 aa, Schizosaccharomyces pombe
MNDGFADDELSLPKATVQKMVSDILPVDLTFTKEARDLLIECCVEFIHLVSSEANEICEKEAKKTIAAEHIIKALENLEFKEYIAEALEVAAEHKEQQKNREKKSSKFEQSGVSRDELLRQQEELLSRARERFKNQNIAHDNHTTTAIPVPTASETETKEN

SEQ ID NO: 10124 - protein, 591 aa, Triticum aestivum
  misc_feature (71)..(71): Xaa can be any naturally occurring amino acid
  misc_feature (91)..(91): Xaa can be any naturally occurring amino acid
MCGILAVLGCADWSQAKRARVLSCSRRLKHRGPDWSGLFQCEGNFLAQQRLSVVSPLSGDQPLYNEDRTVXVVVANGEIYNHKKIRKQFRXKHTFTTGSDCEVIIPLYEEYGENFVNMLDGVFSFVLYDTRNKTYMAARDAVGVNPLYFGRGSDGSVWIASEMKALHEDCPKFELFPPGNLYSSAAGGFRRWYNPQWFAEHVPATAYQPLVLREAFEKAVIKRLMTDVPFGVLLSGGLDSSLVASVTKRHLIETEAAKKFGTELHSFVVGLEGSPDLKAAREVADYLGTIHHEFHFTVQDGIDAIEEVIYHNETYDVTTIRASTPMFLMARKIKALGVKMVLSGEGSDELLGGYLYFHFAPNKEEFHKETCRKVKALHQYDCLRANKATSAWGLEVRVPFLDKEFIDVAMSMDPEWKLYDANLGRIEKWVLRKAFDDEKEPYLPKHILYRQKEQFSDGVGYNWIDGLKAFTEQQVTDEMMKNAAEEYPYNTPINKEAYYYRMIFERLYPQDSARETVPWGPSIACSTPAAIEWVAQWKASNDPSGRHIASHNDAAPAHAHANWNGAVANGKANGNGTANGNANANGTLVPC

SEQ ID NO: 10125 - protein, 275 aa, Brucella suis 1330
MTVPTVKLNDGNHIPQLGYGVWQISNDEAVSAVSEALKAGYRHIDTATIYGNEKGVGKAINGSGIARADIFLTTKLWNSDQGYESTLKAFDTSLKKLGTDYVDLYLIHWPMPSKDLFMETWRAFIKLKEEGRVKSIGVSNFRTADLERLIKESGVTPVLNQIELHPQFQQDELRLFHGKHDIATEAWSPLGQGKLLEDPTLKSIAEKHAKSVAQIILRWHIETGNIVIPKSITPARIKENFDIFDFTLNGTDHDAITKLDMADGRIGPNPSVFSA

SEQ ID NO: 10126 - protein, 402 aa, Gibberella zeae PH-1
MNSKNWNDRADKDLFFTILSVKNIGVISGSEWTTIGNHMRSLGYGFTNEGCRQHFQGLRRAQHKSDIPGPNGDTVRRNDPTMNPITRRPGPGRGRPRKQPPVPVPGAPGEGAPHPPLALGIDHGPPPNSAPPYPQGAQSYDPTPAGHQPTHPQQVQAAMRPGTISSAPPTPQASTPGNAVPGPGPVTYPSPNLTPALPQNPPHLHPLQHGQPGQSGQPGQQPQQPQQPQPEQQSQSDQQSQPDQQPQQPQPQQTQPQSAQQSQPGQQPNPTTQPQPQPQPDQEIQHDYQSQELPQEPPQETREATDTDAISQSQPQPIEQNHEPHAILPQEQLQPEHEDIDADGDADGEVDVDNDEPSAKRQRMGSPEPAKDDDMDDEAVLALAAHSGPTDFASDFATYGEA

SEQ ID NO: 10127 - protein, 464 aa, Xanthomonas campestris pv. campestris str. ATCC 33913
MTDGLPTALADLLAARLGPEGWLTGADARRRYGEDDSRRWALPGAVALPRDTDDVVAIVQACRAHGVPIVARGAGTGTTGAAVPFSGGVVVSMARMNRILALRPADRCAVVQPGVLNGDLQQALQPHGLFWPPDPSSAEICSVGGNLSTNAGGPRAVKYGATRDNVLGLVAVTGTGDVIHCGGAYTKNSTGYDLTHLLVGSEGTLAIIVEATLKLTPRAVAQAGVRALYRDAASAAAAVSRIMAQPTTPTMLEFMDASAIALLRRNGSDVPDAGAMLLIEADGDHDTLPYALQALHDAADGDGVLSLDIAADGSARDKLWAARRALSPALRTIKPGKINEDVVVPVSRIPELVAGVEALAVEFAVPIVAFGHAGNGNLHVNIMYDPDDADETARAQAALPRVFALVLALEGTLSGEHGIGVAKRDFMTQAFSAPTLAAMRAIKAALDPDGILNPGKVLPTSPAE

SEQ ID NO: 10128 - protein, 182 aa, Zea mays
MPAGKRHSWVKQQETGTIFTHHQKTVILDADAGNHRRKIVAFVGGLDLCGGRYDTPKHTLFRTLQTFHKEDYYNPNFAVEDARGPREPWHDLHSKIDGPAAYDVLKNFEERWLKASKRSAAKKLSKLSRSHNDSLLWINKIPDIIAIDDEIYSNDDDPERWEEQESLPKGSINHCKINNDID

SEQ ID NO: 10129 - protein, 364 aa, Buchnera aphidicola
MTKKLYKIAVLPGDGIGPEIIQEAYKIIDVLQKKFSFNVKMHEYDIGGISIDKHGTALTQETIEGCENSDAILFGSVGGSKWDHLPEIEKPEKAGLLKLRKHFNLFANIRPCKLSQHLLDISPLKNSIIKKGIDLICIRELTGGIYFGKSNKITNIDDPYAFDTEIYFRSEIKRIAKIAFQIAQSRKKKIVSIDKANVLKSSILWRDTVNKMAYKFPNVKLEHMYIDNATMELIKNPSSFDVILCSNLFGDIISDECAAIIGSIGLLPSASLNKSGFGLYEPAGGSAPNIAGKTIANPIAQILSLSMLLKYSLHLPFLSSCIDEAVHEALVKKYMTMDISKNPQNFLKTNEIGDKISDLLAKKA

SEQ ID NO: 10130 - protein, 205 aa, Cytophaga hutchinsonii
MYTKKNKQFVLMGLTYSLMMFVSSCLGINSDVKNRPSATDSMATVDKTQSIYSIKVTTLDGQPFDLSTLKGKKILIVNTASKCGYTPQYEELQQLHALHGDSVAVLGFPCNDFGGQESGSESEIGAFCTKNYGVTFQMFEKVHIKGNEQHPLYKWLTDPALNGWNKDAPTWNFCKYLINEKGELVNFFGSGVKPMSKTVLDAIRK

SEQ ID NO: 10131 - protein, 161 aa, Triticum aestivum
  misc_feature (134)..(134): Xaa can be any naturally occurring amino acid
MSDSEDHHFESKADAGASKTYPMQAGAIRKGGFLVIKNRPCKVVEVSTSKTGKHGHAKCHFVALDIFNGKKLEDIVPSSHNCDVPHVDRTEYQLIDISEDGFVSLLTDNGSTKDDLKLPTDDAILTQLKDGFAXEGKDLALTVMSAMGEEQICAVKDVGPR

SEQ ID NO: 10132 - protein, 324 aa, Hypocrea jecorina
MASPTLKLNSGYDMPQVGFGLWKVDNAVCADTVYNAIKAGYRLFDGACDYGNEKECGEGVARAIKDGLVKREDLFIVSKLWQTFHDEDKVEPITRRQLADWQIDYFDLFLVHFPAALEYVDPSVRYPPGWFYDGKSEVRWSKTTTLQQTWGAMERLVDKGLARSIGVSNYQAQSVYDALIYARIKPATLQIEHHPYLQQPDLVSLAQTEGIVVTAYSSFGPTGFMELDMPRAKSVAPLMDSPVIKALADKHRRTPAQVLLRWATQRGIAVIPKTSRPEVMAQNLDNTSFDLDSEDLAKIADMDLNIRFNKPTNYFSANKLYLFG

SEQ ID NO: 10133 - protein, 67 aa, Zea mays
LQIEIFEASKDDNREASPECSICLDGFYDGDELIRLHCGHRFHSTCLEPWVRKCSDCPYCRTNIRSQ

SEQ ID NO: 10134 - protein, 481 aa, Salmonella enterica subsp. enterica serovar Typhi Ty2
MTIWENAMQYQLLINGVLVDGEGERQSVYNPATGEVILEIAEASPVQVDAAVLAADSAFAEWGQTTPKARAECLLKLADSIEQNALEFARLESQNCGKPLHCVINDEIPAIVDVFRFFAGAARCLSGLAAGEYLEGHTSMIRRDPIGVVASIAPWNYPLMMAAWKLAPALAAGNCVVIKPSEITPLTALKLAALAKDIFPPGVLNVLFGRGQTVGDVLTGHEKVRMVSLTGSIATGEHILRHTAPAIKRTHMELGGKAPVIVFDDADLDAVAQGVRTFGFYNAGQDCTAACRIYAQRGIYDALVEKLGNAVSSLKMGAPEDKSTELGPLSSLAHLKRVTAAVEEAKALSHIRVITGGSQTEGKGYYFAPTLLADAKQEDAIVQREVFGPVVSITVFDDEDQVLRWANDSRYGLASSVWTQDVGRAHRLSARLQYGCTWINTHFMLVSEMPHGGQKQSGYGKDMSLYGLEDYTLVRHIMVKH

SEQ ID NO: 10135 - protein, 507 aa, Glycine max
  misc_feature (220)..(220): Xaa can be any naturally occurring amino acid
  misc_feature (241)..(241): Xaa can be any naturally occurring amino acid
  misc_feature (346)..(346): Xaa can be any naturally occurring amino acid
MASNDSDSQMKIVHGDAGYILEDVPHFADYIPNLPTYPNPLRSNPAYSVVKQYFVHMDDTVPPTRPVHKDSPRGVHFRRAGPRQKVYFKSDEVHACIVTCGGLCPGLNTVIREIVCGLSYMYGVNKGLGIDGGYRGFYSKNTITLTPKVVNDIHKRGGTILGTSRGGHDTGKIVDSIQDRGINQVYIIGGDGTQRGATVIYEEVRRRGLKVAIAGIPKTXDNDNSSINKSFGFNNAVEVGXHAINAAHVEAESIENGIGVVKLMGRYSGFIAMYATLASRDVDCCLIPESPFYLEGKGGLFEFIEKRLKENGHMVIVIAEGAGQDLLTESMQAMDQKDASGNKLLXDVGLWISHKIKDHFARKDKMPINLKYIDPTYMIRAIPSNASDNVYCTLLAQSAVHGAMAGYTGFTVGLVNGRQTYIPFIRINERQNKVVITDRMWARLLSSTNQPSFLSPKDLEEAKKAESPTQLLEENNCNDVGDAEKEQPPKDEQESGNHTDNGIKTQN

SEQ ID NO: 10136 - protein, 474 aa, Novosphingobium aromaticivorans DSM 12444
MRERLQQYIDGKWVDSEGGKRHEVINPTTEEPCCVITLGTQADVDKAVAAAQRAFKTFSKTTREERLALLERIVEEYKKRVPDLAAAMAEEMGAPVSFASTAQVGAGIGAFLGTMAALRNFSFVEDNGAFKVAYEPIGVVGMITPWNWPLNQIALKVAPALAAGNTMILKPSEECPTNAAIFTEILDAAGVPPGVFNLIQGDGPGVGTAISSHPGIDMVSFTGSTRAGILVAKAAADTVKRVHQELGGKSPNVVLPDADFAKYLPSTASGPLVNSGQSCISPTRILVPREREAEAAAFVSAMYSATPVGDPMQEGAHIGPVVNKAQFDKIRGLIQSAIDEGAKLETGGPDLPANVNRGYYIKPTVFSGVTPDMRIAQEEIFGPVATIMAYDSLEEAIEIANDTAYGLSACITGDPAKAAEVAPELRAGMVAINNWGPTPGAPFGGYKQSGNGREGGLYGLKDFMEMKAISGLPA

SEQ ID NO: 10137 - protein, 181 aa, Glycine max
MAESDNESGGHTGNASGSNELSGCREQDRFLPIANVSRIMKKALPANAKISKEAKETVQECVSEFISFITGEASDKCQKEKRKTINGDDLLWAMTTLGFEDYVDPLKIYLHKYREMEGEKTAMMGRPHERDEGYGHGHGHATPMMTMMMGHQPQHQHQHQHQHQHQGHVYGSGSASSARTR

SEQ ID NO: 10138 - protein, 114 aa, Glycine max
  misc_feature (17)..(17): Xaa can be any naturally occurring amino acid
  misc_feature (44)..(44): Xaa can be any naturally occurring amino acid
  misc_feature (75)..(75): Xaa can be any naturally occurring amino acid
  misc_feature (86)..(86): Xaa can be any naturally occurring amino acid
  misc_feature (99)..(99): Xaa can be any naturally occurring amino acid
PALTARHLTEEQWEDYXYISELAIQGDYETRLMDTEEMKERSVXQTTQGTECMEQLAAMEGMSEWLRKAEGAAEXARRYDGDLSIXTCGTDARGIDQAXDMNAIHRLEEKPSVR

SEQ ID NO: 10139 - protein, 214 aa, Triticum aestivum
HGAINARAGYGEMVTCSKSLSADLFDAVLGGLGQFGVIVRARIALEPAPTRARWARLVYTDFAAFSADQERLAAPGPDGAFGPMSYLEGAVYVNHSLAAGLRNSGGFFTDAHVARIVAVAAARNATTVYVIRGNLQIQQTHGPVSGEQETPLSGLETLRPQGGASGFGGKPFYPSNFLDTGCPGKKGGLLKKNGCWWGSPEPLGSKGFWAPPSP

SEQ ID NO: 10140 - protein, 268 aa, Medicago truncatula
  misc_feature (192)..(192): Xaa can be any naturally occurring amino acid
  misc_feature (199)..(199): Xaa can be any naturally occurring amino acid
MAISHNTLAFTFGMLGNVISFLVFLAPISTFYRIYKKKSTEGFQSLPYLVALFSSMLWLYYALLKKDAFLLITINSFGCVVETIYIILYIIYAPRDARNLTFKLLSAMNVGSFALILIVTNYAVHGPLRVQVLGWVCVSLSVSVFAAPLSIVAQVVRTKSVEFMPFNLSFTLTLSATMWFGYGFFLKDICIXLPNVLGXVLGLLQMLLYAIYRNGGEKAMKKEKKAPIEPPKSIVIETQLEKIEQEKKNKDDDNEEKDKSEEPIGCGV

SEQ ID NO: 10141 - protein, 123 aa, Brassica napus
  misc_feature (11)..(11): Xaa can be any naturally occurring amino acid
  misc_feature (20)..(20): Xaa can be any naturally occurring amino acid
  misc_feature (25)..(25): Xaa can be any naturally occurring amino acid
  misc_feature (29)..(29): Xaa can be any naturally occurring amino acid
  misc_feature (32)..(32): Xaa can be any naturally occurring amino acid
  misc_feature (35)..(38): Xaa can be any naturally occurring amino acid
  misc_feature (41)..(43): Xaa can be any naturally occurring amino acid
  misc_feature (46)..(46): Xaa can be any naturally occurring amino acid
  misc_feature (49)..(49): Xaa can be any naturally occurring amino acid
  misc_feature (53)..(55): Xaa can be any naturally occurring amino acid
  misc_feature (59)..(59): Xaa can be any naturally occurring amino acid
  misc_feature (61)..(61): Xaa can be any naturally occurring amino acid
  misc_feature (71)..(71): Xaa can be any naturally occurring amino acid
  misc_feature (74)..(74): Xaa can be any naturally occurring amino acid
  misc_feature (76)..(76): Xaa can be any naturally occurring amino acid
  misc_feature (78)..(78): Xaa can be any naturally occurring amino acid
  misc_feature (85)..(85): Xaa can be any naturally occurring amino acid
  misc_feature (87)..(87): Xaa can be any naturally occurring amino acid
  misc_feature (89)..(89): Xaa can be any naturally occurring amino acid
  misc_feature (97)..(101): Xaa can be any naturally occurring amino acid
  misc_feature (107)..(107): Xaa can be any naturally occurring amino acid
  misc_feature (109)..(111): Xaa can be any naturally occurring amino acid
MAYSMLSSAGXVTSPAQATXGAPFXGLKXSSXFPXXXXGQXXXTFXVSXGRRXXXVEVXPXGGKKKFENLXYLXDXTXVNGVKEXYXLXPKGDSCGXXXXXHGFFYXEXXXPPQGGELTPKPP

SEQ ID NO: 10142 - protein, 116 aa, Oryza sativa
MARAQLVLVALVAALLLAAPHAAVAITCGQVNSAVGPCLTYARGGAGPSAACCSGVRSLFAAASTTADRRTACNCLKNAARGIKGLNAGNAASIPSKCGVSVPYTISASIDCSRVS

SEQ ID NO: 10143 - protein, 509 aa, Candida albicans SC5314
MITKRLYSTIESSKKVLGTLSNPNLVKTEAYINGKWVPSSSGETFTVTNPALYPNPESELATMQSMSEEDFNSAIESADIAFNKFKKTTGRYRSELLLKLYNLMISNKDDLAKLVVLENGKPYADALGEVNYAASFFQWFSEEAPRIYGDIIPSANGTNRILTFKQPIGVCGILTPWNFPLAMITRKLGAAIATGCTAVIKPASETPLSATALAFLAEEAGFPPGVINVLPSADASGSGKYLTEHPLIKKVSFTGSTPVGKILMNQSASTLKKLSFELGGNAPFIAFDDVDVDKAVNGAIASKFRSSGQTCVCANRIFVHEKIYDEFAKKFVDKLKNETVLGNPLASGVTHGPVIHDRSMKKVRQHIEDAVDKGATILLGGSKRPDLGENFHDLTVLGDVTTEMLITQEETFGPVAPLIKFKTDDEVIKMANDTTVGLAGYFYANDVAKVFKIAEALNVGMLGVNTGAISEAALPFGGVGESGFGREGSKFGVEDYLVIKSAVLGGIEN

SEQ ID NO: 10144 - protein, 154 aa, Quercus suber
MALSLFGGRRSNVFDPFSLDIWDPFEGFSAVASVPPSARETTAFATARIDWKETPEAHIFKADLPGLKKEEVKVEVEDGNVLQISGERSKEHEEKNDKWHRVERSCGKFMRRFRLPENAKVDQVKANMENGVLTVMVPKEEQKKPAVKAIEISG

SEQ ID NO: 10145 - protein, 437 aa, Sulfolobus solfataricus P2
MNIRDKWIEEEKSLEYEWSEDPRWRGIKRNYKPLDVVKLRGSIRIEYSLAKLASHKLWNLLNTEPYVATFGALTGSQAVEMAKAGLKAIYVSGWQVAADNNLSNQTYPDLSLYPSNSVPNLVKRLNNALIRADQISWSEGKHDIDYLLPIVADAEAGFGGPIHAFELTKALIEAGAAGVHFEDQLAAEKKCGHLGGKVLIPISAFIRVLNAARLASDVLGVPTILIARTDALNAKYLSNDVDETDNQFLTGKRTSEGYYEIKGGIEYAIARGLAYAPYADLLWFETSKPDLEEARQFAEAIHTHYPGKMLAYNLSPSFNWKKFMDDSKISKFMNELGEMGYKFQFITLAGWHLINYHTFKLARAYRNEGMPAYVRLQELEFQAQAEGYTAVSHQREVGTDYFDLVLTIASGGEASTTAMEGSTEAEQFVEAKQKVLK

SEQ ID NO: 10146 - protein, 81 aa, Glycine max
  misc_feature (45)..(45): Xaa can be any naturally occurring amino acid
FIAVEWLLEYWLLTRAFDDHRHPYLPKHFFSCLLPHFSDGFDSGXIDVLSAHADIRVSVVLMLIAANIFPFYSPSTCAAFY

SEQ ID NO: 10147 - protein, 489 aa, Burkholderia cepacia R1808
MTSYDQSPVRHLLEAGRLERFFIDGDWVAPDGGGRFAVVCPSTEDTLCEIPLGSARDADRAVQAARHAFAGWAATSPQERAALLDRVHRLLLERAERFATALALEMGAPLGYARSAHVPLAAEHIRVARDNLTDYPFRKQRGTTAIVREPIGVCALITPWNWPIYQITAKVGPALAAGCTVVLKPSELSPLSALLFAEVLADAGVPAGVFNLVSGTGAEVGAALSSHPLVDMVSITGSTRAGVLVAQAAAPTVKRVAQELGGKSPNVVLPDADLERAIAPGVAAAFRNMGQSCSAPTRMIVPRAALGAVEALAVAAAQRCVVGDPFADATTHGPLANRAQFERVAQMIDVGVAEGAKLIAGGPGRPAGCERGFYARPTIFSDVRTGMAIAQQEIFGPVLAILPYDSIDEAVSIANDTVYGLGAHVQGTDRERTRAVAARIRAGQVHLNYPAWDPQAPFGGYKQSGNGREYGVEGMEEYMEVKSILGYYD

SEQ ID NO: 10148 - protein, 812 aa, Zea mays
MAQILLHGTLHATIFEAESLSNPHRATGGAPKFIRKPDYWIEDTVGIGKGTTKIYATVDLEKARVGRTRMVSNEPVNPRWYESFHIYCAHMAADVVFTVKIDNPIGASLIGRAYLPVEDILGGDEIDKWLEICDEKREPIGDSKIHVKLQYFDVGKDRNWARGVRSTKYPGVPYTFFSQRQGCKVTLYQDAHVPDNFVPRIPLADGKNYEPHRCWEDIFDAISKAQHLIYITGWSVYTEITLVRDTSRPKPGGDVTLGELLKRKASEGVRVLMLVWDDRTSVGLLKKDGLMATHDEETANYFHGTDVNCVLCPRNPDDSGSFVQDLQISTMFTHHQKIVVVDHELPNEGSQQRRIVSFVGGIDLCDGRYDTQYHSLFRTLDTVHHDDFHQPNFEGGSIKKGGPREPWHDIHSRLEGPIAWDVLYNFEQRWRKQGGKDLLVRLRDLSDIIIPPSPVMFPEDRDTWNVQLFRSIDGGAAFGFPETPDEAARAGLVSGKDQIIDRSIQDAYINAIRRAKNFIYIENQYFLGSSYDWKPEGIKPEDIDCLHLIPKELSLKIVSKIEAGERFTVYVVVPMWPEGVPESASVQAILDWQRRTMDMMYTDITQALEANGIQTNPKDYLTFFCLGNREVKQEGEYQPEEHPEPGTDYIRAQEARRFMIYVHAKMMIVDDEYIIIGSANINQRSMDGARDSEIAMGAYQPYHLATRQPARGQIHGFRMSLWYEHLGMLDDVFQRPESVECVQKVNKIAEKYWDLYSSDDLEQDLPGHLLSYPIGVTADGTVTELPGMENFPDTRARVLGNKSDYLPPILTT

SEQ ID NO: 10149 - protein, 153 aa, Glycine max
ISCPDDTTANRAGAGMVVPFTDLKSMVGFHTRKTSHDITCIASNGRRVQCMQVWPPVDKKKVETLSYLPDLDDAQLAKEVQYLLRKGWIPCLEFESQHGFPYREHNRSPRYYDGRYWTMWKLPMFDCTDACQVLKELQEAKTPYPIDLIRIIG

SEQ ID NO: 10150 - protein, 241 aa, Tradescantia virginiana
  misc_feature (228)..(228): Xaa can be any naturally occurring amino acid
VQLKRMENKINRQVTFSKRRGGLLKKAHEISILCDAEIALIIFSTKGKLYEYATNSKMDNILERYERYSYAEKALTSSDPDIQGNWCQEYAKLKSKVEALCKSQRHLMGEQLETLNLKELQQLEQQLEGSLKHVRSRKTQVMLDSISELQRKEKSLEEQNKNLEKEILEKQKIKALAQQAHWEHQNQPAPRGSPPRPFVIAESHPTLNIGHFQGRTNAVEAEENQQPXMRICSSLLPPWML

SEQ ID NO: 10151 - protein, 273 aa, Triticum aestivum
  misc_feature (138)..(138): Xaa can be any naturally occurring amino acid
  misc_feature (244)..(245): Xaa can be any naturally occurring amino acid
MAHAAAAAAVPLRRPLLLFLRPARLLSSVAPRSSSVRAYTRALRPLAPLPSDDEDPDDGDGAPSRNEKKREARRAVKWGMELAKFSPPQIKRIVRAASLEREVVDALMLVKKFGPDVREGRRRQYNYIGSLLRGAQPXELMEDLIHSLKNGDESRIQALLSEVADKSMPIEDEEVGELPHEEEGEENQEYMEIADRWFEGLVCQDIPVTNEVYAIHNVEFDRQELRKLVRIVQEVQKSTRDKDXXEKDLIESFPGPKKPLIMFLRSLAKKTLE

SEQ ID NO: 10152 - protein, 276 aa, Burkholderia cepacia R1808
MDARSTAFFEQPDQLAATGWPAFDGNARPRASELFAATDALADADPNWTLSALESRPGAGLTRRAFVSQTLAFLAASVGITAACATYVAMLGLPVGDSIVCMLAGLFTLSGLLGANALGRRVSKWLSLPLMGLFSVLQGVAVGPIVHGYWMQAGGALIVAGALATTAIAFAAIGVYAFGTRHARRDFTALGGFLFAGAIVALSLSIATFYVSAPGLEFALAGVGAMVFTGYLLHDLSRLWTAGQDDPVIAALGLYINVLNVFLSLLRLFEFFVSGD

SEQ ID NO: 10153 - protein, 222 aa, Tradescantia virginiana
  misc_feature (11)..(11): Xaa can be any naturally occurring amino acid
  misc_feature (218)..(218): Xaa can be any naturally occurring amino acid
  misc_feature (221)..(221): Xaa can be any naturally occurring amino acid
GLVKKAHEISXLCDAEVALIIFSTKGKLYEYATDSKMENILERYERYSYAEKALTSSDPELQGNWCQEYVKLKAKVEALHKSQRHLMGEQLEALDLKELQQLEHQLEGSLRLVRSRKTQMMLDSISELQRKEKSLEEQNKNLEKEILEKQKEKALAHQAHWEQQNQPLQSTNSPPRPFVIAETHPTLNIGNFQGRTNTVHAEESLQRQMRISSSLLPXWMXH

SEQ ID NO: 10154 - protein, 92 aa, Triticum aestivum
  misc_feature (11)..(11): Xaa can be any naturally occurring amino acid
  misc_feature (22)..(22): Xaa can be any naturally occurring amino acid
  misc_feature (28)..(28): Xaa can be any naturally occurring amino acid
  misc_feature (31)..(31): Xaa can be any naturally occurring amino acid
  misc_feature (35)..(36): Xaa can be any naturally occurring amino acid
  misc_feature (39)..(39): Xaa can be any naturally occurring amino acid
  misc_feature (42)..(42): Xaa can be any naturally occurring amino acid
  misc_feature (45)..(45): Xaa can be any naturally occurring amino acid
  misc_feature (54)..(54): Xaa can be any naturally occurring amino acid
  misc_feature (56)..(56): Xaa can be any naturally occurring amino acid
  misc_feature (59)..(59): Xaa can be any naturally occurring amino acid
  misc_feature (64)..(64): Xaa can be any naturally occurring amino acid
  misc_feature (68)..(68): Xaa can be any naturally occurring amino acid
  misc_feature (71)..(71): Xaa can be any naturally occurring amino acid
  misc_feature (73)..(76): Xaa can be any naturally occurring amino acid
  misc_feature (80)..(80): Xaa can be any naturally occurring amino acid
  misc_feature (82)..(82): Xaa can be any naturally occurring amino acid
  misc_feature (86)..(86): Xaa can be any naturally occurring amino acid
  misc_feature (88)..(88): Xaa can be any naturally occurring amino acid
MGTVKWFNVTXGFGFISPEDGXEDLFVXQSXIKAXXYRXLNXNDXVEFKVITGXDXRRXNATDXTAPXRGXLXXXXRPIXKXGDRXGXGGDR

SEQ ID NO: 10155 - protein, 203 aa, Zea mays
MEDEEHEVFGQEIPVDGEDVDMAAGDDATKLQELDDMKRRLKEMEEEAAALREMQAKVAKEMQGVDPNATTSENKEEMDSRSVFIGNVDYACTPEEVQQHFNSCGTVNRVTILTDKFGQPKGFAYVEFVEVEAVQEAIKLNESELHGRQLKVAPKRTNVPGMKQPRGRGFNPYHGHPYMRPYGYSPYGYGRFPRFRRPRRPYF

SEQ ID NO: 10156 - protein, 176 aa, Manihot esculenta
MASSMLSTATVASINRVSPAQATMVAPFTGLKSTPVFPTTRKTNSDITSITSNGGKVQCMKVWPTLGMKKFETLSYLPPLTREQLAKPSCIGPCLEFELEHGLVYREHARVPGYYDGRYWTMWKLPMFGCTDAAQVLKELDELIKHHPDGYARIIGFDNVRQVQCISFLAYKPPGA

SEQ ID NO: 10157 - protein, 208 aa, Bacillus halodurans C-125
MKSNSQDAASIVWHPQLVTKQARNQSNGHKSRMIWFTGLSGSGKSTIANAVQAELFKRGIQVYVLDGDNLRHGLNADLSFSMEDRKENIRRTAEVGKLFVDAGLVVLAALISPVEEERQRARSRFAEDEFLEVYVSCTLQECEKRDPKGLYKKARKGEIPQFTGIHQPYEEPKNPDICIDTTDRTVEQSVQIILPIILEKIAWKEGEQ

SEQ ID NO: 10158 - protein, 185 aa, Triticum aestivum
MAPTVMASSATSVAPFQGLKSTAGLPVSRRSNGASLGSVSNGGRIRCMQVWPIEGIKKFETLSYLPPLSREALLKQVDYLIRSKWVPCLEFSKVGFIFREHNASPGYYDGRYWTMWKLPMFGCTDATQVINEVEEVKKESPDAYVRIIGFHNMRQVQCVSFIAFNPPGCEESRQGLNSSLPTGHI

SEQ ID NO: 10159 - protein, 512 aa, Oceanobacillus iheyensis HTE831
MLNDKAIRQSKIIYWSSGIVSICGIIFEVLFGALGSYILGDGVKQYTLTISLFLTGMGIGASLSEKFMRNLIIKFVWIEFCVALIGGFSSFIMFGITAFAPAGTDAFYLYSITLIIGALTGVELPILIRKANEIGVTLNKSTARVLFSDYAGGLIGGVLFVFLFRPYFGMVKTAFLVGLINLTVALIVLWLFRKEIRHFIVHAVIGGVIGVLLIAGLFFGEEMAFNFEQKLYQDPIIHMEESSYQKITVTQDEKDIRLYLDGSLQFSSVDEHRYHEVLVHPAMANVETPENVLILGGGDGIAAKEVLKYQDVKQVTLVDLDPAVVELANENRHLLEINEGALMDEKVEVKNMDAFQFLEDTSEWYDVILVDLPDPNNESLNKLYTKEFYSLVRNHLKPEGTLMVQATSPVFAREVYWTISETISSTNLNTENLHVDVPSFGNWGFVMASREEIDLDIMEIPVSTRFLTDDMMPALTAFGKDEDQQIPNFELKANTLIDPHLIQIYEKAWENY

SEQ ID NO: 10160 - protein, 341 aa, Streptomyces coelicolor A3(2)
MRIGVLTSGGDCPGLNAVIRSVVHRAVVDHGDEVIGFRDGWKGLLECDYLKLDLDAVGGILARGGTILGSSRVRPEHLRDGVERARGHVEELGLDAIIPIGGEGTLKAARLLSDNGLPIVGVPKTIDNDIAVTDVTFGFDTAVTVATEALDRLKTTAESHQRVLIVEVMGRHTGWIALHSGMAAGAHAVVVPERPFDIDELTAKVGERFSAGKRFAIVVAAEGAKPKAGTMDFDEGGKDVYGHERFAGIARQLSIELEERLGKEARPVILGHVQRGGTPTAYDRVLATRFGWHAVEAVHRGEFGKMTALRGTDIEMVSLADAVESLKTVPDARYAEAECVL

SEQ ID NO: 10161 - protein, 174 aa, Triticum aestivum
MAPAVMASSATTVAPFQGLKSTAGLPVSRRSRGSLGSVSNGGRIRCMQVWPIEGIKKFETLSYLPPLSTEALLKQVDYLIRSKWVPCLEFSKVGFVFREHNSSPGYYDGRYWTMWKLPMFGCTDATQVLNEVEEVKKEYPDAYVRVIGFDNLRQVQCVSFIAFRPPGCEESGKA

SEQ ID NO: 10162 - protein, 110 aa, Glycine max
  misc_feature (86)..(86): Xaa can be any naturally occurring amino acid
MASSMIWDRAVTTVNRAGAGMVAPFTGLKSMAGFPTRKTNNDITYIASNGGRVQCMHVWPPIGKRKSRLFSTWQNLVNPNLPKEVXFLLRKGWIPCLEFELEHGFLYRGP

SEQ ID NO: 10163 - protein, 173 aa, Lemna gibba
MMVSTAAVARVRPAQTNMVGAFNGCRSSVAFPATRKANNDLSTLPSSGGRVSCMQVWPPEGLKKFETLSYLPPLSVEDLAKEVDYLLRNDWVPCIEFSKEGFVYRENHASPGYYDGRYWTMWKLPMFGCTDASQVIAEVEEAKKAYPEYFVRIIGFDNKRQVQCISFIAYKPT

SEQ ID NO: 10164 - protein, 426 aa, Streptomyces coelicolor A3(2)
MAEARTQAAEDLARRWDTEPRWQGIERTYSAQDVVRLSGSVREEHTLARRGAERLWRQLHERDYVHALGALTGGQAVQQIKAGLQAIYLSGWQVAADANQAGHTYPDQSLYPANSVPQVVRRINNALLRADQIATSEGDNSTDWLAPIVADAEAGFGGPLNAFELAKAMIAAGAAGIHYEDQLASEKKCGHLGGKVLVPTSQHIRTLNAARLAADIADTPTVIIARTDALAANLLTSDVDERDAQFVTGERTPEGFYRVRNGMAPVIARGLAYAPYADLIWVETGTPDLEQAREFAEAIHAEHPDQMLAYNCSPSFNWKAALDDDQIAKFQRELGAMGYKFQFITLAGFHSLNHGMFDLARGYAEHGMTAYVDLQEREFAAQAHGFTAVKHQREVGTGYFDLVSTAVNPASSTTALAGSTEEEQFH

SEQ ID NO: 10165 - protein, 177 aa, Lemna gibba
MASSMMASTAAVARAGPAQTNMVAPFNACRSSVAFPATRKANNDLSTLPSNGGRVSCMQVWPPEGLKKFETLSYLPPLSVEDLAKEVDYLLRNDWVPCIEFSKEGFVYRENHASPGYYDGRYWTMWKLPMFGCTDASQVIAEVEEAKKAYPEYFVRIIGFDNKRQVQCISFIAYKPT

SEQ ID NO: 10166 - protein, 316 aa, Triticum aestivum
GGPRPAGLFAARGAFALPQSYSAAHLVFNDDIQGTAAVVLAGLMAGLKFAGGTLADHTFLFFGAGEAGTGIAELVALEISMQSKTSQEEARKNIWLVDSKGLIVSSRKDSIQPFKKLYAHEHEPVKDLLSAIKDIKPTALIGSAGVGQSFTKEVIEAMSSINKRPIILALSNPTSKSECTAEQAYSWSQGRAIFGSGSPFDPVKYNDKLFVPAQANNAYIFPGFGLGVVTSGAIRVKDDMVLAAPKTSDEHVTAPPPDTGRSSPPAACTAPSSAHTAAPVAPHALALGLAPPLPRPNVAVTHAAGRWYRPFCRAYR

SEQ ID NO: 10167 - protein, 604 aa, Glycine max
MWKLVRYAAASNLARSRRFSAAIPGPCIVHKRGADILHDPWFNKDTGFPLTERDRLGLRGLLPPRVISFEQQYDRFMNSFRSLENNTQGQPDKVVSLAKWRILNRLHDRNETLYYRVLIDNIKEFAPIIYTPTVGLVCQNYSGLFRRPRGMYFSAKDKGEMMSMIYNWPAHEVDMIVLTDGSRILGLGDLGVQGIGIPIGKLDVYVAAAGINPQRILPVMLDVGTNNQKLLEDRLYLGLRQPRLEGEEYLSIIDEFMEAVHARWPKAIVQFEDFQMKWAFETLKRYQKKFCMFNDDIQGTAGVALAGLLGTVRAQGRPLTDFVNQKIVVVGAGSAGLGVLKMAIQAVAKISGCSELAAKSQFYLIDKDGLVTTERNNLDPAAAPFAKNPRDIEGLTEGASIIEVVKKIRPHVLLGLSGVGGIFNEEVLKAMRESVSTKPAIFAMSNPTMNAECTAIDAFKHAGENMVFASGSPFENVDLGNGIVGHVNQANNMYLFPGIGLGTLLSGAHLITDGMLQAAAECLASYMAEEDILKGILYPSVDSIRDVTAEVGAAVLRAAVEEELAEGNGDVGPKELSHMSKDETVEYVRSNMWYPVYSPLVHEK

SEQ ID NO: 10168 - protein, 112 aa, Zea mays
  misc_feature (17)..(17): Xaa can be any naturally occurring amino acid
  misc_feature (64)..(64): Xaa can be any naturally occurring amino acid
  misc_feature (79)..(79): Xaa can be any naturally occurring amino acid
  misc_feature (93)..(93): Xaa can be any naturally occurring amino acid
HEMNCSTAAVRHLASSXVDVFTALSGGGGALYGPLHGGANEALLKMLNERGSMENISRFHCMIXNRYRKIVVFGLRVFXNYYPRAYFIKDIVXMRCFSIFGRDPLIVVGLCP

SEQ ID NO: 10169 - protein, 220 aa, Zea mays
APAFCELSLPLTKEEAAFSPSHPAMQRHVASGRPSGTDGSDFSYRMVVESRYQRVAEGRSRLARLILVQALHLVAGGLLLLLSLSKGAAVNKFAVLSMAAGFLAIVVGELGRMRTMAVLLRLYTSLSSIAVAFSVTCIIRSELFLKVMKQNTEAITSYEMLDAVRVALGILLQMVVIATTTRLLQNMSPPKSASRLLGHFSFVSSSKGYKLRVKNIGQVR

SEQ ID NO: 10170 - protein, 235 aa, Tradescantia virginiana
VQLKRMENKINRQVTFSKRRTGLLKKAHEISVLCDAEVGLIIFSTKGKLYEYSTDNSMAKILERYDRYATAERAVLEANLNLEVGSHYEYRKIKAKVDALQKSQRHLMGEQLDTMTNKELQQLEQQLETALKHIRSRKNQMMLESVAALQKKEKALREQKSILEKKLIEKQKDMEISQIHQYQAHEDNTSPTSLVLTNSLPTTLNTNGCITHAIEEEHAPTLPHTNNNNLPPWMV

SEQ ID NO: 10171 - protein, 318 aa, Zea mays
MEAEAAAKRTRDSGEDAAAAGISAVIPGWFSEISPMWPGEAHSLKVDKVLFQGKSDYQSVMVFQSSTYGKVLVLDGVIQVTERDECAYQEMITHLPLCSIKDPKKVLVIGGGDGGVLREVSRHSSVEQIDICEIDKMVVDVSKQFFPHLAVGFEDPRVSLHIGDGVAFLKNAPEGTYDAVIVDSSDPIGPAQELFEKPFFQLVARALRPGGVVCTQAESIWLHMHIIEDIVVNCRQVFKGSVNYAWTTVPTYPSGVIGFMLCSTEGPAVDFQHPVFNIEEDEHPMKSKGPLKFYNSEIHTASFCLPSFAKRVIESKAN

SEQ ID NO: 10172 - protein, 455 aa, Bacillus sphaericus
MKQVLTELQEKDLQHVWHPCSQMKDYEAFPPIVIKKGEGVWLYDEQNQRYLDAVSSWWVNLFGHANPRISQALSEQAFTLEHTIFANFSHEPAIKLAQKLVALTPQSLQKVFFADNGSSAIEVALKMSFQYHMQTGKTQKKRFLALTDAYHGETLGALSVGGVDLYNEVYQPLLLDTVRAQGPDCFRCPFKHHPDSCHAQCISFVEDQLRMHHKEITAVIIEPLIQAAAGMKMYPAIYLRRLRELCTQYDVHLIADEIAVGFGRTGTLFACEQANISPDFMCLSKGLTGGYLPLSVVMTTNDVYQAFYDDYATMKAFLHSHSYTGNTLACRVALEVLAIFEEEQYIDVVQDKGERMRKLALEAFSDLPFVGEYRQVGFVGAIELVANRDTKEPLPSEERIGYQIYKRALAKGLLIRPLGNVLYFMPPYIITDDEMQFMIQTTKDTIVQFFEEREG

SEQ ID NO: 10173 - protein, 505 aa, Gossypium arboreum
MDLLFLEKALLGLFVAVVLAITISKLRGKRFKLPPGPLPVPVFGNWLQVGDDLNHRNLTDLAKKFGDIFLLRMGQRNLVVVSSPELAKEVLHTQGVEFGSRTRNVVFDIFTGKGQDMVFTVYGEHWRKMRRIMTVPFFTNKVVQQYRFGWEDEAARVVEDVRKNPEAATNGIVLRRRLQLMMYNNMYRIMFDTRFESEDDPLFVRLKALNGERSRLAQSFEYNYGDFIPILRPFLRGYLKICKEVKDRRLQLFKDHFVEERKKLGSTKSMNNDGLKCAIDHILDAQQKGEINEDNVLYIVENINVAAIETTLWSIEWGIAELVNHPEIQKKLRHELDTVLGPGNQITEPDTHKLPYLQAVIKETLRLRMAIPLLVPHMNLHDAKLGGYDIPAESKILVNAWWLANNPANWKNPEEFRPERFFEEEAKVEANGNDFRYLPFGVGRRSCPGIILALPILGITLGRLVQNFELLPPPGQSQIDTTEKGGQFSLHILKHSTIVAKPRQF

SEQ ID NO: 10174 - protein, 226 aa, Paeonia suffruticosa
SQVTFSKRRGGLLKKAHEISVLCDAEVALIVFSTKGKLFEYSTDSSMEKILDRYEQYSIAERQLVEEPGSQGNWSLEYSKLRAKIELLQRNQRRFMGEDLDSLSPKDLQNMEQQLDVSLKNIRSRKNQLMYESISELQKKERAIQEQNNLLAKQIKEKEKTMAQQAQWEQQIHHGPNASAYLLSPHELTTLNMGGNYQGEPTEMRRNELDLTLEPIYTCHLGCFGA

SEQ ID NO: 10175 - protein, 239 aa, Triticum aestivum
MESSKIDASDKHLESYLTLGLTVSQSKKGSTKFPKVLSLLATYLGRSVQKNEELLGSNGIKESTTIFHGQKVPDLSIQLYAERIFKYAECSPSCFVLALVYMERYLQQPNVYMTLFSVHRLLITSVVVAAKFTDDAFFNNAFYARVGGISTIEMNRLELDLLFNLDFRLKVNLGTFGSYCLQLEKHAPVSPERLPVQVHCVSVKGSKDLGYSSSGSADEFCQSKLVRQSYSSQALQGCS

SEQ ID NO: 10176 - protein, 184 aa, Manihot esculenta
MATSMLSTATVASINRASPAQASMVAPFTGLKSTSAFTATTKTSADITSLASNGGRVQCMQVWPTRGKKKFETLSYLPPLSREQLASEIDYLLRSGWIPCLEFELEHGFVYRAHGSLPGYYDGRYWTMWKLPMFGCTDSSQVLKELDELIKAHPDGFARIIGFDNVRQVQCISFIAYKPPGTDY

SEQ ID NO: 10177 - protein, 184 aa, Manihot esculenta
MATSMLSTATVASINRASPAQASMVAPFTGLKSTSAFPATTKTSADITSLASNGGRVQCMQVWPTRGKKKFETLSYLPPLSREQLASEIDYLLRSGWIPCLEFELEHGFVYRAHGSLPGYYDGRYWTMWKLPMFGCTDSSQVLKELDELIKAHPDGFARIIGFDNVRQVQCISFIAYKPPGTDY

SEQ ID NO: 10178 - protein, 505 aa, Gossypium arboreum
MDLLFLEKVLISLFFTIIFAILVSKLRGKRFKLPPGPLPIPVFGNWLQVGDDLNHRNLTDLAKKFGDIFLLRMGQRNLVVISSPELAKEVLHTQGVEFGSRTRNVVFDIFTGKGQDMVFTVYGEHWRKMRRIMTVPFFTNKVVQQYRHGWEDEAASVVEDVKKNPEAATNGIVLRRKLQLMMYNNMYRIMFDRRFESEDDPLFVKLKALNGERSRLAQSFEYNYGDFIPILRPFLRGYLKLCKEVKEIRLQLFRDQFLEERKKLATTKRIDNNALKCAIDHILDAQRKGEINEDNVLYIVENINVAAIETTLWSIEWGIAELVNHPEIQQKLRNEIDTVLGPGVQVTEPDTHKLPYLQAVIKETLRLRMAIPLLVPHMNLHDAKLGGYDIPAESKILVNAWWLANNPAHWKNPEEFRPERFFEEESKVEANGNDFRYLPFGVGRRSCPGIILALPILGITLGRLVQNFELLPPKGQSKLDTSEKGGQFSLHILKHSTIVAKPRVF

SEQ ID NO: 10179 - protein, 355 aa, Craterostigma plantagineum
MEKYELVKDIGSGNFGVARLMRNKETKELVAMKYIERGHKIDENVAREIINHRSLRHPNIIRFKEVVLTPTHLAIVMEYAAGGELFERICNAGRFSEDEARYFFQQLICGVHYCHALQICHRDLKLENTLLDGSPAPRLKSCDFGYSKSSLLHSRPKSTVGTPAYIAPEVLSRREYDGKLADVWSCGVTLYVMLVGAYPFEDQEDPFFFRKTILWIMAVQYKIPDYVRISQSCRHLLSRIFVANPLRRITIKEIKSHLWFLKNLPRELTEVAQAAYFRRDNPTYSLQSEEEIMKIVEEAKVPPQASRSIGGFGWGTEEDEENVEEEEEGESEGEEDEYEKQVKAAHASGEVPPLT

SEQ ID NO: 10180 - protein, 406 aa, Oceanobacillus iheyensis HTE831
MSNTTVLLDKKTTEIIKATVPVLKEHGEAITKHFYKILLENNPELKNVFNQTNQRKGAQSKALANTVYAAAANIEKLEEILPHVKQIAHKHVSLNIKPEQYPIVGKYLLIAIKEVLGDAATDEIIEAWEKAYFVIADIFISVEKEMYNEKKNQIGGWTGFRDFKVIKKVKESKEITSFYLKPDDNLPITTFIPGQYITIKAQIESEAYVHLRQYSLSTAPGKDYYRISVKREASNQPIGVVSNYLHTSVEVGSVLPISAPAGDFILDERDHRPLVLISGGVGLTPIMSMLESVVEHQPNRNVVFIHAAKSIDHQAMRKRVSEIAKSKEQVKQYVVYSNPTNRTDGDKQGYIDYEWLKEVIPTKDAAFYLCGPKPFMSAINNDLQNMNIAQNDIHMELFGPLEPIAK

SEQ ID NO: 10181 - protein, 495 aa, Hordeum vulgare subsp. vulgare
MKPTTATAALVLALTLAHHASIAAAAGPRVIIVGAGMSGISAGKRLSEAGITDLVILEATDHVGGRMHKQSFGGINVEVGANWVEGVNGAGRMNPIWPLVNSTLKLKNFRSDFDGLADNVYKENGGVYERAYVQKRLDRWGEVEEGGEKLSAKLRPSGQDDMSILAMQRLNDHLPNGPTSPVDMVLDYFKHDYEFAEPPRVTSLQNVVPLATFTDFGDDVYFVADQRGYEAVVYYLAGQYLKADKSGNIVDPRLQLNKVVTEISHSGGGVTVRTEDAKVYKADYVMVSTSVGVLQSDLIQFKPRLPTWKVLSIYQFDMAVYTKIFVKFPRKFWPQGKGREFFLYASSRRGYYGVWQEFEAQYPDANVLLVTVTDDESRRIEQQSDNQTKAEIVEVLRSMFPGEDVPDATDILVPRWWSDRFYRGTFSNWPIGVNRYEYDQLRAPVGRVYFTGEHTSEHYNGYVHGAYLSGIDSADILIKCAQKRMCKYHSPGKFD

SEQ ID NO: 10182 - protein, 389 aa, Escherichia coli O157:H7 EDL933
MSDTTILQNSTHVIKPKKSVALSGVPAGNTALCTVGKSGNDLHYRGYDILDLAEHCEFEEVAHLLIHGKLPTRDELAAYKTKLKALRGLPANVRTVLEALPAASHPMDVMRTGVSALGCTLPEKEGHTVSGARDIADKLLASLSSILLYWYHYSHNGERIQPETDDDSIGGHFLHLLHGEKPSQSWEKAMHISLVLYAEHEFNASTFTSRVIAGTGSDMYSAIIGAIGALRGPKHGGANEVSLEIQQRYETPDEAEADIRKRVESKEVVIGFGHPVYTIADPRHQVIKRVAKQLSQEGGSLKMYNIADRLETVMWESKKMFPNLDWFSAVSYNMMGVPTEMFTPLFVIARVTGWAAHIIEQRQDNKIIRPSANYVGPEDRQFVALDKRQ

SEQ ID NO: 10183 - protein, 167 aa, Triticum aestivum
  misc_feature (70)..(70): Xaa can be any naturally occurring amino acid
  misc_feature (92)..(92): Xaa can be any naturally occurring amino acid
EDSWGCKSRDEHHFEFKVDLAASKACRHQHGAIRKGVHIVIRGRPYKLAEVCTSKTGNHVHSKCHYVAIXIFNGKKLEDIVLSSHNCEVPPXCRPRCVRVIDITDDGYVSVVAESVNQKDDLKLLIDDVLSVQIKTGFVDGKGPIEYVMYRVGEEQIWAVKEIGGGK

SEQ ID NO: 10184 - protein, 503 aa, Hordeum vulgare subsp. vulgare
MKPSFVTAIAALLLIAAQHASIVAAGKGPRVIIVGAGMSGISAGKRLWDAGVRDLLILEATDRVGGRMHKHNFGGLNVEIGANWVEGLNGDKTNPIWPMVNSTLKLRNFYSDFDGVVANVYKESGGLYDEEFVQKRMDRADEVEELGGKFAAKLDPSGRDDISILAMQRLFNHQPNGPTTPVDMALDYYKYDYEFAEPPRVTSLQGTEPTATFADFGDDANFVADQRGFETIIYHIAGQYLRSDKSGNIIDPRVKLNKVVRQISYNDKGVVVTTEDNSAYSADYVMVSTSLGVLQSDLIQFKPQLPAWKIMAIYRFDMAVYTKIFLKFPKKFWPTGPGKQFFVYASSRRGYYGMWQSFEKEYPGANVLLVTVTDVESRRIEQQPDNVTMAEAVGVLRNMFPDRDVPDATDIYVLRWWSNRFFKGSYSNWPIGVNRYEYDQLRAPVGGRVYFTGEHTSEHYNGYVHGAYLAGIHSADILMNKASNNVDFKVRPKYDDELKAEAK

SEQ ID NO: 10185 - protein, 352 aa, Azotobacter vinelandii
MRAAVWHGRHDIRVENVPLPANPPPGWVQIRVDWCGICGSDLHEYVAGPVFIPVEKPHPLTGIQGQCILGHEFSGEIVKLGTGVSGFAPGERIAADACQHCGTCYYCRSGLYNLCEKLAFTGLMNNGAFAELVNVPAELLYKLPADFPVEAGALIEPLAVGMHAVKKAGNLLGRNVVVVGAGTIGLCTIMCAKAAGAAQVIALEMSSARKAKALEVGASLVLDPKECDALAEIRARTNGLGADVSFECIGNKHTAKLAIDVIRNAGKSVLVGIFEEPSSFNFFELVSTEKQVIGALAYNGEFADVIAFIADGRLDVEPLITGRIGLEEIVGRGFEELVNNKEHNVKIIVSPH

SEQ ID NO: 10186 - protein, 219 aa, Chromobacterium violaceum ATCC 12472
MGEVSIQAGVPANVFRTGGRIRLVDRQRLFGHAAVTIWLTGLSGAGKSTIAYELEARLVRGGFSAVVLDGDNLRHGINRNLGFTDADRRENLRRVAEVARLMNDAGLIVICSCISPLRIDREMARDIVGERHFAEVYVSTPLAVCEQRDCKGLYAKARSGQIAHFTGVSSPYEAPEQAALALDTSALSVDECVDRLFGMVLRCCSPAAMEGGIGHEYHI

SEQ ID NO: 10187 - protein, 167 aa, Glycine max
MASQSNTKSVHDFTVKDARGNDVNLADYKGKVLLLVNVASQCGLTNSNYTELNQLYEKYKGKGLEILAFPCNQFGAQEPGTNEEIVEFACTRFKAEFPIFDKVDVNGDNAAPLYKFLKSSKGGLFGDSIKWNFSKFLVDKDGNVVDRYAPTTSPLSIEKDIKKLLDA

SEQ ID NO: 10188 - protein, 384 aa, uncultured proteobacterium
MAFRSATNQEYTNQVGKPTSRFGRFLLWRNRLLRSSTFQKWAARLPISQSIARTRATDLHHILAGFVYSQTLSASYKLGLLECLKDRIATLDEIASYCELERGAAATLIKAATAIDLLQAVGADNWTLGELGASIHGNPGVQSMLRHHDLLYRDMADPASLLRSRDNAALRGYWPYVDGNHSDPAATARYSELMADSQHLIANHILDAIKLKPQQQLLDIGGGTGTFARLAAERFPKTETAVFDLPQVIASIAPRYHGTLQTISGNMFEDPIPTTFNTISLVRILHDHDDDPVDKLLARCFKALPAGGELIIAEPMADTRGAESIGHTYFGFYLWAMGSGRPRTKQELQAALERAGFESIKEKRTHIPALVRVVTAKKPNVIFY

SEQ ID NO: 10189 - protein, 246 aa, Zea mays
  misc_feature (26)..(26): Xaa can be any naturally occurring amino acid
MAAAARQRGTVKWFNDTKGFGFISPXDGSEDLFVHQSSIKSEGFRSLAEGEEVEFSVSEGDDGRTKAVDVTGPDGSFVRGGGGGGGGGGGYGSRGGGGSGGGGRSYGGSWGGGRRSGGGGGPGACYKCGEPGHMARDCPSADGGGGYGGGGYGGGGGGGGGCFKCGEPGHMAQGLPPAGGGGYGGGRRRRWRRLLQLRPGRATWPGTAPAVAAVAGGRFGGGGGGGGDRSCYNCGEAGHIARDCPT

SEQ ID NO: 10190 - protein, 396 aa, Zea mays
  misc_feature (188)..(188): Xaa can be any naturally occurring amino acid
  misc_feature (223)..(223): Xaa can be any naturally occurring amino acid
  misc_feature (246)..(246): Xaa can be any naturally occurring amino acid
  misc_feature (323)..(323): Xaa can be any naturally occurring amino acid
MTRASTIDFGRRKQSELFGSGPLRPANIIRNKFPTYKNGSNGIVIKLADGPEMPSLKEAVAKEATDLLDRCQRPSVRELTMKFEKGFNTATLLSNEAKWRHAALLERDILLKDLKSVLESLRGRVGGKNKDEIEESLSMVDILAIELSKREDELLRQKTEVTKIADTLKLASTDAKRIIDEERANARXEIESAKASVQKIQSALKEQEIFSQRTGKQDADELXKEEVQEARRVKMLHCPSKAMDIXENEIQVLRDQLAEKSSDSLRLLKELELHRSYGENDMPSYELKGLETLRSTLHIVGHECASVDFSNSSIQWFRIQPEXSKQEIISCATKLVYAPEPHDVGRYIQAEVKSGGQISVAKTAGSIDPAAGLVEYVETLVMCLNTIKWEREGGKD

SEQ ID NO: 10191 - protein, 270 aa, Triticum aestivum
  misc_feature (233)..(233): Xaa can be any naturally occurring amino acid
MKLSAVTLLTLATGIIAAPVADVSKEVRSYASYEPPKDTYEQPKTPKQEKPKKPEYNQPKAPKPHHEKPKAPKPHHDKPKHYAPPHHEKPKAPKPHHEKPKTPSYEKPKAPKPHHEKPKKPETPKKPEYNQPKAPKPHHEKPKKPETPKKPSYEAPKAPKPHHEKPKKPETPKKPAYEQPKAPKPHHEKPKKPETPKGPSYEQPKAPKPHHEKPKKPETPKKPEYNQPKAPPXLTHEKPKKPETPKGPSYEQPKTPKPHHEKPKKPETPR

SEQ ID NO: 10192 - protein, 378 aa, Nostoc sp. PCC 7120
MMVCEYKPGLEGIPAAQSSISYVDGQKGILEYRGIRIEDLAQQSTFLETAYLLIWGELPTKEELQVFEEEVRLHRRIKYRIRDMMKCFPESGHPMDALQASAAALGLFYSRRDLHNPAYIRDAVVRLIATIPTMVAAFQLMRKGNDPVKPRDDLDYSANFLYMLNEKEPDALAAKIFDICLILHVEHTMNASTFSARVTASTLTDPYAVVASAVGTLGGPLHGGANEEVIQMLEEIGSVENVRSYVEERLQRKDKLMGFGHRVYKVKDPRATILQGLAEQLFAKFGADKYYDIAQEMERVVEEKLGHKGIYPNVDFYSGLVYRKMGIPTDLFTPIFAIARVAGWLAHWKEQLEENRIFRPTQVYNGKHSVTYTPIDQR

SEQ ID NO: 10193 - protein, 138 aa, Aspergillus niger
  misc_feature (106)..(106): Xaa can be any naturally occurring amino acid
  misc_feature (108)..(108): Xaa can be any naturally occurring amino acid
  misc_feature (131)..(131): Xaa can be any naturally occurring amino acid
WDTAGQERFRSLIPSYIRDSSVAVVVYDISNAKSFQNTRKWIDDVRGERGNDVIIVLVGNKTDLNDKREVTTAQGEEEAKKNGLMFIETSAKVGHNVKQLFRRIAXAXPGMEVSHRRHQMIDVNITRKETXTNDGCAC

SEQ ID NO: 10194 - protein, 190 aa, Schizosaccharomyces pombe
MGKSQSKLSQDQLQDLVRSTRFDKKELQQWYKGFFKDCPSGHLNKSEFQKIYKQFFPFGDPSAFAEYVFNVFDADKNGYIDFKEFICALSVTSRGELNDKLIWAFQLYDLDNNGLISYDEMLRIVDAIYKMVGSMVKLPEDEDTPEKRVNKIFNMMDKNKDGQLTLEEFCEGSKRDPTIVSALSLYDGLV

SEQ ID NO: 10195 - protein, 215 aa, Zea mays
PHSPPALARRPRTKATATATATTTATATDRRPSTRRRRRSPSSSSTPPPPPPAAALVRTTCNSTSYYALCVSALAADPSSATADVRGLSAIAVSAAAANASGGAATAAALAANGTAPAGTATSAADSAVQALLQTCAAKYASARDALAAAGDSIALDDYDSASVHVSAAAEYPQVCRTLFRRQRPGQYPAELAAREETLGQLCSVSLDIIALLSS

SEQ ID NO: 10196 - protein, 433 aa, Ralstonia solanacearum
MTPSDVKATLSFSDGSPSVELPIYTGTVGPDVIDIRKLYGQTGKFTYDPGFMSTASCNSKITYIDGDKGELLYRGYAIDDLAGKCDFLEICYLLLKGELPNAKQKDEFNSTVMNHTMVHEQMQFFLRGFRRDAHPMAVLTGLVGAMSAFYPDAANINDSREREISQIRLIAKLPTLVAMAYKYNIGQPLIYPQNNLSYTGNFMRMMFATPCEDYKVNPVLERALDRIFILHADHEQNASTSTVRLAGSSGTNPIAAIAAGIACLWGPAHGGANEAALNMLEEIGSVDKIDEFIKQVKDKNSGVRLMGFGHRVYKNYDPRAKLMRETCHEVLQELGLENDRLFKLAMALEKIALEDEYFVSRKLYPNVDFYSGIVQRALGIPTSMFTCIFALARSVGWIAQWEEMITDPEYKIGRPRQLFNGAATRAVPELGKR

SEQ ID NO: 10197 - protein, 371 aa, Crotalaria retusa
MSEEVKEASSDDVIASVHSTVFKESENLEGKCAQIEGYDFNAGVDYHHLLNSMLTTGFQASNLGDAIHVINQMLDWRLADEPIAEDSSTEERDSNYRNSVTCKVFLGFTSNLISSGVRDIVRFLCQHHMVDVIVTTTGGIEEDLIKCLAPTYKGDFSLPGAYLRSKGLNRIGNLLVPNDNYCKFEDWIIPIFDQMLKEQNEENVLWTPSKLVARLGKEINNESSYLYWAYKNNISVYCPGLTDGSLGDMLYFHSFRSPGLIVDIVQDIRAINGEAVHASPRKTGMIILGGGIPKHHICNANMMRNGADYAVFINTAQEFDGSDSGARPDEAVSWGKIRGSAKTVKVHCDATIAFPLLVAETFATRVKPCHQ

SEQ ID NO: 10198 - protein, 372 aa, Cynoglossum officinale
MGEALKEQQLLESIRSVVLKQSENLEDKCTKIEGYNFNNGVNYQQLLKSLSSTGFQASNLGDAIQVVNQMLDWKLSDECPTEDCSETEKDPAYRESVKCKIFLGFTSNLVSSGIRDIIRYLVQHSMVDVVVTTAGGVEEDLIKCLAPTYRGDFSLSGAVLRSKGLNRIGNLLVPNDNYCKFEDWIMNIFDQMMEEQNTKKILWTPSKVISRLGKEINDESSYLYWANKNNIPVYCPGLTDGSLGDMLYIHSIRKDPGLVVDVVQDIRSMNSEAVHAGLRKTGIIVLGGGLPKHHICNANMMRNGADFAVFINTAQEFDGSDSGACPDEAVSWGKIRGSAKTVKVHCDATIAFPLLVAETFATKASKSADNKL

SEQ ID NO: 10199 - protein, 478 aa, Burkholderia cepacia R1808
MKIYDQFYIDGAWCKPAGAGTIDVIDSATEAVLGRIPEGAATDARHAVRAAHAAFDAWAATPPATRAGYLRRIVERLQTRSEELAQSITGEVGMPIKLSRAIQVGAPVYNWKVYAKLAESFEFEAKVGNSLVVREPVGVVAAITPWNYPLNQITLKVAPALAAGCTVVLKPSEVAPLNAFMLAEAIHEAGLPAGVFNLVCGYGPVVGEVLATDPEVDMVSFTGSTRAGKRVAELAAATVKRVALELGGKSAAVILDDADFPAAVKGTVNACFLNAGQTCSAHTRMLVPHARYDDARALAKAAAEAYLAGDPRQETTRLGALASAVQQQRVQAYIQRGIDDGAELVTGGTGLPDGLTKGFFVKPTVFGRVDPTSAIAQEEIFGPVLSIITYRDEDEAVRIANDTPYGLGGAVWAGSDERALRVARRLRTGQVDINGGSWNSAAPFGGYKQSGYGRENGVYGLEEYLEYKSMQLRPANPS

SEQ ID NO: 10200 - protein, 617 aa, Zea mays
  misc_feature (60)..(60): Xaa can be any naturally occurring amino acid
LPGQEIDLAKVVAKAAGPRAGGGLGLPLPLLVRFPDVLRHRVETLNAAFGYAVRSTGYGXRYQGVYPVKCNQDRYVVEDIVEFGAPFGFGLEAGSKPELLLAMSCLAARGGLDALLICNGYKDDGYVSLALMARSMGLNTVIVLEQEEELDIVVEASRRLGVRPVVGMRAKLRTKHAGHFGSTSGEKGKFGLSAAQILSVVTKLKAIGMLDCLQLLHFHIGSQIPTTALLSDGVGEAAQIYCELARLGADMRVIDVGGGLGIDYDGTHSAQTDMSVAYSLEEYAGAVVAAVGRVCDRKGVQHPIICSESGRALVSHHSVLVFEAFSATAPGRLDAATAYLLDELTDDCRADYRNVMAAAVRGDYDTCGLYADQLKRRSAELFKEGVLGLEHLAAVDAFCELVARGMGAPEPPRTYHINLSVFTSLPDMWAIGQQFPIIPIQRLQERPAVDGVLSDLTCDSDGKVSEFIGGRHSLPLHELPTHATRGYYLGMFLGGAYQEALGGLHNLFGGPSVVRVSQCDGPHCFAVTRAAAGPSCADVLRAMQHEPEVMYEVLKQRTDGATAAALARAFGAMPYLVFDPEAAVMSGGESSDSERSAAGAAEEEDDEEWEFMRGLTV

SEQ ID NO: 10201 - protein, 488 aa, Synechocystis sp. PCC 6803
MGRQLILFPMSDQSDHPLILLWHRRDLRLNDHLALAKARQKTAKIVGVFCLDNKILQAEDMAPARVAYLLGCLQSLQDHYQRLGSELLVFQADPVQLLPKLANTLGAHGVTWTLDTEPYAQKRDLAVAQALRERGLAIATEWDQLMHHPGEVLTQAGSPYTVYTPFWKNWSQLPKTSPVPTPKDLQGLTPAEKEKLAPLEPLAIPQLADLGFIWDQPLPLTPGEEAAEQRLDWFVAHGLEEYQQNRNFPALDGTSQLSAALKFGVISPRTLWQTTLEAWEQSRSEEARASIETWQQELAWREFYQHCLYSFPALAQGPYRSPFQEFPWEENQDHFQAWCEGRTGYPIIDAAMAQLNQTGWMHNRCRMIVASFLIKDLILNWQWGELYFMQTLYDGDLAANNGGWQWSASSGMDPKPLRIFNPHTQAQKFDPEGEYIRTWLPQLARFDTGDLLTGKLTPGSRRSVNYPEPIVDHNQQQREFKRRYQLVK

SEQ ID NO: 10202 - protein, 369 aa, Cynoglossum officinale
MGEVATSNNALDSVRSALFKKSENLEGSSKIIGYDFNGGVNYEDLLKSLVTSGFQASQLGDAIQIVNDMLNWRLSHDSPSEDCSEEEKDPKFREGVKCKIFLGFTSNLISSGLRETFRYLAQHRMVDVMVTTAGGIEEDLIKCLGDTYKGDFALPGAMLRSKGLNRIGNMLVPNDNYCKFEDWIMAILDKMLEEQISEKKLWTPSRVIARLGKEINDESSYLYWAYKNNIPVFCPALTDGSIGDMLYLHASRNKPSLVLDIVQDVCAMDDESVNASPRKTGIIILGGGLPKHHICNANMMRGGADFAVYINTAQEFDGSDSGARPDEAISWGKIRANAKNVKVHCDATIAFPLVVAETFATKIADKKSK

SEQ ID NO: 10203 - protein, 46 aa, Glycine max
  misc_feature (11)..(11): Xaa can be any naturally occurring amino acid
MSRVNIDNVTXLFNNGSFVTLFKFEISYECITALKDDLEWNLIYVG

SEQ ID NO: 10204 - protein, 654 aa, Zea mays
  misc_feature (103)..(103): Xaa can be any naturally occurring amino acid
  misc_feature (126)..(126): Xaa can be any naturally occurring amino acid
  misc_feature (141)..(141): Xaa can be any naturally occurring amino acid
MAGPEKTVVWFRRDLRIQDNPALAAAAKGGSVLPIFIWCPSDYGQYYPGRCSRWWLKQSLAHLGKSLELLGCPLVLIRAEDSTLAALLECVRSISATRVVQSXLYDPISLVLEMFQDNDFLSKDFXSKALDLLDLLITYWXAFIQLHSLTMLIIICFELIELTIEISQYLAHTRLVAAPGLANVRCWSSDDLGLESSKDVESSNALLSRAWSPGWRNAENMLEEFVSYGLPEYSEHGMKVGGSTTSLLSPYLHFGELSVRMIYQLVKMRQVKWQNEGKSEAEESVRLFLRSIGFREYSRYLCFNYPFTHERSFLGNLKHYPWLLDEGRFKSWRQGMTGYPLVDAGMRELWATGWTHNRIRVIVSSFAVKFLQIPWIWGMKYFWDVLLDADLESDILGWQYISGSLPDGHELSRLDNPEVQGQKYDPDGEYVRTWIPELARMPTEWIHSPWAAPNSILQVAGVELGFNYPKPIVELHMARECLDDAISTMWQLDTAAKLAELDGEVVDDNLNNIRNFDIPKVVLNKKLSPSTSSMEHRVLSTNGKDEKSQPTEVKALYKQIIRDDMMNDSNMDDTCSTANLKVTRKRSSSDSAFNVPSCSSSLVMESRIHHNEPSSVLYSGYFQKTADRDGTSKVEDNDSEDSGTSISRPSKKAA

SEQ ID NO: 10205 - protein, 449 aa, Desulfitobacterium hafniense DCB-2
MSHYDLILRNGNVVCPDGVRKADIAVSDGKIVLIAEEIPGDAKEIIDAAGKHIFPGITDGHVHFNDPGRTEWETITTGSSALAAGGGVAYFDMPLNCSPCTLDAVNFNNKLAVAQKDSLVDYGFWGGLTSANLDKLDELAECGVIGFKAFACHSGIDEFPRMDDYTALVGMEKLAKLGLPLMVHCENAEITKELTELSLANNRTGVRDYFAARPPITEIENVSRMITFAEETGCKLIIAHISTAKAVELVAQARARGVDVYCETIGHYLYLTGDDVERLGTVAKCSPPIRDGENQLQMWGRLFNDNIAFVSSDHSPCDPKLKNGEFMRVWGGISACQTTLQGLLTHAYHDRKFPLVKIAQLTAQHVNEIFKIKDKGQIALGYDADFALVDLDHEFTLQAEDLFYKHKVSPYVGDRFRGSVSQTILRGTTIYKDGKIVSQPIGKHLRPHQ

SEQ ID NO: 10206 - protein, 71 aa, Glycine max
  misc_feature (18)..(18): Xaa can be any naturally occurring amino acid
  misc_feature (41)..(41): Xaa can be any naturally occurring amino acid
PGAGMVVPFTGLKSMVGXPTRKTTIDFTSIVTTGEKFQCMXQVWPPFGKKNFKTFSYLPNLDDPQWAKEVE

SEQ ID NO: 10207 - protein, 171 aa, Glycine max
  misc_feature (63)..(63): Xaa can be any naturally occurring amino acid
  misc_feature (102)..(102): Xaa can be any naturally occurring amino acid
MASDGSEEFRLVSPAFKNGGKLPRHYTDDGQGTKKNISPPLEWYNLPEGTKTLALVVEDIDAXPHSGGPMVPWTHWVVANILATVKGLPEGFSGKSAEMGGXTPAIKEGNNDLKVPGWNGPRLPTPGHRIQFRLYALDDELKLGNKLTKEKLLEDTIEGHVLGEATLMAIF

SEQ ID NO: 10208 - protein, 318 aa, Saccharomyces cerevisiae
  misc_feature (162)..(162): Xaa can be any naturally occurring amino acid
PKYSLQDFQILRTLGTGSFGRVHLIRSRHNGRYYAMKVLKKEIVVRLKQVEHTNDERLMLSIVTHPFIIRMWGTFQDAQQIFMIMDYIEGGELFSLLRKSQRFPNPVAKFYAAEVCLALEYLHSKDIIYRDLKPENILLDKNGHIKITDFGFAKYVPDVTYXLCGTPDYIAPEVVSTKPYNKSIDWWSFGILIYEMLAGYTPFYDSNTMKTYEKILNAELRFPPFFNEDVKDLLSRLITRDLSQRLGNLQNGTEDVKNHPWFKEVVWEKLLSRNIETPYEPPIQQGQGDTSQFDKYPEEDINYGVQGEDPYADLFRDF

SEQ ID NO: 10209 - protein, 120 aa, Brassica napus
  misc_feature (106)..(106): Xaa can be any naturally occurring amino acid
  misc_feature (117)..(117): Xaa can be any naturally occurring amino acid
MDAVMFGLETPLMAALQHLLDVPDGDAGAGGDNKTGSGGSATRTYVRDARAMAATPADVKELPGAYAFVVDMPGLGTGDIRVQVEDERVLVVSGERRREEREDDAXYLRMERRMGKXMRK

SEQ ID NO: 10210 - protein, 122 aa, Flavobacterium psychrophilum
MADLKQFAEQLVNLTVKEVNDLATILKDEYGIEPAAAAVVMQAGGGEAAEEAQTEFTVVLKEAGASKLAVVKAVKELTGLGLKEAKDLVDAAPSNVKEGVSKDEAEGLKKSLEEAGAVVELK

SEQ ID NO: 10211 - protein, 322 aa, Bacillus methanolicus
MNKIAVLTSGGDAPGMNAAIRAVVRRGIFKGLDVYGVKNGYKGLMNGNFVSMNLGSVGDIIHRGGTILQTTRCKEFKTAEGQQQALAQLKKEGIDGLIVIGGDGTFEGARKLTAQEFPTIGIPATIDNDIAGTEYTIGFDTAVNTAVEAIDKIRDTAASHDRIYVVEVMGRNAGDIALWAGMCAGAESIIIPEADHDVEDVIDRIKQGYQRGKTHSIIVVAEGAFNGVGAIEIGRAIKEKTGFDTKVTILGHIQRGGSPSAYDRMMSSQMGAKAVDLLVEGKKGLMVGLKNGQLIHTPFEEAAKDKHTVDLSIYHLARSLSL

SEQ ID NO: 10212 - protein, 477 aa, Mesorhizobium loti MAFF303099
MSRQAQAPTIVLFRRDLRMGDNAALAAAAERGVPVVALYILDETTKGLRAMGAASRWWLHHSLAALGDLLRKAGANLFLAHGRTEDAVAKAIDASGANCVFWNRRYDPSEVAVDARLKAALREKGLTALSFDGALLHEPSLLKTGSGGFYKVFTPFWKAMADKVDVRDPIDTPGQIDGWRGELGGLRLDELDLLPSKPDWAYGLRETWTPGEKGAQARLGQFIEHGLANYERQRDYPGQPSTSRLSPHLTFGEITPFQIFAALRRSKSSGTSKFRAEIGWREFSYHLLFHNPDLSGRNFRPEFDAMSWRDDIRALRTWQRGLTGYPIVDAGMRELWRTGWMHNRVRMIVASFLIKDLMIDWRHGEKWFWDTLVDADAANNPASWQWVAGSGADPAPYFRIFNPVLQGEKFDPHGDYVRQHVPEISALPDRYIHRPWEAPAAVLKDKGIVLGKTYPNPIVDHGAARERALIVYQSLKD

SEQ ID NO: 10213 - protein, 374 aa, Eupatorium cannabinum
MGEPTKEAAMMENLRSVVFKESESLEGFSAKIHGYDFNQGVNYSQILKSLISTGFQASNLGDAIEIVNQMLDWRLSHEQVTEDCSEEEKILTYRESVRCKIFLGFTSNLISSGVRDVIRYLVQHHMVEVIVTTTGGIEEDLIKCLGDTYMGDFSLPGAALRTKGLNRIGNLLVPNENYCKFEDWIIPILDQLLEEQKKQHVLWTPSKLIARLGKEINNESSYLYWAYKNDIPVFCPGLTDGSLGDMLYFHSFRNPGLVVDVVQDIRAMNSEAVHANPRKTGMIILGGGLPKHHICNANMMRNGADYAVFINTAQEFDGSDSGARPDEAVSWGKIRAAAKYVKVHCDATIAFPLLVAETFAATKEKTTDSKPSSG

SEQ ID NO: 10214 - protein, 163 aa, Zea mays
MDAVMFGLETPLMAALQHLLDVPDGDAGAGDNKTGGGGGATRTYVRDARAMAATPADVKELPGSYAFVVDMPGLGTGDIRVQVEDERVLVVSGERRREEREDDAKYLRMERRMGKFMRKFVLPDNADVDKVAAVCRDGVLTVTVEKLPPPEPKKPKTIEVKVA

SEQ ID NO: 10215 - protein, 375 aa, Eupatorium cannabinum
MAAAIKEAAAVIENARSAVFKESESLDGISAKIHGYDFNQGLNYSQLLKSLISTGFQASNLGDAIETINAMLDWRLSHEKVKEDCCEEEKDETYRESVRCKIFLGFTSNLISSGVRDTIRYLVQNKMVEVLVTTTGGIEEDLIKCLADTYRGHFHLPGAALREKGLNRIGNLIMPNSNYSKFEDWIIPIFDQMLEEQKTQHVVWTPSKVIARLGKEINDESSYLYWAYKNNIPVFCPALTDGSLGDMFYFHSFKNPGLVVDIVQDVLAMDNEAVLADPRKTGVIILGGGLPKHHICNANMMRNGADYAVFINTAQEYDGSDSGARPDEAVSWGKIRATAKSVKVHCDATIAFPLVVAETFAARREKTIEKKLCSA

SEQ ID NO: 10216 - protein, 364 aa, Heliotropium indicum
MGEVATNALDSVRSQLFKKSENLDGSAKVIGYDFNKGVNYAELLKSMVTTGFQASHLGDAMDCINDMLKWRLSHETPTEGCSEQEKDPAYRESVKCKIFLGFTSNLTSSGVRETLRYLCQHRMIDVLVTTAGGIEEDFIKCLGDTYRGDFALQGSMLRSKGLNRIGNLLVPNDNYCKFEDWIMGILDQMLEEQKTQKVLWTPSKVIARLGKEINDESSFLYWASKNNIPVFCPALTDGSIGDMLYLHANNNSPGLVVDIVEDARAMDNEAVHADPRKTGIIILGGGLPKHHICNANMMRGGADFAVYINTAQEFDGSDSGARPDEAVSWGKIRASAKKVKVHCDATIAFPLVVAETFAKVKKSS

SEQ ID NO: 10217 - protein, 371 aa, Heliotropium indicum
MGDVSEEQQQQLLASIRSVVLKQSENLEASSATKIQGYDFNRGVNYPDLLKSLSSTGFQASNLGDAIQVVNQMLNWKLSDECPTEECSDKERDPAFRDSVRCKIFLGFTSNLVSSGVRDIIRYLVQHHLVDVIVTTAGGVEEDLIKCLAPTYRGDFSLPGAVLRSKGLNRIGNLLVPNDNYCKFEDWIMNIFDRMMEEQNSEKVLWTPSKVISRLGKEINDESSYLYWAYKNNIPVYCPGLTDGSLGDMLYIHAIRKDPGLVVDVVKDIRAMNSEAVHAGLRKTGIIVLGGGLPKHHICNANMMRNGADFAVFINTAQEFDGSDSGARPDEAVSWGKIRGSAKTVKVHCDATIAFPLLVAETFATKVNKSG

SEQ ID NO: 10218 - protein, 382 aa, Ipomoea hederifolia
MGEDTRDQNRVMDAVRATVFKKSESLDGEGGCTKIEGYDFNRGVDYPQLLNSLLSTGFQASNLGEAIQIVNEMLDWRLSQEPIMEDCDEEEKDPAYRDTVTSKIFLGFTSNLVSSGVRDTIRYLVQHHMVDVVVTTAGGIEEDLIKCLAPTYKGDFSLPGAVLRSKGLNRIGNLLVPNDNYCKFEDWIIPIFDQMYEEQTKQNVLWTPSKVIARLGKEINDESSYLYWAYKNKIPVFCPSLTDGSLGDMLYFHSFRKEDPNNPDHNPGLIIDIVGDIRAMNGEAVHAGSRKTGVIILGGGLPKHHICNANMMRNGADYAVYINTAQEFDGSDSGARPDEAVSWGKIRGGAKTVKVHCDATIAFPLLVAETFATKPKNSTGNQ

SEQ ID NO: 10219 - protein, 110 aa, Gibberella zeae PH-1
MSDAPVAKKAEGSNSKSVEGKKKFEVKKWNAVALWAWDIVVDNCAICRNHIMDLCIECQANQASATSEECTVAWGICNHAFHFHCISRWLKARSVCPLDNRDWEFQKYGR

SEQ ID NO: 10220 - protein, 367 aa, Psychrobacter sp. 273-4
MATILTLAGDGIGPEIMTQAIDVLNAVNNKFALGLTLESGLIGGVAVDATGEPLPEETLQRARAADAVLLGAVGGPKWDGIERSKRPERGLLKIRSELGLFANLRVAKLYPQLVNASSIKPEIISGLDLLIVRELTGGIYFGEPRGIRTLENGEQQGYNTMVYSTSEINRIGKVAFELAQTRAQAAGTPAKVCSIDKANVLEVTELWKQTMIELQQAEYSDVALSHMYADNACMQLIKDPKQFDVMVTGNLFGDILSDEAAMLTGSIGMLPSASLDEAGKGMYEPCHGSAPDIAGQDIANPLATILSVAMMLRYTFKQEVAAQAIEQAVSDVLDDGLRTVDILDRNEAGLIQVGCQQMGQAVLAKLL

SEQ ID NO: 10221 - protein, 165 aa, Zea mays
MDGRMFGLETPLMVALQHLLDVPDGDAGAGGDKASGAAAGGGPTRTYVRDARAMAATPADVKELPGVYAFVVDMPGLGTGDIKVQVEDERVLVISGERRREEREDAKYLRMERRMGKFMRKFVLPDNADMDKISAVCRDGVLTVTVEKLPPPEPKKPKTIEVKVA

SEQ ID NO: 10222 - protein, 214 aa, Zea mays
MAAVEVCVKAATGKPDTLGDCPFSQRVLLTLEEKKVPYEVKLVDLDNKPEWFLKISPEGKVPVFNGGDGECIADSDVITQTIEEKFPTPSLVTPVEYASVGSKIFPAFITFLKSKDASDGSEKALLDELQALDEHLKAHGPYINGENVSAADLSLGPKLFHLQVALEHFKGWKIPENLTNVHAYTKALFSRESFVKTKPSEEHVIAGWAPKVNA

SEQ ID NO: 10223 - protein, 326 aa, Bradyrhizobium japonicum USDA 110
MELRKIIRTDIAASAIAHLTLVALIIVISEVHPFHAAPPEAVAVDIVTPEQVKEQETKAEEAAKEKAPEPTPTPEMRLPKLDVTDKADAAAKPDAKQQAASQSSQQKASPEPEQPTQQKQPQPQPSQTPKQREATAQPQQPQQPQPQPSQLPPQQPLPQSQPQPAPQPSQAVPQPQAAPPAYQAPEPDVTVKYGVMLGLPPELPVEPKDAPRDDGGDAKDSIGAKLPPEVIAELRRRLRSCAKLPAGVAPTDPVRIKLRAVFATDGTLARPPILIEAPPSAKGVAIVKSATSALQACQPYKMLPADKYEEWKVLDLPFTPQDFGGG

SEQ ID NO: 10224 - protein, 182 aa, Zea mays
MAAAARQRGTVKWFNDTKGFGFISPEDGSEDLFVHQSSIKSEGFRSLAEGEEVEFSVSEGDDGRTKAVNVDRPRRSFVRGGGGGGGGGGGYGSRGGGGSGGGGRSYGGSWGGGRRSGGGGGPGACYKCGEPGHMARDCPSADGGGYGGGGYGGGGYGGGGGGGDRSCYNCGEAGHIARDCPT

SEQ ID NO: 10225 - protein, 429 aa, Arabidopsis thaliana
MESLPQPQNQSSPATTPAKILLGKHELGRRLGSGSFAKVHLARSIESDELVAVKIIEKKKTIESGMEPRIIREIDAMRRLRHHPNILKIHEVMATKSKIYLVMELASGGELFSKVLRRGRLPESTARRYFQQLASALRFSHQDGVAHRDVKPQNLLLDEQGNLKVSDFGLSALPEHLQNGLLHTACGTPAYTAPEVISRRGYDGAKADAWSCGVILFVLLVGDVPFDDSNIAAMYRKIHRRDYRFPSWISKQAKSIIYQMLDPNPVTRMSIETVMKTNWFKKSLETSEFHRNVFDSEVEMKSSVNSITAFDLISLSSGLDLSGLFEAKKKKERRFTAKVSGVEVEEKAKMIGEKLGYVVKKKMMKKEGEVKVVGLGRGRTVIVVEAVELTVDVVVVEVKVVEGEEDDSRWSDLITELEDIVLSWHNDIM

SEQ ID NO: 10226 - protein, 69 aa, Zea mays
GSPLGCLIFCPGLSGAPNGHGFAKGPLWKNPLSPSKWKEKPFVLASLSMWGGIFYGGSKLFSGKKEAKT

SEQ ID NO: 10227 - protein, 179 aa, Glycine max
  misc_feature (110)..(110): Xaa can be any naturally occurring amino acid
  misc_feature (124)..(124): Xaa can be any naturally occurring amino acid
  misc_feature (131)..(131): Xaa can be any naturally occurring amino acid
MDPMDIVGKSKEDVSLPKSTMTKIIKEMLPPDVRVARDTQDLLVECCVEFINLLSSESNDVCSRDDKKTIAPEHVIRALQDLGFKEYVEEVYAAYEQHKLETLDSPKATXFTGIKMTEKKAGAXQQRMFAXSPSKMNNGAAKPKEAALKPRFTPTAPKTFLGVGPRAEAPHLSARMCFP

SEQ ID NO: 10228 - protein, 119 aa, Glycine max
  misc_feature (26)..(26): Xaa can be any naturally occurring amino acid
MAAENVVEFTDLPVKRPREEEEEEEXQTNGVSNDAVSTLPNDPQYPGISAVIPGWFSEISPMWPGEAHSLKVEKILFQGKSDYQNVMVFQSSTYGKVLVLDGVMLLVPASRAREALLVP

SEQ ID NO: 10229 - protein, 157 aa, Brassica napus
  misc_feature (100)..(100): Xaa can be any naturally occurring amino acid
  misc_feature (145)..(147): Xaa can be any naturally occurring amino acid
MSEKMANYVDGDSDRKRKYSSSSGSSKNNSNEGKRKVKKVDWTPELHRRFVDAVEQLGLEKAVPSRILELMGVHCLTRHNVASHLQKYRSHRKHVLAREXEAANWTRKRHIYGLDSTRVNINGRNKNGWIAPAPTIGYAPPPPAXXXSPTIHNHHFR

SEQ ID NO: 10230 - protein, 218 aa, Aspergillus niger
MSSTSPSKEPEVEPEVQSGEDQEQMDKEQQDTQAQGQGEFEVKEQDRWLPIANVARIMKLALPENAKIAKEAKECMQECVSEFISFITSEASEKCQQEKRKTVNGEDILFAMTSLGFENYAEALKIYLSKYRETQSARGEHQNRPTSSGYGAGAPVGAPGPAGPGGRPMAPGAGFPDTADSANNIMNQSLDPSEQDTSTYGYPPMVGQPHNGTAGESY

SEQ ID NO: 10231 - protein, 133 aa, Brassica napus
VDPRVRALKVYVPSYESYGRMWPHIHTRILAALFLFQLVMFGYLGVKLFVWATLLVPLIFISLIFGYVCRQKFYKGFEHTALEVACRELKQRPDLEEVFKAYIPHSLSTHKGDDHQFKGAMSRYQDYAAISAA

SEQ ID NO: 10232 - protein, 346 aa, Rosa gallica
QKWSNGEHSNELLHAQAHIWNHIFSFINSMSLKSAIQLGIPDIINKHGYPMTLSELTSALPIHPTKSHSVYRLMRILVHSGFFAKKKLSKTDEEGYTLTDASQLLLKDHPLSLTPFLTAMLDPVLTKPWNYLSTWFQNDDPTPFDTAHGMTFWDYGNHHPSIAHFFNDAMASDARLVTSVIIDDCKGVFEGLESLVDVGGGTGTLAKAIADAFPHIECTVLDLPHVVADLQGSKNLKYTGGDMFEAVPPADTVLLKWILHDWNDEECVKILKRSREAITSKDKKGKVIIIDMMMENQKGDEESIETQLFFDMLMMALLTGKERNEKEWAKLFTDAGLSDYKITPIL

SEQ ID NO: 10233 - protein, 496 aa, Staphylococcus aureus subsp. aureus Mu50
MELLKHLSQRQYIDGEWVESTNKNTRDIINPYNQEVIFTVSEGTKEDAERAILAARRAFESGEWSQETAEKRGKKVRAIADKIKEHREALARLETLDTGKTLEESYADMDDIHNVFMYFAGLADKDGGEMIDSPIPDTESKIVKEPVGVVTQITPWNYPLLQASWKIAPALATGCSLVMKPSEITPLTTIRVFELMEEVGFPKGTINLILGAGSEVGDVMSGHKEVDLVSFTGGIETGKHIMKNAANNVTNIALELGGKNPNIIFDDADFELAVDQALNGGYFHAGQVCSAGSRILVQNSIKDKFEQALIDRVKKIKLGNGFDADTEMGPVISTEHRNKIESYMDVAKAEGATIAVGGKRPDRDDLKDGLFFEPTVITNCDTSMRIVQEEVFGPVVTVEGFETEQEAIQLANDSIYGLAGAVFSKDIGKAQRVANKLKLGTVWINDFHPYFAQAPWGGYKQSGIGRELGKEGLEEYLVSKHILTNTNPQLVNWFSK

SEQ ID NO: 10234 - protein, 318 aa, Arabidopsis thaliana
MVALDLEFERYPGERSFGSVSLFKYKRQRDGETQYAAVKTSSDENAKSLYKEFQILSQFKGCSRIVQCYGNGVKEIFNDKGYVEYKIAMEYAFGGSLSDFMDRFKDRKLSDSMIREFTRMLLEGLATIHRHGYVHCDLKPENILVFPSSVYKNGAWIRSYELKISDFGMSKRDGDTQWWQPRKPYVGTPIYMSPESISHGEIGKGLDLWSLGCVVLEMYTRKKPWWHTNYELEELMKCYEPLFPRNLPCDAKLFLMTCFASEPDERKDALTLLRQSFLHGDVNKFTNRQMNVKIDSADDFTLQLEKVSQMLSEIRTMC

SEQ ID NO: 10235 - protein, 346 aa, Rosa gallica
QKWSNGEHSNELLHAQAHIRNHIFSFINSMSLKSAIQLGIPDIINKHGYPMTLSELTSALPIHPTKSHSVYRLMRILVHSGFFAKKKLSKTDEEGYTLTDASQLLLKDHPLSLTPFLTAMPDPVLTKPWNYLSTWFQNDDPTPFDTAHGMTFWDYGNHHPSIAHFFNDAMASDARLVTSVIINDCKGVFEGLESLVDVGGGTGTLAKAIADAFPHIECTVLDLPHVVADLQGSKNLKYTGGDMFEAVPPADTVLLKWILHDWNDEECVKILKRSREAITSKDKKGKVIIIDMMMENQKGDEESIETQLFFDMLMMALLTGKERNKKEWAKLFTDAGFSDYKITPIL

SEQ ID NO: 10236 - protein, 373 aa, Arabidopsis thaliana
MVPPELEFNKYLGKGSYGSVSLFKYSKPRTTLYTAVMTCNYKNAESLEKEFGILSEFKGCSRIVQCYENRVIENLDVEGNKEYMMLMEYAAGGSLRTFMKRSEDKKLPDPLIREFTRMILEGLATIHGQGYVHCDLKPDNILVFPRCVYKKRAWRSSYELKISDFGLSKRDGDSKWWHPHRPFVGTAIYMSPGSVSHGETGRGLDLWSLGCVVLEMYTGKKPWWHNNYDLKDLKNWYAPMIPSDLPCDAKHFIMACFALNTNERRDALTLLEHSFLRGVVNKITKPHVKNENPKEIALALGRVVRRPSKVLTSIFKRAGELMKIIKKQPRAPRSNLLPVHICHLAQPSQKICFFIYCSLCVVFIILTVVCMFR

SEQ ID NO: 10237 - protein, 346 aa, Rosa hybrid cultivar 'Kazanlik'
QKWSNGEHSNELLHAQAHIWNHIFSFINSMSLKSAIQLGIPDIINKHGYPMTLSELTSALPIHPTKSHSVYRLMRILVHSGFFAKKKLSKTDEEGYTLTDASQLLLKDHPLSLTPFLTAMLDPVLTKPWNYLSTWFQNDDPTPFDTAHGMTFWDYGNHHPSIAHFFNDAMASDARLVTSVIIDDCKGVFEGLESLVDVGGGTGTVAKAIADAFPHIECTVLDLPHVVADLQGSKNLKYTGGDMFEAVPPADTVLLKWILHDWNDEECVKILKRSREAITSKDKKGKVIIIDMMMENQKGDEESIETQLFFDMLMMALLTGKERNKKEWAKLFTDAGFSDYKITPIL

SEQ ID NO: 10238 - protein, 440 aa, Oryza sativa (japonica cultivar-group)
MSDCHIMTARRRSCYGRYLSASNEPFLLGITGRKVLQAQPPGGRATDSSLEWEPVKDDALVYVRVELTAWNVAPLRCAAEYLEMTEEHAEDNLTARVEAYLEQAVLRHSCEATKALKSREELLPHAEELGIVSRCVEAISIFTSGVNLNEEQNMDHLTSPFATTARSSAASRSWFDDLAVLGLDMYRRVMAAMAARADVRTEARESCLVSYARGTITALSRSMRRLASAPASSEVEQRDLLEAVVTSVPTDKCSGRVVTAKFLFAQLWTAHILLALDAALGQKAATQLEHATLEDVLIPSYSGGMKTLYDVDCVERVVRHVLAEEEHGEAGESTSAAAITEEKRGGGGGEGASDGGEPAGAVECRRGGGGGAGGSPVIRLGGLRRARSHGGARRPPPPDAGVLMVVGQRSRRLPHLLPHRRPAVGAPRPDDLLPTACRPA

SEQ ID NO: 10239 - protein, 388 aa, Pichia norvegensis
MSAAKQLFKIVPLTPTEINFLQSLAPVVKEHGVTVTSTMYKYMFQTYPEVRSYFNMTNQKTGRQPKVLAFSLYQYILHLNDLTPISGFVNQIVLKHCGLGIKPDQYPVVGESLVQAFKMVLGEAADEHFVEVFKKAYGNLAQTLIDAEASVYKTLAWEEFKDFRVTKLVKEAEDVTSVYLTPVDGFKLKPIIPGEYISFRWDIHNPDITDIQPREYSISQDVKENEYRISVRDIGIVSDYINKKLQVGDIVPVHAPVGTMKYDSISKKGKVAVLAGGIGITPMIPIIEHALKDGKDVELYYSNRSYQSEPFREFFSNLEKENNGKFKLNNYISAENQKLQVKDLEHINPDEYDVYLLGPVAYMHEFKTYLVGKGVSDLKMEFFGPTDP

SEQ ID NO: 10240 - protein, 346 aa, Rosa hybrid cultivar 'Kazanlik'
QKWSNGEHSNELLHAQAHIWNHIFSFINSMSLKSAIQLGIPDIINKHGYPMTLSELTSALPIHPTKSHSVYRLMRILVHSGFFAKKKLSKTDEEGYTLTDASQLLLKDHPLSLTPFLTAMLDPVLTKPWNYLSTWFQNDDPTPFDTAHGMTFWDYGNHQPCIAHFFNDAMASDARLVTSVIIDDCKGVFEGLESLVDVGGGTGTVAKAIADAFPHIECTVLDLPHVVADLQGSKNLKYTGGDMFEAVPPADTVLLKWILHDWNDEECVKILKRSREAITSKDKKGKVIIIDMTMENQKGDEESIETQLFFDMLMMALVTGKERNEKEWAKLFTDAGFSDYKITPIL

SEQ ID NO: 10241 - protein, 371 aa, Phalaenopsis hybrid cultivar
MGSAACETERDVLKSLVFKESAALESLKIGGYDFNNGLDLTGLLNSLVSTGFQATNLGEAMEVVNQMISWRLADEEVAVDGSEETDRAFRESVKCKIFLGFTSNLISSGVRETIRFLVQHRMVDVLVTTAGGIEEDFIKCLAPTFKGDFSLGGTFLRSRGWNRIGNLLVPNDNYCKFGDWIMPILDKMLEEQINEKAHWTPSKVIARLGKEINNESSYLYWASKNGIPVFCPAITDGSIGDMLYLHSLRNPGHIIDLVQDVKAMDEEAVHASPRKTGVLILGGGVPKHHICNANMLRNGADYAVFINTAQEFDGSDSGARPDEAVSWGKIKGTAKTAKVHCDATIAFPLLVAGTFAKKINKAAAQANGIKA

SEQ ID NO: 10242 - protein, 370 aa, Senecio vernalis
MAESNKEAIDSARSNVFKESESLEGTCAKIGGYDFNNGIDHSKLLKSMVSTGFQASNLGDAMIITNQMLEWRLSHDEVPEHCSEEEKKNRESVKCKIFLGFTSNLISSGVRETICYLAQHRMVDVLVTTTGGIEEDFIKCLASTYKGKFSLPGADLRSKGLNRIGNLIVPNDNYIKFEDWIIPIFDQMLIEQKTQNVLWTPSRMIARLGKEINNETSYLYWAYKNNIPVFCPSITDGSIGDMLYFHSVSNPGPGLVVDIVQDVIAMDNEAVHASPQKTGIIILGGGLPKHHICNANMMRNGADFAVFINTAQEYDGSDSGARPDEAVSWGKISSTGKAVKVHCDATIAFPLLVAETFAVKKEKASKVNGF

SEQ ID NO: 10243 - protein, 272 aa, Bradyrhizobium japonicum USDA 110
MLFVEANGARIPAIGLGTWELSGRPCARVVEQALRLGYRHIDTAQVYDNEREVGDGVRASGVRRDDVFLTTKVWTNHFAPNDLERSVKESLARLRLPSVDLLLLHWPNSHVPLAETLGALSHARQMGLTRHIGVSNFTVALIEQAVALSPEPLVCNQVEFHPYLDQAKVRAACDQHGLALVAYSPIARGRIKTDQTLAGIGRAHRKTPAQVCLRWLVQQNVAAIPRTSRIERLSENIEIFDFELSDDEMARIAALANPKGRLTDFGFAPKWD

SEQ ID NO: 10244 - protein, 343 aa, Gibberella zeae PH-1
MAADDSPTFEEHFSRLSIDHKSVGSQSKRVPKTKIPQSQPVPGPAQPKCLLPVKGPVVANRVDTPTPHKDQDTNSPSPSSPQKPTTKSSTTKSATLYKHLHLGMFEIGRPMGKGKFGRVYLARERSSGFICALKVLYKTELRQSRMESQVRREIEIQTNLRHPNIVQLYSHFHDSKRIVLVLEFAAKGELYKHLQKETRFTERKAARFIAQVVSALQYLHRKNIIHRDIKPENILVGMHDELKMSDFGWSVHSPSKRRETMCGTLDYLPPEMIKLGAVDAGRFYDEKVDVWSLGVLTYEFLVGVPPFEDTPVRTQRRIARADMQIPDFISSKAKHLIKSACSL

SEQ ID NO: 10245 - protein, 372 aa, Senecio jacobaea
MGETNKSAEMIESARSAVFKESERLEGTCAIIGGYDFNNGIDHSKLLKAMVSTGFQASNLGDAIDIVNQMLDWRLSHEPVTEDCTEEEKKKRESVKCKIFLGFTSNLISSGVRETIRYLAQHRMVNVIVTTAGGIEEDYIKCLGSTFRGKFSLPGANLRSRGLNRIGNLLVPNDNYCKFEDWIIPIFDQMLIEQKTKNVLWTPSRIIARLGKEINNESSYLYWAYKNNIPVFCPALTDGSIGDMLYFHSVTNPGPGLVVDIVQDVIAMDNQAVHASPQKTGIIILGGGLPKHHICNANMMRNGADYAVFINTAQEYDGSDSGARPDEAVSWGKISSSGKAVKVHCEATIAFPLLVAETFAAKKEKASKLNGF

SEQ ID NO: 10246 - protein, 58 aa, Brassica napus
MSEGTANCVDILIAIILPPLGVFLKYGCGHEFWICLLLTFLGYIPGIIYAIYAITKNT

SEQ ID NO: 10247 - protein, 114 aa, Glycine max
MFHSIKTVLTCPQVSFPARSLSSNLGRETCAVRFCTDSARKMDKTQKPSTEENKQGDTMSHSFGEGYATRSDEEGFGGVYGGNQSKPEMDPAYDKTQGSEVKEKEKARHQTSAN

SEQ ID NO: 10248 - protein, 578 aa, Zea mays
  misc_feature (137)..(137): Xaa can be any naturally occurring amino acid
  misc_feature (166)..(166): Xaa can be any naturally occurring amino acid
  misc_feature (199)..(199): Xaa can be any naturally occurring amino acid
  misc_feature (210)..(210): Xaa can be any naturally occurring amino acid
  misc_feature (224)..(224): Xaa can be any naturally occurring amino acid
  misc_feature (234)..(234): Xaa can be any naturally occurring amino acid
  misc_feature (418)..(418): Xaa can be any naturally occurring amino acid
  misc_feature (442)..(442): Xaa can be any naturally occurring amino acid
MAGGGVEDVYGEDRATEEQLITPWAFSVASGYTLLRDPRHNKGLAFSEAERDAHYLRGLLPPALASQELQEKKLMQNLRRYEQPLHRYIAMMDLQERNERLFYKLLIDNVEELLPVVYTPTVGEACQKYGSIYRRPXQGLYISLRDKGKILEVLKNWPERSIQVIXVVTDGERILGLGDLGWPGGWEIPVGKLSLYTAXSGGVRPSACLXHFTIDVGTNNEALXLKDEFYIGLXRQRRATGEEYHELLEEFMTAVKQNYGEKVLTQFEDFANHNAFDLLEKYRESHLVFNDDIQGTASVVLAGLLAALKVVGGTLADHTYLFLGAGEAGTGIAELIALEMSKHTGSPIEECRPKIWLMDSKGLIVASRKDSLQAFKKPWAHEHEPVATLLEAVQSLKPTVLIGTSGKGGTFTKEVVEXMASQNEKPVIFALSNPTSHSECTXAEQAYTWTKGRAVFASGSPFDSVELDGKVLVPGQSNNAYIFPGFGLGVVISGAIRVRDDMLLAASEALAEQVTEEHFAKGLIFPPFTNIRAISARIAAKVAAKAYELGLASRLPRPDDLVKYAESCMYTPIYRSYR

SEQ ID NO: 10249 - protein, 364 aa, Hyphomicrobium chloromethanicum
MSTYSLRVERKQRETDDCASLWLSVPTDLRSAFAHRPGQFIAVSAEINGEEVTRQYSLSSAPDDSRGIRITVKKIPGGRMSSWLVDRVNEGDRIEVAAPRGRFFRPLDRAHRVLLLAAGSGIAPILPIAQKLLADGVGHRITLAYGSRALDDIILRKDVDELPNIFRTCALEHVLSRPGPTWDGPRGRLDSAYLLSRQDLWDGNASHLPLIVYLCGPESFMDAAEAFFLSHGVDASAIRRESFDLVLEDDADEPPLFVAGTEEVGEPSAICEEIVANVGGEETRVVPEPDETILAALIRGEAPVPFSCQEGTCSSCIAKIKKGSASVRSGVLKTLRQDDLDEGLLLACLARPASRHILIDFDDI

SEQ ID NO: 10250 - protein, 346 aa, Rosa hybrid cultivar 'Kazanlik'
KKWSNGEDSNELLHAQAHIWNHIFSFINSMSLKSAIQLGIPDIINKHGPPMTLSELTSALPIHPTKSHSLDRLMRILVHSGFFAKEKLSETDEEGYTLTDTSQLLLKDHPLSLTPFLTAMLDPVLTKPWHHLSTWFQNDDLTPFATAHGMTMWDYGNHQPSFSHFFNDAMASDARLVASVIINECKGVFEGLESLVDVGGGTGTLAKAIADAFPHIECTVLDLPHVVADLQGSKNLKYTGGDMFEAVPPADTVLLKWILHDWNDEECVKILQRSKEAITSKDKKGKVIIIDMIMGNQKGDEESIEMQLFFDMLMMVLLKGKERNEKEWAKLFTDAGFSDYKITPIL

SEQ ID NO: 10251 - protein, 346 aa, Rosa hybrid cultivar
QKWSNGEHSNELLHAQAHIWNHIFSFINSMSLKSAIQLGIPDIINKHGYPMTLSELTSALPIHPTKSHSVYRLMRILVHSGFFAKKKLSKTDEEGYTLTDASQLLLKDHPLSLTPYLTAMLDPVLTNPWNYLSTWFQNDDPTPFDTAHGMTFWDYGNHQPSIAHLFNDAMASDARLVTSVIINDCKGVFEGLESLVDVGGGTGTLAKAIADAFPHIECTVLDLPHVVADLQGSKNLKYTGGDMFEAIPPANTVLLKWILHDWNDEECVKILKRSRVAITSKDKKGKVIIIDMMMENQKGDEESIETQLFLDMLMMALVGGKERNEKEWAKLFTDAGFSDYKITPIL

SEQ ID NO: 10252 - protein, 346 aa, Rosa hybrid cultivar
QKWSNGEHSNELLHAQAHIWNHIFSFINSMSLKSAIQLGIPDIINKHGYPMTLSELTSALPIHPTKSHSVYRLMRILVHSGFFAKKKLSKTDEEGYTLTDASQLLLKDHPLSLTPYLTAMLDPVLTNPWNYLSTWFQNDDPTPFDTAHGMTFWDYGNHQPSIAHLFNDAMASDARLVTSVIINDCKGVFEGLESLVDVGGGTGTLAKAIADAFPHIECTVLDLPHVVADLQGSKNLKYTGGDMFEAVPPADTVLLKWILHDWNDQECIKILKRSRVAITSKDKKGKVIIIDMMMENQKGDEESIETQLFFDMLMMALVGGKERNEKEWAKLFTDAGFSDYKITPIL

SEQ ID NO: 10253 - protein, 589 aa, Glycine max
MESATQVGAAAQPSSASASVIPSAFDGTLGRHLARRLAETGVRDVFSVPGDFNLTLLDHLIAEPSLNLVGCCNELNAGYAADGYARAKGVGACVVTFTVGGLSVLNAIAGAYSENLPVICIVGGPNSNDYGTNRILHHTIGLPDFTQELRCFQAITCFQAVVNNLDDAHELIDTAISTALKESKPVYISISCNLPGIPHPTFARDPVPFFLAPKVSNQEGLEAAVEATAALLNNAVKPVIVGGPKLRVAKAQKAFLEFAEASGYPIAVMPSGKGLVPEHHPHFIGTYWGAVSSSFCGEIVESADAYVFVGPIFNDYSSVGYSLLIKKEKAIIVQPNRVTIGNGPSLGWVFMADFLTALAKKVKTNTAAVENYRRIYVPPGIPLRREKDEPLRVNVLFKHIQELLSGDTAVIAETGDSWFNCQKLHLPENCGYEFQMQYGSIGWSVGATLGYAQAATDKRVIACIGDGSFQVTAQDISTMIRCGQKTIIFLINNGGYTIEVEIHDGPYNVIKNWDYTRFVDAIHNGQGKCWTAKVRTEDDLTEAIAKATGPQKDSLCFIEVFVHKDDTSKELLEWGSRVAAANSRPPNPQ

SEQ ID NO: 10254 - protein, 346 aa, Rosa hybrid cultivar
QKWSNGEHSNELLHAQAHIWNHIFSFINSMSLKSAIQLGILDIINKHGYPMTLSELTSALPIHPTKSHSVYRLMRILVHSGFFAKKKLSKTDEEGYTLTNASQLLLKDHPLSLTPFLTAMLDPVLTKPWNYLSTWFQNDDPTPFDTAHGMTFWDYGNHQPSTAHFFNDAMASDARLVTSVIIDDCKGVFEGLESLVDVGGGTGTVAKAIADAFPHIECTVLDLPHVVADLQGSKNLKYTGGDMFEAVPPADTVLLKWILHDWNDQECIKILKRSRVAITSKDKKGKVIIIDMMMENQKGDEESIETQLFFDMLMMALVGGKERNEKEWAKLFTDAGFSDYKITPIL

SEQ ID NO: 10255 - protein, 194 aa, Zea mays
APAFCELSLPLTKEEAAFSPSDPAMQRHVASGRPSGTDGSDFSYRMVVESRYQRVAEGRSRLARLILVQALHLVAGGLLLLLSLSKGAAVNKFAVLSMAAGFLAIVVGELGRMRTMAVLLRLYTSLSSIAVAFSVTCIIRSELFLKVMKQNTEAITSYEMLDAVRVALGILLQMVVIATTTRLLQNMSPPKRAS

SEQ ID NO: 10256 - protein, 346 aa, Rosa hybrid cultivar
QKWSNGEHSNELLHAQAHVWNHIFSFINSMSLKSAIQLGILDIINKHGYPMTLSELTSALPIHPTKSHSVYRLMRILVHSGFFAKKKLSKTDEEGYTLTNASQLLLKDHPLSLTPFLTAMLDPVLTKPWNYLSTWFQNDDPTPFDTAHGMTFWDYGNHQPSIAHFFNDAMASDARLVTSVIIDDCKGVFEGLESLVDVGGGTGTVAKAIADAFPHIECTVLDLPHVVADLQGSKNLKYTGGDMFEAIPPANTVLLKWILHDWNDEECVKILKQSREAITSKDKKGKVIIIDMMMENQKGDEESIETQLFFDMLMMALVTGKERNEKEWAKLFTDAGFSDYKITPIL

SEQ ID NO: 10257 - protein, 455 aa, Mycobacterium avium subsp. paratuberculosis str. k10
MSTARLINPATEEVLRSVEHADAAAVDDAVDRARAAQRRWARLAPADRAAGLRAFAAAVDAHRDELAALEVANSGHPIASAEWEAGQVRDVLTFYAGSPERLSGKQIPVAGGLDVTFHEPLGVVGVITPWNFPMPIASWGIAPALAAGNAVLVKPAEPTPVTTIRLAELAVQAGLDRDLLQVLPGPGTVVGERFVTHPDVRKIVFTGSTEVGKKVLAGAAAQVKRVTLELGGKSANIVFADCDLQRAAATAPAGVFDNAGQDCCARSRILVQRTVFDRFMELLEPAVTGIVVGDPASRDTQMGPLVSAAHRAKVASYVPDGAPVAFRGTAPTGPGFWFPPTVLTPSRTDRCVTEEIFGPVVTVLAFDDEQDAVALANDTSYGLSGSIWTNDLSRALRVSRAVEAGNLSVNSHSSVRYHTPFGGFKQSGLGRELGPDAPAQFTETKNVFIAIDEEP

SEQ ID NO: 10258 - protein, 1499 aa, Streptococcus gordonii
MQKREVFGFRKSKVAKTLCGAVLGAALIAIADQQVLADEVTETNSTANVAVTTTGNPATNLPEAQGEATEAASQSQAQAGSKDGALPVEVSADDLNKAVTDAKAAGVNVVQDQTSDKGTATTAAENAQKQAEIKSDYAKQAEEIKKTTEAYKKEVEAHQAETDKINAENKAAEDKYQEDLKAHQAEVEKINTANATAKAEYEAKLAQYQKDLAAVQKANEDSQLDYQNKLSAYQAELARVQKANAEAKEAYEKAVKENTAKNAALQAENEAIKQRNETAKANYDAAMKQYEADLAAIKKAKEDNDADYQAKLAAYQAELARVQKANADAKAAYEKAVEENTAKNTAIQAENEAIKQRNETAKATYEAAVKQYEADLAAVKQANATNEADYQAKLAAYQTELARVQKANADAKATYEKAVEDNKAKNAALQAENEEIKQRNAAAKTDYEAKLAKYEADLAKYKKDFAAYTAALAEAESKKKQDGYLSEPRSQSLNFKSEPNAIRTIDSSVHQYGQQELDALVKSWGISPTNPDRKKSTAYSYFNAINSNNTYAKLVLEKDKPVDVTYTGLKNSSFNGKKISKVVYTYTLKETGFDDGTKMTMFASSDPTVTAWYNDYFTSTNINVKVKFYDEEGQLMNLTGGLVNFSSLNRGNGSGAIDKDAIESVRNFNGRYIPISGSSIKIHENNSAYADSSNAEKSRGARWDTSEWDTTSSPNNWYGAIVGEITQSEISFNMASSKSGNIWFAFNSNINAIGVPTKPVAPTAPTQPMYETEKPLEPAPVVPTYENEPTPPVKTPDQPEPSKPEEPTYETEKPLEPAPVAPTYENEPTPPVKIPDQPEPSKPEEPTYETEKPLEPAPVAPTYENEPTPPVKTPDQPEPSKPEEPTYDPLPTPPLAPTPKQLPTPPVVPTVHFHYSSLLAQPQINKEIKNEDGVDIDRTLVAKQSIGKFELKTEALTAGRPKTTSFVLVDPLPTGYKFDLDATKAASTGFDTTYDEASHTVTFKATDETLATYNADLTKPVETLHPTVVGRVLNDGATYTNNFTLTVNDAYGIKSNVVRVTTPGKPNDPDNPNNNYIKPTKVNKNKEGLNIDGKEVLAGSTNYYELTWDLDQYKGDKSSKEAIQNGFYYVDDYPEEALDVRPDLVKVADEKGNQVSGVSVQQYDSLEAAPKKVQDLLKKANITVKGAFQLFSADNPEEFYKQYVSTGTSLVITDPMTVKSEFGKTGGKYENKAYQIDFGNGYATEVVVNNVPKITPKKDVTVSLDPTSENLDGQTVQLYQTFNYRLIGGFIPQNHSEELEDYSFVDDYDQAGDQYTGNYKTFSSLNLTMKDGSVIKAGTDLTSQTTAETDATNGIVTVRFKEDFLQKISLDSPFQAETYLQMRRIAIGTFENTYVNTVNKVAYASNTVRTTTPIPRTPDKPTPIPTPKPKDPDKPETPKEPKVPSPKVEDPSAPIPVSVGKELTTLPKTGTNDATYMPYLGLAALVGFLGLGLAKRKED

SEQ ID NO: 10259 - protein, 432 aa, Bordetella parapertussis 12822
MTVRTVRIAGGRLIDPASGADARADLYLADGRIAAIGQAPAGFQAQQHIDARGLAVLPGLVDLSARVHGAGLAPLACEMQAALAGGVTRLVVPPDTDPPLDEPGRVEMLRHRAHQAGQAQLHPLGALTEGLRGERLSEMAALAEAGCVAFSQAGLPVADTRVLWRAMQYARTFGLALWLRPLDPWMGRDGVAAAGAYASRLGLAEVPVQAETLALHTIFELQRATGARVHLMRLSSAAGVALVRAARREGLPLTCDVAAHQIHLTDVDIGFFDSRFRLDPPLRGQRDRDAIVAGLADGTIDAICSDHRPVGDTGKLLPFAEAEAGASGLELLLSLTLKWAQRERVPLARALALVTSAPAAILRAATAALPPCGELAAGAPADLCLVDLDADWTAAPAAMRSRSVHTPFAGMMLPGRVRATLVAGRTVWETPA

SEQ ID NO: 10260 - protein, 137 aa, Glycine max
  misc_feature (71)..(71): Xaa can be any naturally occurring amino acid
  misc_feature (110)..(110): Xaa can be any naturally occurring amino acid
  misc_feature (131)..(131): Xaa can be any naturally occurring amino acid
KNKLLRTNNEKLTAGSMISCAAVTTVNRAGGDMVATFTGLMSMAGLPTTKTNDDISSIASNGGRVQCMQAXPPVGKKKFETLCYLPDLDDAQLAKEVEYLLRKGWIACWXFELDHRFWYREHNTSAEYYYXRYWTMW

SEQ ID NO: 10261 - protein, 181 aa, Leptospira interrogans serovar Copenhageni str. Fiocruz L1-130
MKIKWFIFVFLFSVSWLQAEPFQLKSPELTSVKLIANEQVFNGFGCSGGNISPSLSWTGLPKDTKSIALTVYDPDAPTGSGWWHWVVFNLPSTITSIPANAGNLEKNLLPKEAIQSRTDFGTSGYGGPCPPKGHKPHRYYFTVYALKDKIPADQNSSGALIGFYINQLKIGEAQILAKYGR

SEQ ID NO: 10262 - protein, 316 aa, Glycine max; identical to SEQ ID NO: 356

SEQ ID NO: 10263 - protein, 471 aa, Vibrio parahaemolyticus RIMD 2210633
MILVWFRRDLRTLDHTALKAALDTGQPVVACFIATPEQWQEHHMAPMQADLIARRLEHVHQELTELNIPLLYKEVPRFDDCTQVICDWADKLNATAAMVNINYEVNEVELDRKVSQALDNRGVEFHAFHDKCVHAPTTVLNKQGEYFKVFTPFKRAWLQKFSLPTVSKPQRQNELPSAQLAAVKQDGFDADFTFSYPRESSEAWCVSTNDILKQLRTFARERSDGYQMKRDFPAIDGTSQLSPYLAIGALSPRQCIARLYAENPQPDLSEGKATWLSEIIWREFYQHLLVFEPKLVKGRGFIDWEDKIQWSYDEQAFECWKTGTTGYPIVDAAMRQLNQTGWMHNRLRMIVASFLTKDLHIDWRWGEEYFMSKLVDGDFAANNGGWQWSASTGCDGQPYFRIFNPISQGEKFDSDGQFVRHWVPEIKSVPNKFVHKPWTWEGFSLLEYHKPMVDHKVEREITLRLFKSAKE

SEQ ID NO: 10264 - protein, 286 aa, Azotobacter vinelandii
MSDYQETLYEGYGQRFRMDRLLHEVRTGHQHLVIFENARMGRVMALDGVIQTTEADEFIYHEMLTHVPILAHGAARRVLIVGGGDGGILREVCRHRSVERITMVEIDATVVEMCKEFLPEHSRGAFEDPRLNLVIDDGMRFVATTEDRFDVIISDSTDPIGPGEVLFSENFYQACRRCLNDGGILVTQNGTPFMQLGEVQTTAQRMNGLFADWHFYQAAVPTYIGGAMTFAWGACDAASRRLPPDILRQRFVGSGIVARYYNPEIHQGAFALPQYVLQAIGKPGNN

SEQ ID NO: 10265 - protein, 360 aa, Physcomitrella patens
MSPSVDCLASLYCAEDVSGTAWNESEMCGAADRVFESQPAVFMDFPVEDDEAIATLLMKEAQFMPEADYLERYQSRKLSLEARLAAIEWILKVHSFYNYSPLTVALAVNYMDRFLSRYYFPEGKEWMLQLLSVACISLAAKMEESDVPILLDFQVEQEEHIFEAHTIQRMELLVLSTLEWRMSGVTPFSYVDYFFHKLGVSDLLLRALLSRVSEIILKSIRVTTSLQYLPSVVAAASIICALEEVTTIRTGDLLRTFNELLVNVESVKDCYIDMRQSEIGPYCVRMGLKRKILHASEPQSPVGVLEAADVSSPSGTVLGFSSRESSPDVTDSPPSTNSQRKRRKLCLHNESCLHVESASL

SEQ ID NO: 10266 - protein, 223 aa, Glycine max
MASSLIISPRKLRSDLYSYSYQEDHYSTPLVINVLASLIERSMARTERIVKNGSRSLSKAISTNIFDCREILDMTIQSYLERIFRYTRAGPSVYVVAYVYIDRFCQNNPGFRINARNVHRLLITTIMLASKYVEDMNYRNSYFGRVGGLTTDELNKLELEFLFLMDFKLHVNVSVFESYCCHLEREVSIGGGYHIERTLRCAEEIKAKHREERGYTHIARVML

SEQ ID NO: 10267 - protein, 310 aa, Malus x domestica
MSTGTLSSGYEMPVIGLGLWRLEKDELKEVILNAIKIGYRHFDCAAHYKSEADVGEALAEAFKTGLVKREELFITTKIWNSDHGHVVEACKNSLEKLQIDYLDLYLVHYPMPTKHNAIGKTASLLGEDKVLDIDVTISLQQTWEGMEKTVSLGLVRSIGLSNYELFLTRDCLAYSKIKPAVSQFETHPYFQRDSLVKFCMKHGVLPTAHTPLGGAAANKDMFGSVSPLDDPVLNDVAKKYGKSVAQICLRWGIQRKTAVIPKSSKIQRLKENLEVLEFQLSDEDMQLIYSIDRKYRTSLPSKTWGLDVYA

SEQ ID NO: 10268 - protein, 208 aa, Zea mays
  misc_feature (78)..(78): Xaa can be any naturally occurring amino acid
  misc_feature (113)..(113): Xaa can be any naturally occurring amino acid
  misc_feature (183)..(183): Xaa can be any naturally occurring amino acid
MACNYANRLLSPHPHSHAKNDVPSGLAAVLLCAAVAAALGGKRAPIPDDLRDVIDDEEDDEWRRYGTPPSRGPGRGDXQPPDLSRMDPAALQDELLRGQTGPSFGFVKLRPGXRRSREDVVGIATRWSNVLRTGSVDAKFVAVNFVTLMFTMERGRDILELKEFVLSQAEAYELRIGDQVFRXPGDPPLDQVLRKPRKKKRRKSRDEL

SEQ ID NO: 10269 - protein, 476 aa, Glycine max
  misc_feature (361)..(361): Xaa can be any naturally occurring amino acid
  misc_feature (380)..(380): Xaa can be any naturally occurring amino acid
ETEQFVWRVLPLLTILMSLVVFFYLQDSYRAHLHPLVKFPRSKCSLLPHRHFWITSKRIVTPQGIISGSVEINEGKIISVIKGYSKQGKSKQEKIIDYGGAVVMPGLIDVHVHLDEPGRTAWEGFDTGTRAAAAGGVTTVVDMPLNNHPTTVSRETLKLKLEAAENKIYVDVGFWGGLIPENAHNTSILEGLLSAGVLGVKSFMCPSGIDDFPMTTIDHIKAGLSVLAKYRRPIVVHAEIQQHFENHLELNEDNLDPRAYLTYLNTRPPSWEEAAIKQLVSVTKDTRKGGPLEGAHVHIVHLSDSSASLDLIKEAKSHGDSISVETCPHYLAFTSEEIPNGDTRFKCSPPIRDAYNKDKLXEAVLEGHIDLLRTDHSPTXLEQLSLLWSKKPATLAGLESKGAIAVGNHADIVVWQPELEFDLDDDYPVFIKHSELSAYMGRRLSGKVLETFVRGNLVFKDGKHAPAPCGVQILAK

SEQ ID NO: 10270 - protein, 181 aa, Vigna radiata
MASSMISSPAVTTVNRAGAAGMVAPFTGLKSLGGFPTRKTNNDITSVANNGGRVQCMQVWPTIGKKKFETLSYLPDLTEEQLGKEVDYLLRSGWIPCLEFELSHKDAFPHRENNRSPGYYDGRYWTMWKLPMYGCTDSSQVLKELREARTLYPDGFVRIVGFDSVRQVQCISFIAYKPPGY

SEQ ID NO: 10271 - protein, 123 aa, Psychrobacter sp. 273-4
MALSKDDVLNAIAEMSVMDIVELISAMEEKFGVTAAVAAAPAAAGPAAAAAEEKDEFDVVLASFGEKKVGVIKAVREATGLGLKEAKDLVESAPASIKEGVNKAEAEELKKKLEEAGATVELK

SEQ ID NO: 10272 - protein, 405 aa, Glycine max
MVLEATMICIDNSEWMRNGDYSPSRFQAQADAVNLICGAKTQSNPENTVGVLTMAGKGVRVLVTPTSDLGKILACMHGLDIGGEMNLAAGIQVAQLALKHRQNKKQQQRIIVFAGSPVKHEKKMLEMIGRKLKKNSVALDIVNFGEEDEGKTEKLEALLAAVNNNDTSHIVHVPSGPNALSDVLISTPIFTGDGEGGSGFAAAAATAAAGGVSGFEFGVDPNLDPELALALRVSMEEERARQEAAAKKAAEDAAKQEKGGEQQASSQDATMTEGASAAASEAENKTSDLMDDENALLQQALAMSMDDPTISHDVKDTDMSEASASDPDLALALQLSIADSAKDQSSQSDMSKLLADQSFVSSILASLPGVDPNDPSVKDLLASMQNQSEPQQKNDDKPSNEEEKK

SEQ ID NO: 10273 - protein, 225 aa, Glycine max
MTRKIMGTLTSNINLSPQYNVPKDYPPHGSVVEEIQGLIRVHKHGYVERPQVVPCVTASSKMSPELNVTSRDMAIDSATNTWARFYVPISQHKKMPFLVYFHGGGFCVGSAAWSCYHDFLARLSAKVECVIMSVNYRLAPENPLPAPYDDGLKAIMWVKQQMLHQQHNKGGSEWWTSKCNFSSVFLGGDSAGANIAYNVATRLCACDGAALRPLNLKGLILIQPF

SEQ ID NO: 10274 - protein, 117 aa, Brassica napus
MEGVGGRLGRSSTRYGGPATVFTGPVRKWKKKWVHVSPSTKKLNHSSSSSAASDAANGSHLLFFKWAPLSQTGNGNEDGKSESLSPSEDTVAVAAEDPPRRRFKYVPIALLEEQKNE

SEQ ID NO: 10275 - protein, 346 aa, Rosa gigantea
QKWSNGEHSNELLHAQAHIWNHIFSFINSMSLKSAIQLGIPDIINKHGYPMTLFELTSALPIHPTKSHSVYRLMRILVHSGFFAKKKLSKTDEEGYTLTDASQLLLKDHPLSLTPYLTAMLDPVLTNPWNYLSTWFQNDDPTPFDTAHGMTFWDYGNHQPSIAHLFNDAMASDARLVTSVIIDDCKGVFEGLESLVDVGGGTGTMAKAIADAFPHIECTVLDLPHVVADLQGSKNLKYTRGDMFEAVPPADTVLLKWILHDWNDQECIKILKRSRVAITSKDKKGKVIIIDMMMENQKGDEESIETQLFFDMLMMALVGGKERNEKEWAKLFTDAGFSDYKITPIL

SEQ ID NO: 10276 - protein, 313 aa, Oryza sativa (japonica cultivar-group)
MERRPELRRTMTLSEQLSAPDQAIRDFLKIPHDGLGGGDGEGGRIPAAAGASGGGGGVGGMINWKPLRDRLRLRRAASAWMSASPKPAASNSGGGGGGGATLSSSNSGSNHSNKYNYSPGEAAAAFSRTFSRTRSLRPTPTFSRATSTRLGATAFSSGSRRAAVDGGGHANEDDDEDHTDDDDDDDEEEQGKDDAPAAQMSLMALLEQSDSQWDSEDEDDQGHGGGGGGGGNGGGGGGGGARKNGDGDDDEDDGEGREEEMVHVCCVCMVRHKGAAFIPCGHTFCRLCSRELWVSRGNCPLCNGFIQEILDIF

SEQ ID NO: 10277 - protein, 285 aa, Xylella fastidiosa 9a5c
MTTNDSWFTEHFQATGSAIGFRITGKLDEVQSPFQKIEIYNSTDWGKLMVIDGALMLTSRDNFLYHEMISHPALFTHTAPKCVVIIGGGDCGTLREVLKHPDIEQVTQCDIDEQVTRMAEKHFPELCTSNNDPRATLLFSDGVAYMTDCPTNSVDVIIVDSTDPVGPAKGLFNRTFYESCFRALKNDGLLVQQSESPLALLELIKEMRHEMSKAGFKAFKTLPFPQPCYPTGWWSVTLSSKQPNANFAFRQTDAQTKPFDTLYYNAHLHHGVLVPPPFIAHALGE

SEQ ID NO: 10278 - protein, 359 aa, Pirellula sp.
MNSSIVLLPGDGIGPEIVEQARLVLVKVAERFGHTFDFSSHQIGGIAIDETGDPLPQPTIDACRNAAAILLGAVGGPKWDDPSAKTRPEAGLLKIRKELGLFANLRPIKLFDELADASPLRADIVKGTDILFFRELTGGIYFGESGTSGSGEEETAFQSMTYSVGEVKRIVRMAAQAARGRSNRLTSVDKANVLEPSRLWRRVAAEVMANEFPDVQYDVVLVDSMAMHLINRPSEFDVVVTGNMFGDILTDEASMLPGSLGMLPSASLGDGGPGLYEPIHGSAPDIAGKSVANPLATILAAAMMLRHSLGLTDEAEAIEKAVAGVITDGLRTPDLARGDQSKSVSTEEMGAAVVAKLAS

SEQ ID NO: 10279 - protein, 346 aa, Rosa gigantea
QKWSNGEHSNELLHAQAHIWNHIFSFINSMSLKSAIQLGIPDIINKHGYPMTLSELTSALPIHPTKSHSVYRLMRILVHSGFFAKKKLSKTDEEGYTLTNASQLLLKDHPLSLTPFLTAMLDPVLTKPWNYLSTWFQNDDPTPFDTAHGMTFWDYGNHQPSIAHFFNDAMASDARLVTSVIIDDCKGVFEGLESLVDVGGGTGTVAKAIADAFPHIECTVLDLPHVVADLQGSKNLKYTGGDMFEAIPPANTVLLKWILHDWNDEECVKILKRSRKAITSKDKKGKVIILDMMMENQKRDEESIETQLFFDMLMMALVTGKERNEKEWAKLFTDAGFSDYKITPIL

SEQ ID NO: 10280 - protein, 346 aa, Rosa gigantea
QKWSNGEHSNELLHAQAHIWNHIFSFINSMSLKSAIQLGILDVINKHGYLMTLSELTSALPIHPTKSHSVYRLMRILVHSGFFAKKKLSKTDEEGYTLTNASQLLLKDHPLSLTPFLTAMLDPVLTKPWNYLSTWFQNDDPTPFDTAHGMTFWDYGNHQPSIAHFFNDAMASDARLVTSVIIDDCKGVFEGLESLVDVGGGTGTVAKAIADAFPHIECTVLDLPHVVADLQGSKNLKYTGGDMFEAIPPANTVLLKWILHDWNDEECVKILKQSREAITSKDKKGKVIIIDMMMENQKGDEESIETQLFFDMLMMALVTGKERNEKEWAKLFTDAGFSDYKITPIL

SEQ ID NO: 10281 - protein, 169 aa, Triticum aestivum
MAPTVMASSATAVAPFQGLKSTATLPVARRSTTSFAKVSNGGRIRCMQVWPADGNKKFETLSYLPPLTEEQLLKQVDYLLRNNWVPCLEFSKEGFVYRENSTSPCYYDGRYWTMWKLPMFGCTDASQVYKELQEAIASYPDAYVRILGFDNIKQTQCVSFIAYKPAGSE

SEQ ID NO: 10282 - protein, 274 aa, Triticum aestivum
  misc_feature (260)..(260): Xaa can be any naturally occurring amino acid
HASADAWGVVGVITAFNFPCAVLGWNACIALVCGNCVVWKGAPTTPLITIAMTKIVASVFEKNNLPSAIFTAFCGGAEIGQAIALDTRIPLVSFTGSTKVGQMVQQQVSARFGKCLLELSGNNAIIVMDDADIPLAVRSVLFAAVGTAGQRCTTCRRLLLHESIYQTFLDQLVEVYKQVRIGDPMEKGTLLGPLHTTASKESFLKGIQNIRSQGGKILLGGSAIESEGNFVQPTIVEISPAAPVVKEGMVLVPVLYAMEXQTLEEAIEITNFCS

SEQ ID NO: 10283 - protein, 346 aa, Rosa gigantea
QKWSNGEHSNELLHAQAHIWNHIFSFINSMSLKSAIQLGIPDIINKYGYPMTLSELTSALPIHPTKSHSVYRLMRILVHSGFFAKKKLSKTDEEGYTLTDASQLLLKDHPLSLTPFLTAMLDPVLTKPWNYLSTWFQNDDPTPFDTAHGMAFWDYGNHQPSIAHLFNDAMASDARLVTSVIIDDCKGVFEGLESLVDVGGGTGTMAKAIADAFPHIECTVLDLPHVVADLQGSKNLKYTGGDMFEAVPLADTVLLKWILHDWNDEECVKILKQSREAITSKDKKGKVIIIDMMMENQKGDEESIETQLFFDMLMMALVTGKERNEKEWAKLFTDAGFSDYKITPIL

SEQ ID NO: 10284 - protein, 506 aa, Brucella suis 1330
MVMSTIVKPQPLTGLEVREFSMLIDGKWVGSDSGKSIERVAPGHGVTVSRYPAGNKADVERAVSAARKAFDDGRWSSTTASQRSLVLLKAADLIEARAEELAYLDAIEAGKPISQVRGEISGSVDIWRYAAALARDLHGESYNTLGDGTLGVVLREAIGVVSIITPWNFPFLIVGQKLPFALAAGCTAVVKPSELTSGSTLLLGEILAEAGVPDGVVNIVTGTGADVGQHMSTHPHVDMVSFTGSTGVGKLTMANAAQTLKKVSLELGGKNPQILFPDADMDAFIDAAVFGAWFNAGECCNAGSRLIVHRSVVDAIVGRVADLSKKVIVGDPLDASTQVGAIITPQHLTKVGAYVDQARKAGAAIAHGGEVLDLGLGQYMGPTILAGVKADMAVAREEVFGPVLSVLSFDTVEEAISIANAVDYGLSAGVWSRDFDTCMTIGRKVRAGTVWMNTFMDGTPELPFGGYRQSGLGRELGRHAVEDYTETKTLNMHIGARTGWWMPQAK

SEQ ID NO: 10285 - protein, 428 aa, Zea mays
  misc_feature (389)..(389): Xaa can be any naturally occurring amino acid
MESTLKGIRGSDAPCVLDLDDAATVAGGVEDTYGEDRATEEQLVTPWTVSVASGYNLLRDPRYNKGLAFTERERETHYLRGLLPPAIVSQELQERKIMNNIRQYQLPLQRYMALMDLQEGNERLFYKLLIDNVEELLPIVYTPTVGEACQKYGSIFSRPQGLYISLKEKGKILEVLKNWPERSIQVIVVTDGERILGLGDLGCQGMGIPVGKLSLYTALGGVRPSACLPITLDVGTNNEELLNDEFYIGLRQRRATGQEYTDFLQEFMSAVKQNYGEKVLIQFEDFANHNAFDLLARYGTTHLVFNDDIQGTASVVLAGLIAAQTLLGGSLADHTYLFLGAGEAGTGIAELIALEISRQTKAPIEECRKKIWLVDSKGLIVSTRKESLXHFKKPWAHEHKPLINLLDAVNAIKPTVLIGTFRKVQTFT

SEQ ID NO: 10286 - protein, 146 aa, Brassica napus
RPTRPPTRPPTRPPTRPVLTCRIFCNVRWDERSSAVTPDEEVFYLVALLRSALSDGEETQKLEYLKDQNRRILEFCEQAKINVKQYLPHHATQEEWVDHYGDRWDQFRSMKTEFDPRHILATGQKIFQNPSLALFPPSPSSSSASW

SEQ ID NO: 10287 - protein, 448 aa, Burkholderia cepacia R1808
MSTPATDDWVARSLRAVWHPCTQMKHHERLPLVPVARGAGVWLYDRDGRRYFDAISSWWVNLFGHANPHINAALKDQLDTLEHAMLAGCTHEPAIELAERLHALTARTLGHAFFASDGASAVEIALKMSFHAWRNRGQGDKREFVCVANSYHGETIGALGVTDVALFKDAYDPLIRNAHVVASPDARGAQPGETAADVAQRALGDVRRLFAERAGQIAALLVEPLVQCAAGMAMHDPSYVRGLRALCDEFGVHLIADEIAVGCGRTGTFFACEQAGVWPDFLCLSKGISGGYLPLSLVLTRDDVYAAFYDDDTTRGFLHSHSYTGNPLACRAAVATLELFARDDVLAANARKSAALRAALAPLDAHPQVRHLRERGTLFAFDVALDGDAARGFSRRFFERALERELLLRPIGTTVYLMPPYVMTDDDIAWLAQRTRDTLDATLAEAAR

SEQ ID NO: 10288 - protein, 456 aa, Rhodococcus opacus
MVVDVTELRARARRHLGPHFTRKDTWESDFPVFVRGEGSYLIDTEGDRFLDGLAGLFCVNIGHGRDDIAKAASEQIGTLAYASNWGSAHIPAIEASALIADLAPGDLGTTFFVNSGSEAVETAVKFARQYHRSQGNPQRTKIISREMAYHGTTLGALSVTQLPKIKDPFGPLLPGVRSVPNTLGYLGDCGPANELDCIAAIEAVIEEEGAETIAAVFAEPVQNGRGALVPPDGYWAALRALCDKHGILLVSDEVICSFGRLGHWFGHGLTGVVPDMITFAKGSTSGYAPLGGLIVREQLVRELYDSPKGGVFTHGATWGGHPVSTAVAVANITAMRDENVLGNVSARGPKLRSALDSLMSSHRCVKDVRGTGFFYAIELMADSDSGREFTEQESLTVLRKVLPEAFARTKVILRGDDRGATMLMISPPLVADDEVLSELLHGIDSMLTDIEKAIQP

SEQ ID NO: 10289 - protein, 486 aa, Comamonas sp. JS765
MLAKQILNFINGEFVATGKWFDNRTPISNAVIGQVAEAGQAEVDAAVAAARAALKGPWGSMTLAQRVELLEALVAEITRRFDEFLEAECADTGKPRSLASHIDIPRGAANFKVFADVVKNVPTEFFEMATPDGRGAINYGYRKPVGVVGVICPWNLPLLLMTWKVGPALACGNTVVVKPSEETPRTAALLGEVMNHVGIPKGVYNVVHGFGPGSAGEFVTSHPGIDAITFTGETRTGEVIMKAAAKGARPVSLEMGGKNAAIVFADCDFDAAIEGTLRSAFVNCGQVCLGTERVYVERPIFDKFVAALKQQVEGWKIGVPEGADTQLGPLISKEHQAKVLSYYQLAVQEGATVVTGGGVPDMPGELKDGCWVQPTIWTGLPETARVIKEEIFGPCCHIAPFDTEDEVLAKANDNEYGLATAIWTRDLSRAHRVAQRMEVGISWVNSWFLRDLRTPFGGSKQSGIGREGGVHSLEFYTELKNVCIKL

SEQ ID NO: 10290 - protein, 462 aa, Methanosarcina barkeri str. fusaro
MSGGIEIKNRHSASELETDLKKNSRKDLKINSEKNLEKNSENNLEKDSGQGLEKHQEKSGDEHTSLYQESLAVHRRFGGVLEVASKVSLQTIHDLSVAYTPGVAEPCRKIIKDPELVYLYTMKRNTIAVVTDGSAVLGLGNIGPYAALPVMEGKAIIFKEFAGIDAFPICLDTQETEEVIKAVKHLAPAFGGINLEDISAPRCFEIEGRLREELDVPVMHDDQHGTAIVVFAGLLNALKIVNKKLNELHIVISGMGAAGVAIFRFLVRAGANPARILVCDSKGLVYEGRKNGMNPVKEEVARLTNPEKLKGGLENAFPDADLFIGVSVGGIVNEEMVRSMAKDAIVMAMANPLPEIMPDAAKRAGARVVATGRSDFPNQLNNCLSFPGVFKGALSTCARKITPEMEMAASHALAEVVTLNELSEDRIIPDPLDRRVVPAVAKAVASASLESCVARKSHEDMA

SEQ ID NO: 10291 - protein, 432 aa, Burkholderia cepacia R18194
MPVAVAGDGIEIIDSTGKRYIDACGGAAVSCLGHSNQRVIDAIKRQAQQLAYAHTSFFTTDVAEELADRLVAAAPAGLEHVYFVSGGSEAVEAALKLARQYFVEKGEPQRRHFIARRQSYHGNTLGALAIGGNAWRREPFLPLLIEAHHVSPCFAYRDQQAGETDEAYAQRLADELEQKIVELGADNVAAFVAETVVGATAGAVPPVRTYLKKIRAVCDKYGVLLILDEIMSGMGRTGYLYACDEDGVAPDLLTIAKGLGAGYQPIGATLVSDRIYRTIVDGSGFFQHGHTYLGHATACAAALEVQRVIAEEKLLDNVKARGEQLRASLRDHYGAHPHIGDVRGRGLFVGVELVRDRDSKATFDPALKLHAAVKREAMQRGLMVYPMGGTIDGVHGDHILVAPPFICTAQQIDTIVERLSGAIGAALASAGA

SEQ ID NO: 10292 - protein, 202 aa, Glycine max
  misc_feature (146)..(146): Xaa can be any naturally occurring amino acid
  misc_feature (155)..(155): Xaa can be any naturally occurring amino acid
  misc_feature (174)..(174): Xaa can be any naturally occurring amino acid
MLTAGDYSNHGRPLQPETSLAELNLPRVLCVLSSMLEKLVARNEKLIDILSQELDGLNSGSVRLGNSLNTFHGVRAPSISIPKYLERIYKYTNCSPSCFVVGYVYIDRLTHRHPDSLVTSLNVHRLLVTSVMVASKMLDDEHYNNXIYAPSRGGXSNAELTKLELELLFLLDFXVMVSSRVFESYCFHLEKEIGCQWHGHED

SEQ ID NO: 10293 - protein, 278 aa, Oryza sativa (japonica cultivar-group)
HASDGRTQLASWARIAMDRGDHHHLQQQHQFLMPPPAPVVPPQLCMPAMMADEQYMDLGGGGAAAAPGRGGAGERKRRFTEEQIRSLESMFHAHHAKLEPREKAELARELGLQPRQVAIWFQNKRARWRSKQLEHDYAALRSKYDALHSRVESLKQEKLALTVQLHELRERLREREERSGNGGAATTAASSSSCNGSGSEEVDDDDDKRNAAAGCLDLEPPESCVLGGATCATPADVSVESDQCDDQLDYDEGLFPESFCATPELWEPWPLVEWNAVA

SEQ ID NO: 10294 - protein, 446 aa, Oryza sativa (japonica cultivar-group)
MVGGGALRRVGKYEVGRTIGEGTFAKVKFAQNTESGESVAMKVVDRSSILKHKMADQIKREISIMKLVRHPNVVRLHEVLASRKKIFIILEFITGGELFDKIIRHGRLNEADARRYFQQLIDGVDFCHSKGVYHRDLKPENLLLDSQGNLKISDFGLSAWPAQGGALLRTTCGTPNYVAPEVLSHKGYDGALADTWSCGVILYVLLAGYLPFDEVDLTTLYGKIESAEYSFPAWFPNGAKSLIHRILDPNPDKRIRIEEIRNDEWFKKNYEPTREIESEEVNLDDVNAAFDDPEEDADHTLDDEAGPLTLNAFDLIILSQGLNLAALFDRRQDYDKLQNRFLSRKPAKVIMSSMEVVAQSMGYKTHIRNYKMRVEGLNANKTSHLAVMLEIFEVAPSIFMIELQRAAGDTSDYNKFINNYCSKLDDIIWNFPIEKSKSRISRLSKR

SEQ ID NO: 10295 - protein, 343 aa, Bradyrhizobium japonicum USDA 110
MRAVVIHAPKDLRIDSYPDPAPGPGEVRVKIANGGICGSDLHYYHHGGFGVVRIQQPMALGHEIAGVVAAVGDGVTSVKPGTRVAVNPSKPCGKCLHCQEGMRNQCLDMRFLGSAMRFPHVQGGFREFLTIDATQAVPIADELSLAEAAVAEPLAVCLHAGKQAGPLLGKRVLITGCGPIGALMILVSRFGGASEIVVTDVADAPLAVARKLGATHAINVATHATALDPWRAGKGVFDTLFEASGNQAALRTALDVLRPGATLVQLGLGGEMTLPINSIVAKELQLRGTFRFDPEFELAVRLMGEGLIDVKPLITATMPFENAVAAFELASDRSQSMKVQLSF

SEQ ID NO: 10296 - protein, 420 aa, Zea mays
  misc_feature (80)..(81): Xaa can be any naturally occurring amino acid
  misc_feature (142)..(142): Xaa can be any naturally occurring amino acid
INTGRVTFLRSIGLREYSRYLTFNHPCSHEKPLLSHLRFFPWVVNEVYFKVWRQGRTGYPLVDAGMRELWATGWVHDRIXXVVVSSFFVKVLQLPWRWGMKYFWDTLLDADLESDALGWQYISGSLPDGRELDRIDNPQFEXRVDPRVRYKFDPHGEYVRRWLPELARLPTEWIHHPWDAPESVLQAAGVELGSNYPRPIVELDAANSRLQDALSEMWELEAASRAAMENGMEEGLGDSTDEPPIDFPQELRMEVDRQPVQPAIHAPGVTGRRREDQMVPSMTSSFIRAETELTADFGHTSEDSRPEVPSNIHHLQARPEREETVDGGTGNAVRVHGNHHQQNLQNNMHRVLGIAPSISEASSSWTGRDGGVVPVWSPPAASGHSDSYAADEADISSRGYLDRHPQSHTMMNWSQLSQSL

SEQ ID NO: 10297 - protein, 268 aa, Zea mays
  misc_feature (224)..(224): Xaa can be any naturally occurring amino acid
MEAEAAAKRAREGGEDATAPVAGAEAAVAGAGEQAGISAVIPGWFSEISPMWPGEAHSLKVEKVLFQGKSDYQNVMVFQSSTYGKVLVLDGVIQVTERDECAYQEMITHLPLCSIKDPKKVLVIGGGDGGVLREVSRHISVEQIDICEIDKMVVDVSKQFFPHLAVGFEDPRVSLHIGDGVAFLKNAPEGTYDAVIVDSSDPIGPAQELFEKPFFQSVARALRXPGGVVCTQAESIWLHMHIIEDIFVNCRQVFKGSVNYAWTTVPTY

SEQ ID NO: 10298 - protein, 364 aa, Arabidopsis thaliana
MGKGGMSQGEGSKVEEENMAAWLVGINTLKIQPFLLPSVGPHDVRVRMKAVGICGSDVHYLKTMICADFVVKEPMVIGHECAGIIEEVGEEVKHLVVGDRVALEPGISCWRCNLCREGRYNLCPEMKFFATPPVHGSLANQVVHPADLCFKLPENVSLEEGAMCEPLSVGVHACRRAEVGPETNVLVMGAGPIGLVTMLAARAFSVPRIVIVDVDENRLAVAKQLGADEIVQVTTNLEDVGSEVEQIQKAMGSNIDVTFDCAGFNKTMSTALAATRCGGKVCLVGMGHGIMTVPLTPAAAREVDVVGVFRYKNTWPLCLEFLTSGKIDVKPLITHRFGFSQKEVEDAFETSARGSNAIKVMFNL

SEQ ID NO: 10299 - protein, 468 aa, Sulfolobus tokodaii str. 7
MSEVIEIKSPSNLKVIGTVKRMSKDEVRGEIEEAYKGFETISRMPLYKRTAILRKVSEILEREQERLARLLAMEAGKPIKDSRVEVMRASRLFRQAAEEAAIVLEGKNYRVDAYEYPPGNENRIVISTREPIGVVTAILPFNFPINSFAHKVAPAIAVGNSVVVKPSISTPLSAIEMKKILVEAGLPDSAVRIVTGYSNEIGDELITHPLVGLITLTGSTQTGLAIASKAVSLGKRIIMELGGSDPIIVLEDANIDRASSIAVRARYEYAGQNCNAGKRIIVREEIYDKFVKAFKEKVKALKVGDPLDESTDIGPVINQESVEKLNKALEDAQSKGGNVEVLNKGPETGYFFPLSLVTNPSLDMLVLKTEIFGPIAPIVSVKSDEEAINIANSTEYGLQSAIFSNDVNRALKIAKELKFGAIIINDSTRLRWDSLPFGGFKKTGIGREGVRDTMLEMTENKLIAITLL

SEQ ID NO: 10300 - protein, 238 aa, Glycine max
  misc_feature (129)..(129): Xaa can be any naturally occurring amino acid
  misc_feature (230)..(230): Xaa can be any naturally occurring amino acid
WTRAKSLTPLIAPPSSYCFHYYFLVSRGGSGALGAGLSKFSTAAAIEEPIKPPLKVEHTQLLIDGKFVDAATGKTFPTLDPRTGDVISHVAEGDHEDVDRAVAAARKAFDRGPWPKMTAYERQRILLRXADLFEKHNDDLAALETWDNGKPYEQSAQIEIPMLVRLFRYYAGWADKIHGLTVPADGPYHVQTLHEPIGVAGQIIPWNFPLVMFAWKVGPALACGNTIVLXTAEQTPLS

SEQ ID NO: 10301 - protein, 223 aa, Arabidopsis thaliana
MAFAGTTQKCMACDKTVYLVDKLTADNRVYHKACFRCHHCKGTLKLSNYNSFEGVLYCRPHFDQNFKRTGSLEKSFEGKLPKTDQNVKSFVSGDFKFGIIYLKFDSYICTGTPKIGKPDRPLEGERPAGTKVSNMFGGTREKCVGCDKTVYPIEKVSVNGTLYHKSCFKCTHGGCTISPSNYIAHEGKLYCKHHHIQLIKEKGNLSQLEGGGENAAKDKVVAA

SEQ ID NO: 10302 - protein, 168 aa, Zea mays
VDEVLTCSGASTLQTDLIQFKPQLPFWKIAAIYSFDMGVYTKIFLKFPERFWPVGEGKQFFMYASSRRGYYALWQSFEREYPGANVLLATVTDDESRRIERQSDDQTKAEVAEVLRDMFPAADVPGPDQIDVYVPRWWSDRFFKGSYSNWPVGVSRYEYDQLRVRMPV

SEQ ID NO: 10303 - protein, 483 aa, Rubrobacter xylanophilus DSM 9941
MRVLENFIGGEWVEARGERAREVVSPVTGERLAEAPEASAEEISRAARAAREAQPRWAALSAWERAEVCHAVADLLEERKEELARQLSLEQGKPYRSEAIPDIEETAENFRVAAEDVKRLETAVIPSQDANKRIFTFREPNGVYACITPWNFPTVIPSELIAPAIAAGNAVVAKPSEWTPISMANLVQTMADAGLPGGVVNLVYGAGEVGERLVTDPAVDCVAFVGSHQTAERIVRSAGLRRTLIEASGNGPVIVCADADLRRAAKGAVFGGFYCSGQVCCATERVLVDRSVHEDFLRAVVEEARSWKLGDPFEEDTLVGPMNNEPTAAKMDRHLEDAVGKGASVVLGGGREEGRPTSLYYRPTVLDNVGTDTLINRDETFGPIVPLIPVSGDEEALAVANDSHLGLQAAVYTSSLRRAFAYLRNLRVGNVVINDSTDYWEALEPFGGAAGTRTGWGRVGGRYSLLEMTDLKTVVLDFGSLEG

SEQ ID NO: 10304 - protein, 213 aa, Brassica napus
  misc_feature (186)..(186): Xaa can be any naturally occurring amino acid
MGKGGMSQGEGSKVEEENMAAWLVGLNTLKIQPFPLPTLGPHDVRVRMKAVGICGSDVHYLKTMRCADFIVKEPMVIGHECAGIIEEVGEGVKHLVVGDRVALEPGISCWRCNLCKEGRYNLCPEMKFFATPPVHGSLANQVVHPADLCFKLPENVSLEEGAMCEPLSVGVHACRRAEVGPETNVXLVMGAGPIGLVTMLAARCFWCAKKLGI

SEQ ID NO: 10305 - protein, 484 aa, Synechococcus sp. PCC 7002
MTFSFDSWFRGLSPRLSYPFRRQGRLLLLACMLPLLWQGVAIAQGSLGEIPPAVQVTLDTLWVVFAAMLVFFMNAGFAMLESGFCRAKNTVNILAKNLIVFALSSLAFWAIGFALMFGDGNAVLGWNGFFLTGADNSPLTGSAYSGIFSSLSWAGIPLYTKFFFQLAFAGTAATIVSGAVAERIKFASFVIFSLFLVGFSYGITGHWVWGGGWLATLGFYDFAGSTVVHSVGGWAALMGVILLGPRLEKFAGDRINAIPGHNMSTATLGGLILWLGWFGFNPGSTMAADPDAISHIIVTTNMAAAAGAIAATITSWIQFGKPDLSMIINGVLAGLVGITAACAYVNVPSAIVIGAIAGVIVVFSVLTFEGLRFDDPVGALSVHLVCGIWGTLAVGLFSVGGDIYPWYAADAGPSAGLLFGGGVAQLLSQFIGVVVVGMFTAGFSFAIWLVLELSMGLRVSKEEELEGLDIGEHGMEAYHRFFRE

SEQ ID NO: 10306 - protein, 329 aa, Triticum aestivum
  misc_feature (260)..(260): Xaa can be any naturally occurring amino acid
MDPMDIVGKSKEDVSLPKSTMTKIIKEMLPPDVRVARDTQDLLVECCVEFINLLSSESNDVCSRDDKKTIAPEHVIRALQDLGFKEYVEEVYAAYEQHKLETLDSPKATKFTGIEMTEEEAVAEQQRMFAEARARMNNGAAKPKEPALEPQNQPQQPPQPHLQLHPQAQQPPQPQPQLHHPQSQQPLHPQLQPYTQAPPQQPLHPQLQPYTQAPPQQPLQPPLQLYPQAQPEQPLQPQSSGSTTGTCVISTAAPSATGTXLLLQPPPQQSPQSQLQLHQQPQPMQVPLPPLPQPQPQPPELQQPQPLTQLQAEHGLNWTVSGSEHVASL

SEQ ID NO: 10307 - protein, 118 aa, Brassica napus
MTSASELFSTRRSRRGRSVPDLESDSFLYRYHSDHHHRRHGIHHLNHRHDSNGCDPPRRAPPRLRRFCLSERRPVHDVQGTSQYLNTNGADLETEGNSFGNLERLPGAVLLARERLFE

SEQ ID NO: 10308 - protein, 466 aa, Lactococcus lactis
MLYGKENRDEAEFLEPIFGSESEQVDLPKYKLAQQSIEPRVAYQLVQDEMLDEGNARLNLATFCQTYMEPEAVKLMSQTLEKNAIDKSEYPRTTEIENRCVNMIADLWNASEKGKIYGTSTIGSSEACMLGGMAMKFSWRKRAEKLGLDINAKKPNLVISSGYQVCWEKFCVYWDIEMREVPMDREHMSINLEKVMDYVDEYTIGVVGIMGITYTGRYDDIKALDNLIEEYNKQTDYKVYIHVDAASGGLYAPFVEPELEWDFRLKNVISINTSGHKYGLVYPGVGWVLWRDKKYLPEELIFKVSYLGGELPTMAINFSHSASQLIGQYYNFVRYGFDGYKAIHERTHKVAMYLAEEIEKTGMFEIMNDGAQLPIVCYKLKENSNRGWNLYDLADRLLMKGWQVPAYPLPKNLENEIIQRLVIRADFGMNMAFNYVQDMQEAIDALNKAHILFHQEPENKTYGFTH

SEQ ID NO: 10309 - protein, 330 aa, Gibberella zeae PH-1
MSADDSYAPKSPDLSSFYSNGPTQEEVHHPQTDSHFRPGYEYKAESPTYTRSASFSSYVPPSPHFDNTTRVSADSTFHHLEFDYQQRSAQPRTSRPEYQPYPSRHSSIPEHYIYSTPDQPRLSGHGYECDPTSSHSYPRQPQVRQASLGGQVYPEQASNHNATTYDPSYTPLTAAGGLERTSTFGAAQFDTNMPPRKAAPPAAPAIDPSPVRTKFPTARIKRIMQADEEVGKVAQQTPIAVGKALELFMIQLVTKSADVAKDKGSKRVTASMLKQVVETDEQWDFLRDIVSRVENEKEGSRSKAKQESSSDEEIEEPKKRTRGGRKKKAA

SEQ ID NO: 10310 - protein, 497 aa, Azotobacter vinelandii
MTTPTRNDWEERARSLIIEGRAFVDGQYLPAADGATFDCLSPIDGRLLAQVASCAAADADLAVAAARRSFESGRWSRLAPAKRKAVMIRLAELLEIHREELALLETLDMGKPIKYSLSIDVPAAARALRWSGEAIDKLYGEVAATPDDELGLVTREPVGVVAAIVPWNFPLLMACWKLGPALASGNSVVLKPSEKSPLTAIRLAQLAFEAGIPPGVLNVLPGYGHSVGRALALHMDVDCLVFTGSTRVAKQLMVYAGESNMKRIWLEAGGKSPNIVFADAPDLAAAAEAAASAIAFNQGEVCTAGSRLLVERSIKEAFLPLVLEALKTWQPGHPLDPATNVGALVDRQQLDTVLGYIEAGLGEGASLLAGGRRILEETGGTYVEPTVFDGVSNAMKIAREEIFGPVLSVIVFDTPEEAVQIANDTSYGLAAAIWTRDLSKAHRTARALRAGSVWINQYDGGDMTAPFGGFKQSGNGRDKSLHAFDKYTELKATWIKL

SEQ ID NO: 10311 - protein, 420 aa, Rubrivivax gelatinosus PM1
MAKQKRNAFYAQSGGVTAVINASACGVIETARRHKDRIGKVYAGRDGIIGALTEDLIDTGKESATAIAALRSTPSGAFGSCRYKLKSLEANRREYERLIEVFRAHDIGYFFYNGGGDSADTCFKVSQLSEAMGYPVQAIHVPKTIDNDLAFTDCCPGFGSVAKYVAVSTLEASFDVRSMAKTSTKVFVVEVMGRHAGWIAAAAGLVEEQGIPVVILFPEIVFDEPEFLARVDQLVRQHGYCTVVVSEGCHHADGSFLAEQGARDAFGHAQLGGAAPVVANLIKQALGHKFHWAVADYLQRSARHIASKTDVTQAYALGRKAVELALQGHNAVMPTIERLSDAPYKYRIGMAPLAKVANVEKFMPRDFISKDGFGITEKCRRYLRPLIQGEDYPRFTNGLPRYVSLKNVAVPKKLAAFDLK

SEQ ID NO: 10312 - protein, 585 aa, Triticum aestivum
MCGILAVLGCADDTQGKRVRVLELSRRLKHRGPDWSGMHQVGDCYLSHQRLAIIDPASGDQPLYNEDKSIVVTVNGEIYNHEQLRAQLSSHTFRTGSDCEVIAHLYEEHGENFIDMLDGVFSFVLLDTRDNSFIAARDAIGVTPLYIGWGIDGSVWISSEVKGLNDDCEHFEIFPPGHLYSSKQGGFKRWYNPPWFSEVIPSVPYDPLALRKAFEKAVVKRLMTDVPFGVLLSGGLDSSLVAAVTVRHLAGTKAAKRWGTKLHSFCVGLEGSPDLKAAKEVANYLGTMHHEFTFTVQDGIDAIEDVIYHTETYDVTTIRASTPMFLMSRKIKSLGVKMVISGEGSDEIFGGYLYFHKAPNKEELHRETCQKIKALHQYDCLRANKATSAWGLEARVPFLDKEFINEAMSIDPEWKMIRPDLGRIEKWMLRKAFDDEEQPFLPKHILYRQKEQFSDGVGYSWIDGLKAHAESNVTDKMMSNAKFIYPHNTPTTKEAYCYRMIFERFFPQNSAILTVPGGPSVACSTAKAVEWDAQWSGNLDPSGRAALGVHLSAYEQEHLPATIMAGTSKKPRMIEVAAPGVAIES

SEQ ID NO: 10313 - protein, 336 aa, Acinetobacter sp. YAA
MNTLKFRVIDKIAETKESFSFVLKPLDGVLAEHSPGKYLPIKIRTEKGLLFRSYSLSSSASANEDFKITVKRERGGRGSNWLCDNVKVGDFIETLPPAGSFHPQNWDRDFVFFAGGSGITPVISIIKTALNRHKNRIKLFYANSSESSIIFHKELKDLCLQFPDRLDIQFWLDDEKGIPTSIAFEQYIDDALEVEYFLCGPAPFMGGVENFLIESKVPPGLITKESFAGSVSDDNGDTVESSAEKDVTVNFMLNGIKNSVMCSEDDFILNEIIKAGINVPSSCCAGNCGSCMCLLVSGDVILESNTVLDASDEEDGWILACRSKPRSKNIEISFDQ

SEQ ID NO: 10314 - protein, 486 aa, Azotobacter vinelandii
MKEIKHFINGEYVGSASGKLFDNVNPANGEVIARIHEAGEAEVDAAVKAARAALKGPWGKMSVAERTEILHRVAAGITARFDEFLEAECQDTGKPKSLASHIDIPRGAANFSVFADLVKNVPTEAFEMATPDGSGALNYGVRRPKGVIGVISPWNLPLLLMTWKVGPALACGNTVVVKPSEETPSTTALLGEVMNAAGVPAGVYNVVHGFGGNSAGAFLTAHPDVDGITFTGETGTGETIMRAAAKGVRQVSLELGGKNAGIVFADADLDKAIEGTLRSAFANCGQVCLGTERVYVQRPIFDAFVARLKAGAEALVIGEPNDPKANFGPLVSHKHREKVLSYYQKAKDEGATIVTGGGVPDMPQHLAGGAWVQPTIWTGLKDDSPVVTEEIFGPCCHIRPFDTEEEAIELANSLPYGLASAIWTENASRAHRVAGRIEAGIVWVNSWFLRDLRTAFGGAKQSGIGREGGVHSLEFYTELKNICVKL

SEQ ID NO: 10315 - protein, 434 aa, Desulfitobacterium hafniense DCB-2
MWWIKNAQVVDPAQGLSGVYDVLIGEGKVLQLKKGLTEAEVKGECGETGWQEIDAAGSYLFPGLIDVHTHLREPGREDKEDIASGSRAAVRGGFTTILAMPNTTPILDQKALVEYVVNQGKKVGLAKVHPIAAITKGQAGKELVEMVELAAAGAAGFSDDGRGVQQGEMMRLALEYAKLTSCPVISHCEDESLAHKGVMHRGIVSTRLGLKGIPSSSESVMVARDILLAEESGGKLHLAHISAKESVALIREGKKRGVDVTAEVNPHHLLFTDEAVARTPYGTSYKVNPPLRREEDRQALIEGLLDGTLDMLATDHAPHTWEEKTNPFDQAPFGISGLETALAAVWQELVTTGILPIELLIKAWSMNPAQRFQLPGGTLKVGGPADLILFDPEHTELIDTEYLASKGKNTPFLGQRLQGFPVKVWVDGRLVHEI

SEQ ID NO: 10316 - protein, 159 aa, Escherichia coli
  misc_feature (2)..(2): Xaa can be any naturally occurring amino acid
  misc_feature (24)..(24): Xaa can be any naturally occurring amino acid
  misc_feature (88)..(88): Xaa can be any naturally occurring amino acid
  misc_feature (139)..(139): Xaa can be any naturally occurring amino acid
  misc_feature (157)..(157): Xaa can be any naturally occurring amino acid
AXKLISNDLRDGDKLPHRHVFNGXGYDGDNISPHLAWDDVPAGTKSFVVTCYDPDAPTGSGWWHWVVVNLPADTRVLPQGFGSGLVAXPDGVLQTRTDFGKTGYDGAAPPKGETHRYIFTVHALDIERIDVDEGASGAXVGFNVHFHSLASASITAXFS

SEQ ID NO: 10317 - protein, 303 aa, Sulfolobus tokodaii str. 7
MIDPKIKKLLESTIQLPIGKASVEEIRSLFKQFSSLTPREEVGKIEDITIPGSETNIKARVYYPKTQGPYGVLVYYHGGGFVLGDIESYDPLCRAITNSCQCVTISVDYRLAPENKFPAAVVDSFDALKWVYNNSEKFNGKYGIAVGGDSAGGNLAAVTAILSKKENIKLKYQVLIYPAVSFDLITKSLYDNGEGFFLTREHIDWFGQQYLRSFADLLDFRFSPILADLNDLPPALIITAEHDPLRDQGEAYANKLLQSGVQVTSVRFNNVIHGFVSFFPFIEQGRDAIGLIGYVLRKVFYGK

SEQ ID NO: 10318 - protein, 321 aa, Oryza sativa (japonica cultivar-group)
MSDGGAGAKGAGFGMPRVGMGTAVQGPRPEPIRRAVLKAIEAGYRHFDTAAHYETEAPIGEAAAEAVRSGAIASRADLFITSKLWCSDAHRDRVLPALRQTLWNLQMEYVDLYLVHWPVSMKPGRYKAPFTADDFVPFDMRAVWEAMEECHRLGLAKAIGVCNFSCKKLDTLLSFATIPPAVNQVEVNPVWQQRKLRELCREKGVQICAYSPLGASGTHWGSDSVMASAVLRDIAQSKGKTVAQARHVCLRWVYEQGDCLIVKSFDEARMRENLDIVGWELTEEERQRIAGIPQRKINRALRFVSDHGPYKSLDDLWDGEI

SEQ ID NO: 10319 - protein, 341 aa, Mycobacterium vanbaalenii
MEAIVLNGTNDVGLTSVPDPAPQDGEVIIEVAATGLCGTDLHEYVAGPTFSQPPVVLGHEVSGRIVEVGAGVDQSRIGQGAAVIPMDFCGSCHYCHRSLYHLCQRPGWIGFTRNGGLANYVAVPSRLAVRVPDVVDLEEAALTEPTAVAFHAVRRAELLLGETVMVLGAGALGLTVIQCARAAGAARIFVTEPSGVRASLARDLGATLVLDPHDPGTTACILEETRGVGVDVVFHVAGSAEAFTQGLDCLRKQGRFMEMSSWAGAASLDVNRHLLKEIQLRMVFGYDMFDDFPAVLALIADGKLALAPQITARVPLDRAVKEGLGGLLEGREGLVKVLVKP

SEQ ID NO: 10320 - protein, 350 aa, Thermoanaerobacter tengcongensis MB4
MSIMDGLMTAVVKQYHKEGADIVKKEIPKIGPDEVLIKVKATSICGTDVHIYVWNEWAKSRIKPPKTMGHEFVGEVVEIGENVTSVKVGDLVSAETHIVCGKCRACRTGNAHICENTLILGVDTDGAFAEYIKVPESNVWINDKNIPLEILSIQEPLGNAVHTVFSGDVVGKSVAVIGCGPIGMMAIPLLKRTGAAAIFAIEPADYRRELAHKLGATRVINPLREDVVSIIKSETEGYGADVVLDFSGNPTAIRQGLEYIAKGGRMSILGLPDNEVPIDITNNVVFKGITIQGITGRRMYDTWYTVKGLLKSGLAEDLKPIITHTFPLTEYQKGMELMIKGQCGKVVLYP

SEQ ID NO: 10321 - protein, 166 aa, Escherichia coli
  misc_feature (146)..(146): Xaa can be any naturally occurring amino acid
AEFQVTSNEIKTGEQLTTSHVFSGFGCEGGNTSPSLTWSGVPEGTKSFAVTVYDPDAPTGSGWWHWTVVNIPATVTYLPVDAGRRDGTKLPTGAVQGRNDFGYAGFGGACPPKGDKPHHYQFKVWALKTEKIPVDSNSSGALVGYXLNANKIATAEITPVYEIKLE

SEQ ID NO: 10322 - protein, 416 aa, Arabidopsis thaliana
MAKMRPSVSLDTWREYFRRGDSDIFGIIDHAIMVAAADWPKEFKSRSDRIAELLFSCKVSRCIGCDHLELSIAGDEAAVEIVGVGGGGDRGDSGVATGEGEEASVSVDEVMRIRDILSNKDDEKDSVLLESLRKLESMSMSVDILKDTEIGKAVNGLRRHSSDKISKLAKTLFAEWKRLVDQWMNTPEEMAGTEGTPESLNLSVIDEEEAFPSPPHDLDIYAPEPNGFELSQTKCYPDKFPPSSLFHNVLGHLKILDCLDCDGNPRHSVESKHERKSQSSAGRRPKGTNDANVVGRYCNDQQTRREEADVRPMKHSATDVVEPKRQTKQSREQMVSAIQRKPTAVTEQKRKLAGPQQDKLKALDPDSKFEFAKRKLQESYHQHENAKRQRTIQVLETIPKQNKVQKPQLKRPATRR

SEQ ID NO: 10323 - protein, 479 aa, Escherichia coli CFT073
MSVPVQHPMYIDGQFVTWRGDAWIDVVNPATEAVISRIPDGQAEDARKAIDAAERAQPEWEALPAIERASWLRKISAGIRERATEISALIVEEGGKIQQLAEVEVAFTADYIDYMAEWARRYEGEIIQSDRPGENILLFKRALGVTTGILPWNFPFFLIARKMAPALLTGNTIVIKPSEFTPNNAIAFAKIVDEIGLPRGVFNLVLGRGETVGQELAGNPKVAMVSMTGSVSAGEKIMATAAKNITKVCLELGGKAPAIVMDDADLELAVKAIVDSRVINSGQVCNCAERVYVQKSIYDQFVNRLGEAMQAVQFGNPAERNDIAMGPLINAAALERVEQKVARAVEEGARVALGGKAVEGKGYYYPPTLLLDVRQEMSIMHEETFGPVLPVVAFDTLEEAISMANDSDYGLTSSIYTQNLNVAMKAIKGLKFGETYINRENFEAMQGFHAGWRKSGIGGADGKHGLHEYLQTQVVYLQS

SEQ ID NO: 10324 - protein, 482 aa, Burkholderia cepacia R18194
MRHYIDGAFVETARTFADTSPVDGREIARVCEADEASVDAAVRAARAAQAAGWRDTTPAQRADWLHRIADGIQARFDDFVAAEVADTGRPLAQARTLDIARGIANFRTFADLVRTAGDDCFESQTADGAQYLNYVTRKPLGVVGIISPWNLPLLLFTWKVAPALAMGNCVVAKPSEETPGSATLLAEVIDAVGLPRGVFNLVHGHGPAAAGEFLTRHPGIDAITFTGESRTGSAIMKAVADGVKDISFELGGKNAAVVFADADFDAAVDGIVKSSFTNAGQVCLCSERVYVERPIFERFVAALKTRTEALQVGAPDDPATTMGPLISRGHRDKVLSYFRLAVDEGATVVTGGGVPAFGDARDDGAFVQPTIWTGLPDTARCVTEEIFGPVCHVAPFDSEDEVIRRVNDSAYGLAASVWTTHLARGHRVAKRIETGIVWLNAWFVRDLRTPFGGTKLSGIGREGGRHSLDFYSETTNVCVRVA

SEQ ID NO: 10325 - protein, 253 aa, Triticum aestivum
  misc_feature (63)..(63): Xaa can be any naturally occurring amino acid
  misc_feature (81)..(81): Xaa can be any naturally occurring amino acid
  misc_feature (213)..(213): Xaa can be any naturally occurring amino acid
  misc_feature (243)..(243): Xaa can be any naturally occurring amino acid
MKTLLIVTILAMATTIATANMQVDPGYQVQWPQQQPFPQPQQPFCQQPQQTIPQPHQTFHHQXPQQTYPHQPQQQFPQTQXQPQQPFPQPQQTFPQQPQLPFPQQPQQPFPQPQQPQQQFPQSQQPQQPFPQPQQQFLQPQQPQQSFPQQQQPLIQLSLQQQMNPCKNFLLQQCNPVSLVSSLISMILPRSDCQVMQQQCCQQTGTEIPQQLXRCAAPHKGRASIIMQQEQRQGVQIRGPLVXLVQGQGIIQP

SEQ ID NO: 10326 - protein, 475 aa, Triticum aestivum
  misc_feature (186)..(186): Xaa can be any naturally occurring amino acid
MGATGDSEVAAAEGAAAGCRARAALLGAYELGRTLGEGNFGKVKQARHRATGEHFAVKILDRGRVLSLRGADDQVRREIATLTMLAHPNVVRLHEVAASKTKIYMVLEFVNGGELFDRIAIKRKLSEREGRRLFQQLIDGVSYCHGKGVYHRDLKPENVLIDRKGNIKISDFGLSALPQHLGQVAXNDGLLHTTCGSPNYIAPEVLQNRGYDGSLSDIWSCGVILYIMLVGHLPFVDRNMVVLYQKIFKGDTQIPEWLSPGAQNLLRRILEPNPMKRINMAEIKLHEWFQKDYIPAAPYDDDDEDVRLGAILPIKQQISEAPGDKSTHQMNAFQLIGMASSLDLSGLFEEEGVSQRKIRFTSAHPPKDLFDKIEVSATQSGFHVQRAHSKLKITGNCNGPNNPTPFLVCAEVFVLGPSLHVVELRKSHGDTAVYKKLCDRISSDLGIDKTFGMGSLFDDNLPGFDSRATTPLVAL

SEQ ID NO: 10327 - protein, 147 aa, Aspergillus oryzae
MPLSPEQIQLIKATVPVLQQHGTTITTVFYNNMLTAHPELNAVFNNANKVNGHQPRALAGALFAYASHIDDLGALGPAVELICNKHASLYIQPEQYQIVGKFLLEAMGEVLGDALTPEILDAWATAYWQLADLMIGREAELYKQADG

SEQ ID NO: 10328 - protein, 297 aa, Actinobacillus actinomycetemcomitans
NRDHYRIFNDDMQGTGAIVMAAVFSGLKVTKQNFAEQRLVVYGAGTAGTGMADQISAAMQRDGLSREEAKKRVWLIDINGLVTDDMPNLPDYQQEYARPAAEAAAWAKTDGKIGLLEVVKQVKPTILIGTSTDHGAFTEDVVKALCAGVERPILLPLSNPTERIEVMPTDAVQWSDGKALISVGIPVPPVPYKGVNYQIGQANNAMLYPGLGLGVIVSGAKQVTDGMLLAAAEAVASQVNPQDEGASLLPPVDNLRASSATVAVAVAKQAVKDGVAANTSDNWVQAVQDAMWQPEYR

SEQ ID NO: 10329 - protein, 147 aa, Aspergillus niger
  misc_feature (29)..(29): Xaa can be any naturally occurring amino acid
MPLTPEQIKIIKATVPVLQEYGTKITTAXYMNMSTVHPELNAVFNTANQVKGHQARALAGALFAYASHIDDLGALGPAVELICNKHASLYIQADEYKIVGKYLLEAMKEVLGDACTDDILDAWGAAYWALADIMINREAALYKQSQG

SEQ ID NO: 10330 - protein, 412 aa, Aspergillus niger
  misc_feature (29)..(29): Xaa can be any naturally occurring amino acid
MPLTPEQIKIIKATVPVLQEYGTKITTAXYMNMSTVHPELNAVFNTANQVKGHQARALAGALFAYASHIDDLGALGPAVELICNKHASLYIQADEYKIVGKYLLEAMKEVLGDACTDDILDAWGAAYWALADIMINREAALYKQSQGWTNWRQFRISKKVPESDEITSFYLEPVDGKPLPAFRPGQYISVSVQVPEEDPQARQYSLSDTSRSDYYRISVKKETGLDPRAPGAKRHPGYVSNVLHDMIKEGDLIDVSHPYGDFFLSTAEATHPIVLLSAGVGMTPMMSILNTITKKSNRKIHFIHGSRTTEARAFKSHVQKLEKEIPNMQVTYFLSRPGDSDQLGVDYHHAGRIDLQKLDGPSHLYLDNPSTEYYICGPDTFMTQMEEALKAYGVGDDRIKMELFGTGGVPHN

SEQ ID NO: 10331 - protein, 105 aa, Arabidopsis thaliana
MDNTDRRRRRKQHKIALHDSEVSSIEWEFINMTEQEEDLIFRMYRLVGDRWDLIAGRVPGRQPEEIERYWIMRNSEGFADKRRQLHSSSHKHTKPHRPRFSIYPS

SEQ ID NO: 10332 - protein, 498 aa, Pirellula sp. 1
MSSISAFTTQELSGGPTGFRFAWLTMVLLVGMMGIGGSLASVASAQDEPAAATDTAEVADAGDADSEEPAADAGVGYAFDNGFLFLCAVLVLFMQAGFAMVEVGLNSSKNTVNILSKNLMDLSVGALLFFFVGFGLMYPGSYGDVTNGYFAFGGTGIYDSSPDQTFSPQVDWFFQAVFAATAATIVSGAVAGRMKFNAYLIYSAILTGLIYPISGFWKWGGGWLMQFGEQAADGSFAMGFQDFAGSAVVHAVGGFAGLAGAIFLGPRLGRYTAEGKSVPLPGHNVAFAALGVFILWVGWYGFNPGSQLAFQSSADIDATVFIAVNTTLAAAAGVIVATAVSWGLFGKPDLTMGLNGALGGLVGITACCDAMSNSMSIVVGAVAGALVVLSIVVLDKVKIDDPVGAFPVHGVCGVWGCMALGILPNAHLESESTNFMIQLIGTASICAWAFISMSVVFGVLKAVGMLRVSPQEEQAGLDISEHGMHAYPSDAVAGGSVI

SEQ ID NO: 10333 - protein, 268 aa, Glycine max
MSEALEEVVPSMKGGCEEEGLNLKATELRLGLPGCESPEREGVFKSVVVSGAKRGFSDAIDGNWNGGGSEKDAAALFSPTSRGAVSVSVSAAKSLTLTATDCTNQPTALGASVLKETVPHSPKPLHENKPQISAPAAKAQVVGWPPIRSFRKNSMASQPQKNDAAADAEAKSGCLYVKVSMEGAPYLRKVDLNSFTTYKDLSLALEKMFSCFTLKYVLTYEDKDGDWMLVGDVPWEMFTESCKRLRIMKSSEAIGLAPRAMEKCKSRY

SEQ ID NO: 10334 - protein, 505 aa, Zea mays
MASQAMVPLRQLFVDGEWRPPAQGRRLPVVNPTTEAHIGEIPAGTAEDVDAAVAAARAALKRNRGRDWARAPGAVRAKYLRAIAAKVIERKQELAKLEALDCGKPYDEAAWDMDDVAGCFEYFADQAEALDKRQNSPVSLPMETFKCHLRREPIGVVGLITPWNYPLLMATWKVAPALAAGCAAVLKPSELASVTCLELADICKEVGLPPGVLNIVTGLGPDAGAPLSAHPDVDKVAFTGSFETGKKIMAAAAPMVKPVTLELGGKSPIVVFDDVDIDKAVEWTLFGCFWTNGQICSATSRLLVHTKIAKKFNERMVAWAKNIKVSDPLEEGCRLGPVVSEGQYEKIKKFILNAKSEGATILTGGVRPAHLEKGFFIEPTIITDITTSMEIWREEVFGPVLCVKEFSTEDEAIELANDTQYGLAGAVISGDRERCQRLSEEIDAGIIWVNCSQPCFCQAPWGGNKRSGFGRELGEGGIDNYLSVKQVTEYISDEPWGWYRSPSKL

SEQ ID NO: 10335 - protein, 275 aa, Bacillus cereus ATCC 14579
MELWFTEKQTKHFGITARINRTLHTEQTEFQKLDMVETEEFGNMLILDGMVMTTEKDEFVYHEMVAHVPLFTHPNPENVLIVGGGDGGVIREVLKHPSVKKATLVEIDGKVIEYSKQYLPSIAGALDNERVEVKVGDGFLHIAESENEYDVIMVDSTEPVGPAVNLFTKGFYAGISKALKEDGIFVAQTDNPWFTPELITTVFKDVKEIFPITRLYTANIPTYPSGLWTFTIGSKKHDPLEVIEERFHEIETKYYTKELHNAAFALPKFVGDLIK

SEQ ID NO: 10336 - protein, 452 aa, Neurospora crassa
MSAANGRQPEVQPCRYKVGKTLGAGSYSVVKECVHIDTGRYYAAKVINKRLMAGREHMVRNEIAVLKKVSMGHQNILTLVDYFETMNNLYLVTDLALGGELFDRICRKGSYYESDAADLIRATLSAVAYLHDHGIVHRDLKPENLLFRTPEDNADLLIADFGLSRIMDEEQFHVLTTTCGTPGYMAPEIFKKTGHGKPVDIWALGVITYFLLCGYTPFDRDSDFEEMQAILNADYSFTPLEYWRGVSDNAKDFIRRCLTIDPAKRMTAHEALQHPFVAGWARGTDGAEADKGANLLPTVKKNFNARRTLHAAIDTVRAINKLREGQFMNGGRSREPAKKAAAALGPTLGKEASMVSTASSNVTKDSGYATQPEGEGGSRDGDDVLMKDASVPAPTSSSPAPCRVSYGRAVSRIRLSRLVKACGMGLVLSDDQFLGLSSLTNGGWFCSIVIIF

SEQ ID NO: 10337 - protein, 512 aa, Thermoplasma acidophilum
MKALVEDDLFSKIGLDDVNSGVYDGEWVKPSGKMLTVKSPIDGSEVAKISLATRADYDRLVSRAIEEFKKWRMIPAPKRGLIIREIGDELRKEKKNLGKIVTIEAGKTPSEGEGEIQEMIDISDLALGLSRQLYGLTIASERPYHRMYEQWVPLGPVAVITSFNFPASVWSWNAFIAAVDGDVVIWKPSSKAALTAVAVMKVIERVLKRNNAPNIFFLMVSSGSEGGDWITNDPRIPLVSFTGSVPVGKKISENVAKRLGKSILELGGNNGAIVSDKADIDLALRGVVFGALATAGQRCTTTRRVIVQEKIYDQFLEKLKNAYSTIKVGDPREKGVLVGPLIDEDAVKDYEHAIDLAIKQGGKLIFGGKRITIKGLEGGHYVMPTIIEAKPDMPIVKEETFASILYVMKYRTIEEAIEIHNSVPQGLSSSIFTTDLREEEAFLSPYGSDCGLANVNTSTAGAEIGGAFGGEKDTGGGRESGSDAWKYYMRRQTVTKNWGQTLPLAQDVVFEF

SEQ ID NO: 10338 - protein, 486 aa, Acinetobacter sp. YAA
MKDIKHYINGQYVGSASGKLFDNVNPANGKLISKVHEAGREEVDAAVNAAKAALRGPWGKMTLEERTSILHKVADGINARFDEFLKAECLDTGKPKSMASHIDIPRGAAHFKVFADMIKNVPTESFEMPTPDGTGALNYAVRRPKGVIGVISPWNLPLLLMTWKVGPALACANTVVVKPSEETPTTTALLGEVMKEAGIPTGVYNVVHGFGGDSAGAFLTEHPQVDGFTFTGETVPGEVIMKAAAKGIRDISLELGGKNAALVFADCDMDKAIEGTMRSAFANCGQVCLGTERVYVERSIFDEFVGRLKEAAEGLKIGPPDDAEANLGPLVSLKHREKVLSYYQKAVDDGATVVTGGGVPEMPEELAGGAWVQPTIWTGLPKDSAVITDEIFGPCVHVCPFDTEEEAIELANSLPYGLASAIWSENITRAHRVAGQIEAGIIWVNSWFLRDLRTPFGGSKQSGIGREGGVHSLEFYTEMKNICVKL

SEQ ID NO: 10339 - protein, 321 aa, Bacillus halodurans C-125
MDRQTIAQKFQERILGLLFYPYHSRILQTFTQKWRDRIDRDRSNALEPSTIPFVQREEKILPTSYGGTRVLIYRPDKTLNSSIPVYVNMHGGGFVMGNAEMDDVWCRVIADRANCVVVNIDYRLAPQHKFPTAVYECYEVVKWLVDHPEQFSITPQKVAIGGHSAGGNLATAVCLLNLERGNELPIIYQIIDYAPLDLHTDPALKPSFKDAIPVKMARLFNASYVETEEDARNPLASPLFAESLQGLPDALVITAERDSLAAEGEQYAERLKQAGVKVTYKDYKGMPHGFTHAGDLAVAEHAWHLMCDKLKEAFSESCGPM

SEQ ID NO: 10340 - protein, 485 aa, Burkholderia cepacia R1808
MAILIRGGTVVDAERTYRADVLCADPQDGGTILQIAEKIDAPAGADVVDAHDQYVMPGGIDPHTHMELPFMGTTASDDFYSGTAAGLAGGTTSIIDFVIPSPRQPLMDAFHQWRGWAEKAAADYGFHVAVTWWDESVHRDMGTLVNEHGVSSFKHFMAYKNAIMADDEILVNSFSRSLELGALPTVHAENGELVFRLQQALLARGMTGPEAHPLSRPPEVEGEAANRAIRIAQVLGVPVYIVHVSAKDAVDAIARARSEGLRVFGEVLPGHLVIDEAVYRDPDWTRAAAHVMSPPFRSAEHREALWRGLQAGQLHTTATDHCVFCASQKAMGRDDFTKIPNGCGGVEDRMSVLWHHGVNRGRITPNEFVRITSTNAAQIFNLHPRKGAVQVGADADLVVWDPAATKTISVKTHHQQVDFNVFEGMTVQGVATHTLTRGALAWADGDLRAQRGAGRYLKRPPAASYYEAARIANRLREPHPVERSR

SEQ ID NO: 10341 - protein, 112 aa, Arabidopsis thaliana
MSGVWVFNNGVIRLVENPNQSGGVSTQSHGRRNVLVYLPTGEAVSSYSSLEQILRSLGWERYFSGDSDLIQYHKRSSIDLISLPRDFSKFNSVYMYDIVVKNPNSFHVRDFN

SEQ ID NO: 10342 - protein, 335 aa, Xylella fastidiosa Temecula1
MTQTITVIRGDGIGPEIMDATLSVLNALQANLNYEFADAGLSALEKHGDLLPESTLNSISKNKIALKSPLTTPVGEGFSSINVALRRKFDLYANVRPAKSFPNTKSRFSDNVDLITVRENTEGAYLSEGQTISPDGEVATSSARVTRKGSERIVRYAFDLARTTGRKKVTAVHKANIIKSTSGLFLKTARDVASQYPEIDFQEMIVDNTCMQLVMRPEQFDIIVTTNLFGDILSDLCAGLVGGLGLAPGANIGNEQAIFEAVHGSAPDIAGQGKANPCALLLGAVQMLDHIGQPQNAERLRNAIVATLNAKDSLTPDLGGNGNTMGFAKAIASRL

SEQ ID NO: 10343 - protein, 259 aa, Zea mays
  misc_feature (247)..(247): Xaa can be any naturally occurring amino acid
MALSISAPTSSPFLPAPRQVGRWSSSPSSAKPAVFSLRRPVVVARAAAGNAPSSPAGAVVTEFDVVSSFSEIVPDTVVFDDFEKFAPTAATVSSSLLLGIAGLPDTKFKSAIDTALVDGECNTMEKPGDRMSCYLTKALGNVGAELAHQVPGRVSTEIDARLAYNTQGIVQRVHELLQIYNEHDIPSERLLFKIPATWQGIEASRLLESEGTQTHLTFVYSFAQAAAAAQAGASVVQIFGEVVFGDXAKNHSGEPEIDE

SEQ ID NO: 10344 - protein, 474 aa, Oryza sativa (japonica cultivar-group)
METTSQDSQVIMGRYKLGRLLGRGTFAKVYKAYKLATGEAVAIKVFDKEAVQRSGTVEQVKREVDVMRRVHHRHVIRLHEVMATRSRIYFVMEYASGGELFTRLSRSPRFPEPVARRYFQQLITAVEFCHSRGVYHRDLKPENLLLDARGDLKVTDFGLSALDGGLRGDGLLHTTCGTPAYVAPEVLLKRGYDGAKADIWSCGVILFVLLAGYLPFNETNLVILYRNITESNYRCPPWFSVEARKLLARLLDPNPKTRITISKIMDRPWFQQATCPLGDMSLVASAPSVLLARKEASQQHDDEEDDGFAREKKKRSNVIMSSPVIDVRPSSMNAFDIISRSRGLDLSKMFDAEERRSEARFSTRETTTAIVSKLEEIAEAGRFSFKLKEKGRVELEGSQDGRKGALAIEAEIFKVAPEVHVVEVRKTGGDSPDFRDFYKQELKPSLGDMVWAWQGGDSPPLVPAAGRRPITKRS

SEQ ID NO: 10345 - protein, 509 aa, Glycine max
  misc_feature (66)..(66): Xaa can be any naturally occurring amino acid
  misc_feature (128)..(128): Xaa can be any naturally occurring amino acid
  misc_feature (267)..(267): Xaa can be any naturally occurring amino acid
MGSDNHQNLEFLKEIGLGSSNIGSYINGQWKATGSSVTSVNPSNNQSIAQVTEATLQDFEEGLRAXSEAAKTWMTIPAPKRGEIVRQIGEALRAKLDPLGRLVSLEMGKILPEGIGEVQEIIDMCDYXLGLSRQLNGSIIPSERPDHMMFEVWNPLGIVGVISAFNFPCAVLGWNACIALVCGNCVVWKGAPTTPLITIAVTKLVAEVLERNKLPGAIFTSFCGGADIGQAIAKDTRIPLVSFTGSSKVGLMVQQTVNERFGKCLLXLSGNNAIIVMDDADIKLAVRSILFAAVGTTGQRCTTCRRLFLHESIYTDVLDQLVEVYKQVKIGNPLEKGTLVGPLHTRTSVENFQKGISVIKSQGGKILTGGSVLESGGNFVQPTIVEISPDAPVVKEELFGPVLYVMKFQTLEEAIALNNSVPQGLSSSIFTQRPGTIFKWIGPRGSDCGIVNANIPTNGAEIGGAFGGEKATGGGREAGSDSWKQYMRRSTCTINYGSELPLAQGINFG

SEQ ID NO: 10346 - protein, 511 aa, Streptomyces lavendulae
MKAMDRVDRAVERFPMYIDGQAVQAHDGAVLRTFEPATRRHLADLPSGGAEDVRRAVSAARRAFDEGPWPRMAPGERAGLLRKAAQRLREEAEPLAELEARDNGSTLRKALGADVPGAAAAFEWSAWWAEHVPERQPEAPGSGSYVVWRPVGVVAAIVPWNLPLLLAAWRIAPAIAAGNTCVIKPASFASLSTLRLVELLHECGLPPGVVNVVTGPGGVAGEQLVRSPGVDLVAFTGSDETGAAVREGAAAAGTSARLDLGGKSPNIVLADADLDRAVTGVTWGAFLHNGQVCMAGTRAVVHADVHDDFLRLLSERVGRLRVGDPLDPATDLGPLVSRNQARTARRFTELGLSQGAELVCGGRAPAADELPPGLDAGAYFLPTVLASVGADDAVAQEEIFGPVLAVVRAGSDDDAVRIANGSRYRLSAGVWSADPARARAVAERLRADRVWINDYRLVDLELPGTAGPRSAVWDRLTNELDAYRHKHVVHGGGAGAGGVPAPPTPYALLGG

SEQ ID NO: 10347 - protein, 507 aa, Candida tropicalis
MIEQVLHYWYYVLPAFIIFHWIVSAIHTNSLRRKLGAKPFTHTQLDGFYGFKFGRDFLKAKRIGRQVDLINSRFPDDIDTFSSYTFGNHVIFTRDPENIKALLATQFNDFSLGGRIKFFKPLLGYGIFTLDGEGWKHSRAMLRPQFAREQLPMSPSLEPHFNVKAYPQEQRWVFDIQELFFRFTVDSATEFLFGESVNSLKSASIGCDEETELEERKKFAEAFNKAQEYISTRVALQQLYWFVNNSEFKECNEIVHKFTNYYVQKALDATPEELEKQSGYVFLYELVKQTRDPNVLRDHHSISLLAGRDTTAGLLSFAVFELARNPHIWAKLREDVESQFGLGEESRIEEITFESLKRCEYLKAVMNETLRLHPSVPRNARFALKDTTLPRGGGPDGKDPILVRKMSCSIFISGTQIDPKHYGKDAKLFRPERWFESSTRNLGWAYLPFNGGPRICLGQQFALTEAGYILVRLAQSFDTLELKPDTEYLTKISHLTMCLFGAFVKMD

SEQ ID NO: 10348 - protein, 388 aa, Bacillus sp. KSM-K16
MEMFSKSVKKGVAVFALAAVTISLISIFFVQSWRYTEAGKVPPKTAVLLHAVNNRLLPEGKLEAPAFLAVKAPPTIERHQVTVPTRDGEDIPATVYQPIAAGPHPIIVYYHGGAFLEGYGDLDTHDNIIRSLAARTGAIVVAPAYRLAPTYAFPTAVNDSYDALTWAYEHADVLDGDRDRLAVAGDSAGGNLAAAVAIMSGEEGGPALSGQALLYPLATFEDTKFPSRDMYASGFYFLSRAVMEMAQQSYAPNEADWTSPYTSPLNAEDVSMMPSTLVITGEFDPLRDEGEALAKRLYNEGIYVQAQRFNGVMHGFISFYEVMERGDKGLQSAAAFLKEALNKELPEPQNSQPFAVEVIDGRDSWRDEAEAYVIGVYLLFKHMIQVFE

SEQ ID NO: 10349 - protein, 335 aa, Nicotiana tabacum
MVHEKQVIEEVSGWLRVFEDGSVDRTWTGPPEVKFMAEPVPPHDYFIDGVAVKDVVADEKSGSRLRIYLPERNDNSASKLPVILHFQGGGFCVSHADWFMYYTVYTRLARAAKAIIVSVFLPLAPEHRLPAACDAGFAALLWLRDLSRQQGHEPWLNDYADFNRVFLIGDSSGGNIVHQVAVKAGEENLSPMRLAGAIPIHPGFVRSYRSKSELEQEQTPFLTLDMVDKFLGLALPVGSNKDHQITCPMGEAAPAVEELKLPPYLYCVAEKDLIKDTEMEFYEAMKKGEKDVELFINNGVGHSFYLNKIAVRMDPVTGSETEKLYEAVAEFINKH

SEQ ID NO: 10350 - protein, 185 aa, Xanthomonas axonopodis pv. citri str. 306
MLLNRLLALVLTGFFATPAFAAGTPVLDVEYRPLAGKTPINLNRTYGGKVVMVVNTASKCGFTPQYEGLEALNHRFGSRGFTVLGFPSNDFQGQEPGSEKQIQEFCTLTYGVKFPMFEKVHVLGAEATPLYQRLTQATGVAPGWNFHKYLIGRDGRVVAQFPSKIKPDDPSVLAAIERELKAPAR

SEQ ID NO: 10351 - protein, 506 aa, Candida tropicalis
MSLTETTATFIYNYWYIIFHLYFYTTSKIIKYHHTTYLMIKFKASPPLNYINKGFFGIQATFTELKHLICHTSIDYAIDQFNNVPFPHVHTFVTKVLGNELIMTKDPENIKVLLRFPVFDKFDYGTRSSAVQPSLGMGIFTLEGENWKATRSVLRNMFDRKSIDKVHDFEPHFKTLQKRIDGKVGYFDIQQEFLKLGLELSIEFIFGQVVSEDVPHYDDFTQAWDRCQDYMMLRLLLGDFYWMANDWRYKQSNQIVQAFCDYLVQKSLENTCNDKFVFVHQLAKHTTNKTFIRDQALSLIMASRDTTAELMAFTILELSRKSHHLGKLREEIDANFGLESPDLLTFDSLRKFKYVQAILNETLRMYPGVPRNMKTAKCTTTLPKGGGPDGQDPILVKKGQSVGFISIATHLDPVLNFGSDAHVFRPDRWFDSSMKNLGCKYLPFNAGPRTCLGQQYTLIEASYLLVRLAQTYETVESHPDSVYPPRKKALINMCAADGVDVKFHRL

SEQ ID NO: 10352 - protein, 505 aa, Candida tropicalis
MYQLFCFLAGIIVVYKAAQYYKRRTLVTKFHCKPARISPNKSWLEYLGIASVVHADEMIRKGGLYSEIDGRFKSLDVSTFKSITLGKTTYVTKDIENIRHILSATEMNSWNLGARPIALRPFIGDGIFASEGQSWKHSRIMLRPVFAKEHVKQITSMEPYVQLLIKIIKNHEGEPLEFQTLAHLFTIDYSTDFLLGESCDSLKDFLGEESNSTLDTSLRLAFASQFNKTQQQMTIRFMLGKLAFLMYPKSFQYSIQMQKDFVDVYIDRVVGMSEEELNNHPKSYVLLYQLARQTKNRDILQDELMSILLAGRDTTASLLTFLFFELSHHPEVFNKLKEEIERHFPDVESVTFGTIQRCDYLQWCINETMRLHPSVPFNFRTAANDTVIPRGGGKSCTDPILVHKGEQVLFSFYSVNREEKYFGTNTDKFAPERWSESLRRTEFIPFSAGPRACLGQQLPRVEASYVTIRLLQTFHGLHNASKQYPPNRVVAATMRLTDGCNVCFI

SEQ ID NO: 10353 - protein, 100 aa, Glycine max
MSGVWVFKNGVVRLVENPGSERKVLVHTASNEIITSYAVLEHKLSSLGWERYYDDPDLLQFHKRSTVHLISLPRDFNKFRSMHMYDIVVKNKNYFEVRDM

SEQ ID NO: 10354 - protein, 109 aa, Glycine max
  misc_feature (10)..(11): Xaa can be any naturally occurring amino acid
  misc_feature (61)..(62): Xaa can be any naturally occurring amino acid
TLDSCGSTPXXTGDGEGGSGFAAGSVSGFEFGVDPNLDPELALALRVSMEEERARQEAAAXXAAEDAAKQEKDGEQQASPQDTTMTKGVSAAASEAETKNDSCTDYDEL

SEQ ID NO: 10355 - protein, 334 aa, Bordetella parapertussis 12822
MTTAALPYPLDPQIQRFVERMQADSAAHPRRDLVPVEQARAISEAVRRPWAEGGPQMARTREIHAPTPHGPVRLRVYTPRAARPGPAMLYVHGGGWVLFSLDTHDRLMREYAERAGLTVIGVDYTRAPEARYPRAIEEIVGVIDWLDANGAELEVDRARLCIGGDSAGANLSVAACLTLRERGAAPLAGMVLNYGVYDANLFRDSTVKYGGGEYLLSTQQMVWFYWNYLRAGDDPRDPRISPVHADLRGLPPAFMAITELDLLHDANQDMAARLREAGVDVQAKVYPGTVHSFLEAVSLAQVSVAAFDDTAAWLRAVLRPAAAAAAIHTGEHQP

SEQ ID NO: 10356 - protein, 141 aa, Brassica napus
MSGENDNGGAKRRGSVKWFAAEKGFGFITPEDGGEDLFVHQSSIRSEGYRSLAEGESVEFLVEVDNNSGRTKAIEVTGPDGAPVQGTSRGSSGGRGGFGGDGYGGRGGGRGSYGGRGGGGGCRGGGRDRYTCGGPRGIAGH

SEQ ID NO: 10357 - protein, 347 aa, Halobacterium sp. NRC-1
MRAAVYQGPGEIAVEEVPKPDIESPEDAVIRVTHTAVCGSDLWFYRGDSDREAGSRVGHEPMGIVEEVGDDVTSVAPGDRVIAPFAISCGECEFCRQGLYTSCVEDESWGSEANGGGQGEYVKCPFADGTLVRVPDRYADDEDVLESLLPLTDVMGTGHHAAVSAGVGEGDTAVVVGDGAVGLCGVLAAQRLGAERIIAMGHHEDRLELAAEFGATDTISARGDDAIERARDLTHGGANHVMECVGAASAMDSAIAIARPGGTVGYVGVPYGVEDGGLDVFTMFSDNITIRGGVAPVRAYAEELMADVLQGTLDPSPIFTKTVDLDGVPEGYAAMDDREAIKVLVKA

SEQ ID NO: 10358 - protein, 201 aa, Chlamydomonas reinhardtii
MLLTRKNVAVRPARAARRDVRAMSLLGNLFGGGSKPTSSTSNFHQLSALDIDKKNVDFKSLNNRVVLVVNVASKCGLTAANYKEFATLLGKYPATDLTIVAFPCNQFGGQEPGTNAEIKAFASARGFSGAGALLMDKVDVNGANASPVYNFLKVAAGDTSDIGWNFGKFLVRPDGTVFGRYAPTTGPLSLEKYIVELINSR

SEQ ID NO: 10359 - protein, 343 aa, Vibrio parahaemolyticus RIMD 2210633
MKIKALSKLKPEQGIWMTEVDKPEVGHNDILIKIKKTAICGTDVHIYNWDEWSQKTIPVPMVVGHEYVGEVVAIGQEVRGFEIGDRVSGEGHITCGHCRNCRGGRTHLCRNTIGVGVNREGAFAEYLVIPAFNAFKIPDEISDDLASIFDPFGNAVHTALSFDLVGEDVLITGAGPIGIMAAAVAKHVGARHVVITDVNEYRLELARKMGVTRAVNVAEEKLEDVMAELGMTEGFDVGLEMSGNPAAFNSMLTTMNHGGRIALLGIPPSDMGIDWNQVIFKGLVIKGIYGREMFETWYKMASLIQSGLDLSPIITHHYKIDDFQEGFDVMRSGMSGKVILDWE

SEQ ID NO: 10360 - protein, 124 aa, Hordeum vulgare subsp. vulgare
MASRRAHAAATMALLVVALVLSGAPAPAEGAVASCGQVVSYLAPCIGYAMGRERAPGGGCCTGVRSLNAAAATPADRQATCTCLKQQTSGMGGIKPDLVAGIPSKCGVNIPYAISPRTDCSKVR

SEQ ID NO: 10361 - protein, 122 aa, Glycine max
WINCVATFCFIVNHVDSRHSVVVPDSNIFYIIALLRFIPPPPKGPPTELLVEQNHEIIQLCYNRGFDFKLYLPHYQSQENWMRHYGDKWTRFVERKANFDPLAILAPGQKIFSRIPQTLSIT

SEQ ID NO: 10362 - protein, 343 aa, Agrobacterium tumefaciens str. C58
MKAIVAHGAKDVRIEDRPEEKPGPGEVRLRLARGGICGSDLHYYNHGGFGAVRLREPMVLGHEVSAVIEELGEGVEGLKIGGLVAVSPSRPCRTCRFCQEGLHNQCLNMRFYGSAMPFPHIQGAFREILVADALQCVPADGLSAGEAAMAEPLAVTLHATRRAGDLLGKRVLVTGCGPIGILSILAARRAGAAEIVATDLSDFTLGKAREAGADRVINSKDEPDALAAYGANKGTFDILYECSGAAVALAGGITALRPRGIIVQLGLGGDMSLPMMAITAKELDLRGSFRFHEEFATGVELMRKGLIDVKPFITQTVDLADAISAFEFASDRSRAMKVQIAFS

SEQ ID NO: 10363 - protein, 439 aa, Arabidopsis thaliana
MNRPKVQRRVGKYEVGKTLGQGTFAKVRCAVNTETGERVALKILDKEKVLKHKMAEQIRREICTMKLINHPNVVRLYEVLASKTKIYIVLEFGTGGELFDKIVHDGRLKEENARKYFQQLINAVDYCHSRGVYHRDLKPENLLLDAQGNLKVSDFGLSALSRQVRGDGLLHTACGTPNYAAPEVLNDQGYDGATADLWSCGVILFVLLAGYLPFEDSNLMTLYKKIIAGEYHCPPWLSPGAKNLIVRILDPNPMTRITIPEVLGDAWFKKNYKPAVFEEKEEANLDDVDAVFKDSEEHHVTEKKEEQPTSMNAFELISMSRALDLGNLFEEEEGFKRETRFAAKGAANDLVQKIEEASKPLGFDIQKKNYKMRLENVTAGRKGNLRVATEIFQVSPSLHMIEVRKTKGDTLEFHKFYKKLSTSLNDVVWKSGESSGLSK

SEQ ID NO: 10364 - protein, 115 aa, Zea mays
QPNGPATPVDMVVDYYKFDYEFAEPPRVTSLQNTRGYEAVVYYLAGQYLKTDDRSGKIVDPRLQLNKVVREIKYSPGGVTVKTEDNSVYSADYVMVSASLGVLQSDLIQFKPKLP

SEQ ID NO: 10365 - protein, 174 aa, Glycine max
  misc_feature (37)..(37): Xaa can be any naturally occurring amino acid
  misc_feature (86)..(86): Xaa can be any naturally occurring amino acid
  misc_feature (143)..(143): Xaa can be any naturally occurring amino acid
MVPSVISSPAETTVNRAGAGMADPLTALKSMDGCPTXNTLIDFTSFASNGGRAQNMQAWPPVDNKKYETLYYLPDLDPAQPAKDGXYLLRTGWTPRLELELEHGFWCREHNRPPEHYDGRYWTMWKLPIMTYTDAYHASKDLXEANTAYPNGFIRIIRFNTVRQVHHMNLIDYK

SEQ ID NO: 10366 - protein, 157 aa, Leuconostoc mesenteroides subsp. mesenteroides ATCC 8293
MSIYDYFATLENGETYSLNKLANHPVVIVNTATKCGYAPQFGELEKLYKKYKDKGLVILGFPSNQFKQELETASQAAQACQLTYGVTFPMHQLVAVNGKNTDPLFKYLKENSKGMLGSSTIKWNFTKFLVDKEGNVVKRYAPKTEPKDLEEDIEDVL

SEQ ID NO: 10367 - protein, 436 aa, Psychrobacter sp. 273-4
MTTVSTNDFDQQHLWHPYASLPPRYPNIMIDHADGIHIVTQDGTRLIDGMSSWWASVHGYNHPKLNAAIIEQLGKMAHVMFGGLTHQPAIDLGKKLLSIVPAGIDAIFYADSGSIAVEVALKMALQYQIAAKRPNKQQFASTHSGYYGDTWHAMSVCDPINGMHSLYGKQLPMQHFVAAPPMGFERDITQNERDELTAFFAKNSHQLAGFIIEPIIQGAGGMRFYSPEYLQLLRQLCCEHDVLLIADEIATGFGRSGKLFACEHANISPDIMTIGKALTGGYMTFAATLCTRSIADTISQSDYSALMHGPTFMGNPLACAVACASIDLILSYDIEARTENMHALMVEQLASAAKLEGVKEVRCLGAVAVIELDDAVDMPTFQSLLIEHGIWVRPFGKLVYIMPPYIITDSELITLCQALLKVVSIYLTQTSLSAKG

SEQ ID NO: 10368 - protein, 277 aa, Arabidopsis thaliana
MAETLKEDSIMIREVWDYNLVEEFALIREIVDKFSYIAMDTEFPGVVLKPVATFKYNNDLNYRTLKENVDLLKLIQVGLTFSDENGNLPTCGTDKFCIWQFNFREFNIGEDIYASESIELLRQCGIDFKKNIEKGIDVVRFGELMMSSGIVLNDAISWVTFHGGYDFGYLVKLLTCKELPLKQADFFKLLYVYFPTVYDIKHLMTFCNGLFGGLNRLAELMGVERVGICHQAGSDSLLTLGSFRKLKERYFPGSTEKYTGVLYGLGVEDGTTTTVAN

SEQ ID NO: 10369 - protein, 329 aa, Triticum aestivum
  misc_feature (250)..(250): Xaa can be any naturally occurring amino acid
MASPLSAPSLIMEEEGRFEAEVAEVGAWWNTERFRLTKRPYTVRDVVLLRGTLRQSYASGEMAKKLWRTLKAHQAAGTASRTFGALDPVQVTMMAKHLDTIYVSGWQCSSTHTSTNEPGPDLADYPYDTVPNKVEHLFFAQQYHDRKQQEARMSLPRAERTHAPFVDFLKPIIADGDTGFGGATATVKLCKLFVERGAAGVHLEDQSSVTKKCGHMAGKVLVAVSEHVNRLVAARLQFDIMGVENVLVAXTDAVAATLIQNNIDAREHQFILGATNPRLKNRSLTGMLSDAMSARKNGRSCRHRGRVDATAHSNLLEVVKTPSEPHATI

SEQ ID NO: 10370 - protein, 351 aa, Streptomyces lavendulae
MTVEQTPENPGTAARAAAEETVNDILQGAWKARAIHVAVELGVPELLQEGPRTATALAEATGAHEQTLRRLLRLLATVGVFDDLGHDDLFAQNALSAVLLPDPASPVATDARFQAAPWHWRAWEQLTHSVRTGEASFPSTWPTAPRSGSSPTRDPKARELFNRAMGSVSLTEAGQVAAAYDFSGAATAVDIGGGRGSLMAAVLDAFPGLRGTLLERPPVAEEARELLTGRGLADRCEILPGDFFETIPDGADVYLIKHVLHDWDDDDVVRILRRIATAMKPDSRLLVIDNLIDERPAASTLFVDLLLLVLVGGAERSESEFAALLEKSGLRVERSLPCGAGPVRIVEIRRA

SEQ ID NO: 10371 - protein, 128 aa, Brassica napus
  misc_feature (2)..(2): Xaa can be any naturally occurring amino acid
  misc_feature (10)..(11): Xaa can be any naturally occurring amino acid
  misc_feature (22)..(22): Xaa can be any naturally occurring amino acid
  misc_feature (26)..(26): Xaa can be any naturally occurring amino acid
  misc_feature (35)..(35): Xaa can be any naturally occurring amino acid
  misc_feature (53)..(53): Xaa can be any naturally occurring amino acid
  misc_feature (65)..(65): Xaa can be any naturally occurring amino acid
  misc_feature (71)..(71): Xaa can be any naturally occurring amino acid
  misc_feature (83)..(84): Xaa can be any naturally occurring amino acid
  misc_feature (86)..(86): Xaa can be any naturally occurring amino acid
  misc_feature (93)..(94): Xaa can be any naturally occurring amino acid
  misc_feature (99)..(99): Xaa can be any naturally occurring amino acid
  misc_feature (101)..(102): Xaa can be any naturally occurring amino acid
  misc_feature (105)..(107): Xaa can be any naturally occurring amino acid
  misc_feature (111)..(111): Xaa can be any naturally occurring amino acid
MXSSMLSSAXXVTSPDQATMVXPFTXLKSSAAFPXTRKANNDITSIASNGGKXSCMKVRTPVGKXKFETLXLTFPDLTEVELXXEXDYPSPHXXIPCVXFXXEHXXXHRDXREAPPYAHVEFPTPSRF

SEQ ID NO: 10372 - protein, 421 aa, Triticum aestivum
  misc_feature (397)..(397): Xaa can be any naturally occurring amino acid
MPALAVDAAAPVAHAFAASCDASPRFAAPLLGPAAAVVAATAAEKPEMAAWSADLSSALYNVDGWGAPYFFVNDDGDVAVRPHGAATLPGQEIDLAKVVARAAGARAGGGLGLALPLLVRFPDVLRHRVETLNAAFAYAVRSTGYAGRYQGVYPVKCNQDRYVVEDIVEFGAPFGFGLEAGSKPELLLTMSCLVARGSPDALLVCNGYKDLEYVSLALIARTMGLNTVIVLEQEEELDIVVEASRRLNIRPVVGMRAKLRTKHAGHFGATSGEKGKFGLNAAQILSVVAKLKALAMLDCLQLLHFHIGSQIPTTALLADGVGEAAQIYCELARLGAAMRVIDVGGGLGIDYDGTHSAQTDMSVAYSLEEYAAAVVAAVGRVCDRKGVQHPVICSESXGRPLVSHHSVLIFRAFPEGGRVPK

SEQ ID NO: 10373 - protein, 136 aa, Zea mays
ETGSSGSIVAAVLFYLLSFVGVLPGERLVLLGPAAGERLVLPGPLKRSHGIGGLCRLLPALQMSVQDANMSSDTDMSKVFEDRTFVSSILNSLPGVDPNDPSIKDLLASLHSQGEEEKKEDKSDKTEDEKNCFKLE

SEQ ID NO: 10374 - protein, 494 aa, Oryza sativa (japonica cultivar-group)
MTRASTIDFGRKTHNDVLWSGPLRPANFIRNKFPTYKKSLNGIVIKLTDDQEMPSLKEAVAKETADLLHRSQRLSVRELAMKFEKGLNTATLLSNEVKWRQAALLERDILLKNLKSVLESLRSRVAGKHKDEIEESLSMVDVLTVQLSKREDELLQQKAEVAKIATSLKLASEDARRIVEEERSNARIEIDNARAAVQKVEQLVKEQEIDPQINGKQDEDELKEKAQEARRVKMLHCPSKAMDIENEIEVLREQLAEKSSNCVHLLKELHLHQSYEENDVSSYELEGLESLGSMLRIVSQSDGYVDLSRSTIQWFRVQPEGNKKEIISGAIKQAYAPEPHDVGRYLQAEINHCGEISVVKTAGPVDPAAGLVDYVETLLRNPETEYNVVVLQVNGIKQPTDSIHVLSIGKLRMRLAKGKTVIAKEFYSSTMQLCGMRGGGDAAPQAMYWQPRRDLSLVLGFETARERNSAIMLARRFAIDCNIILAGPGDKTHW

SEQ ID NO: 10375 - protein, 505 aa, Helianthus tuberosus
MEIPYLLTTTLLLLFTTLYLLLRRRSSTLPPTIFPSLPIIGHLYLLKPPLYRTLAKLSAKHGQILRLQLGFRRVLIVSSPSAAEECFTKNDIVFANRPKMLFGKIIGVNYTSLAWSPYGDNWRNLRRIASIEILSIHRLNEFHDIRVEETRLLIQKLLSACNSGSSQVTMKFSFYELTLNVMMRMISGKRYFGGDNPELEEEGKRFRDMLDETFVLAGASNVGDYLPVLSWLGVKGLEKKLIKLQEKRDVFFQGLIDQLRKSKGTEDVNKKKTMIELLLSLQETEPEYYTDAMIRSFVLVLLAAGSDTSAGTMEWVMSLLLNHPQVLKKAQNEIDSVIGKNCLVDESDIPNLPYLRCIINETLRLYPAGPLLVPHEASSDCVVGGYNVPRGTILIVNQWAIHHDPKVWDEPETFKPERFEGLEGTRDGFKLLPFGSGRRSCPGEGLAVRMLGMTLGSIIQCFDWERTSEELVDMTEGPGLTMPKAIPLVAKCKPRVEMTNLLSEL

SEQ ID NO: 10376 - protein, 348 aa, Burkholderia cepacia R18194
MKIVKPLLIAAAVAAALSVTTTAFAAGAGAGVEAVRPDATTSAFLAALNGQKGPGLETLSPAKARQVLVDAQNGTKVDLSGIDVSNRTIEQDGLSVPVTIVRPQGATGTLPVFMFIHGGGWVLGDFPTHERLVRDLVVQSGAVAVFVNYTPSPEAHYPVAINQAYAATKWVAAHGAEIGVDGSRLAVVGNSVGGNMAAVVALMAKDKGGPAIRFQGLMWPVTDHNFNTGSYNAYQQGHFLTRPMMKWFWDAYTKNEAQRNEIYASPLRASTAQLKGLPPALIQVAQFDVLRDEGEAYGRKLDAAGVDATTTRYDGTIHDFGLLNALAMDAPTKAATKAMANEIATRLK

SEQ ID NO: 10377 - protein, 514 aa, Glycine max
  misc_feature (446)..(446): Xaa can be any naturally occurring amino acid
MDQFLWRVLPLLTILVSFGVFFYLQDSYTAQLFPLIKLPRDKCSLLPHRHFWISSKRIVTPQGIISGSVEINDGKIISVVEGHAIQGKPKQEEVIDYGDAVIMPGLIDVHVHLNEPGRTEWEGFDTGTRAAAAGGVTTVVDMPLNCYPTTVSKEKLKLKLDAAEDKIYVDVGFWGGLIPENALNTSILDGLLSAGVLGVKSFMCPSGIDDFPMATIDHIKAGLSVLAKYRRPIVVHAEIQQDFENHLELNEDNLDPRAYLTYLNTRPPSWEEAAIKQLVSVTKDTRKGGPLEGAHVHIVHLSDSSASLDLIKEAKSHGDSISVETCPHYLAFTSEEIPNGDTRFKCSPPIRDAYNKDKLWEAVLEGHIDLLSTDHSPTVPELKLMEEGDFLKAWGGISSLQFNLPVTWSYGKKYGLTLEQLSLLWSKKPATLAGLESKGTIAVGKXHADIVVWQPELEFDLDDDYPVFIKHSELSAYMGRRLSGKVLETFVRGNLVFKDGKHAPAPCGVQILAK

SEQ ID NO: 10378 - protein, 443 aa, Anabaena variabilis ATCC 29413
MQLVQWIYQPLQLMEASAKAHGDCFTLWLTNKRPIVFLSNPQAIQELFTTPLEQLDARGTAQVLQPLLGENSLLLLSGETHQRQRKLLTPPFHGDRMRAYGDIITNITQEVISKWQLGEPFSVRDSMQEITLRVILQAVFGLREGERYTQLQKRLCDILDLSGSALRSTLSFLPALQIDLGSWSPWGHFLRQRAAIDQLLYAEIQDRRDHPDPSRTDILSLMMAARDENGEAMTDIELRDELMTLLVAGHETTASALTWALYWIHKLPQVREKLLAELDNFGDNGDVNEITRLPYLTAVCQETLRIYPIAMVTIPRIVKTTLEIGGHQFAPGTMLVGCIYLMHRRPDLYPQPQEFKPERFLEKQYSLYEYLPFGGSNRRCVGMAFALYEMKLVLATVLANMDLALVDNYPVKPTRRGVTLAPSGGKWLIATGQHQKVKSPVEV

SEQ ID NO: 10379 - protein, 474 aa, Escherichia coli CFT073
MQHKLLINGELVSGEGEKQPVYNPATGDVLLEIAEASAEQVNAAVRAADAAFAEWGQTTPKARAECLLKLADVIEENGQVFAELESRNCGKPLHSAFNDEIPAIVDVFRFFAGAARCLNGLAAGEYLEGHTSMIRRDPLGVVASIAPWNYPLMMAAWKLAPALAAGNCVVLKPSEITPLTALKLAELAKDIFPAGVINVLFGRGKTVGDPLTGHPKVRMVSLTGSIATGEHIISHTAPSIKRTHMELGGKAPVIVFDDADIEAVVEGVRTFGYYNAGQDCTAACRIYAQKGIYDTLVEKLGAAVATLKSGSPDDESTELGPLSSLAHLERVSKAVEEAKATGHIKVITGGEKRKGNGYYYAPTLLAGALQDDAIVQKEVFGPVVSVTLFDNEEQVVNWANDSQYGLASSVWTKDVGRAHRVSARLQYGCTWVNTHFMLVSEMPHGGQKLSGYGKDMSLYGLEDYTVVRHVMVKH

SEQ ID NO: 10380 - protein, 144 aa, Zea mays
  misc_feature (48)..(48): Xaa can be any naturally occurring amino acid
  misc_feature (63)..(63): Xaa can be any naturally occurring amino acid
MSAGPEDTQQLINSAAASPNRSAPSAAPSDMERGSGTAASSSRASTTXPLPPEGHPQGGGGGXEEPSSSRGAGSLCSGYLSLPALLLVGVTASLVILPLVLPPLPPPPSLLMLVPVAMLLLLLVLAFMPTSSTGGRGGTGPTYM

SEQ ID NO: 10381 - protein, 496 aa, Burkholderia cepacia R18194
MNQPTFEDWQARAAVLRVEGRAFIDGDARHAHTGATFACVSPIDGCVLAHVADCGADDVDLAVAAARRAFDARSWAGMNPRTRKAVLQRWAALMREHLDELALLETLDTGKPIADTTAIDVPAAAHCVDWYAEAIDKVGGEVAPVDHHLVGLVTREPIGVVAAVVPWNFPLLMAAWKFAPALAAGNSVVLKPSEKSPLTAIRVAQLACDAGVPPGVFSVVPGGAEPGKALALHRDVDCIAFTGSTRTGQQIMACAAQSNLKRVWLELGGKSPNIVLRDCPDLDRAAQAAADAIFFNMGEVCTAGSRLLVHRDIKDAFVAKLVDASRRFAPGHPLDPSVTMGAIVDRTQLDRVMGYIGAGRDEGKLVTGGARVREETGGFYVEPTVFEVKPDAKIAREEIFGPVLSVIVFDEVDEAVRIANDTEYGLAAAVWSADLSTAHAVARRLRAGTVWVNCYGDGSDDMNFPFGGYKLSGNGRDKSLHALDKYTELKSTVVRL

SEQ ID NO: 10382 - protein, 467 aa, Thermoplasma acidophilum
MLYGVCRRKHLIIDGYLFSMIMEDQERTERYNEDALRYSEYFKGKIQTISKVPVRSLDDFSIWYTPGVAAVSRKIASDPDLSFELTGRWNSIAILTDGTRVLGLGNIGPEAAMPVMEGKALIFNYLGGVNAIPIPIRVQSKEEFVKVAKALEPSFGGINLEDIESPKCFFLLETLQNEMNIPVWHDDQLGTASITLAGVINSLRIVGKKIDQVKVVFNGAGAANIAAAYLFKAAGFKMKNMILVDSKGILHPEREDIDALMINNPWKYQLAIETNGERVKGDLSNAIEGADLLISAAKSGPDTIDSRIVKKMNNDAIVFVLANPIPEMWPQEAKENGARIVATGRGDFPNQINNSLVFPGVFRGVLDARAKGVNFDVMVAASYEIANFVEDPTEEKIVPTMEEWELYPRLASAVASKTVELGLARKSDSKEGFYRRAREIIESNRNIYSKLMDLGLIKRMPNGEHKN

SEQ ID NO: 10383 - protein, 183 aa, Escherichia coli K12
MKTLIVSTVLAFITFSAQAAAFQVTSNEIKTGEQLTTSHVFSGFGCEGGNTSPSLTWSGVPEGTKSFAVTVYDPDAPTGSGWWHWTVVNIPATVTYLPVDAGRRDGTKLPTGAVQGRNDFGYAGFGGACPPKGDKPHHYQFKVWALKTEKIPVDSNSSGALVGYMLNANKIATAEITPVYEIK

SEQ ID NO: 10384 - protein, 217 aa, Zea mays
MAATRASPVLLLLLLTVQLSLLFRLPDSPSTLALALALAAEPDQQNAKQHRQPALLVQSTCNSTSFYDLCIAALAADPASSTADVPGLGGIAVSAAANNASGTAAFLGNASDAAATPQADRALLRACAGKYAAARDALVQARASLAEQAYDYAFVHVSAAGEYPAVCRTLFRRRQQQQRGASRTAYPAELAKREEALRRLCTIALDIISLLQNQETY

SEQ ID NO: 10385 - protein, 298 aa, Triticum aestivum
  misc_feature (261)..(261): Xaa can be any naturally occurring amino acid
MKTLLILTILAMATTIATANMQVDPSSRVQWPQEQPPPQSQQPFSQQPQQIFPQPQQTFPHQPQQAFLQPQQTFPRRPQQQFPQPQQPQQPFPQPQQPQLPFPQQPQQPFPQPQQPQQPFPQSQQPQQPFPQPQQQFPQPQQPQQSFPQQQQWMIQSFLQQQMNPCKNFLLQQCNPVSLVSSLVSIILPRSDCQLMQQQCCQQLAQIPQQLQCAAIHNVAHSIIMQQEQQRGVQILRPLFQLAQGLGIIQPQQPAQLEGIXRSLVLKTLPTMCNVYVPPDCSTINMPYANIDAVIGGQ

SEQ ID NO: 10386 - protein, 435 aa, Arabidopsis thaliana
MERYKILEELGDGTCGSVYKAVNLETYEVVAVKKMKRKFYYWEECVNLREVKALRKLNHPHIIKLKEIVREHNELFFIFECMDHNLYHIMKERERPFSEGEIRSFMSQMLQGLAHMHKNGYFHRDLKPENLLVTNNILKIADFGLAREVASMPPYTEYVSTRWYRAPEVLLQSSLYTPAVDMWAVGAILAELYALTPLFPGESEIDQLYKICCVLGKPDWTTFPEAKSISRIMSISHTEFPQTRIADLLPNAAPEAIDLINRLCSWDPLKRPTADEALNHPFFSMATQASYPIHDLELRLDNMAALPNLELNLWDFNREPEECFLGLTLAVKPSAPKLEMLRNVSQDMSENFLFCPGVNNDREPSVFWSLLSPDENGLHAPVESSPLSLSFSPMQQHTVGPPQSSGFTMTSSMQPNMLDRPWMAVSAPFQQSHYL

SEQ ID NO: 10387 - protein, 136 aa, Pyrobaculum aerophilum
  misc_feature (4)..(4): Xaa can be any naturally occurring amino acid
  misc_feature (91)..(91): Xaa can be any naturally occurring amino acid
  misc_feature (93)..(93): Xaa can be any naturally occurring amino acid
  misc_feature (103)..(103): Xaa can be any naturally occurring amino acid
KWVXSTKYVEAGELKEGSYVVIDGEPCRVVEIEKSKTGKHGSAKARIVAVGVFDGGKRTLSLPVDAQVEVPIIEKFTAQILSVSGDVIQLXDXRDYKTIEVPXKYVEEEAKGRLAPGAEVEVWQILDRYKIIRVKG

SEQ ID NO: 10388 - protein, 296 aa, Bacillus cereus ATCC 10987
MVIQWFPGHMAKARRQVTEKLKLIDVVIELVDARLPLSSRNPMIDEIITHKPRLVVLNKADMADDRLTKQWIAYFKEKGHMAISINAQAGQGMKEIAAACKVLVKEKFDKMVAKGIRPRAIRALIVGIPNVGKSTLINKLAKKNIAKTGDRPGVTTAQQWIKVGKEMELLDTPGILWPKFEDQLVGLRLATTGAIKDSILNLQDVAVYALRFMEKHYPDRLKERYNLNDIPEDIVELFDAIGKNRGCLMGGGMIDYDKTSELILRELRGGKLGKMTFETPEEFAEQTEDAEKVEEV

SEQ ID NO: 10389 - protein, 282 aa, Zymomonas mobilis
MMSPISIPSIRLNDGNDLPAVGFGTYKLNGSAGVSDIVSAIKVGYRLLDSAFNYENEGAVGEVFREAGIARDKLRIVSKLPGRHHHFEEAIATVEESLYRAQLDYYDLYLIHWPNPSKDLYVEAWQALIEARKKGLIRSIGVCNFLPEHLERLIKETGVTPVVNQVELHPYFPQEEQRAWDKAHGIVTESWSPLGRASKLLQDDTIKKIADRLGKSIPQVILRWHVQLGAIPIPKASSKERQIENLSLFDFELSPQDVEIIATLARPDGRLADQDPARYEEF

SEQ ID NO: 10390 - protein, 486 aa, Xylella fastidiosa 9a5c
MMHHNVHQSEILADPCDLQRAERWLQRDLRVLWHPCTQMREHPDTLPLVPIVRGEGAWLVGHDGRRYLDAVSSWWTNLFGHADPRISAAIAAQARTLEQVMLAGFSHEPAVRLAEALLRLAPRQDGREPLSKVFYADNGSAGVEVALKMAFHYFRNRGEEQRTRFIALHNGYHGETIGALAVGDIPLYRRVYAPLLTEVLFAPSPDAYLAEPGQSAAEYALQAAEALEVLFKRYSGQICALILEPLLQCAGGMRMHHPVYLHRVRELCDAHGALLICDEIATGFGRTGTLFACEQACPVILTDTDDKQLGIMPDLLCLSKGLTGGFLPLAAVLTTQQLYEEFLDDSRERAFLHSHSYTGNPLACIAALTTLDIFENDCIIERNQVTAARMTQLAASLSGHPHVADVRQAGMVVAFELTRDGNKRTPFPLQARLGLHVYRAALARGVILRPLGDVVYWMPPYCVDEEQLHLLAETTRVAIDEAIACV

SEQ ID NO: 10391 - protein, 153 aa, Zea mays
  misc_feature (136)..(136): Xaa can be any naturally occurring amino acid
  misc_feature (149)..(149): Xaa can be any naturally occurring amino acid
MASDRVLGTVKWFNGTKGFGFITPDDGSEDLFVHQSSIKSDGYRSLNDGDAVEYTVGSGNDGRAKALDVTAPGGGPLAGGERPDGGNGGGRGGYGGGDRGYGGGGDRGYGGGGDRGYGGGDRGYGGGGDRGYGGDXGYGGGGCFKCGEXGHMA

SEQ ID NO: 10392 - protein, 174 aa, Triticum aestivum
  misc_feature (23)..(23): Xaa can be any naturally occurring amino acid
MAPTVMASSATSGTPFQGLKSTXAGLPISRRSSSAGLSSVSNGGRIRCMQVWPIEGIKKFETLSYLPPLSTEALLKQVDYLIRSKWVPCLEFSKVGFVFREHNSCHGYYDGRYWTMWKLPMVWCTDATQVLNEVEEVKKEYPDAYVRVISIDNLRQVQCVSFIAFMPPGCEESG

SEQ ID NO: 10393 - protein, 347 aa, Flaveria linearis
YIGLRQRRASGKEYAELMNEFMSAVKQNYGEKVLIQFEDFANHNAFDLLEKYRTTHLVFNDDIQGTASVVLAGLISALKLVGGSLADHKFLFLGAGEAGTGIAELIALEISKQTNAPLEETRKKIWLVDSKGLIVRSRLDSLQHFKKPWAHDHEPVNKFLDAVKAIKPTVLIGSSGAGQTFTKEVVEAMRSFNEKPIILALSNPTSQSECTAEQAYTWSEGRTIFASGSPFAPVEYNGKVYVSGQSNNAYIFPGFGLGLIISGAIRVHDEMLLAASEALAEQVTQEHFDNGLIYPPFTNIRKISAHIAAKVAAKAYELGLASRLPQPENLVAYAESCMYSPKYRNYR

SEQ ID NO: 10394 - protein, 391 aa, Aspergillus nidulans FGSC A4
MSSTLEIATDNENMPLMKALQFHGPRDVRVEQIEEPVCGKGQVKLRNTYCGICGSDLHEYTSGPVLIPKGAHSITKATAPVVMGHEFGGVVEEVGEGITHLKPGQKAVVRPTIFDRKCPPCKIGYEYCCENIGFIGLSGMLFFRIKQAVRSGQANVPMRTGYGGGFAEKIVAPAEHFYPIPDNVTPESMAMIEPLAVAWHAVNLSPFKEGDNVLVVGGGPLGLCILQVLKMRGANFTIIAELTETRKKSAKYFGATHILDPREVDIPDNVRGLTDGVGADVVFDTAGVEKALDGAIGACRVHGTIVNVAVWEKKPQIKVNEMMYHEVKYLGSALYDEKSFQDTIDAISKGLLKPESMITDKIKLEDVVEKGFKTLLQDRNTHCKILVDPQI

SEQ ID NO: 10395 - protein, 381 aa, Prochlorococcus marinus subsp. pastoris str. CCMP1986
MDTHKLILKPGLEGVPVTNSSICDIDGQKGKLLYRGYSIEELAQKSSFLETAFLLIWGELPSATELRDFEQEVQMHRRLSFRVRDMMKCFPATGHPMDALQSSAASLGLFYSRRAIDDPKYIYNAVIRLIAKIPTMIAAFQLIRKGQDPIQPRDDLSYSSNFLYMLTEKEQDPIAAKVFDRCLILHAEHSLNASTFSARVTASTLTDPYAVIASAVGTLAGPLHGGANEDVIAMLEDIKTPEKAASFLEDAIQNKSKIMGFGHREYKVKDPRAIILQKLAEELFVRFGKDEMYEVAKKLELEAIPRLGGKGIFPNVDFYSGLVYRKLGIPRDLFTPIFAISRVAGWLAHWREQLGANRIFRPSQIYTGSAPRDWITLENRK

SEQ ID NO: 10396 - protein, 340 aa, Erwinia carotovora subsp. atroseptica SCRI1043
MSTMNTLICQEPKKLVWKKREIPIPGEGEALIKIKSVGICGTDIHAWGGNQPFFSYPRVLGHEICGEVVDTGKNVDRFKKGQQVTVIPYVACQQCPACKSGRTNCCEKISVIGVHQDGGFSEYLAVPTTNLLLAEGIDPQAAALIEPYAISAHAVRRAKVLQGEQVLVVGAGPIGLGAAAIAKAEGAHVVVADTSAARREHVIAHLGLSVVDPSAEDFEAQLRAEFGGSLAEKVIDATGNQHAMNNTINLIRHGGSIVFVGLFKGDLQFSDPEFHKKETTMMGSRNATPEDFAKVGHLMSEGKLTAEMMLTHRYPFSTLADIYERDVINNRELIKGVITF

SEQ ID NO: 10397 - protein, 313 aa, Glycine max
MASSLASSSTVLWILFLTIATLHLSSARKLSGSDPQLQFQYHRGPLLKGKISVNLIWYGKFKPSQKAIVADFITSLSSPKPVTAQPSVATWWKATDKYYKNSSPKLALSLGTTQILDENYSLGKSLTNNQILKLASKGPQRNAINIVLTSADVAVEGFCSSRCGTHGSSVGARVNGKRYKLAYIWVGNSETQCPGQCAWPFHQPIYGPQNPPLVAPNNDVGLDGMLINVASLLAGTVTNPFGNGYFQGPKEAPLEAGSACTGVYGKGAYPGYAGNLLLDPTTGASYNANGVNGRKYLLPALVDPETSACSTLV
